United States Patent Application Publication US 2021/0199660 A1 - sequence listing, part 17

SEQ ID NO: 232609 - DNA, 120 bp, Artificial Sequence
  ENSG00000119684_56 (sequence is synthesized)
cttcccattattacccatatgctatcccttatatttttaatttattaggaattcattcatttataaacttggtgattcacctttattagattctggtcgctgaaggctttagtaacttca

SEQ ID NO: 232610 - DNA, 120 bp, Artificial Sequence
  ENSG00000119684_57 (sequence is synthesized)
gagtaaaacttgagagatgagatgtaaaatgcagccattcttgagagttcctttttctgtaacattcatcaacacttcattgagaagtgaaggttcctatggctgtctctaccttcaaga

SEQ ID NO: 232611 - DNA, 120 bp, Artificial Sequence
  ENSG00000119684_58 (sequence is synthesized)
ggcttagctttagtcactgagaaagacaaggaaactaatgatagaatatagtagcttcttctggcgttaggtatcacagagtcacagctagttacagctagccctttattattgaaagaa

SEQ ID NO: 232612 - DNA, 120 bp, Artificial Sequence
  ENSG00000119684_59 (sequence is synthesized)
gaggagctagcagtcccactatcagaattaagactagagatggtaataggagctagtatcagaaaagcttaaggcaaagcataaagtgtaggctagaatgaagctggagaatggggaggg

SEQ ID NO: 232613 - DNA, 120 bp, Artificial Sequence
  ENSG00000119684_60 (sequence is synthesized)
ggcttgggtaacatccagaacctggctggggacctggaactacatgagatgtaagaatggagaggttctagcagtcagaggtcaggtacaaatgaacagctgggatctgcgcatggcaga

SEQ ID NO: 232614 - DNA, 120 bp, Artificial Sequence
  ENSG00000119684_61 (sequence is synthesized)
cagtgaaaaaacccaggcaagcaaaatggtcagagcagaaaggggcccaaggccacgttcttgagatgtggagggggctgaggaagccacgccaagtaaggacagatgcagctcagcagt

SEQ ID NO: 232615 - DNA, 120 bp, Artificial Sequence
  ENSG00000119684_62 (sequence is synthesized)
tcctagcgagccctgacaagccagctcagctgaagcttcgggtgggagccagtcatggcacagtggagtgaaggaagagcagtttcaggcacccaaaacctgacccccacgacctgtttt

SEQ ID NO: 232616 - DNA, 120 bp, Artificial Sequence
  ENSG00000119684_63 (sequence is synthesized)
ccacctgaagagccacccattccatccaaacccttggcaaaagtctgctaacagagagaaccggccagtatgctggccagtcgcgatcatgcctgtctttaccctctaagctgaagctgc

SEQ ID NO: 232617 - DNA, 120 bp, Artificial Sequence
  ENSG00000119684_64 (sequence is synthesized)
tcatcaacggtgagatggcaaaaaggtgggtccagaagaggggaaaagaagggagtctgtgaaaacaaaatgctgaagaatctgcatcaaataaacccttccttccttcctttttccttc

SEQ ID NO: 232618 - DNA, 120 bp, Artificial Sequence
  ENSG00000119684_65 (sequence is synthesized)
gcagctgagttgatgatgttgcaggacccgtgttgcaggcagagcagagaggatgaaaatcatgagttcagtctttgaaatgctccagaagagatgtcaaggtggccaggcacggtggct

SEQ ID NO: 232619 - DNA, 120 bp, Artificial Sequence
  ENSG00000119684_66 (sequence is synthesized)
ttgtacttgagaatggttgctgttgatgtaagcagtggccaggctgagagcttagcagttaaaattcacaacatcttgtatccctatcgtttcaccaaaggaatgattcattcaatgcag

SEQ ID NO: 232620 - DNA, 120 bp, Artificial Sequence
  ENSG00000119684_67 (sequence is synthesized)
gtgggcacgcacgagcctcaagatccaagttgctgccggctgcttagtgcattagcttagaaagcagcagaaattctgcagttaagagccctgatttgtcccgagtttggaaaaccggcc

SEQ ID NO: 232621 - DNA, 120 bp, Artificial Sequence
  ENSG00000119684_68 (sequence is synthesized)
agcaggattaaagcttcattaaagaagcctaagaaacatgttactttttccagatatttggcagtgacccaaggtcagcattggtttcccactatatacactataaccttcttgtttctg

SEQ ID NO: 232622 - DNA, 120 bp, Artificial Sequence
  ENSG00000119685_0 (sequence is synthesized)
gggcggttgcttgttggttgttgtagtaaccggggaagcagccgtcggcggctgccctgagccttcctggggaaggaggagggaggtaggcgcagagcgcggtccacgcctgctcgcccc

SEQ ID NO: 232623 - DNA, 120 bp, Artificial Sequence
  ENSG00000119685_1 (sequence is synthesized)
gaaccatgggaagatgagacaggaatctgtgccatccaaattgcttgatccagtgaatctgctaggaaaggtctctgaggcccccgtctgctgactgcatgacaaaccctaaaggaaatg

SEQ ID NO: 232624 - DNA, 120 bp, Artificial Sequence
  ENSG00000119685_2 (sequence is synthesized)
ccaatcgtgatggcccgggacctggaggaaacagcatcatcctcagaggatgaggaggtcataagtcaagaggatcatccatgcatcatgtggactggaggctgcaggagaattccagtt

SEQ ID NO: 232625 - DNA, 120 bp, Artificial Sequence
  ENSG00000119685_3 (sequence is synthesized)
ttggtattccatgccgacgctattcttacaaaggacaacaatattagagtaattggagaacgttatcatttgtcttataagattgtacgaacggacagtcgcctagtacgcagcattctg

SEQ ID NO: 232626 - DNA, 120 bp, Artificial Sequence
  ENSG00000119685_4 (sequence is synthesized)
acagcccatggatttcatgaagttcacccaagcagcactgactataacctaatgtggacaggatcccacctgaagcccttcttactgcgcaccctctctgaagcacaaaaagttaatcac

SEQ ID NO: 232627 - DNA, 120 bp, Artificial Sequence
  ENSG00000119685_5 (sequence is synthesized)
tttcccaggtcttatgaacttacccggaaggaccgactgtacaaaaacattattcgaatgcagcatacacatggattcaaggcttttcacatcctcccccagaccttcctcctgccagct

SEQ ID NO: 232628 - DNA, 120 bp, Artificial Sequence
  ENSG00000119685_6 (sequence is synthesized)
gagtacgcggaattttgtaattcatattcgaaggaccggggaccttggatagtaaaaccagtggcatcttcaagggggcggggcgtctacctgatcaacaatccaaaccagatctccctg

SEQ ID NO: 232629 - DNA, 120 bp, Artificial Sequence
  ENSG00000119685_7 (sequence is synthesized)
gaagagaacattttggtctcccgttacattaacaaccccctgctcatagatgatttcaagtttgacgtgcgcctctatgtgctcgtgacttcctatgatcctcttgtcatctatctctat

SEQ ID NO: 232630 - DNA, 120 bp, Artificial Sequence
  ENSG00000119685_8 (sequence is synthesized)
gaagaaggattggctaggtttgcaactgtgcgatatgatcaaggagccaagaacattcggaaccagttcatgcatctgacaaactacagtgtcaacaagaaaagtggagattacgtcagt

SEQ ID NO: 232631 - DNA, 120 bp, Artificial Sequence
  ENSG00000119685_9 (sequence is synthesized)
tgtgacgatccagaagtggaggattatggaaacaaatggagcatgagtgctatgcttaggtacctgaaacaagaaggcagagatacaaccgcattgatggcccatgtagaagacctgatc

SEQ ID NO: 232632 - DNA, 120 bp, Artificial Sequence
  ENSG00000119685_10 (sequence is synthesized)
attaagactataatctctgctgaactagctattgctactgcctgtaaaacctttgttcctcatcgcagcagttgttttgaactctatggctttgacgtgctcatagattctactctgaag

SEQ ID NO: 232633 - DNA, 120 bp, Artificial Sequence
  ENSG00000119685_11 (sequence is synthesized)
ccatggttgttggaagtgaatctctctccttctttggcctgtgatgcgcctctggacctaaagattaaagccagtatgatttcagatatgttcactgttgtaggatttgtgtgccaagat

SEQ ID NO: 232634 - DNA, 120 bp, Artificial Sequence
  ENSG00000119685_12 (sequence is synthesized)
cctgcccagcgggcatcaactcggccaatttatcccacctttgagtcttccaggcgaaaccctttccagaaacctcagcgttgccgtccactctctgccagtgatgcggaaatgaaaaac

SEQ ID NO: 232635 - DNA, 120 bp, Artificial Sequence
  ENSG00000119685_13 (sequence is synthesized)
ctcgtgggctcagcccgggagaaagggccagggaagttgggtggttctgtgcttggtctgtcaatggaggagatcaaagttttacgaagggtgaaggaggagaatgatcggcgaggtgga

SEQ ID NO: 232636 - DNA, 120 bp, Artificial Sequence
  ENSG00000119685_14 (sequence is synthesized)
tttattcgcatatttcctacatctgagacatgggaaatatatgggtcctacctcgagcataagacctcaatgaactatatgctggcaacacgcctcttccaggacagaatgactgctgat

SEQ ID NO: 232637 - DNA, 120 bp, Artificial Sequence
  ENSG00000119685_15 (sequence is synthesized)
ggagcgccagaattgaagatagagagtctgaattcaaaggccaagctgcatgctgcactttacgagaggaagctcctgtctctggaggtgcgaaaacgtagacgacggagtagcagattg

SEQ ID NO: 232638 - DNA, 120 bp, Artificial Sequence
  ENSG00000119685_16 (sequence is synthesized)
agggcaatgaggccaaaatacccagtgattacccaaccagctgaaatgaatgttaaaactgagacagagagtgaagaggaggaagaagtcgcattagataatgaagatgaagaacaggag

SEQ ID NO: 232639 - DNA, 120 bp, Artificial Sequence
  ENSG00000119685_17 (sequence is synthesized)
gcttcccaggaggagtctgcaggatttcttagagaaaatcaagccaaatatacaccctcattgacagctttggtagaaaatacacccaaagaaaattccatgaaagttcgtgaatggaat

SEQ ID NO: 232640 - DNA, 120 bp, Artificial Sequence
  ENSG00000119685_18 (sequence is synthesized)
aataaaggtggacactgctgcaaacttgagactcaggagctagagcctaaatttaacctgatgcagattcttcaagataatggcaatcttagcaaaatgcaggcccgaatagcattctct

SEQ ID NO: 232641 - DNA, 120 bp, Artificial Sequence
  ENSG00000119685_19 (sequence is synthesized)
gacagtggcggtcagacgttcagtgccagttgggctgccaaagaggatgaacagatggagctggttgttcgtttcctcaagcgagcatcaaataacctccagcattcactgaggatggta

SEQ ID NO: 232642 - DNA, 120 bp, Artificial Sequence
  ENSG00000119685_20 (sequence is synthesized)
ttacccagtcgacgattggcacttctggaacgcagaagaatcctggcccaccagctgggtgactttatcattgtatacaacaaggaaacagaacaaatggctgaaaagaaatcaaagaag

SEQ ID NO: 232643 - DNA, 120 bp, Artificial Sequence
  ENSG00000119685_21 (sequence is synthesized)
aaagttgaggaagaagaggaagatggggtgaatatggaaaactttcaggagttcatcagacaagcaagtgaggctgaactggaggaggtgttgactttttatacccaaaagaacaagtct

SEQ ID NO: 232644 - DNA, 120 bp, Artificial Sequence
  ENSG00000119685_22 (sequence is synthesized)
gctagtgtcttcctggggactcactctaaaatttctaagaacaacaacaattattctgatagtggggcaaaaggtgatcaccctgagactataatggaagaagtgaaaataaagccacct

SEQ ID NO: 232645 - DNA, 120 bp, Artificial Sequence
  ENSG00000119685_23 (sequence is synthesized)
aaacagcaacagacgacagaaattcattctgataaattatctcgatttaccacttcagcagaaaaagaggcaaaattagtttatagcaattcctcctctggtcctactgctactctgcag

SEQ ID NO: 232646 - DNA, 120 bp, Artificial Sequence
  ENSG00000119685_24 (sequence is synthesized)
aaaattcccaacacccatttgtcatctgttacaacctctgacctctctccagggccttgccaccattcttctttatctcaaattccttcagctatccccagcatgcctcaccagccaaca

SEQ ID NO: 232647 - DNA, 120 bp, Artificial Sequence
  ENSG00000119685_25 (sequence is synthesized)
attttactgaacacagtctctgccagtgcttctccctgcctacatcccggggcacagaacatcccaagccctactggcctgccacgctgtcgatcaggaagtcacaccattggtcccttt

SEQ ID NO: 232648 - DNA, 120 bp, Artificial Sequence
  ENSG00000119685_26 (sequence is synthesized)
tcttccttccaaagtgctgcacacatctatagccagaaactgtctcgtccctcttcagcaaaggcaggatcgtgctatctaaacaagcatcattcaggaatagccaaaacacaaaaagag

SEQ ID NO: 232649 - DNA, 120 bp, Artificial Sequence
  ENSG00000119685_27 (sequence is synthesized)
ggagaagatgcttctttatatagcaaacggtacaaccaaagtatggttacagctgaacttcagcggctagctgagaagcaggcagcgagacagtattctccatccagccacatcaacctc

SEQ ID NO: 232650 - DNA, 120 bp, Artificial Sequence
  ENSG00000119685_28 (sequence is synthesized)
ctcacccaacaggtaacaaacctgaatttggcaactggcatcataaacagaagcagtgcttcagctcccccaaccctccgacccatcatcagtcctagtggcccgacatggtctacacag

SEQ ID NO: 232651 - DNA, 120 bp, Artificial Sequence
  ENSG00000119685_29 (sequence is synthesized)
tcagacccccaagctcccgagaatcactccagctctcctggaagcaggagcctgcagacagggggatttgcctgggaaggagaagtagaaaacaacgtgtacagccaggctacaggggtg

SEQ ID NO: 232652 - DNA, 120 bp, Artificial Sequence
  ENSG00000119685_30 (sequence is synthesized)
gtcccccagcacaagtatcaccccacagcaggcagctatcagcttcaatttgccctgcagcaacttgaacaacaaaaacttcagtcccggcagctcctggaccagagtcgagcccggcac

SEQ ID NO: 232653 - DNA, 120 bp, Artificial Sequence
  ENSG00000119685_31 (sequence is synthesized)
caggcaatctttggcagccagacactacctaactccaatttatggacaatgaataatggtgcaggttgtagaatttccagtgccacagctagtggccagaagccaaccactctgccacaa

SEQ ID NO: 232654 - DNA, 120 bp, Artificial Sequence
  ENSG00000119685_32 (sequence is synthesized)
aaagtggtaccacctccaagttcttgcgcctccctggttcccaaacccccacccaaccacgaacaagtgctcagaagggcaacatcccagaaagcttccaaagggtcctccgcggaaggg

SEQ ID NO: 232655 - DNA, 120 bp, Artificial Sequence
  ENSG00000119685_33 (sequence is synthesized)
cagctgaatggactccagagcagccttaaccctgcagcctttgtgcccatcaccagctctacagatcctgctcacactaaaatatgaaccacaaacacacagagaaacaacctgttcacc

SEQ ID NO: 232656 - DNA, 120 bp, Artificial Sequence
  ENSG00000119685_34 (sequence is synthesized)
actcctgggtgcatgattgagggtgaagcatccaccagcacttcaaggggtccatagtatttttttttttgctgcctcaaagtccccaaagccttcgagcagaagtggcagtagatggtt

SEQ ID NO: 232657 - DNA, 120 bp, Artificial Sequence
  ENSG00000119685_35 (sequence is synthesized)
gccaatcagccaatgcagactttcactgggacaacaagaaagcagatcttctgggttttgatggaacttggcagtggggacattcagctgatgcattatataccccgtcagagcacactt

SEQ ID NO: 232658 - DNA, 120 bp, Artificial Sequence
  ENSG00000119685_36 (sequence is synthesized)
gtatcttttaccttccctttgccccatgcccccaaactgcttaggtcttctctgtccctttactgctgctgcacagagatgatataaaagaggctctttggctatttgcattttgcttcc

SEQ ID NO: 232659 - DNA, 120 bp, Artificial Sequence
  ENSG00000119685_37 (sequence is synthesized)
tcttcttttccagattacagtatgaagctttattttctttgtacaagcttaaaatttcaacatcatcatccgccaaagttgttcctcccttttcggaggatctagggggaaagaggagca

SEQ ID NO: 232660 - DNA, 120 bp, Artificial Sequence
  ENSG00000119685_38 (sequence is synthesized)
ttcatcacaagtttcctagagagaggagacaaatcggtgtgccattgacaacatgagccagggtaaaggcaccctttggaattactgatttcaaagattaataaagtaattctattttta

SEQ ID NO: 232661 - DNA, 120 bp, Artificial Sequence
  ENSG00000119685_39 (sequence is synthesized)
agcagtcagctgaactgaggacgacagcctacaaacaactacatgcatctgaactgtctcttgtaaatgagcttttttcagagccagaatcatactctccaggaaatatggagaaagaaa

SEQ ID NO: 232662 - DNA, 120 bp, Artificial Sequence
  ENSG00000119685_40 (sequence is synthesized)
gggaagtgggaaggaaatttcctttatgtagttgagagatgtggctaaagataaaatccacgtagcttctggcaataatgtaagcagcttccaaattaaaaaagaaaccactgtattgaa

SEQ ID NO: 232663 - DNA, 120 bp, Artificial Sequence
  ENSG00000119685_41 (sequence is synthesized)
agagggtcctccgcggaagggcagctgaatggactccagagcagccttaaccctgcagcctttgtgcccatcaccagctctacagaatgttgccagaagatactaccagggctgcccaga

SEQ ID NO: 232664 - DNA, 120 bp, Artificial Sequence
  ENSG00000119685_42 (sequence is synthesized)
tttatgtacaggtgctttgacagatattattgtactctgacaactattattttagaatggtcttttaatgattttagagacttagtttttttcacatgtatcctatgacttgaaatcagt

SEQ ID NO: 232665 - DNA, 120 bp, Artificial Sequence
  ENSG00000119685_43 (sequence is synthesized)
gagagcagactaaccaaacctcgctggtggagctctgtgttccgttcgcctctaggtggcagtcacagcatttataagtcctgtcatattcttaactgagattttgagtttgagccctgg

SEQ ID NO: 232666 - DNA, 120 bp, Artificial Sequence
  ENSG00000119685_44 (sequence is synthesized)
gaacattggagactaccaaaactccctagttctggcctcttccttgaaaattgagaaagggaagaactgaaacatctcgcagttattagataaagggctggaccaggcatctgaacatga

SEQ ID NO: 232667 - DNA, 120 bp, Artificial Sequence
  ENSG00000119685_45 (sequence is synthesized)
gctgactactagctctaatcaggtttttataggaaagaaattgtcgataatatttgtagacacacgtgctctcacgttttgaagtatcactatacaaaattaggtataaaagcctattcc

SEQ ID NO: 232668 - DNA, 63 bp, Artificial Sequence
  ENSG00000119685_46 (sequence is synthesized)
aggattgcctgaggccaggagttcaagaccagtttgggcaacattgtgagaccccatctcatt

SEQ ID NO: 232669 - DNA, 120 bp, Artificial Sequence
  ENSG00000119685_47 (sequence is synthesized)
gcactacccggaatctgtgccatccaaattgcttgatccagtgaatctgctaggaaaggtctctgaggcccccgtctgctgactgcatgacaaaccctaaaggaaatgccaatcgtgatg

SEQ ID NO: 232670 - DNA, 120 bp, Artificial Sequence
  ENSG00000119685_48 (sequence is synthesized)
aaaaaaaaaaaaaaagaccaagaaaaagcctattccctatattatttaaaacaaaatgatggtaaaatacagtcctgacttctcagatatgcaaggttctgaggattttcagctttataa

SEQ ID NO: 232671 - DNA, 120 bp, Artificial Sequence
  ENSG00000119685_49 (sequence is synthesized)
ctttataatttgagacttctgagctttctctcttttgtgttatgagtttcatcattctccttcctctgctcatcctcaccttcacttctctcctgtgtcaagttttagaaactgattatg

SEQ ID NO: 232672 - DNA, 120 bp, Artificial Sequence
  ENSG00000119685_50 (sequence is synthesized)
tcctgccaaaaattggactttgggaatagagaaaagagatggaggttgtgcttcactgtttctcaaggacatcatagcaatatgttttgcttaatattccaaagatattttcacctacaa

SEQ ID NO: 232673 - DNA, 120 bp, Artificial Sequence
  ENSG00000119685_51 (sequence is synthesized)
tattaacagccctctctatgggtaaaatttggcataattttaagacctttctggttcagagcacaacatgagaacaacagtaccaatgtttattatagaatttactacaaatatgcaagt

SEQ ID NO: 232674 - DNA, 120 bp, Artificial Sequence
  ENSG00000119685_52 (sequence is synthesized)
aaatatgcaagtgctttggctactggttgtgtgttggaagtcagaatctactgaattaagtataacccttttgcttccagcagaaacaaaaaaatttatacacacacacacacacacaca

SEQ ID NO: 232675 - DNA, 120 bp, Artificial Sequence
  ENSG00000119685_53 (sequence is synthesized)
ttagaaaaacagcttttaaaaaactcagaccaagtagaaccagaaagccacatgaattttcagggctttggttaggtttacctgaaagtgtaggtgaatataaaagctttatcaaagctt

SEQ ID NO: 232676 - DNA, 120 bp, Artificial Sequence
  ENSG00000119685_54 (sequence is synthesized)
tacaaaagcataacgcatggcaatatgatgcactgtttgcgggagtcctgcgagggcacattgttccgtgcagtaatttcaatgtgcctaagttcttgtgtcttcactaattatgtatct

SEQ ID NO: 232677 - DNA, 120 bp, Artificial Sequence
  ENSG00000119685_55 (sequence is synthesized)
tgacattcacttgctttgttgtaaccctcagagtctgttcaactatgtcgatagtctgtagcatctccagatctgcagcttttagttatcttgggccacatgtaatttatgtagacataa

SEQ ID NO: 232678 - DNA, 120 bp, Artificial Sequence
  ENSG00000119685_56 (sequence is synthesized)
ctgaagatcatcagtttgggatgagattattgggttacgttgaggctcaacaagaaaaaccataatctttcctaaagagacggaacaggaggcaaatacaattcatttccttctttagaa

SEQ ID NO: 232679 - DNA, 120 bp, Artificial Sequence
  ENSG00000119685_57 (sequence is synthesized)
atgaattcccttacaccctatcacttctgttttggacctcaaattaatactaggcgacagaaagattaaattcatttcacaagacagttttgtgatataagttattttgtgtaaaatttt

SEQ ID NO: 232680 - DNA, 120 bp, Artificial Sequence
  ENSG00000119685_58 (sequence is synthesized)
ttaacacaaaattaaattcgtgaaaaccctagtttctgtatagatgagtgttttcagttgtccttattgttttattaacataagaagtgggagagctctcactgttttctcatgtgtggg

SEQ ID NO: 232681 - DNA, 120 bp, Artificial Sequence
  ENSG00000119685_59 (sequence is synthesized)
tatagtattgaagaagtgttgcaattgtccccctggtatttgggtgcagctttttgtgattcccacagtagccctcagaggtcccctgtgcttttgaattttacttgcgtgttgctgttt

SEQ ID NO: 232682 - DNA, 120 bp, Artificial Sequence
  ENSG00000119685_60 (sequence is synthesized)
tgcaccaccaggggacactcagtttccacagaggggtgctatgctctaccaaaatggtgcagattctttttcctgtcaggggtggactccaaaaagattttgtcctggattttacagctt

SEQ ID NO: 232683 - DNA, 120 bp, Artificial Sequence
  ENSG00000119685_61 (sequence is synthesized)
taggtggatccagtattgggtttagatgagttgacagagccctttctgagatgaagctaatagccagattttcactgaaacaggaaaaataaaaatttcaaaaaaattaaaacaaaatgg

SEQ ID NO: 232684 - DNA, 120 bp, Artificial Sequence
  ENSG00000119685_62 (sequence is synthesized)
agttaaaaactaaatatgttgccagagacccaaagataggcagctctagcaacttggggggcatgcaagtatccatccagggagctgagttccacccatgcggcggaggtgggaagagag

SEQ ID NO: 232685 - DNA, 120 bp, Artificial Sequence
  ENSG00000119685_63 (sequence is synthesized)
gattctgggaaggtcccggttggaatggccttttttctgcctcagccatattattcagtggaaattcagaaaagaccccaaaacatttgtagtgcctttccctttctccccacccccagt

SEQ ID NO: 232686 - DNA, 120 bp, Artificial Sequence
  ENSG00000119685_64 (sequence is synthesized)
tccttcttcagtagccttccttgctaattaacactggctctgcagggatatttaccttttctctgctggattcctgtggttttgaaagaattcaggtacttgctggttgccaaggaattc

SEQ ID NO: 232687 - DNA, 120 bp, Artificial Sequence
  ENSG00000119685_65 (sequence is synthesized)
agattacctcacaggctgcacactgtccagaatctgccacagcagcaagtaggggggaagagacaccaacaagggggagaaaaccctttccagtgctcattgtcaccctccctggcaggc

SEQ ID NO: 232688 - DNA, 120 bp, Artificial Sequence
  ENSG00000119685_66 (sequence is synthesized)
ccttgctgtttgtgaagtttgagtcatttctggctctaaagacaagggatcaggctggtaatcccctcccagacggctctgtagggcgctgcctagtcactgcagcgctttggcagtctc

SEQ ID NO: 232689 - DNA, 120 bp, Artificial Sequence
  ENSG00000119685_67 (sequence is synthesized)
ccggctgcagctggttgacagcagatcagagagctcttgggcctcttgttctcttccataagatttttctgggtcaggccaggatgaaacccagtggctcctggcaaggctgcctgaggt

SEQ ID NO: 232690 - DNA, 120 bp, Artificial Sequence
  ENSG00000119685_68 (sequence is synthesized)
gctgtctcttcattgtccaggcctctctgactcaaaatgcctacacctgttgaaggataactcatgtgccacagcgaggtcgaggctggccttctcttttcttggtacatttgtagtgaa

SEQ ID NO: 232691 - DNA, 120 bp, Artificial Sequence
  ENSG00000119685_69 (sequence is synthesized)
tgtttgtcagaaaatataactaccaaagaggatgttaagcttctacatctagaatgcctgtgactctgaccataagaagatattggtatcaaaaaaaagtttttaagaaaacagcaggac

SEQ ID NO: 232692 - DNA, 120 bp, Artificial Sequence
  ENSG00000119685_70 (sequence is synthesized)
tgtagccagcaaaggtaattagtgtccttaaagaagaggaagatgaaaatgaagaagaagaaggacttttttttttttttttgagatgagtatcgctctgtcacccaggctggagtgcag

SEQ ID NO: 232693 - DNA, 120 bp, Artificial Sequence
  ENSG00000119685_71 (sequence is synthesized)
acagacatgagccaccacgcccggccagaagaagaaatttttctggtacggaacagcactctgcaaatcaaactgttgtgttcatatccctgagcatgaatgaacactttctaagggcta

SEQ ID NO: 232694 - DNA, 120 bp, Artificial Sequence
  ENSG00000119685_72 (sequence is synthesized)
tgaacactttctaagggctatatagacatggatggttttaaaggagatagtttctggttctctttcctaaagttgagctgcttgggagtacctcatgaggatgggtttgcctttcttact

SEQ ID NO: 232695 - DNA, 120 bp, Artificial Sequence
  ENSG00000119685_73 (sequence is synthesized)
tccccttcacagttactgttttttcacttttattaaagaatggctcacctagaatcttagtctggtatattgtccttaggtgtagaaattttcagggttccaaagaaaggtagaaaaaaa

SEQ ID NO: 232696 - DNA, 120 bp, Artificial Sequence
  ENSG00000119685_74 (sequence is synthesized)
ttagtgtctaatttaattctagtaatagcataacaaatcctttttgcatgatggtagtttctatttctttgtttttaaaataattgaaggatgatataatctagctattagctgatcatt

SEQ ID NO: 232697 - DNA, 120 bp, Artificial Sequence
  ENSG00000119685_75 (sequence is synthesized)
aaacataattttgatgacagatcattttataattttttgatgtgtaattaggaaggagttcacagagttgagcgtcattggtgtttggatgaattgtatactacaatacttgcaatgata

SEQ ID NO: 232698 - DNA, 120 bp, Artificial Sequence
  ENSG00000119685_76 (sequence is synthesized)
atcagtcatgtatatataaacagttatagccttacggtcacagggaattaaaaatatatgccaattcctatgtataattttgctgtacagaaggtatgatatgatgtaaaagacaagtat

SEQ ID NO: 232699 - DNA, 120 bp, Artificial Sequence
  ENSG00000119685_77 (sequence is synthesized)
taaatacgttaggctaacctgttgtttgtgggaaatgaaagaattaaaaacaagagtgactgggggatagtgtctgtgtggcagtctgagggaggcttttctggcatgctgggaatgttc

SEQ ID NO: 232700 - DNA, 120 bp, Artificial Sequence
  ENSG00000119685_78 (sequence is synthesized)
tatacagaacttgagtggtggctacacagttgtgttcactttgtaaaaattcattatgccctgccgtgttctttgtatacttttctgtacatacgttaacttcattaaaaagcatatttt

SEQ ID NO: 232701 - DNA, 120 bp, Artificial Sequence
  ENSG00000119685_79 (sequence is synthesized)
gataaaagaaggctacctatttatgtacagaacttgattaatttctcttgaacttgaaagattcttgaaagattctctgcttctacttccacttgctacttacactcaaactctatggct

SEQ ID NO: 232702 - DNA, 120 bp, Artificial Sequence
  ENSG00000119685_80 (sequence is synthesized)
ccagctgggtgactttatcattgtatacaacaagttttatcttgttgtttttctgtggggtttgggcactgggtaggaaacagaacaaatggctgaaaagaaatcaaagaagaaagttga

SEQ ID NO: 232703 - DNA, 120 bp, Artificial Sequence
  ENSG00000119685_81 (sequence is synthesized)
taacctgggagacttctctgaagaaagaaaactgtttaagaaacacagactgaactgcagtacttttccttaaatagctgagatgaccttctttaccctgggcttaggtgattctcatca

SEQ ID NO: 232704 - DNA, 120 bp, Artificial Sequence
  ENSG00000119685_82 (sequence is synthesized)
gggtgacctgagtggaagttggtggtaacgactgttctgtgtcagcacccaggacagtggtgtctgttaaggctgccagggattagcagggaggaaagccatcaggactgggtagcctgg

SEQ ID NO: 232705 - DNA, 120 bp, Artificial Sequence
  ENSG00000119685_83 (sequence is synthesized)
tagcaccaaatcccaattaatgttacctgaacatgtggtgaggtcagccgtatgatgaaagatgtttaagagattaatgtcagaagaatatgaaaataaacaccggcttaaaaaatgtta

SEQ ID NO: 232706 - DNA, 120 bp, Artificial Sequence
  ENSG00000119685_84 (sequence is synthesized)
tcaggtctgaatgctggtgctttttatgccttgtccactcttctgaatcgcatggtgatctggcactacccgggggaagaagtgaatgctggaagaattggcctgacgatcgtcattgca

SEQ ID NO: 232707 - DNA, 120 bp, Artificial Sequence
  ENSG00000119685_85 (sequence is synthesized)
aaacctacaagaatctgtgccatccaaattgcttgatccagtgaatctgctaggaaaggtctctgaggcccccgtctgctgactgcatgacaaaccctaaaggaaatgccaatcgtgatg

SEQ ID NO: 232708 - DNA, 120 bp, Artificial Sequence
  ENSG00000119685_86 (sequence is synthesized)
gggaaggtgttgggcttggcacattctctcttctgcctccaaagagagccccagttcaaagaatgaaacatctagcctctcaaaacattggcaaatgggcatttttgttgcattcttctt

SEQ ID NO: 232709 - DNA, 120 bp, Artificial Sequence
  ENSG00000119685_87 (sequence is synthesized)
taaaatagtcttggcagcctaaaataggcattttctggaactagcttggggtaaatgaaacctcgccatcttataaaatgctgtcagatttgcagcatttaatacagatgtcccatattg

SEQ ID NO: 232710 - DNA, 120 bp, Artificial Sequence
  ENSG00000119685_88 (sequence is synthesized)
gatttgtgtgccaagatcctgcccagcgggcatcaactcggccaatttatcccacctttgagtcttccaggcgaaaccctttccagaaacctcagatgacctccctcatcatcatgtaga

SEQ ID NO: 232711 - DNA, 120 bp, Artificial Sequence
  ENSG00000119685_89 (sequence is synthesized)
gtttgtgccaggcctcttgaagtccagcaaccacagtgatagccttttggccacagctcttttctgtgttactgatgtctctcatctcaatatttccccctcaaattgtaaaacatttca

SEQ ID NO: 232712 - DNA, 120 bp, Artificial Sequence
  ENSG00000119685_90 (sequence is synthesized)
cagcccaactttttcatttgtgatataatagattgttccttggttttgtgtcttatgtctcaattctcttaattgttcatctcctgtgctaaaaatatacccactgaaataaatacacat

SEQ ID NO: 232713 - DNA, 120 bp, Artificial Sequence
  ENSG00000119685_91 (sequence is synthesized)
agcaataaataactaaaacaacttactgaacaaccaagcagtcccacttctagagaaataaaaacttacgtttacagtaaaacttacaaaaacgtacattcatataaaaatctatatgga

SEQ ID NO: 232714 - DNA, 120 bp, Artificial Sequence
  ENSG00000119685_92 (sequence is synthesized)
aatgctttatagcaactttattcataatctccaaaaattaaacaatccaaatgccttcaactggtgaatggataaccatggtacatctatacagtggattactactgagcaagaaaaggg

SEQ ID NO: 232715 - DNA, 120 bp, Artificial Sequence
  ENSG00000119686_0 (sequence is synthesized)
agaggactctgcgggcgaagtggctgcgcaaggagagaacttttcctgcacaaggaacgcctcgtggggagacccaaggcaggagcggtccggagccggctgcggcgtgtgcggccggcc

SEQ ID NO: 232716 - DNA, 120 bp, Artificial Sequence
  ENSG00000119686_1 (sequence is synthesized)
ttgggacagcgatcgccgcgggtggcaacagagagccccaagcaaaagtgggagcaggagcttggaggtgagcacaggaagccccacttgaggcttttacgcagcctctagtctctgttt

SEQ ID NO: 232717 - DNA, 120 bp, Artificial Sequence
  ENSG00000119686_2 (sequence is synthesized)
cttctggaataggcaagtgtcctttcaactctaagagaccagcagaggccactgtcccttaagactgccggagtcctcaccacttctccaggattccagaggagactgtggcgatggtga

SEQ ID NO: 232718 - DNA, 120 bp, Artificial Sequence
  ENSG00000119686_3 (sequence is synthesized)
atgaaggtcccaaccaggaagagagcgatgacacccctgtgccggagtccgcactccaagcggaccccagcgtctcggtccatcccagcgtctcggtccatcccagcgtctccatcaacc

SEQ ID NO: 232719 - DNA, 120 bp, Artificial Sequence
  ENSG00000119686_4 (sequence is synthesized)
ccagcgtctctgtccaccccagcagttcggcccaccccagtgccttagcccaacccagtggcttggctcaccccagtagctcgggccctgaggacctcagcgtgatcaaggtgagcaggc

SEQ ID NO: 232720 - DNA, 120 bp, Artificial Sequence
  ENSG00000119686_5 (sequence is synthesized)
gccgttgggccgtggtcctggtgtttagctgctactccatgtgcaactcctttcagtggatccagtacggctccatcaataacatcttcatgcacttctacggtgtcagtgcctttgcca

SEQ ID NO: 232721 - DNA, 120 bp, Artificial Sequence
  ENSG00000119686_6 (sequence is synthesized)
ttgactggctgtccatgtgctacatgctgacttacatccctctgctcctgccagtggcttggctgctggagaagttcggcctgcgcaccattgctctcactggctcggctctcaactgcc

SEQ ID NO: 232722 - DNA, 120 bp, Artificial Sequence
  ENSG00000119686_7 (sequence is synthesized)
tgggggcctgggtgaagctgggcagcctgaagccgcatctctttccggtcaccgtggtgggccagctcatctgctctgtggcccaggttttcatcctgggcatgccctcccgcatcgctt

SEQ ID NO: 232723 - DNA, 120 bp, Artificial Sequence
  ENSG00000119686_8 (sequence is synthesized)
ccgtctggttcggggctaatgaggtttcaacagcctgctccgtggctgtctttggcaatcagcttggaattgcgattgggttcttggtccctcctgttttggtacccaacattgaagacc

SEQ ID NO: 232724 - DNA, 120 bp, Artificial Sequence
  ENSG00000119686_9 (sequence is synthesized)
gggacgagcttgcctaccacatcagcatcatgttctatataataggaggtgtggccactctcctcctcatccttgtcatcattgtgttcaaggagaaacctaaatatccccccagcaggg

SEQ ID NO: 232725 - DNA, 120 bp, Artificial Sequence
  ENSG00000119686_10 (sequence is synthesized)
cccaatccctgagctatgccttgacctctcctgatgcctcatacttaggttccatcgcccggctcttcaaaaatctcaactttgtgctgcttgtcatcacctatggtctgaatgctggtg

SEQ ID NO: 232726 - DNA, 120 bp, Artificial Sequence
  ENSG00000119686_11 (sequence is synthesized)
ctttttatgccttgtccactcttctgaatcgcatggtgatctggcactacccgggggaagaagtgaatgctggaagaattggcctgacgatcgtcattgcaggaatgcttggggctgtga

SEQ ID NO: 232727 - DNA, 120 bp, Artificial Sequence
  ENSG00000119686_12 (sequence is synthesized)
tctcaggaatctggctggataggtccaaaacctacaaagagacaaccctggtagtctatatcatgacactggtgggcatggtggtgtacacgtttaccttgaacctgggacacctgtggg

SEQ ID NO: 232728 - DNA, 120 bp, Artificial Sequence
  ENSG00000119686_13 (sequence is synthesized)
tagtgttcatcactgctggcacaatgggcttctttatgactggctatctcccactgggatttgagtttgctgtggagctcacgtacccagaatcagaaggcatctcctccggcctcctca

SEQ ID NO: 232729 - DNA, 120 bp, Artificial Sequence
  ENSG00000119686_14 (sequence is synthesized)
acatatctgcacaggtatttgggatcatctttaccatctcccagggccagattattgacaactatggaaccaagcctgggaacatcttcctgtgtgtgttccttactcttggagcagccc

SEQ ID NO: 232730 - DNA, 120 bp, Artificial Sequence
  ENSG00000119686_15 (sequence is synthesized)
agacagaaagcaaacaaagaaactcttgagaacaaactccaagaggaggaggaggagagcaacaccagcaaagtgcccactgctgtgtcagaggatcatctctgagaggaaggtggtgac

SEQ ID NO: 232731 - DNA, 120 bp, Artificial Sequence
  ENSG00000119686_16 (sequence is synthesized)
aactcagggaacacgaacaccccaccttttccttcagcacagctctcaccgccagcacaaagggcttcgctagagatgtttttggagggaatcagtgggactatttgtggcatggatggc

SEQ ID NO: 232732 - DNA, 120 bp, Artificial Sequence
  ENSG00000119686_17 (sequence is synthesized)
ctattcctcctagaacccacgtaagagcttggatgatttagttggagaaaattgcacctatcaccaaatgcaaatttgattcccacctccacccccttttaggttatgggagttggtgtt

SEQ ID NO: 232733 - DNA, 120 bp, Artificial Sequence
  ENSG00000119686_18 (sequence is synthesized)
gggacagggtggcagagaatattggagtcaatcctagcttggtctcttgccttccctcttttcctccatccatcgtggacaatgcctgcaaaattttcacaggaagaaagcctattcagg

SEQ ID NO: 232734 - DNA, 120 bp, Artificial Sequence
  ENSG00000119686_19 (sequence is synthesized)
atattaacttgaaatttccagtgtcctaagagcctctcatgaagcccagttctaataagtggcaagctgctctgccggggtcatctcctgggtcatcggactgattgctcaagttctgca

SEQ ID NO: 232735 - DNA, 120 bp, Artificial Sequence
  ENSG00000119686_20 (sequence is synthesized)
ggagaggaagcaccattagaacaactccatcagaacagctccaccgggacttgtgggcctaaattttcctggcctaacgggtctgtctccaaaccctctttcctaagagctgagcaaacc

SEQ ID NO: 232736 - DNA, 120 bp, Artificial Sequence
  ENSG00000119686_21 (sequence is synthesized)
aaccataataaacttgacaaaagactttgttgtggccatgacagagataccgactcaggagggctacctacctaggtgtgatcatgctgggggctaccttctgagtatatttgtgaaagc

SEQ ID NO: 232737 - DNA, 120 bp, Artificial Sequence
  ENSG00000119686_22 (sequence is synthesized)
acatatttgggaactctggtagcttgagttgggaatgggaaggttcttttttacagaagtacttccccagggacttctgtgtgtcacagtcacctctgatgcctttatcttgatgttgca

SEQ ID NO: 232738 - DNA, 120 bp, Artificial Sequence
  ENSG00000119686_23 (sequence is synthesized)
ttgggaatctcagccatcagcccaagtgcttgttttattccaaggcagggtaatccccgtcaacttactctaacctttgctgaaaactaatcttgattcattctactctgaaaatccaaa

SEQ ID NO: 232739 - DNA, 120 bp, Artificial Sequence
  ENSG00000119686_24 (sequence is synthesized)
ggtgcttctgagagataagagggaaggggtagaaggaaaggtgccccttgaaatgggaattgagcctgttagaattaaaagcttatctcacctctgctggggacagtatttgcaccacca

SEQ ID NO: 232740 - DNA, 120 bp, Artificial Sequence
  ENSG00000119686_25 (sequence is synthesized)
acccctctcctcacctgctttgagcgataatctttatcagatattctaaacttaaagggattccctttaaaccaactcaagctgatctttcctatctagcctgctgtttggctgtactca

SEQ ID NO: 232741 - DNA, 120 bp, Artificial Sequence
  ENSG00000119686_26 (sequence is synthesized)
tgggctttggtaatatctcctaaaaatgaggttttggtaatttttcctatgcattgggcaactgtgatcgtgaccactgtgctgtcttgctccagccactgccctggcctcagcatatca

SEQ ID NO: 232742 - DNA, 120 bp, Artificial Sequence
  ENSG00000119686_27 (sequence is synthesized)
gggcagcctgtgctggctgcaatactgtggtgcttgggccactgcctgagaggagccaggtttgtgtgtgtctgcatgtgtgtgtgtgtgtgtttgtacagattcaagcaatggatgcaa

SEQ ID NO: 232743 - DNA, 120 bp, Artificial Sequence
  ENSG00000119686_28 (sequence is synthesized)
ggaacatgctgtatgtaatagaagaaagaagtccacgttttcggcagaagtagtgagtcagtgtggaagagaggtgagggtgtgctttactttttgataaagagaaagatgtttactcat

SEQ ID NO: 232744 - DNA, 120 bp, Artificial Sequence
  ENSG00000119686_29 (sequence is synthesized)
aaacccttcaaaaggtattaacaaaatgtttaccaaacctattgctttattttaaaaacataatttgtgttttctatttgtaagatctgacatttcgaggcaataaaaacttctcagaaa

SEQ ID NO: 232745 - DNA, 120 bp, Artificial Sequence; identical to SEQ ID NO: 232707
  ENSG00000119686_30 (sequence is synthesized)

SEQ ID NO: 232746 - DNA, 120 bp, Artificial Sequence
  ENSG00000119686_31 (sequence is synthesized)
gcctgctgagcacaaggtctccctgtgaacttcttcctggccttcaggggtgcccgtctccttggtatgatcacatagaggatgcccagatcattagagggcctagtatgtcttggtggg

SEQ ID NO: 232747 - DNA, 120 bp, Artificial Sequence
  ENSG00000119686_32 (sequence is synthesized)
aagaaacaaaacagcaaagggagtcctaggggaggaggtgggctccccatccttcttgttctggaagttcttcatccccttgtttctctggtctggtcttcagcttctttatgactggct

SEQ ID NO: 232748 - DNA, 120 bp, Artificial Sequence
  ENSG00000119686_33 (sequence is synthesized)
gatctccggagacagaaagcaaacaaagaaactcttgagaacgtgagtatatgggagctttgtggggctgagatcggggtccaaggcttttgatgaggatgtggcaacatagatggggca

SEQ ID NO: 232749 - DNA, 120 bp, Artificial Sequence
  ENSG00000119686_34 (sequence is synthesized)
gggaggagactattttctttcttctccttcccacgctccacctcacttggcttttcaggaatgtctccttacgggatctcttcactcggaaatggactttctaagtggctgagtctgaat

SEQ ID NO: 232750 - DNA, 120 bp, Artificial Sequence
  ENSG00000119686_35 (sequence is synthesized)
acagaagctggagcaaggttgggagctggttttctcctttttttcttctctcccctggaaactcctgatttctgcatacaatgactgggttgacatggctgggtctcctttggcggctct

SEQ ID NO: 232751 - DNA, 120 bp, Artificial Sequence
  ENSG00000119686_36 (sequence is synthesized)
agaggaactcctgaggctgccctgtccacaagctatgtgtcctgacttacacccttccaagtaaatctaatatggagtgtgccggtggtagtcttgtgagcctcaatgtttagttaaagt

SEQ ID NO: 232752 - DNA, 120 bp, Artificial Sequence
  ENSG00000119686_37 (sequence is synthesized)
tagaaagacccccggtgggcattatggagtggcagtacttattattttaactgtgtgtgcatctttattatctctaaaatggtgacgataatactacctactttctagagttgtcataaa

SEQ ID NO: 232753 - DNA, 120 bp, Artificial Sequence
  ENSG00000119686_38 (sequence is synthesized)
acttctgctttctgacttgattacaggcatctttcctttttcatgctgtgcaaaaacttgagctcagcctctcaccccaacacaattcaagacgcagccttgtcccagcatgagcgcaga

SEQ ID NO: 232754 - DNA, 120 bp, Artificial Sequence
  ENSG00000119686_39 (sequence is synthesized)
taggaaaggtctctgaggcccccgtctgctgactgcatgacaaaccctaaaggaaatgccaatcgtgatggcccgggacctggaggaaacagcatcatcctcagaggatgaggaggtcat

SEQ ID NO: 232755 - DNA, 120 bp, Artificial Sequence
  ENSG00000119686_40 (sequence is synthesized)
tggattggttccattgaagaggaactcctgaggctgccctgtccacaagctatgtgtcctgacttacacccttccaagtatgtgcagccgccattgtcatcatcatcatcaccattgaag

SEQ ID NO: 232756 - DNA, 120 bp, Artificial Sequence
  ENSG00000119688_0 (sequence is synthesized)
agagtccctcgggtctcaggtcatggcggtcgcggggcccgcgcccggagctggcgccaggcccaggttagatctgcaatttctccagcggttcctgcagatactgaaggttttgtttcc

SEQ ID NO: 232757 - DNA, 120 bp, Artificial Sequence
  ENSG00000119688_1 (sequence is synthesized)
ttcttggtcatcacaaaatgccttgatgttcctgacccttttgtgcctgaccctactggagcaatttgtgatctaccaggttggcttgatccccagtcagtactatggggtcctgggaaa

SEQ ID NO: 232758 - DNA, 120 bp, Artificial Sequence
  ENSG00000119688_2 (sequence is synthesized)
caaagacttggaagggtttaagactctgacattcctggctgtcatgctcattgttctgaactccacgctgaagagctttgatcagttcacctgcaacctgctgtatgtgagctggaggaa

SEQ ID NO: 232759 - DNA, 120 bp, Artificial Sequence
  ENSG00000119688_3 (sequence is synthesized)
ggacctcactgagcaccttcaccgcctctacttccggggccgtgcgtactacaccctcaacgtgctgcgggatgacatcgataacccggaccagcgcatcagccaggacgtggagcgatt

SEQ ID NO: 232760 - DNA, 120 bp, Artificial Sequence
  ENSG00000119688_4 (sequence is synthesized)
ctgccggcagctcagcagcatggccagcaagctcatcatctccccgttcaccctcgtctactacacttaccagtgcttccaaagcacaggctggctcgggcctgtgagcatcttcgggta

SEQ ID NO: 232761 - DNA, 120 bp, Artificial Sequence
  ENSG00000119688_5 (sequence is synthesized)
tttcatcctggggaccgtggtgaacaaaactttgatgggccccattgtgatgaagctggtgcatcaggagaagctggagggagattttaggttcaagcacatgcagattcgggtgaatgc

SEQ ID NO: 232762 - DNA, 120 bp, Artificial Sequence
  ENSG00000119688_6 (sequence is synthesized)
ggagcctgctgctttctacagagctgggcatgtggagcacatgaggacagaccgcaggctgcagagactccttcagacccagagggagctgatgtccaaggagctctggctgtacatcgg

SEQ ID NO: 232763 - DNA, 120 bp, Artificial Sequence
  ENSG00000119688_7 (sequence is synthesized)
catcaacacctttgactatctgggcagcatcctgagttacgttgtcatcgcaatccccattttcagcggggtctatggagacctgagtcccgcagagcttagcaccctggtcagcaagaa

SEQ ID NO: 232764 - DNA, 120 bp, Artificial Sequence
  ENSG00000119688_8 (sequence is synthesized)
tgcctttgtgtgcatctacctcatcagctgcttcacccagctcatcgacctgtccacgacgctctcagatgtggctggctacacgcacagaattgggcagcttcgggagacgcttctgga

SEQ ID NO: 232765 - DNA, 120 bp, Artificial Sequence
  ENSG00000119688_9 (sequence is synthesized)
catgtccctgaagtcacaggactgcgagatcctgggcgagagcgagtggggcttggacacacccccagggtggccagcggcagagccagcagacacagcatttctccttgagcgggtctc

SEQ ID NO: 232766 - DNA, 120 bp, Artificial Sequence
  ENSG00000119688_10 (sequence is synthesized)
catctctgccccctcctctgacaaacccctaatcaaggatctgagcctaaagatctccgagggacagagcctgctcatcacaggcaacacgggcactggcaagacctccttgctccgggt

SEQ ID NO: 232767 - DNA, 120 bp, Artificial Sequence
  ENSG00000119688_11 (sequence is synthesized)
tctgggtggcctctggacgagtacacggggctcagtgcagatgctgacggactttgggccccatggggtgctattcctgccacaaaagccattcttcactgacgggacccttcgggagca

SEQ ID NO: 232768 - DNA, 120 bp, Artificial Sequence
  ENSG00000119688_12 (sequence is synthesized)
caggttctgccgatgatgagaggatcttgaggttcttggaattggcaggcctgtccaacttggtggcaaggacagagggcctggaccagcaggtggactggaactggtatgatgttctgt

SEQ ID NO: 232769 - DNA, 120 bp, Artificial Sequence
  ENSG00000119688_13 (sequence is synthesized)
ccccgggggagatgcaacggctctcctttgcccgactcttctacctgcagccgaagtacgcagtgcttgatgaagccaccagtgccctgacagaggaagtggagagcgagctctatcgca

SEQ ID NO: 232770 - DNA, 120 bp, Artificial Sequence
  ENSG00000119688_14 (sequence is synthesized)
tcggccagcagctggggatgacgttcatcagtgtgggacatcggcagagccttgagaagtttcattccttggttctgaaactctgtggaggaggaagatgggagctgatgagaatcaaag

SEQ ID NO: 232771 - DNA, 120 bp, Artificial Sequence
  ENSG00000119688_15 (sequence is synthesized)
tggaatgaagctctggcttttggaaggagagccacactgtggcgggtcggcggccctcaggagagaccaggaggactgacagcgaagatcgagctcaggttcgccacatagatcccgtgc

SEQ ID NO: 232772 - DNA, 120 bp, Artificial Sequence
  ENSG00000119688_16 (sequence is synthesized)
aggagccacatgggtcctgtgcaggacccctagcagtggtgggctgagcccaggtctaggtttctgtgggggacactgaatctcccagtgttcagtctcccaggactctgctgcctcagc

SEQ ID NO: 232773 - DNA, 120 bp, Artificial Sequence
  ENSG00000119688_17 (sequence is synthesized)
cagagcctccatatgcttgaagtgctgattacctacaaatgatttcagatcatgtttgctaaagagaaatctggaagtgtgagatctgtaagaaatgaaagaaatgactcttggagtcaa

SEQ ID NO: 232774 - DNA, 120 bp, Artificial Sequence
  ENSG00000119688_18 (sequence is synthesized)
gagatctggaaatcttttaatcagttaaattgtgcagcaatagatttttaactttaactgaccatttaagttttttaataagttttttacaaagaaaagttaaacattaaaaagaattac

SEQ ID NO: 232775 - DNA, 120 bp, Artificial Sequence
  ENSG00000119688_19 (sequence is synthesized)
agctttctgtcttctctatcatggaatgatcttttttattgaatctccagatttgtatttgacagcttggtgggaagggaagcacactctgctgttctggaatcttatgcccagggtttt

SEQ ID NO: 232776 - DNA, 120 bp, Artificial Sequence
  ENSG00000119688_20 (sequence is synthesized)
tcacttctccccacatctccctttccacttgccagtgttgtgtagttagaacctgaaccactaacttccaggggcctttggtctgccctaccttaacccaaatgaaagtaaatccctttc

SEQ ID NO: 232777 - DNA, 120 bp, Artificial Sequence
  ENSG00000119688_21 (sequence is synthesized)
cccttagccaaaataaggttgggttttctaaaaaaatagtctatattagggaacaacaacagcaaattagacaaaacccagaaagcacaaagcatgaggtggagttactgtgcccaaagt

SEQ ID NO: 232778 - DNA, 120 bp, Artificial Sequence
  ENSG00000119688_22 (sequence is synthesized)
cctcactcagaccagtgcccctccagttcagttgtctatgtattaccttccttaccttcataatttttgccaggcttctgtacttctagtacttgagttacttaatatttttaaaaacaa

SEQ ID NO: 232779 - DNA, 120 bp, Artificial Sequence
  ENSG00000119688_23 (sequence is synthesized)
accttttaagtttaaatggatttttaagtgaaattttacacttaacatagatggaaagtaactaaaaataaatacaagaaaaaccatcggtgttattaacttacggctagatgctgttgc

SEQ ID NO: 232780 - DNA, 120 bp, Artificial Sequence
  ENSG00000119688_24 (sequence is synthesized)
ctgcatagactctgggcctgaggcttgttcattttgtaaaaaagagaggtgaggagttagacggactggcactcaactgagatttttctccttaataaaatcagaaagatggagtgagaa

SEQ ID NO: 232781 - DNA, 64 bp, Artificial Sequence
  ENSG00000119688_25 (sequence is synthesized)
ccttttgtgcctgaccctactgggctggagtgcagtgatcgcctcctgagtagctgggattaca

SEQ ID NO: 232782 - DNA, 120 bp, Artificial Sequence
  ENSG00000119688_26 (sequence is synthesized)
tccctctctctgtgtctctcgtcctctccagtccagtgtgaccgtaatgcctagtggaacttagcctccaggaagcaggaagcaagctgtgggggtgtgtttcctcccttttctgggaac

SEQ ID NO: 232783 - DNA, 120 bp, Artificial Sequence
  ENSG00000119688_27 (sequence is synthesized)
taaagggatagttgcctttattaagcacgttgatcttgctattggcccacgtgggactgattcctcagatgtttccactcctgggcccaggccacaggttctggtttaattcagcattta

SEQ ID NO: 232784 - DNA, 120 bp, Artificial Sequence
  ENSG00000119688_28 (sequence is synthesized)
gcagaactgatcattgcccctttccttcctagaactcttatttccggcagctcattaaaacggctcagcagccagagctgctgctcctcctctgcgggaccgaggctgtgactcaccctg

SEQ ID NO: 232785 - DNA, 120 bp, Artificial Sequence
  ENSG00000119688_29 (sequence is synthesized)
gtctccctcacttgaggtttctgggctggggcataatagttaaggaaggggatctggagtaaaactgcctaagttcaaatcctagctgtgccagttactagctgtgtgatcttggagagg

SEQ ID NO: 232786 - DNA, 120 bp, Artificial Sequence
  ENSG00000119688_30 (sequence is synthesized)
ggggttggactggtctgcttcccttcccacacctctctacctcctgtctgcaaggataaatgtgccatgatgaaggaattaaccggggatgaggagggggggctgttgcctttctgtgag

SEQ ID NO: 232787 - DNA, 120 bp, Artificial Sequence
  ENSG00000119688_31 (sequence is synthesized)
tatcctcaggagaatgaggatccagagagtccacgtggccctacttggcgtcctgctccctgtcttagggttgtgtccgctgtagggcatgtggatggttcctgggtgtctcacagatgt

SEQ ID NO: 232788 - DNA, 120 bp, Artificial Sequence
  ENSG00000119688_32 (sequence is synthesized)
tatatcccctgaaggaggtctaccccgactcaggagagatgcccactgggacaaggaaagtgatgccttccttcacccaccccttcccttatgaagatctgcaacctgtggtttcaaagc

SEQ ID NO: 232789 - DNA, 90 bp, Artificial Sequence
  ENSG00000119688_33 (sequence is synthesized)
cccttcccttatgaagatctgcaacctgtggtttcaaagccttcgcccagcattctgaggcccccacccctgcatcatccatgatgtgcc

SEQ ID NO: 232790 - DNA, 120 bp, Artificial Sequence
  ENSG00000119688_34 (sequence is synthesized)
ctctgtgtggtcctttccttctggcctagccctggagactgctggtggcagacaccaaggagatcatctgcagtcgttttcaaatgctgctgcccagagtcatgggggagggtgccctgc

SEQ ID NO: 232791 - DNA, 120 bp, Artificial Sequence
  ENSG00000119688_35 (sequence is synthesized)
agaggactcctggagaagctgcagggctgtgaataggcagctaaaaagaagaagcctgccaggtgcagtggcatgcacctgtagtcccaacaactcaggaggctgaggcaggaggatcac

SEQ ID NO: 232792 - DNA, 120 bp, Artificial Sequence
  ENSG00000119688_36 (sequence is synthesized)
actgtggcctcatctgtgcccttggggagaggctccagccaggccgctgattcaaggaagaggggctcctctcctcttcctttgactgttttggggtctgtacccagatctcacctcatt

SEQ ID NO: 232793 - DNA, 120 bp, Artificial Sequence
  ENSG00000119688_37 (sequence is synthesized)
gcttccgggagagtccgcgtctcccgcaccttcctctctatcaaacgccgtctctgtggtagccggggccccgcccctcctcggactctacccagtactgaactaggggcagctgggctc

SEQ ID NO: 232794 - DNA, 120 bp, Artificial Sequence
  ENSG00000119688_38 (sequence is synthesized)
cacaaggatggcctgaggaggagaaagaacccaaaggctcagcctggccagggccagaggcccctcaaaacggggagtagcagtagcagagagaaccgagtggcctcctctgccagcggc

SEQ ID NO: 232795 - DNA, 120 bp, Artificial Sequence
  ENSG00000119688_39 (sequence is synthesized)
gacaagtctcaggtcctagagtcagggcaaaaggtgaggtggtgaagtggcccgggcctgggaactgctggctctaagaaccttctattcacatccatggattgggcccactactcatag

SEQ ID NO: 232796 - DNA, 120 bp, Artificial Sequence
  ENSG00000119688_40 (sequence is synthesized)
cagctcctgaggcaggtaaatggggcaaggactcacgccaaataccacacgcgtatgtcaaacacccaaggtcggattctggggcccctgccctcaggaggctgtcagactgttccccct

SEQ ID NO: 232797 - DNA, 120 bp, Artificial Sequence
  ENSG00000119688_41 (sequence is synthesized)
aaacacacttctgaaggttgtagggaccttgccctgctgtctgccggccagagcctctcccatctgacccaggccaggcgttcccacctctcctccttgggaggttccagtgggttctgg

SEQ ID NO: 232798 - DNA, 120 bp, Artificial Sequence
  ENSG00000119688_42 (sequence is synthesized)
agggagggtgggctgtgtgcagctccgtcttttgctcgccctcctaggttggtgtggtttttttcttttctcaggtgatatatcccctgaaggaggtctaccccgactcaggtgagctgg

SEQ ID NO: 232799 - DNA, 85 bp, Artificial Sequence
  ENSG00000119688_43 (sequence is synthesized)
cctcttccgtagctggggctacaggtgcacgccaccttgcctgcctaatttttgtatagtggtctccatctcctgaccttgtgat

SEQ ID NO: 232800 - DNA, 120 bp, Artificial Sequence
  ENSG00000119688_44 (sequence is synthesized)
tgagccactgtgcacagccttgccctgtctattttgaccagccaggaggctctggctttttgcagaaggcttctttgttgtgcaggttctgccgatgatgagaggatcttgaggttcttg

SEQ ID NO: 232801 - DNA, 120 bp, Artificial Sequence
  ENSG00000119688_45 (sequence is synthesized)
gaattggcaggcctggtaagtggggagagggaccctcaggacccgagcccacctgggagcaccagctacaggtaggcaggtgctggccctgctatgcttgggcccaggactggaagtctg

SEQ ID NO: 232802 - DNA, 120 bp, Artificial Sequence
  ENSG00000119688_46 (sequence is synthesized)
aacctggggtggagaatgggagtatcagttgacagtgtgtgctgttggccaggtttaggcacgaagggggtagtgctctcattggagaattttaaaacaagaataggattgatgaaggcg

SEQ ID NO: 232803 - DNA, 120 bp, Artificial Sequence
  ENSG00000119688_47 (sequence is synthesized)
gtttgctttttactgtcatcatgctccagcaagtctaaacagtgtcattggtagaatattcctctctgcctggggcagactgtcccacagtcccccgccttggtatgccactggggcata

SEQ ID NO: 232804 - DNA, 120 bp, Artificial Sequence
  ENSG00000119688_48 (sequence is synthesized)
tatttgtcttagaggtgtgtgtgtatgctggggagtgagggaggttccccatgatggcaggtagcagggctggccatttcatggacatcctgccctctgggtctgttacagtccaacttg

SEQ ID NO: 232805 - DNA, 120 bp, Artificial Sequence
  ENSG00000119688_49 (sequence is synthesized)
agaaacccccatctcttaaaaaaaagaaaaatgttaggagcagctttcttttgtccttttcatactttatatcttagtcttccagtaagaagactaaggggtttctttagagggttctaa

SEQ ID NO: 232806 - DNA, 120 bp, Artificial Sequence
  ENSG00000119688_50 (sequence is synthesized)
agaaaatgtccttgctagaaaaaccagctcttagattttcatcagtaaaaaaaattaccactatccaggactcagtctaggattcacatctccattctatcaccactcaggttataactc

SEQ ID NO: 232807 - DNA, 120 bp, Artificial Sequence
  ENSG00000119688_51 (sequence is synthesized)
ttaaagtcaccaagccccaggttccccttctgtaaaatgaggacaataatagttcctatctcaaagggtgtagtgaggatgaaatatcattcatgtaatgcacatgtacagtgcttgaca

SEQ ID NO: 232808 - DNA, 120 bp, Artificial Sequence
  ENSG00000119688_52 (sequence is synthesized)
catagcaagtgtttcagtgtaagttagctattgttattttacagatgaggaagctgaagcccagagattgcaagtgacttgcccaaggtcacgtcactcattgggaataggaatcagtat

SEQ ID NO: 232809 - DNA, 120 bp, Artificial Sequence
  ENSG00000119688_53 (sequence is synthesized)
ggccctagtggtgagatgagacatagggggtctccttcacacccatcccctcactcaccaccttcctagcaagcactttgttggttggggtacctctcagctcaagcttagctttggtgc

SEQ ID NO: 232810 - DNA, 120 bp, Artificial Sequence
  ENSG00000119688_54 (sequence is synthesized)
aaagatgcgtgggaggctgctgctgctgcctaacttctaggcctctttctgatggctatggcttccatcctgcctctgccccctgagtagctgggactacaggtgtgcctcacagcctgg

SEQ ID NO: 232811 - DNA, 120 bp, Artificial Sequence
  ENSG00000119688_55 (sequence is synthesized)
agctttcacagccagataactaaaggggccaggctagggcttatataagagaaatttgggaggattgagataaaggggatagtcttcttgatcatccaaaacagctcatctaccttcaag

SEQ ID NO: 232812 - DNA, 120 bp, Artificial Sequence
  ENSG00000119688_56 (sequence is synthesized)
tttttctttggctctgctcagagctggctcaggcccctgggtactggacctttcagttcccactttttcaggggattaactaaggcaccgtaagatgcaactctctagaaccctgtttaa

SEQ ID NO: 232813 - DNA, 120 bp, Artificial Sequence
  ENSG00000119688_57 (sequence is synthesized)
ggatttagttgcccctaggaaaccagccttgtctggttccctcttcccatagggtcagtgttcacagcactgtgaggcaaggtcaagagcagaggtgatgtgaaagtttcttgttctctc

SEQ ID NO: 232814 - DNA, 120 bp, Artificial Sequence
  ENSG00000119688_58 (sequence is synthesized)
atggttccccttctgccttgccagagctgagagtggagaaggaaagatgaatcctcaaccctcccaccaccaccgagctcaggggctgagtgttgtcacacttggctgtgaccctctccc

SEQ ID NO: 232815 - DNA, 120 bp, Artificial Sequence
  ENSG00000119688_59 (sequence is synthesized)
tctacctccccctgcccttgcctgcctcatccttaggtccaggggtttgcttctgaagctggtggttccttactgtggccagctttagtcttagtggcctagcgtggggcctgaaattgt

SEQ ID NO: 232816 - DNA, 120 bp, Artificial Sequence
  ENSG00000119688_60 (sequence is synthesized)
caaatgaatgaatgcctcatcctcttgctggtgactgtaagacatccgtctgcctctgctcttctgtctgttaagaagctttcttgccagtgcctgaggttcaagcctgatcctttgtct

SEQ ID NO: 232817 - DNA, 120 bp, Artificial Sequence
  ENSG00000119688_61 (sequence is synthesized)
ccgtagcgtgggatggaatgggagcttctcagaaaaccaggagacctgctccccacaatgctgtctaatggagccaagcgtctggtctcctgacggcagcagcaggagcagcagcagcgg

SEQ ID NO: 232818 - DNA, 120 bp, Artificial Sequence
  ENSG00000119688_62 (sequence is synthesized)
catgaaatcccatcccttccctccagggccagaaccggtccctgtgctctgccttatgtgaggcctctgaaatcagcgttaggattgatagtgcaggcagaggtttgcgtttaagaagtg

SEQ ID NO: 232819 - DNA, 120 bp, Artificial Sequence
  ENSG00000119688_63 (sequence is synthesized)
gaagctactccttggctctgtacttggggtggatgtgatagccctgggacctttgctcctcagtctctgctgcagtttgcaacctccaccacttgagggcaccaagaatactgggaatct

SEQ ID NO: 232820 - DNA, 120 bp, Artificial Sequence
  ENSG00000119688_64 (sequence is synthesized)
tccaccacttgagggcaccaagaatactgggaatctgcgctggggtggggttgtgaggtgggcagggctgggtgtgtaaaaaagttgcttttggaggccgggcatggtggctcatgcctg

SEQ ID NO: 232821 - DNA, 120 bp, Artificial Sequence
  ENSG00000119688_65 (sequence is synthesized)
gaccccaaagtccagatgtttggctggtcagtcgggtgcaagtttatgcccttgggaacagagttttgcctcactctgtgagggctgtaggcctatggtcgaaagggaaggggcttctgt

SEQ ID NO: 232822 - DNA, 120 bp, Artificial Sequence
  ENSG00000119688_66 (sequence is synthesized)
ctcctggggctcacctctgtgcagagaaacctcttcctacccagaccattctaggtaaaagccaagctatattcttcctcctctagcagtcctctctcctacctttcctcaggtatgatg

SEQ ID NO: 232823 - DNA, 120 bp, Artificial Sequence
  ENSG00000119689_0 (sequence is synthesized)
atatccggtgtccgcccgccctcggctcctccgccgtgatgctgtcccgatcccgctgtgtgtctcgggcgttcagccgctcgctctccgccttccagaaggggaactgccctctaggga

SEQ ID NO: 232824 - DNA, 120 bp, Artificial Sequence
  ENSG00000119689_1 (sequence is synthesized)
gacgttccctgcctggggtctccttatgccagggaccaggttaccctaacagcaggaaggttgtcattaacaacagtgtcttcagtgttcgctttttcagaactacagctgtatgcaagg

SEQ ID NO: 232825 - DNA, 120 bp, Artificial Sequence
  ENSG00000119689_2 (sequence is synthesized)
atgacttggttacagtcaaaaccccagcgtttgcagaatctgtcacagagggagatgtcaggtgggagaaagctgttggagacacagttgcagaagatgaagtggtttgtgagattgaaa

SEQ ID NO: 232826 - DNA, 120 bp, Artificial Sequence
  ENSG00000119689_3 (sequence is synthesized)
ctgacaagacatctgtgcaggttccatcaccagcaaatggcgtgattgaagctcttttggtacctgatgggggaaaagtcgaaggaggcactccacttttcacactcaggaaaactggtg

SEQ ID NO: 232827 - DNA, 120 bp, Artificial Sequence
  ENSG00000119689_4 (sequence is synthesized)
ctgctcctgctaaggccaagccggctgaagctcctgctgctgcagccccaaaagcagaacctacagcagcggcagttcctccccctgcagcacccatacccactcagatgccaccggtgc

SEQ ID NO: 232828 - DNA, 120 bp, Artificial Sequence
  ENSG00000119689_5 (sequence is synthesized)
cctcgccctcacagcctccttctggcaaacctgtgtctgcagtaaaacccactgttgccccaccactagctgagccaggagctggcaaaggtctgcgttcagaacatcgggagaaaatga

SEQ ID NO: 232829 - DNA, 120 bp, Artificial Sequence
  ENSG00000119689_6 (sequence is synthesized)
acaggatgcggcagcgcattgctcagcgtctgaaggaggcccagaatacatgtgcaatgctgacaacttttaatgagattgacatgagtaacatccaggagatgagggctcggcacaaag

SEQ ID NO: 232830 - DNA, 120 bp, Artificial Sequence
  ENSG00000119689_7 (sequence is synthesized)
aggcttttttgaagaaacataacctcaaactaggcttcatgtcggcatttgtgaaggcctcagcctttgccttgcaggaacagcctgttgtaaatgcagtgattgacgacacaaccaaag

SEQ ID NO: 232831 - DNA, 120 bp, Artificial Sequence
  ENSG00000119689_8 (sequence is synthesized)
aggtggtgtatagggattatattgacatcagtgttgcagtggccaccccacggggtctggtggttccagtcatcaggaatgtggaagctatgaattttgcagatattgaacggaccatca

SEQ ID NO: 232832 - DNA, 120 bp, Artificial Sequence
  ENSG00000119689_9 (sequence is synthesized)
ctgaactgggagagaaggcccgaaagaatgaacttgccattgaagatatggatggcggtaccttcaccattagcaatggaggcgtttttggctcgctctttggaacacccattatcaacc

SEQ ID NO: 232833 - DNA, 120 bp, Artificial Sequence
  ENSG00000119689_10 (sequence is synthesized)
cccctcagtctgccatcctggggatgcatggcatctttgacaggccagtggctataggaggcaaggtagaggtgcggcccatgatgtacgtggcactgacctatgatcaccggctgattg

SEQ ID NO: 232834 - DNA, 120 bp, Artificial Sequence
  ENSG00000119689_11 (sequence is synthesized)
cccagagtcctcctcctggatctttaggaggaacccacacaccctacaagttgatcatgcaggaactgaaaaccagtcttctccctgtcccctcatgggtcccgggttagcctggtgaca

SEQ ID NO: 232835 - DNA, 120 bp, Artificial Sequence
  ENSG00000119689_12 (sequence is synthesized)
ggcagacacatgctgttggcctcaagcaaggaagcagagcactgtgtaaccagcagtcacaggtcttttcttggcgttcctgccaggctctccctctctgcacctgtctcatagcctcga

SEQ ID NO: 232836 - DNA, 120 bp, Artificial Sequence
  ENSG00000119689_13 (sequence is synthesized)
atatcttaattccttaggcttaagagagagagccttaatggatgctcattcatattcctgcctttcttccatcagctctctgcaaagatgattttgcttttccctagtgctggtatacta

SEQ ID NO: 232837 - DNA, 120 bp, Artificial Sequence
  ENSG00000119689_14 (sequence is synthesized)
tagagaaacccctggggaccatgtgattaagttcctatcttttgaaagtttgttctgcagagacttctaggaggatgctgtgcctcccaagctcagagcagcctctgtcctggctgtgca

SEQ ID NO: 232838 - DNA, 120 bp, Artificial Sequence
  ENSG00000119689_15 (sequence is synthesized)
cattctcccttgattccacttgtgtggagggattgaacacaggcaaagaggtgctgctttgcttcttcaatggcaccttcattctccgttgtcattgacttcaagatgcctcttctacct

SEQ ID NO: 232839 - DNA, 120 bp, Artificial Sequence
  ENSG00000119689_16 (sequence is synthesized)
cttccaggaagcacaggccaggggatctgggtgtgtgagtgggaggagagggcagaggtcccctgaggtcatgcattgtaatcatcatagaaggagagcccaggcctgccctcacgctct

SEQ ID NO: 232840 - DNA, 120 bp, Artificial Sequence
  ENSG00000119689_17 (sequence is synthesized)
ccatcataggctgacaccaagaagactcgtcttggcacaatctcacacagctggggctgtagcaaccctttccaacccctttgctggttgctgggcctcattctagcaccttgttcttag

SEQ ID NO: 232841 - DNA, 120 bp, Artificial Sequence
  ENSG00000119689_18 (sequence is synthesized)
agcagattctagcacatcatggcagtgggaccaagcgtggtcccgaggaagggccagagcctggtagagactagggaagggaggtctcctctagactgactcacattgccttgagctttt

SEQ ID NO: 232842 - DNA, 120 bp, Artificial Sequence
  ENSG00000119689_19 (sequence is synthesized)
cagttaagttgctgtaagcacctgggctgaggaggcagtttttgttccttcctgcgttatagcggggccttgtctcttcctctgcaggacacagatctggaggacgtggactggggtagg

SEQ ID NO: 232843 - DNA, 120 bp, Artificial Sequence
  ENSG00000119689_20 (sequence is synthesized)
aaaccaccctgagggtgttagtacctagtggtgaaacggatgaggtcatttctaaggtgtgttgcccgtggatctgggcacaatcattggaattccttggagccactgggattcatggct

SEQ ID NO: 232844 - DNA, 120 bp, Artificial Sequence
  ENSG00000119689_21 (sequence is synthesized)
ttgtatccaactgcatccaggcctgaggctgctgacgtttgacaccagggccagtagagagtgcccttttgtatcttaagccaagaagtgaggcctgggggtgggggaggggggaagggg

SEQ ID NO: 232845 - DNA, 120 bp, Artificial Sequence
  ENSG00000119689_22 (sequence is synthesized)
tgggagccaatactgagtgcctgcagcatctactactctgtcttcactattcagaacttgtaactaaagtatttaaagaaactgattttaaatgcaaattaaagggcagatattctcaaa

SEQ ID NO: 232846 - DNA, 120 bp, Artificial Sequence
  ENSG00000119689_23 (sequence is synthesized)
gctgtcccgatcccgctgtgtgtctcgggcgttcagccgctcgctctccgccttccagaaggggaactgccctctagggagacgttccctgcctgcattaacaacagtgtcttcagtgtt

SEQ ID NO: 232847 - DNA, 120 bp, Artificial Sequence
  ENSG00000119689_24 (sequence is synthesized)
aatgtgctaattccccgatatgtcaaagactcttgtcattccagctgcccttagttgagggaataaggggtaaatttatatatagtgtgaacttcaaatgtcaaattctaaaagaaaagt

SEQ ID NO: 232848 - DNA, 120 bp, Artificial Sequence
  ENSG00000119689_25 (sequence is synthesized)
atctgaaaattcaaaatctgaaatgctccaaaactgaaaatccaaaatctgaaatgcttcaaaactttttgagcactgacagaatgctcaaaggaaatgctcattgtcttttatggggaa

SEQ ID NO: 232849 - DNA, 120 bp, Artificial Sequence
  ENSG00000119689_26 (sequence is synthesized)
ttcagtgttgtttcttttcacatctgttctctcatatctctaggaagggttggtatttcttttgggaagaaatgagaaacgaatttgtactggacctgataggattagagattaataact

SEQ ID NO: 232850 - DNA, 120 bp, Artificial Sequence
  ENSG00000119689_27 (sequence is synthesized)
ttatctgactcttagttaaattttataaccactaaaaagtctatttctttttcctaagcgagaatcgtacccgtagaccaacgagtcacagaagtctatttctttttcactgttacacta

SEQ ID NO: 232851 - DNA, 120 bp, Artificial Sequence
  ENSG00000119689_28 (sequence is synthesized)
ataaggcagatagaccgcatgattgaggttagtcaggcaagaccagaagctcagagtagaaaacatgtatggtagaaggctgggaaataaggtagtcctcctgttgcagaagtttgtctt

SEQ ID NO: 232852 - DNA, 120 bp, Artificial Sequence
  ENSG00000119689_29 (sequence is synthesized)
agcactaaccctggatataatgtccagatgggtgaaaaacagaaacaaacatttcatttaaagttgtgagattattacttggccacttcagtgatttatgagtcatcctggatgaagtgc

SEQ ID NO: 232853 - DNA, 90 bp, Artificial Sequence
  ENSG00000119689_30 (sequence is synthesized)
gcccacctcagcctgccatgcgtgagccactgcgcctggctcctctcacttcttaagtttaagtgctatctaaaattctcccctcccctc

SEQ ID NO: 232854 - DNA, 120 bp, Artificial Sequence
  ENSG00000119689_31 (sequence is synthesized)
gtccgcccgccctcggctcctccgccgtgatgctgtcccgatcccgctgtgtgtctcgggcgttcagccgctcgctctccgccttccagaagcattaacaacagtgtcttcagtgttcgc

SEQ ID NO: 232855 - DNA, 120 bp, Artificial Sequence
  ENSG00000119689_32 (sequence is synthesized)
gttgtccggccctatatccggtgtccgcccgccctcggctcctccgccgtgatgctgtcccgatcccgctgtgtgtctcgggcgttcagccgctcgctctccgccttccagaaggggtct

SEQ ID NO: 232856 - DNA, 120 bp, Artificial Sequence
  ENSG00000119689_33 (sequence is synthesized)
tgcctggggtctccttatgccagggaccaggttaccctaacagcaggaaggttgtgtaagtatcactggggagtacagatatgtggccacgggttatttatttaaagacataaagttcta

SEQ ID NO: 232857 - DNA, 120 bp, Artificial Sequence
  ENSG00000119689_34 (sequence is synthesized)
acttttcccatgtgatgttccttgagcatcagctccgtgtcaggttttggactgggagtgtgcccactctccacaggtgtttggattataatgaaagttaagttggaatcctctttttat

SEQ ID NO: 232858 - DNA, 120 bp, Artificial Sequence
  ENSG00000119689_35 (sequence is synthesized)
gggatatagaagggtgctcctagatattctgtttggatgtaagtgcagctgaaaggctcgaggttacatttattgtggagattgagagcatcctctcagtagcatagttactcattttta

SEQ ID NO: 232859 - DNA, 120 bp, Artificial Sequence
  ENSG00000119698_0 (sequence is synthesized)
cttgctcccgccgcctggcagcctcacgctcggctccagcggccaagagccggagaaagtcctgctggtgggcggccgcggggctgagggcgtccggcatcccggggccgctccggcccg

SEQ ID NO: 232860 - DNA, 120 bp, Artificial Sequence
  ENSG00000119698_1 (sequence is synthesized)
ggcggcgagagtgcccggcggtccatgcatccgccgccgcccgccgccgcgatggatttcagtcagaacagcctgttcggttacatggaggacctgcaggagctcaccatcatcgagagg

SEQ ID NO: 232861 - DNA, 120 bp, Artificial Sequence
  ENSG00000119698_2 (sequence is synthesized)
ccggtccgccggagcctcaagacaccggaagaaatagaaagattgacagtcgatgaagacctcagtgatattgaaagggctgtttatctgctcagtgctggtcaagatgtccaaggaaca

SEQ ID NO: 232862 - DNA, 120 bp, Artificial Sequence
  ENSG00000119698_3 (sequence is synthesized)
agtgtgattgcaaatctcccatttttgatgcgacagaatcccactgagacgcttcggagagtgttgccaaaagtcagagaagccctgcatgttgcaggagtggaaatgcagttaacggct

SEQ ID NO: 232863 - DNA, 120 bp, Artificial Sequence
  ENSG00000119698_4 (sequence is synthesized)
gcgatgtcatttctgaccattctgcaggacgaatcagtgtcaattcatgcatatacccactcattcctccaagtcattctcctgcatctggagcacagggacacaggtgtcagcaatgca

SEQ ID NO: 232864 - DNA, 120 bp, Artificial Sequence
  ENSG00000119698_5 (sequence is synthesized)
tggctggaaactcttctgtctgttatagaagtattgccaaaagaaaccctacggcatgagattttgaatccacttgtttccaaggcacaactttcccaaacagtccagtctcgtttagtt

SEQ ID NO: 232865 - DNA, 120 bp, Artificial Sequence
  ENSG00000119698_6 (sequence is synthesized)
agttgtaaaattttaggaaaattgaccaacaaatttgatgcccacaccattaagcgagaaatacttcctctggtaaaatcactctgtcaagatgtagaatatgaagttcgatcttgtatg

SEQ ID NO: 232866 - DNA, 120 bp, Artificial Sequence
  ENSG00000119698_7 (sequence is synthesized)
tgtcggcaattagaaaatatagcccagggcattgggacagaacttacaaaaagtgtggtgctccctgaattaatagaactttctagggatgaaggcagcagtgtacgacttgcagctttt

SEQ ID NO: 232867 - DNA, 120 bp, Artificial Sequence
  ENSG00000119698_8 (sequence is synthesized)
gaaactttggttaatctgcttgatatatttgatacagatgacagaagtcaaactatacttcccttagtgaaatcattttgtgaaaaatctttcaaagcagatgaatcaattcttatttct

SEQ ID NO: 232868 - DNA, 120 bp, Artificial Sequence
  ENSG00000119698_9 (sequence is synthesized)
ttatctttccatttaggaaaactatgtcatggactatatggaattttcactccagatcagcacttgagatttttggaattttataagaaactttgtacattgggtttgcaacaagaaaat

SEQ ID NO: 232869 - DNA, 120 bp, Artificial Sequence
  ENSG00000119698_10 (sequence is synthesized)
ggacacaatgaaaaccagattccaccccaaatcctagagcaggagaagaaatatatttcagtacggaagaactgtgcttataactttccggccatgattgtttttgttgatcctaaaaac

SEQ ID NO: 232870 - DNA, 120 bp, Artificial Sequence
  ENSG00000119698_11 (sequence is synthesized)
ttccacatggaactctattctacattcttctgcctttgccatgaccctgaagtaccagtcagatacactattgctatttgcttttatgaagtatctaagcttctgaattctggagtatat

SEQ ID NO: 232871 - DNA, 120 bp, Artificial Sequence
  ENSG00000119698_12 (sequence is synthesized)
ttaatacataaagaactaataacattattacaagatgaatcactggaggtactagatgctcttatagatcatcttccagaaatcttggaacttatgtctactggtggagaaagcagtgtt

SEQ ID NO: 232872 - DNA, 120 bp, Artificial Sequence
  ENSG00000119698_13 (sequence is synthesized)
caagaaaataagttatcttctctgcctgacttgattccagcactcacagctgctgaacagcgagctgcagcctctttaaaatggagaactcatgagaagctacttcagaaatatgcctgc

SEQ ID NO: 232873 - DNA, 120 bp, Artificial Sequence
  ENSG00000119698_14 (sequence is synthesized)
ctgccacatgtcatatcaagcgatcagatttattaccgtttcttacaaagaatgttcacaatcatgatgacaaataatgttttacctgtccaaaaggcggcttcacgaactctatgcatt

SEQ ID NO: 232874 - DNA, 120 bp, Artificial Sequence
  ENSG00000119698_15 (sequence is synthesized)
tttctgcgttataatcgtaaacaagaacagagacatgaggtcattcaaaaattaattgaacaattgggccaaggaaaaagttactggaatagacttcgatttttggatacctgtgaattt

SEQ ID NO: 232875 - DNA, 120 bp, Artificial Sequence
  ENSG00000119698_16 (sequence is synthesized)
aaaatcatttttctgtaaatatttctttctacctgctattgaactgacacatgatccagtagcaaatgtgagaatgaaactttgctacctgttgcccaaagtgaaatctactctgaagat

SEQ ID NO: 232876 - DNA, 120 bp, Artificial Sequence
  ENSG00000119698_17 (sequence is synthesized)
tcctgctgataagcatctacttcagcagttagaaatgtgtgtgaggaaactcctgtgtcaagaaaaagataaagatgttctggctattgtaaaaagaactgtattagagttggacagaat

SEQ ID NO: 232877 - DNA, 120 bp, Artificial Sequence
  ENSG00000119698_18 (sequence is synthesized)
ggaaatgtctatggatgcttttcagaaaaagttttatgagaaagatttgttggatcaagagaaagaaagagaagaactacttcttttggaaatggaacaattagagaaagaaaagcaaca

SEQ ID NO: 232878 - DNA, 120 bp, Artificial Sequence
  ENSG00000119698_19 (sequence is synthesized)
gaatgatggaaggcccatgagtgataaaatgtttgaaaagaaacgtagagacactaagacaccaacgcaaagtctgcccaagaacatccccatttctgttcctggaccctcttctgtcac

SEQ ID NO: 232879 - DNA, 120 bp, Artificial Sequence
  ENSG00000119698_20 (sequence is synthesized)
cccatcgacaagtaaagaaatcaagaaatccaaactgattcgaagccagtcttttaataatcaagcttttcatgcaaaatatggcaacttagagaaatgtgctagtaaaagttctacaac

SEQ ID NO: 232880 - DNA, 120 bp, Artificial Sequence
  ENSG00000119698_21 (sequence is synthesized)
aggatatacaacttctgtctcagggttaggaaagacttctgtgctttcactagctgatgattcattccggactcgtaatgccagtagcgttccatcttccttttctcctaatactccctt

SEQ ID NO: 232881 - DNA, 120 bp, Artificial Sequence
  ENSG00000119698_22 (sequence is synthesized)
accgagtacttcccgtgggacaggtaactcagttgaccccaagagcagtggaagtaaagatacacaaccacggaaggctaccttaaaatccagaaaatccaatccttaaatcaactgctt

SEQ ID NO: 232882 - DNA, 120 bp, Artificial Sequence
  ENSG00000119698_23 (sequence is synthesized)
gatgaaggaggcaaaacaaaggcagcaggagataatgtgattggtacacaaaagctaaagcagtggctggggctttgtttttaaattttgggtttttttttttgttgttgttaatgagca

SEQ ID NO: 232883 - DNA, 120 bp, Artificial Sequence
  ENSG00000119698_24 (sequence is synthesized)
gaaagagagacataatgacagctgatgttaaacttttcatatttcaaattagattccctaggaggtataatatatatttcttgagtaataatgtggttacggaattccaatgttatagtg

SEQ ID NO: 232884 - DNA, 120 bp, Artificial Sequence
  ENSG00000119698_25 (sequence is synthesized)
aagtgtaatgaaaaacatctctaggaatgtgctttaaccactgctgcaaaagagacaagtctgcatttatttgtgcaggaaaccagccatttaattgttctagagttttagcatttaaaa

SEQ ID NO: 232885 - DNA, 120 bp, Artificial Sequence
  ENSG00000119698_26 (sequence is synthesized)
atcgtatgaaagtctacatcagctgaattgtcctagcttgataagcacttggagggggacttggaaggtgagaaagatactgcattttctcatgagtctccaagcccacttgaaaagtca

SEQ ID NO: 232886 - DNA, 120 bp, Artificial Sequence
  ENSG00000119698_27 (sequence is synthesized)
cactgaaaggatgcaaatagccgtctgcgattttggcggccctccggattgtggtgacaatatgttgtacccggacattcccaaatttaaatttggcagtgaaaattccacaaagatttc

SEQ ID NO: 232887 - DNA, 120 bp, Artificial Sequence
  ENSG00000119698_28 (sequence is synthesized)
attccacaaagatttctggtaactttgagctataaataccttaaaaataatagattgatgattttctttatttcctagagaatttattttataaatactttgtttacattttagattgta

SEQ ID NO: 232888 - DNA, 120 bp, Artificial Sequence
  ENSG00000119698_29 (sequence is synthesized)
atgatgaatctagtctgaatcagctgttattccaagctatcatgcttaagctatgtcaacagcatttatttgtactaatgctaatatttccatcaaaatttgcctgtggaatatatacag

SEQ ID NO: 232889 - DNA, 120 bp, Artificial Sequence
  ENSG00000119698_30 (sequence is synthesized)
ttcttaattttaaactgtcagttcttgagatataccgtgtgaagctattgtcagcttctctatttcaaaatgcaatcagcatataactatattgatattagaagatatttgttttttaaa

SEQ ID NO: 232890 - DNA, 120 bp, Artificial Sequence
  ENSG00000119698_31 (sequence is synthesized)
atatattgatgtatgataaagatgatctaatttgtgaatgcatatgtatgtgtggttactttttataatgtgaaataatgaataatgaatttactcaaaataaaacataggttaatgaga

SEQ ID NO: 232891 - DNA, 120 bp, Artificial Sequence
  ENSG00000119698_32 (sequence is synthesized)
agtgccattctgcaactgctgcagccagctgtctgtctgtaattatgaccttacggaagtccggcccagcagaaggaggacttactgctcattaacatcaagggtggccatcactattaa

SEQ ID NO: 232892 - DNA, 120 bp, Artificial Sequence
  ENSG00000119698_33 (sequence is synthesized)
gctccctgggtgccactgcatttatgcccattacctctaataatcaccggaattttgcaaggttcacgttggctatgttggggacaactttagaagaggaaaggcagaagcagaggcacc

SEQ ID NO: 232893 - DNA, 120 bp, Artificial Sequence
  ENSG00000119698_34 (sequence is synthesized)
gaggatgcacacttatttatccagagagtatggatctcacatatgtttgtccagagggtgtgactctgtggaggagaacacttactggaagccctgcatgttgcaggagtggaaatgcag

SEQ ID NO: 232894 - DNA, 120 bp, Artificial Sequence
  ENSG00000119698_35 (sequence is synthesized)
gaagccacgatgtgattttcaagctgcagtccaggagctagaaggataaaaacagaaaaatacagccccctccccaaactccccaaaccacccaattagagacctccgtgattgatgtcg

SEQ ID NO: 232895 - DNA, 120 bp, Artificial Sequence
  ENSG00000119698_36 (sequence is synthesized)
agcgccagcaaacctagtttacggaccggacccctttcccctggccattgcttaattagctgccttagcgcctctcactcccacctgccgcaatatctcaaatctctggtttttttccag

SEQ ID NO: 232896 - DNA, 120 bp, Artificial Sequence
  ENSG00000119698_37 (sequence is synthesized)
ccccggagtttatttccttccctcccccactccagatcttgtccttttcatgcctactcggctgcagtcttcatccatctcccttttagcatttcttggggtggaaaatgctggagaaat

SEQ ID NO: 232897 - DNA, 120 bp, Artificial Sequence
  ENSG00000119698_38 (sequence is synthesized)
ttcggagagtgttgccaaaagtcagagtccatgaggatgcacacttatttatccagagagtatggatctcacatatgtttgtccagagggtgtgactctgtggaggagaacacttactgt

SEQ ID NO: 232898 - DNA, 120 bp, Artificial Sequence
  ENSG00000119698_39 (sequence is synthesized)
ggacagtcccagatgttgaagtcagcacaacaagagaaaaacccaaatcctgataagacttgaggatttttcgaaaattaaatgcaaaatagttggggcaaatgttgctgcgggagtcaa

SEQ ID NO: 232899 - DNA, 120 bp, Artificial Sequence
  ENSG00000119698_40 (sequence is synthesized)
gactaagtaatacagtaagaagatatgaagttggagagcttctcatgttcttcctttgtataaagtttgcatacgtacaaaacccaggactttaatgactttaagagggggcagaattgc

SEQ ID NO: 232900 - DNA, 120 bp, Artificial Sequence
  ENSG00000119698_41 (sequence is synthesized)
atctcttggaagttaacagactcatgtgaactggaatgtacgttgtggccctcacaattgattttaatatttatttgcaaagtcctttctgtttctaaataaaagctgtgccttctgaaa

SEQ ID NO: 232901 - DNA, 120 bp, Artificial Sequence
  ENSG00000119699_0 (sequence is synthesized)
tgcttgccctccacctggcctgctgggagtcagagcccagcaaaacctgtttagacacatggacaagaatcccagcgctacaaggcacacagtccgcttcttcgtcctcagggttgccag

SEQ ID NO: 232902 - DNA, 120 bp, Artificial Sequence
  ENSG00000119699_1 (sequence is synthesized)
cgcttcctggaagtcctgaagctctcgcagtgcagtgagttcatgcaccttcttgccaagcctcagtctttgggatctggggaggccgcctggttttcctccctccttctgcacgtctgc

SEQ ID NO: 232903 - DNA, 120 bp, Artificial Sequence
  ENSG00000119699_2 (sequence is synthesized)
tggggtctcttcctctccaggccttgccgtccccctggcctctcttcccagctcacacatgaagatgcacttgcaaagggctctggtggtcctggccctgctgaactttgccacggtcag

SEQ ID NO: 232904 - DNA, 120 bp, Artificial Sequence
  ENSG00000119699_3 (sequence is synthesized)
cctctctctgtccacttgcaccaccttggacttcggccacatcaagaagaagagggtggaagccattaggggacagatcttgagcaagctcaggctcaccagcccccctgagccaacggt

SEQ ID NO: 232905 - DNA, 120 bp, Artificial Sequence
  ENSG00000119699_4 (sequence is synthesized)
gatgacccacgtcccctatcaggtcctggccctttacaacagcacccgggagctgctggaggagatgcatggggagagggaggaaggctgcacccaggaaaacaccgagtcggaatacta

SEQ ID NO: 232906 - DNA, 120 bp, Artificial Sequence
  ENSG00000119699_5 (sequence is synthesized)
tgccaaagaaatccataaattcgacatgatccaggggctggcggagcacaacgaactggctgtctgccctaaaggaattacctccaaggttttccgcttcaatgtgtcctcagtggagaa

SEQ ID NO: 232907 - DNA, 120 bp, Artificial Sequence
  ENSG00000119699_6 (sequence is synthesized)
aaatagaaccaacctattccgagcagaattccgggtcttgcgggtgcccaaccccagctctaagcggaatgagcagaggatcgagctcttccagatccttcggccagatgagcacattgc

SEQ ID NO: 232908 - DNA, 120 bp, Artificial Sequence
  ENSG00000119699_7 (sequence is synthesized)
caaacagcgctatatcggtggcaagaatctgcccacacggggcactgccgagtggctgtcctttgatgtcactgacactgtgcgtgagtggctgttgagaagagagtccaacttaggtct

SEQ ID NO: 232909 - DNA, 120 bp, Artificial Sequence
  ENSG00000119699_8 (sequence is synthesized)
agaaatcagcattcactgtccatgtcacacctttcagcccaatggagatatcctggaaaacattcacgaggtgatggaaatcaaattcaaaggcgtggacaatgaggatgaccatggccg

SEQ ID NO: 232910 - DNA, 120 bp, Artificial Sequence
  ENSG00000119699_9 (sequence is synthesized)
tggagatctggggcgcctcaagaagcagaaggatcaccacaaccctcatctaatcctcatgatgattcccccacaccggctcgacaacccgggccaggggggtcagaggaagaagcgggc

SEQ ID NO: 232911 - DNA, 120 bp, Artificial Sequence
  ENSG00000119699_10 (sequence is synthesized)
tggacaccaattactgcttccgcaacttggaggagaactgctgtgtgcgccccctctacattgacttccgacaggatctgggctggaagtgggtccatgaacctaagggctactatgcca

SEQ ID NO: 232912 - DNA, 120 bp, Artificial Sequence
  ENSG00000119699_11 (sequence is synthesized)
acttctgctcaggcccttgcccatacctccgcagtgcagacacaacccacagcacggtgctgggactgtacaacactctgaaccctgaagcatctgcctcgccttgctgcgtgccccagg

SEQ ID NO: 232913 - DNA, 120 bp, Artificial Sequence
  ENSG00000119699_12 (sequence is synthesized)
acctggagcccctgaccatcctgtactatgttgggaggacccccaaagtggagcagctctccaacatggtggtgaagtcttgtaaatgtagctgagaccccacgtgcgacagagagaggg

SEQ ID NO: 232914 - DNA, 120 bp, Artificial Sequence
  ENSG00000119699_13 (sequence is synthesized)
gagagagaaccaccactgcctgactgcccgctcctcgggaaacacacaagcaacaaacctcactgagaggcctggagcccacaaccttcggctccgggcaaatggctgagatggaggttt

SEQ ID NO: 232915 - DNA, 120 bp, Artificial Sequence
  ENSG00000119699_14 (sequence is synthesized)
ccttttggaacatttctttcttgctggctctgagaatcacggtggtaaagaaagtgtgggtttggttagaggaaggctgaactcttcagaacacacagactttctgtgacgcagacagag

SEQ ID NO: 232916 - DNA, 120 bp, Artificial Sequence
  ENSG00000119699_15 (sequence is synthesized)
gggatggggatagaggaaagggatggtaagttgagatgttgtgtggcaatgggatttgggctaccctaaagggagaaggaagggcagagaatggctgggtcagggccagactggaagaca

SEQ ID NO: 232917 - DNA, 120 bp, Artificial Sequence
  ENSG00000119699_16 (sequence is synthesized)
cttcagatctgaggttggatttgctcattgctgtaccacatctgctctagggaatctggattatgttatacaaggcaagcattttttttttttttttaaagacaggttacgaagacaaag

SEQ ID NO: 232918 - DNA, 120 bp, Artificial Sequence
  ENSG00000119699_17 (sequence is synthesized)
tcccagaattgtatctcatactgtctgggattaagggcaaatctattacttttgcaaactgtcctctacatcaattaacatcgtgggtcactacagggagaaaatccaggtcatgcagtt

SEQ ID NO: 232919 - DNA, 120 bp, Artificial Sequence
  ENSG00000119699_18 (sequence is synthesized)
cctggcccatcaactgtattgggccttttggatatgctgaacgcagaagaaagggtggaaatcaaccctctcctgtctgccctctgggtccctcctctcacctctccctcgatcatattt

SEQ ID NO: 232920 - DNA, 120 bp, Artificial Sequence
  ENSG00000119699_19 (sequence is synthesized)
ccccttggacacttggttagacgccttccaggtcaggatgcacatttctggattgtggttccatgcagccttggggcattatgggttcttcccccacttcccctccaagaccctgtgttc

SEQ ID NO: 232921 - DNA, 120 bp, Artificial Sequence
  ENSG00000119699_20 (sequence is synthesized)
atttggtgttcctggaagcaggtgctacaacatgtgaggcattcggggaagctgcacatgtgccacacagtgacttggccccagacgcatagactgaggtataaagacaagtatgaatat

SEQ ID NO: 232922 - DNA, 120 bp, Artificial Sequence
  ENSG00000119699_21 (sequence is synthesized)
ctagaggttcgggccgagaagaggagcgaaagcacagagccgacttcccctcacccatctgggaaatgggctcgggccaactgctgacttcgcgctcgctggcgcagctccctgcggaga

SEQ ID NO: 232923 - DNA, 120 bp, Artificial Sequence
  ENSG00000119699_22 (sequence is synthesized)
cctcggcggggagggaggctgaacatctggatgacatttctgcgagagcggctccggagcggcggtcggggagggagagagaagcaggggacagaagcaatggccgaggcagaagacaag

SEQ ID NO: 232924 - DNA, 120 bp, Artificial Sequence
  ENSG00000119699_23 (sequence is synthesized)
ggcagcgtgaacaaagtcatttagaaagcccccgaggaagtgtaaacaaaagagaaagcatgaatggagtgcctgagagacaagtgtgtcctgtactgcccccacctttagctgggccag

SEQ ID NO: 232925 - DNA, 120 bp, Artificial Sequence
  ENSG00000119699_24 (sequence is synthesized)
caactgcccggccctgcttctccccacctactcactggtgatctttttttttttacttttttttcccttttcttttccattctcttttcttattttctttcaaggcaaggcaaggatttt

SEQ ID NO: 232926 - DNA, 120 bp, Artificial Sequence
  ENSG00000119699_25 (sequence is synthesized)
gattttgggacccagccatggtccttctgcttcttctttaaaatacccactttctccccatcgccaagcggcgtttggcaatatcagatatccactctatttatttttacctaaggaaaa

SEQ ID NO: 232927 - DNA, 120 bp, Artificial Sequence
  ENSG00000119699_26 (sequence is synthesized)
catgtgatcccacaactactaggcgaatgggctggagttgcccttcacgcaccagaatgtcaggcaccaaaccctggcacctccaggcttcatcatgctcactgtctccgtgctcaagtc

SEQ ID NO: 232928 - DNA, 120 bp, Artificial Sequence
  ENSG00000119699_27 (sequence is synthesized)
atctggaccctcagccatagttctctatcatctcctctgtgctgttttctaagttcacaactgtcttcccaagctgttcatcttggtgagcaatccacattccaacttcccatcatggtg

SEQ ID NO: 232929 - DNA, 120 bp, Artificial Sequence
  ENSG00000119699_28 (sequence is synthesized)
aacaaggattcccaaagaagaaatgtccaagtaatttttacctcgttgtgtccttgttccttaggaaaaatatggcccagtgtaaccgtgatcttcatcttatctcttctagaatctgcc

SEQ ID NO: 232930 - DNA, 120 bp, Artificial Sequence
  ENSG00000119699_29 (sequence is synthesized)
actttgtctaggcccacagtcatggccctggtagaaatgcttgcatcttccactgagacggattctgcttcctgtttgcaagtgaccttgcctctagcattggttcctgacttgaatctt

SEQ ID NO: 232931 - DNA, 120 bp, Artificial Sequence
  ENSG00000119699_30 (sequence is synthesized)
tttgccagcattacatcctgtggctttttgaatttgtggccttttgaatcacagtctctgtgctcggagactctttagttactccctgtccgtagtctcttccagtccctctgcctcttg

SEQ ID NO: 232932 - DNA, 120 bp, Artificial Sequence
  ENSG00000119699_31 (sequence is synthesized)
ccctgatccttctgcagtagattggctcaacgatcccctctcccaaaaaccatgtagatggcatgagtttttgctttccttactgtatctgtgtacttttgcctccaagtaggtaggtga

SEQ ID NO: 232933 - DNA, 120 bp, Artificial Sequence
  ENSG00000119699_32 (sequence is synthesized)
caattttctcttaataccatcctttcaaagggaatgattattccacttctgtttcatgatggccactagtgtatgcccccatttggtgattcataatacaacaggaatacctggaatgtg

SEQ ID NO: 232934 - DNA, 120 bp, Artificial Sequence
  ENSG00000119699_33 (sequence is synthesized)
gcaacgtgcgcttgaaggtccactctgagctctggaggcactttctgtctcctgtgaccctcaatagaactcagttcctatgagtccctataggagcagaggccctggctcacccttgca

SEQ ID NO: 232935 - DNA, 120 bp, Artificial Sequence
  ENSG00000119699_34 (sequence is synthesized)
acatgggaaccaacatctactgcctgcctactgcccaatggctaggtcaggccccagagccaagccacactcaacagagggtccctgatgctattcacaaacatctccaggaagaagact

SEQ ID NO: 232936 - DNA, 120 bp, Artificial Sequence
  ENSG00000119699_35 (sequence is synthesized)
gaaaatctctcacagagattttctctgtgaaatctctttctgttttcctgggagtcccactgtttttccataggctaactctggaaggagctggctgaagtaaatgaggaaaactctgtg

SEQ ID NO: 232937 - DNA, 120 bp, Artificial Sequence
  ENSG00000119699_36 (sequence is synthesized)
agaataagggatgtgctaagcaaaggcaacagggaggcccaggccctcaagtggaaataagcttgatttgttctagcagcagcagcaaacagatcggtgtggctggagcatgagtccaac

SEQ ID NO: 232938 - DNA, 120 bp, Artificial Sequence
  ENSG00000119699_37 (sequence is synthesized)
caaggcaatgttttgtgagaacatttctcaccgaagtgatcagttccagctaggaagagcaatgtgctgggactgtacaacactctgaaccctgaagcatctgcctcgccttgctgcgtg

SEQ ID NO: 232939 - DNA, 120 bp, Artificial Sequence
  ENSG00000119703_0 (sequence is synthesized)
agaagccagctgagagcgcctgcgcggctgtcggttgatggggaggtcaggtctgggaaactaggccctggggttttccctgagcaggagcggtgcccgagggcctcaggcgtcagtcca

SEQ ID NO: 232940 - DNA, 120 bp, Artificial Sequence
  ENSG00000119703_1 (sequence is synthesized)
ggccctgaatggctggtctccagcggttggcgtcacatctgcctgtgggcgttatgctcccacataatacaacggaagctccagggccccactcagccaagcaagactcttacgaacaag

SEQ ID NO: 232941 - DNA, 120 bp, Artificial Sequence
  ENSG00000119703_2 (sequence is synthesized)
gtgactcttcccagcagtccttgaaggggcacctgaggaacaatttccagaagcagcttttgagcaacaaagagttgattctggataaagtctatactcaccccaaatggaacacccaaa

SEQ ID NO: 232942 - DNA, 120 bp, Artificial Sequence
  ENSG00000119703_3 (sequence is synthesized)
caaaagcccggagctactcctatccccactgtactggaatcagccagcaagatccagaaagtgattcccagggccaaggaaatggtttgttttactcgtcaggccctcaatcctggtatc

SEQ ID NO: 232943 - DNA, 120 bp, Artificial Sequence
  ENSG00000119703_4 (sequence is synthesized)
ccaaagccaataaccaggactttatcccctttacaaagaaacgagttggagtggaccgggcgttcccattgaaacccatggtccacaggaagtcgtgcagtacaggtgaggctggcactg

SEQ ID NO: 232944 - DNA, 120 bp, Artificial Sequence
  ENSG00000119703_5 (sequence is synthesized)
atggggaccataatgtctacccaaggccccctgagccgagagagttttcatctaggaactttggtgtgaggaaccagggcaacttttctgtggttggtactgttcttgctgccacgcagg

SEQ ID NO: 232945 - DNA, 120 bp, Artificial Sequence
  ENSG00000119703_6 (sequence is synthesized)
cggagaaggccgtggcaaactttgacaggacggagtgggtgcagatccgaagactagaagctgcaggggagagcttagaggaggaaatccgaagaaagcagattctcctgaggggaaagc

SEQ ID NO: 232946 - DNA, 120 bp, Artificial Sequence
  ENSG00000119703_7 (sequence is synthesized)
tgaagaagacagaggaggaactcagaaggatccagacgcaaaaggaacaggccaaggaaaatgaaaacggagagctacagaaaattatactccccaggagcagagttaaaggtaataaaa

SEQ ID NO: 232947 - DNA, 120 bp, Artificial Sequence
  ENSG00000119703_8 (sequence is synthesized)
gcaacaccatgtacaaacctatcttctccccagaatttgagtttgaggaagaatttagtagagacaggagagaggatgaaacttggggacggtctcaacaaaattcaggtccattccagt

SEQ ID NO: 232948 - DNA, 120 bp, Artificial Sequence
  ENSG00000119703_9 (sequence is synthesized)
tctctgattatagaatccagaggctcaaaagggaaaggctggtagcaagcaataataaaattcgagacccagtctcagagccatcggtggagaaattctccccgccttcagaaacaccag

SEQ ID NO: 232949 - DNA, 120 bp, Artificial Sequence
  ENSG00000119703_10 (sequence is synthesized)
tcggtgctttgcagggatccgccagaaattccagcctgtccatggcaccagactcctcaggttccagcggctccattgaagagccacagctgggtgagtgcagccactgtgggcgcaaat

SEQ ID NO: 232950 - DNA, 120 bp, Artificial Sequence
  ENSG00000119703_11 (sequence is synthesized)
tcctctcgttcaggctggagagacactccaacatctgcagcaggatgcggggttccaagaggaaagtgtttgactcctccagggcccgggctaagggcacagaactagagcagtacttga

SEQ ID NO: 232951 - DNA, 120 bp, Artificial Sequence
  ENSG00000119703_12 (sequence is synthesized)
actggaaggggccagcttcagccaaggctgaacctcctcagaagagcaactggagatagaagcatgaatcttttatccatacgttccgccaggctcgagaggtccagcaggtaactgcca

SEQ ID NO: 232952 - DNA, 120 bp, Artificial Sequence
  ENSG00000119703_13 (sequence is synthesized)
aaggtggaaactgttcacacttgcctcccatcctgcctgcagaaaacccagactgcattcagtgtcctcagtgtagccaccactttgctcccaaggtggctgagcaacacattcccaagt

SEQ ID NO: 232953 - DNA, 120 bp, Artificial Sequence
  ENSG00000119703_14 (sequence is synthesized)
gtaagaccatcaagaactgtcttccacctctaaggaagcattatagttgagcagacaacaatggaaacttttggatagttcagaaagctctgcttctcttcagcagtaaatgggagtaga

SEQ ID NO: 232954 - DNA, 120 bp, Artificial Sequence
  ENSG00000119703_15 (sequence is synthesized)
atttgatgcaaagcagaaagaaatcaaacagctcccagatctgcctgcagagctaaaatctgtgaggagagagccactgctaagcagcaggaggcagaaggaagccccagcttcccacta

SEQ ID NO: 232955 - DNA, 120 bp, Artificial Sequence
  ENSG00000119703_16 (sequence is synthesized)
cattaaagctcttttcttgcatgcctgacttgtggtttgtgctagttaagtgcctgcatctggttctgccttcttgtcactgcatgtatgttcagagttcctgttaactcttgcttttgt

SEQ ID NO: 232956 - DNA, 120 bp, Artificial Sequence
  ENSG00000119703_17 (sequence is synthesized)
agaagctggagttattaggatgtgttggtgtcagaggggcatgatcacccagatagtaactcttataaaagataatacaattttgctataaggcattattaatggaaatctatccttggt

SEQ ID NO: 232957 - DNA, 120 bp, Artificial Sequence
  ENSG00000119703_18 (sequence is synthesized)
ctccctggtgcataagcctggccaaaacccaatacaagtatgtaaggttaaggcaccaatgtctcctaaaccttccctatggtgtactgtgtaataaaggaaagatctttatgtacttta

SEQ ID NO: 232958 - DNA, 120 bp, Artificial Sequence
  ENSG00000119703_19 (sequence is synthesized)
cagggtagggatgggtgttgggggggaaacacattatacttctctctacttgttcttttctaatgggtttcatatgttaagaaagaaacctccattttagctgttagtagcactctactt

SEQ ID NO: 232959 - DNA, 120 bp, Artificial Sequence
  ENSG00000119703_20 (sequence is synthesized)
tcaaatcggtttggctaaatgactgtttagaggcagcaaaatctaccatcaaagcaagctgagacaggctggtcatggtggctcattcctataattccagcactttgggaggctgaagtg

SEQ ID NO: 232960 - DNA, 120 bp, Artificial Sequence
  ENSG00000119703_21 (sequence is synthesized)
gattgcttgaggccaggagttcaagagcggcctcgacaacaaagcaagaccccatctcaaaacaaaacaaagctgggacactgcacagtgtcacatgcccttggcaattatagcatagtc

SEQ ID NO: 232961 - DNA, 120 bp, Artificial Sequence
  ENSG00000119703_22 (sequence is synthesized)
agtcaacttctatttcagagagtaaactttgaagggaaagggatcaaatctttttaattttctctgtgtagaatattgcctagcacaagttagaccttcaattagtgaggtctggagatt

SEQ ID NO: 232962 - DNA, 120 bp, Artificial Sequence
  ENSG00000119703_23 (sequence is synthesized)
taaaattaaacaagaagatgagtgagtcctacactagtgaaatcagagaactgataagttaatgtctgcgagagtattatcagttcagataggagtgaagttagcacaacagatagaaat

SEQ ID NO: 232963 - DNA, 120 bp, Artificial Sequence
  ENSG00000119703_24 (sequence is synthesized)
cttaggattactgttctgtattactcaaattgttagtttaaaatactggagaaaaactgctcaatttgagctagtcaacagggctagacagacaacaaaatcctattttactaagtaaca

SEQ ID NO: 232964 - DNA, 90 bp, Artificial Sequence
  ENSG00000119703_25 (sequence is synthesized)
gggctagacagacaacaaaatcctattttactaagtaacaaatggccactcactcttgctccatttccactgcactccagcctggtgacc

SEQ ID NO: 232965 - DNA, 120 bp, Artificial Sequence
  ENSG00000119703_26 (sequence is synthesized)
ttgaaatgtgagttaaggctttagcggtgaagctgcaggacacaggctgggaaaaaatcctatatatttaaataggagcacacatttctttgcactctttttaattgttccaaaggaaag

SEQ ID NO: 232966 - DNA, 120 bp, Artificial Sequence
  ENSG00000119703_27 (sequence is synthesized)
gaggtatcacataataaagctttatggttagccccttaaggaaacctcacacagagataatggatatttaacctaataggtacattccctaggcaagttcaatgaaatgtacactttaag

SEQ ID NO: 232967 - DNA, 120 bp, Artificial Sequence
  ENSG00000119703_28 (sequence is synthesized)
tgggaatgtaaaccagtacattgcaatagatggcaagagtaagctgtggccaaggtcacaaaatggcaacatgtggattgctttgctccacagatgttttatttcgctggcctagcattc

SEQ ID NO: 232968 - DNA, 120 bp, Artificial Sequence
  ENSG00000119703_29 (sequence is synthesized)
ataatatgatctgacatttaaaaactgggatatggaacatctcttgaaaaactggaagttctggaaacactgggccagcaacccgcatggcacaaattgggtggggtttagaatcagatg

SEQ ID NO: 232969 - DNA, 120 bp, Artificial Sequence
  ENSG00000119703_30 (sequence is synthesized)
ctcctccagatgggaatggtagcaccagaccactgcagtctcacttggcctgcttcacttctttaccttatctgcctggtaccacaggcacttggatttgggatcgctggatgttagtaa

SEQ ID NO: 232970 - DNA, 120 bp, Artificial Sequence
  ENSG00000119703_31 (sequence is synthesized)
ggtcatagatccgggccctccagagagaacaaattgttgttatatgtggggagtgctttctaaaaaggaagcagttgtttgctctcattttgctaaagaaataaaacaatagtcaatgcc

SEQ ID NO: 232971 - DNA, 120 bp, Artificial Sequence
  ENSG00000119703_32 (sequence is synthesized)
ggttgatggggaggtcaggtctgggaaactaggccctggggttttccctgagcaggagcggtgcccgagggcctcaggtacgcagaagggcggggagacatgggatcagcacctccacct

SEQ ID NO: 232972 - DNA, 120 bp, Artificial Sequence
  ENSG00000119703_33 (sequence is synthesized)
cctaagggaccgaagggcaggagagcgagaggacttgtccccagaggtggagtccgaagtgggggcgccccagttgacccttcgggacaaaacgtgacttcagccttaaggatctaaaac

SEQ ID NO: 232973 - DNA, 120 bp, Artificial Sequence
  ENSG00000119703_34 (sequence is synthesized)
aaaagctttgggttggggatctgtccaggaactcggctgggcctccacaaacctagccctcatcgcatctcagtcaacaagcgcaaccctcttctcattttctcatgaggagaaaggcat

SEQ ID NO: 232974 - DNA, 120 bp, Artificial Sequence
  ENSG00000119703_35 (sequence is synthesized)
agacgaagaagtacatggggatacattcaatcattcaattaaatactgactgacagctactgtgtgccaggcacctgttctaggtgaccaggcaaacatcagtgaacaaaacaggatccc

SEQ ID NO: 232975 - DNA, 120 bp, Artificial Sequence
  ENSG00000119705_0 (sequence is synthesized)
ggggccgcgacctcggctcgagaaggtgctttagtctgaagatggcggcctcagcagcgagaggtgctgcggcgctgcgtagaagtatcaatcagccggttgcttttgtgagaagaattc

SEQ ID NO: 232976 - DNA, 120 bp, Artificial Sequence
  ENSG00000119705_1 (sequence is synthesized)
gccatgtcagaaggtgcattttaccttttgacaaggagactggctttcacagaggtttgggttgggttcagttttcttcagaagaaggacttcggaatgcactacaacaggaaaatcata

SEQ ID NO: 232977 - DNA, 120 bp, Artificial Sequence
  ENSG00000119705_2 (sequence is synthesized)
ttatagatggagtaaaggtccaggttcacactagaaggccaaaacttccgcaaacatctgatgatgaaaagaaagatttttgagactgcagcctattaataaagttaacataactgagaa

SEQ ID NO: 232978 - DNA, 120 bp, Artificial Sequence
  ENSG00000119705_3 (sequence is synthesized)
cttcactccgcccaaataagccactaccgtcaccaaccccatctcgttcgcccgagccgcggacctgagggagcgctgtccgctccccgcaagatgctcacgcgaaaaacccactcttca

SEQ ID NO: 232979 - DNA, 120 bp, Artificial Sequence
  ENSG00000119705_4 (sequence is synthesized)
gtgtctgagaccactccgcagctttcggcctcggtgagcgggtgaactaaacccgggaaaccgctgaaagaccccagcttcgactaggcctagtcgtagcggcggccagcgggagggcgt

SEQ ID NO: 232980 - DNA, 120 bp, Artificial Sequence
  ENSG00000119705_5 (sequence is synthesized)
agccgtagtcttggcccacgtcattctgtgccccgggtcaggtcaccgcccggagggtatgggaagagaaatgaagaagactggtactcccagacccttccgtatcgaggaccccaatca

SEQ ID NO: 232981 - DNA, 120 bp, Artificial Sequence
  ENSG00000119705_6 (sequence is synthesized)
aaatgtaaagtatgttaattttcgtttccctgaggataggtattcacatcaacacacacaatatgctgttcctaaacttgtaccttggattggttgaagagcctttggtcatactgaact

SEQ ID NO: 232982 - DNA, 120 bp, Artificial Sequence
  ENSG00000119705_7 (sequence is synthesized)
tcattggaagtccgaggattaggaacaccgagagcaataacttcactgatatcccgattttcatttctctgaagtttcgacctattttgaaatacgacatcactaactgaaaactcttta

SEQ ID NO: 232983 - DNA, 120 bp, Artificial Sequence
  ENSG00000119705_8 (sequence is synthesized)
tagacaagctgaatatgttcaatagaaatacaaccaatctcagaaacaaaggatgtgaatatgtcacattcacatcttgtgaacatatattccttgatgatacataatcaagctggcagc

SEQ ID NO: 232984 - DNA, 120 bp, Artificial Sequence
  ENSG00000119705_9 (sequence is synthesized)
ccttataaagcatttcagattagagggagagttttacaattaggacgtcctgttagctcaaaagaacatctaacagattcgttgacatggaattctttaatataagcaatcaccttacaa

SEQ ID NO: 232985 - DNA, 120 bp, Artificial Sequence
  ENSG00000119705_10 (sequence is synthesized)
taaagtgcttatttttttaaggtccaggttcacactagaaggccaaaacttccgcaaacatctgatgatgaaaagaaagatttttgagactgcagcctattaataaagttaacataactg

SEQ ID NO: 232986 - DNA, 120 bp, Artificial Sequence
  ENSG00000119705_11 (sequence is synthesized)
ttatagatggagtaaaggtaaatttatttctatgccagatacatacatgatatacatgtaggtactatttaattatgtatcaattaaatagatcataaatgtggaatgatggggacttgg

SEQ ID NO: 232987 - DNA, 78 bp, Artificial Sequence
  ENSG00000119705_12 (sequence is synthesized)
agatcataaatgtggaatgatggggacttggagagatttgtaactgaagctgccttaatgcttgttaagaatggtggg

SEQ ID NO: 232988 - DNA, 120 bp, Artificial Sequence
  ENSG00000119705_13 (sequence is synthesized)
atccagttacaaaataccaatcaactcaaatcagaccagtcggcaacctctttgtttagggaatccttgtttcgggacacccagtggacagcgaaaggagagagaccaccacaggcaaac

SEQ ID NO: 232989 - DNA, 120 bp, Artificial Sequence
  ENSG00000119705_14 (sequence is synthesized)
aatcagccggttgcttttgtgagaagaattccttggactgcggcgtcgagtcagctgaaagaacactttgcacagttcggccatgtcagaaggtgcattttaccttttgaatccttgttt

SEQ ID NO: 232990 - DNA, 120 bp, Artificial Sequence
  ENSG00000119705_15 (sequence is synthesized)
ggcggcctcagcagcgagaggtgctgcggcgctgcgtagaagtatcaatcagccggttgcttttgtgagaagaattccttggactgcggcgtcgaggatcatagtccacatagcacagta

SEQ ID NO: 232991 - DNA, 120 bp, Artificial Sequence
  ENSG00000119705_16 (sequence is synthesized)
gtccatctcaccaccaagtctggtacattatggctttatagtcagtaccatagctgcttcctaaatcttaagcctttaaggaaatgcaaagtagttcctgtccacaagaaatctggtgac

SEQ ID NO: 232992 - DNA, 90 bp, Artificial Sequence
  ENSG00000119705_17 (sequence is synthesized)
ttgcttatgctggtctcgtcgaactcctgggctcaagctatccgcacacctcggcctcccaaaatggcttatttttgtggagatgggggt

SEQ ID NO: 232993 - DNA, 120 bp, Artificial Sequence
  ENSG00000119707_0 (sequence is synthesized)
agacctccatcagctcgccgcgcagcgcggctgtatttgcggcctgtgcgagtaggcgcttgggcactcagtctccctggcgagcgacgggcagaaatctcgaaccagtggagcgcactc

SEQ ID NO: 232994 - DNA, 120 bp, Artificial Sequence
  ENSG00000119707_1 (sequence is synthesized)
gtaacctggatcccagaaggtcgcgaaggcagtaccgtttcctcagcggcggactgctgcagtaagaatgtcttttccacctcatttgaatcgccctcccatgggaatcccagcactccc

SEQ ID NO: 232995 - DNA, 120 bp, Artificial Sequence
  ENSG00000119707_2 (sequence is synthesized)
accagggatcccacccccgcagtttccaggatttcctccacctgtacctccagggaccccaatgattcctgtaccaatgagcattatggctcctgctccaactgtcttagtacccactgt

SEQ ID NO: 232996 - DNA, 120 bp, Artificial Sequence
  ENSG00000119707_3 (sequence is synthesized)
gtctatggttggaaagcatttgggcgcaagaaaggatcatccaggcttaaaggctaaagaaaatgatgaaaattgtggtcctactaccactgtttttgttggcaacatttccgagaaagc

SEQ ID NO: 232997 - DNA, 120 bp, Artificial Sequence
  ENSG00000119707_4 (sequence is synthesized)
ttcagacatgcttataagacaactcttagctaaatgtggtttggttttgagctggaagagagtacaaggtgcttccggaaagcttcaagccttcggattctgtgagtacaaggagccaga

SEQ ID NO: 232998 - DNA, 120 bp, Artificial Sequence
  ENSG00000119707_5 (sequence is synthesized)
atctaccctccgtgcactcagattattacatgacctgcaaattggagagaaaaagctactcgttaaagttgatgcaaagacaaaggcacagctggatgaatggaaagcaaagaagaaagc

SEQ ID NO: 232999 - DNA, 120 bp, Artificial Sequence
  ENSG00000119707_6 (sequence is synthesized)
ttctaatgggaatgcaaggccagaaactgtcactaatgacgatgaagaagccttggatgaagaaacaaagaggagagatcagatgattaaaggggctattgaagttttaattcgtgaata

SEQ ID NO: 233000 - DNA, 120 bp, Artificial Sequence
  ENSG00000119707_7 (sequence is synthesized)
ctccagtgagctaaatgccccctcacaggaatctgattctcaccccaggaagaagaagaaggaaaagaaggaggacattttccgcagatttccagtggccccactgatcccttatccact

SEQ ID NO: 233001 - DNA, 120 bp, Artificial Sequence
  ENSG00000119707_8 (sequence is synthesized)
catcactaaggaggatataaatgctatagaaatggaagaagacaaaagagacctgatatctcgagagatcagcaaattcagagacacacataagaaactggaagaagagaaaggcaaaaa

SEQ ID NO: 233002 - DNA, 120 bp, Artificial Sequence
  ENSG00000119707_9 (sequence is synthesized)
ggaaaaagaaagacaggaaattgagaaagaacggagagaaagagagagggagcgtgaaagggaacgagaaaggcgagaacgggaacgagaaagggaaagagaacgtgaacgagaaaagga

SEQ ID NO: 233003 - DNA, 120 bp, Artificial Sequence
  ENSG00000119707_10 (sequence is synthesized)
gaaagaacgggagcgggaacgagaacgggatagggaccgtgaccggacaaaagagagagaccgagatcgggatcgagagagagatcgtgaccgggatagagaaaggagctcagatcgtaa

SEQ ID NO: 233004 - DNA, 120 bp, Artificial Sequence
  ENSG00000119707_11 (sequence is synthesized)
taaggatcgcagtcgatcaagagaaaaaagcagagatcgtgaaagggaacgagagcgggaaagagagagagagagagaacgagagcgagaacgagaacgggagcgagagagagagcgaga

SEQ ID NO: 233005 - DNA, 120 bp, Artificial Sequence
  ENSG00000119707_12 (sequence is synthesized)
gagggaacgggagcgagaaagagaaaaagacaaaaaacgggaccgagaagaagatgaagaagatgcatacgaacgaagaaaacttgaaagaaaactccgagagaaagaagctgcttatca

SEQ ID NO: 233006 - DNA, 120 bp, Artificial Sequence
  ENSG00000119707_13 (sequence is synthesized)
agagcgccttaagaattgggaaatcagagaacgaaagaaaacccgggaatatgagaaagaagctgaaagagaagaagaaagaagaagagaaatggccaaagaagctaaacgactaaaaga

SEQ ID NO: 233007 - DNA, 120 bp, Artificial Sequence
  ENSG00000119707_14 (sequence is synthesized)
attcttagaagactatgatgatgatagagatgaccccaaatattacagaggaagtgctcttcagaaaaggttgcgtgatagagaaaaggaaatggaagcagatgaacgagataggaagag

SEQ ID NO: 233008 - DNA, 120 bp, Artificial Sequence
  ENSG00000119707_15 (sequence is synthesized)
agagaaggaggagcttgaggaaatcaggcagcgccttctggcagaagggcatccagatccagatgcagagctccagaggatggaacaagaggctgagaggcgcaggcagccacaaataaa

SEQ ID NO: 233009 - DNA, 120 bp, Artificial Sequence
  ENSG00000119707_16 (sequence is synthesized)
gcaagagccagaatcagaagaggaggaagaagaaaagcaagaaaaagaagaaaaacgagaagaacccatggaagaggaagaggagccagagcaaaagccttgtctgaaacctactctgag

SEQ ID NO: 233010 - DNA, 120 bp, Artificial Sequence
  ENSG00000119707_17 (sequence is synthesized)
gcccatcagctctgctccatctgtttcctctgccagtggcaatgcaacacctaacactcctggggatgagtctccctgtggtattattattcctcatgaaaactcaccagatcaacagca

SEQ ID NO: 233011 - DNA, 120 bp, Artificial Sequence
  ENSG00000119707_18 (sequence is synthesized)
acctgaggagcataggccaaaaataggactaagtcttaaactgggtgcttccaatagtcctggtcagcctaattctgtgaagagaaagaaactacctgtagatagtgtctttaacaaatt

SEQ ID NO: 233012 - DNA, 120 bp, Artificial Sequence
  ENSG00000119707_19 (sequence is synthesized)
tgaggatgaagacagtgatgacgtaccccgaaaaaggaaactggttcccttggattatggtgaagatgataaaaatgcaaccaaaggcactgtaaacactgaagaaaagcgtaaacacat

SEQ ID NO: 233013 - DNA, 120 bp, Artificial Sequence
  ENSG00000119707_20 (sequence is synthesized)
taagagtctcattgagaaaatccctacagccaaacctgagctcttcgcttatcccctggattggtctattgtggattctatactgatggaacgtcgaattagaccatggattaataagaa

SEQ ID NO: 233014 - DNA, 120 bp, Artificial Sequence
  ENSG00000119707_21 (sequence is synthesized)
aatcatagaatatataggtgaagaagaagctacattagttgattttgtttgttctaaggttatggctcatagttcaccccagagcattttagatgatgttgccatggtacttgatgaaga

SEQ ID NO: 233015 - DNA, 120 bp, Artificial Sequence
  ENSG00000119707_22 (sequence is synthesized)
agcagaagtttttatagtcaaaatgtggagattattgatatatgaaacagaagccaagaaaattggtcttgtgaagtaaaactttttatatttagagttccatttcagatttcttctttg

SEQ ID NO: 233016 - DNA, 120 bp, Artificial Sequence
  ENSG00000119707_23 (sequence is synthesized)
ccacccttttaaggactttgaatttttctttgtctttgaagacattgtgagatctgtaattttttttttttgtagaaaatgtgaattttttggtcctctaatttgttgttgccctgtgta

SEQ ID NO: 233017 - DNA, 120 bp, Artificial Sequence
  ENSG00000119707_24 (sequence is synthesized)
ctcccttggttgtaaagtcatctgaatccttggttctctttatactcaccaggtacaaattactggtatgttttataagccgcagctactgtacacagcctatctgatataatcttgttc

SEQ ID NO: 233018 - DNA, 120 bp, Artificial Sequence
  ENSG00000119707_25 (sequence is synthesized)
tgctgatttgtttcttgtaaatattaaaacgactccccaattattttgcagaattgcacttaatattgaaatgtactgtataggaaccaacatgaacaattttaattgaaaacaccagtc

SEQ ID NO: 233019 - DNA, 120 bp, Artificial Sequence
  ENSG00000119707_26 (sequence is synthesized)
ataaactattaccacccccactctcttttgatcagaaatggcaagcccttgtgaaggcatggagtttaaaattggaatgcaaaaattagcagacaatccattcctactgtatttctgtat

SEQ ID NO: 233020 - DNA, 120 bp, Artificial Sequence
  ENSG00000119707_27 (sequence is synthesized)
gaatgtgtttgtgaatgtatgtgtaaaagtctttcttttccctaatttgctttggtggggtccttaaaacatttcccaactaaagaatagaattgtaaaggaaaagtggtactgttccaa

SEQ ID NO: 233021 - DNA, 120 bp, Artificial Sequence
  ENSG00000119707_28 (sequence is synthesized)
cttattaataagatggctgcttcagcttctcttttaaaggaatgtggatcatagtgatttttccttttaattttattgctcagaaatgaggcatatcctaaaaatcctggagagctgtat

SEQ ID NO: 233022 - DNA, 120 bp, Artificial Sequence
  ENSG00000119707_29 (sequence is synthesized)
ttaatgcatttttgcactaattggtccttagtttaattctattgtatctgtttatttaacaaaaaattcatcataccaaaaagtgtaagtgaaaaccccctttaaaacaaaacaaaaaaa

SEQ ID NO: 233023 - DNA, 120 bp, Artificial Sequence
  ENSG00000119707_30 (sequence is synthesized)
tgaaataaaattaggcaaattgacagacagtgagagttttacaaacatgataggtattctgctcggcaatttgtaagtttacatgttatttaaggataaaggtaaatcattcaaggcagt

SEQ ID NO: 233024 - DNA, 120 bp, Artificial Sequence
  ENSG00000119707_31 (sequence is synthesized)
taccaaccactaactatttgttttcatttttgtcttgtagaaggtttatatcttgttttaccttggctcattagtgtttaaaaatgtactgatgatgtgcttagagaaattcctggggct

SEQ ID NO: 233025 - DNA, 120 bp, Artificial Sequence
  ENSG00000119707_32 (sequence is synthesized)
ttcttcgttgtagatcagaatttcaccagggagtaaaattacctgaaaacgtaagaagttttaaacagcttttcacacaaattagatgcaactgttcccatgtctgagtacttatttaaa

SEQ ID NO: 233026 - DNA, 120 bp, Artificial Sequence
  ENSG00000119707_33 (sequence is synthesized)
agaaaggtaaagattggcctgttagaaaaagcataatgtgagctttggattactggattttttttttttttaaacacacctggagaggacatttgaaaacactgttcttaccctcgaacc

SEQ ID NO: 233027 - DNA, 120 bp, Artificial Sequence
  ENSG00000119707_34 (sequence is synthesized)
ctgatgtggttccattatgtaaatatttcaaatattaaaaatgtatatatttgatcctggggactcatattctttcagaatcatgtaaataaatggcatcatgttgtaattgtgtggtgc

SEQ ID NO: 233028 - DNA, 120 bp, Artificial Sequence
  ENSG00000119707_35 (sequence is synthesized)
atactagaaaagttaaaaatatgggctgaactttttatggacttgatttttatgactattggtatctaaaggtcaaggaagccatttacattattttggatgaatctactatacatctat

SEQ ID NO: 233029 - DNA, 120 bp, Artificial Sequence
  ENSG00000119707_36 (sequence is synthesized)
ggaaatgtctcttttattttaaattctggtttctcaacggaaaatttcagaaaagatgccccttgccattttcgttaatttttcagtcttttcttagacacacccccagcctaagacctt

SEQ ID NO: 233030 - DNA, 120 bp, Artificial Sequence
  ENSG00000119707_37 (sequence is synthesized)
gttcgaggagtttattgtgtctgtcttttcttaacatactgcactgttcttaagcatcatattgtgttgtttttatttagccactattaacatgaaggtttattcaggtagatttgattt

SEQ ID NO: 233031 - DNA, 120 bp, Artificial Sequence
  ENSG00000119707_38 (sequence is synthesized)
cctttgcttcgtttcttctcctgctctgtcaactgtacttatcttaaagggccactctaaaaacaagggagatgtcgtaatctgaaacctttggggagatgtactctgtactgcataaca

SEQ ID NO: 233032 - DNA, 120 bp, Artificial Sequence
  ENSG00000119707_39 (sequence is synthesized)
tctccagtgaggtttgtgacaggacctcaactaaatatatgaatttgtgcaagttcatatattaaagtttctgcagcagagtgaaaattgttacagtaaatgtggtagaaactgttaatc

SEQ ID NO: 233033 - DNA, 120 bp, Artificial Sequence
  ENSG00000119707_40 (sequence is synthesized)
gcttaatgccagtttaaatcatgttttgtaaccaagcttcagtaaaaggctttagattgtcagagttggttgatttttagaattgtatatataaagaattagacattaaacaggcatatt

SEQ ID NO: 233034 - DNA, 120 bp, Artificial Sequence
  ENSG00000119707_41 (sequence is synthesized)
ctagtgtctgaaaatacacataagaaatttctattaagttgcttgaactttgtgggttaattttaccataatctcataaattaattttagtttgaaaaccttatacagtatgaattcatt

SEQ ID NO: 233035 - DNA, 120 bp, Artificial Sequence
  ENSG00000119707_42 (sequence is synthesized)
ttgccatttcaagttgttatataaagagcatgaaagtctttttttgttgtttttttggggtttttttttttttgagaggaagttgtgcttttgtcgcccaggatggagtgcaatggcgcg

SEQ ID NO: 233036 - DNA, 120 bp, Artificial Sequence
  ENSG00000119707_43 (sequence is synthesized)
gtgcttttgtcgcccaggatggagtgcaatggcgcgagctcagctcacttcaacttccgcctcccgggttctggagatattctgcttcagttttctgagtagctgggattacaggtgccc

SEQ ID NO: 233037 - DNA, 120 bp, Artificial Sequence
  ENSG00000119707_44 (sequence is synthesized)
cgtgaacatcttaagaaccagtcttgatctggcaaaaaagtagtagaatactacttttctttatttgtccctaaaaataaagtatgtacatctgttcacaaggaagaaaggtaagtttga

SEQ ID NO: 233038 - DNA, 120 bp, Artificial Sequence
  ENSG00000119707_45 (sequence is synthesized)
agttgtttttcttaaactttaatgtgaccccaaatcatctgaggagtgcttgtagaaatagagacactgaagtagcagcgctggggtggcgccgcaggctttgcatttctggacagctcc

SEQ ID NO: 233039 - DNA, 120 bp, Artificial Sequence
  ENSG00000119707_46 (sequence is synthesized)
cagctaatgtcattgccaactgatccaagactacattttgattagcactttaaggtgtctattcagtattattttatcctaacagactacataaatgcagctgaattttcctttaagtag

SEQ ID NO: 233040 - DNA, 120 bp, Artificial Sequence
  ENSG00000119707_47 (sequence is synthesized)
attttaaagagaaaaacattttttgaggcaaatacacgtaactcatgaacgtaatgtaatcttgcaaaattatgtctgagaaagccctaatattctaggctttttttccatccagccctg

SEQ ID NO: 233041 - DNA, 120 bp, Artificial Sequence
  ENSG00000119707_48 (sequence is synthesized)
aaaattttttctgtagataactttatgttgtaacttattctgaatcttattatggcatttccctgtaaactatgtaagtgtaagctaatgattattttgtgaagcgtgctgtttcaggta

SEQ ID NO: 233042 - DNA, 120 bp, Artificial Sequence
  ENSG00000119707_49 (sequence is synthesized)
ttaatctgccatgaatactagatatagtagaaaaactgagaaaacatttagcttgagagccaatttgaactagacactatctttttttctcctttttaatggaataaatttaatgcaaat

SEQ ID NO: 233043 - DNA, 120 bp, Artificial Sequence
  ENSG00000119707_50 (sequence is synthesized)
aagtgtaagcaggtatacaatgtttagatgaggcttattttcccaactctttttaacaggttttatgatatccccaatttatacccaaaagactgctgagaggttttatgtcaaattgat

SEQ ID NO: 233044 - DNA, 120 bp, Artificial Sequence
  ENSG00000119707_51 (sequence is synthesized)
tacaaacttctctgggttgtatttcagtcttctgttaagtatgaaattgagaaatagttttgctcaacaaaagatgatgagggattgatttgtgaatgtcactggagataaaagggtatg

SEQ ID NO: 233045 - DNA, 120 bp, Artificial Sequence
  ENSG00000119707_52 (sequence is synthesized)
agaaggaatcccaagcaggcaaagaaacagtctagctgtcaagaagaaaacagggagatacataccaaacccaggagctactaatataacaatcatactatagagcgaagtgaacttaca

SEQ ID NO: 233046 - DNA, 120 bp, Artificial Sequence
  ENSG00000119707_53 (sequence is synthesized)
ctttttgataaactgatagattttttgtaatgtgattatggtaaaatactgaaatatttatgttaatttatttgcatttgaatgcttacatttttaattgacagaatctttgcatttcat

SEQ ID NO: 233047 - DNA, 120 bp, Artificial Sequence
  ENSG00000119707_54 (sequence is synthesized)
tacttgagtcatgaaggcgaaattaaagaatggcagtctaaaatacccaggtaaagaagataatttctagaaacaaaaataaaaattcttttcaagccatgttgtttgaattaaatgaca

SEQ ID NO: 233048 - DNA, 120 bp, Artificial Sequence
  ENSG00000119707_55 (sequence is synthesized)
taaaatgtctaatgtgacctatacttaatatatggagtatatgaaaactaaaatttaagaggacaagaaaaatcttttttttaaccaaagtattattatatttattatggcatagagtgg

SEQ ID NO: 233049 - DNA, 120 bp, Artificial Sequence
  ENSG00000119707_56 (sequence is synthesized)
gtggtattttatacatatctcattttacagtaaaaacattttatgtacaactgtagagagatagctgcacagatagctccaacttaaattagaaaatattttctctatagaaaataataa

SEQ ID NO: 233050 - DNA, 120 bp, Artificial Sequence
  ENSG00000119707_57 (sequence is synthesized)
aaacaccgtttcccaggctagcccaacaagtttatttaaaccaaatagctgaatacatatacatttataaatatggtttgaattctgggatccaggagaaactttagtttcatttattga

SEQ ID NO: 233051 - DNA, 120 bp, Artificial Sequence
  ENSG00000119707_58 (sequence is synthesized)
aacggccatgtttgtcttaaaattatgtgaagagaaattcctataagtctccctcttactcttggtttatgtctgggtcagaaaaatctgtttacacaaaaaagggaagagtaatcttta

SEQ ID NO: 233052 - DNA, 120 bp, Artificial Sequence
  ENSG00000119707_59 (sequence is synthesized)
tagcatttccttccttctttattttcttcccttcacccctgcaaatacctgtattgtgctttaaagaaaaaaatttatatttgtgcttggttaggtagatagaagattactaaaaaatgc

SEQ ID NO: 233053 - DNA, 120 bp, Artificial Sequence
  ENSG00000119707_60 (sequence is synthesized)
ctttctagctcacgattgttttcatagttttactagtgctcctatatctgcagctgcctcgagttctgagaagaagtgaaaagtttaattttctagcacttgtgagtagtgagttatttt

SEQ ID NO: 233054 - DNA, 120 bp, Artificial Sequence
  ENSG00000119707_61 (sequence is synthesized)
ttacagttgggatctttctctaagatttgtggaagtatattttgcattgcttttgagggatggtgggttataaaatgaaacatttggaaattaagtcatcttgctaagagagtgttttta

SEQ ID NO: 233055 - DNA, 120 bp, Artificial Sequence
  ENSG00000119707_62 (sequence is synthesized)
agaaggtcgcgaaggcagtaccgtttcctcagcggcgggtgagtttgtgtctctgaacgcgtgtggaaaccgggagaccgggtgcctcagctggtggaggaggaaaagccggggtggctg

SEQ ID NO: 233056 - DNA, 120 bp, Artificial Sequence
  ENSG00000119707_63 (sequence is synthesized)
agactttttacagaatccaaagcaaagagacaaaaaaaatcaaccttaaattagaatataattttaaatgttttttataggtttaattgatatttagatagaaaaaagaaacagaagacc

SEQ ID NO: 233057 - DNA, 120 bp, Artificial Sequence
  ENSG00000119707_64 (sequence is synthesized)
aataccatattaaagtggtccttgacatgttgtgcttagttttttcagttactgactattctgcagtcatctcactttaatatgaatagaagctaattttatttttagatttcaacataa

SEQ ID NO: 233058 - DNA, 120 bp, Artificial Sequence
  ENSG00000119707_65 (sequence is synthesized)
acatcaaggtcagacttaaattagattcagggggcagcaggataacatacactgtagtgtatttctgggggcagttatttaacttgatcttaggaataccttttctttagagctgagatt

SEQ ID NO: 233059 - DNA, 120 bp, Artificial Sequence
  ENSG00000119707_66 (sequence is synthesized)
aaaatttacattttatatttgtatagatttaagttgagtgggggagattttaaacagtaggtcagtggttaccagacttaccaaattttagatgcatggaagaactgtaaattcccataa

SEQ ID NO: 233060 - DNA, 120 bp, Artificial Sequence
  ENSG00000119707_67 (sequence is synthesized)
agctaatctattcattgacccccaccattatgatagagatcatatggtgactaatgcaagatgaaactctcagcttggaaagtaacaaggaataggatgtaagtatgagcttctgttttt

SEQ ID NO: 233061 - DNA, 120 bp, Artificial Sequence
  ENSG00000119707_68 (sequence is synthesized)
tattatatttatggatgccccctcagaaaaatatgcaaaggggtaactggcttggaaatgggtatttatgcatagtaaatcccactcacgagttttgcctatttgaagcttctctcaatg

SEQ ID NO: 233062 - DNA, 120 bp, Artificial Sequence
  ENSG00000119707_69 (sequence is synthesized)
acagtgcatctgtgaatgttcgctggtgttgaaaatgatgcttttgaacggtgcaatgcaaacactgcatgaaatgtattttgatggtcgagataataaggtgttgctggttcttactga

SEQ ID NO: 233063 - DNA, 120 bp, Artificial Sequence
  ENSG00000119707_70 (sequence is synthesized)
tagactgagagatctttaactcagtgaaatgttaaatgttcattttctcttttattcttactttttcccattgctttcaaaatctgcagttcacaaataatgccaatgaatcagtgctgc

SEQ ID NO: 233064 - DNA, 120 bp, Artificial Sequence
  ENSG00000119707_71 (sequence is synthesized)
tgaacacttactatccagatgcccagcccttgctcacaaacacaatgctttttcaagaattaaatgtgtctaagagcacaaacataattctcccaaaattaattttgagagttgaaaagg

SEQ ID NO: 233065 - DNA, 120 bp, Artificial Sequence
  ENSG00000119707_72 (sequence is synthesized)
tggtctatgggaaatcattttagatgaataattttggttaggtataatactgaaattcaggaccgagtaagcttaaaaatggtatatggttgtgtgtgtggtttaccccctttttgtttt

SEQ ID NO: 233066 - DNA, 120 bp, Artificial Sequence
  ENSG00000119707_73 (sequence is synthesized)
tatttatttgttaaaccctgtcatgttattggtaaattatgaggaaatcatgttttaagaaaaattcaaaaatatatttgctttaaagtttgggaatctgttaggcattttactgcctta

SEQ ID NO: 233067 - DNA, 120 bp, Artificial Sequence
  ENSG00000119707_74 (sequence is synthesized)
gtattatttcactggagggaatgttttgaattttcagaatgtcttttcaaaataaaaagaaatcaaaatgaaaaaccaaaacagttgttttttattgggtggtttggctaaaagggttgt

SEQ ID NO: 233068 - DNA, 120 bp, Artificial Sequence
  ENSG00000119707_75 (sequence is synthesized)
ttgaaactccagtaacaaaaaatgagctcagtgaacctttgcatgttttggtatgagtttattaaataaccacagactgtcagggtatcagcgtggcagggggcgtccatttacagcacg

SEQ ID NO: 233069 - DNA, 120 bp, Artificial Sequence
  ENSG00000119707_76 (sequence is synthesized)
gatgagtctgaagagagaataaggtaagatttatgattttttaatctgtcctttcctcttcatgactttcttacataattttagactcacctcatttcccttctccagtctttctttaaa

SEQ ID NO: 233070 - DNA, 120 bp, Artificial Sequence
  ENSG00000119707_77 (sequence is synthesized)
tgtatgtttacatgtatacctgtatttgtatacatgtgtgtatatatatatatatatatatctcatatataaacttcaggaaacatttagtatggactagattcactcactttttcattt

SEQ ID NO: 233071 - DNA, 120 bp, Artificial Sequence
  ENSG00000119707_78 (sequence is synthesized)
tttcatttacttagaaccaaacttttgaaatgagttctgaaacaaatggttatttatataactgaatataaggagcacagtgaaataagcaagaattaaaaattgaggaattctacagga

SEQ ID NO: 233072 - DNA, 120 bp, Artificial Sequence
  ENSG00000119707_79 (sequence is synthesized)
aaaattagtattggaacagctaaaatattctgtaagtatctatttcagaaataaacaaatttctttataagtgtatgccattgaggtaagttttatatagtctagcctcattttacaata

SEQ ID NO: 233073 - DNA, 120 bp, Artificial Sequence
  ENSG00000119707_80 (sequence is synthesized)
taaatttttatattcattggaactgtttcagaaatgagatttttccccctttaatagctgttagtttctgtcctctttctatcatatcttatttcatccctttgtaatttcaatgtattc

SEQ ID NO: 233074 - DNA, 120 bp, Artificial Sequence
  ENSG00000119707_81 (sequence is synthesized)
agttttgactttgcccgtattctacttcgatatagactggcacagcaactgaatatattgctcatacattagctttcctttcataacctgctataagttctctgatccatgaggaagaga

SEQ ID NO: 233075 - DNA, 120 bp, Artificial Sequence
  ENSG00000119707_82 (sequence is synthesized)
atctgacaggtaagattgctttttaaagttgttttaaatgcattacatgactgagaaaagaaaaatgcacattttattgttgcagtttaaaatttcattttggtgaaactaaacgtgaaa

SEQ ID NO: 233076 - DNA, 120 bp, Artificial Sequence
  ENSG00000119707_83 (sequence is synthesized)
caaaagggataaatgtgttttgttttgttttgttttacctgtttggggtatttttttctgagtttgtgtagaaaccgtgtggtacactggtaatcttgtcagggtacaaacttggtctga

SEQ ID NO: 233077 - DNA, 120 bp, Artificial Sequence
  ENSG00000119707_84 (sequence is synthesized)
ctttgttatttggtttatttgtgaaccatgtacttgctcttcctcccagaaacatagcttgtaggcaaggttaatccagtgttggcgatccatgtcctagcacagcatctgtaagttaat

SEQ ID NO: 233078 - DNA, 120 bp, Artificial Sequence
  ENSG00000119707_85 (sequence is synthesized)
gcacaatcgttccttccaaggatggatttatcattgtaaatatattttcattgtcttacaggcataatgggcataagtatgttgcttttaaatattttaaattaaactattacagttaca

SEQ ID NO: 233079 - DNA, 120 bp, Artificial Sequence
  ENSG00000119707_86 (sequence is synthesized)
tatattttgcttgaagtgagtgattttcaaactttttgtatttggtgggctgtccatcttgtaatggtgggagtaaatgtttccatagatgataaggcagttcttggctgaattcagctt

SEQ ID NO: 233080 - DNA, 120 bp, Artificial Sequence
  ENSG00000119707_87 (sequence is synthesized)
gtgtttcttttggagggtgggcaaatcagagggcagagattatttagttgcattataggtattcttctataccacttgccctttgaaaccctcaacttgaggtaatgtgcagtctggggt

SEQ ID NO: 233081 - DNA, 120 bp, Artificial Sequence
  ENSG00000119707_88 (sequence is synthesized)
tttaattagtattaataatcttgtggatttacagaaatctataatgcacagagttgagttttaaccaatgatcgtattcatagaaaatatttcgaaccaccacattcttcatggtcattt

SEQ ID NO: 233082 - DNA, 120 bp, Artificial Sequence
  ENSG00000119707_89 (sequence is synthesized)
tagttagtacatagtcattgagtggccagccacacctgacacaatctcccagcatccaagattggagattcctggtctgtgtagagtatatggttttgcacgaaatctttctagtcttgt

SEQ ID NO: 233083 - DNA, 120 bp, Artificial Sequence
  ENSG00000119707_90 (sequence is synthesized)
gattgcttcagtttaatttgtcacataaaaccacaagtatttaatattaatgtatcagtggtttggtgtttttgttcccagtactgggctttgcgccgggaaaaatctgaatactggagc

SEQ ID NO: 233084 - DNA, 120 bp, Artificial Sequence
  ENSG00000119707_91 (sequence is synthesized)
aacatagtgataaatgacaagataatgcttgttatacatttacatgtagagagcacactctggtgtgttccgtagatacagaacattaagacattctttaacctcttagcatgcaggttg

SEQ ID NO: 233085 - DNA, 120 bp, Artificial Sequence
  ENSG00000119707_92 (sequence is synthesized)
ttctaatggggttgggatgaaagtagtaagggaggctggacaaggttaacttgccagagaaagcactggtacagactattccaaacagagctaattcattaaggcagctttgtaaaatgc

SEQ ID NO: 233086 - DNA, 120 bp, Artificial Sequence
  ENSG00000119711_0 (sequence is synthesized)
agctgtagtgcttctgggcagtagaggcgcggggtgcggagctagggcggccgagagccatggcggcgctattggcggcggcggcagtgcgagcccggatcctgcaggtttcttccaagg

SEQ ID NO: 233087 - DNA, 120 bp, Artificial Sequence
  ENSG00000119711_1 (sequence is synthesized)
tgaaatccagtcccacctggtattcagcatcttccttctcttcttcagtgccaactgtaaagctcttcattggtgggaaattcgttgaatccaaaagtgacaaatggatcgatatccaca

SEQ ID NO: 233088 - DNA, 120 bp, Artificial Sequence
  ENSG00000119711_2 (sequence is synthesized)
acccagccaccaatgaggtcattggtcgggtccctcaggccaccaaggcagaaatggatgcagccattgcttcctgcaaacgtgcttttcctgcatgggcagacacttcagtattaagcc

SEQ ID NO: 233089 - DNA, 120 bp, Artificial Sequence
  ENSG00000119711_3 (sequence is synthesized)
gccagcaggtcttgctccgctatcaacaacttattaaagaaaacttgaaagaaattgccaagttaatcacattggaacaagggaagaccctagctgatgctgaaggagatgtatttcgag

SEQ ID NO: 233090 - DNA, 120 bp, Artificial Sequence
  ENSG00000119711_4 (sequence is synthesized)
gccttcaggtggttgagcatgcctgtagtgtgacatccctcatgatgggagagaccatgccatccatcaccaaagacatggacctttattcctaccgtctgcctctgggagtgtgtgcag

SEQ ID NO: 233091 - DNA, 120 bp, Artificial Sequence
  ENSG00000119711_5 (sequence is synthesized)
gcattgctccattcaattttcctgccatgatccccctttggatgtttcccatggccatggtgtgtggaaataccttcctaatgaaaccatctgagcgagtccctggagcaactatgcttc

SEQ ID NO: 233092 - DNA, 120 bp, Artificial Sequence
  ENSG00000119711_6 (sequence is synthesized)
ttgctaagttgctccaggattctggtgcccctgatggaacattaaacatcatccatggacagcatgaagctgtaaattttatttgcgatcatccggacatcaaagcaatcagctttgtgg

SEQ ID NO: 233093 - DNA, 120 bp, Artificial Sequence
  ENSG00000119711_7 (sequence is synthesized)
gatccaacaaggcaggagagtatatcttcgagagaggatcaagacatggcaagagggttcaagccaatatgggagccaagaaccatggggtagtcatgccagatgccaataaggaaaata

SEQ ID NO: 233094 - DNA, 120 bp, Artificial Sequence
  ENSG00000119711_8 (sequence is synthesized)
ccctgaaccagctggttggggcagcatttggagctgctggtcagcgctgcatggctctttcaacagcagtccttgtgggagaagccaagaagtggctgccagagctggtggagcatgcca

SEQ ID NO: 233095 - DNA, 120 bp, Artificial Sequence
  ENSG00000119711_9 (sequence is synthesized)
aaaacctgagagtcaatgcaggagatcagcctggagctgatcttggccctctgatcactccccaggccaaagagcgagtctgtaatctgattgatagtggaacaaaggagggagcttcca

SEQ ID NO: 233096 - DNA, 120 bp, Artificial Sequence
  ENSG00000119711_10 (sequence is synthesized)
tccttcttgatggacgaaaaattaaagtgaaaggctatgaaaatggcaactttgttggaccaaccatcatctcgaatgtcaagccaaatatgacctgttacaaagaggagatttttggtc

SEQ ID NO: 233097 - DNA, 120 bp, Artificial Sequence
  ENSG00000119711_11 (sequence is synthesized)
cagttcttgtggttctggagacagaaacattggatgaagccatccagattgtaaataacaacccatatggaaatggaactgccatcttcaccaccaatggagccactgctcggaaatatg

SEQ ID NO: 233098 - DNA, 120 bp, Artificial Sequence
  ENSG00000119711_12 (sequence is synthesized)
cccacttggtggatgttggacaggtgggagtgaatgtccccattccagtgcctttgccaatgttctcattcaccggctctcgatcctccttcaggggagacaccaatttctatggcaaac

SEQ ID NO: 233099 - DNA, 120 bp, Artificial Sequence
  ENSG00000119711_13 (sequence is synthesized)
agggcatccaattctacactcagttaaagaccattacttctcagtggaaagaagaagatgctactctttcctcacctgctgttgtcatgcctaccatgggccgttagaaacaagtttgtt

SEQ ID NO: 233100 - DNA, 120 bp, Artificial Sequence
  ENSG00000119711_14 (sequence is synthesized)
taagactgactccatcctgagtaatctccctttatttttgaccagcttcatttgtcagctttgctcagatcagatcgatgggattggaatacattgtaactaaaatcttcctcaggacta

SEQ ID NO: 233101 - DNA, 120 bp, Artificial Sequence
  ENSG00000119711_15 (sequence is synthesized)
ttaacccccgcaaagtttctatagggaactgcctagtgtaacaatgaaaccagatttctcacttgctcttcatacttctattttgaggtaactgttgtaactatgaaatgcttatctgaa

SEQ ID NO: 233102 - DNA, 120 bp, Artificial Sequence
  ENSG00000119711_16 (sequence is synthesized)
tgaaagtagtgcttaaacctgatttctaaaaattatcccattttctgatgatttgaaggggagaaaagccagtgtatgtaaagaaaatgttccagccaggcgcggtggctcacgcctgta

SEQ ID NO: 233103 - DNA, 120 bp, Artificial Sequence
  ENSG00000119711_17 (sequence is synthesized)
catcattttgggaggccacagtgggcagattgcttgagcccaggagttgaagaacgtggcgaaaccccgtatctattatttaaaaaaattgaaaaagtaaaaaaagaaaagggaaaaaaa

SEQ ID NO: 233104 - DNA, 120 bp, Artificial Sequence
  ENSG00000119711_18 (sequence is synthesized)
attttttaaagaagatgttccaataattgcaagaagaactcttagatggggaaacaggacagaaataactcaccgcttttggttgatcctcaaacatagcgctacctaaatgccactggg

SEQ ID NO: 233105 - DNA, 120 bp, Artificial Sequence
  ENSG00000119711_19 (sequence is synthesized)
agagacctcctgcaaagttttctttagcccctcttttatcccacaatacacaagatataatccatttttatatatcccaaagttgtggcaacagcttctttcttttctgctcaatgccac

SEQ ID NO: 233106 - DNA, 120 bp, Artificial Sequence
  ENSG00000119711_20 (sequence is synthesized)
tttgtttcctagtaattcatgaccactattaattctatcattgtcactgctcctgcttaagatcacttctcaaggatacctcagtaagcaatggataaatcaactttttgttatatgtgc

SEQ ID NO: 233107 - DNA, 120 bp, Artificial Sequence
  ENSG00000119711_21 (sequence is synthesized)
tttttgttatatgtgccaagtactaagtttcagggttctcttcagcaatcattaattaatacttcagccattaattcagatgcaaataattttcttttttcttttttttgagatggagtt

SEQ ID NO: 233108 - DNA, 83 bp, Artificial Sequence
  ENSG00000119711_22 (sequence is synthesized)
gcaaataattttcttagaaaattatttcaaaagttattttaggcccagaaatcaaggattgttccaaccatgaaaatgggtaa

SEQ ID NO: 233109 - DNA, 120 bp, Artificial Sequence
  ENSG00000119711_23 (sequence is synthesized)
cccagaaatcaaggattgttccaaccatgaaaatgggtaagacacctgccttaagcaaatctaacctgctattacttgccaaattttatatattcttttctcttgcctgtatttctaatt

SEQ ID NO: 233110 - DNA, 120 bp, Artificial Sequence
  ENSG00000119711_24 (sequence is synthesized)
agtgatttgtttaatgaagaactcttcatgtagagcaattaactgggcctaagaaatttcgaagctttccatgacataaagtggttaaaaaaaaatgctttgacagtcttcttctgccat

SEQ ID NO: 233111 - DNA, 76 bp, Artificial Sequence
  ENSG00000119711_25 (sequence is synthesized)
gcctctatgctttttgtttctttgatatatctaaacttaaggtcagaacagaaattcatgtgctgaacagaatgga

SEQ ID NO: 233112 - DNA, 120 bp, Artificial Sequence
  ENSG00000119711_26 (sequence is synthesized)
ttaaggtcagaacagaaattcatgtgctgaacagaatggattctttttgcagtaccaatccaattgaatcctctttttattttcctgcgtccttaccagtcactttgatagtgctaacta

SEQ ID NO: 233113 - DNA, 120 bp, Artificial Sequence
  ENSG00000119711_27 (sequence is synthesized)
acctacactatgggggttattcatgaattaagtatgataaaaaaaaaaaagaccttgaaaatgttgtgtaccctgtggatttgaggcttattactaccacctggctggataaaatgtcaa

SEQ ID NO: 233114 - DNA, 120 bp, Artificial Sequence
  ENSG00000119711_28 (sequence is synthesized)
aaccttcaatcacttaaggtgactggaacttttgtaaaatacacttatgatcctactgggccttttttttttttttttctgctttcctaaatatgaggcaatagaaatttataatttgag

SEQ ID NO: 233115 - DNA, 120 bp, Artificial Sequence
  ENSG00000119711_29 (sequence is synthesized)
aaatatgaggcaatagaaatttataatttgagactacagtaccccttgttttagctcttatcacagctggcaactggtagtgattttttttgttgttgttttgttttgttttgagatgga

SEQ ID NO: 233116 - DNA, 120 bp, Artificial Sequence
  ENSG00000119711_30 (sequence is synthesized)
cctggtagtgatatttaatccaatccaacaactataggctgggttaaataaaaggtcattattgtctatattccaagtggaattaaatgtagtcacagagattcctaacattttccttat

SEQ ID NO: 233117 - DNA, 120 bp, Artificial Sequence
  ENSG00000119711_31 (sequence is synthesized)
atttaagggaaatcacttctaaaaaaacacactaatcagaactgtgatgctctaattagaaacaactcatctggccaactatttgctgctcagagtttcttatttcttagatgaaaaaaa

SEQ ID NO: 233118 - DNA, 120 bp, Artificial Sequence
  ENSG00000119711_32 (sequence is synthesized)
ctcatcagttatattcatgtgatcgcggctaaaaagtcagtattttctttttgttctaatgtggcttcatttgaaatttctcagattctacattgtactaattatgaataacaaattata

SEQ ID NO: 233119 - DNA, 120 bp, Artificial Sequence
  ENSG00000119711_33 (sequence is synthesized)
aattaaaaactcttaaagagaaaaacttggcttaaaaaaatcatttcatatctccttataagcctttgtcctctaggttgtaatgactctgacttcccacctgtgatggaaagctaagag

SEQ ID NO: 233120 - DNA, 120 bp, Artificial Sequence
  ENSG00000119711_34 (sequence is synthesized)
tcacaaggtcactatgtttactcttacgtaaaagatagtacacattttggctaggctgtttacttcaaaaggcaacctataggtttctacacaaaaagaggcacacatttgcatttgcat

SEQ ID NO: 233121 - DNA, 120 bp, Artificial Sequence
  ENSG00000119711_35 (sequence is synthesized)
tagtataatatgcatttgtacggatattgctttaaaaatttatgtaatctactaatgctatttattactcattccactgatccctgaagtctctcaactagtagagaaaataaccgtgat

SEQ ID NO: 233122 - DNA, 120 bp, Artificial Sequence
  ENSG00000119711_36 (sequence is synthesized)
ttagcaagaagcgacatggggaagggtgacaacaatatacattgtttgattagatacagactccttactgtgtcagactcctgaggttcttttggaatagtgggtagcaccacttcacca

SEQ ID NO: 233123 - DNA, 120 bp, Artificial Sequence
  ENSG00000119711_37 (sequence is synthesized)
gaagagtctgatattgcaatttgctgggtgatgaagattttatcttgaagcttactttcatccctgcaataatgacaaaataacagaaccgtcaacaactctacacacatgaaacctggt

SEQ ID NO: 233124 - DNA, 120 bp, Artificial Sequence
  ENSG00000119711_38 (sequence is synthesized)
ttagaataacagacttgtcatattactttcaattagcacattcaagatgcccacaagaaccatcgtgttgggctcatgtttattacttaagcaagagagctcttacccaaattcctttgt

SEQ ID NO: 233125 - DNA, 120 bp, Artificial Sequence
  ENSG00000119711_39 (sequence is synthesized)
ttccccactgtcagaaacaacatagtctggaactggaggcctagaactctggttgtatttcctgtagtgggtaaaagtcaacaaagataatgaatgaggcagtgtctcctcatgccttca

SEQ ID NO: 233126 - DNA, 120 bp, Artificial Sequence
  ENSG00000119711_40 (sequence is synthesized)
tcagaatctcattttgcacaaacccttaacttggaagggcaagtcagtgtaccctgcaccccttcattggcctgaaccacttcctgtcctcagggctgaagagaacaggacaaagctaac

SEQ ID NO: 233127 - DNA, 120 bp, Artificial Sequence
  ENSG00000119711_41 (sequence is synthesized)
aaaaaaaaagaaaaagtaaaagaaaaacacaggaaaacttcaaatccatagcagtggggaaaggggaaatttgccatgttgagaatccatttgctcctttgtgagtgatcatttattttc

SEQ ID NO: 233128 - DNA, 120 bp, Artificial Sequence
  ENSG00000119711_42 (sequence is synthesized)
tgctccgctatcaacaacttattaaagaaaacttggtatgaaatctaaatggtatgcttttccaaactgtcacctagggcatgtttgtcactctcacagagaccttttcagccaccctcc

SEQ ID NO: 233129 - DNA, 120 bp, Artificial Sequence
  ENSG00000119711_43 (sequence is synthesized)
cttactctgcagtatgcagagacgttgatcatgactctctcccttgtactgcatctcctccagtcttattcttcctttgctacctcagaatttaaaagaggaacattcttgcattaattt

SEQ ID NO: 233130 - DNA, 120 bp, Artificial Sequence
  ENSG00000119711_44 (sequence is synthesized)
ctatttgtgtgtcttctctctagaaagaaattgccaagttaatcacattggaacaagggaagaccctagctgatgctgaaggagatgtatttcgaggccttcgtaagctgggagcccctt

SEQ ID NO: 233131 - DNA, 120 bp, Artificial Sequence
  ENSG00000119711_45 (sequence is synthesized)
catatggctacttaatctggctaccaaaaaatcaaggtgttgagtgatggttggatgttttaggataaggaacctacttgtaaggaggaaaggatttactcattttaacctccatgtttg

SEQ ID NO: 233132 - DNA, 120 bp, Artificial Sequence
  ENSG00000119711_46 (sequence is synthesized)
ttgatgattttgccatctttgtgcgccaaggtaactgattggggaatagcagtgcttgttgccctacagtatatattgggacactagaaatatggattagggctagacacagataagatt

SEQ ID NO: 233133 - DNA, 120 bp, Artificial Sequence
  ENSG00000119711_47 (sequence is synthesized)
aaaaagaaacttttttcttcagtgtgaagagaatacatgagggtatttaattcagagaatttgcagatctcagagatactgaaggccttctaattcatgtaataatagctaatacttaaa

SEQ ID NO: 233134 - DNA, 120 bp, Artificial Sequence
  ENSG00000119711_48 (sequence is synthesized)
tagtgcttctgtgtttcaggcaccgttcctagtgctttttatctattaatctttataatcaccctttgaggtaggtattatttttccattttgcagaagagaaaaatgagacatagtgaa

SEQ ID NO: 233135 - DNA, 120 bp, Artificial Sequence
  ENSG00000119714_0 (sequence is synthesized)
gtcagcgtgaaaggcagggcatggaccctcactcagggctgcgtgtgcccgacgtgggtggggggggcgtggaatcggagcacaacttggccctgcgttcccaggaagggacccgaagac

SEQ ID NO: 233136 - DNA, 120 bp, Artificial Sequence
  ENSG00000119714_1 (sequence is synthesized)
ctccccaggccaccccgccatctgcgtgcgcgctggcaagaggaggggcgcggggtaatggtggccggcgccacagccccgcgccgcgcagggtcttgcccaccaccagcgatgcccagc

SEQ ID NO: 233137 - DNA, 120 bp, Artificial Sequence
  ENSG00000119714_2 (sequence is synthesized)
ccttggtagagcttgaaccaccttctataaacaggatggcggtggagagacaggcccagtccctgagcccatgaggagtgtggccccttcaggcccaaagatggggaacatcactgcaga

SEQ ID NO: 233138 - DNA, 120 bp, Artificial Sequence
  ENSG00000119714_3 (sequence is synthesized)
caactcctcgatgagctgtaccatcgaccataccatccaccagacgctggccccggtggtctatgttaccgtgctggtggtgggcttcccggccaactgcctgtccctctacttcggcta

SEQ ID NO: 233139 - DNA, 120 bp, Artificial Sequence
  ENSG00000119714_4 (sequence is synthesized)
cctgcagatcaaggcccggaacgagctgggcgtgtacctgtgcaacctgacggtggccgacctcttctacatctgctcgctgcccttctggctgcagtacgtgctgcagcacgacaactg

SEQ ID NO: 233140 - DNA, 120 bp, Artificial Sequence
  ENSG00000119714_5 (sequence is synthesized)
gtctcacggcgacctgtcctgccaggtgtgcggcatcctcctgtacgagaacatctacatcagcgtgggcttcctctgctgcatctccgtggaccgctacctggctgtggcccatccctt

SEQ ID NO: 233141 - DNA, 120 bp, Artificial Sequence
  ENSG00000119714_6 (sequence is synthesized)
ccgcttccaccagttccggaccctgaaggcggccgtcggcgtcagcgtggtcatctgggccaaggagctgctgaccagcatctacttcctgatgcacgaggaggtcatcgaggacgagaa

SEQ ID NO: 233142 - DNA, 120 bp, Artificial Sequence
  ENSG00000119714_7 (sequence is synthesized)
ccagcaccgcgtgtgctttgagcactaccccatccaggcatggcagcgcgccatcaactactaccgcttcctggtgggcttcctcttccccatctgcctgctgctggcgtcctaccaggg

SEQ ID NO: 233143 - DNA, 120 bp, Artificial Sequence
  ENSG00000119714_8 (sequence is synthesized)
catcctgcgcgccgtgcgccggagccacggcacccagaagagccgcaaggaccagatccagcggctggtgctcagcaccgtggtcatcttcctggcctgcttcctgccctaccacgtgtt

SEQ ID NO: 233144 - DNA, 120 bp, Artificial Sequence
  ENSG00000119714_9 (sequence is synthesized)
gctgctggtgcgcagcgtctgggaggccagctgcgacttcgccaagggcgttttcaacgcctaccacttctccctcctgctcaccagcttcaactgcgtcgccgaccccgtgctctactg

SEQ ID NO: 233145 - DNA, 120 bp, Artificial Sequence
  ENSG00000119714_10 (sequence is synthesized)
cttcgtcagcgagaccacccaccgggacctggcccgcctccgcggggcctgcctggccttcctcacctgctccaggaccggccgggccagggaggcctacccgctgggtgcccccgaggc

SEQ ID NO: 233146 - DNA, 120 bp, Artificial Sequence
  ENSG00000119714_11 (sequence is synthesized)
cacgggcaggttggcctagcctgggtcctccgcgggtggctccacgtgaggcctgagccttcagcccacgggcctcagggcctgccgcctcctgcttccctcgctgcggaggcagggaag

SEQ ID NO: 233147 - DNA, 120 bp, Artificial Sequence
  ENSG00000119714_12 (sequence is synthesized)
cccctgtaactccggaagcctgctctcgcttgctgagcccgctgggaccgccgagggtgggaataagccccggttggctcgtgggaataagccgtgtcctctgccgcggctgcgatgtgg

SEQ ID NO: 233148 - DNA, 120 bp, Artificial Sequence
  ENSG00000119714_13 (sequence is synthesized)
ccaggctggggctgctggtcgggggaagacagtgaactgcgttccctggcctgcttcctgcagagtttgtgcatggggagtgtgaggacatggagggtgggaggctgggcgttcagctgc

SEQ ID NO: 233149 - DNA, 120 bp, Artificial Sequence
  ENSG00000119714_14 (sequence is synthesized)
cagggccttccaatgccaccgttgtcacagacaatgcctgtccaaacgtcccggtgggatcagcactgcagcccgcccacaacagggtgggaagggaagactggagggggaaggaaggca

SEQ ID NO: 233150 - DNA, 120 bp, Artificial Sequence
  ENSG00000119714_15 (sequence is synthesized)
ggagggggaaggaagaaagagggggaaggaaagaaagaggggggaaggaaaggaggaaggggagaaggaagggaggaggaaagaaggaaggtagggggtgttgggttgggagaattgagg

SEQ ID NO: 233151 - DNA, 120 bp, Artificial Sequence
  ENSG00000119714_16 (sequence is synthesized)
gagttataggcagaggaggatcctagctccagccataagaactgggagagccgcctgctgctccagaagacctgcccacctccacagaaatgctagcccttcagaccttctggtcagtga

SEQ ID NO: 233152 - DNA, 120 bp, Artificial Sequence
  ENSG00000119714_17 (sequence is synthesized)
actgggaccagctctgactaaggatgccttccatggcctgggactcgagttcttcagaaccaagaggctaactgggcttcctccaagaagggaccaggggctagaagcagaagttggcat

SEQ ID NO: 233153 - DNA, 120 bp, Artificial Sequence
  ENSG00000119714_18 (sequence is synthesized)
cagcaaacatttctggaatctaccaaagggaggcccaggcagaaccccttcctcagtctcccttcccctcttccccccagccttgaagaggttgatcctttgtgctgtgtctcttagccc

SEQ ID NO: 233154 - DNA, 120 bp, Artificial Sequence
  ENSG00000119714_19 (sequence is synthesized)
tttcatcggggatgcccagaggcaacagcccaggctggaggtgccccagggaagggtgctcacagtggtcccagggctacacttggctttgactgcacagcccctgctcagatccttgtg

SEQ ID NO: 233155 - DNA, 120 bp, Artificial Sequence
  ENSG00000119714_20 (sequence is synthesized)
gagggtgtccgatgacttggggaggttctcttccccttcctagaggaggaagtgaccaagtttgaaggcggcagaaatggccacacagccaagaagagcccatgcaactcagtccaggat

SEQ ID NO: 233156 - DNA, 120 bp, Artificial Sequence
  ENSG00000119714_21 (sequence is synthesized)
tttactgggtcagtgacattggtggaagccttcatgcctcctcattccacagcacttcctcctatgttgaccttaaacactggcttcccactgatacagactgggatgagctgagggcag

SEQ ID NO: 233157 - DNA, 120 bp, Artificial Sequence
  ENSG00000119714_22 (sequence is synthesized)
tctcatttactgtcaagagttgtatttttgtattgtcctttttgccaagtctacatgtgttgactctgtaatggatttatgtagcccacttcagtctgcaaataaagcaaagtaactgga

SEQ ID NO: 233158 - DNA, 120 bp, Artificial Sequence
  ENSG00000119714_23 (sequence is synthesized)
gctcctcacctggttgcagagaccacactgccttcctggggccctgaggctctaggagaagctggaaagcacaggtgggggtccatccagctgtttccaaactgcgggttgtgacccatt

SEQ ID NO: 233159 - DNA, 120 bp, Artificial Sequence
  ENSG00000119714_24 (sequence is synthesized)
catgggtcagtaaatcaacttcatagctcatgacctgcatttaaaaaattgaaatagaatagaaatgatcagagtgcgtggcaagaagtaggggtcttgcccaccaccagcgatgcccag

SEQ ID NO: 233160 - DNA, 120 bp, Artificial Sequence
  ENSG00000119714_25 (sequence is synthesized)
aggctgcgggaagtcgctggagggagagctgggatcgtggctgcaagggtgcccaggctcctgcagagcctctgcaggaagcccagctgtttgaggtttgaaggcagagcctagctgggg

SEQ ID NO: 233161 - DNA, 120 bp, Artificial Sequence
  ENSG00000119714_26 (sequence is synthesized)
attctaggccagtgccctgaagaggatggaagaggtgagtcagagactgggagtccctgttttctgggaactgagaggttgagagctgagtctcaggcagagactgtacgtggcagggat

SEQ ID NO: 233162 - DNA, 120 bp, Artificial Sequence
  ENSG00000119714_27 (sequence is synthesized)
gtggagcaaggagacctggattctagcagcaacgcttccaacctcaggctggcttcagggtcttgcccaccaccagcgatgcccagcccttggtagagcttgaaccaccttctataaaca

SEQ ID NO: 233163 - DNA, 120 bp, Artificial Sequence
  ENSG00000119715_0 (sequence is synthesized)
aagtctcttgtgccccagcctcctccacggcttcgcatcccctctgcccgctctctccggagcgtgcggatgagtggagagctgggctgtgcgcgcacggctctctgcctccctctcccc

SEQ ID NO: 233164 - DNA, 120 bp, Artificial Sequence
  ENSG00000119715_1 (sequence is synthesized)
cgccgcggccgcctcctcccactctgcgttctcgcgctcactgtgccctgcccgggctcgcaccttgcccgtgcccttcactcgctcttccgcgtgatttccccgccgtctttctctacc

SEQ ID NO: 233165 - DNA, 120 bp, Artificial Sequence
  ENSG00000119715_2 (sequence is synthesized)
aactgggaatgctaaaacgggactgatggacgtgtccgaactctgcatcccggaccccctcggctaccacaaccagctgctgaacaggatgtcctcggacgacaggcacctgggctccag

SEQ ID NO: 233166 - DNA, 120 bp, Artificial Sequence
  ENSG00000119715_3 (sequence is synthesized)
ctgcggctccttcatcaagactgagccgtccagcccgtcctcgggcatcgatgccctcagccaccacagccccagtggctcgtccgacgccagcggcggctttggcctggccctgggcac

SEQ ID NO: 233167 - DNA, 120 bp, Artificial Sequence
  ENSG00000119715_4 (sequence is synthesized)
ccacgccaacggtctggactcgccacccatgtttgcaggcgccgggctgggaggcaccccatgccgcaagagctacgaggactgtgccagcggcatcatggaggactcggccatcaagtg

SEQ ID NO: 233168 - DNA, 120 bp, Artificial Sequence
  ENSG00000119715_5 (sequence is synthesized)
cgagtacatgctcaacgccatccccaagcgcctgtgcctcgtgtgcggggacattgcctctggctaccactacggcgtggcctcctgcgaggcttgcaaggccttcttcaagaggactat

SEQ ID NO: 233169 - DNA, 120 bp, Artificial Sequence
  ENSG00000119715_6 (sequence is synthesized)
ccaagggaacattgagtacagctgcccggccaccaacgagtgcgagatcaccaaacggaggcgcaagtcctgccaggcctgccgcttcatgaaatgcctcaaagtggggatgctgaagga

SEQ ID NO: 233170 - DNA, 120 bp, Artificial Sequence
  ENSG00000119715_7 (sequence is synthesized)
aggtgtgcgccttgatcgagtgcgtggaggccgtcagaaatacaagcgacggctggactcagagagcagcccatacctgagcttacaaatttctccacctgctaaaaagccattgaccaa

SEQ ID NO: 233171 - DNA, 120 bp, Artificial Sequence
  ENSG00000119715_8 (sequence is synthesized)
gattgtctcatacctactggtggctgagccggacaagctctatgccatgcctccccctggtatgcctgagggggacatcaaggccctgaccactctctgtgacctggcagaccgagagct

SEQ ID NO: 233172 - DNA, 120 bp, Artificial Sequence
  ENSG00000119715_9 (sequence is synthesized)
tgtggtcatcattggctgggccaagcacatcccaggcttctcaagcctctccctgggggaccagatgagcctgctgcagagtgcctggatggaaatcctcatcctgggcatcgtgtaccg

SEQ ID NO: 233173 - DNA, 120 bp, Artificial Sequence
  ENSG00000119715_10 (sequence is synthesized)
ctcgctgccctatgacgacaagctggtgtacgctgaggactacatcatggatgaggagcactcccgcctcgcggggctgctggagctctaccgggccatcctgcagctggtacgcaggta

SEQ ID NO: 233174 - DNA, 120 bp, Artificial Sequence
  ENSG00000119715_11 (sequence is synthesized)
caagaagctcaaggtggagaaggaggagtttgtgacgctcaaggccctggccctcgccaactccgattccatgtacatcgaggatctagaggctgtccagaagctgcaggacctgctgca

SEQ ID NO: 233175 - DNA, 120 bp, Artificial Sequence
  ENSG00000119715_12 (sequence is synthesized)
cgaggcactgcaggactacgagctgagccagcgccatgaggagccctggaggacgggcaagctgctgctgacactgccgctgctgcggcagacggccgccaaggccgtgcagcacttcta

SEQ ID NO: 233176 - DNA, 120 bp, Artificial Sequence
  ENSG00000119715_13 (sequence is synthesized)
tagcgtcaaactgcagggcaaagtgcccatgcacaaactcttcctggagatgctggaggccaaggtgtgatggccccgcacacggaccaatgcccacctacagacagacaaacggacaga

SEQ ID NO: 233177 - DNA, 120 bp, Artificial Sequence
  ENSG00000119715_14 (sequence is synthesized)
ccgaggtggagacctccacagccaccagcctccaccttcaacccctgtatcatggctctgagctgtcccagaggcgggggtttctcacctcctggctgtgtgcagactcccgggtgcagt

SEQ ID NO: 233178 - DNA, 120 bp, Artificial Sequence
  ENSG00000119715_15 (sequence is synthesized)
ggggtgggggacggggatgggggggcaggggtgtggggctcgactgtaactggctttttctttggtatgtctttccttctccatggacggtgcggaggcctgggccagggctgactccct

SEQ ID NO: 233179 - DNA, 120 bp, Artificial Sequence
  ENSG00000119715_16 (sequence is synthesized)
tcaggagtggaggccactggagcaagtgccctctcccctccaccgagccaccaagaggcagcatgtgcatttcctaactcccttgccccctcccccatctgtggcctgggtgggcactgc

SEQ ID NO: 233180 - DNA, 120 bp, Artificial Sequence
  ENSG00000119715_17 (sequence is synthesized)
tcaggctggataccacctggaggttttccttccgcagagggcaggtacgcaagggacaacagtatctttcttccagaggtcctacctgctctgagatcctctggggccggtcaagaggcc

SEQ ID NO: 233181 - DNA, 120 bp, Artificial Sequence
  ENSG00000119715_18 (sequence is synthesized)
ccataccttccacagtttccactcagctttcagccagggggtacccacaggagagcagcggctagagctcaagtgcttcctgggcaccccacccctcggggcctacccccctgcctgtca

SEQ ID NO: 233182 - DNA, 120 bp, Artificial Sequence
  ENSG00000119715_19 (sequence is synthesized)
cccaccgcgccggtgtccacctgtcctcctcctcttctcctccccccgggagtcccccgctacttcctgaccctacctcagagctcactcacccagtgggttcagccagccacagcgact

SEQ ID NO: 233183 - DNA, 120 bp, Artificial Sequence
  ENSG00000119715_20 (sequence is synthesized)
ccctctccctgaagggcaggtccaggccaagtgagcctgtgagaagctcaggagcctggctccatccaagagcaccccggggggaggatcaggacaggatggacagaggcccagactcat

SEQ ID NO: 233184 - DNA, 120 bp, Artificial Sequence
  ENSG00000119715_21 (sequence is synthesized)
ctttgccaagcacagaaaggccgagcagctgagataagtaggcaggggagccccaaagggagggaactcagcggggtggcctgcctcatccttcctggcttcccttccctgcactcagca

SEQ ID NO: 233185 - DNA, 120 bp, Artificial Sequence
  ENSG00000119715_22 (sequence is synthesized)
tcatgccacagggctagtgtaccagtgccacaggaggggtgccctcctaccacacttgggctaccagaggtttggtgtagctcccctgggcaccgcgagcacgccagctctctggcagga

SEQ ID NO: 233186 - DNA, 120 bp, Artificial Sequence
  ENSG00000119715_23 (sequence is synthesized)
cccctgcagtccccctggctgtgccaggtaaccaaccgtcttggtttgtccaggacgtttctttatcccaggaaactcctctaccccaggcacacggggacagtgggtcactctatttct

SEQ ID NO: 233187 - DNA, 120 bp, Artificial Sequence
  ENSG00000119715_24 (sequence is synthesized)
gtggatggccgtgaaagttttcactaactcaaggggcagccctgaacacccatttgtgctcacaggttggccaagagcagcttagaggatctcccaaggatgaaagaatgtcaagccatg

SEQ ID NO: 233188 - DNA, 120 bp, Artificial Sequence
  ENSG00000119715_25 (sequence is synthesized)
atggaaaatgccccttccaatcagctgccttcacaagcagggatcagagcaactccccggggatccccaatccacgcccttctagtccaacccccctcaatgagagaggcaggcagatct

SEQ ID NO: 233189 - DNA, 120 bp, Artificial Sequence
  ENSG00000119715_26 (sequence is synthesized)
cacccagcactaggacaccaggaggccaggtaactttctgcagcttttccatagaagccctggtcccacctccttggctctaccccaggaacctcccggcctgggcttctgggctgggac

SEQ ID NO: 233190 - DNA, 120 bp, Artificial Sequence
  ENSG00000119715_27 (sequence is synthesized)
gtgctgaggtcatcccagacaggagggagggctggctgaaatccacaaactgcagagcagctctctgatggtgtcccacacagaaaatgttaaggatttcaagagccctcccagaccagt

SEQ ID NO: 233191 - DNA, 120 bp, Artificial Sequence
  ENSG00000119715_28 (sequence is synthesized)
gatgtgtccctccggctccccttgcctgtggggaatcgggtctgagtcacttgatgagtaggcactggagccgttacccaggatgctgcggccctagccctccatgcagcccatcttccc

SEQ ID NO: 233192 - DNA, 120 bp, Artificial Sequence
  ENSG00000119715_29 (sequence is synthesized)
tcatttgggtggaggcacacatttggggcaaaggccccttcttggcatcaaggaacaccagctacaaaccaagtctagcacagtgtttagaggctctgccctgaggttctgctccggaga

SEQ ID NO: 233193 - DNA, 120 bp, Artificial Sequence
  ENSG00000119715_30 (sequence is synthesized)
aaccttcacagtagagaccttggggtgtgtgctttgggactccctcagtctctcactgtgctgtgtccttgcagcggggccgaggtagcaccctgctctgtcacttcctgctcaagctgg

SEQ ID NO: 233194 - DNA, 120 bp, Artificial Sequence
  ENSG00000119715_31 (sequence is synthesized)
aggacccaggcggcagggcatcatgcccagctggcatctgctgtctgtcttttctagggaaagcatctctggctcaccatgtaacatctggcttggagcaagtgggtgttctgcacacca

SEQ ID NO: 233195 - DNA, 120 bp, Artificial Sequence
  ENSG00000119715_32 (sequence is synthesized)
ggcagctgcacctcactggatctagtgttgctgcgagtgacctcacttcagagcccctctagcagagtggggcggaagtcctgatggttggtgtccatgaggtggaagctgcttttatac

SEQ ID NO: 233196 - DNA, 120 bp, Artificial Sequence
  ENSG00000119715_33 (sequence is synthesized)
ttaaaactcagatcacaacaggaaatgtgtcagtaacaatggaactccatccaatgggaaagttcctggtactgaaggggtccattggacactcagaaaagaagttcaggggccaacttc

SEQ ID NO: 233197 - DNA, 120 bp, Artificial Sequence
  ENSG00000119715_34 (sequence is synthesized)
ttagctggaatcctggccagatgaggaccctctccggggaagggagaggactgacttagtggaaggtggtgaagtgaggagagtttaggggaaccttcccccagtggaacagatctcaag

SEQ ID NO: 233198 - DNA, 120 bp, Artificial Sequence
  ENSG00000119715_35 (sequence is synthesized)
tttaccctaaacctgccatttctggaaaatctgtaaagaggaaacagcctgtctcagctgtactctcatgatacaggtcatttgaaatgaaccaagaaataaaacatgaaaatccaacca

SEQ ID NO: 233199 - DNA, 120 bp, Artificial Sequence
  ENSG00000119715_36 (sequence is synthesized)
tggagaaggtggtatggctgggttttgtttggtccccttgtccttatacgttctaaagtttccagactggctttgtcactttgtgaactcgtcatgtgtgaaaaccaatctttgcatata

SEQ ID NO: 233200 - DNA, 120 bp, Artificial Sequence
  ENSG00000119715_37 (sequence is synthesized)
gggaacttcctcgggccacactttaagaaccaagtaagaggctctcaagactccagcagagtcgggaggccatggcagcgccttagaggagctggaacctgcacccacctgtgtcggtgg

SEQ ID NO: 233201 - DNA, 120 bp, Artificial Sequence
  ENSG00000119715_38 (sequence is synthesized)
ggggggcctcctttccccatagactctgccctccctctgtgcagatggaagtggcaggggagggtgaccagcttgtgacaagaagactgaagggtccagagtccatgctcacggaacagc

SEQ ID NO: 233202 - DNA, 120 bp, Artificial Sequence
  ENSG00000119715_39 (sequence is synthesized)
accaaagaaaagcactatgtggaaagattgttttattttctaataatgataatatggctggaatggcttcttaagatgtatatattttttaaaatggcagttccccattgcagcatcacc

SEQ ID NO: 233203 - DNA, 120 bp, Artificial Sequence
  ENSG00000119715_40 (sequence is synthesized)
tacttgtatgtctttctgcctctgtatatgttctcccagaaacccccatgtaaatcaaatgccctaggatgcttccatcctggtcccatgtatctggaatctaataaataaggaaaggaa

SEQ ID NO: 233204 - DNA, 120 bp, Artificial Sequence
  ENSG00000119715_41 (sequence is synthesized)
tcagctgcctgttatatcaatcacggagtcgggatctatttataggttgggagtactgtgtccttagtcacaaagagacacagacaggggactgtcagctggtaccggaggagcggagca

SEQ ID NO: 233205 - DNA, 120 bp, Artificial Sequence
  ENSG00000119715_42 (sequence is synthesized)
acgagttatcagcaactgaaagcacctgaggggccgcacattccaccccagcccagtcctcgtcctccacgccagccccaagcatgctgctgaacaggatgtcctcggacgacaggcacc

SEQ ID NO: 233206 - DNA, 120 bp, Artificial Sequence
  ENSG00000119715_43 (sequence is synthesized)
ccgcagagaggtgtggtcagggacatttcccctggccgggagcccatggagcactgtcctcagagatgcgcaggttaggctcactgtctaggccaggcccaccttagtcactgtggactg

SEQ ID NO: 233207 - DNA, 120 bp, Artificial Sequence
  ENSG00000119715_44 (sequence is synthesized)
gcaatggaagctcttcctggacacacctgccctagccctcaccctggggtggaagagaaatgagcttggcttgcaactcagaccattccacggaggcatcctccccttcctgggctggtg

SEQ ID NO: 233208 - DNA, 120 bp, Artificial Sequence
  ENSG00000119715_45 (sequence is synthesized)
aataaaagtttcctgaggtcaaggacttccttttccctgccaaaatggtgtccagaactttgaggccagaggtgatccagtgatttgggagctgcaggtcacacaggctgctcagagggc

SEQ ID NO: 233209 - DNA, 120 bp, Artificial Sequence
  ENSG00000119715_46 (sequence is synthesized)
ccctctccatgtttgagggccgaagagcctgcatcgagcagagccaccaggctaaatcctctgaccttgactttggtttagggaccagagtctggtatctaagtgcgatcttactctagc

SEQ ID NO: 233210 - DNA, 120 bp, Artificial Sequence
  ENSG00000119715_47 (sequence is synthesized)
gaggacttaataggaccataaaaggcagtgtaaagtctggtggtgatccttttaaaaatgtgattgcatgcagaaaggctaatcttctggacatgttaaataaaacatattgtgaaatta

SEQ ID NO: 233211 - DNA, 120 bp, Artificial Sequence
  ENSG00000119718_0 (sequence is synthesized)
ggaagtgcaaactgtgtggtctggcaggtgtggattccgccggtgaaggctgaaggcagctaccttaaagatgccgggatccgcagcgaagggctcggagttgtcagagaggatcgagag

SEQ ID NO: 233212 - DNA, 120 bp, Artificial Sequence
  ENSG00000119718_1 (sequence is synthesized)
cttcgtggagaccctgaagcggggtggtgggccgcgcagctccgaggaaatggctcgggagaccctagggttgctgcgccagatcatcacggaccaccgctggagcaacgcgggggagct

SEQ ID NO: 233213 - DNA, 120 bp, Artificial Sequence
  ENSG00000119718_2 (sequence is synthesized)
gatggagctgatccgcagagagggcaggaggatgacggccgctcagccctccgagaccaccgtgggcaacatggtgcggagagtgctcaagattatccgggaggagtatggcagactcca

SEQ ID NO: 233214 - DNA, 120 bp, Artificial Sequence
  ENSG00000119718_3 (sequence is synthesized)
tggacgcagcgacgagagtgatcagcaggagtccctgcacaaactgttgacatccggaggcctaaacgaggatttcagcttccattatgcccaactccagtccaacatcattgaggcgat

SEQ ID NO: 233215 - DNA, 120 bp, Artificial Sequence
  ENSG00000119718_4 (sequence is synthesized)
taatgagctgctagtggagctggaagggacaatggagaacattgcagcccaggctctggagcacattcactccaatgaggtgatcatgaccattggcttctcccgaacagtagaggcctt

SEQ ID NO: 233216 - DNA, 120 bp, Artificial Sequence
  ENSG00000119718_5 (sequence is synthesized)
cctcaaagaggctgcccgaaagaggaaattccatgtcattgtagcagagtgtgctcctttctgccagggtcatgaaatggctgtgaatttgtccaaagcaggtattgagacaactgtcat

SEQ ID NO: 233217 - DNA, 120 bp, Artificial Sequence
  ENSG00000119718_6 (sequence is synthesized)
gactgatgctgccatttttgccgttatgtcaagagtcaacaaggtgatcattggcacgaagaccatcctggccaatggggccctgagagctgtgacaggaactcacactctggcactggc

SEQ ID NO: 233218 - DNA, 120 bp, Artificial Sequence
  ENSG00000119718_7 (sequence is synthesized)
agcaaaacaccattccaccccactcatcgtctgtgcacctatgttcaaactttctccacagttccccaatgaagaagactcatttcataagtttgtggctcctgaagaagtcctgccatt

SEQ ID NO: 233219 - DNA, 120 bp, Artificial Sequence
  ENSG00000119718_8 (sequence is synthesized)
cacagaaggggacattctggagaaggtcagcgtgcattgccctgtgtttgactacgttcccccagagctcattaccctctttatctccaacattggtgggaatgcaccttcctacatcta

SEQ ID NO: 233220 - DNA, 120 bp, Artificial Sequence
  ENSG00000119718_9 (sequence is synthesized)
ccgcctgatgagtgaactctaccatcctgatgatcatgttttatgaccgaccacacgtgtcctaagcagattgcttaggcagatacagaatgaagaggagacttgagtgttgctgctgaa

SEQ ID NO: 233221 - DNA, 120 bp, Artificial Sequence
  ENSG00000119718_10 (sequence is synthesized)
gcacatccttgcaatgtgggagtgcacaggagtccacctaaaaaaaaaatccttgatactgttgcctgcctttttagtcaccccgtaacaagggcacacatccaggactgtgtcttgcct

SEQ ID NO: 233222 - DNA, 120 bp, Artificial Sequence
  ENSG00000119718_11 (sequence is synthesized)
ttcagatcttaacagagcagcagggcttaacttgttgattttggagcctcttagtgacctggttgcgtctgtgtcaggaacttaaactttctggttcagtagtgtgttaaacataacact

SEQ ID NO: 233223 - DNA, 120 bp, Artificial Sequence
  ENSG00000119718_12 (sequence is synthesized)
gaataccttactgggatacagatttttgctcagaaatggctatgacactttttctaggctctaccaataaaagccacttgaaggttccatagttggtttatttattgtcctactctgaca

SEQ ID NO: 233224 - DNA, 120 bp, Artificial Sequence
  ENSG00000119718_13 (sequence is synthesized)
gaactgcttgaaacagcagcagcagagccttttttgtgtttgcatagagggctgtagttagcgggaaaagtgtacaacatggtagtactggccagatgcagtggctcccacttgtaatcc

SEQ ID NO: 233225 - DNA, 120 bp, Artificial Sequence
  ENSG00000119718_14 (sequence is synthesized)
tggactttgggaggctgaggtgggaggcttgtttgaggcttgtttgaggcctggagtttgagattagcctggcaacatagcaagatcctgtctctacaaaaaaatattttaaaaaattag

SEQ ID NO: 233226 - DNA, 90 bp, Artificial Sequence
  ENSG00000119718_15 (sequence is synthesized)
tgagttcaaggcttcagtgagctatcattgtaccactgcactcctgcctggatgatagagcaagactctgtctctaaaaaaataacaagt

SEQ ID NO: 233227 - DNA, 120 bp, Artificial Sequence
  ENSG00000119718_16 (sequence is synthesized)
gatgatagagcaagactctgtctctaaaaaaataacaagtacaaatgaaagtatagtttcctttacaattcactgctcctggccccaaagtttgttcatagtctaaaacagtagttccaa

SEQ ID NO: 233228 - DNA, 120 bp, Artificial Sequence
  ENSG00000119718_17 (sequence is synthesized)
ctgggaatctgtttaaagcttcccagaaaaggatagtctcatgtagtgtttataggactataaattggtacagccttttagagggcaatttggaagctgtatttctagaattatttgtac

SEQ ID NO: 233229 - DNA, 120 bp, Artificial Sequence
  ENSG00000119718_18 (sequence is synthesized)
aagcaaaaagatttatacagagtgttcagtgtagtagttgtaatgtcatagcctaagtgtccagcaataggagaaaggttaagtattgacagttacaccgtggaacattatacatggcaa

SEQ ID NO: 233230 - DNA, 120 bp, Artificial Sequence
  ENSG00000119718_19 (sequence is synthesized)
tagaagtttcaaaaggatggctggaggggcagtgtctggattgaaggcatttgggctggttcactgcatttaatgtgaatttgttaccaatatttaaaaatctggagattgcacatttca

SEQ ID NO: 233231 - DNA, 120 bp, Artificial Sequence
  ENSG00000119718_20 (sequence is synthesized)
aaaattcagatttcttgcttttcttgaaaactcaaatttggcaactctgggccaacatttccaaatggcagtagttagtttgtggttgggtaacatctgatgccattggatggaacatct

SEQ ID NO: 233232 - DNA, 120 bp, Artificial Sequence
  ENSG00000119718_21 (sequence is synthesized)
ccagttttctgcagttcctactggatccatttaactcatttatgttatctgcctaacccctgtaggcatttgagttgtgatcctggtgttaaaagaatgggacagatttgcaaggaagtc

SEQ ID NO: 233233 - DNA, 120 bp, Artificial Sequence
  ENSG00000119718_22 (sequence is synthesized)
catttgatactctgttagttaaaaacaagctggggaaaaaaaacacaacaagctgcagagcaatatgcataatacggactcatttccataaaacaacactggctgggcgcaatggctcac

SEQ ID NO: 233234 - DNA, 120 bp, Artificial Sequence
  ENSG00000119718_23 (sequence is synthesized)
tagtcccagctactcgggaggctgaacttgggaagtagaggttgcagtgagcagtgccattgggccactgcactttagcctgggcaacagtgggtgagactctgtctcacaaaaacaaaa

SEQ ID NO: 233235 - DNA, 120 bp, Artificial Sequence
  ENSG00000119718_24 (sequence is synthesized)
tgggcaacagtgggtgagactctgtctcacaaaaacaaaacaaaattatatgtacacgcatagggaaacagtatagaagtataataccaagcacagcaagcagagggacatcctctaatt

SEQ ID NO: 233236 - DNA, 120 bp, Artificial Sequence
  ENSG00000119718_25 (sequence is synthesized)
ttgttgacatgtttatgcttacatattgtttccggtttttaacctaaaaagtctcccaggtgatccagattttctgccatgtttaggaactagtggtccaaagcagggcctcttgtgcag

SEQ ID NO: 233237 - DNA, 120 bp, Artificial Sequence
  ENSG00000119718_26 (sequence is synthesized)
tgtctgtgtgggtggagggagcactaagaatctgcatgtttaacaaatagcctgtgggctttgaacaggtgatttgaaaccacattttggttaacactgggcagaggtaggttctgaggg

SEQ ID NO: 233238 - DNA, 120 bp, Artificial Sequence
  ENSG00000119718_27 (sequence is synthesized)
aaaggtctctattctttgatatctctttgagagcgatctttgccttaggtcttccagagaggggaaaaaagtaagacctcagaaagtcggcattttacactgacctaaaagctgtatgac

SEQ ID NO: 233239 - DNA, 120 bp, Artificial Sequence
  ENSG00000119718_28 (sequence is synthesized)
tcagaagagcctgactcactcaggctcagtctttctattatttcttaaagcatctaagaccccacgctttctcagtgaagtggcttgtagctaccaattacgagcaattgtctcctccaa

SEQ ID NO: 233240 - DNA, 120 bp, Artificial Sequence
  ENSG00000119718_29 (sequence is synthesized)
aggcaccaattctaacagcaattcacttgggtacaattgtgtggtttggagtaagagcagcagtgaggcaaggaacttaaatctgttcctggctccaaaaatgctttatgatacttgtcc

SEQ ID NO: 233241 - DNA, 120 bp, Artificial Sequence
  ENSG00000119718_30 (sequence is synthesized)
tttgtccatcttagtctctgtgtctaaaattagcaccaacatccttcccaggcatgactgagttggatgaaggttataagggtagaagctctctttctggtcagctcttacagtgcctag

SEQ ID NO: 233242 - DNA, 120 bp, Artificial Sequence
  ENSG00000119718_31 (sequence is synthesized)
aacagaactgcaggaatgcatactttttagaatctttatgaccccaattaagtaaaccctattaaggctcatcttcttatttcccctctctccgtttccctatttgaggaggggtaagta

SEQ ID NO: 233243 - DNA, 120 bp, Artificial Sequence
  ENSG00000119718_32 (sequence is synthesized)
tcagaaagagagaacctgaactgaacaggaggaaacagaagttccacatcaactcactacctgtcagccttggtatcaggggtgcccacctcccacccctgccttgctggcggaaccgag

SEQ ID NO: 233244 - DNA, 120 bp, Artificial Sequence
  ENSG00000119718_33 (sequence is synthesized)
aaactcggaaaaaaacaaacaaaaaaacaactgttgtagcttggagagaattaatagaactaggattccatggatgtgaaagtcttcctcaatatgctaaataaaccaagttagataaca

SEQ ID NO: 233245 - DNA, 120 bp, Artificial Sequence
  ENSG00000119718_34 (sequence is synthesized)
gcttctcagaaggtatggcatctcaatttccagaaaatatgggactgagagcagtaggttttgcagtttcttgtcccattttacattcattctttccttggaaacctacttttaagctag

SEQ ID NO: 233246 - DNA, 120 bp, Artificial Sequence
  ENSG00000119718_35 (sequence is synthesized)
aacttgtattgagccagggatcccttcacctctaccagtctgtgacccctcacgataccaattctgaggtctaagcatttagctttttgtggccagtggcccttttagggctccaccccc

SEQ ID NO: 233247 - DNA, 120 bp, Artificial Sequence
  ENSG00000119718_36 (sequence is synthesized)
ttgaggtgaaattcacataacatacaattaaccattttaaagtatacaatttagtgatatctagtacattcacagcattgtacaaccaccactctctagtttcaaaactttttctccact

SEQ ID NO: 233248 - DNA, 120 bp, Artificial Sequence
  ENSG00000119718_37 (sequence is synthesized)
gtagaaaaacaccctgtacccattaagtaatctctccctatttgtccttctccccatctcctccaatctgctcctgtctctatggatttgcccattttgtataaaaggaatcatataata

SEQ ID NO: 233249 - DNA, 120 bp, Artificial Sequence
  ENSG00000119718_38 (sequence is synthesized)
caggtaaggagactgctggagttgctactaagaaaaatgaaaaatgaagaagaaataaacgagagatgggtagggccattccaaccttgaattgataagcaagactttgagacactgaga

SEQ ID NO: 233250 - DNA, 120 bp, Artificial Sequence
  ENSG00000119720_0 (sequence is synthesized)
atccctatagagaagaacggaggtacggcctgtggtcatggcgctgttcccagcctttgcggggcttagtgaggctcccgatggcgggagctccaggaaagagttagactggctgagcaa

SEQ ID NO: 233251 - DNA, 120 bp, Artificial Sequence
  ENSG00000119720_1 (sequence is synthesized)
cccaagcttttgtgttggatccataacgtccctgagccaacaaactgaagcagctccagcccatgtttctgaagggttaccgctgacaaggagtcatctgaaatcagagtcttcagatga

SEQ ID NO: 233252 - DNA, 120 bp, Artificial Sequence
  ENSG00000119720_2 (sequence is synthesized)
aagtgacactaacaaaaagctcaaacaaacaagtagaaaaaagaagaaagagaaaaagaaaaaaaggaagcatcagcatcataagaaaacaaagaggaagcatgggccgtcgagtagcag

SEQ ID NO: 233253 - DNA, 120 bp, Artificial Sequence
  ENSG00000119720_3 (sequence is synthesized)
caggtctgagacagacaccgattctgaaaaggacaaaccttccagaggcgttggaggcagtaaaaaggaatctgaggaaccgaatcaaggaaataatgctgcagctgatactggacatcg

SEQ ID NO: 233254 - DNA, 120 bp, Artificial Sequence
  ENSG00000119720_4 (sequence is synthesized)
ctttgtttggcttgaggacattcaggctgtgacgggagaaaccttcagaacagataagaaaccagatcctgcgaactgggagtacaagtctctctaccgaggggatatagcaagatacaa

SEQ ID NO: 233255 - DNA, 120 bp, Artificial Sequence
  ENSG00000119720_5 (sequence is synthesized)
gaggaaaggagactcctgccttggcattaaccctaagaagcagtgcatatcttgggaagggacttccacagagaagaagcattcacgcaagcaggttgaacgctattttactaagaagag

SEQ ID NO: 233256 - DNA, 120 bp, Artificial Sequence
  ENSG00000119720_6 (sequence is synthesized)
tgtgggattaatgaacatcgatggagttgccattagcagtaaaactgaacctccctcatctgagcccatctcctttataccagtgaaggacttggaagatgcggctcctgttacaacctg

SEQ ID NO: 233257 - DNA, 120 bp, Artificial Sequence
  ENSG00000119720_7 (sequence is synthesized)
gttgaatcctctggggatttatgatcagtcaaccacacattggctacaaggacagggtcctccagagcaggaatcaaagcagccagacgcacagccagacagcgagagtgcggctctcaa

SEQ ID NO: 233258 - DNA, 120 bp, Artificial Sequence
  ENSG00000119720_8 (sequence is synthesized)
ggccaaggtggaggagtttaacaggagggtgcgggagaatcctcgggatacgcagctgtggatggcatttgttgcttttcaggacgaggtcatgaaaagtcctggcctgtatgccatcga

SEQ ID NO: 233259 - DNA, 120 bp, Artificial Sequence
  ENSG00000119720_9 (sequence is synthesized)
ggaaggagagcaggaaaagcgaaagaggtccctgaagctcattctggagaagaagctggccattctggagcgggccattgagagcaaccagagcagtgtggatctgaaactggccaagct

SEQ ID NO: 233260 - DNA, 120 bp, Artificial Sequence
  ENSG00000119720_10 (sequence is synthesized)
gaagctctgcacagagttctgggagccctccactctggtcaaagagtggcagaaactgatatttttgcatcccaataatacagccctttggcagaaataccttttattttgccagagcca

SEQ ID NO: 233261 - DNA, 120 bp, Artificial Sequence
  ENSG00000119720_11 (sequence is synthesized)
gtttagtaccttttcgatatcaaaaattcacagtctttatggaaaatgcttgagcactttgtctgctgttaaggacggcagcatcttatctcaccctgcgttgcctggcacggaagaggc

SEQ ID NO: 233262 - DNA, 120 bp, Artificial Sequence
  ENSG00000119720_12 (sequence is synthesized)
catgtttgcactctttcttcagcagtgccactttctgcggcaggctggccactctgagaaggccatctcattgttccaggccatggtggacttcaccttcttcaaacccgacagcgtgaa

SEQ ID NO: 233263 - DNA, 120 bp, Artificial Sequence
  ENSG00000119720_13 (sequence is synthesized)
agatctgcctaccaaaggacaggtggaattctttgaacccttttgggacagtggagagccccgggctggggagaagggagcccgaggctggaaggcgtggatgcaccagcaggaacgagg

SEQ ID NO: 233264 - DNA, 120 bp, Artificial Sequence
  ENSG00000119720_14 (sequence is synthesized)
tggctgggtggtcatcaacccagatgaggatgacgatgaaccagaagaggatgaccaggaaataaaagataagactctgcccaggtggcagatctggcttgctgctgagcgttcccgtga

SEQ ID NO: 233265 - DNA, 120 bp, Artificial Sequence
  ENSG00000119720_15 (sequence is synthesized)
ccagaggcactggcggccctggcgccctgataagaccaagaagcaaaccgaggaagactgtgaggatcccgagagacaggtgttgtttgatgatattgggcaatctttgatcagactttc

SEQ ID NO: 233266 - DNA, 120 bp, Artificial Sequence
  ENSG00000119720_16 (sequence is synthesized)
cagccatgatcttcagttccagctggtggaggccttcctgcagttcttgggtgtgccttctggctttactcctccagcctcctgtctttatctggccatggatgagaacagcatctttga

SEQ ID NO: 233267 - DNA, 120 bp, Artificial Sequence
  ENSG00000119720_17 (sequence is synthesized)
taatggactttatgatgaaaagcccttgacttttttcaaccctttgttttctggggctagctgtgttggccgcatggataggttgggctatcctcgctggaccaggggtcagaaccgaga

SEQ ID NO: 233268 - DNA, 120 bp, Artificial Sequence
  ENSG00000119720_18 (sequence is synthesized)
gggcgaggagttcatccgcaatgtcttccaccttgtcatgcctttattttcaggcaaagagaagtcccagctctgcttctcctggttacagtatgagattgcaaaggtcatttggtgcct

SEQ ID NO: 233269 - DNA, 120 bp, Artificial Sequence
  ENSG00000119720_19 (sequence is synthesized)
gcacactaaaaacaagaagagattaaagtctcaagggaagaactgcaaaaaactagccaagaatctccttaaggagccagaaaactgcaacaacttttgcctgtggaagcagtatgcaca

SEQ ID NO: 233270 - DNA, 120 bp, Artificial Sequence
  ENSG00000119720_20 (sequence is synthesized)
tctggagtggttgcttggcaacacggaggatgccagaaaagtttttgacacagcacttggcatggcaggaagcagagaactgaaagactctgacctctgtgagctcagtctgctctatgc

SEQ ID NO: 233271 - DNA, 120 bp, Artificial Sequence
  ENSG00000119720_21 (sequence is synthesized)
tgagctggaggtggagctgtcgccagaagtgagaagggctgccacagctcgagctgttcacatattaaccaagctgactgagagcagcccctatgggccctacactggacaggtgttggc

SEQ ID NO: 233272 - DNA, 120 bp, Artificial Sequence
  ENSG00000119720_22 (sequence is synthesized)
tgttcacattttgaaagcgcgaaaggcttatgagcacgcactgcaggactgtttgggtgacagctgtgtctccaatccagctcccaccgattcctgtagccgcctaattagcctggctaa

SEQ ID NO: 233273 - DNA, 120 bp, Artificial Sequence
  ENSG00000119720_23 (sequence is synthesized)
atgcttcatgctcttccagtatttgaccatagggattgatgctgctgtgcagatatacgaacaggtgtttgcaaaactgaacagttctgttttcccagaaggctctggcgagggggacag

SEQ ID NO: 233274 - DNA, 120 bp, Artificial Sequence
  ENSG00000119720_24 (sequence is synthesized)
tgccagctcccagagttggaccagtgttctcgaagccatcacactgatgcacacgagcctgctgagattccacatgaaagtgagtgtttacccgctggcccctctgcgagaggcactctc

SEQ ID NO: 233275 - DNA, 120 bp, Artificial Sequence
  ENSG00000119720_25 (sequence is synthesized)
acaggctttaaagttgtatccaggcaaccaggttctttggaggtcctatgtacagattcagaataagtcccacagtgccagcaaaaccaggagattttttgacacaatcaccaggtctgc

SEQ ID NO: 233276 - DNA, 120 bp, Artificial Sequence
  ENSG00000119720_26 (sequence is synthesized)
caaacccttggagccttggttgtttgcaattgaagctgagaaactgaggaagagactggtggaaactgtccagaggttagacggtagagagatccacgccacaattcctgagaccggctt

SEQ ID NO: 233277 - DNA, 120 bp, Artificial Sequence
  ENSG00000119720_27 (sequence is synthesized)
aatgcatcggatccaagccctgtttgaaaatgccatgcgcagcgacagtggcagccagtgccccttgctgtggaggatgtatttgaactttctggtttccttaggaaataaagaaagaag

SEQ ID NO: 233278 - DNA, 120 bp, Artificial Sequence
  ENSG00000119720_28 (sequence is synthesized)
caaaggtgtattctacaaagcacttcagaattgcccttgggcaaaggtgttgtacctggacgccgtggagtatttccccgatgagatgcaggagatcctggacctgatgactgagaagga

SEQ ID NO: 233279 - DNA, 120 bp, Artificial Sequence
  ENSG00000119720_29 (sequence is synthesized)
gctccgggtgcgcctgccgctggaggagctggagctgctgctggaggattagagagcagcgggaaaacgggctgtgcctgcgaggccaagttgcccaccctgcggagctaggaggcgcga

SEQ ID NO: 233280 - DNA, 120 bp, Artificial Sequence
  ENSG00000119720_30 (sequence is synthesized)
gcagagaacgtgtgtgttaggagaactcggcttttgaaatgttctttctcgatagtaataatgtgggctgccagcctctcacatcttgcacactttttgggtgtgtaaatgacacaaaag

SEQ ID NO: 233281 - DNA, 120 bp, Artificial Sequence
  ENSG00000119720_31 (sequence is synthesized)
ttatttacatattatatatgtgaatatgtgtatatatgtacatagccagagagtcatgccacgtggtcattaaaccgatgatgattgaggcgtggcagcgtccttgctcattctctccct

SEQ ID NO: 233282 - DNA, 120 bp, Artificial Sequence
  ENSG00000119720_32 (sequence is synthesized)
gtgcgcagccagcactggcccccgcacggtgaatgtgttccctccgctggtgtcgtggtggtcctgccaggccctctctgagataaaggtctggtttttcagcactaggatgtcttcccc

SEQ ID NO: 233283 - DNA, 120 bp, Artificial Sequence
  ENSG00000119720_33 (sequence is synthesized)
aggctggtgagcaggagattttgctcttgtgttgagacccgcagttaacgcttggtgttctggcctgcacgcagtgtgtggcaagttccctgagtttacctcggcggcgatgcctccgcc

SEQ ID NO: 233284 - DNA, 120 bp, Artificial Sequence
  ENSG00000119720_34 (sequence is synthesized)
tggagctggaggggcagcgtgccctggggctgctgaaaaactcaggcctgtggagtcagaacccgctcttcagcaggtcccaggccacttgagtgtggaaggctgcccggggcactggca

SEQ ID NO: 233285 - DNA, 120 bp, Artificial Sequence
  ENSG00000119720_35 (sequence is synthesized)
gcctctgggggaagcctgctcccaagccgtctaggagccgagcacgctgtaccgccagccccagccctgcctgcatgaggggcccggcacgcttgtgcagcaacgctgcttacactatga

SEQ ID NO: 233286 - DNA, 120 bp, Artificial Sequence
  ENSG00000119720_36 (sequence is synthesized)
aggccaaggctggcctggttctggtgttgcattcgagggctgtgaacagaatgaaatgtcaacatccatttttcagacttgttctgcctccgaagagatttttagtgctgagtgattttc

SEQ ID NO: 233287 - DNA, 120 bp, Artificial Sequence
  ENSG00000119720_37 (sequence is synthesized)
actattaacatatggctggaaggaatggttttcttatcttctccgagctctagactggctagcttctctctggctttttttgttttgttttcctctctttagaattgctgtatacttgta

SEQ ID NO: 233288 - DNA, 120 bp, Artificial Sequence
  ENSG00000119720_38 (sequence is synthesized)
tctcctcagcacatttagaaaagccagtgtataattttggctggcaactgacggacgcagcgggcagcagcaggcagggcagcgcacgagagcacctcccagggcacggtgggaaactgg

SEQ ID NO: 233289 - DNA, 120 bp, Artificial Sequence
  ENSG00000119720_39 (sequence is synthesized)
ccagcccagccccactactgccctctcctgctcgtccccagtccctgagctacaggtggctgtaggcagaagcccaccgggtgttccttagcgacagacaggtcgtcagctgctcccctt

SEQ ID NO: 233290 - DNA, 120 bp, Artificial Sequence
  ENSG00000119720_40 (sequence is synthesized)
gatgccttttcacagaaacaaccctcaacttgaggaagttgagagctccactccgaggtggacttgctccccctccctgagagctaactggcttgaactgtcatgagttcctggctgccc

SEQ ID NO: 233291 - DNA, 120 bp, Artificial Sequence
  ENSG00000119720_41 (sequence is synthesized)
acaaagagggaccttctccacccttgtcctctgcgtggggcagacatcagccagacatgtcaccgacctgattgggggcagggagtaggaagtccaggaccaaaccatgctccccatgac

SEQ ID NO: 233292 - DNA, 120 bp, Artificial Sequence
  ENSG00000119720_42 (sequence is synthesized)
agcagctggcgcctcagtccccatctgactcatgtctcttctcatctggttcagaacttagaagggcgtggcctctgatcagctggttccctccaaaccccagtggcaacctgtcccttg

SEQ ID NO: 233293 - DNA, 120 bp, Artificial Sequence
  ENSG00000119720_43 (sequence is synthesized)
agagccaggaatggctcttagcagtgggcagtgagcccccgagaggataaagcggctgctcgaacagattgcgagcacattacttgctgcatgggaggaggtttaaaacaaatcaaagat

SEQ ID NO: 233294 - DNA, 120 bp, Artificial Sequence
  ENSG00000119720_44 (sequence is synthesized)
ggaggtttaaaacaaatcaaagattccttgagggcattttacagaaaacaagatgtcaagagcatcactgttgttatttaaaagcccatttgaggccaggcgcggtggctcacgtctgta

SEQ ID NO: 233295 - DNA, 120 bp, Artificial Sequence
  ENSG00000119720_45 (sequence is synthesized)
aaaaaaaaaacagcccgtttgagattgctgacatgaacttctgaaagatgactacgtgcctcccaagactaaccgtcagcttggagggctgagaagggggttcccagctggagtcaaaca

SEQ ID NO: 233296 - DNA, 120 bp, Artificial Sequence
  ENSG00000119720_46 (sequence is synthesized)
gtggctcatgtgtttcatcaggaacgctcgtcatttccccgaaggagtcactgatcacatcagaccacaggggtcggcccacctcgggtttgggacagtgttctttcctggaatgaagca

SEQ ID NO: 233297 - DNA, 120 bp, Artificial Sequence
  ENSG00000119720_47 (sequence is synthesized)
gtggcaatgcctctggcacaggattgctgggcctgcaggaggccaggaggcacctctgtgctgtgttcccagtaggaggaggcagctactacttgtaaggcacacatatcattttgcatt

SEQ ID NO: 233298 - DNA, 120 bp, Artificial Sequence
  ENSG00000119720_48 (sequence is synthesized)
ggaaaagtgaagataggcttgctgcagagggagtgatgggagagttcaccttaaattgttctactgaggaagggctccaaagagccagtgggttttccgcaggcagacggggttctccct

SEQ ID NO: 233299 - DNA, 120 bp, Artificial Sequence
  ENSG00000119720_49 (sequence is synthesized)
gtccggctcaccagtgcaggaagccagggaagaaattactgtgggaattctgttatttcacaagcacttcatacctgcatccctgcacttggcaccgcaggcctcagtgaccagctgccg

SEQ ID NO: 233300 - DNA, 120 bp, Artificial Sequence
  ENSG00000119720_50 (sequence is synthesized)
aaacggtaatttcagcattttggtcagtaagcaaactggagaagcagctggggtggggcgcagttcagcccgctaccctgacactctaggccctggcatttgctttagctgcttttgtag

SEQ ID NO: 233301 - DNA, 120 bp, Artificial Sequence
  ENSG00000119720_51 (sequence is synthesized)
aattgacatgagggagactgtccctctagaggaaaacgctcagctattaccaatgaggaaaaggcaatactgatgtgctggggttttttgttttttttaatctcaaacttaggaaaagat

SEQ ID NO: 233302 - DNA, 120 bp, Artificial Sequence
  ENSG00000119720_52 (sequence is synthesized)
gcaagtgcgttacaaagaattttgtttcctgaaccgtgtgagtcagttgctgagagtctgctacccgcccacgatacagacactgaacaggaagtcagcatggacgcagtactcctagca

SEQ ID NO: 233303 - DNA, 120 bp, Artificial Sequence
  ENSG00000119720_53 (sequence is synthesized)
ggtcctcaggcccagtcatgtcctctaggaaaaggatccagttcaggagcaggagctgcacttggttgtcatctctttggtctccttctgattggaagctttttgacttccaagacgtgg

SEQ ID NO: 233304 - DNA, 120 bp, Artificial Sequence
  ENSG00000119720_54 (sequence is synthesized)
atacttttgaagtgttctgaatttgtagaatgttcctcagtttgtgtttgcctggtgtttcctcagcactggattcaggctaagcatctttggcaggagtgtgacagcactgacactctt

SEQ ID NO: 233305 - DNA, 120 bp, Artificial Sequence
  ENSG00000119720_55 (sequence is synthesized)
gggtggcacgtactttcaaagtgcccattactgatgatgtgcatttgaccacttggtgaagacggtgtctgctgggcatctccagtgtgactttccctttctaactgaacagtgttttgt

SEQ ID NO: 233306 - DNA, 120 bp, Artificial Sequence
  ENSG00000119720_56 (sequence is synthesized)
gtgtgtgtgtgtgtgtgtgtagttccctatttaaagggctatactgtattccattaatagtaactgtttgttaggatgctcagattgtcccgagtttggccagtggaagccccttcacat

SEQ ID NO: 233307 - DNA, 120 bp, Artificial Sequence
  ENSG00000119720_57 (sequence is synthesized)
gccccttcacataggcttcggtgtccttaggacatgtccttatcattccttgagcactcccttgctttctggcaaaacagactttgggttcatcctgtcctttccctgcctagccccgga

SEQ ID NO: 233308 - DNA, 120 bp, Artificial Sequence
  ENSG00000119720_58 (sequence is synthesized)
atcagccctcactccttttagtggagaataatacttttagcagcaaaggtctgggtctaggggtgctcactgcagttggggtgtcactgttcccaggtgctcccagtggacagaggtcgt

SEQ ID NO: 233309 - DNA, 120 bp, Artificial Sequence
  ENSG00000119720_59 (sequence is synthesized)
tcttgttttcttctttctgtgtctaactcctcagagaaacctggctcccactgtcctgtttacctgcctgactgcctccatacataagcagcctccctcccctgccaccaccccgtccct

SEQ ID NO: 233310 - DNA, 120 bp, Artificial Sequence
  ENSG00000119720_60 (sequence is synthesized)
gcagatgccttcctcacccacttgggctctcatactgcacatcaggctgcccacactgactccccctatcggaccaccccagccctgcacatacaccccacacggatgccagcctcaccc

SEQ ID NO: 233311 - DNA, 120 bp, Artificial Sequence
  ENSG00000119720_61 (sequence is synthesized)
tgcccatgctgagtccccgtgctgtggtgttcctccacatggacagctccacaccctacttgggctgacacccgccctccccacaagcaccccgtccttaccctgcactgggccaccccc

SEQ ID NO: 233312 - DNA, 120 bp, Artificial Sequence
  ENSG00000119720_62 (sequence is synthesized)
acgtgtggatgtcctctgtggtaggcagagtggcgcccctaaagatggccacaccctaagccctggaacgtgtgaatgttacatggcaaaaggaactttgcagataaaaattaagaagat

SEQ ID NO: 233313 - DNA, 120 bp, Artificial Sequence
  ENSG00000119720_63 (sequence is synthesized)
tgtaaactttaaaacagggaaattatcctggatcatctgcatgggtccaatgcaatcacaaggatccataagaatagaaaaggcaggcagaaagaagggtcggtgggagagagggactgg

SEQ ID NO: 233314 - DNA, 120 bp, Artificial Sequence
  ENSG00000119720_64 (sequence is synthesized)
gcctgctgctgctggtggaaaatgaagtgccacgagtcaggagggagggtggccttcacagactggcaaaggcctcagctggcagccagcaaggaaatgctgacctcagctggcccacaa

SEQ ID NO: 233315 - DNA, 120 bp, Artificial Sequence
  ENSG00000119720_65 (sequence is synthesized)
ctccaagaaattaaattctgccaacaataatcctcagcaaggaaacggattctcccttagagacgccagagggaacggtcctgccaacagcaagactttagcctggagacactcgtgttg

SEQ ID NO: 233316 - DNA, 74 bp, Artificial Sequence
  ENSG00000119720_66 (sequence is synthesized)
ctgccaacagcaagactttagcctggagacactcgtgttggacttctgacctacagaactgagataaaattgtg

SEQ ID NO: 233317 - DNA, 120 bp, Artificial Sequence
  ENSG00000119720_67 (sequence is synthesized)
acaaagcctgtggtaacttgttatagtattaacagaaaactaatacacactcctcattcagtgtgggccctacaacccacaccaggccacctgtcaagggaacgcttaccttgatctgtc

SEQ ID NO: 233318 - DNA, 120 bp, Artificial Sequence
  ENSG00000119720_68 (sequence is synthesized)
ccacttaatagctttaggcctgatttgttcagaaagagaaatgacggaaatagacggagaaagggaaggggaagttctgacatgtttctgaacaccttgaaagggatgagatttctgagc

SEQ ID NO: 233319 - DNA, 120 bp, Artificial Sequence
  ENSG00000119720_69 (sequence is synthesized)
ccaagggctcagaagggctttcaagatatctctaggaatcctcagtctcttgggaacaccagtagttattttctgccctcagagtgctaagaacatgcatggtccacaaaacttccaaaa

SEQ ID NO: 233320 - DNA, 120 bp, Artificial Sequence
  ENSG00000119720_70 (sequence is synthesized)
aggaaagctgtacttcctttggaagcaatagccacattaacgcagcctttattatttaaacaacgaatatccctggctctgtggtagtgaccatttcccactgtaattaccgttgaacgc

SEQ ID NO: 233321 - DNA, 120 bp, Artificial Sequence
  ENSG00000119720_71 (sequence is synthesized)
cagctctgggggtgtgatgtggcgaacgcatagtgaggtccacactccttgggaccgcagcctgagttcctgtccaaaggcttccctgtagctgggtccacccacaggctgctgttgagc

SEQ ID NO: 233322 - DNA, 120 bp, Artificial Sequence
  ENSG00000119720_72 (sequence is synthesized)
ggtaggtgtgtgtggagactgcagaaacaggaagtgtttgtgaaagagcacgctttattgggaagcagactgctgcacagtgaccaacaggccacccaatgggcacttacacatcgtact

SEQ ID NO: 233323 - DNA, 120 bp, Artificial Sequence
  ENSG00000119720_73 (sequence is synthesized)
ccaaaagacacaggatgttttgctaataaaaatcagtgggaacagggattcctctgggcaactcccccaacctcatccctttcagggattgagaaatctcccaaccattttcctgatgac

SEQ ID NO: 233324 - DNA, 120 bp, Artificial Sequence
  ENSG00000119720_74 (sequence is synthesized)
agccatggttcattagagatacagcccctcaggggtgccttcctgtttcttataaagaacattttctttagattttttgaagtcttcatttgttactttcattctacgttctcttaaggc

SEQ ID NO: 233325 - DNA, 120 bp, Artificial Sequence
  ENSG00000119720_75 (sequence is synthesized)
catcagaccagcttctgtacagattgcctgtaagaaagaagagtgtgttcagaaagtgacatactcatttttattctaacaaggaattccaaaaaacctattctgaggccaggcgcggtg

SEQ ID NO: 233326 - DNA, 120 bp, Artificial Sequence
  ENSG00000119720_76 (sequence is synthesized)
gcctgagcaacgagcgaaactctacctcaaaaaaaaaaaaaaaaaaatctgttctgaaataaagcatgagacacctagactaaacacaaattgcttatttgggaaagatttgatttttaa

SEQ ID NO: 233327 - DNA, 120 bp, Artificial Sequence
  ENSG00000119720_77 (sequence is synthesized)
aaaaaatgttttaagcatcctattttctgaaaggatgtgaagtggcttaaactgggagttactgtaactaagactgacccaagggtcagggctgtgggttctagttttggctcaggttct

SEQ ID NO: 233328 - DNA, 120 bp, Artificial Sequence
  ENSG00000119720_78 (sequence is synthesized)
aacaagctatgtggcttgtacaacaccacttttgttaaagagaataatattcctaggaaataaacaaaattatgccctgaaacttagaggcaattgacagtatatgtctatttcatttac

SEQ ID NO: 233329 - DNA, 120 bp, Artificial Sequence
  ENSG00000119720_79 (sequence is synthesized)
ttatagtcataaaagaacatgtattctggttagatactgtaagtggcagtatctatactatggaataatactacagagtatagcatttattccaatatatttaatttctcagtaattact

SEQ ID NO: 233330 - DNA, 120 bp, Artificial Sequence
  ENSG00000119720_80 (sequence is synthesized)
ggcccaaagtaaaagaaaacaataacccatgttacatgggttactgttattgttttaggcctgatctgtttagaaaggaaagagaaatgaaggaaatagatagagaaggacagcaaacaa

SEQ ID NO: 233331 - DNA, 120 bp, Artificial Sequence
  ENSG00000119720_81 (sequence is synthesized)
acatattatgtgggttactgttattgttttctttttcttttggccagtaattactgtggcaaaaacaagatgtggcaaaaaacacaatcctggcacagaagtttgtttggtgatggccat

SEQ ID NO: 233332 - DNA, 120 bp, Artificial Sequence
  ENSG00000119720_82 (sequence is synthesized)
caggttatttacttcaaatggttcgggtgaaaagaaagttttgtgtatagaaagagaaaaagcaaacaggtaaaatgttaactcttggcaaatcactgtgctattgttgcaacttttttg

SEQ ID NO: 233333 - DNA, 120 bp, Artificial Sequence
  ENSG00000119720_83 (sequence is synthesized)
aaggcttgaaaattgtcaaagtaagttcttatcttaaaattttaagatctttcaatttttaaaaaagaagatagattttacttgccaacagagacatctagttctctaggactaactgcc

SEQ ID NO: 233334 - DNA, 120 bp, Artificial Sequence
  ENSG00000119720_84 (sequence is synthesized)
aatgatccgtgggctcagggcaggtgctggcctggaaaggcactgcttgtgctgtccctacctaaccatggcatttatgcccaacgaaaacccagctctttccaggaaaagcaggtagaa

SEQ ID NO: 233335 - DNA, 120 bp, Artificial Sequence
  ENSG00000119720_85 (sequence is synthesized)
cccatattcaacgctgccagaccttgctgtaaattctggtcagctgggaggaaatgtcctaactcatgtacatttgtcataaaaccaagaagtataatctggtacaaccttccagaacac

SEQ ID NO: 233336 - DNA, 120 bp, Artificial Sequence
  ENSG00000119720_86 (sequence is synthesized)
agattgggagatgaatgcagcgggtgcttggtccccactctgcggctctggggagagttctcccaggacatacccttcccctgacctgggactgagcagctacatttgacacaccttgag

SEQ ID NO: 233337 - DNA, 120 bp, Artificial Sequence
  ENSG00000119720_87 (sequence is synthesized)
aaagtcacctgggcctaaggcttagtaccagcgactcagccttgtggctccaggtgatttagcgtcattcactgcataaaatgatgcattaagaatgacttcaatatcaagcacatatac

SEQ ID NO: 233338 - DNA, 120 bp, Artificial Sequence
  ENSG00000119720_88 (sequence is synthesized)
catttggatgtaatcgtaaaccaatatgatgattaaaatacagacacccacctgtccaggccaaccaccatcccaagagcacatatagactctttcctgattgacggccacattcccaga

SEQ ID NO: 233339 - DNA, 120 bp, Artificial Sequence
  ENSG00000119720_89 (sequence is synthesized)
aataagctgacacggctaggctctcaccttgatgtcagcaccagagaggtcatctttagccatgatcaggtcgtccagggttacatcatcagccagcgtcatcctgcttgtgtgaatctg

SEQ ID NO: 233340 - DNA, 120 bp, Artificial Sequence
  ENSG00000119720_90 (sequence is synthesized)
aaagatgcgcttcttcgtcttttcatcaggcagggggaactcaatcttcctgtcaatgcggcctgcaggtacaaagagatttgaagtcacaccaacatccaaacccaggctcggccatgg

SEQ ID NO: 233341 - DNA, 120 bp, Artificial Sequence
  ENSG00000119720_91 (sequence is synthesized)
ctcagaggcctcagcccatctccttacatacgaagtttcagtcggacagaattctgtgggaaggatgtctaaattttaaaaagtaaacatatatttttgtagtttgtagatttctacatt

SEQ ID NO: 233342 - DNA, 120 bp, Artificial Sequence
  ENSG00000119720_92 (sequence is synthesized)
tgaattctcttcatttaaaagaaactctctctgctttggtaccttcagaaataaatgaaaggagcaattcctgagtgaaactgggcagacctattgtgttaaaaacattacaaaagacag

SEQ ID NO: 233343 - DNA, 120 bp, Artificial Sequence
  ENSG00000119720_93 (sequence is synthesized)
caaacaaatcactgtttcttctgatgctacctgaatgtaaaaaggacaaatcctaccatcacatgaattatttcttccagaaaaagcagcaagttcttgaggctaaaaagggaatgttat

SEQ ID NO: 233344 - DNA, 120 bp, Artificial Sequence
  ENSG00000119720_94 (sequence is synthesized)
ggaaaagaaaagacaagacataagactggaattcaaagggccaaggtgcacagaccatatcatgctctgttttaaccctcatctcaagaggacctatttttttgtaaattatcctaagtt

SEQ ID NO: 233345 - DNA, 120 bp, Artificial Sequence
  ENSG00000119720_95 (sequence is synthesized)
tcactgcagtatttgcttttttatgtatcattttataggcctcccaaagcacacttaaacacaaatatataaacacattaatctccatgatgaaaccaaagcaaatttaacctggtctga

SEQ ID NO: 233346 - DNA, 120 bp, Artificial Sequence
  ENSG00000119720_96 (sequence is synthesized)
taagtgctggatccaaagtttctattcggtttgtggccatgataactttcacatctcccctagaatcaaatccatccaactggttcagcagttccaacattgttcgctgaatttctctct

SEQ ID NO: 233347 - DNA, 120 bp, Artificial Sequence
  ENSG00000119720_97 (sequence is synthesized)
caccaccagaattggagtcatatctttggaaaaaaaaaaagggaaggaatgaagactcaactgatcgcctgctcaaggggaattacagcaaagacctcattgtgacaaaacaccttaaca

SEQ ID NO: 233348 - DNA, 120 bp, Artificial Sequence
  ENSG00000119720_98 (sequence is synthesized)
aacattcctgtttcaactcacatggcactccctcaattatgctcggaaaaaataaattcagcaccccttgccatggtctgaatgtatttccccaaatttatgtgttgaaacttaatccct

SEQ ID NO: 233349 - DNA, 120 bp, Artificial Sequence
  ENSG00000119720_99 (sequence is synthesized)
actgtgtggctaagagatgaggccttttggaaagggctaaaggcatgaggcagagccttatacagcatgagttccttctaaaaagagaaaaaggccttatacagcatgtattccttataa

SEQ ID NO: 233350 - DNA, 120 bp, Artificial Sequence
  ENSG00000119720_100 (sequence is synthesized)
aaaatgctgcagggaactagtgtaggccctttttgctcttttgtttgtcccctgagcatttgtctcctctgcagaataggtgccatctcggaagcagagagcagccctcactagacatca

SEQ ID NO: 233351 - DNA, 120 bp, Artificial Sequence
  ENSG00000119720_101 (sequence is synthesized)
atgccagtgccttgatcttgggcttctcagcctccagaactgtgggaaatacatttctattctttatacaaataccagtcctaaggtattttgtttagcagcacaaatggactaagacgc

SEQ ID NO: 233352 - DNA, 120 bp, Artificial Sequence
  ENSG00000119720_102 (sequence is synthesized)
tcccatcagccaagttacagatcatattttttcatagcagtttctgtgtctgaaattgtatcatttattctgtttccatgtttggtatctgatccctacaacctgtgagctcctccaggg

SEQ ID NO: 233353 - DNA, 120 bp, Artificial Sequence
  ENSG00000119720_103 (sequence is synthesized)
cagagacttgtgctcacaactgtgtccctagagtccagatggtcctggatcagggcgggtgctcaagacatggttattcataactgaccaatctctccagacgttcacagttactgggca

SEQ ID NO: 233354 - DNA, 120 bp, Artificial Sequence
  ENSG00000119720_104 (sequence is synthesized)
gttgttagctggctcctgggagagcagagcctaaagcatgcatggaaggccacgcacagcaagaactgtggccatagggagagccccctgagattgctcattctcaagagaagagctatg

SEQ ID NO: 233355 - DNA, 120 bp, Artificial Sequence
  ENSG00000119720_105 (sequence is synthesized)
cggtgttccctactaaacaaggcaaaataagtatgagaaagtctacctttttgtcccaatggcgtcaatttcatcaataaacacgatggacggtgcatgttcttcagcaactcggaacaa

SEQ ID NO: 233356 - DNA, 120 bp, Artificial Sequence
  ENSG00000119720_106 (sequence is synthesized)
ttcccgtacgagtttgggcccatcacctaggtacttctgaataagttcagagccaaccactctcaagaaagtggctgaggtttggtttgctactgctttggctaacaaggttttacctat

SEQ ID NO: 233357 - DNA, 120 bp, Artificial Sequence
  ENSG00000119720_107 (sequence is synthesized)
tttggatgaaaaagataaaaaaaaaaaagacaccttaagtgccattttaacttaaaaactcgtatcattaccaccttaaatggacaccaaaaacaggcgggccctcatgctaaggcatgg

SEQ ID NO: 233358 - DNA, 120 bp, Artificial Sequence
  ENSG00000119720_108 (sequence is synthesized)
caccaattcaagtgtcacgacattccattctcctaagtagataagaggacatttagaaaaatctactaacatgtttggattatccttagctattttgctgaacttatgataacgtcagaa

SEQ ID NO: 233359 - DNA, 120 bp, Artificial Sequence
  ENSG00000119720_109 (sequence is synthesized)
aatactttttacttggttattttccaaccttgacccagtttcccctgaaaagctgcgaactataattacctgtacgaagaattgcttcattccagtaatgaaataaatctcatttttttc

SEQ ID NO: 233360 - DNA, 120 bp, Artificial Sequence
  ENSG00000119720_110 (sequence is synthesized)
aaaacaagtgattacaaagcaccaaatagcttctctacacggaggactcaaacacttgggacgttagtgatgcagccaatgggcagctgcctgccactgttactcgcctcccccgtggtc

SEQ ID NO: 233361 - DNA, 90 bp, Artificial Sequence
  ENSG00000119720_111 (sequence is synthesized)
gggcagctgcctgccactgttactcgcctcccccgtggtcgcacaggggagaattattatggcccagctcaggtctgagtcataagcatt

SEQ ID NO: 233362 - DNA, 120 bp, Artificial Sequence
  ENSG00000119720_112 (sequence is synthesized)
tgcagcctcaacctcctgagctcaagcattccccacaccttagctgggaccacaggtgcgcaccactgtgctgggctaatttttatatttttgtagagacagcgttttgccatgttgccc

SEQ ID NO: 233363 - DNA, 68 bp, Artificial Sequence
  ENSG00000119720_113 (sequence is synthesized)
gcatcttgttggctgagttcttcagatggtttgtatgagattcggttcctggggcttcgtgtgaggga

SEQ ID NO: 233364 - DNA, 120 bp, Artificial Sequence
  ENSG00000119720_114 (sequence is synthesized)
gtttgtatgagattcggttcctggggcttcgtgtgagggaagtggcctctgtgtgaagtctccattcctgcttccctctgggagactgcccttggccgaatcacacactcactcgggcac

SEQ ID NO: 233365 - DNA, 120 bp, Artificial Sequence
  ENSG00000119720_115 (sequence is synthesized)
ccatcacggcagttctgctcctccattagctgttttcttaggttcccagcaaagaccctgttggttacctgagatgctcccagtccacctgaggagacgtttacctggacacaatcccat

SEQ ID NO: 233366 - DNA, 120 bp, Artificial Sequence
  ENSG00000119720_116 (sequence is synthesized)
agggtgcagacacagtaccatgggaactccagcaaagaagagttgccccctgttatgtttcagtcctgacttaggaatttcatgaggggtctcagttgtcagttcagaagatgagaaagg

SEQ ID NO: 233367 - DNA, 120 bp, Artificial Sequence
  ENSG00000119720_117 (sequence is synthesized)
aggaccaggagagccagatagcgcccatgaactcttccctccctcgagactgcgccagtcagaggtcaaaggtacacgcaggccacgtctcagaagatgaaatcatggacggaagccaca

SEQ ID NO: 233368 - DNA, 120 bp, Artificial Sequence
  ENSG00000119720_118 (sequence is synthesized)
cgtggtccccaccaagctttcacctggcatccagcccttccatacctccgtgcagtgagggcatctccagcgctgatggaggctggccagctgtgtacctggatttgttgggttccgaga

SEQ ID NO: 233369 - DNA, 120 bp, Artificial Sequence
  ENSG00000119720_119 (sequence is synthesized)
ttagctgtgcatggttgttacattttgtcagtatcttaggaaaggacactgaagtatgttagcatgggaaggaaggacagcgctcagtggctctttggttataaattcagaggctcagcc

SEQ ID NO: 233370 - DNA, 120 bp, Artificial Sequence
  ENSG00000119720_120 (sequence is synthesized)
tcagaactggaggcttccaccagggaggacacgcaggagtcctccgagcctcacagctggccctgtgcgtggcactcacagaggctggggaaagactgggccttgcctgaagcaaggtta

SEQ ID NO: 233371 - DNA, 120 bp, Artificial Sequence
  ENSG00000119720_121 (sequence is synthesized)
tcacagttccgtccctgtgactgtgggagttaacggttgagaaggactggccatggagtcccggctacttgggagactgaggtgggaggactgcttgagcccagaagttcaaggccagcc

SEQ ID NO: 233372 - DNA, 120 bp, Artificial Sequence
  ENSG00000119720_122 (sequence is synthesized)
aaaaaaaaccaaaaaaaccaaacaaaaaacaaatagaaaagggagtgaggccatccttggtagatggagttcctgagatgtaaattggagagtggagtccctggatgccactgttcaggt

SEQ ID NO: 233373 - DNA, 120 bp, Artificial Sequence
  ENSG00000119720_123 (sequence is synthesized)
ctggatgccactgttcaggtttctgggaagccggtcagcagccctcactggtcccgggctggatgctgtgccccggccgcttggttgggcagggctggcgtcccctagaaccttctgagg

SEQ ID NO: 233374 - DNA, 120 bp, Artificial Sequence
  ENSG00000119720_124 (sequence is synthesized)
cctgtgcccactcctggctgcacagctacctgtggagctgcccgtgtgggctgtgattccttggagggcttgagaggggctgttgtcagcggaggtcccaggctgggtctccttccacac

SEQ ID NO: 233375 - DNA, 120 bp, Artificial Sequence
  ENSG00000119720_125 (sequence is synthesized)
tgggctgggaaggaggctgtgtggctgagtcgagatggagggttttatatctagagagaacacgtgctgaatatccacacagatactgagattgccgatggaacttgcaccttttgtaag

SEQ ID NO: 233376 - DNA, 120 bp, Artificial Sequence
  ENSG00000119720_126 (sequence is synthesized)
gtcagtgatcacagtcctggccatctcttttctctaaaagatagttttcagaaaatggcaagtattaaagcaagtgtcttctctatgttttctaagataagtattgtagaagattttctc

SEQ ID NO: 233377 - DNA, 120 bp, Artificial Sequence
  ENSG00000119720_127 (sequence is synthesized)
tatttgtataatgtcttcagcctcacctcactgacactccttggtttcaagcactgttactaacacccagaggtgacagcctacagcaaaggaggagatctgagactttaaaaagtcagt

SEQ ID NO: 233378 - DNA, 120 bp, Artificial Sequence
  ENSG00000119720_128 (sequence is synthesized)
agtgttcaggattgacactctggggccatttgaatgggaggaaacaaccccaacacagcagtggcttctgagagtgctccctggcacctgcccctgtcccacagccaccgtgacggtgcc

SEQ ID NO: 233379 - DNA, 120 bp, Artificial Sequence
  ENSG00000119720_129 (sequence is synthesized)
aggccctctgcacaggtgggctcactgcagctgagggcttgtgcccgtcatccaggggcgtttgtgtagccttagcctctctgtgtcaactaatcatgtttgtattttctccccctcacc

SEQ ID NO: 233380 - DNA, 120 bp, Artificial Sequence
  ENSG00000119720_130 (sequence is synthesized)
ccgccaggtctccgtccagctagtgtcttcccggcctgccccgcggcaccggggatgctcggctcatggacgccataccctgtcccaaggtacatccagagccttttcctggtgaaactg

SEQ ID NO: 233381 - DNA, 120 bp, Artificial Sequence
  ENSG00000119720_131 (sequence is synthesized)
tcccctgtggagtcagagcctggccctacctggggctggtgcttcatggaagtgttgccgtgggtagctggtttcccagcatttggtcagagtccagcccagatgctgaaagagttggga

SEQ ID NO: 233382 - DNA, 120 bp, Artificial Sequence
  ENSG00000119720_132 (sequence is synthesized)
tcatgtcccagcctggctgtgagagcccaggtcaggtgacactcagaagtgaaactgagggcgacggccagcaattcctggaccccttttaaaagagaaggcctcgcttggcgtttgctc

SEQ ID NO: 233383 - DNA, 120 bp, Artificial Sequence
  ENSG00000119720_133 (sequence is synthesized)
acttttgcgagttcagtgtccttcctgaacatgcccagtgctgcccgagttaagaaagtctcagccaaggggagcaggggccgtggagggcgacaggagggcagggtcaccaggaacctg

SEQ ID NO: 233384 - DNA, 120 bp, Artificial Sequence
  ENSG00000119720_134 (sequence is synthesized)
ttttcgatatcaaaaattcacagtctttatggaaaatgcttgagcactttgtctgctgttaaggacggcagcatcttatctcaccctgcgttgcctggcacggaagaggccatgtttgcc

SEQ ID NO: 233385 - DNA, 120 bp, Artificial Sequence
  ENSG00000119720_135 (sequence is synthesized)
agaaattactaagatctagaagacaggcatgatcttaaattcatgagatgttaaagaagagttgaagtgttataggaagaagtcaagccaggcagaaagaaagttaattactagtccttg

SEQ ID NO: 233386 - DNA, 120 bp, Artificial Sequence
  ENSG00000119723_0 (sequence is synthesized)
agttctgagtgcgacggcgcaggtctgcaccatggcggcccggcttgtcagccgatgcggggctgtgcgtgcagctccccacagcggcccgctggtgtcctggcgcaggtggtccggcgc

SEQ ID NO: 233387 - DNA, 120 bp, Artificial Sequence
  ENSG00000119723_1 (sequence is synthesized)
ctcaacagacaccgtgtatgacgtggtggtgtcgggtggaggcctggtgggcgctgccatggcctgtgccttgggatatgatattcactttcatgacaagaaaatcctgttgctcgaagc

SEQ ID NO: 233388 - DNA, 120 bp, Artificial Sequence
  ENSG00000119723_2 (sequence is synthesized)
aggtccaaagaaagtactggagaaattgtcagaaacttacagcaacagggtcagctccatttcccctggctctgcaacgcttctcagtagttttggtgcctgggaccatatctgcaacat

SEQ ID NO: 233389 - DNA, 120 bp, Artificial Sequence
  ENSG00000119723_3 (sequence is synthesized)
gagatacagagcctttcggcgaatgcaggtgtgggacgcctgctcagaggccctgataatgtttgataaggataatttagatgacatgggctatatcgtggagaatgatgtcatcatgca

SEQ ID NO: 233390 - DNA, 120 bp, Artificial Sequence
  ENSG00000119723_4 (sequence is synthesized)
tgctctcactaagcagttggaggctgtgtctgaccgagtgacggttctctacaggagcaaagccattcgctatacctggccttgtccatttcctatggccgactccagcccttgggttca

SEQ ID NO: 233391 - DNA, 120 bp, Artificial Sequence
  ENSG00000119723_5 (sequence is synthesized)
tattaccctaggtgatggcagcaccttccagaccaaattgttgataggtgcagatggtcacaactccggagtacggcaggctgttggaatccagaatgtgagctggaactatgaccagtc

SEQ ID NO: 233392 - DNA, 120 bp, Artificial Sequence
  ENSG00000119723_6 (sequence is synthesized)
tgctgttgtggctactctgcatttatcagaggccacagaaaacaacgtagcctggcagagatttcttccctctgggcctattgctctgctcccgctctcagacaccttgagttccttggt

SEQ ID NO: 233393 - DNA, 120 bp, Artificial Sequence
  ENSG00000119723_7 (sequence is synthesized)
ttggtccacgtcccatgaacatgcagcagagctagttagcatggatgaggaaaaatttgtggatgccgttaactctgccttttggagtgatgctgaccacacggacttcatcgacacagc

SEQ ID NO: 233394 - DNA, 120 bp, Artificial Sequence
  ENSG00000119723_8 (sequence is synthesized)
aagcgtagccagggtggatgccaaaagccgagttctgtttcctcttgggttgggacatgctgctgagtacgtcaggcctcgggtggcgctcattggggatgcagcccacagagtccatcc

SEQ ID NO: 233395 - DNA, 120 bp, Artificial Sequence
  ENSG00000119723_9 (sequence is synthesized)
gcttgcaggacagggtgtcaacatgggctttggggatatctccagcttggcccatcacctcagtacggcagccttcaatgggaaggacttaggttccgtgagccacctcacaggttatga

SEQ ID NO: 233396 - DNA, 120 bp, Artificial Sequence
  ENSG00000119723_10 (sequence is synthesized)
aacagaaagacagcgtcacaacactgctcttctggctgctacagacttactaaaaaggctctattctaccagtgcctccccgcttgtgttgctcaggacgtggggcttgcaggccacaaa

SEQ ID NO: 233397 - DNA, 120 bp, Artificial Sequence
  ENSG00000119723_11 (sequence is synthesized)
tgcagtgtctccactcaaagaacagattatggcctttgcaagcaaatgagtactcctctcctaaagaaagattacgttgatgaaaaagaacatcctgcccaggacccatcatacatattt

SEQ ID NO: 233398 - DNA, 120 bp, Artificial Sequence
  ENSG00000119723_12 (sequence is synthesized)
tcaagatcttatttaatttaataaacttactttacattaaaattctctttttcttctttgcttaatgggcctgtggcacccaaataatgaatgataatttgctgtgaggagcgtatatta

SEQ ID NO: 233399 - DNA, 120 bp, Artificial Sequence
  ENSG00000119723_13 (sequence is synthesized)
gccagaccaaaggaaaaaacttcgaaggaagacttacaatttggttgaaaagagctttttattactaaaaaacccacaaggtgctgtctcactcatttccagttaatcatttctaaagag

SEQ ID NO: 233400 - DNA, 120 bp, Artificial Sequence
  ENSG00000119723_14 (sequence is synthesized)
aaaatttacattttgtttttgttttaatgttggtcataaatttatacagttgttttttgatagaggtaagaattagactcgatgcatttttgttagaattgctgtttaaatgttaacatc

SEQ ID NO: 233401 - DNA, 120 bp, Artificial Sequence
  ENSG00000119723_15 (sequence is synthesized)
agaatgcaaattaaatataaattgctttaacctttgttacaggtatactggactttctgaaaggaaaaccaggtctcattaatgctagttattactttatcacagcaccagatttccatt

SEQ ID NO: 233402 - DNA, 120 bp, Artificial Sequence
  ENSG00000119723_16 (sequence is synthesized)
ttatttatggttcctctctgggacaccactgtcggtttaataaaacaataaataattcattgcacagatccgaagacctcaggaaccagatcacaagggaaaccgattagcagcagaatt

SEQ ID NO: 233403 - DNA, 120 bp, Artificial Sequence
  ENSG00000119723_17 (sequence is synthesized)
tggtagttgaagattcttattttgctaggggtcttgtatatctacatcttatcctagattctagggactctggttttcgatttaagctatagtttaattttaggcaaaacttttggttat

SEQ ID NO: 233404 - DNA, 120 bp, Artificial Sequence
  ENSG00000119723_18 (sequence is synthesized)
gaggaccagtacctattcaggccagctcaagtggagatggtctcatcgtaaatcctgtacagggagcaatctcatgggccgtcttaggttgtgaaataacagatagctgggcctcacagg

SEQ ID NO: 233405 - DNA, 120 bp, Artificial Sequence
  ENSG00000119723_19 (sequence is synthesized)
acaggcaccagagtgttgggaatggaggctgttctttccctctgaggagtctgtggtcattgatctcttgcctctcatttttctcctttctgctcacaagcttccctttttgcatggtag

SEQ ID NO: 233406 - DNA, 120 bp, Artificial Sequence
  ENSG00000119723_20 (sequence is synthesized)
ccattcctaaccctacatcagaactattcagctccagtgtgtgccccatactgaaactttccttattgctctctagttcaaatatcaggagggcctggctgagtttaactcatggctggc

SEQ ID NO: 233407 - DNA, 120 bp, Artificial Sequence
  ENSG00000119723_21 (sequence is synthesized)
acctgttcagtcatgtccagctttggctctgttggctgaggctgatgtgacagtgcaggggctccacctctaggggctgtgagtgaagcaggcctgatggaattatcctgccacacaaca

SEQ ID NO: 233408 - DNA, 120 bp, Artificial Sequence
  ENSG00000119723_22 (sequence is synthesized)
cggaaaccgggccgcggaggcacgatgagagccgtgagagccctagcacgacttgcccaaagacaatttctcaggatatgatattcactttcatgacaagaaaatcctgttgctcgaagc

SEQ ID NO: 233409 - DNA, 120 bp, Artificial Sequence
  ENSG00000119723_23 (sequence is synthesized)
ctttcccgggggcagtctcttttctctcctcacctgacggctcccctccgcgcctccgggggctccctcaggcctccccacggtcatttcagctggacagaggcagcagcgacagtgaca

SEQ ID NO: 233410 - DNA, 120 bp, Artificial Sequence
  ENSG00000119723_24 (sequence is synthesized)
gcgatagtggcagcagcggtggcagcgagagctatgcggggccagggtccacccctttctagctttggcgtctggttggcttccagggcagcctccgatccatcccgcccgaggaggcaa

SEQ ID NO: 233411 - DNA, 120 bp, Artificial Sequence
  ENSG00000119723_25 (sequence is synthesized)
ttggaggctgtgtctggtgaggcccccatcttccaccttgcattcattgggaagtgaactgcttaggacttactggaagaaaggatctcttttacaatattcagtgtccaccataaagaa

SEQ ID NO: 233412 - DNA, 68 bp, Artificial Sequence
  ENSG00000119723_26 (sequence is synthesized)
aaggatctcttttacaatattcagtgtccaccataaagaaatcctcaaggcgggcggatcacgaggtc

SEQ ID NO: 233413 - DNA, 120 bp, Artificial Sequence
  ENSG00000119723_27 (sequence is synthesized)
ctccgtctcaaaaaaaaaaaaaaaattcctctgatgattatttcacggtgctggatacttagaagtggaattgctgggtcatataataattctatgtttaatattttcagaagctgccaa

SEQ ID NO: 233414 - DNA, 120 bp, Artificial Sequence
  ENSG00000119723_28 (sequence is synthesized)
gctgccaaacttttctgaagaggctatacaatttcactttcccaccagtctataagggttccagtttctccacatcctcaccaacgcttattttccttctgtaaaaaaaaactgtagcca

SEQ ID NO: 233415 - DNA, 120 bp, Artificial Sequence
  ENSG00000119723_29 (sequence is synthesized)
tcctgttgagagtgaagttgtatctcattgtagtagtggttgcatttccttaataactaatgatgctgagtatcttttcatgtccttactggccatttgtgtatccactttggagaaatg

SEQ ID NO: 233416 - DNA, 120 bp, Artificial Sequence
  ENSG00000119723_30 (sequence is synthesized)
tctgttcaaaatattttgcctgtttttaaattggattatttgtttttgagttataggagttctttatatattttaaatataaatttatcagttatgcggcttgcaaatatcttaatgttc

SEQ ID NO: 233417 - DNA, 120 bp, Artificial Sequence
  ENSG00000119723_31 (sequence is synthesized)
tttgtgagtatcaatttacccagctgatgatgtgctgcagggggagatacagaaaggtgttgtttttttttttttgaaacggatccttgccaggctggagcgcagtggcgcgatcttggc

SEQ ID NO: 233418 - DNA, 66 bp, Artificial Sequence
  ENSG00000119723_32 (sequence is synthesized)
aggtggttttgagtcaggaaaaaggagtaaccagtcagctgtccctttctactttgtaactataat

SEQ ID NO: 233419 - DNA, 120 bp, Artificial Sequence
  ENSG00000119723_33 (sequence is synthesized)
gtaaccagtcagctgtccctttctactttgtaactataatgcttggtctagattatgtggaggagtgtacacacggaaatgcaaaacaatagaaataataaataataaccttttgagggt

SEQ ID NO: 233420 - DNA, 120 bp, Artificial Sequence
  ENSG00000119723_34 (sequence is synthesized)
tgctgttaggctgactgaaacagctgcctgggtggtggttagcattggcctttttttgaagctgtaacacttggattattttgaacagttctgctaggttgcagctacctgaacctttca

SEQ ID NO: 233421 - DNA, 120 bp, Artificial Sequence
  ENSG00000119723_35 (sequence is synthesized)
agcctgattcattgaaagtattcctagggaaaggccgagcgaatttcagcatggggcttaagagtaagcttagtagatagatgtgggttcaaaatgtaaatagtatcactaactgctcag

SEQ ID NO: 233422 - DNA, 120 bp, Artificial Sequence
  ENSG00000119723_36 (sequence is synthesized)
gattgaataaagactttcaaaatgagagaacttttgtaaaatccatggaacatctttagtacattgtaggtgctcaacaaatactaataattctggagtagacacagcctttggataata

SEQ ID NO: 233423 - DNA, 120 bp, Artificial Sequence
  ENSG00000119723_37 (sequence is synthesized)
tgggtaccagtattacttttggagcctaaatgacactcaaagcctgctaccttcacaccaaagactccactgctctgtagtagcaacaagaataaagggaactgaacatactgaaatgga

SEQ ID NO: 233424 - DNA, 120 bp, Artificial Sequence
  ENSG00000119723_38 (sequence is synthesized)
ttccgagataaatggtgaacactaccctactctgggccatttagtatatattcctggcacaggtctaggtcctctgcagtgcagtcattcaccattaattgtcctttctatgtagcaggc

SEQ ID NO: 233425 - DNA, 120 bp, Artificial Sequence
  ENSG00000119723_39 (sequence is synthesized)
tctggagatactgagaacagtctccgctttcaggaagttcatagtcaagtaaggaagaccgtaaatgacaatctccgtacagtgatagaagtatgcataggatgctgtggaagcatacag

SEQ ID NO: 233426 - DNA, 120 bp, Artificial Sequence
  ENSG00000119723_40 (sequence is synthesized)
gggggaaacacagagaaagactggaggagttaaaaagaggcgacgtcttctggatgctctgagatgttatcctaatgaaatagagacgggcattctaagcagaggagagtcatggaggta

SEQ ID NO: 233427 - DNA, 120 bp, Artificial Sequence
  ENSG00000119723_41 (sequence is synthesized)
ttctgaccagtccgcccacatgcatgcaagcctttcctcttcactttctctcagcctttttctggtttcaagggaatctgcccaggctgtttgtaagttccctttttgtctttttatgct

SEQ ID NO: 233428 - DNA, 120 bp, Artificial Sequence
  ENSG00000119723_42 (sequence is synthesized)
tttccaagtgcagcagagtcttagccgttggtattggtgttcttttgacacagctctcagacaccttgagttccttggtttggtccacgtcccatgaacatgcagcagagctagttagca

SEQ ID NO: 233429 - DNA, 120 bp, Artificial Sequence
  ENSG00000119723_43 (sequence is synthesized)
aggaatcagacaaggttcacattcagtccgaggaagtggggagaagcattcccaggagaattttcttctcattttatattttcctaccagagaggctgacaaattgtgattttctgctct

SEQ ID NO: 233430 - DNA, 120 bp, Artificial Sequence
  ENSG00000119723_44 (sequence is synthesized)
agtagaagatcctccttcaaagatccaatctcctttcccacttagctttctagtgtatcccatggggcagagtcatcagagcatctgacaaggagggagctcactgaggtgggtggagag

SEQ ID NO: 233431 - DNA, 120 bp, Artificial Sequence
  ENSG00000119723_45 (sequence is synthesized)
agggggtgggattggtagtctagggcagagttgaagatgtggacccctgcagttgctactgcctcaactccctgtctgaggaatgcatccttgaggcatgtgggtccatcatgttgactt

SEQ ID NO: 233432 - DNA, 120 bp, Artificial Sequence
  ENSG00000119723_46 (sequence is synthesized)
agaagtggagagtattattgaagaacactgaaaacaacctcttacgtaacaggatggagggacaagggggagcccaggtccttgtgaagtcactctggtctatagatcctttcttttgta

SEQ ID NO: 233433 - DNA, 120 bp, Artificial Sequence
  ENSG00000119723_47 (sequence is synthesized)
agctcatgtacagtttggctagatcttaaaacctctggggagtgatgagaagttgctttgcacttgaggggcttatcacttgtcaagatcagtgtaggcaagttgggtagcattagccta

SEQ ID NO: 233434 - DNA, 120 bp, Artificial Sequence
  ENSG00000119723_48 (sequence is synthesized)
agctttggttacaaacaaggtttctttattgaatttttaattccctgctactcacatttcaccttgtttgtcttgtggctgatgctgctcagtggagtgatgctgaccacacggacttca

SEQ ID NO: 233435 - DNA, 120 bp, Artificial Sequence
  ENSG00000119725_0 (sequence is synthesized)
aattcgggaccgactgacggccggccggcttcccggaactggaaggttacattgattacccacctagtacaacatcttacgggaagagcatagtatttcctagaggaatatgaacataac

SEQ ID NO: 233436 - DNA, 120 bp, Artificial Sequence
  ENSG00000119725_1 (sequence is synthesized)
aggaaggtatcattggctctgaattaaatttgaacttgtcccctgaatagctacaggttttggaagctgaatcaatgttatcagatgagttagaatccaaaccagagctcctggtacagt

SEQ ID NO: 233437 - DNA, 120 bp, Artificial Sequence
  ENSG00000119725_2 (sequence is synthesized)
ttgttcagaatacgtccatcccattgggacaggggcttgtagaatcagaagctaaagatattacttgcttgtccctccttcccgtgactgaagcctcagaatgcagtcggctaatgttac

SEQ ID NO: 233438 - DNA, 120 bp, Artificial Sequence
  ENSG00000119725_3 (sequence is synthesized)
cagatgatactacaaatcattctaactcctccaaggaggtcccttcctcagctgttttgagaagccttcgggtgaatgtgggtccagacggagaggagacgagagctcagactgtacaga

SEQ ID NO: 233439 - DNA, 120 bp, Artificial Sequence
  ENSG00000119725_4 (sequence is synthesized)
aatccccggagtttttgtccacttcagagtcttctagcttgttgcaagatctacagccaagtgatagcacttcttttattcttcttaacctaacaagagcaggtctgggctcttcagctg

SEQ ID NO: 233440 - DNA, 120 bp, Artificial Sequence
  ENSG00000119725_5 (sequence is synthesized)
agcacttagtgtttgtacaggatgaggcagaagattcagggaatgatttcctctccagtgagagcacagacagtagcattccatggttcctccgggttcaggagttggcccatgacagtt

SEQ ID NO: 233441 - DNA, 120 bp, Artificial Sequence
  ENSG00000119725_6 (sequence is synthesized)
tgattgctgctactcgtgcacaactggcaaagaatgcaaaaaccagcagcaatggagaaaatgtccaccttggttctggtgatgggcagtcaaaagattctgggccccttcctcaagtgg

SEQ ID NO: 233442 - DNA, 120 bp, Artificial Sequence
  ENSG00000119725_7 (sequence is synthesized)
aaaagaagctcaagtgtacagttgaaggttgtgaccggacatttgtatggccagctcactttaaataccacctcaagactcatcgaaatgaccgctccttcatctgtcctgcagaaggtt

SEQ ID NO: 233443 - DNA, 120 bp, Artificial Sequence
  ENSG00000119725_8 (sequence is synthesized)
gtgggaaaagcttctatgtgctgcagaggctgaaggtgcacatgaggacccacaatggagagaagccctttatgtgccatgagtctggctgtggtaagcagtttactacagctggaaacc

SEQ ID NO: 233444 - DNA, 120 bp, Artificial Sequence
  ENSG00000119725_9 (sequence is synthesized)
tgaagaaccaccggcgcatccacacaggagagaaacctttcctttgtgaagcccaaggatgtggccgttcctttgctgagtattctagcctccgaaaacatctggtggttcactcaggag

SEQ ID NO: 233445 - DNA, 120 bp, Artificial Sequence
  ENSG00000119725_10 (sequence is synthesized)
tgcagctgggagcagctgggagtcaagagcaggagcaaactgctgagccactaatgggcagtagtttgcttgaagaggcttcagtacccagtaaaaacctggtgtctatgaattcccagc

SEQ ID NO: 233446 - DNA, 120 bp, Artificial Sequence
  ENSG00000119725_11 (sequence is synthesized)
ccagccttggtggagagtccttgaacctaccaaataccaattctatcctgggagttgatgatgaggtgcttgctgaaggatccccacgttccctgtcttcagtgcctgatgtgacacatc

SEQ ID NO: 233447 - DNA, 120 bp, Artificial Sequence
  ENSG00000119725_12 (sequence is synthesized)
acctggtgaccatgcagtcagggaggcaatcatatgaagtttctgtcttaactgcagtaaatccacaagagttactaaaccaaggagatttaactgaaagacggacatgagcgtgggtgc

SEQ ID NO: 233448 - DNA, 120 bp, Artificial Sequence
  ENSG00000119725_13 (sequence is synthesized)
tgactcctggaagagcaactctatctgatctcaaaatgcgtatactgggaacaggatgccttagcccacaacagaaccagaatgaatctttgaaggcacaagactctgcttttgccactc

SEQ ID NO: 233449 - DNA, 120 bp, Artificial Sequence
  ENSG00000119725_14 (sequence is synthesized)
ttcctctttcctggtatagaagatggatgtaggagagcttcttttctaactaccatctgatcagacaaggaatgaagcaatgactgtgggctgggaaactgtacctacctctcttcccac

SEQ ID NO: 233450 - DNA, 120 bp, Artificial Sequence
  ENSG00000119725_15 (sequence is synthesized)
tgcaaatttctgggatagaccaaaagtgaatttgattatgtgttggctgaagttcttcattctgactgttgaggggaggttttcctttgaagagttttcatcccagactcagctgtcttt

SEQ ID NO: 233451 - DNA, 120 bp, Artificial Sequence
  ENSG00000119725_16 (sequence is synthesized)
tcacatggatgaaataattcctgctaccaacaacagagcttcaccaggaagttgagttttcaagatgccttgttgctttgaagaagggagtgatgtcaattctcttgttacattctccct

SEQ ID NO: 233452 - DNA, 120 bp, Artificial Sequence
  ENSG00000119725_17 (sequence is synthesized)
ttagcaacctgagtaagagactctctgccactgggctgcaaaaaaataaattacttgaatctccccttggcccaggctgaggtactatcttgtcctatacacttctacttggtcactttg

SEQ ID NO: 233453 - DNA, 120 bp, Artificial Sequence
  ENSG00000119725_18 (sequence is synthesized)
ctttcttcgttaatggaacatacagtagcatgttaagagggatttcatgtttttgtttttttaaagttaaaaattacatgatgcagagattcaggttttcctttaaataaacaaaacagc

SEQ ID NO: 233454 - DNA, 120 bp, Artificial Sequence
  ENSG00000119725_19 (sequence is synthesized)
ccagtcagttctttggctcttgttttatacaaaatttgttttcttagagattaagaatttaatctttccctttaaaatagtgtattgatttacccttaggattccataccagtaaaactg

SEQ ID NO: 233455 - DNA, 120 bp, Artificial Sequence
  ENSG00000119725_20 (sequence is synthesized)
aaccgaggagtcttaggaaacaacaagaacatcttcatttcttaagcccaggtgatagttactctgtcaccaccaaaaaagacgcatctgagaaaatggcaataaaaacagatacttctg

SEQ ID NO: 233456 - DNA, 62 bp, Artificial Sequence
  ENSG00000119725_21 (sequence is synthesized)
gcagtcagggaggcaatcatatgaagtttctgtcttaactgcagtaaatccacaagcctctg

SEQ ID NO: 233457 - DNA, 120 bp, Artificial Sequence
  ENSG00000119725_22 (sequence is synthesized)
atctggattttggacattgttaggtttgagatgctgttggatatacatgtggagatacctagcaagcagttagaaatgaaggtttggagttcagaagagatgactagagaaaaatgttac

SEQ ID NO: 233458 - DNA, 120 bp, Artificial Sequence
  ENSG00000119725_23 (sequence is synthesized)
agagatacattctgagaaatatgatggtagttgatatcattattatgcgaacatggtagagtatacttacacaaacctgtatggtttagcctgctacactctaggctgtatggtatacct

SEQ ID NO: 233459 - DNA, 120 bp, Artificial Sequence
  ENSG00000119725_24 (sequence is synthesized)
gttactgtactgaatactgtaggcagttgaagcacagtggtaaacattgtgtatctaaacatatctaaacgtggaaaaagtacaataaaaataggatattacaatctcacaggaccatca

SEQ ID NO: 233460 - DNA, 120 bp, Artificial Sequence
  ENSG00000119725_25 (sequence is synthesized)
aaataggatattacaatctcacaggaccatcatcctatatgtggtctgttaactgaaatgtcgttttgcagcacatgactttatataaatcagctgttctctagaacagagaacttgata

SEQ ID NO: 233461 - DNA, 120 bp, Artificial Sequence
  ENSG00000119725_26 (sequence is synthesized)
aaataactttagatattatgttgtttagtttttgtttgaatatggatgagactagtgaacagtcttaatattatcttttggtaaattcaaaggtttagatacatttctaacaactcgtat

SEQ ID NO: 233462 - DNA, 120 bp, Artificial Sequence
  ENSG00000119725_27 (sequence is synthesized)
ttttccttgccactattctgtgcaaagagattttggtaatgcagtggctggtttgagttgtatataatttaaattattctattgatgagagcagaaggctagaaatctgtaaattgttta

SEQ ID NO: 233463 - DNA, 120 bp, Artificial Sequence
  ENSG00000119725_28 (sequence is synthesized)
aattttattttctataaaataacttggtcatgccagatttgtgttcaaaaccaactagtattctgaattctcaactttaaataatgtacagagccccttttaaagaaaaaataatataca

SEQ ID NO: 233464 - DNA, 120 bp, Artificial Sequence
  ENSG00000119725_29 (sequence is synthesized)
atgatgttatggaagaacttaacttttagaacatttaaacagaacataaccaggttttacagaggagatataaagcaatttctccataccttcaaaagccatatcttctggagaaaagaa

SEQ ID NO: 233465 - DNA, 120 bp, Artificial Sequence
  ENSG00000119725_30 (sequence is synthesized)
agggctctctaggaaacacttgctcctctctggtatagaaatttcacccaagttacacaggccaggccctcttctctgaaaaacttaacaggtgaggtcagcatgcatttattcagtgcc

SEQ ID NO: 233466 - DNA, 120 bp, Artificial Sequence
  ENSG00000119725_31 (sequence is synthesized)
tactgtgtgcctggcaccatgggaaagacaaaagtagaagatagggaccttaaaatccagttgagaagtgaaagcttacatatatatgggaaagaacattgagtacataaaagatagtat

SEQ ID NO: 233467 - DNA, 120 bp, Artificial Sequence
  ENSG00000119725_32 (sequence is synthesized)
aagagcaggagcaaactggtgaggagggtgggcatagtggaacgctgtactacttctagggttccaagagccaaatcactgtcctgcctgcttatctggaaattttctgattctgttttg

SEQ ID NO: 233468 - DNA, 120 bp, Artificial Sequence
  ENSG00000119725_33 (sequence is synthesized)
ggtagatagacctggtctcatttgatgggctgatggtttccaaacatagctatacagtagaatcatctgcaaccttttaaaatttatatactttttgttgcttgtccgcccaccaataaa

SEQ ID NO: 233469 - DNA, 120 bp, Artificial Sequence
  ENSG00000119725_34 (sequence is synthesized)
agaggtttttgtattttgcattcccagcaaaatacaatcagcaatgatgattgctgtaccatgtgtttgtcaattgtgaatttgttcctagcatttagaaattgggagattctacttaaa

SEQ ID NO: 233470 - DNA, 120 bp, Artificial Sequence
  ENSG00000119725_35 (sequence is synthesized)
aatccttatttccagtgtcttaaaaaaaaatcagagaatctgccttaatctacccatggcaacagttggctagagctgaataacagctgccccttttctaggtactctctaggttactgc

SEQ ID NO: 233471 - DNA, 120 bp, Artificial Sequence
  ENSG00000119725_36 (sequence is synthesized)
agcccccacttggccattttacttacttttgctacctatcagtctcctatagacatgagtttttgacccctgctctaagtatggttttctgggtaggtagaatggagacggagagtttgg

SEQ ID NO: 233472 - DNA, 120 bp, Artificial Sequence
  ENSG00000119725_37 (sequence is synthesized)
gacttgaagacatagaggacaatttagattattatgttgtaagagccaccagtgtgaatgttgatgaccctaaagagggtggcagggaatatgacaaggggatattaggaacacaggatt

SEQ ID NO: 233473 - DNA, 120 bp, Artificial Sequence
  ENSG00000119725_38 (sequence is synthesized)
gaaatccttgaggaaagcacatgtcctagaggtccatggaagactaactgaaaaagaaggcatattttttgtggttgccatggtcctataccaaagaggttttgtgaaggcagcattaca

SEQ ID NO: 233474 - DNA, 120 bp, Artificial Sequence
  ENSG00000119725_39 (sequence is synthesized)
gggagtgtgctaaagccctcctggtgtactcttcctgccttcccccatatactgaagtttgagaggctgggaaggtgcggaatgggaaaaggagcagctgcttatgttcagtttaacatt

SEQ ID NO: 233475 - DNA, 120 bp, Artificial Sequence
  ENSG00000119725_40 (sequence is synthesized)
ctctgggtttctccatctaggtcttgagttcattctcttcctgtccttttggcttccttgtttaacctggtccctgtttcaggagagaagcctcatcagtgccaagtctgtgggaagacc

SEQ ID NO: 233476 - DNA, 120 bp, Artificial Sequence
  ENSG00000119725_41 (sequence is synthesized)
ttttatgggttttgatgcctgttgagcttgttgtattttaaaagaagtgtttcggtttgaattctttatttgcttgcttgttgtgattttttttgtatatgtaaagaagtgtctttatgt

SEQ ID NO: 233477 - DNA, 120 bp, Artificial Sequence
  ENSG00000119725_42 (sequence is synthesized)
tgggctcaagcagtcctcccaccttggcttcccaaagtgcttgggattataggtgtgagcaccatgcctggccaagtttctgctgttaagtgcatacaaagataactggggaagatgaag

SEQ ID NO: 233478 - DNA, 120 bp, Artificial Sequence
  ENSG00000119725_43 (sequence is synthesized)
catacaaagataactggggaagatgaagatagatacctgattaatgatcactaggagtaaaatataggagctttattgtttgagcctaagtatctgagtagggtctttccctggattaca

SEQ ID NO: 233479 - DNA, 82 bp, Artificial Sequence
  ENSG00000119725_44 (sequence is synthesized)
ttactaaaccaaggagatttaactgaaagacggacatgagcgtgggtgctgactcctggaagagcaactctatctgatctca

SEQ ID NO: 233480 - DNA, 120 bp, Artificial Sequence
  ENSG00000119725_45 (sequence is synthesized)
aggagtcccgaaggccgagagtgagtgagtgagtgggagcggggcggctgcggctcctcctgtccggggcggagccctgcgtcgcgggcctggggaggccccgccagcacccttgacgtc

SEQ ID NO: 233481 - DNA, 120 bp, Artificial Sequence
  ENSG00000119725_46 (sequence is synthesized)
tgggtcccgagcagtgcggcagccacacgacactgaggcgagcgagtgggtgtgtgcgtggggggtcagccaaacttcctgtcccgcgctcgagctgcttccggcgggagccggaagacg

SEQ ID NO: 233482 - DNA, 120 bp, Artificial Sequence
  ENSG00000119725_47 (sequence is synthesized)
gtgtgtggacggaattcgggaccgactgacggccggccggcttcccggaactggaaggtgagctccgaggtgggcctggccacccctcctcggttacattgattacccacctagtacaac

SEQ ID NO: 233483 - DNA, 120 bp, Artificial Sequence
  ENSG00000119725_48 (sequence is synthesized)
gggttgtgggggtgatataaagacaactaaaaagaaacaaactgttcactataaagatagaaagcttctcatcatcatgacagaatcagaaatcaaggcccttaattcttataatcaagg

SEQ ID NO: 233484 - DNA, 120 bp, Artificial Sequence
  ENSG00000119725_49 (sequence is synthesized)
tggcgggcccgggagcggccagtctgaagccctgcggctttggcccttcccctcgcgggtttttaggggcgatgttcttgctcctttgcttggttttgggggtagggatataggaacaga

SEQ ID NO: 233485 - DNA, 120 bp, Artificial Sequence
  ENSG00000119725_50 (sequence is synthesized)
ctgtcctgagaaagccagagtcagcgagtccccggggcgggggctcttggactgcacccgcagccggggcctgcctacggaccttggggccttatttctgaggcctttgtggtgtggggt

SEQ ID NO: 233486 - DNA, 120 bp, Artificial Sequence
  ENSG00000119725_51 (sequence is synthesized)
agaggatgccaggaggccttgccctgaatgtttcagtccagagctaccctctcctttcataccacttactttctgggtttggaaaagggacagctgcctactcggctgggctgggtcgcc

SEQ ID NO: 233487 - DNA, 120 bp, Artificial Sequence
  ENSG00000119729_0 (sequence is synthesized)
gaggggcccgggttggcgcggggcggggagagccgcctggcccctcccctccgccgccctccccaaagttgccgtctcccccggggccggccggtcttatgatccggcggatcctcctgg

SEQ ID NO: 233488 - DNA, 80 bp, Artificial Sequence
  ENSG00000119729_1 (sequence is synthesized)
ggtcttatgatccggcggatcctcctggggaggccgggccggggagagggcgcgggcgccgagtggcgggggcagcgggc

SEQ ID NO: 233489 - DNA, 120 bp, Artificial Sequence
  ENSG00000119729_2 (sequence is synthesized)
cgggggctccggggggaccatgcccggaggccggccggcagcagcatggctcacgggcccggcgcgctgatgctcaagtgcgtggtggtcggcgacggggcggtgggcaagacgtgccta

SEQ ID NO: 233490 - DNA, 120 bp, Artificial Sequence
  ENSG00000119729_3 (sequence is synthesized)
tcggcgacggggcggtgggcaagacgtgcctactcatgagctatgccaacgacgccttcccggaggagtacgtgcccaccgtcttcgaccactacgcagtcagcgtcaccgtggggggca

SEQ ID NO: 233491 - DNA, 120 bp, Artificial Sequence
  ENSG00000119729_4 (sequence is synthesized)
agcagtacctcctaggactctatgacacggccggacaggaagactatgaccgtctgaggcctttatcttacccaatgaccgatgtcttccttatatgcttctcggtggtaaatccagcct

SEQ ID NO: 233492 - DNA, 120 bp, Artificial Sequence
  ENSG00000119729_5 (sequence is synthesized)
catttcaaaatgtgaaagaggagtgggtaccggaacttaaggaatacgcaccaaatgtaccctttttattaataggaactcagattgatctccgagatgaccccaaaactttagcaagac

SEQ ID NO: 233493 - DNA, 120 bp, Artificial Sequence
  ENSG00000119729_6 (sequence is synthesized)
tgaatgatatgaaagaaaaacctatatgtgtggaacaaggacagaaactagcaaaagagataggagcatgctgctatgtggaatgttcagctttaacccagaagggattgaagactgttt

SEQ ID NO: 233494 - DNA, 120 bp, Artificial Sequence
  ENSG00000119729_7 (sequence is synthesized)
ttgatgaggctatcatagccattttaactccaaagaaacacactgtaaaaaaaagaataggatcaagatgtataaactgttgtttaattacgtgagaaacatcttcagtggccaaggaaa

SEQ ID NO: 233495 - DNA, 120 bp, Artificial Sequence
  ENSG00000119729_8 (sequence is synthesized)
ctgtccatttctctcagaaagcaaatgaaatgctacagctatacccagaccttttataggtaatgaagcagttcaaaacttgaaagaaaacaaaacctgtcctcagaattctataaagtg

SEQ ID NO: 233496 - DNA, 120 bp, Artificial Sequence
  ENSG00000119729_9 (sequence is synthesized)
tattaagaatgttccttaaaggtttaagaagcagtaagcagcatctgaagccacaatctattataaatactttatttcaactagaaggtacaatctctcaggggtttcatagtttaaaaa

SEQ ID NO: 233497 - DNA, 120 bp, Artificial Sequence
  ENSG00000119729_10 (sequence is synthesized)
gctacaatcacatcatgttgtaactacgtaaaaaacagagctgtaaatggaactgcttggctttgaccatacacatttctgcccagcccttacagaatctgcacaaagaaatatctccct

SEQ ID NO: 233498 - DNA, 120 bp, Artificial Sequence
  ENSG00000119729_11 (sequence is synthesized)
ttgctccagttaattgttcttgtatgtaagttgctttctattccagtatatccagagtggtgaaataacaaggccagccacgtagccaaaggtcgctccaagcgtacaggagatgggcca

SEQ ID NO: 233499 - DNA, 120 bp, Artificial Sequence
  ENSG00000119729_12 (sequence is synthesized)
tacctgaggagagaatgtatgagatcaaaaaagaacaaatgttttattattacttgagcacaagtgtaacctaaatatttctatattaaagcttaatgtgctttcttaaagaatgccaaa

SEQ ID NO: 233500 - DNA, 120 bp, Artificial Sequence
  ENSG00000119729_13 (sequence is synthesized)
agtgtaataaggtcataactgcatttatcatgaacactaaaaatgtacacattttagttaatgtgcattaaactgtaacaaggcttctggcaattgtagatttagtttgacgctccccaa

SEQ ID NO: 233501 - DNA, 120 bp, Artificial Sequence
  ENSG00000119729_14 (sequence is synthesized)
agtgcatgagacacatgctaaaattacaaattaaaattttgggtcagactttgccataatgatagactcaatttagctctctgaactagttggtaattttttttttttaattcccacttt

SEQ ID NO: 233502 - DNA, 120 bp, Artificial Sequence
  ENSG00000119729_15 (sequence is synthesized)
ggctgtgtacatcaaatgaaatgagaagtgtgtatgctgaccaaaccacaagaaactttctttaagttgtgttaaagaggaaagacctagaatccaagcgtgttacatgaaaattgtaac

SEQ ID NO: 233503 - DNA, 120 bp, Artificial Sequence
  ENSG00000119729_16 (sequence is synthesized)
agagcagctgcttccacctttcagatatagatgttggaaccacagcagaagttatagagcgacaacttatatacacacctagaatgtaagttaaacaaaataccggcttccagagacccc

SEQ ID NO: 233504 - DNA, 120 bp, Artificial Sequence
  ENSG00000119729_17 (sequence is synthesized)
aaagaaaaaaaagttggaggaaaattttcatgttcttctgtgaagcttatttggtacactggagccatttctaatctttctctggggggaacaggccacagaactgtgttagaggtgaac

SEQ ID NO: 233505 - DNA, 120 bp, Artificial Sequence
  ENSG00000119729_18 (sequence is synthesized)
catcttaattactagttctattacctaattcagcttccttgtttggtctgctgtggatctgccttattgcatatgccatgcatcagataatggatgcatcagataatggtgttagacaaa

SEQ ID NO: 233506 - DNA, 120 bp, Artificial Sequence
  ENSG00000119729_19 (sequence is synthesized)
gcttcattgtgaacaacctaatgcattttagagaaacaatctcatcacattttttctagcctttcctacatttaaacttgctgttgcccaaattataattttttaaatgtctttggtggg

SEQ ID NO: 233507 - DNA, 120 bp, Artificial Sequence
  ENSG00000119729_20 (sequence is synthesized)
cttctgttaattcacatgacttgagcttatagctatgtctactgcacagattgggtaatggaacactaaacttttatacttgaaaatgacagccttaaatgctcatatcagtcacaaatc

SEQ ID NO: 233508 - DNA, 120 bp, Artificial Sequence
  ENSG00000119729_21 (sequence is synthesized)
taggatgtactgtcttgttgtatgtgagctttgtagagatttttaaaaatataagcatcaccttcccattgaagagtggagagagtctactggatgactggccaggaactttctctctga

SEQ ID NO: 233509 - DNA, 120 bp, Artificial Sequence
  ENSG00000119729_22 (sequence is synthesized)
atcggacatttggatgtcttctttcttccaagaaatggtggttcacattaaagtatcatggccttatgtatgctcaaatggaatcttatgtaactttcttatttaattttggtctgctta

SEQ ID NO: 233510 - DNA, 120 bp, Artificial Sequence
  ENSG00000119729_23 (sequence is synthesized)
tttttagataaaattgaaaggaattgtataaatcaattaacatattagctgagttgtccaacacatggtataaacgaattacaacagtaaactattacacatttccaacttgcctttggg

SEQ ID NO: 233511 - DNA, 120 bp, Artificial Sequence
  ENSG00000119729_24 (sequence is synthesized)
gatttatgaggattttttttggtggggggagggggctccaattcatatctctgaaacccttcacacttggtttactaattcaaagttagaagtctagaatttgccctgccctaacagaaa

SEQ ID NO: 233512 - DNA, 120 bp, Artificial Sequence
  ENSG00000119729_25 (sequence is synthesized)
cagattaggaatttgtctacacaaactggtgtcacctgtttcttgactgggatttggtttcctcattataaatatgggaggtagaacagagatctccaacgtctctcccatttatcacag

SEQ ID NO: 233513 - DNA, 120 bp, Artificial Sequence
  ENSG00000119729_26 (sequence is synthesized)
taattttcttattcacagtaatcattgttggatgttaccttttcagcttcacattctcaagatggtaaaaatcatgtatatagattatcagaactctaagcaaagatgactgtcacatct

SEQ ID NO: 233514 - DNA, 120 bp, Artificial Sequence
  ENSG00000119729_27 (sequence is synthesized)
gaagctgaggtgccttaggtactctactgaccttgatgggtttggagttccccattgcttatcaagagctttttaattgctttggttctttagtttttctttttgcaaaaatccttcctg

SEQ ID NO: 233515 - DNA, 120 bp, Artificial Sequence
  ENSG00000119729_28 (sequence is synthesized)
tcactttaactaaaaaccaaagatttgttttctattgataagcagactagagaaaaactgccttattttcagaagcatgtcttcattcaaagcttaggcttcaatagaaattcagactaa

SEQ ID NO: 233516 - DNA, 120 bp, Artificial Sequence
  ENSG00000119729_29 (sequence is synthesized)
tcactgaaatgactatttcaaactagtgaaatatctgggaaataaactgcttcaaaaatattttactgacatgaattttgctagtgaatacaaatacactgcctcaaataaggccatgta

SEQ ID NO: 233517 - DNA, 120 bp, Artificial Sequence
  ENSG00000119729_30 (sequence is synthesized)
tgaatgaacttacaagatatttgagttaatcagtgtttgcatatagagaattagttctaaagttcttaaaaataaatttaggggctccctgaaattttatttaatactttgctaacttac

SEQ ID NO: 233518 - DNA, 120 bp, Artificial Sequence
  ENSG00000119729_31 (sequence is synthesized)
actcttgttttatctccacaggtacattttaggttagctcatggtgaattctatttacaataagtggagcttggattaatgggttttgttatgaattatcttagtgactttagacactgt

SEQ ID NO: 233519 - DNA, 120 bp, Artificial Sequence
  ENSG00000119729_32 (sequence is synthesized)
ttccatttgatttttaactatttaaaataccaaattaaataccagtttgttggttgttacttttaaatgattgttactttaacagtgtcccttcttaacacatggggttacaaataaaat

SEQ ID NO: 233520 - DNA, 120 bp, Artificial Sequence
  ENSG00000119729_33 (sequence is synthesized)
actatgcatagtttactatctacgtaaagcactgaactttttaccttagtagtttttatttattaccctatgtaaacatttaggataatactctttcctctatttatgctgagagtctac

SEQ ID NO: 233521 - DNA, 120 bp, Artificial Sequence
  ENSG00000119729_34 (sequence is synthesized)
taatcattggcaaagtatgagtccctatactctgttaaaaaaagctcactgttaaagtatagggagaatagtaatccctcatgaatcccagctagattccaatttgggttactaaattgt

SEQ ID NO: 233522 - DNA, 120 bp, Artificial Sequence
  ENSG00000119729_35 (sequence is synthesized)
attttaatcattttgtaatttcagtatggctctttgttctcaaacacatacataccaccacgcacattcttttaaacagctgccacacctcacctccaacagaatgccaaaaatgaaatg

SEQ ID NO: 233523 - DNA, 120 bp, Artificial Sequence
  ENSG00000119729_36 (sequence is synthesized)
ttaaaaaattttgtctaatgaagggttacggcttggaacacttggttattcatgttatgtaaatcaagaagtgcatgccatcagcaaattaaaatgtggactggctttgaagactgttaa

SEQ ID NO: 233524 - DNA, 120 bp, Artificial Sequence
  ENSG00000119729_37 (sequence is synthesized)
ggggggcaagcagtacctcctaggactctatgacacggccggacaggaggacactggagagttggctgtgagaagttgtgactttgataagtcgatcttttaaaagaagactatgaccgt

SEQ ID NO: 233525 - DNA, 120 bp, Artificial Sequence
  ENSG00000119729_38 (sequence is synthesized)
cattatctcatttaatccttgcatgaactcagtgaggtaggtctgtttcccctgttacacagaagagacagtggaggctgggagatgtcagataattcgcccaagatcctgcaggtaata

SEQ ID NO: 233526 - DNA, 120 bp, Artificial Sequence
  ENSG00000119729_39 (sequence is synthesized)
aatggcagagttgggtttcagtccaaagcctgactcctgggccgagactcttacacctttgctacattgccagtgatattttcctaaaaagtcacatatggaaaaaagcatcggaaacac

SEQ ID NO: 233527 - DNA, 120 bp, Artificial Sequence
  ENSG00000119729_40 (sequence is synthesized)
gtgtcactactttcaacccttcttcattacttaaacagttgcactgtgccaaatcagctctgtcttaagactcattgagttagacagtggagccacctaggatgacagtttaaatttgtg

SEQ ID NO: 233528 - DNA, 120 bp, Artificial Sequence
  ENSG00000119729_41 (sequence is synthesized)
gccaggcagaggggcaggggttgccgcctcgagcacaggccaagtttcagagcactagtgtgtatcagttctccgggattacaacggaatacctttgaggaacattggggaccgaaaggc

SEQ ID NO: 233529 - DNA, 120 bp, Artificial Sequence
  ENSG00000119729_42 (sequence is synthesized)
ggctcctgctccccgcacttcctacccctcggcgccctgggccgtcctccttgaccttcccacatcccctttcctactgccccaaggccccgggggaaatattcgaggggaccgagcgag

SEQ ID NO: 233530 - DNA, 120 bp, Artificial Sequence
  ENSG00000119729_43 (sequence is synthesized)
acgtggctacgggacttgggagaagggggtggacggctggggaccacatcacaccccggccctttgccggttcacagtgagctggccgcacgggaaaagggggtgacatctcgcggggag

SEQ ID NO: 233531 - DNA, 120 bp, Artificial Sequence
  ENSG00000119729_44 (sequence is synthesized)
acttttgttgttccctctgcctggaatgttcttccctatggacatgattcattctttcactcttttcaggtctctgctcaaataccacatcctcagtgtgatcttgttccttgactgctc

SEQ ID NO: 233532 - DNA, 120 bp, Artificial Sequence
  ENSG00000119729_45 (sequence is synthesized)
caggcatgctcctgcatcaggatctatctgcctggagctcttcccctaggtatccctcactgctcaaacttccccattgagaagcctccccggacccccactaccattgtcctcagcact

SEQ ID NO: 233533 - DNA, 120 bp, Artificial Sequence
  ENSG00000119729_46 (sequence is synthesized)
agcagatgtcagcacatgtggacgccacacagcagggactctgctctttcgttcagttcactgacatatccccaggacctaaacagtgcttgacatatagtagatacccagtaaatatgt

SEQ ID NO: 233534 - DNA, 120 bp, Artificial Sequence
  ENSG00000119729_47 (sequence is synthesized)
ccggaggagtacgtgcccaccgtcttcgaccactacgcagtcagcgtcaccgtggggggcaagcagtacctcctaggactctatgacacggccggacaggctttgcagcaaagcgagttg

SEQ ID NO: 233535 - DNA, 120 bp, Artificial Sequence
  ENSG00000119729_48 (sequence is synthesized)
gatttctgggaggagatttctgtttcatctggatcctggggtcacgtgatcacgttttccttccatacgagagcatgggtttccagtggccaggatctgttgtgtccactagctccagca

SEQ ID NO: 233536 - DNA, 120 bp, Artificial Sequence
  ENSG00000119737_0 (sequence is synthesized)
gtcttgccgcggctcccgggatgcgcggaggcggtggcgatggcgatgatgcctctagtcctgcatcatccagagcggcaggcggagctggggtccggactgcgagatggaggaggggcg

SEQ ID NO: 233537 - DNA, 120 bp, Artificial Sequence
  ENSG00000119737_1 (sequence is synthesized)
gcgctgcggccacccggcaggcttatctgtcttgggcctcttttgtcacatattgctcatctgtgagctgaggccctgactcactgagtatttttggggagcagaagaaggagacatttc

SEQ ID NO: 233538 - DNA, 120 bp, Artificial Sequence
  ENSG00000119737_2 (sequence is synthesized)
tctccgaaaatgaactcaacaggccaccttcaggatgcccccaatgccacctcgctccatgtgcctcactcacaggaaggaaacagcacctctctccaggagggtcttcaggatctcatc

SEQ ID NO: 233539 - DNA, 120 bp, Artificial Sequence
  ENSG00000119737_3 (sequence is synthesized)
cacacagccaccttggtgacctgtacttttctactggcggtcatcttctgcctgggttcctatggcaacttcattgtcttcttgtccttcttcgatccagccttcaggaaattcagaacc

SEQ ID NO: 233540 - DNA, 120 bp, Artificial Sequence
  ENSG00000119737_4 (sequence is synthesized)
aactttgatttcatgatcctgaacctgtccttctgtgacctcttcatttgtggagtgacagcccccatgttcacctttgtgttattcttcagctcagccagtagtatcccggatgctttc

SEQ ID NO: 233541 - DNA, 120 bp, Artificial Sequence
  ENSG00000119737_5 (sequence is synthesized)
tgcttcactttccatctcaccagttcaggcttcatcatcatgtctctgaagacagtggcagtgatcgccctgcaccggctccggatggtgttggggaaacagcctaatcgcacggcctcc

SEQ ID NO: 233542 - DNA, 120 bp, Artificial Sequence
  ENSG00000119737_6 (sequence is synthesized)
tttccctgcaccgtactcctcaccctgcttctctgggccaccagtttcacccttgccaccttggctaccttgaaaaccagcaagtcccacctctgtcttcccatgtccagtctgattgct

SEQ ID NO: 233543 - DNA, 120 bp, Artificial Sequence
  ENSG00000119737_7 (sequence is synthesized)
ggaaaagggaaagccattttgtctctctatgtggtcgacttcaccttctgtgttgctgtggtctctgtctcttacatcatgattgctcagaccctgcggaagaacgctcaagtcagaaag

SEQ ID NO: 233544 - DNA, 120 bp, Artificial Sequence
  ENSG00000119737_8 (sequence is synthesized)
cctgtgcagggaggtggagatcccatccagtgtgccatgccggctctgtataggaaccagaattacaacaaactgcagcacgttcagacccgtggatataccaagagtcccaaccaactg

SEQ ID NO: 233545 - DNA, 120 bp, Artificial Sequence
  ENSG00000119737_9 (sequence is synthesized)
gtcacccctgcagcaagccgactccagctcgtatcagccatcaacctctccactgccaaggattccaaagccgtggtcacctgtgtgatcattgtgctgtcagtcctggtgtgctgtctt

SEQ ID NO: 233546 - DNA, 120 bp, Artificial Sequence
  ENSG00000119737_10 (sequence is synthesized)
ccactggggatttccttggtacaggtggttctctccagcaatgggagcttcattctttaccagtttgaattgtttggatttactcttatatttttcaagtcaggattaaacccttttata

SEQ ID NO: 233547 - DNA, 120 bp, Artificial Sequence
  ENSG00000119737_11 (sequence is synthesized)
tattctcggaacagtgcagggctgagaaggaaagtgctctggtgcctccaatacataggcctgggttttttctgctgcaaacaaaagactcgacttcgagccatgggaaaagggaacctc

SEQ ID NO: 233548 - DNA, 120 bp, Artificial Sequence
  ENSG00000119737_12 (sequence is synthesized)
gaagtcaacagaaacaaatcctcccatcatgaaacaaactctgcctacatgttatctccaaagccacagaagaaatttgtggaccaggcttgtggcccaagtcattcaaaagaaagtatg

SEQ ID NO: 233549 - DNA, 120 bp, Artificial Sequence
  ENSG00000119737_13 (sequence is synthesized)
gtgagtcccaagatctctgctggacatcaacactgtggtcagagcagctcgacccccatcaacactcggattgaaccttactacagcatctataacagcagcccttcccaggaggagagc

SEQ ID NO: 233550 - DNA, 120 bp, Artificial Sequence
  ENSG00000119737_14 (sequence is synthesized)
agcccatgtaacttacagccagtaaactcttttggatttgccaattcatatattgccatgcattatcacaccactaatgacttagtgcaggaatatgacagcacttcagccaagcagatt

SEQ ID NO: 233551 - DNA, 120 bp, Artificial Sequence
  ENSG00000119737_15 (sequence is synthesized)
ccagtcccctccgtttaaagtcatggaggctataggatcttatgtaaacagtttttgtttctgatagtaatggactttattctaacttgagatcagtggcggatcaaaacctacaagatt

SEQ ID NO: 233552 - DNA, 120 bp, Artificial Sequence
  ENSG00000119737_16 (sequence is synthesized)
caactgaaaagttggcagttatggttttctttcatctgatgtgtcagtatctgttgatttgctttgtagtttgttgacatcttaagatttgatgtgaaagttttagattttttaccctgc

SEQ ID NO: 233553 - DNA, 120 bp, Artificial Sequence
  ENSG00000119760_0 (sequence is synthesized)
agatcactaatcaacaaaccagctttcggggtctgacgcgatccttgcctcaggcctctcgaggtccagacagccgcccagcccgctctgcgacgcagcagtgaatagtgtggtacctcc

SEQ ID NO: 233554 - DNA, 120 bp, Artificial Sequence
  ENSG00000119760_1 (sequence is synthesized)
ttgtctcggttcaggtccagacctccccgtcttccggctgccctgaacgtcaggcgacctcaggaccctgtgattggcgcctgcgccggcggaccgtgaccgaggaaacccctggaggga

SEQ ID NO: 233555 - DNA, 120 bp, Artificial Sequence
  ENSG00000119760_2 (sequence is synthesized)
cttgggcattccttgggctccgtgcctgttcttcgtgctcctttcgggcaaggatctcacattatcagtctttgaccgacacagaatgcctggcatttgataaatgtttgttgaacttga

SEQ ID NO: 233556 - DNA, 120 bp, Artificial Sequence
  ENSG00000119760_3 (sequence is synthesized)
agagacatatggacaatgaatctgcaaagatactggggagagataccaatatcatcaagccagaccaacagaagttccttcgatttgctcccacgggagttccgtctggtggaagtccat

SEQ ID NO: 233557 - DNA, 120 bp, Artificial Sequence
  ENSG00000119760_4 (sequence is synthesized)
gacccacccctgcaccaaccctcagccaacaagccgaagccccccactatgctggacatcccctcagagccatgtagtctcaccatccatacgattcagttgattcagcacaaccgacgt

SEQ ID NO: 233558 - DNA, 120 bp, Artificial Sequence
  ENSG00000119760_5 (sequence is synthesized)
cttcgcaaccttattgccacagctcaggcccagaatcagcagcagacagaaggtgtaaaaactgaagagagtgaacctcttccctcgtgccctgggtcacctcctctccctgatgacctc

SEQ ID NO: 233559 - DNA, 120 bp, Artificial Sequence
  ENSG00000119760_6 (sequence is synthesized)
ctgcctttagattgtaagaatcccaatgcaccattccagatccggcacagtgacccagagagtgacttttatcgtgggaaaggggaacctgtgactgaactcagctggcactcctgtcgg

SEQ ID NO: 233560 - DNA, 120 bp, Artificial Sequence
  ENSG00000119760_7 (sequence is synthesized)
cagctcctctaccaggcagtggccacaatcctggcccacgcgggctttgactgtgctaatgagagtgtcctggagaccctaactgatgtggcacatgagtattgccttaagtttaccaag

SEQ ID NO: 233561 - DNA, 120 bp, Artificial Sequence
  ENSG00000119760_8 (sequence is synthesized)
ttgctgcgttttgctgtggaccgggaggcccggctgggacagactccttttcctgatgtgatggagcaggtattccatgaagtgggtattggcagtgtgctctccctccagaagttctgg

SEQ ID NO: 233562 - DNA, 120 bp, Artificial Sequence
  ENSG00000119760_9 (sequence is synthesized)
cagcaccgcatcaaggactatcacagttacatgctacagattagtaagcaactctctgaagaatatgaaaggattgtcaatcctgagaaggccacagaggacgctaaacctgtgaagatc

SEQ ID NO: 233563 - DNA, 120 bp, Artificial Sequence
  ENSG00000119760_10 (sequence is synthesized)
aaggaggaacctgtgagcgacatcacttttcctgtcagtgaggagctggaggctgaccttgcttctggagaccagtcactgcctatgggagtgcttggggctcagagcgaacgcttccca

SEQ ID NO: 233564 - DNA, 120 bp, Artificial Sequence
  ENSG00000119760_11 (sequence is synthesized)
tctaacctggaggttgaagcttcaccacaggcttcaagtgcagaggtaaatgcttctcctctttggaatctggcccatgtgaaaatggagcctcaagaaagtgaagaaggcaatgtctct

SEQ ID NO: 233565 - DNA, 120 bp, Artificial Sequence
  ENSG00000119760_12 (sequence is synthesized)
gggcatggtgtgctgggcagtgatgtcttcgaggagcctatgtcaggcatgagtgaagctgggattcctcagagccctgatgactcagatagcagctatggttcccactccactgacagc

SEQ ID NO: 233566 - DNA, 120 bp, Artificial Sequence
  ENSG00000119760_13 (sequence is synthesized)
ctcatggggtcctcccctgttttcaaccagcgctgcaagaagaggatgaggaaaatataaaaggaaaagagggagatgttttgtccagacctactagacccaacagaaaaggtttttgta

SEQ ID NO: 233567 - DNA, 120 bp, Artificial Sequence
  ENSG00000119760_14 (sequence is synthesized)
ttagaatctgtttccttaaaaattgatttgactcctgttcttaaacacaagtggtttttcctaattccagaggaactggacgtcaccaaacaaggttgcattttacttttgcatccagtt

SEQ ID NO: 233568 - DNA, 120 bp, Artificial Sequence
  ENSG00000119760_15 (sequence is synthesized)
tttatagttttccacaaccaagccacccttcacagataaaatatgatgctggcatggcaatcagaccaaagcactgtccccaattgttgtcttaactatgactagacatgttatacagcc

SEQ ID NO: 233569 - DNA, 120 bp, Artificial Sequence
  ENSG00000119760_16 (sequence is synthesized)
atttatcttgtacaactgagaagaatcatactttgacctaccttgtagagatgtgaggatttagatgtttgctaacttcaaaactgtgcttgaatagactaataatatatgctcatatca

SEQ ID NO: 233570 - DNA, 120 bp, Artificial Sequence
  ENSG00000119760_17 (sequence is synthesized)
tatctattagtcaccttcttaaaactgtttttgctacttttgaagtgtcttatttataagatcagaggtctgacaccttttttgcttagacagctctctatctcatccatttattttctt

SEQ ID NO: 233571 - DNA, 120 bp, Artificial Sequence
  ENSG00000119760_18 (sequence is synthesized)
ctctagacttactccatctctcctcatccttttgcctttgttatttctgctcggactcacatactttcaccatatacatattttcaattgtttctttccttttctcctttgtgagcaaag

SEQ ID NO: 233572 - DNA, 120 bp, Artificial Sequence
  ENSG00000119760_19 (sequence is synthesized)
caaacaagtactgtccaaggacagccttgtgcatatttcatttgttgcatttgcttggtcatcagaggacagcagtccattaagcacactttgctgcttctactgtaaaggcagccttta

SEQ ID NO: 233573 - DNA, 120 bp, Artificial Sequence
  ENSG00000119760_20 (sequence is synthesized)
aaacatagcaatatgcacctttcaactttacatcatgtcctgaacaacatcactgtggttactcatccatcagactatctgtatatataagtactgaatcagtatttattaagtaaatga

SEQ ID NO: 233574 - DNA, 120 bp, Artificial Sequence
  ENSG00000119760_21 (sequence is synthesized)
tgtagcactgtagtgattaggaatcattagcaaatgtgttgcttcatgccttggtgatggatgccagcatgttaaactgctgaagtttgattttctgatgcaaaatatatcttgtaaaat

SEQ ID NO: 233575 - DNA, 120 bp, Artificial Sequence
  ENSG00000119760_22 (sequence is synthesized)
ttagaccactcctttaatgcagaccaaaataaggcacagctttaattcattattgaatgccttaaatgtcccaggtattgagaataaatgaatatgatacaaatgaggttatagtttaac

SEQ ID NO: 233576 - DNA, 120 bp, Artificial Sequence
  ENSG00000119760_23 (sequence is synthesized)
aaatgaggttatagtttaacatataattttaaatttgccaattgtaactctttagcacatttctctaaaccctttctgtcacagtcttttttttaatttatttatttatttatttatttt

SEQ ID NO: 233577 - DNA, 120 bp, Artificial Sequence
  ENSG00000119760_24 (sequence is synthesized)
aggcgtgagccactgcacctggcctctgttgcagtcttatcttcattttcctttgtttataatgaaagtggcgattaggcagttagtttccataaagtggccgtatgggaatttagttca

SEQ ID NO: 233578 - DNA, 120 bp, Artificial Sequence
  ENSG00000119760_25 (sequence is synthesized)
ttcatccagcaaacattgagtaccaattatttgctaggtcctgtgcaaggaatacaaaaatgattaagacttcttccttacccttttggagcttgaagcataaggaagacaagttattct

SEQ ID NO: 233579 - DNA, 120 bp, Artificial Sequence
  ENSG00000119760_26 (sequence is synthesized)
gtaaggaagataaagcattcaaaagtactacagagaaaaaccaagtatgcttgagttttgcgaatgttctcctcttaaagaatagcttcaaattttgagaccagtggttcccactaagta

SEQ ID NO: 233580 - DNA, 120 bp, Artificial Sequence
  ENSG00000119760_27 (sequence is synthesized)
tagaacattaaaattaatactttataataaaacacttttattgctgcagaatgttaaactgcataacaggcaccagatggtcaagacgagggaaatatgagaaggcaaatgatgtgagga

SEQ ID NO: 233581 - DNA, 120 bp, Artificial Sequence
  ENSG00000119760_28 (sequence is synthesized)
ttagtatcttgagattcacctggtctggaattatgtcataggctactatgcatcagaatcacatggagggctttctaaaacagactgctcagcccacccccagggtttctgagttcatag

SEQ ID NO: 233582 - DNA, 120 bp, Artificial Sequence
  ENSG00000119760_29 (sequence is synthesized)
gttataagaggtaagttgaacaattccccagatgatgctgatgctcctggtccacaatgtgagaaccactaagttggagtactgactcatagagataaaattctttgaaagaaatgtact

SEQ ID NO: 233583 - DNA, 120 bp, Artificial Sequence
  ENSG00000119760_30 (sequence is synthesized)
gttttaagatactgtaaaatgtggaggcagggcaaacgtttataagggctgttatgtatgaaatgtgcctctgacccaaatccacggactttgcgaaaatcaccaaggagactttgcatt

SEQ ID NO: 233584 - DNA, 120 bp, Artificial Sequence
  ENSG00000119760_31 (sequence is synthesized)
aagttcagagtacaatacaaactgggcctagctctgtatttagtcagtatgtgcacgtgggaaactttagtaaaatatcacctccttattgagacaagtttggacatctggccttaagcc

SEQ ID NO: 233585 - DNA, 120 bp, Artificial Sequence
  ENSG00000119760_32 (sequence is synthesized)
tctgttgaacaggagaagtgaagctgtttgcaattatataattttctaatttgaaatcatgacaagcagtcttagaacaaagttaaaattaaaaagtctttatccaagtcaccaatgaaa

SEQ ID NO: 233586 - DNA, 120 bp, Artificial Sequence
  ENSG00000119760_33 (sequence is synthesized)
actttttacataaataactggctagacctcgtatttttcactacagaagcctataatctaaagttgccaggatttaaacacattacttttaggttattgtctacatttatcctgagacct

SEQ ID NO: 233587 - DNA, 120 bp, Artificial Sequence
  ENSG00000119760_34 (sequence is synthesized)
aggcaatgggaagccatttgatttaagttttaaaaagagtaagtctagcagcagtgtagagaatagatgacatacaaagagagattggaggaagggataccagttagaaggcagcagaaa

SEQ ID NO: 233588 - DNA, 120 bp, Artificial Sequence
  ENSG00000119760_35 (sequence is synthesized)
tctctcacgttctatatgtcaaaagttgaaagcataatgccatttagattaatggttcataaatttttccaccaggatcatgcctaagacacacagagtaagaaccacttcttattatct

SEQ ID NO: 233589 - DNA, 120 bp, Artificial Sequence
  ENSG00000119760_36 (sequence is synthesized)
ttaaccctactagtttttctcctattgatccagcacagatgtatcaagataccttatcatgccttgcttattgttcaggattgagcgtgatggtagttctggtaatgagttagtgagtga

SEQ ID NO: 233590 - DNA, 120 bp, Artificial Sequence
  ENSG00000119760_37 (sequence is synthesized)
gatgggaaatagggatactagagctccagatgctgttgtagctattggtccactaatgacccaaattctaccctgtggttcagtgtagtaggaattgtcatagtatgacaataaccagca

SEQ ID NO: 233591 - DNA, 120 bp, Artificial Sequence
  ENSG00000119760_38 (sequence is synthesized)
actctcccaagctcccagtggcgtctgtaggcggcgatggtgaagttgctccttcacgacctggagcgttgcgaagtggtgctaacatgagaaggtcataatatgagaaaaacaaaacgg

SEQ ID NO: 233592 - DNA, 80 bp, Artificial Sequence
  ENSG00000119771_0 (sequence is synthesized)
agacggtacccggagcggagcgagccagaagggagcatggtccccgcgccgcggccgcgccagcccccgcgccgccgccg

SEQ ID NO: 233593 - DNA, 120 bp, Artificial Sequence
  ENSG00000119771_1 (sequence is synthesized)
cggggagagggcgggggcgatgctgccggagccgccgccgccgccgccgcctcgatgagagccgcgccgcaccgctcatagccgcacaggctgacaggcaggaggaccgacttccctctc

SEQ ID NO: 233594 - DNA, 120 bp, Artificial Sequence
  ENSG00000119771_2 (sequence is synthesized)
ccgggcatcctccctgggctgccgggaggcggcggcggcggaggaggaggaggaacgaggggagaaggcggagagcaggaacgcgaggaggaggacctggatccgtttcctccggccagg

SEQ ID NO: 233595 - DNA, 120 bp, Artificial Sequence
  ENSG00000119771_3 (sequence is synthesized)
ccagccaccgctacccgccggcgctgtccgctctccatcagccctcctgcgcccacccgcgaccccgggctctctgcgcgtcgggccggggccggagccgcgcgccggagactatctggc

SEQ ID NO: 233596 - DNA, 120 bp, Artificial Sequence
  ENSG00000119771_4 (sequence is synthesized)
agactatctggcttcctggtgatgctcacgctttgctaagtgttggcggccatcgtggttttcgcatcctggggacgaatcctgagcttgccagagacgggcggcgcaaggtccgggctc

SEQ ID NO: 233597 - DNA, 120 bp, Artificial Sequence
  ENSG00000119771_5 (sequence is synthesized)
tgtttccctgtgagaagccgcctcggcccaccgagatgtcccggcaccatagccgcttcgaaagagattaccgggtgggctgggaccgccgcgaatggagcgtcaacgggacgcatggga

SEQ ID NO: 233598 - DNA, 120 bp, Artificial Sequence
  ENSG00000119771_6 (sequence is synthesized)
ccaccagcatctgcagtgtcacctcgggggccggtggcggcacagccagcagcctcagcgtccggcccggcctcctgccgctgcccgtggtgccctcccggctgcccaccccggctacag

SEQ ID NO: 233599 - DNA, 120 bp, Artificial Sequence
  ENSG00000119771_7 (sequence is synthesized)
ctcctgctccctgcaccaccggcagcagcgaggccatcaccagcctcgtggccagctctgcgtctgcggtcaccaccaaggctcccggcatctccaaaggggacagtcagtcccagggac

SEQ ID NO: 233600 - DNA, 120 bp, Artificial Sequence
  ENSG00000119771_8 (sequence is synthesized)
tggcgaccagcatccggtgggggcagacgcctatcaatcagtccacaccctgggacactgatgagccaccctccaaacagatgagagagagtgacaatccaggcacagggccatgggtga

SEQ ID NO: 233601 - DNA, 120 bp, Artificial Sequence
  ENSG00000119771_9 (sequence is synthesized)
ccacggtggccgccgggaaccagcccaccctgattgcacactcctatggagtggcccagcctcccaccttcagcccggctgtgaacgtccaggccccggtcattggggtgaccccctcac

SEQ ID NO: 233602 - DNA, 120 bp, Artificial Sequence
  ENSG00000119771_10 (sequence is synthesized)
tgcctccccacgtggggccccagctcccgctgatgccaggccactactcgctccctcagccgccctctcagccactgagcagcgtggtggtcaacatgcctgcccaggccctgtatgcca

SEQ ID NO: 233603 - DNA, 120 bp, Artificial Sequence
  ENSG00000119771_11 (sequence is synthesized)
gtatgccagccctcagcccctggccgtgtccacactgcccggtgtggggcaggtggcccgcccaggacccaccgctgtgggcaacggccacatggcagggcccctgctgcctccaccgcc

SEQ ID NO: 233604 - DNA, 120 bp, Artificial Sequence
  ENSG00000119771_12 (sequence is synthesized)
agccgtccgccactctccccagtggtgcccctgccaccaatgggccccccacaaccgactcggcccacgggctgcagatgctgcggaccattggcgtggggaagtatgagttcaccgacc

SEQ ID NO: 233605 - DNA, 120 bp, Artificial Sequence
  ENSG00000119771_13 (sequence is synthesized)
cggggcaccccagagaaatgttgaaggaattgaaccagcaacgcagagcgaaagcgtttacagacctgaaaattgttgttgaaggcagagagtttgaagtccaccaaaatgttctagctt

SEQ ID NO: 233606 - DNA, 120 bp, Artificial Sequence
  ENSG00000119771_14 (sequence is synthesized)
cctgcagcttgtatttcaaggacctgattcaaaggtccgtgcaagacagcggccagggcggccgggagaagctggagctcgtcctgtcgaacctgcaggcagacgtcctggagttgctgc

SEQ ID NO: 233607 - DNA, 120 bp, Artificial Sequence
  ENSG00000119771_15 (sequence is synthesized)
tggagtttgtctacacgggctccctggtcatcgactcggccaacgccaagacactgctggaggcggccagcaagttccagttccacaccttctgcaaagtctgcgtgtcctttctcgaga

SEQ ID NO: 233608 - DNA, 120 bp, Artificial Sequence
  ENSG00000119771_16 (sequence is synthesized)
agcagctgacggccagcaactgcctgggcgtgctggccatggccgaggccatgcagtgcagcgagctctaccacatggccaaggccttcgcgctgcagatcttccccgaggtggccgccc

SEQ ID NO: 233609 - DNA, 120 bp, Artificial Sequence
  ENSG00000119771_17 (sequence is synthesized)
aggaggagatcctcagcatctccaaggacgacttcatcgcctacgtctccaacgacagcctcaacaccaaggctgaggagctggtgtacgagacagtcatcaagtggatcaagaaggacc

SEQ ID NO: 233610 - DNA, 120 bp, Artificial Sequence
  ENSG00000119771_18 (sequence is synthesized)
ccgcgacacgcacacagtacgcggctgagctcctggccgtggtccgcctccccttcatccaccccagctacctgctcaatgtggttgacaatgaagagctgatcaagtcatcagaagcct

SEQ ID NO: 233611 - DNA, 120 bp, Artificial Sequence
  ENSG00000119771_19 (sequence is synthesized)
gccgggacctggtgaacgaggccaaacgctaccatatgctgccccacgcccgccaggagatgcagacgccccgaacccggccgcgcctctctgcaggtgtggctgaggtcatcgtcttgg

SEQ ID NO: 233612 - DNA, 120 bp, Artificial Sequence
  ENSG00000119771_20 (sequence is synthesized)
ttgggggccgtcagatggtggggatgacccagcgctcgctggtggccgtcacctgctggaacccgcagaacaacaagtggtaccccttggcctcgctgcccttctatgaccgcgagttct

SEQ ID NO: 233613 - DNA, 120 bp, Artificial Sequence
  ENSG00000119771_21 (sequence is synthesized)
tggaatcaggggtgacgctggctgatgtctggtgctacatgtccctgcttgataactggaacctcgtctccagaatgacagtcccccgctgtcggcacaatagcctcgtctacgatggga

SEQ ID NO: 233614 - DNA, 120 bp, Artificial Sequence
  ENSG00000119771_22 (sequence is synthesized)
agatttacaccctcgggggacttggcgtggcaggcaacgtggaccacgtggagaggtacgacaccatcaccaaccaatgggaggcggtggcccctctgcccaaggcagtacactctgctg

SEQ ID NO: 233615 - DNA, 120 bp, Artificial Sequence
  ENSG00000119771_23 (sequence is synthesized)
cagccacagtgtgtggcggcaagatctacgtgtttggtggggtgaacgaggcaggccgagctgccggcgtcctccagtcttacgttcctcagaccaacacgtggagcttcatcgagtccc

SEQ ID NO: 233616 - DNA, 120 bp, Artificial Sequence
  ENSG00000119771_24 (sequence is synthesized)
caatgattgacaacaagtatgcccccgctgtcacgctcaatggcttcgttttcatcctgggcggggcttatgccagagctaccaccatctacgaccctgagaaaggaaacattaaggcgg

SEQ ID NO: 233617 - DNA, 120 bp, Artificial Sequence
  ENSG00000119771_25 (sequence is synthesized)
gcccaaacatgaaccactctcgccagttctgcagtgctgtggtgcttgatggcaagatttatgcaactggaggtattgtcagcagtgaagggcccgcgctgggcaacatggaggcctacg

SEQ ID NO: 233618 - DNA, 120 bp, Artificial Sequence
  ENSG00000119771_26 (sequence is synthesized)
agcccacaaccaacacatggaccctcctcccccacatgccctgccctgtgttcagacacggctgcgtcgtgataaagaaatatattcaaagcggctgacatcagcagaaagcccacgata

SEQ ID NO: 233619 - DNA, 120 bp, Artificial Sequence
  ENSG00000119771_27 (sequence is synthesized)
agactgtggacaagtctggtgaggcaagtgccacgcaatgataattttccagcgacaccaacaagaggccaacaaaacacaatcaaggaactcactgcgctcaacatgttgaatattctc

SEQ ID NO: 233620 - DNA, 120 bp, Artificial Sequence
  ENSG00000119771_28 (sequence is synthesized)
tacattgaatgtagaaaatcatcctcgcctttggatgaaacggaggcaccgcgcttggagccgcaggaaccacgatcccgccatggggctggctgcctcctgaacaggggcgctcgctct

SEQ ID NO: 233621 - DNA, 120 bp, Artificial Sequence
  ENSG00000119771_29 (sequence is synthesized)
gccaggtgcaatagagtttcacgtatttttcaactgggagagagaagctgttttttccttcctgcagagcaagcttgatccctaaacaaccatagatcagttatcttatgacaacattag

SEQ ID NO: 233622 - DNA, 120 bp, Artificial Sequence
  ENSG00000119771_30 (sequence is synthesized)
gcatcaggctctcttggaataagatcaaagtgtccttatcactttgattcctacttttgttttttaaccgatctacactttcagtggccgacagaaaacgagggacaatactgtgcatca

SEQ ID NO: 233623 - DNA, 120 bp, Artificial Sequence
  ENSG00000119771_31 (sequence is synthesized)
caaggcctaggaggctgctggtccccactggggctgaagagaagcccagctgcccacgcggagccaggggtggcagctgtgggacagccggggagcagggacagcggtctgtccttcaca

SEQ ID NO: 233624 - DNA, 120 bp, Artificial Sequence
  ENSG00000119771_32 (sequence is synthesized)
ggtttttctactgtgtttttgctggagaaggacagtgattgcgctagctttctcttacccggtatgaattatttagatttctgaggcattttcttgataaacaaaaggctatttttaagt

SEQ ID NO: 233625 - DNA, 120 bp, Artificial Sequence
  ENSG00000119771_33 (sequence is synthesized)
actgagaggaggagcaggccacaagagggataatgttgtgggaattcccaaagctctttgtaggtagtgccagaggggggcttttgctctcatttttctatgtgcagaatagaggatctc

SEQ ID NO: 233626 - DNA, 120 bp, Artificial Sequence
  ENSG00000119771_34 (sequence is synthesized)
tcctggggtgggcgatgcccccattttatttttagaaaaagtaactcccagacagccccataaaagctgtgcccaaggaagaagagtctgctctagaaggagcccggttctggctcagga

SEQ ID NO: 233627 - DNA, 120 bp, Artificial Sequence
  ENSG00000119771_35 (sequence is synthesized)
caccggcccagctccctccatgaggtcaagctgaggaccaggccagtgggaagggaaggagggagaattagcgtctataaagcacaggagactatttttgatattcatagctatatatta

SEQ ID NO: 233628 - DNA, 120 bp, Artificial Sequence
  ENSG00000119771_36 (sequence is synthesized)
aggcacctgccacaagagctctcaggatggggacagccttcttagtggagccatggcagcaaggcctgagggcatgaacagaaccactcttcttgtcacatacgaacctgagaaaaggga

SEQ ID NO: 233629 - DNA, 120 bp, Artificial Sequence
  ENSG00000119771_37 (sequence is synthesized)
agccaggagggaggtcacaccatggctcaaaagggaaaggccttcccacttgtccttagcccctcaaacctcacacggtcaacagtttccattccagggcaggagaatgctgccgccact

SEQ ID NO: 233630 - DNA, 120 bp, Artificial Sequence
  ENSG00000119771_38 (sequence is synthesized)
gcgctgttgagttgaagttggtaccaaatacacatttaccacttttatatctgggaagtcaacttgccatcgtttcatgataacaaccatttataagagaaaaagacaggacacgctttc

SEQ ID NO: 233631 - DNA, 120 bp, Artificial Sequence
  ENSG00000119771_39 (sequence is synthesized)
catcgttcagtatttgatgacacaaaattccagttctaacgttgggcatcaacttctagcactacgagtgtggctcccacttggacaagataccgagcttcgttatgcagtttttaatat

SEQ ID NO: 233632 - DNA, 120 bp, Artificial Sequence
  ENSG00000119771_40 (sequence is synthesized)
tatttattattttaaaaagtaataagcacaaaactacatacattgtatgtcatttaaagtatttatgtcaaacagggtgcaagtgtgaacccaaggactggagcacaaattcctaactgc

SEQ ID NO: 233633 - DNA, 120 bp, Artificial Sequence
  ENSG00000119771_41 (sequence is synthesized)
ctggggcagggctaatgttagcattggtgtgcgtctgcctccaaaggaggttctagttgtcagcgagactcaacacagatgacattgaaattcgtttctctcctcatctatcacactgga

SEQ ID NO: 233634 - DNA, 120 bp, Artificial Sequence
  ENSG00000119771_42 (sequence is synthesized)
gcaaaactggctatttctgtgaatgatataaaacagggttctctgtaatggtattgtacatagtatatgtttactgttaagttcttgttatattataataaatatatttatagatctaga

SEQ ID NO: 233635 - DNA, 120 bp, Artificial Sequence
  ENSG00000119771_43 (sequence is synthesized)
actgcaacaccaccgggacagggggtgcttcatgccagctccttcactggcctccccaacccagaggctgcagtggagcctccacctgcccaagacaactggcctgagatgggggaggga

SEQ ID NO: 233636 - DNA, 120 bp, Artificial Sequence
  ENSG00000119771_44 (sequence is synthesized)
gaggaaggaagggagagcctgcaaagcccagagcccgtccccctccagcccaagccctggccattctcacctccaacccccaaggccaggccaagctgcaaaagggtgagagtcatccac

SEQ ID NO: 233637 - DNA, 120 bp, Artificial Sequence
  ENSG00000119771_45 (sequence is synthesized)
tcctctcagggcaccgcagaacagtccctttgggggccttctccacattccatccatgaggacattcagagcatgtactgtgtccttcccagggaaggcactctctgtcgtgccatcgga

SEQ ID NO: 233638 - DNA, 120 bp, Artificial Sequence
  ENSG00000119771_46 (sequence is synthesized)
tgagagcactgcccaaggcaatttagttaggcccaagagacattcctagaccatcttgaggcacttgaatgtttcatttcaaggatccaggggtggctttgtgagaccttgggaaagagc

SEQ ID NO: 233639 - DNA, 120 bp, Artificial Sequence
  ENSG00000119771_47 (sequence is synthesized)
acctccagcctcagccttcagttaaccctcttcccccagcctcaggggagtttcattccagggaactcgaaggtagatccttcagaacagagcctcgggaaggatgcgtgctagacatgg

SEQ ID NO: 233640 - DNA, 120 bp, Artificial Sequence
  ENSG00000119771_48 (sequence is synthesized)
tcctagttggagcccccggtcttagggttagagttcttgatgtctgtctgagggatcagtccagactggaaggcagaaggggacaggaggaccagggcacacatatgaggcttgctggat

SEQ ID NO: 233641 - DNA, 120 bp, Artificial Sequence
  ENSG00000119771_49 (sequence is synthesized)
tcctctgctataggtttgcctagcccttagtgccccagacaagccaagtccctgctcctgctggatgcagtggggaaggctgctgggccactgccaggtacaggcagtgggggcataagg

SEQ ID NO: 233642 - DNA, 120 bp, Artificial Sequence
  ENSG00000119771_50 (sequence is synthesized)
gtccatggcaaacagtctggcccaacggggtgtctacatctcttttgaaagaggacactagacggtcccagaaagtatgcatctctgggcacaacttcccagccttcccacataaaaccc

SEQ ID NO: 233643 - DNA, 120 bp, Artificial Sequence
  ENSG00000119771_51 (sequence is synthesized)
cttgagatggcatttcggggtgctctgcctttcggcagagcaaggaaccccactagccactctcctgtcttctctcccaagtctcttcctttgtcatttcaagcaattttcatgccttgt

SEQ ID NO: 233644 - DNA, 120 bp, Artificial Sequence
  ENSG00000119771_52 (sequence is synthesized)
caagcatcccaacaataaagctcatgtctggatctctgttgggtttaattcccaatctgactgagccctaactgcctttgttttggaaatcagcactagttttaaatgacaaaattgtag

SEQ ID NO: 233645 - DNA, 120 bp, Artificial Sequence
  ENSG00000119771_53 (sequence is synthesized)
aaaattacatctaaattctggtaaactcttgctttaagatcttttttaaaaaaatgactaaattgattttttctttgcattgttttggttaagctctgtctccctttaaaaaaaaaaaaa

SEQ ID NO: 233646 - DNA, 120 bp, Artificial Sequence
  ENSG00000119771_54 (sequence is synthesized)
caacgtggaccacgtggagaggtaatgaggccacggtcaggacaggggcatgctctttgctcaccaagaactgaaatcacgtcactcactgtacctcccaacacccactcagtggcgatg

SEQ ID NO: 233647 - DNA, 120 bp, Artificial Sequence
  ENSG00000119771_55 (sequence is synthesized)
gagcagagcctggaccattcatatgggcagtcatcccaggctcttcagtcacagcaccgggggcagcagggtgtgggatacaagcagatgggatgacatctgtgtcacctttgcagtcgc

SEQ ID NO: 233648 - DNA, 120 bp, Artificial Sequence
  ENSG00000119771_56 (sequence is synthesized)
tgagatgggagatggggcgcttctgtcccgacaacccatttaggtgtcagacaagctggaggcccaagatccagttgcagaaggcctgggatgagccagaccctcctggccaggcagtca

SEQ ID NO: 233649 - DNA, 120 bp, Artificial Sequence
  ENSG00000119771_57 (sequence is synthesized)
gggaacaccctgcaccatgagcaccagcccagagactgctggggtttcgggcaaagctggaagcaatgtttaaaatgcaggtcatgccagtggcggtgcctccttgtcctgccaagcggg

SEQ ID NO: 233650 - DNA, 120 bp, Artificial Sequence
  ENSG00000119771_58 (sequence is synthesized)
gggtcccacaccagggagctcccttcctccctccagccacacacaccaggacatctgttcgtaatacagagaaaggccactgcatacaaactaagcaatttagggagaacattcttgcca

SEQ ID NO: 233651 - DNA, 120 bp, Artificial Sequence
  ENSG00000119771_59 (sequence is synthesized)
accctctagaactttccagaagaaaaaataagccaaaggaccacgtgtgaacctgccctccgctgggagtcccagcctggcttcctcccaaggccattgtggagggtcagatacaggcat

SEQ ID NO: 233652 - DNA, 120 bp, Artificial Sequence
  ENSG00000119771_60 (sequence is synthesized)
gaggggcgtgggctgaagtgggtgcttccggatgagaatacaaaatccttttcccttgagccagggagactgttctttcttacagagaacagatgcctgggggaaaagctcaggaagctt

SEQ ID NO: 233653 - DNA, 120 bp, Artificial Sequence
  ENSG00000119771_61 (sequence is synthesized)
tgtcaggcagcagaacggaggcttagtcctgcttttggagaaactagtgcctggagggtaacccgtcaggctgacctggcccaaagcacaacccaggggagacagctaagattgccagag

SEQ ID NO: 233654 - DNA, 120 bp, Artificial Sequence
  ENSG00000119771_62 (sequence is synthesized)
cccctcctgcacctgagcccaccacccccaccgccatgtgtcaccagaaagcacatcttcccgtgggacatcatgttgcctatgaagccacacatacccctcaatttgtatttttccccc

SEQ ID NO: 233655 - DNA, 120 bp, Artificial Sequence
  ENSG00000119771_63 (sequence is synthesized)
ttggtggctaattggacacttgacaaatgttacagcaaagacggttgcagagtgaggcaggctctgaatgctcattgtgggcttttaactcctcccccaagtagagcccagagatggctc

SEQ ID NO: 233656 - DNA, 120 bp, Artificial Sequence
  ENSG00000119771_64 (sequence is synthesized)
agtaacaacatttagttatcatattgatctggcaatcatgggcattgccacgtgaaaatgaggatattaccgcagttgctggagctgggttggccccggtgctggcagccttcagtgtga

SEQ ID NO: 233657 - DNA, 120 bp, Artificial Sequence
  ENSG00000119771_65 (sequence is synthesized)
cccactgcccagctatgcataccccaagcattctggaagcatcggcttccgatcatttgtcatccaataataaacaaacacatgaaaaatgagacattttctctgtaggagtaaactgaa

SEQ ID NO: 233658 - DNA, 120 bp, Artificial Sequence
  ENSG00000119771_66 (sequence is synthesized)
gatgggccagcagcaccccaagccattcactccatggggcccggtaggacaggacaagaaatggcttggggcagggacagaacagccacctgtggaggacgcagccctcgtcagcgacca

SEQ ID NO: 233659 - DNA, 120 bp, Artificial Sequence
  ENSG00000119771_67 (sequence is synthesized)
gggtcacccatcacgggggtgtcccctctggggtccctgttcagagagaagaggcctaaggagcactggggtccagtcccaagacagtctgatgtccagggatacagaggcgcccccacc

SEQ ID NO: 233660 - DNA, 120 bp, Artificial Sequence
  ENSG00000119771_68 (sequence is synthesized)
ccctcacagctctgcaggccatgcacgaaggcctgtgtggatgagaaccgtgtgtgttggtaagaggcacagccctcgccctctggggcctcgcctcctctttgaactcagattctgaaa

SEQ ID NO: 233661 - DNA, 120 bp, Artificial Sequence
  ENSG00000119771_69 (sequence is synthesized)
gagcccccatcacattcccctgtgcctctgcggcctttccctgcagatcatctgcccagcggccccctccaccccacaggtgaccctcacaaggggccaggaggaacagagccacagcca

SEQ ID NO: 233662 - DNA, 120 bp, Artificial Sequence
  ENSG00000119771_70 (sequence is synthesized)
tgcctcctgtggccaggggtcctcctcagtctagacagcacctgcgatgctccacggcacctgtgtccctcctcctgtgcctggtggccaggacccactccctggctcagactgtgggca

SEQ ID NO: 233663 - DNA, 120 bp, Artificial Sequence
  ENSG00000119771_71 (sequence is synthesized)
agacaggcagcacccctcagggcagccatgtgagtcccatcgcacctgtcactcagccatggactgtccgtctgcccagcacccctccccaccgggggacttcacggctcttagggtcag

SEQ ID NO: 233664 - DNA, 120 bp, Artificial Sequence
  ENSG00000119771_72 (sequence is synthesized)
tgcatatgtgtgcgtgtgcatgtgctcgcacatcctgaagtccccctgggctcagcccttcactggctttgagctcctctgcctgaggactcctgggtggacaagtgggctggccagagg

SEQ ID NO: 233665 - DNA, 120 bp, Artificial Sequence
  ENSG00000119771_73 (sequence is synthesized)
tgaaggcagcagtgactgggggcctcgggagaaggctgtggcccagtgtgacctccacagggcagaaagggcatgcagaggagaggctggacagcggcttgtaggaatgaagtcccaggc

SEQ ID NO: 233666 - DNA, 120 bp, Artificial Sequence
  ENSG00000119771_74 (sequence is synthesized)
agcaaagacaggagtacgaggttgaccagatggctctggggccgggggtgttgaggatttctgtgattttaagtgatcacgtagtgaattatttttacgcttaacaaagccaccgaggta

SEQ ID NO: 233667 - DNA, 120 bp, Artificial Sequence
  ENSG00000119771_75 (sequence is synthesized)
tggaaatccatcctgacagcagaagactaggtgtgtgaattcactttagaagtcactctgtgttggggggtttggaggggcctctgtggagtccacaccttgccccctctgccttctggg

SEQ ID NO: 233668 - DNA, 120 bp, Artificial Sequence
  ENSG00000119771_76 (sequence is synthesized)
ctggccccgggcttggaggcagaggccccttggggtcctggtgggatgagccgttgtgtggggagggcctactgtggccacgctgggagagaggctggacgccagctccgcagcaggatt

SEQ ID NO: 233669 - DNA, 120 bp, Artificial Sequence
  ENSG00000119771_77 (sequence is synthesized)
gcacctccccctctcctcctggccatgcctgtgctgaggccctgggagggcggtgcctgacctcagagaatgtcgctctaatggtggaatttcaggtactgccacgtagggaagagtctc

SEQ ID NO: 233670 - DNA, 120 bp, Artificial Sequence
  ENSG00000119771_78 (sequence is synthesized)
gtgggaagggcattttccagcctctgtcacaaaatctccaagggaattcagacctcatctagttccatcctcttattttgcagaagaggaggctgagggcccgggagaccaaggctgccc

SEQ ID NO: 233671 - DNA, 120 bp, Artificial Sequence
  ENSG00000119771_79 (sequence is synthesized)
acctgtgggtggcagagcccaggcacccagtgcccccagctccctgccccctgctctttccgcccacccacacacccagcagctggcctctctgcggccagcctgctcgcttgctggaca

SEQ ID NO: 233672 - DNA, 120 bp, Artificial Sequence
  ENSG00000119771_80 (sequence is synthesized)
cctcgacagccccaccgccagccgcaggtgcgcgcaagggacccgtcacaagcatcttgccctgtggcctcctgagaagcgagtgagtggaccacagaggtcatttcccagccacgtggc

SEQ ID NO: 233673 - DNA, 120 bp, Artificial Sequence
  ENSG00000119771_81 (sequence is synthesized)
caggcccagcccgaggcaggaccgggctcagggtgggaagcagggctactcagaggagccaggatggggcggccaagccgacggcctgcggggccgcctccggactcctaacgcggcagg

SEQ ID NO: 233674 - DNA, 120 bp, Artificial Sequence
  ENSG00000119771_82 (sequence is synthesized)
tgtttttactcctgctgtcacttatgtatcagtgtcactcttgcttcatcttatctgtttccttccaggtccagctttaggggcagctgccaggccttaggagcctttgcaatggttttg

SEQ ID NO: 233675 - DNA, 120 bp, Artificial Sequence
  ENSG00000119771_83 (sequence is synthesized)
tattcctgtagacaccagatataaacagatttatatatttgtgtccctcccctgctccccccagttccccagcccgacgcacactctacacgcaggccactctgacctctgaccccgtgt

SEQ ID NO: 233676 - DNA, 120 bp, Artificial Sequence
  ENSG00000119771_84 (sequence is synthesized)
tccatgtggcaggagggcccgccccgggccaggccccaggtcatggctgctggctgtctgtggcggaagtccttggttgtttcctctcccctcctcccggctctcaccattctgtccgtc

SEQ ID NO: 233677 - DNA, 120 bp, Artificial Sequence
  ENSG00000119771_85 (sequence is synthesized)
tatctcgtcttgtcctcagtttcaaagcaatgtcacgaagggcttccttttcatgcctaaaaggaaacaatatgtttttggaaagaggtggggttggagcgggttctggggcaacttggg

SEQ ID NO: 233678 - DNA, 120 bp, Artificial Sequence
  ENSG00000119771_86 (sequence is synthesized)
gccctcggtcctggggcgatcagaggatatctctggattggctggcatcacagccagttgggagcctcccaagcctgggtcacgttggagaatctgccacccaaggcaggcagggccggg

SEQ ID NO: 233679 - DNA, 120 bp, Artificial Sequence
  ENSG00000119771_87 (sequence is synthesized)
ctgggatgcgtcggcctgctttggtggagacaccagggcctgcagtgggctgaaccgtattgtttccctttgaggccagtcctggtcctcgtccccatccatagctcatgctttttgatt

SEQ ID NO: 233680 - DNA, 120 bp, Artificial Sequence
  ENSG00000119771_88 (sequence is synthesized)
tgcatctttttttgcatggacatgccgagtagtgataagcagggttttctgttcttttgggcgtctctggtcagactcttctctttcagatcccgtgtcacagcattaggttcaggtgtg

SEQ ID NO: 233681 - DNA, 120 bp, Artificial Sequence
  ENSG00000119771_89 (sequence is synthesized)
tcattgccgtgtcctttgagccctaaaaccaagggcatgaccaaggtgtgcagggagatctagccctgtgaggaagcggcacggtggccgcagggcaggaggtaaggacaccctggtctc

SEQ ID NO: 233682 - DNA, 120 bp, Artificial Sequence
  ENSG00000119772_0 (sequence is synthesized)
gcagtgggctctggcggaggtcgggagaactgcagggcgaaggccgccgggggctccgcgggctgcggggggaggcacttgacaccggcccggggagaggaggggccgctgtccctgcgg

SEQ ID NO: 233683 - DNA, 120 bp, Artificial Sequence
  ENSG00000119772_1 (sequence is synthesized)
ccagtgctggatgcggggacccagcgcagaagcagcgccaggtggagccatcgaagcccccacccacaggctgacagaggcaccgttcaccagagggctcaacaccgggatctatgttta

SEQ ID NO: 233684 - DNA, 120 bp, Artificial Sequence
  ENSG00000119772_2 (sequence is synthesized)
agttttaactctcgcctccaaagaccacgataattccttccccaaagcccagcagccccccagccccgcgcagccccagcctgcctcccggcgcccagatgcccgccatgccctccagcg

SEQ ID NO: 233685 - DNA, 120 bp, Artificial Sequence
  ENSG00000119772_3 (sequence is synthesized)
gccccggggacaccagcagctctgctgcggagcgggaggaggaccgaaaggacggagaggagcaggaggagccgcgtggcaaggaggagcgccaagagcccagcaccacggcacggaagg

SEQ ID NO: 233686 - DNA, 120 bp, Artificial Sequence
  ENSG00000119772_4 (sequence is synthesized)
tggggcggcctgggaggaagcgcaagcaccccccggtggaaagcggtgacacgccaaaggaccctgcggtgatctccaagtccccatccatggcccaggactcaggcgcctcagagctat

SEQ ID NO: 233687 - DNA, 120 bp, Artificial Sequence
  ENSG00000119772_5 (sequence is synthesized)
tacccaatggggacttggagaagcggagtgagccccagccagaggaggggagccctgctggggggcagaagggcggggccccagcagagggagagggtgcagctgagaccctgcctgaag

SEQ ID NO: 233688 - DNA, 120 bp, Artificial Sequence
  ENSG00000119772_6 (sequence is synthesized)
cctcaagagcagtggaaaatggctgctgcacccccaaggagggccgaggagcccctgcagaagcgggcaaagaacagaaggagaccaacatcgaatccatgaaaatggagggctcccggg

SEQ ID NO: 233689 - DNA, 120 bp, Artificial Sequence
  ENSG00000119772_7 (sequence is synthesized)
gccggctgcggggtggcttgggctgggagtccagcctccgtcagcggcccatgccgaggctcaccttccaggcgggggacccctactacatcagcaagcgcaagcgggacgagtggctgg

SEQ ID NO: 233690 - DNA, 120 bp, Artificial Sequence
  ENSG00000119772_8 (sequence is synthesized)
cacgctggaaaagggaggctgagaagaaagccaaggtcattgcaggaatgaatgctgtggaagaaaaccaggggcccggggagtctcagaaggtggaggaggccagccctcctgctgtgc

SEQ ID NO: 233691 - DNA, 120 bp, Artificial Sequence
  ENSG00000119772_9 (sequence is synthesized)
agcagcccactgaccccgcatcccccactgtggctaccacgcctgagcccgtggggtccgatgctggggacaagaatgccaccaaagcaggcgatgacgagccagagtacgaggacggcc

SEQ ID NO: 233692 - DNA, 120 bp, Artificial Sequence
  ENSG00000119772_10 (sequence is synthesized)
ggggctttggcattggggagctggtgtgggggaaactgcggggcttctcctggtggccaggccgcattgtgtcttggtggatgacgggccggagccgagcagctgaaggcacccgctggg

SEQ ID NO: 233693 - DNA, 120 bp, Artificial Sequence
  ENSG00000119772_11 (sequence is synthesized)
tcatgtggttcggagacggcaaattctcagtggtgtgtgttgagaagctgatgccgctgagctcgttttgcagtgcgttccaccaggccacgtacaacaagcagcccatgtaccgcaaag

SEQ ID NO: 233694 - DNA, 120 bp, Artificial Sequence
  ENSG00000119772_12 (sequence is synthesized)
ccatctacgaggtcctgcaggtggccagcagccgcgcggggaagctgttcccggtgtgccacgacagcgatgagagtgacactgccaaggccgtggaggtgcagaacaagcccatgattg

SEQ ID NO: 233695 - DNA, 120 bp, Artificial Sequence
  ENSG00000119772_13 (sequence is synthesized)
aatgggccctggggggcttccagccttctggccctaagggcctggagccaccagaagaagagaagaatccctacaaagaagtgtacacggacatgtgggtggaacctgaggcagctgcct

SEQ ID NO: 233696 - DNA, 120 bp, Artificial Sequence
  ENSG00000119772_14 (sequence is synthesized)
acgcaccacctccaccagccaaaaagccccggaagagcacagcggagaagcccaaggtcaaggagattattgatgagcgcacaagagagcggctggtgtacgaggtgcggcagaagtgcc

SEQ ID NO: 233697 - DNA, 120 bp, Artificial Sequence
  ENSG00000119772_15 (sequence is synthesized)
ggaacattgaggacatctgcatctcctgtgggagcctcaatgttaccctggaacaccccctcttcgttggaggaatgtgccaaaactgcaagaactgctttctggagtgtgcgtaccagt

SEQ ID NO: 233698 - DNA, 120 bp, Artificial Sequence
  ENSG00000119772_16 (sequence is synthesized)
acgacgacgacggctaccagtcctactgcaccatctgctgtgggggccgtgaggtgctcatgtgcggaaacaacaactgctgcaggtgcttttgcgtggagtgtgtggacctcttggtgg

SEQ ID NO: 233699 - DNA, 120 bp, Artificial Sequence
  ENSG00000119772_17 (sequence is synthesized)
ggccgggggctgcccaggcagccattaaggaagacccctggaactgctacatgtgcgggcacaagggtacctacgggctgctgcggcggcgagaggactggccctcccggctccagatgt

SEQ ID NO: 233700 - DNA, 120 bp, Artificial Sequence
  ENSG00000119772_18 (sequence is synthesized)
tcttcgctaataaccacgaccaggaatttgaccctccaaaggtttacccacctgtcccagctgagaagaggaagcccatccgggtgctgtctctctttgatggaatcgctacagggctcc

SEQ ID NO: 233701 - DNA, 120 bp, Artificial Sequence
  ENSG00000119772_19 (sequence is synthesized)
tggtgctgaaggacttgggcattcaggtggaccgctacattgcctcggaggtgtgtgaggactccatcacggtgggcatggtgcggcaccaggggaagatcatgtacgtcggggacgtcc

SEQ ID NO: 233702 - DNA, 120 bp, Artificial Sequence
  ENSG00000119772_20 (sequence is synthesized)
gcagcgtcacacagaagcatatccaggagtggggcccattcgatctggtgattgggggcagtccctgcaatgacctctccatcgtcaaccctgctcgcaagggcctctacgagggcactg

SEQ ID NO: 233703 - DNA, 120 bp, Artificial Sequence
  ENSG00000119772_21 (sequence is synthesized)
gccggctcttctttgagttctaccgcctcctgcatgatgcgcggcccaaggagggagatgatcgccccttcttctggctctttgagaatgtggtggccatgggcgttagtgacaagaggg

SEQ ID NO: 233704 - DNA, 120 bp, Artificial Sequence
  ENSG00000119772_22 (sequence is synthesized)
acatctcgcgatttctcgagtccaaccctgtgatgattgatgccaaagaagtgtcagctgcacacagggcccgctacttctggggtaaccttcccggtatgaacaggccgttggcatcca

SEQ ID NO: 233705 - DNA, 120 bp, Artificial Sequence
  ENSG00000119772_23 (sequence is synthesized)
ctgtgaatgataagctggagctgcaggagtgtctggagcatggcaggatagccaagttcagcaaagtgaggaccattactacgaggtcaaactccataaagcagggcaaagaccagcatt

SEQ ID NO: 233706 - DNA, 120 bp, Artificial Sequence
  ENSG00000119772_24 (sequence is synthesized)
ttcctgtcttcatgaatgagaaagaggacatcttatggtgcactgaaatggaaagggtatttggtttcccagtccactatactgacgtctccaacatgagccgcttggcgaggcagagac

SEQ ID NO: 233707 - DNA, 120 bp, Artificial Sequence
  ENSG00000119772_25 (sequence is synthesized)
tgctgggccggtcatggagcgtgccagtcatccgccacctcttcgctccgctgaaggagtattttgcgtgtgtgtaagggacatgggggcaaactgaggtagcgacacaaagttaaacaa

SEQ ID NO: 233708 - DNA, 120 bp, Artificial Sequence
  ENSG00000119772_26 (sequence is synthesized)
acaaacaaaaaacacaaaacataataaaacaccaagaacatgaggatggagagaagtatcagcacccagaagagaaaaaggaatttaaaacaaaaaccacagaggcggaaataccggagg

SEQ ID NO: 233709 - DNA, 120 bp, Artificial Sequence
  ENSG00000119772_27 (sequence is synthesized)
gctttgccttgcgaaaagggttggacatcatctcctgatttttcaatgttattcttcagtcctatttaaaaacaaaaccaagctcccttcccttcctcccccttcccttttttttcggtc

SEQ ID NO: 233710 - DNA, 120 bp, Artificial Sequence
  ENSG00000119772_28 (sequence is synthesized)
agaccttttattttctactcttttcagaggggttttctgtttgtttgggttttgtttcttgctgtgactgaaacaagaaggttattgcagcaaaaatcagtaacaaaaaatagtaacaat

SEQ ID NO: 233711 - DNA, 120 bp, Artificial Sequence
  ENSG00000119772_29 (sequence is synthesized)
agcaaaaatcagtaacaaaaaatagtaacaataccttgcagaggaaaggtgggagagaggaaaaaaggaaattctatagaaatctatatattgggttgtttttttttttgttttttgttt

SEQ ID NO: 233712 - DNA, 120 bp, Artificial Sequence
  ENSG00000119772_30 (sequence is synthesized)
cttttttttgttgtctctagcctgatcagataggagcacaagcaggggacggaaagagagagacactcaggcggcagcattccctcccagccactgagctgtcgtgccagcaccattcct

SEQ ID NO: 233713 - DNA, 120 bp, Artificial Sequence
  ENSG00000119772_31 (sequence is synthesized)
ggtcacgcaaaacagaacccagttagcagcagggagacgagaacaccacacaagacatttttctacagtatttcaggtgcctaccacacaggaaaccttgaagaaaatcagtttctagaa

SEQ ID NO: 233714 - DNA, 120 bp, Artificial Sequence
  ENSG00000119772_32 (sequence is synthesized)
gccgctgttacctcttgtttacagtttatatatatatgatagatatgagatatatatataaaaggtactgttaactactgtacaacccgacttcataatggtgctttcaaacagcgagat

SEQ ID NO: 233715 - DNA, 120 bp, Artificial Sequence
  ENSG00000119772_33 (sequence is synthesized)
gagtaaaaacatcagcttccacgttgccttctgcgcaaagggtttcaccaaggatggagaaagggagacagcttgcagatggcgcgttctcacggtgggctcttccccttggtttgtaac

SEQ ID NO: 233716 - DNA, 120 bp, Artificial Sequence
  ENSG00000119772_34 (sequence is synthesized)
gaagtgaaggaggagaacttgggagccaggttctccctgccaaaaagggggctagatgaggtggtcgggcccgtggacagctgagagtgggattcatccagactcatgcaataacccttt

SEQ ID NO: 233717 - DNA, 120 bp, Artificial Sequence
  ENSG00000119772_35 (sequence is synthesized)
gattgttttctaaaaggagactccctcggcaagatggcagagggtacggagtcttcaggcccagtttctcactttagccaattcgagggctccttgtggtgggatcagaactaatccaga

SEQ ID NO: 233718 - DNA, 120 bp, Artificial Sequence
  ENSG00000119772_36 (sequence is synthesized)
gtgtgggaaagtgacagtcaaaaccccacctggagcaaataaaaaaacatacaaaacgtactggtgctttcctgtctaagtcgccttttgtgtgttcttttatgaggcccccaccatcca

SEQ ID NO: 233719 - DNA, 120 bp, Artificial Sequence
  ENSG00000119772_37 (sequence is synthesized)
cccctctgtgcacaaggcggctcccggcccctggaatgtgatgtttttggtcatctccaaaggctgcagttttatactgggaggctgatgacaccttttattataattattcttatggtt

SEQ ID NO: 233720 - DNA, 120 bp, Artificial Sequence
  ENSG00000119772_38 (sequence is synthesized)
ctggttataattatgtttgttttaagattttctttaagaaaacaaaaacccaacacccttccctttaggtttcaaaccaaggtgcgggagcagggtgcttctgagttagcggtggctctg

SEQ ID NO: 233721 - DNA, 120 bp, Artificial Sequence
  ENSG00000119772_39 (sequence is synthesized)
gggccaggtgggccactgggcatggtgacagctgggcggccagggagtccccaaggtctgccttctgggcttgtcactcttctcttctacttcccctcctcttgagtcgggtgtgtcagg

SEQ ID NO: 233722 - DNA, 120 bp, Artificial Sequence
  ENSG00000119772_40 (sequence is synthesized)
gctggagggaggaccggccgtctctctccttgtgtgtgtgattggagtggtgtgtatttcttttctagtacttggtctgatgatagctgtgctcttacctcgagtcagcagcacctggag

SEQ ID NO: 233723 - DNA, 120 bp, Artificial Sequence
  ENSG00000119772_41 (sequence is synthesized)
ccccaagtgctcaacactttgttctacttcctacaaggcaggcggcctggcgtcagtagtaggaagggatggcattgttggctccagggtgagggcccgacgggcaggtgcttgcctggg

SEQ ID NO: 233724 - DNA, 120 bp, Artificial Sequence
  ENSG00000119772_42 (sequence is synthesized)
tagatggggtgtagatatgtggcatatagagatatatattttataatgggaggggggatggcacctcctgggactggtagagctgggaggtgtgtcggcaagcacatggccccaagtcca

SEQ ID NO: 233725 - DNA, 120 bp, Artificial Sequence
  ENSG00000119772_43 (sequence is synthesized)
cgtccctagaaagatggggcctacagtgataggcgctctataaatacatagatagggtcatgtttaagaaatattatggggtggggagtgggggaagcaggcttagtgtgctgagcctcg

SEQ ID NO: 233726 - DNA, 120 bp, Artificial Sequence
  ENSG00000119772_44 (sequence is synthesized)
gtccccactgcagacctaaaccccacaccaatcagtcaatctcacacgcatacacaggagcatatttctgtactgatgcataatgaatgcactcacacacacacacacacgccagggggc

SEQ ID NO: 233727 - DNA, 120 bp, Artificial Sequence
  ENSG00000119772_45 (sequence is synthesized)
tcccagcactcttctcccagggttcaggactttgtggagtcagcccgtgcagctatttacctctgttgccctgattgcaggtagactgtcaatcccagaagttgctaggtgctgaggcag

SEQ ID NO: 233728 - DNA, 120 bp, Artificial Sequence
  ENSG00000119772_46 (sequence is synthesized)
gaaaaggaggaggtttcttttagcaggtgctctcctctagcaggtagtgttctatctcttttgcccctggtgatgtcaaaagattcttctgttagcaacctgtgatactgacctgcaact

SEQ ID NO: 233729 - DNA, 120 bp, Artificial Sequence
  ENSG00000119772_47 (sequence is synthesized)
ctaggcaccagtcaagtcagccctcaactccccctacctattctccccaactgaaatcaaattgacatccaggtctgtcttggccagggggcttccattggggaaaaaaaatgggacagt

SEQ ID NO: 233730 - DNA, 120 bp, Artificial Sequence
  ENSG00000119772_48 (sequence is synthesized)
gaacctcacctattgaataaaccaaattagtaattagtgacaaaaccaaaccaaggctttggaccccctgctcattactcaggagtaaattcacacagctggtggccggtctcacccctt

SEQ ID NO: 233731 - DNA, 120 bp, Artificial Sequence
  ENSG00000119772_49 (sequence is synthesized)
tttggggtgcttggtcctggaccccaatctactgtctcctcgacagattggtgtttaagatcatgcccagttgcttcctgtcacctcttgacaggtggtgactgggctgctgtggggctg

SEQ ID NO: 233732 - DNA, 120 bp, Artificial Sequence
  ENSG00000119772_50 (sequence is synthesized)
gagcagcgaggaagggagcctctgccccctcagtggagtccctgtgctaactgtggtgctcacccagctcctccttgctcccgcggggctctgtccttcgggcctggagtccaccagcgc

SEQ ID NO: 233733 - DNA, 120 bp, Artificial Sequence
  ENSG00000119772_51 (sequence is synthesized)
cactccaggagggctgggggaggaggggctgcctcaggcagtccaaggtgctccctcccccgctggccaatgctaaggtcttcccggctcccagggtcaggacagagtcttctaaggctc

SEQ ID NO: 233734 - DNA, 120 bp, Artificial Sequence
  ENSG00000119772_52 (sequence is synthesized)
aggctctcccaagccactgcttagtgacagttagcctttcccagcggcccaagctccaccggaactgggcctggtgctccaaccaaagggttggtgttgggacttgggaagagacttggt

SEQ ID NO: 233735 - DNA, 120 bp, Artificial Sequence
  ENSG00000119772_53 (sequence is synthesized)
agccaagggcatggcaagcctgggggattcctgtgggccggcttgctcgaggagggagtgctgggcacagaggagcccttatggctgacagcttgagagcacttgttcctccagatctag

SEQ ID NO: 233736 - DNA, 120 bp, Artificial Sequence
  ENSG00000119772_54 (sequence is synthesized)
ccacttgaccaggccctagaatggaccagatgccccaggggtcatggcccccccccccccccccttgcagggacgagagttaacaatcaccagcttttcttccggcccagcctgtgtgct

SEQ ID NO: 233737 - DNA, 120 bp, Artificial Sequence
  ENSG00000119772_55 (sequence is synthesized)
tggtctcacagtagaatttaggagagtgtggggctttgggattgtgccaacttggccaagctgagatatgcttaatccacctcaacgctggggcctctggggacaggtattgggtcacct

SEQ ID NO: 233738 - DNA, 120 bp, Artificial Sequence
  ENSG00000119772_56 (sequence is synthesized)
tccaaggggtgctgaacttcagcaggctgtagataaggcagaggttagaggcagtggagtgggggaaccaagaaggcctagggaaaattgccaggcatattccctgtggaattttctttc

SEQ ID NO: 233739 - DNA, 120 bp, Artificial Sequence
  ENSG00000119772_57 (sequence is synthesized)
cgaagagtaggcccatttcccccttagaaacaagggttctgggggctgatgacagcttcccctgcaggtgccaggtggcgcatgatgccaaagagatccgtggctcttgcctgggggagg

SEQ ID NO: 233740 - DNA, 120 bp, Artificial Sequence
  ENSG00000119772_58 (sequence is synthesized)
tagccaggtgctcgtgctggggacacagtccttggcctcctgcctaagcaggaagctagtttccagcaggcggctggtactaaccccccgccccacgggagcgacaggctggtgcaccgg

SEQ ID NO: 233741 - DNA, 120 bp, Artificial Sequence
  ENSG00000119772_59 (sequence is synthesized)
cagactggggggccgcaggcgggcactagcaggggtctgcagtccatagatgatgacatgaatctgttgctgtccttttgtctctaggccccagagacttcttgctattgaacatcctat

SEQ ID NO: 233742 - DNA, 120 bp, Artificial Sequence
  ENSG00000119772_60 (sequence is synthesized)
tggaaagcaaactttccaagagagcacccgggacctgttagcttttgaaacaggcctgggtgtgattgactggtagagatgcctgtgtgatttttggcgcattgcaggagtgtggattgg

SEQ ID NO: 233743 - DNA, 120 bp, Artificial Sequence
  ENSG00000119772_61 (sequence is synthesized)
gacaggcaccccagcaggaaggaaggctgacaccaaaggggtctcacagggcccagctccccttgcttcccgataattggccaccaggccatggcgactctggggaagcctagatgggaa

SEQ ID NO: 233744 - DNA, 120 bp, Artificial Sequence
  ENSG00000119772_62 (sequence is synthesized)
cacccaccttctccagcagtagaaggaatatttcagcagagccatctgggagatgttcttataggaaaactgcagtcattcatttcatagttttgcttatataaatagagtacatttggg

SEQ ID NO: 233745 - DNA, 120 bp, Artificial Sequence
  ENSG00000119772_63 (sequence is synthesized)
aggcagttttgaattcctgttgctactctgcttggtgcggagttgcagtggccccaagtgtctttcagagctgttgcttttaggatccccctcaagctgtgggttagggccagggcaggg

SEQ ID NO: 233746 - DNA, 120 bp, Artificial Sequence
  ENSG00000119772_64 (sequence is synthesized)
agggggtgctgcctggcactgtgccctgaagagggctgcttgcttcctttggtcgggagcacggcagagccaacattctggtgggaaccgagtttctagccaggcccctgttttggtccc

SEQ ID NO: 233747 - DNA, 120 bp, Artificial Sequence
  ENSG00000119772_65 (sequence is synthesized)
gggaggtgagtaatctgagtttgtcattgcgtattctccacgctgcctgctctcagtgctggagactagagagcgaccctggagttgtcctctgggagtcctgcctgtttgccagggagc

SEQ ID NO: 233748 - DNA, 120 bp, Artificial Sequence
  ENSG00000119772_66 (sequence is synthesized)
agctgaaacctccccgctcccaatcccgggggtggaaaaggtgtagtggaggaatggtctggagctgggatggcccttctggccatgccctgctgagccaggattaaggaaagtgtcagc

SEQ ID NO: 233749 - DNA, 120 bp, Artificial Sequence
  ENSG00000119772_67 (sequence is synthesized)
cgcctccttaccaggccctgtgctggggtcaggaggaccgggaggagagggaaggggtgagaggatggactctgctgttgtagtgtgagctctggaatctttacgttttggtaaaggcag

SEQ ID NO: 233750 - DNA, 120 bp, Artificial Sequence
  ENSG00000119772_68 (sequence is synthesized)
gccagggtctttgaggatcgagttggggaaccttgcctctgtgtttccgagacccagctaaggtgggcctttggtgggtgacctgtctctgacccgaggcagcagagttttgggggaggg

SEQ ID NO: 233751 - DNA, 120 bp, Artificial Sequence
  ENSG00000119772_69 (sequence is synthesized)
agaaacaagcaaggagcagggaggacaaggacacaagatccctttgctggtggtgacttactcacttcccccaccagagggcctgggactcccgaaactcccgtaactggaaagctccct

SEQ ID NO: 233752 - DNA, 120 bp, Artificial Sequence
  ENSG00000119772_70 (sequence is synthesized)
ggctcagctccactggggggtgaggagggcggctccctcagccccagcctagcggcctccaaccctgtgcctgagaacatgagcagcggtctaaagcatcccctagtcccatttcacttc

SEQ ID NO: 233753 - DNA, 120 bp, Artificial Sequence
  ENSG00000119772_71 (sequence is synthesized)
acagaccgatttggttgcacagccctagaattcaacagacaacaaaaatgctgaaattccttagaatacgcagagggaggaggtgactcaccaaggtgctaaaacattttattaaaaata

SEQ ID NO: 233754 - DNA, 120 bp, Artificial Sequence
  ENSG00000119772_72 (sequence is synthesized)
tatattgttaaattaagtctgctgtctggacaatgactgtttgttttgttttcttgtagtggagtttaaaagagactattattttactctgatatattattattaaaaaggcattttaac

SEQ ID NO: 233755 - DNA, 120 bp, Artificial Sequence
  ENSG00000119772_73 (sequence is synthesized)
tttgtacttgaaaactaaatgagcgatttcatgtgttttagctgaggcattgaagtagcgggtgcttacttatttgtgggaaatcatgtattcatactgaagaataaactccgtagctga

SEQ ID NO: 233756 - DNA, 120 bp, Artificial Sequence
  ENSG00000119772_74 (sequence is synthesized)
tttggtaataacttttactgttacagacgatttcgctttgaccccggtggcagagcacttttactccacattccacgcagctaaatgcaggacttcccagactcttccctccccagccct

SEQ ID NO: 233757 - DNA, 120 bp, Artificial Sequence
  ENSG00000119772_75 (sequence is synthesized)
ttccctccccagccctctttcctttctcttaagttcctcttttctcctttattattattatttttttttcctggttccagcatcctttcaccactgtatttttttttttttttttttttt

SEQ ID NO: 233758 - DNA, 120 bp, Artificial Sequence
  ENSG00000119772_76 (sequence is synthesized)
ttttttttttttttagggttgcttctctatttattgacaataataatgtacatttcacagtctggttctaggacattcagggaagggcgagtgggggcccgaggggtccctgccccaccc

SEQ ID NO: 233759 - DNA, 120 bp, Artificial Sequence
  ENSG00000119772_77 (sequence is synthesized)
gcctggtgtcctgttgtatctctgtgtaagtgatgctcgtgacatagctgtttatgaaataattaaagaggtcaatgcgtacaacagatgtagaaagtctgtcagttccgccttcatcac

SEQ ID NO: 233760 - DNA, 120 bp, Artificial Sequence
  ENSG00000119772_78 (sequence is synthesized)
atttttttttgtgcccagaagaatataataaagctcctttctaatgtacttgtgctggagaacacttgaataaatggactgtttttgtgcaaaaagaaaaatggaaaagcaccgtaataa

SEQ ID NO: 233761 - DNA, 120 bp, Artificial Sequence
  ENSG00000119772_79 (sequence is synthesized)
ccgattttgctctgtcttgcctcattcagatggagctccctcctggctgtcctgccccccagatgcccagggctggggttgccatggggggatcagggtggcagggcctcgtgaccactg

SEQ ID NO: 233762 - DNA, 120 bp, Artificial Sequence
  ENSG00000119772_80 (sequence is synthesized)
gcccgcagcagccgcggcgtcccggcctggcccgagttctggagatgctgacttagtgctggcccgccgccttcctgcccacgagccccaaggccccactcctcgagggctccagtggca

SEQ ID NO: 233763 - DNA, 120 bp, Artificial Sequence
  ENSG00000119772_81 (sequence is synthesized)
gaccctccaaaggtttacccacctgtcccagctgagaagaggaagcccatccgggtgctgtctctctttgatggaatcgctacaggctcacctgccgagaccagggtgccagggagatgg

SEQ ID NO: 233764 - DNA, 120 bp, Artificial Sequence
  ENSG00000119772_82 (sequence is synthesized)
aggtacaaaatagccacctgtactagtgggctagtggccactgaattgaacagtgtagaggacaacccaccatcgcagaagttcatttggacaatgctgatctagaacgttccagtgaca

SEQ ID NO: 233765 - DNA, 120 bp, Artificial Sequence
  ENSG00000119772_83 (sequence is synthesized)
aagaaaaggcccccaaaaagtcagctgtgattcttcctggatcctggaaccatgtactctccggtcagttttctgcagctttgactgccttccagataggccaaacgaggcatgagacag

SEQ ID NO: 233766 - DNA, 120 bp, Artificial Sequence
  ENSG00000119772_84 (sequence is synthesized)
agcctcgatgtccttactatggatactccagttggatccagaaaggatttaaggcatcttcagggaaaagataggacttgggcctacagctgaccccatgggtcctgttggccagcaggc

SEQ ID NO: 233767 - DNA, 120 bp, Artificial Sequence
  ENSG00000119772_85 (sequence is synthesized)
ccgcccccagccccatcgcccccttcccctcccccaagacgggcagctacttccagagcttcagggccgcggctcacacctgagcgcgactgcagaggggctgcacctggccttatgggc

SEQ ID NO: 233768 - DNA, 120 bp, Artificial Sequence
  ENSG00000119772_86 (sequence is synthesized)
ctggatgcagcctgcgcatatgttttatttggcccatagagtgttttaaacatttaaaaaattagttgccagtatttaaaaatcaaaaaatttcacataaaaatctggagttttggcttc

SEQ ID NO: 233769 - DNA, 120 bp, Artificial Sequence
  ENSG00000119772_87 (sequence is synthesized)
tcatgaaaaaaaaaaaagctagatctggcaacagcgggctttcataacgccaacgattgctagactgggataatggcggtccctccatcgccttctgtggctggttgtgggccttagttt

SEQ ID NO: 233770 - DNA, 120 bp, Artificial Sequence
  ENSG00000119772_88 (sequence is synthesized)
tctgcagctctacctggcctgcttactctcccacgtgccatgcagttcctgggggttgctgtatttgtagcccctggcctgggcactcaagggcagcagataccctgtttgcctccctga

SEQ ID NO: 233771 - DNA, 120 bp, Artificial Sequence
  ENSG00000119772_89 (sequence is synthesized)
gtgcagaggtcctgagcccaccctagttgggctgactcaactggaaatttggttgtgacagtggcgtggggagagggctgggtgattgtattctgtgtactgcccagcccaggcctcttc

SEQ ID NO: 233772 - DNA, 120 bp, Artificial Sequence
  ENSG00000119772_90 (sequence is synthesized)
atctggggactttttggcctaaccctggaagcctggaaagttgcccacttttctctttcaggttaagccagcaatttcagggccaaccgagctgtaaacatgttagtaatgaggacaact

SEQ ID NO: 233773 - DNA, 120 bp, Artificial Sequence
  ENSG00000119772_91 (sequence is synthesized)
agcatttgtacagggcttcacagtttacaaagcgctttctcatacattatcacatttgatcctcccagggccctgccaggttgttttgcatatgtgcattttaatttcaaaaagtcttcc

SEQ ID NO: 233774 - DNA, 120 bp, Artificial Sequence
  ENSG00000119772_92 (sequence is synthesized)
ttccaagcgtgtatgatgaaatgagtaaattgattaattggcgtaacttattttgcatggatccaacctaatgttcatgcaggatagagaacatttccagaatacaaatttccaaactta

SEQ ID NO: 233775 - DNA, 120 bp, Artificial Sequence
  ENSG00000119772_93 (sequence is synthesized)
cctggggtgggggaaggttcttgatcccagggcctgtggttttggctgggggcagtctggaattggggtgatggaagtgggttctgctcacccctactctgcctgtggtgggtggaagaa

SEQ ID NO: 233776 - DNA, 120 bp, Artificial Sequence
  ENSG00000119772_94 (sequence is synthesized)
gctgtagggataattaggttgcacctgtggctcagagagctaggatgctggcccagttttagccttccaggaacctattcactagaattcctttccacctgcactcaggtacttccctac

SEQ ID NO: 233777 - DNA, 120 bp, Artificial Sequence
  ENSG00000119772_95 (sequence is synthesized)
ttgcatcgggtaattatttatcactgtatctggtcccctccagggctgagactgactctcgaggctcccagcccctgccagttgcaaggcatggggtgggtgcttgcaagtgtaagcctc

SEQ ID NO: 233778 - DNA, 120 bp, Artificial Sequence
  ENSG00000119772_96 (sequence is synthesized)
ccgcccccagccccatcgcccccttcccctcccccaagacgggcagctacttccagagcttcagggccgcggctcacacctgagcgcgactgcagaggggctgcacctggccttatgggg

SEQ ID NO: 233779 - DNA, 120 bp, Artificial Sequence
  ENSG00000119777_0 (sequence is synthesized)
gcgccggaccggaaagccggggaagtggccgaggagggagggctgcgagccatggcgaccaagacggcgggcgtggggcggtgggaggtagtgaagaagggtcggcggcctggggtcggc

SEQ ID NO: 233780 - DNA, 120 bp, Artificial Sequence
  ENSG00000119777_1 (sequence is synthesized)
gccggcgccggcggccgaggaggcggcaggaaccgcagggcgctcggggaagcaaacggagtgtggaaatacgacctgacccctgcaatccagaccacaagcaccctttatgagcggggc

SEQ ID NO: 233781 - DNA, 120 bp, Artificial Sequence
  ENSG00000119777_2 (sequence is synthesized)
tttgagaatatcatgaagcggcagaataaggagcaggtcccaccccctgctgtggaacctaagaaaccagggaacaagaagcagccaaagaaggtggcaactcctcccaaccaaaaccag

SEQ ID NO: 233782 - DNA, 120 bp, Artificial Sequence
  ENSG00000119777_3 (sequence is synthesized)
aagcagggccgcttccgcagcctggaggaagcactgaaagctctggatgtggcagacctgcagaaggaactggacaagagccagagtgtgttctctggaaacccatccatatggttgaag

SEQ ID NO: 233783 - DNA, 120 bp, Artificial Sequence
  ENSG00000119777_4 (sequence is synthesized)
gacctggccagctatctcaactacaagctacaagctcctctaagtgaacccacgctgagccagcatactcatgattatccctacagcctggtgagccgggagctacgtgggatcatccga

SEQ ID NO: 233784 - DNA, 120 bp, Artificial Sequence
  ENSG00000119777_5 (sequence is synthesized)
gggctgctggcgaaggcagcagggtctctggagctcttttttgaccactgtctgttcaccatgttgcaagagctggataagacaccaggggagtcactacatggttaccgcatctgtatc

SEQ ID NO: 233785 - DNA, 120 bp, Artificial Sequence
  ENSG00000119777_6 (sequence is synthesized)
caggccatcctgcaagacaagcccaagattgccacggcaaacctaggcaagttcctggaactgctgaggtcccaccagagccgaccagcaaagtgtctcaccatcatgtgggccctgggt

SEQ ID NO: 233786 - DNA, 120 bp, Artificial Sequence
  ENSG00000119777_7 (sequence is synthesized)
caagcaggttttgccaacctcaccgagggactgaaagtgtggctggggatcatgctgcctgtgctgggcatcaagtctctgtctccctttgccatcacatacctggatcggctgctcctg

SEQ ID NO: 233787 - DNA, 120 bp, Artificial Sequence
  ENSG00000119777_8 (sequence is synthesized)
atgcatcccaaccttaccaagggcttcggcatgattggccccaaggacttcttcccacttctggactttgcctatatgccgaacaactccctgacacccagcctgcaggagcagctgtgt

SEQ ID NO: 233788 - DNA, 120 bp, Artificial Sequence
  ENSG00000119777_9 (sequence is synthesized)
cagctctacccccgactgaaagtgctggcatttggagcaaagccggattccaccctgcatacctacttcccttctttcctgtccagagccacccctagctgtccccctgagatgaagaaa

SEQ ID NO: 233789 - DNA, 120 bp, Artificial Sequence
  ENSG00000119777_10 (sequence is synthesized)
gagctcctgagcagcctgactgagtgcctgacggtggaccccctcagtgccagcgtctggaggcagctgtaccctaagcacctgtcacagtccagccttctgctggagcacttgctcagc

SEQ ID NO: 233790 - DNA, 120 bp, Artificial Sequence
  ENSG00000119777_11 (sequence is synthesized)
tcctgggagcagattcccaagaaggtacagaagtctttgcaagaaaccattcagtccctcaagcttaccaaccaggagctgctgaggaagggtagcagtaacaaccaggatgtcgtcacc

SEQ ID NO: 233791 - DNA, 120 bp, Artificial Sequence
  ENSG00000119777_12 (sequence is synthesized)
cctgtgccatgacctccggtcacacagctccttccaggcctcccttactggccggttgcttcgatcatctggcttcttacctgctagccaacaagcgtgtgccaagctctactcctacag

SEQ ID NO: 233792 - DNA, 120 bp, Artificial Sequence
  ENSG00000119777_13 (sequence is synthesized)
tctgcaaggctacagctggctgggggagacactgccgctctggggctcccacctgctcaccgtggtgcggcccagcttgcagctggcctgggctcacaccaatgccacagtcagcttcct

SEQ ID NO: 233793 - DNA, 120 bp, Artificial Sequence
  ENSG00000119777_14 (sequence is synthesized)
ttctgcccactgtgcctctcaccttgcgtggtttggtgacagtctcaccagtctctctcagaggctacagatccagctccccgattccgtgaatcagctactccgctatctgagagagct

SEQ ID NO: 233794 - DNA, 120 bp, Artificial Sequence
  ENSG00000119777_15 (sequence is synthesized)
gcccctgcttttccaccagaatgtgctgctgccactgtggcacctcttgcttgaggccctggcctgggcccaggagcactgccatgaggcatgcagaggtgaggtgacctgggactgcat

SEQ ID NO: 233795 - DNA, 120 bp, Artificial Sequence
  ENSG00000119777_16 (sequence is synthesized)
gaagacacagctcagtgaggctgtccactggacctggctttgcctacaggacattacagtggctttcttggactgggcacttgccctgatatcccagcagtaggccctgccttcctggcc

SEQ ID NO: 233796 - DNA, 120 bp, Artificial Sequence
  ENSG00000119777_17 (sequence is synthesized)
actgatttctgcatgggtagaccatccaagactgcagcgggtagaaggtggcagttcttcatgggagtctttttaacttggtgcctgagttctctcctaggcaagtggccagttgcctcc

SEQ ID NO: 233797 - DNA, 120 bp, Artificial Sequence
  ENSG00000119777_18 (sequence is synthesized)
acctcagttcttccatctttggtggggacagggcccagcagcatctcagcctcctacccacaattccactgaacacttttctggccctactgcacatggcccccagcctccatccttgtg

SEQ ID NO: 233798 - DNA, 120 bp, Artificial Sequence
  ENSG00000119777_19 (sequence is synthesized)
ctggtagcctctcacaactccgcccttgccctctgccttccacttccttccatctcatttctaaaccccaaacagctcatctctaaaaagatagaactcccagcaggtggcttctgtgtt

SEQ ID NO: 233799 - DNA, 120 bp, Artificial Sequence
  ENSG00000119777_20 (sequence is synthesized)
cttctgacaaatgattcctgcttctccagactttagcagcctcctgttcccattcttggtcacagctctagccacagcagaaggaaaggggcttccagaagaatatagcaccgcattggg

SEQ ID NO: 233800 - DNA, 120 bp, Artificial Sequence
  ENSG00000119777_21 (sequence is synthesized)
aaacagcagcctcacctccacctgaagcctgggtgtggctgtcagtggacatggggagctggatggaaatgcctctcacttcaaaatgcccagcctgccccaaatgcctctaagcccctc

SEQ ID NO: 233801 - DNA, 120 bp, Artificial Sequence
  ENSG00000119777_22 (sequence is synthesized)
cctgtcccctcccttgtagtcctacttcttccaactttccattccccatcatgctgggggtcttggtcacaaggctcagcttctctccactgtccatccctcctatcatctgtagagcag

SEQ ID NO: 233802 - DNA, 120 bp, Artificial Sequence
  ENSG00000119777_23 (sequence is synthesized)
agcacaggcagttgtgtgccttgggcccagggaaccctccatcaacctgagacaggactcagtatatggttcttgggtatgccctaccaggtggaataaaggacacagatttgatttcta

SEQ ID NO: 233803 - DNA, 120 bp, Artificial Sequence
  ENSG00000119777_24 (sequence is synthesized)
aagagacagcacattcagggtggatgtgcggcctggatggccttgcttacgggaaggggatcacctcttagcactccccgcctctgccagccccatgcccccagcagcctctccctctgt

SEQ ID NO: 233804 - DNA, 120 bp, Artificial Sequence
  ENSG00000119777_25 (sequence is synthesized)
acaagctcctctaagtgaacccacgctgagccagcatactcatggtaagtccttccagcttcctcaagctcagacaagttcaaataaattcaaaaagggtggtataacagatcccagtgc

SEQ ID NO: 233805 - DNA, 120 bp, Artificial Sequence
  ENSG00000119777_26 (sequence is synthesized)
cccacactgtcctgatttccatgggtgatttgggctggtctcaaatcatcgtgactgtgaatgtttctgggcctcattctgtgatcctccctctgggcctcctcagaggaaggatcccag

SEQ ID NO: 233806 - DNA, 120 bp, Artificial Sequence
  ENSG00000119777_27 (sequence is synthesized)
gcgtggtttggtgacagtctcaccagtctctctcagagggtaagtcagagacagggagtcaaataaggggctggttttcccaggagcagaattctgggaaaggagcagcactgtgtggcc

SEQ ID NO: 233807 - DNA, 120 bp, Artificial Sequence
  ENSG00000119777_28 (sequence is synthesized)
agggagagcaccacagttctcagagctgatgggtgtctggtcctagcactcacattgaggcctatgggccttagattatccctacagcctggtgagccgggagctacgtgggatcatccg

SEQ ID NO: 233808 - DNA, 120 bp, Artificial Sequence
  ENSG00000119777_29 (sequence is synthesized)
gggagcctcctcctttttttcctgcttccagtaccactcagtggttctgtttccagcagagaaatgtgctaaccttaacactttttggaaagtgtggaggaagttaggagtcagtggacc

SEQ ID NO: 233809 - DNA, 120 bp, Artificial Sequence
  ENSG00000119777_30 (sequence is synthesized)
gaaacactttaagggttgagaggagttcaggaaaagatggaaaccccaggggaacagaatgcctgcacttagaatagaaaggaaatggaaaatttatagggaaacatggattggtaagag

SEQ ID NO: 233810 - DNA, 120 bp, Artificial Sequence
  ENSG00000119777_31 (sequence is synthesized)
gaaagccttgaagacccaggaacaccagggaggagatggagaaactggttatgattctctgtcctatggaaatactgatctttcattttctgtcttgtcctctgttttcctctttttttt

SEQ ID NO: 233811 - DNA, 120 bp, Artificial Sequence
  ENSG00000119777_32 (sequence is synthesized)
atagaagtgcttgcatattcatagtatcattttagtaggtgttacctccttttaactcctgaggaaatggtctcagaaagatgtagcaattagctttaggtcatagctagtaagtagaag

SEQ ID NO: 233812 - DNA, 120 bp, Artificial Sequence
  ENSG00000119777_33 (sequence is synthesized)
ggcagaccctcaacctgaggcttcctgaagcctgagcctaggctccaaccggcagctgcattcctgcacacctggcccagcaggagaagggcagctctgcatgcctccctccacagcagc

SEQ ID NO: 233813 - DNA, 120 bp, Artificial Sequence
  ENSG00000119777_34 (sequence is synthesized)
ctggagctggctttgtggccctgtgagaacacaaagctctgcccagcgcctcgctgtgcctgctctgggccctgtagtgtctgtctccccagtccctgcccctctcacctcccagctcac

SEQ ID NO: 233814 - DNA, 120 bp, Artificial Sequence
  ENSG00000119777_35 (sequence is synthesized)
cagaggccccctttacttagcctcccttactggccggttgcttcgatcatctggcttcttacctgctagccaacaagcgtgtgccaagctctactcctacagtctgcaaggctacaggtg

SEQ ID NO: 233815 - DNA, 120 bp, Artificial Sequence
  ENSG00000119777_36 (sequence is synthesized)
agctcctcccagggaggggagaggagaggcagaagagagaaggcctgggtgtcagggaggaggcgacagtcagtgggaagcgcttgtgattctcctttcccacggcctccctttccccag

SEQ ID NO: 233816 - DNA, 120 bp, Artificial Sequence
  ENSG00000119778_0 (sequence is synthesized)
ctcgttggccctgcggcgctggagccttgacgcacggagctcgagagcgagaacgggagagaaaggggtagaaatggcggctccgctcggctcccgctgaggagggcgaagccggcggag

SEQ ID NO: 233817 - DNA, 120 bp, Artificial Sequence
  ENSG00000119778_1 (sequence is synthesized)
tgtctgtgctgccggtctgcagcaccgcccccgcttcccgcacgccgcctgctcacgccgacttcccttcctctgcccggctctctcttgtgctcgtctgcgctccgcacgctccgggcc

SEQ ID NO: 233818 - DNA, 120 bp, Artificial Sequence
  ENSG00000119778_2 (sequence is synthesized)
ggctcgtctctcattgcccggctcggctccgctggccctgactgaccggccggcgggccggccttgctcggctctcccgggcgcggcgtggactccgtccccctggctggaccatggtga

SEQ ID NO: 233819 - DNA, 120 bp, Artificial Sequence
  ENSG00000119778_3 (sequence is synthesized)
acacccggaagagctctctccgccttctcgggtccaagtctcctggtcccgggcctgggcctggggccggagcagagcctggggcgaccggaggcagcagccatttcatctcctctcgga

SEQ ID NO: 233820 - DNA, 120 bp, Artificial Sequence
  ENSG00000119778_4 (sequence is synthesized)
cccgctcctccaagacccgcgccgccagctgccccgccgccaaagccgggggaagcggtggcgccggcgtcactctggatgaggccaggaaagttgaagttgatggtagtttaagtgata

SEQ ID NO: 233821 - DNA, 120 bp, Artificial Sequence
  ENSG00000119778_5 (sequence is synthesized)
gccacgtatctcctccagccaaacgcactttgaaacaacctgattctgtttgcaaagacaaatcaaaatcacgaagtactggtcagcgagaggaatggaacttatcaactggacaggcca

SEQ ID NO: 233822 - DNA, 120 bp, Artificial Sequence
  ENSG00000119778_6 (sequence is synthesized)
ggttaacttctcagcctggtgctacattaccaaatggacatagtggcttatcccttcgaagccatccccttcgaggggaaaagaagggagatggggacctttcttgtataaatggtgaca

SEQ ID NO: 233823 - DNA, 120 bp, Artificial Sequence
  ENSG00000119778_7 (sequence is synthesized)
tggaagtcagaaaaagttgtcgttccaggaaaaacagatttgaaagtgtgaaccagagtttgttatttgatcaactagtaaatagcactgctgaagctgtactacaggaaatggacaaca

SEQ ID NO: 233824 - DNA, 120 bp, Artificial Sequence
  ENSG00000119778_8 (sequence is synthesized)
ttaacatccgacggaatcgtcgatcaggagaagtagaacgacttcgaatgtggacagatacagaatttgaaaacatggatatgtattcaagagtgaaaaggcgaagaaagtcactaagaa

SEQ ID NO: 233825 - DNA, 120 bp, Artificial Sequence
  ENSG00000119778_9 (sequence is synthesized)
gaaatagttatgggatacaaaatcatcatgaagtttctactgagggtgaagaagaagaatctcaagaggaggatggagatatagaagttgaagaggcagaaggagaagaaaatgatagac

SEQ ID NO: 233826 - DNA, 120 bp, Artificial Sequence
  ENSG00000119778_10 (sequence is synthesized)
catataatttgagacagagaaaaacagtggatcgataccaagcacctccaatagtaccagctcatcaaaaaaagagggaaaacacgctgtttgatattcatagatctccagcaagaagaa

SEQ ID NO: 233827 - DNA, 120 bp, Artificial Sequence
  ENSG00000119778_11 (sequence is synthesized)
gccatattaggagaaagaagcatgccattcatagtagtgacacaacttcttctgatgaggaacgctttgaaagaaggaaatcaaagagcatggcaagagcaagaaatagatgtttgccta

SEQ ID NO: 233828 - DNA, 120 bp, Artificial Sequence
  ENSG00000119778_12 (sequence is synthesized)
tgaacttcagagcagaggacttagctagcggtattctccgagaacgagtgaaagtgggtgcaagcttggctgatgttgatccaatgaacattgataaatcagtacggtttgatagcatag

SEQ ID NO: 233829 - DNA, 120 bp, Artificial Sequence
  ENSG00000119778_13 (sequence is synthesized)
gtggattgagccatcatattcatgcgctaaaggaaatggtagtattcccacttttatatccagaaatttttgaaaagtttaaaattcagcctccaaggggctgtttgttttatggccctc

SEQ ID NO: 233830 - DNA, 120 bp, Artificial Sequence
  ENSG00000119778_14 (sequence is synthesized)
ctggcacaggtaaaaccttggttgccagagcattagctaatgaatgcagccaaggagacaaaaaagtggctttttttatgcgaaaaggagcagattgtttgagcaagtgggttggtgaat

SEQ ID NO: 233831 - DNA, 120 bp, Artificial Sequence
  ENSG00000119778_15 (sequence is synthesized)
ctgaaaggcaacttaggcttctttttgatcaggcatatttgatgagaccttctataatattttttgatgaaatagatggattagctccagttcgctctagcagacaagatcagatccaca

SEQ ID NO: 233832 - DNA, 120 bp, Artificial Sequence
  ENSG00000119778_16 (sequence is synthesized)
gctctatagtatcaaccctccttgctcttatggatggattagataataggggtgaaattgttgttattggtgctacaaacagacttgactctatagatcctgcactcaggagacctggtc

SEQ ID NO: 233833 - DNA, 120 bp, Artificial Sequence
  ENSG00000119778_17 (sequence is synthesized)
gttttgacagagaattcctcttcaacctgcctgatcaaaaggcaagaaaacacatcttacagatccataccagggactggaatccaaaattgtcagatgcatttttaggtgaattggctg

SEQ ID NO: 233834 - DNA, 120 bp, Artificial Sequence
  ENSG00000119778_18 (sequence is synthesized)
aaaaatgtgttggctactgtggagccgatatcaaggccctgtgcactgaagccgccctgattgcactgcggaggcgttatccccagatctatgctagcagtcataaactgcagctggatg

SEQ ID NO: 233835 - DNA, 120 bp, Artificial Sequence
  ENSG00000119778_19 (sequence is synthesized)
tttcctcaatagtgcttagtgcccaagatttttaccatgcaatgcagaatatcgtgcctgcttcccaacgtgctgtgatgtcttcagggcatgcactatcccccatcataagaccactgc

SEQ ID NO: 233836 - DNA, 120 bp, Artificial Sequence
  ENSG00000119778_20 (sequence is synthesized)
tggaaagaagcttcaacaacatcctagcagtcttgcaaaaagtgtttcctcatgctgaaattagccagagtgacaaaaaagaagatatagaaactttaattttagaggatagtgaagatg

SEQ ID NO: 233837 - DNA, 120 bp, Artificial Sequence
  ENSG00000119778_21 (sequence is synthesized)
aaaatgctttatcaatttttgagaccaattgtcactcaggatcaccaaagaaacagtcatcatctgctgctatacataaaccctaccttcattttacaatgtcaccatatcatcagccaa

SEQ ID NO: 233838 - DNA, 120 bp, Artificial Sequence
  ENSG00000119778_22 (sequence is synthesized)
cctcttacaggccacgcttattgctctctggagaacggggctcaggtcaaacttctcaccttgctccagcacttttgcacactctagaaagattctctgtgcatagactagatctcccag

SEQ ID NO: 233839 - DNA, 120 bp, Artificial Sequence
  ENSG00000119778_23 (sequence is synthesized)
cactttattcagttagtgccaaaacacctgaggaatcatgtgcacagatttttcgtgaagctcgaagaacagtacctagtattgtttacatgcctcacattggggattggtgggaagctg

SEQ ID NO: 233840 - DNA, 120 bp, Artificial Sequence
  ENSG00000119778_24 (sequence is synthesized)
tcagtgaaactgtgagagcaacttttctgacattgctacaagatataccatcattttcacctatatttttattgtctacctctgaaaccatgtacagtgaactgcctgaagaggttaaat

SEQ ID NO: 233841 - DNA, 120 bp, Artificial Sequence
  ENSG00000119778_25 (sequence is synthesized)
gtatctttagaatacagtatgaagaggtcttgtatattcaaaggcctattgaagaagacagaagaaaattttttcaagaattgattctcaatcaggcatcaatggctccaccacgaagga

SEQ ID NO: 233842 - DNA, 120 bp, Artificial Sequence
  ENSG00000119778_26 (sequence is synthesized)
aacatgctgctctttgtgctatggaagtgcttcctcttgcactaccttctccacctcgtcaattatcagaatcagaaaaaagtcgaatggaggaccaggaggaaaatactttaagagagt

SEQ ID NO: 233843 - DNA, 120 bp, Artificial Sequence
  ENSG00000119778_27 (sequence is synthesized)
tgcggttgtttctcagggatgtaaccaagaggctggccacagataaacgctttaacatcttcagcaaaccggtggatattgaagaggtttcagattatcttgaagtaatcaaggaaccaa

SEQ ID NO: 233844 - DNA, 120 bp, Artificial Sequence
  ENSG00000119778_28 (sequence is synthesized)
tggacttatcaacagtaataactaaaattgataaacataattacctgactgcaaaggatttcctgaaagatattgacctcatctgtagcaatgctttagagtataatccagataaggacc

SEQ ID NO: 233845 - DNA, 120 bp, Artificial Sequence
  ENSG00000119778_29 (sequence is synthesized)
caggagataaaataattaggcacagggcttgtaccctgaaggacactgcacatgctatcattgcagctgaattagatccagaatttaataaactttgtgaggaaattaaggaagcaagaa

SEQ ID NO: 233846 - DNA, 120 bp, Artificial Sequence
  ENSG00000119778_30 (sequence is synthesized)
taaaaagaggcttatcagtaacatcagaacaaataaatcctcatagtactggagctcggaagacagaaactagagtcgaagaggcatttcggcacaaacaaagaaatccaatggatgtgt

SEQ ID NO: 233847 - DNA, 120 bp, Artificial Sequence
  ENSG00000119778_31 (sequence is synthesized)
ggcacaactctgcaaataaatgtgcatttcgggttcggagaaaatcaaggcggagatcacagtggggtaaaggaattattaagaaaaggaaagttaataatttaaaaaaagatgaagaag

SEQ ID NO: 233848 - DNA, 120 bp, Artificial Sequence
  ENSG00000119778_32 (sequence is synthesized)
acaccaaatttgcagactatgagaaccatacggaggacaggaaattattagagaatggagagtttgaggtaagcactgactgccatgaggaaaatggagaagagactggagacttatcta

SEQ ID NO: 233849 - DNA, 120 bp, Artificial Sequence
  ENSG00000119778_33 (sequence is synthesized)
caaaagagaactttgcatctactgaggaggaaagttcaaatgaatctctactggtcaacagcagcagttccttaaacccggagcagacctccaggaaagagactttccttaaaggaaatt

SEQ ID NO: 233850 - DNA, 120 bp, Artificial Sequence
  ENSG00000119778_34 (sequence is synthesized)
gtctaaatggtgaggcttccactgacagttttgaaggaataccagttctggaatgtcagaatggcaagcttgaagtagtttctttctgtgatagtggagataaatgtagttctgaacaaa

SEQ ID NO: 233851 - DNA, 120 bp, Artificial Sequence
  ENSG00000119778_35 (sequence is synthesized)
agattcttctggaggaccagtcaaaagaaaaaccagaaacttcgactgaaaatcatggagatgatcttgagaaactagaggcactggaatgtagcaataatgagaagttagaacctggct

SEQ ID NO: 233852 - DNA, 120 bp, Artificial Sequence
  ENSG00000119778_36 (sequence is synthesized)
ctgatgtggaggttaaagatgcagaactggataaagaaggtgcttctaaagtaaagaaataccgtaaattaattttagagcaggcaaaaacgacaagcctggaactggttccagaagagc

SEQ ID NO: 233853 - DNA, 120 bp, Artificial Sequence
  ENSG00000119778_37 (sequence is synthesized)
catctgagcctgtgcctcctcttatagttgatcgtgagagattgaagaaattgcttgatttgttggtggataaaagcaacaatctggcagttgatcagcttgagagattatattctcttc

SEQ ID NO: 233854 - DNA, 120 bp, Artificial Sequence
  ENSG00000119778_38 (sequence is synthesized)
ttagtcagtgtatctaccgtcatcgtaaagattatgacaaatcacaacttgtagaggagatggaaagaacagttcatatgtttgagacattcctatgaacttttcaagatgagtggttta

SEQ ID NO: 233855 - DNA, 120 bp, Artificial Sequence
  ENSG00000119778_39 (sequence is synthesized)
tcctctccaatctgctcctcacagagcagtcttctgagccattcaatttcaaattgcaccaattatgtgcagagccttggtgtaaagtgctctctcactcattctttctctctgttgaat

SEQ ID NO: 233856 - DNA, 120 bp, Artificial Sequence
  ENSG00000119778_40 (sequence is synthesized)
ttggtgctattgtctcaggtacctgaaaccaaccagcctacaagaaccaaacagaacttcagaaacatgttgtattttccacaaataaaaaatacaaccccacagcttggagattttggt

SEQ ID NO: 233857 - DNA, 120 bp, Artificial Sequence
  ENSG00000119778_41 (sequence is synthesized)
gctacagaaactgctctcgcttctgctcctctttttgtgcactctcttttggagactcctctcttagggagcagaccagcaaacaggaggaaactggatgggggcagttctaactgtgtt

SEQ ID NO: 233858 - DNA, 120 bp, Artificial Sequence
  ENSG00000119778_42 (sequence is synthesized)
gaattgtttaaacagtgggcaacttgttatttttttttcctccattttacccctttaatcatatttttcccccatctgggtaatggactgaaacctgttttagagttggctatggtctgt

SEQ ID NO: 233859 - DNA, 120 bp, Artificial Sequence
  ENSG00000119778_43 (sequence is synthesized)
tctggtgggaagctgaagaaactggatgaaattaggtcaggctctttagaactgcctttaacgtgcctttttattcatttgaggaagataaggctaaaaggatgggctgtttgaagcaaa

SEQ ID NO: 233860 - DNA, 120 bp, Artificial Sequence
  ENSG00000119778_44 (sequence is synthesized)
taaattagaaatatttctttggtcacaaccttgaaaataagttttgatactctatgtcattaagagacaaccagtgtttgggtatgaaatgcctgtcttattctcaaagctcaatcaaga

SEQ ID NO: 233861 - DNA, 120 bp, Artificial Sequence
  ENSG00000119778_45 (sequence is synthesized)
cacccagtaagccacataatatactaaaatggtaagttttcttgtaaggtctgttttggtttaagaaacatgaataacaacaaagaataatacacagtccacacacaaaaaaacaaaaaa

SEQ ID NO: 233862 - DNA, 120 bp, Artificial Sequence
  ENSG00000119778_46 (sequence is synthesized)
caaaactgcacacgttttggtattgccaacaatgatgactagaaaataaatagatagtggccattttttcttctgtcagtggcaatttaatagttattcatgtttgagttcccagagaaa

SEQ ID NO: 233863 - DNA, 120 bp, Artificial Sequence
  ENSG00000119778_47 (sequence is synthesized)
aatggttttcatatgtagtaaattgttgttttgttttaaagccaggacttgccaaatggacagaaaagagaggaattcatcagaagctccataaaattcattttctgtatgcttaattgc

SEQ ID NO: 233864 - DNA, 120 bp, Artificial Sequence
  ENSG00000119778_48 (sequence is synthesized)
aaacgagctctggtatggtccttgaataacagtattaatgtttaaatcccatctcctaagcttaccttcacaactcttctttttgattggaaaccattttgaatcttgttgagtgatttc

SEQ ID NO: 233865 - DNA, 120 bp, Artificial Sequence
  ENSG00000119778_49 (sequence is synthesized)
tgtgaattgtatgtatctgaaattaattatgggttactagttttacaaaaactttctacaaatttggagacacagtctaggcagttgcaatgaggcaaaggatgcagtgactttttttat

SEQ ID NO: 233866 - DNA, 120 bp, Artificial Sequence
  ENSG00000119778_50 (sequence is synthesized)
cagatgatttttaaacaaaaagaaaattttgccagcaagttggcttggtatcttcattcattgtagccgttagctgcaggtgtgtctttccaatatatgcaacacatgtagtttgggttt

SEQ ID NO: 233867 - DNA, 120 bp, Artificial Sequence
  ENSG00000119778_51 (sequence is synthesized)
taattagggcgaatggtcttggactactgcagagattctgagctacctcagctttttgtattttagttaccaacagtgtttacagagtcttgtaatcactttgccaccgtttacatcctg

SEQ ID NO: 233868 - DNA, 120 bp, Artificial Sequence
  ENSG00000119778_52 (sequence is synthesized)
aagctaaggtacttgtctccttgtctttggctctttgtagtgtgcagaaagcatactttggccatagcctactgcagtaatccaaagtgcttctttgcatttacatttacatctaacgcc

SEQ ID NO: 233869 - DNA, 120 bp, Artificial Sequence
  ENSG00000119778_53 (sequence is synthesized)
ttctaattctagcttaatttttttttaaatgccacgtgttttctttgtacctagtctgtgaagtttctgtaatatccagttagtcatacaagtcaagatgctacccatgtagacacactg

SEQ ID NO: 233870 - DNA, 120 bp, Artificial Sequence
  ENSG00000119778_54 (sequence is synthesized)
tatttttaaggtgggcaagtgcgattaacgatgaaccattttaaaggggaggttatttgaaacctctaatttgattattgggaggattttcatgctttctttagtatttattaccatcat

SEQ ID NO: 233871 - DNA, 120 bp, Artificial Sequence
  ENSG00000119778_55 (sequence is synthesized)
accgattcaaactattttattgtctaatacattagcattttgtattttgatggaaattgttacagaatttaaagatttgatgaaataagatgtagcagattttttgtagcaagtttctgg

SEQ ID NO: 233872 - DNA, 120 bp, Artificial Sequence
  ENSG00000119778_56 (sequence is synthesized)
taaaagggttttttgcaagtctcaggttcttgctgcactatttttttttaaatatttattccagttattctaattcagaagcattcttttcaagtaacagcagcacttgtgaaaggaaaa

SEQ ID NO: 233873 - DNA, 120 bp, Artificial Sequence
  ENSG00000119778_57 (sequence is synthesized)
aaaaatgcacatgtttcttagtaggttactaaatttgtacaattaattaagattttagccatcagtgagtttgaaaagggaaatgtatttattttcagcattaaaatgcttccaaaagat

SEQ ID NO: 233874 - DNA, 120 bp, Artificial Sequence
  ENSG00000119778_58 (sequence is synthesized)
caagttgcttttgtttgtttgtttttttaaccgtaatgtagatggagaaattggaggcaacctcagtataggaactgccactttgaacagtttaggtcttaaagagaaagtcaatctaat

SEQ ID NO: 233875 - DNA, 120 bp, Artificial Sequence
  ENSG00000119778_59 (sequence is synthesized)
gccaaggggagaacaatgagctgaaattgtaccaactcctctggccctccttccctcaattaaaaaaacacacttaccagttttgcttattttacagatatctggtggttctatagttta

SEQ ID NO: 233876 - DNA, 120 bp, Artificial Sequence
  ENSG00000119778_60 (sequence is synthesized)
aagcagcttgtgaaattaaaaaagtggactcaattttgtttacctttctgtaagtttttcatttttgctgtatagcattggcaaaaatatgtacaaattgacctctgttcttatttccta

SEQ ID NO: 233877 - DNA, 120 bp, Artificial Sequence
  ENSG00000119778_61 (sequence is synthesized)
ttgtgagcattataaagataagctcctatgtaaaaccttgctctcagatgagtaaaatatgtatcacagcatagctcagcaataattcatgctcagctgtggggaccctgggggcttttt

SEQ ID NO: 233878 - DNA, 120 bp, Artificial Sequence
  ENSG00000119778_62 (sequence is synthesized)
gaagatgatggaaccgcactagggttgaaactgatggctgtggagttaattgtgttttcgagcttgaatctcacctgtgattttttttttttaatgttgtttcatgacttgatttttctc

SEQ ID NO: 233879 - DNA, 120 bp, Artificial Sequence
  ENSG00000119778_63 (sequence is synthesized)
ataagccaatgtatttgtaggtttactggattttatttttagggagtgggtaatttcttcccttttttgattaagttggttcagctatggtgctattcagtaggtatcttcagtgtcagg

SEQ ID NO: 233880 - DNA, 120 bp, Artificial Sequence
  ENSG00000119778_64 (sequence is synthesized)
tcccgtagctgaatgccattgttattataattattatttgtaatcacattgtaagcttgaatttgggcttgtacctgcatcttttgtattctgtacatctggttacttagactttgggag

SEQ ID NO: 233881 - DNA, 120 bp, Artificial Sequence
  ENSG00000119778_65 (sequence is synthesized)
tccaatttggtttcagtcatgtatgtctactttgtagtttaagtagacttcatcaactatggtctattttgggtttgtagttttaatttagaattgtgttaaattgatgttttgcatttg

SEQ ID NO: 233882 - DNA, 120 bp, Artificial Sequence
  ENSG00000119778_66 (sequence is synthesized)
acttcatttgacattagttgaagtaaattatttaatttttgaattctggaatttgaacatttactgtaatttgtaatataactgctgtgaaatacttgaataaagatgacaagaaaaaca

SEQ ID NO: 233883 - DNA, 120 bp, Artificial Sequence
  ENSG00000119778_67 (sequence is synthesized)
gagtgaaggctgtttgttaagtcagtgcttagaggtgaagattgcttttatcttccttttagtggatatgcttattaggtgatactttagtatgacttggctttttaagttgtagtttag

SEQ ID NO: 233884 - DNA, 120 bp, Artificial Sequence
  ENSG00000119778_68 (sequence is synthesized)
ttttctttaatttgggttacttagtcttaccaataaaaaatctaccacattgggttgctttaaaaaaaatcacttaagaatacacccttcctcattccaaaagggatttgtgtggtaggt

SEQ ID NO: 233885 - DNA, 120 bp, Artificial Sequence
  ENSG00000119778_69 (sequence is synthesized)
attttggcattgttcttcgagcagcgtgcattttggtagacactagccgtatgtggctattgagcacttaaaatgtggctagtgtaactaaagaactgcattttaaattttatttagtct

SEQ ID NO: 233886 - DNA, 120 bp, Artificial Sequence
  ENSG00000119778_70 (sequence is synthesized)
tagttaatttaaaatttaaataaaatggcattatgtggctcatggcttactatattgcacagcatggatcttgaacatcgttttccacattaactttccctttctaacatttcgaggaaa

SEQ ID NO: 233887 - DNA, 120 bp, Artificial Sequence
  ENSG00000119778_71 (sequence is synthesized)
cagttttgtgagactgaaatctaagtcattcttctcaagcctgggtctgtggaaaggcctatgctggctgtttacctttttcccttaaatagtttttaaggtcccgagactagatgagat

SEQ ID NO: 233888 - DNA, 120 bp, Artificial Sequence
  ENSG00000119778_72 (sequence is synthesized)
ttgtatgcaagtaaaagaattactcagtaccatttaaaataaatacaaatgatttagtagaaaaatataaatcaacaaaattgaccccagagaagagagaatctaaacaatcactgtgga

SEQ ID NO: 233889 - DNA, 120 bp, Artificial Sequence
  ENSG00000119778_73 (sequence is synthesized)
agaagaaattcagcaagtatcttaaaaccactaaacatagatggtttcacagcccaaaataaactctacatgggcagtggaactataaaagtactggaaaaattcacaagaactttggaa

SEQ ID NO: 233890 - DNA, 120 bp, Artificial Sequence
  ENSG00000119778_74 (sequence is synthesized)
aaaaataatccttggatttccaagatccaggataggagggtacgtgtttgcagaaaaggtcaaaatttgagagtcctgaaggagttgtactgtacaactgttctggattggtggatatgc

SEQ ID NO: 233891 - DNA, 120 bp, Artificial Sequence
  ENSG00000119778_75 (sequence is synthesized)
attgtgttcacctgacttgagattgggaagtatagccttgttaaagctttgctaaacaggacttcttcttatgacttcaaccacatcctgtggtagatgtcacattatggggctcaaaaa

SEQ ID NO: 233892 - DNA, 120 bp, Artificial Sequence
  ENSG00000119778_76 (sequence is synthesized)
tgaactggctaaaagaaaaaaatattgacatctttttttggaaggaaaaaaaagcaaaggcatggatgaatattacccctagcctataaaattttaatccatgtgataactaccgatgtc

SEQ ID NO: 233893 - DNA, 120 bp, Artificial Sequence
  ENSG00000119778_77 (sequence is synthesized)
atcagcaaacatctggtgacttttggatgaaattagcgaccaatttatattggcctcttaattattattaacctttgtggtctcttactcttcgatttaagaggattaaaggttgcctta

SEQ ID NO: 233894 - DNA, 120 bp, Artificial Sequence
  ENSG00000119778_78 (sequence is synthesized)
catttgaaactgtttgaattttcacatgacactcaaaggaaatgctcatcaaagctttttcagttttggattttgggattcaggaagctccactggtaaatataatgcaaatattccaaa

SEQ ID NO: 233895 - DNA, 80 bp, Artificial Sequence
  ENSG00000119778_79 (sequence is synthesized)
caggaagctccactggtaaatataatgcaaatattccaaaatctgaaaaatatcccaagtttaaaataattctggtctga

SEQ ID NO: 233896 - DNA, 120 bp, Artificial Sequence
  ENSG00000119778_80 (sequence is synthesized)
atcatgaagtttctactgagggtgaagaagaagctagaacctctaaattgcttcctttggagaaaatcagtatagaatctcaagaggaggatggagatatagaagttgaagaggcagaag

SEQ ID NO: 233897 - DNA, 120 bp, Artificial Sequence
  ENSG00000119778_81 (sequence is synthesized)
aagatgaaggctctggcagatttggtgtctggtgggggcttggtttctgcctctaagatgatgccttgaccgctgcttcctctggaggggaacaacaatgtcctcacatggcagaaggga

SEQ ID NO: 233898 - DNA, 120 bp, Artificial Sequence
  ENSG00000119778_82 (sequence is synthesized)
ttgaagggactagctagttttattatcaagccctttgatgatataactaatccattcatgagggctgactgctcatgacttaatcacctcctaaaggccctgcctgttaattgagtccta

SEQ ID NO: 233899 - DNA, 120 bp, Artificial Sequence
  ENSG00000119782_0 (sequence is synthesized)
ggcgaggaggcgagccggagcgacggcggggctggggccggagccgagccggggtcgggcagcagcagggaccccccagaggcggggcctgtgggaccgctatgggcgtggagatcgaga

SEQ ID NO: 233900 - DNA, 120 bp, Artificial Sequence
  ENSG00000119782_1 (sequence is synthesized)
gatcgagaccatctcccccggagacggaaggacattccccaagaagggccaaacgtgtgtggtgcactacacaggaatgctccaaaatgggaagaagtttgattcatccagagacagaaa

SEQ ID NO: 233901 - DNA, 120 bp, Artificial Sequence
  ENSG00000119782_2 (sequence is synthesized)
caaacctttcaagttcagaattggcaaacaggaagtcatcaaaggttttgaagagggtgcagcccagatgagcttggggcagagggcgaagctgacctgcacccctgatgtggcatatgg

SEQ ID NO: 233902 - DNA, 120 bp, Artificial Sequence
  ENSG00000119782_3 (sequence is synthesized)
ggaactcaaggtggctggagatggctgctgctcaccctcctagcctgctctgccactgggacggctcctgcttttggggctcttgatcagtgtgctaacctcactgcctcatggcatcat

SEQ ID NO: 233903 - DNA, 120 bp, Artificial Sequence
  ENSG00000119782_4 (sequence is synthesized)
ccattctctctgcccaagttgctctgtatgtgttcgtcagtgttcatgcgaattcttgcttgaggaaacttcggttgcagattgaagcatttcaggttgtgcattttgtgtgatgcatgt

SEQ ID NO: 233904 - DNA, 120 bp, Artificial Sequence
  ENSG00000119782_5 (sequence is synthesized)
agtagcctttcctgatgacagaacacagatctcttgttcgcacaatctacactgccttaccttcacttaaaccacacacacaaggtgctcagacatgaaatgtacatggcgtaccgtaca

SEQ ID NO: 233905 - DNA, 120 bp, Artificial Sequence
  ENSG00000119782_6 (sequence is synthesized)
cagagggacttgagccagttacctttgctgtcactttctctcttataaattctgttagctgctcacttaaacaatgtcctctttgagaaaatgtaaaataaaggctctgtgcttgacaaa

SEQ ID NO: 233906 - DNA, 120 bp, Artificial Sequence
  ENSG00000119782_7 (sequence is synthesized)
gacattccccaagaagggccaaacgtgtgtggtgcactacacaggcgaggtagagtgagttcttcaggactgctggcaggaagatcatgagcaggtgtttgttccaagggaggaatgctc

SEQ ID NO: 233907 - DNA, 120 bp, Artificial Sequence
  ENSG00000119782_8 (sequence is synthesized)
ctctgagcttctctccagaggtgcctgcctctggatcagggctaaagcccaaggcagcagggtctccctgtgaccagccatcctctactcctcccagccagtctagtgggaatgataaag

SEQ ID NO: 233908 - DNA, 120 bp, Artificial Sequence
  ENSG00000119782_9 (sequence is synthesized)
gaggcttggaaggccaactctttccctcttctaccagcaagggccatccatggtgccagcttctaggtgagtcaaacaccttcagtccccttccttctgttgcaggtatggtggagcccc

SEQ ID NO: 233909 - DNA, 120 bp, Artificial Sequence
  ENSG00000119782_10 (sequence is synthesized)
tgtccctgctgggtctgtctgatatttggaaatccctcctagagctccccgcagactttctctccatcctgcagtatcattagagaagaagaggaggggagaggacagacaagtcaccca

SEQ ID NO: 233910 - DNA, 120 bp, Artificial Sequence
  ENSG00000119782_11 (sequence is synthesized)
gaggctccgatgccatttgaggggtggggtgatggcagtgcttttctctgggtactgagggagcccagagcgggactgatcccagttggatgctctttatctgcaggcgaggtagagtga

SEQ ID NO: 233911 - DNA, 120 bp, Artificial Sequence
  ENSG00000119782_12 (sequence is synthesized)
tgttccaagggaggtgagcaccctgccttgtgacctgcttcctaaagtggcaaactcgatgacagccacttagcagacagcaagcccaggaatgctccaaaatgggaagaagtttgattc

SEQ ID NO: 233912 - DNA, 120 bp, Artificial Sequence
  ENSG00000119782_13 (sequence is synthesized)
tccccaagaagggccaaacgtgtgtggtgcactacacagccagtctagtgggaatgataaaggaggcttggaaggccaactctttccctcttctaccagcaagggccatccatggtgcca

SEQ ID NO: 233913 - DNA, 120 bp, Artificial Sequence
  ENSG00000119787_0 (sequence is synthesized)
aaatcggtacaagatggcggagggggacgaggcagcgcgagggcagcaaccgcaccaggggctgtggcgccggcgacggaccagcgacccaagcgccgcggttaaccacgtctcgtccac

SEQ ID NO: 233914 - DNA, 120 bp, Artificial Sequence
  ENSG00000119787_1 (sequence is synthesized)
gacctccctaggtgagaattatgaagatgatgacctagtaaattctgatgaggttatgaagaaaccatgtccagtacagattgttcttgctcatgaagatgaccataactttgaacttga

SEQ ID NO: 233915 - DNA, 120 bp, Artificial Sequence
  ENSG00000119787_2 (sequence is synthesized)
tgaagaagctttggagcagatattgctacaggagcacatacgagatcttaacatagtagtggtatctgtggcaggagcttttcgtaaagggaagtcatttctactggacttcatgcttag

SEQ ID NO: 233916 - DNA, 120 bp, Artificial Sequence
  ENSG00000119787_3 (sequence is synthesized)
atacatgtataacaaggattctcaaagttggattggtggaaacaatgaaccattgacaggctttacatggcgaggtggctgtgaaagagaaacaacaggcatacaagtttggaatgaagt

SEQ ID NO: 233917 - DNA, 120 bp, Artificial Sequence
  ENSG00000119787_4 (sequence is synthesized)
atttgtgattgacagacctaatggaactaaagttgctgtgctgcttatggatacccagggtgcctttgatagccagtcaactatcaaagactgtgcaacggtgtttgctctgagcactat

SEQ ID NO: 233918 - DNA, 120 bp, Artificial Sequence
  ENSG00000119787_5 (sequence is synthesized)
gactagctctgtccaggtatataatctgtctcagaatattcaagaagatgatcttcaacatttgcaattatttacagagtatggaagacttgcgatggaagaaatctaccagaaaccatt

SEQ ID NO: 233919 - DNA, 120 bp, Artificial Sequence
  ENSG00000119787_6 (sequence is synthesized)
tcagacattaatgtttttgattcgagattggagctatccttatgaacattcatatggtttggaaggtggaaagcaatttcttgaaaagagattacaggtaaaacaaaatcaacatgaaga

SEQ ID NO: 233920 - DNA, 120 bp, Artificial Sequence
  ENSG00000119787_7 (sequence is synthesized)
gcttcagaatgtaaggaagcacatacacaattgtttctcaaatcttggttgcttccttttgccacatcctggtcttaaagttgcaactaatcctagttttgatgggagattgaaagatat

SEQ ID NO: 233921 - DNA, 120 bp, Artificial Sequence
  ENSG00000119787_8 (sequence is synthesized)
tgatgaagactttaaacgagagcttcgaaatctggttccattgctgcttgcccctgaaaatttggtagaaaaagagataagtggatctaaagtcacttgtagagatcttgtagaatattt

SEQ ID NO: 233922 - DNA, 120 bp, Artificial Sequence
  ENSG00000119787_9 (sequence is synthesized)
cttcaggcaacagctgaagctaataatcttgctgcagtagcaggagcaagagatacctattgtaaaagtatggaacaggtatgtggaggggacaagccttacattgcaccttcagatctg

SEQ ID NO: 233923 - DNA, 120 bp, Artificial Sequence
  ENSG00000119787_10 (sequence is synthesized)
gagcgaaaacacttggatctcaaggaagtggcgataaaacaatttcgttcagtaaaaaagatgggtggagatgagttctgccgtcgttatcaggaccagcttgaagctgaaattgaagaa

SEQ ID NO: 233924 - DNA, 120 bp, Artificial Sequence
  ENSG00000119787_11 (sequence is synthesized)
acctatgcaaattttataaagcacaatgatggcaaaaatatcttctatgctgctcgtaccccagccacactgtttgcggtcatgtttgctatgtatataatctcaggactgactggcttc

SEQ ID NO: 233925 - DNA, 120 bp, Artificial Sequence
  ENSG00000119787_12 (sequence is synthesized)
attggcctaaactctatagctgtcttgtgtaaccttgtcatggggttagcactgatatttctttgtacttgggcatatgttaaatactctggggagttcagagaaattggaacagtgatt

SEQ ID NO: 233926 - DNA, 120 bp, Artificial Sequence
  ENSG00000119787_13 (sequence is synthesized)
gatcagattgctgaaacactatgggaacaggtgttttccaaactgtttgaagttactagacgtcgaatggttcaccgtgctctttcatcagcacagcgacagagactgtcatccaacaat

SEQ ID NO: 233927 - DNA, 120 bp, Artificial Sequence
  ENSG00000119787_14 (sequence is synthesized)
aacaagaagaaaaattagacagtatttttaacctttttctctatctgaagtgttcacacttacacatgtaggacaataagcaggaccgtctgggccggtctgcataaatgctgtatacat

SEQ ID NO: 233928 - DNA, 120 bp, Artificial Sequence
  ENSG00000119787_15 (sequence is synthesized)
accagatttgatgctgcatatagggtatggaattgcacatccatctcataggaattgtaaatggtttgaataagaggaaagtaatttttgttgcattataaaatgtctagtagcatcata

SEQ ID NO: 233929 - DNA, 120 bp, Artificial Sequence
  ENSG00000119787_16 (sequence is synthesized)
agtttttttgagagaagcatctttttatttcccatattcctggttattttcatcattgctttgaattgaatttttatatctatttttatatgtaactctttttttacctcatgtttttgt

SEQ ID NO: 233930 - DNA, 120 bp, Artificial Sequence
  ENSG00000119787_17 (sequence is synthesized)
ttgttttgcacatttctcataccacaggtattgaagcccctgggtgataatttgatggaggaaaacataaggcagtctgtaacaaactctatcaaagcaggcctgactgaccaggtgtct

SEQ ID NO: 233931 - DNA, 120 bp, Artificial Sequence
  ENSG00000119787_18 (sequence is synthesized)
catcatgccagattaaagacagactgacagttcatctcctcacggactccactctctttttttttcatgcttgctgtacaatgagaactcaaataaaaataaaccaaagtttacaatcaa

SEQ ID NO: 233932 - DNA, 120 bp, Artificial Sequence
  ENSG00000119787_19 (sequence is synthesized)
ttcacagatggctgccacagagtgtgaagattgtttgttagttttaagcattcttttaatggctcctaagacatgcagatggactgaggagcattggttaatcatgcacctttgtgccat

SEQ ID NO: 233933 - DNA, 120 bp, Artificial Sequence
  ENSG00000119787_20 (sequence is synthesized)
gtttaactcttttatttctttttacttaatctaatgttagtgaatttgtcttatgtaaaaggatatttcagggaaatattttcagaaatctatttagagtctctttaacacagtgtccca

SEQ ID NO: 233934 - DNA, 120 bp, Artificial Sequence
  ENSG00000119787_21 (sequence is synthesized)
ttgaaattttaatttttagagaatttatgaatcactgtttcaagaaccagattggaaagacaatgaagcctttattgagccactacattaaaagtatatattgctttactgccttcaata

SEQ ID NO: 233935 - DNA, 120 bp, Artificial Sequence
  ENSG00000119787_22 (sequence is synthesized)
ccagtattacatcaatgcatgtatcagaaacttcacagaaattacatggcaactcttgtagctaagaaagtaattctgaggtgtacatttgtcttgcctttttaaatttataaacttgcc

SEQ ID NO: 233936 - DNA, 120 bp, Artificial Sequence
  ENSG00000119787_23 (sequence is synthesized)
ctaaaaggagatgcatatctgggaaactgaactgtctttttgcagtttagccttcatgtatataaaatatgccattaattttattggggaagaaattccatccaaaaatgttgcctacag

SEQ ID NO: 233937 - DNA, 120 bp, Artificial Sequence
  ENSG00000119787_24 (sequence is synthesized)
ctatgagttaagagtgtctgtacagtgtgtagcttttattttctaaaatcacagatagggcatgtatatgacttataaatatataaatacgattttgtattaaaagttttgtagtttatg

SEQ ID NO: 233938 - DNA, 120 bp, Artificial Sequence
  ENSG00000119787_25 (sequence is synthesized)
gcaaaatctggtcctgtggtaggctaaataagtactgtccctgtgaaaggaatgtttgtggctcatgtcagtgtgtgaatgcatagacaatttgaagtttttgatatatttgtgatattt

SEQ ID NO: 233939 - DNA, 120 bp, Artificial Sequence
  ENSG00000119787_26 (sequence is synthesized)
atcttgagcactgcaatctcaccccccccccgcccaccaagggaattcaatgggaatgtttattgtgactttgtcctctgttgcattttaaagttatttcctgtaatttattttcagtac

SEQ ID NO: 233940 - DNA, 120 bp, Artificial Sequence
  ENSG00000119787_27 (sequence is synthesized)
ataattaaaaatttgttgtatatataaaatgaaacttgtgattcttttttaaggaatttttcaagtatgtattccacttcataaaccacatttgtttatagtgaaaagagcatgagcagg

SEQ ID NO: 233941 - DNA, 120 bp, Artificial Sequence
  ENSG00000119787_28 (sequence is synthesized)
aaacaccccagttgagagctctaaggcattgtacctcaaaactaagcttgtaaaaagttacttttctgtgtctgtctctataagggaaaacctatgattagcctagttgtagatggggat

SEQ ID NO: 233942 - DNA, 120 bp, Artificial Sequence
  ENSG00000119787_29 (sequence is synthesized)
tgttaatttctttctctctctttttttttttttggtggtatatgtaaggctagcattttttcagtacttttgtggtcttctttgtgaacaccgattaaagtacctagttttgtttgtttc

SEQ ID NO: 233943 - DNA, 75 bp, Artificial Sequence
  ENSG00000119787_30 (sequence is synthesized)
tagctgggactacaggtgcgtgccaccattcccggctaatgttttctattttgcctgaccttgtgatccgcctgc

SEQ ID NO: 233944 - DNA, 120 bp, Artificial Sequence
  ENSG00000119787_31 (sequence is synthesized)
ggcgtgagccaccgcgcccggcccttagtttgctttttaagcgaagagaatgcaggtgttgagttgcatgtgtgaaaactctgaatttactttggttgatacatcttcgctcccactccc

SEQ ID NO: 233945 - DNA, 120 bp, Artificial Sequence
  ENSG00000119787_32 (sequence is synthesized)
tgatacatcttcgctcccactcccattcagattctgtttttatatggattgtatttgttttcatctgtattaaattgctaacttatctgttcttaaagaatccacctgaaaagtgtcttt

SEQ ID NO: 233946 - DNA, 120 bp, Artificial Sequence
  ENSG00000119787_33 (sequence is synthesized)
ttatttcttctgccaccctgttttatgaatgctgtggactgttttttatgaatgaaaaaataatttgttgtataatagcagattttctgaaattaaagacagcttacttttaaaaagtta

SEQ ID NO: 233947 - DNA, 120 bp, Artificial Sequence
  ENSG00000119787_34 (sequence is synthesized)
cttcctggagggaaccgcagtccgcaggccagggctctgtccccgggctcgcgtttcggggctcctcggctcccgaacccattcgcgcgggttgtgcgtggctagggtgcaagtctagat

SEQ ID NO: 233948 - DNA, 120 bp, Artificial Sequence
  ENSG00000119787_35 (sequence is synthesized)
tttcgtgtcaaactggggttatgagccgtttacgagtcacttggacgatagtaaggcctgatcactctgaaagtgtctgtagtgtgaagtcacctgatccttggctccctggttttgctg

SEQ ID NO: 233949 - DNA, 120 bp, Artificial Sequence
  ENSG00000119787_36 (sequence is synthesized)
aatgtgagctcctactgtacgtgtaccaggagcgcccctgccccctcgaagacgcagttgcgttggcagcgcagtgtatccctctcactcataacacccctatttataggagtttagcgt

SEQ ID NO: 233950 - DNA, 120 bp, Artificial Sequence
  ENSG00000119787_37 (sequence is synthesized)
ttgatctctcactgtggtgcgaattgatcgcatgaaatcctgattgaaaattttgatggtacttaagaaaggcataaagttttttcaaaggcttataaatagtaaaagcctacgatttgg

SEQ ID NO: 233951 - DNA, 86 bp, Artificial Sequence
  ENSG00000119787_38 (sequence is synthesized)
atttcaagtggaaaatagtatgtgaatcctataggaaaaacaactctttgtttcctgatttaatagtaatgaaggaaggagatgaa

SEQ ID NO: 233952 - DNA, 63 bp, Artificial Sequence
  ENSG00000119787_39 (sequence is synthesized)
gcaagctccgcctcttgggtcgtgtccggcttactttttttgtatttttaatagagacggggt

SEQ ID NO: 233953 - DNA, 120 bp, Artificial Sequence
  ENSG00000119787_40 (sequence is synthesized)
ttttaatggtgttaattatttttatatttaatgacttttctttctttggggatgtggagccaaattgcataatccgtcagtctaacaaatcttctccctttttaggcttacatcaaaatc

SEQ ID NO: 233954 - DNA, 120 bp, Artificial Sequence
  ENSG00000119787_41 (sequence is synthesized)
cagattgctgaaacactatgggaacaggttggtatctatcttttggttttttagtgactaatcttattttcctgtgactttccatcctttgcagtatttgtactccgactttgccttcat

SEQ ID NO: 233955 - DNA, 120 bp, Artificial Sequence
  ENSG00000119787_42 (sequence is synthesized)
gtgaggaatgtcaaaaggatgtcttctgttttgttcagatgtagaatctttatgaattgaagattttttctttaaagttataattttaatgtactttggttagcctaaatctgtactatc

SEQ ID NO: 233956 - DNA, 120 bp, Artificial Sequence
  ENSG00000119787_43 (sequence is synthesized)
acgtctcgtccacgacctccctagagtcttgctctgtcgccaggttggagtgcagtggcacgatcttcgcttactgcaacctcccgggttcaagtgattcctctgcctcagcctcccaag

SEQ ID NO: 233957 - DNA, 120 bp, Artificial Sequence
  ENSG00000119787_44 (sequence is synthesized)
actgtggtgcgaattgatcgcatgaaatcctgattgaaaattttgatggtacttaagaaaggcataaagttttttcaaaggcttataaatagtaaaagcctacgatttggattctcaaag

SEQ ID NO: 233958 - DNA, 120 bp, Artificial Sequence
  ENSG00000119801_0 (sequence is synthesized)
ataccagctgaagagcgacaagccgctggcagccgcggatctcaccgccgctcagggtttttagaacttcagccataaaaatgggcagaattttccttgatcatatcggtggtacccgtc

SEQ ID NO: 233959 - DNA, 120 bp, Artificial Sequence
  ENSG00000119801_1 (sequence is synthesized)
tgttttcttgtgcaaactgtgatacgatcctgaccaaccgctcagaactcatctccactcgtttcacaggcgccactggcagagcatttctttttaacaaggtagttaacctgcagtaca

SEQ ID NO: 233960 - DNA, 120 bp, Artificial Sequence
  ENSG00000119801_2 (sequence is synthesized)
gtgaagttcaagatcgggtcatgctcactggccgccacatggttcgagatgtgagctgcaaaaactgcaatagcaaactgggatggatctatgagtttgccactgaagacagccagcgat

SEQ ID NO: 233961 - DNA, 120 bp, Artificial Sequence
  ENSG00000119801_3 (sequence is synthesized)
ataaggaaggccgcgtgatcctggaacgtgctctagttcgagagagtgagggctttgaggagcatgtaccatctgataactcttgaagatacagagagaaatccatcttttcccaggtct

SEQ ID NO: 233962 - DNA, 120 bp, Artificial Sequence
  ENSG00000119801_4 (sequence is synthesized)
ccttcactgaaaacaaaaatctacttacatacactgtcaccttagcatcagagtcggattaatgaactgcggaacaagaggttgtgagaatctaagatggaacctttctttctttctttc

SEQ ID NO: 233963 - DNA, 120 bp, Artificial Sequence
  ENSG00000119801_5 (sequence is synthesized)
tttttttttaaattttgtattttccatccaacagcagtgtgtagagagaatattatgcagatgccgttaattttttaccctatgtttacatcttgaggcagcagagtctgtctgcagcta

SEQ ID NO: 233964 - DNA, 120 bp, Artificial Sequence
  ENSG00000119801_6 (sequence is synthesized)
tgtggtgagctatgtaaggaaaaaaatctgggctgttagagtgaaaaagtgtgttttatgtcaattgtgaaaggaaaatgttaggagtatggtttttaaacttgggcttcattttaaact

SEQ ID NO: 233965 - DNA, 120 bp, Artificial Sequence
  ENSG00000119801_7 (sequence is synthesized)
tttttttttaaacccagttatttcacttgatttgctagcttcagagaagagatccgaatctgtgcccagcgctaaaggctcagtgttagcatggcttgtgctggccggtgtgccatattc

SEQ ID NO: 233966 - DNA, 120 bp, Artificial Sequence
  ENSG00000119801_8 (sequence is synthesized)
gtgttgattggaaactttttctgagatgggacagaactgctgggttgtctttttccatgtaacttaagcatagtaatataaataaagtaatagttggatgcttttggtcctgtgttgctt

SEQ ID NO: 233967 - DNA, 120 bp, Artificial Sequence
  ENSG00000119801_9 (sequence is synthesized)
ttaaaaacaccttataaaagaggagagtatttgataagcaattttcatagtagtaaagttttttttcatctcttaaactaaattgaccatgcatataatattctttgtttaaatgaaagc

SEQ ID NO: 233968 - DNA, 120 bp, Artificial Sequence
  ENSG00000119801_10 (sequence is synthesized)
atactgttgaaacccgcagtgttgcatttagaaaacagttgaacagaatgtcaatgtgcattcatgcaaaaaaacatttaatctgcatctgttttagaaaagggggaaatgaagcaactt

SEQ ID NO: 233969 - DNA, 120 bp, Artificial Sequence
  ENSG00000119801_11 (sequence is synthesized)
gtctaaaaatactgctttacaaagcatttcagcctttccccctcagttttgcattgattttttgacaagtctgtagagcctaatagtttccatcaaaggcctagatctcttatttagcat

SEQ ID NO: 233970 - DNA, 120 bp, Artificial Sequence
  ENSG00000119801_12 (sequence is synthesized)
ttttttcagctcttctctcagaagttcagctgttgaaacgaaaactgtactttgtaccctcacatacaaagggatcaaatttgacctggtgttattttagccccaaatttatgacattac

SEQ ID NO: 233971 - DNA, 120 bp, Artificial Sequence
  ENSG00000119801_13 (sequence is synthesized)
acaatattaaaatgtaaatgtttctttacccaaactacttctagatattctagtatttgcttctggtggaattaaatgacggtaaaattggctaattatttgaatgaatgaatggatgga

SEQ ID NO: 233972 - DNA, 120 bp, Artificial Sequence
  ENSG00000119801_14 (sequence is synthesized)
tgttttgcatgctcaatttctaggtcctttgtctagaaaggaaatttgcctcagttgaattagtgaaatatttctgtcgttgatattaaaagtgacttctgagtacagttaagttcctcc

SEQ ID NO: 233973 - DNA, 120 bp, Artificial Sequence
  ENSG00000119801_15 (sequence is synthesized)
tatttgccactgggctgttggttagaagcataggtaactgattaagtaggtatgatactgcatttgaaataagtggacacaaactatcctttctccaccatggactcaatctgagaacaa

SEQ ID NO: 233974 - DNA, 120 bp, Artificial Sequence
  ENSG00000119801_16 (sequence is synthesized)
cagcattcatttccattcatttccatactggcttttgattatatgcagattcctagtagcatgccttacctacagcactatgtgcatttgctgtcacaataaagtatattttgtcttgca

SEQ ID NO: 233975 - DNA, 120 bp, Artificial Sequence
  ENSG00000119801_17 (sequence is synthesized)
cagggagaggcggggccaaggccagggcctgactaaacctggagactcgggtggccgaggggcttcataccagctgaagagcgacaagccgctggcagccgcggatctcaccgccgctca

SEQ ID NO: 233976 - DNA, 120 bp, Artificial Sequence
  ENSG00000119801_18 (sequence is synthesized)
ggagatctgttggtaatctgaggatttttattctacgtcgtcttgacagatggaaaacctgaagtaacttcgggctaaccttgtgtttttggaaaattagtagacttggtggtgaagaaa

SEQ ID NO: 233977 - DNA, 120 bp, Artificial Sequence
  ENSG00000119801_19 (sequence is synthesized)
ctgggaggagtaggatattagctaactttgcatagccacatatagagcgtcgcagctgcattccaccaaagaggaaccaaaaggcctgtggtgttcccagggtacatattcatgccagaa

SEQ ID NO: 233978 - DNA, 120 bp, Artificial Sequence
  ENSG00000119801_20 (sequence is synthesized)
gtgaagtgctttggtgaattcgtttcctgaaagtttatcgcatacttgtactgggttagccttatgccagcctggaccatcttggaggcagtgtaggatcatggaagaactttgaattag

SEQ ID NO: 233979 - DNA, 120 bp, Artificial Sequence
  ENSG00000119801_21 (sequence is synthesized)
ataccagctgaagagcgacaagccgctggcagccgcggatctcaccgccgctcaggagatctgttggtaatctgaggatttttattctacgtcgtcttgacagatggaaaacctgaagtt

SEQ ID NO: 233980 - DNA, 120 bp, Artificial Sequence
  ENSG00000119801_22 (sequence is synthesized)
tcgcatagtcgggggcgcgcccggtctccgccccgaatccaagtcggaacttgaccgagttgtttgggccgcgatgaccgcacggcgtgaaccgtcctgagcagggcccacgcccggccc

SEQ ID NO: 233981 - DNA, 120 bp, Artificial Sequence
  ENSG00000119801_23 (sequence is synthesized)
aagcggcccagccaccgggctggggcggtgtctccctttgccccctcccccccatgaacgtccgcctcccccgccctcctgcccagaggacccgggactgacagcgcagggtgacggttg

SEQ ID NO: 233982 - DNA, 120 bp, Artificial Sequence
  ENSG00000119801_24 (sequence is synthesized)
ggcagcccgccgggtgtcgggaccaagagagccccccggccacccgctcagctgtttcctgctcgtgtttgttgtgccgagggaggccccgccgccaccgccgccgccgcgctctgccgc

SEQ ID NO: 233983 - DNA, 80 bp, Artificial Sequence
  ENSG00000119801_25 (sequence is synthesized)
cccggtccctcccgattggccggctggcgtcacgtggcctccatcagctgggccggcgggggcgctcgcgggccccactg

SEQ ID NO: 233984 - DNA, 120 bp, Artificial Sequence
  ENSG00000119801_26 (sequence is synthesized)
cccagctccgccagcttcgggctgcggccttccctccgcttgcagtcgggagggtgggcgtgcccttgcaacccctttcctgtaccttctctgcagccttatgccagcctggaccatctt

SEQ ID NO: 233985 - DNA, 120 bp, Artificial Sequence
  ENSG00000119801_27 (sequence is synthesized)
ttggccttggctaataggtttacttccttggctcactgctttaaaatcttcttagcttaggcatgcctgtttatttgttcagtgtgtgaactttggatctttttgttcaggatcagctat

SEQ ID NO: 233986 - DNA, 120 bp, Artificial Sequence
  ENSG00000119801_28 (sequence is synthesized)
ttcacacatcgagtactacaaagcagagattacataaatacgtatacaaattgttctctatgacaccccccaagtaggtgctaacatgattattataatgcatttgttatccttttctat

SEQ ID NO: 233987 - DNA, 120 bp, Artificial Sequence
  ENSG00000119801_29 (sequence is synthesized)
ggcgctcgcgggccccactgcggctgccggagatctgttggtaatctgaggatttttattctacgtcgtcttgacagatggaaaacctgaagtaacttcgggctaaccttgtgtttttgg

SEQ ID NO: 233988 - DNA, 120 bp, Artificial Sequence
  ENSG00000119812_0 (sequence is synthesized)
agtcgcgcatgcgcgagtgtacgcgttgccggcgaagaggggagcctgacgactcggaaatttgaataccacagtagcatggagtgtgacctcatggagactgacatcttggagtcgttg

SEQ ID NO: 233989 - DNA, 120 bp, Artificial Sequence
  ENSG00000119812_1 (sequence is synthesized)
gaagatctaggttacaagggcccattgttggaagatggagcgctctctcaggcagtctctgctggagccagttcccccgagtttaccaaactctgtgcttggctggtgtctgaattaaga

SEQ ID NO: 233990 - DNA, 120 bp, Artificial Sequence
  ENSG00000119812_2 (sequence is synthesized)
gtgctctgtaaactagaggaaaacgtgcaagcaactaacagtccgagtgaagctgaagaattccagcttgaggtgagtgggctactaggggagatgaactgcccgtatctttcactgaca

SEQ ID NO: 233991 - DNA, 120 bp, Artificial Sequence
  ENSG00000119812_3 (sequence is synthesized)
tctggggatgtgaccaagcgccttctcattcagaagaactgcctcctcttgctcacatacctcatctcagaactagaagctgccagaatgctctgtgtgaatgctcctccaaaaaaagct

SEQ ID NO: 233992 - DNA, 120 bp, Artificial Sequence
  ENSG00000119812_4 (sequence is synthesized)
caagaaggaggcggtagtgaggtctttcaagagttgaaaggcatatgtattgctctaggaatgtccaaacctccagccaatataactatgttccaattcttcagcgggattgaaaaaaaa

SEQ ID NO: 233993 - DNA, 120 bp, Artificial Sequence
  ENSG00000119812_5 (sequence is synthesized)
ttaaaggaaacattagcaaaagttccacctaatcatgtgggaaagcctttactgaagaagccaatgggaccagcccactgggaaaagatagaagcaattaaccaagccatagccaatgaa

SEQ ID NO: 233994 - DNA, 120 bp, Artificial Sequence
  ENSG00000119812_6 (sequence is synthesized)
tatgaagtccggagaaagctgctaataaaacgtttggatgtcactgtacaatcctttggctggtctgacagagctaagagccagacagaaaaattagccaaggtttaccagccgaaacgt

SEQ ID NO: 233995 - DNA, 120 bp, Artificial Sequence
  ENSG00000119812_7 (sequence is synthesized)
tcagtcttatcccctaaaactactatttctgttgcccatcttttggctgcaaggcaggacttgtcaaagattttaaggacaagcagcggctctataagagaaaagactgcctgtgccatc

SEQ ID NO: 233996 - DNA, 120 bp, Artificial Sequence
  ENSG00000119812_8 (sequence is synthesized)
aataaggtgttgatgggcagggtgcctgacagaggtggtagacccaatgaaatcgaacctccacccccagagatgccaccgtggcagaagaggcaagatggcccccagcagcaaacagga

SEQ ID NO: 233997 - DNA, 120 bp, Artificial Sequence
  ENSG00000119812_9 (sequence is synthesized)
ggccgaggaggagggagaggtggctatgaacattcctcatacggaggacgaggaggtcatgaacaaggaggcgggagaggtggacgtggtggctatgaccatggtggccgagggggagga

SEQ ID NO: 233998 - DNA, 120 bp, Artificial Sequence
  ENSG00000119812_10 (sequence is synthesized)
agaggaaataagcatcaaggaggctggacagatggagggagtggtggaggaggtggctaccaagatggtggttatcgagattcaggtttccagccaggtggctatcatggtggccacagc

SEQ ID NO: 233999 - DNA, 120 bp, Artificial Sequence
  ENSG00000119812_11 (sequence is synthesized)
gggcaccatggtgatcgtggtggtggtcgtggtgggcgaggtggtcgtggaggccgaggtggtcgtgcaggccagggaggaggctggggaggaagagggagccagaattatcaccaaggg

SEQ ID NO: 234000 - DNA, 120 bp, Artificial Sequence
  ENSG00000119812_12 (sequence is synthesized)
ggtcaatttgaacagcatttccagcatggaggttatcagtataatcattctggatttggacagggaagacattacactagttgaggctaccgaaccttacattttgctagagctcaagta

SEQ ID NO: 234001 - DNA, 120 bp, Artificial Sequence
  ENSG00000119812_13 (sequence is synthesized)
atagaaacttagtttcagaatcctgaattcagcacctattttgaattaatgtgagaccacaggtggcaggcagattcctgcttggcataagcatttgtaggtcttcattcaattctgtta

SEQ ID NO: 234002 - DNA, 120 bp, Artificial Sequence
  ENSG00000119812_14 (sequence is synthesized)
gatttttttattggacttacataatgccgtttatttgagaaacacataacatctctcctttctatgaaaaattttttaaaaggtggttaaaattgcctttaattgcccagtagactaatt

SEQ ID NO: 234003 - DNA, 120 bp, Artificial Sequence
  ENSG00000119812_15 (sequence is synthesized)
ccacagtcagaacatgcaaacttttttgaagaaattacttgaataagtagttttcatgttttcaatatgcagttttgaaaatgaggattcacctagacttttttagatttactactagga

SEQ ID NO: 234004 - DNA, 120 bp, Artificial Sequence
  ENSG00000119812_16 (sequence is synthesized)
aaccttcctcatatgaataaccatttatatgtgttttgcttaaagtattccaatgcctattttccaagcacagttctgccccccggttgacttttatgccacgtgtgcttcatgatggaa

SEQ ID NO: 234005 - DNA, 120 bp, Artificial Sequence
  ENSG00000119812_17 (sequence is synthesized)
cttttaggtcagttcctattaaatgagctcttttgcagatagcacattcagtagccttattttgttgatggaatactgtatcatatgctcaactctgaaaaccttgaacacggccaaaat

SEQ ID NO: 234006 - DNA, 120 bp, Artificial Sequence
  ENSG00000119812_18 (sequence is synthesized)
ccataaagattataaaagcaaactaagttgtgaagctatagtacatgtaggcatttagttaagtatagcaattcaaactgacctgcatccatccaaaacaaattcctccttcaaccttat

SEQ ID NO: 234007 - DNA, 120 bp, Artificial Sequence
  ENSG00000119812_19 (sequence is synthesized)
ttttacttgaaatttgctagaagaaatagcaaaccgaaatttgttttatgcatgagttaataccactggctcagcaaatacaagttagtttgctttaagcaggtaactttttttgtaatg

SEQ ID NO: 234008 - DNA, 120 bp, Artificial Sequence
  ENSG00000119812_20 (sequence is synthesized)
gaagaaatgcactacaaagttaagacagatttttgctaagtgcaggaggccctttattattgctgcagaaaacaaaagcctggctgagttgatgttttacattctcccttactgaaatct

SEQ ID NO: 234009 - DNA, 120 bp, Artificial Sequence
  ENSG00000119812_21 (sequence is synthesized)
acatgacatgatgcttcttgctgggtttttgtacatgtaaacattgtcaagctgtgaaagaaaatggctggaggtgtgctttgtgtgaaaggtgagcaataaagtatctgttaagttctc

SEQ ID NO: 234010 - DNA, 120 bp, Artificial Sequence
  ENSG00000119812_22 (sequence is synthesized)
ctcattcagaagaactgcctcctcttgctcattaaaggaaacattagcaaaagttccacctaatcatgtgggaaagcctttactgaagaagccaatgggaccagcccactgggaaaagat

SEQ ID NO: 234011 - DNA, 120 bp, Artificial Sequence
  ENSG00000119812_23 (sequence is synthesized)
tgtttatgttttccatgactaataaactgaccatggttttttgtttgtttatttcattatgaatgtaattcaaaattcattttaaaataaaactttcttaaatttccaatttaggagctg

SEQ ID NO: 234012 - DNA, 120 bp, Artificial Sequence
  ENSG00000119812_24 (sequence is synthesized)
cacaactacatacctttgctgttacagcatgaaagcagccatagacaatatataaatgagtgagtgtggcagtgtcctaatgaaaccttatgtacaaaaacagtggttgttgtcttaaca

SEQ ID NO: 234013 - DNA, 120 bp, Artificial Sequence
  ENSG00000119812_25 (sequence is synthesized)
gtggggttttactgttttgacgttttaactcataaatacagtttgctgtatggaacatgttaagattttacagtgtcaaatccatttagaatgacctttccagaaacttagctgtattta

SEQ ID NO: 234014 - DNA, 120 bp, Artificial Sequence
  ENSG00000119812_26 (sequence is synthesized)
ttgttttagaacaggagttggcagcctttcagaaatgatttgccaaaattatggcctctgtccttctagcattacattttgggtataggaaatttgatacacaagttgacttttttctac

SEQ ID NO: 234015 - DNA, 120 bp, Artificial Sequence
  ENSG00000119812_27 (sequence is synthesized)
ttctaataggacctgagggccttgaaaatatcttttcccaaaactggttttgttatattgtcagaagaatctcactttgtcacataaccagaaatcctaagattcaaatgattcttaatc

SEQ ID NO: 234016 - DNA, 120 bp, Artificial Sequence
  ENSG00000119812_28 (sequence is synthesized)
atcttttataaaaattgaaatgtccttgggaatgttaaaggaatgagattgaatatttataccttcaactgaattacctgaaacagattgcagcccccattataccaggctgaaatcagc

SEQ ID NO: 234017 - DNA, 120 bp, Artificial Sequence
  ENSG00000119812_29 (sequence is synthesized)
acacaaggggatgatactgacacaaagggaaccatgccaaaaagtgctttgaaggttttatggttgttttgaagggaatggggtgaggaaagtagggggaagggagtcctgagaagaata

SEQ ID NO: 234018 - DNA, 120 bp, Artificial Sequence
  ENSG00000119812_30 (sequence is synthesized)
tagatgaaagagggctctctttgattagccagagggcaacataagatttggagaccatgggaaaggagctctggggtgccttcctgcttctcctgtgagttaagctttgacttcttataa

SEQ ID NO: 234019 - DNA, 120 bp, Artificial Sequence
  ENSG00000119812_31 (sequence is synthesized)
atgttgtttcacacctcttctggacaggctcctaattaatgggagacaagagagcaaggtagttgtgtcattgatgctcacaagtagtgagaagttaaaaaaaaaaaattaattgtcatt

SEQ ID NO: 234020 - DNA, 120 bp, Artificial Sequence
  ENSG00000119812_32 (sequence is synthesized)
aaaaattggtcacctgccttcttttgcaaaatttttaacagatgccaacccctgttctggaggttccttaataccagaattcaagattccaaatttttagatgttacttacctcgatcct

SEQ ID NO: 234021 - DNA, 120 bp, Artificial Sequence
  ENSG00000119812_33 (sequence is synthesized)
tcggtttcaaagagaatcgcttattttaaaattaacatttaaacattatatatcgcttaaataactgaattacataaccagtttatttcttatttcatttgcaggtaaaagtagtttttc

SEQ ID NO: 234022 - DNA, 120 bp, Artificial Sequence
  ENSG00000119812_34 (sequence is synthesized)
tttcttgtttttatccattcttgcagctttaacagttacatatcaataggtctatatagttgtgactccagacttatgactataactatagctgtatctcattttgaaatcttattttgt

SEQ ID NO: 234023 - DNA, 120 bp, Artificial Sequence
  ENSG00000119812_35 (sequence is synthesized)
ttatgttttgtgaatcagctttttgtcacctatcatttcattaattgttagtatattatatggaataagaacttttgactgttaaatggccgggatctcagttatgaatgacacagacgt

SEQ ID NO: 234024 - DNA, 120 bp, Artificial Sequence
  ENSG00000119812_36 (sequence is synthesized)
ggctgaactctacaggggagcagcagtgtatccatagtccatattttcctgtgtgttcattcatccattcagcaaatgttcattgagtgcctactgttgtcaggcactgttctaggtgca

SEQ ID NO: 234025 - DNA, 120 bp, Artificial Sequence
  ENSG00000119812_37 (sequence is synthesized)
atgaaggacttctgtaggcgtgaggagtgggaccagtgagtgtctttatcttgtgggtcttttacatttgcatttcaaaacatcctccacctttgcctctgtcaggaatcttcttttgat

SEQ ID NO: 234026 - DNA, 120 bp, Artificial Sequence
  ENSG00000119820_0 (sequence is synthesized)
gtcactgttatggtcctgtcagggtgccggcgtcgtggtgcttgggtggtcgccaccaagaagactttggtggggtagtctcggggcagctcagcggcccgctgtgcccgtttctggcct

SEQ ID NO: 234027 - DNA, 120 bp, Artificial Sequence
  ENSG00000119820_1 (sequence is synthesized)
cgctcgcagcttgcacgtcgagactcgtaggccgcaccgtagggcgagcgtgcgggtcgccgccgcggccgcctcggggtctgggcccagccgcagcctcttctaccgcggccggttggg

SEQ ID NO: 234028 - DNA, 120 bp, Artificial Sequence
  ENSG00000119820_2 (sequence is synthesized)
agtcgccgcgagatgcagcctccgggcccgcccccggcctatgcccccactaacggggacttcacctttgtctcctcagcagacgcggaagatctcagtggttcaatagcatccccagat

SEQ ID NO: 234029 - DNA, 120 bp, Artificial Sequence
  ENSG00000119820_3 (sequence is synthesized)
gtcaaattaaatcttggtggagattttatcaaagaatctacagctactacatttctgagacaaagaggttatggctggcttctggaagttgaagatgatgatcctgaagataacaagcca

SEQ ID NO: 234030 - DNA, 120 bp, Artificial Sequence
  ENSG00000119820_4 (sequence is synthesized)
ctcttggaagaattggacattgatctaaaggatatttactacaaaatccgatgtgttttgatgccaatgccatcacttggttttaatagacaagtggtgagagacaatcctgacttttgg

SEQ ID NO: 234031 - DNA, 120 bp, Artificial Sequence
  ENSG00000119820_5 (sequence is synthesized)
ggtcctctggctgttgttcttttcttttccatgatatcattatatggacagtttagggtggtctcatggattataaccatttggatatttggttcactaacaattttcttactggccaga

SEQ ID NO: 234032 - DNA, 120 bp, Artificial Sequence
  ENSG00000119820_6 (sequence is synthesized)
gttcttggtggagaagttgcatatggccaagtccttggagttataggatattcattacttcctctcattgtaatagcccctgtacttttggtggttggatcatttgaagtggtgtctaca

SEQ ID NO: 234033 - DNA, 120 bp, Artificial Sequence
  ENSG00000119820_7 (sequence is synthesized)
cttataaaactgtttggtgtgttttgggctgcctacagtgctgcttcattgttagtgggtgaagaattcaagaccaaaaagcctcttctgatttatccaatctttttattatacatttat

SEQ ID NO: 234034 - DNA, 120 bp, Artificial Sequence
  ENSG00000119820_8 (sequence is synthesized)
tttttgtcgttatatactggtgtgtgatccaagttatacatgaatagaaaaagatggtgttaaatttgtgtgtaggctgggaattcttgctgaaggaattggagaaaacctgttgctgca

SEQ ID NO: 234035 - DNA, 120 bp, Artificial Sequence
  ENSG00000119820_9 (sequence is synthesized)
aaattttacatgttccagatggaaagggaagtctaagcgctttttaaaacaatttttttttgtatttaattaagcaattgcagttatctgggatttttgggtcagaattttaaattctgt

SEQ ID NO: 234036 - DNA, 120 bp, Artificial Sequence
  ENSG00000119820_10 (sequence is synthesized)
ttgattctccatattccagtgaataaaatacaaaagcattgtgtttttaagattgtgtcgatattcacctaaaaacttgtgccaaaagcacctggattggtaattatatttcacttaaag

SEQ ID NO: 234037 - DNA, 120 bp, Artificial Sequence
  ENSG00000119820_11 (sequence is synthesized)
ggtaaatttgacaatatcttgataatcaaaagtgcaatttttttcttcaaaatgttttctccagcatcacagatcctgcagatatatatttatatttatacatatatatttatgaaataa

SEQ ID NO: 234038 - DNA, 120 bp, Artificial Sequence
  ENSG00000119820_12 (sequence is synthesized)
gatattaaatctgatgcacaaactttttaatttggccattaatcttttttatttaaaaatttaaatttgtttttaaaattgtatatagtttttaaaatctcacacatgcttcgatacttc

SEQ ID NO: 234039 - DNA, 120 bp, Artificial Sequence
  ENSG00000119820_13 (sequence is synthesized)
atagtttttaaaatctcacacatgcttcgatacttccttgttaagaattcttaataactactaaaactgatttttaatagttgctgatatatatttggtttgtttgggtatacttttcaa

SEQ ID NO: 234040 - DNA, 120 bp, Artificial Sequence
  ENSG00000119820_14 (sequence is synthesized)
aaccatttttgaatgtccaaacatctgatttaaagtttctgtttatctttctgaccaaaggagcaagaggtataatggatatggcattcattaaaatctttactatgtacaaaaacagta

SEQ ID NO: 234041 - DNA, 120 bp, Artificial Sequence
  ENSG00000119820_15 (sequence is synthesized)
atatttacagcatcagtaaatatttttaagtggtacttctaaatcataaaagttggggaaagagacctttaaaatcttgtggtgttgaacaatgttatatgaagtagaaaaaataaaata

SEQ ID NO: 234042 - DNA, 120 bp, Artificial Sequence
  ENSG00000119820_16 (sequence is synthesized)
cttcccagttgtgtgttttgttttacagcaccatgtcctgtattacttgatattttaacaagtatcaggtactctctaacaaatgtacagtttttgctaagggaaatattaagaaatttt

SEQ ID NO: 234043 - DNA, 120 bp, Artificial Sequence
  ENSG00000119820_17 (sequence is synthesized)
tatcagtgaaatatttgttgcaaataatttcataggtttttagatacacctgtagttaatattactttgtaaagtaggtaaatcattttatttatgtccataaaatatcaaatgtctgtt

SEQ ID NO: 234044 - DNA, 120 bp, Artificial Sequence
  ENSG00000119820_18 (sequence is synthesized)
aactattagcaaattattgtattatcctttctggtctcacctggaagagtttcctgctgtcctcagtatgataacatggcgacctcttggtatgtatttctttagcaaacttacccatca

SEQ ID NO: 234045 - DNA, 120 bp, Artificial Sequence
  ENSG00000119820_19 (sequence is synthesized)
ggaaatatccagcacctctgaagcaaacctacaaatgagtgtgttatcaagcccagccgtcttcctttcccctaatcccaaaaggaaagaaagaaaaacttattttaagctgcagaaaaa

SEQ ID NO: 234046 - DNA, 120 bp, Artificial Sequence
  ENSG00000119820_20 (sequence is synthesized)
gtgtggagcacttttgagctagaataatgtagaaaattacatgtactgatttttttaaaaacaggtgagaagcaccagagggacaggacttctagaagttagaataatatgaagtaatca

SEQ ID NO: 234047 - DNA, 120 bp, Artificial Sequence
  ENSG00000119820_21 (sequence is synthesized)
ggaaatatctatgcctacagaagcagcaaccgtaagataaacatttgttacacttaagaaattgctgaggttaatactttgttataatggattataatatttgacattcatagtgttgac

SEQ ID NO: 234048 - DNA, 120 bp, Artificial Sequence
  ENSG00000119820_22 (sequence is synthesized)
cctggaatctttcacagaaagcttgggggtcaggaccaggaggtagaattttacaaggcaataaatgaaggtattttaagatcacctctattaaaaaatggtttaatttttaaaaactat

SEQ ID NO: 234049 - DNA, 120 bp, Artificial Sequence
  ENSG00000119820_23 (sequence is synthesized)
cattgctttaaggtatgaattttaaaaatcacttatatggatcatgtttactcctaatgatataagataaaatgaggtatttttgttccaaaaagtattttaaaatagcatttaatcttg

SEQ ID NO: 234050 - DNA, 120 bp, Artificial Sequence
  ENSG00000119820_24 (sequence is synthesized)
ggaactatcttacttagggtttctataaatacaaattacaatgtttcgaactcaaccagtatcattttcgtgtgctaatgagcaaagtagttagaacagattgtcagtttaaaaacagga

SEQ ID NO: 234051 - DNA, 60 bp, Artificial Sequence
  ENSG00000119820_25 (sequence is synthesized)
agcaaagtagttagaacagattgtcagtttaaaaacaggatttgagcagcttgagtcagg

SEQ ID NO: 234052 - DNA, 78 bp, Artificial Sequence
  ENSG00000119820_26 (sequence is synthesized)
ttgtagatgtgtgcaagacacagtactgctatggctaataatggtaagatgaccctaataatgtcctctccttgaatt

SEQ ID NO: 234053 - DNA, 120 bp, Artificial Sequence
  ENSG00000119820_27 (sequence is synthesized)
atggctaataatggtaagatgaccctaataatgtcctctccttgaatttttatataataatattttctgagtcataactaattttttaaataatgatttccaatctaattattaattaga

SEQ ID NO: 234054 - DNA, 62 bp, Artificial Sequence
  ENSG00000119820_28 (sequence is synthesized)
atgatttccaatctaattattaattagaattttgttgttgttgtttgagacagagtcactct

SEQ ID NO: 234055 - DNA, 69 bp, Artificial Sequence
  ENSG00000119820_29 (sequence is synthesized)
cagccaccgcaccaggccagttcattagaatttttaaaacaggctgggcatggtggcttacgcctgtaa

SEQ ID NO: 234056 - DNA, 68 bp, Artificial Sequence
  ENSG00000119820_30 (sequence is synthesized)
gggcaacaggagtgaaactccatctcaagaaaaacacaaaatacaaaacaaaacaaaacaaaaaaaca

SEQ ID NO: 234057 - DNA, 120 bp, Artificial Sequence
  ENSG00000119820_31 (sequence is synthesized)
ttaaaaagtagtttaggaagatttgtaaagcttatgaaccattgtaaaaccttatttctaaggtctgtaagacagttttatatgtaataatgtgtccatttccaggaattccccaaatac

SEQ ID NO: 234058 - DNA, 120 bp, Artificial Sequence
  ENSG00000119820_32 (sequence is synthesized)
tcatacagccattgagcaccccaatccaaaattcagaatgcttcagataagaacatttttgagtgccgatgtgacactttaaaggaaatgttcattggagcattttgcatttcagatttt

SEQ ID NO: 234059 - DNA, 120 bp, Artificial Sequence
  ENSG00000119820_33 (sequence is synthesized)
tggattaggaaaactcaaccactgtatttctgcacatattccaaaatctgaaaaagtctgaaacctgagaaactctggtcccaagcattttggaaagggtatactcaatctgtattaaca

SEQ ID NO: 234060 - DNA, 120 bp, Artificial Sequence
  ENSG00000119820_34 (sequence is synthesized)
tttggaaagggtatactcaatctgtattaacatagacttctaaattagtgaaaatttgcattgaattaaaatgtgaagtaaatatttttgtttaaatattgtttaaaatttagtcattta

SEQ ID NO: 234061 - DNA, 120 bp, Artificial Sequence
  ENSG00000119820_35 (sequence is synthesized)
aataatgcttctacaacttaaaattatttttcatagtgaacaaaactagttgaatacttctaaatattcatttttgttagtgcacattttatccagttttaggctttagggaattgtgac

SEQ ID NO: 234062 - DNA, 120 bp, Artificial Sequence
  ENSG00000119820_36 (sequence is synthesized)
ctgggattacaggcttaagccaccgtgcccggcacttttgtttttaaaataatatcttactttcatatgattctttcagactgtggtatggcattctgaagcaagtcttaacagagctaa

SEQ ID NO: 234063 - DNA, 120 bp, Artificial Sequence
  ENSG00000119820_37 (sequence is synthesized)
ggtatggcattctgaagcaagtcttaacagagctaaaaatcacccttacccaattctctgcactgacatatgtacacaaagtaatattttattattctccttcataaatggtttctttaa

SEQ ID NO: 234064 - DNA, 120 bp, Artificial Sequence
  ENSG00000119820_38 (sequence is synthesized)
gtaatattttattattctccttcataaatggtttctttaattgaacctttgagccttatactatttttaaatttccctttaaaaattgaattacagccaggcatggtggctcatgcctgt

SEQ ID NO: 234065 - DNA, 120 bp, Artificial Sequence
  ENSG00000119820_39 (sequence is synthesized)
gaacccaggagttgtagaccagcctgggcaagatagcgagatcctgcctctgaaaaaatcataataatactttaatttagaaaataccctgaattagaagtgcttcattcctcatttgtg

SEQ ID NO: 234066 - DNA, 120 bp, Artificial Sequence
  ENSG00000119820_40 (sequence is synthesized)
tacagctgttcctctatatacgaaggggattggtaccagaaccactgcataccaaattccacccatactcaagtctcacagtcttccctgcagaatccaagtatacaaaaagtaggccta

SEQ ID NO: 234067 - DNA, 120 bp, Artificial Sequence
  ENSG00000119820_41 (sequence is synthesized)
cagcactttggaaggctgaggcgggaggactgttttgtggccaggagttcaaaatcagcctggtcgacgtagtgagaccccatctctacaaaagaaaaattagctgggcatgtggcacct

SEQ ID NO: 234068 - DNA, 90 bp, Artificial Sequence
  ENSG00000119820_42 (sequence is synthesized)
tcaaaatcagcctggtcgacgtagtgagaccccatctctacaaaagaaaaattagctgggcatgtggcacctgaggcaggagaattgctt

SEQ ID NO: 234069 - DNA, 120 bp, Artificial Sequence
  ENSG00000119820_43 (sequence is synthesized)
gggcgacagagtgagaccctgtctcagaaaagaaaaaaaaagtaaaaattgcatgtaagttgacccgcactattcaaatttgtggtgttcaaggttcaactgtaatttcctagcagcatt

SEQ ID NO: 234070 - DNA, 120 bp, Artificial Sequence
  ENSG00000119820_44 (sequence is synthesized)
atttcctagcagcattttgtgtgtttgagaatctcttgacactcttcaagtaaatccctaaattacaactttgacatcaaaaaagctagacattcctacatttttgcactacaatacata

SEQ ID NO: 234071 - DNA, 87 bp, Artificial Sequence
  ENSG00000119820_45 (sequence is synthesized)
aagtaagaccttgtctcttaaaaaaaatacattctgaagaaagttctacttatgaatacattttatttataacaaactggtgaaaat

SEQ ID NO: 234072 - DNA, 120 bp, Artificial Sequence
  ENSG00000119820_46 (sequence is synthesized)
acttatgaatacattttatttataacaaactggtgaaaattttagaccaaaccatgtctttctgggttgtagtgattaaaaaatggttaagagaatgttccctatacaaggcatatgtta

SEQ ID NO: 234073 - DNA, 120 bp, Artificial Sequence
  ENSG00000119820_47 (sequence is synthesized)
ttaaacatgaaatttaggattagttttctctttgaaaattcttttgatatgctgaggttacagtttggaggttacattagagaaagaatatagggaagatggcagtggtaaaacatttcc

SEQ ID NO: 234074 - DNA, 120 bp, Artificial Sequence
  ENSG00000119820_48 (sequence is synthesized)
ctgctttacatttttatattggcagtatcttggtttcaacttttctattttcagcaagatatttgcaagtttttactttgaagatgtttggtttatagtagtccatgctatactaatgct

SEQ ID NO: 234075 - DNA, 120 bp, Artificial Sequence
  ENSG00000119820_49 (sequence is synthesized)
gttgctgagataattaagttagatactaatatgaaaaagaatatttgtgtaaaatattttgaagttgtaattagtgtatatacaagttgttaatacttacgaaaaaaggaagcattccca

SEQ ID NO: 234076 - DNA, 120 bp, Artificial Sequence
  ENSG00000119820_50 (sequence is synthesized)
cctgtaataattttgttaacactagactatcagtaaattatcaagaataaaaaccttggtttttctgtaatatttgccactgagcaatttttattaaaaaccaaacagaagtatttacac

SEQ ID NO: 234077 - DNA, 120 bp, Artificial Sequence
  ENSG00000119820_51 (sequence is synthesized)
aagaacaagtgaaattacacaaaatgataatggggagaaatttctcatctggtgataaagggaaaaagataatgtaaaagcagattgctgctatttgcataataagcacttgttgaagaa

SEQ ID NO: 234078 - DNA, 120 bp, Artificial Sequence
  ENSG00000119820_52 (sequence is synthesized)
taaatgattaagttcaatatttttgctctattttatacctactcactttggtggaattagttctccatgtaaagtatctttttaatagtaagcaccatttaataatgaaacaactcatat

SEQ ID NO: 234079 - DNA, 120 bp, Artificial Sequence
  ENSG00000119820_53 (sequence is synthesized)
gttttgtaatccttatggagaattacttcatgtgataattatagtctcttcatggaaaacagtaaaaatactcacgtttatgatgatgggcctaggtactaaattcctcattcaatcttt

SEQ ID NO: 234080 - DNA, 86 bp, Artificial Sequence
  ENSG00000119820_54 (sequence is synthesized)
tgatgatgggcctaggtactaaattcctcattcaatctttttttaccaaatggtacttaataaaatcttttaccttataaaaatct

SEQ ID NO: 234081 - DNA, 120 bp, Artificial Sequence
  ENSG00000119820_55 (sequence is synthesized)
aaaaattattttcaaaggattgtgctagtggtggcctgaataataaaacattgagaagaaacagcctttgaatttggcaccctgaatgtgaagggacaatagatattaatcacatattta

SEQ ID NO: 234082 - DNA, 120 bp, Artificial Sequence
  ENSG00000119820_56 (sequence is synthesized)
agatattaatcacatatttattaaccccttcctgtatgaacctagtactgtgctgagtgtagggatacagtgataatgcaaaaaagacccccaataggccgggcgcggtggctcacgcct

SEQ ID NO: 234083 - DNA, 120 bp, Artificial Sequence
  ENSG00000119820_57 (sequence is synthesized)
aaaaagaccgccccccccaatatacacacaccctgactttaatgagcttattttgctggggactcagccaattaatttcacaaattgtaaaactatttcaagaaatgagaaaaagaggcc

SEQ ID NO: 234084 - DNA, 120 bp, Artificial Sequence
  ENSG00000119820_58 (sequence is synthesized)
tgtggtggtaagcaagtatataaaagaagccttccttgaagcaacgatgcttaagctgaaatcttagggaaaaataaaagttaactaggcaaagaaggtagggaagactctttcagatag

SEQ ID NO: 234085 - DNA, 120 bp, Artificial Sequence
  ENSG00000119820_59 (sequence is synthesized)
aatcgcagtttgtgagtttgcttggggaaaaaaatttaaaaatataaaaagaaaaccagtttgaagtttagtggttaatgaaattgaacaggtatgtcagcaccatacctgacattctag

SEQ ID NO: 234086 - DNA, 120 bp, Artificial Sequence
  ENSG00000119820_60 (sequence is synthesized)
aaattgaacaggtatgtcagcaccatacctgacattctaggccattctttctttgtcagagcttttttgttgagatggagtctcgctgtctcgctgaggctggagtgcagtggtgcaatc

SEQ ID NO: 234087 - DNA, 89 bp, Artificial Sequence
  ENSG00000119820_61 (sequence is synthesized)
gtgcccatcaccacacccggctaatttttttgtttttagtaaagacggtttctccatgtaggccaagcgggtcttgaactcccaacctc

SEQ ID NO: 234088 - DNA, 89 bp, Artificial Sequence
  ENSG00000119820_62 (sequence is synthesized)
tgtcagagcttttgagtagaaatacggtatcagaaatgtgctttattttattttattagacaaagtcttgctctgttgccaggctggag

SEQ ID NO: 234089 - DNA, 63 bp, Artificial Sequence
  ENSG00000119820_63 (sequence is synthesized)
cgagtagctgggattacaggcacccacttcgaactgctaacctcaggtgatctgcccgccttg

SEQ ID NO: 234090 - DNA, 120 bp, Artificial Sequence
  ENSG00000119820_64 (sequence is synthesized)
ggattataggcatgaaccactgcgcccagccagaaacgtgcttttaatactaaaggccaagatatgcaattatactcttgacatatattcaaccgaaatgcatgtacatgtaccataaga

SEQ ID NO: 234091 - DNA, 120 bp, Artificial Sequence
  ENSG00000119820_65 (sequence is synthesized)
ccataagagacatatgtacaagaatgtgcacagttaacattattcaaatagccaaaaacgggaacatgtccatcaacacagaatagacaagttggtataattacacaatggaatcttatg

SEQ ID NO: 234092 - DNA, 120 bp, Artificial Sequence
  ENSG00000119820_66 (sequence is synthesized)
cagcaatgaaaataaatgaactaaagccgcatacaaaaacatgaagaatttcacaagtattatgttgagtgaaaaagacaaagaatttgtactgtattacttcatttatatgaagttcaa

SEQ ID NO: 234093 - DNA, 120 bp, Artificial Sequence
  ENSG00000119820_67 (sequence is synthesized)
tttatatgaagttcaaacacaggcaaaattaagctatagtgtttagggatgcatactgaaatgcagtcttttaaaacagctttagaattccttggccaggtgcggtggcttacgcctgta

SEQ ID NO: 234094 - DNA, 84 bp, Artificial Sequence
  ENSG00000119820_68 (sequence is synthesized)
gaatcgcttgaacctgggaggtggagagtgtggtgagctgagatgtcatcgtctcaaaaaaaaataaaaaaataaggctccaag

SEQ ID NO: 234095 - DNA, 120 bp, Artificial Sequence
  ENSG00000119820_69 (sequence is synthesized)
aaaaaaaataaaaaaataaggctccaagcgctgttgtgagggttaaatgaactagataattaatgtaataaacagaatagttttggcattcaacaaacattggctgttattatattagct

SEQ ID NO: 234096 - DNA, 120 bp, Artificial Sequence
  ENSG00000119820_70 (sequence is synthesized)
attaaaaatttaagtcatttaggtcaatgaaacaggagggtttccagaattatacccaattaattatacatgggaaggtgatgaaggtagcatgtcaaattggtataaaaagatggaata

SEQ ID NO: 234097 - DNA, 120 bp, Artificial Sequence
  ENSG00000119820_71 (sequence is synthesized)
ttaaataagtggggatactgtatcagataggaacatatttggttgcaagaaacaaaaattcctgtgattactagcttcactgtgagtttattttttcacgtaataaatccaaggttacat

SEQ ID NO: 234098 - DNA, 120 bp, Artificial Sequence
  ENSG00000119820_72 (sequence is synthesized)
aatccataactgatatggcagtttaacagtgttattaagaactcaaggtccatttattgctctattctgccatctttggtgagtggctttcatcctcattgtctcagaaaagttatttca

SEQ ID NO: 234099 - DNA, 120 bp, Artificial Sequence
  ENSG00000119820_73 (sequence is synthesized)
cctctaagtattacatctacatttcaagcaggaagaagatgaagcttaagagaccaaatggagcatgtcagtcaaaggtgtccttatttaaaatctctggaagccccacttagtggcttc

SEQ ID NO: 234100 - DNA, 120 bp, Artificial Sequence
  ENSG00000119820_74 (sequence is synthesized)
catccatgtctcatgggacagaactgaatcacatagccatcccttgctgtaagagagttggggaaagtattttaagctgggacatcccagccctgagtgaagtcagggatctgttaggaa

SEQ ID NO: 234101 - DNA, 120 bp, Artificial Sequence
  ENSG00000119820_75 (sequence is synthesized)
agggatctgttaggaagaatggatgctaggtaggtaaatggcaatgtctgacaaagacatggtaggccagtctgaaaaatgtaaagctgggctgcgcgcggtggctcacgcctgaaatcc

SEQ ID NO: 234102 - DNA, 68 bp, Artificial Sequence
  ENSG00000119820_76 (sequence is synthesized)
ggagatcgagaccatcctggttaacgtggtgaaaccccgtctctactaaacatacaggagagtggcat

SEQ ID NO: 234103 - DNA, 120 bp, Artificial Sequence
  ENSG00000119820_77 (sequence is synthesized)
aatataaagctggatctatacctcactccttataccaaagtacattacccttgtatcaaatattttaaaaactggaataagcttttcatataatctttgagaagatggggctttcaaagc

SEQ ID NO: 234104 - DNA, 120 bp, Artificial Sequence
  ENSG00000119820_78 (sequence is synthesized)
cggtggctcatgcctgtaatcccagctctcagggaggcaagaggcaggagcatagcttgagcccaggcgttcaagacctgcctgggcaatatagcgagaccccgttctccccaaaaagga

SEQ ID NO: 234105 - DNA, 90 bp, Artificial Sequence
  ENSG00000119820_79 (sequence is synthesized)
gcacagaagcgaaaggaaaagtgatgaagacacttgaagacctgtcatttaaaatgattctacaggaaaaagatgaactacaaattgggg

SEQ ID NO: 234106 - DNA, 120 bp, Artificial Sequence
  ENSG00000119820_80 (sequence is synthesized)
aaaatgattctacaggaaaaagatgaactacaaattggggaaaaatatttgtaggacttatgtagacaaaggactaattttcttaataaaaacatttatcagtaaatttaaatgggcaaa

SEQ ID NO: 234107 - DNA, 120 bp, Artificial Sequence
  ENSG00000119820_81 (sequence is synthesized)
ggaaatacttggacaatcatatcatgtatgtaatattaatatttataaatcaataaaatgggctagggatataaatcagcaattcaaggggagggtaaaaagaccaactaatatatgtaa

SEQ ID NO: 234108 - DNA, 120 bp, Artificial Sequence
  ENSG00000119820_82 (sequence is synthesized)
agatgcacaaattcattcatgattaaatgtgaattaacaacgttggcctctcggattcccaaaactttaaaagattaataatatccagtattggttgggattataagcagatatgatatt

SEQ ID NO: 234109 - DNA, 120 bp, Artificial Sequence
  ENSG00000119820_83 (sequence is synthesized)
tcactgatagagaccagcatgactgtctcaattgttaaactattgaaatgcatctgtgtcaatggtaaatagtattattgtaagtacaacactaaaattaataaattgtgtaaattctaa

SEQ ID NO: 234110 - DNA, 120 bp, Artificial Sequence
  ENSG00000119820_84 (sequence is synthesized)
ctgtgggatgattatattcttcttgttatttagagagaaagcattaaccttttttggtcaaaagctatagtgattgtcaattttactagtaatttaaaaaactgaaataataatgagaga

SEQ ID NO: 234111 - DNA, 120 bp, Artificial Sequence
  ENSG00000119820_85 (sequence is synthesized)
atattttttaaccaattaaaagacaaaaattaaaagaatggtaatcctgtatctcacacacatgtgtgtctactccagcttacctgggtctgtcagctatctgaagtaatcatgcaattt

SEQ ID NO: 234112 - DNA, 120 bp, Artificial Sequence
  ENSG00000119844_0 (sequence is synthesized)
gtgtcggcggcagcggttcccccgctgcatgatgggagagtgtgtggagtgggcggggggtctccgcggaggaggtggaggaggcggcggcggcggcggaagagggcggagggtagtggg

SEQ ID NO: 234113 - DNA, 120 bp, Artificial Sequence
  ENSG00000119844_1 (sequence is synthesized)
atgggggtcccgcggcagcggtgaaactccgggtgggcgtccatggtgctgctgcgctgacagggctgtgagcagccggccttccgctctcaccagttccgcgtcggaatagacggtcct

SEQ ID NO: 234114 - DNA, 120 bp, Artificial Sequence
  ENSG00000119844_2 (sequence is synthesized)
tccccggggagtcagttcctccccgggcccctgagccatgcccatcgcagccgccccgaaggagccaggtgtaaattaattatttgaaagcaactgaacaatggagccagacatcattcg

SEQ ID NO: 234115 - DNA, 120 bp, Artificial Sequence
  ENSG00000119844_3 (sequence is synthesized)
aatgtactcttcatccccaccaccattagacaatggagcagaggatgatgatgatgatgaatttggggaatttggtgggttttcagaagttagcccttctggtgtagggtttgttgattt

SEQ ID NO: 234116 - DNA, 120 bp, Artificial Sequence
  ENSG00000119844_4 (sequence is synthesized)
cgatacaccagattatactcgtcccaaggaagagtttgtaccttcaaaccattttatgccaattcatgaattctcagaaaatgtagatagccttacaagctttaagtccattaaaaatgg

SEQ ID NO: 234117 - DNA, 120 bp, Artificial Sequence
  ENSG00000119844_5 (sequence is synthesized)
taatgataaggacatcactgctgaactttctgctcctgtgaaaggacagtctgatgttttactttctaccaccagcaaagaaataatttcatctgaaatgttagctacttccattgatgg

SEQ ID NO: 234118 - DNA, 120 bp, Artificial Sequence
  ENSG00000119844_6 (sequence is synthesized)
catggaaagaccaggaaatttaaataaagtagtggagcagagacagaatgttggaacacttgaaagtttctctccaggagattttagaactaatatgaatgttgttcatcaaaacaagca

SEQ ID NO: 234119 - DNA, 120 bp, Artificial Sequence
  ENSG00000119844_7 (sequence is synthesized)
gttagagagctgcaatggtgaaaagcctccttgtctggagattctaacaaatgggtttgcagtgttggaaactgtaaatcctcagggaacagatgatctggacaatgtagctgattcaaa

SEQ ID NO: 234120 - DNA, 120 bp, Artificial Sequence
  ENSG00000119844_8 (sequence is synthesized)
gggacggaagcctcttagcactcatagcactgagtataatttagactctgtacctagtcctgctgaggaatttgcagattttgccacattttccaaaaaggaaaggatacaattagaaga

SEQ ID NO: 234121 - DNA, 120 bp, Artificial Sequence
  ENSG00000119844_9 (sequence is synthesized)
aatagaatgtgcagttttaaatgatagagaagcactaaccattcgggaaaacaataaaattaatagagtcaatgaactgaattctgtaaaagaagtggctttgggtagaagcttggataa

SEQ ID NO: 234122 - DNA, 120 bp, Artificial Sequence
  ENSG00000119844_10 (sequence is synthesized)
caaaggagacactgatggagaggatcaggtttgtgtttcagaaataagcatagtgactaacagaggtttcagtgttgaaaaacaaggccttccaacactgcaacaggatgaatttttaca

SEQ ID NO: 234123 - DNA, 120 bp, Artificial Sequence
  ENSG00000119844_11 (sequence is synthesized)
gtcaggtgttcagtcaaaggcttggagtttggtagactcagctgataattcagaagccattaggagagaacaatgtaaaactgaagaaaaacttgacttacttacttctaaatgtgctca

SEQ ID NO: 234124 - DNA, 120 bp, Artificial Sequence
  ENSG00000119844_12 (sequence is synthesized)
cctatgcatggattctgttaaaacttctgatgatgaagttggttctcccaaagaagaaagtagaaagtttactaatttccaaagcccaaacattgaccccacagaagaaaatgatttgga

SEQ ID NO: 234125 - DNA, 120 bp, Artificial Sequence
  ENSG00000119844_13 (sequence is synthesized)
tgattctttaagtgtaaaaaatggtgatagtagtaatgactttgtgacttgcaatgatatcaatgaagatgattttggtgattttggtgactttggctctgccagtggctcaactccacc

SEQ ID NO: 234126 - DNA, 120 bp, Artificial Sequence
  ENSG00000119844_14 (sequence is synthesized)
ttttgttactggtactcaagattcaatgagtgatgccacttttgaagagtcttcagagcactttccacattttagtgaaccaggtgatgactttggagaatttggggatataaatgctgt

SEQ ID NO: 234127 - DNA, 120 bp, Artificial Sequence
  ENSG00000119844_15 (sequence is synthesized)
ttcttgccaagaggagacaatattaacaaagtcagacctaaaacagacttctgataatttatcagaagaatgtcaattggcaagaaaatctagtggaacaggcactgaacctgttgcaaa

SEQ ID NO: 234128 - DNA, 120 bp, Artificial Sequence
  ENSG00000119844_16 (sequence is synthesized)
actctgatgattttgcagacttcagttcagctggtcctagccaagttgtagattggaatgcttttgaggatgaacaaaaagatagttgttcttgggctgcttttggagaccagcaggcta

SEQ ID NO: 234129 - DNA, 120 bp, Artificial Sequence
  ENSG00000119844_17 (sequence is synthesized)
ctgaatctcatcatcgaaaggaagcctggcagtcacataggacagatgaaaatattgatactccaggaacccccaaaacgcacagtgtaccttcagcaacttccaaaggagcagttgcta

SEQ ID NO: 234130 - DNA, 120 bp, Artificial Sequence
  ENSG00000119844_18 (sequence is synthesized)
gtggccatttacaggaatcagccacttcagttcagacagctttattaaaccgcctggagcgaattttcgaagcatgttttccttccatacttgtccctgatgctgaagaggaagttactt

SEQ ID NO: 234131 - DNA, 120 bp, Artificial Sequence
  ENSG00000119844_19 (sequence is synthesized)
ccctgaagcacttgctggaaacaagcactttgccaataaaaacgagagaggccttacctgaaagtggggaattgctagatgtgtggactgagctacaggatatccatgatgcacatggct

SEQ ID NO: 234132 - DNA, 120 bp, Artificial Sequence
  ENSG00000119844_20 (sequence is synthesized)
tgagataccagtggggcggctcccatagcaacaagaagcttttgtcctccttgggaatagacacccgaaacattctcttcacgggcaataagaagcagcctgttatagtgcccatgtatg

SEQ ID NO: 234133 - DNA, 120 bp, Artificial Sequence
  ENSG00000119844_21 (sequence is synthesized)
cagcaggattgggtatgttagagcccaccaaggaaccactgaaaccactttctgctgcagaaaaaatagcttccatcggtcagacagccaccatgtcaccagatatgaacacatgtacat

SEQ ID NO: 234134 - DNA, 120 bp, Artificial Sequence
  ENSG00000119844_22 (sequence is synthesized)
ctgatcagttccaggagtctctaccacccgtccagtttgactggagtagcagtggccttactaaccctttagatggtgtggatccggagttgtatgagttaacaacttctaagctggaaa

SEQ ID NO: 234135 - DNA, 120 bp, Artificial Sequence
  ENSG00000119844_23 (sequence is synthesized)
tctccacctcaagcctcaaagtgactgatgcatttgcaagactcatgtctacagtagagaagacaagcacatctaccagtaggaaaccgaaaagagaagagcacctaagtgaagaagcta

SEQ ID NO: 234136 - DNA, 120 bp, Artificial Sequence
  ENSG00000119844_24 (sequence is synthesized)
tcaaggtgatcgctggccttcctgacttaacattcatgcatgccaaggtgttgatgttcccagccacgttaacaccttccacaagctctcaagaaaaagcagacggataactgatgtgaa

SEQ ID NO: 234137 - DNA, 120 bp, Artificial Sequence
  ENSG00000119844_25 (sequence is synthesized)
ttggacagtttctattgcttttccttttttccatcccttccctaccatcaaaagcatacctgctctaattaaaaaaaaaaaaaaaaaaaattcaagttcagctgatttgttggtaagccg

SEQ ID NO: 234138 - DNA, 120 bp, Artificial Sequence
  ENSG00000119844_26 (sequence is synthesized)
cactagaaaggtatacatagtaatgtatatttatttacatactgaagtcctaaatttatattagaaaaatgtaaataatcgggggtaaacatttttgaagatttattctttttgtgttgc

SEQ ID NO: 234139 - DNA, 120 bp, Artificial Sequence
  ENSG00000119844_27 (sequence is synthesized)
tggggtgtatacatttatgtctttgtgaaatacactggtggtgtccttcttacaaaacttttgaaataaaaaaaaaactcaaatcttcactgtctgtgaaatccccttcagtcttttcag

SEQ ID NO: 234140 - DNA, 120 bp, Artificial Sequence
  ENSG00000119844_28 (sequence is synthesized)
attgcattgactgtcctcttgatttttcatattacatgtcaaattacttttgctatcataaataagctccaaagtcccccatttaatttttttttaattttgtgtatgatgggtttcaga

SEQ ID NO: 234141 - DNA, 120 bp, Artificial Sequence
  ENSG00000119844_29 (sequence is synthesized)
tctggcttttgttaacattttggggcttttttaatcttttcaatctggcgtattgctgtttgaccttttgcaaggtacttaattgctcttttgttatagggtatggatcattgtcagaac

SEQ ID NO: 234142 - DNA, 120 bp, Artificial Sequence
  ENSG00000119844_30 (sequence is synthesized)
ttgattggaggggtttaaagagattgtgtctgtttaaaatcagtatgattcagagaaggaccaaattatatgaatgtcttacaatggaatttacttgttactgatttttttgttctattg

SEQ ID NO: 234143 - DNA, 120 bp, Artificial Sequence
  ENSG00000119844_31 (sequence is synthesized)
taccactattttttgaggattttgcacagtgtaaaatgacataatcatagattgctatggtttaggctgtatatacagtgaaaactatgggttttaaatgtttggggaaattcctatgga

SEQ ID NO: 234144 - DNA, 120 bp, Artificial Sequence
  ENSG00000119844_32 (sequence is synthesized)
aaaaagagagacatgtagaagaacctctaacaaggttaatgtgcatgcccaaggtcttttgaaatttcagtgtgtaaatttccttttagcttatacaaaaataaaataatttaaaagaaa

SEQ ID NO: 234145 - DNA, 120 bp, Artificial Sequence
  ENSG00000119844_33 (sequence is synthesized)
tgctagtggaggttccactcttctgaaccttgatttctttgggcccgtggatgacagtagctctagcagcagcaccacaatcccaggtgtggatccggagttgtatgagttaacaacttc

SEQ ID NO: 234146 - DNA, 120 bp, Artificial Sequence
  ENSG00000119844_34 (sequence is synthesized)
acaaacttctctctgctgatttccttttttgtttgaacataacttattcttatctttggaaattcaggctttctttctgaacagtaattgctcaagaaaccagccgttactattatcaac

SEQ ID NO: 234147 - DNA, 120 bp, Artificial Sequence
  ENSG00000119844_35 (sequence is synthesized)
agtattaatgtccaaatataggtaatagtagttaggtaaaattttagtttcagtcaaaagtaagcttctttattttttacaaatatctaggtagtttaaaaggtattttagctaggacca

SEQ ID NO: 234148 - DNA, 120 bp, Artificial Sequence
  ENSG00000119844_36 (sequence is synthesized)
atttaccttgaatttttttctgtaagttttaatttttggaattttcttggatgcaaagtcttgtgactagaggctgcttcaaagcacaaagcacaattatttagccaaaaacagtgtgca

SEQ ID NO: 234149 - DNA, 120 bp, Artificial Sequence
  ENSG00000119844_37 (sequence is synthesized)
tagatccatgtttattgactcaaagtagtttttagatttaatattttatagagcacctatatgcaaatagaaaataaatttcacgatccttttctaaagcgtgtctccaaatgttagtag

SEQ ID NO: 234150 - DNA, 120 bp, Artificial Sequence
  ENSG00000119844_38 (sequence is synthesized)
gcagttctaaaaataattggtttcacttatggctttaaaagaaaatcctcaaaaaggaataacttatttcagtaatgtaatgtgggctctttaaaataagtaacacaccaatgttagttt

SEQ ID NO: 234151 - DNA, 120 bp, Artificial Sequence
  ENSG00000119844_39 (sequence is synthesized)
ctagtattgacaccacaagttttaagtggatcccaagatgtaattgctcttactgcttgtgcttaagttgttcgagccattgtctaaacacctatcattgtctaaatggcaattattttg

SEQ ID NO: 234152 - DNA, 120 bp, Artificial Sequence
  ENSG00000119844_40 (sequence is synthesized)
ccattgtaaaaaaacactatcagcttggccttatagtggggtcctaggatatctggaaagcatccaattgaattaatatagtgctgaaggaaagcctggatgcactttttgctgttgtct

SEQ ID NO: 234153 - DNA, 120 bp, Artificial Sequence
  ENSG00000119844_41 (sequence is synthesized)
ggtgtcttcagtcaaatcagatatctggaaagcatccaattgaattaatatagtgctgaaggaaagcctggatgcactttttgctgttgtctggtgtcttcagtcaaatcatcatgcttt

SEQ ID NO: 234154 - DNA, 120 bp, Artificial Sequence
  ENSG00000119844_42 (sequence is synthesized)
ttattaacaaacaacttctttaaaaatgtatactatttctgattactgtttcagagttaaaggggaacagtacagcttgaggttgcacatcagggtagggtagttatgacattctttatt

SEQ ID NO: 234155 - DNA, 120 bp, Artificial Sequence
  ENSG00000119844_43 (sequence is synthesized)
atgttattttattttaaactaagttaacacattggtgcgtgtcctgaaactgacaactttgtcactttttaaaaagcattaattagaaaccaatattactaacatgaaagattgatttgg

SEQ ID NO: 234156 - DNA, 120 bp, Artificial Sequence
  ENSG00000119844_44 (sequence is synthesized)
gcatgtacagtgatttttaatgttgggttgagattaaagtattgtttccctttaacgggtacgcattcctttcggtctttctggtatggcttccagttttgattgaagcaactgaactcc

SEQ ID NO: 234157 - DNA, 120 bp, Artificial Sequence
  ENSG00000119844_45 (sequence is synthesized)
taaaaccttactaagtgttacattctttacattgtacatgagaaaatgtacattgaattaaattgttattttagaaatgtccttagtaatgaaaagctaatactgtacacattgttttaa

SEQ ID NO: 234158 - DNA, 120 bp, Artificial Sequence
  ENSG00000119844_46 (sequence is synthesized)
tgttgatttttaaaatgtgtaatgattactaattataacctgcatgttcaagtgtgtgtcttacccctttttacacataacccctcctcccttggcttaccttctgtgtggctgcctacc

SEQ ID NO: 234159 - DNA, 120 bp, Artificial Sequence
  ENSG00000119862_0 (sequence is synthesized)
gttcccggttcccgagccgggccccggaggcctttaaatgctgcccagggccgacgcggcacggccctcgccacttttcttggtcgggcagcggcagcggcagcggcagcaagcagcccc

SEQ ID NO: 234160 - DNA, 120 bp, Artificial Sequence
  ENSG00000119862_1 (sequence is synthesized)
gcaagcagccccgtcggcccgggtccggggccgttctgggccgcggcaagcaccttcgccctcccagctcgcgctgcctccctcccctcccctcctcccaggctctgcctgccaggtcgg

SEQ ID NO: 234161 - DNA, 80 bp, Artificial Sequence
  ENSG00000119862_2 (sequence is synthesized)
ccgccccgcgcaggacagccccgggatccccgcccgcgcgccgcgtcccacgtaccccgccgcgccgggcaagaagatgg

SEQ ID NO: 234162 - DNA, 120 bp, Artificial Sequence
  ENSG00000119862_3 (sequence is synthesized)
taccccgccgcgccgggcaagaagatggcgggatcagtggccgacagcgatgccgtggtgaaactagatgatggccatttaaacaactctttgagctctccagttcaagcggacgtgtac

SEQ ID NO: 234163 - DNA, 120 bp, Artificial Sequence
  ENSG00000119862_4 (sequence is synthesized)
ttcccacgactgatagttccattttgtgggcacattaaaggtggcatgagaccaggcaagaaggtgttagtgatgggcatcgtagacctcaacccagagagctttgcaatcagcttgacc

SEQ ID NO: 234164 - DNA, 120 bp, Artificial Sequence
  ENSG00000119862_5 (sequence is synthesized)
tgtggggactcagaagaccctcctgccgatgtggcaatcgaactcaaagctgtgttcacagatcggcagctactcagaaattcttgtatatctggggagaggggtgaagaacagtcagca

SEQ ID NO: 234165 - DNA, 120 bp, Artificial Sequence
  ENSG00000119862_6 (sequence is synthesized)
atcccttactttccattcattccagaccagccattcagggtggaaattctttgtgagcacccacgtttccgagtgtttgtggatggacaccaactttttgatttttaccatcgcattcaa

SEQ ID NO: 234166 - DNA, 120 bp, Artificial Sequence
  ENSG00000119862_7 (sequence is synthesized)
acgttatctgcaattgacaccataaagataaatggagacctccagatcaccaagcttggctgatttaaaccacctctatttcaaataggatcacgtgccacaactatctgactgttggtc

SEQ ID NO: 234167 - DNA, 120 bp, Artificial Sequence
  ENSG00000119862_8 (sequence is synthesized)
tggaagaagtgtcctagcaagatctggagacttaaaaagaaaacaaaaacaaatggcaagtttcacttaagggtggtttgcccttaagaagaaagctgttgggacaaagacaccgagcca

SEQ ID NO: 234168 - DNA, 120 bp, Artificial Sequence
  ENSG00000119862_9 (sequence is synthesized)
ttatacccagaataaaataatacatttatgctggattttattcagaccaaactaaaatggatttgtgatgatttgtgatttggtagcaaattattcatcttttcaaagcaaggcaatgct

SEQ ID NO: 234169 - DNA, 120 bp, Artificial Sequence
  ENSG00000119862_10 (sequence is synthesized)
tagaaacagaagtgctaaagacacttaaaaagccaacaacaacggtacagtgaaatcaatgcatttctgcactaaagtggaattgtgtagcacaaccaatattttagtcagggtatttac

SEQ ID NO: 234170 - DNA, 120 bp, Artificial Sequence
  ENSG00000119862_11 (sequence is synthesized)
ttttgtttttgtttttgtttttgttttgcacagcataatgttaattcagattgttgaagctttcttgtagttatttatttatactcaatgtatgtattaaagaatgaacaatgtctcaag

SEQ ID NO: 234171 - DNA, 120 bp, Artificial Sequence
  ENSG00000119862_12 (sequence is synthesized)
atactcaatgtatgtattaaagaatgaacaatgtctcaagaacagcaagttgtaaacttttgaatgtataaatatcttaggtccaaggggagaaaattacatattacaattatgaaacag

SEQ ID NO: 234172 - DNA, 120 bp, Artificial Sequence
  ENSG00000119862_13 (sequence is synthesized)
gtgaatttctgctttaaagaattgagattctccatacccctaaacttaggatctcttgatataaactgctgtaagtgcttttgggaaacctttgcaaaaccattttgataaaactgcttt

SEQ ID NO: 234173 - DNA, 120 bp, Artificial Sequence
  ENSG00000119862_14 (sequence is synthesized)
ccaagttattgttggttatgtaaaattctatttacattgctttttctccttactgggaattagcacattattggcttccttaagactaattatttctctcttgatttatataatagctca

SEQ ID NO: 234174 - DNA, 120 bp, Artificial Sequence
  ENSG00000119862_15 (sequence is synthesized)
ttaagttgttattaatcaaaaacacaaagaggtgattgcttagacaatttttaaagtgactatagtataaacttttaaaagaataatatgaaaatgactgtggaatgcagtgtaaagcag

SEQ ID NO: 234175 - DNA, 120 bp, Artificial Sequence
  ENSG00000119862_16 (sequence is synthesized)
ataacttacttggaagtaatttatatcaacttaagctgttagctcattgtataacttttcttatgtgaccctcaccaatatccctaagtaatgcctttggaagcttcagagtagaagatg

SEQ ID NO: 234176 - DNA, 120 bp, Artificial Sequence
  ENSG00000119862_17 (sequence is synthesized)
cttcctactgtgttggctctgaggagatagtaggattagataggatccagattaggaaatgatccagttagtttatctgaaaggttaactcccaggactccaggtctttgaatccagcca

SEQ ID NO: 234177 - DNA, 120 bp, Artificial Sequence
  ENSG00000119862_18 (sequence is synthesized)
gtagagtgaatgcttccaattaagctgtaggtgttaccctgcacttacggaactgatcaaacaggtgactccaacaggaggttgcagtactgtaaacgtcaccgcaaggcaagggatgct

SEQ ID NO: 234178 - DNA, 120 bp, Artificial Sequence
  ENSG00000119862_19 (sequence is synthesized)
taaagtcctgggttctggactttaaaagctacattggccctggagggagggacccttggcattgctttgatcaggtagtgagggaagacagggttctggggtgggggtgtatttatatat

SEQ ID NO: 234179 - DNA, 120 bp, Artificial Sequence
  ENSG00000119862_20 (sequence is synthesized)
aagacagggttctggggtgggggtgtatttatatataatttaggttttgtttgtacagcatactgtgtcttgtaatgacacatccttgtcctgctttccttttttgagtttttttttttt

SEQ ID NO: 234180 - DNA, 120 bp, Artificial Sequence
  ENSG00000119862_21 (sequence is synthesized)
tcattttcaagtgtcaagaatgtagacagtgtttcagtaccaaagtctaaaataaactaaaattatgaattttttataggtgatacatttggattcttctcaactttgaaactgtttagc

SEQ ID NO: 234181 - DNA, 120 bp, Artificial Sequence
  ENSG00000119862_22 (sequence is synthesized)
acagttccattgtattatataagaagacactgtatccaacaagactggctgtacattgaaaagctttatgtaccagccaacttatttaaccatattcagcctgttccgtgggggctgttc

SEQ ID NO: 234182 - DNA, 120 bp, Artificial Sequence
  ENSG00000119862_23 (sequence is synthesized)
tgtggttccaggtattttcaagcctgtgattaacttctcatggcttgtcacttaaaagtccctaaatttgagagacttaaagggcaccttgaaatacatttgtggagttttgatccaact

SEQ ID NO: 234183 - DNA, 120 bp, Artificial Sequence
  ENSG00000119862_24 (sequence is synthesized)
tatggtggaagagccccataggaagactgttttgagtggccaaccattcccacccactgcataattcagcagaaactagaggagcagggcgtgtactgattggaattgacacgcttattc

SEQ ID NO: 234184 - DNA, 120 bp, Artificial Sequence
  ENSG00000119862_25 (sequence is synthesized)
tgtctacctatcagctaactcattagcagccaagcccttaggcagcttagtgtgaaaatacaatgttaactgtttgtttctctgtgaggttagtgggaaccgcttggataagcctattgg

SEQ ID NO: 234185 - DNA, 120 bp, Artificial Sequence
  ENSG00000119862_26 (sequence is synthesized)
gattaatctaaatgatgtgatgatttgattcaggtatagcccaaattagtaaggggctttagctgtaaactgaaaacaatattcacaccctctcctgggcctgtaaggtctaaggtgaga

SEQ ID NO: 234186 - DNA, 120 bp, Artificial Sequence
  ENSG00000119862_27 (sequence is synthesized)
atttcaggatggaaaatgcaatgtaaagcttccacaggaaagtattcgggtatgtaaggtgttatttctgaccagagccctagttctgcaataaccaaaaccaaggagtataaataacaa

SEQ ID NO: 234187 - DNA, 120 bp, Artificial Sequence
  ENSG00000119862_28 (sequence is synthesized)
tcaggctctgggggaatagaaagcaggctttagacaatctgtccatttctacagtaaaattggagtgagtgtgtatatctacttaaaacttaatagaagtgacttctactttttgggcta

SEQ ID NO: 234188 - DNA, 120 bp, Artificial Sequence
  ENSG00000119862_29 (sequence is synthesized)
ttccagaagtattttaaaattattatttaaaattttgaagccccatttcaaatcttgccgaccttagttcaaagccccctgagagatcacttttagaattgaggatttgttaaaatggca

SEQ ID NO: 234189 - DNA, 120 bp, Artificial Sequence
  ENSG00000119862_30 (sequence is synthesized)
agtcatttcatttgtgttaaaaagaaaatacccaaaaggaaggagggagccctgtttgccttgagataaacggccttggcattttctggcattaatgtagaaataatgttcctatgatga

SEQ ID NO: 234190 - DNA, 120 bp, Artificial Sequence
  ENSG00000119862_31 (sequence is synthesized)
catattttcaaagaaacactttcttatttactgtgtggtgtaaaatgttgctaaatgtgttgttacattatgtcactgctgaaagtaatttgcactataataaaggaattttctacaaaa

SEQ ID NO: 234191 - DNA, 120 bp, Artificial Sequence
  ENSG00000119865_0 (sequence is synthesized)
tccctttaccccccctcagcctcctcccgcctggctggcgccggatccgcgagcagcagtgtccacctcacgtagctggccgaggcggtatccagattccgggggtctcgctccttggca

SEQ ID NO: 234192 - DNA, 120 bp, Artificial Sequence
  ENSG00000119865_1 (sequence is synthesized)
tagtggtcgcttaactccagcgccttcccagtgcctcccaaacctctcctcctcctgcccggggctgttctaggaggagcctaaatgtccgcttccccagctgaaggggattgtggtgcg

SEQ ID NO: 234193 - DNA, 120 bp, Artificial Sequence
  ENSG00000119865_2 (sequence is synthesized)
taaacaggattaactccctcgcccccagctgcgcggatctgcgcggcggcctgcgggccagagcgagccttcgggtgcgtggagggcgcagcactggagcgggggatggggaagcgcgcg

SEQ ID NO: 234194 - DNA, 120 bp, Artificial Sequence
  ENSG00000119865_3 (sequence is synthesized)
gccttggagccgtctcttgggcccgcttcctcgccgagtggggaggggggccacagcctaaggagctgctcctcaaaagcccgggcggacggcggcgacggcgcgggttcctagcggcag

SEQ ID NO: 234195 - DNA, 120 bp, Artificial Sequence
  ENSG00000119865_4 (sequence is synthesized)
cctcagctccaccacctccctcaccctccccgcgcttcctctccgcccctcgcgctccagccactcggccgcagccggcgctgtcctccgccccccggagccgccgcgccagaccctcgc

SEQ ID NO: 234196 - DNA, 120 bp, Artificial Sequence
  ENSG00000119865_5 (sequence is synthesized)
ccagacatgggggacctgccgggcctcgtgcgcctctccatcgcgctgcgcatccagcctaatgacggcccggtcttttacaaggtggacgggcagcgcttcggccagaaccgcaccatc

SEQ ID NO: 234197 - DNA, 120 bp, Artificial Sequence
  ENSG00000119865_6 (sequence is synthesized)
aagctgctcaccggctcctcctacaaggttgaggtgaagattaaacccagcacgctgcaggtcgagaatatttccattggtggtgtgcttgtcccactggaactgaagtctaaagagcct

SEQ ID NO: 234198 - DNA, 120 bp, Artificial Sequence
  ENSG00000119865_7 (sequence is synthesized)
gatggggacagagttgtttatacgggtacatatgacacagaaggtgtgaccccaacgaagagtggagaacggcaacccatccagatcaccatgccgttcacagacattgggaccttcgag

SEQ ID NO: 234199 - DNA, 120 bp, Artificial Sequence
  ENSG00000119865_8 (sequence is synthesized)
aagcgggatcactgccagtggggaagccccttctctgtcattgagtatgaatgcaagcccaacgagacacgcagtctgatgtgggtgaacaaggagtccttcctctgaaagtggctcttt

SEQ ID NO: 234200 - DNA, 120 bp, Artificial Sequence
  ENSG00000119865_9 (sequence is synthesized)
ctgatgctactggacaatcttttcagaaatctacttttagataaaccagcgcaggccttaaacaaggcatgccacaccattgctgttccccatctggtactaatgacctactagccctgg

SEQ ID NO: 234201 - DNA, 120 bp, Artificial Sequence
  ENSG00000119865_10 (sequence is synthesized)
ttattttgaaagtgtaattcccctctgacacaatatccctcacatacaagatggtgatgtaccactcccgagaatattcccatctgtattttgtgctgatgttcctgcatccagttgttc

SEQ ID NO: 234202 - DNA, 120 bp, Artificial Sequence
  ENSG00000119865_11 (sequence is synthesized)
tcggtcatacttttgaccacttgtgactggagttcagtggccctggcaggcttgtcctgctcttgaccattccactgactaactttggtgttttgtttccaagttaagtgattcctcctt

SEQ ID NO: 234203 - DNA, 120 bp, Artificial Sequence
  ENSG00000119865_12 (sequence is synthesized)
ttttttgttcaatgttaaatttaaaaataacaatgtgtatgggtcctcccatgtgtaatatggtaacatgtaacttgcagtgtttgccagctttcaaagcaggctttgtgaaaatgtaat

SEQ ID NO: 234204 - DNA, 120 bp, Artificial Sequence
  ENSG00000119865_13 (sequence is synthesized)
acaaacagcagtgaatgggactcaaatgttgtgcttcctataaacagctccgctctttcagggaaggatggtaacaaactagaaggacaaatatgtacgtatttataacgtattaaaact

SEQ ID NO: 234205 - DNA, 120 bp, Artificial Sequence
  ENSG00000119865_14 (sequence is synthesized)
cttttaagtagcttaaggtattgtgcaatggcctagcctagtagaaatgggggaaaagcattgctgtggaccattgttaaagtgacaggagttgtagggttacccctttgacaagcttcc

SEQ ID NO: 234206 - DNA, 120 bp, Artificial Sequence
  ENSG00000119865_15 (sequence is synthesized)
atagtcttcagacacgcacattgatggcatccctacagtcttcttcacttgaactttgtaaaactgcatatggacctgtaatcaacttttgatatttcttaataaaggcgttgaaaatca

SEQ ID NO: 234207 - DNA, 120 bp, Artificial Sequence
  ENSG00000119865_16 (sequence is synthesized)
atagtggtcgcttaactccagcgccttcccagtgcctcccaaacctctcctcctcctgcccggggctgttctaggaggagcctaaatgtccgcttccccagctgaaggggattgtgccac

SEQ ID NO: 234208 - DNA, 120 bp, Artificial Sequence
  ENSG00000119865_17 (sequence is synthesized)
aggtgtgttgggagccaattactgtggaaattgagttgtggatttccttcaagcatctgctggagagagaactacttaattaatgctcttttgcatgacagactgaccctgtagatgctg

SEQ ID NO: 234209 - DNA, 120 bp, Artificial Sequence
  ENSG00000119865_18 (sequence is synthesized)
aaaagacaccataagcagaagcagatggttctggaagagacagaacctacattgccattttcccagttatagtctacttcagaactggtttagataattggctgtgaaaagtttctgatt

SEQ ID NO: 234210 - DNA, 120 bp, Artificial Sequence
  ENSG00000119865_19 (sequence is synthesized)
aaagctaaatggaggagccaaaaaaagtgtcatgggaaaaatacacctcttatataatatcctataatacacctattttatataatatatacctattatatatacacctatataatatat

SEQ ID NO: 234211 - DNA, 120 bp, Artificial Sequence
  ENSG00000119865_20 (sequence is synthesized)
atattatatatacctattatatataatatctggtaatcctatcagatatcatatataataaaatgatataccctggtaatatggccccaagtaagaaaaaacaaattggtagaaaggata

SEQ ID NO: 234212 - DNA, 120 bp, Artificial Sequence
  ENSG00000119865_21 (sequence is synthesized)
gagtcaagacatagatttaactatatgtgcaaacataataaataggtgatgaagcaagcttgctaaagcacaggaaaaggaagcttcacctaaactgctgcttgcaaactgggcagcctt

SEQ ID NO: 234213 - DNA, 120 bp, Artificial Sequence
  ENSG00000119865_22 (sequence is synthesized)
ttccctctgcaagaacaaccttcaactgtctgccctctagctttataggaagtatcacaagggttctcaaatatcggtatgcgtgagaatctctttgggagtttgtttaaaattccagtc

SEQ ID NO: 234214 - DNA, 120 bp, Artificial Sequence
  ENSG00000119865_23 (sequence is synthesized)
ctaggttccctctccagtgatcttagctcagtagagctagggtggggacagagaaactcttagcaagcataccagatcctgaagaggatggtgtgggaatgcactttgagaaatgcctat

SEQ ID NO: 234215 - DNA, 120 bp, Artificial Sequence
  ENSG00000119865_24 (sequence is synthesized)
ctaacctttggaaacttaaagtgttcccagtccccattatactttttaaaaccacaatagtcacataaggaaataatctagcagctcatccctttgcatccaatgtttgaactattttta

SEQ ID NO: 234216 - DNA, 120 bp, Artificial Sequence
  ENSG00000119865_25 (sequence is synthesized)
gaaagtgctcttgttctgtcaaagaaccttcaacacagaaaaatacaaaaatgagggaaatgtataattcctgcaagagagaagtgttgttaacatgtcaataaatgttcttagaaagtt

SEQ ID NO: 234217 - DNA, 120 bp, Artificial Sequence
  ENSG00000119865_26 (sequence is synthesized)
tgccatcatgaggaacaaatgttcttttttttttttccaaattatttgctttgcattctaggggagggcttctcacaggccatcagaattatcggggatgcttgttaaaatgtagattcc

SEQ ID NO: 234218 - DNA, 120 bp, Artificial Sequence
  ENSG00000119865_27 (sequence is synthesized)
taaactctacctttttagacctcttaaattgagcaaactctctgagagtaaatccaaagcatctgcattttattaagcactttaggtgattcttatcatattaaagtttggaaaacacta

SEQ ID NO: 234219 - DNA, 120 bp, Artificial Sequence
  ENSG00000119866_0 (sequence is synthesized)
gtctctgtccatccagactcctgacgttcaagttcgcagggacgtcacgtccgcacttgaacttgcagctcaggggggcttttgccatttttttcatctctctctctctctctccctcta

SEQ ID NO: 234220 - DNA, 120 bp, Artificial Sequence
  ENSG00000119866_1 (sequence is synthesized)
ttttttttttttttttttttgcttaaaaaaaagccatgacggctctcccacaattcatcttccctgcgccatctttgtattatttctaatttattttggatgtcaaaaggcactgatgaa

SEQ ID NO: 234221 - DNA, 120 bp, Artificial Sequence
  ENSG00000119866_2 (sequence is synthesized)
atttattttggatgtcaaaaggcactgatgaagatattttctctggagtctccttctttctaacccggctctcccgatgtgaaccgagccgtcgtccgcccgccgccgccgccgccgccg

SEQ ID NO: 234222 - DNA, 120 bp, Artificial Sequence
  ENSG00000119866_3 (sequence is synthesized)
ccgccgcccgccccgcagcccaccatgtctcgccgcaagcaaggcaaaccccagcacttaagcaaacgggaattctcgcccgagcctcttgaagccattcttacagatgatgaaccagac

SEQ ID NO: 234223 - DNA, 120 bp, Artificial Sequence
  ENSG00000119866_4 (sequence is synthesized)
cacggcccgttgggagctccagaaggggatcatgacctcctcacctgtgggcagtgccagatgaacttcccattgggggacattcttatttttatcgagcacaaacggaaacaatgcaat

SEQ ID NO: 234224 - DNA, 120 bp, Artificial Sequence
  ENSG00000119866_5 (sequence is synthesized)
ggcagcctctgcttagaaaaagctgtggataagccaccttccccttcaccaatcgagatgaaaaaagcatccaatcccgtggaggttggcatccaggtcacgccagaggatgacgattgt

SEQ ID NO: 234225 - DNA, 120 bp, Artificial Sequence
  ENSG00000119866_6 (sequence is synthesized)
ttatcaacgtcatctagaggaatttgccccaaacaggaacacatagcagataaacttctgcactggaggggcctctcctcccctcgttctgcacatggagctctaatccccacgcctggg

SEQ ID NO: 234226 - DNA, 120 bp, Artificial Sequence
  ENSG00000119866_7 (sequence is synthesized)
atgagtgcagaatatgccccgcagggtatttgtaaagatgagcccagcagctacacatgtacaacttgcaaacagccattcaccagtgcatggtttctcttgcaacacgcacagaacact

SEQ ID NO: 234227 - DNA, 120 bp, Artificial Sequence
  ENSG00000119866_8 (sequence is synthesized)
catggattaagaatctacttagaaagcgaacacggaagtcccctgaccccgcgggttggtatcccttcaggactaggtgcagaatgtccttcccagccacctctccatgggattcatatt

SEQ ID NO: 234228 - DNA, 120 bp, Artificial Sequence
  ENSG00000119866_9 (sequence is synthesized)
gcagacaataacccctttaacctgctaagaataccaggatcagtatcgagagaggcttccggcctggcagaagggcgctttccacccactccccccctgtttagtccaccaccgagacat

SEQ ID NO: 234229 - DNA, 120 bp, Artificial Sequence
  ENSG00000119866_10 (sequence is synthesized)
cacttggacccccaccgcatagagcgcctgggggcggaagagatggccctggccacccatcacccgagtgcctttgacagggtgctgcggttgaatccaatggctatggagcctcccgcc

SEQ ID NO: 234230 - DNA, 120 bp, Artificial Sequence
  ENSG00000119866_11 (sequence is synthesized)
atggatttctctaggagacttagagagctggcagggaacacgtctagcccaccgctgtccccaggccggcccagccctatgcaaaggttactgcaaccattccagccaggtagcaagccg

SEQ ID NO: 234231 - DNA, 120 bp, Artificial Sequence
  ENSG00000119866_12 (sequence is synthesized)
cccttcctggcgacgccccccctccctcctctgcaatccgcccctcctccctcccagcccccggtcaagtccaagtcatgcgagttctgcggcaagacgttcaaatttcagagcaacctg

SEQ ID NO: 234232 - DNA, 120 bp, Artificial Sequence
  ENSG00000119866_13 (sequence is synthesized)
gtggtgcaccggcgcagccacacgggcgagaagccctacaagtgcaacctgtgcgaccacgcgtgcacccaggccagcaagctgaagcgccacatgaagacgcacatgcacaaatcgtcc

SEQ ID NO: 234233 - DNA, 120 bp, Artificial Sequence
  ENSG00000119866_14 (sequence is synthesized)
cccatgacggtcaagtccgacgacggtctctccaccgccagctccccggaacccggcaccagcgacttggtgggcagcgccagcagcgcgctcaagtccgtggtggccaagttcaagagc

SEQ ID NO: 234234 - DNA, 120 bp, Artificial Sequence
  ENSG00000119866_15 (sequence is synthesized)
gagaacgaccccaacctgatcccggagaacggggacgaggaggaagaggaggacgacgaggaagaggaagaagaggaggaagaggaggaggaggagctgacggagagcgagagggtggac

SEQ ID NO: 234235 - DNA, 120 bp, Artificial Sequence
  ENSG00000119866_16 (sequence is synthesized)
tacggcttcgggctgagcctggaggcggcgcgccaccacgagaacagctcgcggggcgcggtcgtgggcgtgggcgacgagagccgcgccctgcccgacgtcatgcagggcatggtgctc

SEQ ID NO: 234236 - DNA, 120 bp, Artificial Sequence
  ENSG00000119866_17 (sequence is synthesized)
agctccatgcagcacttcagcgaggccttccaccaggtcctgggcgagaagcataagcgcggccacctggccgaggccgagggccacagggacacttgcgacgaagactcggtggccggc

SEQ ID NO: 234237 - DNA, 120 bp, Artificial Sequence
  ENSG00000119866_18 (sequence is synthesized)
gagtcggaccgcatagacgatggcactgttaatggccgcggctgctccccgggcgagtcggcctcggggggcctgtccaaaaagctgctgctgggcagccccagctcgctgagccccttc

SEQ ID NO: 234238 - DNA, 120 bp, Artificial Sequence
  ENSG00000119866_19 (sequence is synthesized)
tctaagcgcatcaagctcgagaaggagttcgacctgcccccggccgcgatgcccaacacggagaacgtgtactcgcagtggctcgccggctacgcggcctccaggcagctcaaagatccc

SEQ ID NO: 234239 - DNA, 120 bp, Artificial Sequence
  ENSG00000119866_20 (sequence is synthesized)
ttccttagcttcggagactccagacaatcgccttttgcctcctcgtcggagcactcctcggagaacgggagtttgcgcttctccacaccgcccggggagctggacggagggatctcgggg

SEQ ID NO: 234240 - DNA, 120 bp, Artificial Sequence
  ENSG00000119866_21 (sequence is synthesized)
cgcagcggcacgggaagtggagggagcacgccccatattagtggtccgggcccgggcaggcccagctcaaaagagggcagacgcagcgacacttgtgagtactgtgggaaagtcttcaag

SEQ ID NO: 234241 - DNA, 120 bp, Artificial Sequence
  ENSG00000119866_22 (sequence is synthesized)
aactgtagcaatctcactgtccacaggagaagccacacgggcgaaaggccttataaatgcgagctgtgcaactatgcctgtgcccagagtagcaagctcaccaggcacatgaaaacgcat

SEQ ID NO: 234242 - DNA, 120 bp, Artificial Sequence
  ENSG00000119866_23 (sequence is synthesized)
ggccaggtggggaaggacgtttacaaatgtgaaatttgtaagatgccttttagcgtgtacagtaccctggagaaacacatgaaaaaatggcacagtgatcgagtgttgaataatgatata

SEQ ID NO: 234243 - DNA, 120 bp, Artificial Sequence
  ENSG00000119866_24 (sequence is synthesized)
aaaactgaatagaggtatattaatacccctccctcactcccacctgacaccccctttttcaccactccccttccccatcgccctccagccccactccctgtaggatttttttctagtccc

SEQ ID NO: 234244 - DNA, 120 bp, Artificial Sequence
  ENSG00000119866_25 (sequence is synthesized)
tttttccttttttttttttttcctttatgttctcaccgtttgaatgcatgatctgtatggggcaatactattgcattttacgcaaactttgagcctttctcttgtgcaataatttacatg

SEQ ID NO: 234245 - DNA, 120 bp, Artificial Sequence
  ENSG00000119866_26 (sequence is synthesized)
catgttgtgtatgtttttttttaaacttagacagcatgtatggtatgttatggctattttaaattgtccctaattcgttgctgagcaaacatgttgctgtttccagttccgttctgagag

SEQ ID NO: 234246 - DNA, 120 bp, Artificial Sequence
  ENSG00000119866_27 (sequence is synthesized)
aaaaagagagagagagagaaaaagaccatgctgcatacattctgtaatacatatcatgtacagttttattttataacgtgaggaggaaaaacagtctttggattaaccctctatagacag

SEQ ID NO: 234247 - DNA, 120 bp, Artificial Sequence
  ENSG00000119866_28 (sequence is synthesized)
aatagatagcactgaaaaaaaatctctatgagctaaatgtctgtctctaaagggttaaatgtatcaattggaaaggaagaaaaaaggccttgaattgacaaattaacagaaaaacagaac

SEQ ID NO: 234248 - DNA, 120 bp, Artificial Sequence
  ENSG00000119866_29 (sequence is synthesized)
aagtttattctatcatttggttttaaaatatgagtgccttggatctattaaaaccacatcgatggttctttctacttgttataaacttgtagcttaattcagcattgggtgaggtaataa

SEQ ID NO: 234249 - DNA, 120 bp, Artificial Sequence
  ENSG00000119866_30 (sequence is synthesized)
accttaggaactagcatataattctatattgtatttctcacaacaatggctacctaaaaagatgacccattatgtcctagttaatcatcatttttcctttagtttaattttataaacaaa

SEQ ID NO: 234250 - DNA, 120 bp, Artificial Sequence
  ENSG00000119866_31 (sequence is synthesized)
actgattataccagtataaaagctactttgctcctggtgagagcttaaaagaaatgggctgttttgcccaaagttttattttttttaaacaatgattaaattgaatgtgtaatgtgcaaa

SEQ ID NO: 234251 - DNA, 120 bp, Artificial Sequence
  ENSG00000119866_32 (sequence is synthesized)
agccctggaacgcaattaaatacactagtaaggagttcattttatgaagatatttgctttaataatgtctttttaaaaatactggcaccaaaagaaatagatccagatctacttggttgt

SEQ ID NO: 234252 - DNA, 120 bp, Artificial Sequence
  ENSG00000119866_33 (sequence is synthesized)
caagtggacaatcaaatgataaactttaagaccttgtataccatattgaaaggaagaggctgacaataaggtttgacagaggggaacagaagaaaataatatgatttattagcacaacgt

SEQ ID NO: 234253 - DNA, 120 bp, Artificial Sequence
  ENSG00000119866_34 (sequence is synthesized)
ggtactatttgccatttaaaactagaacaggtatataagctaatattgatacaatgatgattaactatgaattcttaagacttgcatttaaatgtgacattcttaaaaaaagaagagaaa

SEQ ID NO: 234254 - DNA, 120 bp, Artificial Sequence
  ENSG00000119866_35 (sequence is synthesized)
gaattttaagagtagcagtatatatgtctgtgctccctaaaagttgtacttcatttcttttccatacactgtgtgctatttgtgttaacatggaagaggattcattgtttttatttttat

SEQ ID NO: 234255 - DNA, 120 bp, Artificial Sequence
  ENSG00000119866_36 (sequence is synthesized)
ttttttaattttttcttttttattaagctagcatctgccccagttggtgttcaaatagcacttgactctgcctgtgatatctgtatcttttctctaatcagagatacagaggttgagtat

SEQ ID NO: 234256 - DNA, 120 bp, Artificial Sequence
  ENSG00000119866_37 (sequence is synthesized)
aaaataaacctgctcagataggacaattaagtgcactgtacaattttcccagtttacaggtctatacttaagggaaaagttgcaagaatgctgaaaaaaaattgaacacaatctcattga

SEQ ID NO: 234257 - DNA, 120 bp, Artificial Sequence
  ENSG00000119866_38 (sequence is synthesized)
ggagcattttttaaaaactaaaaaaaaaaaaactttgccagccatttacttgactattgagcttacttacttggacgcaacattgcaagcgctgtgaatggaaacagaatacacttaaca

SEQ ID NO: 234258 - DNA, 120 bp, Artificial Sequence
  ENSG00000119866_39 (sequence is synthesized)
tagaaatgaatgattgctttcgcttctacagtgcaaggatttttttgtacaaaacttttttaaatataaatgttaagaaaaattttttttaaaaaacacttcattatgtttaggggggaa

SEQ ID NO: 234259 - DNA, 120 bp, Artificial Sequence
  ENSG00000119866_40 (sequence is synthesized)
ctgcattttagggttccattgtcttggtggtgttacaagacttgttatccatttaaaaatggtagtggaaattctatgccttggatacacaccgctcttcaggttgtaaaaaaaaaaaac

SEQ ID NO: 234260 - DNA, 120 bp, Artificial Sequence
  ENSG00000119866_41 (sequence is synthesized)
atacattggggaaaggtttaagattatatagtacttaaatataggaaaatgcacactcatgttgattcctatgctaaaatacatttatggtcttttttctgtatttctagaatggtattt

SEQ ID NO: 234261 - DNA, 120 bp, Artificial Sequence
  ENSG00000119866_42 (sequence is synthesized)
gaattaaatgttcatctagtgttaggcactatagtatttatattgaagcttgtatttttaactgttgcttgttctcttaaaaggtatcaatgtaccttttttggtagtggaaaaaaaaaa

SEQ ID NO: 234262 - DNA, 120 bp, Artificial Sequence
  ENSG00000119866_43 (sequence is synthesized)
taccttttttggtagtggaaaaaaaaaagacaggctgccacagtatatttttttaatttggcaggataatatagtgcaaattatttgtatgcttcaaaaaaaaaaaaaagagagaaacaa

SEQ ID NO: 234263 - DNA, 120 bp, Artificial Sequence
  ENSG00000119866_44 (sequence is synthesized)
atataatggcggtttgggggagcctgctagaatgtcacatggatggctgtcataggggttgtacatatccttttttgttcctttttcctgctgccatactgtatgcagtactgcaagcta

SEQ ID NO: 234264 - DNA, 120 bp, Artificial Sequence
  ENSG00000119866_45 (sequence is synthesized)
gcaagctaataacgttggtttgttatgtagtgtgctttttgtccctttccttctatcaccctacattccagcatcttaccttcatatgcagtaaaagaaagaaagaaaaaaaaaggaaaa

SEQ ID NO: 234265 - DNA, 120 bp, Artificial Sequence
  ENSG00000119866_46 (sequence is synthesized)
aaaccaatgttttgcagtttttttcattgccaaaaactaaatggtgctttatatttagattggaaagaatttcatatgcaaagcatattaaagagaaagcccgctttagtcaatactttt

SEQ ID NO: 234266 - DNA, 120 bp, Artificial Sequence
  ENSG00000119866_47 (sequence is synthesized)
ttgtaaatggcaatgcagaatattttgttattggccttttctattcctgtaatgaaagctgtttgtcgtaacttgaaattttatcttttactatgggagtcactatttattattgcttat

SEQ ID NO: 234267 - DNA, 88 bp, Artificial Sequence
  ENSG00000119866_48 (sequence is synthesized)
gatgaccaaaggtcattacaacctggctttttattgtatttgtttctggtctttgttaagttctattggaaaaaccactgtctgtgtt

SEQ ID NO: 234268 - DNA, 120 bp, Artificial Sequence
  ENSG00000119866_49 (sequence is synthesized)
gtctttgttaagttctattggaaaaaccactgtctgtgtttttttggcagttgtctgcattaacctgttcatacacccattttgtccctttattgaaaaaataaaaaaaattaaagtaca

SEQ ID NO: 234269 - DNA, 120 bp, Artificial Sequence
  ENSG00000119866_50 (sequence is synthesized)
gcgcacacccagtgcccagaattgcgggggaaatgcatttgcagagatcccccaaagtaaaaagtgtaagcttgtggacacagaatgaatctcaggacccgcgcttgaggtgtgtgcgga

SEQ ID NO: 234270 - DNA, 120 bp, Artificial Sequence
  ENSG00000119866_51 (sequence is synthesized)
tcatctagaggaatttgccccaaacaggaacacatagcagactgaactggaggatgtatttgtgtaccttatggtgtaattgtaaatgagactataaattatagtatgctattatgacta

SEQ ID NO: 234271 - DNA, 120 bp, Artificial Sequence
  ENSG00000119866_52 (sequence is synthesized)
cctcgggccccggcctgcgccgcctgcctctccccggtcccctctttccaggccgcgcgggctcctggagacttgggcgctgcccttccggacccgcagccctccaaacttaggctggat

SEQ ID NO: 234272 - DNA, 120 bp, Artificial Sequence
  ENSG00000119866_53 (sequence is synthesized)
tccgcgttgccgtgcgctccctcccacctcccctcgcccgctgcggagctgtaacttggaggctcagctctcaacttcgggtgatttttctttgctgtcctctcctcgggcaaagtttcc

SEQ ID NO: 234273 - DNA, 120 bp, Artificial Sequence
  ENSG00000119866_54 (sequence is synthesized)
cgagcgcagccgcgggctcggggcttttacttcggcccctggcgtccacacgcggggagcgagcgcggcggcggcggggaggggaagtgggtgtgcgtacggaggagggtgtccgggagc

SEQ ID NO: 234274 - DNA, 120 bp, Artificial Sequence
  ENSG00000119866_55 (sequence is synthesized)
aactctacctggcttccctccgcccgcgcttccccagcccggggctgcagcctcccggtgcactctcgctctatttttttcttttttgaataatctttcattttagagtccgcgtgtgtg

SEQ ID NO: 234275 - DNA, 120 bp, Artificial Sequence
  ENSG00000119866_56 (sequence is synthesized)
ggggggagcagggcgcacgtcttgctcccccccaccctttcctcccacccctgccacccctttcttctctcccggccacgccaccgccgcggcgctcgctgcggccactggcactgatga

SEQ ID NO: 234276 - DNA, 120 bp, Artificial Sequence
  ENSG00000119866_57 (sequence is synthesized)
tctacttagaaagcgaacacggaagtcccctgaccccgcgggttcttcacacacccccattcggcgtagtacccagagagctcaagatgtgtggcagttttcggatggaagctcgagagc

SEQ ID NO: 234277 - DNA, 120 bp, Artificial Sequence
  ENSG00000119866_58 (sequence is synthesized)
ccttaagttctgagaaaatttgaagcccccaggggtggggtggacgcgtgccgcccagtcgacgtcagcgtggtctgtcatcctgctagtttgtgatgttttctgacagtagcctccaag

SEQ ID NO: 234278 - DNA, 120 bp, Artificial Sequence
  ENSG00000119866_59 (sequence is synthesized)
aagccgttgtgcgaagacagagtcctgcagagtccttccagcctaggcctgcagcgccattttatttatattttttaataaaaagtaaaaacaaaaaaacagacccacattggaacagtg

SEQ ID NO: 234279 - DNA, 120 bp, Artificial Sequence
  ENSG00000119866_60 (sequence is synthesized)
aatcagtcccatagagagggcccgtggaccatcgctgtcatgagtgatgccctggcccttctgaaaccagccaacctaattacctgtattgtggaaatgcgcatgagtccccaacccctt

SEQ ID NO: 234280 - DNA, 120 bp, Artificial Sequence
  ENSG00000119866_61 (sequence is synthesized)
aaaagtgtgcttaacattgacacaataaatgttggagctttaggtggtgtttgcttgttctttaatttttaatgcttataagacaatgaggctgcttatgattttgtacttctgtacctg

SEQ ID NO: 234281 - DNA, 120 bp, Artificial Sequence
  ENSG00000119866_62 (sequence is synthesized)
tttcctacagacacccatcgggtgggtaggaggaacagatttgagaaatgggcaggagatgtaggaggggaactaggttaccgcttatcagatggcataaattttcaaggagaatcaaaa

SEQ ID NO: 234282 - DNA, 120 bp, Artificial Sequence
  ENSG00000119866_63 (sequence is synthesized)
tgcaaaacttgggaataaatcatagcaatatcataattaatgtagtagtaatattgctgtttattaatgctgaagtgtggttttcctaactgtctgacttataatttgcataccattaaa

SEQ ID NO: 234283 - DNA, 120 bp, Artificial Sequence
  ENSG00000119866_64 (sequence is synthesized)
taatgcataatatggcacgccgaatcctgtttttcaaatatatgcttttggtggctaccatgcaggatttgaatttgtcttttaatttagcttaggaaagaacatcactgggcgagcggt

SEQ ID NO: 234284 - DNA, 120 bp, Artificial Sequence
  ENSG00000119866_65 (sequence is synthesized)
aaatcctaaagaaggtgataaatgtcagtagtttcttattaaatattctaattttaggttcccaaaccttcaggaaatatatcttaatgcagacaaacaaacataaaacttctttagtac

SEQ ID NO: 234285 - DNA, 120 bp, Artificial Sequence
  ENSG00000119866_66 (sequence is synthesized)
ttacatcaggaaatttggggcagattttagaggggggaaattataggaggaaagaagttcacatcagaacagacaatcacagcaatgctctattccttagaaattagtgccacaaataag

SEQ ID NO: 234286 - DNA, 120 bp, Artificial Sequence
  ENSG00000119866_67 (sequence is synthesized)
ttacatctacaaacaggtggtaaaaattctttctggcccagttaatttgcacagaacttttctcagtttggtattttttactgcttggagatccagaagagaattagaaacaacatagca

SEQ ID NO: 234287 - DNA, 120 bp, Artificial Sequence
  ENSG00000119866_68 (sequence is synthesized)
aattaaaataggtttgtcaataatagagctcagacacctgtgtgctgtagattcacatacaggccgtgaacctaagtggggaaaatcctacctatccaccttctggctagattacctagc

SEQ ID NO: 234288 - DNA, 120 bp, Artificial Sequence
  ENSG00000119866_69 (sequence is synthesized)
ttagtgaaaagatagccaaataattggcatgtgaattatttcctgcttattcataataaataatgactgtctacagtagtgaactaccttatactgtatacagtgctgtctcgtgcatta

SEQ ID NO: 234289 - DNA, 120 bp, Artificial Sequence
  ENSG00000119866_70 (sequence is synthesized)
tttcacctgctctctgggacagatctcacgacttctactttatggaggtggagattgaggcttaccaaggttaagggcttgccagaggccacatcagtaagagagaaagcagagaagcca

SEQ ID NO: 234290 - DNA, 120 bp, Artificial Sequence
  ENSG00000119866_71 (sequence is synthesized)
ggttttctggtttcttgtccagagctaatttcaccaaactctgtttaactgatcaaagggagtatcttttcctgtgttagcacataagtcataaatgttcacagacacacacatgtggct

SEQ ID NO: 234291 - DNA, 120 bp, Artificial Sequence
  ENSG00000119866_72 (sequence is synthesized)
tacacatacagacccaggatggcctttggtaaaggcatgcagagttgcctcttcctaccaacagatgtgtgcactgagaaagggaggttgcagcctccttgccatcacctttcccctgtg

SEQ ID NO: 234292 - DNA, 120 bp, Artificial Sequence
  ENSG00000119866_73 (sequence is synthesized)
gcttttccatgacaaataaccctgattgcacgagtggcctgtttgtgacttcctatcaattagttgggacttccagacaagaagttatttcataaagaaaccctctccctgccccatgct

SEQ ID NO: 234293 - DNA, 120 bp, Artificial Sequence
  ENSG00000119866_74 (sequence is synthesized)
ctgcctatgtgttgctgaaacataagaccattagggtttctgtgatggcttcctccctaaatgtgctgaactccttgctgatgcctagaaagagtgacaccacttccaaagggaggccag

SEQ ID NO: 234294 - DNA, 120 bp, Artificial Sequence
  ENSG00000119866_75 (sequence is synthesized)
gatgtggtgggatggcatggggttgagatgtgcttctcccctttctgtcctctctggcactctaataattgtgcttttgtttctccaaccacagccgagcctcttgaagccattcttaca

SEQ ID NO: 234295 - DNA, 120 bp, Artificial Sequence
  ENSG00000119866_76 (sequence is synthesized)
tttgtgtaccttatggtgtaattgtaaatgagactataaattatagtatgctattatgactacttatttttcttttctctttatttatgtgattctgaataaaaacgactgacttctgaa

SEQ ID NO: 234296 - DNA, 120 bp, Artificial Sequence
  ENSG00000119866_77 (sequence is synthesized)
tctgtgcagaaccgtccaggagaacactttcttccaagacaaatgaattccagttctgaacactgggagtgcacctgcttgtcggatgtggtgatgggccacatggtggggagtgaggga

SEQ ID NO: 234297 - DNA, 120 bp, Artificial Sequence
  ENSG00000119866_78 (sequence is synthesized)
gactcagggcctgtggggcagtcgatgtgggaggactgtcacagagactctcagagggtgcattcagccctgaacagggcaaaggactgcaaggggcaggagcttgggctgacatgcaag

SEQ ID NO: 234298 - DNA, 120 bp, Artificial Sequence
  ENSG00000119866_79 (sequence is synthesized)
gtggctttacacaaggccctttttagagagtgtgattctctgaagcttttcttggcagcttcagtcttgaacctcactggaagggatcctccaaaacatgacccagatggaaagaagtat

SEQ ID NO: 234299 - DNA, 120 bp, Artificial Sequence
  ENSG00000119866_80 (sequence is synthesized)
ttctgagtttaaaataactcccctatttggtaatacgggactttatttgtgactttattatttttaggtgtgataatggttttgcagttgtatttaaaagaaaaaaaacgagttcctatg

SEQ ID NO: 234300 - DNA, 120 bp, Artificial Sequence
  ENSG00000119866_81 (sequence is synthesized)
tttaaaaaatacatacagaggtgtttactgatgaaatgatatgacgtctgggatcaacttaaataataaaatgggctagggaggcgatagggttacagaagacaagaatgactgtgagct

SEQ ID NO: 234301 - DNA, 120 bp, Artificial Sequence
  ENSG00000119866_82 (sequence is synthesized)
gtggtggttggagctggaagatgtggacttggggactgatttataacattctctctacttttgtagtatttgagatttttccagaaaataaaggtattgcctgactggtggagagcagta

SEQ ID NO: 234302 - DNA, 120 bp, Artificial Sequence
  ENSG00000119866_83 (sequence is synthesized)
ctgtttttgacagcagaggaccccagttgttgaggactaaagagagagaagatgagaaagaagatgctggaaacagaggttggagaaagagaggcaaggaagtagaaaggaggaaaaggg

SEQ ID NO: 234303 - DNA, 120 bp, Artificial Sequence
  ENSG00000119866_84 (sequence is synthesized)
gaagagaggaggcagggggagagagggttggaattcgagctattttcagctgaatgtgagtgcagatttcatcaggcttctgggctacagggaaactgactgtgtgcggaccttgcgtgt

SEQ ID NO: 234304 - DNA, 120 bp, Artificial Sequence
  ENSG00000119866_85 (sequence is synthesized)
aacttcctgtgaagcagccgtggtgactgcattttctgacactgtcagagtctggacaaccctgccagctcctagaagggcaacccaacaactgtcacagacgaagcatcaaaagcatga

SEQ ID NO: 234305 - DNA, 120 bp, Artificial Sequence
  ENSG00000119866_86 (sequence is synthesized)
gatagtgacctgcatttgcagaaaatctgagggctttctaattaacagaggagctctaaattagagtaaagctgttcgacaagacccctcatacgcgataaacttctgcactggaggggc

SEQ ID NO: 234306 - DNA, 120 bp, Artificial Sequence
  ENSG00000119866_87 (sequence is synthesized)
ttctttataattttattattattttgagaaggtgtcccctttccctcctccctctcccgctctcctcaaccaaaggactgtttcttactaagttttctcagtcataagggcaagtgtttc

SEQ ID NO: 234307 - DNA, 120 bp, Artificial Sequence
  ENSG00000119866_88 (sequence is synthesized)
tttgccccaaacaggaacacatagcaggtaaatgagaagcaaggagaaaagctgtttgcatgttttcttttcattttcagaggtgctgtagccaagcagtaaggagttgtgaagtgcttt

SEQ ID NO: 234308 - DNA, 120 bp, Artificial Sequence
  ENSG00000119866_89 (sequence is synthesized)
ctctattactctatgtgactgtccatgacagccctgtaatgttaaaataatcatttctgttgcttacgtccagaacacagaaaaataaatattttccacctcactgaatcagatgtaggc

SEQ ID NO: 234309 - DNA, 120 bp, Artificial Sequence
  ENSG00000119866_90 (sequence is synthesized)
aggataggtacacacatcagacaccttctctctggatctgtcgattttggatttcttttcttccccatccccaccttctcattttgaagtattgagctttactacacctagtccagcttc

SEQ ID NO: 234310 - DNA, 120 bp, Artificial Sequence
  ENSG00000119866_91 (sequence is synthesized)
cattgtccatttccagccttggtgacgtgtcagaggcaaagtggccatataggcatttgcagttcagccaatgacttgtttgactcagaacatctggccaggcctccttaggggttcagc

SEQ ID NO: 234311 - DNA, 120 bp, Artificial Sequence
  ENSG00000119866_92 (sequence is synthesized)
tcgttctcaaggcttccctgaagtagagtgggctggcagggtagttggaggtggtggaaagagttaactgagcttcagggctagccttggatccatattggctgtcagcccggatggggc

SEQ ID NO: 234312 - DNA, 120 bp, Artificial Sequence
  ENSG00000119866_93 (sequence is synthesized)
tgtaattaaacacagccccgtggtgggatgacaccatgaccttgactttaagatgccattttcgactggccaggccagagtagagagggcagttgctgaagcgcacagacatgcttactc

SEQ ID NO: 234313 - DNA, 120 bp, Artificial Sequence
  ENSG00000119866_94 (sequence is synthesized)
gaaaagtttaagggcatgttggaaatttcaaaaggttggtttgacaggaacggctgctccctgcagcctgcctcctcagctaaatgataaatgcttctctgtgctctctcttgtctctga

SEQ ID NO: 234314 - DNA, 120 bp, Artificial Sequence
  ENSG00000119866_95 (sequence is synthesized)
tgtggttttgacagatgtatcttgattttgtttgtggtttacacagccacatgtcacccttacaaatgtccagtccagactccactgtttctgctataacacaatgtaaaaattttcttg

SEQ ID NO: 234315 - DNA, 120 bp, Artificial Sequence
  ENSG00000119866_96 (sequence is synthesized)
gaaaaatacacacacgtattcaacagccctccctcctttggttaattttagcagggaggcagctaggtgtgtgggtttctcggcagctcaagggaaaaggaattaaaggctagcagtggg

SEQ ID NO: 234316 - DNA, 120 bp, Artificial Sequence
  ENSG00000119866_97 (sequence is synthesized)
acttaaattcccttctctaagtgataaacagtaacactatatagtgaccctcaaaacattttttgcttgagcatgttagacaaaagtcaatgcagattctgtgatgacagacatgccatg

SEQ ID NO: 234317 - DNA, 120 bp, Artificial Sequence
  ENSG00000119866_98 (sequence is synthesized)
cctgttggtggatcgctttcttccatctacctaccacccagctcccgaaaggcaagaggtttgttcagttttaggaaaggtagtgcatatcatgaattgattcactggaacttgtctctc

SEQ ID NO: 234318 - DNA, 120 bp, Artificial Sequence
  ENSG00000119866_99 (sequence is synthesized)
cgacctagtttgaccacaaagttgaaccataataggtcagtggtctagaggggattaaatgtcatattatttctcctctccccctctagaatttgatcattaaaaccaaacatggcattt

SEQ ID NO: 234319 - DNA, 120 bp, Artificial Sequence
  ENSG00000119866_100 (sequence is synthesized)
tctttctttttttagtgctttctgtgatagcactcagatactttccctttagtgaaatgggaaatctgctgctagggaagctgcatttgtggagtgtatttcttgaatccaccacattta

SEQ ID NO: 234320 - DNA, 120 bp, Artificial Sequence
  ENSG00000119866_101 (sequence is synthesized)
ccttatgtgacatgtaggtgaagattttatctcccctaccccccagcaggatgtgggaatgaccatttccatgtgttgtcttgtgactggaaggaaaatgaacagaagtgtaaggcatga

SEQ ID NO: 234321 - DNA, 120 bp, Artificial Sequence
  ENSG00000119866_102 (sequence is synthesized)
ggagtaacacttgcgtgatgtaacatcgtatttacatatcgagctgctcgtttaaaagacaaaacacagtgtctgtcaagcaagaattaaaaccacacttcttactgaggtcccaaatag

SEQ ID NO: 234322 - DNA, 120 bp, Artificial Sequence
  ENSG00000119866_103 (sequence is synthesized)
gttattcagtcttagattaaccagctcaaaaattctgtgcctctgtatttagaggaggaatctaaatgctggggggaaggccttacatatagttaagacttttactgctatagttgtgaa

SEQ ID NO: 234323 - DNA, 120 bp, Artificial Sequence
  ENSG00000119866_104 (sequence is synthesized)
tctatgtagggaaataagagatatttgcttgaactccctggttgtctaaaggttctgttattatttttttaaagaacaagtataatagcagagcctagagaagccaaaaccaaaagcaaa

SEQ ID NO: 234324 - DNA, 120 bp, Artificial Sequence
  ENSG00000119866_105 (sequence is synthesized)
tttaaaatatattttatagcgctaataatcaatcatttaactgagacgaaaagctctctaagatgtctaagatattcaatgggcgcacaacaagtgctgtgacccaggtgaggtaaacct

SEQ ID NO: 234325 - DNA, 120 bp, Artificial Sequence
  ENSG00000119866_106 (sequence is synthesized)
ttcgtgcatgaataattacaaagtcttgatttctttcattgtgtttaatcacctgttcccaccctggaactggctgaacataaatagtgtggtcacatctcaaagtgagatgtcagtaac

SEQ ID NO: 234326 - DNA, 120 bp, Artificial Sequence
  ENSG00000119866_107 (sequence is synthesized)
tagaatcacgacttctcataattcacagtaatgaattaagagtttcctatggtgaagttaacattctaccattgcacataaattccgacgctctggccctcaggtgcccctgaagcgaag

SEQ ID NO: 234327 - DNA, 120 bp, Artificial Sequence
  ENSG00000119866_108 (sequence is synthesized)
ttctggaagacggctgtgtgtgtacccccagcccatttctctaaagcacgtctgcacaattccaagtctgcttttctttttatgatgaggaaggaaacaataacagtaatcattcagtag

SEQ ID NO: 234328 - DNA, 120 bp, Artificial Sequence
  ENSG00000119866_109 (sequence is synthesized)
atatttgaattgtgtcacaaaaagaaaggagaagcaatgccttgtattaaggaaagagatatattgatgaatctctagaagaatgtgtttggcaaccacataaaaggtagtcatttaagc

SEQ ID NO: 234329 - DNA, 120 bp, Artificial Sequence
  ENSG00000119866_110 (sequence is synthesized)
gtgctgggtaggaaaggctttattaaagtgatgtaagttggatttgagttcactgtgagcctgtactattttataggcaggaagcaagaataaaacagtgacagatcttcttcctaagat

SEQ ID NO: 234330 - DNA, 120 bp, Artificial Sequence
  ENSG00000119866_111 (sequence is synthesized)
aaataaagcttagaattcgggactttcagataggagaataaggcagagttctttaaatcttgagtaaaatggtatgcattttcactgtactcaggcctctccaagctgagtttttttttt

SEQ ID NO: 234331 - DNA, 120 bp, Artificial Sequence
  ENSG00000119866_112 (sequence is synthesized)
caaagtgctgggattacaggcttgagcgaccgcacctggcccaaactgagtattttttagaggattctttttacctggtgaatagatgggtatgtgctcccccacttcatccacgtacac

SEQ ID NO: 234332 - DNA, 120 bp, Artificial Sequence
  ENSG00000119866_113 (sequence is synthesized)
cttcatccacgtacacatatgagctgtacacatagatgttaatcaggttgcttttttcattttatttaaatattcaaaatattgtgtgattgtgatccattgagatcattgaagtagtat

SEQ ID NO: 234333 - DNA, 120 bp, Artificial Sequence
  ENSG00000119866_114 (sequence is synthesized)
taatttagctgggaattagcagcttatgttgtgtgggcccagttcatcaatatgtgtgtcaaatatccaccctcagatatcagcagcctttgacttgcagtcagagctttcaataggggt

SEQ ID NO: 234334 - DNA, 120 bp, Artificial Sequence
  ENSG00000119866_115 (sequence is synthesized)
tttgttttgttttgttttctttttttttagtctcatattttatgatggggggaaatattcatggaagattactgaatgtgaaactgctgttcccttatagaaaagacccaaacattatcc

SEQ ID NO: 234335 - DNA, 120 bp, Artificial Sequence
  ENSG00000119866_116 (sequence is synthesized)
catcatgtcagatttgaggttttggcttattgcacataggaatctttaaattaggtttgggctgtcataaagttagctttttgagagactagagaaaaaatatgacaagtcctataaaat

SEQ ID NO: 234336 - DNA, 120 bp, Artificial Sequence
  ENSG00000119866_117 (sequence is synthesized)
gtagtaaagtctgctcctgttgatatataacattttttctctttaaaatcatgaacatagacatttatatcagggtatttaaaattatttgcctagacagtatagctggtatttagataa

SEQ ID NO: 234337 - DNA, 120 bp, Artificial Sequence
  ENSG00000119866_118 (sequence is synthesized)
tgatatatcagacagatactctaaagaagggagatatagtaattcaaaatggaaatacattagcatgctcttaaaagtaaatcaaatacaatatgcttttcagaatttagaaaatgaact

SEQ ID NO: 234338 - DNA, 120 bp, Artificial Sequence
  ENSG00000119866_119 (sequence is synthesized)
taccttttctttttgtatccattctgattctctcctagctcagactgaactggaggatgtatttgtgtaccttatggtgtaattgtaaatgagactataaattatagtatgctattatga

SEQ ID NO: 234339 - DNA, 120 bp, Artificial Sequence
  ENSG00000119866_120 (sequence is synthesized)
ttttcaatcttctgggaaagagaagaatgttcccctccagttctgggcatattgaaggagcacggagctgttgggaaaagttgcaatgctaacatagacctccactgagagaatttcaga

SEQ ID NO: 234340 - DNA, 120 bp, Artificial Sequence
  ENSG00000119866_121 (sequence is synthesized)
atcatttggtagttgagaagcgcctacttcatgcggaggccccgtgggaggagtggaagagttggcctcagcactggcgagtatcggatgggagctctgctcacttgataaacttctgca

SEQ ID NO: 234341 - DNA, 120 bp, Artificial Sequence
  ENSG00000119866_122 (sequence is synthesized)
cttcaaaggctggggagaatcagaattatacagggagggagagactgagtgtgagtgagtgtgcgtggcagtggtgtttcttaggacgatgggttctggggggtcataatctgcttcgag

SEQ ID NO: 234342 - DNA, 120 bp, Artificial Sequence
  ENSG00000119866_123 (sequence is synthesized)
gaggttttcatttctggctgaacaaggctgtggtaaggcaagtccggaaggcatgctggaaacttgagggaagttttgaatggaaactgcagtcaacagctccatatgatccgcatgtgg

SEQ ID NO: 234343 - DNA, 120 bp, Artificial Sequence
  ENSG00000119866_124 (sequence is synthesized)
cttccccagaggcaagttttcagctgcgtggtggcctctcccagtcactccacaggctgccctgacgctattaatatttgctgaagcaagacctgaggttcgttgcagatggattacaca

SEQ ID NO: 234344 - DNA, 120 bp, Artificial Sequence
  ENSG00000119866_125 (sequence is synthesized)
ccatcacaaagaagttgtcggtcacatccaggttgtcttctgagtttgaggtgggatggaggtggctgctgagaatccatgtgggtcaagagctccaaagcttcacttttacttcgcact

SEQ ID NO: 234345 - DNA, 120 bp, Artificial Sequence
  ENSG00000119866_126 (sequence is synthesized)
ctgtcccggggcatggacgtcctcaatggaggtcatgcaagcccttccccctcaccccttctcttggccctcttcattgtctctacatacccttgggtcaagagtgtagtggttctccct

SEQ ID NO: 234346 - DNA, 120 bp, Artificial Sequence
  ENSG00000119866_127 (sequence is synthesized)
tgtcaccctggaagagaagctcttagttttatttgctgggtctcctagactgaaatgataaagctgaaatgataaaaggcgtatcatggctttagaacccttcttatttccctcgctcgc

SEQ ID NO: 234347 - DNA, 120 bp, Artificial Sequence
  ENSG00000119866_128 (sequence is synthesized)
accccctagttttccttctcttcccttgaaaatcagtgaaaatcaggccacatctctgatgatggccttttgtttctttttctttttctgtttctgccttcgttaggtaagcacaaattt

SEQ ID NO: 234348 - DNA, 120 bp, Artificial Sequence
  ENSG00000119866_129 (sequence is synthesized)
gatgtcccaagaggcaggccggtgacccttcaggccaagtgcctggatgtggcaaagctacaataaatatcgaatggtgagagcaatggaaatttagcaaagccataaccggggagacct

SEQ ID NO: 234349 - DNA, 120 bp, Artificial Sequence
  ENSG00000119866_130 (sequence is synthesized)
cagaggggcagtggactggttaagaggctgttggatgagccgggtagtatttctacttcaacctgattgaaatgtcgactaaaaatcaatgctgttgactagtgataatttacaacgttc

SEQ ID NO: 234350 - DNA, 120 bp, Artificial Sequence
  ENSG00000119866_131 (sequence is synthesized)
ctggtgctaagtagttccccgcttaagaatgcgttggctgggcagagattagcgcagggagttgtgtgtgtcacaatgaatcagacgcattataggtcagccctttatttgtttcatcat

SEQ ID NO: 234351 - DNA, 120 bp, Artificial Sequence
  ENSG00000119866_132 (sequence is synthesized)
gacttttacacagttgtcatgtaatttatggctgctttcacgttgtcaaacattttcattgcatcttcttctttaacaccctcctgacatagacacactgcacttgaaggcttggtattg

SEQ ID NO: 234352 - DNA, 120 bp, Artificial Sequence
  ENSG00000119866_133 (sequence is synthesized)
tttcataatccgagaggaggcctataaaccatcaaattacactatctttgggctaatctaaatgcgctgcagattaaaatcagagctcatttgtccctgatgcaaattattaagttctaa

SEQ ID NO: 234353 - DNA, 120 bp, Artificial Sequence
  ENSG00000119866_134 (sequence is synthesized)
ttataaatacccatttaattacccgacacatttttattttgcggacccttttgagcactgctgtctgcgatgcagagggggtggggggagatgcataggagacaatctgcagtaattaat

SEQ ID NO: 234354 - DNA, 120 bp, Artificial Sequence
  ENSG00000119866_135 (sequence is synthesized)
tcccaaatggtaaaggataaacatatgctgctttgtttgtcttatttatttattgattagatgtatagagactttggcgtgggcacaatctgaagttgaaatccttttaaagatgaaaac

SEQ ID NO: 234355 - DNA, 120 bp, Artificial Sequence
  ENSG00000119866_136 (sequence is synthesized)
tatttaaaaatcttttggggaagaaagagcaaaatatagccaaccaatagctttctgctagaacacatcatcccaaaatatgggattctgaatttgatcaaatcaccagtttctgaattt

SEQ ID NO: 234356 - DNA, 120 bp, Artificial Sequence
  ENSG00000119866_137 (sequence is synthesized)
gatcaaatctagattttgcagaagttcagggtgagagaaaccatgcctgttttatatctagaaagtgaaatcattgttatagaaaaaacctactgtggttagaaaaaaaccacattcttt

SEQ ID NO: 234357 - DNA, 120 bp, Artificial Sequence
  ENSG00000119866_138 (sequence is synthesized)
tttcccagccctgctgccatcctctaccagaaaataacagtatctgcctgtagtatgaagaccttccaattgagagcattatgataaactatttttgattaccaaacacgaatgaaggaa

SEQ ID NO: 234358 - DNA, 120 bp, Artificial Sequence
  ENSG00000119866_139 (sequence is synthesized)
gaagataacataaaaattagtaaaggccttccaagtagacatttacccttctgtgaaagccatggagaaattaccaagactggtttggggggagggcatttaaggtcttttgggcattac

SEQ ID NO: 234359 - DNA, 120 bp, Artificial Sequence
  ENSG00000119866_140 (sequence is synthesized)
agattttccagaaccaaactttgacttttagtgttaacagagagacactgatctgaaaaccaggacacctgggttctgacccttattgtatcatgctgtgagattttgggctcccttcac

SEQ ID NO: 234360 - DNA, 120 bp, Artificial Sequence
  ENSG00000119866_141 (sequence is synthesized)
ctgttagcatttgtttccttgtcttgtaaagtaggtaaaatagatagtttggactgggtgggtctctaagtccccatgatgttctagcatagtatgaacaccactgaccagttttctccc

SEQ ID NO: 234361 - DNA, 120 bp, Artificial Sequence
  ENSG00000119866_142 (sequence is synthesized)
tgctattttttggaatctagttgctgaatggggctcacctgcaaagacagcagaatattattttcttgatttgcctcaaagatggaagctatggtggagattaaggcttggattcgtgat

SEQ ID NO: 234362 - DNA, 120 bp, Artificial Sequence
  ENSG00000119866_143 (sequence is synthesized)
tccccaacagaaagcttaaaggcatctttcaaattgctggaagcaaaattgaagtgcagtataatggaatggtgataattcacagaagtttccagccttataagatttctccatctttta

SEQ ID NO: 234363 - DNA, 120 bp, Artificial Sequence
  ENSG00000119866_144 (sequence is synthesized)
attgttgcaagctgttttttttgaaaaactccaaagaatgtaatgtgtattttctccaagtttgcttttttgggcaaatgtaactacatcaaaatagaagtacgtttttgaaaaagaaat

SEQ ID NO: 234364 - DNA, 120 bp, Artificial Sequence
  ENSG00000119866_145 (sequence is synthesized)
agttgaattcaaacaaccaggtattttaaattcaattaactgactgaattcagtgatattttcctccttcctcctcccaaaagctggtttctctgtatggacatagcctacatatgctga

SEQ ID NO: 234365 - DNA, 120 bp, Artificial Sequence
  ENSG00000119866_146 (sequence is synthesized)
gtccctggagttaggaatttttgcttgttaaaggcatccgatgcaacatgtttagaagaactctccctctgttagtgttgaagacagcataaattgagggaaaatgttctttttttattc

SEQ ID NO: 234366 - DNA, 120 bp, Artificial Sequence
  ENSG00000119866_147 (sequence is synthesized)
atcatgtaggtaaaagcatatggcctgttctgggacatgcgatctttgcaatccattttttaaacttggtgtttaccattggcttttagcacggatgtttctgttttccacactgtccag

SEQ ID NO: 234367 - DNA, 120 bp, Artificial Sequence
  ENSG00000119866_148 (sequence is synthesized)
caaataccatttatatgtggcattgaatgagatatgaaatgttttcagaagcatgctgaaaaagggcattcaaagttatcctttggataatgatgatctaaaactttcttttattatccc

SEQ ID NO: 234368 - DNA, 120 bp, Artificial Sequence
  ENSG00000119866_149 (sequence is synthesized)
atgtgctcagagtaaggggcaaatgaatcagttgtgaaatatgtgttccttgtaggacacaggcactcttgagatctatagcttcaataaaaaggtaatttatttaaattactgcctctt

SEQ ID NO: 234369 - DNA, 120 bp, Artificial Sequence
  ENSG00000119866_150 (sequence is synthesized)
taatttataatgttttggggatttttaataggcatgctctgtaagggcactggtaatcagctgtttctgattttgcatgctcttctatctctggtaacaaaataaaatcttaaaaaacaa

SEQ ID NO: 234370 - DNA, 120 bp, Artificial Sequence
  ENSG00000119866_151 (sequence is synthesized)
aagaaaaatacacgtttcctgaaacaaaacacttggaaaaataagctgctaagaactggcgaattagaagtttgcagacagggaactgaagtgtcatctcttggttcaccctggagactg

SEQ ID NO: 234371 - DNA, 120 bp, Artificial Sequence
  ENSG00000119866_152 (sequence is synthesized)
atgtgagtggatctgatgcaatgctgctggaagatttacctgcacaggttgctcctctaaggcaacgcgcagtgcacgattgacgtatgcaccagagctaggctgggcctcagctcgctc

SEQ ID NO: 234372 - DNA, 120 bp, Artificial Sequence
  ENSG00000119866_153 (sequence is synthesized)
catcttttgccctttttgatctctttagatagataaaataccaagttctcagagtgctaaacaacaaattatatatacctaaaggtgagatgatcaggtttaaacttcctgtaaaagagg

SEQ ID NO: 234373 - DNA, 120 bp, Artificial Sequence
  ENSG00000119866_154 (sequence is synthesized)
cgagaaggcgccttgcacacccttttccagatagggctggcagcatgttattcagaactgaatcagtctctgccagagaattcccagtgggaacctggagcaggtatgttgatgaagggg

SEQ ID NO: 234374 - DNA, 120 bp, Artificial Sequence
  ENSG00000119866_155 (sequence is synthesized)
atacctggggacctttggtcactcacaatgagtttttgtttgtattctcactgttgttagcattgccaatgaacaattgcacctacaatttgattttagttttagatagaggcgaatcca

SEQ ID NO: 234375 - DNA, 120 bp, Artificial Sequence
  ENSG00000119866_156 (sequence is synthesized)
ctgattaaaaactcccattaaaataaagaatggaattattgtgaaacctgcaagggtgccttcaaaaagaaaaccagtgctgttgtatacctacctcgcctttctatttgctttttgaac

SEQ ID NO: 234376 - DNA, 120 bp, Artificial Sequence
  ENSG00000119866_157 (sequence is synthesized)
tttctaaaaaacacaaggaagctttttgctaagcatcagggcatttaaatttatattcatcagttgttcattttcttaatatgtaatgatgcataaaaaggctgcaaggaaatcacatct

SEQ ID NO: 234377 - DNA, 120 bp, Artificial Sequence
  ENSG00000119866_158 (sequence is synthesized)
gttaatttttagggaaataaagtgtagcttggattcttatgttggagcacaaagcactatgtgccaagtctgttcctgtacattttaaatatagagttttaatatttggccaatccctgc

SEQ ID NO: 234378 - DNA, 120 bp, Artificial Sequence
  ENSG00000119866_159 (sequence is synthesized)
acctcctcaaacaaaaacaaacctcaaaaaactaagagaaccaaacctgaagtattctccttcaccaactcaaggtataccatgattttatgatttatttacatttaggggggaacccct

SEQ ID NO: 234379 - DNA, 120 bp, Artificial Sequence
  ENSG00000119866_160 (sequence is synthesized)
cagtgaaccatttactccccattttaactcccctgccccgatcctttcagtttccagttaaaacaatgcattaaccaatgttaaatcttaaatctcgtgagtttctctccatcacaccct

SEQ ID NO: 234380 - DNA, 120 bp, Artificial Sequence
  ENSG00000119866_161 (sequence is synthesized)
aatattttaaaaaaattattcctttacatttaaaactgaacattggctactgaagaatgatttaaaggctgaaaaaaattttaataataaatcgtaaccttctcatgttatgtttttgtt

SEQ ID NO: 234381 - DNA, 120 bp, Artificial Sequence
  ENSG00000119866_162 (sequence is synthesized)
atgttaaggagaaaaaaatcaataaggaaaaatttaattctgataaagatactcttggatctttgaaaacaactgctgtccttttaactaaaacatttgagcagcttcaaagactatgta

SEQ ID NO: 234382 - DNA, 120 bp, Artificial Sequence
  ENSG00000119866_163 (sequence is synthesized)
tttcttctgatcttggagctgtgtgactggtagcaagaaagaaaaaaaatcttattctacatacaagtggattgcttaacaagtcagcacagacacgtacttgtttgtacaatagagata

SEQ ID NO: 234383 - DNA, 120 bp, Artificial Sequence
  ENSG00000119866_164 (sequence is synthesized)
aaaattcctgtataaaaataattcagctgctgacagcaggcattgttgttggacctgtcttttgtgcttgtcccagctctgggtccccctcccctcctatctgcttggggcagcctgctg

SEQ ID NO: 234384 - DNA, 120 bp, Artificial Sequence
  ENSG00000119866_165 (sequence is synthesized)
cctgcacactgctgaccagaagttaattgctatatattaagtatataggtattgtatttaaagaggaatatctcaaggcttcctatatgcattccactttactttctgatgtgattgcgg

SEQ ID NO: 234385 - DNA, 120 bp, Artificial Sequence
  ENSG00000119866_166 (sequence is synthesized)
tgttgccagcaggggggtggcaggcaaacgctctaatagggaaaatcacttgaaggcagttaggggaaatttggccttcaagtcccatttgctctgtagtgtagcattggtttctaaact

SEQ ID NO: 234386 - DNA, 120 bp, Artificial Sequence
  ENSG00000119866_167 (sequence is synthesized)
tttgtttttaatctaattctgatttgccctgtcacatcccatatcaaccctcattgaactctactcatgtagagtaacattagtgtcaaacggaattggtcaggactgtggacctgtggc

SEQ ID NO: 234387 - DNA, 120 bp, Artificial Sequence
  ENSG00000119866_168 (sequence is synthesized)
tcatacagatggttgtggatgtgggttccatgcagctctgcatcctatcctttctaataaatgttaaaatgtggcacatttctgagcagggcccaaggataagagagttaagaaatcagg

SEQ ID NO: 234388 - DNA, 120 bp, Artificial Sequence
  ENSG00000119866_169 (sequence is synthesized)
gggtagtacctgagatttttctcccttctctttccgatttccttgataacatccacatttccggtaagatcaactctaggagaaagtctgaggctgggggagagagggggagaagggtgc

SEQ ID NO: 234389 - DNA, 120 bp, Artificial Sequence
  ENSG00000119866_170 (sequence is synthesized)
ggagagaggttcttggaatattcttcgatagcagttcaaatgaaatccccacagcagagagcttttgggtctagcagtggagcggtaagctgggacacgtggcctttcgaagctgttatt

SEQ ID NO: 234390 - DNA, 120 bp, Artificial Sequence
  ENSG00000119866_171 (sequence is synthesized)
ctcagtctgacttgcacaccagctgagataggacttaacatatactttcttgctttcacctgggttggagaggttggggttgggaggaagaggaggagttcattgggaattctgtcacta

SEQ ID NO: 234391 - DNA, 120 bp, Artificial Sequence
  ENSG00000119866_172 (sequence is synthesized)
gaattttttaaatgtcaggaggttagcaaggtgtgagttagcattcaagcaaaggattcttctccagactagtaattggaaagcctgcaaatccaggttcccacgatactctctaataac

SEQ ID NO: 234392 - DNA, 120 bp, Artificial Sequence
  ENSG00000119866_173 (sequence is synthesized)
ggtgggatggtggtggtgggtggacaccacaactttctgaatgtcagctgatgtctgcatgacccgttcaccatggattaaatgcggctggtgccgaatggaggaaatcagaaaggcaaa

SEQ ID NO: 234393 - DNA, 120 bp, Artificial Sequence
  ENSG00000119866_174 (sequence is synthesized)
tctcaagcaacaggatttgcactcctcagaagtaaaccagaccttgctcctctccctcctgtgcttctcctttcttgctggtttccctttggaagcagaaacttctaaaattaatgccac

SEQ ID NO: 234394 - DNA, 120 bp, Artificial Sequence
  ENSG00000119866_175 (sequence is synthesized)
tccaagccaatgaaaaagctgtttttataccacagtggatgtttacacaggagagacaacttgagggggaaaaggctttttggaagggtggagggactcgtgttaatctgttctgttgga

SEQ ID NO: 234395 - DNA, 120 bp, Artificial Sequence
  ENSG00000119866_176 (sequence is synthesized)
ggactatgcagtattgcctatgagcgactctgggctgtttttgataaattaccatgtttagagataggtttggctcttaagggcttagttttatgaacaaagtccgtgacgatgtttgca

SEQ ID NO: 234396 - DNA, 120 bp, Artificial Sequence
  ENSG00000119866_177 (sequence is synthesized)
gcctctgtttgtatcttagcccctttggcttgactagaagctctatgtttagtttaagctcagtctggaagatattacaattttgcattaaaaaaatgaggaaatcataggaagaaaaac

SEQ ID NO: 234397 - DNA, 120 bp, Artificial Sequence
  ENSG00000119866_178 (sequence is synthesized)
cctttgctttttggatgaatcttactgataatttgctaaagctcatttgaattttaagcacttctttaatcttcaaaggctaaattgctttatgaatatgcatggtgtgggcagacttca

SEQ ID NO: 234398 - DNA, 120 bp, Artificial Sequence
  ENSG00000119866_179 (sequence is synthesized)
gttcattacctagttgtaaattctaatgaccattaggtccttccagtaattgcgaattgttttgcatttttgattggcctattaacatgtacattcggtgcacatcaggctggcctgtca

SEQ ID NO: 234399 - DNA, 120 bp, Artificial Sequence
  ENSG00000119866_180 (sequence is synthesized)
gcctgctgaaggagaaaaaaaaggtgaaaattgtttatagcaccaagattcttagattttcaatcttgcaaaattgatgatgtaaaaaaattaaagcagtgttttttcttctcaagatta

SEQ ID NO: 234400 - DNA, 120 bp, Artificial Sequence
  ENSG00000119866_181 (sequence is synthesized)
aaagttcaccaagagatttgacatatttaatttacatgatgactttgcactccttcattaatgtaatttgcatatgaagctgttgttaatcacttttgatcatgttttgtgtattagctg

SEQ ID NO: 234401 - DNA, 120 bp, Artificial Sequence
  ENSG00000119866_182 (sequence is synthesized)
cctcagtggctctcctcctcagatgccccagtagaaaggagcaaaatgatgcatcttcttgccaagtttcctttagtgaattgaggaattagaagtctaaccttgagtaattacatatgt

SEQ ID NO: 234402 - DNA, 120 bp, Artificial Sequence
  ENSG00000119866_183 (sequence is synthesized)
tttatccgttttcttttaacgttaagtacagtttgtgaacgtgttggctggaaatcgttctcatttggggagaagactgtaaaatttaagtatatgattgaggcacttccagatacatag

SEQ ID NO: 234403 - DNA, 120 bp, Artificial Sequence
  ENSG00000119866_184 (sequence is synthesized)
agaaatatgtattgcctgtttctgttccccacgaacattgcagggcagttttattgttagcagtttgatggcaggaagccttggctattatagtgtattaagacatcaggttcctccttt

SEQ ID NO: 234404 - DNA, 120 bp, Artificial Sequence
  ENSG00000119866_185 (sequence is synthesized)
ggaggagggaaggctacagaactacaaacctttctaacaatgctttaggtttcttctttagatagatggctggcacctaaaggacttgggcctgggtttggctgactcttttatctttta

SEQ ID NO: 234405 - DNA, 120 bp, Artificial Sequence
  ENSG00000119866_186 (sequence is synthesized)
gatcaagtaagttttctcattcagctgctgctctgagctacaatgtgtcctcccctcatcaccaaagtatatcctggtctccaggctccctgggctcccagtgtctccctcaaggtacac

SEQ ID NO: 234406 - DNA, 120 bp, Artificial Sequence
  ENSG00000119866_187 (sequence is synthesized)
gagtgccctggtggtgaaaacaaggtgctaactaacggtttccgatttttgagagcctgtgattttggtgtttgcctttgctgttgaataacctgtgctgtattattgatgttcatcttt

SEQ ID NO: 234407 - DNA, 120 bp, Artificial Sequence
  ENSG00000119866_188 (sequence is synthesized)
ggtttatgagtttatcactggttaacaagcagaatcagaacagtgtaactgatattctgattaaaacgaatgtttaatgaaagaaaataaattgtgatggaaaatgaacagtgtgtaaga

SEQ ID NO: 234408 - DNA, 120 bp, Artificial Sequence
  ENSG00000119866_189 (sequence is synthesized)
aacataactataattttaacctccgagggacctagcactgccctaccgtgacttccatccataccatgctaaaagcatgcttcagtttaaagttgttaatattcagctgggaaacagtat

SEQ ID NO: 234409 - DNA, 120 bp, Artificial Sequence
  ENSG00000119866_190 (sequence is synthesized)
ccagaacacaaataaattattaagtgcatgaactttttaggcagtaagatgaactgatggggtccatctgtgagatccaggggctttttatttgtgtgtgtcgagcgattctgccctctc

SEQ ID NO: 234410 - DNA, 120 bp, Artificial Sequence
  ENSG00000119866_191 (sequence is synthesized)
cgacttcacagcctttggtctccggccaactgcatgcataattgattccacacgcactatcattttcttgatgtaattgctttactaagatatgatgaaatctaatggataatttgctat

SEQ ID NO: 234411 - DNA, 120 bp, Artificial Sequence
  ENSG00000119866_192 (sequence is synthesized)
ttgaaaatggtcaaaaaaaatcttcatactttatgtggggctgagtgggcagtggagaaaggggtattcagctgacccggtatttaagaaaacaaaacaagcaacactaacttatgcatg

SEQ ID NO: 234412 - DNA, 120 bp, Artificial Sequence
  ENSG00000119866_193 (sequence is synthesized)
ctgcttcagtcgcgttggctgtggataggaaggtctttgtgacatatggaagccagtgtataaatctctctccttctatcttgcatcacccccttcattccttctctctttctctcctct

SEQ ID NO: 234413 - DNA, 120 bp, Artificial Sequence
  ENSG00000119866_194 (sequence is synthesized)
ctctctcccccaaactttacaagaaagggatcctaacaaggtaaaaagtaaacaatttagtcatcacaagccttattattcagtctatccaggagttttgccatgtcggtttatttaact

SEQ ID NO: 234414 - DNA, 120 bp, Artificial Sequence
  ENSG00000119866_195 (sequence is synthesized)
tccaggaatgtaaacactgacacagccctagaagcagcaagaaagattacagtattagagttaaaaacgtgagcatggaggagctgtgctttatactctgctataataacactttacatt

SEQ ID NO: 234415 - DNA, 120 bp, Artificial Sequence
  ENSG00000119866_196 (sequence is synthesized)
gaaacataatggtaagtcaaaagtgactggaaacttctgcttatatggagtacaaatttcattctaatagattggcataatctagtgtacccagggtagattgttatataatggagaaac

SEQ ID NO: 234416 - DNA, 120 bp, Artificial Sequence
  ENSG00000119866_197 (sequence is synthesized)
tgtataaatgtcaagtacacaaataattctacaggaagtaaataaaaagtattagaatttcttaagtcaccattaaattttggtggtgggacaatctcattagctccttcaaaatcatgt

SEQ ID NO: 234417 - DNA, 120 bp, Artificial Sequence
  ENSG00000119866_198 (sequence is synthesized)
cccaaacaggaacacatagcaggtaacccaagggggagctcagagaagagtccaggctgccagtgcaaaggtccagccctgtcgccaaggagaccctcagggaaatgcacaggcctccag

SEQ ID NO: 234418 - DNA, 120 bp, Artificial Sequence
  ENSG00000119866_199 (sequence is synthesized)
ctattcccacggcccctgtagctgagcgccagcttcttcctgggccaagctgaggctgtttcctgccgtgtccattctcctagcaacgcttctctttggccagtttgccatagtacctga

SEQ ID NO: 234419 - DNA, 120 bp, Artificial Sequence
  ENSG00000119878_0 (sequence is synthesized)
gtagtgttgttgttttcagcctgctgctgctgctgctgttgcggctaggggaaccgtcgtggggaaggatggtgtgcgaaaaatgtgaaaagaaacttggtactgttatcactccagata

SEQ ID NO: 234420 - DNA, 120 bp, Artificial Sequence
  ENSG00000119878_1 (sequence is synthesized)
catggaaagatggtgctaggaataccacagaaagtggtggaagaaagctgaatgaaaataaagctttgacttcaaaaaaagcaagatttgatccatatggaaagaataagttctccactt

SEQ ID NO: 234421 - DNA, 120 bp, Artificial Sequence
  ENSG00000119878_2 (sequence is synthesized)
gtagaatttgtaaaagttctgtgcaccaaccaggttctcattactgccagggctgtgcctacaaaaaaggcatctgtgcgatgtgtggaaaaaaggttttggataccaaaaactacaagc

SEQ ID NO: 234422 - DNA, 120 bp, Artificial Sequence
  ENSG00000119878_3 (sequence is synthesized)
aaacatctgtctagatgtattgatggaatttctggctttctaaatgattttactttctgccttgaattttcaaggcatagatgtcaacttacagaataacatgttttaagataattaagt

SEQ ID NO: 234423 - DNA, 120 bp, Artificial Sequence
  ENSG00000119878_4 (sequence is synthesized)
ttaaaccagagaatttgattgttactcattttgctctcatgttctaaacagcaacagtgtaactagtcttttgttgtaaatggttattttccttataagaattttaagaactaagtggca

SEQ ID NO: 234424 - DNA, 120 bp, Artificial Sequence
  ENSG00000119878_5 (sequence is synthesized)
aattccatgaaaatatttctcagttctgtatgcacttttatttaacattattcatataattctccccccaccactttatttatagatactgcaaaagtgagaaggagataatagatactt

SEQ ID NO: 234425 - DNA, 120 bp, Artificial Sequence
  ENSG00000119878_6 (sequence is synthesized)
tgctctgaatttggcatccagagttaacatttctcccctcactcccttgctggtgtcatagttattagaatcagcagcctcttaactaattgcggtttcataggatatataaatgtttca

SEQ ID NO: 234426 - DNA, 120 bp, Artificial Sequence
  ENSG00000119878_7 (sequence is synthesized)
agccattattgctgaatggttctttagttattaacctagacccaaatcaaagaccagttggatttatgatattttttatttgttcttgcagccaaagtgccagtttctttaatatgtgac

SEQ ID NO: 234427 - DNA, 120 bp, Artificial Sequence
  ENSG00000119878_8 (sequence is synthesized)
caagaacacaaggagcatccatatggccaaataaatacactgaattttagaaaaacatattactttgaattcaaattgtcatgaaaaccagaacagtgtttgtccatgttgcatgtaatg

SEQ ID NO: 234428 - DNA, 120 bp, Artificial Sequence
  ENSG00000119878_9 (sequence is synthesized)
aaaataaatccctgctctgagaaaagctctttgaagcaaaaaccaaacttttttttttttttttttacctcctgtcttgccccctaaaagaaataaatagagcaaacatcttgactctcc

SEQ ID NO: 234429 - DNA, 120 bp, Artificial Sequence
  ENSG00000119878_10 (sequence is synthesized)
tgtttgttttttttttttttttttggatacaagagctcactctgttgcccagggtggagtgcagaggtatcatcaggctctctgcagcctccatctgctgggctcaagcaattcttcccc

SEQ ID NO: 234430 - DNA, 120 bp, Artificial Sequence
  ENSG00000119878_11 (sequence is synthesized)
caattcttccccctcagcctcctaagtagctggggactacaggcgtgtgccactgtgctcagctagtttttatttttagtagagatgaggactcactatgttgcccaagctgttctcgaa

SEQ ID NO: 234431 - DNA, 120 bp, Artificial Sequence
  ENSG00000119878_12 (sequence is synthesized)
ttgcccaagctgttctcgaacttctgatctcaagcaatcctctggcctcagccttccgaagtgctgggatacaggtgtgagccacagaacttggcctctctctttttttttttttttttt

SEQ ID NO: 234432 - DNA, 120 bp, Artificial Sequence
  ENSG00000119878_13 (sequence is synthesized)
gtttcaaatgaatacttttcttatgttgccttcagaggttcaggacttctgcttttaaaacctgcagcctaccgtgggaaaccaaaaaagcattccctatttccaactgcagtatgtata

SEQ ID NO: 234433 - DNA, 120 bp, Artificial Sequence
  ENSG00000119878_14 (sequence is synthesized)
aatacatatcactacaaaatgtatagaaagtgtgatgagatacatgaatggcatttttattggtcataacattttgatgaaaagcatttaaagttttaactttataaggcttttcaaaat

SEQ ID NO: 234434 - DNA, 120 bp, Artificial Sequence
  ENSG00000119878_15 (sequence is synthesized)
gtgtttttctgagatacattgttatttattcatatccagaaaaattacaaggataatacagaatataataaataatttatctgagagcaggaagtatcctctcatgcttaatcagtttgg

SEQ ID NO: 234435 - DNA, 120 bp, Artificial Sequence
  ENSG00000119878_16 (sequence is synthesized)
ggtttttaattataacacaggaaactcataacaggacctggtcagagagcatcccagatccattaaagattggattcattgacttggagaaaagtacatttctcagggatcagctagaat

SEQ ID NO: 234436 - DNA, 120 bp, Artificial Sequence
  ENSG00000119878_17 (sequence is synthesized)
ctggacttgcctaactcacatttcattttttttgttgttgttgttgtttttataatttcaacttttattttagatgtaggggtacatgtgcaggtgagttatatgggtatattttgtgat

SEQ ID NO: 234437 - DNA, 120 bp, Artificial Sequence
  ENSG00000119878_18 (sequence is synthesized)
gctgaggtttggggtacaaatgatcctgtcacccaggtagtgagcatagagtccaacaggtggtttttcaccccttccctcccctcttccctccagtagtcccctatgtctgttctcatt

SEQ ID NO: 234438 - DNA, 120 bp, Artificial Sequence
  ENSG00000119878_19 (sequence is synthesized)
catttttatgtccatgtgtacccattgcttagttcccactgataagtgagaacatgcggtctttggttttctgttcctgtgtatattcactataatgacctccagctgcatccatgttgc

SEQ ID NO: 234439 - DNA, 87 bp, Artificial Sequence
  ENSG00000119878_20 (sequence is synthesized)
catagtattctgtggtgtatatgtaccaattttctttatccagtccactattaatgagcatctaggttgattctgtatgtgagtgta

SEQ ID NO: 234440 - DNA, 120 bp, Artificial Sequence
  ENSG00000119878_21 (sequence is synthesized)
gtgaatagtgctgtgatgaatatgtgagtgtatgtgtctttttggtagaacaatttattttcatttggatttatatccagtcatgggattgctggttcaaatggtagttctgttttaact

SEQ ID NO: 234441 - DNA, 120 bp, Artificial Sequence
  ENSG00000119878_22 (sequence is synthesized)
tctttgagaaatctccaaactgctttcacagtggctgaactaatttgcatttccatcagtgtaggcgcattctacactgcactggcttctacagtgttgaagcattccgtttttcccaca

SEQ ID NO: 234442 - DNA, 120 bp, Artificial Sequence
  ENSG00000119878_23 (sequence is synthesized)
taatagccattctgactggtgtgagattgtaactcattgtggttttgatttgcatttatctgattagtaatgttgagcattttttcatgtttgttaaccgcttgtatgttgtcttttgag

SEQ ID NO: 234443 - DNA, 120 bp, Artificial Sequence
  ENSG00000119878_24 (sequence is synthesized)
tcatgtttgttaaccgcttgtatgttgtcttttgagaagtgtctgttcaagtcttttggcatttttttaatgggtttttgtttgtgtgtgtgtatttttgtttttgtttttgttttgaga

SEQ ID NO: 234444 - DNA, 83 bp, Artificial Sequence
  ENSG00000119878_25 (sequence is synthesized)
cgagttacttggttttcgttttctgaattgttttagttccttatagattttggacattagacctttttcagatgcacagtttg

SEQ ID NO: 234445 - DNA, 120 bp, Artificial Sequence
  ENSG00000119878_26 (sequence is synthesized)
tagattttggacattagacctttttcagatgcacagtttgtgaatattctctcccattctgtaggttgtctgtttactgtattgatagttccttttgcggtgcagaagctctttagtttg

SEQ ID NO: 234446 - DNA, 120 bp, Artificial Sequence
  ENSG00000119878_27 (sequence is synthesized)
ttgttgcaattgcttttgaggacttagccgtaagttctttcccatagctgatgtccagatgttatttcgtaggttttcttctaggactcttatagcttgaagtcttacatttaaatcttt

SEQ ID NO: 234447 - DNA, 120 bp, Artificial Sequence
  ENSG00000119878_28 (sequence is synthesized)
gttatttcgtaggttttcttctaggactcttatagcttgaagtcttacatttaaatctttttttttttttttccccaaagacagagtctccttctgttgcccaggctggagtacagtggt

SEQ ID NO: 234448 - DNA, 120 bp, Artificial Sequence
  ENSG00000119878_29 (sequence is synthesized)
taattttatatatatggtgaaaggggtccagtttgagtcttctgcatatggctagacagctgttccagcaccatttattgaattagggaatcctttctctgttgcttatttttgttaact

SEQ ID NO: 234449 - DNA, 120 bp, Artificial Sequence
  ENSG00000119878_30 (sequence is synthesized)
ttgtcaaaggtcagatggctgtaggtgtgtagctttatttctgtctgttccattccattggtctatgggtctgtttttatatctgtaccatgctgttttggttactgtagcttccttata

SEQ ID NO: 234450 - DNA, 120 bp, Artificial Sequence
  ENSG00000119878_31 (sequence is synthesized)
tatagtatagtttaactcaggtaatgtgatacctcagctttgttttatttgcttaggattgattttttggttccatatgaattttagaatggattttttctttttttttttttttgagac

SEQ ID NO: 234451 - DNA, 89 bp, Artificial Sequence
  ENSG00000119878_32 (sequence is synthesized)
ggagcccgccaaccatgcccagctaatttacttagccaggctggtcttgaactcctgacgttgtgatccacccgcctcagcctcccaaa

SEQ ID NO: 234452 - DNA, 90 bp, Artificial Sequence
  ENSG00000119878_33 (sequence is synthesized)
tgggattacaggcgtgagccactggacccggcaggatttttctaattctgtgaaaaatgatgtttggattgctttgggcagtatggccat

SEQ ID NO: 234453 - DNA, 81 bp, Artificial Sequence
  ENSG00000119878_34 (sequence is synthesized)
gtgttttgtagttcttgtccagctcacattttatcttcatactttgagtagcctccttccatgaatggatcatccagtggc

SEQ ID NO: 234454 - DNA, 120 bp, Artificial Sequence
  ENSG00000119878_35 (sequence is synthesized)
ctttgagtagcctccttccatgaatggatcatccagtggccgcacttaggttctcctatgaagatttttgttgtattgtacctcagaaccatctccatattctctaaataataataatga

SEQ ID NO: 234455 - DNA, 120 bp, Artificial Sequence
  ENSG00000119878_36 (sequence is synthesized)
tggtcataaattgaatagaagtatttactagatgaggaggaaaaccctaaaacaaaacatgaacataaaatatttttaaaaggaagacatacaaacagacactataaccaaataagatga

SEQ ID NO: 234456 - DNA, 120 bp, Artificial Sequence
  ENSG00000119878_37 (sequence is synthesized)
cagaattaaggccttatgccacagccagagttgaaaaatgcagaaaaaaagtttaaaaacaaggaattaaagccaaacctaacttttatcaaaataaatgtaaaagtgatgaaagaatct

SEQ ID NO: 234457 - DNA, 120 bp, Artificial Sequence
  ENSG00000119878_38 (sequence is synthesized)
gttaagatatcagattgtaatataaaagatactagaaacaaatgccaatagaacacttaagtacattttatatattcatccattagaatatatagctgtcagaatgatagaagaattaca

SEQ ID NO: 234458 - DNA, 120 bp, Artificial Sequence
  ENSG00000119878_39 (sequence is synthesized)
tatgtgtgcaaaagtttttgtatccatgtggaaaacacaggaagctaatagtactgtttttctctggagtgggtgtaagggtagagacttaactctttacatccttatggcagccttcga

SEQ ID NO: 234459 - DNA, 120 bp, Artificial Sequence
  ENSG00000119878_40 (sequence is synthesized)
ataccttttaactcccagttcccttaactgggggtgtgtatcctagaatcctcgacccattagaaagtatattgtagacatcatactctttaccctttaacactacacatgcacttcata

SEQ ID NO: 234460 - DNA, 120 bp, Artificial Sequence
  ENSG00000119878_41 (sequence is synthesized)
agaacaagcatgctgtcttacccaagtacagctatcaagttcagaaatttaacattgccataatactttacagtccatatttcaatttcatttgctgttttattggtaatttttttcagc

SEQ ID NO: 234461 - DNA, 120 bp, Artificial Sequence
  ENSG00000119878_42 (sequence is synthesized)
tccacgatccagcctaggatcatatgttgtattgccataaccctctaatctggagcagttcctcagcttttctttgttttttataatagtaatatatttgaaaaatacaggacagctaaa

SEQ ID NO: 234462 - DNA, 120 bp, Artificial Sequence
  ENSG00000119878_43 (sequence is synthesized)
ggatagagtatccttctatttgggtttttctgatgtttcctcatggttagattggggtagtgcagtgagggttgaaatgctgtaagtgatatgtattgcaggtatacatccagatgcaca

SEQ ID NO: 234463 - DNA, 120 bp, Artificial Sequence
  ENSG00000119878_44 (sequence is synthesized)
gaatgtccatttgtcccttattggtgatgctaattttgatcacttgggtaagatgtccagtttctccagtgtatcgttattgtttttccttttgcaattagtgggtaatttgtgaggaga

SEQ ID NO: 234464 - DNA, 120 bp, Artificial Sequence
  ENSG00000119878_45 (sequence is synthesized)
aactttgagaccttgttgacaattctgttcctcatcaaatctacccctcctaggtttagcatcctttgacgattcttgtctgaataaatttttactaggatgtttccaaaattgtgattg

SEQ ID NO: 234465 - DNA, 120 bp, Artificial Sequence
  ENSG00000119878_46 (sequence is synthesized)
ttctaactctattattatttctgtattaattagtcatcattctactgtaaggaagaggtttccctttatcatcaacttcgagtaagtacttttttctgagccatttgaatattccttact

SEQ ID NO: 234466 - DNA, 120 bp, Artificial Sequence
  ENSG00000119878_47 (sequence is synthesized)
agatgtggtgcctctttaccccaattacttaagtttgtatttccaaagaacaagggtgttttcctgcatagccatagcacaattaccaaaatcagaaaattaacattaatactttactat

SEQ ID NO: 234467 - DNA, 120 bp, Artificial Sequence
  ENSG00000119878_48 (sequence is synthesized)
gcagcagatgtggatgtaatacagtgagcaggacccaaactcaaatgtttgctgaatgaatgaaggaaccagagtaagcaaagagggaaccagcaccggttaggccctggcgtgccccca

SEQ ID NO: 234468 - DNA, 120 bp, Artificial Sequence
  ENSG00000119878_49 (sequence is synthesized)
ggacgcctgcagaagtgccacgggcatgacccggcccacctcgctacgcaccgcagcggagagaaggctcttccgagcggcacccagaggagccttcgcgggcatcgccgcaccttcacc

SEQ ID NO: 234469 - DNA, 120 bp, Artificial Sequence
  ENSG00000119878_50 (sequence is synthesized)
ggcagccccaccccaacccgggtccctcgggattctgcccgagcctacgccggcgcaagcgtgggcagcgaggaaccagctgagaggcaggatcaaagagcatgggagttgaagacaagg

SEQ ID NO: 234470 - DNA, 120 bp, Artificial Sequence
  ENSG00000119878_51 (sequence is synthesized)
gaaaactgggggacagaggcgaaaactcggatccgaaagggggtctgtccatcagggcacgccggaagagtggcgctgagctgacggcgagcgccggcgggtcggggcgccaaggctcag

SEQ ID NO: 234471 - DNA, 120 bp, Artificial Sequence
  ENSG00000119878_52 (sequence is synthesized)
ggctgcttcggcaattcgcgggggtagcttgcacctcgtgaggcgagacgccgagggcgtccagcggggcttacctaactctccctcccgcggaagggaagcggggaactactgcctcct

SEQ ID NO: 234472 - DNA, 120 bp, Artificial Sequence
  ENSG00000119888_0 (sequence is synthesized)
aactgcagcgccggggctgggggaggggagcctactcactcccccaactcccgggcggtgactcatcaacgagcaccagcggccagaggtgagcagtcccgggaaggggccgagaggcgg

SEQ ID NO: 234473 - DNA, 120 bp, Artificial Sequence
  ENSG00000119888_1 (sequence is synthesized)
ggccgccaggtcgggcaggtgtgcgctccgccccgccgcgcgcacagagcgctagtccttcggcgagcgagcaccttcgacgcggtccggggaccccctcgtcgctgtcctcccgacgcg

SEQ ID NO: 234474 - DNA, 120 bp, Artificial Sequence
  ENSG00000119888_2 (sequence is synthesized)
ctcctcgtgtcccactcccggcgcacgccctcccgcgagtcccgggcccctcccgcgcccctcttctcggcgcgcgcgcagcatggcgcccccgcaggtcctcgcgttcgggcttctgct

SEQ ID NO: 234475 - DNA, 120 bp, Artificial Sequence
  ENSG00000119888_3 (sequence is synthesized)
ggcgcccccgcaggtcctcgcgttcgggcttctgcttgccgcggcgacggcgacttttgccgcagctcaggaagaatgtgtctgtgaaaactacaagctggccgtaaactgctttgtgaa

SEQ ID NO: 234476 - DNA, 120 bp, Artificial Sequence
  ENSG00000119888_4 (sequence is synthesized)
taataatcgtcaatgccagtgtacttcagttggtgcacaaaatactgtcatttgctcaaagctggctgccaaatgtttggtgatgaaggcagaaatgaatggctcaaaacttgggagaag

SEQ ID NO: 234477 - DNA, 120 bp, Artificial Sequence
  ENSG00000119888_5 (sequence is synthesized)
agcaaaacctgaaggggccctccagaacaatgatgggctttatgatcctgactgcgatgagagcgggctctttaaggccaagcagtgcaacggcacctccatgtgctggtgtgtgaacac

SEQ ID NO: 234478 - DNA, 120 bp, Artificial Sequence
  ENSG00000119888_6 (sequence is synthesized)
tgctggggtcagaagaacagacaaggacactgaaataacctgctctgagcgagtgagaacctactggatcatcattgaactaaaacacaaagcaagagaaaaaccttatgatagtaaaag

SEQ ID NO: 234479 - DNA, 120 bp, Artificial Sequence
  ENSG00000119888_7 (sequence is synthesized)
tggatccaaaatttatcacgagtattttgtatgagaataatgttatcactattgatctggttcaaaattcttctcaaaaaactcagaatgatgtggacatagctgatgtggcttattatt

SEQ ID NO: 234480 - DNA, 120 bp, Artificial Sequence
  ENSG00000119888_8 (sequence is synthesized)
ttgaaaaagatgttaaaggtgaatccttgtttcattctaagaaaatggacctgacagtaaatggggaacaactggatctggatcctggtcaaactttaatttattatgttgatgaaaaag

SEQ ID NO: 234481 - DNA, 120 bp, Artificial Sequence
  ENSG00000119888_9 (sequence is synthesized)
cacctgaattctcaatgcagggtctaaaagctggtgttattgctgttattgtggttgtggtgatagcagttgttgctggaattgttgtgctggttatttccagaaagaagagaatggcaa

SEQ ID NO: 234482 - DNA, 120 bp, Artificial Sequence
  ENSG00000119888_10 (sequence is synthesized)
agtatgagaaggctgagataaaggagatgggtgagatgcatagggaactcaatgcataactatataatttgaagattatagaagaagggaaatagcaaatggacacaaattacaaatgtg

SEQ ID NO: 234483 - DNA, 120 bp, Artificial Sequence
  ENSG00000119888_11 (sequence is synthesized)
tgtgcgtgggacgaagacatctttgaaggtcatgagtttgttagtttaacatcatatatttgtaatagtgaaacctgtactcaaaatataagcagcttgaaactggctttaccaatcttg

SEQ ID NO: 234484 - DNA, 120 bp, Artificial Sequence
  ENSG00000119888_12 (sequence is synthesized)
aaatttgaccacaagtgtcttatatatgcagatctaatgtaaaatccagaacttggactccatcgttaaaattatttatgtgtaacattcaaatgtgtgcattaaatatgcttccacagt

SEQ ID NO: 234485 - DNA, 120 bp, Artificial Sequence
  ENSG00000119888_13 (sequence is synthesized)
aaaatctgaaaaactgatttgtgattgaaagctgcctttctatttacttgagtcttgtacatacatacttttttatgagctatgaaataaaacattttaaactgaatttcttaactttga

SEQ ID NO: 234486 - DNA, 120 bp, Artificial Sequence
  ENSG00000119888_14 (sequence is synthesized)
gcgcgcgcagcatggcgcccccgcaggtcctcgcgttcgggcttctgcttgccgcggcgacggcgacttttgccgcagctcaggaaggtgaggcgcggattggagcagagttgtggagct

SEQ ID NO: 234487 - DNA, 120 bp, Artificial Sequence
  ENSG00000119888_15 (sequence is synthesized)
gggctgggctggggggcagcggcccccggccctcggcccccgaaacgggcataatagggaggggaccaagaggccgcgctttccagcgtggagaccggacggtgcggccgtgctccggct

SEQ ID NO: 234488 - DNA, 120 bp, Artificial Sequence
  ENSG00000119888_16 (sequence is synthesized)
ggacaaagagcaagagctgtagagtctagccctggggtgaggatgccacggctacccggctcctccacgttcctctatccagttcccgcacccttccccccaggccccattcttcaaggc

SEQ ID NO: 234489 - DNA, 120 bp, Artificial Sequence
  ENSG00000119888_17 (sequence is synthesized)
ttcagagcagcgctcctccggttaaaaggaagtctcagcacagaatcttcaaacctcctcggaggccaccaaagatccctaacgccgccatggagacgaagcacctggggcggggcggag

SEQ ID NO: 234490 - DNA, 120 bp, Artificial Sequence
  ENSG00000119888_18 (sequence is synthesized)
cggggcgcgcgggcccacacctgtggagagggccgcgccccaactgcagcgccggggctgggggaggggagcctactcactcccccaactcccgggcggtgactcatcaacgagcaccag

SEQ ID NO: 234491 - DNA, 120 bp, Artificial Sequence
  ENSG00000119888_19 (sequence is synthesized)
aaataatctttgaccctggaactttagagttaattttttttttcccgtaatcatgaaatcagttatttttcagtttggcattaaggtttctttttcagtggctgccaaatgtttggtgat

SEQ ID NO: 234492 - DNA, 120 bp, Artificial Sequence
  ENSG00000119899_0 (sequence is synthesized)
gcccccgccccgcccggtccagccagctcggcccgggggcttcgggctgtcgggccggcgctcccttctctgccaggtggcgagtacacctgctcacgtaggcgtcatgaggtctccggt

SEQ ID NO: 234493 - DNA, 120 bp, Artificial Sequence
  ENSG00000119899_1 (sequence is synthesized)
tcgagacctggcccggaacgatggcgaggagagcacggaccgcacgcctcttctaccgggcgccccacgggccgaagccgctccagtgtgctgctctgctcgttacaacttagcaatttt

SEQ ID NO: 234494 - DNA, 120 bp, Artificial Sequence
  ENSG00000119899_2 (sequence is synthesized)
ggccttttttggtttcttcattgtgtatgcattacgtgtgaatctgagtgttgcgttagtggatatggtagattcaaatacaactttagaagataatagaacttccaaggcgtgtccaga

SEQ ID NO: 234495 - DNA, 120 bp, Artificial Sequence
  ENSG00000119899_3 (sequence is synthesized)
gcattctgctcccataaaagttcatcataatcaaacgggtaagaagtaccaatgggatgcagaaactcaaggatggattctcggttcctttttttatggctacatcatcacacagattcc

SEQ ID NO: 234496 - DNA, 120 bp, Artificial Sequence
  ENSG00000119899_4 (sequence is synthesized)
tggaggatatgttgccagcaaaataggggggaaaatgctgctaggatttgggatccttggcactgctgtcctcaccctgttcactcccattgctgcagatttaggagttggaccactcat

SEQ ID NO: 234497 - DNA, 120 bp, Artificial Sequence
  ENSG00000119899_5 (sequence is synthesized)
tgtactcagagcactagaaggactaggagagggtgttacatttccagccatgcatgccatgtggtcttcttgggctccccctcttgaaagaagcaaacttcttagcatttcatatgcagg

SEQ ID NO: 234498 - DNA, 120 bp, Artificial Sequence
  ENSG00000119899_6 (sequence is synthesized)
agcacagcttgggacagtaatttctcttcctctttctggaataatttgctactatatgaattggacttatgtcttctacttttttggtactattggaatattttggtttcttttgtggat

SEQ ID NO: 234499 - DNA, 120 bp, Artificial Sequence
  ENSG00000119899_7 (sequence is synthesized)
ctggttagttagtgacacaccacaaaaacacaagagaatttcccattatgaaaaggaatacattctttcatcattaagaaatcagctttcttcacagaagtcagtgccgtgggtacccat

SEQ ID NO: 234500 - DNA, 120 bp, Artificial Sequence
  ENSG00000119899_8 (sequence is synthesized)
tttaaaatccctgccactttgggctatcgtagttgcacacttttcttacaactggactttttatactttattgacattattgcctacttatatgaaggagatcctaaggttcaatgttca

SEQ ID NO: 234501 - DNA, 120 bp, Artificial Sequence
  ENSG00000119899_9 (sequence is synthesized)
agagaatgggtttttatcttcattgccttatttaggctcttggttatgtatgatcctgtctggtcaagctgctgacaatttaagggcaaaatggaatttttcaactttatgtgttcgcag

SEQ ID NO: 234502 - DNA, 120 bp, Artificial Sequence
  ENSG00000119899_10 (sequence is synthesized)
aatttttagccttataggaatgattggacctgcagtattcctggtagctgctggcttcattggctgtgattattctttggccgttgctttcctaactatatcaacaacactgggaggctt

SEQ ID NO: 234503 - DNA, 120 bp, Artificial Sequence
  ENSG00000119899_11 (sequence is synthesized)
ttgctcttctggatttagcatcaaccatctggatattgctccttcgtatgctggtatcctcctgggcatcacaaatacatttgccactattccaggaatggttgggcccgtcattgctaa

SEQ ID NO: 234504 - DNA, 120 bp, Artificial Sequence
  ENSG00000119899_12 (sequence is synthesized)
aagtctgacccctgataacactgttggagaatggcaaaccgtgttctatattgctgctgctattaatgtttttggtgccattttctttacactattcgccaaaggtgaagtacaaaactg

SEQ ID NO: 234505 - DNA, 120 bp, Artificial Sequence
  ENSG00000119899_13 (sequence is synthesized)
ctgcctctattaatgtatttttatttatcatgtaacctcaaagtgccttctgtattgtgtaagcattctatgtctttttttaattgtacttgtattagatttttaaggcctataatcatg

SEQ ID NO: 234506 - DNA, 120 bp, Artificial Sequence
  ENSG00000119899_14 (sequence is synthesized)
aaatatcactagttgccagaataataaaatgaactgtgtttaattatgaataatatgtaagctaggacttctactttaggttcacatacctgcctgctagtcgggcaacatgaagtagga

SEQ ID NO: 234507 - DNA, 120 bp, Artificial Sequence
  ENSG00000119899_15 (sequence is synthesized)
cagttctgttgattttttagggccatactaaagggaatgagctgaaacagacctcctgatacctttgcttaattaaactagatgataattctcaggtactgataaacacctgttgttgtt

SEQ ID NO: 234508 - DNA, 120 bp, Artificial Sequence
  ENSG00000119899_16 (sequence is synthesized)
cactttcctcataaaaattgtcagctctctctgacacttagacctcaaactttagcatctctgtggagctgccatccactgtataatttcgcctggcaactggactgaggggagtgtgcc

SEQ ID NO: 234509 - DNA, 120 bp, Artificial Sequence
  ENSG00000119899_17 (sequence is synthesized)
caggcagctgccaagcactccctccctggcttcagggtcagagtgcccagcgtttatcagaggcagcatccaagcccagagccagtgtcgactcttcggctggtgcctttcctctgaggg

SEQ ID NO: 234510 - DNA, 120 bp, Artificial Sequence
  ENSG00000119899_18 (sequence is synthesized)
gctatcaatgtgtagataaagccctgagtaggcaagagcagtgagatccactgctatggtcttgatacatcctcaaactttcccttcccagcacagaggaatattggctggcatgcaacc

SEQ ID NO: 234511 - DNA, 60 bp, Artificial Sequence
  ENSG00000119899_19 (sequence is synthesized)
tcccttcccagcacagaggaatattggctggcatgcaacctgcaaaagaaaaatgcgaga

SEQ ID NO: 234512 - DNA, 73 bp, Artificial Sequence
  ENSG00000119899_20 (sequence is synthesized)
cgatgtgcgatgcccagtcaatcacaaataagatcatcctggtttaaatctactctcacatggatcacagtat

SEQ ID NO: 234513 - DNA, 120 bp, Artificial Sequence
  ENSG00000119899_21 (sequence is synthesized)
tcatcctggtttaaatctactctcacatggatcacagtataaatttctatgtgctgtgttttgttcgtttgtattttgtagagatggggtctcgttttgtcgcccaggctggttttgaac

SEQ ID NO: 234514 - DNA, 120 bp, Artificial Sequence
  ENSG00000119899_22 (sequence is synthesized)
tcctggcttcaagcgatcctcctgtctcggcctcacaaagtgttgagactacaggcatgagccactgtgcccagcctgttctatgtttttaagctacacgagaattttttttttaattaa

SEQ ID NO: 234515 - DNA, 120 bp, Artificial Sequence
  ENSG00000119899_23 (sequence is synthesized)
ttctcactgtttgttcagtctgtcttcatctaagtttgtgttgcagtttaaagttaaagtgacttttaaaggccacatcacctgagactagggtaatcatctttacttctggttcctgaa

SEQ ID NO: 234516 - DNA, 120 bp, Artificial Sequence
  ENSG00000119899_24 (sequence is synthesized)
atcatatttttccagtggaccatcctccagtggctgtggttgttgagcatgctttcagaacacctatgtggcttaaaacttagtttatgttttgtgttcaacactacgtgtaatatttta

SEQ ID NO: 234517 - DNA, 120 bp, Artificial Sequence
  ENSG00000119899_25 (sequence is synthesized)
aaactgtttaatgtgatgtgaatacatttatgtacatttatttttaaatttgtaaatagctttaaattgctatggcaatgtttcttttataaatcatcaaaataaacctttgtgaattga

SEQ ID NO: 234518 - DNA, 120 bp, Artificial Sequence
  ENSG00000119899_26 (sequence is synthesized)
tgtcagaaactttttttcttcagaattaagatatcagtttttaaaaatatatattcctattgtgcatgctctagacaaagtagaataggcaaatgaaatgaacatccaaagtattgtctg

SEQ ID NO: 234519 - DNA, 80 bp, Artificial Sequence
  ENSG00000119900_0 (sequence is synthesized)
ccatgcccgggccctagagcgcctgccgcagcttgcgccccgcagccccgcagccccgcgcccgccgccgcctcttcaat

SEQ ID NO: 234520 - DNA, 120 bp, Artificial Sequence
  ENSG00000119900_1 (sequence is synthesized)
tcttcaatgggcaacctgctcggcggggtcagcttccgcgagcccaccaccgtggaggactgcgactccacctggcagaccgactcggagcccgagcccgaagaaccagggccgggcggc

SEQ ID NO: 234521 - DNA, 120 bp, Artificial Sequence
  ENSG00000119900_2 (sequence is synthesized)
gcgcagcccccggagcaagccggcgggcggcccggcgccagccccgcgccggacgaggacgccgaggcggcgggcgccgagcagggtggtgattccactgaagcaactgccaaaccaaag

SEQ ID NO: 234522 - DNA, 120 bp, Artificial Sequence
  ENSG00000119900_3 (sequence is synthesized)
ggtggtgattccactgaagcaactgccaaaccaaagagaagtttttatgctgccagggatttgtacaagtaccgacaccagtacccaaacttcaaagatatccgatatcaaaatgacttg

SEQ ID NO: 234523 - DNA, 120 bp, Artificial Sequence
  ENSG00000119900_4 (sequence is synthesized)
agcaatcttcgtttttataagaataaaattccattcaagccagatggtgtttacattgaagaagttctaagtaaatggaaaggagattatgaaaaactggagcacaaccacacttacatt

SEQ ID NO: 234524 - DNA, 120 bp, Artificial Sequence
  ENSG00000119900_5 (sequence is synthesized)
caatggcttttccccctgagagaacaaggcttgaacttctatgccaaagaactaactacatatgaaattgaggaattcaaaaaaacaaaagaagcaattagaagattcctcctggcttat

SEQ ID NO: 234525 - DNA, 120 bp, Artificial Sequence
  ENSG00000119900_6 (sequence is synthesized)
aaaatgatgctagaattttttggaataaaactgactgataaaactggaaatgttgctcgggctgttaactggcaggaaagatttcagcatctgaatgagtcccagcacaactatttaaga

SEQ ID NO: 234526 - DNA, 120 bp, Artificial Sequence
  ENSG00000119900_7 (sequence is synthesized)
atcactcgtattcttaaaagccttggtgagcttggatatgaaagttttaaatctcctcttgtaaaatttattcttcatgaagctcttgtggagaatactattcccaatattaagcagagt

SEQ ID NO: 234527 - DNA, 120 bp, Artificial Sequence
  ENSG00000119900_8 (sequence is synthesized)
gctctagagtattttgtttatacaattagagacagaagagaaaggagaaagctcctgcggttcgcccagaaacactacacgccttcagagaactttatctggggaccgcctcgaaaagaa

SEQ ID NO: 234528 - DNA, 120 bp, Artificial Sequence
  ENSG00000119900_9 (sequence is synthesized)
cagtcggagggaagcaaagcccagaaaatgtcttcccctctcgcctccagtcataacagtcaaacttctatgcacaaaaaagccaaggactccaaaaattcctcctcagctgttcattta

SEQ ID NO: 234529 - DNA, 120 bp, Artificial Sequence
  ENSG00000119900_10 (sequence is synthesized)
aatagcaaaacagctgaagacaaaaaagtggcaccaaaagagcctgtggaagagacagacaggcccagcccagagcccagcaatgaagctgccaagccaagaaatacagagaaggacagt

SEQ ID NO: 234530 - DNA, 120 bp, Artificial Sequence
  ENSG00000119900_11 (sequence is synthesized)
aatgctgagaacatgaattctcaacctgagaaaacagttactactcccacagaaaaaaaggagagtgtatctcctgagaataacgaagaaggtggaaatgataaccaagacaatgaaaat

SEQ ID NO: 234531 - DNA, 120 bp, Artificial Sequence
  ENSG00000119900_12 (sequence is synthesized)
cctggaaatacaaattgccatgatgttgtactagtacagtgaattatcagaaaacccagaagccagtttaggctagagaggaaaaaactactgtatcatttatcctaaagaacagagatg

SEQ ID NO: 234532 - DNA, 120 bp, Artificial Sequence
  ENSG00000119900_13 (sequence is synthesized)
aggtcaatttcaaattttagccatctgtttgtgatttctgtcataagcattttgttgtttgtttttttattttggatgacaatgaattgaatatctaataaggagatttaagataagacc

SEQ ID NO: 234533 - DNA, 120 bp, Artificial Sequence
  ENSG00000119900_14 (sequence is synthesized)
caataaatgaatgtattctgtaatgcttttaggatgtgaattttcaaattttgtatataataattactttgagaatattttcagagtatctagaaattaccatgtagtatttggtataca

SEQ ID NO: 234534 - DNA, 120 bp, Artificial Sequence
  ENSG00000119900_15 (sequence is synthesized)
aaatacattcttttgagacattatagtctacatgaaggaaatcaagaggataatttcattggattgctacacttttacctgatttatggctttattttactttattttattttattatta

SEQ ID NO: 234535 - DNA, 120 bp, Artificial Sequence
  ENSG00000119900_16 (sequence is synthesized)
gattacaggcatgagccaccatgtctggctgattaattttttttttaactgtaagagtttgatcttttcaaatgtgttcagaaactaatttggattctttgattctagtatctcaacgtg

SEQ ID NO: 234536 - DNA, 120 bp, Artificial Sequence
  ENSG00000119900_17 (sequence is synthesized)
tatctcaacgtgtttatttttagattctgataagtgaaatggatgtccttgtggagctctggcctccccagcttatctatcagtcctgctgtcctcacctccttgcctctttccatgctt

SEQ ID NO: 234537 - DNA, 120 bp, Artificial Sequence
  ENSG00000119900_18 (sequence is synthesized)
acccttaagccaccatctttctcagctagcgtgtgtgtttctagtgtagttggccctccatattcaggggtccagcatctgtggattcaaccaaccgcagattgaaaatatttgttggaa

SEQ ID NO: 234538 - DNA, 120 bp, Artificial Sequence
  ENSG00000119900_19 (sequence is synthesized)
aaaatggatggttacatctctactaaatatgtgcagtccttttatttgtcattattctctaaacaatacagtataacaactattgacatagcatttatattgtatgtattaggtattgta

SEQ ID NO: 234539 - DNA, 120 bp, Artificial Sequence
  ENSG00000119900_20 (sequence is synthesized)
agtaatttagagatgatttaaagtattttacataagggacttgagcattcctagattttggtaactgcagagggtcctggaaccaaccccctacagatatcaagggaccactatacacat

SEQ ID NO: 234540 - DNA, 120 bp, Artificial Sequence
  ENSG00000119900_21 (sequence is synthesized)
taggatgatctatattgaaatctacatggaacagagtgggacttctaattgtatgacttcaagattttgctttgtttaaattaataactgttttcagaattaagtgcttaaaaacaaatt

SEQ ID NO: 234541 - DNA, 120 bp, Artificial Sequence
  ENSG00000119900_22 (sequence is synthesized)
tgattgaaaagttcaagacaagaattttgctctctatggctgttccatataaatttgatggttgattctgaatgtaaatgactgaagaattaaaaaataagaaattcctttttaaaaggc

SEQ ID NO: 234542 - DNA, 120 bp, Artificial Sequence
  ENSG00000119900_23 (sequence is synthesized)
atgcctcttgcactgtgaacaagacagtagtcccttaaaccatgaatatgtcagtgttctatggattacgaaattagtaatgttgcttagcccaaacgtgttttttaaaaagtatagttt

SEQ ID NO: 234543 - DNA, 120 bp, Artificial Sequence
  ENSG00000119900_24 (sequence is synthesized)
tgtacatctctaagttatcaaacttcaaaattgagaacaaatttaaaagtccatatatgcaactctagtaagcacttaataggttacatagcactggttaagaacaattaattttgtttc

SEQ ID NO: 234544 - DNA, 120 bp, Artificial Sequence
  ENSG00000119900_25 (sequence is synthesized)
ttattactaattattattacaaatcaaaaaacactgtgataagaacttcaaagcatatatacaaatatagttaaagcaatgaatagatgaaacatgtctactttatttcatttagaaagg

SEQ ID NO: 234545 - DNA, 120 bp, Artificial Sequence
  ENSG00000119900_26 (sequence is synthesized)
aaggaattaacttttttgttaggcttttaagaaaagttctattcattttaatcccctagggaatttgtaatatgtcctacttcatatcatcttctgttgcctctattgatccacattttc

SEQ ID NO: 234546 - DNA, 120 bp, Artificial Sequence
  ENSG00000119900_27 (sequence is synthesized)
tgcagtggatttcttgaaaagaatcacacttatagtatgcctctagaaatatgattttactgctttgaagtttacatgaaacatgccagttgcttaactctaattttttatatgaatctc

SEQ ID NO: 234547 - DNA, 120 bp, Artificial Sequence
  ENSG00000119900_28 (sequence is synthesized)
agtagcacttttgttgtacattgtgttccaataagtatagtatggaacactttctcatttttagttcccataatatgccagtttttgctttcctagtgttctgtgagtattaggatttgg

SEQ ID NO: 234548 - DNA, 120 bp, Artificial Sequence
  ENSG00000119900_29 (sequence is synthesized)
caatctgcttttgcatttcaatttctgttttacatgcaagaaaaacatggacactcttacgtggtgcttgtagctgtgtctccgtagagctcagtaaatagttctacagggtttagagga

SEQ ID NO: 234549 - DNA, 120 bp, Artificial Sequence
  ENSG00000119900_30 (sequence is synthesized)
tgagaagcgattgtcaaattaggctgaattgtagaacacaaataatttaattcaaaataacttaccaattttatatacatgataaagtattcagacaactttctaaatgcataatagtaa

SEQ ID NO: 234550 - DNA, 120 bp, Artificial Sequence
  ENSG00000119900_31 (sequence is synthesized)
aagattgtgaccagatattatgatattaataaagttaccagatactaaaatcaatgaatgtaatttgaattacttagaaattgtatattagagcccttatgagtaaaaacatttcattta

SEQ ID NO: 234551 - DNA, 120 bp, Artificial Sequence
  ENSG00000119900_32 (sequence is synthesized)
gcaacttaacttttagaatattcttcctacttagggattttgattagattgtaacattaaattcgagaatatttagtctcaagagaaacacttcctggcatccatcttaaatagtggcct

SEQ ID NO: 234552 - DNA, 120 bp, Artificial Sequence
  ENSG00000119900_33 (sequence is synthesized)
agaacaagtaaaaggatatcattccttttggagataaacattgagtgtctagaatttttttctattaatgctttgtatattagttttttaaataagatctatagatatgtatttatgtgt

SEQ ID NO: 234553 - DNA, 120 bp, Artificial Sequence
  ENSG00000119900_34 (sequence is synthesized)
gtcttatatatgaaacagtgctctgggtttgactcctatgttttgtaattttaaaaactacgatatgcttgcagaaattcattgagaagctgttataaaaaatgcagtgaagcatgacca

SEQ ID NO: 234554 - DNA, 120 bp, Artificial Sequence
  ENSG00000119900_35 (sequence is synthesized)
aatagctaaaaatattactgaatctttacaaatatataatctttattgttgtactgtggagtgcaaggatactaaatattggctattgataaaatactaacttgcatttcatggcaaata

SEQ ID NO: 234555 - DNA, 120 bp, Artificial Sequence
  ENSG00000119900_36 (sequence is synthesized)
gatgttatatcgcttgattagtctagaacatttctaatattttgtgctttcatatatcaaaggagattatgtgaaactatttttaaatactgtaaagtgacatatagttataagatatat

SEQ ID NO: 234556 - DNA, 120 bp, Artificial Sequence
  ENSG00000119900_37 (sequence is synthesized)
ttctgtacagtagagaaagagtttataacatgaagaatattgtaccattatacattttcattctcgatctcataagaaattcaaaagaataatgatagaggtgaaaatatgtttactttc

SEQ ID NO: 234557 - DNA, 120 bp, Artificial Sequence
  ENSG00000119900_38 (sequence is synthesized)
tctaaatcaagcctagttgtcaactcaaaaattatgttgcatagttttattttgaatttaggttttgggactacttttttccagcttcaatgagaaaataaaatctacaactcaggagtt

SEQ ID NO: 234558 - DNA, 120 bp, Artificial Sequence
  ENSG00000119900_39 (sequence is synthesized)
actagagaagttctaagtatttttttgctaagtagtaaaaatataaacatatgaaaatgccataatgcctgtcatagtcattgtttcatattttgtcatataaaatcacctaccctgctt

SEQ ID NO: 234559 - DNA, 120 bp, Artificial Sequence
  ENSG00000119900_40 (sequence is synthesized)
ctagttttatactttaatctgagtgaaagtatgatgtggtggaaagaaaaaacagtacagtattacatctgagttagtctttgaaaaatcatagtagtaaatgaacctcaacactgagtg

SEQ ID NO: 234560 - DNA, 120 bp, Artificial Sequence
  ENSG00000119900_41 (sequence is synthesized)
gtcaaaaattgggttaaccaatggggggagaatatttggttaattgttttaatattaaattttcaagtttataatagagttatggttgagtagtcatccatactgagtaatcacgcattt

SEQ ID NO: 234561 - DNA, 120 bp, Artificial Sequence
  ENSG00000119900_42 (sequence is synthesized)
tttaaactataattgaggctcttctaaagctttgttttctaatctaagatacaaaggatattcttgatcttgcttgattgtaactacatctaccagtctttaatgtctgtttggggtgag

SEQ ID NO: 234562 - DNA, 120 bp, Artificial Sequence
  ENSG00000119900_43 (sequence is synthesized)
tggcgatcctctgttgtaggaatgtttttgaagatttctattttgttttccacttaggaaattcccctctctcatttggggtatatgcgttgagtataaggtaggctgtatttagacaca

SEQ ID NO: 234563 - DNA, 120 bp, Artificial Sequence
  ENSG00000119900_44 (sequence is synthesized)
ctagaatcattaaatgtaggtgaagttgtagagaaaaatggcctgggtcaatgtaggatctagaaaattaggagtgtacatttgctggcttctttttgagttttgtactgtttattacag

SEQ ID NO: 234564 - DNA, 120 bp, Artificial Sequence
  ENSG00000119900_45 (sequence is synthesized)
gaacatatttgtgtggctaatctctagggtgacagtgagtactaccctgctccttctgcattctagttatccaacacacccagcagattgtgttcagggacagaatgtgtttttagaaat

SEQ ID NO: 234565 - DNA, 120 bp, Artificial Sequence
  ENSG00000119900_46 (sequence is synthesized)
cccttattattgaaatgaataataatatagctataaatatgaatgtctggaggtatccagatgtgccttaacaaatgtaaatggttttcattcagaagtttacatttttattacattata

SEQ ID NO: 234566 - DNA, 120 bp, Artificial Sequence
  ENSG00000119900_47 (sequence is synthesized)
aaatctcatcattgggaactttctaaaccatgaatatcagttcttttaatgaaatttaggtggtgctttatcattttggagaagttgctgtttgggacaatagcatcagtttatcaagaa

SEQ ID NO: 234567 - DNA, 120 bp, Artificial Sequence
  ENSG00000119900_48 (sequence is synthesized)
gtgtactcaccatgatattcaacaatgtgttacatttgacaaaacgtgtttagagtaagaaagactaactatactgtctgttatatttatttatgctttttgtagtttagctacatacta

SEQ ID NO: 234568 - DNA, 120 bp, Artificial Sequence
  ENSG00000119900_49 (sequence is synthesized)
taattttcattttaaacgttccttagttactacaaataatatttatgttttgcttcttcttagatgtaggcggatgcagaaatagaattatgttagagaaattattaaaagtttaattcc

SEQ ID NO: 234569 - DNA, 120 bp, Artificial Sequence
  ENSG00000119900_50 (sequence is synthesized)
agtaggcagttggagaaatctgaaactaatttgaaaaacttttatgctgtagtctcattagaatcattttaaaagcactgttcttgcatttttcctagactacagagagtgttctttgtc

SEQ ID NO: 234570 - DNA, 120 bp, Artificial Sequence
  ENSG00000119900_51 (sequence is synthesized)
attttttttcctattctgttgtgaagtttattgtttcagttatttgagggaaataacctcttaatatgtttattttcctgaactaaagttttcatgtagagaatacaattaaatgttttg

SEQ ID NO: 234571 - DNA, 120 bp, Artificial Sequence
  ENSG00000119900_52 (sequence is synthesized)
tgttatgacccaaactggctggaagtagagttcagagagggagaagggacaagaatcagtgtgggcatctcaggaaagtggcgccagtgctgggctccagccttctccactggcatgatg

SEQ ID NO: 234572 - DNA, 120 bp, Artificial Sequence
  ENSG00000119900_53 (sequence is synthesized)
ggtcctcagattctcctctggataatgagggtgttgggcactgtgagctctgacttctggggaggataggccatcatggactccatacacaattttgatgggtatcagttctcataaaat

SEQ ID NO: 234573 - DNA, 120 bp, Artificial Sequence
  ENSG00000119900_54 (sequence is synthesized)
acctgctacaatttatttattttgtagttgtttagaaaactgtgagcagttgggcattagtaaattgtagttatatcttaacgatcttgggaatcattgaaatatgagtttttttccctc

SEQ ID NO: 234574 - DNA, 120 bp, Artificial Sequence
  ENSG00000119900_55 (sequence is synthesized)
actcctatttatttaattaaaaaattagggaagttgttcattcacagctgtatattaatataaaatctctttataaaatgattcagagaaaaggcagtagtggtcacttactgtgctaaa

SEQ ID NO: 234575 - DNA, 120 bp, Artificial Sequence
  ENSG00000119900_56 (sequence is synthesized)
cacttactgtgctaaaatacctttttctctaaaaatatttaagctttagggtttgtcatagttttactttttaaattatactttgtgtaacaatttacgttaactagaaaaattagatat

SEQ ID NO: 234576 - DNA, 120 bp, Artificial Sequence
  ENSG00000119900_57 (sequence is synthesized)
ctaagaaacatttacattctacactcattagtcaaatgaacttttctttcccagtgctaacagattttgtttcatgtgaagaaaaataaaatacaaatgaaataaaagtctagaaacagc

SEQ ID NO: 234577 - DNA, 120 bp, Artificial Sequence
  ENSG00000119900_58 (sequence is synthesized)
aacaggaaactcaccacagaaataaagacataacccttgataagtttgtgtaagtgccagaattattggaagcaggtgacgaatgattaagaaaagctttattgtggggacatgctttaa

SEQ ID NO: 234578 - DNA, 120 bp, Artificial Sequence
  ENSG00000119900_59 (sequence is synthesized)
gaatcagctctgtatttgtgccaaggagatcaggtattggtgtgcaaacagatcccattaatactctgatttgaaccatgaattccacctactctgcgttgaagccctccagtagactga

SEQ ID NO: 234579 - DNA, 120 bp, Artificial Sequence
  ENSG00000119900_60 (sequence is synthesized)
tagatgtaatcaaatgatcagctaccaagtttaattcctttgcctgtgtgtagcaacagttggtagttttacaagttaagttgatggtctggctgcagataagagaaagactcagtgata

SEQ ID NO: 234580 - DNA, 120 bp, Artificial Sequence
  ENSG00000119900_61 (sequence is synthesized)
ggtggtttgtgagtgaagtaacttccacactgtcaagagttgacagcatattaattgtgtggcattataattgtgagaaacaaatgagagcaaaatgttaggtcctttgacaagcatttt

SEQ ID NO: 234581 - DNA, 120 bp, Artificial Sequence
  ENSG00000119900_62 (sequence is synthesized)
cctcctgtttttaaaaagggctttaagttgtttcctatgtaaggtaatctttcttttttagtattatctaagaaggatggtagattatgtcattttggaaactattgtgtcccttgtatt

SEQ ID NO: 234582 - DNA, 120 bp, Artificial Sequence
  ENSG00000119900_63 (sequence is synthesized)
ttaaatatttcaggaaaatgcctacgattgttacaaagatgtgtgttttacttataacataagctctgattctccagtggccactgggccttctctgtgctctgtattcaactgcagtat

SEQ ID NO: 234583 - DNA, 120 bp, Artificial Sequence
  ENSG00000119900_64 (sequence is synthesized)
gaattacagaatgctgtgcatgttcgttagtaccaataccatgtgtatgtggtagaagttgtaaccagtttctggatctgtatggtactataaaatacttattttataattctgtaaccg

SEQ ID NO: 234584 - DNA, 120 bp, Artificial Sequence
  ENSG00000119900_65 (sequence is synthesized)
tatggcagtgttatgccaaaaatgtataaagagcaatagtttttgttgcttactgctgtattttaaaatattgtttctaaaataatagagttagagttccttttgagtaattatttttaa

SEQ ID NO: 234585 - DNA, 120 bp, Artificial Sequence
  ENSG00000119900_66 (sequence is synthesized)
gaactattgccaaatatacatcctgtaaaactaataaaagccactccatcttagataacattttagcattgtgctagagtacattatggtgattttgcacgattaaaatatttttaaaga

SEQ ID NO: 234586 - DNA, 120 bp, Artificial Sequence
  ENSG00000119900_67 (sequence is synthesized)
actagaaaaaatgacttgctgttttcctgtcattaagcatgtattttttatgattaacacataagactaacattattttcttttatcctcaaaaataaatattgtgaagggtgaatcata

SEQ ID NO: 234587 - DNA, 120 bp, Artificial Sequence
  ENSG00000119900_68 (sequence is synthesized)
gaggacaaaagcctgattgagggtggtgattccactgaagcaactgccaaaccaaagagaagtttttatgctgccagggatttgtacaagtaccgacaccagtacccacagaacttcaaa

SEQ ID NO: 234588 - DNA, 120 bp, Artificial Sequence
  ENSG00000119900_69 (sequence is synthesized)
agaaaagaaggaaacaaagtatgggcaattctttggtggtgatttgctataaaaaaggagtagatatatggatctgtaattgatggtaggcctgggtcaaggaatgttttgtatgtttat

SEQ ID NO: 234589 - DNA, 120 bp, Artificial Sequence
  ENSG00000119900_70 (sequence is synthesized)
tttaagattaaagatactacagcatgtttgtttgagatcgagaagagagggaaattttgatgatccaggaaagaggaacaatattgaacaacagaatccttgtctgagcaggtgaaaggg

SEQ ID NO: 234590 - DNA, 120 bp, Artificial Sequence
  ENSG00000119900_71 (sequence is synthesized)
gtctgggtagagagtccaaagggaataggggttggaagagcaggagcagatgctggcaggacacagacattcttatgataatcctgagaaataggtagggcttgagtcattatctttatt

SEQ ID NO: 234591 - DNA, 120 bp, Artificial Sequence
  ENSG00000119900_72 (sequence is synthesized)
actgatactacaccaaggtttccatatatccttcattttttagtgtgactgagattgattcagacctggacttgggacccagagcctgggattcttgttcttgcactgtcactggactct

SEQ ID NO: 234592 - DNA, 120 bp, Artificial Sequence
  ENSG00000119906_0 (sequence is synthesized)
acttccgaagagagaaccgccatgaagagagaagggggtgccgcccacctctgctccgacagcctcccggagtcccagcagcaagacggcaaccacgcacccaacttctccagccacggc

SEQ ID NO: 234593 - DNA, 120 bp, Artificial Sequence
  ENSG00000119906_1 (sequence is synthesized)
tcatgccgccgtcgccagcggcgccgacatgacaaggcgctgcatgcccgctaggccaggtttcccctcatccccagccccggggtcgtcgcccccgcgctgccatctgagacccggtag

SEQ ID NO: 234594 - DNA, 120 bp, Artificial Sequence
  ENSG00000119906_2 (sequence is synthesized)
taccgcccatgctgcagcgggaaagagaacagagagtcctggggacaggaagcagtcaattatagatttcttcaaaccagcttcaaaacaagacagacacatgttggattcaccacaaaa

SEQ ID NO: 234595 - DNA, 120 bp, Artificial Sequence
  ENSG00000119906_3 (sequence is synthesized)
atcaaacatcaaatatggaggaagtagattgtctatcactgggacagagcagtttgaaaggaaactatcctcaccaaaagaatctaaacccaaaagggtgccaccagaaaagagccctat

SEQ ID NO: 234596 - DNA, 120 bp, Artificial Sequence
  ENSG00000119906_4 (sequence is synthesized)
tatagaagctttcatgaaaggtgttaaagagcaccatgaagatcatggtatacatgagtcacgtcggccttgtctgtcactagcctccaaatatttagccaaaggaacaaatatctatgt

SEQ ID NO: 234597 - DNA, 120 bp, Artificial Sequence
  ENSG00000119906_5 (sequence is synthesized)
tccttcttcatatcacttgccaaaggagatgaagtcactaaagaaaaaacatcgatccccagagagaaggaagtcactattcattcatgaaaataatgagaagaatgatagagatcgagg

SEQ ID NO: 234598 - DNA, 120 bp, Artificial Sequence
  ENSG00000119906_6 (sequence is synthesized)
caaaaccaatgcagactccaaaaagcagaccacagtggcagaagctgacatcttcaataacagctccagaagccttagcagcaggagcagcctgtccaggcaccacccggaagaaagccc

SEQ ID NO: 234599 - DNA, 120 bp, Artificial Sequence
  ENSG00000119906_7 (sequence is synthesized)
actgggagctaaattccagttgtcactagcttcttactgcagagaacgagaactaaagaggttgagaaaggagcaaatggagcagagaatcaactccgagaattctttctcagaagcaag

SEQ ID NO: 234600 - DNA, 120 bp, Artificial Sequence
  ENSG00000119906_8 (sequence is synthesized)
cagtctttccttaaaatctagtatagaaagaaaatataaaccaaggcaggaacaaaggaaacagaatgacatcatacctggaaaaaataatctgtcaaatgtggaaaatggacatctctc

SEQ ID NO: 234601 - DNA, 120 bp, Artificial Sequence
  ENSG00000119906_9 (sequence is synthesized)
aagaaaaagatcctcttctgattcatgggaacctacttcagcaggctctaagcagaataaattccctgaaaaaagaaaaaggaactctgtggactcagatctgaaaagcacaagagaatc

SEQ ID NO: 234602 - DNA, 120 bp, Artificial Sequence
  ENSG00000119906_10 (sequence is synthesized)
tatgataccaaaagcaagagagtccttccttgagaagcgtcctgatggaccacatcagaaagaaaaatttataaaacatattgcactgaagacacctggtgatgtgttgcgcttagaaga

SEQ ID NO: 234603 - DNA, 120 bp, Artificial Sequence
  ENSG00000119906_11 (sequence is synthesized)
tatatccaaggaaccgagtgatgaaactgatggctcttctgcaggcttggcaccttcaaattctggcaattctggccaccattctaccaggaatagtgaccaaatccaagtggcaggtac

SEQ ID NO: 234604 - DNA, 120 bp, Artificial Sequence
  ENSG00000119906_12 (sequence is synthesized)
caaggagactaagatgcagaaaccccacttacctttatctcaggaaaagtctgcaattaaaaaagctagcaaccttcagaaaaataaaaccgctagctccacgacaaaggagaaggagac

SEQ ID NO: 234605 - DNA, 120 bp, Artificial Sequence
  ENSG00000119906_13 (sequence is synthesized)
aaaactacctttactttcccgtgttccaagtgctggttcctctctagtaccattaaatgctaaaaattgtgctcttccagtttctaaaaaagataaagagcgttcctcatctaaagaatg

SEQ ID NO: 234606 - DNA, 120 bp, Artificial Sequence
  ENSG00000119906_14 (sequence is synthesized)
ttctgggcattctacagaatccaccaaacacaaggaacacaaagcaaagactaataaggccgattctaatgtatcttcagggaaaatttctgggggacctttgcgctcagaatatggcac

SEQ ID NO: 234607 - DNA, 120 bp, Artificial Sequence
  ENSG00000119906_15 (sequence is synthesized)
tcctacaaagtctccccctgctgctttggaagttgtgccatgtatcccaagccctgcagcaccttcagataaagccccttcagaaggagagagttcaggaaattccaatgcaggtagcag

SEQ ID NO: 234608 - DNA, 120 bp, Artificial Sequence
  ENSG00000119906_16 (sequence is synthesized)
tgcactgaaaagaaaactaaggggtgattttgatagtgatgaagaaagtttaggttacaacctagacagtgatgaggaagaggaaacattaaagtcactggaagaaataatggctttgaa

SEQ ID NO: 234609 - DNA, 120 bp, Artificial Sequence
  ENSG00000119906_17 (sequence is synthesized)
cttcaatcagactcctgcagctacaggaaagcctcctgctctttccaaggggcttagatctcagtcatcagactatacaggacatgttcatcctggaacttacacaaataccttagaacg

SEQ ID NO: 234610 - DNA, 120 bp, Artificial Sequence
  ENSG00000119906_18 (sequence is synthesized)
tctagtgaaggaaatggaagacacacaaaggctagatgaactgcagaagcaactacaagaagacataaggcaaggccgaggcattaaatccccaatcagaattggagaagaagacagtac

SEQ ID NO: 234611 - DNA, 120 bp, Artificial Sequence
  ENSG00000119906_19 (sequence is synthesized)
agatgatgaggatggcctcttagaagagcacaaggaatttctaaagaaattttcagttacaattgatgctattcctgatcatcatccaggtgaagaaatatttaatttcctcaattctgg

SEQ ID NO: 234612 - DNA, 120 bp, Artificial Sequence
  ENSG00000119906_20 (sequence is synthesized)
aaaaattttcaatcagtataccttggatttaagagactctggttttattggacaaagtgctgtagaaaaacttattcttaaatcgggaaaaacagatcagatttttttgacaacacaagg

SEQ ID NO: 234613 - DNA, 120 bp, Artificial Sequence
  ENSG00000119906_21 (sequence is synthesized)
tttccttacgtctgcttatcactatgtccagtgtcctgtccctgtgttaaagtggctgtttcggatgatgtcagttcatacagactgtattgtgtcagtgcagattttaagtacattgat

SEQ ID NO: 234614 - DNA, 120 bp, Artificial Sequence
  ENSG00000119906_22 (sequence is synthesized)
ggaaataacaattagaaatgataccttcagtgactcaccagtttggccatggatcccatcattgtctgatgtagcagctgtgtttttcaatatggggattgattttagatctttgtttcc

SEQ ID NO: 234615 - DNA, 120 bp, Artificial Sequence
  ENSG00000119906_23 (sequence is synthesized)
cctggagaatcttcagccagactttaatgaagactatctagtttctgaaacacagacaacatcaagggggaaagaaagtgaagattcatcttataagccaattttttcaacacttcctga

SEQ ID NO: 234616 - DNA, 120 bp, Artificial Sequence
  ENSG00000119906_24 (sequence is synthesized)
aaccaacattttaaatgtggttaagtttctaggcttgtgtacatctatacatccagaaggttaccaggatcgtgaaataatgttgctgattttaatgttatttaaaatgagtttggaaaa

SEQ ID NO: 234617 - DNA, 120 bp, Artificial Sequence
  ENSG00000119906_25 (sequence is synthesized)
acagctgaaacagattcctttagtagactttcaaagcctcctgataaacctgatgaaaaacatcagagattggaacacaaaggtgcctgaactctgtctgggcataaatgaactctccag

SEQ ID NO: 234618 - DNA, 120 bp, Artificial Sequence
  ENSG00000119906_26 (sequence is synthesized)
tcatccccacaacctcctgtggttggtacagctggtccctaattggacatcacgtggaaggcaactgagacagtgcctcagtctagtgattatttcaaagcttttggatgagaaacacga

SEQ ID NO: 234619 - DNA, 120 bp, Artificial Sequence
  ENSG00000119906_27 (sequence is synthesized)
agatgttcctaatgccagtaatctgcaggtatcagtcctacatcgctatcttgtgcagatgaagccttctgatttgttaaagaaaatggtcttgaagaaaaaggctgaacaaccagatgg

SEQ ID NO: 234620 - DNA, 120 bp, Artificial Sequence
  ENSG00000119906_28 (sequence is synthesized)
acctacattcttcttcatttagtcggtgaagttagttgttctcattctttttcttctggacaacggaaacactttgtgctactctgtggggctttggaaaagcatgttaaatgtgatatt

SEQ ID NO: 234621 - DNA, 120 bp, Artificial Sequence
  ENSG00000119906_29 (sequence is synthesized)
agggaagatgcaagacttttttacagaactaaggtgaaagacttggtcgccaggatacatggaaaatggcaggaaataatccagaactgtcggcctactcaggggcagcttcatgacttc

SEQ ID NO: 234622 - DNA, 120 bp, Artificial Sequence
  ENSG00000119906_30 (sequence is synthesized)
tgggtaccagattcttaataggagttgcagcagcaaaaatatgaaccaagagaaattcaataagagcctttcatagaggagtagaaaggattattacagaatccaatgaatgccaagaaa

SEQ ID NO: 234623 - DNA, 120 bp, Artificial Sequence
  ENSG00000119906_31 (sequence is synthesized)
atgtacagcaaatgtgccacttgaatatctagtatgaagctggtaatgaagaaattgccatttctgaagcagatatgaaatatgatctgcttaattgttaaggcaactgacctttcaaaa

SEQ ID NO: 234624 - DNA, 120 bp, Artificial Sequence
  ENSG00000119906_32 (sequence is synthesized)
gtgcagagtcttattaaaagaggggaggggtagaagcagaataatagtcatatgtctaacctgccccagttaactcctcttgttaaattataagccagttatcttttttagatagtattt

SEQ ID NO: 234625 - DNA, 120 bp, Artificial Sequence
  ENSG00000119906_33 (sequence is synthesized)
ttgtcacttggataatcacaggaaatatataagaaaagagcttggactaacttgagaagttggacatggaaagcaagaccaagttccagttgggtttaattttccctcttggttattttc

SEQ ID NO: 234626 - DNA, 120 bp, Artificial Sequence
  ENSG00000119906_34 (sequence is synthesized)
ggacacaaagggaatgcttaaaactgagtttagtaataaaaagcataaatctcttctgtaacttttataaaccacagggaggtttcaatccatgcattttccttcattactcaagattat

SEQ ID NO: 234627 - DNA, 120 bp, Artificial Sequence
  ENSG00000119906_35 (sequence is synthesized)
aaatctgtttttaaaatacatctaaacaaacagttgagaaacaaaagtttggcatgttgtcagatccccttaagaggaagaggttaagctgtaaagtagtggccctgttttgatgccaga

SEQ ID NO: 234628 - DNA, 120 bp, Artificial Sequence
  ENSG00000119906_36 (sequence is synthesized)
acattcatatgctgtttgttctggatttcttttaaatgcatgtattttaaatactggttaaatcttagaatcttggctatatcttagaattctggctcttggtaaccatattacagaagt

SEQ ID NO: 234629 - DNA, 120 bp, Artificial Sequence
  ENSG00000119906_37 (sequence is synthesized)
ctatattgtaaaagcctaaagatctggacaagtttccaacaaccttgtttccatgagtatataattttggcagacacctgaattctttgggacactgtgtctgtgtatgtgtgtgtgtgt

SEQ ID NO: 234630 - DNA, 120 bp, Artificial Sequence
  ENSG00000119906_38 (sequence is synthesized)
gtgtgtgtgtgtgtgcgcttgtatcttgaagttgttgcacttcaaaaccacagctgctgtaaattcttaaacactggagagccatcctttggtttaaatggtagagggttagtggaagtg

SEQ ID NO: 234631 - DNA, 120 bp, Artificial Sequence
  ENSG00000119906_39 (sequence is synthesized)
cacacgttgtttttagcccaggggtagtaacaaactcttactagccaactagaaaattattttgttgacgagatgtcccttttaggagggtttgtttcctgaaagaatgccaactttttt

SEQ ID NO: 234632 - DNA, 120 bp, Artificial Sequence
  ENSG00000119906_40 (sequence is synthesized)
tgttgttctttcagtattggcttgagtgacctgttctcctgagtgctctagtgtctccagttgtgggggggaaagatgatggaggggaacagaaactggacttgatgtttgcggtttgag

SEQ ID NO: 234633 - DNA, 120 bp, Artificial Sequence
  ENSG00000119906_41 (sequence is synthesized)
aggcaagaaaataaaataactttctacctctaaattgaggcttaggagtaaaaagcattttgtcctaaatttatcatttaaaatagcatcagtaacttttgagctcatgtcaatcaagca

SEQ ID NO: 234634 - DNA, 120 bp, Artificial Sequence
  ENSG00000119906_42 (sequence is synthesized)
ttggcagtcagagattttatagggaagactaagtaaatccagtttccaagaacctaaactgattgaggctccaagagtcagaccaacaaaagttttattctgtgttgtttactggtaaga

SEQ ID NO: 234635 - DNA, 120 bp, Artificial Sequence
  ENSG00000119906_43 (sequence is synthesized)
atattattatcttgatactacctctcaagggtattgttacaaaatgccacttatggttaaagagatagatacaaagagttctatttgacagaagcttgaaactctggcatctatctgccc

SEQ ID NO: 234636 - DNA, 120 bp, Artificial Sequence
  ENSG00000119906_44 (sequence is synthesized)
aacgatgggggctttcgttctgtaatttaatcctttgtagatacattatttgtgtgtaattttatacgtgttcatatttttctcattttgcattgtgtaaagtgtacaaaatctcaaagt

SEQ ID NO: 234637 - DNA, 120 bp, Artificial Sequence
  ENSG00000119906_45 (sequence is synthesized)
ataaaatactgcttatattgcttgtaatttacagtgtgtaaatattttctaattgtgtacattgatgggggggacaagtgggttattcaggtttttttttaatgacccttttgtattgca

SEQ ID NO: 234638 - DNA, 120 bp, Artificial Sequence
  ENSG00000119906_46 (sequence is synthesized)
gtttcaacagataactgtccatcaaatttaaaaccactttgatacatttttatttaacagttccaataagaaaaaaatctctatttttaattatatttctcctttagaaaaaaaatactt

SEQ ID NO: 234639 - DNA, 120 bp, Artificial Sequence
  ENSG00000119906_47 (sequence is synthesized)
catggtccctctaaaataaatggccagacctcagtttaggcccttgtatttatgactctggtagaggtcttcagactccaggtcatagtccagtcagtatttgcatttgggttctcatga

SEQ ID NO: 234640 - DNA, 120 bp, Artificial Sequence
  ENSG00000119906_48 (sequence is synthesized)
aaactttgtgactctcttttagcacaagtagcccatggtttttcttccaaatcaagtattttacttctcccttgagtccccatgctttgtctccctcctgctgctattgcccggtgaatg

SEQ ID NO: 234641 - DNA, 120 bp, Artificial Sequence
  ENSG00000119906_49 (sequence is synthesized)
ggatggtagagagggagaaatgttcattgcacagagaatgtcaggccactttggggacttggcaaacgaagcttgcactgagtggtggtgtgtttggcaatattactgtgccaaaaatca

SEQ ID NO: 234642 - DNA, 120 bp, Artificial Sequence
  ENSG00000119906_50 (sequence is synthesized)
ccttgtctaattttatggatatgtatggcaaacttattacccttcttgcaagctgcacattaaggtacttgtaagtgtttatgcttttgtgtgtaactgtttgccttttctaactgcttt

SEQ ID NO: 234643 - DNA, 120 bp, Artificial Sequence
  ENSG00000119906_51 (sequence is synthesized)
tcttgttactgaaaatataattctactagttttatcacattaagaggctctccatgcacaaaatgcattgatgtagccgtaaagtaacagcatttgtacattttctatctcctgatggca

SEQ ID NO: 234644 - DNA, 120 bp, Artificial Sequence
  ENSG00000119906_52 (sequence is synthesized)
gtggtgcctttgtcaccttttggaaggtttgcattttgtttctgctttcaagcgcaaatagtagcttgctttcagcttcacaaaaatctcctcaaatgtaaaagatacaaaatggcgtgt

SEQ ID NO: 234645 - DNA, 120 bp, Artificial Sequence
  ENSG00000119906_53 (sequence is synthesized)
tatcatccaggcttagttggagtatttgcatttttatttttatcaaaacaaatataattggtggggactggccagtaataatgtgtggcgtctttaagccaagagtaatttttaaattaa

SEQ ID NO: 234646 - DNA, 120 bp, Artificial Sequence
  ENSG00000119906_54 (sequence is synthesized)
aaatgaaaattttaagaggtagcccattaaacaagctactgagttggagaattaggggatgactgtggtggtttgtcgctaaggaggcaacagtagggtccaggcggcggggcacgtaga

SEQ ID NO: 234647 - DNA, 120 bp, Artificial Sequence
  ENSG00000119906_55 (sequence is synthesized)
gcagttagcatgatccatggttattccttactcatgaacagtgtcggcgcacctcattatctgtgcatttgtttttcctgggcagtcctgtcagccagttaatccaccagctcttaggaa

SEQ ID NO: 234648 - DNA, 120 bp, Artificial Sequence
  ENSG00000119906_56 (sequence is synthesized)
gtaaatacagatttttttctttccttttttttttttttaaagattttatactacatcttgttaaagtcctatgaatgtgtgtgtgtgtgtgctattaaaactgctttttctcagtttgaa

SEQ ID NO: 234649 - DNA, 120 bp, Artificial Sequence
  ENSG00000119906_57 (sequence is synthesized)
gagtcctggggacaggtaccgtgcagagggcttgagaaggggccgggtcgcgggggcaagggtatgaggggagggctgcagaccgccgctcttccagttcccgccatcctccgcgagctc

SEQ ID NO: 234650 - DNA, 120 bp, Artificial Sequence
  ENSG00000119906_58 (sequence is synthesized)
ggctactgggagttggagtttgcttctctgtagttgggcagctgctcttggtctagtgaccaccagcctggacagctacggagaacccgccttaggtagaaagaaagtgatttttttcct

SEQ ID NO: 234651 - DNA, 120 bp, Artificial Sequence
  ENSG00000119906_59 (sequence is synthesized)
ttgcaagagtttgacccgggaccctaactgcttaatgcatatttagatcgttttctgtacgttgtcagttctactgatcctagtggtttagtaatataaaccttttctatgttgtgggtg

SEQ ID NO: 234652 - DNA, 120 bp, Artificial Sequence
  ENSG00000119906_60 (sequence is synthesized)
aaattatgtaacctgtgatgagggaatcccttccacgaattactttgtagtccagcgtgcacgctagttcatacttaaaagaacttgcagatttggaatgtgacgtgttttctctttcag

SEQ ID NO: 234653 - DNA, 120 bp, Artificial Sequence
  ENSG00000119906_61 (sequence is synthesized)
taacttcacgcctctccaagaggctaatttttttgtaaagattttgtgggagctatgtaatgagatggggagtttcatctaatgacatcctctgacaataaaacatgtttaaattcccta

SEQ ID NO: 234654 - DNA, 120 bp, Artificial Sequence
  ENSG00000119906_62 (sequence is synthesized)
tttgctaaatttaacattttgcttgtttgtgtggcttacttttaatttaccttttttaaaaaatcatgagaaattagcgtgcattttggactctgttgtcaactgtgttagaataagata

SEQ ID NO: 234655 - DNA, 120 bp, Artificial Sequence
  ENSG00000119906_63 (sequence is synthesized)
tgttggccggacgcagtggctcatgcctgtaatcacaacactttgggagacccaggcaagattacttgagcccaggagttcaaggctgcggtgagtcgtgatggcgccacttcactgcag

SEQ ID NO: 234656 - DNA, 89 bp, Artificial Sequence
  ENSG00000119906_64 (sequence is synthesized)
caaggctgcggtgagtcgtgatggcgccacttcactgcagcctgggtggcagagtgagacccagtctcaaatgaaaaaaagaagtactt

SEQ ID NO: 234657 - DNA, 120 bp, Artificial Sequence
  ENSG00000119906_65 (sequence is synthesized)
ctacaaaaaatacaaaaattagccagtcatggtgccacatacctatggtcccagctactcaacaggctgaggttgggaggatcacctgagcccaaggaggtcaaggctgtagtgagctgt

SEQ ID NO: 234658 - DNA, 90 bp, Artificial Sequence
  ENSG00000119906_66 (sequence is synthesized)
caaggaggtcaaggctgtatctgggtgacagaataagaccccgtctcaaaaaaaaaaaaagtggggggccaggcgcagtggctcacgcct

SEQ ID NO: 234659 - DNA, 120 bp, Artificial Sequence
  ENSG00000119906_67 (sequence is synthesized)
gagccatcttctacatagctctctaacaccaacagcaatgaggatagtaccatataaaaagtagcttgttcaagagaaaactgatgcataatgatagaaatcattagtgtttgccttgag

SEQ ID NO: 234660 - DNA, 120 bp, Artificial Sequence
  ENSG00000119906_68 (sequence is synthesized)
tcagggatagcagattgacttggatttggcataaagagacttttgaggggaatggaaatgttctatttcttgatttggatggtggttacattagtatatatgattatcaaaacttaaaat

SEQ ID NO: 234661 - DNA, 120 bp, Artificial Sequence
  ENSG00000119906_69 (sequence is synthesized)
gtaaattatacctcgataaaacatagtttttaaaaagtagcccagaatttcttaaagtgagttatatattttgtgcctaacttcacattgctttactcacttctcaatagttctgaaaca

SEQ ID NO: 234662 - DNA, 120 bp, Artificial Sequence
  ENSG00000119912_0 (sequence is synthesized)
atgcgcagtgcgcagggccggctcgaagcgcaagcaggaagcgtttgcggtgatcccggcgactgcgctggctaatgcggtaccggctagcgtggcttctgcaccccgcactgcccagca

SEQ ID NO: 234663 - DNA, 120 bp, Artificial Sequence
  ENSG00000119912_1 (sequence is synthesized)
ccttccgctcagtcctcggcgcccgcctgccgcctccggagcgcctgtgtggtttccaaaaaaagacttacagcaaaatgaataatccagccatcaagagaataggaaatcacattacca

SEQ ID NO: 234664 - DNA, 120 bp, Artificial Sequence
  ENSG00000119912_2 (sequence is synthesized)
agtctcctgaagacaagcgagaatatcgagggctagagctggccaatggtatcaaagtacttcttatcagtgatcccaccacggataagtcatcagcagcacttgatgtgcacataggtt

SEQ ID NO: 234665 - DNA, 120 bp, Artificial Sequence
  ENSG00000119912_3 (sequence is synthesized)
cattgtcggatcctccaaatattgctggcttaagtcatttttgtgaacatatgctttttttgggaacaaagaaataccctaaagaaaatgaatacagccagtttctcagtgagcatgcag

SEQ ID NO: 234666 - DNA, 120 bp, Artificial Sequence
  ENSG00000119912_4 (sequence is synthesized)
gaagttcaaatgcctttactagtggagagcataccaattactattttgatgtttctcatgaacacctagaaggtgccctagacaggtttgcacagttttttctgtgccccttgttcgatg

SEQ ID NO: 234667 - DNA, 120 bp, Artificial Sequence
  ENSG00000119912_5 (sequence is synthesized)
aaagttgcaaagacagagaggtgaatgcagttgattcagaacatgagaagaatgtgatgaatgatgcctggagactctttcaattggaaaaagctacagggaatcctaaacaccccttca

SEQ ID NO: 234668 - DNA, 120 bp, Artificial Sequence
  ENSG00000119912_6 (sequence is synthesized)
gtaaatttgggacaggtaacaaatatactctggagactagaccaaaccaagaaggcattgatgtaagacaagagctactgaaattccattctgcttactattcatccaacttaatggctg

SEQ ID NO: 234669 - DNA, 120 bp, Artificial Sequence
  ENSG00000119912_7 (sequence is synthesized)
tttgtgttttaggtcgagaatctttagatgacttgactaatctggtggtaaagttattttctgaagtagagaacaaaaatgttccattgccagaatttcctgaacaccctttccaagaag

SEQ ID NO: 234670 - DNA, 120 bp, Artificial Sequence
  ENSG00000119912_8 (sequence is synthesized)
aacatcttaaacaactttacaaaatagtacccattaaagatattaggaatctctatgtgacatttcccatacctgaccttcagaaatactacaaatcaaatcctggtcattatcttggtc

SEQ ID NO: 234671 - DNA, 120 bp, Artificial Sequence
  ENSG00000119912_9 (sequence is synthesized)
atctcattgggcatgaaggtcctggaagtctgttatcagaacttaagtcaaagggctgggttaatactcttgttggtgggcagaaggaaggagcccgaggttttatgttttttatcatta

SEQ ID NO: 234672 - DNA, 120 bp, Artificial Sequence
  ENSG00000119912_10 (sequence is synthesized)
atgtggacttgaccgaggaaggattattacatgttgaagatataattttgcacatgtttcaatacattcagaagttacgtgcagaaggacctcaagaatgggttttccaagagtgcaagg

SEQ ID NO: 234673 - DNA, 120 bp, Artificial Sequence
  ENSG00000119912_11 (sequence is synthesized)
acttgaatgctgttgcttttaggtttaaagacaaagagaggccacggggctatacatctaagattgcaggaatattgcattattatcccctagaagaggtgctcacagcggaatatttac

SEQ ID NO: 234674 - DNA, 120 bp, Artificial Sequence
  ENSG00000119912_12 (sequence is synthesized)
tggaagaatttagacctgacttaatagagatggttctcgataaactcagaccagaaaatgtccgggttgccatagtttctaaatcttttgaaggaaaaactgatcgcacagaagagtggt

SEQ ID NO: 234675 - DNA, 120 bp, Artificial Sequence
  ENSG00000119912_13 (sequence is synthesized)
atggaacccagtacaaacaagaagctataccggatgaagtcatcaagaaatggcaaaatgctgacctgaatgggaaatttaaacttcctacaaagaatgaatttattcctacgaattttg

SEQ ID NO: 234676 - DNA, 120 bp, Artificial Sequence
  ENSG00000119912_14 (sequence is synthesized)
agattttaccgttagaaaaagaggcgacaccataccctgctcttattaaggatacagctatgagcaaactttggttcaaacaagatgataagttttttttgccgaaggcttgtctcaact

SEQ ID NO: 234677 - DNA, 120 bp, Artificial Sequence
  ENSG00000119912_15 (sequence is synthesized)
ttgaatttttcagcccatttgcttatgtggaccccttgcactgtaacatggcctatttgtaccttgagctcctcaaagactcactcaacgagtatgcatatgcagcagagctagcaggct

SEQ ID NO: 234678 - DNA, 120 bp, Artificial Sequence
  ENSG00000119912_16 (sequence is synthesized)
tgagctatgatctccaaaataccatctatgggatgtatctttcagtgaaaggttacaatgacaagcagccaattttactaaagaagattattgagaaaatggctacctttgagattgatg

SEQ ID NO: 234679 - DNA, 120 bp, Artificial Sequence
  ENSG00000119912_17 (sequence is synthesized)
aaaaaagatttgaaattatcaaagaagcatatatgcgatctcttaacaatttccgggctgaacagcctcaccagcatgccatgtactacctccgcttgctgatgactgaagtggcctgga

SEQ ID NO: 234680 - DNA, 120 bp, Artificial Sequence
  ENSG00000119912_18 (sequence is synthesized)
ctaaagatgagttaaaagaagctctggatgatgtaacccttcctcgccttaaggccttcatacctcagctcctgtcacggctgcacattgaagcccttctccatggaaacataacaaagc

SEQ ID NO: 234681 - DNA, 120 bp, Artificial Sequence
  ENSG00000119912_19 (sequence is synthesized)
aggctgcattaggaattatgcagatggttgaagacaccctcattgaacatgctcataccaaacctctccttccaagtcagctggttcggtatagagaagttcagctccctgacagaggat

SEQ ID NO: 234682 - DNA, 120 bp, Artificial Sequence
  ENSG00000119912_20 (sequence is synthesized)
ggtttgtttatcagcagagaaatgaagttcacaataactgtggcatcgagatatactaccaaacagacatgcaaagcacctcagagaatatgtttctggagctcttctgtcagattatct

SEQ ID NO: 234683 - DNA, 120 bp, Artificial Sequence
  ENSG00000119912_21 (sequence is synthesized)
cggaaccttgcttcaacaccctgcgcaccaaggagcagttgggctatatcgtcttcagcgggccacgtcgagctaatggcatacagggcttgagattcatcatccagtcagaaaagccac

SEQ ID NO: 234684 - DNA, 120 bp, Artificial Sequence
  ENSG00000119912_22 (sequence is synthesized)
ctcactacctagaaagcagagtggaagctttcttaattaccatggaaaagtccatagaggacatgacagaagaggccttccaaaaacacattcaggcattagcaattcgtcgactagaca

SEQ ID NO: 234685 - DNA, 120 bp, Artificial Sequence
  ENSG00000119912_23 (sequence is synthesized)
aaccaaagaagctatctgctgagtgtgctaaatactggggagaaatcatctcccagcaatataattttgacagagataacactgaggttgcatatttaaagacacttaccaaggaagata

SEQ ID NO: 234686 - DNA, 120 bp, Artificial Sequence
  ENSG00000119912_24 (sequence is synthesized)
aaggaaatgttggcagtagatgctccaaggagacataaggtatccgtccatgttcttgccagggaaatggattcttgtcctgttgttggagagttcccatgtcaaaatgacataaatttg

SEQ ID NO: 234687 - DNA, 120 bp, Artificial Sequence
  ENSG00000119912_25 (sequence is synthesized)
tcacaagcaccagccttgccacaacctgaagtgattcagaacatgaccgaattcaagcgtggtctgccactgtttccccttgtgaaaccacatattaacttcatggctgcaaaactctga

SEQ ID NO: 234688 - DNA, 120 bp, Artificial Sequence
  ENSG00000119912_26 (sequence is synthesized)
agattccccatgcatgggaaagtgcaagtggatgcattcctgagtcttccagagcctaagaaaatcatcttggccactttaatagtttctgattcactattagagaaacaaacaaaaaat

SEQ ID NO: 234689 - DNA, 120 bp, Artificial Sequence
  ENSG00000119912_27 (sequence is synthesized)
taaatccaaagtaaattacaaaatcttatagatgtagaatattttttaaatacatgcctcttaaatattttaaaatttttcttttgattactgagagaaatttccccaatataacaatgc

SEQ ID NO: 234690 - DNA, 120 bp, Artificial Sequence
  ENSG00000119912_28 (sequence is synthesized)
gagagaaatttccccaatataacaatgcttaaaatgaatgatattcctatagaatcttccttccctattctgtaaaatagtcacttgtccgaagaaagttaaaagttagctcttttctaa

SEQ ID NO: 234691 - DNA, 120 bp, Artificial Sequence
  ENSG00000119912_29 (sequence is synthesized)
aagcctcctagcttgacatagaaggcttcacaacatttagaaaggtaataactttttaaaaattgatcctcaaatttgctttctacttgatggtttcatgtaaatcagtggaaaacatta

SEQ ID NO: 234692 - DNA, 120 bp, Artificial Sequence
  ENSG00000119912_30 (sequence is synthesized)
catttggcagatgataaagcaatgtcatcttttattagtgaaatgctggttatataaggcatggttttaatctttttataaaatttgaacatgttttttatgccaactcgtaaaatgcta

SEQ ID NO: 234693 - DNA, 120 bp, Artificial Sequence
  ENSG00000119912_31 (sequence is synthesized)
gaaaaccctacttatttacaatgctagaaatacagacttaccttacatcaattttgtcctaaaccgaatttctcaggattactgtggtttctttcattctgattgaattatattgaccta

SEQ ID NO: 234694 - DNA, 120 bp, Artificial Sequence
  ENSG00000119912_32 (sequence is synthesized)
cttcttcatagttggtttgcagtgttccatgagttttacttttcctcatcaacatattgctttaacacaacatatttatttaacacgtacaaatagggtcaacttcagatcctactgagt

SEQ ID NO: 234695 - DNA, 120 bp, Artificial Sequence
  ENSG00000119912_33 (sequence is synthesized)
gtgtgacatgcttttccaacatcagctttttgtaaccacctgtataactttttattacagtgaaattgcagtcagtatgtgaaccaaaatatcttgcccctttatgaatttaaaaggcag

SEQ ID NO: 234696 - DNA, 120 bp, Artificial Sequence
  ENSG00000119912_34 (sequence is synthesized)
ccaatacaaagccacctttttggaaatataaaaagtaaagccttgcattcttatatagcaggtcttcataaaactctaaaatcccttgttgctaccagtctaatcttgccttaaatgtta

SEQ ID NO: 234697 - DNA, 120 bp, Artificial Sequence
  ENSG00000119912_35 (sequence is synthesized)
tttgaatatataaatataaacatataaacacagatgatgactggagtagacttttaaaaaaatatttttttcatgagatactattttaggtgaaattgttactgtagatttaacagctgt

SEQ ID NO: 234698 - DNA, 120 bp, Artificial Sequence
  ENSG00000119912_36 (sequence is synthesized)
acagctgttttgaaatatttactgttattaaaacttgcttcaagagaaattgtgaatatatttccatatacaagcactagtaacagtaagtggccctgtcatccactaactcaggcaaag

SEQ ID NO: 234699 - DNA, 120 bp, Artificial Sequence
  ENSG00000119912_37 (sequence is synthesized)
taaagaatggcatttttgaaggacattttacctccccatatgatttgattggctaggactttcttctgtaaagtcataccttttcacatcttaagtttttacatttgccattttccaaat

SEQ ID NO: 234700 - DNA, 120 bp, Artificial Sequence
  ENSG00000119912_38 (sequence is synthesized)
ctcaattttgggcaagaacgatatagtcacaactatggggctgctttcaaaagcggggctccatttctactgtcagatcaatgtggtgctgtaaccatctttttatccctaccttcaaga

SEQ ID NO: 234701 - DNA, 120 bp, Artificial Sequence
  ENSG00000119912_39 (sequence is synthesized)
acctccttatatgaagcctgtctttatccatcagaaggtgtgtgaaatcatcacttccttctggttttatgtatttgtagactatgcagcttttcattaaactgcaagtatatacaagac

SEQ ID NO: 234702 - DNA, 120 bp, Artificial Sequence
  ENSG00000119912_40 (sequence is synthesized)
agatctgaaattaggcctgagtgttccgatccaccactgtactagtaaataaaaatccacctaccttttatgtggaaaattatgtgctattgagtaacttttagctcttttttaaaaaat

SEQ ID NO: 234703 - DNA, 120 bp, Artificial Sequence
  ENSG00000119912_41 (sequence is synthesized)
gggtgaaatttaagtgtcttttttatgagaatgacacatgaagagatctgagagcaatctcatgtagtcttccatgaacctgcaattgtttggtatgcgtcagcattttccaatttccag

SEQ ID NO: 234704 - DNA, 120 bp, Artificial Sequence
  ENSG00000119912_42 (sequence is synthesized)
gttggatctagagctgctgttgatcactcaggcatactaatggattcatttagatgggtccaagctgcagtccatgagcaataacagactaccccagatactgcagtttacgcagtgctt

SEQ ID NO: 234705 - DNA, 120 bp, Artificial Sequence
  ENSG00000119912_43 (sequence is synthesized)
agtaaatgagatttgtggaactaagttattagttacctgaggcttcttaagaaagtcttcttttttgaccagttgatgtgaaagagggagcatgtgacacagccagtatggtggagtgct

SEQ ID NO: 234706 - DNA, 120 bp, Artificial Sequence
  ENSG00000119912_44 (sequence is synthesized)
agggttatcctgtttacaataaatcgcctgaatttcacctctggagtctgcatttgtattatttttccagttttagtgaaatagtacagtggccagtcctcagcctacctctcaacatcc

SEQ ID NO: 234707 - DNA, 120 bp, Artificial Sequence
  ENSG00000119912_45 (sequence is synthesized)
cagtttgaccagatttcttgctttcattgttcataatgcagaaagcagtgaattatattaacattttaaaagtgtttctgggtaacaatgatttttgtcaaatagaagactcaatttcac

SEQ ID NO: 234708 - DNA, 120 bp, Artificial Sequence
  ENSG00000119912_46 (sequence is synthesized)
aaccttaagaatagatcacttttgtaaaacaagaatctcagtatttgatgttggactccttgctgtgagtattgtcactgactccaaacccagaaagatttgttcctgcccttacaggga

SEQ ID NO: 234709 - DNA, 120 bp, Artificial Sequence
  ENSG00000119912_47 (sequence is synthesized)
tgaaaataaaaaggatagaaaaaatatttctctcctctacaatgagtccttacatcttcttgccacatctccagctgcagtttaggcagatatcttgttcaatctctgtcttcttgatcc

SEQ ID NO: 234710 - DNA, 120 bp, Artificial Sequence
  ENSG00000119912_48 (sequence is synthesized)
ctgtcaaaataatttttctactcatatagtggccagttggctcaggcaggcatttcaagaggaatctgcttgttcctcacttttccagcataggacagtggtccagcccgcacagtcagc

SEQ ID NO: 234711 - DNA, 120 bp, Artificial Sequence
  ENSG00000119912_49 (sequence is synthesized)
tacatttatgctgatcctctccattgcaacatgacatacctgtttatcaggttattgaaggatgatttaaaagagtatacatatgcagcacgcctctcaggtttgagctatggcattgca

SEQ ID NO: 234712 - DNA, 120 bp, Artificial Sequence
  ENSG00000119912_50 (sequence is synthesized)
agttgtaactgtagtaggtcagtgatacatggtgcaaaacagcctgggataatattgccagctgccagaccagactagggtggctcaaggggttgccatagtttctaaatcttttgaagg

SEQ ID NO: 234713 - DNA, 120 bp, Artificial Sequence
  ENSG00000119912_51 (sequence is synthesized)
ctttgataaaattgttggcttttggctgggtgcgatagctcacacctgtaatcctaacattttgggaagccgaggcaggaagatcgcttgagcctaggagttcgagaccagcctggacaa

SEQ ID NO: 234714 - DNA, 120 bp, Artificial Sequence
  ENSG00000119912_52 (sequence is synthesized)
cacagtgagaccttgactcaactttaaaaaacaaaatgttgactttgttatcagtacattagttatatttactgtgctacaagtagagtgaaacttttaatttgctgccaaacaagccaa

SEQ ID NO: 234715 - DNA, 120 bp, Artificial Sequence
  ENSG00000119912_53 (sequence is synthesized)
gcaggcacctgcctcaggcctttagcagtagctatttcttcagcctgggaagttctccactccaccccttagatatccccagggctcactcccttgcctccttcaggtctgagtccagat

SEQ ID NO: 234716 - DNA, 120 bp, Artificial Sequence
  ENSG00000119912_54 (sequence is synthesized)
ttcagacatcttcttttttttcctcataagaaatagcctcaagaattcaaccatatcctcaggaaatcatattaaccggtgttcaatatcttgatccatctcaaaaggccatatcacatt

SEQ ID NO: 234717 - DNA, 120 bp, Artificial Sequence
  ENSG00000119912_55 (sequence is synthesized)
ctgccgcctccggagcgcctgtgtgggaactaccaggttgtttttcaaagcagcggcactattttgcatttccaccagcagtgtgtgaaaattccaatttctctatatccttgacaacac

SEQ ID NO: 234718 - DNA, 120 bp, Artificial Sequence
  ENSG00000119912_56 (sequence is synthesized)
ttgctatatgtacttttgttataagccatcctggtgggtatgaagtggtgtctcattggaattttgactttcattttcctgatgaccattgtaagagttttaaaatatattctctaggcc

SEQ ID NO: 234719 - DNA, 90 bp, Artificial Sequence
  ENSG00000119912_57 (sequence is synthesized)
ggatgaggcaggtggatcacctgcaagctcctgcatgtggcatctgaaagctatctgtgaagaggttcaagcaattcttctgcctcagcc

SEQ ID NO: 234720 - DNA, 120 bp, Artificial Sequence
  ENSG00000119912_58 (sequence is synthesized)
tctacttaaagcttaatgctttcttcatttttttcctaaattcattttggtttattctgatattgactgtttatacttttaaataacttgtagttctattaaagctggctgtgtatatgt

SEQ ID NO: 234721 - DNA, 120 bp, Artificial Sequence
  ENSG00000119912_59 (sequence is synthesized)
tttataaaaacagtggtgggcaggatggctatagttaacagtaacatatacttttaaataggtagaaggaagatattgaacattcccaacccaaacaaatgataaataaacttgagatga

SEQ ID NO: 234722 - DNA, 120 bp, Artificial Sequence
  ENSG00000119912_60 (sequence is synthesized)
acccaaacaaatgataaataaacttgagatgatggatatgcttagtaccctgatgtgatcactatacattatatgtatatataataacattatatactctatgaatatctacaattatta

SEQ ID NO: 234723 - DNA, 120 bp, Artificial Sequence
  ENSG00000119912_61 (sequence is synthesized)
cacataccctgcatttctaacttgtcagttctgccacaccatctggggtaggcagttccttctccttcttcactactaccagtgcgcacgcacacacgcacgcatgcacacacacacaca

SEQ ID NO: 234724 - DNA, 120 bp, Artificial Sequence
  ENSG00000119913_0 (sequence is synthesized)
aggctcaggccctggaaggaccgtaaacatttggccagcttggtttggatacctggcagagaccaggttctgagaagcaatggtgacgaaggcctttgtcttgttggccatctttgcaga

SEQ ID NO: 234725 - DNA, 120 bp, Artificial Sequence
  ENSG00000119913_1 (sequence is synthesized)
agcctctgcaaaatcgtgtgctccaaataaagcagatgtcattcttgtgttttgctatcccaaaaccatcatcaccaaaatccccgagtgtccctatggatgggaagttcatcagctggc

SEQ ID NO: 234726 - DNA, 120 bp, Artificial Sequence
  ENSG00000119913_2 (sequence is synthesized)
cctcggagggctgtgttacaatggggtccacgaaggaggttactaccaatttgtgatcccagatttatcacctaaaaacaagtcctattgtggaacccagtctgagtacaagccacctat

SEQ ID NO: 234727 - DNA, 120 bp, Artificial Sequence
  ENSG00000119913_3 (sequence is synthesized)
ctatcacttctacagtcacatcgtttccaatgacaccacagtgattgtaaaaaaccagcctgtcaactactccttctcctgcacctaccactccacctacttggtgaaccaggctgcctt

SEQ ID NO: 234728 - DNA, 120 bp, Artificial Sequence
  ENSG00000119913_4 (sequence is synthesized)
tgaccagagagtggccactgttcacgtgaagaacgggagcatgggcacatttgagagccaactgtctctcaacttctacactaatgccaagttctccatcaagaaagaagctccctttgt

SEQ ID NO: 234729 - DNA, 120 bp, Artificial Sequence
  ENSG00000119913_5 (sequence is synthesized)
cctggaggcatccgaaatcggttcagatctgtttgcaggagtggaagccaaagggttaagcattaggtttaaagtggtcttgaacagctgttgggccaccccctcggctgacttcatgta

SEQ ID NO: 234730 - DNA, 120 bp, Artificial Sequence
  ENSG00000119913_6 (sequence is synthesized)
tcccttgcagtggcagctgatcaacaagggctgccccacggatgaaaccgtcctcgtgcatgagaatgggagagatcacagggcaaccttccaattcaatgctttccggttccagaacat

SEQ ID NO: 234731 - DNA, 120 bp, Artificial Sequence
  ENSG00000119913_7 (sequence is synthesized)
ccccaaactctccaaggtgtggttacactgtgagacgttcatctgcgacagtgagaaactctcctgcccagtgacctgcgataaacggaagcgcctcctgcgagaccagaccgggggagt

SEQ ID NO: 234732 - DNA, 120 bp, Artificial Sequence
  ENSG00000119913_8 (sequence is synthesized)
cctggtcgtggagctctccctgcggagcaggggattttccagtctctatagcttctcagatgttctccaccacctcatcatgatgttggggatttgtgccgtgttataggagttagccag

SEQ ID NO: 234733 - DNA, 120 bp, Artificial Sequence
  ENSG00000119913_9 (sequence is synthesized)
gcagctgccgctcctccacccacaatagtcctcagcgaatgacaaacacatttattgtgctgccaaaaagaacaaacagaagaccacattgttggggggcagagaatagcactttgccaa

SEQ ID NO: 234734 - DNA, 120 bp, Artificial Sequence
  ENSG00000119913_10 (sequence is synthesized)
atatgcactccaataatttctgtgaatttggtgatgcctttttctttctaagaaaaacttaggctacttcccgtggcccttagatctcacagtccttctacagctgggggaggagcctcc

SEQ ID NO: 234735 - DNA, 120 bp, Artificial Sequence
  ENSG00000119913_11 (sequence is synthesized)
gcagtaaattcctttgaaagctattttaactttaaaaggttagcagacccaaccaagtactgctgagcattttgaagagaatgtagggtgcaactacaaagtcaacactaaatgcacaac

SEQ ID NO: 234736 - DNA, 120 bp, Artificial Sequence
  ENSG00000119913_12 (sequence is synthesized)
gcacattaatagctgactttgccaaaaaggagctttgtcattgaggcagtgtcattctacttaaggaccagagctgagcccccacgcagggagttccaatctttcaactgatgacatggg

SEQ ID NO: 234737 - DNA, 120 bp, Artificial Sequence
  ENSG00000119913_13 (sequence is synthesized)
agatgatgtgggattcagagtggaatacaatagttttgctcaaacctaatgatataaaggaaatagattcttgaaagcccctagtactgacctaatttgtttttattataccatttgtta

SEQ ID NO: 234738 - DNA, 120 bp, Artificial Sequence
  ENSG00000119913_14 (sequence is synthesized)
aatatataaacatgatataggtagaaactccttgtttttatagcagatgtatacttctaaagtcaaaagaaaattacaaattaaataggaatatttacaaaaagaataatcacaagaaga

SEQ ID NO: 234739 - DNA, 120 bp, Artificial Sequence
  ENSG00000119913_15 (sequence is synthesized)
atacaactcacattaatttaacctaataacacggcattgccccagtgaaactgctgctggaaacatgactataaagtgactccaatgacacaagtgctgtgagtttggtgacccaatcct

SEQ ID NO: 234740 - DNA, 120 bp, Artificial Sequence
  ENSG00000119913_16 (sequence is synthesized)
acagataaatgccttgtgacactcaatgctattttttctctatttgctctactaagaagttttcatttataagaaatggtctgatctcatttagcttttacttaaacatcgaagcttaca

SEQ ID NO: 234741 - DNA, 120 bp, Artificial Sequence
  ENSG00000119913_17 (sequence is synthesized)
tctgtttttgtctcattcacttacaatcattagaatgaagctaacacaaaatcagaaacacaaatgcaaatgcagccaatgaaagcatgcagtagcacatcttggtaactggccacccca

SEQ ID NO: 234742 - DNA, 120 bp, Artificial Sequence
  ENSG00000119913_18 (sequence is synthesized)
gtgatccagaatatgcccatataaatgatttacattgtcaacaaaatacaaactgaatgaaccaattctggtagagaattggctggattgtgataggaaaaggcagagttctaagtcctt

SEQ ID NO: 234743 - DNA, 120 bp, Artificial Sequence
  ENSG00000119913_19 (sequence is synthesized)
agttatgtaaagacttaattagtaggcttataatttgaaaacaacacatgggtttgtctctctgtatttaaggtatttgagaagttttgcaatttgcagtttgatgattcttttacaact

SEQ ID NO: 234744 - DNA, 120 bp, Artificial Sequence
  ENSG00000119913_20 (sequence is synthesized)
tgtgttagtgaactcagagattaaactagttatgaaatctccggatacatgaagtgtatgtttgtttagtaataggctaaagtaaaatgactcaatttggtctagacttggtctctaagc

SEQ ID NO: 234745 - DNA, 120 bp, Artificial Sequence
  ENSG00000119913_21 (sequence is synthesized)
tggagttccaacgagtttaggatctcttctttctgtaaattcagagtttttatagtcaggaaaaacagaagacatattttattggttctagtagaaaactcttaaatagcatactcatag

SEQ ID NO: 234746 - DNA, 120 bp, Artificial Sequence
  ENSG00000119913_22 (sequence is synthesized)
ccatgttcaaatcctttgctgtcagaataaaccaatgttgtattagttttgctgtatttcatcattgtgttttatgatcttgtatctctacctggcgctatggaataaataaaatgcctt

SEQ ID NO: 234747 - DNA, 120 bp, Artificial Sequence
  ENSG00000119913_23 (sequence is synthesized)
tatagcttctcagcacacctgagtggcgcagagggggcgagatcaagaggtctccctctgaccagcccctgaactctgaagagagggaggaaccgaaggtaaatcggatgaagcagaact

SEQ ID NO: 234748 - DNA, 120 bp, Artificial Sequence
  ENSG00000119913_24 (sequence is synthesized)
ggacctcacttccccaagtcttagtaaagccatccccagatggcttcccttggattccaacatttacagaacaagattttcagtgatctgttcattcaacaaatatttgaattcttgtta

SEQ ID NO: 234749 - DNA, 120 bp, Artificial Sequence
  ENSG00000119913_25 (sequence is synthesized)
tggctctgtcttttattaactgagtgaccttgggcaatgacctcacccctcctccataccctagtttcctctgtgaaattgggctaataattgcccctatctacatggctgtggtataga

SEQ ID NO: 234750 - DNA, 120 bp, Artificial Sequence
  ENSG00000119913_26 (sequence is synthesized)
tatttaattacagctaagggcactgaacaatgcccagcaaacagcaaacacccagtcagggtcagccatgattatgatgactgtactgggaactggtcttgtggctactgccgtgaacaa

SEQ ID NO: 234751 - DNA, 120 bp, Artificial Sequence
  ENSG00000119913_27 (sequence is synthesized)
gacagacaaggccccttcccttgccaatatgtgtagagtatttggggttcaatgggggacgtgatttagagagcagccagggaagccccttagaggaagaaacatttcagctaagaccca

SEQ ID NO: 234752 - DNA, 120 bp, Artificial Sequence
  ENSG00000119913_28 (sequence is synthesized)
agatctcacctgaatgataagaaggaagcaactacatgaggagatggggtaagacagttcacttattaataatctcacagacagattttgctctcatcattacaggagaatcatgtaaat

SEQ ID NO: 234753 - DNA, 120 bp, Artificial Sequence
  ENSG00000119913_29 (sequence is synthesized)
atttgtcagaggtccacaacctaggtttatctgtcaggttctttgtactgataaatgtgagctacagaatccccaagggatgaacaaaatcgactttgtctaaaatgtgtggaattttat

SEQ ID NO: 234754 - DNA, 120 bp, Artificial Sequence
  ENSG00000119913_30 (sequence is synthesized)
gaagacccctgagttaactcttctgttgagttggctttacccttgtagaactgtctctgagtgccatctccctccccttctggtccacagatgttctccaccacctcatcatgatgttgg

SEQ ID NO: 234755 - DNA, 120 bp, Artificial Sequence
  ENSG00000119915_0 (sequence is synthesized)
gcaggaaagaggtcgcgccagcccgggcaggcagctttgcaagtccgcgttatatatcgcagtggctgcgcccgggatagctggctgcgccgccgcgcacatgcctaggttcgacgccct

SEQ ID NO: 234756 - DNA, 120 bp, Artificial Sequence
  ENSG00000119915_1 (sequence is synthesized)
cctccctttgcccaggagttccttctgtcccggctctgttccgtctcgccccgaggttcacgccatcctcggagccccagcctttcacccagcgcctccaagctttggaccttgacttct

SEQ ID NO: 234757 - DNA, 120 bp, Artificial Sequence
  ENSG00000119915_2 (sequence is synthesized)
gcaaaactagatggtcacagccatgaatgtctcacatgaagtaaatcagctgttccagccctataacttcgagctgtccaaggacatgaggccctttttcgaggagtattgggcaacctc

SEQ ID NO: 234758 - DNA, 120 bp, Artificial Sequence
  ENSG00000119915_3 (sequence is synthesized)
attccccatagccctgatctacctggttctcatcgctgtggggcagaactacatgaaggaacgcaagggcttcaacctgcaagggcctctcatcctctggtccttctgccttgcaatctt

SEQ ID NO: 234759 - DNA, 120 bp, Artificial Sequence
  ENSG00000119915_4 (sequence is synthesized)
cagtatcctgggggcagtgaggatgtggggcattatggggactgtgctacttaccgggggcctaaagcaaaccgtgtgcttcatcaacttcatcgataattccacagtcaaattctggtc

SEQ ID NO: 234760 - DNA, 120 bp, Artificial Sequence
  ENSG00000119915_5 (sequence is synthesized)
ttcactggtaccaccacagcacagtgctcgtgtacacaagctttggatacaagaacaaagtgcctgcaggaggctggttcgtcaccatgaactttggtgttcatgccatcatgtacacct

SEQ ID NO: 234761 - DNA, 120 bp, Artificial Sequence
  ENSG00000119915_6 (sequence is synthesized)
actacactctgaaggctgccaacgtgaagccccccaagatgctgcccatgctcatcaccagcctgcagatcttgcagatgtttgtaggagccatcgtcagcatcctcacgtacatctgga

SEQ ID NO: 234762 - DNA, 120 bp, Artificial Sequence
  ENSG00000119915_7 (sequence is synthesized)
ggcaggatcagggatgccacaccacgatggaacacttattctggtccttcatcttgtatatgacctatttcatcctctttgcccacttcttctgccagacctacatcaggcccaaggtca

SEQ ID NO: 234763 - DNA, 120 bp, Artificial Sequence
  ENSG00000119915_8 (sequence is synthesized)
aagccaagaccaagagccagtgaaggtttggagagaacaatgaagctccaggctctctcttctccagggcaccaagaggctgggcttagttttgggagaatgattaggttgccttacctg

SEQ ID NO: 234764 - DNA, 120 bp, Artificial Sequence
  ENSG00000119915_9 (sequence is synthesized)
catggtttccccagaggatgtgtgccccaaggtggctggaatttttgacagacaagaagggtgaccttgggatgggggtgtggtctgttactttaatgtttctgtttttaatgtgaaggc

SEQ ID NO: 234765 - DNA, 120 bp, Artificial Sequence
  ENSG00000119915_10 (sequence is synthesized)
caagcaggccctgggatgggagtggggcggaggagggtcctaagagctgattatttaatttctatccagaaatctttcttcttcttgctctgtttttttaaattaaagatttcaacaaaa

SEQ ID NO: 234766 - DNA, 120 bp, Artificial Sequence
  ENSG00000119917_0 (sequence is synthesized)
tttcctttcccctttcataaaagcacagacctaacagcaccctgggtggaaacctcttcagcatttgcttggaatcagtaagctaaaaacaaaatcaaccgggaccccagcttttcagaa

SEQ ID NO: 234767 - DNA, 120 bp, Artificial Sequence
  ENSG00000119917_1 (sequence is synthesized)
ctgcagggaaacagccatcatgagtgaggtcaccaagaattccctggagaaaatccttccacagctgaaatgccatttcacctggaacttattcaaggaagacagtgtctcaagggatct

SEQ ID NO: 234768 - DNA, 120 bp, Artificial Sequence
  ENSG00000119917_2 (sequence is synthesized)
agaagatagagtgtgtaaccagattgaatttttaaacactgagttcaaagctacaatgtacaacttgttggcctacataaaacacctagatggtaacaacgaggcagccctggaatgctt

SEQ ID NO: 234769 - DNA, 120 bp, Artificial Sequence
  ENSG00000119917_3 (sequence is synthesized)
acggcaagctgaagagttaatccagcaagaacatgctgaccaagcagaaatcagaagtctagtcacttggggaaactacgcctgggtctactatcacttgggcagactctcagatgctca

SEQ ID NO: 234770 - DNA, 120 bp, Artificial Sequence
  ENSG00000119917_4 (sequence is synthesized)
gatttatgtagataaggtgaaacaaacctgcaagaaattttcaaatccatacagtattgagtattctgaacttgactgtgaggaagggtggacacaactgaagtgtggaagaaatgaaag

SEQ ID NO: 234771 - DNA, 120 bp, Artificial Sequence
  ENSG00000119917_5 (sequence is synthesized)
ggcgaaggtgtgttttgagaaggctctggaagaaaagcccaacaacccagaattctcctctggactggcaattgcgatgtaccatctggataatcacccagagaaacagttctctactga

SEQ ID NO: 234772 - DNA, 120 bp, Artificial Sequence
  ENSG00000119917_6 (sequence is synthesized)
tgttttgaagcaggccattgagctgagtcctgataaccaatacgtcaaggttctcttgggcctgaaactgcagaagatgaataaagaagctgaaggagagcagtttgttgaagaagcctt

SEQ ID NO: 234773 - DNA, 120 bp, Artificial Sequence
  ENSG00000119917_7 (sequence is synthesized)
ggaaaagtctccttgccaaacagatgtcctccgcagtgcagccaaattttacagaagaaaaggtgacctagacaaagctattgaactgtttcaacgggtgttggaatccacaccaaacaa

SEQ ID NO: 234774 - DNA, 120 bp, Artificial Sequence
  ENSG00000119917_8 (sequence is synthesized)
tggctacctctatcaccagattgggtgctgctacaaggcaaaagtaagacaaatgcagaatacaggagaatctgaagctagtggaaataaagagatgattgaagcactaaagcaatatgc

SEQ ID NO: 234775 - DNA, 120 bp, Artificial Sequence
  ENSG00000119917_9 (sequence is synthesized)
tatggactattcgaataaagctcttgagaagggactgaatcctctgaatgcatactccgatctcgctgagttcctggagacggaatgttatcagacaccattcaataaggaagtccctga

SEQ ID NO: 234776 - DNA, 120 bp, Artificial Sequence
  ENSG00000119917_10 (sequence is synthesized)
aagtctgaagacactgctgtgcaacatggtttagagggtttgtccataagcaaaaaatcaactgacaaggaagagatcaaagaccaaccacagaatgtatctgaaaatctgcttccacaa

SEQ ID NO: 234777 - DNA, 120 bp, Artificial Sequence
  ENSG00000119917_11 (sequence is synthesized)
aatgcaccaaattattggtatcttcaaggattaattcataagcagaatggagatctgctgcaagcagccaaatgttatgagaaggaactgggccgcctgctaagggatgccccttcaggc

SEQ ID NO: 234778 - DNA, 120 bp, Artificial Sequence
  ENSG00000119917_12 (sequence is synthesized)
ataggcagtattttcctgtcagcatctgagcttgaggatggtagtgaggaaatgggccagggcgcagtcagctccagtcccagagagctcctctctaactcagagcaactgaactgagac

SEQ ID NO: 234779 - DNA, 120 bp, Artificial Sequence
  ENSG00000119917_13 (sequence is synthesized)
agaggaggaaaacagagcatcagaagcctgcagtggtggttgtgacgggtaggacgataggaagacagggggccccaacctgggattgctgagcagggaagctttgcatgttgctctaag

SEQ ID NO: 234780 - DNA, 60 bp, Artificial Sequence
  ENSG00000119917_14 (sequence is synthesized)
tgggattgctgagcagggaagctttgcatgttgctctaaggtacatttttaaagagttgt

SEQ ID NO: 234781 - DNA, 64 bp, Artificial Sequence
  ENSG00000119917_15 (sequence is synthesized)
ttttctcatgttcattatagttcattacagttacatagtccgaaggtcttacaactaatcactg

SEQ ID NO: 234782 - DNA, 120 bp, Artificial Sequence
  ENSG00000119917_16 (sequence is synthesized)
ttacagttacatagtccgaaggtcttacaactaatcactggtagcaataaatgcttcaggcccacatgatgctgattagttctcagttttcattcagttcacaatataaccaccattcct

SEQ ID NO: 234783 - DNA, 120 bp, Artificial Sequence
  ENSG00000119917_17 (sequence is synthesized)
gccctccctgccaagggtcataaatggtgactgcctaacaacaaaatttgcagtctcatctcattttcatccagacttctggaactcaaagattaacttttgactaaccctggaatatct

SEQ ID NO: 234784 - DNA, 120 bp, Artificial Sequence
  ENSG00000119917_18 (sequence is synthesized)
cttatctcacttatagcttcaggcatgtatttatatgtattcttgatagcaataccataatcaatgtgtattcctgatagtaatgctacaataaatccaaacatttcaactctgttagaa

SEQ ID NO: 234785 - DNA, 120 bp, Artificial Sequence
  ENSG00000119919_0 (sequence is synthesized)
agtggctgtaacaaaacccagacccccaggtcccggccaatggaggcgatttagactggagtgggaccgcgtctgtcaaaagcccgactcggcagcagcggcggagtccaggaggagagc

SEQ ID NO: 234786 - DNA, 120 bp, Artificial Sequence
  ENSG00000119919_1 (sequence is synthesized)
tggagccgccgcgctgcctccccgcccccgccgggatttattatttggactggacaattaagtggccctgatgatgttaccaagcccggtcacctccacccctttctcagtcaaagacat

SEQ ID NO: 234787 - DNA, 120 bp, Artificial Sequence
  ENSG00000119919_2 (sequence is synthesized)
tttgaatctggagcagcagcaccagcacttccatggtgcgcacttgcaggcggacttggagcaccacttccactctgcgccctgcatgctggccgccgctgaggggacgcaattttctga

SEQ ID NO: 234788 - DNA, 120 bp, Artificial Sequence
  ENSG00000119919_3 (sequence is synthesized)
cggaggggaggaggacgaggaagacgagggcgagaaattgtcctatttgaactcactagccgcagcagacggccacggggattcagggctgtgtccccagggctatgtccacacggtcct

SEQ ID NO: 234789 - DNA, 120 bp, Artificial Sequence
  ENSG00000119919_4 (sequence is synthesized)
gcgagactcgtgcagcgagcccaaggaacatgaagaggagcccgaggtcgtgagggaccggagccaaaaaagctgccagctgaagaagtctctagagacggccggagactgcaaggcggc

SEQ ID NO: 234790 - DNA, 120 bp, Artificial Sequence
  ENSG00000119919_5 (sequence is synthesized)
ggaggagagcgagaggccgaagccacgcagccgccggaagccccgggtcctcttctcgcaagcccaggtcttcgagctggaacgcaggttcaagcagcagcggtacctgtcggcacccga

SEQ ID NO: 234791 - DNA, 120 bp, Artificial Sequence
  ENSG00000119919_6 (sequence is synthesized)
gcgcgagcacctcgccagcagcctgaagctcacatccactcaggtgaaaatctggttccagaatcgcaggtacaagtgcaagagacagcggcaggacaagtctctggagcttggcgcaca

SEQ ID NO: 234792 - DNA, 120 bp, Artificial Sequence
  ENSG00000119919_7 (sequence is synthesized)
cgccgccgccgcgccgcgtggctgtcccggtgctggtgcgggacggcaagccgtgcgtcacgcccagcgcgcaggcctacggcgcgccctacagcgtgggcgccagcgcctactcctaca

SEQ ID NO: 234793 - DNA, 80 bp, Artificial Sequence
  ENSG00000119919_8 (sequence is synthesized)
tacagcagcagctatggctgtgcgtacccggcgggcggcggcggcggcggcggcgggacctccgcggcgaccactgccat

SEQ ID NO: 234794 - DNA, 120 bp, Artificial Sequence
  ENSG00000119919_9 (sequence is synthesized)
gcagcccgcctgcagcgcggccggaggcggcccctttgtgaacgtgagcaacctaggaggcttcggcagcggcggcagcgcacagccgttgcaccagggtactgcagccggggccgcgtg

SEQ ID NO: 234795 - DNA, 120 bp, Artificial Sequence
  ENSG00000119919_10 (sequence is synthesized)
cgctcagggcaccttgcagggcatccgggcctggtagggacggggcgggtcacgcggcgggcaccccagcgcagcctggcgccgcgggactgaagctcgagaagggcctgacctaaaggt

SEQ ID NO: 234796 - DNA, 120 bp, Artificial Sequence
  ENSG00000119919_11 (sequence is synthesized)
caggtcccctcgttaaaaaaatatgtacgtctagctcctcagggcttcggatcgcagctcactcgaggcctggggaaggggactcaggggcgaggaggatgactgggtccggtcgccagg

SEQ ID NO: 234797 - DNA, 120 bp, Artificial Sequence
  ENSG00000119919_12 (sequence is synthesized)
actgtctctgaggcagaaacgccggctgggcgccggggaggacgatggccccgaccctggcagcgagaggagaccaggaggctaggaccctggccgcgcttggttcttccaaagcgagaa

SEQ ID NO: 234798 - DNA, 120 bp, Artificial Sequence
  ENSG00000119919_13 (sequence is synthesized)
gggcttctctccctctgcctttccgcggcctccgcgaagcgttggcggggagcccaaggacataacaaattaaaagcatgaaggagagaaaaatgggggtcgtggcttgagaaattccag

SEQ ID NO: 234799 - DNA, 120 bp, Artificial Sequence
  ENSG00000119919_14 (sequence is synthesized)
gccctaccgatcctctgccccctttgcgggcctggagcgccatagcacagtcgatttcgtttcgcagctgtctcccctccgcagcagatacctcggtccagatctccggattgtcggggg

SEQ ID NO: 234800 - DNA, 120 bp, Artificial Sequence
  ENSG00000119919_15 (sequence is synthesized)
acgcaggactcttcgaggaaaaccagccgaatgagatcaaaagttgggggtggggggaggctgaacaaactcaggacctggtggcccaccggaggtgttaccgggtttcctttctgtttc

SEQ ID NO: 234801 - DNA, 120 bp, Artificial Sequence
  ENSG00000119919_16 (sequence is synthesized)
gtattctgtattcagcacatgttatctatctatctatctatataactataaccacacgccgtgtagacacccgctgccacacactacaggagtcaataaacaaggtgcaatattttcaaa

SEQ ID NO: 234802 - DNA, 120 bp, Artificial Sequence
  ENSG00000119922_0 (sequence is synthesized)
ggcagaagaggaagatttctgaagagtgcagctgcctgaaccgagccctgccgaacagctgagaattgcactgcaaccatgagtgagaacaataagaattccttggagagcagcctacgg

SEQ ID NO: 234803 - DNA, 120 bp, Artificial Sequence
  ENSG00000119922_1 (sequence is synthesized)
caactaaaatgccatttcacctggaacttgatggagggagaaaactccttggatgattttgaagacaaagtattttaccggactgagtttcagaatcgtgaattcaaagccacaatgtgc

SEQ ID NO: 234804 - DNA, 120 bp, Artificial Sequence
  ENSG00000119922_2 (sequence is synthesized)
aacctactggcctatctaaagcacctcaaagggcaaaacgaggcagccctggaatgcttacgtaaagctgaagagttaatccagcaagagcatgctgaccaggcagaaatcagaagtctg

SEQ ID NO: 234805 - DNA, 120 bp, Artificial Sequence
  ENSG00000119922_3 (sequence is synthesized)
gtcacctggggaaactatgcctgggtctactatcacatgggccgactctcagacgttcagatttatgtagacaaggtgaaacatgtctgtgagaagttttccagtccctatagaattgag

SEQ ID NO: 234806 - DNA, 120 bp, Artificial Sequence
  ENSG00000119922_4 (sequence is synthesized)
agtccagagcttgactgtgaggaagggtggacacggttaaagtgtggaggaaaccaaaatgaaagagcgaaggtgtgctttgagaaggctctggaaaagaagccaaagaacccagaattc

SEQ ID NO: 234807 - DNA, 120 bp, Artificial Sequence
  ENSG00000119922_5 (sequence is synthesized)
acctctggactggcaatagcaagctaccgtctggacaactggccaccatctcagaacgccattgaccctctgaggcaagccattcggctgaatcctgacaaccagtaccttaaagtcctc

SEQ ID NO: 234808 - DNA, 120 bp, Artificial Sequence
  ENSG00000119922_6 (sequence is synthesized)
ctggctctgaagcttcataagatgcgtgaagaaggtgaagaggaaggtgaaggagagaagttagttgaagaagccttggagaaagccccaggtgtaacagatgttcttcgcagtgcagcc

SEQ ID NO: 234809 - DNA, 120 bp, Artificial Sequence
  ENSG00000119922_7 (sequence is synthesized)
aagttttatcgaagaaaagatgagccagacaaagcgattgaactgcttaaaaaggctttagaatacataccaaacaatgcctacctgcattgccaaattgggtgctgctatagggcaaaa

SEQ ID NO: 234810 - DNA, 120 bp, Artificial Sequence
  ENSG00000119922_8 (sequence is synthesized)
gtcttccaagtaatgaatctaagagagaatggaatgtatgggaaaagaaagttactggaactaataggacacgctgtggctcatctgaagaaagctgatgaggccaatgataatctcttc

SEQ ID NO: 234811 - DNA, 120 bp, Artificial Sequence
  ENSG00000119922_9 (sequence is synthesized)
cgtgtctgttccattcttgccagcctccatgctctagcagatcagtatgaagacgcagagtattacttccaaaaggaattcagtaaagagcttactcctgtagcgaaacaactgctccat

SEQ ID NO: 234812 - DNA, 120 bp, Artificial Sequence
  ENSG00000119922_10 (sequence is synthesized)
ctgcggtatggcaactttcagctgtaccaaatgaagtgtgaagacaaggccatccaccactttatagagggtgtaaaaataaaccagaaatcaagggagaaagaaaagatgaaagacaaa

SEQ ID NO: 234813 - DNA, 120 bp, Artificial Sequence
  ENSG00000119922_11 (sequence is synthesized)
ctgcaaaaaattgccaaaatgcgactttctaaaaatggagcagattctgaggctttgcatgtcttggcattccttcaggagctgaatgaaaaaatgcaacaagcagatgaagactctgag

SEQ ID NO: 234814 - DNA, 120 bp, Artificial Sequence
  ENSG00000119922_12 (sequence is synthesized)
aggggtttggagtctggaagcctcatcccttcagcatcaagctggaatggggaatgaagaatagagatgtggtgcccactaggctactgctgaaagggagctgaaattcctccaccaagt

SEQ ID NO: 234815 - DNA, 120 bp, Artificial Sequence
  ENSG00000119922_13 (sequence is synthesized)
tggtattcaaaatatgtaatgactggtatggcaaaagattggactaagacactggccataccactggacagggttatgttaacacctgaattgctgggtcttgagagagcccaaggagtt

SEQ ID NO: 234816 - DNA, 120 bp, Artificial Sequence
  ENSG00000119922_14 (sequence is synthesized)
cgggcttggtgatagaattatttctcgattgacttcttgagtgcaatttgaactgtaacatttgcttagtcacctttagtggagtaatctactgggcttgtttctatatttatataaagc

SEQ ID NO: 234817 - DNA, 120 bp, Artificial Sequence
  ENSG00000119922_15 (sequence is synthesized)
agccaaatccttcatgtaatattgaagtccatttttgcaatgttgttccatacttggagtcattttgcatcccatagaggttagtcctgcatagccagtaatgtgctaagttcatccaaa

SEQ ID NO: 234818 - DNA, 120 bp, Artificial Sequence
  ENSG00000119922_16 (sequence is synthesized)
agctggcggaccaaagtctaaatagggctcagtatcccccatcgcttatctctgcctccttcctcctccttcccagtctatcatcaaccttgagtattctacacaatgtgaattcaagtg

SEQ ID NO: 234819 - DNA, 120 bp, Artificial Sequence
  ENSG00000119922_17 (sequence is synthesized)
cctgattaattgaggtggcaacatagtttgagacgagggcagagaacaggaagatacatagctagaagcgacgggtacaaaaagcaatgtgtacaagaagactttcagcaagtatacaga

SEQ ID NO: 234820 - DNA, 120 bp, Artificial Sequence
  ENSG00000119922_18 (sequence is synthesized)
gagttcacctctactctgccctcctcatagtcataatgtagcaagtaaagaatgagaatggattctgtacaatacactagaaaccaacataatgtatttctttaaaacctgtgtgaaaaa

SEQ ID NO: 234821 - DNA, 120 bp, Artificial Sequence
  ENSG00000119922_19 (sequence is synthesized)
ataaatgttccaccagtagggataggggaaaagtaaccaaaagagagaaagagaaaggaatgctggtttatctttgtagattgtaatcgaatggagaaatttgcagtattttagccacta

SEQ ID NO: 234822 - DNA, 120 bp, Artificial Sequence
  ENSG00000119922_20 (sequence is synthesized)
ttaggaattttttttttttgtaaaatgaagactgaactctgttcaaatgctttcatgaacctggtttgagacggtaggaaagcaacaaaacgtgggaacctggtgactaagggcctggtg

SEQ ID NO: 234823 - DNA, 120 bp, Artificial Sequence
  ENSG00000119922_21 (sequence is synthesized)
caaggacttgggaaatgtcattgataatagatggtggggttttcccccctttagaaatgttggatattaagtgatataaacacttcttttaactccgaaaatcttctgagaaatcacaaa

SEQ ID NO: 234824 - DNA, 120 bp, Artificial Sequence
  ENSG00000119922_22 (sequence is synthesized)
attcacggtatgcttggaacgattgagattttctaggtagatgctgaatagcctagacatcaaagttggtgtgaaccaaaatagagtcagctgacccagcatcagccacactctgggttg

SEQ ID NO: 234825 - DNA, 120 bp, Artificial Sequence
  ENSG00000119922_23 (sequence is synthesized)
gaaaatgtttgcctgttggaattaatttaagcttaagtatatatcaacattattttattgtgcaattaaaacaatacaaattcatggttttttaaagttaaaaattctaaccactgtaac

SEQ ID NO: 234826 - DNA, 120 bp, Artificial Sequence
  ENSG00000119922_24 (sequence is synthesized)
aacagtttttgtgttattttctgtattaaacatcttgttgcacgcatttgaggtcatcagggtgcaaaatttgtattcctgaaaatgtcatatattttcattaataaataacctaaatat

SEQ ID NO: 234827 - DNA, 120 bp, Artificial Sequence
  ENSG00000119922_25 (sequence is synthesized)
gataaaacataaagcagtgttctggttcatctggaattttgctgtactttaaatctttcagactcagctactgataaatgaaacgttacacaggtgtgaaccaaatccaaataacctcga

SEQ ID NO: 234828 - DNA, 120 bp, Artificial Sequence
  ENSG00000119922_26 (sequence is synthesized)
ctggtctactatcataatcacctgaacagaacaaaactttttcctcagctttaagagtccagggcttcggataacagctgccatctgccacctgctaccattgacctacgtgaacacaga

SEQ ID NO: 234829 - DNA, 120 bp, Artificial Sequence
  ENSG00000119922_27 (sequence is synthesized)
cattctgtctccaccttgatggtgggtgggctgctccccttttctttgttaaattttgtgctttcatcacattttctctattctgacctctgttatgagaaataaaagtcactgattcca

SEQ ID NO: 234830 - DNA, 120 bp, Artificial Sequence
  ENSG00000119922_28 (sequence is synthesized)
gtagttatgttgtttgtacttgccaggatacacttccatttcatatttgcaagtacacataaaggtatccttcatcagcagcacagtgcttcctttcctctgaatctgccatcagctcag

SEQ ID NO: 234831 - DNA, 120 bp, Artificial Sequence
  ENSG00000119922_29 (sequence is synthesized)
ccatcagctcaggcagatttctaagcagcaaatcagcctttgccagaacactgcaggacaccagtgcagcgcccagcctgcgaccatgagctcgcctgcacccaggtgattaaaaagctt

SEQ ID NO: 234832 - DNA, 72 bp, Artificial Sequence
  ENSG00000119922_30 (sequence is synthesized)
gtggtctcttcacatggacgcgagtgacatttggtgccgtgactcggatcgcaagagaaagatccacctacg

SEQ ID NO: 234833 - DNA, 120 bp, Artificial Sequence
  ENSG00000119922_31 (sequence is synthesized)
aggaacatctcaccaattttaaatcggcacaaagatccctttgtacagaggcactgatttgtcttcttctggagtagcatcccagtttctcactgtggccaacaaagcgaataaaaagaa

SEQ ID NO: 234834 - DNA, 120 bp, Artificial Sequence
  ENSG00000119922_32 (sequence is synthesized)
cccagtttctcactgtggccaacaaagcgaataaaaagaaaaaaaggatctgaaatagcaatccagcggcagccaccaatacctgataatactatagtcaaagctccacattagagaaca

SEQ ID NO: 234835 - DNA, 120 bp, Artificial Sequence
  ENSG00000119927_0 (sequence is synthesized)
gcgccactgcagctggcattggccgggactggaagtgcgggcttctgcagcagccgaagctggagctgctagggcagcagcggctcccctgttgtatggacattctgcacccgaaactga

SEQ ID NO: 234836 - DNA, 120 bp, Artificial Sequence
  ENSG00000119927_1 (sequence is synthesized)
tagctgagtcctgaagttttatgttatgaaacagaagaactttcatcccagcacatgatttgggaattacactttgtgacatggatgaatctgcactgacccttggtacaatagatgttt

SEQ ID NO: 234837 - DNA, 120 bp, Artificial Sequence
  ENSG00000119927_2 (sequence is synthesized)
cttatctgccacattcatcagaatacagtgttggtcgatgtaagcacacaagtgaggaatggggtgagtgtggctttagacccaccatcttcagatctgcaactttaaaatggaaagaaa

SEQ ID NO: 234838 - DNA, 120 bp, Artificial Sequence
  ENSG00000119927_3 (sequence is synthesized)
gcctaatgagtcggaaaaggccatttgttggaagatgttgttactcctgcactccccagagctgggacaaatttttcaaccccagtatcccgtctttgggtttgcggaatgttatttata

SEQ ID NO: 234839 - DNA, 120 bp, Artificial Sequence
  ENSG00000119927_4 (sequence is synthesized)
tcaatgaaactcacacaagacaccgcggatggcttgcaagacgcctttcttacgttctttttattcaagagcgagatgtgcataagggcatgtttgccaccaatgtgactgaaaatgtgc

SEQ ID NO: 234840 - DNA, 120 bp, Artificial Sequence
  ENSG00000119927_5 (sequence is synthesized)
tgaacagcagtagagtacaagaggcaattgcagaagtggctgctgaattaaaccctgatggttctgcccagcagcaatcaaaagccgttaacaaagtgaaaaagaaagctaaaaggattc

SEQ ID NO: 234841 - DNA, 120 bp, Artificial Sequence
  ENSG00000119927_6 (sequence is synthesized)
ttcaagaaatggttgccactgtctcaccggcaatgatcagactgactgggtgggtgctgctaaaactgttcaacagcttcttttggaacattcaaattcacaaaggtcaacttgagatgg

SEQ ID NO: 234842 - DNA, 120 bp, Artificial Sequence
  ENSG00000119927_7 (sequence is synthesized)
ttaaagctgcaactgagacgaatttgccgcttctgtttctaccagttcatagatcccatattgactatctgctgctcactttcattctcttctgccataacatcaaagcaccatacattg

SEQ ID NO: 234843 - DNA, 120 bp, Artificial Sequence
  ENSG00000119927_8 (sequence is synthesized)
cttcaggcaataatctcaacatcccaatcttcagtaccttgatccataagcttgggggcttcttcatacgacgaaggctcgatgaaacaccagatggacggaaagatgttctctatagag

SEQ ID NO: 234844 - DNA, 120 bp, Artificial Sequence
  ENSG00000119927_9 (sequence is synthesized)
ctttgctccatgggcatatagttgaattacttcgacagcagcaattcttggagatcttcctggaaggcacacgttctaggagtggaaaaacctcttgtgctcgggcaggacttttgtcag

SEQ ID NO: 234845 - DNA, 120 bp, Artificial Sequence
  ENSG00000119927_10 (sequence is synthesized)
ttgtggtagatactctgtctaccaatgtcatcccagacatcttgataatacctgttggaatctcctatgatcgcattatcgaaggtcactacaatggtgaacaactgggcaaacctaaga

SEQ ID NO: 234846 - DNA, 120 bp, Artificial Sequence
  ENSG00000119927_11 (sequence is synthesized)
agaatgagagcctgtggagtgtagcaagaggtgttattagaatgttacgaaaaaactatggttgtgtccgagtggattttgcacagccattttccttaaaggaatatttagaaagccaaa

SEQ ID NO: 234847 - DNA, 120 bp, Artificial Sequence
  ENSG00000119927_12 (sequence is synthesized)
gtcagaaaccggtgtctgctctactttccctggagcaagcgttgttaccagctatacttccttcaagacccagtgatgctgctgatgaaggtagagacacgtccattaatgagtccagaa

SEQ ID NO: 234848 - DNA, 120 bp, Artificial Sequence
  ENSG00000119927_13 (sequence is synthesized)
atgcaacagatgaatccctacgaaggaggttgattgcaaatctggctgagcatattctattcactgctagcaagtcctgtgccattatgtccacacacattgtggcttgcctgctcctct

SEQ ID NO: 234849 - DNA, 120 bp, Artificial Sequence
  ENSG00000119927_14 (sequence is synthesized)
acagacacaggcagggaattgatctctccacattggtcgaagacttctttgtgatgaaagaggaagtcctggctcgtgattttgacctggggttctcaggaaattcagaagatgtagtaa

SEQ ID NO: 234850 - DNA, 120 bp, Artificial Sequence
  ENSG00000119927_15 (sequence is synthesized)
tgcatgccatacagctgctgggaaattgtgtcacaatcacccacactagcaggaacgatgagttttttatcacccccagcacaactgtcccatcagtcttcgaactcaacttctacagca

SEQ ID NO: 234851 - DNA, 120 bp, Artificial Sequence
  ENSG00000119927_16 (sequence is synthesized)
atggggtacttcatgtctttatcatggaggccatcatagcttgcagcctttatgcagttctgaacaagaggggactggggggtcccactagcaccccacctaacctgatcagccaggagc

SEQ ID NO: 234852 - DNA, 120 bp, Artificial Sequence
  ENSG00000119927_17 (sequence is synthesized)
agctggtgcggaaggcggccagcctgtgctaccttctctccaatgaaggcaccatctcactgccttgccagacattttaccaagtctgccatgaaacagtaggaaagtttatccagtatg

SEQ ID NO: 234853 - DNA, 120 bp, Artificial Sequence
  ENSG00000119927_18 (sequence is synthesized)
gcattcttacagtggcagagcacgatgaccaggaagatatcagtcctagtcttgctgagcagcagtgggacaagaagcttccagaacctttgtcttggagaagtgatgaagaagatgaag

SEQ ID NO: 234854 - DNA, 120 bp, Artificial Sequence
  ENSG00000119927_19 (sequence is synthesized)
acagtgactttggggaggaacagcgagattgctacctgaaggtgagccaatccaaggagcaccagcagtttatcaccttcttacagagactccttgggcctttgctggaggcctacagct

SEQ ID NO: 234855 - DNA, 120 bp, Artificial Sequence
  ENSG00000119927_20 (sequence is synthesized)
ctgctgccatctttgttcacaacttcagtggtcctgttccagaacctgagtatctgcaaaagttgcacaaatacctaataaccagaacagaaagaaatgttgcagtatatgctgagagtg

SEQ ID NO: 234856 - DNA, 120 bp, Artificial Sequence
  ENSG00000119927_21 (sequence is synthesized)
ccacatattgtcttgtgaagaatgctgtgaaaatgtttaaggatattggggttttcaaggagaccaaacaaaagagagtgtctgttttagaactgagcagcacttttctacctcaatgca

SEQ ID NO: 234857 - DNA, 120 bp, Artificial Sequence
  ENSG00000119927_22 (sequence is synthesized)
accgacaaaaacttctagaatatattctgagttttgtggtgctgtaggtaacgtgtggcactgctggcaaatgaaggtcatgagatgagttccttgtaggtaccagcttctggctcaaga

SEQ ID NO: 234858 - DNA, 120 bp, Artificial Sequence
  ENSG00000119927_23 (sequence is synthesized)
gttgaaggtgccatcgcagggtcaggcctgccctgtcccgaagtgatctcctggaagacaagtgccttctccctccatggatctgtgatcttcccagctctgcatcaacacagcagcctg

SEQ ID NO: 234859 - DNA, 120 bp, Artificial Sequence
  ENSG00000119927_24 (sequence is synthesized)
cagataacacttggggggacctcagcctctattcgcaactcataatccgtagactacaagatgaaatctcaataaattatttttgagtttattaaagattgacattttaagtacaacttt

SEQ ID NO: 234860 - DNA, 120 bp, Artificial Sequence
  ENSG00000119927_25 (sequence is synthesized)
taaggactaattactgtgatggacacagaaatgtagctgtgttctggaactgaatcttacatggtatacttagtgctgctgggtaatttgttggtatattatctggttagtggttaatgc

SEQ ID NO: 234861 - DNA, 120 bp, Artificial Sequence
  ENSG00000119927_26 (sequence is synthesized)
taattgagtcatccattcactctttttcagttttatctgtcaatagtagctacatttttaatgggagcaccttttatcccaaagtgctttataaattgagtggactgatatatatcacac

SEQ ID NO: 234862 - DNA, 120 bp, Artificial Sequence
  ENSG00000119927_27 (sequence is synthesized)
ccaggtatcactgtgctgtcctttgctgtcagatttagaaatgtttttaagagctatgtgaaaacagacaatattagtttaggtcgggaactgagatattgtaatcaaatagttaacatc

SEQ ID NO: 234863 - DNA, 120 bp, Artificial Sequence
  ENSG00000119927_28 (sequence is synthesized)
aggaagttaatttggctggcaaaattctagggaaacttggccagaaaactggtgttgaaggcttttgctcatataaacaagtgccattgagtttcaaatgaccagcaaatatatttagaa

SEQ ID NO: 234864 - DNA, 120 bp, Artificial Sequence
  ENSG00000119927_29 (sequence is synthesized)
cccttcctgttttatgtctgtacctcgtccacccctcaggtaatacctgcctctcacaggtacagctgtttcttggaaatcctccaaccaaatagcagttttcctaacttgattagcttg

SEQ ID NO: 234865 - DNA, 120 bp, Artificial Sequence
  ENSG00000119927_30 (sequence is synthesized)
agctgacagactgttagaatacagttctctggccacagctgatgagggctttctgtactgcacacagattgtgtactgcaccccagtccaggtgactggtacccactcgagttgtgccgt

SEQ ID NO: 234866 - DNA, 120 bp, Artificial Sequence
  ENSG00000119927_31 (sequence is synthesized)
gcacaacctgtccagtatatgcatgtggtggccctactgactggtaatggttagaggcatttatggatttttagctttgaggaaaaaccatgacttttaacaaatttttatgggttatat

SEQ ID NO: 234867 - DNA, 120 bp, Artificial Sequence
  ENSG00000119927_32 (sequence is synthesized)
gcctaaacccttatgccacatagtggtaaataattatgaaaaatggtctgttcataattggtaggtgccttttgtgagcagggagcataattattggtttattatggtaattatggtgat

SEQ ID NO: 234868 - DNA, 120 bp, Artificial Sequence
  ENSG00000119927_33 (sequence is synthesized)
tttttaaatatcatgtaatgttaaaacgttttctaacagtttactgttgcttatctccaagatattatggaattaagaatttttccagatgagtgttacatagattctttgaatttagta

SEQ ID NO: 234869 - DNA, 120 bp, Artificial Sequence
  ENSG00000119927_34 (sequence is synthesized)
taaaagtactgagaattaagtttgtacttccataagcttggattttaaacactgatagtatctcatgagtaatgtgtgttttgggagagggagggatgctgattgatatttcacattgta

SEQ ID NO: 234870 - DNA, 120 bp, Artificial Sequence
  ENSG00000119927_35 (sequence is synthesized)
tgaaataccatgtttgaaactcatagcaataatgctatgctgttgtgatccctctcaagttctgcatttaaaatatattttttctttataggaattgatgtataccatgaagtcattgtc

SEQ ID NO: 234871 - DNA, 120 bp, Artificial Sequence
  ENSG00000119927_36 (sequence is synthesized)
agttgtagtagctctgatgttgaatgagatatcatgttttagcattccattttactgactagggtagaagaacacttttcttggctacatttggaggatacccagggagtcttgggtgtt

SEQ ID NO: 234872 - DNA, 120 bp, Artificial Sequence
  ENSG00000119927_37 (sequence is synthesized)
ccttatctggggaagcaaacatttcactagtctctttttttcatcctttaaattgtaaattaaggattactcaagctcaccattattcaagattgggactcgcttcccagtcgacactct

SEQ ID NO: 234873 - DNA, 120 bp, Artificial Sequence
  ENSG00000119927_38 (sequence is synthesized)
gccctgcctgtcattgctgcaaagagctgctgctttgccaacctaagcaaagaaaatacggcttctcttgcattattttcccttttggttggtttgttttctagaagtacgttcagatgc

SEQ ID NO: 234874 - DNA, 120 bp, Artificial Sequence
  ENSG00000119927_39 (sequence is synthesized)
tttggggaatgcaatgtatgatttgctagctctctcaccacttaactcactgtgaggataaatatgcatgctttttgtaattaactggtgctttgaaaatcttttttaagggagaaaaat

SEQ ID NO: 234875 - DNA, 120 bp, Artificial Sequence
  ENSG00000119927_40 (sequence is synthesized)
ctcaaccaaagttatgctcatccagacaagctgacctttgagttaatttcagcacaactcattcttcagtgcctcatgactgaaaacaaaaaacaaaaaaacgaaagcatcttcacaatg

SEQ ID NO: 234876 - DNA, 120 bp, Artificial Sequence
  ENSG00000119927_41 (sequence is synthesized)
aagcttccagatagcaccgttttgctaaaagatacattctcattgttttccaacagtgatggcttccacataaggttaaacaaactaggtgcttgtaaataatttattacagtttactct

SEQ ID NO: 234877 - DNA, 120 bp, Artificial Sequence
  ENSG00000119927_42 (sequence is synthesized)
atcgcatttctgtaacatgaaatgcatgcccttcttcaggggaagactgtggtcaagttaaaaaaaaaaaacaatattaaacaacatgaaactgcagtctgtttttgaaaatgagaatgt

SEQ ID NO: 234878 - DNA, 120 bp, Artificial Sequence
  ENSG00000119927_43 (sequence is synthesized)
cctaagtgattcagaagagaggagggaagttgtgcactctgaaaatgcatgaaaaacaaaggcaaaaactagtgggaaatgtgtagaactgttaactgagatggcttcgagtcttccttc

SEQ ID NO: 234879 - DNA, 120 bp, Artificial Sequence
  ENSG00000119927_44 (sequence is synthesized)
tggaatctgttaaatttcacaaagtcatgagggtaaatggagaaaatatttctgggattacaatgaatgtaagcccaaattgtggaattgccagtaacctggatggggaaaagcatttcc

SEQ ID NO: 234880 - DNA, 120 bp, Artificial Sequence
  ENSG00000119927_45 (sequence is synthesized)
catagcactccatgtaatatgagtgctctgtgagatgttcatcagtgttttatagaaatggtgttgctgggaaaccaagtttgcacctggaaacttacaatgcactttagcgcagtaagg

SEQ ID NO: 234881 - DNA, 120 bp, Artificial Sequence
  ENSG00000119927_46 (sequence is synthesized)
gcttggcatccggtagtgaaaaactgtctaacccagcattgcccaaactattttgacaccaggacctttttctcctttgggatacttatgaacctctcactaatgtcctgtggagaacat

SEQ ID NO: 234882 - DNA, 120 bp, Artificial Sequence
  ENSG00000119927_47 (sequence is synthesized)
tttgggaaacactatgttagatagttctttaaggagacaaaacggtaatgaacagatagcactggggcagaatatgcatgcattttgtaacgtccagtgtggcgttgaatagatgtgtat

SEQ ID NO: 234883 - DNA, 120 bp, Artificial Sequence
  ENSG00000119927_48 (sequence is synthesized)
ttcctcccctgcagaaaataagcacagaaaattataatgtaggtgatcggagctctttcctttgatagagagaacagccccaatgatcctggctttttcactgaacgtatcagaatacat

SEQ ID NO: 234884 - DNA, 120 bp, Artificial Sequence
  ENSG00000119927_49 (sequence is synthesized)
ggatgaattggggtaaataaggttttaattcagatctagaagaaagtattgtacgtttgaatgcagatttttatccacagatagttgtagtgtttagacatgacaggacctatcgttgag

SEQ ID NO: 234885 - DNA, 120 bp, Artificial Sequence
  ENSG00000119927_50 (sequence is synthesized)
gtttctaagacttactatgggctgtaaacctgttttttaaaactattttagaaacctgagacttgccgtctggcattttagtttaatacaaactaatgattgcatttgaaagagattctt

SEQ ID NO: 234886 - DNA, 120 bp, Artificial Sequence
  ENSG00000119927_51 (sequence is synthesized)
gaccttatttctaaacgtctagagctctgaaatgtcttgatggaaggtattaaactatttgcctgttgtacaaagaaatgttaagactcgtgaaaagaattactataaggtactgtgaaa

SEQ ID NO: 234887 - DNA, 120 bp, Artificial Sequence
  ENSG00000119927_52 (sequence is synthesized)
taactgcgattttgtgagcaaaacatacttggaaatgctgattgatttttatgcttgttagtgtattgcaagaaacacagaaaatgtagttttgttttaataaaccaaaaattgaacata

SEQ ID NO: 234888 - DNA, 120 bp, Artificial Sequence
  ENSG00000119927_53 (sequence is synthesized)
tgaaggtacttgggtgaagaattctggtggatattacagggatatgttgaggtttatgctgcagtgagatcagctggagtcctggtgatgtcttcttatctaaagaatcccccaactagc

SEQ ID NO: 234889 - DNA, 120 bp, Artificial Sequence
  ENSG00000119927_54 (sequence is synthesized)
tctggtaccttctgtgtggtaaagacactcaaactgtttgagttgaattaatagcattttaagtagaaaaggaaaggagagtctgaaaagtcaggaagatgaatgtcataggtgagactt

SEQ ID NO: 234890 - DNA, 120 bp, Artificial Sequence
  ENSG00000119927_55 (sequence is synthesized)
tcaccatccttttatgaaatacacaggtgcatacctgtttacctacacctgcacccctcatgaggcagcagttttgctattgagctgccactgacctggctgctctttttgagtcactct

SEQ ID NO: 234891 - DNA, 120 bp, Artificial Sequence
  ENSG00000119927_56 (sequence is synthesized)
tgctgtccctcccaaaatttcatatattaagctctttgctgtcaattaaaacaaataccattataggagaaaattgagattaaaaaaaaagtccctgatttagaaaaatcaattttgtct

SEQ ID NO: 234892 - DNA, 120 bp, Artificial Sequence
  ENSG00000119927_57 (sequence is synthesized)
ataatgacccgtcttttctgaatactctaagaggattactcttttttgacatttagaaattgtcttctttttcacttgggtggtattagtttagtttcaagatggggcagtgatcttgct

SEQ ID NO: 234893 - DNA, 120 bp, Artificial Sequence
  ENSG00000119927_58 (sequence is synthesized)
ttcacactccagaggggcttgaccgaaccagtgtgttttgggtaggtacagtgagagcctctcggccataaagcaccgccgtcacagtggccatcattccccacagtgctggactgtggg

SEQ ID NO: 234894 - DNA, 120 bp, Artificial Sequence
  ENSG00000119927_59 (sequence is synthesized)
caaaggccatttaggggaggcagggaataggtgctgcagaaggagtgagataatcttggtggtctcccattggtctttctgcagacttgagtgactgttgagcccaggcttcaaaccatg

SEQ ID NO: 234895 - DNA, 120 bp, Artificial Sequence
  ENSG00000119927_60 (sequence is synthesized)
gagggcctggtcttaggagcggctatttttagtgatgacagcgtatcacaagtagggcattcatttatgaaaatttcttctaggtggctgttcaatgaacacaagcctcaaataccataa

SEQ ID NO: 234896 - DNA, 120 bp, Artificial Sequence
  ENSG00000119927_61 (sequence is synthesized)
aaaagtgaatgattacaataaagaatgtgtttgaaagccagcagttgtttccagcagagattctctgcatgaggggcagggggccgctttcatgtagtgctgatgtgagtggccatcttc

SEQ ID NO: 234897 - DNA, 120 bp, Artificial Sequence
  ENSG00000119927_62 (sequence is synthesized)
tcacgttactggctctccagagaaagtcctctgtccacttgccttgtgtctcttgtcccttcctcatgacttcatctcctgcttttgcacactcaggtgagccaatccaaggagcaccag

SEQ ID NO: 234898 - DNA, 120 bp, Artificial Sequence
  ENSG00000119927_63 (sequence is synthesized)
aaattggaaaaatgcaaacttatcctgacctctaacaccgtagagtattactattatcttctttggcatgttatataagttgaatgatacagttatacactcttacatctggcttttttc

SEQ ID NO: 234899 - DNA, 120 bp, Artificial Sequence
  ENSG00000119927_64 (sequence is synthesized)
acgtaacgttatttttgagattcatacatgttgcatatagttgttcctttgttcttgttgtgtagtgttccattgtataaatatttaccacattttattcattctgctgttgatggatat

SEQ ID NO: 234900 - DNA, 120 bp, Artificial Sequence
  ENSG00000119927_65 (sequence is synthesized)
ttgggttgttttcagttcacagctgctttgaacagtgttgctatgagcatatttgaatatgtcttttggtgaatatctgtgcccctatatacagcatgtatgtgggaacagaattgcctg

SEQ ID NO: 234901 - DNA, 120 bp, Artificial Sequence
  ENSG00000119927_66 (sequence is synthesized)
gttgtaggctctgggtatattcggctttggtagataccaccaaacagtttccaagggattatacctacttgtactcccacaacagtgtgtgtttcacttgctgcacatcttggccagcgc

SEQ ID NO: 234902 - DNA, 120 bp, Artificial Sequence
  ENSG00000119927_67 (sequence is synthesized)
tccgtcttctttgttttaggaggtgtgattggggtgggagtactattttatacagttgtagtttggagctgaaactacttgaatcactttttagagccaaaaggaatctaatctaatcac

SEQ ID NO: 234903 - DNA, 120 bp, Artificial Sequence
  ENSG00000119927_68 (sequence is synthesized)
ctcattttatagttgaggaaaataccccaggtcacactgctaattaatgggtaatctcgggatcagaattcttgtttcctaacctcgaggcctgtgctttctctggttccactgatgtac

SEQ ID NO: 234904 - DNA, 120 bp, Artificial Sequence
  ENSG00000119927_69 (sequence is synthesized)
aatcatctgtgtaccactgggtagcttaaagaatatttatacactatctcatttgattctcacaacagtcctggaaaatggatgttttaggtatttctacttccctctgttctccctatt

SEQ ID NO: 234905 - DNA, 120 bp, Artificial Sequence
  ENSG00000119927_70 (sequence is synthesized)
tctctctctacaccctcttttctttccccttccctttcttatttacctcaatataggacaaagtaggtgtaagcaaagtaggtttaacagcaagtcatctgagaactcacaggttgccag

SEQ ID NO: 234906 - DNA, 120 bp, Artificial Sequence
  ENSG00000119927_71 (sequence is synthesized)
tggtggaagtggggccccacccttgtctgctgacttgccctcattctcttcctagctccccatactttcttactgtggctgctgggattgtcatgatttgttgagcgtaaccatttgaca

SEQ ID NO: 234907 - DNA, 120 bp, Artificial Sequence
  ENSG00000119927_72 (sequence is synthesized)
gggttttattctctctcttcagctgagagtgccacatattgtcttgtgaagaatgctgtgaaaatgtttaaggatattggggtaggtgtccaccatttatggtataaaagctatctcaac

SEQ ID NO: 234908 - DNA, 120 bp, Artificial Sequence
  ENSG00000119927_73 (sequence is synthesized)
ttctgttctctttagatctagtctgtttgagctacctttgtggtggggtggaccccgagagaagcagtttctgctggcttaatgataaaggcatttttgggaacggggcatgtaggatgg

SEQ ID NO: 234909 - DNA, 120 bp, Artificial Sequence
  ENSG00000119927_74 (sequence is synthesized)
gttgggctatgttgaaggtgaagcccatcagtgtagatttatttgaatgttctggaattttactggtttcacatttattcccaagctgctatatataactggtatcaatatgtttcaagg

SEQ ID NO: 234910 - DNA, 120 bp, Artificial Sequence
  ENSG00000119927_75 (sequence is synthesized)
tgctacaggttgaatatcccttatccaaaatgttgggaccagaaatgttttggatttcagatttttttgggattttggaatatgtgcattagacttacaggttgagcgtctctaatccaa

SEQ ID NO: 234911 - DNA, 120 bp, Artificial Sequence
  ENSG00000119927_76 (sequence is synthesized)
aacccaaaatgctctgatgagcatgtcttttgagcatcatattgatgttcaaaatctttcagattttggagtacttcagatttttgattttgggattaggaccacaatcttggctcttaa

SEQ ID NO: 234912 - DNA, 120 bp, Artificial Sequence
  ENSG00000119927_77 (sequence is synthesized)
ttattccatatgatttttagttactttcttgtatttttacaagaatttctagaagtatcctcaggtgtcctttaccttcatgattcatggggaatgtaagttctatagagatactagcgg

SEQ ID NO: 234913 - DNA, 120 bp, Artificial Sequence
  ENSG00000119927_78 (sequence is synthesized)
ccttttgtgagggactgtttgtgactttattctaagtcattttagagtatagttatgttggttgaaattttagaatatagttaatgttggttgaactccatcaaaacaaaaaaaaaaaaa

SEQ ID NO: 234914 - DNA, 120 bp, Artificial Sequence
  ENSG00000119927_79 (sequence is synthesized)
cagaggggaagatacgatgcaaaaccaaggaaatcaatacttttgttttagtattgagtggaaaagaatgtttttacggcagcagcggctcccctgttgtatggacattctgcacccgaa

SEQ ID NO: 234915 - DNA, 120 bp, Artificial Sequence
  ENSG00000119927_80 (sequence is synthesized)
gagaatttgctgctgcggggggactctttctgaggttactgtggagcacccaaagtctgtcagcctctggccgtgcaaacaggcacccagaggaaccagaccttgcttattcacccacag

SEQ ID NO: 234916 - DNA, 120 bp, Artificial Sequence
  ENSG00000119927_81 (sequence is synthesized)
cctgggactgtcttctccagagtctccatcagctttgctaatcgactgattggaaataattcctcaaacaccaccaagtcaaggatacaggcagcagcggctcccctgttgtatggacat

SEQ ID NO: 234917 - DNA, 120 bp, Artificial Sequence
  ENSG00000119929_0 (sequence is synthesized)
gtcggggacgcgcgcacgggcgcgcgcagctgttgacgcgcttcttagctggtgcgcgccggagcccaaattccaagtggaaactgcaggcgcacgagggaggaacgcgtggagcatgaa

SEQ ID NO: 234918 - DNA, 120 bp, Artificial Sequence
  ENSG00000119929_1 (sequence is synthesized)
aaggcagggggcctcctctgagcgaaaacgagcgcggataccgtccgggaaggccggagcagcaaatggatttctcatggaagtttgtgttgattcagtggaatcagctgtgaatgcaga

SEQ ID NO: 234919 - DNA, 120 bp, Artificial Sequence
  ENSG00000119929_2 (sequence is synthesized)
aagaggaggtgctgatcggattgaattatgttctggtttatcagaggggggaactacacccagcatgggtgtccttcaagtagtgaagcagagtgttcagatcccagtttttgtgatgat

SEQ ID NO: 234920 - DNA, 120 bp, Artificial Sequence
  ENSG00000119929_3 (sequence is synthesized)
tcggccacggggaggtgattttttgtattcagatcgtgaaattgaggtgatgaaggctgacattcgtcttgccaagctttatggtgctgatggtttggtttttggggcattgactgaaga

SEQ ID NO: 234921 - DNA, 120 bp, Artificial Sequence
  ENSG00000119929_4 (sequence is synthesized)
tggacacattgacaaagagctgtgtatgtcccttatggctatttgccgccctctgccagtcactttccaccgagcctttgacatggttcatgatccaatggcagctctggagaccctctt

SEQ ID NO: 234922 - DNA, 120 bp, Artificial Sequence
  ENSG00000119929_5 (sequence is synthesized)
tgaacgcgtgttgaccagtggatgtgacagttcagcattagaagggctacccctaataaagcgactcattgagcaggcaaaaggcaggattgtggtaatgccaggaggtggtataacaga

SEQ ID NO: 234923 - DNA, 120 bp, Artificial Sequence
  ENSG00000119929_6 (sequence is synthesized)
cagaaatctacaaaggatccttgagggttcaggtgctacagaattccactgttctgctcggtctactagagactcgggaatgaagtttcgaaattcatctgttgccatgggagcctcact

SEQ ID NO: 234924 - DNA, 120 bp, Artificial Sequence
  ENSG00000119929_7 (sequence is synthesized)
ttcttgctcagaatattccctaaaggtaacagatgtgaccaaagtaaggactttgaatgctatcgcaaagaacatcctggtgtagccagacctctctgagagacatggatatcacaggat

SEQ ID NO: 234925 - DNA, 120 bp, Artificial Sequence
  ENSG00000119929_8 (sequence is synthesized)
gaaggtagaactataatctgcaattctctatgacacagctttaaccttcttctctggccaggacagtcgcaatctttgttttaagtttcacatggccatggagaatgtgcccaagaagaa

SEQ ID NO: 234926 - DNA, 120 bp, Artificial Sequence
  ENSG00000119929_9 (sequence is synthesized)
aaagaatttgaaacagagatacagtcacttcctttgcttagtcttaccagtgattgtcatcatggttaaagctggtctgtgcttcttccatagacagaagcttagtctgttttcagtgga

SEQ ID NO: 234927 - DNA, 120 bp, Artificial Sequence
  ENSG00000119929_10 (sequence is synthesized)
attaattgatgaactgggaaaattttaactgcatggtatgaattcagagtgtgacttaagggtcaattcaaagcagtattttgacttttcatttgtaaaataaaaatttccactattaca

SEQ ID NO: 234928 - DNA, 120 bp, Artificial Sequence
  ENSG00000119929_11 (sequence is synthesized)
ggattccactttccctatgactacccaaacctgcggacagcccagctggtgtatgaccgagaggttcagtggacgctgggagccattctatataaaacacgattcttaccactcagatgt

SEQ ID NO: 234929 - DNA, 120 bp, Artificial Sequence
  ENSG00000119929_12 (sequence is synthesized)
ggaattattcagtggttgtctactgtatcaatatttcaacccaatttggcttctctgtgggaatgactgccaagacaacacgtccagtccttactgggatctagctactagctccaagta

SEQ ID NO: 234930 - DNA, 120 bp, Artificial Sequence
  ENSG00000119929_13 (sequence is synthesized)
gtccgggaaggccggtgcggaaggtggcgggggaggggacggtcggccgaaggctccccggggcgggccggcgggagtcgtagtcagtggtgatttcttctggagtcgtttcctcagctc

SEQ ID NO: 234931 - DNA, 120 bp, Artificial Sequence
  ENSG00000119938_0 (sequence is synthesized)
agtctctcccagcgaccgccgcgggggcaaggcctggagctgtggttcgaatttgtgcaggcagcgggtgctggcttttagggtccgccgcctctctgcctaatgagctgcaccagaatg

SEQ ID NO: 234932 - DNA, 120 bp, Artificial Sequence
  ENSG00000119938_1 (sequence is synthesized)
atccaggttttagatccacgtcctttgacaagttcggtcatgcccgtggatgtggccatgaggctttgcttggcacattcaccacctgtgaagagtttcctgggcccgtacgatgaattt

SEQ ID NO: 234933 - DNA, 120 bp, Artificial Sequence
  ENSG00000119938_2 (sequence is synthesized)
caacgacgacattttgtgaataaattaaagcccctgaaatcatgtctcaatataaaacacaaagccaaatcacagaatgactggaagtgctcacacaaccaagccaagaagcgcgttgtg

SEQ ID NO: 234934 - DNA, 120 bp, Artificial Sequence
  ENSG00000119938_3 (sequence is synthesized)
tttgctgactccaagggcctctctctcactgcgatccatgtcttctccgacctcccagaagaaccagcgtgggatctgcagtttgatctcttggaccttaatgatatctcctctgcctta

SEQ ID NO: 234935 - DNA, 120 bp, Artificial Sequence
  ENSG00000119938_4 (sequence is synthesized)
aaacaccacgaggagaaaaacttgattttagatttccctcagccttcaaccgattacttaagtttccggagccactttcagaagaactttgtctgtctggagaactgctcgttgcaagag

SEQ ID NO: 234936 - DNA, 120 bp, Artificial Sequence
  ENSG00000119938_5 (sequence is synthesized)
cgaacagtgacagggactgttaaagtcaaaaatgtgagttttgagaagaaagttcagatccgtatcactttcgattcttggaaaaactacactgacgtagactgtgtctatatgaaaaat

SEQ ID NO: 234937 - DNA, 120 bp, Artificial Sequence
  ENSG00000119938_6 (sequence is synthesized)
gtgtatggtggcacagatagtgataccttctcatttgccattgacttaccccctgtcattccaactgagcagaaaattgagttctgcatttcttaccatgctaatgggcaagtcttttgg

SEQ ID NO: 234938 - DNA, 120 bp, Artificial Sequence
  ENSG00000119938_7 (sequence is synthesized)
gacaacaatgatggtcagaattatagaattgttcatgttcaatggaagcctgatggggtgcagacacagatggcaccccaggactgtgcattccaccagacgtctcctaagacagagtta

SEQ ID NO: 234939 - DNA, 120 bp, Artificial Sequence
  ENSG00000119938_8 (sequence is synthesized)
gagtcaacaatctttggcagtccgaggctggctagtgggctcttcccagagtggcagagctgggggagaatggagaacttggcctcttatcgatgaattaagcaacaatgtaactggtct

SEQ ID NO: 234940 - DNA, 120 bp, Artificial Sequence
  ENSG00000119938_9 (sequence is synthesized)
tgacttgtcatattcccccatgcaatcctaggtctgtattgctcaattttaggaagcctttgctactccatcagtaggtttagatttgagcttttgagacctggctatggaaaagaaaga

SEQ ID NO: 234941 - DNA, 120 bp, Artificial Sequence
  ENSG00000119938_10 (sequence is synthesized)
ggtctgtacagatgatgctacccaatttggctttgaaggatcaagtaacaggttgaaaactatttttataaaggtaatactttttcagttcccttcttccttccctctcaatccactagc

SEQ ID NO: 234942 - DNA, 120 bp, Artificial Sequence
  ENSG00000119938_11 (sequence is synthesized)
tttcatgttgggcaaggaaaagttgaggaaggatggctgatggtgatggaaagctgtgttaatggtatgaggaatgtgtgaaaagtatacacaaagggctctgaagctcaagtcagagga

SEQ ID NO: 234943 - DNA, 120 bp, Artificial Sequence
  ENSG00000119938_12 (sequence is synthesized)
gtgggaggtctgatcattgttggtggaaaaacgtaaggttattttgtgtttttaagttggttttacaattctttcctggggaaattatttctggaggggaaaaagatccattctacgtat

SEQ ID NO: 234944 - DNA, 120 bp, Artificial Sequence
  ENSG00000119938_13 (sequence is synthesized)
ccttgtggagaaaagctaaataacctttaagaatgtgggtggtattggagaaagaagatgaattatagctccggagaatcaagatcttaagtgaagcctttctgttcagatgtgatctat

SEQ ID NO: 234945 - DNA, 120 bp, Artificial Sequence
  ENSG00000119938_14 (sequence is synthesized)
aaaaaatcataatttggggaaagtttaagcaaatctggctttgtagtcctgatgttataagtgactttgtgatcaaactgtcaggcttgggttcttgttatagaatgcttggtatagaaa

SEQ ID NO: 234946 - DNA, 120 bp, Artificial Sequence
  ENSG00000119938_15 (sequence is synthesized)
aaccatgccatcattaatggctaacaacacgtagggacttcatgtcatgtcaaagatagctctttgcaagtgccttgattaaaccagaaaactgtcatcgtttaacccaaatatctgaat

SEQ ID NO: 234947 - DNA, 120 bp, Artificial Sequence
  ENSG00000119938_16 (sequence is synthesized)
ggtcatctggtaactcatgggtttttggcctcataagatggtccactctgtacacaggcattcctcctgcaataatgttgtatctttgagaccgttgtcagtgtacacaactcacatcct

SEQ ID NO: 234948 - DNA, 120 bp, Artificial Sequence
  ENSG00000119938_17 (sequence is synthesized)
tcatattgaaggtgactcatttttctgcacacttttttgatgtgatgcttgacgtgaggcccgacactaggattctcaatgcaagaatccagtaccttgcacatagaagtagcaacccat

SEQ ID NO: 234949 - DNA, 120 bp, Artificial Sequence
  ENSG00000119938_18 (sequence is synthesized)
cccttgcctattttcatcttgctgttttcttttttttaaaaaaatggatgtgacttgttttgaatgttttgtattatacttgtttttgtgtgtgcataaattcattctgtaggatcttaa

SEQ ID NO: 234950 - DNA, 120 bp, Artificial Sequence
  ENSG00000119938_19 (sequence is synthesized)
gaaaaagagtcccagaatgttgcttctattattgtgcacaaccattgagaggtgttacaagaatgcagttaattttaacatgtgtgatgtgccatggtggaaaagtactatcggaataac

SEQ ID NO: 234951 - DNA, 120 bp, Artificial Sequence
  ENSG00000119938_20 (sequence is synthesized)
tctgcagtgacagaatttgaagtttggctagcatccatacttttctactgtaaatatttcactctcctctagctatccttgatgagcttctcactttaagaataaatgtgtttgatataa

SEQ ID NO: 234952 - DNA, 120 bp, Artificial Sequence
  ENSG00000119943_0 (sequence is synthesized)
aatcgctagcaaactccctgcctagcaaggcccagcctggggcagaaatggctgcaagtggccgaggtctctgcaaggctgtggccgcctctcccttcccggcgtggagacgagataaca

SEQ ID NO: 234953 - DNA, 120 bp, Artificial Sequence
  ENSG00000119943_1 (sequence is synthesized)
cggaagccaggggaggtctgaagcctgagtatgatgcggtggtgataggagcaggacacaacggactggtggctgcagcgtacctgcagagactgggggtgaacaccgccgtcttcgaga

SEQ ID NO: 234954 - DNA, 120 bp, Artificial Sequence
  ENSG00000119943_2 (sequence is synthesized)
ggcgccatgtgatcgggggtgcagctgtcactgaggagatcatcccagggtttaagttctcccgcgcgtcctacctgctcagcctgctgaggccgcagatttacactgatctggagctga

SEQ ID NO: 234955 - DNA, 120 bp, Artificial Sequence
  ENSG00000119943_3 (sequence is synthesized)
agaaacatgggctgaggcttcatcttcgaaacccctactccttcacccccatgctggaagagggtgcaggcagcaaggtgcccaggtgccttctgctgggcacagacatggcagaaaacc

SEQ ID NO: 234956 - DNA, 120 bp, Artificial Sequence
  ENSG00000119943_4 (sequence is synthesized)
agaagcagatcgcccagttctcccagaaggatgcccaggtctttcccaaatatgaggagttcatgcatcgcttggcattagccattgaccctctgctggatgcggcccccgtggacatgg

SEQ ID NO: 234957 - DNA, 120 bp, Artificial Sequence
  ENSG00000119943_5 (sequence is synthesized)
cggccttccagcatggctccttgctgcaaaggatgaggtcgctctccaccctcaagcccctgctgaaggcaggccgcatcctgggagcccagcttccccgatattatgaggtcctcacag

SEQ ID NO: 234958 - DNA, 120 bp, Artificial Sequence
  ENSG00000119943_6 (sequence is synthesized)
ctcccattaccaaggtgctggatcagtggttcgagtctgagcctttaaaagccactctagccacagatgcagtgattggagccatgacaagtccccacactccggggagtgggtatgtgc

SEQ ID NO: 234959 - DNA, 120 bp, Artificial Sequence
  ENSG00000119943_7 (sequence is synthesized)
tgctgcaccatgtgatggggggcctggagggaatgcagggggcctggggctacgtccaggggggcatgggtgccctctctgatgcgatcgcaagctcagccaccacacatggagcaagca

SEQ ID NO: 234960 - DNA, 120 bp, Artificial Sequence
  ENSG00000119943_8 (sequence is synthesized)
gtccaacacatcaccgcagatcaccttcctgaagctgacgccacaggagtggcttcctgaggagttcctggagagaatctctcagctggacacccggtcgcctgtcaccaagatcaatgt

SEQ ID NO: 234961 - DNA, 120 bp, Artificial Sequence
  ENSG00000119943_9 (sequence is synthesized)
ggccgtagacaggctgcccagcttcctggcggcccccaatgctcccaggggccagccgctgccccatcaccaatgctccatccacctgaactgtgaagacaccctcctccttcatcaggc

SEQ ID NO: 234962 - DNA, 120 bp, Artificial Sequence
  ENSG00000119943_10 (sequence is synthesized)
ctttgaagatgccatggatggcctgccttcccacaggcctgtgattgagctctgcatcccttcctcgctggaccccaccctggctccccctggctgccatgtagtctccctcttcactca

SEQ ID NO: 234963 - DNA, 120 bp, Artificial Sequence
  ENSG00000119943_11 (sequence is synthesized)
gtacatgccctatacgctggctggaggcaaggcctgggacgagcaggagagagacgcttatgcagacagagtgtttgattgcatcgaggtctatgcccctggcttcaaggactctgtggt

SEQ ID NO: 234964 - DNA, 120 bp, Artificial Sequence
  ENSG00000119943_12 (sequence is synthesized)
tggcagagacatcctcacaccaccagatttggagagaatcttcgggcttcctggagggaacatattccactgcgccatgtccctggaccagctctacttcgcccgccccgtgcccctgca

SEQ ID NO: 234965 - DNA, 120 bp, Artificial Sequence
  ENSG00000119943_13 (sequence is synthesized)
ttctggctaccgctgccctctccagggcctgtatctctgtggaagtggggctcatcctggaggaggtgtgatgggagctgctgggcgaaatgcagcacatgtggcctttagggacctcaa

SEQ ID NO: 234966 - DNA, 120 bp, Artificial Sequence
  ENSG00000119943_14 (sequence is synthesized)
gagcatgtgaccctgaaccagctctgacccaggaagaagactccacccctgaattccaagtgctccattggatcagcttcccaggaagttcagcttcgggttagtacataaggccaccac

SEQ ID NO: 234967 - DNA, 120 bp, Artificial Sequence
  ENSG00000119943_15 (sequence is synthesized)
aatgctcaagaaattattttagaaaaaacgtacgagttacatttagtgcaagttgaccttatgcccatgcctccatacatggactggttctgttttattaaaactaatatttcatacaga

SEQ ID NO: 234968 - DNA, 120 bp, Artificial Sequence
  ENSG00000119943_16 (sequence is synthesized)
tgtcaaccagcactttttaagatgaactgtaaccaactagcttctcacatgcttctcatatggtaagagttaattttagctcatgaaacttttggttctgtgaaacacctgctgaacaga

SEQ ID NO: 234969 - DNA, 120 bp, Artificial Sequence
  ENSG00000119943_17 (sequence is synthesized)
ctcctgggaagggggtctgtgggagtcgacatttatacaaccttccaggtgattctgagcttatcagagctggagaggcacttgctacccaggggcttggtgtggaacgtgagatgccaa

SEQ ID NO: 234970 - DNA, 120 bp, Artificial Sequence
  ENSG00000119943_18 (sequence is synthesized)
agccaaattcaggcctctcagctcaaggcaccctgaagcacagctagtcactccagcacatgttgaagctgtgcatgtttacttcatgttgaactgttcatgttttatttttggaacact

SEQ ID NO: 234971 - DNA, 120 bp, Artificial Sequence
  ENSG00000119943_19 (sequence is synthesized)
ggggattggcaaaaaaaaaaaaaacccatgtgaataaagccttctagggcaccactgtgccgattgtgaaccacacgtggacaaaacaagccgcgcttgatagcaactacctacatgacc

SEQ ID NO: 234972 - DNA, 120 bp, Artificial Sequence
  ENSG00000119943_20 (sequence is synthesized)
agcactcccctggatgctgatgctgccatgcgagacgggacgttggcgcagcagcatgccagccacccattgcttctcctgcttgccaactcaaccgtgctgctccctcagacaccatca

SEQ ID NO: 234973 - DNA, 120 bp, Artificial Sequence
  ENSG00000119943_21 (sequence is synthesized)
cttgcgcctcccaagcaatggaagccctggcgatgctctcatgagcccctcactccagcagagcccctgaccaagccaggggagcaggacttttccagccaaggacacaacggactggtg

SEQ ID NO: 234974 - DNA, 120 bp, Artificial Sequence
  ENSG00000119943_22 (sequence is synthesized)
gctgtgagtacctccccacttgatcccacttcactggccctgggcgtgtggctctcagcagcctgggaaggagtgtgaagaagcaggtgggataagggccttgagagagaaggaaaaggc

SEQ ID NO: 234975 - DNA, 120 bp, Artificial Sequence
  ENSG00000119943_23 (sequence is synthesized)
agcctagtcgatgctctctgctctccagtgctgactgggggctgggtcgaatgctcatctgcagccagctgtggacatcacaggctcctttcctccccttcccctaatggggaaaggtgg

SEQ ID NO: 234976 - DNA, 120 bp, Artificial Sequence
  ENSG00000119943_24 (sequence is synthesized)
tttccccatggcctgtgagggagtcagggagcttccagaaacaagctgacaaggtggggaagcatgtaaccaacacagcatgagagcaggcagcgtacctgcagagactgggggtgaaca

SEQ ID NO: 234977 - DNA, 120 bp, Artificial Sequence
  ENSG00000119943_25 (sequence is synthesized)
aatgcatgattgccaactgggtctatacagagataatgacgggaccgaaagcagacggcactcaacatgcagctttgagggcatgccttcattttcatatgtactagagcagttgcgagc

SEQ ID NO: 234978 - DNA, 120 bp, Artificial Sequence
  ENSG00000119943_26 (sequence is synthesized)
agccaggggaggtctgaagcctgagtatgatgcggtggtgataggagcaggcaggcacctgggattccggtgctggctctgctgtgtggcctggggcaaatgcttgccttctctgggctt

SEQ ID NO: 234979 - DNA, 120 bp, Artificial Sequence
  ENSG00000119943_27 (sequence is synthesized)
cctcttcactcagtacatgccctatacgctggctggaggcaaggcctgggacgagcaggagagagacgcttatgcagacagagcacagctgactgcacgaaccaaaggagacgcatgagc

SEQ ID NO: 234980 - DNA, 120 bp, Artificial Sequence
  ENSG00000119943_28 (sequence is synthesized)
ggtcaagctgggtttccaaggatgactaggagctggccaggcagcaaagggcattccaagcaagagaaacagcttgatcaggccaggcgtgggggctcatgcctgtaattccagcacttc

SEQ ID NO: 234981 - DNA, 120 bp, Artificial Sequence
  ENSG00000119943_29 (sequence is synthesized)
cggatcacccgagtgtttgattgcatcgaggtctatgcccctggcttcaaggactctgtggttggcagagacatcctcacaccaccagatttggagagaatcttcgggcttcctggaggg

SEQ ID NO: 234982 - DNA, 120 bp, Artificial Sequence
  ENSG00000119946_0 (sequence is synthesized)
gcagtatcacgtgcagctgcgctgggtgcaggatggcggcggccgcggcggcggcagcagcggtgggtgtcaggctccgggactgctgcagccgaggcgctgtgctcctgctcttctttt

SEQ ID NO: 234983 - DNA, 120 bp, Artificial Sequence
  ENSG00000119946_1 (sequence is synthesized)
cttcttttccctgtctcctcggcccccggccgccgccgcctggctgctgggcctgcggcccgaggacactgctggaggccgcgtgtccctggaggggggcaccctgcgcgccgccgaagg

SEQ ID NO: 234984 - DNA, 120 bp, Artificial Sequence
  ENSG00000119946_2 (sequence is synthesized)
tcctcctgcgtgtctatttccagccaggaccgccggccaccgccgcaccggtgccctcaccgaccctcaactcgggggagaatggcaccggcgactgggctccgcggctcgtgttcatcg

SEQ ID NO: 234985 - DNA, 120 bp, Artificial Sequence
  ENSG00000119946_3 (sequence is synthesized)
gttcatcgaggagcccccgggcggtggcggcgtggcccccagcgcggtccccactcgccccccgggaccgcagcgctgcagggagcagagcgactgggcatcggacgtggaagtcctggg

SEQ ID NO: 234986 - DNA, 120 bp, Artificial Sequence
  ENSG00000119946_4 (sequence is synthesized)
gtcccgggggcgtggcaggctcggccctggtccaggtgcgagtgcgggagctgcgcaagggcgaagcggagcggggcggcgcgggcggtggcgggaagctcttttcactctgcgcctggg

SEQ ID NO: 234987 - DNA, 120 bp, Artificial Sequence
  ENSG00000119946_5 (sequence is synthesized)
tcactctgcgcctgggatgggcgcgcgtggcaccaccacggcgccgccggcggcttcctgctgcgcgttcgcccgcggttgtacggcccaggcggggacctgctgccccctgcgtggctg

SEQ ID NO: 234988 - DNA, 120 bp, Artificial Sequence
  ENSG00000119946_6 (sequence is synthesized)
tcctgctgctagccttgtcggccctgttcagcggcctgcgcctgagcctgctgtcgctggacccggtggagttacgggtgctgcggaacagcggctcggccgccgagcaggagcaggcgc

SEQ ID NO: 234989 - DNA, 120 bp, Artificial Sequence
  ENSG00000119946_7 (sequence is synthesized)
gccgcgtgcaggccgttcgcggcagggggacccatctgctctgcaccctactcctgggccaagccggagccaacgcggccctggctggctggctgtacacctcgctgccgccgggcttcg

SEQ ID NO: 234990 - DNA, 120 bp, Artificial Sequence
  ENSG00000119946_8 (sequence is synthesized)
ggggcaccggggaagactacagcgaagaggggatccacttcccgtggctgccggcgctcgtgtgcaccggcgcggtattcctgggcgccgaaatctgcccctactcagtgtgttcgcggc

SEQ ID NO: 234991 - DNA, 120 bp, Artificial Sequence
  ENSG00000119946_9 (sequence is synthesized)
acgggctggccatcgcctcgcacagcgtgtgcctgacccggcttctgatggcagccgccttccccgtgtgctacccgctgggccgcctgctggactgggcgctgcgccaggagataagca

SEQ ID NO: 234992 - DNA, 120 bp, Artificial Sequence
  ENSG00000119946_10 (sequence is synthesized)
ccttctacacgcgggagaagttgctggagacgttgcgggccgcagacccctacagtgacctggtgaaggaggagctcaacatcatacagggtgccctggagctgcgcaccaaagttgtgg

SEQ ID NO: 234993 - DNA, 120 bp, Artificial Sequence
  ENSG00000119946_11 (sequence is synthesized)
aggaggtgctgacccccctgggagactgcttcatgctgcgctcagacgcggtgctcgacttcgccactgtctccgagatcctgcgcagcggctacactcgcatcccagtgtacgagggtg

SEQ ID NO: 234994 - DNA, 120 bp, Artificial Sequence
  ENSG00000119946_12 (sequence is synthesized)
accagcggcacaacattgtggacattttatttgtcaaggacttggccttcgtggaccccgacgactgcaccccgctcctcactgtcacccgcttctacaaccggcccctgcattgtgttt

SEQ ID NO: 234995 - DNA, 120 bp, Artificial Sequence
  ENSG00000119946_13 (sequence is synthesized)
tcaatgacacccgactggacacggttctggaggagtttaagaagggaaaatctcacctggccattgtccagcgggtgaataatgagggagaaggggaccctttctatgaggtgatgggca

SEQ ID NO: 234996 - DNA, 120 bp, Artificial Sequence
  ENSG00000119946_14 (sequence is synthesized)
ttgtcacgctggaggatatcatagaggagattatcaagtcggagatcctggatgaaactgatctctacactgacaatcggaaaaagcagagggtcccgcaacgggagcggaagcggcatg

SEQ ID NO: 234997 - DNA, 120 bp, Artificial Sequence
  ENSG00000119946_15 (sequence is synthesized)
acttctccttgtttaagctttcggacacggagatgcgggtgaagatctcaccacagcttctgctagccacacaccgcttcatggccacagaagtggagccctttaagtctctgtaccttt

SEQ ID NO: 234998 - DNA, 120 bp, Artificial Sequence
  ENSG00000119946_16 (sequence is synthesized)
cggagaagatcctgctccggctcctgaaacatcccaacgtgatccaggagctgaagtttgatgagaagaacaagaaggccccggaacactacctctaccagcgcaaccgccctgtggact

SEQ ID NO: 234999 - DNA, 120 bp, Artificial Sequence
  ENSG00000119946_17 (sequence is synthesized)
actttgtgctgcttctacagggtaaagtggaggtggaggttggtaaggaaggccttcgctttgaaaatggagcctttacttactatggcgtcccagccatcatgaccactgcttgctcag

SEQ ID NO: 235000 - DNA, 120 bp, Artificial Sequence
  ENSG00000119946_18 (sequence is synthesized)
ataatgacgtgcggaaggttggaagtctggctggatcttctgtctttctaaaccggtccccttctcgctgcagtgggttgaatcgctctgagtctccaaaccgagagcgcagtgactttg

SEQ ID NO: 235001 - DNA, 120 bp, Artificial Sequence
  ENSG00000119946_19 (sequence is synthesized)
ggggcagcaacacccagctgtacagcagcagcaacaacctctacatgcctgactactcagtccacatcctcagcgatgtgcagtttgtgaagatcacacggcagcaatatcagaacgcac

SEQ ID NO: 235002 - DNA, 120 bp, Artificial Sequence
  ENSG00000119946_20 (sequence is synthesized)
tcactgcctgccacatggacagctcacctcagtcccctgacatggaggccttcacagacggggactccactaaggcccccacaacccggggcacaccccagacccctaaggatgaccccg

SEQ ID NO: 235003 - DNA, 120 bp, Artificial Sequence
  ENSG00000119946_21 (sequence is synthesized)
ccatcacgctcctcaacaacaggaacagcctgccgtgcagccgctcagacgggctgagaagccccagcgaggtagtgtacctgaggatggaggagctggccttcacccaggaagaaatga

SEQ ID NO: 235004 - DNA, 120 bp, Artificial Sequence
  ENSG00000119946_22 (sequence is synthesized)
ctgacttcgaggagcacagcacacagcagctcacgctgtctcctgcagccgttcccacgagagcagcatcagatagtgaatgttgtaacatcaacctggatacagagaccagcccctgca

SEQ ID NO: 235005 - DNA, 120 bp, Artificial Sequence
  ENSG00000119946_23 (sequence is synthesized)
aagaggtcaccagaaggagagagaacctctgaggacaactccaatttaacacctctgatcacatgacagggcaaagccagcattcactgggtgtgtgaaattccagagctttgggggaga

SEQ ID NO: 235006 - DNA, 120 bp, Artificial Sequence
  ENSG00000119946_24 (sequence is synthesized)
atccaccctcccatcatctgcttcccccaaggcctcccacaggtgacagaatgttctgccttcccttccatctcttcacccctagctgtcagtttggcagattttccctcgttacctcca

SEQ ID NO: 235007 - DNA, 120 bp, Artificial Sequence
  ENSG00000119946_25 (sequence is synthesized)
gttcgactcagaaccttgacatggccataacagaaggaggtgcctctgatagaacatgctagaaatggtcttttccacagcatagtctgggactggaaaagagatgtctgactgcaagct

SEQ ID NO: 235008 - DNA, 120 bp, Artificial Sequence
  ENSG00000119946_26 (sequence is synthesized)
gacaatgccactctgggacccctgatgctcttctttgttctttgggtcccctgatgccataggagacctatcgtcttggaacttgccattctttcctccagaacaaaatgttaactttct

SEQ ID NO: 235009 - DNA, 120 bp, Artificial Sequence
  ENSG00000119946_27 (sequence is synthesized)
aacacatttcatgcatagcttggctcagaaggtgccattggcagacaggcacatgggaggctggagtaggaggtctgaagattagttcaggggatggaccaagaatttcccccagagctt

SEQ ID NO: 235010 - DNA, 120 bp, Artificial Sequence
  ENSG00000119946_28 (sequence is synthesized)
taaagaagtgggactcagccatgttggcgcgtgattgacattacagcacagaaaactgttagtgactggtttcctgttagataagggttccagcagcctggggcagtatgtctcagctgg

SEQ ID NO: 235011 - DNA, 120 bp, Artificial Sequence
  ENSG00000119946_29 (sequence is synthesized)
aatggaaagaatgtgagatggaacctcaagtcactgtttttaccagggacacatctgttttggctcccaatcagcagtcttcaatcgatcaataattctgctctggaagagaaggaacag

SEQ ID NO: 235012 - DNA, 120 bp, Artificial Sequence
  ENSG00000119946_30 (sequence is synthesized)
ggagcagagagacccaactgggagccagagatggaacttcaggtcttaagtgcaaatcaaagcaaaaaacaaacaaaacttacatggaaaaactgtaagtgctgaaagcaagtttagcca

SEQ ID NO: 235013 - DNA, 120 bp, Artificial Sequence
  ENSG00000119946_31 (sequence is synthesized)
tgacaaaccaaagagtgcccaggtcagccaagaaagatacataatctcatgggacttcagtgggagttacacaggaatgttgaagaatcattcttctttttcatgcatttgtccttctcc

SEQ ID NO: 235014 - DNA, 120 bp, Artificial Sequence
  ENSG00000119946_32 (sequence is synthesized)
cacccccttactacaccctagcagatcagctgagtgtactttattccaagaacttactggatctctggtttttctcctgaagttggggcaggtgcaattccaagcataaccaccagatgg

SEQ ID NO: 235015 - DNA, 120 bp, Artificial Sequence
  ENSG00000119946_33 (sequence is synthesized)
ggggcaggtgcaattccaagcataaccaccagatggcagagtgaccgcgcatacctgcttccaagaataaaacagttctgaaaagcaaccgcaaagccgggcgcggtggctcacacctgt

SEQ ID NO: 235016 - DNA, 89 bp, Artificial Sequence
  ENSG00000119946_34 (sequence is synthesized)
agctgagatcacaccactgcacttcatcctaggcaacagagcgagactctgtctccccccgcgaaaagaaaagcaaccacagccagcct

SEQ ID NO: 235017 - DNA, 120 bp, Artificial Sequence
  ENSG00000119946_35 (sequence is synthesized)
cacagccagccttagggaaaacttggaagtaagtgaaatttgtcttcagaataactatctccctttctgatctgtctcctactctttagatgttctcagtcaagtactcactgaactcat

SEQ ID NO: 235018 - DNA, 120 bp, Artificial Sequence
  ENSG00000119946_36 (sequence is synthesized)
tgatcgagtgctgtctgctaaatctccaaaccattcccaaacctttccccgtagtataccatccagcttccctccccttcctccaaaaccctccctcccacctccccacacccattgagt

SEQ ID NO: 235019 - DNA, 120 bp, Artificial Sequence
  ENSG00000119946_37 (sequence is synthesized)
cattcacaggcaggagggagactgatcattcctctgggttatctgcatctcaaaagaaaatgcttacccacaggaactgttaactcaggggttcttaacttggggtccatcaccccaggg

SEQ ID NO: 235020 - DNA, 120 bp, Artificial Sequence
  ENSG00000119946_38 (sequence is synthesized)
ggtccatagttggacttcagagggtctatgaaacccctaaaactgtcagtatttaatgtatttattcttgtatgttttttccagagcattaaagctttcataaggttctcaaaggtctca

SEQ ID NO: 235021 - DNA, 120 bp, Artificial Sequence
  ENSG00000119946_39 (sequence is synthesized)
gacctacaaagagttaaaacaaacagacaaacaaaaaaaaacactactattttaaatagtggaactttcagcccagcgtttctgcaatgcagagtgaagtggatactgggcagttcgaga

SEQ ID NO: 235022 - DNA, 120 bp, Artificial Sequence
  ENSG00000119946_40 (sequence is synthesized)
caggtttttaatcataagtggtcttttcaaatgtccatcaattgatggggaaggctggcacccaccaagaagtggaagtcctcagaaattctcggcacaccctagagtattgtacaacca

SEQ ID NO: 235023 - DNA, 120 bp, Artificial Sequence
  ENSG00000119946_41 (sequence is synthesized)
acacccccacataactttgtcccctcttccccaacaacccagagcaggtgttgcagacaggagggccacagcgtgtggaagtaaagactttggagctagagaagccttttccagcaatga

SEQ ID NO: 235024 - DNA, 120 bp, Artificial Sequence
  ENSG00000119946_42 (sequence is synthesized)
ttattgacttcaccacaccccttgcctggcctggcctgaggctcagcagtgcatgacttctcgtagataacttcacagtcatccagtcccaacacctgctcttgcctggtaggaacaggc

SEQ ID NO: 235025 - DNA, 120 bp, Artificial Sequence
  ENSG00000119946_43 (sequence is synthesized)
gaagtgtcagccctcaatgttgggtacttagacccaaaccaataaatggtgagttttgaacaagaactaccatcatgcaggcttcttgcccagctgaccactggccccggggtgcctgcc

SEQ ID NO: 235026 - DNA, 120 bp, Artificial Sequence
  ENSG00000119946_44 (sequence is synthesized)
tggctggtcttcatcacctgaggccaccaggctcaagccactgctgttgcattacacccatccctttgcaaaatccctatggagcctgtcaccactcccctccctatatacccccacccc

SEQ ID NO: 235027 - DNA, 120 bp, Artificial Sequence
  ENSG00000119946_45 (sequence is synthesized)
acaaagattttcttcaggttaaaaaaaaagtttaaaaaaaagattttaaaataaagcatttatgaaggcttaataaattgtaaataatttttaaataaaatgaaaatgcctttcctggaa

SEQ ID NO: 235028 - DNA, 120 bp, Artificial Sequence
  ENSG00000119946_46 (sequence is synthesized)
ggctcggcttgtgcttgtacatctgattccaagatgtgttgcacatcttttcagatgaccttcagcaaaatccattttattttcttgtctttctggagtgtgactttgtaagaggatgtg

SEQ ID NO: 235029 - DNA, 120 bp, Artificial Sequence
  ENSG00000119946_47 (sequence is synthesized)
attcctgtgttttcagagtcaagattcctttttgcagagaaatgtgatgttgtgaagatccaggaacagactgtctcacccactttgttctttgtctctttccttttgtgtttatatctt

SEQ ID NO: 235030 - DNA, 120 bp, Artificial Sequence
  ENSG00000119946_48 (sequence is synthesized)
atccttggcccctgactctttagtgcctgtctctgtgtctcgtaccttcgctgtcagcagaggggactctctggcaggctccccagtaaaccggtccccttctcgctgcagtgggttgaa

SEQ ID NO: 235031 - DNA, 120 bp, Artificial Sequence
  ENSG00000119946_49 (sequence is synthesized)
gtttgtgaaggtaactcccccaggaaggttatcctctccctcccagtgggcagtgttggctggctgagcgggacaagaagactacccccattcctaggagggatgtgtgcaccattcccc

SEQ ID NO: 235032 - DNA, 80 bp, Artificial Sequence
  ENSG00000119950_0 (sequence is synthesized)
gcggcggagagcgcgccgagccgcggccgagctggcccgcccgcccgtcgcacatgttccggaacggcgcccggccgtag

SEQ ID NO: 235033 - DNA, 120 bp, Artificial Sequence
  ENSG00000119950_1 (sequence is synthesized)
catgttccggaacggcgcccggccgtagccgcctgcggcgcctcctgtcggcccgagaagggagtgcggagaggcgccggtcgccacccgcggtgcccatggagcgggtgaagatgatca

SEQ ID NO: 235034 - DNA, 120 bp, Artificial Sequence
  ENSG00000119950_2 (sequence is synthesized)
acgtgcagcgtctgctggaggctgccgagtttttggagcgccgggagcgagagtgtgaacatggctacgcctcttcattcccgtccatgccgagcccccgactgcagcattcaaagcccc

SEQ ID NO: 235035 - DNA, 120 bp, Artificial Sequence
  ENSG00000119950_3 (sequence is synthesized)
cacggaggttgagccgggcacagaaacacagcagcgggagcagcaacaccagcactgccaacagatctacacacaatgagctggaaaagaatcgacgagctcatctgcgcctttgtttag

SEQ ID NO: 235036 - DNA, 120 bp, Artificial Sequence
  ENSG00000119950_4 (sequence is synthesized)
aacgcttaaaagttctgattccactaggaccagactgcacccggcacacaacacttggtttgctcaacaaagccaaagcacacatcaagaaacttgaagaagctgaaagaaaaagccagc

SEQ ID NO: 235037 - DNA, 120 bp, Artificial Sequence
  ENSG00000119950_5 (sequence is synthesized)
accagctcgagaatttggaacgagaacagagatttttaaagtggcgactggaacagctgcagggtcctcaggagatggaacgaatacgaatggacagcattggatcaactatttcttcag

SEQ ID NO: 235038 - DNA, 120 bp, Artificial Sequence
  ENSG00000119950_6 (sequence is synthesized)
atcgttctgattcagagcgagaggagattgaagtggatgttgaaagcacagagttctcccatggagaagtggacaatataagtaccaccagcatcagtgacattgatgaccacagcagcc

SEQ ID NO: 235039 - DNA, 120 bp, Artificial Sequence
  ENSG00000119950_7 (sequence is synthesized)
tgccgagtattgggagtgacgagggttactccagtgccagtgtcaaactttcattcacttcatagaacccagcatgacataacagtgcagggcaaaatattcactgggccaattcaatac

SEQ ID NO: 235040 - DNA, 120 bp, Artificial Sequence
  ENSG00000119950_8 (sequence is synthesized)
aaacaatctcttaaattgggttcatgatgcagtctcctctttaaaacaaaacaaaacaaaacaaaactatacttgaacaaaagggtcagaggacctgtatttaagcaaatacttagcaaa

SEQ ID NO: 235041 - DNA, 120 bp, Artificial Sequence
  ENSG00000119950_9 (sequence is synthesized)
aagtggggcagagcctcccaaggagaacaaatattcagaatattcatattggaaaaatcacaatttttaatggcagcagaaaacttgtgtgaaattttcttgatttgagttgattgagaa

SEQ ID NO: 235042 - DNA, 120 bp, Artificial Sequence
  ENSG00000119950_10 (sequence is synthesized)
tttctcttttctagtttgctcatactacattgagtagacacatttaaggatggggttatgaacccttcctgagctttatggtcctaaaagcaaaataaaaactattcgaatgaaaagaca

SEQ ID NO: 235043 - DNA, 120 bp, Artificial Sequence
  ENSG00000119950_11 (sequence is synthesized)
agaaaatcaggtattaatcttggatagctaataatgagctattaaaactcagcctgggacagtttatcatgaagcctgtggatgatcaatcctttattattattttttttttttgaaaaa

SEQ ID NO: 235044 - DNA, 120 bp, Artificial Sequence
  ENSG00000119950_12 (sequence is synthesized)
agctcatttcatgctctgcaaaaggagagactcccatgaagccttttgaaagggatcatcatgcagctcaactttctgttggattccatgctaagcaagctaaccttatcctgcattgtt

SEQ ID NO: 235045 - DNA, 120 bp, Artificial Sequence
  ENSG00000119950_13 (sequence is synthesized)
agcactaggcacccagctgccacctctccatcctgctgcccttaggccacatgggagcagtccatgcatgacagcctctatcctacaaggcctatgagtatggattgggggggccaaaag

SEQ ID NO: 235046 - DNA, 120 bp, Artificial Sequence
  ENSG00000119950_14 (sequence is synthesized)
gaaaaagctccatgtgcctctttgtctgcgtgggtcagaagagttgtgcacgcagattagcaggccaaggtctgagccacagcagcatttttatttcagattttgataactgtttatatg

SEQ ID NO: 235047 - DNA, 120 bp, Artificial Sequence
  ENSG00000119950_15 (sequence is synthesized)
tgttgaaaaccaaaatgacatctttttaaagcttatccataaaaaaaaatagatgtcttttatagtggaaaaacacatggggaaaaaaatcatctattttgatgcagcatttgataatga

SEQ ID NO: 235048 - DNA, 120 bp, Artificial Sequence
  ENSG00000119950_16 (sequence is synthesized)
taaaacacctcacacctcactctttatagtgcacaaaatgaatgaggtctgggctaggtagaaaaagggtcaatgctatttttgtttttagaatcattaccttttaccagcttttaacca

SEQ ID NO: 235049 - DNA, 120 bp, Artificial Sequence
  ENSG00000119950_17 (sequence is synthesized)
tctgatatctatagtagacacactatcatagttaacatagtaagttcagcacttgtctcattttaatgtaaagatttgcttccattttcctacaggcagtctctctcttcctcacagtcc

SEQ ID NO: 235050 - DNA, 120 bp, Artificial Sequence
  ENSG00000119950_18 (sequence is synthesized)
cactgtgcaggtgctattgttactcttacgaatattttcagtaatgttattttcttctaagtgaaatttctagcctgcactttgatgtcatgtgttccctttgtctttcaaactccaagg

SEQ ID NO: 235051 - DNA, 120 bp, Artificial Sequence
  ENSG00000119950_19 (sequence is synthesized)
ttcccttgtggccctctcccttaccctgggaaggcctcttggagaccttacccctggctgtttggactttgtatactttaaataatttaactacccttaattacttaaaaaaaaaaaaaa

SEQ ID NO: 235052 - DNA, 120 bp, Artificial Sequence
  ENSG00000119950_20 (sequence is synthesized)
catcgcccgaggcgtccgccctgcaaatctgccagcccccgagaggggtttggaaccttagcacccaagtctaagtcaacttcatagtgtgaacatggctacgcctcttcattcccgtcc

SEQ ID NO: 235053 - DNA, 120 bp, Artificial Sequence
  ENSG00000119950_21 (sequence is synthesized)
ggtgcccatggagcgggtgaagatgatcaacgtgcagcgtctgctggaggctgccgagtttttggagcgccgggagcgaggtaatggctgggcgccgctgcgtgagcccgagcgctacta

SEQ ID NO: 235054 - DNA, 120 bp, Artificial Sequence
  ENSG00000119950_22 (sequence is synthesized)
gggtgctgggagataagaggaaggaggaacacggatgctggggggggtcaggggaagggacgaggccgggagaacactgagcgggggaaaaccggtggagaggggcctttgaatacctgc

SEQ ID NO: 235055 - DNA, 120 bp, Artificial Sequence
  ENSG00000119950_23 (sequence is synthesized)
ggggtgatgagatggggtccctttagcggtggcagcccaaggggctgtagagatggcgcagaaagaccaggaactcggagactgtggtgtcgagagagaaaatgtctttctaagacttgt

SEQ ID NO: 235056 - DNA, 120 bp, Artificial Sequence
  ENSG00000119950_24 (sequence is synthesized)
ggagatgacttcatttggctgtgtccttccgtatttttccatcaaataccatactagaggaagtttctccgtggagattactttacagacttttagaagtccatcttgttcaaaaacttg

SEQ ID NO: 235057 - DNA, 120 bp, Artificial Sequence
  ENSG00000119950_25 (sequence is synthesized)
ttgggcttaaagagactctttagaacagagagagttgaaagtaaaggggaatttttgaggcaagcgaagtcaatgaggtgaatgagtgtgaacatggctacgcctcttcattcccgtcca

SEQ ID NO: 235058 - DNA, 120 bp, Artificial Sequence
  ENSG00000119950_26 (sequence is synthesized)
gtcaggccggcttttcgccccggcgccttctctgctccagccggccgggtctccctgggggcccggagctcggccgggccgcgcagccccgttagaggacgagctcggcggacccccgct

SEQ ID NO: 235059 - DNA, 80 bp, Artificial Sequence
  ENSG00000119950_27 (sequence is synthesized)
gagctcggcggacccccgctcctccatgggcaaacgcgggcggccgcgcaaggaggcgcgctgcgagggcgcggggctgg

SEQ ID NO: 235060 - DNA, 120 bp, Artificial Sequence
  ENSG00000119950_28 (sequence is synthesized)
ccgaggaccccgctggggccaagcccaggtgccccttctcagacattttcaacaccagcgagaactcgatggagaagcacatcaacacttttctgcagaacgtgcagattctgctcgagg

SEQ ID NO: 235061 - DNA, 120 bp, Artificial Sequence
  ENSG00000119950_29 (sequence is synthesized)
gatggagtgagccatataccaggaggaaagagcacactgctcttacacaaaacaaggagcacagcttagctcatctaaaatatttgtctataaacaatctgaagagaaagtagctacaga

SEQ ID NO: 235062 - DNA, 120 bp, Artificial Sequence
  ENSG00000119950_30 (sequence is synthesized)
tatttagcagtgcagttgagttgtgtgttaatgttagactatccctttgtgagtgacactttaacagcattcactgcttctatatatagtgtaccatcttggtcatacattacgcctcaa

SEQ ID NO: 235063 - DNA, 120 bp, Artificial Sequence
  ENSG00000119950_31 (sequence is synthesized)
catatacttgtgctcttcctttgcctccagaagaagtttttccttgattgtgctatgtttcagtggaagaaattctttgaagtagatgtgagtgaaaaactgcatgcctttagaagccca

SEQ ID NO: 235064 - DNA, 120 bp, Artificial Sequence
  ENSG00000119950_32 (sequence is synthesized)
gtatcagaacttgctacgtttcaggtgctagggacttaatgaaaaacaggacaaaacaattcctttttgtggcccaggtaaattatttctggtttcacttataattactaatggctgagt

SEQ ID NO: 235065 - DNA, 120 bp, Artificial Sequence
  ENSG00000119950_33 (sequence is synthesized)
caagatgttgtctctgtgtttgcttactcttgatcaagtgtgagacagtttgaagactgtgctaccatacaaagtgaatgaagccagtgactaagcttctgtttgttttgttattctcat

SEQ ID NO: 235066 - DNA, 120 bp, Artificial Sequence
  ENSG00000119950_34 (sequence is synthesized)
ggccttcgcttgcattatttgggccttcattcagatgaacttgaggtgccattttgttgcatatgtacaggattatgggctggaaagcatttgttataaacctatagtgcacattttaac

SEQ ID NO: 235067 - DNA, 120 bp, Artificial Sequence
  ENSG00000119950_35 (sequence is synthesized)
tgccccctaaattacccttccctgggtttgttttccttggggtggtgtagattgtatgagtaagaagtattaattttttaaaagacaaatcaactttgaagacacaaaagttaattggaa

SEQ ID NO: 235068 - DNA, 120 bp, Artificial Sequence
  ENSG00000119950_36 (sequence is synthesized)
ggaatacagaaagttcttgtgtgaccaaagaagaaatatggtgaatgaatgatcaagtttttctttttaactaaatccttataaacagataagagaggggaagtatgcatagaaactaaa

SEQ ID NO: 235069 - DNA, 120 bp, Artificial Sequence
  ENSG00000119950_37 (sequence is synthesized)
tttagcacagaatggatgtcaagtgagcaatttctgttaaatcactttggagtttgggttccttgtgggagttccagtgaagaacaaatgcctctggaacaagatttaattatttttttt

SEQ ID NO: 235070 - DNA, 120 bp, Artificial Sequence
  ENSG00000119950_38 (sequence is synthesized)
tttttcaaatgaggctgtcaaaaatgaagtcttccttagacatgaatgcaggataattaaaaaaaatagttgtttatatgttctgcactatagtcttcaacttagcaagcagtccatgga

SEQ ID NO: 235071 - DNA, 120 bp, Artificial Sequence
  ENSG00000119950_39 (sequence is synthesized)
gtaactggtcacaaaatttttgttctaaagcatctgaaatctcaagttcttgggagagaaggattttggaaaggggggataaactctttggtttagaggaggtatcaaaacaccttccag

SEQ ID NO: 235072 - DNA, 120 bp, Artificial Sequence
  ENSG00000119950_40 (sequence is synthesized)
ctggtggggtgtcacaggattgatgtccaggcgagggacattaattttctaaccaaaaagagtggaaacattttacctcttttcctgctttcaaaaacctgttactgcaaagacctcgga

SEQ ID NO: 235073 - DNA, 120 bp, Artificial Sequence
  ENSG00000119953_0 (sequence is synthesized)
tcccgaggtgaagcggaggcccaaggctgaggagcccgcctcgccggagacgcccaggcgctggccctggatcccggagccacggccgtctctcagccagagctgagcctcggcggcccg

SEQ ID NO: 235074 - DNA, 120 bp, Artificial Sequence
  ENSG00000119953_1 (sequence is synthesized)
caaacacggcccgcaggggaccgggtcgggtggggctgggcgccgcgcggctccctgtggagcctgcctgttggagcgcggcggggctccggcggtggtcttggagctggcgtgtggatt

SEQ ID NO: 235075 - DNA, 120 bp, Artificial Sequence
  ENSG00000119953_2 (sequence is synthesized)
cggtggtcttggagctggcgtgtggatttccacgtccgaatgatcgagttgtggcgggctttgagatgtcagaggatttagcaaagcagctggcaagctacaaagctcagctccagcaag

SEQ ID NO: 235076 - DNA, 120 bp, Artificial Sequence
  ENSG00000119953_3 (sequence is synthesized)
ttgaagctgcattatctggaaatggagaaaatgaagatttgctaaaattgaagaaagatttacaagaagttatagaactaaccaaagaccttctgtcaactcaaccttctgagacgcttg

SEQ ID NO: 235077 - DNA, 120 bp, Artificial Sequence
  ENSG00000119953_4 (sequence is synthesized)
ctactcattcatggaaagtaggagacaagtgtatggcagtctggagtgaagatggacagtgttatgaagcggagattgaggagatagatgaagaaaatggcaccgctgcaatcacctttg

SEQ ID NO: 235078 - DNA, 120 bp, Artificial Sequence
  ENSG00000119953_5 (sequence is synthesized)
ctggttatggcaatgctgaagtgactccactgttgaacctcaagcctgtagaagaaggaaggaaggcaaaggaggacagtggcaacaaacccatgtcaaaaaaagaaatgattgcccagc

SEQ ID NO: 235079 - DNA, 120 bp, Artificial Sequence
  ENSG00000119953_6 (sequence is synthesized)
agcgtgaatataaaaagaagaaagctttgaaaaaagctcagagaataaaagaacttgagcaggaaagagaggaccagaaagtgaaatggcaacaattcaacaacagagcctattctaaaa

SEQ ID NO: 235080 - DNA, 120 bp, Artificial Sequence
  ENSG00000119953_7 (sequence is synthesized)
acaaaaaaggccaggtaaagaggagtatttttgcttcacctgagagtgtgactggtaaagttggagtaggaacctgtggaattgctgataaacctatgacacaatatcaagatacctcta

SEQ ID NO: 235081 - DNA, 120 bp, Artificial Sequence
  ENSG00000119953_8 (sequence is synthesized)
aatacaatgtcaggcatttgatgcctcaataatcagaaaaactgttggatttcatctctgcagggctttacatttacctttttatccttatatttttctaaaggtaaattatttgttaga

SEQ ID NO: 235082 - DNA, 120 bp, Artificial Sequence
  ENSG00000119953_9 (sequence is synthesized)
gttcctcccttccccctcgccgccgaccgagttcttccttttcagaccgggtcgccttgctgtcgtcgcggtgattttcctgctactgctactgctgctgctgccaccgccactaccact

SEQ ID NO: 235083 - DNA, 120 bp, Artificial Sequence
  ENSG00000119953_10 (sequence is synthesized)
cagtaccacggttccctcaaagtttgttgaataaagcaacttttgtagatgctgtttcatacagcacttagatgaattattgatcttcctaatatcaggcgcctacttaacctatggtgt

SEQ ID NO: 235084 - DNA, 120 bp, Artificial Sequence
  ENSG00000119953_11 (sequence is synthesized)
gtactttttgtaagttgtaacttgaaattttcagatgctttgaacttgacacatactctagcaattcattggaacaccaaggcaaaaacaccaacctgctaaaagagatcttttcatttt

SEQ ID NO: 235085 - DNA, 120 bp, Artificial Sequence
  ENSG00000119953_12 (sequence is synthesized)
tcttattttcagctttaaaacttagctgtcgttcagttaagcttaaagataggttaatttgtaaatggcaaagtttgttttgaggtttttcctcaataacttgtttcccaggcctattag

SEQ ID NO: 235086 - DNA, 120 bp, Artificial Sequence
  ENSG00000119953_13 (sequence is synthesized)
gccatctctaaaattgatctagctgttttatttttatgtactcttagttttatgtaagaaaccttaggatgagctcccttttctaaggtgtttttgttttttgtatgtttgcttttttcc

SEQ ID NO: 235087 - DNA, 120 bp, Artificial Sequence
  ENSG00000119953_14 (sequence is synthesized)
tgttttttgttttttccatttacggcagtggtaccatgttttggatgtgtgatgtttatatgggagaacaaaaagctgatgtatagccctgtatacagtgtagatactatttttgtaaaa

SEQ ID NO: 235088 - DNA, 120 bp, Artificial Sequence
  ENSG00000119953_15 (sequence is synthesized)
acacaaggctaaattaatgaacaagaatactgaatatttcatcattaaaaatttcttgtatttcttgtgcattaatctgacgataatttccctgtatattatgttcatttagctgtttgt

SEQ ID NO: 235089 - DNA, 120 bp, Artificial Sequence
  ENSG00000119953_16 (sequence is synthesized)
aatttttgttaattagatcaggttgtctgcatttgttggtgtaagtgaacatcatcacagttatcctgagttgagtttaagccaaatacatgcatagaaaagggtcttcctattaatgga

SEQ ID NO: 235090 - DNA, 120 bp, Artificial Sequence
  ENSG00000119953_17 (sequence is synthesized)
agaaggtaatttttaggatgtgtattatttcagttttgtatgtttaacttttattaaataaagtgtttttaaaatctccagggtgtgttaacaaaagggtaaagtctttagctgtcagca

SEQ ID NO: 235091 - DNA, 120 bp, Artificial Sequence
  ENSG00000119953_18 (sequence is synthesized)
tggatcttaaagggcaaaccaggcctgtgtttataggatgtcctcattttaatgggtgtttgtagatttttggtggaaggggaaaataagtttttatttcatgaattttaatttttttta

SEQ ID NO: 235092 - DNA, 120 bp, Artificial Sequence
  ENSG00000119953_19 (sequence is synthesized)
taaattgaaacttaggacagtggtaggtagaattcttcatctctcccttccacacccacccctctcaacccaggagggtcactttttcttcatataattcgtggccacagggtaggacac

SEQ ID NO: 235093 - DNA, 120 bp, Artificial Sequence
  ENSG00000119953_20 (sequence is synthesized)
aaaggacagaaaggcacaaactgcagtagaaaaagggtttgttgaagcctgtaaacttctaaataaaatatactttgttattgtaacatcttaagagcttatcaataatcaagagtagcc

SEQ ID NO: 235094 - DNA, 120 bp, Artificial Sequence
  ENSG00000119953_21 (sequence is synthesized)
ttgatggattgcaagagaatcctttgaattaaaaagcactgggaagaaatttggtgtcattgtgtgaccccagaaaatggttgttgagattaccttggtggtattagaatagtaattcac

SEQ ID NO: 235095 - DNA, 120 bp, Artificial Sequence
  ENSG00000119953_22 (sequence is synthesized)
ttgatgtttgtgtaggcaggactgttaacagtcttgtccctcttttgaccctggggggccttagttttcccagaggactttgcagtaggagagagaaaaagaataaaagtgaccttaaaa

SEQ ID NO: 235096 - DNA, 120 bp, Artificial Sequence
  ENSG00000119953_23 (sequence is synthesized)
aaaaatgttttgaaaatagacctttagaatgaaatcagcaacctttgtgtcaaagatctagatgtggccctttggaaaatcctagtgtcaggatgatgtttgtgtctctgaactaagagg

SEQ ID NO: 235097 - DNA, 120 bp, Artificial Sequence
  ENSG00000119953_24 (sequence is synthesized)
caggactcctggggagactacctgtcacagtgtgatactgaatttgagaagatgctcaatgagaagcatgatacccacagtattttacagttgaaggtggttaagctctctatattctga

SEQ ID NO: 235098 - DNA, 120 bp, Artificial Sequence
  ENSG00000119953_25 (sequence is synthesized)
aacaaaatataaaccttgaccttaaaaagctttgttagaaaatttaatgtagagttttccccattaagaaaggagacttgaagctttgaaactgtgacagactgaaatgttaaatattga

SEQ ID NO: 235099 - DNA, 120 bp, Artificial Sequence
  ENSG00000119953_26 (sequence is synthesized)
gttatgggcccctaagtagaaatggttgcatgtaacttaccaaagcttgacgtttgactgttgttaccatttcaaggaaagaacagtcctaacctcccgaaaataaaatgttgagtttta

SEQ ID NO: 235100 - DNA, 120 bp, Artificial Sequence
  ENSG00000119953_27 (sequence is synthesized)
gtggtaatcacaggtaacaagtgctattttaattaacatgtagggaggccacagagcatactggaaaacagcaaggactctagagccagactagtgtttgtttattaccatttattacct

SEQ ID NO: 235101 - DNA, 120 bp, Artificial Sequence
  ENSG00000119953_28 (sequence is synthesized)
gtgtattcccatttattacctgtgtattcctctgattcatttttctcagctgtagaatggaaaaatctgtttcagttttaaggattgaattcaaatgtgtaaatagcttaagagtatccg

SEQ ID NO: 235102 - DNA, 120 bp, Artificial Sequence
  ENSG00000119953_29 (sequence is synthesized)
gcataagcactatagaagcgtctgctattactctgcagagtggcagtggtgaattatctgatattttttccttaacttgaatagcaatccacattacaatggataacaatacccattgtt

SEQ ID NO: 235103 - DNA, 120 bp, Artificial Sequence
  ENSG00000119953_30 (sequence is synthesized)
tatgatttgaggcatccaattataactgtattattgaagtgttatcaaattaccaaggctgtagggtatatttagtattcctagttaaaggtttgaactaatttgtatactagggcatgt

SEQ ID NO: 235104 - DNA, 120 bp, Artificial Sequence
  ENSG00000119953_31 (sequence is synthesized)
ttcttaatgggaagggggtgaaggttataataaaagtcacccctaatgcttgtttaaaattaaagaggaatttgtgggcctgggaccaaccttagacttatccaggccaaggtatgttgt

SEQ ID NO: 235105 - DNA, 120 bp, Artificial Sequence
  ENSG00000119953_32 (sequence is synthesized)
ttgacgaacaccgcaggtgatcctgatgtgcatccccgtctgagaactgttaactataaaagtttgactttggaaatgaagaaaaattaccttttagcctaatcatgaagactaggcgtc

SEQ ID NO: 235106 - DNA, 120 bp, Artificial Sequence
  ENSG00000119953_33 (sequence is synthesized)
aaaccaaaacaagatgcatcagttactgtagcaacacattttttttaaaaaattgcttgttgtcacaatgaagggtgtgtgtctgtttccagtatgcaattctaatgccaaatgtctgcc

SEQ ID NO: 235107 - DNA, 120 bp, Artificial Sequence
  ENSG00000119953_34 (sequence is synthesized)
ttaaaaatagcaaaggagaccatcaggttaacataaaggaaaactgtagttgtgtgactcatgtgtctgtagattgtaattttataattacaatttttataagataaaaaactaccagtt

SEQ ID NO: 235108 - DNA, 120 bp, Artificial Sequence
  ENSG00000119953_35 (sequence is synthesized)
gtaaattcaaccaaaaaaaatttaaagctttgatttagctttttgctttaacttgggtagtaactgaaatataaaggaagaaaatctattaaaaccaatgaggttttatatttttttaaa

SEQ ID NO: 235109 - DNA, 120 bp, Artificial Sequence
  ENSG00000119953_36 (sequence is synthesized)
ttcagaactcagacttgagggaggaaaagtaattaatgtttttgtttttcttttttaggaagttatagaactaaccaaagaccttctgtcaactcaaccttctgagacgcttgcaagttc

SEQ ID NO: 235110 - DNA, 120 bp, Artificial Sequence
  ENSG00000119953_37 (sequence is synthesized)
tgcaccgataaatatttaagcgactgggcgaaagatttttgttttggagaggcacttttaaatacactcttaattgaatagttcaagtaaagatcgtagtttgtgtagttaatttaaaaa

SEQ ID NO: 235111 - DNA, 120 bp, Artificial Sequence
  ENSG00000119953_38 (sequence is synthesized)
cgcacttgtttggctttggaagcatactgtagtgcttaaaaataagtatttggattgtttttgaaagtttcgacttttccaacagagtagtgctttttaaaaagataacactgattattg

SEQ ID NO: 235112 - DNA, 120 bp, Artificial Sequence
  ENSG00000119953_39 (sequence is synthesized)
agccgaattcagcacctaccctgtggataggagttaaaagaaaattagaaatttctttgtatctgtatgcttttttaaagtatggaatgtatctcaagtttataatcctcagaatctgtt

SEQ ID NO: 235113 - DNA, 120 bp, Artificial Sequence
  ENSG00000119953_40 (sequence is synthesized)
attaagctgcagtgttagaaggagttagaggcaaaaactggtaattcaggcagacaggggagttagttttttatgccttgatttttggtttagttttcatggtctaaccctttttatttt

SEQ ID NO: 235114 - DNA, 120 bp, Artificial Sequence
  ENSG00000119965_0 (sequence is synthesized)
actggaagagaggttccggggctgggctggcctgactgaaggcggcggaatggagacgcggaccgaggacgggggcctcacccgccgccccacgctggcctcttcttgggatgttgcagg

SEQ ID NO: 235115 - DNA, 120 bp, Artificial Sequence
  ENSG00000119965_1 (sequence is synthesized)
cggggccctgacccacagcctcctcctcacccgggccggtctcggccccggtgacttcgactgggaggagctgctggcaccgcctgctccaggtcaggatctggtgattttgaagagaaa

SEQ ID NO: 235116 - DNA, 120 bp, Artificial Sequence
  ENSG00000119965_2 (sequence is synthesized)
ccacaacaacaaagatgaaaacccctgcttcctttacctgaggtgtggccctgatggaggtgaagaaatcgcttctattggcattttaagttcagcaagaaatatggaagtgtacttagg

SEQ ID NO: 235117 - DNA, 120 bp, Artificial Sequence
  ENSG00000119965_3 (sequence is synthesized)
agaggagtactgtggaaccagtaggggcaagaatgtttgtactgtcctggatgacagtgaacatgaaaagatcattttgtataaaaaaaatctaaaattggagtcctccacacatgcttg

SEQ ID NO: 235118 - DNA, 120 bp, Artificial Sequence
  ENSG00000119965_4 (sequence is synthesized)
taaaataaagttgctctcctttggcgaaaggcagtgtgtgttcatcagtaaagttgtggtacacatgagatcagtttttgcaaattcttcaacaagctctcctgctctaggatcaaggat

SEQ ID NO: 235119 - DNA, 120 bp, Artificial Sequence
  ENSG00000119965_5 (sequence is synthesized)
agaccttgacaaggtccaaaccataatggagtccatggggtcaaagttatctcctggagctcagcagttgatggatatggttaggtgtcagcagcggaattgtattcccattggagagca

SEQ ID NO: 235120 - DNA, 120 bp, Artificial Sequence
  ENSG00000119965_6 (sequence is synthesized)
gcttcagtcggtgttgggcaattctggatacaagcatatgattggactacaatcctcatctaccttaggaaccttaaacaagtcgtcctccacaccttttccttttagaactggattgac

SEQ ID NO: 235121 - DNA, 120 bp, Artificial Sequence
  ENSG00000119965_7 (sequence is synthesized)
atctgggaacgtgactgaaaacttacaaacttacattgataaaagtacacaactgcctggtggagagaattctaccaagcttgatgagtgtaaagttatgcctcaaaaccattcctttct

SEQ ID NO: 235122 - DNA, 120 bp, Artificial Sequence
  ENSG00000119965_8 (sequence is synthesized)
tgaaaatgatcttaaaaatgcaatggcctctttcttaccaaagaaagtaagtgacaactcaaatatacccaactccgagttgctgccttttctccagaatttatgtagtcaagttaatca

SEQ ID NO: 235123 - DNA, 120 bp, Artificial Sequence
  ENSG00000119965_9 (sequence is synthesized)
tctccatgtgggaaataagaccgagtgtcaggaaaacatcaccaagcatggtgaacgcattcttggtgttggaatggaagagcaatctatttgctcctacttggaaaagattctttctaa

SEQ ID NO: 235124 - DNA, 120 bp, Artificial Sequence
  ENSG00000119965_10 (sequence is synthesized)
aaatatggaactgatggaaaagaaacttatggattacattgatcagcgaatacatgaactccaggagcacattgatgataagattgctttgttactggatttgctgcaaaatcctaactc

SEQ ID NO: 235125 - DNA, 120 bp, Artificial Sequence
  ENSG00000119965_11 (sequence is synthesized)
cccgcccactgggatacctctaagacattatgactctggagaaagactttcaaatggagaaagataagctctcaacataaacagtgtactgcagatatttattacatatttattacaaag

SEQ ID NO: 235126 - DNA, 120 bp, Artificial Sequence
  ENSG00000119965_12 (sequence is synthesized)
tttaatgtcctttgagggatcattgtcttacacaaagtgacctcagttttcgtttttactacacttgttattttaaatccagtactgtacactgagttaatatgatacagtcaaattatt

SEQ ID NO: 235127 - DNA, 120 bp, Artificial Sequence
  ENSG00000119965_13 (sequence is synthesized)
tttgctcacgatatttttcagtcttacagaaatgtatgtatatttgtgttaagagtttaaaatgcttgaggatttctaatacagttcattagtttgtattgtatatgtgtttaagtataa

SEQ ID NO: 235128 - DNA, 120 bp, Artificial Sequence
  ENSG00000119965_14 (sequence is synthesized)
tttttatttatacaaagatcttatagtcttagaagtatgaaaaataatgcttaagagtatttgatttttttctttttctaattatcttggaaaattggatacttaagacttggagccttt

SEQ ID NO: 235129 - DNA, 120 bp, Artificial Sequence
  ENSG00000119965_15 (sequence is synthesized)
acttcagattaccagtttacattttgtattgcttgtgtgagataatgaataagatgtgatatttggcatgtgtaaacttagttcactctggggttgttaatattatttgtttcattacag

SEQ ID NO: 235130 - DNA, 120 bp, Artificial Sequence
  ENSG00000119965_16 (sequence is synthesized)
agtagctgtaggtaggaaagtaaacatcagaactagcctagtccttgttacgattagtactttggatttgatttttcctgtaaaacagatgcagtcatcttgtttgacctcagtaacccc

SEQ ID NO: 235131 - DNA, 120 bp, Artificial Sequence
  ENSG00000119965_17 (sequence is synthesized)
agacagtttaagaaaacctctccttttgagctgatacaggttttttccccagaatccttttctggcatgtttattgtatgaaataatgaggctctccatggaaggatgaacacatatgag

SEQ ID NO: 235132 - DNA, 120 bp, Artificial Sequence
  ENSG00000119965_18 (sequence is synthesized)
tcaagggattgcaattctctctgatagacttagttttcagaccttataactattgtatatgcattgaagggtgatatatttgcatataaaaataaatgcacctgctctgggaactacttg

SEQ ID NO: 235133 - DNA, 120 bp, Artificial Sequence
  ENSG00000119965_19 (sequence is synthesized)
tctttagttagtagaactgttttatttcaactaatctttacttcaaatgtcttattttttagaaaaagggtatctcatactcatttaatattttggcaaatttcttctttaaaaatgtta

SEQ ID NO: 235134 - DNA, 120 bp, Artificial Sequence
  ENSG00000119965_20 (sequence is synthesized)
cctgatgtaattcctgcgtgacatagctgaatttttaccctgccctaactctgcttatctttaagaaacaggatgcctgtgatgaaaagttccttttgtaaccagtccagaggagactgg

SEQ ID NO: 235135 - DNA, 120 bp, Artificial Sequence
  ENSG00000119965_21 (sequence is synthesized)
ttacaaccacgatagctgaccaaacgactttaaaaagacctcagcctttttataatcttatttctgtgctaaataacgctcctgctagctccatgacagttgacaatcgccatgacagtg

SEQ ID NO: 235136 - DNA, 120 bp, Artificial Sequence
  ENSG00000119965_22 (sequence is synthesized)
accagaagaagccatgaaaggacaaaaaggaaggcagcactctggttttaggaagttcactgcccatttctgaaaaatccaggaatattcctccctttgcttgaatgtgaaacaccttta

SEQ ID NO: 235137 - DNA, 120 bp, Artificial Sequence
  ENSG00000119965_23 (sequence is synthesized)
ttagaaaaattatattttaaccccctcactcctcattagttgaaaagttgatttgtgagccatactcctgcttctcaattcagtggcgattgaataaaacctgcagtgtttgtcactctt

SEQ ID NO: 235138 - DNA, 120 bp, Artificial Sequence
  ENSG00000119965_24 (sequence is synthesized)
ggagtcttatcacccaggctggagtgcagttgcgcaatctcagctcactgcagcctctgtctcccgggttcaagcaatcctcccagaatggaagagcaatctatttgctcctacttggaa

SEQ ID NO: 235139 - DNA, 120 bp, Artificial Sequence
  ENSG00000119969_0 (sequence is synthesized)
gaaggagaagcgcgcttttttccctggcgggggatttggctagaaggctgggccggcagcggttgtgaggagttagctcgcggcattgcaggctctgagaggaggggacccggttcccgg

SEQ ID NO: 235140 - DNA, 120 bp, Artificial Sequence
  ENSG00000119969_1 (sequence is synthesized)
gtgagtgtccaggcatgccagcggaacggcccgcgggcagcggcggctcggaggctccagcaatggttgaacaactggacactgctgtgattaccccggccatgctagaagaggaagaac

SEQ ID NO: 235141 - DNA, 120 bp, Artificial Sequence
  ENSG00000119969_2 (sequence is synthesized)
agcttgaagctgctggactagagagagagcggaagatgctggaaaaggctcgcatgtcttgggatagagagtcgacagaaattcggtaccgtagacttcaacatttgcttgaaaaaagca

SEQ ID NO: 235142 - DNA, 120 bp, Artificial Sequence
  ENSG00000119969_3 (sequence is synthesized)
atatatactccaaatttttattgacgaaaatggaacagcaacaattagaggaacagaagaagaaagaaaaattggagagaaaaaaggagtctttaaaagttaaaaagggtaaaaattcaa

SEQ ID NO: 235143 - DNA, 120 bp, Artificial Sequence
  ENSG00000119969_4 (sequence is synthesized)
ttgatgcaagtgaagagaagccagttatgaggaaaaaaagaggaagagaagatgaatcatacaatatttcagaggtcatgtcaaaagaggaaattttgtctgtggctaaaaaaaataaaa

SEQ ID NO: 235144 - DNA, 120 bp, Artificial Sequence
  ENSG00000119969_5 (sequence is synthesized)
aggagaatgaggatgaaaactcctcctctactaatctctgtgtggaagatcttcagaaaaataaagattcgaatagtataattaaagatagattgtctgaaacggttaggcagaatacta

SEQ ID NO: 235145 - DNA, 120 bp, Artificial Sequence
  ENSG00000119969_6 (sequence is synthesized)
aattcttttttgacccagtccggaagtgtaatggtcagccagtaccttttcaacaaccaaagcacttcactggaggagtgatgcgatggtaccaagtagaaggcatggaatggcttagga

SEQ ID NO: 235146 - DNA, 120 bp, Artificial Sequence
  ENSG00000119969_7 (sequence is synthesized)
tgctttgggaaaatggaattaatggcattttagcagatgaaatgggattgggtaagacagttcagtgcattgctactattgcattgatgattcagagaggagtaccaggaccttttcttg

SEQ ID NO: 235147 - DNA, 120 bp, Artificial Sequence
  ENSG00000119969_8 (sequence is synthesized)
tctgtggccctttgtctacacttcctaactggatggctgaattcaaaagatttacaccagatatccctacaatgttatatcatggaacccaggaggaacgtcaaaaattggtaagaaata

SEQ ID NO: 235148 - DNA, 120 bp, Artificial Sequence
  ENSG00000119969_9 (sequence is synthesized)
tttacaaacggaaagggactttgcagattcatcctgtggtaatcacgtcatttgaaatagccatgagagaccgaaatgcgttacagcattgctattggaaatacttaatagtagatgaag

SEQ ID NO: 235149 - DNA, 120 bp, Artificial Sequence
  ENSG00000119969_10 (sequence is synthesized)
gacacaggattaagaatatgaagtgccgtctaatcagggagttaaaacgattcaatgctgataacaaacttcttttgactggtactcccttgcaaaacaatttatcagaactttggtcat

SEQ ID NO: 235150 - DNA, 120 bp, Artificial Sequence
  ENSG00000119969_11 (sequence is synthesized)
tgctaaactttttgttgccagatgtatttgatgacttgaaaagctttgagtcttggtttgacatcactagtctttctgaaactgctgaagatattattgctaaagaaagagaacagaatg

SEQ ID NO: 235151 - DNA, 120 bp, Artificial Sequence
  ENSG00000119969_12 (sequence is synthesized)
tattgcatatgctgcaccagattttaacacctttcttattgagaagactgaagtctgatgttgctcttgaagttcctcctaaacgagaagtagtcgtttatgctccactttcaaagaagc

SEQ ID NO: 235152 - DNA, 120 bp, Artificial Sequence
  ENSG00000119969_13 (sequence is synthesized)
ttttatacagccattgtgaaccgtacaattgcaaacatgtttggatccagtgagaaagaaacaattgagttaagtcctactggtcgaccaaaacgacgaactagaaaatcaataaattac

SEQ ID NO: 235153 - DNA, 120 bp, Artificial Sequence
  ENSG00000119969_14 (sequence is synthesized)
agcaaaatagatgatttccctaatgaattggaaaaactgatcagtcaaatacagccagaggtggaccgagaaagagctgttgtggaagtgaatatccctgtagaatctgaagttaatctg

SEQ ID NO: 235154 - DNA, 120 bp, Artificial Sequence
  ENSG00000119969_15 (sequence is synthesized)
aagctgcagaatataatgatgctacttcgtaaatgttgtaatcatccatatttgattgaatatcctatagaccctgttacacaagaatttaagatcgatgaagaattggtaacaaattct

SEQ ID NO: 235155 - DNA, 120 bp, Artificial Sequence
  ENSG00000119969_16 (sequence is synthesized)
gggaagttcttgattttggatcgaatgctgccagaactaaaaaaaagaggtcacaaggtgctgcttttttcacaaatgacaagcatgttggacattttgatggattactgccatctcaga

SEQ ID NO: 235156 - DNA, 120 bp, Artificial Sequence
  ENSG00000119969_17 (sequence is synthesized)
gatttcaacttcagcaggcttgatgggtccatgtcttactcagagagagaaaaaaacatgcacagcttcaacacggatccagaggtgtttatcttcttagtgagtacacgagctggtggc

SEQ ID NO: 235157 - DNA, 120 bp, Artificial Sequence
  ENSG00000119969_18 (sequence is synthesized)
ctgggcattaatctgactgcagcagatacagttatcatttatgatagtgattggaacccccagtcggatcttcaggcccaggatagatgtcatagaattggtcagacaaagccagttgtt

SEQ ID NO: 235158 - DNA, 120 bp, Artificial Sequence
  ENSG00000119969_19 (sequence is synthesized)
gtttatcgccttgttacagcaaatactatcgatcagaaaattgtggaaagagcagctgctaaaaggaaactggaaaagttgatcatccataaaaatcatttcaaaggtggtcagtctgga

SEQ ID NO: 235159 - DNA, 120 bp, Artificial Sequence
  ENSG00000119969_20 (sequence is synthesized)
ttaaatctgtctaagaatttcttagatcctaaggaattaatggaattattaaaatctagagattatgaaagggaaataaaaggatcaagagagaaggtcattagtgataaagatctagag

SEQ ID NO: 235160 - DNA, 120 bp, Artificial Sequence
  ENSG00000119969_21 (sequence is synthesized)
ttgttgttagatcgaagtgatcttattgatcaaatgaatgcttcaggaccaattaaagagaagatggggatattcaagatattagaaaattctgaagattccagtcctgaatgtttgttt

SEQ ID NO: 235161 - DNA, 120 bp, Artificial Sequence
  ENSG00000119969_22 (sequence is synthesized)
taaagtggagctcaagaatagcttttaaaagttcttatttacatctagtgatttccctgtattgggtttgaaatactgattgtccacttcaccttttttattatatcagttgacatgtaa

SEQ ID NO: 235162 - DNA, 120 bp, Artificial Sequence
  ENSG00000119969_23 (sequence is synthesized)
ctagtaccatgcgtacttaaatagatggtaattttctgagccttaccaagaacaaagaagtatccatattaagtttagattttcagttaatttttgagactgagtagtattcttggatac

SEQ ID NO: 235163 - DNA, 120 bp, Artificial Sequence
  ENSG00000119969_24 (sequence is synthesized)
aggctgatgtgtacttaaccacttccagatttatacagtcttcctgtggaagtttagtaaatgtctttttccctcctttcttctagtaatgcagttcatgggctttaggtacttcagtta

SEQ ID NO: 235164 - DNA, 120 bp, Artificial Sequence
  ENSG00000119969_25 (sequence is synthesized)
tgaagtaggcttttcatggggagagattgggattatgctctctgttgtttaagaaactgtttgattttagagtctatttctatgagatagtttaccaaataaatgttccttataagatga

SEQ ID NO: 235165 - DNA, 120 bp, Artificial Sequence
  ENSG00000119969_26 (sequence is synthesized)
caccaggaaagaattcctagaatgtatgtgtcagagtttacagatgagggcttctttgaaggcaaattgccctccagaaaagatttatatgatatacgtccatatgaaaatacttattta

SEQ ID NO: 235166 - DNA, 120 bp, Artificial Sequence
  ENSG00000119969_27 (sequence is synthesized)
gtactctgctgttgttgcttgaaagcagccatagacaaaccgtaaacaagtgaggctgactttgttccaatttatcccatttctttgcttttaaaaaaatacctgtgtattcgcttagct

SEQ ID NO: 235167 - DNA, 120 bp, Artificial Sequence
  ENSG00000119969_28 (sequence is synthesized)
ggagttggtctacaggctgtagtttgctgaccccaggactagaggtttgttgccatgtgtgaatttgtacttaatctactcagattaaaagaaagaaaagctggaaaatcactgtatttg

SEQ ID NO: 235168 - DNA, 120 bp, Artificial Sequence
  ENSG00000119969_29 (sequence is synthesized)
atgaaatatcccattgtataagtgttcccaaattagcctagaatgttatgaaatattatgagccagtaatgtctataggcttatttctgcctgaaggctactagttttatcttgagaatc

SEQ ID NO: 235169 - DNA, 75 bp, Artificial Sequence
  ENSG00000119969_30 (sequence is synthesized)
tggcctgagcactagggcgcaagagaagccgtactggaatattacactactcagcacaagacaggtttaatcttt

SEQ ID NO: 235170 - DNA, 120 bp, Artificial Sequence
  ENSG00000119969_31 (sequence is synthesized)
ggaatattacactactcagcacaagacaggtttaatctttttcttgggggacaagattggaaaattgaggtctgagcagacctgaagagaggcatccagcaactctgagattaaattcat

SEQ ID NO: 235171 - DNA, 120 bp, Artificial Sequence
  ENSG00000119969_32 (sequence is synthesized)
cattgatcaattcgttattgtttggaattgacgtttagctgtgttcctcactcagatacgtgcatgatagctgcttgctaatttggtcttagctcacatttcacctagaatgtatggtct

SEQ ID NO: 235172 - DNA, 120 bp, Artificial Sequence
  ENSG00000119969_33 (sequence is synthesized)
ccctctcccctgcaaaatatcccactgttgctaatctgtctgcctcataatttccatgagattgagcatcttgtttgttttgtcaccactatataacagcatgttggaaacaaagcagta

SEQ ID NO: 235173 - DNA, 120 bp, Artificial Sequence
  ENSG00000119969_34 (sequence is synthesized)
agtaataaagctagaaaaaccaagcgaatacactggattaaaaaaaatactgtttcctagaattaaagaaataaatgaggccgggcgcagtggtgcctgtaatcccagcagtttgggagg

SEQ ID NO: 235174 - DNA, 120 bp, Artificial Sequence
  ENSG00000119969_35 (sequence is synthesized)
ggctagtggatcatgtggccgagatcgcgtcactgcactccagtctagcaacagagcgataccttgtttcttacttaaaaaaaaaaaaagacctcatttgttaactgttaaacagaaaac

SEQ ID NO: 235175 - DNA, 120 bp, Artificial Sequence
  ENSG00000119969_36 (sequence is synthesized)
aagaaattccctatacctgtatgcattatagagcaaataagagcatcaaaaacaatcttagaaatctttcagagaaaggtcacctacaaaggaacattgatcagataatagatttttttt

SEQ ID NO: 235176 - DNA, 120 bp, Artificial Sequence
  ENSG00000119969_37 (sequence is synthesized)
tttttctcagatggagttctgctcttgtcgcccagactggagtgcaatggcacgatgttggctcactgcaatctccgcttcccaggttcaagcagttctccagccttagcctcccaagta

SEQ ID NO: 235177 - DNA, 82 bp, Artificial Sequence
  ENSG00000119969_38 (sequence is synthesized)
cccaagtagctgggattacaggctcccactaccattcccagaatttttgtattttaacctcgaactcctgaactcaggtgat

SEQ ID NO: 235178 - DNA, 120 bp, Artificial Sequence
  ENSG00000119969_39 (sequence is synthesized)
ctcggcctcacaaagtgctgtgattacagggtgtgagccactgcacctggccgataacagatgttttaatagtaagataaaaagtaaaatttccagtgtgtcgaaggaagaaaattacag

SEQ ID NO: 235179 - DNA, 120 bp, Artificial Sequence
  ENSG00000119969_40 (sequence is synthesized)
cctagaattttatcttcatgtacattatttaagtgtgagggaatagtttcagtgacattatgtcattgaagaccttagaagatttccctcgctaaaggagataaagcgactggcacaaca

SEQ ID NO: 235180 - DNA, 120 bp, Artificial Sequence
  ENSG00000119969_41 (sequence is synthesized)
tgtatttctctgagtaattagaagtgttcttttctggctgtactgaagggactttcatgatttcttcgtttttgtactcttagttttataatattgcatagtagctaaggcctggctgta

SEQ ID NO: 235181 - DNA, 120 bp, Artificial Sequence
  ENSG00000119969_42 (sequence is synthesized)
gcagttataaactgttctgcaagtgcgggaagtaatagttattcctatctcaaggatgtggggtttaaatgggttagtgcacaaaaggacatttattaaatttagtcataatcatctcaa

SEQ ID NO: 235182 - DNA, 120 bp, Artificial Sequence
  ENSG00000119969_43 (sequence is synthesized)
ctcaaagagaccaccaccactactacattttacttttattagtaattaataataattaataattagtaattcagtggtaattagtatactaccaaagaaagtacttgagcagaagagcca

SEQ ID NO: 235183 - DNA, 120 bp, Artificial Sequence
  ENSG00000119969_44 (sequence is synthesized)
aaattcaaaccatagaatcattttactgtgcttttattctacctcaaacactaatctccaggccttggataaagggattatttctctgaaggggaaagttatcctctttttgcccaagtc

SEQ ID NO: 235184 - DNA, 120 bp, Artificial Sequence
  ENSG00000119969_45 (sequence is synthesized)
acacttgtgtcatttcttatactgtaaacatgtggttccaattctgaggtattttcccggtttgtaggacccaaaaagaagttaggcttgagaaattttaagtgaagagaacaattctag

SEQ ID NO: 235185 - DNA, 120 bp, Artificial Sequence
  ENSG00000119969_46 (sequence is synthesized)
ttcagagtgattggctcttcctaaaagctgacatttgactgaaaattttgaggggagggaaagaaacaataccttttacggcatgtaataggaagaagacctggattttagttgctgctc

SEQ ID NO: 235186 - DNA, 120 bp, Artificial Sequence
  ENSG00000119969_47 (sequence is synthesized)
tgatgtcccaacttgggtaaggcaacataacataaatgtcagtttcttcagatttgtgatgaagctgataatccatgctcagcttcctttatgggtctcttgcctatcaaataaggtaca

SEQ ID NO: 235187 - DNA, 120 bp, Artificial Sequence
  ENSG00000119969_48 (sequence is synthesized)
gtatgtgaagatacattgcagattatcttatgcattgcttcaggggatgattaaaccatcctttattatagccagagtctagtctaagggaagaaggtcattctctataccagtgaaggc

SEQ ID NO: 235188 - DNA, 120 bp, Artificial Sequence
  ENSG00000119969_49 (sequence is synthesized)
tccatccaaaccagtgtttgggggcatagtcataattgaaaaatgattgttttccttatctgtaagacaggtaaatggtattaatcctcaggtggttgtgaggattaagtgatacatgta

SEQ ID NO: 235189 - DNA, 120 bp, Artificial Sequence
  ENSG00000119969_50 (sequence is synthesized)
aaaaaaagaaagctttggatagtacctattataagaaactcagtgttgctgcaatgtatgtattataatggatttgaaatttgccctaaccaagagtcacagacagaaaaaaggaagtta

SEQ ID NO: 235190 - DNA, 120 bp, Artificial Sequence
  ENSG00000119969_51 (sequence is synthesized)
atgtatctcttgatcactatcaagatgtggtattgaaccttcaagatccttttcagggaatatgtgagatcaaaatttttatactggcactatgatgttatttgccttttcctcatattc

SEQ ID NO: 235191 - DNA, 120 bp, Artificial Sequence
  ENSG00000119969_52 (sequence is synthesized)
acaagtgaacagtggagttttacagaagctatataatgtcatgacatcactgatgggtaatagaatgtgtgcttgtatattccgaaactttcagttccaatttcttcgatcaatgtaatc

SEQ ID NO: 235192 - DNA, 120 bp, Artificial Sequence
  ENSG00000119969_53 (sequence is synthesized)
tttcagttccaatttcttcgatcaatgtaatcctcataagtaaaagttatttgaggacctcagacatttttaaaaatgtaaagggggtggggtcaggctcagtggctcatgcctgtaatc

SEQ ID NO: 235193 - DNA, 87 bp, Artificial Sequence
  ENSG00000119969_54 (sequence is synthesized)
atggtgaaaccccgtctccactaaaacaaaaagttttctggatgtggtggcacacatacctgtaatcccagctactttaagacaggt

SEQ ID NO: 235194 - DNA, 120 bp, Artificial Sequence
  ENSG00000119969_55 (sequence is synthesized)
tgaggcatgagaatcacttgaacccagaagacaggttgcagtgagccaagattgtgcccctgcattctagcctgggtgacagtgagactgtctcaaaaaataaaggtgtacagggattgt

SEQ ID NO: 235195 - DNA, 120 bp, Artificial Sequence
  ENSG00000119969_56 (sequence is synthesized)
atatttgacaacttggtatgtaggatgtgctacctctaatgttccatgctgttacttagttttcactcactactatattttggagatttgttcatattgctctgtgtacatttaattctt

SEQ ID NO: 235196 - DNA, 120 bp, Artificial Sequence
  ENSG00000119969_57 (sequence is synthesized)
cagtgtgtatccaccacatttaacttattcacttacagaactatgcaagaatttctctggtaaatttcactaagtacttatgtacttttcagaacgattgtgagtttacacccctaccag

SEQ ID NO: 235197 - DNA, 120 bp, Artificial Sequence
  ENSG00000119969_58 (sequence is synthesized)
caggactgagttgagtacccatttcctcacatccttgccagtacttcatttgcctaatttttgccattctcataatgtggcaattgttcaattttgcatttcttccattttatttttttg

SEQ ID NO: 235198 - DNA, 120 bp, Artificial Sequence
  ENSG00000119969_59 (sequence is synthesized)
catctctgcttttcttttggttagctttgccagttctgcctattatattaatctcccagaatcagcttttagttttgttaaatctctgacatgtttcgttgattcctgctttcatcttaa

SEQ ID NO: 235199 - DNA, 120 bp, Artificial Sequence
  ENSG00000119969_60 (sequence is synthesized)
acatttcttcgttgttaatttgtgtttgctataaaataagcaacatcttaaatgcttgatttgctttcgatgtttattctgtaataagatatttaaagatataattttttccctaaatgc

SEQ ID NO: 235200 - DNA, 120 bp, Artificial Sequence
  ENSG00000119969_61 (sequence is synthesized)
tttattagacttttctcataagttttgactggtactgttttcattgttatttaattttgtgttttttaacttctttcatgatttccttttaactgaaggttttcttagatatttagtttg

SEQ ID NO: 235201 - DNA, 120 bp, Artificial Sequence
  ENSG00000119969_62 (sequence is synthesized)
ctggtatattcttttaaaattgtatcattgctttctttctatattggattattgtcagagaacatgatttgcatgatattaactttttggagtatattgttgcatctttgtggcctagta

SEQ ID NO: 235202 - DNA, 120 bp, Artificial Sequence
  ENSG00000119969_63 (sequence is synthesized)
catagttaatttagtgaatgcttccagttgtacttgaaaagaatgtatattttctgattattgagggtaaatttctctatatatgttttcctgtttaataaatatgtagctatgtgctta

SEQ ID NO: 235203 - DNA, 120 bp, Artificial Sequence
  ENSG00000119969_64 (sequence is synthesized)
tctggattaaatctgtctaagaatttcttagatcctaaggaattaatggaattattaaaatctagagattatgaaaggtgagtttttaattttagaaagatttaatttgtagctttgaat

SEQ ID NO: 235204 - DNA, 120 bp, Artificial Sequence
  ENSG00000119969_65 (sequence is synthesized)
aaaaagaaaaaaaaaacctttaaagaacagaagaagaaataagactttcaaagagaacttaaattttaaaagttaaaaatggtaaaaattcaattgatgcaagtgaagagaagccaggaa

SEQ ID NO: 235205 - DNA, 120 bp, Artificial Sequence
  ENSG00000119969_66 (sequence is synthesized)
aggagaagcgcgcttttttccctggcgggggatttggctagaaggctgggccggcagcggttgtgaggagttagctcgcggcattgcaggctctgagaggaggggacccggttcccgggc

SEQ ID NO: 235206 - DNA, 120 bp, Artificial Sequence
  ENSG00000119969_67 (sequence is synthesized)
tacaggcttgagccaccatgcccggccaagactattttttagaaccataaccacaatacagttaccacacttttgaaagtcgatgggaattccttaatatttaaatttctcaataggcta

SEQ ID NO: 235207 - DNA, 120 bp, Artificial Sequence
  ENSG00000119969_68 (sequence is synthesized)
ttaaatttctcaataggctaatttttatttttagggatgggggcttgctgtattgacgagactggagtgcagtggctattcctgagtattgtcatagtgactacacctcaaacacctggg

SEQ ID NO: 235208 - DNA, 120 bp, Artificial Sequence
  ENSG00000119969_69 (sequence is synthesized)
ctcacatgatcctcctgcctcagtgtcccgagtagtagtgcagggactataggcacttaccgctgtgatctgcttagctcatacattttaaaaaaatagttggttcaaatcaggatccga

SEQ ID NO: 235209 - DNA, 120 bp, Artificial Sequence
  ENSG00000119969_70 (sequence is synthesized)
aaaagttacataaattgtgtttgattaatgcgtatcttgggtctcttttagatctagagtgtctctcatcttttttaagaaacattatttgttgaagaaaatgagtaattctgtataatt

SEQ ID NO: 235210 - DNA, 120 bp, Artificial Sequence
  ENSG00000119969_71 (sequence is synthesized)
ccccacattctagactttactgattgtatccccatgatttctctgcctcttgtgtttcctgttaactatagtaactataagttaaatacggaagtttgtgattaaggtgtttttttattt

SEQ ID NO: 235211 - DNA, 74 bp, Artificial Sequence
  ENSG00000119969_72 (sequence is synthesized)
ttatttttttttgggagacaagatctttaacctctgattgctgggctcaagcaatcctcccacctcatcctcct

SEQ ID NO: 235212 - DNA, 120 bp, Artificial Sequence
  ENSG00000119969_73 (sequence is synthesized)
agctgggactacaggcgtgtaccaccaagcccagccaacatttatattttttgtagagatgggatctcaccatgttgcccatgcttgatttttaataagaatacttcattggtggtattt

SEQ ID NO: 235213 - DNA, 120 bp, Artificial Sequence
  ENSG00000119969_74 (sequence is synthesized)
ttcattggtggtatttatagattttgatttatttccaaattgttctttcaaaagtttcattttatctagtcattttacaggacagcttttatcagttcctggtataaaatccttttagcc

SEQ ID NO: 235214 - DNA, 120 bp, Artificial Sequence
  ENSG00000119969_75 (sequence is synthesized)
tcagccttataatatgaatatctatacatacataatacttcatacacacacgatatacatatattcccatgtatatatatgtgtgtgtgtcagccacttacatgtcctgttactcttcta

SEQ ID NO: 235215 - DNA, 120 bp, Artificial Sequence
  ENSG00000119969_76 (sequence is synthesized)
ctatcttgaatgatgaagcctggtgacaactttttagataattttatgtaagataattatttgctaagtcatccagtgacatactcgggtattgtttgtctccctaccagcagcatctag

SEQ ID NO: 235216 - DNA, 120 bp, Artificial Sequence
  ENSG00000119969_77 (sequence is synthesized)
taggtacttcaaaatcagagcactttattctgtatttttaattttttctgtctttgcctcttacccaggaatgcaaactcagatgtctatccacagaggcctaaagtgggctgtaacatg

SEQ ID NO: 235217 - DNA, 120 bp, Artificial Sequence
  ENSG00000119969_78 (sequence is synthesized)
tacaagatactggttttatttctatagtagcctaatgatttgaggtaccacaacttgagtcatttctatcatgtttcactattatacatttgtatgtggatacttgctttctgatttctt

SEQ ID NO: 235218 - DNA, 120 bp, Artificial Sequence
  ENSG00000119969_79 (sequence is synthesized)
taccctgaatttttagaagtagaaattaccttgttaatggcttccagcacttttatggctttgataaaggactttccagtgttgttataatttatggtgtgaatatatcagctttaacat

SEQ ID NO: 235219 - DNA, 120 bp, Artificial Sequence
  ENSG00000119973_0 (sequence is synthesized)
atttggatccgttcagctcccgcggagaagcgagaccggatcaccgacgtgggcagaggactaccgagggccagcagaaattctgccccttcttcccgcgagtgctttcccgctctccaa

SEQ ID NO: 235220 - DNA, 120 bp, Artificial Sequence
  ENSG00000119973_1 (sequence is synthesized)
accccactcccaggtggccatggcctcatcgaccactcggggccccagggtttctgacttattttctgggctgccgccggcggtcacaactcccgccaaccagagcgcagaggcctcggc

SEQ ID NO: 235221 - DNA, 120 bp, Artificial Sequence
  ENSG00000119973_2 (sequence is synthesized)
gggcaacgggtcggtggctggcgcggacgctccagccgtcacgcccttccagagcctgcagctggtgcatcagctgaaggggctgatcgtgctgctctacagcgtcgtggtggtcgtggg

SEQ ID NO: 235222 - DNA, 120 bp, Artificial Sequence
  ENSG00000119973_3 (sequence is synthesized)
gctggtgggcaactgcctgctggtgctggtgatcgcgcgggtgcgccggctgcacaacgtgacgaacttcctcatcggcaacctggccttgtccgacgtgctcatgtgcaccgcctgcgt

SEQ ID NO: 235223 - DNA, 120 bp, Artificial Sequence
  ENSG00000119973_4 (sequence is synthesized)
gccgctcacgctggcctatgccttcgagccacgcggctgggtgttcggcggcggcctgtgccacctggtcttcttcctgcagccggtcaccgtctatgtgtcggtgttcacgctcaccac

SEQ ID NO: 235224 - DNA, 120 bp, Artificial Sequence
  ENSG00000119973_5 (sequence is synthesized)
catcgcagtggaccgctacgtcgtgctggtgcacccgctgaggcggcgcatctcgctgcgcctcagcgcctacgctgtgctggccatctgggcgctgtccgcggtgctggcgctgcccgc

SEQ ID NO: 235225 - DNA, 120 bp, Artificial Sequence
  ENSG00000119973_6 (sequence is synthesized)
cgccgtgcacacctatcacgtggagctcaagccgcacgacgtgcgcctctgcgaggagttctggggctcccaggagcgccagcgccagctctacgcctgggggctgctgctggtcaccta

SEQ ID NO: 235226 - DNA, 120 bp, Artificial Sequence
  ENSG00000119973_7 (sequence is synthesized)
cctgctccctctgctggtcatcctcctgtcttacgtccgggtgtcagtgaagctccgcaaccgcgtggtgccgggctgcgtgacccagagccaggccgactgggaccgcgctcggcgccg

SEQ ID NO: 235227 - DNA, 120 bp, Artificial Sequence
  ENSG00000119973_8 (sequence is synthesized)
gcgcaccttctgcttgctggtggtgatcgtggtggtgttcgccgtctgctggctgccgctgcacgtcttcaacctgctgcgggacctcgacccccacgccatcgacccttacgcctttgg

SEQ ID NO: 235228 - DNA, 120 bp, Artificial Sequence
  ENSG00000119973_9 (sequence is synthesized)
gctggtgcagctgctctgccactggctcgccatgagttcggcctgctacaaccccttcatctacgcctggctgcacgacagcttccgcgaggagctgcgcaaactgttggtcgcttggcc

SEQ ID NO: 235229 - DNA, 120 bp, Artificial Sequence
  ENSG00000119973_10 (sequence is synthesized)
ccgcaagatagccccccatggccagaatatgaccgtcagcgtggtcatctgatgccacttagccaggccttggtcaaggagctccacttcaactggcctcctagggcaccactcgaggtc

SEQ ID NO: 235230 - DNA, 120 bp, Artificial Sequence
  ENSG00000119973_11 (sequence is synthesized)
aatctggtgcttattctcagcaccagagctagctaagccaacatagggcaacatttccagcccagccctcttgtccggctgtctgtcttgtccttgtgtgtttgtaaaatgttaagcggg

SEQ ID NO: 235231 - DNA, 120 bp, Artificial Sequence
  ENSG00000119973_12 (sequence is synthesized)
ctttggtgagagtcttgctctttgcttgggggaggccaaagagagggaagaggatttcttatttcttctttatgcccttgaaggacaaacaaaactttttctccacgttcagaaaagtat

SEQ ID NO: 235232 - DNA, 120 bp, Artificial Sequence
  ENSG00000119973_13 (sequence is synthesized)
ttcagaaccacgattgccttcctggcgtcccctcctcctgctcgttggtgaaatgaacaatatgaatgggatttaaaaggaatgcattgggcttggtaaagattttcagtttgcctttag

SEQ ID NO: 235233 - DNA, 120 bp, Artificial Sequence
  ENSG00000119973_14 (sequence is synthesized)
aaaaaggacccagctgagagtaccatgatattgcttagtccatttgaacccttgcattcctagaatttcaggtaaatatgtattaaaactctacatctaggatttcagcatttcctgagt

SEQ ID NO: 235234 - DNA, 120 bp, Artificial Sequence
  ENSG00000119973_15 (sequence is synthesized)
aagacctttatatgccaaaagggtttcgttttaaaaccacttgagtttatagtacaaaaacacctacaagctccctttagaaaggtcttgctattgtttctcccctttcctccccaacta

SEQ ID NO: 235235 - DNA, 120 bp, Artificial Sequence
  ENSG00000119973_16 (sequence is synthesized)
ctatttaaaaatgatgagacgaattagtcaatgaagagatagataaataaagaggaaaaggtccaattcacttaagaggtcattcaattgtacctaaggacagacatcctctgtgtatgt

SEQ ID NO: 235236 - DNA, 120 bp, Artificial Sequence
  ENSG00000119973_17 (sequence is synthesized)
gtgtttgtgtatgtgtgtgtatgtgtgggtacacattcagtgtttgccacaaagtgggcactcaaatatttggttttctgaatactcaatgtaaactgtgtagcgtggcattctcctgca

SEQ ID NO: 235237 - DNA, 120 bp, Artificial Sequence
  ENSG00000119973_18 (sequence is synthesized)
gtctctaattgctcacttgcaacagatcaacagctgtcatctgactgctcagcacctgctctgtagtgattcttggaacatgatcaacccagaaatcaaggaccggcagaagtttactta

SEQ ID NO: 235238 - DNA, 120 bp, Artificial Sequence
  ENSG00000119973_19 (sequence is synthesized)
aggacagaacagaagaataagctaccacccacatgatgtgtagatcaaacactaattacctccagggttaagggaaaaggtgaagactgtggagcatgataccaggctgataatcatcac

SEQ ID NO: 235239 - DNA, 120 bp, Artificial Sequence
  ENSG00000119973_20 (sequence is synthesized)
cttaacctcctgtgagttctgtaaatgaggacaagtgccttgggacaaaggtctccacactgttggaaaagcaacttgggcagtgagggcaggagtcttgggaaatgatacataatatcc

SEQ ID NO: 235240 - DNA, 120 bp, Artificial Sequence
  ENSG00000119973_21 (sequence is synthesized)
agctgtcagatcagcctctgtgttcccagtaactcagtcaccatctgtagggttcaactactttcccagctcactgaacacaagaatcactgtttcacctcctcctgcttctcttattca

SEQ ID NO: 235241 - DNA, 120 bp, Artificial Sequence
  ENSG00000119973_22 (sequence is synthesized)
ggtgggagtgggagtgatcacggttgggctggttggcataggaatctttagtagttacagggctagactttttgcacacagtaaagggtaggaaaggctggcttgggagaaaggaaaagg

SEQ ID NO: 235242 - DNA, 120 bp, Artificial Sequence
  ENSG00000119973_23 (sequence is synthesized)
caggcaaagatgggtatggaggttacctctggcaatggtgctaaatgaacttgagcttcatccgtggattggagaacaaagaacctgtgtgctaatagtgcaacccacccctgccccaga

SEQ ID NO: 235243 - DNA, 120 bp, Artificial Sequence
  ENSG00000119973_24 (sequence is synthesized)
taagctcatctcccaggcatcccgaggactggctcctgtgcttccagcagctatattacttgggaggctcagggccagacatttctcatttcctcagagagttcctttgatggtcatgtg

SEQ ID NO: 235244 - DNA, 120 bp, Artificial Sequence
  ENSG00000119973_25 (sequence is synthesized)
tggagagtgtagatggtagaggggaaggagagggattatttggggagggatctgattcatcgtcggctctttgttggaaggtttgaatcactggttctcaaccctggctgctcctagaat

SEQ ID NO: 235245 - DNA, 120 bp, Artificial Sequence
  ENSG00000119973_26 (sequence is synthesized)
cacctggggaacttttttttctttttgtaattgatgtctgggctctcctcccaagagtctagttgatttgagatggtgcctggacactagcattttccaaagcacttcaggggattttaa

SEQ ID NO: 235246 - DNA, 85 bp, Artificial Sequence
  ENSG00000119973_27 (sequence is synthesized)
tggacactagcattttccaaagcacttcaggggattttaatgtgcaaccaagattaagcaccttaagaattatcctttctagggc

SEQ ID NO: 235247 - DNA, 120 bp, Artificial Sequence
  ENSG00000119973_28 (sequence is synthesized)
ttgcagtgagctgagattgtgccagtgtactccaacctgggtgacagaacaagactccatctcggggtggggggtgggggcgggaatcctctttctaatgaatctcagaaacatccgaat

SEQ ID NO: 235248 - DNA, 120 bp, Artificial Sequence
  ENSG00000119973_29 (sequence is synthesized)
aatctcagaaacatccgaatgaagctttagttgtacctgccaaaggtgttaataatttggagctgaatttgacggtgttacatgccatacttagagaatactcttttagtcttcaggcaa

SEQ ID NO: 235249 - DNA, 120 bp, Artificial Sequence
  ENSG00000119973_30 (sequence is synthesized)
taccagctcaatcacaaagaggcaaattattgaaatcagaatatatagggattcgttcaacagtttacttacatatttcttatgtatcagtccaatcaattcagaaggaatatcatcatt

SEQ ID NO: 235250 - DNA, 120 bp, Artificial Sequence
  ENSG00000119973_31 (sequence is synthesized)
cattcaaccttaggtcaattgtattataaagttacataccatggccaggtaccatggctcacatctataattccaaaactttgggagaccgaagagggagaattgcttgagcccaggagt

SEQ ID NO: 235251 - DNA, 84 bp, Artificial Sequence
  ENSG00000119973_32 (sequence is synthesized)
aaatagccggaccacaaaggcaggaggatcacttgagcctgggaggatcactgggctgcagtgagctatcattacaccactgca

SEQ ID NO: 235252 - DNA, 120 bp, Artificial Sequence
  ENSG00000119973_33 (sequence is synthesized)
aggatcacttgagcctgggaggatcactgggctgcagtgagctatcattacaccactgcactccagtctcagtgacagagcaaaatctagtctcaaaaaaacaaaaaaaacaaaaacaac

SEQ ID NO: 235253 - DNA, 120 bp, Artificial Sequence
  ENSG00000119973_34 (sequence is synthesized)
tttacataccatgaattattttaaatcctggttgtcagggtgttagaaaaagtgctccttgattagcttaagtttatatcaactatgaaaaacaagcatctccattaattactagaaaag

SEQ ID NO: 235254 - DNA, 120 bp, Artificial Sequence
  ENSG00000119973_35 (sequence is synthesized)
ctgccactggtttctgtcatgcctacaacttaagtttgaaacacttacatggactttataaagagcttaaagaggttggagaattagattgtgcttataaacatctttacatattatgaa

SEQ ID NO: 235255 - DNA, 120 bp, Artificial Sequence
  ENSG00000119973_36 (sequence is synthesized)
aatcagcaacggaacagcaattaattcttacaacatctgaaatgtgttgtggactagtttataaatcaaaccgaatttcaaaaaaatcagaggtgagtcccagagagaactgcgtaggac

SEQ ID NO: 235256 - DNA, 120 bp, Artificial Sequence
  ENSG00000119973_37 (sequence is synthesized)
tgtaggtagaaaattttatttaataattcattttggttaatatcaagcatctaagatgtatacacagtcctcttcctgcaaggagtaatacaggcagtcaggctgggaactgagccaact

SEQ ID NO: 235257 - DNA, 120 bp, Artificial Sequence
  ENSG00000119973_38 (sequence is synthesized)
tggtacttggcagcagcccttctcaaggctgatgggaggttctgtaatcctctttgcaagctttgtcaccaggtcacacttttggcagccaatcaatagatttatctcattaaactggca

SEQ ID NO: 235258 - DNA, 120 bp, Artificial Sequence
  ENSG00000119973_39 (sequence is synthesized)
gaagagtgtttcaatgcatgctccaacagctacctggaaatagcaattgtgagagatgctaaggtaaggatattccagttcctataaccgtctgattttttgtccttgtgaattttcaat

SEQ ID NO: 235259 - DNA, 120 bp, Artificial Sequence
  ENSG00000119973_40 (sequence is synthesized)
ctgctgttttactgggatagctaagttccaggtttattttctcaggtaggctcacccacgacctctgtcctgtggtttgcattcctgaacatctgttagtctttcaaatgcaaggcacaa

SEQ ID NO: 235260 - DNA, 120 bp, Artificial Sequence
  ENSG00000119973_41 (sequence is synthesized)
aactaacctcaagagtgtggctagatctgggagtgaacacagggcctgtccctcacagacgagaggtcaggagcacctttgtttcccaaggcaggttcttgattgatttaccttcatgcg

SEQ ID NO: 235261 - DNA, 120 bp, Artificial Sequence
  ENSG00000119973_42 (sequence is synthesized)
ttgatgtctttgctatgtgtgtaaaatgcatgtgttgctgaatcacatgtgaagctctacatgctggggtttatactgtgtttggcatgttgtgggagctcaataaatactaaatcagtt

SEQ ID NO: 235262 - DNA, 120 bp, Artificial Sequence
  ENSG00000119973_43 (sequence is synthesized)
gttctgtggccggttattcccaagggaggactcaggcgatgggggaggggcgcggctggtgtaggaggtcggatggagtatggcaagggaagtgacggactttgattacctttgaacagg

SEQ ID NO: 235263 - DNA, 120 bp, Artificial Sequence
  ENSG00000119977_0 (sequence is synthesized)
cgtcggacccggaggccctgaatgccccatgcgcaccccacagctcgcgctcctgcaagtgttctttctggtgttccccgatggcgtccggcctcagccctcttcctccccatcaggggc

SEQ ID NO: 235264 - DNA, 120 bp, Artificial Sequence
  ENSG00000119977_1 (sequence is synthesized)
agtgcccacgtctttggagctgcagcgagggacggatggcggaaccctccagtccccttcagaggcgactgcaactcgcccggccgtgcctggactccctacagtggtccctactctcgt

SEQ ID NO: 235265 - DNA, 120 bp, Artificial Sequence
  ENSG00000119977_2 (sequence is synthesized)
gactccctcggcccctgggaataggactgtggacctcttcccagtcttaccgatctgtgtctgtgacttgactcctggagcctgcgatataaattgctgctgcgacagggactgctatct

SEQ ID NO: 235266 - DNA, 120 bp, Artificial Sequence
  ENSG00000119977_3 (sequence is synthesized)
tctccatccgaggacagttttctccttctgccttccaggcagcgtaaggtcttcaagctgggtttgtgtagacaactctgttatcttcaggagtaattccccgtttccttcaagagtttt

SEQ ID NO: 235267 - DNA, 120 bp, Artificial Sequence
  ENSG00000119977_4 (sequence is synthesized)
catggattctaatggaatcaggcagttttgtgtccatgtgaacaactcaaacttaaactatttccagaagcttcaaaaggtcaatgcaaccaacttccaggccctggctgcagagtttgg

SEQ ID NO: 235268 - DNA, 120 bp, Artificial Sequence
  ENSG00000119977_5 (sequence is synthesized)
aggcgaatcattcacttcaacattccaaactcaatcaccaccatctttttacagggctggggaccccattcttacttacttccccaagtggtctgtaataagcttgctgagacaacctgc

SEQ ID NO: 235269 - DNA, 120 bp, Artificial Sequence
  ENSG00000119977_6 (sequence is synthesized)
aggagttggagctgggggactctgtgctgaaagcaatcctgcaggtttcctagagagtaaaagtacaacttgcactcgttttttcaagaacctggctagtagctgtaccttggattcagc

SEQ ID NO: 235270 - DNA, 120 bp, Artificial Sequence
  ENSG00000119977_7 (sequence is synthesized)
cctcaatgctgcctcttactataacttcacagtcttaaaggttccaagaagcatgactgatccacagaatatggagttccaggttcctgtaatacttacctcacaggctaatgctcctct

SEQ ID NO: 235271 - DNA, 120 bp, Artificial Sequence
  ENSG00000119977_8 (sequence is synthesized)
gttggctggaaacacttgtcagaatgtagtttctcaggtcacctatgagatagagaccaatgggacttttggaatccagaaagtttctgtcagtttgggacaaaccaacctgactgttga

SEQ ID NO: 235272 - DNA, 120 bp, Artificial Sequence
  ENSG00000119977_9 (sequence is synthesized)
gccaggcgcttccttacagcaacacttcatccttcgcttcagggcttttcaacagagcacagctgcttctctcaccagtcctagaagtgggaatcctggctatatagttgggaagccact

SEQ ID NO: 235273 - DNA, 120 bp, Artificial Sequence
  ENSG00000119977_10 (sequence is synthesized)
aagctcaggttgaagaaggcagactgcagccacttgcagcaggagatttatcagactcttcatggaaggcccagaccagagtatgttgccatctttggtaatgctgacccagcccagaaa

SEQ ID NO: 235274 - DNA, 120 bp, Artificial Sequence
  ENSG00000119977_11 (sequence is synthesized)
ggagggtggaccaggatcctcaacaggcactgcagcatttcagctataaactgtacttcctgctgtctcataccagtttccctggagatccaggtattgtgggcatatgtaggtctcctg

SEQ ID NO: 235275 - DNA, 120 bp, Artificial Sequence
  ENSG00000119977_12 (sequence is synthesized)
tccaacccgcaagctcatgtatcaggagttcgattcctataccagtgccagtctatacaggattctcagcaagttacagaagtatctttgacaactcttgtgaactttgtggacattacc

SEQ ID NO: 235276 - DNA, 120 bp, Artificial Sequence
  ENSG00000119977_13 (sequence is synthesized)
cagaagccacagcctccaaggggccaacccaaaatggactggaaatggccattcgacttctttcccttcaaagtggcattcagcagaggagtattctctcaaaaatgctcagtctctccc

SEQ ID NO: 235277 - DNA, 120 bp, Artificial Sequence
  ENSG00000119977_14 (sequence is synthesized)
atccttatcctgtgcctcttactacttggagttctcaacctagagactatgtgaagaaaagaaaataatcagatttcagttttccctatgagaaactctgaggcagccacttatcttggc

SEQ ID NO: 235278 - DNA, 120 bp, Artificial Sequence
  ENSG00000119977_15 (sequence is synthesized)
taaatagaacctcacctgctcatgaccagagagcatttaggataatagaggacctaactgaaggaatccttgtatatgaaaggagttattttagaaaagcaataaaaatattttattcat

SEQ ID NO: 235279 - DNA, 120 bp, Artificial Sequence
  ENSG00000119977_16 (sequence is synthesized)
catagctctctgctttgggctctgcaggccaccagatacacatgaggcccctacttctcaagctgggaaggccaagagccttccttcagcctttctggttatgttacacctagctgaatg

SEQ ID NO: 235280 - DNA, 120 bp, Artificial Sequence
  ENSG00000119977_17 (sequence is synthesized)
tttacaaggtctggatccatcagccctcaggcacagttgggccaagcagaaagagagaaacacttctgctgtcaccttgaatgaactcaggaatagcttccctctggactgtagaggagc

SEQ ID NO: 235281 - DNA, 120 bp, Artificial Sequence
  ENSG00000119977_18 (sequence is synthesized)
taactgtttggaacagaaaactgctggctgttgattttgtctggttcctttgccaacatctgggcacaccctttgcccagacacgagtggggaaagcagttctttctcctcagtttccaa

SEQ ID NO: 235282 - DNA, 120 bp, Artificial Sequence
  ENSG00000119977_19 (sequence is synthesized)
agtaaatggggaatcccagctttcttttctactagcaaatgaccctaccatttatttctgcctttttcttccgttcattgtgaggaaaaataaaactggttgagagctttgttgtactaa

SEQ ID NO: 235283 - DNA, 120 bp, Artificial Sequence
  ENSG00000119977_20 (sequence is synthesized)
ggttgccaggcaacggaggcacggcccggcccgcgttaaggaggagggcgcagaccgaaggacactgaaagagctgtaacaaccccactttcgattggttgaagagctctcagccttctc

SEQ ID NO: 235284 - DNA, 120 bp, Artificial Sequence
  ENSG00000119977_21 (sequence is synthesized)
ggcctgttgcagcctaatgagaaaagctgcaaaggctttcaaacttatgttagactagccaaaggtgaggaattttttgttcattataatgaggtacttatatactaatatatggttaat

SEQ ID NO: 235285 - DNA, 120 bp, Artificial Sequence
  ENSG00000119977_22 (sequence is synthesized)
catttttggaatctagttgtctctctgtggttttctgaggaaaaaaatcacaaatttgtgactcgaacattatgatagtaatacaaaataaatagcattaaaggagaatgagaacataaa

SEQ ID NO: 235286 - DNA, 120 bp, Artificial Sequence
  ENSG00000119979_0 (sequence is synthesized)
agccagagctgcgcgccgcggcggcggaagatggctgcggccgaggtggcggacactcagctgatgcttggagtcgggctgatcgaaaaggacacaaatggagaagttctgtgggtgtgg

SEQ ID NO: 235287 - DNA, 120 bp, Artificial Sequence
  ENSG00000119979_1 (sequence is synthesized)
tgttatccttccacgacagccacattaaggaacctgctgctgagaaaatgctgccttacagatgaaaacaaacttctccatccctttgtctttggtcagtacagaagaacatggttttat

SEQ ID NO: 235288 - DNA, 120 bp, Artificial Sequence
  ENSG00000119979_2 (sequence is synthesized)
atcacaacaattgaagttccagattcttccattttgaaaaaggtgactcatttttctattgtcctgaccgccaaagattttaacccagagaagtatgctgccttcactaggatattgtgt

SEQ ID NO: 235289 - DNA, 120 bp, Artificial Sequence
  ENSG00000119979_3 (sequence is synthesized)
agaatgtacctgaaacatgggagcccagttaaaatgatggagagttatattgcagttctcacaaaggggatatgccagagtgaagaaaacggctctttccttagtaaggattttgatgcc

SEQ ID NO: 235290 - DNA, 120 bp, Artificial Sequence
  ENSG00000119979_4 (sequence is synthesized)
cgaaaggcctacctggctggctccatcaaagacattgtatctcagtttggaatggaaactgttatcttacacacagcactgatgctaaagaaaagaattgtggtgtatcaccccaagata

SEQ ID NO: 235291 - DNA, 120 bp, Artificial Sequence
  ENSG00000119979_5 (sequence is synthesized)
gaagcggtccaggagttcaccaggactctgcctgccctggtgtggcaccgacaggactggaccatccttcactcttacgtgcacctcaacgccgatgagctggaagccctgcagatgtgc

SEQ ID NO: 235292 - DNA, 120 bp, Artificial Sequence
  ENSG00000119979_6 (sequence is synthesized)
acaggttacgtcgctggatttgtagacttggaggtgagcaacagaccagacctctatgatgtgtttgtgaatctggcagagagtgagattaccattgctccccttgcaaaagaggccatg

SEQ ID NO: 235293 - DNA, 120 bp, Artificial Sequence
  ENSG00000119979_7 (sequence is synthesized)
gcaatgggcaaactgcacaaagaaatgggtcagctaattgttcagtctgcagaagatccagagaaatcagagagccacgttatacaggatattgctctaaaaacaagagaaatctttacc

SEQ ID NO: 235294 - DNA, 120 bp, Artificial Sequence
  ENSG00000119979_8 (sequence is synthesized)
aacctagcaccgttttcagaagtttcggctgatggagaaaagagagtccttaatttggaggcgctaaagcaaaaacgatttccaccagcaacagaaaacttcctttatcatctagcagca

SEQ ID NO: 235295 - DNA, 120 bp, Artificial Sequence
  ENSG00000119979_9 (sequence is synthesized)
gccgaacaaatgctgaaaatctgactgtgtgacagaacgtatcactgatgactgatagaaagccctctttcactctgattacccactcactacatgaagtcctgaaaataacagagaaac

SEQ ID NO: 235296 - DNA, 120 bp, Artificial Sequence
  ENSG00000119979_10 (sequence is synthesized)
tgacctgaaaaacaatgaaacacatgaacacacttccgattttctcctcgctgattagcttcctgcctgctgtcagtgctggacgaagtgctataactactttatgtaacattacagaac

SEQ ID NO: 235297 - DNA, 120 bp, Artificial Sequence
  ENSG00000119979_11 (sequence is synthesized)
agctagaggtcctggggtaagagaaaaaaagcacatcacaacaaatgtgaaagccttcattattacacgttccagtttgtctcgctgtgtaggcataagctaatggtttattttcagaaa

SEQ ID NO: 235298 - DNA, 120 bp, Artificial Sequence
  ENSG00000119979_12 (sequence is synthesized)
gctgcctgaaacgttgctttgtattcttctaggaagaactttaattcctcctgaggaactctactttctgagccaaactgctaattttctgcggaactgtctagaagatcattcaagaga

SEQ ID NO: 235299 - DNA, 120 bp, Artificial Sequence
  ENSG00000119979_13 (sequence is synthesized)
aagttaaaaaaaaaaaaaaaaaaaaaaggtttttcccggcctttgaacattttgcctatgagagttttgcatatattttatacttgagtagacaactttaataatccatatttatactat

SEQ ID NO: 235300 - DNA, 120 bp, Artificial Sequence
  ENSG00000119979_14 (sequence is synthesized)
tttaataatccatatttatactatcgcagaagtaagcatttggcaaacgttcagccattagcactcatttaaccctgttagcaatattcttttgaaaaaagtgccagtccttatgtgata

SEQ ID NO: 235301 - DNA, 120 bp, Artificial Sequence
  ENSG00000119979_15 (sequence is synthesized)
aactaagaagcccattgaatataaaagtgtgtaggactgaaacagtgaccttatattattgctaagggaatatgagattaacttcctacaggggccaaaaccagagaaaggcttccagca

SEQ ID NO: 235302 - DNA, 120 bp, Artificial Sequence
  ENSG00000119979_16 (sequence is synthesized)
acttcgatgaaagtagtttggccacatgtcaagccaattgtttgtactatttatgtacctttttcataactggaattgccaaataagcatggagatctaaatgatgtacttgttagtgta

SEQ ID NO: 235303 - DNA, 120 bp, Artificial Sequence
  ENSG00000119979_17 (sequence is synthesized)
ttcattcatattgactgtaaaggattatttttcactcagtactgatgtccttggaaatcttacctggaaacatgtttgcaaaaaacattattgggtctttcatctttttcttggtattac

SEQ ID NO: 235304 - DNA, 120 bp, Artificial Sequence
  ENSG00000119979_18 (sequence is synthesized)
atatttgttcaataaaaattaaacaccctcccttttttttgagtgagggcagggagtacctgaaataagacaatgtttactaaggcaaataattgaaaattaaatctgcactttatggaa

SEQ ID NO: 235305 - DNA, 120 bp, Artificial Sequence
  ENSG00000119979_19 (sequence is synthesized)
tctgcactttatggaaatgaggaatattaacatcttttttctcatttttttgtattactatattagctaatgatcaaagttgttaaaattataaatttatgatgcagaaataaaattgat

SEQ ID NO: 235306 - DNA, 120 bp, Artificial Sequence
  ENSG00000119979_20 (sequence is synthesized)
agagctgcgcgccgcggcggcggaagatggctgcggccgaggtggcggacactcagctgatgcttggagtcgggctgatcgctctcaccaaggaccgaggggccgtgggaaacgtctgac

SEQ ID NO: 235307 - DNA, 120 bp, Artificial Sequence
  ENSG00000119979_21 (sequence is synthesized)
gcccacttcacggaggagcaaatggaggcccaggccgtcattgtgcacggacacaccataggccgtacagagccgggagtgggaccctcgcagtgtatcccagagcccccaacccccacc

SEQ ID NO: 235308 - DNA, 120 bp, Artificial Sequence
  ENSG00000119979_22 (sequence is synthesized)
agtggagagctcctgcatcatgtgatcgagcttgtgcataaataaagcaggagtttctacacaatcctgtgtggtggaatctcgacggggtctccctcttatccaggctggagtgcagta

SEQ ID NO: 235309 - DNA, 120 bp, Artificial Sequence
  ENSG00000119979_23 (sequence is synthesized)
gcgcaatcatcgctctctgcagcctccacctcccaggcccaaaccatcctcccgcctcggcctccgagtagctgggacctcaggcgtgcaccaccacccgattaatttttgtattttttg

SEQ ID NO: 235310 - DNA, 120 bp, Artificial Sequence
  ENSG00000119979_24 (sequence is synthesized)
agcttgtgcagtgcgtggcattgtagtatcctggatttcttctcccgtcacagtgcaagagaagtgaggactcggagctactgccagccgcctcctctgcttcctgccccttcatgcagc

SEQ ID NO: 235311 - DNA, 120 bp, Artificial Sequence
  ENSG00000119979_25 (sequence is synthesized)
actatgctcactcttgcatgtatgcacatccaagtatttgcacacacacacacacacacacacacaggtctgtgtgtacatgcacacactcataggcaaagacttcttttcttcatgaca

SEQ ID NO: 235312 - DNA, 120 bp, Artificial Sequence
  ENSG00000119979_26 (sequence is synthesized)
gtttaacatggagttgcctccctccatttctggtgaggagcaggcaggcgtgccttccacacacagcttgctgctcacagtggcagcagaagcccgcaggagggaacctcattccctatg

SEQ ID NO: 235313 - DNA, 120 bp, Artificial Sequence
  ENSG00000119979_27 (sequence is synthesized)
tggctgcaggttcactgctgtggtcctcttcagcctctagtcgcttgctgctagtggccctgctagagaaccggggtttcatgcacacttgcagtcagctgtacaggcctcgatgtgtgg

SEQ ID NO: 235314 - DNA, 120 bp, Artificial Sequence
  ENSG00000119979_28 (sequence is synthesized)
ctctgaggaatgtaattatcttccataattaaaaaatatcacacggggatctttgggcagcctcgtgcagtatttaggggatggaacccgttggttcccttcgaaaaagttttattttcc

SEQ ID NO: 235315 - DNA, 120 bp, Artificial Sequence
  ENSG00000119979_29 (sequence is synthesized)
ttccccaagtgcgcaataacattgcttaggctttagcaaaactgaagaaatatgctgattatttttcagtgcctcaaagcagtgcgtttatgtgggaatcgcttactgtttttatttctt

SEQ ID NO: 235316 - DNA, 120 bp, Artificial Sequence
  ENSG00000119979_30 (sequence is synthesized)
attttcaaactgcttcaaaacaaaacctaagtaacttagtttctccagaaggtacttttgaactaaggctaagttaaactgtctttatctactaatagcaaataaaaagatgacatatga

SEQ ID NO: 235317 - DNA, 120 bp, Artificial Sequence
  ENSG00000119979_31 (sequence is synthesized)
gcaggcggcagccagagctgcgcgccgcggcggcggaagatggctgcggccgaggtggcggacactcagctgatgcttggagtcgggctgatcgtgaccatctttccaccgtagaaaagg

SEQ ID NO: 235318 - DNA, 120 bp, Artificial Sequence
  ENSG00000119979_32 (sequence is synthesized)
gggaagaactttaattcctcctgaggaactctactttctgagccaaactgctaattttctgcggaactgtctagaagatcattcaagagaccctgcagttgcactttctcgtaaaagtta

SEQ ID NO: 235319 - DNA, 120 bp, Artificial Sequence
  ENSG00000119979_33 (sequence is synthesized)
caggtaactccctcaccttctgacttactgaaagtcctgacccggtgtcgctgggtggtgtgcggcagagctgtgcacataagcagagtggggggctgtggtagaggccagcgggcaggt

SEQ ID NO: 235320 - DNA, 120 bp, Artificial Sequence
  ENSG00000119979_34 (sequence is synthesized)
gcttagagagggtttacagacggccacagtgatgatggacaagcaggtgcaggctggcctgatctagttagttactgggctcgagggcaggtatacacaggggctggtgctgacaccgac

SEQ ID NO: 235321 - DNA, 120 bp, Artificial Sequence
  ENSG00000119979_35 (sequence is synthesized)
cgctggcaatgagaaatgtaactaccaagtggtctggaaggcttttctgggccagccagtgcattctttcttcctaggagaatttccctggaggaacaaattataaaggggaggttgttg

SEQ ID NO: 235322 - DNA, 120 bp, Artificial Sequence
  ENSG00000119979_36 (sequence is synthesized)
ctgagcatggggaactagattgtcaaaattttgctttgcttgtctccaggacaacagaaatcatgcagtcagactcctgtcccacttagtgactgttgccacatgccgcagagccagctc

SEQ ID NO: 235323 - DNA, 120 bp, Artificial Sequence
  ENSG00000119979_37 (sequence is synthesized)
cttgctggtgtctacctggcatgctgaccagcgtccatgtggcccagtgggcacctgctctgcccttgccaaactgggatggcaaatgggttttatttcttgtgctttccacgtggtggc

SEQ ID NO: 235324 - DNA, 120 bp, Artificial Sequence
  ENSG00000119979_38 (sequence is synthesized)
ctgcagcccgcccagctccttgcatttggcctgttcccagctccttgctcctctcctgaaggatacacttccagcgttgccttatctagatgcctgactcataacctggggctggagggc

SEQ ID NO: 235325 - DNA, 120 bp, Artificial Sequence
  ENSG00000119979_39 (sequence is synthesized)
ccagaaggactgtctcccatctgcacctgtcctacctgggggtacgggggcacctctgatatgcaggctttactcattcggcccaacctgatgccttcttcatttatccattcatttact

SEQ ID NO: 235326 - DNA, 120 bp, Artificial Sequence
  ENSG00000119979_40 (sequence is synthesized)
cagtgtttcttgagctctgtttgttaggcattgcactggcagtggggatgcagtggtgagcaaatccctgccctcatggagtctgtaatttagtggagtagatgcacagaaaataataaa

SEQ ID NO: 235327 - DNA, 120 bp, Artificial Sequence
  ENSG00000119979_41 (sequence is synthesized)
atgtcagcggaaagatgagaggggccatttctctgcagtgctggtggcctggccagctgtgagcaggaagagtgggctgatcttgccctgaggacctgaacactggagactctggggccg

SEQ ID NO: 235328 - DNA, 120 bp, Artificial Sequence
  ENSG00000119979_42 (sequence is synthesized)
cttctttcctaccatgggaatcctcactgcccacctacccccaacattagagtaaagacatattcttacaatatcagcaacatatgtgaatctgagttttgcattactgtgttgttcaca

SEQ ID NO: 235329 - DNA, 120 bp, Artificial Sequence
  ENSG00000119979_43 (sequence is synthesized)
gactaaaagtgctacctagatgacttagtatgacgtatgagaccttggggagggcaagtgaaagtgctgggaatgctgtaagggttcaaaaatacatgaatgaattaatgatgtcagcaa

SEQ ID NO: 235330 - DNA, 89 bp, Artificial Sequence
  ENSG00000119979_44 (sequence is synthesized)
agggttcaaaaatacatgaatgaattaatgatgtcagcaaacaaggaagaagacgtgacttttttttcccttttttgagtttcactgtc

SEQ ID NO: 235331 - DNA, 86 bp, Artificial Sequence
  ENSG00000119979_45 (sequence is synthesized)
aagacatgattttaatgagtgctttagtgagtcctcagccacccaaaaggaataaagcctgcgtggcaggtgccgggttacttatc

SEQ ID NO: 235332 - DNA, 120 bp, Artificial Sequence
  ENSG00000119979_46 (sequence is synthesized)
aaggaataaagcctgcgtggcaggtgccgggttacttatcccaggcagaagaggacttttgggaagagattccttcaaaaaaacaatagcagcatttctcaaaaagttaaacatcaagtt

SEQ ID NO: 235333 - DNA, 120 bp, Artificial Sequence
  ENSG00000119979_47 (sequence is synthesized)
tctcaaaaagttaaacatcaagttaccatatgatttagcaatgctgtttctgggtatatacccaaaataattgaaagcagggactcggccaggcccggtggctcatgcatgtaatcccag

SEQ ID NO: 235334 - DNA, 120 bp, Artificial Sequence
  ENSG00000119986_0 (sequence is synthesized)
atacctggctagggccgaggattggctgttccggggctagggagcgctttctcccgggaaccgcggctgtgacccaagtggcccggaccagtttggggctgcgtgcggcctgcctcaagc

SEQ ID NO: 235335 - DNA, 120 bp, Artificial Sequence
  ENSG00000119986_1 (sequence is synthesized)
aaccaggtacgtaggtcggcggcccagctcggcgctgcggtgggagccggagggcgacagtcagagccggggtgccagcgggacgcgaccgccagatccacttaggaccccgtcgttctg

SEQ ID NO: 235336 - DNA, 120 bp, Artificial Sequence
  ENSG00000119986_2 (sequence is synthesized)
cgaagcggccacgtctgagtcccggggcctcctcgtgctgcagatgtcgccttaggacctcggccaggataccctctgccatgctcttgtgctgcccgtgatcaccgactggcccttgta

SEQ ID NO: 235337 - DNA, 120 bp, Artificial Sequence
  ENSG00000119986_3 (sequence is synthesized)
agcaccttcgcagagctgcgcctgccctttctgaaggctgtggaagaggttggagtgggcgcatcttagcttgccccatccccatttgaggtctgtcggagctgcccttcagtgtgagca

SEQ ID NO: 235338 - DNA, 120 bp, Artificial Sequence
  ENSG00000119986_4 (sequence is synthesized)
tccacaatgggtaccccagcctcggtggtcagtgagccacccccttggcaggccccgattgaggcccggggccgcaagcaggcctcggccaacatcttccaggacgccgagctgctgcag

SEQ ID NO: 235339 - DNA, 120 bp, Artificial Sequence
  ENSG00000119986_5 (sequence is synthesized)
tcatctgggaatgtgcaggggaccaccgtgtggctgaggccctcaagaggctgcgcaggaagaggcccccaaggcagaaacccctgggccactcgctacaccactgcagccgcctcagaa

SEQ ID NO: 235340 - DNA, 120 bp, Artificial Sequence
  ENSG00000119986_6 (sequence is synthesized)
tcctggagccccactctgcactggccaacccacagagtgccacagagacagcctccagtgagcagtatctgcactctaggaagaaaagtgccaggatccgccggaactggaggaagtcag

SEQ ID NO: 235341 - DNA, 120 bp, Artificial Sequence
  ENSG00000119986_7 (sequence is synthesized)
gccccacaagctacctccaccagatcagacactgatccagggaaagagccaggaatggcagtgtcttccctcttgccaaaaggcctggggaggtgaaggaagagagactttaggcaagca

SEQ ID NO: 235342 - DNA, 120 bp, Artificial Sequence
  ENSG00000119986_8 (sequence is synthesized)
gcccaaaggggtaaatgaaagcaagaggctgctgccactgacctgctccattcagaacaagactggatgcttctgttgagctctccattatgtgggacccattcctcaccaaaatgagga

SEQ ID NO: 235343 - DNA, 120 bp, Artificial Sequence
  ENSG00000119986_9 (sequence is synthesized)
gagacagtgactgttcctgccacagtccttcccagtctaacactattcctgggctgcatgatattcccctgggagcaaagtgacaggcacttagatgcagcatttcaccactcatgctac

SEQ ID NO: 235344 - DNA, 120 bp, Artificial Sequence
  ENSG00000119986_10 (sequence is synthesized)
taatcatctacctgctactactgtaaaccatggttccagcagcctgttccacacccccacaccatcaggatagcacagggaaactgtagtttaagtggcaaataaaaacatttgcatcaa

SEQ ID NO: 235345 - DNA, 120 bp, Artificial Sequence
  ENSG00000120008_0 (sequence is synthesized)
acagtgtccgccgcttcctggttgcgggtcagcgcccaggtcctgggctggccgccgggatgttgccctacacagtgaacttcaaggtgtcggcgcgcaccctcacgggggccctcaacg

SEQ ID NO: 235346 - DNA, 120 bp, Artificial Sequence
  ENSG00000120008_1 (sequence is synthesized)
cccacaacaaggcggcggtggactggggctggcaaggtttaattgcttatggatgtcattcacttgtggtagtgattgattccattactgcccaaactcttcaagttttagaaaagcata

SEQ ID NO: 235347 - DNA, 120 bp, Artificial Sequence
  ENSG00000120008_2 (sequence is synthesized)
aagctgatgttgtaaaggttaaatgggccagggaaaactatcaccataacattggctcaccatattgcttacggttagcttctgctgatgtcaatgggaagatcatcgtctgggatgtag

SEQ ID NO: 235348 - DNA, 120 bp, Artificial Sequence
  ENSG00000120008_3 (sequence is synthesized)
cagcaggagtagctcagtgtgagatccaagagcatgccaagcctatccaggatgttcagtggttgtggaatcaagatgcttcccgcgatttactgcttgctatccacccgccaaattaca

SEQ ID NO: 235349 - DNA, 120 bp, Artificial Sequence
  ENSG00000120008_4 (sequence is synthesized)
ttgtgctctggaatgccgacactggcaccaaactatggaagaagagctatgcagataacattctttctttttcttttgacccttttgatccctcacatttaactttgcttaccagcgagg

SEQ ID NO: 235350 - DNA, 120 bp, Artificial Sequence
  ENSG00000120008_5 (sequence is synthesized)
gtattgttttcatctcagacttctccccatccaagcctccctcaggccctgggaaaaaagtttacatatccagcccacactctagcccagctcataacaagctggccacagccacaggtg

SEQ ID NO: 235351 - DNA, 120 bp, Artificial Sequence
  ENSG00000120008_6 (sequence is synthesized)
ccaagaaagctctaaataaagtaaaaattttaatcactcaagagaaacctagtgctgaattcataactctcaatgattgccttcagttggcatacctgccttcaaaaaggaatcacatgt

SEQ ID NO: 235352 - DNA, 120 bp, Artificial Sequence
  ENSG00000120008_7 (sequence is synthesized)
tgttgctctatcctcgagagattttaatccttgaccttgaggtgaatcagacggtgggtgtgattgcaatagaacgcacaggagttccatttttacaggtaataccctgctttcagcgtg

SEQ ID NO: 235353 - DNA, 120 bp, Artificial Sequence
  ENSG00000120008_8 (sequence is synthesized)
atggtttattttgtctacatgaaaatggttgtataactttacgtgttcgaagatcttataataacatttttaccacttcaaatgaggaaccagatccagatccagttcaggagcttacct

SEQ ID NO: 235354 - DNA, 120 bp, Artificial Sequence
  ENSG00000120008_9 (sequence is synthesized)
atgatttacgaagccagtgtgatgcaatcagggtgacaaaaaccgtccgtcccttcagtatggtgtgctgtcctgtcaatgagaatgcagccgccctcgtagtgagtgatggcagggtca

SEQ ID NO: 235355 - DNA, 120 bp, Artificial Sequence
  ENSG00000120008_10 (sequence is synthesized)
tgatatgggaactcaagtctgcagtttgtaatcgaaattcacggaacagtagttctggtgtgtcacctttatattcaccagtgtctttctgtggaattcctgtaggagtgctacagaata

SEQ ID NO: 235356 - DNA, 120 bp, Artificial Sequence
  ENSG00000120008_11 (sequence is synthesized)
aactcccagacctttccttagataacatgattgggcaaagtgcaattgctggggaagaacatcccagaggttcaattctgcgggaagtgcacctcaagttcctgctgacgggactgcttt

SEQ ID NO: 235357 - DNA, 120 bp, Artificial Sequence
  ENSG00000120008_12 (sequence is synthesized)
caggactgcccgcaccacagtttgctattcgtatgtgtccaccgttgaccacaaaaaacatcaagatgtatcagccactgctggctgttggtacaagtaatggttctgtcctggtgtacc

SEQ ID NO: 235358 - DNA, 120 bp, Artificial Sequence
  ENSG00000120008_13 (sequence is synthesized)
atctcaccagtggtctgctacacaaagagttaagcatccactcatgtgaagtcaagggtattgaatggacaagtttgactagttttctttcttttgctacctcaacaccaaacaatatgg

SEQ ID NO: 235359 - DNA, 120 bp, Artificial Sequence
  ENSG00000120008_14 (sequence is synthesized)
gattagtgagaaatgaacttcaactggttgatcttccaacaggtaggagcattgcttttcgtggtgaaagaggcaatgatgaatctgccatcgaaatgattaaagtatctcatttgaagc

SEQ ID NO: 235360 - DNA, 120 bp, Artificial Sequence
  ENSG00000120008_15 (sequence is synthesized)
agtatttggcagtcgtattcagagataaacccctggagctatgggatgttaggacttgtacccttcttagagagatgtccaaaaacttccctacaataactgctttggagtggtcaccat

SEQ ID NO: 235361 - DNA, 120 bp, Artificial Sequence
  ENSG00000120008_16 (sequence is synthesized)
ctcacaacttgaagagcctgagaaagaagcaacttgcaactcgagaggccatggcccgccagaccgtagtctcagacacagagctgagtattgttgaatcatctgtgatcagcttgctgc

SEQ ID NO: 235362 - DNA, 120 bp, Artificial Sequence
  ENSG00000120008_17 (sequence is synthesized)
aggaggcagaaagtaaatctgaacttagtcagaacatctctgcccgggaacattttgtatttaccgatattgatggccaagtgtatcatctcactgttgaaggaaactcagtaaaagaca

SEQ ID NO: 235363 - DNA, 120 bp, Artificial Sequence
  ENSG00000120008_18 (sequence is synthesized)
acttgaaaggcagagtatccagaggaatacccacacaccgaagttgggtgaggaagattcgttttgctcctggtaaaggaaatcaaaaattaatagcaatgtacaatgatggagctgaag

SEQ ID NO: 235364 - DNA, 120 bp, Artificial Sequence
  ENSG00000120008_19 (sequence is synthesized)
tgtgggatactaaagaggttcagatggtgagcagtttaagaagtggcagaaatgtgacctttcgtatattggatgtggactggtgtacgtcagataaagtgatcttggcctcagatgatg

SEQ ID NO: 235365 - DNA, 120 bp, Artificial Sequence
  ENSG00000120008_20 (sequence is synthesized)
ggtgcatcagagtcctagagatgtctatgaagtctgcgtgctttagaatggatgaacaagagttaaccgagcctgtgtggtgcccctatctccttgttccaagggcctctcttgccttga

SEQ ID NO: 235366 - DNA, 120 bp, Artificial Sequence
  ENSG00000120008_21 (sequence is synthesized)
aagccttcttattacaccagccttggaatggacagtattctttggacatttctcatgttgactatccagaaaatgaagaaataaagaatctcctccaagaacagttgaattcattgtcta

SEQ ID NO: 235367 - DNA, 120 bp, Artificial Sequence
  ENSG00000120008_22 (sequence is synthesized)
atgacataaagaaactgttgcttgatccagaattcactctcttgcagaggtgcctgcttgtttcaaggctctatggtgatgaatcggagctgcacttctggactgtcgctgcccactacc

SEQ ID NO: 235368 - DNA, 120 bp, Artificial Sequence
  ENSG00000120008_23 (sequence is synthesized)
tgcacagcttatcccaggaaaagtcagccagcacaacagctcctaaagaagctgctcctcgagacaaactgagcaacccactggatatatgctatgacgtgctctgtgaaaatgcctact

SEQ ID NO: 235369 - DNA, 120 bp, Artificial Sequence
  ENSG00000120008_24 (sequence is synthesized)
ttcagaaatttcagctagaaagggttaatctgcaggaagtgaaacggtcaacttatgatcatacaaggaaatgtacagaccagctactgctcttgggtcaaacagacagagctgtgcagt

SEQ ID NO: 235370 - DNA, 120 bp, Artificial Sequence
  ENSG00000120008_25 (sequence is synthesized)
tgctgttggaaacaagtgcagataaccagcattattactgtgattcactgaaagcctgtttagtcactactgtcacctcgtcaggcccctctcagagcaccattaagttggtggcaacga

SEQ ID NO: 235371 - DNA, 120 bp, Artificial Sequence
  ENSG00000120008_26 (sequence is synthesized)
atatgattgccaatggcaaattggcagagggcgttcagttgctctgcctgatagataaggctgcagacgcctgccgctacctgcagacatacggcgagtggaatcgggctgcatggctgg

SEQ ID NO: 235372 - DNA, 120 bp, Artificial Sequence
  ENSG00000120008_27 (sequence is synthesized)
caaaagtccgtttgaatcctgaggagtgtgccgatgttttaaggcggtgggttgaccacctttgttctccacaagtcaatcagaaatcaaaggctctcctggttctcctctctctgggct

SEQ ID NO: 235373 - DNA, 120 bp, Artificial Sequence
  ENSG00000120008_28 (sequence is synthesized)
gcttttttagcgtggcagagacgcttcacagcatgagatactttgatagagcagccttatttgtggaagcttgcctcaagtatggagcatttgaagtcactgaggacacagagaaactca

SEQ ID NO: 235374 - DNA, 120 bp, Artificial Sequence
  ENSG00000120008_29 (sequence is synthesized)
tcactgctatatatgcagattatgcccggagtttgaagaacctcggttttaagcagggagcagttctctttgcttcaaaagccggagcagctggcaaagacttattgaatgagcttgagt

SEQ ID NO: 235375 - DNA, 120 bp, Artificial Sequence
  ENSG00000120008_30 (sequence is synthesized)
cccccaaggaagaacccattgaagagtgacagcttaataaatgccagggaatctgacctggaaggcagatgggagggggctggtctggctgtggccaccgtcacagtccaggatgaagag

SEQ ID NO: 235376 - DNA, 120 bp, Artificial Sequence
  ENSG00000120008_31 (sequence is synthesized)
gagtacagggtcctgtgagctgtttgaccactgttctaagactatgtgtgcccaaaagcacataagcatctatgttgagagtaagtttgtatcctgcgttggtctcagaaagaacgtgaa

SEQ ID NO: 235377 - DNA, 120 bp, Artificial Sequence
  ENSG00000120008_32 (sequence is synthesized)
tgcttaagattttgaaagtacataatattttatactttgggagagagctttaagagtccctggaaatactttttaatttttttaacttaaaattcaagagactgaatcacttttctcatt

SEQ ID NO: 235378 - DNA, 120 bp, Artificial Sequence
  ENSG00000120008_33 (sequence is synthesized)
gattaaatgtaaagattattgagaaacctatagtaaatgaaatttgtgagatgttttctcaaatatatgctgtgcctgtacttatatacagtctttcaagagagatacaaacaaggcaga

SEQ ID NO: 235379 - DNA, 120 bp, Artificial Sequence
  ENSG00000120008_34 (sequence is synthesized)
aacatttaaactagtattaaaggtagtttaccaaagcattttttgttttcttaccttgaaaacacagaaccgttaattccttggtttaagcagttgctaagttttgtaattttaggctca

SEQ ID NO: 235380 - DNA, 120 bp, Artificial Sequence
  ENSG00000120008_35 (sequence is synthesized)
gaggaccataggaggttttaagatttatgtttagtccgataggtgaggtctttgatattttgaattttaactccttttatgatacatcacagtaacctcatttttgaagtctttctttgt

SEQ ID NO: 235381 - DNA, 120 bp, Artificial Sequence
  ENSG00000120008_36 (sequence is synthesized)
actttaatgttctctctgttctaatagttgaagtatgagatgtaactattataaactgttgctgaaaacataaatgtctgtaacttacaaacatgataaataaattaaaaattccatcca

SEQ ID NO: 235382 - DNA, 120 bp, Artificial Sequence
  ENSG00000120008_37 (sequence is synthesized)
ttatttagaagaacaaacacttgttctttctgccaataaccttatgttatctttttaatataagacataatatagaatgccaagcttggaggcctctgatgaattgtaatggaccacctg

SEQ ID NO: 235383 - DNA, 120 bp, Artificial Sequence
  ENSG00000120008_38 (sequence is synthesized)
tttctcttcaacttagagaacattcccattatgttatgaatgcataacattgccagttatatattattaaaattatcactatattgctctcaaaattgtattggaataaaactgtatgct

SEQ ID NO: 235384 - DNA, 120 bp, Artificial Sequence
  ENSG00000120008_39 (sequence is synthesized)
attctgtaaagcacgctggcagcacttgggcaaacacagacatcttctgtgtccgctgagctcttggtcgtaaatgaacttttgcaaggatattgactggtgtgttttgtcatgatgagt

SEQ ID NO: 235385 - DNA, 120 bp, Artificial Sequence
  ENSG00000120008_40 (sequence is synthesized)
ttcaaaataaagaatttgaaaatataataaggaaagagtttcaaattattttctggtgtatgcagtagtttcaaagaggtttttttaaaaataaaattgtgatgagtttctttaaaatgg

SEQ ID NO: 235386 - DNA, 120 bp, Artificial Sequence
  ENSG00000120008_41 (sequence is synthesized)
tatagcaacacgaatcatatgtagatgatcttaaccaatgagagcatgtgtatgtatgtgtaaaatgaattaaatcaaataaatggttgtaaatcaagtaagttgtaaataaatgaagta

SEQ ID NO: 235387 - DNA, 120 bp, Artificial Sequence
  ENSG00000120008_42 (sequence is synthesized)
catggttgcttttttatgttctccatatgtattttcaagctctcaaagatccagttgttcttacttctcagggtatgttgctgaacttccaggaatcattcccgtctttagtccagtgtt

SEQ ID NO: 235388 - DNA, 120 bp, Artificial Sequence
  ENSG00000120008_43 (sequence is synthesized)
gctgctctagtctcattggaagtgacctgtccactgactctcatccccaagttcctaatttgccagcagaatggtactggccctgtgtctagtgatcccagggataaaatgctgttgtct

SEQ ID NO: 235389 - DNA, 120 bp, Artificial Sequence
  ENSG00000120008_44 (sequence is synthesized)
agtatcattgacttaaaaaaaagaaaaaaaatccctgttttatttgttttggtcagctcaagttcaggactgttagataacttaaaatctgctttgcacagatgtatttttaaggaacaa

SEQ ID NO: 235390 - DNA, 120 bp, Artificial Sequence
  ENSG00000120008_45 (sequence is synthesized)
acatctacagtaacagttacagatttccttaagtgggatatttgagttcatagatggtagacttttatagcctgggcttctaaggagggcagcagactagtgcagtcaggacaggacatg

SEQ ID NO: 235391 - DNA, 120 bp, Artificial Sequence
  ENSG00000120008_46 (sequence is synthesized)
ggctgtttggggtataataatagtgagtatagtgagattccacatgatggaatctcaacaaagagtaggaaggcgtttaggccttcagttgtccttgaattgagtatgttctctcttttg

SEQ ID NO: 235392 - DNA, 120 bp, Artificial Sequence
  ENSG00000120008_47 (sequence is synthesized)
tttaatgtagataaaaatctaacacaagatactaaaacatacaaggtagaatttatactttttttattcacagaaaatcatgtaacttcctttgcgggtaactcattctttcacagcata

SEQ ID NO: 235393 - DNA, 120 bp, Artificial Sequence
  ENSG00000120008_48 (sequence is synthesized)
catgaacaccgtagttattccctagtttccagtttataaagatgttttgagaggaacatgttcaaaatatttaactagtattttgcacatgggacaagaagatcttaaatacatgtttca

SEQ ID NO: 235394 - DNA, 120 bp, Artificial Sequence
  ENSG00000120008_49 (sequence is synthesized)
agagtttttcccccactagttagtatttggaaacatgggaatgtttgtattaaatattactttaaataagtagttttcgcaccagacaattgctgtaccataaatatcttaaaacttaac

SEQ ID NO: 235395 - DNA, 120 bp, Artificial Sequence
  ENSG00000120008_50 (sequence is synthesized)
attgtttttttaaatttctaaaattgaattatagaattcaagaaactgtgtgacaaatgaaaatgcctttttacaaaataaatatctgaatatgtgatatattattgatcattagtttgt

SEQ ID NO: 235396 - DNA, 120 bp, Artificial Sequence
  ENSG00000120008_51 (sequence is synthesized)
tctgaatatgtgatatattattgatcattagtttgtaacacttttaagaatattctttgaacttacattattagaaacagcttagaaggaactgggcgccgtggctcacacctgtaatcc

SEQ ID NO: 235397 - DNA, 85 bp, Artificial Sequence
  ENSG00000120008_52 (sequence is synthesized)
ccccatctctactaggagtacaaaaatgagctgggatgctaaggtaggagcattgcttttcgtggtgaaagaggcaatgatgaat

SEQ ID NO: 235398 - DNA, 120 bp, Artificial Sequence
  ENSG00000120008_53 (sequence is synthesized)
atcgcttggaaaggtgatacattagtgcttggagatatggatggaaatttaaatttctgggacttgaaaggcagagtatccaggtataagccaagaatgaaatcttgttatttcattaaa

SEQ ID NO: 235399 - DNA, 120 bp, Artificial Sequence
  ENSG00000120008_54 (sequence is synthesized)
tccattagaggcttgtgacttggcaagaaggatcagtaaactcgtggaggtgtagcttggacccttgggtcccttcacctaaacttgggaggatgggccttgagccaagcattcttagga

SEQ ID NO: 235400 - DNA, 120 bp, Artificial Sequence
  ENSG00000120008_55 (sequence is synthesized)
gatagttatctgcaagtggcccctgcagaagtcttagctgaccttaaagggcaggccctttctgtcagatgtggcccccagtcccagcaagtaaagggttctcccatcatcagacctgtt

SEQ ID NO: 235401 - DNA, 120 bp, Artificial Sequence
  ENSG00000120008_56 (sequence is synthesized)
aacaaggcggcggtggactggtgaggacgccgagcttccaggtcgccaggatcggccaggaatgtgtgagggggaagggggaaggacaagaggtttcaccccctggggctggcaaggttt

SEQ ID NO: 235402 - DNA, 120 bp, Artificial Sequence
  ENSG00000120008_57 (sequence is synthesized)
aattgcttatggatgtcattcacttgtggtagtgattgattccattactgcccaaactcttcaagttttagaaaagcataaagctgatgttgtaaaggtccaagtttcagtctggtatta

SEQ ID NO: 235403 - DNA, 120 bp, Artificial Sequence
  ENSG00000120008_58 (sequence is synthesized)
agcgcccaggtcctgggctggccgccgggatgttgccctacacagtgaacttcaaggtgtcggcgcgcaccctcacgggggccctcaacgcccacaacaaggcggcggtggactgcttct

SEQ ID NO: 235404 - DNA, 120 bp, Artificial Sequence
  ENSG00000120008_59 (sequence is synthesized)
agatttgaatgcagagactctctctgctcttggcttgtgtttcctaagcggtgactacattgaatatactctcagttgttccagatttacctgttgctctctgctgactgctctgtaaat

SEQ ID NO: 235405 - DNA, 120 bp, Artificial Sequence
  ENSG00000120008_60 (sequence is synthesized)
ggtttatagctgaagcttcactgtagtataaaacttcattttatttttaaaaacctttctttgttgtctagagcctgtgtggtgcccctatctccttgttccaagggcctctcttgcctt

SEQ ID NO: 235406 - DNA, 120 bp, Artificial Sequence
  ENSG00000120008_61 (sequence is synthesized)
atatgatatgggacaaaatacagcacttaaagagaggtgttgctcaggccagccactataatccacccatcagccagaacattttatttcttctaaatggcacttgagcaacattggttt

SEQ ID NO: 235407 - DNA, 120 bp, Artificial Sequence
  ENSG00000120008_62 (sequence is synthesized)
ctttgaaaagaatgaacttgagaatgcaactcccaggaccagaaaagaatgaaactgggccagtgcttgcatggtcctgctgctgctcactgcactttgcttcaaattcttacatttgct

SEQ ID NO: 235408 - DNA, 120 bp, Artificial Sequence
  ENSG00000120008_63 (sequence is synthesized)
ctcatttctacatggcaggtacttggttctctctctctttctccctctttctctgtgtgtgtttataatttttttttttttttaacagagaattaaaactaaactaaaaatttttttttt

SEQ ID NO: 235409 - DNA, 120 bp, Artificial Sequence
  ENSG00000120008_64 (sequence is synthesized)
cctttttttgaggtaaggtctcactcttctgcccagactggagtgagtggcacgatcatggctcactacagccttgacttcctgggctcaagcagtcctcccacctcatcctccccagta

SEQ ID NO: 235410 - DNA, 120 bp, Artificial Sequence
  ENSG00000120008_65 (sequence is synthesized)
ggctcaagcagtcctcccacctcatcctccccagtagctgggaccataggtccacaccattgtgcctggcttttttttttttttggtagtaacccgggtctcactatgttgcccaggctg

SEQ ID NO: 235411 - DNA, 120 bp, Artificial Sequence
  ENSG00000120008_66 (sequence is synthesized)
tgctgagattacaggcatgagccacccagccctgcactgaaagttttttaaaattaaactgaaggctgagcctactcaagatcatgtacctagtcactgggaaggtgactggttcagtgt

SEQ ID NO: 235412 - DNA, 120 bp, Artificial Sequence
  ENSG00000120008_67 (sequence is synthesized)
caagatcatgtacctagtcactgggaaggtgactggttcagtgtatgcattttgaggatcaaagcatcagcacagagtacccaataggctgtttaaaaaaataaaaataaataaaaaaaa

SEQ ID NO: 235413 - DNA, 120 bp, Artificial Sequence
  ENSG00000120008_68 (sequence is synthesized)
aaccagatatagggaacattcagaaataaatatctgcccccaaactgccagcctctcagactttcaaatggaatgaggatatgcaggttaagtttctcctctcttatcattcatcttcca

SEQ ID NO: 235414 - DNA, 120 bp, Artificial Sequence
  ENSG00000120008_69 (sequence is synthesized)
atcttcagttgagtgtaggttatgggaggatgttggttgggtcttctggaaggagaagctttggactcagctggtacgaaaggtaatgatggtacagactgagacatggcctactatggc

SEQ ID NO: 235415 - DNA, 120 bp, Artificial Sequence
  ENSG00000120008_70 (sequence is synthesized)
cccttccgagcagccagcagagcagacgcgactcacccttcctgcttctgggagcctgtgaagagtctcatcacagccctttttactcttcttttccttaactatggtttacagaaactc

SEQ ID NO: 235416 - DNA, 120 bp, Artificial Sequence
  ENSG00000120008_71 (sequence is synthesized)
aaggaaatgtacagaccagctactgctcttgggtcaagtatgtcaggcgttcagttgctctgcctgatagataaggctgcagacgcctgccgctacctgcagacatacggcgagtggaat

SEQ ID NO: 235417 - DNA, 120 bp, Artificial Sequence
  ENSG00000120008_72 (sequence is synthesized)
cctctctcttttcctctcctccagcttccaggcttctctctctccaccattaattccctgtgcactttctctttcccatcctgtcttttctttttcgttgtcttgtattcctgttgtctt

SEQ ID NO: 235418 - DNA, 120 bp, Artificial Sequence
  ENSG00000120008_73 (sequence is synthesized)
tcaacaatgtgccagaccctgtgctaggcgcctgttctttcacctgtccttttcacctcttttcgggctcctcctgtgtagaacattcctgccttcaacaggtcgtctttattactctct

SEQ ID NO: 235419 - DNA, 120 bp, Artificial Sequence
  ENSG00000120008_74 (sequence is synthesized)
cctttcactataaattactactgcagctctgaaaactactcattagacaaatgtaaagcaaaattctgtggctgtgggatgttgttaggaggactgaaacgtcttgtgcagtgtttgtcg

SEQ ID NO: 235420 - DNA, 120 bp, Artificial Sequence
  ENSG00000120008_75 (sequence is synthesized)
ttttatttagttggaaggactaggattagtcgcagtatccccaggcacattgtggatactaaggattagaaatcggataagcgaaagacgtatgcctacaagaacagtcagagggcacaa

SEQ ID NO: 235421 - DNA, 120 bp, Artificial Sequence
  ENSG00000120008_76 (sequence is synthesized)
ttttatccgaatgaaaagtgaatttcaacaagcattttaagcttagccagatcttttatttaagtgggataatgataaatactggcctttgggtttaaatgattttattaatggtggtac

SEQ ID NO: 235422 - DNA, 120 bp, Artificial Sequence
  ENSG00000120008_77 (sequence is synthesized)
acacaatggaagagcccaagtgtgacccgggtaatcctggctccagagcctgctccttagcaatggcctccagtcctgacagctccactgtcatcttggggcaaagtgcaattgctgggg

SEQ ID NO: 235423 - DNA, 120 bp, Artificial Sequence
  ENSG00000120008_78 (sequence is synthesized)
ggtaaaccgagagttcacatgggctgctcaggcctgcccgtgagcagtcacttcatgttctctcgcggttctagcaggtcatggtactcgatgtgtaaagtgaaaggagaagtatacatt

SEQ ID NO: 235424 - DNA, 120 bp, Artificial Sequence
  ENSG00000120008_79 (sequence is synthesized)
tcaggtttgtcaaaaaacccaaaggagaatggaactgtccgtattcattacatcttcattcggtctaggagctatgctagtttcctactaatatgctgatcagacttaacaggcacctag

SEQ ID NO: 235425 - DNA, 120 bp, Artificial Sequence
  ENSG00000120008_80 (sequence is synthesized)
taaaagggaatttaaaagtcttcagagaattggggtccattcagctttgactagagcaactgagaggaggcccagagagcagggggagaggcgacagaaggcatggtgaggtggagacat

SEQ ID NO: 235426 - DNA, 120 bp, Artificial Sequence
  ENSG00000120008_81 (sequence is synthesized)
cccgtctgaaaatctggaagaggaacaaccatcactaattgtggagcatttcatttattcaaaactaagggaggtagattacggaaatatgacaaaagattacttgtcaactctggacag

SEQ ID NO: 235427 - DNA, 120 bp, Artificial Sequence
  ENSG00000120008_82 (sequence is synthesized)
gggtacatgggcacttgtcatatctctgtagatttttgtgtatttaaactatttcacaattttttaaagtattaattttaaaaagcttgtgtttggagatgtgagtattcttccctcctt

SEQ ID NO: 235428 - DNA, 120 bp, Artificial Sequence
  ENSG00000120008_83 (sequence is synthesized)
ttttcaacaaactagggcttagaaaagtgcttgtatcttaatgcagtatgcaggtttccagggaaaatgtgtaaatgtctttatacccttcgatgctgctgcccaccagtgatgtaaatc

SEQ ID NO: 235429 - DNA, 120 bp, Artificial Sequence
  ENSG00000120008_84 (sequence is synthesized)
gtaggtggttccaagtttcaataggtgccctcaacattcgggatagaaagctcagtcctgaactttggacttatgacttagaaacattttttggcctgcaaagctgctttgcaaatactg

SEQ ID NO: 235430 - DNA, 120 bp, Artificial Sequence
  ENSG00000120008_85 (sequence is synthesized)
tcttggaacctttatccttttcctattctttatgagtgtaaattgcattacttatttaaaaatggatcttgcattggtagcaattaagtaaaagcagctgcctcctctttctcccagagt

SEQ ID NO: 235431 - DNA, 120 bp, Artificial Sequence
  ENSG00000120029_0 (sequence is synthesized)
gtgagcccggagcagcggcagcgtcggtggcgtcgagagcgagcgggcccgggaacggcgcgggtggtagaggaggagccgcgggctcgattctctaaccatggcacaggtagagaaacg

SEQ ID NO: 235432 - DNA, 120 bp, Artificial Sequence
  ENSG00000120029_1 (sequence is synthesized)
tggaggtttgctccggaaatcttcagcctccaaaaaaccactgaaggaaaaagtggtgctgatgtatgatgagatcttcatgacagaggaccccagtaagtgcagtcctcggttttggga

SEQ ID NO: 235433 - DNA, 120 bp, Artificial Sequence
  ENSG00000120029_2 (sequence is synthesized)
ggagctctttctcatgaaggtgaatttagagtacctagaaggcaagctggaatctcttgatggtgaggagttaatgaagatcaaggacaatattaattgcttattccaacactgcatcca

SEQ ID NO: 235434 - DNA, 120 bp, Artificial Sequence
  ENSG00000120029_3 (sequence is synthesized)
ggctctgggagaggagcatccaattcgggttgtcaatgcattgcagaccctgtgcgcactcattcgaggagtccatcaaaagaataagtctacctctgggtttgacattatcaacatgct

SEQ ID NO: 235435 - DNA, 120 bp, Artificial Sequence
  ENSG00000120029_4 (sequence is synthesized)
gatgggctttgacaaggcggagctgtgcatgaagaacttgatggagagtttggattcattgctttgtgcagaaggttctgaaagtctgaagagtttatgtctgaaacttctcctttgctt

SEQ ID NO: 235436 - DNA, 120 bp, Artificial Sequence
  ENSG00000120029_5 (sequence is synthesized)
agtgaccgtgacagataacatcagccagaacactattctcgagtatgtaatgatcaacagcatatttgaagcaattttacagatactttcccatcccccaagtcgtagggagcatgggta

SEQ ID NO: 235437 - DNA, 120 bp, Artificial Sequence
  ENSG00000120029_6 (sequence is synthesized)
tgatgctgtcgtcctcttggctttgctggtgaactatagaaaatatgagtctgtgaatccttatattgtgaagctgtctatcgtggatgatgaggccacactcaatggaatgggacttgt

SEQ ID NO: 235438 - DNA, 120 bp, Artificial Sequence
  ENSG00000120029_7 (sequence is synthesized)
aattgctcaggctttatctgagtacaacaggcagtataaagacaaggaagaagaacaccaaagtggttttttctctgctttaacaaatatggtgggcagcatgttcatagcagatgccca

SEQ ID NO: 235439 - DNA, 120 bp, Artificial Sequence
  ENSG00000120029_8 (sequence is synthesized)
tgagaaaatctcagtacaaaccaatgaggccattcttctggcactttatgaagctgttcatttaaatcgcaacttcatcacagtattagctcagagccatccagaaatgggcttggtgac

SEQ ID NO: 235440 - DNA, 120 bp, Artificial Sequence
  ENSG00000120029_9 (sequence is synthesized)
gacccctgtcagtcctgctcctacaaccccagtcacaccacttgggaccacaccgccttcctctgatgttataagttctgtggaactcccactggatgcagatgtacagaccagtaatct

SEQ ID NO: 235441 - DNA, 120 bp, Artificial Sequence
  ENSG00000120029_10 (sequence is synthesized)
actgataacctttttaaagtatagctcaattgtcatgcaggacaccaaagatgaacacaggcttcacagtggcaaactctgtctgattatccttacatgtattgcagaggatcaatatgc

SEQ ID NO: 235442 - DNA, 120 bp, Artificial Sequence
  ENSG00000120029_11 (sequence is synthesized)
caatgcatttttgcatgatgacaacatgaattttcgagtaaacttacatagaatgcctatgagacacaggaagaaggcagcagacaagaatcttccctgccgtcctttagtatgtgcagt

SEQ ID NO: 235443 - DNA, 120 bp, Artificial Sequence
  ENSG00000120029_12 (sequence is synthesized)
actggacctgatggtagagtttattgtaacacacatgatgaaggagtttcctatggatctctatatacgctgcatccaggtagtacacaaactgctctgctaccagaagaagtgtcgggt

SEQ ID NO: 235444 - DNA, 120 bp, Artificial Sequence
  ENSG00000120029_13 (sequence is synthesized)
acgcctgcattacacctggcgggagctctggtcagccttgataaatttgctgaagttccttatgtcaaatgagactgtacttttggccaaacacaacatttttacattagcccttatgat

SEQ ID NO: 235445 - DNA, 120 bp, Artificial Sequence
  ENSG00000120029_14 (sequence is synthesized)
tgtgaacctatttaatatgtttatcacatatggcgacacatttctgccaacccccagcagctatgatgaactttactatgagattatccgcatgcaccagagctttgacaacctctactc

SEQ ID NO: 235446 - DNA, 120 bp, Artificial Sequence
  ENSG00000120029_15 (sequence is synthesized)
catggtcctgaggctttctaccaatgcaggccagtggaaggaagcagctagcaaggtgacccatgcattggttaatatcagagccatcatcaaccactttaaccccaaaattgagtccta

SEQ ID NO: 235447 - DNA, 120 bp, Artificial Sequence
  ENSG00000120029_16 (sequence is synthesized)
cgctgctgtgaatcacatatcccaactgtcagaggagcaggtgctggaggtggtgagagccaactatgacacgctcacgctgaagctgcaggatggcctggaccagtatgagcgctactc

SEQ ID NO: 235448 - DNA, 120 bp, Artificial Sequence
  ENSG00000120029_17 (sequence is synthesized)
gccttcttcaaagagctggttcgatccattagcaccaacgtccggagaaacctggccttccacacactcagccaagaagtcctgctcaaggagttctccactatctcctgaggccacgcc

SEQ ID NO: 235449 - DNA, 120 bp, Artificial Sequence
  ENSG00000120029_18 (sequence is synthesized)
tacctgagcagcctctgactgcccttacccatgaggatcatgggctggagggggagcgaggggagagggggctgcccccgaggttggagagaaacacagataccaagttctcttggtgaa

SEQ ID NO: 235450 - DNA, 120 bp, Artificial Sequence
  ENSG00000120029_19 (sequence is synthesized)
gaccgcacttcaatggagcttgggcagcaggggcaggagggtcaagccagggataatcttatttggggaggaatgggtgggcacagtggggagaggcctccaggaatgtggggacttcca

SEQ ID NO: 235451 - DNA, 120 bp, Artificial Sequence
  ENSG00000120029_20 (sequence is synthesized)
gagtgggctccctaaacagcccctcacatttccaatcttgaggttacaagctgtagctactgactaattttcgggagctggtgaggcaagcctcagggtaatgccagcaccctgaaagtc

SEQ ID NO: 235452 - DNA, 120 bp, Artificial Sequence
  ENSG00000120029_21 (sequence is synthesized)
agtggctctgctcggcttctgaaaacagatcaactctcagatatagctggagctacatcctgcttcctttgggcctggggctgtgcttggcttgaaatctgtgtcccctgcctgcactgg

SEQ ID NO: 235453 - DNA, 120 bp, Artificial Sequence
  ENSG00000120029_22 (sequence is synthesized)
atctgtgtcccctgcctgcactggcactttgtccagtcatcgggacctttggctcagatttagggtaagataggaatagggtacctttttccttttttttctgagacggagtctcactct

SEQ ID NO: 235454 - DNA, 120 bp, Artificial Sequence
  ENSG00000120029_23 (sequence is synthesized)
gttttcctattttctgaattcagaattgacttctctgggaaaactggagatgagaatctgcccagtgctctgctgtccagtcaccgccttttgaattttagttttggcaccaggagtacc

SEQ ID NO: 235455 - DNA, 120 bp, Artificial Sequence
  ENSG00000120029_24 (sequence is synthesized)
gttagctttccccttcttctggcccatttgactcatcagcacaatagggtcaccaccttaacttttaatttctaatctgctttactgtctttagggtgtgtatgaaataaacattgacag

SEQ ID NO: 235456 - DNA, 120 bp, Artificial Sequence
  ENSG00000120029_25 (sequence is synthesized)
gctttctggagccctcaaggtgcctactttgctggttccctttccagcagctcccccacctcccttagccccccctcctctggcagcctctcctgcctctgctgagctcccctccacgtg

SEQ ID NO: 235457 - DNA, 120 bp, Artificial Sequence
  ENSG00000120029_26 (sequence is synthesized)
ttccacccccttaccctgctgttgtttacatccaacctgcctgagaatttcctctggggaggaatctattcctgtcatggtctagtgcctgggagggagagaactttctgggggtagggt

SEQ ID NO: 235458 - DNA, 120 bp, Artificial Sequence
  ENSG00000120029_27 (sequence is synthesized)
gccctccatctgaaacaggccaggtgagcatcatgcataaggcctccattctgtccgctcagattctgggtggggccacaggcaaatctcctgacttatggggagttggcttgtggttcc

SEQ ID NO: 235459 - DNA, 120 bp, Artificial Sequence
  ENSG00000120029_28 (sequence is synthesized)
tcccttggatagcctccatggaaccactataggctttcccaacagctgcctctgaaatagctgctgcttcgagatcctccctttttaaagcactttctaaagccctcaggatggcgggag

SEQ ID NO: 235460 - DNA, 120 bp, Artificial Sequence
  ENSG00000120029_29 (sequence is synthesized)
caaacagcactggtatattctaggagtaagtgcaggaattcagcagtgagagcatgtctgggaccacctggactgccatccatttaacctcaaatctctttgggatactcgccctccctg

SEQ ID NO: 235461 - DNA, 120 bp, Artificial Sequence
  ENSG00000120029_30 (sequence is synthesized)
ggaaccagagttctggctctaacattgagcagctatgcactagttccagagaagccactaacaggctgccatgtgtagatgtaggttcttaagagatcacaggctgggtcatctgatcac

SEQ ID NO: 235462 - DNA, 120 bp, Artificial Sequence
  ENSG00000120029_31 (sequence is synthesized)
tggatggatagctcagcctggggcatttagtgttttccctggtgataaatccccaaggcagctggatttggagctggtggcaagttgaaattattaaaaattgatttgtgtgggactgtc

SEQ ID NO: 235463 - DNA, 120 bp, Artificial Sequence
  ENSG00000120029_32 (sequence is synthesized)
gttagttcatttgcagagcagagatgcttgattctattttctgtctaatagtaaatccttcccacttcagagttatcaattcacccccatttgtgactacctcatgttcaataagaggaa

SEQ ID NO: 235464 - DNA, 120 bp, Artificial Sequence
  ENSG00000120029_33 (sequence is synthesized)
gttacccagtcacaatcggtcccatgctctagtactctaaaccagagggtacttgatccttattttttaacagatgtatccacctcttctatctggcaccatattaatacgaattctttg

SEQ ID NO: 235465 - DNA, 120 bp, Artificial Sequence
  ENSG00000120029_34 (sequence is synthesized)
acaaatgtactcaaagatttggactcagaaagatacagatgattgaatttggccttgcatttagatgtttttatttcacagatttgctttatctgaataaaggaaaattttaaattcaaa

SEQ ID NO: 235466 - DNA, 120 bp, Artificial Sequence
  ENSG00000120029_35 (sequence is synthesized)
caaaaaaaaaaaaagaaaactaaggttgactatgtatagtattcttaatgcttttggtgttagctgggaaggctgaatgtgcttatattctggtttcagacagaggaccccagtaagtgc

SEQ ID NO: 235467 - DNA, 120 bp, Artificial Sequence
  ENSG00000120049_0 (sequence is synthesized)
gagggggcgggaggagagaggcagctcggctcggctccgcgctcagctccgctctgcctccggctctgcgctcacctgctgcctagtgttccctctcctgctccaggacctccgggtaga

SEQ ID NO: 235468 - DNA, 120 bp, Artificial Sequence
  ENSG00000120049_1 (sequence is synthesized)
cctcagaccccgggcccattcccagactcagcctcagcccggacttccccagccccgacagcacagtaggccgccagggggcgccgtgtgagcgccctatcccggccacccggcgccccc

SEQ ID NO: 235469 - DNA, 120 bp, Artificial Sequence
  ENSG00000120049_2 (sequence is synthesized)
tcccacggcccgggcgggagcggggcgccgggggccatgcggggccagggccgcaaggagagtttgtccgattcccgagacctggacggctcctacgaccagctcacgggccaccctcca

SEQ ID NO: 235470 - DNA, 120 bp, Artificial Sequence
  ENSG00000120049_3 (sequence is synthesized)
gggcccactaaaaaagcgctgaagcagcgattcctcaagctgctgccgtgctgcgggccccaagccctgccctcagtcagtgaaacattagccgccccagcctccctccgcccccacaga

SEQ ID NO: 235471 - DNA, 120 bp, Artificial Sequence
  ENSG00000120049_4 (sequence is synthesized)
ccccgcctgctggacccagacagcgtggacgatgaatttgaattgtccaccgtgtgtcaccggcctgagggtctggagcagctgcaggagcaaaccaaattcacgcgcaaggagttgcag

SEQ ID NO: 235472 - DNA, 120 bp, Artificial Sequence
  ENSG00000120049_5 (sequence is synthesized)
gtcctgtaccggggcttcaagaacgaatgtcccagcggaattgtcaatgaggagaacttcaagcagatttactcccagttctttcctcaaggagactccagcacctatgccacttttctc

SEQ ID NO: 235473 - DNA, 120 bp, Artificial Sequence
  ENSG00000120049_6 (sequence is synthesized)
ttcaatgcctttgacaccaaccatgatggctcggtcagttttgaggactttgtggctggtttgtccgtgattcttcggggaactgtagatgacaggcttaattgggccttcaacctgtat

SEQ ID NO: 235474 - DNA, 120 bp, Artificial Sequence
  ENSG00000120049_7 (sequence is synthesized)
gaccttaacaaggacggctgcatcaccaaggaggaaatgcttgacatcatgaagtccatctatgacatgatgggcaagtacacgtaccctgcactccgggaggaggccccaagggaacac

SEQ ID NO: 235475 - DNA, 120 bp, Artificial Sequence
  ENSG00000120049_8 (sequence is synthesized)
tcttgtcaaaaggatgagaacatcatgaggtccatgcagctctttgacaatgtcatctagcccccaggagagggggtcagtgtttcctggggggaccatgctctaaccctagtccaggcg

SEQ ID NO: 235476 - DNA, 120 bp, Artificial Sequence
  ENSG00000120049_9 (sequence is synthesized)
gacctcacccttctcttcccaggtctatcctcatcctacgcctccctgggggctggagggatccaagagcttggggattcagtagtccagatctctggagctgaaggggccagagagtgg

SEQ ID NO: 235477 - DNA, 120 bp, Artificial Sequence
  ENSG00000120049_10 (sequence is synthesized)
gcagagtgcatctcggggggtgttcccaactcccaccagctctcacccccttcctgcctgacacccagtgttgagagtgcccctcctgtaggaattgagcggttccccacctcctacccc

SEQ ID NO: 235478 - DNA, 120 bp, Artificial Sequence
  ENSG00000120049_11 (sequence is synthesized)
tactctagaaacacactagacagatgtctcctgctatggtgcttcccccatccctgacctcataaacatttcccctaagactcccctctcagagagaatgctccattcttggcactggct

SEQ ID NO: 235479 - DNA, 120 bp, Artificial Sequence
  ENSG00000120049_12 (sequence is synthesized)
ggcttctcagaccagccattgagagccctgtgggagggggacaagaatgtatagggagaaatcttgggcctgagtcaatggataggtcctaggaggtggctggggttgagaatagaaggg

SEQ ID NO: 235480 - DNA, 120 bp, Artificial Sequence
  ENSG00000120049_13 (sequence is synthesized)
cctggacagattatgattgctcaggcataccaggttatagctccaagttccacaggtctgctaccacaggccatcaaaatataagtttccaggctttgcagaagaccttgtctccttaga

SEQ ID NO: 235481 - DNA, 120 bp, Artificial Sequence
  ENSG00000120049_14 (sequence is synthesized)
aatgccccagaaattttccacaccctcctcggtatccatggagagcctggggccagatatctggctcatctctggcattgcttcctctccttccttcctgcatgtgttggtggtggttgt

SEQ ID NO: 235482 - DNA, 120 bp, Artificial Sequence
  ENSG00000120049_15 (sequence is synthesized)
ggtgggggaatgtggatgggggatgtcctggctgatgcctgccaaaatttcatcccaccctccttgcttatcgtccctgttttgagggctatgacttgagtttttgtttcccatgttctc

SEQ ID NO: 235483 - DNA, 120 bp, Artificial Sequence
  ENSG00000120049_16 (sequence is synthesized)
tagaatcttcaatcaacctgggctctccccaccccaccccagataacctcctcagttccctagggtctcttcttgcttgactcaatctacccagagatgccccttagcacacctagaggg

SEQ ID NO: 235484 - DNA, 120 bp, Artificial Sequence
  ENSG00000120049_17 (sequence is synthesized)
cagggaccataggacccaggttccaaccccattgtcagcaccccagccatgcggccaccccttagcacacctgctcgtcccatttagcttaccctcccagttggccagaatctgagggga

SEQ ID NO: 235485 - DNA, 120 bp, Artificial Sequence
  ENSG00000120049_18 (sequence is synthesized)
gagcccccagagagcccccttccccatcagaagactgttgactgctttgcattttgggctcttctatatattttgtaaagtaagaaatataccagatctaataaaacacaatggctatgc

SEQ ID NO: 235486 - DNA, 120 bp, Artificial Sequence
  ENSG00000120049_19 (sequence is synthesized)
ctcagacgccccctcttgaactggcttttcccactcctccctttctaaaacgaagatgcggctgggggccttcccctccaacgagggatcgagggccgcggggcgagcactgagtcggat

SEQ ID NO: 235487 - DNA, 120 bp, Artificial Sequence
  ENSG00000120049_20 (sequence is synthesized)
ccctggctctggggccaggccaggccttggcccgctgatagacctcgaagatggccatcatcttttctccttacctcagtgtccttggctcggggcccagggaactggcagcctggtctc

SEQ ID NO: 235488 - DNA, 120 bp, Artificial Sequence
  ENSG00000120049_21 (sequence is synthesized)
cggcatcggatgggaccggggggcggggagggggtgaatggggcagtgatttgaagaggggtcgcggaggctgggcctgaggcgcggctgtcctcaccgctcccgcagacagcgtggacg

SEQ ID NO: 235489 - DNA, 120 bp, Artificial Sequence
  ENSG00000120049_22 (sequence is synthesized)
gagctgggcgaggtgggccagggaagcctgtttcctggagttcagggccaggatctccaggccaaacccagagaaggagttgggtgaagagtacccgaggacacagctccctcctgcctc

SEQ ID NO: 235490 - DNA, 120 bp, Artificial Sequence
  ENSG00000120049_23 (sequence is synthesized)
tggagcttagacgccgagctcgccgccaaaccatgaaccgatgcccccgcaggtgccggagcccgctggggcaggcagcgcgatccctctaccagctggtgactgggtcgctgtccccag

SEQ ID NO: 235491 - DNA, 120 bp, Artificial Sequence
  ENSG00000120049_24 (sequence is synthesized)
ttcttccagaagatggacagaaacaaggatggtgtggtgaccattgaggaattcattgagtcttgtcaaaaggtacagctccctgccctctacattaccctgacctggactcaggcctga

SEQ ID NO: 235492 - DNA, 120 bp, Artificial Sequence
  ENSG00000120051_0 (sequence is synthesized)
agactccggcccagctcctgcgatctccacagcagcctctgaggccgcccccagagagcatcaggatggctgaggaaaagggtggaaagcaagtcctggaagaatctgcatttgaagaaa

SEQ ID NO: 235493 - DNA, 120 bp, Artificial Sequence
  ENSG00000120051_1 (sequence is synthesized)
tggaaagagattttcagggagttctccatgaactttctggagacaaaagtttggaaaaatttcggattgaatatgagaggcttcatgctgtcatgaaaaagtcttatgacaatgaaaagc

SEQ ID NO: 235494 - DNA, 120 bp, Artificial Sequence
  ENSG00000120051_2 (sequence is synthesized)
gtctgatggccaaatgcagagagctaaatgcagagattgtagtgaattctgcgaaggtcgccactgcccttaagctctctcaggatgatcagaccaccattgcatccctaaagaaggaaa

SEQ ID NO: 235495 - DNA, 120 bp, Artificial Sequence
  ENSG00000120051_3 (sequence is synthesized)
ttgaaaaggcctggaagatggtggactcagcctatgacaaagagcagaaggccaaggagacgattcttgctctgaaagaggaaatagtgaacctgaccaaactagtggagcaggggtctg

SEQ ID NO: 235496 - DNA, 120 bp, Artificial Sequence
  ENSG00000120051_4 (sequence is synthesized)
gactgtcaatggaccagcatagcaacatccgagatttactgaggttcaaagaagaagtgacaaaggagagagaccagctcttatcagaagtggtaaaattacgagaatccctagctcaga

SEQ ID NO: 235497 - DNA, 120 bp, Artificial Sequence
  ENSG00000120051_5 (sequence is synthesized)
ccactgaacagcagcaggaaacagagcgatcaaaagaggaggctgaacatgccatcagtcagttccaacaagaaatccagcaacgtcagaacgaagcttcccgggagttccggaagaagg

SEQ ID NO: 235498 - DNA, 120 bp, Artificial Sequence
  ENSG00000120051_6 (sequence is synthesized)
aaaaactagagaaagagctcaagcagattcaggcagacatggacagcaggcagacagaaataaaagccctgcagcagtatgtgcagaagagcaaggaggagcttcagaagctggagcagc

SEQ ID NO: 235499 - DNA, 120 bp, Artificial Sequence
  ENSG00000120051_7 (sequence is synthesized)
agctgaaggagcagaagatattgaatgagagagctgcaaaggaactcgagcaatttcagatgagaaatgctaaacttcagcaagagaatgaacagcacagtttggtctgtgagcagctat

SEQ ID NO: 235500 - DNA, 120 bp, Artificial Sequence
  ENSG00000120051_8 (sequence is synthesized)
cccaggaaaaccaacagaaggcgttggagctcaaagccaaagaggaagaagtccatcaaatgcgccttgacatcgggaagctcaacaaaatcagagaacaaattcataagaaattgcacc

SEQ ID NO: 235501 - DNA, 120 bp, Artificial Sequence
  ENSG00000120051_9 (sequence is synthesized)
acaccgaagatcaaaaggcagaagtcgaacagcacaaagaaaccctaaaaaatcagattgtgggattagagagagaggtagaggcttcaaagaaacaagcagaacttgacagaaaggcaa

SEQ ID NO: 235502 - DNA, 120 bp, Artificial Sequence
  ENSG00000120051_10 (sequence is synthesized)
tggacgagcttctaagagaaagggacatactaaataagaacatgcttaaggcggtcaatgcgacccagaagcagacagacttggtaaagctccatgaacaagccaagaggaacctggagg

SEQ ID NO: 235503 - DNA, 120 bp, Artificial Sequence
  ENSG00000120051_11 (sequence is synthesized)
gagaaatccagaactacaaggatgaggctcagaagcagagaaagatcatctttcatctggaaaaggagcgtgaccggtacatcaaccaagccagtgaccttacgcaaaaggtccttatga

SEQ ID NO: 235504 - DNA, 120 bp, Artificial Sequence
  ENSG00000120051_12 (sequence is synthesized)
acatggaagacataaaagttcgtgaaacacagatttttgactacaggaaaaaaatagctgaatcagagattaaattaaaacagcaacagaacctatatgaagctgtgagatcagacagaa

SEQ ID NO: 235505 - DNA, 120 bp, Artificial Sequence
  ENSG00000120051_13 (sequence is synthesized)
tctggttgaggctcaggatgaaataacagatatgaagagaaagttaaagattatgatccatcaggtagatgagctgaaagaagacatctctgccaaagagtccgcacttgtgaagctgca

SEQ ID NO: 235506 - DNA, 120 bp, Artificial Sequence
  ENSG00000120051_14 (sequence is synthesized)
cctggaacagcagcgaatagaaaaggaaaaggaaacattgaaggctgagctgcagaagctgagacaacaagccctggagacaaaacactttattgaaaagcaagaagctgaagagagaaa

SEQ ID NO: 235507 - DNA, 120 bp, Artificial Sequence
  ENSG00000120051_15 (sequence is synthesized)
actcctgcgaataattgctgaggctgacggggagaggttgagacagaagaaggaattagaccaggtcatcagtgagagagatatcctggggtctcagcttgttcggcgcaatgatgagtt

SEQ ID NO: 235508 - DNA, 120 bp, Artificial Sequence
  ENSG00000120051_16 (sequence is synthesized)
agctttgctctatgagaagatcaagatccaacagtctgtgctgaataaaggggagagccagtacaaccagaggttggaggacatgagaatcctcagacttgagatcaagaagcttcgccg

SEQ ID NO: 235509 - DNA, 120 bp, Artificial Sequence
  ENSG00000120051_17 (sequence is synthesized)
ggaaaaggggattcttgccaggagtatggctaatgttgaagaactcagacaggagttttttcacatgcaaagagaattgttgaaggagaggacacgctgccgagccctggaggaggagct

SEQ ID NO: 235510 - DNA, 120 bp, Artificial Sequence
  ENSG00000120051_18 (sequence is synthesized)
ggagaatcccctgaatgtgcacagatggaggaagctcgaggccagcgaccccaatgcatatgagctgatacagaaaattcacaccctgcagaagcgtctcatcagcaagactgaagaggt

SEQ ID NO: 235511 - DNA, 120 bp, Artificial Sequence
  ENSG00000120051_19 (sequence is synthesized)
ggttgaaaaagagctgctcctccaggaaaaggagaaactctacatggaactaaagcacgtcttggcccgccagcctggacctgaggctgcggaacagctgaagctgtaccgacgcacgct

SEQ ID NO: 235512 - DNA, 120 bp, Artificial Sequence
  ENSG00000120051_20 (sequence is synthesized)
gcatgacaagaagcagcagctgaaagttttgtcttcagaattgaatatgtatgaagtacagagcaaagaatataaatatgaggtagagaaacttaccaatgagctccagaatttaaagaa

SEQ ID NO: 235513 - DNA, 120 bp, Artificial Sequence
  ENSG00000120051_21 (sequence is synthesized)
gaaatacctcgctcagaaacgtaaagaacaacttcaaaaaaacaaggacacagcacccatggataacaccttcttaatggtcaaaccaaatggtcctggttttactgggggcggatttcc

SEQ ID NO: 235514 - DNA, 120 bp, Artificial Sequence
  ENSG00000120051_22 (sequence is synthesized)
tctcaggtcaaccaaaatgacgttctaacctgaagctgctggctgtttccagttgaacaactcatgaaatctgctctgggacattttgggggaatctcaaagtccttggatcatagaact

SEQ ID NO: 235515 - DNA, 120 bp, Artificial Sequence
  ENSG00000120051_23 (sequence is synthesized)
gagtgctgagaatccaggatggaaagaaatgcagaactatcatagtcacatacatataagagggatggtgttttgtctggttcacgttgatattaacagatcataattctctctgttcag

SEQ ID NO: 235516 - DNA, 120 bp, Artificial Sequence
  ENSG00000120051_24 (sequence is synthesized)
ttaggctgacctattgcatgaagcaaatcttttgttgctaccccattgattgaaatgtactagaccttaatttctttattacagacattggtgtacttgaaggttttatatttaaaagta

SEQ ID NO: 235517 - DNA, 120 bp, Artificial Sequence
  ENSG00000120051_25 (sequence is synthesized)
tttttgaaatgcaatgtgtcccctctcaccttattaacaataatctattttaattattcctcattaacaagtcattgcatgagatgagaaagaaggacaaactcttaagaatttaaaaag

SEQ ID NO: 235518 - DNA, 120 bp, Artificial Sequence
  ENSG00000120051_26 (sequence is synthesized)
tgttttgagaatgatttctatatggaatttcttttcaggcccggaatgggaaaatctattccaaagagacacactaataaatacttcattataaaaaataaaaaagaatctttgtagaga

SEQ ID NO: 235519 - DNA, 120 bp, Artificial Sequence
  ENSG00000120051_27 (sequence is synthesized)
aaaaggctgactctgtcaggatgccctggcctctggacaaagggaaatggtgaaacagtggaccctcagggagcttctgagcctctgctgacaagggaagggcacagatcctacccactc

SEQ ID NO: 235520 - DNA, 120 bp, Artificial Sequence
  ENSG00000120051_28 (sequence is synthesized)
atattccaccggccaaccaagtcacagggctgtgccggacatcctgggcaggagtgtggtcctccttagggaggggccctgtagggtgaggcagcaaatatatttgaacataaaatgtca

SEQ ID NO: 235521 - DNA, 120 bp, Artificial Sequence
  ENSG00000120053_0 (sequence is synthesized)
agacctgacctgccagctccgggcgtggggtgaaatctcttgattcctagtctctcgatatggcacctccgtcagtctttgccgaggttccgcaggcccagcctgtcctggtcttcaagc

SEQ ID NO: 235522 - DNA, 120 bp, Artificial Sequence
  ENSG00000120053_1 (sequence is synthesized)
tcactgccgacttcagggaggatccggacccccgcaaggtcaacctgggagtgggagcatatcgcacggatgactgccatccctgggttttgccagtagtgaagaaagtggagcagaaga

SEQ ID NO: 235523 - DNA, 120 bp, Artificial Sequence
  ENSG00000120053_2 (sequence is synthesized)
ttgctaatgacaatagcctaaatcacgagtatctgccaatcctgggcctggctgagttccggagctgtgcttctcgtcttgcccttggggatgacagcccagcactcaaggagaagcggg

SEQ ID NO: 235524 - DNA, 120 bp, Artificial Sequence
  ENSG00000120053_3 (sequence is synthesized)
taggaggtgtgcaatctttggggggaacaggtgcacttcgaattggagctgatttcttagcgcgttggtacaatggaacaaacaacaagaacacacctgtctatgtgtcctcaccaacct

SEQ ID NO: 235525 - DNA, 120 bp, Artificial Sequence
  ENSG00000120053_4 (sequence is synthesized)
gggagaatcacaatgctgtgttttccgctgctggttttaaagacattcggtcctatcgctactgggatgcagagaagagaggattggacctccagggcttcctgaatgatctggagaatg

SEQ ID NO: 235526 - DNA, 120 bp, Artificial Sequence
  ENSG00000120053_5 (sequence is synthesized)
ctcctgagttctccattgttgtcctccacgcctgtgcacacaacccaactgggattgacccaactccggagcagtggaagcagattgcttctgtcatgaagcaccggtttctgttcccct

SEQ ID NO: 235527 - DNA, 120 bp, Artificial Sequence
  ENSG00000120053_6 (sequence is synthesized)
tctttgactcagcctatcagggcttcgcatctggaaacctggagagagatgcctgggccattcgctattttgtgtctgaaggcttcgagttcttctgtgcccagtccttctccaagaact

SEQ ID NO: 235528 - DNA, 120 bp, Artificial Sequence
  ENSG00000120053_7 (sequence is synthesized)
tcgggctctacaatgagagagtcgggaatctgactgtggttggaaaagaacctgagagcatcctgcaagtcctttcccagatggagaagatcgtgcggattacttggtccaatccccccg

SEQ ID NO: 235529 - DNA, 120 bp, Artificial Sequence
  ENSG00000120053_8 (sequence is synthesized)
gacaggtaatgtgaagacaatggctgaccggattctgaccatgagatctgaactcagggcacgactagaagccctcaaaacccctgggacctggaaccacatcactgatcaaattggcat

SEQ ID NO: 235530 - DNA, 120 bp, Artificial Sequence
  ENSG00000120053_9 (sequence is synthesized)
gttcagcttcactgggttgaaccccaagcaggttgagtatctggtcaatgaaaagcacatctacctgctgccaagtggtcgaatcaacgtgagtggcttaaccaccaaaaatctagatta

SEQ ID NO: 235531 - DNA, 120 bp, Artificial Sequence
  ENSG00000120053_10 (sequence is synthesized)
cgtggccacctccatccatgaagcagtcaccaaaatccagtgaagaaacaccacccgtccagtaccaccaaagtagttctctgtcatgtgtgttccctgcctgcacaaacctacatgtac

SEQ ID NO: 235532 - DNA, 120 bp, Artificial Sequence
  ENSG00000120053_11 (sequence is synthesized)
ataccatggattagagacacttgcaggactgaaaggctgctctggtgaggcagcctctgtttaaaccggccccacatgaagagaacatcccttgagacgaatttggagactgggattaga

SEQ ID NO: 235533 - DNA, 120 bp, Artificial Sequence
  ENSG00000120053_12 (sequence is synthesized)
gcctttggaggtcaaagcaaattaagatttttatttaagaataaaagagtactttgatcatgagacataggtatcttgtccctctcactaaaaaggagtgttgtgtgtggcggccacgtg

SEQ ID NO: 235534 - DNA, 120 bp, Artificial Sequence
  ENSG00000120053_13 (sequence is synthesized)
cttctatgtggtgtttgactctgtacaaattctagtcccaaagatcaagttgtctgaaggagccaaagtgtgaatgtgggtgtcggctgcggcattaaattcatcatctcaacccagagt

SEQ ID NO: 235535 - DNA, 120 bp, Artificial Sequence
  ENSG00000120053_14 (sequence is synthesized)
gtctggtctccctgctctttctgcatggttgtgtccctagtcctaagctttggttctttagggtgactgtggtaagaaggatatttaatcatgacatgcacggacacgtacatatttaac

SEQ ID NO: 235536 - DNA, 120 bp, Artificial Sequence
  ENSG00000120053_15 (sequence is synthesized)
tgaaacaagttttaccaaacagtatttactcgtgatgtgcgtagtgcattctgatatttttgagccattctattgtgttctacttcacctaaaaaaataaaataaaaatgttgatcaaga

SEQ ID NO: 235537 - DNA, 120 bp, Artificial Sequence
  ENSG00000120053_16 (sequence is synthesized)
tttctgtagcgcgagttcaggaacctgatagcgcaaataatgtggccatgtacaaagcacggctttttcacttgttcagttttgcccagtagatcatcagattttagctactgcatttga

SEQ ID NO: 235538 - DNA, 120 bp, Artificial Sequence
  ENSG00000120053_17 (sequence is synthesized)
agcagtcagtggagatgccaagtagaaagaatttaatggagtgataaagacaccagggttctagatccaactctgccactacttttgatcataggcaagtcatttagccctctgggctca

SEQ ID NO: 235539 - DNA, 120 bp, Artificial Sequence
  ENSG00000120053_18 (sequence is synthesized)
cttctccaagaacttcgggctctacagtgagtgctctcctgaggagttacagccccacctcctcgcatcactccctgcttcagcagccacagctgattctggtccctctctttagatgag

SEQ ID NO: 235540 - DNA, 120 bp, Artificial Sequence
  ENSG00000120054_0 (sequence is synthesized)
acctttcaaaaggctttcctggattagagaaagaaagggagtgagggaggagagatgagtggctattccagaacgacataaagaatttccagccttggacggacagctgggaacgtcttc

SEQ ID NO: 235541 - DNA, 120 bp, Artificial Sequence
  ENSG00000120054_1 (sequence is synthesized)
caatttggactggtgtttacaagcgggaagctaggtggaccttggattttggcgggtgaagaggctaggttgtttaaggaggtggggcgcgtttcagtggctctctttgaaaaagcccag

SEQ ID NO: 235542 - DNA, 120 bp, Artificial Sequence
  ENSG00000120054_2 (sequence is synthesized)
caagatgtcagacctgctctcagtcttcctccacctcctccttctcttcaagttggttgccccggtgacctttcgccaccaccgctatgatgatcttgtgcggacgctgtacaaggtgca

SEQ ID NO: 235543 - DNA, 120 bp, Artificial Sequence
  ENSG00000120054_3 (sequence is synthesized)
aaacgaatgccccggcatcacgcgggtctacagcattgggcgcagcgtggaggggagacacctctacgtgctggagttcagcgaccaccctggaatccacgagcccttggaaccagaggt

SEQ ID NO: 235544 - DNA, 120 bp, Artificial Sequence
  ENSG00000120054_4 (sequence is synthesized)
caagtatgtggggaacatgcacggcaacgaagcgttgggccgcgagctgatgctgcagctgtcggagtttctgtgcgaggagttccggaacaggaaccagcgcatcgtccagctcatcca

SEQ ID NO: 235545 - DNA, 120 bp, Artificial Sequence
  ENSG00000120054_5 (sequence is synthesized)
ggacacgcgcattcacatcctgccatccatgaaccccgacggctacgaggtggctgctgcccagggcccaaacaagcctgggtatctagttggcaggaacaatgcaaatggagtggacct

SEQ ID NO: 235546 - DNA, 120 bp, Artificial Sequence
  ENSG00000120054_6 (sequence is synthesized)
gaaccgcaacttccctgatctcaatacctatatctactataacgagaagtacggaggccccaaccaccacctgccccttccagacaactggaaaagtcaggtggaacccgagacccgggc

SEQ ID NO: 235547 - DNA, 120 bp, Artificial Sequence
  ENSG00000120054_7 (sequence is synthesized)
ggggcggtggtggccaattacccgtatgacaagtcctttgagcaccgggtccgaggggtccgccgcaccgccagcacccccacgcctgacgacaagctcttccagaagctggccaaggtc

SEQ ID NO: 235548 - DNA, 120 bp, Artificial Sequence
  ENSG00000120054_8 (sequence is synthesized)
tactcctatgcacatggatggatgttccaaggttggaactgcggagattacttcccagatggcatcaccaatggggcttcctggtattctctcagcaagggaatgcaagactttaattat

SEQ ID NO: 235549 - DNA, 120 bp, Artificial Sequence
  ENSG00000120054_9 (sequence is synthesized)
ctccataccaactgctttgagatcacgctggaactgagttgcgacaagtttccccccgaagaggagttacagcgggagtggctgggtaatcgggaagccctaatccagttcctggaacag

SEQ ID NO: 235550 - DNA, 120 bp, Artificial Sequence
  ENSG00000120054_10 (sequence is synthesized)
gttcaccagggcatcaagggaatggtgcttgatgagaattacaataatctcgccaatgctgtcatttctgtcagtgggattaaccatgatgtcacttcaggtgaccatggtgattacttc

SEQ ID NO: 235551 - DNA, 120 bp, Artificial Sequence
  ENSG00000120054_11 (sequence is synthesized)
cggctgctgcttccaggtatctacactgttagtgccacagcacctgggtatgacccagagacagtaactgtgaccgtgggtcctgcggaaccaacgttggttaacttccacctcaaaaga

SEQ ID NO: 235552 - DNA, 120 bp, Artificial Sequence
  ENSG00000120054_12 (sequence is synthesized)
agcatccctcaagtaagccctgtgaggagagctcccagcagaaggcacggagtcagagccaaagtgcagccccaagccagaaagaaagaaatggagatgaggcagctgcagagaggccct

SEQ ID NO: 235553 - DNA, 120 bp, Artificial Sequence
  ENSG00000120054_13 (sequence is synthesized)
gcctgaaacccacagtgccaggcaacccttcagaaaggctttgctcctgctctcagatcagatcaagcattctttctattttattatctgggacatatttaaatacaaacatattcagaa

SEQ ID NO: 235554 - DNA, 120 bp, Artificial Sequence
  ENSG00000120054_14 (sequence is synthesized)
agaacaattcagaatggtctccatctgttccaggggtaagccatctctaggtcatcatgaaaaaaattaggatctattgaaaggtgatgtggtggccgggtgtggtggctcacatctgta

SEQ ID NO: 235555 - DNA, 120 bp, Artificial Sequence
  ENSG00000120055_0 (sequence is synthesized)
agacgctggtagctcctggccagctcaaggtgtttccttttgcctggtaaccaggaggagtggctgaggcagggcatggagcggagcaacgcagctacaaagtgcggagaggagccccgc

SEQ ID NO: 235556 - DNA, 120 bp, Artificial Sequence
  ENSG00000120055_1 (sequence is synthesized)
tctggatcccgccggctccccaaggctgaaggagacaagtctggatccgcaggagcccccagtaagaacagcagccgcctggggggccgaccatgtatgtgtacagctggccgccgccca

SEQ ID NO: 235557 - DNA, 120 bp, Artificial Sequence
  ENSG00000120055_2 (sequence is synthesized)
aacagggcgtctggccgccgccgccgcagctgctcacctgcacctacctggccgcccctctgctgctacccccagtccaggcccacagcttccgcagccggcccgggagcctgcatgcgg

SEQ ID NO: 235558 - DNA, 80 bp, Artificial Sequence
  ENSG00000120055_3 (sequence is synthesized)
gcgagtgggcggccccacgggaataccaccgcttctacggccccgccgcgccacccgaggccgcgccgccctggtgggcc

SEQ ID NO: 235559 - DNA, 80 bp, Artificial Sequence
  ENSG00000120055_4 (sequence is synthesized)
ggcggtggccgagagctgggcgccgtggccggagggcgggagcctgcaaaccgagctgcgctggggccgcgtggagcgcg

SEQ ID NO: 235560 - DNA, 120 bp, Artificial Sequence
  ENSG00000120055_5 (sequence is synthesized)
cgcggggcccccctctgcagctaccggacttcgtgcgccgggagctgcggcgcgcgtacggcacctacccccgcgccgacgtgcgcgtcacccagcgccgcggccagttcctgctgcagg

SEQ ID NO: 235561 - DNA, 120 bp, Artificial Sequence
  ENSG00000120055_6 (sequence is synthesized)
tggagtggcgcgtgcggcgccggcccgacagcggcgacagcagcccagcccgggaagccgcggagcgcggccgccccaggaagagcaagggcctgagctgaagccgccgcaaggcctagg

SEQ ID NO: 235562 - DNA, 120 bp, Artificial Sequence
  ENSG00000120055_7 (sequence is synthesized)
taggggcgggcccgcgtgcacgcgcttggctctttcctgtgtgtgccgccgccgacaggcagaagtgagccctcacctgtgcgcgggaggcggacgcgctgctcacctgtctttttggct

SEQ ID NO: 235563 - DNA, 120 bp, Artificial Sequence
  ENSG00000120055_8 (sequence is synthesized)
tctcccatgactgccggccagtttcctgcacttgtttctctcgctttattgctggacggtgggagaagggcaagtgcaagacggaatcgagggcacctctgggtgttctgtacctctttt

SEQ ID NO: 235564 - DNA, 120 bp, Artificial Sequence
  ENSG00000120055_9 (sequence is synthesized)
cttcttgcaccttgggaagtggaggacgtgggatggaagaagggcctggacctccctccttcctcctccccaccttctcctaaggagcttgccctgcagtaagccccaactttcccttcc

SEQ ID NO: 235565 - DNA, 120 bp, Artificial Sequence
  ENSG00000120055_10 (sequence is synthesized)
tcttttccctctatcagagtcgtcgcccacccccctttcccaccgctcccctacccccgccttcctgccaagccgagggcgacggtgatccccagcttagtaagaaaagtaaataggccg

SEQ ID NO: 235566 - DNA, 76 bp, Artificial Sequence
  ENSG00000120055_11 (sequence is synthesized)
gacggtgatccccagcttagtaagaaaagtaaataggccgggcgcggtagctcacgcctggccaggagaccaggtt

SEQ ID NO: 235567 - DNA, 80 bp, Artificial Sequence
  ENSG00000120057_0 (sequence is synthesized)
agtcggggcgcccgcagcgcaggctgccacccacctgggcgacctccgcggcggcggcggcggcggctgggtagagtcag

SEQ ID NO: 235568 - DNA, 80 bp, Artificial Sequence
  ENSG00000120057_1 (sequence is synthesized)
cggaacacctgggccgccgggcaccgagcgtcggggggctgcgcggcgcgcacctggagagggcgcagccatgcgggcgg

SEQ ID NO: 235569 - DNA, 120 bp, Artificial Sequence
  ENSG00000120057_2 (sequence is synthesized)
gccggcgcgctgcgaggagtacgactactatggctggcaggccgagccgctgcacggccgctcctactccaagccgccgcagtgccttgacatccctgccgacctgccgctctgccacac

SEQ ID NO: 235570 - DNA, 120 bp, Artificial Sequence
  ENSG00000120057_3 (sequence is synthesized)
ggtgggctacaagcgcatgcggctgcccaacctgctggagcacgagagcctggccgaagtgaagcagcaggcgagcagctggctgccgctgctggccaagcgctgccactcggatacgca

SEQ ID NO: 235571 - DNA, 120 bp, Artificial Sequence
  ENSG00000120057_4 (sequence is synthesized)
ggtcttcctgtgctcgctctttgcgcccgtctgtctcgaccggcccatctacccgtgccgctcgctgtgcgaggccgtgcgcgccggctgcgcgccgctcatggaggcctacggcttccc

SEQ ID NO: 235572 - DNA, 120 bp, Artificial Sequence
  ENSG00000120057_5 (sequence is synthesized)
ctggcctgagatgctgcactgccacaagttccccctggacaacgacctctgcatcgccgtgcagttcgggcacctgcccgccaccgcgcctccagtgaccaagatctgcgcccagtgtga

SEQ ID NO: 235573 - DNA, 120 bp, Artificial Sequence
  ENSG00000120057_6 (sequence is synthesized)
gatggagcacagtgctgacggcctcatggagcagatgtgctccagtgactttgtggtcaaaatgcgcatcaaggagatcaagatagagaatggggaccggaagctgattggagcccagaa

SEQ ID NO: 235574 - DNA, 120 bp, Artificial Sequence
  ENSG00000120057_7 (sequence is synthesized)
gcccctgcccacagctggacagcctggcgggcagcttcctggtcatgggccgcaaagtggatggacagctgctgctcatggccgtctaccgctgggacaagaagaataaggagatgaagt

SEQ ID NO: 235575 - DNA, 120 bp, Artificial Sequence
  ENSG00000120057_8 (sequence is synthesized)
ttgcagtcaaattcatgttctcctacccctgctccctctactaccctttcttctacggggcggcagagccccactgaagggcactcctccttgccctgccagctgtgccttgcttgccct

SEQ ID NO: 235576 - DNA, 120 bp, Artificial Sequence
  ENSG00000120057_9 (sequence is synthesized)
ctggccccgccccaacttccaggctgacccggccctactggagggtgttttcacgaatgttgttactggcacaaggcctaagggatgggcacggagcccaggctgtcctttttgacccag

SEQ ID NO: 235577 - DNA, 120 bp, Artificial Sequence
  ENSG00000120057_10 (sequence is synthesized)
gggtcctggggtccctgggatgttgggcttcctctctcaggagcagggcttcttcatctgggtgaagacctcagggtctcagaaagtaggcaggggaggagagggtaagggaaaggtgga

SEQ ID NO: 235578 - DNA, 120 bp, Artificial Sequence
  ENSG00000120057_11 (sequence is synthesized)
ggggctcagggcaccctgaggcggaggtttcagagtagaaggtggtgtcagctccagctcccctctgtcggtggtggggcctcaccttgaagagggaagtctcaatattaggctaagcta

SEQ ID NO: 235579 - DNA, 120 bp, Artificial Sequence
  ENSG00000120057_12 (sequence is synthesized)
tttgggaaagttctccccaccgcccctgtacgcgtcatcctagccccccttaggaaaggagttagggtctcagtgcctccagccacaccccctgccttccccagcttgcccatttccctg

SEQ ID NO: 235580 - DNA, 120 bp, Artificial Sequence
  ENSG00000120057_13 (sequence is synthesized)
ccccaaggcccagagctccccccagactggagagcaagcccagcccagcctcggcatagacccccttctggtccgcccgcggctcgattcccgggattcattcctcagcctctgcttctc

SEQ ID NO: 235581 - DNA, 120 bp, Artificial Sequence
  ENSG00000120057_14 (sequence is synthesized)
ccttttatcccaataagttattgctactgctgtgaggccataggtactagacaaccaatacatgcagggttgggttttctaatttttttaactttttaattaaatcaaagaaaacaataa

SEQ ID NO: 235582 - DNA, 80 bp, Artificial Sequence
  ENSG00000120063_0 (sequence is synthesized)
agttcgctggttccctccctccctgggcgcgctcgggccgccgccgcgctccccgccctcgagcctcggtgccggagccg

SEQ ID NO: 235583 - DNA, 120 bp, Artificial Sequence
  ENSG00000120063_1 (sequence is synthesized)
cgccgaggcggcggcggcggcggcaagatggcggacttcctgccgtcgcggtccgtgctgtccgtgtgcttccccggctgcctgctgacgagtggcgaggccgagcagcaacgcaagtcc

SEQ ID NO: 235584 - DNA, 120 bp, Artificial Sequence
  ENSG00000120063_2 (sequence is synthesized)
aaggagatcgacaaatgcctgtctcgggaaaagacctatgtgaagcggctggtgaagatcctgctgctgggcgcgggcgagagcggcaagtccaccttcctgaagcagatgcggatcatc

SEQ ID NO: 235585 - DNA, 120 bp, Artificial Sequence
  ENSG00000120063_3 (sequence is synthesized)
cacgggcaggacttcgaccagcgcgcgcgcgaggagttccgccccaccatctacagcaacgtgatcaaaggtatgagggtgctggttgatgctcgagagaagcttcatattccctgggga

SEQ ID NO: 235586 - DNA, 120 bp, Artificial Sequence
  ENSG00000120063_4 (sequence is synthesized)
gacaactcaaaccaacaacatggagataagatgatgtcgtttgatacccgggcccccatggcagcccaaggaatggtggaaacaagggttttcttacaatatcttcctgctataagagca

SEQ ID NO: 235587 - DNA, 120 bp, Artificial Sequence
  ENSG00000120063_5 (sequence is synthesized)
ttatgggcagacagcggcatacagaatgcctatgaccggcgtcgagaatttcaactgggtgaatctgtaaaatatttcctggataacttggataaacttggagaaccagattatattcca

SEQ ID NO: 235588 - DNA, 120 bp, Artificial Sequence
  ENSG00000120063_6 (sequence is synthesized)
tcacaacaagatattctgcttgccagaagacccaccaaaggcatccatgaatacgactttgaaataaaaaatgttcctttcaaaatggttgatgtaggtggtcagagatcagaaaggaaa

SEQ ID NO: 235589 - DNA, 120 bp, Artificial Sequence
  ENSG00000120063_7 (sequence is synthesized)
cgttggtttgaatgtttcgacagtgtgacatcaatacttttccttgtttcctcaagtgaatttgaccaggtgcttatggaagatcgactgaccaatcgccttacagagtctctgaacatt

SEQ ID NO: 235590 - DNA, 120 bp, Artificial Sequence
  ENSG00000120063_8 (sequence is synthesized)
tttgaaacaatcgtcaataaccgggttttcagcaatgtctccataattctgttcttaaacaagacagacttgcttgaggagaaggtgcaaattgtgagcatcaaagactatttcctagaa

SEQ ID NO: 235591 - DNA, 120 bp, Artificial Sequence
  ENSG00000120063_9 (sequence is synthesized)
tttgaaggggatccccactgcttaagagacgtccaaaaattcctggtggaatgtttccggaacaaacgccgggaccagcaacagaagcccttataccaccacttcaccactgctatcaac

SEQ ID NO: 235592 - DNA, 120 bp, Artificial Sequence
  ENSG00000120063_10 (sequence is synthesized)
acggagaacatccgccttgttttccgtgacgtgaaggatactattctgcatgacaacctcaagcagcttatgctacagtgatgtacaaaagacttgctgttttaatatctttttgtgttt

SEQ ID NO: 235593 - DNA, 120 bp, Artificial Sequence
  ENSG00000120063_11 (sequence is synthesized)
ttgatgttttctgtttgttttgttttttaaaatagcagtttacaaccagaattagaacaatcttaattctacgtttaacttcttgaaaatcttagtactttttctgcggcctttggtttg

SEQ ID NO: 235594 - DNA, 120 bp, Artificial Sequence
  ENSG00000120063_12 (sequence is synthesized)
tggctgaaagctgttgagtgactcatcgccaagatttgctgtaatgcaggctttgatctgtttcaccatggcttctattcaagtccagttaaaacctcccagctgacctcagactaggca

SEQ ID NO: 235595 - DNA, 120 bp, Artificial Sequence
  ENSG00000120063_13 (sequence is synthesized)
tatttcaggctttaaattattctactttccaaactgaattctcctgcagtgccaagtatcaaaggtgtccttaaatacttgtagggatgaggttaggaatattcagttccaaaacaagat

SEQ ID NO: 235596 - DNA, 120 bp, Artificial Sequence
  ENSG00000120063_14 (sequence is synthesized)
atcttctgtccgccttacatatagcagtgacacttgttgcctaactttatggtgacctcctattttgtaagggctgttagaagttctatctaagaaatggcattctgtaggtttatagaa

SEQ ID NO: 235597 - DNA, 120 bp, Artificial Sequence
  ENSG00000120063_15 (sequence is synthesized)
ggtttagccttcatattttaattgcttgtatacacaacagctgttttgcttttagatttctgtgtttctgaaggtaatgttcttcctgttttcaagtttacataaggatctttggtctga

SEQ ID NO: 235598 - DNA, 120 bp, Artificial Sequence
  ENSG00000120063_16 (sequence is synthesized)
tgctgatgaagagttcacaggtggtatgggagagcaaaaggcaagctaatgctgtttaccgtgttttggtcaaacgtaacgagtgaaatagaatttgcctttctcatatttaattatcat

SEQ ID NO: 235599 - DNA, 120 bp, Artificial Sequence
  ENSG00000120063_17 (sequence is synthesized)
gtagtttaatgtaccatatgtgaaacattctggccatagcagcaactaaaaactgcaagcaacttggtaacagaactttctaaataaacttaacctgttccagaatgtcatgtatttgac

SEQ ID NO: 235600 - DNA, 120 bp, Artificial Sequence
  ENSG00000120063_18 (sequence is synthesized)
ttttaagccctatctcagttggtcagtaaagaccaatccttactgtaggaaatcattgttgtatcatcacaaacatctatcttttgctgtcctgtccagtcccatcaactccacactgtg

SEQ ID NO: 235601 - DNA, 120 bp, Artificial Sequence
  ENSG00000120063_19 (sequence is synthesized)
ccatttgtggcatcgttttgtttatttggagtttgctaagggcagtatttttctgtcaagactattcaagaaggcattatttgagattcctgttcattcttggtgtgtctctaacagata

SEQ ID NO: 235602 - DNA, 120 bp, Artificial Sequence
  ENSG00000120063_20 (sequence is synthesized)
cagtatgtatacatttgtataattgttgttgttgaaagtccagcttttttgaggtatattttaaatgttttaaggatgcttctaaggatcagtagtaatttttttagttcgcacctaaag

SEQ ID NO: 235603 - DNA, 120 bp, Artificial Sequence
  ENSG00000120063_21 (sequence is synthesized)
atgattacattgacctcccccgactgcttaccaaattaaaatgtgtccacgaagtagctttgtgatcgcagatacattcatagtgaactcatcagaatggctggtttgcagtactgaaat

SEQ ID NO: 235604 - DNA, 120 bp, Artificial Sequence
  ENSG00000120063_22 (sequence is synthesized)
actatcttctaggctgtatgtagtgctacaattagagaaacagaagtccaaggctggcgacagcttgaaaagtctgacagcttttctacttttcctgaaaattttaagactgtgatatct

SEQ ID NO: 235605 - DNA, 120 bp, Artificial Sequence
  ENSG00000120063_23 (sequence is synthesized)
gtcattttactgtatagctgactgtgtactcaggtattttattggtccttgaaagattggtcgttatggatcacccagcctttccaagtcagtggctgttgttctgtcttgctgtctgat

SEQ ID NO: 235606 - DNA, 120 bp, Artificial Sequence
  ENSG00000120063_24 (sequence is synthesized)
acgagagtggggcttttcagtgaactaaccagggattgttcttgacatacctgacttttctcacatttgaacttccactatcattgtatccatataacttctagcattttcatgccatgg

SEQ ID NO: 235607 - DNA, 120 bp, Artificial Sequence
  ENSG00000120063_25 (sequence is synthesized)
taatccatgagctacacatacgtagcccggcaccgtgatgcaagttcatggtatcgtgcatgttcgtggtatcatggtatcattcatgcgtgtttgaatagttctacatctagtgcttct

SEQ ID NO: 235608 - DNA, 120 bp, Artificial Sequence
  ENSG00000120063_26 (sequence is synthesized)
gaatacattgtttaaattcacaaaattagcataattgcagtgctaatgaatatcggaatatgtgcacagtaacatttggactattcattggagagtttacccatacatttagcaaattga

SEQ ID NO: 235609 - DNA, 120 bp, Artificial Sequence
  ENSG00000120063_27 (sequence is synthesized)
atggccaaaacatttgactccagtgagggctcaagttagatccctatagaaagaggacacttcatcttacttaagtcatagttaagatctgtgatacgaaccatagatattgcctgacaa

SEQ ID NO: 235610 - DNA, 120 bp, Artificial Sequence
  ENSG00000120063_28 (sequence is synthesized)
agcagaaatcaccaagtttcccccttttgaattaccaccaagaagtgttgaaacaccaaatagatatcatgttattttgggcatttgcagttttcttccctgctgcatgtaatgtctcag

SEQ ID NO: 235611 - DNA, 120 bp, Artificial Sequence
  ENSG00000120063_29 (sequence is synthesized)
aatcaacattcttttaaaatctagactatattttgaggcaatgaattacttatattcaacttaggcttgttttgacattcagtagaactttaagttcaatctaaaggcttcagtccacat

SEQ ID NO: 235612 - DNA, 120 bp, Artificial Sequence
  ENSG00000120063_30 (sequence is synthesized)
ttttttatacgttgtattttaaaaacgtttgaaaggagtcttacacctgtatcatgaaaactgaatccttttgaaataccactatatgaagagagagatgaaatttagtgaacagaattg

SEQ ID NO: 235613 - DNA, 120 bp, Artificial Sequence
  ENSG00000120063_31 (sequence is synthesized)
aaaaggtgctcataatttcactatgcaaacttaccccagtctctaaaaaagtaatttagatttaaagttctttgatgtatttgattttctaaatctttatggttatgatttggaataaaa

SEQ ID NO: 235614 - DNA, 120 bp, Artificial Sequence
  ENSG00000120063_32 (sequence is synthesized)
tgtgcctaatcctgtgttacattctgttcttaaatctgaatgccttctcatttaattctgaggaaatatcacacaagtgtcttcattgaccttgaagaaatgtatatacagttgccttat

SEQ ID NO: 235615 - DNA, 120 bp, Artificial Sequence
  ENSG00000120063_33 (sequence is synthesized)
aaaacaacataaatttagaccataacttttatagagaaagggttttgtcaaatgttttctgaaaatctgagtaattcaaagcatgcctctgcccctttaatatttttaataacctgcatt

SEQ ID NO: 235616 - DNA, 120 bp, Artificial Sequence
  ENSG00000120063_34 (sequence is synthesized)
gttgctgtctgccaaatattaaattgaaatcttcatttcaattttattatctggaaagggcactggattgctctgcaaccaaagaaagcaatatggaatgaaaaaactcattcacttttg

SEQ ID NO: 235617 - DNA, 120 bp, Artificial Sequence
  ENSG00000120063_35 (sequence is synthesized)
tcttattttcttttaaggtgtattggcatgtaatttgcatagagaaggtcctctggttagtctctcaaattgaggctgtttagggaaatccttattcagttggtggcagtggttggttta

SEQ ID NO: 235618 - DNA, 120 bp, Artificial Sequence
  ENSG00000120063_36 (sequence is synthesized)
aagtagaaggaaataagatcgccttaataccagaaatgattagaagtgctgatttagattcaacaaataccatatgtccttatcattttttgtaagaagaaattggttaagtcctaactt

SEQ ID NO: 235619 - DNA, 120 bp, Artificial Sequence
  ENSG00000120063_37 (sequence is synthesized)
tcaatgtgtacccaaatacttgtatttatgcttttgataaaatgtattttcagcattaatacacatccgattatgccttatttatatatgaagaataaagttaccatgttacactgttat

SEQ ID NO: 235620 - DNA, 120 bp, Artificial Sequence
  ENSG00000120063_38 (sequence is synthesized)
gtcctaaaattcaaatcactatttgagaaaccctcaaattggtgctttcattatataatgatacatttagacaaaaccccaaactaagccatttgaaacaagattctctccattgcagtt

SEQ ID NO: 235621 - DNA, 120 bp, Artificial Sequence
  ENSG00000120063_39 (sequence is synthesized)
tgtagcaatgttatttctgtgtatgtcatgagaaggctaaatatcagtgttaatttcttgtttgaatccgtgaaatcatgcctgtaaagcccaaacatttgtaacaaactccctaataaa

SEQ ID NO: 235622 - DNA, 120 bp, Artificial Sequence
  ENSG00000120063_40 (sequence is synthesized)
tttagagaaagtcactctgttaccatttcatttattttagttttatttgagaaattaagaccagaagttttgctcatgtctttttcacttggaaatctgacttagtacctagttaatttg

SEQ ID NO: 235623 - DNA, 120 bp, Artificial Sequence
  ENSG00000120063_41 (sequence is synthesized)
tctctctcccatcattttaaggcgttcgcttctgttaatcacagatgatctgtccttgtgttgtgctgcttgactaaaagcactgttttgttttgttttgttttgttttttaatgatagg

SEQ ID NO: 235624 - DNA, 120 bp, Artificial Sequence
  ENSG00000120063_42 (sequence is synthesized)
atacagggtggcttttcagtctagtaaacatgaggaggggagagattgtgggtgggtgtgggtgtgtccgcatgtcccaaatacagcacatgcccatttttttatggtacgaggttaggg

SEQ ID NO: 235625 - DNA, 120 bp, Artificial Sequence
  ENSG00000120063_43 (sequence is synthesized)
cttattaataaatgtatactagatcttgaagtgtaagtctaagtctgaacattttaaacaagttggactttatggctttttcaagttccatcaagtagatactagtcttaggctggtagg

SEQ ID NO: 235626 - DNA, 120 bp, Artificial Sequence
  ENSG00000120063_44 (sequence is synthesized)
tgattaacaacatcatttggagtacagtgtttgtaccactagcattcttatgtctgtacttgaacgtgtagttagcatttaagttatgttcactcttgtagcattcaggtcttaccatct

SEQ ID NO: 235627 - DNA, 120 bp, Artificial Sequence
  ENSG00000120063_45 (sequence is synthesized)
ggtttcaaatgcgagagcttatatgaacattgttttgaaagcatgaatgatatggcaatattttatgtcttgataaggagagttttgtgacatatacaaatctgctgttgatgatgaaag

SEQ ID NO: 235628 - DNA, 120 bp, Artificial Sequence
  ENSG00000120063_46 (sequence is synthesized)
tttacaggtggatcagagtatgctggaactcagtgtgcataaaatttcagtcagtgaatatcactgaacgtcatatactacttggtatgtgactttggtttgtgttaagaaagcttgtat

SEQ ID NO: 235629 - DNA, 120 bp, Artificial Sequence
  ENSG00000120063_47 (sequence is synthesized)
ataatattttttgccatagtaagtgagaaattgtccttaatcatgcctgtttgatggtactaggaaagaaaggggtagagattaattcttgcacagtataagcaacagtgcaacaaacta

SEQ ID NO: 235630 - DNA, 120 bp, Artificial Sequence
  ENSG00000120063_48 (sequence is synthesized)
tgccatttaccttttacctcttacttgaaggcagaatcgcaaaacgtttgaaatggcttttctaaactactctactctggtgagagctcatttaccacaagaagccttataaaaaagtat

SEQ ID NO: 235631 - DNA, 120 bp, Artificial Sequence
  ENSG00000120063_49 (sequence is synthesized)
attttgtaataaccccgtagatactgtacctaacaaaacatgactcgtattagctctataaaatatttgtggcttaggattttttttttacatatatctttttataactttccaggaact

SEQ ID NO: 235632 - DNA, 120 bp, Artificial Sequence
  ENSG00000120063_50 (sequence is synthesized)
aagcacattatctgataattgttgtaaatttttttgtcagtgctttagttcaggatgggcaataaattatttctaaaggaggtctaaaagtggaaagaatggtttgattttataaaatga

SEQ ID NO: 235633 - DNA, 120 bp, Artificial Sequence
  ENSG00000120063_51 (sequence is synthesized)
gttgctagttcattacagctttttacttttgtacatattttgcaaaacatttgcctcttgctattaatatttgctttgtaaaaattactgacatttaataaacatttgtaaacaattcaa

SEQ ID NO: 235634 - DNA, 120 bp, Artificial Sequence
  ENSG00000120063_52 (sequence is synthesized)
aataagggaactttttgcccgagacttcttgtcaagggcgtagggtgacagcctccttttgggcgagaatatgaaacttgaggagtgtcaggttgactgtactggaatcaggagagagtg

SEQ ID NO: 235635 - DNA, 120 bp, Artificial Sequence
  ENSG00000120068_0 (sequence is synthesized)
cgctctctcctcactccctggcgctctctcgctctagctctctctctcgctcgctctctctcgctctcaccctcgctctgcgttctgtccgggaggagtacgaagaagccaataggatgc

SEQ ID NO: 235636 - DNA, 120 bp, Artificial Sequence
  ENSG00000120068_1 (sequence is synthesized)
ggggtctctaatggatgcaaatgatcatgaaaagacagtgcaaaatatgaaacaactcatttgcagggaagtaaatcaccgaaaactgtttatgaactggcatcccttcttcgaaatgta

SEQ ID NO: 235637 - DNA, 120 bp, Artificial Sequence
  ENSG00000120068_2 (sequence is synthesized)
aagcgaggacctctttaagtggtggtatatttttgtttggggggtggggggtggggggagggcgagcgagccgcggctgccatgcaagcttagacttttggaggcttctctgtccttttc

SEQ ID NO: 235638 - DNA, 120 bp, Artificial Sequence
  ENSG00000120068_3 (sequence is synthesized)
tattcctggaaaccacaaaaagtgtgtcggcttcgagatcttcttcgccttttctttcttttctttttttccctcctctctttccctctcctttcctggcgagggtgactaggagccggc

SEQ ID NO: 235639 - DNA, 120 bp, Artificial Sequence
  ENSG00000120068_4 (sequence is synthesized)
gaatccgcgtttttttctctctctccctccctttccccctccccaccccctccccaacagcccccaactatagcctccgccgccgccgccgcctcaaaattcaataaaatgagctcttat

SEQ ID NO: 235640 - DNA, 120 bp, Artificial Sequence
  ENSG00000120068_5 (sequence is synthesized)
ttcgtcaactcactgttctccaaatacaaaaccggggagtccctgcgccccaattattatgactgcggcttcgcccaggacctgggcggccgacccaccgtggtgtacggtcccagcagc

SEQ ID NO: 235641 - DNA, 120 bp, Artificial Sequence
  ENSG00000120068_6 (sequence is synthesized)
ggcggcagcttccagcacccgtcgcaaatccaggagttctaccacgggccgtcgtcgctgtccacggctccctaccagcagaacccgtgcgccgtggcgtgccacggggaccccggcaat

SEQ ID NO: 235642 - DNA, 120 bp, Artificial Sequence
  ENSG00000120068_7 (sequence is synthesized)
ttctacggctacgacccgctgcaacgccagagcctattcggtgcgcaggatccagacctggtgcagtacgcagactgcaagcttgccgccgccagcggcctgggcgaggaggccgagggc

SEQ ID NO: 235643 - DNA, 120 bp, Artificial Sequence
  ENSG00000120068_8 (sequence is synthesized)
tccgagcagagcccgtcgcccacacagctcttcccctggatgcgcccgcaagcagccgccggacgcaggcgaggccgacagacctacagccgctaccagaccctggagctggagaaggag

SEQ ID NO: 235644 - DNA, 120 bp, Artificial Sequence
  ENSG00000120068_9 (sequence is synthesized)
atctgactcgtaagcggcgaatcgaggtatcgcacgccctgggactgacagagagacaggtcaaaatctggttccagaaccggaggatgaagtggaaaaaagagaacaacaaagacaagt

SEQ ID NO: 235645 - DNA, 120 bp, Artificial Sequence
  ENSG00000120068_10 (sequence is synthesized)
tccccagcagcaaatgcgagcaggaggagctggagaaacagaagctggagcgggccccagaggcggcggacgagggcgacgcgcagaagggcgacaagaagtaggcttcagctgggactg

SEQ ID NO: 235646 - DNA, 120 bp, Artificial Sequence
  ENSG00000120068_11 (sequence is synthesized)
cgccgccgccgcgcgcccctgcccgagagagctctggccccgctagcggggccaggagccgggcctcccaccgcagcgtcccccgccgcgccagtccccgctagtggtagtatctcgtaa

SEQ ID NO: 235647 - DNA, 120 bp, Artificial Sequence
  ENSG00000120068_12 (sequence is synthesized)
ccccgccgcgccagtccccgctagtggtagtatctcgtaatagcttctgtgtgtgagctaccgtggatctccttcccttctcttgggggccggggggaaagaaaaggatttaagcaaagg

SEQ ID NO: 235648 - DNA, 120 bp, Artificial Sequence
  ENSG00000120068_13 (sequence is synthesized)
ctccctcgccctgtgagggcgagcggcaaaggcccggctgagccccccatgcccctcccctccccgtgtaaaaagcctccttgtgcaattgtcttttttttcctttgaacgtgcttcttt

SEQ ID NO: 235649 - DNA, 120 bp, Artificial Sequence
  ENSG00000120068_14 (sequence is synthesized)
gtaatgaccaaggtaccgatttctgctaagttctcccaacaacatgaaactgcctattcacgccgtaattctttctgtctcccttctctctctctctctcgctcgctcgctctcgctctc

SEQ ID NO: 235650 - DNA, 120 bp, Artificial Sequence
  ENSG00000120068_15 (sequence is synthesized)
gctctctctcgctgcgtcctcatttcccctcccaatcctctctcccctctgcaaccccccagctcgctggctttctctctggcttctctcttttcctcctccacccaccccctttggttt

SEQ ID NO: 235651 - DNA, 120 bp, Artificial Sequence
  ENSG00000120068_16 (sequence is synthesized)
gacaattttgtcttaagtgtttctcaaaagaggttactttagttagcatgcgcgctgtgggcaattgttacaagtgttcttaggtttactgtgaagagaatgtattctgtatccgtgaat

SEQ ID NO: 235652 - DNA, 120 bp, Artificial Sequence
  ENSG00000120068_17 (sequence is synthesized)
tgctttatgggggggagggagggctaattatatattttgttgttcctctatactttgttctgttgtctgcgcctgaaaagggcggaagagttacaataaagtttacaagcgagaacccga

SEQ ID NO: 235653 - DNA, 120 bp, Artificial Sequence
  ENSG00000120068_18 (sequence is synthesized)
gggcgacaagaaaaacggcagcgtccaaggcccgtgggctggatcctgtgccctaggagcacctaggaagacttgctccatctccgcccgcatatctggggcaccaagagagacagagtc

SEQ ID NO: 235654 - DNA, 120 bp, Artificial Sequence
  ENSG00000120068_19 (sequence is synthesized)
gtgagccaggctcgcctcattcctcgtcttgggagaaccggaccaacttccccaaaaggccttgccgtgcagaattggcctggtttaataaagaacagacctgccccaagcacccaccca

SEQ ID NO: 235655 - DNA, 120 bp, Artificial Sequence
  ENSG00000120071_0 (sequence is synthesized)
gggcggaagattccccgcccccacttctaggcttggttgaaccgtgcagataccttctcgaaacaaaagattttcctacctgcttatacttggtaaccgagggaattactaagacttctt

SEQ ID NO: 235656 - DNA, 120 bp, Artificial Sequence
  ENSG00000120071_1 (sequence is synthesized)
gctcatttctgagtattgtctttatatcctgacactatgaatgctacttggatgcctcttaagtctgttctctggggaggcagtaaggggccgtggagctggcctcggcctcggcatcgg

SEQ ID NO: 235657 - DNA, 120 bp, Artificial Sequence
  ENSG00000120071_2 (sequence is synthesized)
gagaggctggacttcctgtctctctgtgctgaatggctgcgatggcgcccgctctcactgacgcagcagctgaagcacaccatatccggttcaaactggctcccccatcctctaccttgt

SEQ ID NO: 235658 - DNA, 120 bp, Artificial Sequence
  ENSG00000120071_3 (sequence is synthesized)
cccctggcagtgccgaaaataacggcaacgccaacatccttattgctgccaacggaaccaaaagaaaagccattgctgcagaggatcccagcctagatttccgaaataatcctaccaagg

SEQ ID NO: 235659 - DNA, 120 bp, Artificial Sequence
  ENSG00000120071_4 (sequence is synthesized)
aagacttgggaaagctgcaaccactggtggcatcttatctctgctctgatgtaacatctgttccctcaaaggagtctttgaagttgcaaggggtcttcagcaagcagacagtccttaaat

SEQ ID NO: 235660 - DNA, 120 bp, Artificial Sequence
  ENSG00000120071_5 (sequence is synthesized)
ctcatcctctcttatctcagtcctatgaactccgagctgagctgttggggagacagccagttttggagttttccttagaaaatcttagaaccatgaatacgagtggtcagacagctctgc

SEQ ID NO: 235661 - DNA, 120 bp, Artificial Sequence
  ENSG00000120071_6 (sequence is synthesized)
cacaagcacctgtaaatgggttggctaagaaattgactaaaagttcaacacattctgatcatgacaattccacttccctcaatgggggaaaacgggctctcacttcatctgctcttcatg

SEQ ID NO: 235662 - DNA, 120 bp, Artificial Sequence
  ENSG00000120071_7 (sequence is synthesized)
ggggtgaaatgggaggatctgaatctggggacttgaaggggggtatgaccaattgcactcttccacatagaagccttgatgtagaacacacaactttgtatagcaataatagcactgcaa

SEQ ID NO: 235663 - DNA, 120 bp, Artificial Sequence
  ENSG00000120071_8 (sequence is synthesized)
acaaatcctctgtcaattccatggaacagccggcacttcaaggaagcagtagattatcacctggtacagactccagctctaacttggggggtgtcaaattggagggtaaaaagtctcccc

SEQ ID NO: 235664 - DNA, 120 bp, Artificial Sequence
  ENSG00000120071_9 (sequence is synthesized)
tgtcttccattcttttcagtgctttagattctgacacaaggataacagctttactgcggcgacaggctgacattgagagccgtgcccgcagattacaaaagcgcttacaggttgtgcaag

SEQ ID NO: 235665 - DNA, 120 bp, Artificial Sequence
  ENSG00000120071_10 (sequence is synthesized)
ccaagcaggttgagaggcatatacaacatcagctgggtggatttttggagaagactttgagcaaactgccaaacttggaatccttgagaccacggagccagttgatgctgactcgaaagg

SEQ ID NO: 235666 - DNA, 120 bp, Artificial Sequence
  ENSG00000120071_11 (sequence is synthesized)
ctgaagctgccttgagaaaagctgccagtgagaccaccacttcagagggacttagcaactttctgaaaagcaattcaatttcagaagaattggagagatttacagctagtggcatagcca

SEQ ID NO: 235667 - DNA, 120 bp, Artificial Sequence
  ENSG00000120071_12 (sequence is synthesized)
acttgaggtgcagtgaacaggcatttgattcagatgtcactgacagtagttcaggaggggagtctgatattgaagaggaagaactgaccagagctgatcccgagcagcgtcatgtacccc

SEQ ID NO: 235668 - DNA, 120 bp, Artificial Sequence
  ENSG00000120071_13 (sequence is synthesized)
tgagacgcaggtcagaatggaaatgggctgcagaccgggcagctattgtcagccgctggaactggcttcaggctcatgtttctgacttggaatatcgaattcgtcagcaaacagacattt

SEQ ID NO: 235669 - DNA, 120 bp, Artificial Sequence
  ENSG00000120071_14 (sequence is synthesized)
acaaacagatacgtgctaataaggggttgatagttcttggggaggtacctcccccagagcatacaacagacttatttcttccacttagttctgaggtgaagacagatcatgggactgata

SEQ ID NO: 235670 - DNA, 120 bp, Artificial Sequence
  ENSG00000120071_15 (sequence is synthesized)
aattgattgagtctgtttctcagccattggaaaaccatggtgcccctattattggtcatatttcagagtcactgtctaccaaatcatgtggagcactcagacctgtcaatggagttatta

SEQ ID NO: 235671 - DNA, 120 bp, Artificial Sequence
  ENSG00000120071_16 (sequence is synthesized)
acactcttcagcctgtcttggcagaccacattccaggtgacagctctgatgctgaggaacaattacataagaagcaacgactgaatctcgtctcttcatcatctgatggcacctgtgtgg

SEQ ID NO: 235672 - DNA, 120 bp, Artificial Sequence
  ENSG00000120071_17 (sequence is synthesized)
cagcccggacacgtcctgtactgagctgtaagaagcggaggcttgttcgacccaacagcatcgttcctctttccaagaaggttcaccggaacagcacaatccgccctggctgtgatgtga

SEQ ID NO: 235673 - DNA, 120 bp, Artificial Sequence
  ENSG00000120071_18 (sequence is synthesized)
atccctcctgcgcactgtgtggttcaggcagcatcaacaccatgcctcccgaaattcactatgaagcccctctgttggaacgtctttcccagttggactcttgtgttcatcctgttctag

SEQ ID NO: 235674 - DNA, 120 bp, Artificial Sequence
  ENSG00000120071_19 (sequence is synthesized)
catttccagatgatgttcccacaagcctgcatttccagagcatgctgaaatctcagtggcagaacaagccttttgacaaaatcaaacctcccaaaaagttatcgcttaagcacagagcac

SEQ ID NO: 235675 - DNA, 120 bp, Artificial Sequence
  ENSG00000120071_20 (sequence is synthesized)
ccatgccgggcagtctgccagattcagctcgtaaggacaggcacaaattggtcagctccttcctaacaacagccaagctgtcccatcaccaaacccggcctgacaggacccacaggcagc

SEQ ID NO: 235676 - DNA, 120 bp, Artificial Sequence
  ENSG00000120071_21 (sequence is synthesized)
atgagattgcgagaccattcatctgagagaagtgaagtgttgaagcatcacacagacatgagcagttcgagctacttggcagccacccaccatcctccacacagtcccttggtgcgacag

SEQ ID NO: 235677 - DNA, 120 bp, Artificial Sequence
  ENSG00000120071_22 (sequence is synthesized)
ctctccacctcctcagattcccctgcacccgccagctctagctcacaggttacagccagcacatcgcagccagtaaggaggagaaggggagagagctcatttgatattaacaacattgtc

SEQ ID NO: 235678 - DNA, 120 bp, Artificial Sequence
  ENSG00000120071_23 (sequence is synthesized)
atcccaatgtctgttgctgcaacaactcgcgtagagaaactgcaatacaaggaaatccttacgcccagctggcgggaggttgatcttcagtctctgaaggggagtcctgatgaggagaat

SEQ ID NO: 235679 - DNA, 120 bp, Artificial Sequence
  ENSG00000120071_24 (sequence is synthesized)
gaagagattgaggacctatccgacgcagccttcgccgccctgcatgccaaatgtgaggagatggagagggcacggtggctgtggaccacgagtgtgccaccccagcggcggggcagcagg

SEQ ID NO: 235680 - DNA, 120 bp, Artificial Sequence
  ENSG00000120071_25 (sequence is synthesized)
tcctacaggtcatcagacggccggacaaccccccagctgggcagtgccaacccctccaccccccagcctgcctcccctgatgtcagcagtagccactctttgtcagaatactcccatggt

SEQ ID NO: 235681 - DNA, 120 bp, Artificial Sequence
  ENSG00000120071_26 (sequence is synthesized)
cagtcccctaggagccccattagcccggaactgcactcagcacccctcacccctgtggctcgggacactccgcgacacttagccagtgaggatacccgttgttccacaccagagctgggg

SEQ ID NO: 235682 - DNA, 120 bp, Artificial Sequence
  ENSG00000120071_27 (sequence is synthesized)
ctggatgaacagtctgtccagccctgggagcggcggaccttccccctggcgcacagtccccaggcggagtgtgaggaccagctggatgcacaggagcgagcagcccgctgcactcgacgc

SEQ ID NO: 235683 - DNA, 120 bp, Artificial Sequence
  ENSG00000120071_28 (sequence is synthesized)
acctcaggcagcaagactggccgggagacagaggcagcgcccacctcgcctcccattgtccccctcaagagtcggcatctggtggcagcagccacagctcagcgcccgactcacagatga

SEQ ID NO: 235684 - DNA, 120 bp, Artificial Sequence
  ENSG00000120071_29 (sequence is synthesized)
gcgggagacagccatctaaacagactcactaactattggcattaaagcttcagaaatctctgcgtttgatattcaaacatcatatgccggaaattttcacagtttttagtgaacttaagg

SEQ ID NO: 235685 - DNA, 120 bp, Artificial Sequence
  ENSG00000120071_30 (sequence is synthesized)
aatttagatcctactttggtatttttttttcttgttttaatttttgttttgtttttgtttccatgttttcttgtcacacacctgagcacttcctcccgttggcaaacagaagttcaggat

SEQ ID NO: 235686 - DNA, 120 bp, Artificial Sequence
  ENSG00000120071_31 (sequence is synthesized)
gagaccctgctggcctggtcctggcacatcctctgcactgttgaatcactggacttactgatcttagatgaccaccccctccctcacacctgtgggcagggcagaacagcctggcgggct

SEQ ID NO: 235687 - DNA, 120 bp, Artificial Sequence
  ENSG00000120071_32 (sequence is synthesized)
acagtttagcatggccttcttgagctagggtggaatggggcagggtgctctggactcttaccccctcccctcccatctgtggcttggctctgctgtggccctcctggctgggtccccttg

SEQ ID NO: 235688 - DNA, 120 bp, Artificial Sequence
  ENSG00000120071_33 (sequence is synthesized)
gtttttcgtgctggaacatccccaccagagcctctctgccataactgccagctgctctccccgagtgctcagctggcagaacacctttcctttctcacccagaacttaagagactgattt

SEQ ID NO: 235689 - DNA, 120 bp, Artificial Sequence
  ENSG00000120071_34 (sequence is synthesized)
tttgtttcatctgcatttggtcttctctgttttgactctttcactgcagtaacctggctgtggctgctcaggttcccctcctcatgccccttggtacccttccctgtctgctctcccatg

SEQ ID NO: 235690 - DNA, 120 bp, Artificial Sequence
  ENSG00000120071_35 (sequence is synthesized)
ccatgtacacacccacaacccgtccttccacttggaatatttttaccacctatcctgatctttgaaggtagggttaggactacttaacctctattcccactcccctgcaaactgggggtt

SEQ ID NO: 235691 - DNA, 120 bp, Artificial Sequence
  ENSG00000120071_36 (sequence is synthesized)
gtgggaagtgagcagccatctccctgtgtgattttttttttttttccctctgattcactttgccatgtttccttcacatccagatccctgtcggtgttagttccactcttggtctttcac

SEQ ID NO: 235692 - DNA, 120 bp, Artificial Sequence
  ENSG00000120071_37 (sequence is synthesized)
gctccccttgcctgtggaacattgtctggtcctagctgtggttcccattgttcccccttcacccttctctgttaaccttgtgcctgtctcctgtatgatcacatcaccaaaaagggggag

SEQ ID NO: 235693 - DNA, 120 bp, Artificial Sequence
  ENSG00000120071_38 (sequence is synthesized)
gggggagaagactctttttttttggccattttgtaatcgtataaaaatagtagacaactgcttaatggttggggttttttcacaattttcaacattagtgatttttttttctgtttgcaa

SEQ ID NO: 235694 - DNA, 120 bp, Artificial Sequence
  ENSG00000120071_39 (sequence is synthesized)
gttaaagggtttgtcattgtttctttaaaaaaaaatacaataatgcaccatatccctatgcataaagtgcttcttctatttataaggttgaaaattctgaataacccttttagcattgaa

SEQ ID NO: 235695 - DNA, 120 bp, Artificial Sequence
  ENSG00000120071_40 (sequence is synthesized)
caaaaacaaaaaatggaaaaaaaaaaccttgtattttgtaaatattttcttttcctgctttggagctgtgtaatggcagcgaaacatgtagctgtctttgttctatagaaatgcttttct

SEQ ID NO: 235696 - DNA, 120 bp, Artificial Sequence
  ENSG00000120071_41 (sequence is synthesized)
gcttttcttcagagaagctgatctttgttaatgtcttgattctgttcgcaaagcacagactagtgcttaaaaaaaaaaaagaaggaaaaattgaaaaaaataaaaaaaaaagttacagaa

SEQ ID NO: 235697 - DNA, 120 bp, Artificial Sequence
  ENSG00000120071_42 (sequence is synthesized)
ggagggaaaaggagctcggccgccattttcccagtgccgccgccaccgccgccaccgctcgccgagccggcgggagaaccgagcaccgtagcgaagccgactcgtctcgccgcggcggcg

SEQ ID NO: 235698 - DNA, 120 bp, Artificial Sequence
  ENSG00000120071_43 (sequence is synthesized)
cggggggcggctgaagcgcgctccccggctggaaagaggcggccgggggtggcggcctgggtgcgggttcgggctgcagacggcggtgcttgtttgtgcggggcgggggggcggtttcac

SEQ ID NO: 235699 - DNA, 120 bp, Artificial Sequence
  ENSG00000120071_44 (sequence is synthesized)
tctctgcccccgcccgcccgccctcccggccgggctgcggtctccagccgtgctcgggccccgtcggtgcggagcaaggccgggaaagggcccgaaagagaagaaaaagcagccgctccc

SEQ ID NO: 235700 - DNA, 120 bp, Artificial Sequence
  ENSG00000120071_45 (sequence is synthesized)
cgaaagagaagaaaaagcagccgctccccgccgccgccttcccctccccctctgcctcgcccccccgcccggaaagtcagggcggctccgggcgtcggggggaggagagcggcgggcccg

SEQ ID NO: 235701 - DNA, 120 bp, Artificial Sequence
  ENSG00000120071_46 (sequence is synthesized)
ccgccgctggccctcggcgcccaggccggggggctgtttgcaaactgcgcccattttgtggggctgaatccgcccgggctacgctcctccatcacgtgtctgttctctggggaggcagta

SEQ ID NO: 235702 - DNA, 120 bp, Artificial Sequence
  ENSG00000120071_47 (sequence is synthesized)
ctgagacttgggtcaagagtcaaactgtcgccccccgctcctcccccaaaatccggtgagcggtaaggaaagtgatgccaagtcttcgaagcctcagtgacaaacgcatagcaagaacac

SEQ ID NO: 235703 - DNA, 120 bp, Artificial Sequence
  ENSG00000120071_48 (sequence is synthesized)
ggtgaaagaaaatcagccaaggtgcagttacaactcagatactttcaaggtacaactttcgtcaaccaagtcttctcttagaattttgcaaaaagactgtaacagatccaccaaaccaga

SEQ ID NO: 235704 - DNA, 120 bp, Artificial Sequence
  ENSG00000120071_49 (sequence is synthesized)
aggtgccactaaaaggttgcaacttaatatgagatttccttctaactcttcaagtagctaggagggatctgggctcagttgcctctagccacagtaatctggtccaaaatacgcttagta

SEQ ID NO: 235705 - DNA, 64 bp, Artificial Sequence
  ENSG00000120071_50 (sequence is synthesized)
gcctctagccacagtaatctggtccaaaatacgcttagtatatctttaaaaatgttttgtctgg

SEQ ID NO: 235706 - DNA, 70 bp, Artificial Sequence
  ENSG00000120071_51 (sequence is synthesized)
cagcctgaccaacatggtgaaaccaccgtctctactaaatataaaaaattagccagtcgtggttgtgcct

SEQ ID NO: 235707 - DNA, 82 bp, Artificial Sequence
  ENSG00000120071_52 (sequence is synthesized)
ggatttgtctgtgcgtgccatgatataatgtaggatggacggcagtgttctaggagaatatcttcatactggcatttatgtg

SEQ ID NO: 235708 - DNA, 120 bp, Artificial Sequence
  ENSG00000120071_53 (sequence is synthesized)
cagtgttctaggagaatatcttcatactggcatttatgtggtaacgcgacagctttgcagggtgtagataagcacaaatcttcgttgttagcttgtactgtctttctaaagtttgcctcc

SEQ ID NO: 235709 - DNA, 120 bp, Artificial Sequence
  ENSG00000120071_54 (sequence is synthesized)
ctgttaaatctctgtgtctgacagccctcctttcccacctcccttcccatacctgtacctctcccacttgacaaaagaagagcattccttttggccatattgagtcccactatgggtctt

SEQ ID NO: 235710 - DNA, 120 bp, Artificial Sequence
  ENSG00000120071_55 (sequence is synthesized)
ttccttttggccatattgagtcccactatgggtcttgccccagagtgtaaaaatcttgaggctcggtgtcgtggcccacgtctttaatcccgtcactttgggagaccaaggcaggcagat

SEQ ID NO: 235711 - DNA, 120 bp, Artificial Sequence
  ENSG00000120071_56 (sequence is synthesized)
cctgtccttccttttactatatttcaagttcctttccagacagattattaagaggagtcagatttttaccctttttgggattctggctacagacagcgccactaggaagacttaggaatg

SEQ ID NO: 235712 - DNA, 120 bp, Artificial Sequence
  ENSG00000120071_57 (sequence is synthesized)
tttgttgggttactctctgaattactgtgttgaattgtatagtctcatacttgaagaaggacaggaagcccggacacttaagcacactcattggatatcacctgctaaacagaacagtca

SEQ ID NO: 235713 - DNA, 120 bp, Artificial Sequence
  ENSG00000120071_58 (sequence is synthesized)
tttctttgtcaacagcattaccacatacagttgcaaataacctcccccaccctcagatatacccagactgtgtgtctctcagctcctgttccatcattcagcatctctactaagaggttc

SEQ ID NO: 235714 - DNA, 120 bp, Artificial Sequence
  ENSG00000120071_59 (sequence is synthesized)
catttcccttgaacattttctgtcctgctgactgcaggacactatagatctgacatgaatgctgccctgccgcataccttacacctcccacaccatcattcagagcaactacaggcagca

SEQ ID NO: 235715 - DNA, 120 bp, Artificial Sequence
  ENSG00000120071_60 (sequence is synthesized)
atgagggggaatggaaagaaagatagggaacactcccccttttctggtctttatggtttttattttcctgcatctaatcctatttgtttttctgtctatgtctcacacacacacgaagag

SEQ ID NO: 235716 - DNA, 120 bp, Artificial Sequence
  ENSG00000120071_61 (sequence is synthesized)
cttctagctatggccctggggtttggacgaaaaagttggtcattaaattctccttatgagactgtggagatatatatatatttttacatgtaggctctattaactactgtatttgcctgt

SEQ ID NO: 235717 - DNA, 120 bp, Artificial Sequence
  ENSG00000120071_62 (sequence is synthesized)
agattaattacacctcagttggttgacctgaagacctgattaccatgtctaatattattcctgttggaataattttgctttgacccaaacaactgccacattcagaatgcagtccatttg

SEQ ID NO: 235718 - DNA, 120 bp, Artificial Sequence
  ENSG00000120071_63 (sequence is synthesized)
gaaatcagaagattcccatgggtgcagagatagccaactccaaagggcaccattcacataatatcccgtgtaaataacacaccccctgaagtcttgggattccctgtacatcattgtata

SEQ ID NO: 235719 - DNA, 120 bp, Artificial Sequence
  ENSG00000120071_64 (sequence is synthesized)
gcagtaaataacagtgaaggctagcagcttggcatacgactgtgtaggtcaaacatttgtgtggtagattttactactgggccacccttacaacctcttctctagaagatgttttaaagt

SEQ ID NO: 235720 - DNA, 120 bp, Artificial Sequence
  ENSG00000120071_65 (sequence is synthesized)
ggcaggatttccaacttttttttttttcataacaaggttaaaaatgattttgattcattgattccatatagttacatttataccagacataaaggcagaaaattgtttgaatgtgatact

SEQ ID NO: 235721 - DNA, 120 bp, Artificial Sequence
  ENSG00000120071_66 (sequence is synthesized)
tagctgttttctggccccataggacagatatttttttaagtagttttagtgctgtttcctaaccagtttgtgtagtttgttagaataacaaccaactgctgcttttcatcctggagttgt

SEQ ID NO: 235722 - DNA, 120 bp, Artificial Sequence
  ENSG00000120071_67 (sequence is synthesized)
gcctcgcaccttgactgtacctcagcccctctcattaagtgtgtgtgggtgatagaaattgagggactgtgttatagccaactctacgcctggctgtggaaggtggagagactagggtat

SEQ ID NO: 235723 - DNA, 120 bp, Artificial Sequence
  ENSG00000120071_68 (sequence is synthesized)
aataacctgttagtattccagcaggaagggggctttgttttatcacctcaagtaatcaaatccagttaatccttagttggaaatgtagaggatatataaccttggagaaaagcttgttaa

SEQ ID NO: 235724 - DNA, 120 bp, Artificial Sequence
  ENSG00000120071_69 (sequence is synthesized)
ctttataaaaggggcttaataagagcaccacctgctggccatgaagatctgtggtattttgagagagcttgccaaaccctgcacatgaggctacagcaacttcccagcaggaggaagaag

SEQ ID NO: 235725 - DNA, 120 bp, Artificial Sequence
  ENSG00000120071_70 (sequence is synthesized)
tgagcattacaaaacacccggaaaaagtgcgcctgagaaaatggtggaaagtaaggagccagacagccaggtgaatcgtggaatgtcagaccctagtcatcctgaagtcagggtcttctc

SEQ ID NO: 235726 - DNA, 120 bp, Artificial Sequence
  ENSG00000120071_71 (sequence is synthesized)
attcatctttcattttgtttgaggaaacagtaacttaaggatgacattagtaattcgtcttattttcctgttatttacctgataaggatcagcaccctcttctctgaaaatagcagttta

SEQ ID NO: 235727 - DNA, 120 bp, Artificial Sequence
  ENSG00000120071_72 (sequence is synthesized)
cctatgtgggtatggaatgtaggagacctctagctgaatggatctctggtgtgttctcttccatttcatatccctttttttgcttactttcaggtcccgtatccagtctattttagattt

SEQ ID NO: 235728 - DNA, 120 bp, Artificial Sequence
  ENSG00000120071_73 (sequence is synthesized)
ttaactcttcacagaacctaggtattatcacttactagttagtatatgaactcaaccagcaattcctaagatatcttttttttttttttttactgactgggggatctaactgggttcctg

SEQ ID NO: 235729 - DNA, 120 bp, Artificial Sequence
  ENSG00000120071_74 (sequence is synthesized)
ttcactcttaacatggaagcaattaaaaggcaacacagcaaacttctaacaaagtctagcagctggagttccttaaactgtttatactgggtttaaagaggaatcgctcttgattccgct

SEQ ID NO: 235730 - DNA, 120 bp, Artificial Sequence
  ENSG00000120071_75 (sequence is synthesized)
taatacgtcaactggagagtacaaggtagtgttccatgacttgggttctacaatgtgccaacttgcacttaagagcatttagttgaggggaagggtttaggagtggagttccagttgaag

SEQ ID NO: 235731 - DNA, 120 bp, Artificial Sequence
  ENSG00000120071_76 (sequence is synthesized)
agtcattgactaaacattttagagttgagagactcatagcagtcatataatctagcagtaacaaatagatgtcctttcttgtgcctattcaaatgaattgacagtaactgtctggagtta

SEQ ID NO: 235732 - DNA, 120 bp, Artificial Sequence
  ENSG00000120071_77 (sequence is synthesized)
tttaatgtattgtttgggaagaatctgaggtctccagtacaacaggaaagacagctgtgtttgtacctccagtacaacaggagggttagagaatgaatgctagaatgttgccagccctga

SEQ ID NO: 235733 - DNA, 120 bp, Artificial Sequence
  ENSG00000120071_78 (sequence is synthesized)
tctagccccactgcctcatttcacaggtggaactaaagcccagctgaatgatttgttcttgctttctccttctactcgagatagaaccaggacctgaatccaggcctacttgtttctagt

SEQ ID NO: 235734 - DNA, 120 bp, Artificial Sequence
  ENSG00000120071_79 (sequence is synthesized)
cattgctgttttcactataaccaggtctctcatatccctgtcccttttttttttcctggcttcattttcagatttgggagaacgatgggggaaaataaaaggaaaaaataaaatctatgt

SEQ ID NO: 235735 - DNA, 120 bp, Artificial Sequence
  ENSG00000120071_80 (sequence is synthesized)
tttttggagttccattacatatatatacaaaacatacacagcctttgccaagtgggagtaactcttctgctgacaaaggggtattgtgggatgggcagaagtgacctcgtctcctttctt

SEQ ID NO: 235736 - DNA, 120 bp, Artificial Sequence
  ENSG00000120071_81 (sequence is synthesized)
gagcctcttttatacattccagctcagcccagctttcagattgttttacagggccgaatgcttctagacaatgctttatttcctaggatttggtatagctgagtttttaagtgtggaaaa

SEQ ID NO: 235737 - DNA, 120 bp, Artificial Sequence
  ENSG00000120071_82 (sequence is synthesized)
gagtgattatgaaaaatgtttgagaagacagcactgtcctcagagactgtgtttttacacttggacaggtagcaaatgtttgttttcattaaaactttaatagttttcctaatttgtttc

SEQ ID NO: 235738 - DNA, 120 bp, Artificial Sequence
  ENSG00000120071_83 (sequence is synthesized)
actgtcataaagcccagcaatcatggagctgagggtgcttacccactgggaaaaatcatccctgagaatgttagctttttttttttttttttttccccaactcagatttttattccagtc

SEQ ID NO: 235739 - DNA, 120 bp, Artificial Sequence
  ENSG00000120071_84 (sequence is synthesized)
ctggaaggcctaacattcagtcctcgaaggcataacattcagtgtcatgaaattcatcatctataccataggcaggagtggctaaatttcttttactctgcagaactggcttggaaaata

SEQ ID NO: 235740 - DNA, 120 bp, Artificial Sequence
  ENSG00000120071_85 (sequence is synthesized)
ttttgtactgtctatttcttgggagtaatttgagaaataattgactttactacagaatcctctccatcctctggatcagtgagtagcctcaaggtatattgtctaagagtatgggcttta

SEQ ID NO: 235741 - DNA, 120 bp, Artificial Sequence
  ENSG00000120071_86 (sequence is synthesized)
gggttgtataatcttgagtttgaaagttggttgttactcattaaactatgtaaccttggacatagttaatgtacctttctgcacctgttccctatctttaaaataagcataattgtgttt

SEQ ID NO: 235742 - DNA, 120 bp, Artificial Sequence
  ENSG00000120071_87 (sequence is synthesized)
gcctcatggaactgttacaaagattaagtggcacacgcatgatgataaacacacagtgcctggcagataataatgggttcagtaatgttaatttagacgtctcttccctgccttcttatc

SEQ ID NO: 235743 - DNA, 120 bp, Artificial Sequence
  ENSG00000120071_88 (sequence is synthesized)
ctcttccctgccttcttatcctcagttcagattgagcatatcctctgtgctctatgggacccaaaaccccataagcttttagaaaatatattaaacaggccgggtgcagtggctcacgcc

SEQ ID NO: 235744 - DNA, 120 bp, Artificial Sequence
  ENSG00000120071_89 (sequence is synthesized)
acacacacacacacacacaaaataaatttctaatagttctagaagacatgctatcagtgactggaatttgtaattatttttgaaagatggataaagacaagataactgtgaagaaataaa

SEQ ID NO: 235745 - DNA, 120 bp, Artificial Sequence
  ENSG00000120071_90 (sequence is synthesized)
acaagataactgtgaagaaataaatagaaagatagcccaaagcacatgccaggagtaagttgctgtgaggtgggaactgattacaggaggtttttgacccagaattaaagggcagaagga

SEQ ID NO: 235746 - DNA, 120 bp, Artificial Sequence
  ENSG00000120071_91 (sequence is synthesized)
cagagccttcttccttgaagtagtggtgtttcattctattctgaagcagtggatagggactctggcgggaacttctgagcatgccccaagtggttaccgattcccaggaggaactgggag

SEQ ID NO: 235747 - DNA, 120 bp, Artificial Sequence
  ENSG00000120071_92 (sequence is synthesized)
gtgaggaaaaatgtgctggcttttagatttgaatatccctggaaagctttgcagaagcttgaaaacagactcacaccgctatccatggtggtgaaatgtcagaatattgaaaacatgaaa

SEQ ID NO: 235748 - DNA, 120 bp, Artificial Sequence
  ENSG00000120071_93 (sequence is synthesized)
aggaaaatctaaaagttgtacatcagcaccagaggttccagtcagagtaataggcaagaagtaaaaaaggaatacagattggaaagaaaaggtaaaacagtctccatttgtagatgatgt

SEQ ID NO: 235749 - DNA, 120 bp, Artificial Sequence
  ENSG00000120071_94 (sequence is synthesized)
acttatgtctatagaaaatcctactgaataaacaagaaaaagtctataacgaagtagtttcacaggctacaaggtcattatatagcagtttattgtacttctatatactagtaatgaaga

SEQ ID NO: 235750 - DNA, 120 bp, Artificial Sequence
  ENSG00000120071_95 (sequence is synthesized)
actgaagttgaaattttaaaaggtactatctttaatcatttccatctgagacttttgtcagcctggccttcactgcccgtatttctatcagtattttggtcaaaaccatttaacaaatct

SEQ ID NO: 235751 - DNA, 120 bp, Artificial Sequence
  ENSG00000120071_96 (sequence is synthesized)
tttccctcatcttcctgtcttcttctgaaccctgcaaactcttccaacttctgcccatcagaaaacattaattcttaggaataaacttaacaaattgtatttaagaccggtatgtcaaca

SEQ ID NO: 235752 - DNA, 120 bp, Artificial Sequence
  ENSG00000120071_97 (sequence is synthesized)
gaccggtatgtcaacaataactaaacgctgtcaagagaaaatcaagacaaacgtaaatagatggagagagagataccacgtcagtcgattgaaagattcagtattggtggtggaacacat

SEQ ID NO: 235753 - DNA, 120 bp, Artificial Sequence
  ENSG00000120071_98 (sequence is synthesized)
ggaagttgtccccaaattgatctgtagagtcagtgtaataccacaagtttgttgttgttttttgcagaagcttaaaaggcaaaaaccagaccacctacaagtaagaaagaatccgattcc

SEQ ID NO: 235754 - DNA, 120 bp, Artificial Sequence
  ENSG00000120071_99 (sequence is synthesized)
ctcttaaatatagcactggatattagaatacacggaagaattgaatagctttaaatgtttgagaggaaaatggtttaaatctagaaattccttttctaaaggaattgctcaaggatatat

SEQ ID NO: 235755 - DNA, 120 bp, Artificial Sequence
  ENSG00000120071_100 (sequence is synthesized)
tcttgggaaaaatctaagaaaatggaaagataagaaacagcataaaaaattcagtccaaaagatgttgatttgtgatattgaacattaaccagtcagctaaaaatccccgataatctcat

SEQ ID NO: 235756 - DNA, 120 bp, Artificial Sequence
  ENSG00000120071_101 (sequence is synthesized)
gatgggaattggcggagccacagaggaaggaaagagagaatggtatgtagttcttatttggagagagtatgtagtactcagtacagtgcctgataacatagataatgaatattgttgaat

SEQ ID NO: 235757 - DNA, 120 bp, Artificial Sequence
  ENSG00000120071_102 (sequence is synthesized)
aattgcatcctgattaactttatattgatagaaaagaagtaggcttaaatatgtttttaaatctctagaatagaaacaggatgttttcaaaccagtaaattcaacaaacaaggatacaag

SEQ ID NO: 235758 - DNA, 120 bp, Artificial Sequence
  ENSG00000120071_103 (sequence is synthesized)
aacaaaaactccatcaaccaaaccaaaaaggtgtcttgttttgtttccctttgggacttgaaagtaaaaagctaaagtgacctgcttgcaaatagaagaatgaccttcagtaatgttcac

SEQ ID NO: 235759 - DNA, 120 bp, Artificial Sequence
  ENSG00000120071_104 (sequence is synthesized)
gtaaacagatcttccatatgacagcacttgccctgccaagtgtcaggccactgggcaaattaaaggaggatggagtgtaggtcttgaacactagagaggccaggtgtttggactaacctg

SEQ ID NO: 235760 - DNA, 120 bp, Artificial Sequence
  ENSG00000120071_105 (sequence is synthesized)
gtgccgacggccttaccctctttactacacagtgcaaacagttcctcgctcacgtcctctcgctccgcggcgccggcccgccctgcccctcaactggcgagccgcaccgccggccccagc

SEQ ID NO: 235761 - DNA, 120 bp, Artificial Sequence
  ENSG00000120071_106 (sequence is synthesized)
cggccgcgggcgcccctgccctgagcccaccccgcgctctgccctccctaacaatgggaatggggcagaaggaggcgccccactgcggggaggtgaggggtgggtttgggactggggtcc

SEQ ID NO: 235762 - DNA, 120 bp, Artificial Sequence
  ENSG00000120071_107 (sequence is synthesized)
aggtacccacccctatgaaatttacgcatgagcccttgaaggaagagggtgaccagtgggacttatgaatgggactaactcctcatgaccacctggtatttctccgtgaggttttttgct

SEQ ID NO: 235763 - DNA, 120 bp, Artificial Sequence
  ENSG00000120071_108 (sequence is synthesized)
agtatctgatgtttttaaatgctgccgaaaactatcaatatcgcttttctcacatcccctcccacctcgtaacccccataaccctcttcttaactattgcaaagtaaatggtttaatgac

SEQ ID NO: 235764 - DNA, 120 bp, Artificial Sequence
  ENSG00000120071_109 (sequence is synthesized)
tcttcttaactattgcaaagtaaatggtttaatgacctgatatagtggtttaatttaagaacctgatgtggctgcgcgtggtggctcactcttgtgatcccagcactttgggaggccaag

SEQ ID NO: 235765 - DNA, 86 bp, Artificial Sequence
  ENSG00000120071_110 (sequence is synthesized)
gcctgggcaacatagtgagaccttgtctttacaaaaattacaaaaattagttgagcatgatagcattgggagtatcgcttgagccc

SEQ ID NO: 235766 - DNA, 120 bp, Artificial Sequence
  ENSG00000120071_111 (sequence is synthesized)
aagattgtgccaccacactccagcctggacaactaagaaaggcctgtctcataaaaaggaaaacactattagaatataatgtttaactgaacgtgtatttagaacaaaactgtgtgggta

SEQ ID NO: 235767 - DNA, 120 bp, Artificial Sequence
  ENSG00000120071_112 (sequence is synthesized)
atttagaacaaaactgtgtgggtatctgagctaacaggaaacaaggaaaacagactgaataatgcaagcaagccattgatgttaactgtcatatttgttagatttatatttgttagttcc

SEQ ID NO: 235768 - DNA, 120 bp, Artificial Sequence
  ENSG00000120071_113 (sequence is synthesized)
ctgttataaaactgccacatttcatagaacttaagatgctactgatggtaagatgtaccattattttaagtgcttactgtgtctcagcagtgttctcaaaaatcctaccttcatgaagct

SEQ ID NO: 235769 - DNA, 120 bp, Artificial Sequence
  ENSG00000120071_114 (sequence is synthesized)
tacattcttgcaaagtattttttatattagcttggtgtggctgagctctatctttatgtagacccatgtctagaaaaagtctattgctactaaaaataagggtcaaaatgcctttttgac

SEQ ID NO: 235770 - DNA, 120 bp, Artificial Sequence
  ENSG00000120071_115 (sequence is synthesized)
cttagtactagtcaaagccttaagaaaatggctttcctgtgaacagtatccattaaattagtaggccaaaagttgaaggttgatcaactgataaaatgaacagaatgatcagggtttgaa

SEQ ID NO: 235771 - DNA, 120 bp, Artificial Sequence
  ENSG00000120071_116 (sequence is synthesized)
gtgaaagttctgtgggctatctaatcatttaaacttttattctaaaaatgtcactgcggacttatagcttctttccagattggagatacatatatatatatatattccccctccccctaa

SEQ ID NO: 235772 - DNA, 120 bp, Artificial Sequence
  ENSG00000120071_117 (sequence is synthesized)
aagttcaatagagcatactttaattgaggacacagtccagagggctcacttttttattcttactagtttgttcccttagggtagcatacaaattaaatcctgatttacttatttaaaaat

SEQ ID NO: 235773 - DNA, 120 bp, Artificial Sequence
  ENSG00000120071_118 (sequence is synthesized)
tagctggaacaaaactaataaacattctagatttggtgcatattttgctttcccaagtcttcacaaaggaaattttaaagtgagatttgtagaacttgaactggaatgatgactaagaat

SEQ ID NO: 235774 - DNA, 120 bp, Artificial Sequence
  ENSG00000120071_119 (sequence is synthesized)
aactaggaggtgactggatatgcctgtactgaggagaaaaacacagtctttctctatcagagacacctcttcagtgtctgtttctaggtttttatagccagtagttaagtgggattttct

SEQ ID NO: 235775 - DNA, 120 bp, Artificial Sequence
  ENSG00000120071_120 (sequence is synthesized)
atatttgagaactagagtctcttagtaacaactgagattagtataatagtagtcataagtgctgcttcatctttttatatacattcataaatatatatgtgggtttatatatgtgtatat

SEQ ID NO: 235776 - DNA, 120 bp, Artificial Sequence
  ENSG00000120071_121 (sequence is synthesized)
gttatatcatcttagttccttgttataaaactgctacatttcatagaacttaagatgctattgattgtaagatgtaccattgttttaagtacgacaaagaaattatttcagttaaaccag

SEQ ID NO: 235777 - DNA, 120 bp, Artificial Sequence
  ENSG00000120071_122 (sequence is synthesized)
ggatagggtattaactatctgggcagcagcagctagtagacttcttcctccatccaagagactaagccatttagttccctagtctcccagctactgtagatgcttacctctgcctctgat

SEQ ID NO: 235778 - DNA, 120 bp, Artificial Sequence
  ENSG00000120071_123 (sequence is synthesized)
attcgatccttggaagtcttatttttccaagagtttggtcttctcaactatttcctatagaagcaaatttcctttcaccaggaatgtgaggtatagtcaggttctcctctttagtttccc

SEQ ID NO: 235779 - DNA, 120 bp, Artificial Sequence
  ENSG00000120071_124 (sequence is synthesized)
tccattcatctcctttgatacagctagaaagctctcagctctttccccaagaatcatcaaaagaggggaaatcacataaagactgggcagatggtgggtgcagatttagctgaagagttc

SEQ ID NO: 235780 - DNA, 120 bp, Artificial Sequence
  ENSG00000120071_125 (sequence is synthesized)
ctcctaggtgggagcagctgctatggtcattactcagcttcaacccaaggacccagatgcttggttattgcagcagccagtaaggaggagaaggggagagagctcatttgatattaacaa

SEQ ID NO: 235781 - DNA, 120 bp, Artificial Sequence
  ENSG00000120071_126 (sequence is synthesized)
aaccacagcaaaatgagattgcgagaccattcatctgagagaagtgaaggtagggccaggcccatggcacctctacctgcaactgcacctgctcagggctttctggggcagcctaggctt

SEQ ID NO: 235782 - DNA, 120 bp, Artificial Sequence
  ENSG00000120071_127 (sequence is synthesized)
ctcttaattacccccagctttgtccttcactttctaggaaagcagagtagagggacgctactgcttctaaatggaggtcacttcttaactgctacagcaacctctgccctgcccctactt

SEQ ID NO: 235783 - DNA, 120 bp, Artificial Sequence
  ENSG00000120071_128 (sequence is synthesized)
cccacagctagtgtgcttcacctttttatcctctaggcatagaaaacatttttgcctttagtatgtattgctgccattccaagcttgtgttagaagtaacgctggttaagatagccatgt

SEQ ID NO: 235784 - DNA, 120 bp, Artificial Sequence
  ENSG00000120071_129 (sequence is synthesized)
gaatctccctaacctcctgaattcactaggcactttgctatggactcacctggcattgttcagccatgcttttttcttgggatggtaaatgttgtatacctacccctccagagaatagtg

SEQ ID NO: 235785 - DNA, 120 bp, Artificial Sequence
  ENSG00000120071_130 (sequence is synthesized)
ggaagaaatgggagttgctggatcctaaggaaaatctgttggtgtttgtttgcctcaactcctccagtggggatgcttttttcatgccctctacccccataagtaaacatttcccaggca

SEQ ID NO: 235786 - DNA, 120 bp, Artificial Sequence
  ENSG00000120071_131 (sequence is synthesized)
ctagccatcccctcccccttttgaagggacaaagggctgcacttaaattgatctcctcaacgttcagtggaactgtattgatcactgctaaatgatcaatacagttgtctgggtataccc

SEQ ID NO: 235787 - DNA, 120 bp, Artificial Sequence
  ENSG00000120071_132 (sequence is synthesized)
aggctgaaaaagatgaatatgtgggaagaattggtgtttccttgactgtattaaaaggtatctccatacagccaagaataaagaaagaaagggatagatggaatgagtttcatcgtgatt

SEQ ID NO: 235788 - DNA, 120 bp, Artificial Sequence
  ENSG00000120071_133 (sequence is synthesized)
attgtcatcccaatgtctgttgctgcaacaactcgcgtagagaaactgcaatacaaggaaatccttacgcccaggttttgcagctggcgggaggttgatcttcagtctctgaaggggagt

SEQ ID NO: 235789 - DNA, 120 bp, Artificial Sequence
  ENSG00000120071_134 (sequence is synthesized)
ccagtaagtgtcagggagccgggaagtcccccagagtatcagtgacttttcattccttttatattctcaaatttgtagtttgcatgcatgttggggttgggagaggcagttgaccgataa

SEQ ID NO: 235790 - DNA, 120 bp, Artificial Sequence
  ENSG00000120071_135 (sequence is synthesized)
aaaattcagctcacagtgactgcttctgcttgtcttggatgctctcagatggacttcgggagctattctagacaccatggatcttggagcaagacccaaaatgctcagtgaacagccagc

SEQ ID NO: 235791 - DNA, 120 bp, Artificial Sequence
  ENSG00000120071_136 (sequence is synthesized)
aatggcatggcattgagttcatctacgggcaggtgtcttctgtatcctggtgacatgtttctctggttctgggctccctgtgcctatcctagccattgtgcaaattactagaaacttcag

SEQ ID NO: 235792 - DNA, 120 bp, Artificial Sequence
  ENSG00000120071_137 (sequence is synthesized)
tcctgaaggactgtcctgctgccctgggtatacggcgttggcctagagagaactcgagagcttggaactcgaataagaaaatatttgagaggacatatttcacagctctttttctgttcc

SEQ ID NO: 235793 - DNA, 120 bp, Artificial Sequence
  ENSG00000120071_138 (sequence is synthesized)
tggggttggccggacaccccctctgcaggtcacagctcactcaagtggctccagaggacagtgtgagggtgggttataaagcccagggcatttataggatctcagctcatcatgacatat

SEQ ID NO: 235794 - DNA, 120 bp, Artificial Sequence
  ENSG00000120071_139 (sequence is synthesized)
gtatgtatgtctgtaccatttttaagtcaaagtcatggtacttgaccttctgttgtttttcttgagttgtttttcatagcagagatggatttatgctgagccatccatagaaagcttgat

SEQ ID NO: 235795 - DNA, 120 bp, Artificial Sequence
  ENSG00000120071_140 (sequence is synthesized)
gcagggacaaactcttaaggtgatctgtgactattcaagatctgttggactaagtttcacacaggactcaacagttccgtggccctaatcctgttggcccaagaagtgaacaagagagga

SEQ ID NO: 235796 - DNA, 120 bp, Artificial Sequence
  ENSG00000120071_141 (sequence is synthesized)
ggggtgggtagaggggagattcccatgggcgttggaagcagtgtttgatttccttggttttactctctgggtgagtggaggtgaagtactaagaataaacactaggcgtgagggtaccag

SEQ ID NO: 235797 - DNA, 120 bp, Artificial Sequence
  ENSG00000120071_142 (sequence is synthesized)
aagagaagggaagggagaaggcagagtccatgctttttaggtatacagagcagaattacagatccagcaggcccccatggcaggacatttggcatgcacacaccagattttacgatacca

SEQ ID NO: 235798 - DNA, 120 bp, Artificial Sequence
  ENSG00000120071_143 (sequence is synthesized)
cactccatctggaagcagtttgcacagctattccagacacatttcctttaatttcattctaatattttaattcctcaagtgtgccctcttggaacatacatacctgtagctgctatggac

SEQ ID NO: 235799 - DNA, 120 bp, Artificial Sequence
  ENSG00000120071_144 (sequence is synthesized)
ctactcaaagggtcctttttgtataataattacaatgtaatgtaatggtaaatgtaaaagtctgcaactgtaatgtttattgaacacttactacataccagtgatcagtgatttacatgt

SEQ ID NO: 235800 - DNA, 120 bp, Artificial Sequence
  ENSG00000120071_145 (sequence is synthesized)
gttacatgttataatgccttttgagatgtaggttggtactgtggatttcattttatatgcatgaaaactgtcaaggcaacttgtgagggttataattatgattcaaactcaggcagcctg

SEQ ID NO: 235801 - DNA, 120 bp, Artificial Sequence
  ENSG00000120071_146 (sequence is synthesized)
actgtagagccagctcttttaccattacactacacaggctaagcctgggtgagggtattgcagaggcaacttaggaagttccttcagagcctagatcaggaaacttccaagctcataaaa

SEQ ID NO: 235802 - DNA, 120 bp, Artificial Sequence
  ENSG00000120071_147 (sequence is synthesized)
tggactcactaggctcctgtgatcaggtaggaattcacattgttctctctttgctgttacaaatcaatcttttccaaatggtctctttgctcttcgactttctttacccccgtaacccac

SEQ ID NO: 235803 - DNA, 120 bp, Artificial Sequence
  ENSG00000120071_148 (sequence is synthesized)
gatagagaaagaaattgaagtgaaaagggcattgtggtcatctgaagttataaatgacagtgactgaaactctggcccaggaagtgctgacttttaacattctctgagaatgtcctaaga

SEQ ID NO: 235804 - DNA, 120 bp, Artificial Sequence
  ENSG00000120071_149 (sequence is synthesized)
tgataggatgaataaagggtatctcaccgtccaggaacagaggatagaggggttagttataggggacttcttactcctccaaccccttccctgtggactgaccacacttggtggtttagg

SEQ ID NO: 235805 - DNA, 120 bp, Artificial Sequence
  ENSG00000120071_150 (sequence is synthesized)
gcattgcttttaggggaggggccactatgagtcttaagtcataaacggggataaaggaaggaaataaagattgtaaaaggagaggaggttaatagaggtgtatatagagtaggaacccca

SEQ ID NO: 235806 - DNA, 120 bp, Artificial Sequence
  ENSG00000120071_151 (sequence is synthesized)
aggtgtctaggttctgtttgttttttccctgatgttgggtagatgagtgcatatacatgctagtgaagaaggggaagatacttttgctgtagggttgtattgttgtagtctaaatggtgg

SEQ ID NO: 235807 - DNA, 120 bp, Artificial Sequence
  ENSG00000120071_152 (sequence is synthesized)
taatttccttttgaagtctaagaaaaataactaggagacatcttatgtgtaaaattgtactagtacctctttaagagtgaatttagatttcttttgaaactatatataggacatgataag

SEQ ID NO: 235808 - DNA, 120 bp, Artificial Sequence
  ENSG00000120071_153 (sequence is synthesized)
ttaatggcctgattgttgagattttgttgtttccagtaagcagggacaaatgctgagttgacctagttacctttgtaggaaattacagttgcttttgattgaactttcagcagagagcac

SEQ ID NO: 235809 - DNA, 120 bp, Artificial Sequence
  ENSG00000120071_154 (sequence is synthesized)
acccagtcttcaattttaacacttgagattttcttacattttaaggactgacaattagaaaatgcttcagaatatttaatacatcgcctccaagcacagtctagtttcacaacctgactc

SEQ ID NO: 235810 - DNA, 120 bp, Artificial Sequence
  ENSG00000120071_155 (sequence is synthesized)
tcctcctcctcctgctgccctttctccttctcctcgctctccctgtggctcccatttctctctctctttgttagttgtaactagaaaggcagggcagggtagaaaaatcccccggaactt

SEQ ID NO: 235811 - DNA, 120 bp, Artificial Sequence
  ENSG00000120071_156 (sequence is synthesized)
taaatggcctctccgggcttccctgctgcgggtccgggctgggagtcgccccaagggcgggggtgtgcgggggcccttccccaggagctgccgcctcgttcgccagcttttcctttggcg

SEQ ID NO: 235812 - DNA, 120 bp, Artificial Sequence
  ENSG00000120071_157 (sequence is synthesized)
ttctatttaaaaaggcggcctgaagaacatgatttattcccgtaaaagaaccccccaaacaaactctggctctcgccttgaacttctcttgactgcaaaaggcctttctctgctcgaaac

SEQ ID NO: 235813 - DNA, 120 bp, Artificial Sequence
  ENSG00000120071_158 (sequence is synthesized)
tattgtctttatatcctgacactatgaatgctacttggatgcctcttaaggtaagatgtgttattttttcattaccagcctcattttattcatttttctttagaattgggaatattgtag

SEQ ID NO: 235814 - DNA, 120 bp, Artificial Sequence
  ENSG00000120071_159 (sequence is synthesized)
tttttgaatttgctattcttcacttcctttacctgccatttctcttgcctcttgtgtttgcttcctaggattgattggctatattttactttgtatctctactgttctttgattatcggt

SEQ ID NO: 235815 - DNA, 120 bp, Artificial Sequence
  ENSG00000120071_160 (sequence is synthesized)
gtgaatgttttaatgaagttctcaaattaacttccattataatgaaaggcagtgatctttttaactttaaattatggcaacttacatagttgtaaaattatgttccggtcttaggatggg

SEQ ID NO: 235816 - DNA, 120 bp, Artificial Sequence
  ENSG00000120071_161 (sequence is synthesized)
ttggcaattcaaacatctaggtccacttttcaaacaggtactttagagtcataggtactagggtgtgtcccactcttgcaaatcagtagctgattcatgtgttacaaaagatgtgtcatt

SEQ ID NO: 235817 - DNA, 120 bp, Artificial Sequence
  ENSG00000120071_162 (sequence is synthesized)
aaccatttgtttactctgaaacttcatatagtatattagggcattctaagacctgctggtttacacgtatgactctttcagagtcctcctgctgcaccccagtcctttgtgtgacatttc

SEQ ID NO: 235818 - DNA, 120 bp, Artificial Sequence
  ENSG00000120071_163 (sequence is synthesized)
atactatttttctcagcaggtagcacttacaccaagttttatttcacagggtaaacctcatttggacagtgtggacagatgacctttagatgaaaaagctcccattgatgtggttctcca

SEQ ID NO: 235819 - DNA, 120 bp, Artificial Sequence
  ENSG00000120071_164 (sequence is synthesized)
gtctctttggctcctctaatctcttgtacatagatggccaaagaactctccattaggactaagcaaagggcagagcttaagacttaagtaggtggcttctttgattttcttgtgactaaa

SEQ ID NO: 235820 - DNA, 120 bp, Artificial Sequence
  ENSG00000120071_165 (sequence is synthesized)
aatacattaaaaaaaaaattaaataaaaacaaacagaaaagacgtaaggaggggatgggaggaaggacagagaaggataaggagtcttggaaaccctccaccagcttcgcctttcttcag

SEQ ID NO: 235821 - DNA, 120 bp, Artificial Sequence
  ENSG00000120071_166 (sequence is synthesized)
agtaggatactagcttagttaagattgttgggtgctaatctgctctgtggacttccagattgatgcagaggagaaatcagacaatagtgcagtgtgtgtaacctaaatatctggacttgt

SEQ ID NO: 235822 - DNA, 120 bp, Artificial Sequence
  ENSG00000120071_167 (sequence is synthesized)
gggaaatcttaggtcatgtaggctgagttctcatcttcatttatgtttcagctgctattgctggataagagtgcttatattaatatacaggaagccaaagtgacacagtttttccagcat

SEQ ID NO: 235823 - DNA, 120 bp, Artificial Sequence
  ENSG00000120071_168 (sequence is synthesized)
ggaggggttgcatggggaatgcaaccagaagttctgaacccgttaagaatcagaggacctgtgtaagagtgtttcgacttagcaagtgttgagcaccagtgttggtggcctctgtcctct

SEQ ID NO: 235824 - DNA, 120 bp, Artificial Sequence
  ENSG00000120071_169 (sequence is synthesized)
ttaggaagcaggcaaggggattgagatcaatacattggatttcattttatagtttcctaggttttaacgaatgtatttggtacacaaagccctacttttaaagatatttccagtgtttaa

SEQ ID NO: 235825 - DNA, 120 bp, Artificial Sequence
  ENSG00000120071_170 (sequence is synthesized)
ggttttacctctaaatctctctgaacctgggttgtaatacagtaacctcagaagttctactagaggtctctggcatggcaggaatagagaaaggaaatcagctccatatcgtgagttacc

SEQ ID NO: 235826 - DNA, 120 bp, Artificial Sequence
  ENSG00000120071_171 (sequence is synthesized)
acctgttactacttaagaatgcagttaggtggttgccttaatattatgttccttaccaatcctttgctcagtgggaaacatcttctaagtgtaaaccaattttggggggtaatgttttct

SEQ ID NO: 235827 - DNA, 120 bp, Artificial Sequence
  ENSG00000120071_172 (sequence is synthesized)
tcctatttttattacttagaaaccttaaaaattacagtgttcgtctggtcagaaaaaaaggtcctttttgcggggaggatagcattgagtttgtgggctggaaaataaaagtggggagag

SEQ ID NO: 235828 - DNA, 120 bp, Artificial Sequence
  ENSG00000120071_173 (sequence is synthesized)
ggaactttattctctttttcattggtgaatatccttaaaacatttctaagatgtagtttcagattggagctacttaatttaagtaaaaagaaatgataggttaattaaagtgcatatttt

SEQ ID NO: 235829 - DNA, 120 bp, Artificial Sequence
  ENSG00000120071_174 (sequence is synthesized)
ggagcccaaatgtttattttatatagatcttatattttgtttccaattatcttattgtagaatgaactctgtcgttctgtcaggcattgcgtaaatgttagactgagtatgtgcttgttt

SEQ ID NO: 235830 - DNA, 120 bp, Artificial Sequence
  ENSG00000120071_175 (sequence is synthesized)
ccatgcgtatagaaaatagcgtcacactcactcagtcttcacaaatgaaaatgccagaggaggcaagtaacaaggaagaataactccaagccaaaactcctcaatttaaggcactctcgt

SEQ ID NO: 235831 - DNA, 120 bp, Artificial Sequence
  ENSG00000120071_176 (sequence is synthesized)
taattagaagttctcatggaaattattatttatccctttttctctgtgttaggggtctgtacctttttaaagcctgaatatttctagccacgactaagcaatgtcagtgatgttactagg

SEQ ID NO: 235832 - DNA, 120 bp, Artificial Sequence
  ENSG00000120071_177 (sequence is synthesized)
gtctagttgtcagggttagggctaaggagtgggtgagatgggagaggaatagggaaaggaaggagaattgagtgagtcggagaaaagagtgaaatgaagatgaggaggagagaaaagata

SEQ ID NO: 235833 - DNA, 120 bp, Artificial Sequence
  ENSG00000120071_178 (sequence is synthesized)
cagggtctttagtgtgtagcatggagccatcatcagttgtttcaggtagttcttagggctgctggatgccttgtgtgctagactgaactatggtgaaatgaagtaaaaactgttcttgac

SEQ ID NO: 235834 - DNA, 61 bp, Artificial Sequence
  ENSG00000120071_179 (sequence is synthesized)
atctccatacagccaagaataaagaaagaaagggatagatggaatgagtttcatcgtgatt

SEQ ID NO: 235835 - DNA, 120 bp, Artificial Sequence
  ENSG00000120071_180 (sequence is synthesized)
tcttgacctcaagtgatcctccttgccttggcctcccagaagcactggcttgactcttacgttgttttttaaaatctcctcttctgactactctttgagattacacagctgtagctgagg

SEQ ID NO: 235836 - DNA, 120 bp, Artificial Sequence
  ENSG00000120071_181 (sequence is synthesized)
atggaaatgttattgaggatgggaggtggaagagcattgaaacttttgaatagggaaggagttgaatgggaactgcagaagcttataacacctttctcttcaaaattttcataaagctgt

SEQ ID NO: 235837 - DNA, 120 bp, Artificial Sequence
  ENSG00000120071_182 (sequence is synthesized)
gttaatttagacctaatgagtagctaacataatagggggtgtgtctaggcagaggatgagataagagcccgttgaaccatcccacaacctgctccagtatctttttctcgaaggtactaa

SEQ ID NO: 235838 - DNA, 120 bp, Artificial Sequence
  ENSG00000120071_183 (sequence is synthesized)
caacaagcccaagaagtttcagggaaagtgtatacctgtttctgccagcagtttcacatttattcttgaccaagatactgggaaggctgtctctcttgaggctttcttaagatgcatttc

SEQ ID NO: 235839 - DNA, 120 bp, Artificial Sequence
  ENSG00000120071_184 (sequence is synthesized)
ttgtagtgggatgtataatttcagcacagatctggcagtggcagaggtctctgggtatgagatcactaatcctcagctacagaactcaggcaagatccccaaaagtctgtttaaccattt

SEQ ID NO: 235840 - DNA, 120 bp, Artificial Sequence
  ENSG00000120071_185 (sequence is synthesized)
taggtgggagcagctgctatggtcattactcagcttcaacccaaggacccagatgcttggttattggtgatcctgctttaactcttagatgaatgatttgatgtctgtaaaattgtacct

SEQ ID NO: 235841 - DNA, 120 bp, Artificial Sequence
  ENSG00000120071_186 (sequence is synthesized)
tgattgggagcggttgttgagaagaatcatgtaactatgtaaaaagcatgtctgtttggtacactatttgctaatgtcagaagtgttaaatagaaataaaatttccaccatagtagctaa

SEQ ID NO: 235842 - DNA, 120 bp, Artificial Sequence
  ENSG00000120075_0 (sequence is synthesized)
cattgaatcggccctaacgattctcggatcgtcattatttgtaaccatagagcatgaattacctcttgaggtcatcagcgagaatttacgactggtcaacaaaagcacgtgattccctaa

SEQ ID NO: 235843 - DNA, 120 bp, Artificial Sequence
  ENSG00000120075_1 (sequence is synthesized)
cgccccccaccccccttccaaccccccccccatatttggccgcatacatagcaaaacgaagtacagtgcatcgctataattcattaatacatcataaatcgtgaagcacagggttataac

SEQ ID NO: 235844 - DNA, 120 bp, Artificial Sequence
  ENSG00000120075_2 (sequence is synthesized)
gaccacgatccacaaatcaagccctccaaaatcacccaaatgagctcgtactttgtaaactccttctcggggcgttatccaaatggcccggactatcagttgctaaattatggcagtggc

SEQ ID NO: 235845 - DNA, 120 bp, Artificial Sequence
  ENSG00000120075_3 (sequence is synthesized)
agctctctgagcggctcttacagggatcccgctgccatgcacaccggctcttacggctacaattacaatgggatggacctcagcgtcaaccgctcctcggcctcctccagccactttggg

SEQ ID NO: 235846 - DNA, 120 bp, Artificial Sequence
  ENSG00000120075_4 (sequence is synthesized)
gcggtgggcgagagctcgcgcgccttccccgcgcccgcccaggagccccgcttcaggcaagcggcttcgagctgctccctgtcctcgcccgagtccctgccctgcaccaacggcgacagc

SEQ ID NO: 235847 - DNA, 120 bp, Artificial Sequence
  ENSG00000120075_5 (sequence is synthesized)
cacggcgccaagccctctgcttcgtccccctccgaccaggcgacctcagccagctccagcgccaatttcaccgaaatagacgaggccagcgcgtcctcggagcctgaggaagcggcaagc

SEQ ID NO: 235848 - DNA, 120 bp, Artificial Sequence
  ENSG00000120075_6 (sequence is synthesized)
cagctaagcagccccagcctagctcgggcgcagccagagcccatggccacctccacagccgcgcccgaggggcagactccgcaaatattcccctggatgaggaagcttcacatcagccat

SEQ ID NO: 235849 - DNA, 120 bp, Artificial Sequence
  ENSG00000120075_7 (sequence is synthesized)
gatatgaccgggccggacgggaaaagggcccggaccgcgtatacccgctaccagaccctggagctggaaaaggagttccacttcaaccgctacctgacccggcgacggcgcatcgagatc

SEQ ID NO: 235850 - DNA, 120 bp, Artificial Sequence
  ENSG00000120075_8 (sequence is synthesized)
cccacgcactctgcctgtccgagcgccagatcaagatctggttccagaaccggcgcatgaagtggaagaaggacaacaaattgaaaagtatgagcctggctacagctggcagcgccttcc

SEQ ID NO: 235851 - DNA, 120 bp, Artificial Sequence
  ENSG00000120075_9 (sequence is synthesized)
agccctgagcccgcccagaggagcccagcggcccaagagcccgtgccacccccagccctggcccctccaatcctccccgctctgccgccgcccgctggggaccggttcccacaagcctgc

SEQ ID NO: 235852 - DNA, 120 bp, Artificial Sequence
  ENSG00000120075_10 (sequence is synthesized)
ctcgccttgtgttacgatatttcgtttggtcttaggtcttcctgtggctccctctctcctggactggttatcttgttattattgttaataataattattattattattttccttccatgc

SEQ ID NO: 235853 - DNA, 120 bp, Artificial Sequence
  ENSG00000120075_11 (sequence is synthesized)
tcccaactcccttctgcttgtcccaaatccgccagtgtttctgaatgtttgtgtctgtggttgcagtctttcccccaggaaaaaaaaaaaaagaaattcgcatgtttaatgtgaactctc

SEQ ID NO: 235854 - DNA, 120 bp, Artificial Sequence
  ENSG00000120075_12 (sequence is synthesized)
ccctccccatctgtgttctaacttatttataaaaagatgatcgctgtattttgagtttcagctggaaacttctgtaaggggcagcagttgaggtggggtagtgccgcagtggggtcaagc

SEQ ID NO: 235855 - DNA, 120 bp, Artificial Sequence
  ENSG00000120075_13 (sequence is synthesized)
tgagctggcttcggagatggagtcccttttcattctcctcctcctccctcctcactccctaggcccaagtctcctaggggcttggtcctagggtgggaaggggctagggaggaccaaagg

SEQ ID NO: 235856 - DNA, 120 bp, Artificial Sequence
  ENSG00000120075_14 (sequence is synthesized)
gatggtattgagaagagagaaagaagatagtgagatttaagttcctgctgcctgggtaggccccacaaggcctggtctgggagtatacggaaacaaaaatgatcctcagtgcaaaatgtc

SEQ ID NO: 235857 - DNA, 120 bp, Artificial Sequence
  ENSG00000120075_15 (sequence is synthesized)
ttgtgtatttctctgtgaatccatgggtctggctagagggcccaaagcttgtaaatatggggatagtctgggtcagacccatctctcccttacccatcttgcttccaagaccatttgtag

SEQ ID NO: 235858 - DNA, 120 bp, Artificial Sequence
  ENSG00000120075_16 (sequence is synthesized)
tgagcgagtggatgctgtgctacgtgtgaaatctgtctttgcggggcctgtctcagtgattcgcttttggtatttgtttgtagctttcctggaagtcaaataaatgtttcccccactcca

SEQ ID NO: 235859 - DNA, 80 bp, Artificial Sequence
  ENSG00000120088_0 (sequence is synthesized)
gggccgcggggccgggaagcgccgagccgggcatctcctcaccaggcagcgaccgaggagcccggccgcccaccccgtgc

SEQ ID NO: 235860 - DNA, 120 bp, Artificial Sequence
  ENSG00000120088_1 (sequence is synthesized)
cccggccgcccaccccgtgccgcccgagcccgcagccgcccgccggtccctctgggatgtccgtaggacccgggcattcaggacggtagccgagcgagcccgaggatgggagggcacccg

SEQ ID NO: 235861 - DNA, 120 bp, Artificial Sequence
  ENSG00000120088_2 (sequence is synthesized)
cagctccgtctcgtcaaggcccttctccttctggggctgaaccccgtctctgcctccctccaggaccagcactgcgagagcctgtccctggccagcaacatctcaggactgcagtgcaac

SEQ ID NO: 235862 - DNA, 120 bp, Artificial Sequence
  ENSG00000120088_3 (sequence is synthesized)
gcatccgtggacctcattggcacctgctggccccgcagccctgcggggcagctagtggttcggccctgccctgcctttttctatggtgtccgctacaataccacaaacaatggctaccgg

SEQ ID NO: 235863 - DNA, 120 bp, Artificial Sequence
  ENSG00000120088_4 (sequence is synthesized)
gagtgcctggccaatggcagctgggccgcccgcgtgaattactccgagtgccaggagatcctcaatgaggagaaaaaaagcaaggtgcactaccatgtcgcagtcatcatcaactacctg

SEQ ID NO: 235864 - DNA, 120 bp, Artificial Sequence
  ENSG00000120088_5 (sequence is synthesized)
ggccactgtatctccctggtggccctcctggtggcctttgtcctctttctgcggctcaggagcatccggtgcctgcgaaacatcatccactggaacctcatctccgccttcatcctgcgc

SEQ ID NO: 235865 - DNA, 120 bp, Artificial Sequence
  ENSG00000120088_6 (sequence is synthesized)
aacgccacctggttcgtggtccagctaaccatgagccccgaggtccaccagagcaacgtgggctggtgcaggttggtgacagccgcctacaactacttccatgtgaccaacttcttctgg

SEQ ID NO: 235866 - DNA, 120 bp, Artificial Sequence
  ENSG00000120088_7 (sequence is synthesized)
atgttcggcgagggctgctacctgcacacagccatcgtgctcacctactccactgaccggctgcgcaaatggatgttcatctgcattggctggggtgtgcccttccccatcattgtggcc

SEQ ID NO: 235867 - DNA, 120 bp, Artificial Sequence
  ENSG00000120088_8 (sequence is synthesized)
tgggccattgggaagctgtactacgacaatgagaagtgctggtttggcaaaaggcctggggtgtacaccgactacatctaccagggccccatgatcctggtcctgctgatcaatttcatc

SEQ ID NO: 235868 - DNA, 120 bp, Artificial Sequence
  ENSG00000120088_9 (sequence is synthesized)
ttccttttcaacatcgtccgcatcctcatgaccaagctccgggcatccaccacgtctgagaccattcagtacaggaaggctgtgaaagccactctggtgctgctgcccctcctgggcatc

SEQ ID NO: 235869 - DNA, 120 bp, Artificial Sequence
  ENSG00000120088_10 (sequence is synthesized)
ttcgtcaatcccggggaggatgaggtctcccgggtcgtcttcatctacttcaactccttcctggaatccttccagggcttctttgtgtctgtgttctactgtttcctcaatagtgaggtc

SEQ ID NO: 235870 - DNA, 120 bp, Artificial Sequence
  ENSG00000120088_11 (sequence is synthesized)
cgttctgccatccggaagaggtggcaccggtggcaggacaagcactcgatccgtgcccgagtggcccgtgccatgtccatccccacctccccaacccgtgtcagctttcacagcatcaag

SEQ ID NO: 235871 - DNA, 120 bp, Artificial Sequence
  ENSG00000120088_12 (sequence is synthesized)
cagtccacagcagtctgagctggcaggtcatggagcagcccccaaagagctgtggctggggggatgacggccaggctccctgaccaccctgcctgtggaggtgacctgttaggtctcatg

SEQ ID NO: 235872 - DNA, 120 bp, Artificial Sequence
  ENSG00000120088_13 (sequence is synthesized)
cccactcccccaggagcagctggcactgacagcctgggggggccgctctccccctgcagccgtgcaggactctagctcatgagtggaaagtcacctacaggactgggccgggcccagggc

SEQ ID NO: 235873 - DNA, 120 bp, Artificial Sequence
  ENSG00000120088_14 (sequence is synthesized)
ctctggcttccctgcccaatcctccctggagaagggacatgggaatgaattgaaatggggcgctggacacctacagcagcacgcatgtccctccaaggctgtcttctcccagagcacaag

SEQ ID NO: 235874 - DNA, 120 bp, Artificial Sequence
  ENSG00000120088_15 (sequence is synthesized)
aaggccagcccactgggccctggggctgccctcggcaaccgtggggaggccatttgctgccctggggcatcatgggcaactcgtgacagcctctgactcaccacgatgacgcctctggac

SEQ ID NO: 235875 - DNA, 120 bp, Artificial Sequence
  ENSG00000120088_16 (sequence is synthesized)
ctcggtgatgccttccgacaccactgggaaccaagggccctcactcaggaaccctggagacagaagtcaggtgtcatcatcagacttgcggccacagcactagagtcacccccccaggcc

SEQ ID NO: 235876 - DNA, 120 bp, Artificial Sequence
  ENSG00000120088_17 (sequence is synthesized)
tccagaaccttactggcactgtggcactgccaccagcaatgccctgccttgctgccttcaccctgaacatttagtaccctgcaggccaggccagcttcccctcacttaaccaccccatac

SEQ ID NO: 235877 - DNA, 120 bp, Artificial Sequence
  ENSG00000120088_18 (sequence is synthesized)
cagtcacctcctgctccttttcctcttttgtgagaagatgggggctggagggggcagagtggcctgtgagcaagagccaggggtgtcccagtcccagcctctggggcagagcttgtagcc

SEQ ID NO: 235878 - DNA, 120 bp, Artificial Sequence
  ENSG00000120088_19 (sequence is synthesized)
ctggatggcctctggggcaggaccactagctaagcaagccaggagaagacccctgcccaagtggctcttgggacaacgtgctgcttacactccaggtgtggaccggccgcagcccccact

SEQ ID NO: 235879 - DNA, 120 bp, Artificial Sequence
  ENSG00000120088_20 (sequence is synthesized)
gacctgcccatgtccagagggactggacagccagggcagggctttggggggcactagaagatgagggtgtcggctgtgaggcgggtggctggtataaataatatttatcttttcaaccag

SEQ ID NO: 235880 - DNA, 120 bp, Artificial Sequence
  ENSG00000120088_21 (sequence is synthesized)
tgaccaggcagatggagccctggaggtgggggctccatggagtggtgccccatttcaggttcgaaggagcatccggtgcctgcgaaacatcatccactggaacctcatctccgccttcat

SEQ ID NO: 235881 - DNA, 120 bp, Artificial Sequence
  ENSG00000120088_22 (sequence is synthesized)
cctcaggcacagcctgggagagcacaccgtggtgggacatgaaacggattctgggggtctggtttgtggaccaaggttcactgctcaccgtgtggggagagaaaaaaagcaaggtgcact

SEQ ID NO: 235882 - DNA, 120 bp, Artificial Sequence
  ENSG00000120088_23 (sequence is synthesized)
gtgctggtttggcaaaaggcctggggtgtacaccgactacatctaccagggccccatgatcctggtcctgctggaaggctgtgaaagccactctggtgctgctgcccctcctgggcatca

SEQ ID NO: 235883 - DNA, 120 bp, Artificial Sequence
  ENSG00000120088_24 (sequence is synthesized)
cgggctggggggcctgagggatggaggtcgggttggggcggtaaggtgtgcacgatagccctctgctcctcttgggggtgggcggcagtagaagcaccttgaaggaggtgtgtgagtttg

SEQ ID NO: 235884 - DNA, 120 bp, Artificial Sequence
  ENSG00000120088_25 (sequence is synthesized)
agatccaccctgagtaaccccagaccccctggagcctgggctgcactggggttctccaggcccacatcctccagcccccgctgagggctctgtgacagcccatctctcccccaggtgtgc

SEQ ID NO: 235885 - DNA, 120 bp, Artificial Sequence
  ENSG00000120088_26 (sequence is synthesized)
gcccgcctgccctgcagaggaggagcccacagaacaggagtgggatcccagggtatgccctgtcctgccctggggaggcccaggcccagggtttggtgcctcccctgccccccatcatca

SEQ ID NO: 235886 - DNA, 120 bp, Artificial Sequence
  ENSG00000120093_0 (sequence is synthesized)
ttttgcattcctccagcttgcagctccggtagttggaggctgggtagggcagggggaaccgacaggccggtgtccccagccgcaaaagagctgctgaactgtccgtttaaatgctgctgg

SEQ ID NO: 235887 - DNA, 120 bp, Artificial Sequence
  ENSG00000120093_1 (sequence is synthesized)
gagactcgtaaaaaaatcatcgtggacctggaggatgagaggggcgagctttatttcggtcggattgcggtgtggtggtttagctgcaaggggatgccgcagccccagttgagggggaaa

SEQ ID NO: 235888 - DNA, 120 bp, Artificial Sequence
  ENSG00000120093_2 (sequence is synthesized)
atagttcttaaaaagcatatgcccccctaaggaatgtctctaaagaaccaaatcaaagctgctctttggaaggtatgaatagaatttaaaaaaaaaagatttctatggagcttaaagttc

SEQ ID NO: 235889 - DNA, 120 bp, Artificial Sequence
  ENSG00000120093_3 (sequence is synthesized)
acagccattctgtgtagacaagagctaagaaaaatgtgagaattatacagaaaaccattaatcacttcttttctttaaatacgtatcctctctcctttgttattattcaacagcaaatct

SEQ ID NO: 235890 - DNA, 120 bp, Artificial Sequence
  ENSG00000120093_4 (sequence is synthesized)
ccttggaccggctgttgggggaaaaaagtgttagccgtctctcccggatctgcaagggggaaaaaatttggaaccataaagttgaaaacttttttctctcagtttggaagaagcccttcg

SEQ ID NO: 235891 - DNA, 120 bp, Artificial Sequence
  ENSG00000120093_5 (sequence is synthesized)
tcatgaatgggatctgcagagttcgggcgagaggaggcgagaggcgcaaaggaggggagatttgtcgcctgccgctcgctctggggctcgatgtgaatatatattatgtctgcctgttct

SEQ ID NO: 235892 - DNA, 120 bp, Artificial Sequence
  ENSG00000120093_6 (sequence is synthesized)
cccctcgtcggtggctaaggtcagccgcttggaacagaccccggaggaggggggcagagaggggaggtggggggggggggtccggcgtgtcacgtgacccccagggttgccaatgtccgg

SEQ ID NO: 235893 - DNA, 120 bp, Artificial Sequence
  ENSG00000120093_7 (sequence is synthesized)
tcctgagggtatcaggcctttccaagttgccacccactgcccaggcctcacccagcgatgcagaaagccacctactacgacaacgccgcggctgctctcttcggaggctattcctcgtac

SEQ ID NO: 235894 - DNA, 120 bp, Artificial Sequence
  ENSG00000120093_8 (sequence is synthesized)
cctggcagcaatggcttcggcttcgatgtccccccccaacccccatttcaggccgccacgcacctggagggcgactaccagcgctcagcttgctcgctgcagtccctgggcaacgctgcc

SEQ ID NO: 235895 - DNA, 120 bp, Artificial Sequence
  ENSG00000120093_9 (sequence is synthesized)
ccacatgccaagagcaaggagctcaacggcagctgcatgaggccgggtctggcccccgagcccctgtcggccccgcctggctcacccccgcccagtgccgcacctaccagtgccactagc

SEQ ID NO: 235896 - DNA, 120 bp, Artificial Sequence
  ENSG00000120093_10 (sequence is synthesized)
aacagcagtaatgggggcgggcccagcaaaagtggtcccccaaagtgcggtcccggcaccaactccaccctcaccaaacagatattcccctggatgaaagagtcgaggcaaacgtccaag

SEQ ID NO: 235897 - DNA, 120 bp, Artificial Sequence
  ENSG00000120093_11 (sequence is synthesized)
aacgtccaagctgaaaaacaactcccccggcacagcagagggctgtggtggcggcggcggtggcggcggcggcggaggcagtggtggcagcgggggcggtggcggcggcggcgggggagg

SEQ ID NO: 235898 - DNA, 120 bp, Artificial Sequence
  ENSG00000120093_12 (sequence is synthesized)
cccggggtcggcggcgtccaagcgggcgcggacggcgtacacgagcgcgcagctggtggagctggagaaggagttccattttaaccgctacctgtgccggcctcgccgtgtagagatggc

SEQ ID NO: 235899 - DNA, 120 bp, Artificial Sequence
  ENSG00000120093_13 (sequence is synthesized)
caacctgctgaacctcagcgagcggcagatcaagatctggttccagaaccggcgcatgaagtacaagaaggaccagaaggccaagggattggcctcgtcgtcggggggcccatctccagc

SEQ ID NO: 235900 - DNA, 120 bp, Artificial Sequence
  ENSG00000120093_14 (sequence is synthesized)
cggcagccccccgcagcccatgcagtccacggccggcttcatgaacgccttacactccatgacccccagctacgagagcccgtccccacccgccttcggtaaagcccaccagaatgccta

SEQ ID NO: 235901 - DNA, 120 bp, Artificial Sequence
  ENSG00000120093_15 (sequence is synthesized)
cgcgctgccctccaactaccagccccctctcaaaggctgcggcgccccgcagaagtaccctccgaccccggcgcccgagtatgagccgcacgtcctccaagccaacgggggcgcctacgg

SEQ ID NO: 235902 - DNA, 120 bp, Artificial Sequence
  ENSG00000120093_16 (sequence is synthesized)
gacgcccaccatgcagggcagtccggtgtacgtgggcgggggcggctacgcggatccgctgccgccccctgccggcccctccctctatggcctcaaccacctttcccatcacccttccgg

SEQ ID NO: 235903 - DNA, 120 bp, Artificial Sequence
  ENSG00000120093_17 (sequence is synthesized)
gaacctggactacaacggggcgccccctatggcgcccagccagcaccacggaccctgcgaaccccaccccacctacacagacctctcctctcaccacgcgcctcctcctcagggtagaat

SEQ ID NO: 235904 - DNA, 120 bp, Artificial Sequence
  ENSG00000120093_18 (sequence is synthesized)
ccaagaagcgcccaaattaacacacctgtgatgggaaagggcgaacgaggattaggggatggggaggaagagagagactgtggagctctggggggcaacctggaggtctgaaaagaggag

SEQ ID NO: 235905 - DNA, 120 bp, Artificial Sequence
  ENSG00000120093_19 (sequence is synthesized)
ccagagaaggtggtacccaggcttcctggtcagaaccggcctggagctccttcccttccccctggcctgagaggttgcttttaagtcttccaccccttgttccatctgcctgccaaccca

SEQ ID NO: 235906 - DNA, 120 bp, Artificial Sequence
  ENSG00000120093_20 (sequence is synthesized)
tcggaaaggaatccacatcatattggagatgaccccatcaaccccagggctccagcactaccaagttggaattccacgcccgggagtggggtagaggaagacgagacaggacgaggcaga

SEQ ID NO: 235907 - DNA, 120 bp, Artificial Sequence
  ENSG00000120093_21 (sequence is synthesized)
aaagcacattttaaaaaccagacaagatggctaggccatcaccaaccaacggacttaccttacatctttgtaggtaattccccccaaatcttgatttttttttttcctcaattatccttt

SEQ ID NO: 235908 - DNA, 120 bp, Artificial Sequence
  ENSG00000120093_22 (sequence is synthesized)
ggagttgaacagctaggctgaatgagattaaagttttccaaacacacatggcagtatggaggttttatgaaaagtgatggtgaagagttgggagagatggagggaaaaaaatgcagtcag

SEQ ID NO: 235909 - DNA, 120 bp, Artificial Sequence
  ENSG00000120093_23 (sequence is synthesized)
aagtttcagaacaaatacacaaaatcctatgttagtttgaatctttatttttctggcacacttttaaaaggctgtattaaaatagtgattttttttttttgcctcagggaacctcagtca

SEQ ID NO: 235910 - DNA, 120 bp, Artificial Sequence
  ENSG00000120093_24 (sequence is synthesized)
acaggaatacctctgtttctaacctagagaataatattgttaaaattgctttgttaatttttttttcctcaggaataattttctcttttggaaagcactttccccgtctcagtagaaaag

SEQ ID NO: 235911 - DNA, 120 bp, Artificial Sequence
  ENSG00000120093_25 (sequence is synthesized)
tctagcagttgtaacttcttgtttcttatttgctttgggggaaatcaaagaaaacagacggtgaaggaaagggtgggaaaaattaagtctcatgaaaaaaaaaaaaagaggtccggggag

SEQ ID NO: 235912 - DNA, 120 bp, Artificial Sequence
  ENSG00000120093_26 (sequence is synthesized)
agacctgggccaaatggtcacagcaccaactggcgtggcccaggaaattgaaacaatcctgctccatgtgggggccccacagggccactggctgcccgatcccaggtttggctgagcaaa

SEQ ID NO: 235913 - DNA, 120 bp, Artificial Sequence
  ENSG00000120093_27 (sequence is synthesized)
gacaagggctggaggtggtggtacctgcagcagggccatggacagatgagtctcggttcagctggctcttgaggttaaaaatcatcaggaagtttctaggtcaggctgttgttgtcttcc

SEQ ID NO: 235914 - DNA, 120 bp, Artificial Sequence
  ENSG00000120093_28 (sequence is synthesized)
tggtgggagagtggtgggaagtggagaggatacctcacaagagaagcttctctgctgaacttgcttctcctgcctgttcttttaggagatcctttggttttccttcaggctagactttgc

SEQ ID NO: 235915 - DNA, 120 bp, Artificial Sequence
  ENSG00000120093_29 (sequence is synthesized)
ttgggcaagagacctaaaccgacttggaaggaggcaaaggctggaagcatagaagcctctgggctcagaggagggtgttgatgatgcttttattttggagtctcctagtgtcccctccct

SEQ ID NO: 235916 - DNA, 120 bp, Artificial Sequence
  ENSG00000120093_30 (sequence is synthesized)
tgagccatcctatcccagagttggggaggagagatagggagagagggactaggggaggtcaggggctagtgcacaggcaggagagaagcaatggcctttgccatagattctacatctagg

SEQ ID NO: 235917 - DNA, 120 bp, Artificial Sequence
  ENSG00000120093_31 (sequence is synthesized)
cagtcttgaaaggcatatagtctttatttatttttttattttttagtggaaatgaaaactggtgggcttttttttctcagcatctgctttggagatgttggggaggggaaaagaaaaaac

SEQ ID NO: 235918 - DNA, 120 bp, Artificial Sequence
  ENSG00000120093_32 (sequence is synthesized)
actttcccaaaacctcaaatttgttcccatttgaggtttattgaggtacacttctagcccccggtttttctgctctagaacattcatatctatacatcccacccccatcaattacagttt

SEQ ID NO: 235919 - DNA, 120 bp, Artificial Sequence
  ENSG00000120093_33 (sequence is synthesized)
ttagagggctcagggatggtgagagatcctgaaagagctgcctatattataaattatatacatttttttttaaggaaaagtgtggaggctagggcaggcaggttgttaggactgaaggtt

SEQ ID NO: 235920 - DNA, 120 bp, Artificial Sequence
  ENSG00000120093_34 (sequence is synthesized)
tgcccattctgctgcctccatctcagctccagctccatccccctctccacagaaagcagttggtgacacgaggttctatacttttcttctgttgctctcttgacttaacgtgaaaacagg

SEQ ID NO: 235921 - DNA, 120 bp, Artificial Sequence
  ENSG00000120093_35 (sequence is synthesized)
gtatatttgaacaaactgtcccaggcaggggctgggcagggcctgtgtgccttgctcagcctcctgacaggacacttttgttgcacttagaatttacattttaatggatgtaaaaacaac

SEQ ID NO: 235922 - DNA, 120 bp, Artificial Sequence
  ENSG00000120093_36 (sequence is synthesized)
tgtgagagatgtctgggcctgcagaagtccagcattgctcaaaaaagcgtgtgttctagtgaacattttcatatatatttattggttatagcctgttaaaatattttcttttttgtatta

SEQ ID NO: 235923 - DNA, 120 bp, Artificial Sequence
  ENSG00000120093_37 (sequence is synthesized)
tttatccccctacattatgtatttatatgagggaaaaaaaggaaaaaattgtacttttttagtatttacctgttacaaaggacattgtgtttcctgtcatgtaaaaccagctattttagt

SEQ ID NO: 235924 - DNA, 120 bp, Artificial Sequence
  ENSG00000120093_38 (sequence is synthesized)
tactattgtactctagaaaagagctgtagatttatgttaaactcgtacttacgaacaattgtaattagttctaaaaggcatgaactcagctcctaatcgtcactgtatagtcctgaattt

SEQ ID NO: 235925 - DNA, 120 bp, Artificial Sequence
  ENSG00000120093_39 (sequence is synthesized)
gtagaactagagttaattccctcttggaactttctttgttcttcagtagttacttttttccttacctaaaagggttgtctgtcaaacaattcttgaataaactttctgttatcaatttta

SEQ ID NO: 235926 - DNA, 120 bp, Artificial Sequence
  ENSG00000120093_40 (sequence is synthesized)
ttaactgctcgctgtggtggggaagggggcagaggtaggtgagcactctcccagcctggagcagccggaccagcccagaaggcagcggcggcccaggccagcattcccgcagcctcaccc

SEQ ID NO: 235927 - DNA, 120 bp, Artificial Sequence
  ENSG00000120093_41 (sequence is synthesized)
agtatatttcacattctccagaatgttaagtgacactttaactgctcgctgtggtggggaagggggcagaggtaggtgagcactctcccagcctggagcagccggaccagcccagaaggc

SEQ ID NO: 235928 - DNA, 120 bp, Artificial Sequence
  ENSG00000120093_42 (sequence is synthesized)
caaagggatgtgagatttctattcgccgcggaggcggcgacaattagaacgtctcggacccatggcggggcggccattggctcggaggatcacgtgggcgcctaactttgttcacttgac

SEQ ID NO: 235929 - DNA, 120 bp, Artificial Sequence
  ENSG00000120093_43 (sequence is synthesized)
ttacctccagctcccaaaacttgctgccgcccgcggggctcggccctcggccggctggtgtgctgggaacctgcctccgataaccgttttggtgtcctgatcgcttgctcttcttcgcct

SEQ ID NO: 235930 - DNA, 120 bp, Artificial Sequence
  ENSG00000120093_44 (sequence is synthesized)
ccttgggccatcgtaggtggctggtagcttgtcgccagtcgccgcggcagcagcgaccggctgaggcagcctggcagcagcagccagggactacccgggtgcacaaaccttcccagccct

SEQ ID NO: 235931 - DNA, 120 bp, Artificial Sequence
  ENSG00000120093_45 (sequence is synthesized)
gtctgcaccaccggcggagtctccattctttcctatcgcgtctctggctccttcgctttccacactcgcctggcctccgtcccgcgatggtttggggtttattgcaaggggagcggcagg

SEQ ID NO: 235932 - DNA, 120 bp, Artificial Sequence
  ENSG00000120093_46 (sequence is synthesized)
aatttcggccccaggcatctagttaaattattgttttattattattactatcatcatcatcgtcatcattattattgctgtaacaatcagactaaataaagccagggcctagccagccaa

SEQ ID NO: 235933 - DNA, 120 bp, Artificial Sequence
  ENSG00000120093_47 (sequence is synthesized)
cagagtgacaatagaaataaatgtttggtttcttgtgaccagcacagcgtgtttttgttgaaacattggcgtaaagatatggacaaatgccacccagtgtatattttaagcaccctactg

SEQ ID NO: 235934 - DNA, 120 bp, Artificial Sequence
  ENSG00000120093_48 (sequence is synthesized)
ggttcagccccacattgtgtgtggttgaagatttttttcaaagagtctgatgggaatttttatctcagaggactccaaattgtggtggctggtttgttttccttttagggtgggtgtgtt

SEQ ID NO: 235935 - DNA, 120 bp, Artificial Sequence
  ENSG00000120093_49 (sequence is synthesized)
taagtacggcaaagcctttcatatcgtgatttatttgtcataagcaaataaaatgcggttaagctgtctccttttagacagaaggctctttggttattaaagttccgagagaggattcca

SEQ ID NO: 235936 - DNA, 120 bp, Artificial Sequence
  ENSG00000120093_50 (sequence is synthesized)
acttcagtatcagctcgatagagcaaaagagagagaggacgagagaggggggtgaggagaaaagagagagagcgcgagagggagagggagagaaggaggggtgggaattacacaaagaga

SEQ ID NO: 235937 - DNA, 120 bp, Artificial Sequence
  ENSG00000120093_51 (sequence is synthesized)
atttttcaaagccagaacttactccattttctatgcaaatgtcagaaaaatgaaacaccctctctcccaagtcagagaaggggaagcaacggctctcacgttgggacaatattatctgga

SEQ ID NO: 235938 - DNA, 120 bp, Artificial Sequence
  ENSG00000120093_52 (sequence is synthesized)
agctgaagaagaaactgaatactccttccttcctccccacccattcctttaaatccggagggggaaaaaatcccaaggtctgcaaagcaaatctccttggaccggctgttgggggaaaaa

SEQ ID NO: 235939 - DNA, 120 bp, Artificial Sequence
  ENSG00000120093_53 (sequence is synthesized)
agagactgggcctggagactggagggagatttgggaggaatagagagggtgtagtggagggaagaagccggggctggagactcagaaggagggagccagagtgaggggagatttgtcgcc

SEQ ID NO: 235940 - DNA, 120 bp, Artificial Sequence
  ENSG00000120093_54 (sequence is synthesized)
actttaactgctcgctgtggtggggaagggggcagaggtaggtgagcactctcccagcctggagcagccggaccagcccagaaggcagcggcggcccaggccagcattcccgcagacaca

SEQ ID NO: 235941 - DNA, 120 bp, Artificial Sequence
  ENSG00000120093_55 (sequence is synthesized)
atagtaactgcctgctcgtgggggaggctgggagagaggtgaaccgcaggtcacggcgtctaaaaattattaaaatgtttgagagcctcgtgacgcgcctagctgtttaacaaagactgc

SEQ ID NO: 235942 - DNA, 120 bp, Artificial Sequence
  ENSG00000120093_56 (sequence is synthesized)
caaagtatgagattaacacgaaaacttgcgcttccaaaacaaaaacacaccaaaaaaaaaagtcacgttccggcttctgagggagcccgtggctgtgtccgccgccgcggtccggttttc

SEQ ID NO: 235943 - DNA, 120 bp, Artificial Sequence
  ENSG00000120093_57 (sequence is synthesized)
ataaatcttgcagggcagagagaaacaaacagggttgttctgaataataataataaccatcttccatctcttctgccagtgcatttaaaattaagcgaccctgctagttcttctcttctt

SEQ ID NO: 235944 - DNA, 120 bp, Artificial Sequence
  ENSG00000120093_58 (sequence is synthesized)
gcctattcggaggaggggagatttgtcgcctgccgctcgctctggggctcgatgtgaatatatattatgtctgcctgttctcccctcgtcggtggctaaggtaagctggactgaaatagg

SEQ ID NO: 235945 - DNA, 120 bp, Artificial Sequence
  ENSG00000120093_59 (sequence is synthesized)
ctatcagtttgtgaatggcggagagtatgtctcaatgatttatggcccatatgactccaatctcggttcaagaagagttcacaagctttaagcttccttccacgcagcgactctctctct

SEQ ID NO: 235946 - DNA, 120 bp, Artificial Sequence
  ENSG00000120093_60 (sequence is synthesized)
gacactttaactgctcgctgtggtggggaagggggcagaggtaggtgagcactctcccagcctggagcagccggaccagcccagaaggcagcggcggcccaggccagcattcccgcagag

SEQ ID NO: 235947 - DNA, 120 bp, Artificial Sequence
  ENSG00000120094_0 (sequence is synthesized)
gggtcaggccatggattcgagccccagcgctgtgacatactgccgaaaggttgtagggcaagagggtgtctcccccaaacgggccgaccctcctgcggccttgacgcatggactataata

SEQ ID NO: 235948 - DNA, 120 bp, Artificial Sequence
  ENSG00000120094_1 (sequence is synthesized)
ggatgaactccttcttagagtacccactctgtaaccggggacccagcgcctacagcgcccacagcgccccaacctcctttcccccaagctcggctcaggcggttgacagctatgcaagcg

SEQ ID NO: 235949 - DNA, 120 bp, Artificial Sequence
  ENSG00000120094_2 (sequence is synthesized)
agggccgctacggtggggggctgtccagccctgcgtttcagcagaactccggctatcccgcccagcagccgccttcgaccctgggggtgcccttccccagctccgcgccctcggggtatg

SEQ ID NO: 235950 - DNA, 120 bp, Artificial Sequence
  ENSG00000120094_3 (sequence is synthesized)
ctcctgccgcctgcagccccagctacgggccttctcagtactaccctctgggtcaatcagaaggagacggaggctattttcatccctcgagctacggggcccagctagggggcttgtccg

SEQ ID NO: 235951 - DNA, 120 bp, Artificial Sequence
  ENSG00000120094_4 (sequence is synthesized)
atggctacggagcaggtggagccggtccggggccatatcctccgcagcatcccccttatgggaacgagcagaccgcgagctttgcaccggcctatgctgatctcctctccgaggacaagg

SEQ ID NO: 235952 - DNA, 120 bp, Artificial Sequence
  ENSG00000120094_5 (sequence is synthesized)
aaacaccctgcccttcagaacctaacacccccacggcccggaccttcgactggatgaaggttaagagaaacccacccaagacagcgaaggtgtcagagccaggcctgggctcgcccagtg

SEQ ID NO: 235953 - DNA, 120 bp, Artificial Sequence
  ENSG00000120094_6 (sequence is synthesized)
gcctccgcaccaacttcaccacaaggcagctgacagaactggaaaaggagttccatttcaacaagtacctgagccgggcccggagggtggagattgccgccaccctggagctcaatgaaa

SEQ ID NO: 235954 - DNA, 120 bp, Artificial Sequence
  ENSG00000120094_7 (sequence is synthesized)
cacaggtcaagatttggttccagaaccgacgaatgaagcagaagaagcgcgagcgagaggaaggtcgggtccccccagccccaccaggctgccccaaggaggcagctggagatgcctcag

SEQ ID NO: 235955 - DNA, 120 bp, Artificial Sequence
  ENSG00000120094_8 (sequence is synthesized)
aggctctccccaaccccaggcctgggcttcactggcctggggatcctctctagggctgaaatgccagtttagagctgcctgggggtgggaggggggatggggaaacatttttctcagacc

SEQ ID NO: 235956 - DNA, 120 bp, Artificial Sequence
  ENSG00000120094_9 (sequence is synthesized)
tgggtggctgggggccctacaggaccagaggcctgggaggcatggaacctgtcaaatgtagagggaagggcttctgcctttgatctggggatcagctcagtgtcaacatgtggtgggggt

SEQ ID NO: 235957 - DNA, 120 bp, Artificial Sequence
  ENSG00000120094_10 (sequence is synthesized)
gggggccagcctcatcctcctggattcatcctcctttcccttccaacttgggtttattcggttcagtgccttcgagctttgaggagtctcctcacgcactcttatcctaactcccccttc

SEQ ID NO: 235958 - DNA, 120 bp, Artificial Sequence
  ENSG00000120094_11 (sequence is synthesized)
taggcctgacacagaaccttaaattttcttgtgtgggaggtgtttgggtgcagccatattattatcaatgcttaatccagtcaccacagaccttacaatagcaccagctgccttgtgaca

SEQ ID NO: 235959 - DNA, 120 bp, Artificial Sequence
  ENSG00000120094_12 (sequence is synthesized)
gaccaaaaagccccccgcccccatctaaccccattagccctctcctggcatatttatattgcactaatgcagccttcagaggttgttttctgagacctgcctcctcacaccagcgacctc

SEQ ID NO: 235960 - DNA, 120 bp, Artificial Sequence
  ENSG00000120094_13 (sequence is synthesized)
atcactatgtcaccaaagtgttttggaacttggtattccagagacttctggaacgccgtgcaaggcctgcccccagcaagccacaaccaggaaggtgcaggcacgcccccactagctcct

SEQ ID NO: 235961 - DNA, 120 bp, Artificial Sequence
  ENSG00000120094_14 (sequence is synthesized)
cccctatttattgcctcctggaaaacccaggaccctcttccccatctccacccctacccctgggggcagcccagggagagccaggcacaatgagggctcccaacagctgcaaggatttat

SEQ ID NO: 235962 - DNA, 120 bp, Artificial Sequence
  ENSG00000120094_15 (sequence is synthesized)
ctgaacctttgagaaagaggaggagccatctaagtttctggaaacctgagccccaagtgagcccgggttctctctgtacctgcaactacctcatttcaataaagtctgtgttttcccttc

SEQ ID NO: 235963 - DNA, 120 bp, Artificial Sequence
  ENSG00000120094_16 (sequence is synthesized)
gacacaggtaagagcacaacctacgtctcaggtcaggtgaggtctccccacccagtatgtaaccggtcaccccaggagtaagtttccatacacaccccacttcctgatctgtgcacccag

SEQ ID NO: 235964 - DNA, 120 bp, Artificial Sequence
  ENSG00000120094_17 (sequence is synthesized)
cacagacccaggacctggtgtgcatgggggatggaagtatggggaaggctgctccagacttggtgatcaccatgggggtacctggtggtccctgggaactttgacaactgtacttgggca

SEQ ID NO: 235965 - DNA, 120 bp, Artificial Sequence
  ENSG00000120094_18 (sequence is synthesized)
gaatggcaaatggaggtccagagccagccccgggaggagggaagcggaaggagaaagaggtgagagaattgacctggcctttctccctgccccgcccctagcgaaggtgtcagagccagg

SEQ ID NO: 235966 - DNA, 120 bp, Artificial Sequence
  ENSG00000120129_0 (sequence is synthesized)
gcgaaggacatttgggctgtgtgtgcgacgcgggtcggaggggcagtcgggggaaccgcgaagaagccgaggagcccggagccccgcgtgacgctcctctctcagtccaaaagcggcttt

SEQ ID NO: 235967 - DNA, 120 bp, Artificial Sequence
  ENSG00000120129_1 (sequence is synthesized)
tggttcggcgcagagagacccgggggtctagcttttcctcgaaaagcgccgccctgcccttggccccgagaacagacaaagagcaccgcagggccgatcacgctgggggcgctgaggccg

SEQ ID NO: 235968 - DNA, 120 bp, Artificial Sequence
  ENSG00000120129_2 (sequence is synthesized)
gccatggtcatggaagtgggcaccctggacgctggaggcctgcgggcgctgctgggggagcgagcggcgcaatgcctgctgctggactgccgctccttcttcgctttcaacgccggccac

SEQ ID NO: 235969 - DNA, 120 bp, Artificial Sequence
  ENSG00000120129_3 (sequence is synthesized)
atcgccggctctgtcaacgtgcgcttcagcaccatcgtgcggcgccgggccaagggcgccatgggcctggagcacatcgtgcccaacgccgagctccgcggccgcctgctggccggcgcc

SEQ ID NO: 235970 - DNA, 120 bp, Artificial Sequence
  ENSG00000120129_4 (sequence is synthesized)
cgtggtgttgctggacgagcgcagcgccgccctggacggcgccaagcgcgacggcaccctggccctggcggccggcgcgctctgccgcgaggcgcgcgccgcgcaagtcttcttcctcaa

SEQ ID NO: 235971 - DNA, 120 bp, Artificial Sequence
  ENSG00000120129_5 (sequence is synthesized)
ttcctcaaaggaggatacgaagcgttttcggcttcctgcccggagctgtgcagcaaacagtcgacccccatggggctcagccttcccctgagtactagcgtccctgacagcgcggaatct

SEQ ID NO: 235972 - DNA, 120 bp, Artificial Sequence
  ENSG00000120129_6 (sequence is synthesized)
gggtgcagttcctgcagtaccccactctacgatcagggtggcccggtggaaatcctgccctttctgtacctgggcagtgcgtatcacgcttcccgcaaggacatgctggatgccttgggc

SEQ ID NO: 235973 - DNA, 120 bp, Artificial Sequence
  ENSG00000120129_7 (sequence is synthesized)
atcactgccttgatcaacgtctcagccaattgtcccaaccattttgagggtcactaccagtacaagagcatccctgtggaggacaaccacaaggcagacatcagctcctggttcaacgag

SEQ ID NO: 235974 - DNA, 120 bp, Artificial Sequence
  ENSG00000120129_8 (sequence is synthesized)
gcttaccttatgaggactaatcgagtcaagctggacgaggcctttgagtttgtgaagcagaggcgaagcatcatctctcccaacttcagcttcatgggccagctgctgcagtttgagtcc

SEQ ID NO: 235975 - DNA, 120 bp, Artificial Sequence
  ENSG00000120129_9 (sequence is synthesized)
caggtgctggctccgcactgttcggcagaggctgggagccccgccatggctgtgctcgaccgaggcacctccaccaccaccgtgttcaacttccccgtctccatccctgtccactccacg

SEQ ID NO: 235976 - DNA, 120 bp, Artificial Sequence
  ENSG00000120129_10 (sequence is synthesized)
aacagtgcgctgagctaccttcagagccccattacgacctctcccagctgctgaaaggccacgggaggtgaggctcttcacatcccattgggactccatgctccttgagaggagaaatgc

SEQ ID NO: 235977 - DNA, 120 bp, Artificial Sequence
  ENSG00000120129_11 (sequence is synthesized)
aataactctgggaggggctcgagagggctggtccttatttatttaacttcacccgagttcctctgggtttctaagcagttatggtgatgacttagcgtcaagacatttgctgaactcagc

SEQ ID NO: 235978 - DNA, 120 bp, Artificial Sequence
  ENSG00000120129_12 (sequence is synthesized)
acattcgggaccaatatatagtgggtacatcaagtccatctgacaaaatggggcagaagagaaaggactcagtgtgtgatccggtttctttttgctcgcccctgttttttgtagaatctc

SEQ ID NO: 235979 - DNA, 120 bp, Artificial Sequence
  ENSG00000120129_13 (sequence is synthesized)
ttcatgcttgacatacctaccagtattattcccgacgacacatatacatatgagaatataccttatttatttttgtgtaggtgtctgccttcacaaatgtcattgtctactcctagaaga

SEQ ID NO: 235980 - DNA, 120 bp, Artificial Sequence
  ENSG00000120129_14 (sequence is synthesized)
accaaatacctcaatttttgtttttgagtactgtactatcctgtaaatatatcttaagcaggtttgttttcagcactgatggaaaataccagtgttgggtttttttttagttgccaacag

SEQ ID NO: 235981 - DNA, 120 bp, Artificial Sequence
  ENSG00000120129_15 (sequence is synthesized)
ttgtatgtttgctgattatttatgacctgaaataatatatttcttcttctaagaagacattttgttacataaggatgacttttttatacaatggaataaattatggcatttctattgaaa

SEQ ID NO: 235982 - DNA, 120 bp, Artificial Sequence
  ENSG00000120137_0 (sequence is synthesized)
gcgcggcccagccacctccggagtcgccgcctctgctctcagtgccccggatcggaggccgtccatcgcccctcgggccgacgccatgaagatcaaagatgccaagaaaccctctttccc

SEQ ID NO: 235983 - DNA, 120 bp, Artificial Sequence
  ENSG00000120137_1 (sequence is synthesized)
atggtttggcatggacattgggggaactctagtaaagctctcgtactttgaacctattgatatcacagcagaggaagagcaagaagaagttgagagtttaaaaagtattcggaaatattt

SEQ ID NO: 235984 - DNA, 120 bp, Artificial Sequence
  ENSG00000120137_2 (sequence is synthesized)
gacttctaacgtggcatatggatccaccggcattcgggatgtacaccttgaactgaaagatttaacactttttggccgaagagggaacttgcactttatcaggtttccaacccaggacct

SEQ ID NO: 235985 - DNA, 120 bp, Artificial Sequence
  ENSG00000120137_3 (sequence is synthesized)
gcctacttttatccaaatgggaagagataaaaacttctcaacattgcagacggtgctatgtgctacaggaggtggtgcttacaagtttgaaaaagattttcgcacaattggaaacctcca

SEQ ID NO: 235986 - DNA, 120 bp, Artificial Sequence
  ENSG00000120137_4 (sequence is synthesized)
cctgcacaaactggatgaacttgactgccttgtaaagggcttgctgtatatagactctgtcagtttcaatggacaagccgagtgctattattttgctaatgcctcagaacctgagcgatg

SEQ ID NO: 235987 - DNA, 120 bp, Artificial Sequence
  ENSG00000120137_5 (sequence is synthesized)
ccaaaagatgccttttaacctggatgatccctatccactgcttgtagtgaacattggctcaggagtcagtattttagcagtccattccaaagacaactataaacgagtgactgggacaag

SEQ ID NO: 235988 - DNA, 120 bp, Artificial Sequence
  ENSG00000120137_6 (sequence is synthesized)
ccttggagggggtacctttctgggtttatgcagtttattgactggctgtgaaagttttgaagaggctcttgaaatggcatccaaaggtgatagcacacaagctgacaagctggtccgtga

SEQ ID NO: 235989 - DNA, 120 bp, Artificial Sequence
  ENSG00000120137_7 (sequence is synthesized)
tatttatggaggagattatgaaagatttggtttgccaggttgggctgtagcatctagttttgggaatatgatttataaggagaagcgagaatctgttagtaaagaagatctggcaagagc

SEQ ID NO: 235990 - DNA, 120 bp, Artificial Sequence
  ENSG00000120137_8 (sequence is synthesized)
tactttagttactatcaccaataacattggttctgtggcacgaatgtgtgctgttaatgagaaaataaacagagttgtctttgttggaaactttttacgtgtcaataccctctcaatgaa

SEQ ID NO: 235991 - DNA, 120 bp, Artificial Sequence
  ENSG00000120137_9 (sequence is synthesized)
acttttggcatatgcactggattactggtcaaaaggtcaactaaaagcattgtttctagaacatgagggttactttggagcagttggtgcacttcttgggctgccaaatttcagctaaag

SEQ ID NO: 235992 - DNA, 120 bp, Artificial Sequence
  ENSG00000120137_10 (sequence is synthesized)
catcaggtctctctctctgctaataaatgtcatccaagaggaactaaaaccagaggcattattactgcattgtttgtcactgggaaccaaaggataaaagagtagcataagctgctgaat

SEQ ID NO: 235993 - DNA, 120 bp, Artificial Sequence
  ENSG00000120137_11 (sequence is synthesized)
gttgccatattaaaggagagaacttggtaacgtgaagtatttctcattgaaatgctttcccttttgtatatagccagtgttaaatccttaaatgcaatacagcctctgattattgagctt

SEQ ID NO: 235994 - DNA, 120 bp, Artificial Sequence
  ENSG00000120137_12 (sequence is synthesized)
cctcttaaaaagatttttttattttatgtagccaacattgcagtactgtatgctcaaacacaaatcttaaagtatcggaactgtttagcttatgaaaataatcgactctgaatatttgtt

SEQ ID NO: 235995 - DNA, 120 bp, Artificial Sequence
  ENSG00000120137_13 (sequence is synthesized)
acaagtctgttttatgtgttttgattactagtgagcagaaaataacataccctgtattcaaaattactgaaatggcaatcaaagatgatcatttttatgtgattttagaaatgttaaggc

SEQ ID NO: 235996 - DNA, 120 bp, Artificial Sequence
  ENSG00000120137_14 (sequence is synthesized)
aatactactaattattgtaggtttttttaacgtatcacccaaagcatgtatgtgatctttccccattagtatctttttctcaaatgccataattaactgaaatactattattaaattttc

SEQ ID NO: 235997 - DNA, 120 bp, Artificial Sequence
  ENSG00000120137_15 (sequence is synthesized)
atgagaattctaaaatgaatcctgggaaatgcacgtttggtgatgttgcactttctgtattttacaggaattagtcaatacatgttgaaatgtttaacattttaagattggaggcttaat

SEQ ID NO: 235998 - DNA, 120 bp, Artificial Sequence
  ENSG00000120137_16 (sequence is synthesized)
tactgggagtctgtctaatgaagtcctgggactattgtaatggaatatgatttgagttcactgtgctctttttgtttgtttgttttggtcatatatacattcagaacttttattttaaaa

SEQ ID NO: 235999 - DNA, 120 bp, Artificial Sequence
  ENSG00000120137_17 (sequence is synthesized)
caaccacaataacattaataatagaaaattcatctgtaaatattcacagtctagtcactgaaaaatgggaaaacctctaccatgccttattattaccctttgctgtttgaggagccagaa

SEQ ID NO: 236000 - DNA, 120 bp, Artificial Sequence
  ENSG00000120137_18 (sequence is synthesized)
atagaggtgcagttagaggacggtcactttttccaacaaaacccactccatagccatgtggatttttatccaaaggctcaacaaccagagggaatggtgagacctgataactaaaatact

SEQ ID NO: 236001 - DNA, 120 bp, Artificial Sequence
  ENSG00000120137_19 (sequence is synthesized)
gttattggcaagggtttgaaatgtgtaagaacctaggagggaaaggaagattgagcaacataggaaaaggggaagagaggctgagtgtcaccaaggtccaaactccatttataaaaatac

SEQ ID NO: 236002 - DNA, 120 bp, Artificial Sequence
  ENSG00000120137_20 (sequence is synthesized)
tgcaaaaccaggagttgatggtagaaatgcatatgatccatggcaggagtaaatctctccacctcctctaactctctgaaaactctagagttggagcaagtcttccatttgcttcttatc

SEQ ID NO: 236003 - DNA, 120 bp, Artificial Sequence
  ENSG00000120137_21 (sequence is synthesized)
cccttaaaagaatgccttccacttcccaacagcccccatcaagggaccccaagaggccaccatgctcttatctcgcactttctttcctattccccttgcctgaatctggagtggggttga

SEQ ID NO: 236004 - DNA, 120 bp, Artificial Sequence
  ENSG00000120137_22 (sequence is synthesized)
gccctctgccttcaaccttaagatttaggaagttctttccccaactgtctaacttggaaaggtagatgagtctgaattttgaagtaacgaatgcaaattccactcagcagaggcaatgtt

SEQ ID NO: 236005 - DNA, 120 bp, Artificial Sequence
  ENSG00000120137_23 (sequence is synthesized)
atttatgtacatagggatagtggaatgagttttaatagattctgtccaaaaggggtttgttcctcttatttcctctatgtaggaagttgtgtcttaggcaactttatcagtatcaatgga

SEQ ID NO: 236006 - DNA, 120 bp, Artificial Sequence
  ENSG00000120137_24 (sequence is synthesized)
aaaatgataggcactacaatgaaatggcaggatgccaatatgagatatttcaggaataataagaaatacagtttgtttgtataaaataaactatctcaagaaagttttcaacgacagtga

SEQ ID NO: 236007 - DNA, 120 bp, Artificial Sequence
  ENSG00000120137_25 (sequence is synthesized)
tagtgttcatttgtaagagagagttctagaacttcgatgtccagtgcagtagccactacccatatgtagctgttgagcatttgaaatatggttagtccaaattgagatgtgctctaaagg

SEQ ID NO: 236008 - DNA, 120 bp, Artificial Sequence
  ENSG00000120137_26 (sequence is synthesized)
acaataaaaggttaaatatctcctaattttttgtattgattacatgttgaaatgttaacattggaaatattgggttaaagaaaaatacacaattaaaatgaatcttggccaggcgcagtg

SEQ ID NO: 236009 - DNA, 71 bp, Artificial Sequence
  ENSG00000120137_27 (sequence is synthesized)
ctctaatcccagcactttgagaggccagtggcaaaaccctgcctactaaaaatacaaaaattagccaggca

SEQ ID NO: 236010 - DNA, 120 bp, Artificial Sequence
  ENSG00000120137_28 (sequence is synthesized)
agagtgagactctgtctcaaaaaaaagaatcatctgtttccaattatttttaaatgtgcttactagaaaagataaaatcacacatggtttacattttatttctattaagacagcaccgtt

SEQ ID NO: 236011 - DNA, 120 bp, Artificial Sequence
  ENSG00000120137_29 (sequence is synthesized)
gcaccgttaagaacatagagctttgaggaattgtggtattagaaccaaatctatttaccacagtgagcttacagggagttactcgagatcttaataaaaaattataatctttggcagcct

SEQ ID NO: 236012 - DNA, 120 bp, Artificial Sequence
  ENSG00000120137_30 (sequence is synthesized)
tcattatgattttgtgttcttattattccagtacctctagattacatatgggaaaagctaaagagccacagtggtgagatggttgctcactctagcaggtaatttcagtttgaaaggata

SEQ ID NO: 236013 - DNA, 120 bp, Artificial Sequence
  ENSG00000120137_31 (sequence is synthesized)
aaatatatgaatcatagttcacattaaccaaagtacagtgatgaaataacttagactctgaccattccattttttcttaaagattgccctaaatctatagatgctaatacagtatttgcc

SEQ ID NO: 236014 - DNA, 120 bp, Artificial Sequence
  ENSG00000120137_32 (sequence is synthesized)
acaggtataaaacttgtagttactgtcattcaattaagattcttatctgtacagatatacaaatcagaaacttttaaaataaattgaactaatggaattttggctccaatatttagtcac

SEQ ID NO: 236015 - DNA, 120 bp, Artificial Sequence
  ENSG00000120137_33 (sequence is synthesized)
tacaatggaaatattaaagcaaggaacatgaagtcattgtagggttttaaaatggctactgactgacatgaattcagagtttcaaacagtctaaattctaaaaacttaactttacacgct

SEQ ID NO: 236016 - DNA, 120 bp, Artificial Sequence
  ENSG00000120137_34 (sequence is synthesized)
aaaacttaactttacacgcttttcctcctaaataaccactctaataattcatacattcatatcttcaggtaaagaaaactgaattttaaacaattgaggctgggtgcagtggctcatgcc

SEQ ID NO: 236017 - DNA, 120 bp, Artificial Sequence
  ENSG00000120137_35 (sequence is synthesized)
tgagtataaaatttgaaaactacatggggaaatgtctttatcatgcatctcttgatagtctactgaaaactattaagtaaacctgcggtctgtaaacaaaaaaacccatagtgatactta

SEQ ID NO: 236018 - DNA, 120 bp, Artificial Sequence
  ENSG00000120137_36 (sequence is synthesized)
ccttgtgtaatgtaaacaattttttaagctctttaaagtacatctagatttactggtaatgtatagaagtcaattttatccccaagcatttctacttcctaaaccattagcaagagtctc

SEQ ID NO: 236019 - DNA, 120 bp, Artificial Sequence
  ENSG00000120137_37 (sequence is synthesized)
aaaacaacttcactaaactattggacctccagtgttaacttgccaacataaaaatctgaaaaactttgtaatcactatcaaaaatacaaaagagagaataaattcccaggtaaaaggctt

SEQ ID NO: 236020 - DNA, 120 bp, Artificial Sequence
  ENSG00000120137_38 (sequence is synthesized)
tacaaattttggaactattatgcttttgtttactaaacactgatccttttagtaattctgcagtattgcctcagactcccacaaagtttcaaaatagctcatctattagattcctgtaac

SEQ ID NO: 236021 - DNA, 120 bp, Artificial Sequence
  ENSG00000120137_39 (sequence is synthesized)
atttatttgggataaacgtggttttgttgccgttgttcataatagaataaaatatttagctttgatggttcagatgtaatacaaagaaataactaagtttgggcctgagataaatgtggt

SEQ ID NO: 236022 - DNA, 120 bp, Artificial Sequence
  ENSG00000120137_40 (sequence is synthesized)
aaagcaagaatgcagagatgctgtaatgatgagtgagttttatagcattactgaggacctgaaaacttgctgccaaggacactttgaaggttttgttggctggaagaagtgtctctggaa

SEQ ID NO: 236023 - DNA, 120 bp, Artificial Sequence
  ENSG00000120137_41 (sequence is synthesized)
ttcttttcagtttggctacaacattggagtcatcagtgctcctgagacagtcatacaggactttctcagttacactttgaaagagaggtcagaagactctccctctgaggttttgctcat

SEQ ID NO: 236024 - DNA, 120 bp, Artificial Sequence
  ENSG00000120137_42 (sequence is synthesized)
gtccccctggcccttgtctgtggccatcttccccaatggtgatatgattggctcctttctgttgcactctttgtcaaccactttggcaggtgcagttcaatgcttatcataatttgttgg

SEQ ID NO: 236025 - DNA, 120 bp, Artificial Sequence
  ENSG00000120137_43 (sequence is synthesized)
ctattactggttgccttatgggattctgcagacaagctgagttggttgaaatgctgatcctgggccactagattactggcttgtaatgcggactctgcacaagttttgtgcccatgtaca

SEQ ID NO: 236026 - DNA, 120 bp, Artificial Sequence
  ENSG00000120137_44 (sequence is synthesized)
ttggagagatctcgcctactcccctttggggtacctttagtgctctcaaccagctggacgtcgttggtattctggagatccagatctttggtctggagttcatcttggggtctgaagagc

SEQ ID NO: 236027 - DNA, 120 bp, Artificial Sequence
  ENSG00000120137_45 (sequence is synthesized)
tatgcccagtgatactgggctttaccatccttccagctgtcctataaagtgtagcccttccattttgccctggaagtcgtaagtttttgctcattaacagaaaggaagagtactaatgag

SEQ ID NO: 236028 - DNA, 120 bp, Artificial Sequence
  ENSG00000120137_46 (sequence is synthesized)
atccttcagcaattgtaggggactcaggatgtgtcccaggacatctaggagataagagtgctaggatgatacaagaaaagcaagtcactacactggcgctctttagagtacccagctacc

SEQ ID NO: 236029 - DNA, 120 bp, Artificial Sequence
  ENSG00000120137_47 (sequence is synthesized)
aacaacccactgtcatttccatcatgctccagctctctcagtagctctctggaatcaatgttgtcttctattactcaatgagaatcttcaaggatgcaggtgttgagaagccaatctata

SEQ ID NO: 236030 - DNA, 120 bp, Artificial Sequence
  ENSG00000120137_48 (sequence is synthesized)
gattagtgcaggagtggttaatattatcttcttgactgtagtctctctgtttgtggttgaaagggcaggaaggactttacatatgataggtcttgaggcatggcgttttgttctgtcctc

SEQ ID NO: 236031 - DNA, 120 bp, Artificial Sequence
  ENSG00000120137_49 (sequence is synthesized)
atgattgtttctttgttattaaaggatgagtatggtgggatgagctttgtctgtagtggggctatcttggtctttgtggccttctctgaagttggaccagactccgttccctggaatact

SEQ ID NO: 236032 - DNA, 120 bp, Artificial Sequence
  ENSG00000120137_50 (sequence is synthesized)
gtggccacactcttcagtttgcaatagcagtggctggttgctccaactggacctccaactttctagttggattgctcttcctgaacaattattatctagtttaagtgtgttgttgcttta

SEQ ID NO: 236033 - DNA, 120 bp, Artificial Sequence
  ENSG00000120137_51 (sequence is synthesized)
gggtcatggcatgcttatgtatttctgttaccatctgaccatggtactatgccaagttctcttaggggacctgaatctttccagtagaccacatttgagagagtatgagtcaactgggca

SEQ ID NO: 236034 - DNA, 120 bp, Artificial Sequence
  ENSG00000120137_52 (sequence is synthesized)
tagttcccaacaacccaaaatacatacgtacttcactgaagcagatctcatgattccattgacttcatttctaaaattggactttgagcagccaatttctaaggattaaaaagaaacttt

SEQ ID NO: 236035 - DNA, 120 bp, Artificial Sequence
  ENSG00000120137_53 (sequence is synthesized)
aatgcattgtagacctctgtacacagaaaaatctttgtaacttttgggcttaattttcattcttaaaaaatctggtaactttttcaaatgcaaccactgtcagtttgctgtgaggctagg

SEQ ID NO: 236036 - DNA, 120 bp, Artificial Sequence
  ENSG00000120137_54 (sequence is synthesized)
caaacaacacaaggtatagaatttcccatcaccaccaccctgaccccgcgagaagattgccttttaattagagacttgtagaactagtgccttttaagttctacactcatcttttccaaa

SEQ ID NO: 236037 - DNA, 120 bp, Artificial Sequence
  ENSG00000120137_55 (sequence is synthesized)
gactattagtaaacttgccatgtaatttgacatggcagttccttgctcagctactctaaataaagttggaaattaggtggtctcttagtttgggtaaagtcagtactattgccagtaata

SEQ ID NO: 236038 - DNA, 120 bp, Artificial Sequence
  ENSG00000120137_56 (sequence is synthesized)
tacatggtaattgaaagcccttaaagtggttcagattatttgccaaatattagactctataaaaatttctgaggttttttttcttttacctttgagtgtacatgtgattgctataatgta

SEQ ID NO: 236039 - DNA, 120 bp, Artificial Sequence
  ENSG00000120137_57 (sequence is synthesized)
aataccagtcccttaaagactgtttctataagcagaatgatgcagcacaaagtggaaaggttttcctcttattccagcagtattcttgccttcaaagagtagtccatcttgccttgattt

SEQ ID NO: 236040 - DNA, 120 bp, Artificial Sequence
  ENSG00000120137_58 (sequence is synthesized)
ttaaggttgttttcttggatggaaagcttaactggatagtaatttccatatgttctttataaccactctgtatattataagcaaagttttttcatattgtatctttttctgttgagcact

SEQ ID NO: 236041 - DNA, 120 bp, Artificial Sequence
  ENSG00000120137_59 (sequence is synthesized)
ttatgcattttagtctattgcatttgagaatgtagtttagaaattcactgtttaaagccatgtgaaaactgatagaggataatgaaaatgagtgtacattattttgaatttaacttaact

SEQ ID NO: 236042 - DNA, 120 bp, Artificial Sequence
  ENSG00000120137_60 (sequence is synthesized)
gttttgtggtgggtgtgaacaaaacattagaaatatattatctttttgtgataatactctctgacctcacttaaagtgatctgccatgaggtatccatgatcaagtttatgtttattcta

SEQ ID NO: 236043 - DNA, 120 bp, Artificial Sequence
  ENSG00000120137_61 (sequence is synthesized)
atacctaaggaattcagccaactttgtttctatcatcagataatctcagaaaatagtgtgttttatctatattactgcctcttttcaatatttaagagaataattgtcttctggtttcta

SEQ ID NO: 236044 - DNA, 120 bp, Artificial Sequence
  ENSG00000120137_62 (sequence is synthesized)
ctgagcctagtaataatcactaaagacctaaaaaaggaattccttctgttaagagtatttggatagcccattcacgataatggtggtgtgaaaatcaatcatcccagcttttctgacata

SEQ ID NO: 236045 - DNA, 120 bp, Artificial Sequence
  ENSG00000120137_63 (sequence is synthesized)
tctaaattttgaataattaatttccacttccaaaaaattcaaatgttttctcaaagcagtcactacttatttgcattattcctgcatattcagtgaatgtgaggtcatatttggtattgt

SEQ ID NO: 236046 - DNA, 120 bp, Artificial Sequence
  ENSG00000120137_64 (sequence is synthesized)
attagaagtagtgttggtcactggtcttgcctctttgaacattatttttatttgtaaaatgagggagttggtttgttatgatgggaaatgagtcagttttcagggtcctgagaaaattgc

SEQ ID NO: 236047 - DNA, 120 bp, Artificial Sequence
  ENSG00000120137_65 (sequence is synthesized)
ttcattcatggctgtgtttgagataactaaagtaaattttttttcaggtatttggtgtcatgttttggagttaatatttagtgcttatataattttaagttattacataatttttattgg

SEQ ID NO: 236048 - DNA, 120 bp, Artificial Sequence
  ENSG00000120137_66 (sequence is synthesized)
tatatatttgataggtactaggtattggattctcaccaaaccagtagaatggtattctctcttaatatgtgattgcctgtaatggccaggtagatataccttaaagtaatatgaaaggtt

SEQ ID NO: 236049 - DNA, 120 bp, Artificial Sequence
  ENSG00000120137_67 (sequence is synthesized)
ttatatgtatattaaaatgtttgtacttttaaatctgtaaaggttatctggaatttttactgtgttaacttcagaattatatgggcattatgactttttcattgtacaaaaaattattca

SEQ ID NO: 236050 - DNA, 120 bp, Artificial Sequence
  ENSG00000120137_68 (sequence is synthesized)
taaatgttagaatacagatgttccttgacttacaatagggttatgttccagtagacccattgtaaattgaaaataccgtaagttgaaaatacatttaatacgcctaacctactgaacatc

SEQ ID NO: 236051 - DNA, 120 bp, Artificial Sequence
  ENSG00000120137_69 (sequence is synthesized)
ccagcttagcctagcctatcttaaatgtgttctgaacacttaacgttggcctttagctgggcaaaatcatctaatacaaaacctattttataatgaagtgtttaatatctcaaataagag

SEQ ID NO: 236052 - DNA, 120 bp, Artificial Sequence
  ENSG00000120137_70 (sequence is synthesized)
tattgtaccacatatcgttatcccaggataatatcagagtacaaaatttgaagtacagtttttaactgaatgtgtattgcttttgccccattataaagttgaaaaaccataagtcaaacc

SEQ ID NO: 236053 - DNA, 120 bp, Artificial Sequence
  ENSG00000120137_71 (sequence is synthesized)
attgttaagtcggactgtttgtgttacatatatttgggattttttagtggccctttttaaaaagctgtttcttatttctgatcattgtgagtggggatagatgtgggaagaaccatgtct

SEQ ID NO: 236054 - DNA, 87 bp, Artificial Sequence
  ENSG00000120137_72 (sequence is synthesized)
ttgtaccgaggcaggagaatcacttgaaccgggaggcagagggcagatcatgccactgtattccagcctgggcaacagagtaagact

SEQ ID NO: 236055 - DNA, 120 bp, Artificial Sequence
  ENSG00000120137_73 (sequence is synthesized)
gcaacagagtaagactctgtctcaaaaatgaatgaatgaatgaatgaacgaatgaatgtactatgagctgatactgggatttcaggtaccgcagtttgtgctgaatgatatgtttggggt

SEQ ID NO: 236056 - DNA, 120 bp, Artificial Sequence
  ENSG00000120137_74 (sequence is synthesized)
tatgtttggggtaaatcagtttttttcttatagaatttcggcgtttttgctgcaactgccactaattttgcatttaaaagaacaaaagaggaatgtatttttcaaaggagtgaatgaggt

SEQ ID NO: 236057 - DNA, 120 bp, Artificial Sequence
  ENSG00000120137_75 (sequence is synthesized)
taaaatcaagattttgaatggtataaatatgcaactaattcagttgtaggatattattaaattttttattgctaaatatgtttctttcatacgttgcagtgcttacagttccaacagctt

SEQ ID NO: 236058 - DNA, 120 bp, Artificial Sequence
  ENSG00000120137_76 (sequence is synthesized)
tccaagaaaacatttccatatttgtgttatttgtaaagtatacataaataatgtaaaataatttgggattatttcaactttacattgtatgtctgaatttcatcgatgttgtacctggct

SEQ ID NO: 236059 - DNA, 120 bp, Artificial Sequence
  ENSG00000120137_77 (sequence is synthesized)
cagtcaatagttgtcacaggtattaagccattttggaatttgccacttttttctgggtaacctgttttagtttagtttacagcatttagaaacagaaggtaactttatagaagtaacacc

SEQ ID NO: 236060 - DNA, 120 bp, Artificial Sequence
  ENSG00000120137_78 (sequence is synthesized)
aatatcctagtctgcttgccccgaatataactaatagtattaggatgtaagcaatattaagatggtttttattattttttatacactgtgtgcttttactttttatttaaactacagcaa

SEQ ID NO: 236061 - DNA, 120 bp, Artificial Sequence
  ENSG00000120137_79 (sequence is synthesized)
aaaactgattttttaactaaaattgaatggcgtttatcttaatgaccagttattgaccaaagtgtactcagaagatgttattatgtcccaatctaaggaatcctttaatttggggattaa

SEQ ID NO: 236062 - DNA, 120 bp, Artificial Sequence
  ENSG00000120137_80 (sequence is synthesized)
ttttacttacacatgccatttcagtttcagttgcctcattctattacatcattcttgtcaagtctaagctttatcatgtctgaattcttttaacactgaatctgtgatgtaaaaatgtat

SEQ ID NO: 236063 - DNA, 120 bp, Artificial Sequence
  ENSG00000120137_81 (sequence is synthesized)
tgatgtaaaaatgtatgatgtgccataaattttattcataataaactaagttatagcctattgtaatctgtaaaacatttcttgtaaattacctaatttattttttcatttatgtacagt

SEQ ID NO: 236064 - DNA, 120 bp, Artificial Sequence
  ENSG00000120137_82 (sequence is synthesized)
aaaaatgtttgccatggcgcattctgtaaacattcccgtattcttttccttaatgcttatttgcatgaaggtaacttgggttttgcttgtttgtattggataaccattaagccaacttca

SEQ ID NO: 236065 - DNA, 120 bp, Artificial Sequence
  ENSG00000120137_83 (sequence is synthesized)
gtttctctgcctttttttctgtagtttaaccatttctaattttgttcatattctaaatagatgttagaatcatactttttattttctactttctaaataaattatctaagttgtttacta

SEQ ID NO: 236066 - DNA, 120 bp, Artificial Sequence
  ENSG00000120137_84 (sequence is synthesized)
cggagtcgccgcctctgctctcagtgccccggatcggaggccgtccatcgcccctcgggccgacgccatgaagatcaaagatgccaagaaaccctaaaacgcagataaacaagaaagata

SEQ ID NO: 236067 - DNA, 120 bp, Artificial Sequence
  ENSG00000120149_0 (sequence is synthesized)
gcagcaaaaaagtttgagtcgccgctgccgggttgccagcggagtcgcgcgtcgggagctacgtagggcagagaagtcatggcttctccgtccaaaggcaatgacttgttttcgcccgac

SEQ ID NO: 236068 - DNA, 120 bp, Artificial Sequence
  ENSG00000120149_1 (sequence is synthesized)
gaggagggcccagcagtggtggccggaccaggcccggggcctgggggcgccgagggggccgcggaggagcgccgcgtcaaggtctccagcctgcccttcagcgtggaggcgctcatgtcc

SEQ ID NO: 236069 - DNA, 120 bp, Artificial Sequence
  ENSG00000120149_2 (sequence is synthesized)
gtccgacaagaagccgcccaaggaggcgtccccgctgccggccgaaagcgcctcggccggggccaccctgcggccactgctgctgtcggggcacggcgctcgggaagcgcacagccccgg

SEQ ID NO: 236070 - DNA, 120 bp, Artificial Sequence
  ENSG00000120149_3 (sequence is synthesized)
ctggtgaagcccttcgagaccgcctcggtcaagtcggaaaattcagaagatggagcggcgtggatgcaggaacccggccgatattcgccgccgccaagacatatgagccctaccacctgc

SEQ ID NO: 236071 - DNA, 120 bp, Artificial Sequence
  ENSG00000120149_4 (sequence is synthesized)
accctgaggaaacacaagaccaatcggaagccgcgcacgccctttaccacatcccagctcctcgccctggagcgcaagttccgtcagaaacagtacctctccattgcagagcgtgcagag

SEQ ID NO: 236072 - DNA, 120 bp, Artificial Sequence
  ENSG00000120149_5 (sequence is synthesized)
ttctccagctctctgaacctcacagagacccaggtcaaaatctggttccagaaccgaagggccaaggcgaaaagactgcaggaggcagaactggaaaagctgaaaatggctgcaaaacct

SEQ ID NO: 236073 - DNA, 120 bp, Artificial Sequence
  ENSG00000120149_6 (sequence is synthesized)
atgctgccctccagcttcagtctccctttccccatcagctcgcccctgcaggcagcgtccatatatggagcatcctacccgttccatagacctgtgcttcccatcccgcctgtgggactc

SEQ ID NO: 236074 - DNA, 120 bp, Artificial Sequence
  ENSG00000120149_7 (sequence is synthesized)
tatgccacgccagtgggatatggcatgtaccacctgtcctaaggaagaccagatcaatagactccatgatggatgcttgtttcaaagggtttcctctccctctccacgaaggcagtacca

SEQ ID NO: 236075 - DNA, 120 bp, Artificial Sequence
  ENSG00000120149_8 (sequence is synthesized)
gccagtactcctgctctgctaaccctgcgtgcaccaccctaagcggctaggctgacagggccacacgacatagctgaaatttgttctgtaggcggaggcaccaagccctgttttcttggt

SEQ ID NO: 236076 - DNA, 120 bp, Artificial Sequence
  ENSG00000120149_9 (sequence is synthesized)
cccccttttcctttcacaaagattggctctgatggtttttatgtataaatatatatatataataaaatataatacatttttatacagcagacgtaaaaattcaaattattttaaaaggca

SEQ ID NO: 236077 - DNA, 120 bp, Artificial Sequence
  ENSG00000120149_10 (sequence is synthesized)
tttttttctatatctcaccttcccaaaagacactgtgtaagtccatttgttgtattttcttaaagagggagacaaattatttgcaaaatgtgctaaagtcaatgatttttacgggattat

SEQ ID NO: 236078 - DNA, 120 bp, Artificial Sequence
  ENSG00000120149_11 (sequence is synthesized)
tgacttctgcttatggaaaacaaagaaacagacacaatgcacacagaaaatattagatatggagagattattcaaagtgaaggggacacatcatatttctgcattttacttgcattaaaa

SEQ ID NO: 236079 - DNA, 120 bp, Artificial Sequence
  ENSG00000120149_12 (sequence is synthesized)
gaaacctctttatatactacagttgttcctatctctcccccgccccccaccgccccaccacacacatatttttaaagtttttccttttttaagaatatttttgtaagaccaatacctggg

SEQ ID NO: 236080 - DNA, 120 bp, Artificial Sequence
  ENSG00000120149_13 (sequence is synthesized)
atgagaagaatcctgagactgcctggaggtgaggtagaaaattagaaatacttcctaattcttctcaaggctgttggtaactttatttcagataattggagagtaaaatgttaaaacctg

SEQ ID NO: 236081 - DNA, 120 bp, Artificial Sequence
  ENSG00000120149_14 (sequence is synthesized)
ttgagaggaattgatggtttctgagaaatactaggtacattcatcctcacagattgcaaaggtgatttgggtgggggtttagtaattttctgcttaaaaaatgagtatcttgtaaccatt

SEQ ID NO: 236082 - DNA, 120 bp, Artificial Sequence
  ENSG00000120149_15 (sequence is synthesized)
acctatatgctaaatattcttgaacaattagtagatccagaaagaaaaaaaaatatgctttctctgtgtgtgtacctgttgtatgtcctaaacttattagaaaattttatatactttttt

SEQ ID NO: 236083 - DNA, 120 bp, Artificial Sequence
  ENSG00000120149_16 (sequence is synthesized)
acatgttggggggcagaaggtaaagccatgttttgacttggtgaaaatgggattgtcaaacagcccattaagttccctggtatttcaccttcctgtccatctgtcccctccctccggtat

SEQ ID NO: 236084 - DNA, 120 bp, Artificial Sequence
  ENSG00000120149_17 (sequence is synthesized)
acctttatccctttgaaagggtgcttgtacaatttgatatattttattgaagagttatctcttattctgaattaaattaagcatttgttttattgcagtaaagtttgtccaaactcacaa

SEQ ID NO: 236085 - DNA, 120 bp, Artificial Sequence
  ENSG00000120156_0 (sequence is synthesized)
gctgttccttcttgcctctaacttgtaaacaagacgtagtaggacgatgctaatggaaagtcacaaaccgctgggtttttgaaaggatccttgggacctcatgcacatttgtggaaactg

SEQ ID NO: 236086 - DNA, 120 bp, Artificial Sequence
  ENSG00000120156_1 (sequence is synthesized)
gatggagagatttggggaagcatggactctttagccagcttagttctctgtggagtcagcttgctcctttctggaactgtggaaggtgccatggacttgatcttgatcaattccctacct

SEQ ID NO: 236087 - DNA, 120 bp, Artificial Sequence
  ENSG00000120156_2 (sequence is synthesized)
cttgtatctgatgctgaaacatctctcacctgcattgcctctgggtggcgcccccatgagcccatcaccataggaagggactttgaagccttaatgaaccagcaccaggatccgctggaa

SEQ ID NO: 236088 - DNA, 120 bp, Artificial Sequence
  ENSG00000120156_3 (sequence is synthesized)
gttactcaagatgtgaccagagaatgggctaaaaaagttgtttggaagagagaaaaggctagtaagatcaatggtgcttatttctgtgaagggcgagttcgaggagaggcaatcaggata

SEQ ID NO: 236089 - DNA, 120 bp, Artificial Sequence
  ENSG00000120156_4 (sequence is synthesized)
cgaaccatgaagatgcgtcaacaagcttccttcctaccagctactttaactatgactgtggacaagggagataacgtgaacatatctttcaaaaaggtattgattaaagaagaagatgca

SEQ ID NO: 236090 - DNA, 120 bp, Artificial Sequence
  ENSG00000120156_5 (sequence is synthesized)
gtgatttacaaaaatggttccttcatccattcagtgccccggcatgaagtacctgatattctagaagtacacctgcctcatgctcagccccaggatgctggagtgtactcggccaggtat

SEQ ID NO: 236091 - DNA, 120 bp, Artificial Sequence
  ENSG00000120156_6 (sequence is synthesized)
ataggaggaaacctcttcacctcggccttcaccaggctgatagtccggagatgtgaagcccagaagtggggacctgaatgcaaccatctctgtactgcttgtatgaacaatggtgtctgc

SEQ ID NO: 236092 - DNA, 120 bp, Artificial Sequence
  ENSG00000120156_7 (sequence is synthesized)
catgaagatactggagaatgcatttgccctcctgggtttatgggaaggacgtgtgagaaggcttgtgaactgcacacgtttggcagaacttgtaaagaaaggtgcagtggacaagaggga

SEQ ID NO: 236093 - DNA, 120 bp, Artificial Sequence
  ENSG00000120156_8 (sequence is synthesized)
tgcaagtcttatgtgttctgtctccctgacccctatgggtgttcctgtgccacaggctggaagggtctgcagtgcaatgaagcatgccaccctggtttttacgggccagattgtaagctt

SEQ ID NO: 236094 - DNA, 120 bp, Artificial Sequence
  ENSG00000120156_9 (sequence is synthesized)
aggtgcagctgcaacaatggggagatgtgtgatcgcttccaaggatgtctctgctctccaggatggcaggggctccagtgtgagagagaaggcatacagaggatgaccccaaagatagtg

SEQ ID NO: 236095 - DNA, 120 bp, Artificial Sequence
  ENSG00000120156_10 (sequence is synthesized)
gatttgccagatcatatagaagtaaacagtggtaaatttaatcccatttgcaaagcttctggctggccgctacctactaatgaagaaatgaccctggtgaagccggatgggacagtgctc

SEQ ID NO: 236096 - DNA, 120 bp, Artificial Sequence
  ENSG00000120156_11 (sequence is synthesized)
catccaaaagactttaaccatacggatcatttctcagtagccatattcaccatccaccggatcctcccccctgactcaggagtttgggtctgcagtgtgaacacagtggctgggatggtg

SEQ ID NO: 236097 - DNA, 120 bp, Artificial Sequence
  ENSG00000120156_12 (sequence is synthesized)
gaaaagcccttcaacatttctgttaaagttcttccaaagcccctgaatgccccaaacgtgattgacactggacataactttgctgtcatcaacatcagctctgagccttactttggggat

SEQ ID NO: 236098 - DNA, 120 bp, Artificial Sequence
  ENSG00000120156_13 (sequence is synthesized)
ggaccaatcaaatccaagaagcttctatacaaacccgttaatcactatgaggcttggcaacatattcaagtgacaaatgagattgttacactcaactatttggaacctcggacagaatat

SEQ ID NO: 236099 - DNA, 120 bp, Artificial Sequence
  ENSG00000120156_14 (sequence is synthesized)
gaactctgtgtgcaactggtccgtcgtggagagggtggggaagggcatcctggacctgtgagacgcttcacaacagcttctatcggactccctcctccaagaggtctaaatctcctgcct

SEQ ID NO: 236100 - DNA, 120 bp, Artificial Sequence
  ENSG00000120156_15 (sequence is synthesized)
aaaagtcagaccactctaaatttgacctggcaaccaatatttccaagctcggaagatgacttttatgttgaagtggagagaaggtctgtgcaaaaaagtgatcagcagaatattaaagtt

SEQ ID NO: 236101 - DNA, 120 bp, Artificial Sequence
  ENSG00000120156_16 (sequence is synthesized)
ccaggcaacttgacttcggtgctacttaacaacttacatcccagggagcagtacgtggtccgagctagagtcaacaccaaggcccagggggaatggagtgaagatctcactgcttggacc

SEQ ID NO: 236102 - DNA, 120 bp, Artificial Sequence
  ENSG00000120156_17 (sequence is synthesized)
cttagtgacattcttcctcctcaaccagaaaacatcaagatttccaacattacacactcctcagctgtgatttcttggacaatattggatggctattctatttcttctattactatccgt

SEQ ID NO: 236103 - DNA, 120 bp, Artificial Sequence
  ENSG00000120156_18 (sequence is synthesized)
aatgaagaccagcacgttgatgtgaagataaagaatgccaccatcactcagtatcagctcaagggcctagagcctgaaacagcataccaggtggacatttttgcagagaacaacataggg

SEQ ID NO: 236104 - DNA, 120 bp, Artificial Sequence
  ENSG00000120156_19 (sequence is synthesized)
tcaagcaacccagccttttctcatgaactggtgaccctcccagaatctcaagcaccagcggacctcggaggggggaagatgctgcttatagccatccttggctctgctggaatgacctgc

SEQ ID NO: 236105 - DNA, 120 bp, Artificial Sequence
  ENSG00000120156_20 (sequence is synthesized)
ctgactgtgctgttggcctttctgatcatattgcaattgaagagggcaaatgtgcaaaggagaatggcccaagccttccaaaacgtgagggaagaaccagctgtgcagttcaactcaggg

SEQ ID NO: 236106 - DNA, 120 bp, Artificial Sequence
  ENSG00000120156_21 (sequence is synthesized)
actctggccctaaacaggaaggtcaaaaacaacccagatcctacaatttatccagtgcttgactggaatgacatcaaatttcaagatgtgattggggagggcaattttggccaagttctt

SEQ ID NO: 236107 - DNA, 120 bp, Artificial Sequence
  ENSG00000120156_22 (sequence is synthesized)
aaggcgcgcatcaagaaggatgggttacggatggatgctgccatcaaaagaatgaaagaatatgcctccaaagatgatcacagggactttgcaggagaactggaagttctttgtaaactt

SEQ ID NO: 236108 - DNA, 120 bp, Artificial Sequence
  ENSG00000120156_23 (sequence is synthesized)
ggacaccatccaaacatcatcaatctcttaggagcatgtgaacatcgaggctacttgtacctggccattgagtacgcgccccatggaaaccttctggacttccttcgcaagagccgtgtg

SEQ ID NO: 236109 - DNA, 120 bp, Artificial Sequence
  ENSG00000120156_24 (sequence is synthesized)
ctggagacggacccagcatttgccattgccaatagcaccgcgtccacactgtcctcccagcagctccttcacttcgctgccgacgtggcccggggcatggactacttgagccaaaaacag

SEQ ID NO: 236110 - DNA, 120 bp, Artificial Sequence
  ENSG00000120156_25 (sequence is synthesized)
tttatccacagggatctggctgccagaaacattttagttggtgaaaactatgtggcaaaaatagcagattttggattgtcccgaggtcaagaggtgtatgtgaaaaagacaatgggaagg

SEQ ID NO: 236111 - DNA, 120 bp, Artificial Sequence
  ENSG00000120156_26 (sequence is synthesized)
ctcccagtgcgctggatggccatcgagtcactgaattacagtgtgtacacaaccaacagtgatgtatggtcctatggtgtgttactatgggagattgttagcttaggaggcacaccctac

SEQ ID NO: 236112 - DNA, 120 bp, Artificial Sequence
  ENSG00000120156_27 (sequence is synthesized)
tgcgggatgacttgtgcagaactctacgagaagctgccccagggctacagactggagaagcccctgaactgtgatgatgaggtgtatgatctaatgagacaatgctggcgggagaagcct

SEQ ID NO: 236113 - DNA, 120 bp, Artificial Sequence
  ENSG00000120156_28 (sequence is synthesized)
tatgagaggccatcatttgcccagatattggtgtccttaaacagaatgttagaggagcgaaagacctacgtgaataccacgctttatgagaagtttacttatgcaggaattgactgttct

SEQ ID NO: 236114 - DNA, 120 bp, Artificial Sequence
  ENSG00000120156_29 (sequence is synthesized)
gctgaagaagcggcctaggacagaacatctgtataccctctgtttccctttcactggcatgggagacccttgacacctgctgagaaaacatgcctctgccaaaggatgtgatatataagt

SEQ ID NO: 236115 - DNA, 120 bp, Artificial Sequence
  ENSG00000120156_30 (sequence is synthesized)
gtacatatgtgctgtacacctgggaccttcaccactgtagatcccatgcatggatctatgtagtatgctctgactctaataggactgtatatactgttttaagaatgggctgaaatcaga

SEQ ID NO: 236116 - DNA, 120 bp, Artificial Sequence
  ENSG00000120156_31 (sequence is synthesized)
atgcctgtttgtggtttcatatgcaataatatatttttttaaaaatgtggacttcataggaaggcgtgagtacaattagtataatgcataactcattgttgtcctagatattttgatatt

SEQ ID NO: 236117 - DNA, 120 bp, Artificial Sequence
  ENSG00000120156_32 (sequence is synthesized)
tacctttatgttgaatgctattaaatgttttcctgtgtcaaagtaaaatattgttaataaacctaacaatgaccctgatagtacaggttaagtgagagaactatatgaattctaacaagt

SEQ ID NO: 236118 - DNA, 120 bp, Artificial Sequence
  ENSG00000120156_33 (sequence is synthesized)
cataggttaatatttaagacactgaaaaatctaagtgatataaatcagattcttctctctcaattttatccctcacctgtagcagccagtcccgtttcatttagtcatgtgaccactctg

SEQ ID NO: 236119 - DNA, 120 bp, Artificial Sequence
  ENSG00000120156_34 (sequence is synthesized)
tcttgtgtttccacagcctgcaagtcagtccaggatgctaacatctaaaaatagacttaaatctcattgcttacaagcctaagaatctttagagaagtatacataagtttaggataaaat

SEQ ID NO: 236120 - DNA, 120 bp, Artificial Sequence
  ENSG00000120156_35 (sequence is synthesized)
aatgggattttcttttcttttctctggtaatattgacttgtatattttaagaaataacagaaagcctgggtgacatttgggagacatgtgacatttatatattgaattaatatccctaca

SEQ ID NO: 236121 - DNA, 120 bp, Artificial Sequence
  ENSG00000120156_36 (sequence is synthesized)
tgtattgcacattgtaaaaagttttagttttgatgagttgtgagtttaccttgtatactgtaggcacactttgcactgatatatcatgagtgaataaatgtcttgcctactcacgtctca

SEQ ID NO: 236122 - DNA, 120 bp, Artificial Sequence
  ENSG00000120156_37 (sequence is synthesized)
agtttcccgcctatgagaggatacccctattgtttctgaaaatgctgaccgggacccacacttccaacaaaaattcctctgcccctacagcagcagcaaaagcagcagcagaagcaacag

SEQ ID NO: 236123 - DNA, 120 bp, Artificial Sequence
  ENSG00000120156_38 (sequence is synthesized)
caacagataagtgttttgatgaattgcgagatggatagggcttgagtgcccccagccctgctgataccaaatgcctttaagatacagcctttcccatcctaatctacaaaggaaacagga

SEQ ID NO: 236124 - DNA, 120 bp, Artificial Sequence
  ENSG00000120158_0 (sequence is synthesized)
aaaccacgtggacgcgtctgggctgctggaggcagcccgagccgccgccgtcggtgtcgccgccaccaccaccatcggagtcacgagtcccgcgtctgtccgaagtcgccgctctcgggc

SEQ ID NO: 236125 - DNA, 120 bp, Artificial Sequence
  ENSG00000120158_1 (sequence is synthesized)
tgctcacgtctcttcggagagcgcgcacatggcgactcaggcgcactccctcagctacgcagggtgcaacttcttgcgccaacgtctggtcctgtctaccctgagcgggcgccccgtcaa

SEQ ID NO: 236126 - DNA, 120 bp, Artificial Sequence
  ENSG00000120158_2 (sequence is synthesized)
aatccgaaagattcgggccagagacgacaacccgggcctccgagattttgaagccagcttcataaggctattggacaaaataacgaatggttctcgaattgaaataaaccaaacaggaac

SEQ ID NO: 236127 - DNA, 120 bp, Artificial Sequence
  ENSG00000120158_3 (sequence is synthesized)
aaccttatattatcagcctggcctcctgtatggtggatctgtggaacatgactgtagcgtccttcgtggcattgggtattacctggagagtcttctttgcttggctccatttatgaagca

SEQ ID NO: 236128 - DNA, 120 bp, Artificial Sequence
  ENSG00000120158_4 (sequence is synthesized)
cccgttaaaaatagttctacgaggagtgaccaatgatcaggttgacccttcagttgatgttcttaaggcaacagcactccctttgttgaaacaatttgggattgatggtgaatcatttga

SEQ ID NO: 236129 - DNA, 120 bp, Artificial Sequence
  ENSG00000120158_5 (sequence is synthesized)
actgaagattgtgcgacggggaatgcctcccggaggaggaggcgaagtggttttctcatgtcctgtgaggaaggtcttgaagcccattcaactcacagatccaggaaaaatcaaacgtat

SEQ ID NO: 236130 - DNA, 120 bp, Artificial Sequence
  ENSG00000120158_6 (sequence is synthesized)
tagaggaatggcgtactctgtacgtgtgtcacctcagatggcgaaccggattgtggattctgcaaggagcatcctcaacaagttcatacctgatatctatatttacacagatcacatgaa

SEQ ID NO: 236131 - DNA, 120 bp, Artificial Sequence
  ENSG00000120158_7 (sequence is synthesized)
aggagtcaactctgggaagtctccgggctttgggttgtcactggttgctgagaccaccagtggcaccttcctcagtgctgaactggcctccaacccccagggccagggagcagcagtact

SEQ ID NO: 236132 - DNA, 120 bp, Artificial Sequence
  ENSG00000120158_8 (sequence is synthesized)
ctgtgcccggctgctgctggaggaaatctacaggggtggatgcgtagactcgaccaaccaaagcctggcgctactactcatgacccttggacagcaggatgtttccaaagtcctgctagg

SEQ ID NO: 236133 - DNA, 120 bp, Artificial Sequence
  ENSG00000120158_9 (sequence is synthesized)
ccctctctctccctacacgatagaatttttgcggcatttgaagagctttttccagattatgtttaaaattgaaaccaagccatgtggtgaagaactcaagggtggggataaagtgctgat

SEQ ID NO: 236134 - DNA, 120 bp, Artificial Sequence
  ENSG00000120158_10 (sequence is synthesized)
gacctgtgttggcattggtttctccaaccttagcaagaccctcaagtgataaccatcacaagataaggccccaatgcctacagacaaagcagaagctgccacggacaccaatgggaccaa

SEQ ID NO: 236135 - DNA, 120 bp, Artificial Sequence
  ENSG00000120158_11 (sequence is synthesized)
gtccaaatggattaatccaggacagaatagccacttgcttaattttctgtgaagaaatatcaatatacaaataaaagacatccctgtagcatatggtttccagctgtttctccagtggca

SEQ ID NO: 236136 - DNA, 120 bp, Artificial Sequence
  ENSG00000120158_12 (sequence is synthesized)
ttgccattgcccaggaggggcccagtcaccatgagagctcccttgccttacctggaggaagaatgtgccttcaggccacagtcgtgctgctagaacagtctcgtagctgcagttcagctg

SEQ ID NO: 236137 - DNA, 120 bp, Artificial Sequence
  ENSG00000120158_13 (sequence is synthesized)
tgcttcctcagcctactatcataggcttcctcagccctctgtcatatggctgttttgcaaacctgtggagtctgttactgttctttctgcaaggactcacctccttgagccttggttttt

SEQ ID NO: 236138 - DNA, 120 bp, Artificial Sequence
  ENSG00000120158_14 (sequence is synthesized)
gttgtagggattaaatgagataatatgagtggcagctcttcatgagtcctgcagtgctaagcaaatgtcagaaattggtgtattagactatttatctttgatcttctgaatggattgctg

SEQ ID NO: 236139 - DNA, 120 bp, Artificial Sequence
  ENSG00000120158_15 (sequence is synthesized)
tcatggacacggacacggatcttcatctggttcattgtatttatatgtgagggatggatggctgcggggctccaagtaagttattgggatgtttttatattccaggtgtgctgtacattc

SEQ ID NO: 236140 - DNA, 120 bp, Artificial Sequence
  ENSG00000120158_16 (sequence is synthesized)
ttattttattttcacaatagctctgtgatgtaagtgctatctccatgagaaaattcataaagggtgttttgttcctttgaaatgtataatgtaaagacattaaatctcctcatttaagga

SEQ ID NO: 236141 - DNA, 120 bp, Artificial Sequence
  ENSG00000120158_17 (sequence is synthesized)
gaggtaaagcccttgcccttatagagtgtgtggtctcattgaagagcaagaacaaaatgtgcatatgtgaagagagatgtatgaatgacatccttaactccaggctgcaggtactctgta

SEQ ID NO: 236142 - DNA, 120 bp, Artificial Sequence
  ENSG00000120158_18 (sequence is synthesized)
agtgggcagcctcagacctcagaaggacagcacctgcttggtccaaagggtatgagattcaggactgtttgtctaagctgtctgtggtcaaaagtacattctggactgaagagatggtga

SEQ ID NO: 236143 - DNA, 120 bp, Artificial Sequence
  ENSG00000120158_19 (sequence is synthesized)
agaaaaaagttccttataaggcacagttttattacaaatgtatattgcttttgttatttactttgagatttagaggttaatcactccaggaggcagatgaaccaaaacttaggatcatca

SEQ ID NO: 236144 - DNA, 120 bp, Artificial Sequence
  ENSG00000120158_20 (sequence is synthesized)
aattcaggactattgttaacagttaccaaggtgccttttgttgttacctaagaaccttcaaaacagatgctctccgtctcatcatagttgacatgaactatagttctgctggctgtatat

SEQ ID NO: 236145 - DNA, 120 bp, Artificial Sequence
  ENSG00000120158_21 (sequence is synthesized)
ggattacagaggtaaagcccttgcccttatagagtgtgtggtctcattgaagagcaagaacaaaatgtgcatatgtgaagagagatgtatgcagaatgacatccttaactccaggctgca

SEQ ID NO: 236146 - DNA, 120 bp, Artificial Sequence
  ENSG00000120158_22 (sequence is synthesized)
gtgacagggcacccacaaaggcagacaaggactctgagaaccaacaggacttctctggtcttattctgaggctaagacaaaaaccgcacctgagccagatctctcagcctggcagctcca

SEQ ID NO: 236147 - DNA, 120 bp, Artificial Sequence
  ENSG00000120158_23 (sequence is synthesized)
ggacccgtgggccctgccactggcccatctcaacggctaggacctagagcatcatcaagctgcaggttaaacaggttggttggttctgatttgactgcacctctacaaggacctatggct

SEQ ID NO: 236148 - DNA, 120 bp, Artificial Sequence
  ENSG00000120158_24 (sequence is synthesized)
gcacttgttgatactttcccgaggagccacaacactgagcaatgaggggaggagcatgtgttagttcattcatcaagtcctaaatgttaactactatgtgccaggtgctgagccaggcac

SEQ ID NO: 236149 - DNA, 120 bp, Artificial Sequence
  ENSG00000120158_25 (sequence is synthesized)
catgtgaaagagaagtatgaaataattatacgttatttttttttagtttttgagatggagtttcacttttgtcccccaggctggagtgcggtggtgtgacctcagctcactgcaacctct

SEQ ID NO: 236150 - DNA, 120 bp, Artificial Sequence
  ENSG00000120158_26 (sequence is synthesized)
agtgctgggattgcaggcgtgagccacggcacctcacaaattacacattattcaactgtaactgtgaaagtgattctaaggaaaaagtacagagagctgtgggaaaacataataggaaat

SEQ ID NO: 236151 - DNA, 120 bp, Artificial Sequence
  ENSG00000120158_27 (sequence is synthesized)
acagagagctgtgggaaaacataataggaaatctttgtcattctgtcactattgtctattaggctgtcactgttgtcattgtcacccctaccctctcgcagagagtggttcccatttgcc

SEQ ID NO: 236152 - DNA, 120 bp, Artificial Sequence
  ENSG00000120158_28 (sequence is synthesized)
agagctcatttattgtcctgaaggtctgtgaaaagatgacaaagtcgtgttgccttctttccactttcccaagtctcacgtgagcacccctaactggcagaatcaattcacacccacaag

SEQ ID NO: 236153 - DNA, 120 bp, Artificial Sequence
  ENSG00000120158_29 (sequence is synthesized)
cctagctgcaaggggacctgggaaatgtattcccagctttccaacctctccacccaggagatgaaacagccaatttaggccaggtgcaatggcttacacatgtaaaaccagcactatggg

SEQ ID NO: 236154 - DNA, 120 bp, Artificial Sequence
  ENSG00000120158_30 (sequence is synthesized)
caggagtttgagaccagcctggacaacagggcgagaccatcatctctacaaaaaatacaaaaaaaattagctaggcgtggtgtcctgtgcctgtggtcccagctcctcaggaggctgagg

SEQ ID NO: 236155 - DNA, 78 bp, Artificial Sequence
  ENSG00000120158_31 (sequence is synthesized)
aattagctaggcgtggtgtcctgtgcctgtgatcgaggctgcagtgagccgtgatcgcgccactgcactccagtctgg

SEQ ID NO: 236156 - DNA, 120 bp, Artificial Sequence
  ENSG00000120159_0 (sequence is synthesized)
agtgcctgccgcccacggccgcaggagtcgggcttcggtcgcaccagagacagcggactttcctccgatggttgcagcagagggatcatgacggggaaaaagtcctcccgggagaaacgg

SEQ ID NO: 236157 - DNA, 120 bp, Artificial Sequence
  ENSG00000120159_1 (sequence is synthesized)
cgcaaacgtagcagtcaggaggcggccgcagcgctcgcggccccggacatcgtacccgcgttggccagcggcagcagtggaagcactagcggctgcgggagcgccgggggctgcgggagc

SEQ ID NO: 236158 - DNA, 120 bp, Artificial Sequence
  ENSG00000120159_2 (sequence is synthesized)
gtcagctgctgtgggaacgccaattttagtggaagtgtcaccggcggtgggagcggcggcagctgttggggcgggagcagcgtggagcgcagcgagcgccggaagcggaggagtaccgac

SEQ ID NO: 236159 - DNA, 120 bp, Artificial Sequence
  ENSG00000120159_3 (sequence is synthesized)
tcttccagcgtctcgggctccttgcagcaggaaactaaatatattttgccaactttggaaaaagaattattcttggcagagcacagtgaccttgaagaaggtggactggacctgactgtg

SEQ ID NO: 236160 - DNA, 120 bp, Artificial Sequence
  ENSG00000120159_4 (sequence is synthesized)
tcattgaaaccagttagtttctatatatcagacaaaaaagaaatgcttcagcagtgcttctgtattataggagagaaaaagttacagaagatgcttcctgatgtgttaaagaactgttca

SEQ ID NO: 236161 - DNA, 120 bp, Artificial Sequence
  ENSG00000120159_5 (sequence is synthesized)
atagaagaaattaaaaaactatgccaggaacagttagagctcctgtctgaaaaaaaaattttgaagattcttgagggtgacaatggaatggactctgatatggaagaggaagcagatgat

SEQ ID NO: 236162 - DNA, 120 bp, Artificial Sequence
  ENSG00000120159_6 (sequence is synthesized)
ggttctaagatgggatctgatttagtcagtcagcaagacatctgtatagattctgcttcatccgtgagagagaataagcaacctgaaggtttggaattaaaacaaggaaaaggggaagat

SEQ ID NO: 236163 - DNA, 120 bp, Artificial Sequence
  ENSG00000120159_7 (sequence is synthesized)
agtgatgtactcagtataaatgcagatgcttatgacagcgacatagaaggcccatgcaacgaagaagcagctgctcccgaggcaccagaaaatacagtccaaagtgaagctggtcagata

SEQ ID NO: 236164 - DNA, 120 bp, Artificial Sequence
  ENSG00000120159_8 (sequence is synthesized)
gatgacctggagaaagacattgagaaaagtgtgaatgagattctaggactggcagagtctagcccaaacgaacccaaagcagccaccctggctgttcctccaccagaagatgttcaacct

SEQ ID NO: 236165 - DNA, 120 bp, Artificial Sequence
  ENSG00000120159_9 (sequence is synthesized)
tctgcacagcaactggagctgctagaacttgagatgagggcaagagcgattaaagccctaatgaaagctggtgatataaaaaagccagcctaggtatttaacttgattttgaattttagg

SEQ ID NO: 236166 - DNA, 120 bp, Artificial Sequence
  ENSG00000120159_10 (sequence is synthesized)
tatgtttgaacaaagccacatcatttaattttgtatctaaaatttatttggggtcttatatgttatttctcatgtaacccttattaggactcattttagccctaaattacctgtggctgt

SEQ ID NO: 236167 - DNA, 120 bp, Artificial Sequence
  ENSG00000120159_11 (sequence is synthesized)
ttataaatgtgtgttactgtcttatgaattcatggcaatatagttggatagcctggatactttgttagatgagtatttagctgtgtctgcaaatcttaaaagccattagcaaagagtcgt

SEQ ID NO: 236168 - DNA, 120 bp, Artificial Sequence
  ENSG00000120159_12 (sequence is synthesized)
ggtatttttttctttatttttaaatgtttgggcaccaaacctaaaagcaaaagattgacgaagcatgtttctcttaaggctacttgtattttacaatacaatattaaattatttaatttg

SEQ ID NO: 236169 - DNA, 120 bp, Artificial Sequence
  ENSG00000120159_13 (sequence is synthesized)
agaaatttagttttgcttatatgcactttttaaatatatactattttgaagattccttatgtaaatgcaaatttcctagttaaaaccgaataacagagatctgaaatgactgagaaaaac

SEQ ID NO: 236170 - DNA, 120 bp, Artificial Sequence
  ENSG00000120159_14 (sequence is synthesized)
ttttttattaaaggaaggaattaatttaaggcaatttttaactatgtagaactaattgcccatgtttaattatagcagacacgccattctaacaggtatttgataccattggatgcatta

SEQ ID NO: 236171 - DNA, 120 bp, Artificial Sequence
  ENSG00000120159_15 (sequence is synthesized)
ttctaggttttttctttaataaaaatggaacaagttttcatttacattccaagctgtcaggaaatgaagaatattttattatctaggattttatctgatgtagttgcttaaagatctgat

SEQ ID NO: 236172 - DNA, 120 bp, Artificial Sequence
  ENSG00000120159_16 (sequence is synthesized)
gtgctataattccatgaatcagaaataataaaatgctatcattctggatctgaagacttttgatactttttcaaaagcaaaattaatttcaggaacctttgataagttgttgttataatt

SEQ ID NO: 236173 - DNA, 120 bp, Artificial Sequence
  ENSG00000120159_17 (sequence is synthesized)
aatctaattttgtatagtttttgtaaataaattaccatccttccacaattagggatgcttttatccccccatcactaattgcagttgtttgataccaaaataaatttacgtagagatcct

SEQ ID NO: 236174 - DNA, 120 bp, Artificial Sequence
  ENSG00000120159_18 (sequence is synthesized)
taacttaaaataaattaattttttcaaaaaacataaatctggaactgttgtttctatatttgataacaaatacagtatattttatttataagccatggtctactgatactgtatgaggac

SEQ ID NO: 236175 - DNA, 120 bp, Artificial Sequence
  ENSG00000120159_19 (sequence is synthesized)
tttccttatatataaaagttgcagggattgtgttttattagctgctttaattatgttaattttagagagtttttaaatggaaatagaggacatttatgaaacgctggaattgcagttaca

SEQ ID NO: 236176 - DNA, 120 bp, Artificial Sequence
  ENSG00000120159_20 (sequence is synthesized)
aattctttttgttgttgttgttcctgaacatgccttggaataattctaccattttttccccctccataaatctttctaataaagcatagaaaaagcctatatgattttaaatgcttctct

SEQ ID NO: 236177 - DNA, 120 bp, Artificial Sequence
  ENSG00000120159_21 (sequence is synthesized)
taagctggtaaacagatttgagttatgagttcattgttattgcttcaagatgaaaagacagtgatataatttttctatttcaacttaaaagtaatagttaatatgctaaagtagtacaga

SEQ ID NO: 236178 - DNA, 120 bp, Artificial Sequence
  ENSG00000120159_22 (sequence is synthesized)
ataaactttattgctgcttactaactacaaaatactgtagatggcatctgtatgattaaacatataaagtaaaacaggtctgagggctttgtagatgattaaagtctccaccttcatgaa

SEQ ID NO: 236179 - DNA, 120 bp, Artificial Sequence
  ENSG00000120159_23 (sequence is synthesized)
tcttccagcgtctcgggctccttgcagcaggtgcgtgcgcgcccctctggccgcttcctggagctgctgctttttcggaagaagtcgggcttccagagggatggggcgcaggctggagct

SEQ ID NO: 236180 - DNA, 120 bp, Artificial Sequence
  ENSG00000120159_24 (sequence is synthesized)
tgggatctgatttagtcagtcatcaatttactgcctcatcctgctgctcaagcactgggttagatgattagcagtcaccaagctgtggtagtttattacaaaattcataggaaacaaata

SEQ ID NO: 236181 - DNA, 120 bp, Artificial Sequence
  ENSG00000120159_25 (sequence is synthesized)
cactaggcaaattcacaaatctcctgaattcaatccgtatacctggcagtaaagaggtggagatggtccaagaatccatgttaaggtcccaagcttcaaaggcaagacatctgtatagat

SEQ ID NO: 236182 - DNA, 120 bp, Artificial Sequence
  ENSG00000120160_0 (sequence is synthesized)
ataatgtcctagttagacacaggacctgctgggccacagaaaggaggctctgggtagacgcactagattactggataaatcacttcaatttcccaatgaattttatattgtttattttta

SEQ ID NO: 236183 - DNA, 120 bp, Artificial Sequence
  ENSG00000120160_1 (sequence is synthesized)
tacctggagttttttccttaaaaagtagcactttgaagcctactattgaagcattgcctaatgtgctacctttaaatgaagatgttaataagcaggaagaaaagaatgaagatcatactc

SEQ ID NO: 236184 - DNA, 120 bp, Artificial Sequence
  ENSG00000120160_2 (sequence is synthesized)
ccaattatgctcctgctaatgagaaaaatggcaattattataaagatataaaacaatatgtgttcacaacacaaaatccaaatggcactgagtctgaaatatctgtgagagccacaactg

SEQ ID NO: 236185 - DNA, 120 bp, Artificial Sequence
  ENSG00000120160_3 (sequence is synthesized)
acctgaattttgctctaaaaaacgataaaactgtcaatgcaactacatatgaaaaatccaccattgaagaagaaacaactactagcgaaccctctcataaaaatattcaaagatcaaccc

SEQ ID NO: 236186 - DNA, 120 bp, Artificial Sequence
  ENSG00000120160_4 (sequence is synthesized)
attccagagtctgatgtgaatgctacacagggagaaaatcagccagatctagaggatctgaagatcaaaataatgctgggaatctcgttgatgaccctcctcctctttgtggtcctcttg

SEQ ID NO: 236187 - DNA, 120 bp, Artificial Sequence
  ENSG00000120160_5 (sequence is synthesized)
gcattctgtagtgctacactgtacaaactgaggcatctgagttataaaagttgtgagagtcagtactctgtcaacccagagctggccacgatgtcttactttcatccatcagaaggtgtt

SEQ ID NO: 236188 - DNA, 120 bp, Artificial Sequence
  ENSG00000120160_6 (sequence is synthesized)
tcagatacatccttttccaagagtgcagagagcagcacatttttgggtaccacttcttcagatatgagaagatcaggcacaagaacatcagaatctaagataatgacggatatcatttcc

SEQ ID NO: 236189 - DNA, 120 bp, Artificial Sequence
  ENSG00000120160_7 (sequence is synthesized)
ataggctcagataatgagatgcatgaaaacgatgagtcggttacccggtgaagaaatcaaggaacccggtgaagaaatcttattgatgaataaataactttaattattttgtcatcaaaa

SEQ ID NO: 236190 - DNA, 120 bp, Artificial Sequence
  ENSG00000120160_8 (sequence is synthesized)
aaaaactcagaggaagaaaaaggtaaaggaaaaaaagtgacttagctagttgctgaagactttcgcttttgtttttagatgtgttcacaacacaaaatccaaatggcactgagtctgaaa

SEQ ID NO: 236191 - DNA, 120 bp, Artificial Sequence
  ENSG00000120160_9 (sequence is synthesized)
cctggagaatatcattatgtgacttaaaaatttaagtttcactactctgagcattacataaagccatagcatgcttaaagaatttatactgctaccttttaaagtcactaaaatctttta

SEQ ID NO: 236192 - DNA, 120 bp, Artificial Sequence
  ENSG00000120160_10 (sequence is synthesized)
aatggtgaatgtctaacagtcagtcttcaggtatacctgacaaaggatgagaaatgagcttttgtagaaatagaactttattttaataaaaatgtgttacatttgtgtctatattaaata

SEQ ID NO: 236193 - DNA, 120 bp, Artificial Sequence
  ENSG00000120162_0 (sequence is synthesized)
gcgcgctgggtgcatgagggggctgctccggagcgacggcggctgcagctggagccaggcgctcgcccgtccgccggttggctcgccgggacctcgcgcaccggcggcagagtcccttgc

SEQ ID NO: 236194 - DNA, 120 bp, Artificial Sequence
  ENSG00000120162_1 (sequence is synthesized)
cgcaccggcggcagagtcccttgcgtggattggcaagcgacgccccacctgccccgagctcaccattttctttcgcgctggctgcagctgacccggcgaagggagccgaccgggccctgg

SEQ ID NO: 236195 - DNA, 120 bp, Artificial Sequence
  ENSG00000120162_2 (sequence is synthesized)
gctggaggtaaaaccccacggaaagaacatgaggttcccttggaaatcattcaagaggaagatggaaggggctgtttagaagagcttaaaagctacaggctgtaagactggggcctgagt

SEQ ID NO: 236196 - DNA, 120 bp, Artificial Sequence
  ENSG00000120162_3 (sequence is synthesized)
gctggcagtggaaaacactgttgggctgtgatctctccctgaaaagttccaggtgccttttcgcttcctgcaaaagaaaggaagcgaaagagaagaccatgtccatagccctgaagcagg

SEQ ID NO: 236197 - DNA, 120 bp, Artificial Sequence
  ENSG00000120162_4 (sequence is synthesized)
tattcaacaaggacaagaccttccgacccaagaggaaatttgaacctggcacacagaggtttgagctgcacaaacgggctcaggcatccctcaactcgggtgtggacctgaaggcggctg

SEQ ID NO: 236198 - DNA, 120 bp, Artificial Sequence
  ENSG00000120162_5 (sequence is synthesized)
tgcagttgcccagtggggaggaccagaatgactgggtggcagtacatgtggtggacttcttcaatcggatcaacctcatctatggcaccatctgtgagttctgcaccgagcggacctgtc

SEQ ID NO: 236199 - DNA, 120 bp, Artificial Sequence
  ENSG00000120162_6 (sequence is synthesized)
ctgtgatgtcagggggccccaaatatgagtatcggtggcaggatgatctcaagtataagaagccaacagcgctgccagctccccagtacatgaaccttcttatggattggattgaggttc

SEQ ID NO: 236200 - DNA, 120 bp, Artificial Sequence
  ENSG00000120162_7 (sequence is synthesized)
agatcaacaacgaggaaatatttccaacatgcgtgggtgttcccttcccaaagaacttccttcagatctgcaagaagatcctgtgccgccttttccgggtctttgtccacgtctatatcc

SEQ ID NO: 236201 - DNA, 120 bp, Artificial Sequence
  ENSG00000120162_8 (sequence is synthesized)
accacttcgaccgggtcattgtgatgggtgcagaggcccatgtcaacacctgctacaaacacttctattactttgtcacagagatgaacctcatagaccgcaaggagctagagcctttga

SEQ ID NO: 236202 - DNA, 120 bp, Artificial Sequence
  ENSG00000120162_9 (sequence is synthesized)
aagaaatgacgagcaggatgtgtcactaatgctccacctcaccctttggaagaaaggaaagctgtttcctcctggtgccctgagcgggcaggaggtggaccaccctggctgaaatgacac

SEQ ID NO: 236203 - DNA, 120 bp, Artificial Sequence
  ENSG00000120162_10 (sequence is synthesized)
acctactcccaggaacagcagaggtggaggcaagcagtgactcctgagagacattccccactcactttgtgtgctcttaaccttctgagtgctgctagcccagacctgtggacgaggcag

SEQ ID NO: 236204 - DNA, 120 bp, Artificial Sequence
  ENSG00000120162_11 (sequence is synthesized)
accacaacgtgaaagaaggaccagccccttgaccgttctggctggggaattgtccacgaggaagcctctgcacttccacacatggcacagttctgcctgtgacctgccgcctaagcttta

SEQ ID NO: 236205 - DNA, 120 bp, Artificial Sequence
  ENSG00000120162_12 (sequence is synthesized)
ctggaattcaggttttgagactgagatgcgtgttcgtatttttccacttatctgtcttgtcagctggccgacttctctgtgattggttttttaagtgccgggtgaattttggacctctgg

SEQ ID NO: 236206 - DNA, 120 bp, Artificial Sequence
  ENSG00000120162_13 (sequence is synthesized)
atgtgcagcaagtttttatgcaataagccttcctttcaggtctctaaaagctcctgctctgatctgtggtttaacactgtgcagggctgtggagctctgagacacctgaacccctaccca

SEQ ID NO: 236207 - DNA, 120 bp, Artificial Sequence
  ENSG00000120162_14 (sequence is synthesized)
tcccctgcacctccctactctccctgccgaggcgtccatagcatttccctaataaatagttttatcagggacactccatggggtggcttgtctctgccccaaacagggtcttcacgttct

SEQ ID NO: 236208 - DNA, 120 bp, Artificial Sequence
  ENSG00000120162_15 (sequence is synthesized)
aactgcagggaagagactggttactagcgtaaagctgacaagttaccagttcacctgatcagaatgtattttttataaccaccatcattccttgtctcttcagtggaagatattctttcc

SEQ ID NO: 236209 - DNA, 120 bp, Artificial Sequence
  ENSG00000120162_16 (sequence is synthesized)
tgtttcccagaagagagaaataaaagtcctaaataactaagaatgatcagcgggagcgttgggcatgattactgcagtgtttgttctttattaaagacagggagtcgtggctgtctctac

SEQ ID NO: 236210 - DNA, 120 bp, Artificial Sequence
  ENSG00000120162_17 (sequence is synthesized)
ataatactaacatttcagtgaaaaaagtacaattggttatttggtacgtgtagatttaacacccagacggctgacttgtaaccctccccactagccttctgagcatttaaacccagccgt

SEQ ID NO: 236211 - DNA, 120 bp, Artificial Sequence
  ENSG00000120162_18 (sequence is synthesized)
cattctctccccactccacgctccccactcctctgccacgttatgttacggcacaaaattaatttctgcccctgtgattgggccacggttgccaaggtaacagtggagctggagctaact

SEQ ID NO: 236212 - DNA, 120 bp, Artificial Sequence
  ENSG00000120162_19 (sequence is synthesized)
tccttctttcatcctttccaatttttctattccagaagacagtcagaataatgcattctgtactacatcctgccttttgaaacctaaatgagttttcgttgatgaaatgttgccttctct

SEQ ID NO: 236213 - DNA, 120 bp, Artificial Sequence
  ENSG00000120162_20 (sequence is synthesized)
gattcattcacaaaactgtggtggttctgaccacctgtgacgaggggggtcataatacttccagtgatccttttaatttagcaaaatatttgtcggtggagggaagtagataagaatgta

SEQ ID NO: 236214 - DNA, 120 bp, Artificial Sequence
  ENSG00000120162_21 (sequence is synthesized)
ttagtgtattttaaagtaataatgattaaagaataactaaatgactctgattttgttttatcaatcataatgtgttaaagccctctgtggctgccacaaaagactagaatcatgaaatct

SEQ ID NO: 236215 - DNA, 120 bp, Artificial Sequence
  ENSG00000120162_22 (sequence is synthesized)
ttgtccaagctaagaaagggctgtctctgtgggtacagtggcattctctgttgacctaaccaagcagcctgaaccttgctttgtgtctcgtaaaggtcatctcacggaatccaattgctg

SEQ ID NO: 236216 - DNA, 120 bp, Artificial Sequence
  ENSG00000120162_23 (sequence is synthesized)
ctacctcaccatgttgctgtgccctggtcaacaataaacatacttttgtcccccttcctaagtaactttgagaggacaagataggcaaagttttttccctacatctcttttggccaaaag

SEQ ID NO: 236217 - DNA, 120 bp, Artificial Sequence
  ENSG00000120162_24 (sequence is synthesized)
aatatctgaccatcacagagatccagagaacagaaacaagagcccctaagtcccagcctctgcaatacacagttaccagatgggaatgcagcacagtggcacagagaggtaactacggag

SEQ ID NO: 236218 - DNA, 120 bp, Artificial Sequence
  ENSG00000120162_25 (sequence is synthesized)
cccatgccctggaggaactctgtagctgtgcatcatggaacgccacaggatttttacattaaaaagttgaatatgttcctgcatttcagcagtgcataatcgagcaggaggctggaatct

SEQ ID NO: 236219 - DNA, 120 bp, Artificial Sequence
  ENSG00000120162_26 (sequence is synthesized)
ggagacctttgttattcattctttttaaggttattttttattaactgtgcatatgaaatttccactcaatttaaaaatccaaatctttttaagcttcttggaagaatttcctcctgctta

SEQ ID NO: 236220 - DNA, 120 bp, Artificial Sequence
  ENSG00000120162_27 (sequence is synthesized)
aattgcactaatgaactcttctagggtaaattctggcaaactaccctttttttttttttaatcacagaatattcctgttcccacagaactttggcacattctgaagaaaatctctgcagt

SEQ ID NO: 236221 - DNA, 120 bp, Artificial Sequence
  ENSG00000120162_28 (sequence is synthesized)
caatttttatctcctctgcttgactgcatctaactgttcatctctgttataaatggagcttcagccctctgggtcagagactgacaaccctccttcttcttcctaacctgtcctactctc

SEQ ID NO: 236222 - DNA, 120 bp, Artificial Sequence
  ENSG00000120162_29 (sequence is synthesized)
cttctttttctgctttcattttaattttgggaaattttaaagtaaaagtttcaaagttgaaagattatagtgagtacccttatgtcctttagtgcatcagttgttaatgttttgccttgt

SEQ ID NO: 236223 - DNA, 120 bp, Artificial Sequence
  ENSG00000120162_30 (sequence is synthesized)
tttcttttcttccttttttttttttaagagaaggggtctctccctattttacccaagctggccttgaaccccttgcctcaagtgagcttcaaccttagcctcctgagtagccaggactat

SEQ ID NO: 236224 - DNA, 120 bp, Artificial Sequence
  ENSG00000120162_31 (sequence is synthesized)
ggcatgtaccaccgcacctgcctcacattttctttctcactgtaaatacacattcttattcttgaaccttctgaaaataagttgcagacatcatgaaaatgtaaaatacttcatcatatt

SEQ ID NO: 236225 - DNA, 120 bp, Artificial Sequence
  ENSG00000120162_32 (sequence is synthesized)
ctttcttttaataagagcattgtcctataaatctgcaatattttcacgcccatgaaactgaacactgatactgcataaatctaatatatgatccatattcaaaattctccagttgtcccc

SEQ ID NO: 236226 - DNA, 120 bp, Artificial Sequence
  ENSG00000120162_33 (sequence is synthesized)
aaaatatcctttatagctgtttatttttaaatccaggatccaatcaagaattatacgttatatgtagttgtcattctcttttgtttcctttaattgattagagttgcccttttgtgtgtg

SEQ ID NO: 236227 - DNA, 120 bp, Artificial Sequence
  ENSG00000120162_34 (sequence is synthesized)
tctgagtggtgggtggtggggtggtgtttgtgtatgatgtgcagtgtgtgtgtgtgtggtgtgtctttcatgacactgacattattaaagagttcaggcaagtttgtggaatgtcccaca

SEQ ID NO: 236228 - DNA, 120 bp, Artificial Sequence
  ENSG00000120162_35 (sequence is synthesized)
atctagacttttttactgattgtttcctcattacgagatacaggttacattttttttcccaagactgctacatgtgtgatgttgtttccttactactgcctcacctcaggaagcacataa

SEQ ID NO: 236229 - DNA, 120 bp, Artificial Sequence
  ENSG00000120162_36 (sequence is synthesized)
tgtctacttgtctcttttctgatattaggactgatcaggtgttgtctgcctgatccaatcattatcaagttccataattcattattaagctctgaaattcaggacacatacatttataga

SEQ ID NO: 236230 - DNA, 120 bp, Artificial Sequence
  ENSG00000120162_37 (sequence is synthesized)
gtgtgaggctgtgcatacgtacattcatcccttaatgttctcaaggaggcccaggatccccaaaatattataagcattgcagtcagatgatatagcactagcaaagcattcatccctttc

SEQ ID NO: 236231 - DNA, 120 bp, Artificial Sequence
  ENSG00000120162_38 (sequence is synthesized)
catataacaggagggaggggaagaaggaagtttccatgtgcaggcaatacgtgagagcatgggcaagtgaggatttgtatgctccctgtagccagaggtgaaatattcaacgcttttatt

SEQ ID NO: 236232 - DNA, 120 bp, Artificial Sequence
  ENSG00000120162_39 (sequence is synthesized)
ttttctcccgtcttcaatgacctcccatttggacccatagtttatttatagagagcacacactccctaattgtcagatggtttttttgggaaaactcttagatagtacagtgagttgtga

SEQ ID NO: 236233 - DNA, 120 bp, Artificial Sequence
  ENSG00000120162_40 (sequence is synthesized)
ccctccaaaggatcacaagtacataaacagatacaaagtatttatgtggtattaaaatttcatggtgatggtgcaagggagagatgattaggaagaaaatgtcttacacggctgtaattg

SEQ ID NO: 236234 - DNA, 120 bp, Artificial Sequence
  ENSG00000120162_41 (sequence is synthesized)
agaaatactgatctagagtcatttcctgcttcttaaattgttcgttttctcttccctgggtattttctcatttccaaagacccagagtctcagagccaggttaagtggaagaaactttga

SEQ ID NO: 236235 - DNA, 120 bp, Artificial Sequence
  ENSG00000120162_42 (sequence is synthesized)
gaggtttcttaatcaattccttctatctctcaaaccatgccagtaacttccttggtgaaaaaatctatactcctctcacagttcttcgggcatggaaattctatagcattctttggtata

SEQ ID NO: 236236 - DNA, 120 bp, Artificial Sequence
  ENSG00000120162_43 (sequence is synthesized)
accaacccactgaaccctccacaacatcttgaattccattcaactcgagctgaagtattctttttgagtttcagtatatcttttctagtgtcccacttttagaaaggtccaaagatgata

SEQ ID NO: 236237 - DNA, 120 bp, Artificial Sequence
  ENSG00000120162_44 (sequence is synthesized)
tataataagtgaaaatacaattaatcagagctttatttgcatatccattaaatatctgaaggctattaccagttgtgcttcagcctcctttcccttgcaattctcccagggtggcatcct

SEQ ID NO: 236238 - DNA, 120 bp, Artificial Sequence
  ENSG00000120162_45 (sequence is synthesized)
ctacggagtcttgttgctccattgttgaccactgatgtaactcaacgtgaaaccttcccaaagctctccacatcactctctgttatggctgtgaccagcagtgaacatgaaaagaactta

SEQ ID NO: 236239 - DNA, 120 bp, Artificial Sequence
  ENSG00000120162_46 (sequence is synthesized)
tttcatgccttctccaaactatattgtttctttgctaagtccagacctgctttttctacatttataggttttctattttaatcgccatgcaaaattctttatcatactcaatcattttgg

SEQ ID NO: 236240 - DNA, 120 bp, Artificial Sequence
  ENSG00000120162_47 (sequence is synthesized)
tttatcttcctgacttcttacctttaacatccctgttaaagattacactgttgttgtttcaaaaaaaaaaaaaaaaaaaccttaattggcaaaacattaagggacttgaatagaattaca

SEQ ID NO: 236241 - DNA, 120 bp, Artificial Sequence
  ENSG00000120162_48 (sequence is synthesized)
cttatctttttgtgctgatttatgtcaatccatcattctggttattgatggaagcaaattgcttcctatgttctctaaaccttatgtcccttccatactccatgagtaccacactgggag

SEQ ID NO: 236242 - DNA, 120 bp, Artificial Sequence
  ENSG00000120162_49 (sequence is synthesized)
aaaacaaaagcaaaaagattgtgggaaaagtatagccattatctttgaggaaatgtgtaccaaggcacaatcattaaaaggagttggaggcatcatttggttgacactgttgtcattctt

SEQ ID NO: 236243 - DNA, 120 bp, Artificial Sequence
  ENSG00000120162_50 (sequence is synthesized)
gttctgatcattttggaccttgaagaaattggtgattctctcctagaattagacaaacaaagtgtgtttggaaataatgattgttttcctgccttaaaaaatatattaacagaaagcttt

SEQ ID NO: 236244 - DNA, 120 bp, Artificial Sequence
  ENSG00000120162_51 (sequence is synthesized)
tataacaggctgtttccctctggacaggtattaattctgagtaagaattttcagtgactacataaggatttgtgtaacttatgaaggaagagtccatttctaatcaaataattcgcctgt

SEQ ID NO: 236245 - DNA, 120 bp, Artificial Sequence
  ENSG00000120162_52 (sequence is synthesized)
tttactagcttatagtgatctgatttcagaattttcctgtatcttttttacatacatcagaaaaagaaatgtttactatatttttggttccatttatgattgtattaagcatttgactat

SEQ ID NO: 236246 - DNA, 120 bp, Artificial Sequence
  ENSG00000120162_53 (sequence is synthesized)
aaggaaaactaacaattaaatcaattagaaaagcaacataaaattaaatgatatttaggaaatcagttatatgtgagcttgggtattcaaatgtcacaaataaaaagcatataaccatta

SEQ ID NO: 236247 - DNA, 120 bp, Artificial Sequence
  ENSG00000120162_54 (sequence is synthesized)
ctagcaaggaggccagtgcagctggagtgtggaaatggaggaagttggaggtagacaaattatgtgaggccacagtaaggttttgggactttattctgaggatgacgagaaaccagttga

SEQ ID NO: 236248 - DNA, 120 bp, Artificial Sequence
  ENSG00000120162_55 (sequence is synthesized)
ggattttcagcagaaatgtgaagtaacccccgccccccggcctggtgttttaaaagaactactctggctgctttgtagagaactgcgtggtttgaaaggagcacccaaggtgagcaaaaa

SEQ ID NO: 236249 - DNA, 120 bp, Artificial Sequence
  ENSG00000120162_56 (sequence is synthesized)
aaaagacctgcactttatgctactctcacttaactcactctagggctgtgtgcctcaattctttgcctataaaatggaggtgagagtggccgggcatgttggctcacgcctgtaatccca

SEQ ID NO: 236250 - DNA, 120 bp, Artificial Sequence
  ENSG00000120210_0 (sequence is synthesized)
attgcacaacgcggaggactagcctggggtcacagggatgccgcggctcctccgcttgtccctgctgtggcttggactcctgctggttcggttttctcgtgaactgagcgacatcagcag

SEQ ID NO: 236251 - DNA, 120 bp, Artificial Sequence
  ENSG00000120210_1 (sequence is synthesized)
tgccaggaagctgtgcggcaggtacttggtgaaagaaatagaaaaactctgcggccatgccaactggagccagttccgtttcgaggaggaaacccctttctcacggttgattgcacaggc

SEQ ID NO: 236252 - DNA, 120 bp, Artificial Sequence
  ENSG00000120210_2 (sequence is synthesized)
ctcggagaaggtcgaagcctacagcccataccagttcgaaagcccgcaaaccgcttccccggcccggggaagaggcacaaacccagtgtctacttcttgggaagaagcagtaaacagttg

SEQ ID NO: 236253 - DNA, 120 bp, Artificial Sequence
  ENSG00000120210_3 (sequence is synthesized)
atgcagtcactacctgagtataaggataaaaagggatattcaccccttggtaagacaagagaattttcttcatcacataatatcaatgtatatattcatgagaatgcaaaatttcagaag

SEQ ID NO: 236254 - DNA, 120 bp, Artificial Sequence
  ENSG00000120210_4 (sequence is synthesized)
aaacgtagaaacaaaattaaaaccttaagcaatttgttttgggggcatcatccccaaagaaaacgcagaggatattcagaaaagtgttgtcttacaggatgtacaaaagaagaacttagc

SEQ ID NO: 236255 - DNA, 120 bp, Artificial Sequence
  ENSG00000120210_5 (sequence is synthesized)
attgcatgtcttccatatattgattttaaaaggctaaaggaaaaaagatcatcacttgtaactaagatatactaaccatcttagaattttttctaacctaataaaagcttaatacattta

SEQ ID NO: 236256 - DNA, 90 bp, Artificial Sequence
  ENSG00000120210_6 (sequence is synthesized)
tagatgccagccagagctttcctgtatgagtgacataaggaactgcattgaatctgcagattgctttgcgcagtatgggaaaggacaccc

SEQ ID NO: 236257 - DNA, 120 bp, Artificial Sequence
  ENSG00000120210_7 (sequence is synthesized)
agtatgggaaaggacacccttttcaataaatggtgctggtaaattggattgccatatgcagaagaatgaaactggacccatatttatcaccatatagaaaaattaactcgatcgattaca

SEQ ID NO: 236258 - DNA, 120 bp, Artificial Sequence
  ENSG00000120210_8 (sequence is synthesized)
gacttaaatgtaagatctgaaactagaaaaatactagaaaaaaaacctagagaaaactttaatggaaatgagtgtaaacaaagaattcatggcaaagacctcaaaagcataggcaacaaa

SEQ ID NO: 236259 - DNA, 120 bp, Artificial Sequence
  ENSG00000120210_9 (sequence is synthesized)
accaaaaatagacaaatgagactttattaagctaaaaaatttcagcatagcaaaatcaataatcaacagaatgaacagaaaacctgcataatcggagaaaatatttgcaaactttgtatc

SEQ ID NO: 236260 - DNA, 120 bp, Artificial Sequence
  ENSG00000120210_10 (sequence is synthesized)
tgacaaggaactaccatccagaatttataaggaactcaagcaattcaaccaaaaccccctaataatcgtgttaaaaagtggacaaaggagatcaatagacattttcaaaagaagacaccc

SEQ ID NO: 236261 - DNA, 87 bp, Artificial Sequence
  ENSG00000120210_11 (sequence is synthesized)
gacaaaggagatcaatagacattttcaaaagaagacacccaaactgacaagaggcatatgaaaaaatgctaatcactaatcactgcc

SEQ ID NO: 236262 - DNA, 120 bp, Artificial Sequence
  ENSG00000120210_12 (sequence is synthesized)
aaactcagtttcaagtttctttgtcaacaacaacctttactcctattaccaagaatttctattcaacaaactgcaaagcagttataaaagtaataaaggtaaaaaaaagtggtaccatga

SEQ ID NO: 236263 - DNA, 120 bp, Artificial Sequence
  ENSG00000120211_0 (sequence is synthesized)
agtctggagcccagaagggacacaccagcacagtctggtaggctacagcagcaagtctctaaagaaaggctgagaacacccagaacaggagagttcaggtccaggatggccagcctgttc

SEQ ID NO: 236264 - DNA, 120 bp, Artificial Sequence
  ENSG00000120211_1 (sequence is synthesized)
cggtcctatctgccagcaatctggctgctgctgagccaactccttagagaaagcctagcagcagagctgaggggatgtggtccccgatttggaaaacacttgctgtcatattgccccatg

SEQ ID NO: 236265 - DNA, 120 bp, Artificial Sequence
  ENSG00000120211_2 (sequence is synthesized)
cctgagaagacattcaccaccaccccaggagggtggctgctggaatctggacgtcccaaagaaatggtgtcaacctccaacaacaaagatggacaagccttaggtacgacatcagaattc

SEQ ID NO: 236266 - DNA, 120 bp, Artificial Sequence
  ENSG00000120211_3 (sequence is synthesized)
attcctaatttgtcaccagagctgaagaaaccactgtctgaagggcagccatcattgaagaaaataatactttcccgcaaaaagagaagtggacgtcacagatttgatccattctgttgt

SEQ ID NO: 236267 - DNA, 120 bp, Artificial Sequence
  ENSG00000120211_4 (sequence is synthesized)
gaagtaatttgtgacgatggaacttcagttaaattatgtacatagtagagtaatcatggactggacatctcatccattctcatatgtattctcaatgacaaattcactgatgcccaatta

SEQ ID NO: 236268 - DNA, 120 bp, Artificial Sequence
  ENSG00000120211_5 (sequence is synthesized)
aatgattgctgtttattagaacatgagaatcattattagtattcacatgtttcacttgctctgtactaatatagtctctccaaatggaggaagttagatagatggaataagttctagtag

SEQ ID NO: 236269 - DNA, 120 bp, Artificial Sequence
  ENSG00000120211_6 (sequence is synthesized)
ttgatagtacaatggggaaattatacttaacaataattcactgtatattccaaaatagctagaagagaattgtaatgattccaacacaaaaaagatgaatgttagtttggatgcatatcc

SEQ ID NO: 236270 - DNA, 120 bp, Artificial Sequence
  ENSG00000120211_7 (sequence is synthesized)
caattaccctgatttgatcattacacattatatacacgtatcaaaatatcacatgtactacaaaaatgtgtataactgtaatatgtgaactacaaacttactggaaataaatttttaaag

SEQ ID NO: 236271 - DNA, 120 bp, Artificial Sequence
  ENSG00000120211_8 (sequence is synthesized)
actcactcaagtctcttcatttttcctcttttcacactagaagaaatgtaagagataaaggatctaaccatctctaacatcagctcatagtacggaggaaaagcagtgaaggaatgaact

SEQ ID NO: 236272 - DNA, 120 bp, Artificial Sequence
  ENSG00000120211_9 (sequence is synthesized)
ggtgggagaggtattaggcatgttcaccctagggtaaacccagagacctccctagaactttgcccaatgcatatcctccacctgcctctcagcacgctgcctttagaccttcaatcattc

SEQ ID NO: 236273 - DNA, 120 bp, Artificial Sequence
  ENSG00000120211_10 (sequence is synthesized)
tataaactcctcttttgtccctggcattactccacatcccctcatcaaagtggtgaattggcacaaatactggcattcctctggctacacatacctcctccctatgtgtctctaaatcct

SEQ ID NO: 236274 - DNA, 120 bp, Artificial Sequence
  ENSG00000120211_11 (sequence is synthesized)
aaatcaaagagtacattttatactctgtcagtgaggttctactagttgtgtttgtttgtttgcaggctaactgaagctgctactacctcattatcaggtcctataaacttaattcaagtg

SEQ ID NO: 236275 - DNA, 120 bp, Artificial Sequence
  ENSG00000120211_12 (sequence is synthesized)
gcatgatttgagtagccccctgtgcctgcccataaagtgctctgaatctagtgtgggacatggagaagcaaaggataataagtgcaatgatacttgtaggtcatcatagagactgtaatg

SEQ ID NO: 236276 - DNA, 120 bp, Artificial Sequence
  ENSG00000120211_13 (sequence is synthesized)
atccacaggaatcagggtcgtgtttaatgccaacatgtgaaagaataaatatacagggaacagtgtaggtaagaggagagagcaaaatttccctaaggaaactgatggctgatctgcatc

SEQ ID NO: 236277 - DNA, 120 bp, Artificial Sequence
  ENSG00000120211_14 (sequence is synthesized)
ttgaaagacatctaagcagaagagagtgcaaaaagggacaagtagaagcccaggaaaatgcacaaaggcctggaagcatagcatgtgtggaaacagccagagtcagcagggcaggaggtg

SEQ ID NO: 236278 - DNA, 120 bp, Artificial Sequence
  ENSG00000120211_15 (sequence is synthesized)
gtgtggagaaaaggaattgtcaagatctggttggaatggagacaggagagaggatctcaaacgattccacacaatgcagctatggggtttaggctgcatcctggagtaaggaagaactgc

SEQ ID NO: 236279 - DNA, 120 bp, Artificial Sequence
  ENSG00000120215_0 (sequence is synthesized)
ctctcattaaggaaggtaagagcgttgccttctcgccataatcatagtcctcttctcccagaataggatttgggaaattctggctaagtcctctgcctaccctcattgccccgctgatgt

SEQ ID NO: 236280 - DNA, 120 bp, Artificial Sequence
  ENSG00000120215_1 (sequence is synthesized)
gtgacatcaacagaatttctccgcaacgtttgtcagtctccaacctcagagggctcacaaagcctcctcctgaatcctctctcagtcctccaacactaccaagaagaaaagcaattattc

SEQ ID NO: 236281 - DNA, 120 bp, Artificial Sequence
  ENSG00000120215_2 (sequence is synthesized)
aggatggcatcttgctggggagaagcagcctccctgaggtagatgtgttctcctgtcacttaaagaaccacttctcctggtctgagtagtaagaggcgcatttgctgttgctgcaccatt

SEQ ID NO: 236282 - DNA, 120 bp, Artificial Sequence
  ENSG00000120215_3 (sequence is synthesized)
tgccaaggctctgagtttgaggtgtcctgtgccctgaccctacaagatgccaagagaagatgctcacttcatctatggttaccccaagaaggggcacggccactcttacaccacggctga

SEQ ID NO: 236283 - DNA, 120 bp, Artificial Sequence
  ENSG00000120215_4 (sequence is synthesized)
gtcttactgctcatcggctgttggtattgtagaagacgaaatggatacagagccttgatggataaaagtcttcatgttggcactcaatgtgccttaacaagaagatgcccacaagaaggg

SEQ ID NO: 236284 - DNA, 120 bp, Artificial Sequence
  ENSG00000120215_5 (sequence is synthesized)
tttgatcatcgggacagcaaagtgtctcttcaagagaaaaactgtgaacctgtggttcccaatgctccacctgcttatgagaaactctctgcagaacagtcaccaccaccttattcacct

SEQ ID NO: 236285 - DNA, 120 bp, Artificial Sequence
  ENSG00000120215_6 (sequence is synthesized)
taagagccagcgagacacctgagacatgctgaaattatttctctcacacttttgcttgaatttaatacagacatctaatgttctcctttggaatggtgtaggaaaaatgcaagccatctc

SEQ ID NO: 236286 - DNA, 120 bp, Artificial Sequence
  ENSG00000120215_7 (sequence is synthesized)
taataataagtcagtgttaaaattttagtaggtccgctagcagtactaatcatgtgaggaaatgatgagaaatattaaattgggaaaactccatcaataaatgttgcaatgcatgatact

SEQ ID NO: 236287 - DNA, 120 bp, Artificial Sequence
  ENSG00000120215_8 (sequence is synthesized)
gaattcaagtgggtattctggggccatccaatttctctttacttgaaatttggctaataacaaactagtcaggttttcgaaccttgaccgacatgaactgtacacagaattgttccagta

SEQ ID NO: 236288 - DNA, 120 bp, Artificial Sequence
  ENSG00000120215_9 (sequence is synthesized)
ctatggagtgctcacaaaggatacttttacaggttaagacaaagggttgactggcctatttatctgatcaagaacatgtcagcaatgtctctttgtgctctaaaattctattatactaca

SEQ ID NO: 236289 - DNA, 120 bp, Artificial Sequence
  ENSG00000120215_10 (sequence is synthesized)
tacaggcgtgagccaccacgcctggctggatcctatatcttaggtaagacatataacgcagtctaattacatttcacttcaaggctcaatgctattctaactaatgacaagtattttcta

SEQ ID NO: 236290 - DNA, 120 bp, Artificial Sequence
  ENSG00000120215_11 (sequence is synthesized)
tctactaaaccagaaattggtagaaggatttaaataagtaaaagctactatgtactgccttagtgctgatgcctgtgtactgccttaaatgtacctatggcaatttagctctcttgggtt

SEQ ID NO: 236291 - DNA, 120 bp, Artificial Sequence
  ENSG00000120215_12 (sequence is synthesized)
cccaaatccctctcacaagaatgtgcagaagaaatcataaaggatcagagattctggaatggtgtcattatttgcatagcaacattgcaatttgttttcctttggctacatcaacgtatc

SEQ ID NO: 236292 - DNA, 120 bp, Artificial Sequence
  ENSG00000120215_13 (sequence is synthesized)
acctacactattatttatctaatatttctctttcaggcagctcatttaaactttttttggctttaattcctattgccatcctgagtggaaaaccagtatcattttccatagtagaggata

SEQ ID NO: 236293 - DNA, 120 bp, Artificial Sequence
  ENSG00000120215_14 (sequence is synthesized)
actataacaacgaagataatgaaagtaatttttttaacctaagaaaatactaatggtcacagaaggctatgaacctgagacctgctctctttgtcaaacagagattaacaaggatcagag

SEQ ID NO: 236294 - DNA, 120 bp, Artificial Sequence
  ENSG00000120215_15 (sequence is synthesized)
aaaagttaaaggctgtctttgacataactggaaggcttacaagagttttaaagaaattactttctcactatatgattcattgctatttaacggtgagtcagtaaaccacctaaaaatcat

SEQ ID NO: 236295 - DNA, 120 bp, Artificial Sequence
  ENSG00000120215_16 (sequence is synthesized)
cttgtctcatcagaaacactagtgtaacataactgcatcattttctactaaagacaaaatttcaccaaaggggaaaaagaaaacacaggataaagagatgtattacacacatcgaaaaaa

SEQ ID NO: 236296 - DNA, 120 bp, Artificial Sequence
  ENSG00000120215_17 (sequence is synthesized)
acaacatttaacaaaatattaaaatatttccccactcttctgatactgtcaagtcttactacttaaaataaggcttccacctctcccacttcaaacaaataaatgaattctaaaccaaag

SEQ ID NO: 236297 - DNA, 120 bp, Artificial Sequence
  ENSG00000120215_18 (sequence is synthesized)
aaacttcatcaggcatttgggtacctcctcccctcaccacgaggtctctgctgaacctcaatcctgtacactgaggaacctgtggcttgaaccctacatccctccagaacccccagactg

SEQ ID NO: 236298 - DNA, 120 bp, Artificial Sequence
  ENSG00000120215_19 (sequence is synthesized)
gggatcggcatcctgacagtgatcctgggagtcttactgctcatcggctgttggtattgtagaagacgaaatggatacagagccttgatggaaatcctgggatggagcgcagtggtgaac

SEQ ID NO: 236299 - DNA, 83 bp, Artificial Sequence
  ENSG00000120215_20 (sequence is synthesized)
ataaaagtcttcatgttggcactcaatgtgccttaacaagaagatgcccacaagaagggtttgatcatcgggacagcaaagtg

SEQ ID NO: 236300 - DNA, 120 bp, Artificial Sequence
  ENSG00000120215_21 (sequence is synthesized)
tcatcgggacagcaaagtgtctcttcaagagaaaaactgtgaacctgtggtaggttaagatccttcataagggtattttcatgaatggctgtttttaactcaagtgaatacaattatttc

SEQ ID NO: 236301 - DNA, 120 bp, Artificial Sequence
  ENSG00000120215_22 (sequence is synthesized)
catttaaaaagcaaggacaatgtgaatgtactcattgccactgaactatatacacctaaaaatggttaaaatggcaacttttatgtgtattttatgagaataaaaaataaataataataa

SEQ ID NO: 236302 - DNA, 120 bp, Artificial Sequence
  ENSG00000120217_0 (sequence is synthesized)
agttctgcgcagcttcccgaggctccgcaccagccgcgcttctgtccgcctgcagggcattccagaaagatgaggatatttgctgtctttatattcatgacctactggcatttgctgaac

SEQ ID NO: 236303 - DNA, 120 bp, Artificial Sequence
  ENSG00000120217_1 (sequence is synthesized)
gcatttactgtcacggttcccaaggacctatatgtggtagagtatggtagcaatatgacaattgaatgcaaattcccagtagaaaaacaattagacctggctgcactaattgtctattgg

SEQ ID NO: 236304 - DNA, 120 bp, Artificial Sequence
  ENSG00000120217_2 (sequence is synthesized)
gaaatggaggataagaacattattcaatttgtgcatggagaggaagacctgaaggttcagcatagtagctacagacagagggcccggctgttgaaggaccagctctccctgggaaatgct

SEQ ID NO: 236305 - DNA, 120 bp, Artificial Sequence
  ENSG00000120217_3 (sequence is synthesized)
gcacttcagatcacagatgtgaaattgcaggatgcaggggtgtaccgctgcatgatcagctatggtggtgccgactacaagcgaattactgtgaaagtcaatgccccatacaacaaaatc

SEQ ID NO: 236306 - DNA, 120 bp, Artificial Sequence
  ENSG00000120217_4 (sequence is synthesized)
aaccaaagaattttggttgtggatccagtcacctctgaacatgaactgacatgtcaggctgagggctaccccaaggccgaagtcatctggacaagcagtgaccatcaagtcctgagtggt

SEQ ID NO: 236307 - DNA, 120 bp, Artificial Sequence
  ENSG00000120217_5 (sequence is synthesized)
aagaccaccaccaccaattccaagagagaggagaagcttttcaatgtgaccagcacactgagaatcaacacaacaactaatgagattttctactgcacttttaggagattagatcctgag

SEQ ID NO: 236308 - DNA, 120 bp, Artificial Sequence
  ENSG00000120217_6 (sequence is synthesized)
gaaaaccatacagctgaattggtcatcccagaactacctctggcacatcctccaaatgaaaggactcacttggtaattctgggagccatcttattatgccttggtgtagcactgacattc

SEQ ID NO: 236309 - DNA, 120 bp, Artificial Sequence
  ENSG00000120217_7 (sequence is synthesized)
atcttccgtttaagaaaagggagaatgatggatgtgaaaaaatgtggcatccaagatacaaactcaaagaagcaaagtgatacacatttggaggagacgtaatccagcattggaacttct

SEQ ID NO: 236310 - DNA, 120 bp, Artificial Sequence
  ENSG00000120217_8 (sequence is synthesized)
gatcttcaagcagggattctcaacctgtggtttaggggttcatcggggctgagcgtgacaagaggaaggaatgggcccgtgggatgcaggcaatgtgggacttaaaaggcccaagcactg

SEQ ID NO: 236311 - DNA, 120 bp, Artificial Sequence
  ENSG00000120217_9 (sequence is synthesized)
aaaatggaacctggcgaaagcagaggaggagaatgaagaaagatggagtcaaacagggagcctggagggagaccttgatactttcaaatgcctgaggggctcatcgacgcctgtgacagg

SEQ ID NO: 236312 - DNA, 120 bp, Artificial Sequence
  ENSG00000120217_10 (sequence is synthesized)
gagaaaggatacttctgaacaaggagcctccaagcaaatcatccattgctcatcctaggaagacgggttgagaatccctaatttgagggtcagttcctgcagaagtgccctttgcctcca

SEQ ID NO: 236313 - DNA, 120 bp, Artificial Sequence
  ENSG00000120217_11 (sequence is synthesized)
ctcaatgcctcaatttgttttctgcatgactgagagtctcagtgttggaacgggacagtatttatgtatgagtttttcctatttattttgagtctgtgaggtcttcttgtcatgtgagtg

SEQ ID NO: 236314 - DNA, 120 bp, Artificial Sequence
  ENSG00000120217_12 (sequence is synthesized)
tggttgtgaatgatttcttttgaagatatattgtagtagatgttacaattttgtcgccaaactaaacttgctgcttaatgatttgctcacatctagtaaaacatggagtatttgtaaggt

SEQ ID NO: 236315 - DNA, 120 bp, Artificial Sequence
  ENSG00000120217_13 (sequence is synthesized)
gcttggtctcctctataactacaagtatacattggaagcataaagatcaaaccgttggttgcataggatgtcacctttatttaacccattaatactctggttgacctaatcttattctca

SEQ ID NO: 236316 - DNA, 120 bp, Artificial Sequence
  ENSG00000120217_14 (sequence is synthesized)
gacctcaagtgtctgtgcagtatctgttccatttaaatatcagctttacaattatgtggtagcctacacacataatctcatttcatcgctgtaaccaccctgttgtgataaccactatta

SEQ ID NO: 236317 - DNA, 120 bp, Artificial Sequence
  ENSG00000120217_15 (sequence is synthesized)
ttaagtaacttgcccaaaccagtaaatagcagacctcagactgccacccactgtccttttataatacaatttacagctatattttactttaagcaattcttttattcaaaaaccatttat

SEQ ID NO: 236318 - DNA, 120 bp, Artificial Sequence
  ENSG00000120217_16 (sequence is synthesized)
taagtgcccttgcaatatcaatcgctgtgccaggcattgaatctacagatgtgagcaagacaaagtacctgtcctcaaggagctcatagtataatgaggagattaacaagaaaatgtatt

SEQ ID NO: 236319 - DNA, 120 bp, Artificial Sequence
  ENSG00000120217_17 (sequence is synthesized)
attacaatttagtccagtgtcatagcataaggatgatgcgaggggaaaacccgagcagtgttgccaagaggaggaaataggccaatgtggtctgggacggttggatatacttaaacatct

SEQ ID NO: 236320 - DNA, 120 bp, Artificial Sequence
  ENSG00000120217_18 (sequence is synthesized)
taataatcagagtaattttcatttacaaagagaggtcggtacttaaaataaccctgaaaaataacactggaattccttttctagcattatatttattcctgatttgcctttgccatataa

SEQ ID NO: 236321 - DNA, 120 bp, Artificial Sequence
  ENSG00000120217_19 (sequence is synthesized)
tctaatgcttgtttatatagtgtctggtattgtttaacagttctgtcttttctatttaaatgccactaaattttaaattcatacctttccatgattcaaaattcaaaagatcccatggga

SEQ ID NO: 236322 - DNA, 120 bp, Artificial Sequence
  ENSG00000120217_20 (sequence is synthesized)
gatggttggaaaatctccacttcatcctccaagccattcaagtttcctttccagaagcaactgctactgcctttcattcatatgttcttctaaagatagtctacatttggaaatgtatgt

SEQ ID NO: 236323 - DNA, 120 bp, Artificial Sequence
  ENSG00000120217_21 (sequence is synthesized)
taaaagcacgtatttttaaaatttttttcctaaatagtaacacattgtatgtctgctgtgtactttgctatttttatttattttagtgtttcttatatagcagatggaatgaatttgaag

SEQ ID NO: 236324 - DNA, 120 bp, Artificial Sequence
  ENSG00000120217_22 (sequence is synthesized)
ttcccagggctgaggatccatgccttctttgtttctaagttatctttcccatagcttttcattatctttcatatgatccagtatatgttaaatatgtcctacatatacatttagacaacc

SEQ ID NO: 236325 - DNA, 120 bp, Artificial Sequence
  ENSG00000120217_23 (sequence is synthesized)
accatttgttaagtatttgctctaggacagagtttggatttgtttatgtttgctcaaaaggagacccatgggctctccagggtgcactgagtcaatctagtcctaaaaagcaatcttatt

SEQ ID NO: 236326 - DNA, 120 bp, Artificial Sequence
  ENSG00000120217_24 (sequence is synthesized)
attaactctgtatgacagaatcatgtctggaacttttgttttctgctttctgtcaagtataaacttcactttgatgctgtacttgcaaaatcacattttctttctggaaattccggcagt

SEQ ID NO: 236327 - DNA, 120 bp, Artificial Sequence
  ENSG00000120217_25 (sequence is synthesized)
gtaccttgactgctagctaccctgtgccagaaaagcctcattcgttgtgcttgaacccttgaatgccaccagctgtcatcactacacagccctcctaagaggcttcctggaggtttcgag

SEQ ID NO: 236328 - DNA, 120 bp, Artificial Sequence
  ENSG00000120217_26 (sequence is synthesized)
attcagatgccctgggagatcccagagtttcctttccctcttggccatattctggtgtcaatgacaaggagtaccttggctttgccacatgtcaaggctgaagaaacagtgtctccaaca

SEQ ID NO: 236329 - DNA, 120 bp, Artificial Sequence
  ENSG00000120217_27 (sequence is synthesized)
gagctccttgtgttatctgtttgtacatgtgcatttgtacagtaattggtgtgacagtgttctttgtgtgaattacaggcaagaattgtggctgagcaaggcacatagtctactcagtct

SEQ ID NO: 236330 - DNA, 120 bp, Artificial Sequence
  ENSG00000120217_28 (sequence is synthesized)
attcctaagtcctaactcctccttgtggtgttggatttgtaaggcactttatcccttttgtctcatgtttcatcgtaaatggcataggcagagatgatacctaattctgcatttgattgt

SEQ ID NO: 236331 - DNA, 120 bp, Artificial Sequence
  ENSG00000120217_29 (sequence is synthesized)
cactttttgtacctgcattaatttaataaaatattcttatttattttgttacttggtacaccagcatgtccattttcttgtttattttgtgtttaataaaatgttcagtttaacatccca

SEQ ID NO: 236332 - DNA, 120 bp, Artificial Sequence
  ENSG00000120217_30 (sequence is synthesized)
tgcaaggaaacccgacttaacctctgcaaggtggtgcaaaggcattccactgttcaacagcaattatattgaagctgagtgggatcactgggtgaagatgaagcgtaaggggtgaggggc

SEQ ID NO: 236333 - DNA, 120 bp, Artificial Sequence
  ENSG00000120217_31 (sequence is synthesized)
aggagaatgggtatggatggaggtagaagatgcagtgtcatacagtttttttctatcatgaaaataaccacagacttacagaagagaaagagctaaaatgcccgtcattttcagttgcat

SEQ ID NO: 236334 - DNA, 120 bp, Artificial Sequence
  ENSG00000120217_32 (sequence is synthesized)
caggtaatattctgaatgtgtccattaaaatatgtctaacactgtcccctagcacctagcatgatgtctgcctatcatagtcattcagtgattgttgaataaatgaatgaatgaataaca

SEQ ID NO: 236335 - DNA, 120 bp, Artificial Sequence
  ENSG00000120217_33 (sequence is synthesized)
ctggcacatcctccaaatgaaaggactcacttgggagaatgatggatgtgaaaaaatgtggcatccaagatacaaactcaaagaagcaaagtgatacacatttggaggagacgtaatcca

SEQ ID NO: 236336 - DNA, 120 bp, Artificial Sequence
  ENSG00000120235_0 (sequence is synthesized)
tgctcagagttaagttaaatgtcaaatttttaaaaatttaacttttagttaaattactttgccattcctaacagatcaagaaataataaaagtaaactttatgctttttcttttagtgtg

SEQ ID NO: 236337 - DNA, 120 bp, Artificial Sequence
  ENSG00000120235_1 (sequence is synthesized)
caaagtagacatacatacagtacataaggagatatacaatatatttgttattaaaatttaataaaaatttaatttcaattaagaaaaaaatttcttaaaagactctggaggcaggcaaga

SEQ ID NO: 236338 - DNA, 120 bp, Artificial Sequence
  ENSG00000120235_2 (sequence is synthesized)
gaagggagtgtcaataatgaccacatacacacacaaacacacacacaaaactggttgaaaaactactctatacccatgtagagagtaaataaatgaaagcaaaatcagacgtagaaagta

SEQ ID NO: 236339 - DNA, 120 bp, Artificial Sequence
  ENSG00000120235_3 (sequence is synthesized)
aattctgaaaatggaaactagtatgttccctatttaagacctacacataaagcaaggtcttcagagaacctagagctgaaggttcagagtcacccatctcaacaagtccaacagcatctg

SEQ ID NO: 236340 - DNA, 120 bp, Artificial Sequence
  ENSG00000120235_4 (sequence is synthesized)
caacatctacaatggctttgccttttgctttactgatggccctggtggtgctcagctgcaagtcaagctgctctctggactgtgatctgcctcagacccacagcctgggtcacaggagga

SEQ ID NO: 236341 - DNA, 120 bp, Artificial Sequence
  ENSG00000120235_5 (sequence is synthesized)
ccatgatgctcctggcacaaatgaggagaatctctcttttctcctgtctgaaggacagacatgacttcagatttccccaggaggagtttgatggcaaccagttccagaaggctgaagcca

SEQ ID NO: 236342 - DNA, 120 bp, Artificial Sequence
  ENSG00000120235_6 (sequence is synthesized)
ctttaccagcagctgaatgacctggaagcctgtgtgatgcaggaggtgtgggtgggagggactcccctgatgaatgaggactccatcctggctgtgagaaaatacttccaaagaatcact

SEQ ID NO: 236343 - DNA, 120 bp, Artificial Sequence
  ENSG00000120235_7 (sequence is synthesized)
aggttgtcagagcagaaatcatgagatccttctcttcatcaagaaacttgcaagaaaggttaaggaggaaggaataagacctgatccaacacagaaacgactcccattgacgactacacc

SEQ ID NO: 236344 - DNA, 120 bp, Artificial Sequence
  ENSG00000120235_8 (sequence is synthesized)
ctgatccaacacagaaacgactcccattgacgactacaccagcttgcactttcatgatctgccattttaaagactcttgtttctgctataaccataccatgagttgaatcaaacgcgtca

SEQ ID NO: 236345 - DNA, 120 bp, Artificial Sequence
  ENSG00000120235_9 (sequence is synthesized)
agtattttcaagtgtgttaagcaacatcgtgttcagttgcacaggaactagtcccttacagatgactaagctgatggatctatttatctatttattaaatgtatatttatttgactataa

SEQ ID NO: 236346 - DNA, 120 bp, Artificial Sequence
  ENSG00000120235_10 (sequence is synthesized)
actatagaaaacttcttggatttgtttattctctaaggagaaacaccaagccgattctccaacatgatttaaaaatgtatggttcaattcattgattcattgttattatactcaagttat

SEQ ID NO: 236347 - DNA, 120 bp, Artificial Sequence
  ENSG00000120242_0 (sequence is synthesized)
agagacccaggttaagggtcatccatctgaaccagctcagcagcatccacaacatctacaatggccttgactttttatttactggtggccctagtggtgctcagctacaagtcattcagc

SEQ ID NO: 236348 - DNA, 120 bp, Artificial Sequence
  ENSG00000120242_1 (sequence is synthesized)
tctctgggctgtgatctgcctcagactcacagcctgggtaacaggagggccttgatactcctggcacaaatgcgaagaatctctcctttctcctgcctgaaggacagacatgactttgaa

SEQ ID NO: 236349 - DNA, 120 bp, Artificial Sequence
  ENSG00000120242_2 (sequence is synthesized)
ttcccccaggaggagtttgatgataaacagttccagaaggctcaagccatctctgtcctccatgagatgatccagcagaccttcaacctcttcagcacaaaggactcatctgctgctttg

SEQ ID NO: 236350 - DNA, 120 bp, Artificial Sequence
  ENSG00000120242_3 (sequence is synthesized)
gatgagacccttctagatgaattctacatcgaacttgaccagcagctgaatgacctggagtcctgtgtgatgcaggaagtgggggtgatagagtctcccctgatgtacgaggactccatc

SEQ ID NO: 236351 - DNA, 120 bp, Artificial Sequence
  ENSG00000120242_4 (sequence is synthesized)
tatcaatcaacttgcaaaaaagattgaagagtaaggaatgagacctggtacaacacggaaatgattcttatagactaatacagcagctcacacttcgacaagttgtgctctttcaaagac

SEQ ID NO: 236352 - DNA, 120 bp, Artificial Sequence
  ENSG00000120242_5 (sequence is synthesized)
ccttgtttctgccaaaaccatgctatgaattgaatcaaatgtgtcaagtgttttcaggagtgttaagcaacatcctgttcagctgtatgggcactagtcccttacagatgaccatgctga

SEQ ID NO: 236353 - DNA, 120 bp, Artificial Sequence
  ENSG00000120242_6 (sequence is synthesized)
catgctgatggatctattcatctatttatttaaatctttatttagttaactatctatagggcttaaattagttttgttcatattatattatgtgaacttttacattgtgaattgtgtaac

SEQ ID NO: 236354 - DNA, 120 bp, Artificial Sequence
  ENSG00000120242_7 (sequence is synthesized)
gttctttatatttattattttgccttgtttattaaatttttactatagaaaaattctttatttattctttaaaattgaactccaaccctgattgtgcaaactgattaaagaatggatggt

SEQ ID NO: 236355 - DNA, 120 bp, Artificial Sequence
  ENSG00000120251_0 (sequence is synthesized)
gagtgtgtgtgagtgcatgggagggtgctgaatattccgagacactgggaccacagcggcagctccgctgaaaactgcattcagccagtcctccggacttctggagcggggacagggcgc

SEQ ID NO: 236356 - DNA, 120 bp, Artificial Sequence
  ENSG00000120251_1 (sequence is synthesized)
agggcatcagcagccaccagcaggacctgggaaatagggattcttctgcctccacttcaggttttagcagcttggtgctaaattgctgtctcaaaatgcagaggatctaatttgcagagg

SEQ ID NO: 236357 - DNA, 120 bp, Artificial Sequence
  ENSG00000120251_2 (sequence is synthesized)
aaaacagccaaagaaggaagaggaggaaaaggaaaaaaaaaggggtatattgtggatgctctacttttcttggaaatgcaaaagattatgcatatttctgtcctcctttctcctgtttta

SEQ ID NO: 236358 - DNA, 120 bp, Artificial Sequence
  ENSG00000120251_3 (sequence is synthesized)
tggggactgatttttggtgtctcttctaacagcatacagataggggggctatttcctaggggcgccgatcaagaatacagtgcatttcgagtagggatggttcagttttccacttcggag

SEQ ID NO: 236359 - DNA, 120 bp, Artificial Sequence
  ENSG00000120251_4 (sequence is synthesized)
ttcagactgacaccccacatcgacaatttggaggtggcaaacagcttcgcagtcactaatgctttctgctcccagttttcgagaggagtctatgctatttttggattttatgacaagaag

SEQ ID NO: 236360 - DNA, 120 bp, Artificial Sequence
  ENSG00000120251_5 (sequence is synthesized)
tctgtaaataccatcacatcattttgcggaacactccacgtctccttcatcactcccagcttcccaacagatggcacacatccatttgtcattcagatgagacccgacctcaaaggagct

SEQ ID NO: 236361 - DNA, 120 bp, Artificial Sequence
  ENSG00000120251_6 (sequence is synthesized)
ctccttagcttgattgaatactatcaatgggacaagtttgcatacctctatgacagtgacagaggcttatcaacactgcaagctgtgctggattctgctgctgaaaagaaatggcaagtg

SEQ ID NO: 236362 - DNA, 120 bp, Artificial Sequence
  ENSG00000120251_7 (sequence is synthesized)
actgctatcaatgtgggaaacattaacaatgacaagaaagatgagatgtaccgatcactttttcaagatctggagttaaaaaaggaacggcgtgtaattctggactgtgaaagggataaa

SEQ ID NO: 236363 - DNA, 120 bp, Artificial Sequence
  ENSG00000120251_8 (sequence is synthesized)
gtaaacgacattgtagaccaggttattaccattggaaaacatgttaaagggtaccactacatcattgcaaatctgggatttactgatggagacctattaaaaatccagtttggaggtgca

SEQ ID NO: 236364 - DNA, 120 bp, Artificial Sequence
  ENSG00000120251_9 (sequence is synthesized)
aatgtctctggatttcagatagtggactatgatgattcgttggtatctaaatttatagaaagatggtcaacactggaagaaaaagaataccctggagctcacacaacaacaattaagtat

SEQ ID NO: 236365 - DNA, 120 bp, Artificial Sequence
  ENSG00000120251_10 (sequence is synthesized)
acttctgctctgacctatgatgccgttcaagtgatgactgaagccttccgcaacctaaggaagcaaagaattgaaatctcccgaagggggaatgcaggagactgtctggcaaacccagca

SEQ ID NO: 236366 - DNA, 120 bp, Artificial Sequence
  ENSG00000120251_11 (sequence is synthesized)
gtgccctggggacaaggtgtagaaatagaaagggccctcaaacaggttcaggttgaaggtctctcaggaaatataaagtttgaccagaatggaaaaagaataaactatacaattaacatc

SEQ ID NO: 236367 - DNA, 120 bp, Artificial Sequence
  ENSG00000120251_12 (sequence is synthesized)
atggagctcaaaactaatgggccccggaagattggctactggagtgaagtggacaaaatggttgttacccttactgagctcccttctggaaatgacacctctgggcttgagaataagact

SEQ ID NO: 236368 - DNA, 120 bp, Artificial Sequence
  ENSG00000120251_13 (sequence is synthesized)
gttgttgtcaccacaattttggaatctccgtatgttatgatgaagaaaaatcatgaaatgcttgaaggcaatgagcgctatgagggctactgtgttgacctggctgcagaaatcgccaaa

SEQ ID NO: 236369 - DNA, 120 bp, Artificial Sequence
  ENSG00000120251_14 (sequence is synthesized)
cattgtgggttcaagtacaagttgacaattgttggtgatggcaagtatggggccagggatgcagacacgaaaatttggaatgggatggttggagaacttgtatatgggaaagctgatatt

SEQ ID NO: 236370 - DNA, 120 bp, Artificial Sequence
  ENSG00000120251_15 (sequence is synthesized)
gcaattgctccattaactattacccttgtgagagaagaggtgattgacttctcaaagcccttcatgagcctcgggatatctatcatgatcaagaagcctcagaagtccaaaccaggagtg

SEQ ID NO: 236371 - DNA, 120 bp, Artificial Sequence
  ENSG00000120251_16 (sequence is synthesized)
ttttcctttcttgatcctttagcctatgagatctggatgtgcattgtttttgcctacattggggtcagtgtagttttattcctggtcagcagatttagcccctacgagtggcacactgag

SEQ ID NO: 236372 - DNA, 120 bp, Artificial Sequence
  ENSG00000120251_17 (sequence is synthesized)
gagtttgaagatggaagagaaacacaaagtagtgaatcaactaatgaatttgggatttttaatagtctctggttttccttgggtgcctttatgcagcaaggatgcgatatttcgccaaga

SEQ ID NO: 236373 - DNA, 120 bp, Artificial Sequence
  ENSG00000120251_18 (sequence is synthesized)
tccctctctgggcgcattgttggaggtgtgtggtggttctttaccctgatcataatctcctcctacacggctaacttagctgccttcctgactgtagagaggatggtgtctcccatcgaa

SEQ ID NO: 236374 - DNA, 120 bp, Artificial Sequence
  ENSG00000120251_19 (sequence is synthesized)
agtgctgaggatctttctaagcaaacagaaattgcttatggaacattagactctggctccactaaagagtttttcaggagatctaaaattgcagtgtttgataaaatgtggacctacatg

SEQ ID NO: 236375 - DNA, 120 bp, Artificial Sequence
  ENSG00000120251_20 (sequence is synthesized)
cggagtgcggagccctctgtgtttgtgaggactacggccgaaggggtggctagagtgcggaagtccaaagggaaatatgcctacttgttggagtccacgatgaacgagtacattgagcaa

SEQ ID NO: 236376 - DNA, 120 bp, Artificial Sequence
  ENSG00000120251_21 (sequence is synthesized)
aggaagccttgcgacaccatgaaagttggtggaaacctggattccaaaggctatggcatcgcaacacctaaaggatcctcattaagaaccccagtaaatcttgcagtattgaaactcagt

SEQ ID NO: 236377 - DNA, 120 bp, Artificial Sequence
  ENSG00000120251_22 (sequence is synthesized)
gagcaaggcgtcttagacaagctgaaaaacaaatggtggtacgataaaggtgaatgtggagccaaggactctggaagtaaggaaaagaccagtgccctcagtctgagcaacgttgctgga

SEQ ID NO: 236378 - DNA, 120 bp, Artificial Sequence
  ENSG00000120251_23 (sequence is synthesized)
tgaaggtggcaaagaatgcacagaatattaacccatcttcctcgcagaattcacagaattttgcaacttataaggaaggttacaacgtatatggcatcgaaagtgttaaaatttagggga

SEQ ID NO: 236379 - DNA, 120 bp, Artificial Sequence
  ENSG00000120251_24 (sequence is synthesized)
tgaccttgaatgatgccatgaggaacaaggcaaggctgtcaattacaggaagtactggagaaaatggacgtgttatgactccagaatttcccaaagcagtgcatgctgtcccttacgtga

SEQ ID NO: 236380 - DNA, 120 bp, Artificial Sequence
  ENSG00000120251_25 (sequence is synthesized)
gtcctggcatgggaatgaatgtcagtgtgactgatctctcgtgattgataagaaccttttgagtgccttacacaatggttttcttgtgtgtttattgtcaaagtggtgagaggcatccag

SEQ ID NO: 236381 - DNA, 120 bp, Artificial Sequence
  ENSG00000120251_26 (sequence is synthesized)
tatcttgaagacttttctttcagccaagaattcttaaatatgtggagttcatcttgaattgtaaggaatgattaattaaaacacaacatctttttctactcgagttacagacaaagcgtg

SEQ ID NO: 236382 - DNA, 120 bp, Artificial Sequence
  ENSG00000120251_27 (sequence is synthesized)
gtggacatgcacagctaacatggaagtactataatttacctgaagtctttgtacagacaacaaacctgtttctgcagccactattgttagtctcttgattcataatgacttaagcacact

SEQ ID NO: 236383 - DNA, 120 bp, Artificial Sequence
  ENSG00000120251_28 (sequence is synthesized)
tgacatcaactgcatcaagatgtgacatgttttataaaaaaaggaaaaaaaacatttaaaactaaaaaatatttttaggtattttcacaaacaaactggcttttaaataaatttgcttcc

SEQ ID NO: 236384 - DNA, 120 bp, Artificial Sequence
  ENSG00000120251_29 (sequence is synthesized)
atattggttgaataagacaaaaacaattaaactgagtgggaagtgaataaaaaaaggctttaggtatcgattccatatttttcaaagccaaatatgtaaatgctaaggaaagtaaacaaa

SEQ ID NO: 236385 - DNA, 120 bp, Artificial Sequence
  ENSG00000120251_30 (sequence is synthesized)
gaggagattccaatcttgtaatttaatattgttattaaaactttaatgtatcctattctttaacatttggtgttaatataaaattacttggcaatgcttgacatttgaaataaacatttt

SEQ ID NO: 236386 - DNA, 120 bp, Artificial Sequence
  ENSG00000120251_31 (sequence is synthesized)
tctattgttttattgcaagtggtccaattaattttgcttagctacagtttggtcataaatcaagtgagtttaaagacactaccaagttgttaggtgcccagagaaaatttctccctttta

SEQ ID NO: 236387 - DNA, 120 bp, Artificial Sequence
  ENSG00000120251_32 (sequence is synthesized)
aaaaggccaggtgatttttcaaatgtaatcttgcccccaaagtaatatctgaatatctttttgacatgtctaaatatatatatatataaagaaatatttgttaacacaaaagcatttgat

SEQ ID NO: 236388 - DNA, 120 bp, Artificial Sequence
  ENSG00000120251_33 (sequence is synthesized)
ctatgtagataaatgctaatagatttaaaaagctaatattaacaaataccagaatacgtgaagttccatttttaaagtgtttgagcttacagaagagaaacattcattttaaatgaagta

SEQ ID NO: 236389 - DNA, 120 bp, Artificial Sequence
  ENSG00000120251_34 (sequence is synthesized)
aaaaatgccttgaaagtaattctttagatagttgcccattgattaaattccaaaaactaaatatgtttttagctttaaaattataaaagctgtcataaactttatatattatgaatttta

SEQ ID NO: 236390 - DNA, 120 bp, Artificial Sequence
  ENSG00000120251_35 (sequence is synthesized)
aaatatgtttgagtctcctgcaatatagtttcatcccattgacatcaattaaaaataaccctaatatattatttttatatttattcctcaggtggaatggctattttaatatgcccagtg

SEQ ID NO: 236391 - DNA, 120 bp, Artificial Sequence
  ENSG00000120251_36 (sequence is synthesized)
tggataaaatgtcacatttctgtaacttttgactaaagagcctatatttatctagttaatgaatttaaaggatctatctttcccttcataaaatacctcttatttccattaaagcccccc

SEQ ID NO: 236392 - DNA, 120 bp, Artificial Sequence
  ENSG00000120251_37 (sequence is synthesized)
aagtttaattaatttaggattttgaatgattattgacatccaatagttatttttaatatttgtattcttgttatttctggaagaaagcctttgtgtagcacttggtattttgcaaagtgc

SEQ ID NO: 236393 - DNA, 120 bp, Artificial Sequence
  ENSG00000120251_38 (sequence is synthesized)
ttttaaaacattcttacttaccgtatttcatagaagggaaggaaaaatgtaaggtttaacagtaagcacttgcattgaacatggaggcatgtggtatcatgatattcttcactaaattta

SEQ ID NO: 236394 - DNA, 120 bp, Artificial Sequence
  ENSG00000120251_39 (sequence is synthesized)
gctgtccctaatcacagatcctaaggtaatataatataattttagtgcatttctcctcatcaggaatgctggaggtgcattttaagttttaataataagtgctagaatgaccaaattgca

SEQ ID NO: 236395 - DNA, 120 bp, Artificial Sequence
  ENSG00000120251_40 (sequence is synthesized)
gactaattgtttccatattgtacttaaaatgagtttttaaaagtgaaaaagaaatgactatatacaatcaatgctatttattgtacctctgggcctactcttctaaaaattgtagcttat

SEQ ID NO: 236396 - DNA, 120 bp, Artificial Sequence
  ENSG00000120251_41 (sequence is synthesized)
cgatttttctctgtcaagcttgaactaatgtaaataattgaaataatgtaaagttatattttcatgtttttatagatacaacatgacaagaatacataatgtaagagtatttcaactatg

SEQ ID NO: 236397 - DNA, 120 bp, Artificial Sequence
  ENSG00000120251_42 (sequence is synthesized)
gataatgttgattggataatgcacatctcagttacaagcagtactcatagtttaatatccatgtaacggtgcatcaatatattgctatataaatatgtctgtgtgcatataagtgaaaag

SEQ ID NO: 236398 - DNA, 120 bp, Artificial Sequence
  ENSG00000120251_43 (sequence is synthesized)
tggtcaaacaagagtgatgacagctgtctaaaggtttttttattcattttatataaaaactgttatggaaagaccaaaatgtttatgaactattcttatgtaaatttacaattgtccttt

SEQ ID NO: 236399 - DNA, 120 bp, Artificial Sequence
  ENSG00000120251_44 (sequence is synthesized)
actgtacttttttgtttacagtatagtaccttattttctgctgtgttaagtgggtgtcaaactccaagaagacatacactttctataacttctattgaagatattggaatttccaatttt

SEQ ID NO: 236400 - DNA, 120 bp, Artificial Sequence
  ENSG00000120251_45 (sequence is synthesized)
tcatgtgtactatgtcagaaaatgctttcgattttatttttaaatctaacatcggatggcttttccggagtgttgtaaaaacttcaatcatacataaaacatgttcttacaaaaggcaaa

SEQ ID NO: 236401 - DNA, 120 bp, Artificial Sequence
  ENSG00000120251_46 (sequence is synthesized)
aacaaggcctgttggacaaattgaaaaacaaatggtggtacgacaaaggagagtgcggcagcgggggaggtgattccaaggaaaagaccagtgccctcagtctgagcaacgttgctggag

SEQ ID NO: 236402 - DNA, 120 bp, Artificial Sequence
  ENSG00000120251_47 (sequence is synthesized)
cccgtgcgctctgtaactaggcgagtcagcatcacagcccaatggaatatactctaaagatgggattttcatgcaaaatatttaaaagattccatcttgatctcttgtgcggcttaagca

SEQ ID NO: 236403 - DNA, 120 bp, Artificial Sequence
  ENSG00000120251_48 (sequence is synthesized)
tttaaagatataacttggggttctccctggatcctggctacatcccatgaagcccaagtgcacaattttggaatatttcctccacggtgctttgcttgcttgtttgctttcggctgggtc

SEQ ID NO: 236404 - DNA, 120 bp, Artificial Sequence
  ENSG00000120251_49 (sequence is synthesized)
attccagatttaaactacctagaatatacatgtttttcttaggatgaagcaaaaggaaaagactatgcctttgatacaatagaagaaaaggtcctctcatttcggatccccaaattttat

SEQ ID NO: 236405 - DNA, 120 bp, Artificial Sequence
  ENSG00000120251_50 (sequence is synthesized)
taattctgccttagcgacattttccagtttgctcagattttcttggggtctgaatgcaaagcttgtgattacatggaaaggtgaaggtttctggccgcctacctcgccttcagactctca

SEQ ID NO: 236406 - DNA, 120 bp, Artificial Sequence
  ENSG00000120251_51 (sequence is synthesized)
ctcgcagtactaaaactgaatgaacaaggcctgttggacaaattgaaaaacaaatggtggtacgacaaaggagagtgcggcagcgggggaggtgattccaagaaccccagtaaatcttgc

SEQ ID NO: 236407 - DNA, 120 bp, Artificial Sequence
  ENSG00000120251_52 (sequence is synthesized)
ttgcttcttttgcaatgttttaatcatttatttcatatttactctgttaaaaggaatacacaagatctagctaaagcattgaaaatgttccccattttctttaaggaacgctacagttta

SEQ ID NO: 236408 - DNA, 120 bp, Artificial Sequence
  ENSG00000120251_53 (sequence is synthesized)
cacagataattcctaccctggtgcttacatcggtgaacaattggggaatgtcttgaagagtgttcctcatgtttctgcgagttattcacctttccattcccacccgatactgtgtaaatt

SEQ ID NO: 236409 - DNA, 120 bp, Artificial Sequence
  ENSG00000120251_54 (sequence is synthesized)
ctttctttccctttgttacatgatttcatgatgatgtcaagttgtctttattctatctaatgaaagatgatctccttaaaaataaggattatttcccttgtttttactccaaatttcagc

SEQ ID NO: 236410 - DNA, 120 bp, Artificial Sequence
  ENSG00000120251_55 (sequence is synthesized)
actggttggcacatagctagtacacaaaaaatgcatattgaatgaataaggaaaaattgaactggatcttcaacacccaggctttggatagatggaagagagatgtggatcagcatgaca

SEQ ID NO: 236411 - DNA, 120 bp, Artificial Sequence
  ENSG00000120251_56 (sequence is synthesized)
agctgttggtgaaatgaaatggagaaaatggtgttcgttataggacagaattttgtgacaaactattttgttgtattttcttttacaaaaaaaaatgggcttagcagtgaagttgtaaat

SEQ ID NO: 236412 - DNA, 120 bp, Artificial Sequence
  ENSG00000120251_57 (sequence is synthesized)
tggtgtgatttattctcctaacaatattgagagcagatatagatagattggtaagggatttgaattaaaacattagtaggcaattgaaaatctcttgataagtgcaaattagacatttga

SEQ ID NO: 236413 - DNA, 120 bp, Artificial Sequence
  ENSG00000120251_58 (sequence is synthesized)
ggatttttgcctttatcatgccattgagaggaactatctcactgagaccccaaatatcctcagtgccactttccaatggagaatattggactgtgttgattcattttttcttgcttcctt

SEQ ID NO: 236414 - DNA, 120 bp, Artificial Sequence
  ENSG00000120251_59 (sequence is synthesized)
tttcttatgtttacagggggaagctactctctagctatccttgtagcatcattctaggatattgtatctcacagatgaagtgagacctgaagcctgcgggggtagaatcagtacatcatc

SEQ ID NO: 236415 - DNA, 120 bp, Artificial Sequence
  ENSG00000120251_60 (sequence is synthesized)
aatgctggttttgggattggcctaaccttaatcaaggataagggtgtggtgaatccaaacttgaataaaataggttttgagcagtaatattttgctctaagtcctagcagtgacaaacat

SEQ ID NO: 236416 - DNA, 120 bp, Artificial Sequence
  ENSG00000120251_61 (sequence is synthesized)
ggctagagaacatacaaagagtttgtggttttgagtatcttgttaactcagtatgcttgcatacaagccgtcttaatgaattatagtgatagacattccgaggctttctggggggaagca

SEQ ID NO: 236417 - DNA, 120 bp, Artificial Sequence
  ENSG00000120251_62 (sequence is synthesized)
ttatgcttaaattattcctctactgttgtgtgttcaccatctatattcttcattcactctggctaatgggtaataattaaaccagaagatttgattcaatgagagtacataattaacaca

SEQ ID NO: 236418 - DNA, 120 bp, Artificial Sequence
  ENSG00000120251_63 (sequence is synthesized)
tttttttagtggagtcacattcaagacactgttatttgtttgttgtggatgtgagtacattgctgtagaatatagaactccccatattagcactctttcctttattttctttttgttatg

SEQ ID NO: 236419 - DNA, 120 bp, Artificial Sequence
  ENSG00000120251_64 (sequence is synthesized)
ctctaccaccttacccaaagtttcagatttttagtagctcatagtaacatattattgtggcctttttcccacttcatttttttgtgacaagagttgccacagaagccaaagaaaaacaaa

SEQ ID NO: 236420 - DNA, 120 bp, Artificial Sequence
  ENSG00000120251_65 (sequence is synthesized)
cagcccgcaatggctgccggtatccgctgctttcttggtgtctgagctgtagagcggacctgtcaaagagggacagctgtttgggtcactttccctctggctgtttgtggcacaggtaca

SEQ ID NO: 236421 - DNA, 120 bp, Artificial Sequence
  ENSG00000120251_66 (sequence is synthesized)
gcgaagaagtgaagacactaaaggggcgcagcgttgtgtttacttggcggcagtggagcgggtccagggcagtcctccttcgccagtctgctcccagttttcgagaggagtctatgctat

SEQ ID NO: 236422 - DNA, 120 bp, Artificial Sequence
  ENSG00000120251_67 (sequence is synthesized)
aggtgaggaggatgacagggcttctgtattgctaaatgggttttcacaggagatggaagataaaaatcaaaattatttgtaacgtaagacagcagggcctggtgagaggacgcttcgccg

SEQ ID NO: 236423 - DNA, 120 bp, Artificial Sequence
  ENSG00000120251_68 (sequence is synthesized)
ccaacaattagcaattcggcttctacacagcagccggagatcagctttgctgcatttggtccaggttggagcatctccgcagcagctgcaacagccgcacgaaggggggctatttcctag

SEQ ID NO: 236424 - DNA, 120 bp, Artificial Sequence
  ENSG00000120251_69 (sequence is synthesized)
tatttattgaatgcttttgacatacggaggaattaattccagaaagaccagaggaactaaaaatcttgaaagagaaccaccattttagtgtctgctcccagttttcgagaggagtctatg

SEQ ID NO: 236425 - DNA, 120 bp, Artificial Sequence
  ENSG00000120253_0 (sequence is synthesized)
gctttttgcagtacctgctgcggccgctttcggcatggaggaaatttatgcgaagtttgtgtcccagaaaatcagcaaaacccgctggcgaccgctgcctccgggaagtttacagaccgc

SEQ ID NO: 236426 - DNA, 120 bp, Artificial Sequence
  ENSG00000120253_1 (sequence is synthesized)
ggagacgttcgctacaggatcttgggacaatgaggaaaattatatttcactgtggtctattggagattttggaaacttggactctgatggagggtttgaaggagaccatcagttattgtg

SEQ ID NO: 236427 - DNA, 120 bp, Artificial Sequence
  ENSG00000120253_2 (sequence is synthesized)
tgatatcagacaccatggtgatgtaatggatttacagttttttgaccaggaaagaattgtcgctgcttcatcaacaggatgtgtaacagttttccttcaccatccaaataaccagactct

SEQ ID NO: 236428 - DNA, 120 bp, Artificial Sequence
  ENSG00000120253_3 (sequence is synthesized)
gtcagtcaaccagcagtggactacagctcactaccacacaggccctggcagtccttcctatagcagtgcaccatgtacaggtgttgtgtgcaacaacccagaaatcgttacagttggaga

SEQ ID NO: 236429 - DNA, 120 bp, Artificial Sequence
  ENSG00000120253_4 (sequence is synthesized)
ggatggtcgaataaatctcttcagagctgatcacaaggaagctgtaagaaccatagacaatgcagatagtagtacactccatgctgtaacctttcttcgaactcctgagattcttactgt

SEQ ID NO: 236430 - DNA, 120 bp, Artificial Sequence
  ENSG00000120253_5 (sequence is synthesized)
aaattcaattggacagttgaaaatatgggatttcagacaacaaggaaatgagccttctcagatattgtcactgactggtgaccgagtgccactccactgtgttgatagacatcccaacca

SEQ ID NO: 236431 - DNA, 120 bp, Artificial Sequence
  ENSG00000120253_6 (sequence is synthesized)
acagcatgttgtagctactggtggccaagatggaatgttgagtatttgggatgttagacaaggtactatgcctgtatctctgctgaaggctcatgaagctgaaatgtgggaagttcactt

SEQ ID NO: 236432 - DNA, 120 bp, Artificial Sequence
  ENSG00000120253_7 (sequence is synthesized)
tcacccatccaacccagaacatctttttacctgctctgaagatggatccctctggcactgggatgcttccacagatgtacctgaaaagtcgtcactctttcaccaaggaggaagaagcag

SEQ ID NO: 236433 - DNA, 120 bp, Artificial Sequence
  ENSG00000120253_8 (sequence is synthesized)
tacttttttgtctcatagcattagtaaccaagctaatgttcaccagtctgtcattagctcctggctcagcactgatcctgcaaaagaccgaattgaaatcacaagcttacttcccagtag

SEQ ID NO: 236434 - DNA, 120 bp, Artificial Sequence
  ENSG00000120253_9 (sequence is synthesized)
gtctctgtctgtgaacactttggatgttttaggtccttgtcttgtttgtggaaccgatgcagaagcaatttatgttactagacatcttttttcgtagaagtactataattataagatttc

SEQ ID NO: 236435 - DNA, 120 bp, Artificial Sequence
  ENSG00000120253_10 (sequence is synthesized)
agatagaacatgcaattagccttttgaaatccaacttctgtgcaaaattttagtatcagaaaatacgagatttgcaggggaaacatcagtaaactaccattaatgtcaatgcccagtttt

SEQ ID NO: 236436 - DNA, 120 bp, Artificial Sequence
  ENSG00000120253_11 (sequence is synthesized)
gacttttgttagcctgacactcccaaacagttgtagaatccgatagatgactgatggcaaaagattgtgaacatgtggaagaaaatcagtgggattctggtgctgatgaataggttgcct

SEQ ID NO: 236437 - DNA, 120 bp, Artificial Sequence
  ENSG00000120253_12 (sequence is synthesized)
tcagagtattattgacagacagcttgtggaactaattctttatttttgatgttgtgggaattaacacatcaatggtggttatgggaactaccaatgggttcctacaatttttatcagtag

SEQ ID NO: 236438 - DNA, 120 bp, Artificial Sequence
  ENSG00000120253_13 (sequence is synthesized)
tatgtggcatatacaccttcctagtggcagttgccaatgttaatgattattctttttattgcaagtatttcctatgatccttccacactttatttccttaataataataaactttttcag

SEQ ID NO: 236439 - DNA, 79 bp, Artificial Sequence
  ENSG00000120253_14 (sequence is synthesized)
ttccacactttatttccttaataataataaactttttcagaaagaattgagtagagcaaaaatgacaaagatgtgtagc

SEQ ID NO: 236440 - DNA, 120 bp, Artificial Sequence
  ENSG00000120253_15 (sequence is synthesized)
taaggtgaaaatgttttgacaagttcctttttcagaataggtttttgagcagaactctttcagcttgttagacccaactttgcttttgtttagcttcacagcatagctgaaagttgccaa

SEQ ID NO: 236441 - DNA, 120 bp, Artificial Sequence
  ENSG00000120253_16 (sequence is synthesized)
actggacattgtgcaataaagtagaattctatattgataagcaaactatttccaaactaaaaatgtgatagataaaagtgtgattaatcaaatgatatgatcagagtaaagaattttgcc

SEQ ID NO: 236442 - DNA, 120 bp, Artificial Sequence
  ENSG00000120253_17 (sequence is synthesized)
attttgatccttttactttgttttagccacctatagtgttaccaaccatctttatccttgtctgcagggataataatgaactaatgtagtgttttaagataatttaatgatactatcttt

SEQ ID NO: 236443 - DNA, 120 bp, Artificial Sequence
  ENSG00000120253_18 (sequence is synthesized)
ccaaactttgttagattttaaatgtattattgacctgagaccttaatgacaaatcactgctattagacaattgaagtgttcatttactttgtaattccaataatcatagttatggaatta

SEQ ID NO: 236444 - DNA, 87 bp, Artificial Sequence
  ENSG00000120253_19 (sequence is synthesized)
catttactttgtaattccaataatcatagttatggaattatggtaaggttttgcttttctgtcctaataaatatatagaggctggag

SEQ ID NO: 236445 - DNA, 82 bp, Artificial Sequence
  ENSG00000120253_20 (sequence is synthesized)
cggctgatttttgtattagtagagacgacagggtttcaccatgttggccagggctggtctcgaactcctgaccacaggtaat

SEQ ID NO: 236446 - DNA, 78 bp, Artificial Sequence
  ENSG00000120253_21 (sequence is synthesized)
gctgatttttgtattagtagagacgacagggtttcaccatgttggccagggctggtctcgaactcctgaccacaggta

SEQ ID NO: 236447 - DNA, 120 bp, Artificial Sequence
  ENSG00000120253_22 (sequence is synthesized)
ttaacagcattacatttcatgccaattgacaagttttgccaattttaataagaaactaagctttatgtaatgtaacaccgtaatttatgaatttgttcattgtcactgcctttattcatg

SEQ ID NO: 236448 - DNA, 120 bp, Artificial Sequence
  ENSG00000120253_23 (sequence is synthesized)
aaactgtcaaatagagtgtctttcaagggttgcaggatcttagagatagaaagtaccttggtgatcatctccagcctaaatttcatcatcccttctatggtattcccaacaaattatcat

SEQ ID NO: 236449 - DNA, 89 bp, Artificial Sequence
  ENSG00000120253_24 (sequence is synthesized)
tttcatcatcccttctatggtattcccaacaaattatcatccaacctatacttaaaaacatatggctagcactttgggaggccgaggtg

SEQ ID NO: 236450 - DNA, 60 bp, Artificial Sequence
  ENSG00000120253_25 (sequence is synthesized)
gcaaaaaaaaaattaaccgggcgtggtggcaggcatctataatcccagctacttgggagg

SEQ ID NO: 236451 - DNA, 120 bp, Artificial Sequence
  ENSG00000120253_26 (sequence is synthesized)
gatcgtgccacttcactccagcctgggcaaaagagcaaaacgccatctcaaaaaatatacatatataaggagataaagtttcccattttccaatacagtttcacatttgaacagccctaa

SEQ ID NO: 236452 - DNA, 120 bp, Artificial Sequence
  ENSG00000120253_27 (sequence is synthesized)
agtttcacatttgaacagccctaattgatacaactttatggcagggttttagtgtgtgagtgggatccaaaacactcaatcctgtaaaagggtacagtcctattgtatgttaacacactg

SEQ ID NO: 236453 - DNA, 120 bp, Artificial Sequence
  ENSG00000120253_28 (sequence is synthesized)
atgatgtgagcctgtgagatgagccaatcaccagttgttatgttcgaatctgctttgtgttgggacgctttaatgtcagggtttcactaaataaatgaattttcatatactgaactgaaa

SEQ ID NO: 236454 - DNA, 120 bp, Artificial Sequence
  ENSG00000120253_29 (sequence is synthesized)
agggcgggggaggcgtgtggcccagccgcccgcccctgtggctgctaccgctgccaggggactgcagggaggccgggctgagtcagcgccacttccgctgctgcgtgtccctttctgagg

SEQ ID NO: 236455 - DNA, 120 bp, Artificial Sequence
  ENSG00000120253_30 (sequence is synthesized)
cctcggaccgcaccgctttcgccctgcggcccggctcggtagcctgatcagtcgcgttcccggctgtgtctccggtcaccgagcgggacggcgggatggcggggtcgatctgtgcagacg

SEQ ID NO: 236456 - DNA, 120 bp, Artificial Sequence
  ENSG00000120254_0 (sequence is synthesized)
tgagtcccactccgcaccccaccctctgtctggtacagcttaccaaaccaaagtgcccaaagccgtgacatcccggccggcggctcgcaggcccccgccctccgcacgtcacggccgccg

SEQ ID NO: 236457 - DNA, 80 bp, Artificial Sequence
  ENSG00000120254_1 (sequence is synthesized)
ggtgcagtgccccctaggggcccctgggacgaggaggaagcgccaggtccttcccgccgccgccgccgccgccgccgcct

SEQ ID NO: 236458 - DNA, 80 bp, Artificial Sequence
  ENSG00000120254_2 (sequence is synthesized)
ctccgtgtcccctgagaaccagccgtcccgcgccatgggcacgcgtctgccgctcgtcctgcgccagctccgccgcccgc

SEQ ID NO: 236459 - DNA, 120 bp, Artificial Sequence
  ENSG00000120254_3 (sequence is synthesized)
ggcggcggtggccgggagggcctgcttggacagcggcggccgcaggatggccaggcccggagcagctgcagccccggcggccgaacgcccgcggcgcgggactccatcgtcagagaagtc

SEQ ID NO: 236460 - DNA, 120 bp, Artificial Sequence
  ENSG00000120254_4 (sequence is synthesized)
ggcgcgggactccatcgtcagagaagtcattcagaattcaaaagaagttctaagtttattgcaagaaaaaaaccctgccttcaagccggttcttgcaattatccaggcaggtgacgacaa

SEQ ID NO: 236461 - DNA, 120 bp, Artificial Sequence
  ENSG00000120254_5 (sequence is synthesized)
cttgatgcaggaaatcaaccagaatttggctgaggaggctggtctgaacatcactcacatttgcctccctccagatagcagtgaagccgagattatagatgaaatcttaaagatcaatga

SEQ ID NO: 236462 - DNA, 120 bp, Artificial Sequence
  ENSG00000120254_6 (sequence is synthesized)
agataccagagtacatggccttgcccttcagatctctgagaacttgtttagcaacaaagtcctcaatgccttgaaaccagaaaaagatgtggatggagtaacagacataaacctggggaa

SEQ ID NO: 236463 - DNA, 120 bp, Artificial Sequence
  ENSG00000120254_7 (sequence is synthesized)
gctggtgcgaggggatgcccatgaatgttttgtttcacctgttgccaaagctgtaattgaacttcttgaaaaatcaggtgtcaacctagatggaaagaagattttggtagtgggggccca

SEQ ID NO: 236464 - DNA, 120 bp, Artificial Sequence
  ENSG00000120254_8 (sequence is synthesized)
tgggtctttggaagctgctctacaatgcctgttccagagaaaagggtccatgacaatgagcatccagtggaaaacacgccagcttcaaagcaagcttcacgaggctgacattgtggtcct

SEQ ID NO: 236465 - DNA, 120 bp, Artificial Sequence
  ENSG00000120254_9 (sequence is synthesized)
aggctcacctaagccagaagagattccccttacttggatacaaccaggaactactgttctcaactgctcccatgacttcctgtcagggaaggttgggtgtggctctccaagaatacattt

SEQ ID NO: 236466 - DNA, 120 bp, Artificial Sequence
  ENSG00000120254_10 (sequence is synthesized)
tggtggactcattgaggaagatgatgtgattctccttgctgcagctctgcgaattcagaacatggtcagtagtggaaggagatggcttcgtgaacagcagcacaggcggtggagacttca

SEQ ID NO: 236467 - DNA, 120 bp, Artificial Sequence
  ENSG00000120254_11 (sequence is synthesized)
ctgcttgaaacttcagcctctctcccctgtgccaagtgacattgagatttcaagaggacaaactccaaaagctgtggatgtccttgccaaggagattggattgcttgcagatgaaattga

SEQ ID NO: 236468 - DNA, 120 bp, Artificial Sequence
  ENSG00000120254_12 (sequence is synthesized)
aatctatggcaaaagcaaagccaaagtacgtttgtccgtgctagaaaggttaaaggatcaagcagatggaaaatacgtcttagttgctgggatcacacccacccctcttggagaagggaa

SEQ ID NO: 236469 - DNA, 120 bp, Artificial Sequence
  ENSG00000120254_13 (sequence is synthesized)
gagcacagtcaccatcgggcttgtgcaggctctgaccgcacacctgaatgtcaactcctttgcctgcttgaggcagccttcccaaggaccgacgtttggagtgaaaggaggagccgcggg

SEQ ID NO: 236470 - DNA, 120 bp, Artificial Sequence
  ENSG00000120254_14 (sequence is synthesized)
tggtggatatgcccaggtcatccccatggaggagttcaaccttcacttgactggagacatccacgccatcaccgctgccaataacttgctggctgccgccatcgacacgaggattcttca

SEQ ID NO: 236471 - DNA, 120 bp, Artificial Sequence
  ENSG00000120254_15 (sequence is synthesized)
aacacgcaaacagataaggctctgtataatcggctggttcctttagtgaatggtgtcagagaattttcagaaattcagcttgctcggctaaaaaaactgggaataaataagactgatccg

SEQ ID NO: 236472 - DNA, 120 bp, Artificial Sequence
  ENSG00000120254_16 (sequence is synthesized)
agcacactgacagaagaggaagtgagtaaatttgcccgtctcgacatcgacccatctaccatcacgtggcagagagtattggatacaaatgaccgatttctacgaaaaataaccatcggg

SEQ ID NO: 236473 - DNA, 120 bp, Artificial Sequence
  ENSG00000120254_17 (sequence is synthesized)
cagggaaacacagagaagggccattaccggcaggcgcagtttgacatcgcagtggccagcgagatcatggcggtgctggccctgacggacagcctcgcagacatgaaggcacggctggga

SEQ ID NO: 236474 - DNA, 120 bp, Artificial Sequence
  ENSG00000120254_18 (sequence is synthesized)
aggatggtggtggccagtgacaaaagcgggcagcctgtgacagcagatgatttgggggtgacaggtgctttgacagttttgatgaaagatgcaataaaaccaaacctgatgcagaccctg

SEQ ID NO: 236475 - DNA, 120 bp, Artificial Sequence
  ENSG00000120254_19 (sequence is synthesized)
gaagggacacctgtgttcgtgcatgcgggcccttttgctaacattgctcacggcaactcttcagtgttggctgataaaattgccctgaaactggttggtgaagaaggatttgtagtgacc

SEQ ID NO: 236476 - DNA, 120 bp, Artificial Sequence
  ENSG00000120254_20 (sequence is synthesized)
gaagctggctttggtgctgacatcggaatggagaaattcttcaacatcaagtgccgagcttccggcttggtgcccaacgtggttgtgttagtggcaacggtgcgagctctgaagatgcat

SEQ ID NO: 236477 - DNA, 120 bp, Artificial Sequence
  ENSG00000120254_21 (sequence is synthesized)
ggaggcgggccaagtgtaacggctggtgttcctcttaagaaagaatatacagaggagaacatccagctggtggcagacggctgctgtaacctccagaagcaaattcagatcactcagctc

SEQ ID NO: 236478 - DNA, 120 bp, Artificial Sequence
  ENSG00000120254_22 (sequence is synthesized)
tttggggttcccgttgtggtggctctgaatgtcttcaagaccgacacccgcgctgagattgacttggtgtgtgagcttgcaaagcgggctggtgcctttgatgcagtcccctgctatcac

SEQ ID NO: 236479 - DNA, 120 bp, Artificial Sequence
  ENSG00000120254_23 (sequence is synthesized)
tggtccgttggtggaaaaggatcggtggacttggctcgggctgtgagagaggctgcgagtaaaagaagccgattccagttcctgtatgatgttcaggttccaattgtggacaagataagg

SEQ ID NO: 236480 - DNA, 120 bp, Artificial Sequence
  ENSG00000120254_24 (sequence is synthesized)
accattgctcaggctgtctatggagccaaagatattgaactctctcctgaggcacaagccaaaatagatcgttacactcaacagggttttggaaatttgcccatctgcatggcaaagacc

SEQ ID NO: 236481 - DNA, 120 bp, Artificial Sequence
  ENSG00000120254_25 (sequence is synthesized)
cacctttctctatctcaccaacctgacaaaaaaggtgtgccaagggacttcatcttacctatcagtgacgtccgggccagcataggcgctgggttcatttaccctttggtcggaacgatg

SEQ ID NO: 236482 - DNA, 120 bp, Artificial Sequence
  ENSG00000120254_26 (sequence is synthesized)
agcaccatgccaggactgcccacccggccctgcttttatgacatagatcttgataccgaaacagaacaagttaaaggcttgttctaagtggacaaggctctcacaggacccgatgcagac

SEQ ID NO: 236483 - DNA, 120 bp, Artificial Sequence
  ENSG00000120254_27 (sequence is synthesized)
tcctgaaacagactactctttgcctttttgctgcagttggagaagaaactgaatttgaaaaatgtctgttatgcaatgctggagacatggtgaaataggccaaagatttcttcttcgttc

SEQ ID NO: 236484 - DNA, 120 bp, Artificial Sequence
  ENSG00000120254_28 (sequence is synthesized)
aagatgaattctgttcacagtggagtatggtgttcggcaaaaggacctccaccaagactgaaagaaactaatttatttctgtttctgtggagtttccattatttctactgcttacacttt

SEQ ID NO: 236485 - DNA, 120 bp, Artificial Sequence
  ENSG00000120254_29 (sequence is synthesized)
agaatgtttattttatggggactaagggattaggagtgtgaactaaaaggtaacattttccactctcaagttttctactttgtctttgaactgaaaataaacatggatctagaaaaccaa

SEQ ID NO: 236486 - DNA, 120 bp, Artificial Sequence
  ENSG00000120254_30 (sequence is synthesized)
cttctgaacttcacgctctcactgcccagatggccaggggtgtttcctcctctgctggtcttttttaaggcaggatgtttgttgttattgttgttgtttttctggttggttcttaagaaa

SEQ ID NO: 236487 - DNA, 120 bp, Artificial Sequence
  ENSG00000120254_31 (sequence is synthesized)
ttattttctacatcttgaaaatgccagctggaacctacaccagttgttggtggggtgtgagaactatcctttacatggacttggagcatttgcaactagagcctccacattgaaataaac

SEQ ID NO: 236488 - DNA, 120 bp, Artificial Sequence
  ENSG00000120254_32 (sequence is synthesized)
gggagaggcgggctcgggcccagcgccgcccgcgcgaagctccctggtgttgtgcgcccttccccgcgcgcggcccctcctgctgggctggggtctgtggctgacgtccgcttttcccgg

SEQ ID NO: 236489 - DNA, 120 bp, Artificial Sequence
  ENSG00000120254_33 (sequence is synthesized)
gcaagtccatccttaaacaataaacatctccagcattgctggctttggaagaccccatggtgagatgctggagcttttttccgctccagatttcgcttctaaatatttacttttactttc

SEQ ID NO: 236490 - DNA, 120 bp, Artificial Sequence
  ENSG00000120254_34 (sequence is synthesized)
catgttcacttataggccagggtttttttttcctaccattgaattatttcgtcatgttctatttaattattgctttaattggcattggtgaccacaaataataataaatactattaactg

SEQ ID NO: 236491 - DNA, 120 bp, Artificial Sequence
  ENSG00000120254_35 (sequence is synthesized)
ggtcctaggctcacctaagccagaagagattccccttacttggatacaaccaggaactactgttctcaactgctcccatgacttcctgtcagaaagtttgattatcattagaagaatggc

SEQ ID NO: 236492 - DNA, 120 bp, Artificial Sequence
  ENSG00000120254_36 (sequence is synthesized)
gattcattgacttgtccctggagaaatcatgagttagatgagagtgtttagtgggaagtgaaaagacccgtccacggtttcggatgagatcctcgttggactgtgatcccaggatattac

SEQ ID NO: 236493 - DNA, 120 bp, Artificial Sequence
  ENSG00000120254_37 (sequence is synthesized)
ccaggcccagatcgtagacaacctcccaatggagtcctgcccctacacgggcagggggtgaaataatgattccctttcttaattttctttagccatgaaatttattaaaaatgtatgtct

SEQ ID NO: 236494 - DNA, 120 bp, Artificial Sequence
  ENSG00000120254_38 (sequence is synthesized)
atctaggctcactgcaagctctgcctcccaggttgaagtgattctcctgtgaaagggaattatttttgatgagtcattaaagtatatccattcccagaatggtgctgcatttttcctttt

SEQ ID NO: 236495 - DNA, 120 bp, Artificial Sequence
  ENSG00000120254_39 (sequence is synthesized)
ggacacctgtgttcgtgcatgcgggcccttttgctaacattgctcacggcaactcttcagtgttggctgataaaattgccctgaaactggttggtgaagaaggatttgtaggcttgttct

SEQ ID NO: 236496 - DNA, 120 bp, Artificial Sequence
  ENSG00000120256_0 (sequence is synthesized)
actgttcgcacacacctggtgctgatcaacgccgaggccgactcgtcgccacccagcgcgccgcaggccggggcggagaggcgcagggcgctgggcagtctccggcgagggcaaggagcg

SEQ ID NO: 236497 - DNA, 120 bp, Artificial Sequence
  ENSG00000120256_1 (sequence is synthesized)
aaggagcggtgcccggctgggccggctatgtctcccgctactgcggttcccgccggcgcccgcgacctcgggggagcagccgggttcgggggcgccgcgctgtgaggccggggcctagag

SEQ ID NO: 236498 - DNA, 120 bp, Artificial Sequence
  ENSG00000120256_2 (sequence is synthesized)
gctcgcccgcgtccccgccttcctcccgcgctcagccccgcctcggctcgctgcccttggctctcgtcgccatggcctccgtcgcccaggagagcgcgggctcgcagcgccggctaccgc

SEQ ID NO: 236499 - DNA, 120 bp, Artificial Sequence
  ENSG00000120256_3 (sequence is synthesized)
ctcgcagcgccggctaccgccgcgtcacggggcgctgcgcgggctgctactgctctgcctgtggctgccaagcggccgtgcggccttgccgcccgcggcgccgctgtccgaactgcacgc

SEQ ID NO: 236500 - DNA, 120 bp, Artificial Sequence
  ENSG00000120256_4 (sequence is synthesized)
ctgcacgcgcagctgtcgggcgtggagcagctgctggaggagttccgccggcaactgcagcaggagcggcctcaggaggagctggagctggagctgcgcgcgggcggcggcccccaggag

SEQ ID NO: 236501 - DNA, 120 bp, Artificial Sequence
  ENSG00000120256_5 (sequence is synthesized)
gactgcccgggcccgggcagcggcggctacagcgcaatgcctgacgccatcatccgcaccaaggactccctggcggcgggtgccagcttcctgcgggcgccggcggccgtgcggggctgg

SEQ ID NO: 236502 - DNA, 120 bp, Artificial Sequence
  ENSG00000120256_6 (sequence is synthesized)
cggcaatgcgtggcggcctgctgctccgagccgcgctgctccgtggccgtggtggagctgccccggcgccccgcgcccccggcagccgtgctcggctgctacctcttcaactgcacggcg

SEQ ID NO: 236503 - DNA, 120 bp, Artificial Sequence
  ENSG00000120256_7 (sequence is synthesized)
cgcggccgcaacgtctgcaagttcgcgctgcacagcggctacagcagctacagcctcagccgcgcgccggacggcgccgccctggccaccgcgcgcgcctcgccccggcaggaaaaggat

SEQ ID NO: 236504 - DNA, 120 bp, Artificial Sequence
  ENSG00000120256_8 (sequence is synthesized)
gcgcctccacttagcaaggctgggcaggatgtggttctgcatctgcccacagacggggtggttctagacggccgcgagagcacagatgaccacgccatcgtccagtatgagtgggcactg

SEQ ID NO: 236505 - DNA, 120 bp, Artificial Sequence
  ENSG00000120256_9 (sequence is synthesized)
ctgcagggggacccgtcagtggacatgaaggtgcctcaatcaggaaccctgaagctgtcccacctacaggagggaacctacaccttccagctgaccgtgacggacactgccgggcagaga

SEQ ID NO: 236506 - DNA, 120 bp, Artificial Sequence
  ENSG00000120256_10 (sequence is synthesized)
agctctgacaacgtgtcagtgacagtgcttcgcgcagcctactccacaggaggatgtttgcacacttgctcacgctaccacttcttctgtgacgatggctgctgcattgacatcacgctc

SEQ ID NO: 236507 - DNA, 120 bp, Artificial Sequence
  ENSG00000120256_11 (sequence is synthesized)
gcctgcgatggagtgcagcagtgtcctgatgggtctgatgaagacttctgccagaatctgggcctggaccgcaagatggtaacccacacggcagctagtcctgccctgccaagaaccaca

SEQ ID NO: 236508 - DNA, 120 bp, Artificial Sequence
  ENSG00000120256_12 (sequence is synthesized)
gggccgagtgaagatgcagggggtgactccttggtggaaaagtctcagaaagccactgccccaaacaagccacctgcattatcaaacacagagaagaggaatcattccgccttttgggga

SEQ ID NO: 236509 - DNA, 120 bp, Artificial Sequence
  ENSG00000120256_13 (sequence is synthesized)
ccagagagtcaaatcattcctgtgatgccagatagtagttcctcagggaagaacagaaaagaggaaagttatatatttgagtcaaagggtgatggaggaggaggggaacacccagcccca

SEQ ID NO: 236510 - DNA, 120 bp, Artificial Sequence
  ENSG00000120256_14 (sequence is synthesized)
gaaacaggtgcagtgctacccctggcgctgggtttggctatcactgctctgctgcttctcatggttgcatgccgactacgactggtgaaacagaaactgaaaaaagctcgtcccattaca

SEQ ID NO: 236511 - DNA, 120 bp, Artificial Sequence
  ENSG00000120256_15 (sequence is synthesized)
atctatagtaatgtaatttcaataccttggggcagggacatgttttgtttataatttatacatctattaagttctggatatttacagcttcttttgtttttaattgggccagaagattct

SEQ ID NO: 236512 - DNA, 120 bp, Artificial Sequence
  ENSG00000120256_16 (sequence is synthesized)
gcaaatcccaaatctttctttattatttattgtaaaaaaagtttccttagaagtcataaaatattttgaaatttagagaggaattcatgattaaagattcctaaaaatataattctgatt

SEQ ID NO: 236513 - DNA, 120 bp, Artificial Sequence
  ENSG00000120256_17 (sequence is synthesized)
tatgtaagctgtccctgaaaatagaaatgtgtacttagctgagagaaaattcagcatctcaggaggtggtattaggatgactgtgttaacccattaccttttagaagccaactgttggcc

SEQ ID NO: 236514 - DNA, 120 bp, Artificial Sequence
  ENSG00000120256_18 (sequence is synthesized)
ccttaccatgctggactgctataggcccagcttccccttgttctgtggcccttttcttcctccttgaagctcccagtattctttttcttttcccctctaaacctgtttctgagagtggat

SEQ ID NO: 236515 - DNA, 120 bp, Artificial Sequence
  ENSG00000120256_19 (sequence is synthesized)
ctcaagcaagttcatgccttcaatcagatgttacttagggtgggtatacctaaattataaaccttatgtacaagtcagtaagccttagggaaggtgagtgtgggtccttcctaatccctc

SEQ ID NO: 236516 - DNA, 120 bp, Artificial Sequence
  ENSG00000120256_20 (sequence is synthesized)
tgacgtcatgtcatataggtggctgcctccttagactgacctttgggagaaaaaaaccccagactttgaattagtaacagctctaagatggtcatgcagtgagataggaaatcaagatgg

SEQ ID NO: 236517 - DNA, 120 bp, Artificial Sequence
  ENSG00000120256_21 (sequence is synthesized)
aagcagagaatctggcatgccaaaaactaacagaaacttagttgaaggcaaagagagcaaggagaacgtttaatacttcattacatcaaatcaacactgctccatggtgagagcacagca

SEQ ID NO: 236518 - DNA, 120 bp, Artificial Sequence
  ENSG00000120256_22 (sequence is synthesized)
actcatttatatatatatatataggctttgttgatgaaaaacgacaattgaagagaggacgttgagtggattcctgggtacagcttttgtaaaaatgtcaccatggctttcatccaatgg

SEQ ID NO: 236519 - DNA, 120 bp, Artificial Sequence
  ENSG00000120256_23 (sequence is synthesized)
aatgagtcgatgttttttaatgctataaaatgttagaatgtgccatcagctaatgccaggcttacgtatttctagaccataaagcagtttttcacaaattcatctttacagaaaaccagc

SEQ ID NO: 236520 - DNA, 120 bp, Artificial Sequence
  ENSG00000120256_24 (sequence is synthesized)
atctagcttagcatctttccccttttaatttgtaggcttttaaaggcaaatcattcccaccatcacttaacgccgggattatacacattctagaaatgattctgagaggagtgtatagta

SEQ ID NO: 236521 - DNA, 120 bp, Artificial Sequence
  ENSG00000120256_25 (sequence is synthesized)
tggtgcctatctacactcacatgatattcttattcacgttttttttaaccataagtggcaaatattttaaaatatttgaaaaacactccagaatctagtacgctttatttttagactgaa

SEQ ID NO: 236522 - DNA, 120 bp, Artificial Sequence
  ENSG00000120256_26 (sequence is synthesized)
cctaaagtaggttgttcttttaacaaagggtttaattcgggtggggaatataacatatcaaaatacatgaacaaatggaaagttacttctagaaaagcaaagaaattgggtatcattttt

SEQ ID NO: 236523 - DNA, 120 bp, Artificial Sequence
  ENSG00000120256_27 (sequence is synthesized)
gtttcttgggaagctaattttgttgaatgtttagaattgagcaaagatgtaaatttttgaagggcagtttagaaaaattaactttgtgaatgaacttaagatgtctgtactctatatgtg

SEQ ID NO: 236524 - DNA, 120 bp, Artificial Sequence
  ENSG00000120256_28 (sequence is synthesized)
atgctgtgcagtttgtttttatatggaaagatgtcaactatagccataaccaataaaataaaaactgatgaggcatgcagctttcagcacatcttttatacatgaagaaattaattttgt

SEQ ID NO: 236525 - DNA, 120 bp, Artificial Sequence
  ENSG00000120256_29 (sequence is synthesized)
gttgctatggtgttgaaatatccaagatgttctgtatctatgtaaacatgattcctttaataaattgtattttattattaagcctttttttccttttaatataatcataagttgctatta

SEQ ID NO: 236526 - DNA, 120 bp, Artificial Sequence
  ENSG00000120256_30 (sequence is synthesized)
aaggagtttagtgaaaccagttgaactcgtggaagcagagagtggaatggcggttactggaggctgtgcgggggacggactgggaaaggagagacgctggtcaaagggtacaaagtgtca

SEQ ID NO: 236527 - DNA, 120 bp, Artificial Sequence
  ENSG00000120256_31 (sequence is synthesized)
ctgagaccggaggaacaggttctggtgatctgttgcacagcatggtgactatagttaatgataatgtattgtctgtttcaaaattgctaaaacagtaggttttaaatgttgtcatcacaa

SEQ ID NO: 236528 - DNA, 120 bp, Artificial Sequence
  ENSG00000120256_32 (sequence is synthesized)
aaagattacaagtaggggagatgatagatatgtcagttagcttgatgtaatcattccacaatgcaaacatatatcaaaacatcacattgtgcctcataaatatatactctcctcttttgt

SEQ ID NO: 236529 - DNA, 120 bp, Artificial Sequence
  ENSG00000120256_33 (sequence is synthesized)
caattaaaaatacatattaaaaaaacaaggaaaaggcataccacaggattgaagaaagacttggctcttgggtgtaatcaattgctgatataataagtcacttcaaaaattttagaaaga

SEQ ID NO: 236530 - DNA, 120 bp, Artificial Sequence
  ENSG00000120256_34 (sequence is synthesized)
gaaaaagagtgcagctaaggagtacggttaaaattaattgaaatacgcaaaggacccatcaatttgaaagtgctacctacacattttcatagacactttacgcagatgcagttatattaa

SEQ ID NO: 236531 - DNA, 120 bp, Artificial Sequence
  ENSG00000120256_35 (sequence is synthesized)
tcacattctgttgtacaatgtaacaatgtaaaacttatttcattcatctatgtttcttacttttctaaacatctacattttttttttgagagggagttttgctcttgttgcctaggctgg

SEQ ID NO: 236532 - DNA, 69 bp, Artificial Sequence
  ENSG00000120256_36 (sequence is synthesized)
cacttagactacaggcgtgaaccaccgcgcccagcccaacgtctacatgtctaagaaagattaggtcat

SEQ ID NO: 236533 - DNA, 120 bp, Artificial Sequence
  ENSG00000120256_37 (sequence is synthesized)
cccagcccaacgtctacatgtctaagaaagattaggtcatcaaattttttaaaatatccattgcatggaacttagcgacactaaagatattgtagtattgtagagggaacccctcaccac

SEQ ID NO: 236534 - DNA, 120 bp, Artificial Sequence
  ENSG00000120256_38 (sequence is synthesized)
acacacaattcacttctggagaggtgctaaggtcttgtacatttaaatatcctgttactcggtcatcgtgtattttcttagtgtatgcagtgtgcagggtccttgccaggcactggggat

SEQ ID NO: 236535 - DNA, 120 bp, Artificial Sequence
  ENSG00000120256_39 (sequence is synthesized)
agagtggtgcactggtggtccctgactctggtaaacttgcagtaagtctgtgacatttttgaattctcagtattcaatactcaggatccagatggtaattaagccagcagagtgcagaat

SEQ ID NO: 236536 - DNA, 120 bp, Artificial Sequence
  ENSG00000120256_40 (sequence is synthesized)
gaggataaaagagttggaacaggactgtgatttacttgtactatattggatctagccttctatcaaaaactgaggttagtatgcatactggaaatgaaattttctaaggagttagagatt

SEQ ID NO: 236537 - DNA, 120 bp, Artificial Sequence
  ENSG00000120256_41 (sequence is synthesized)
ttaggatcctaaggacttgtcaactttgataattttcataggcggcattaaaaatttgtttggctgatgacaacctgtccagccaggggttaagcttactgtaaggaagcagggtaacca

SEQ ID NO: 236538 - DNA, 120 bp, Artificial Sequence
  ENSG00000120256_42 (sequence is synthesized)
ttcacagacaggacaggcaccaaactccagcccgtgccagcactgtgaggtcaccagtgatagcgagtaaacagtctgtccagctcagcccggattccatcagccctgctaattcattgc

SEQ ID NO: 236539 - DNA, 120 bp, Artificial Sequence
  ENSG00000120256_43 (sequence is synthesized)
agctggacaggagagccagccagctactcaaaacattgttgagtccctttgctgggcagctactcaaaacatcattggtcccttggccaccaggaccagtggagacatgacattgtctcc

SEQ ID NO: 236540 - DNA, 120 bp, Artificial Sequence
  ENSG00000120256_44 (sequence is synthesized)
agcagggatggctcacttctgtagatctgggcgccctctagagggctttccccctgggtaccgggactcacctggacagggtctgagtcaagtgctgactctgggaggaagggactcttg

SEQ ID NO: 236541 - DNA, 120 bp, Artificial Sequence
  ENSG00000120256_45 (sequence is synthesized)
ggaaaaagacacagataccctgtcatccccacagaaatcagaaaaggattgctcttgtacagctgaagtgcctgggagggaggaagggcctgcactgatatgagcagatggccagcacct

SEQ ID NO: 236542 - DNA, 120 bp, Artificial Sequence
  ENSG00000120256_46 (sequence is synthesized)
caccggccacttgtttgtcctggtttatttcctcaggcagctttccgggctccagaggtaaattgccagctgtaaatttctggcccttctccaagatgataataaactgtatttgaagta

SEQ ID NO: 236543 - DNA, 120 bp, Artificial Sequence
  ENSG00000120256_47 (sequence is synthesized)
gtagtcttctcagaactgcatgccctctggctgaggatattccctgaggccatgagagctcaggacaggaggagtccgtcagtggaccgaaagaactgtctcctcgttgcttgtattgca

SEQ ID NO: 236544 - DNA, 120 bp, Artificial Sequence
  ENSG00000120262_0 (sequence is synthesized)
gcggtgtttacccgttgcccgaggagacacccgcgccacccgccggctcccggcgccgccgcttcctcagggccggttccgggtccgagcgcgcccccgggctcgggtcgtcatgagcct

SEQ ID NO: 236545 - DNA, 120 bp, Artificial Sequence
  ENSG00000120262_1 (sequence is synthesized)
ggactgcaccagccatatcgcgctgggtgccgcttcgccagcgcccgaggaaacttacgatcatctttcggaagtcccggtcacgcgggagcagttaaaccactatcggaatgtggctca

SEQ ID NO: 236546 - DNA, 120 bp, Artificial Sequence
  ENSG00000120262_2 (sequence is synthesized)
aaatgctcgaagtgaacttgcagcaactttggtcaaatttgaatgtgctcagtctgagcttcaagacctccgatccaagatgctttctaaagaagtctcctgtcaagaactgaaagctga

SEQ ID NO: 236547 - DNA, 120 bp, Artificial Sequence
  ENSG00000120262_3 (sequence is synthesized)
aatggagagctacaaggaaaacaatgccagaaaatcatctctccttacctctttgagagacagagttcaggaactagaagaagaatcagcagcactttccacttctaaaatcagaacaga

SEQ ID NO: 236548 - DNA, 120 bp, Artificial Sequence
  ENSG00000120262_4 (sequence is synthesized)
aatcacagctcacgctgcaatcaaggagaaccaggaattaaagaagaaagttgtagagttaaatgaaaaattacaaaagtgttcaaaagaaaatgaggagaataagaaacaagtttcaaa

SEQ ID NO: 236549 - DNA, 120 bp, Artificial Sequence
  ENSG00000120262_5 (sequence is synthesized)
gaattgcaggaaacatgaggaatttctgactcaactgcgtgactgcttggatccagatgagaggaatgacaaggcatcagatgaagatttaattttaaagcttagagacctgcgcaaaga

SEQ ID NO: 236550 - DNA, 120 bp, Artificial Sequence
  ENSG00000120262_6 (sequence is synthesized)
aaatgaattcgtgaaaggacaaattgttattcttgaagagactataaatgtccatgagatggaagcaaaagctagcagagaaacgatcatgaggctggcttcagaagtcaacagagagca

SEQ ID NO: 236551 - DNA, 120 bp, Artificial Sequence
  ENSG00000120262_7 (sequence is synthesized)
gaaaaaagctgcctcctgtactgaagagaaagagaagctgaaccaggacctgctcagtgctgtagaagcaaaagaagctcttgaaagggaagttaagatcttccaagaaaggctgcttgc

SEQ ID NO: 236552 - DNA, 120 bp, Artificial Sequence
  ENSG00000120262_8 (sequence is synthesized)
tggccagcaggtctgggatgcctcaaagcaggaagtgagcctcctgaagaaaagctcttctgagttggagaagagtttgaaggccagtcaggatgcagtcacaacctcacaaagccagta

SEQ ID NO: 236553 - DNA, 120 bp, Artificial Sequence
  ENSG00000120262_9 (sequence is synthesized)
cttctcatttagggagaaaatcgcagccctccttaggggcagattgagcatgactgggtccactgaggacaccattttggagaagattcgagaaatggacagccgggaagaaagcaggga

SEQ ID NO: 236554 - DNA, 120 bp, Artificial Sequence
  ENSG00000120262_10 (sequence is synthesized)
ccggatggtctcccagcttgaagcccaaatatctgagcttgttgaacagttgggaaaggagtctgggtttcaccagaaagctctccagagggcccagaaagcagagaatatgttggagac

SEQ ID NO: 236555 - DNA, 120 bp, Artificial Sequence
  ENSG00000120262_11 (sequence is synthesized)
tcttcagggtcagctgacacacctggaggcagagctggtttctggaggtgttttgcgagacaacttgaattttgagaaacaaaaatatcttaaatttctggatcagctttctcagaaaat

SEQ ID NO: 236556 - DNA, 120 bp, Artificial Sequence
  ENSG00000120262_12 (sequence is synthesized)
gaagttggaccagatggctgccgaacttggctttgacatgcggctggacgtggttttagctcgaacagagcagctggttcgtcttgagagcaatgcagtcattgagaacaagaccattgc

SEQ ID NO: 236557 - DNA, 120 bp, Artificial Sequence
  ENSG00000120262_13 (sequence is synthesized)
ccacaatttgcagagaaagctaaagacacagaaagagagactggagagcaaagaattacacatgagcctcctccggcagaaaatagcccagctggaggaggagaagcaggcacgcacggc

SEQ ID NO: 236558 - DNA, 120 bp, Artificial Sequence
  ENSG00000120262_14 (sequence is synthesized)
cttggtggttgagagggacaacgcgcatcttaccatcaggaacttgcagaagaaggtggagaggctgcagaaagagctgaacacgtgtcgagacttgcacaccgagctcaaagccaaact

SEQ ID NO: 236559 - DNA, 120 bp, Artificial Sequence
  ENSG00000120262_15 (sequence is synthesized)
ggccgacaccaatgaactgaagattaaaactttggaacagactaaagccattgaagatctaaacaaatccagagaccaactggagaagatgaaggagaaagctgagaaaaagctcatgtc

SEQ ID NO: 236560 - DNA, 120 bp, Artificial Sequence
  ENSG00000120262_16 (sequence is synthesized)
tgtcaagtcagaactggataccacagaacatgaggctaaggagaataaagaaagggccagaaacatgatagaagtggtaaccagtgaaatgaagacactaaaaaaatctctggaagaagc

SEQ ID NO: 236561 - DNA, 120 bp, Artificial Sequence
  ENSG00000120262_17 (sequence is synthesized)
agaaaagagagaaaagcagctggcagacttcagggaggtggtgtcgcagatgctaggcttgaacgtgaccagccttgctcttcctgattatgaaatcatcaagtgtcttgaaagattggt

SEQ ID NO: 236562 - DNA, 120 bp, Artificial Sequence
  ENSG00000120262_18 (sequence is synthesized)
ccattcacatcagcatcactttgttacctgtgcctgcctcaaagatgtgactactgggcaagagaggcacccacaaggccatttacagcttcttcattgaacactgtatctcttgagaga

SEQ ID NO: 236563 - DNA, 120 bp, Artificial Sequence
  ENSG00000120262_19 (sequence is synthesized)
ggtggccataagacatggcacacaattcccaatttcacaaattcctcatgtctttgagatttgatcagtttgtgaatattttatgctttgatgatatagtgagaatgcatcacttgcaaa

SEQ ID NO: 236564 - DNA, 120 bp, Artificial Sequence
  ENSG00000120262_20 (sequence is synthesized)
aacgatctcaaaagtgtcagccttagataaacgttcagcattaaaaacgcctattatttcatttactagcattttaggatccagaagaattccaccagattgcatgagttagattgggaa

SEQ ID NO: 236565 - DNA, 120 bp, Artificial Sequence
  ENSG00000120262_21 (sequence is synthesized)
atgggagtgggagataatattgggaggtatctattttaagtcaggggctttactagccgatttagttctcacaataaccatgtggagaagctgtgacatttttaatttacaacctttctg

SEQ ID NO: 236566 - DNA, 120 bp, Artificial Sequence
  ENSG00000120262_22 (sequence is synthesized)
aaggttgcagttgggtagtggtgggaccaggatggacaactcattggccctgcctcaaaagccatacctcttctcctgctatgcagaatctgtttctcctgaatctctgtgatgctggtg

SEQ ID NO: 236567 - DNA, 120 bp, Artificial Sequence
  ENSG00000120262_23 (sequence is synthesized)
tctgtttctcctgaatctctgtgatgctggtgggaattgtttgcatagaggaaggacaataaccctgccatcgtgagttaatgtccgggctggtcacagtggttcatgcctgtaatccca

SEQ ID NO: 236568 - DNA, 82 bp, Artificial Sequence
  ENSG00000120262_24 (sequence is synthesized)
gaccctgttcatgactgtaatcccaactactcagcaggagaagcacttgaacccaggagacggaggcggcagtgagccaaga

SEQ ID NO: 236569 - DNA, 65 bp, Artificial Sequence
  ENSG00000120262_25 (sequence is synthesized)
ggtggtgcatgactgtaatcccaactactcagcaggagaagcacttgaacccaggagacggaggc

SEQ ID NO: 236570 - DNA, 120 bp, Artificial Sequence
  ENSG00000120262_26 (sequence is synthesized)
atgtccaaaaatgacagatttacaagtgtaagctatatgatttcttcaaaaagcaaaagcaatatacctaattcatttggatcaaacttacataggtctcaggtcctgtaagaaacttgc

SEQ ID NO: 236571 - DNA, 120 bp, Artificial Sequence
  ENSG00000120262_27 (sequence is synthesized)
ctgttctaactgttgctaccagattatatctggtggtaattgttaatgtttcagcagggctggtctcagtcctttaaaatggaaagctttatttggagcccaaccctataagatgaagaa

SEQ ID NO: 236572 - DNA, 120 bp, Artificial Sequence
  ENSG00000120262_28 (sequence is synthesized)
atcctatatagtcttattcaccaatatatccaatacacccacagcaatggtacctttttaagatcaggattttattatgaattcctgtcactttctgttttccatttaaatttctatttt

SEQ ID NO: 236573 - DNA, 120 bp, Artificial Sequence
  ENSG00000120262_29 (sequence is synthesized)
acaaatttttcagggaatcatattcttaacttcactgagaaaaatgtgttactcttttggacaatttatcttatttctatcatataagatgtatttttttattgtccttaaaagaagctc

SEQ ID NO: 236574 - DNA, 120 bp, Artificial Sequence
  ENSG00000120262_30 (sequence is synthesized)
tagcatgaaattaaaggaaagggaaagaaatagatctggtgcacccgaacattaggagaaaatgaaaaatatacaaccaaccgttcgtgagtcatcaaaaagtcaaagtcagcctggcca

SEQ ID NO: 236575 - DNA, 88 bp, Artificial Sequence
  ENSG00000120262_31 (sequence is synthesized)
tcgtgagtcatcaaaaagtcaaagtgcaaaaaatacaaaaatgagcccggtatgttggcatatgcctgtaatcccagctactcgagag

SEQ ID NO: 236576 - DNA, 120 bp, Artificial Sequence
  ENSG00000120262_32 (sequence is synthesized)
ctccagcctgggcaacagagagagaccttgtctcaaaaaacaacaacaacaaaaagtcaaagtcataataagcaaattattggcttctttcttctagactaaaagaaattaaagagatga

SEQ ID NO: 236577 - DNA, 120 bp, Artificial Sequence
  ENSG00000120262_33 (sequence is synthesized)
ttcttctagactaaaagaaattaaagagatgaaacaatcaattgcaagggtcaaaactagattggatcttggtttgaatgaaaaaaagcataaaatattcttgcaataattgtaaaaatt

SEQ ID NO: 236578 - DNA, 120 bp, Artificial Sequence
  ENSG00000120262_34 (sequence is synthesized)
tgaatgtggactaagtcctagattatattaaaatatttttaattttttaagcttgacaaatgcactgattgttatactttaaataactaaaaatctgagaatccacagtgctacagacaa

SEQ ID NO: 236579 - DNA, 120 bp, Artificial Sequence
  ENSG00000120262_35 (sequence is synthesized)
acagtgctacagacaataagtgataaaatgggaaaaaatagtgaagatcttcttttaggaaaactaccaataaatgtagaatggatgattccaaaaaaaaaaaaaaaaagaagaaagaga

SEQ ID NO: 236580 - DNA, 120 bp, Artificial Sequence
  ENSG00000120262_36 (sequence is synthesized)
aaaacctaaaagaaagcgaatgaatttgacacctgttggttggatgacagaccacacagagggagagtgaccaggctttgcttgtggagcgggcatccctgcctagctatctccttcatg

SEQ ID NO: 236581 - DNA, 120 bp, Artificial Sequence
  ENSG00000120262_37 (sequence is synthesized)
tgcaaggacagtataagtagtattttgcatgtgagtaaacacacctgcgcagccctggctgaggtcactaggctggccagaggcaggacaggcagtcttgaatttcctctaggggaggcc

SEQ ID NO: 236582 - DNA, 120 bp, Artificial Sequence
  ENSG00000120262_38 (sequence is synthesized)
tgcagttttccccaccaaccccttttcacatgctccaaagatgtagtagtgtctgctgttttggatcgaaaatcaccttgagtggaggaagtgacttcactgggtctctggaggctctcg

SEQ ID NO: 236583 - DNA, 120 bp, Artificial Sequence
  ENSG00000120262_39 (sequence is synthesized)
gagcttgagtggctctgccccaccctgaatcatgcacccataaatgcagttatgggtggatgtgggtgtatgagagtggagattgtttttgtacattctctttgttttcattttccaaat

SEQ ID NO: 236584 - DNA, 80 bp, Artificial Sequence
  ENSG00000120262_40 (sequence is synthesized)
acattctctttgttttcattttccaaatataatctttaataaacttgatttagtttcttgggaaatttattttctacgct

SEQ ID NO: 236585 - DNA, 120 bp, Artificial Sequence
  ENSG00000120262_41 (sequence is synthesized)
tcattaattttatatcaggattcatgtaagagactaaaaatgatccatagtggttagtactgtaatttctgtttattacatgaaattacattccatttatccaaatatatgtttatataa

SEQ ID NO: 236586 - DNA, 120 bp, Artificial Sequence
  ENSG00000120262_42 (sequence is synthesized)
tccactgtgtgactctagtgatctttaacatacacagaatgatctacagtgatctttaacatactcagaaatatgaaaaatgtttgaatatgatctttagggacttctaatgaaaagggt

SEQ ID NO: 236587 - DNA, 120 bp, Artificial Sequence
  ENSG00000120262_43 (sequence is synthesized)
atatgaaatgggaacaataaattctgtacatgtatacagtccatatacacattaagtgtttgtcatttggacaaattgaaaacttttaataaagccattttcttctttgttaaaatgcca

SEQ ID NO: 236588 - DNA, 120 bp, Artificial Sequence
  ENSG00000120265_0 (sequence is synthesized)
gcggcgtcacagagcgcatgcgtgccgcgggggatgccgggagcgcgcagtggcggcagcggcggcgacggcagtaacagcggcagctacagcggggacgcgagcggggcggtgacggtg

SEQ ID NO: 236589 - DNA, 120 bp, Artificial Sequence
  ENSG00000120265_1 (sequence is synthesized)
tgggaggtggtctcactcttgggaaaactgctgggcaccgtcgtcgcgctgaaggtggttctgtacctgctccgagtgtgcttagcgatggcctggaaatccggcggcgccagccactcg

SEQ ID NO: 236590 - DNA, 120 bp, Artificial Sequence
  ENSG00000120265_2 (sequence is synthesized)
gagctaatccacaatctccgcaaaaatggaatcatcaagacagataaagtatttgaagtgatgctggctacagaccgctcccactatgcaaaatgtaacccatacatggattctccacaa

SEQ ID NO: 236591 - DNA, 120 bp, Artificial Sequence
  ENSG00000120265_3 (sequence is synthesized)
tcaataggtttccaagcaacaatcagtgctccacacatgcatgcatatgcgctagaacttctatttgatcagttgcatgaaggagctaaagctcttgatgtaggatctggaagtggaatc

SEQ ID NO: 236592 - DNA, 120 bp, Artificial Sequence
  ENSG00000120265_4 (sequence is synthesized)
cttactgcatgttttgcacgtatggttggatgtactggaaaagtcataggaattgatcacattaaagagctagtagatgactcagtaaataatgtcaggaaggacgatccaacacttctg

SEQ ID NO: 236593 - DNA, 120 bp, Artificial Sequence
  ENSG00000120265_5 (sequence is synthesized)
tcttcagggagagtacagcttgttgtgggggatggaagaatgggatatgctgaagaagccccttatgatgccattcatgtgggagctgcagcccctgttgtaccccaggcgctaatagat

SEQ ID NO: 236594 - DNA, 120 bp, Artificial Sequence
  ENSG00000120265_6 (sequence is synthesized)
cagttaaagcccggaggaagattgatattgcctgttggtcctgcaggcggaaaccaaatgttggagcagtatgacaagctacaagatggcagcatcaaaatgaagcctctgatgggggtg

SEQ ID NO: 236595 - DNA, 120 bp, Artificial Sequence
  ENSG00000120265_7 (sequence is synthesized)
ttatcttctgctctttcttcttccacacatgcaagggatgaattgtaaaagcaacatcagcttgaccagtataaaattacagtggattgctcatctcagtcctcaaagctttttgaaaac

SEQ ID NO: 236596 - DNA, 120 bp, Artificial Sequence
  ENSG00000120265_8 (sequence is synthesized)
caacaccatcacagcttgttttggactttgttacactgttattttcagcatgaaaatgtgtgtttttttagggtttctgattcttcaaagaggcacagagccaaattggtagaggaagga

SEQ ID NO: 236597 - DNA, 120 bp, Artificial Sequence
  ENSG00000120265_9 (sequence is synthesized)
tgcaaagtataaatttgtgtaatattactttaacatgcccatattttacttggaaatattaaaagaaagggttctgtaaaatggaaaacttagtttgtgaattgattttgaggagtggtt

SEQ ID NO: 236598 - DNA, 120 bp, Artificial Sequence
  ENSG00000120265_10 (sequence is synthesized)
tttcttttcttggacacttaattctgttctgatattaatttatcagattgcttttgtgcattggataacaccaccattcacaagttaagattcttggtatttggatatctgttagatgct

SEQ ID NO: 236599 - DNA, 120 bp, Artificial Sequence
  ENSG00000120265_11 (sequence is synthesized)
actaagaaaatagagatgagctttctttttaaagcttttgatgtggtgtcatagaatagcatgttgtagatacaatcagctgctttgttaccttaaaactaggcatttgtaaatattaaa

SEQ ID NO: 236600 - DNA, 120 bp, Artificial Sequence
  ENSG00000120265_12 (sequence is synthesized)
ccataagatggcaggtgatgtcctgtaaacactcagctgttcagattggacataactgacttagttcttcccttctctctctctcaaaattataggagacttgtagtttagtgtggtttt

SEQ ID NO: 236601 - DNA, 120 bp, Artificial Sequence
  ENSG00000120265_13 (sequence is synthesized)
ctgtttctaatttgctgctgataatgtatatgaacttaacatgctgtgtaagctgtgtcctagttcttgaacagtttatgcagtgctgctttgccaaataaagttaaaagtaaaagaggc

SEQ ID NO: 236602 - DNA, 120 bp, Artificial Sequence
  ENSG00000120265_14 (sequence is synthesized)
gtccccgcgcgcctgttggagggcttcggcgcagagttgccccggtagtcccgaacggcgtgcgcttgcagtcgcctccctcgggacctgtcactcgtcgacgacgtggactggaagggg

SEQ ID NO: 236603 - DNA, 120 bp, Artificial Sequence
  ENSG00000120265_15 (sequence is synthesized)
agagaaagagccaggggccgctgctggtgggggcaggggcagtcgtctccctgcaggccctgggggagggagtgcagtacaggtgatgctgctgtcactcagaaaatggaatcatcaaga

SEQ ID NO: 236604 - DNA, 120 bp, Artificial Sequence
  ENSG00000120265_16 (sequence is synthesized)
cccgccatcccgccgtcccgctcggtgaccggagacacagccgggaacgcgactgatcaggctaccgagccgggccgcagggcgaaagcggtgcggtccgaggcctcagaaagggacacg

SEQ ID NO: 236605 - DNA, 120 bp, Artificial Sequence
  ENSG00000120265_17 (sequence is synthesized)
gggacacgcagcagcggaagtggcgctgactcagcccggcctccctgcagtcccctggcagcggtagcagccacaggggcgggcggctgggccacacgcctcccccgccctcggccccac

SEQ ID NO: 236606 - DNA, 120 bp, Artificial Sequence
  ENSG00000120265_18 (sequence is synthesized)
tgcaaggtgaaagggtgtggattttaagacattagactacaagagctgtttttggttgtcacctttatgctcctccattataacgtcagaaattcattacattaaaaatgtgaaaaatgt

SEQ ID NO: 236607 - DNA, 120 bp, Artificial Sequence
  ENSG00000120265_19 (sequence is synthesized)
taggttttgctgaactgctgagccttggcagtgggcgcctttgaggcttagaagtgcctcaggattctgtcagtcggctgccatgctatcttcttttgacgcactataacagtcagcaga

SEQ ID NO: 236608 - DNA, 120 bp, Artificial Sequence
  ENSG00000120278_0 (sequence is synthesized)
aatatttctacggaaggcgctgcacagactagcaaaggctgtttcttttacctgactgaggtcactgcatcagctgaaggcagacgatgtgcttaagcctgagtggagcagagatgggca

SEQ ID NO: 236609 - DNA, 120 bp, Artificial Sequence
  ENSG00000120278_1 (sequence is synthesized)
ccagttgcgtcttgaagtgccatcagctgtaaccaaagttccacatcccaagacgacagccaggcgttcctgccctcaagaactgaagacaatggagctctctgatagtgaccgacccgt

SEQ ID NO: 236610 - DNA, 120 bp, Artificial Sequence
  ENSG00000120278_2 (sequence is synthesized)
cagcttcggttccacatcatcctcggcctcttcccgcgacagccatggttccttcggcagcagaatgaccttagtttcaaatagccacatgggcttgtttaaccaggataaggaggtagg

SEQ ID NO: 236611 - DNA, 120 bp, Artificial Sequence
  ENSG00000120278_3 (sequence is synthesized)
ggccataaaactggagctgattcctgccaggccgttttccagcagcgagctgcagagggacaaccccgccacggggcaacagaacgcggatgagggcagcgaaaggccacccagagcgca

SEQ ID NO: 236612 - DNA, 120 bp, Artificial Sequence
  ENSG00000120278_4 (sequence is synthesized)
gtggagagtggactcaaacggggcacccaagacgatcgcagactcggccacgagccccaagctcctctatgtggatagagttgttcaggaaattctggaaaccgaaaggacttatgtaca

SEQ ID NO: 236613 - DNA, 120 bp, Artificial Sequence
  ENSG00000120278_5 (sequence is synthesized)
agatttaaaaagcatcgtagaggattaccttgactgcatcagggaccaaacaaaacttcccctggggaccgaagaaagatcagccctttttggaaacatacaggatatctaccacttcaa

SEQ ID NO: 236614 - DNA, 120 bp, Artificial Sequence
  ENSG00000120278_6 (sequence is synthesized)
tagtgaacttctgcaagatttggaaaactgtgaaaatgatcctgtggccatagcagagtgttttgtgtccaagagtgaagagttccacatttatacccagtattgcactaactatccaag

SEQ ID NO: 236615 - DNA, 120 bp, Artificial Sequence
  ENSG00000120278_7 (sequence is synthesized)
gtccgtggctgtgctaacagagtgtatgaggaacaagatactggccaaattcttcagggagcgtcaggaaactctgaaacactcgctgcctctggggtcctatctcttgaaaccagttca

SEQ ID NO: 236616 - DNA, 120 bp, Artificial Sequence
  ENSG00000120278_8 (sequence is synthesized)
gcggattctcaagtatcatctccttctgcatgaaatagaaaaccaccttgataaggacacagaaggctatgatgtggtgcttgatgctatagacacaatgcagcgagtcgcctggcatat

SEQ ID NO: 236617 - DNA, 120 bp, Artificial Sequence
  ENSG00000120278_9 (sequence is synthesized)
caatgacatgaagcggaaacacgagcacgcggtccggttacaggagatacagagtttgctcactaactggaaggggccagacctgaccagctacggggaactggtgcttgagggaacctt

SEQ ID NO: 236618 - DNA, 120 bp, Artificial Sequence
  ENSG00000120278_10 (sequence is synthesized)
ccgcatccagcgagccaagaatgagcggacgctcttcctcttcgacaagctgctgctcatcacgaagaagagagatgacacgtttacatacaaagctcacatcctgtgtggcaacctcat

SEQ ID NO: 236619 - DNA, 120 bp, Artificial Sequence
  ENSG00000120278_11 (sequence is synthesized)
gcttgtggaggtgattccaaaagagccgctcagcttcagcgtcttccactacaagaatcccaagctgcagcacacagtccaggccaaatcccagcaagacaaacgcctctgggttctgca

SEQ ID NO: 236620 - DNA, 120 bp, Artificial Sequence
  ENSG00000120278_12 (sequence is synthesized)
cctaaagagactgattctggagaaccatgcagccaagattccagctaaggccaagcaagcaatccttgaaatggatgccattcatcatccaggcttctgttacagtcctgagggagggac

SEQ ID NO: 236621 - DNA, 120 bp, Artificial Sequence
  ENSG00000120278_13 (sequence is synthesized)
gaaagcactgttcggctctaaagaaggttctgctccatatcggctgagaagaaaatctgaaccttcctcacggtcacataaagttttgaagaccagtgaaacagcacaagacatccaaaa

SEQ ID NO: 236622 - DNA, 120 bp, Artificial Sequence
  ENSG00000120278_14 (sequence is synthesized)
ggtttctagagaggaaggatctccccagctgtcttcagcaaggccgtctcctgcccagagaaatagtcagcctagcagttctaccatgatcagcgtgcttcgagcgggtggagctctcag

SEQ ID NO: 236623 - DNA, 120 bp, Artificial Sequence
  ENSG00000120278_15 (sequence is synthesized)
aaacatctggaccgatcaccagatcaggcaagccttgtttcccagccgacggtccccgcaggagaatgaggatgatgaagatgattatcagatgttcgtgccgtcattttcctcctcaga

SEQ ID NO: 236624 - DNA, 120 bp, Artificial Sequence
  ENSG00000120278_16 (sequence is synthesized)
tctgaactctaccagactatgtgaagatagcacttctagtcgcccttgcagctggcatatgggacagatggagtccacagagacctccagctctggtcacaggattgtcaggcgggccag

SEQ ID NO: 236625 - DNA, 120 bp, Artificial Sequence
  ENSG00000120278_17 (sequence is synthesized)
cagtgctggggagagcaacacatgccctcctgaaataggaactagtgacagaactagggaactgcagaacagccccaaaacagaagggcaggaggagatgactccctttgggtcatccat

SEQ ID NO: 236626 - DNA, 120 bp, Artificial Sequence
  ENSG00000120278_18 (sequence is synthesized)
agagttgactattgatgacatagaccatgtctatgataacatcagttatgaggacttaaaactaatggttgctaagcgggaagaagctgaatccactccctctaaatcagccagggactc

SEQ ID NO: 236627 - DNA, 120 bp, Artificial Sequence
  ENSG00000120278_19 (sequence is synthesized)
cgttcgccccaagagcaccccagagttagccttcacaaagaggcaagctggccacagtaagggctctctttacgcacaaacagatggcaccctctcaggtggagaggcatccagccaaag

SEQ ID NO: 236628 - DNA, 120 bp, Artificial Sequence
  ENSG00000120278_20 (sequence is synthesized)
cacgcatgaactccaagcggttgaggagaacatctatgacaccatagggctcccagatcctccgtcgctgggttttaagtgcagcagcctaaagcgtgcaaagcggagcacctttttggg

SEQ ID NO: 236629 - DNA, 120 bp, Artificial Sequence
  ENSG00000120278_21 (sequence is synthesized)
tctggaggccgacttcgtgtgctgtgacagcctgaggccatttgtttcccaagacagcctccagctcagtgaggacgaagccccttaccatcaggccactcccgatcatggttatctgag

SEQ ID NO: 236630 - DNA, 120 bp, Artificial Sequence
  ENSG00000120278_22 (sequence is synthesized)
tttgctgtatgactctcccagtggtaacttgtctatgcctcataagcctgtatctgataaactgtccgaagaagtagatgaaatctggaatgacctggaaaattacatcaagaaaaatga

SEQ ID NO: 236631 - DNA, 120 bp, Artificial Sequence
  ENSG00000120278_23 (sequence is synthesized)
agacaaggccagagaccgtctcctggcagcgtttcctgtgagcaaggatgatgtgccagacaggctgcacgcagagagcacccctgagctgagccgggacgtggggcgctctgtgtccac

SEQ ID NO: 236632 - DNA, 120 bp, Artificial Sequence
  ENSG00000120278_24 (sequence is synthesized)
gctgtccctgcctgagagccaggctctcctcacgcccgtgaagagcagggctggcagagccagccgcgccaactgcccctttgaggaagacctgatttctaaagaaggctcctttatgag

SEQ ID NO: 236633 - DNA, 120 bp, Artificial Sequence
  ENSG00000120278_25 (sequence is synthesized)
ccttaaccggctttctctggctagtgaaatgcccctcatggacaatccctacgacctggccaacagtggcctgtctcaaacagacccagaaaaccctgacctggggatggaggccacaga

SEQ ID NO: 236634 - DNA, 120 bp, Artificial Sequence
  ENSG00000120278_26 (sequence is synthesized)
taagacaaaaagcagggtgtttatgatggctcggcagtacagtcagaagattaagaaggcgaatcaacttttaaaagtgaaaagtctggagctggagcagccgccggccagtcagcatca

SEQ ID NO: 236635 - DNA, 120 bp, Artificial Sequence
  ENSG00000120278_27 (sequence is synthesized)
gaaatccatgcacaaagacctggctgccatcttggaagagaagaagcaaggagggcccgccattggtgccaggattgctgagtattcccagttgtatgaccagattgtattcagagagtc

SEQ ID NO: 236636 - DNA, 120 bp, Artificial Sequence
  ENSG00000120278_28 (sequence is synthesized)
tcccttgaaaattcagaaggatggctgggccagccctcaagaatcctccctcctgaggtctgtgtcaccttcccaggtccaccatggtagtggagactggcttctgcattcaacctatag

SEQ ID NO: 236637 - DNA, 120 bp, Artificial Sequence
  ENSG00000120278_29 (sequence is synthesized)
cccacgtttgagatcaatacaaaaagtactcccaggcaattgtccgcagcttgctctgtgccttctcttcaaacctctgaccctctgccaggctctgtgcagagatgcagcgtggtagta

SEQ ID NO: 236638 - DNA, 120 bp, Artificial Sequence
  ENSG00000120278_30 (sequence is synthesized)
agtcagcccaacaaagagaactggtgtcaggaccatctttacaactccttgggtcggaaagggatcagcgctaaatctcagccttatcacaggtcccagtcatcttcctccgtcttgatc

SEQ ID NO: 236639 - DNA, 120 bp, Artificial Sequence
  ENSG00000120278_31 (sequence is synthesized)
aacaaatcaatggattccatcaactaccctagtgatgtgggaaagcagcagctgctgtctttacacagaagttcaaggtgtgagagtcaccaggacttgctgccagatattgctgactcg

SEQ ID NO: 236640 - DNA, 120 bp, Artificial Sequence
  ENSG00000120278_32 (sequence is synthesized)
catcaacagggcactgaaaaactctcagatctcacactccaagactcacagaaagttgtggtggtcaatagaaatttacccttaaatgcccaaattgcaacacagaattatttttccaat

SEQ ID NO: 236641 - DNA, 120 bp, Artificial Sequence
  ENSG00000120278_33 (sequence is synthesized)
ttcaaagagactgatggagatgaagatgactatgtggaaatcaagtcagaagaagatgagtcggagttggagctatctcacaatcgtagaaggaaatctgactcaaagtttgtggatgct

SEQ ID NO: 236642 - DNA, 120 bp, Artificial Sequence
  ENSG00000120278_34 (sequence is synthesized)
gacttttctgataatgtctgcagcggcaacacattgcattctttgaatagtccgcgcactccaaaaaagccggttaacagcaaacttggcctttcaccatatctgacaccatataatgat

SEQ ID NO: 236643 - DNA, 120 bp, Artificial Sequence
  ENSG00000120278_35 (sequence is synthesized)
tctgacaaactgaatgactatctttggagggggccatctcccaatcaacaaaatattgtccagtctctaagggaaaaatttcagtgtctcagttcaagcagctttgcttaaggttcttca

SEQ ID NO: 236644 - DNA, 120 bp, Artificial Sequence
  ENSG00000120278_36 (sequence is synthesized)
taataactgcttgaatcaacttcttattttgctcataaaacgttacagatactgatgaggtgttttatgtataccagattaaaacaattttgtaagaaccagaggtgtaaaatatacttt

SEQ ID NO: 236645 - DNA, 120 bp, Artificial Sequence
  ENSG00000120278_37 (sequence is synthesized)
cttttacagcacaacttttggaaatggctgacgatgcagcccggattgtactgtagcacatgttggcatcaacagtatattttctcatgctgagtgtcttcatgtttcatgtaagtcaat

SEQ ID NO: 236646 - DNA, 120 bp, Artificial Sequence
  ENSG00000120278_38 (sequence is synthesized)
cttacttgaaagtttttagacttttaacacgatggccataacctgacaatagtgcccacaccttaagaaatgcaataatcctttcctgttatccagaaggcccaggtagttttatcctgt

SEQ ID NO: 236647 - DNA, 120 bp, Artificial Sequence
  ENSG00000120278_39 (sequence is synthesized)
gactcaaaggcagcaaggagactttttcacattttaaaaggcaacgaaagctgttgaaagaattatgcttatatctcacattttggttatatttgtggtaacaccttaggataacgtaag

SEQ ID NO: 236648 - DNA, 120 bp, Artificial Sequence
  ENSG00000120278_40 (sequence is synthesized)
ccagagatctgtaaattggactgcagtctgaggtgcccattttagggtttttgtgctagtattcttttatgtcattttgatgcagaaattgtgtgactgttgaaaattaaaatgtagcgg

SEQ ID NO: 236649 - DNA, 120 bp, Artificial Sequence
  ENSG00000120278_41 (sequence is synthesized)
gacccattttctgtacgcagaaccctttacctgtattcctggacaaggcctagagaacgagctgctcatcatgtttctaatataatttctggggtgaaatgaatgatttccttactggct

SEQ ID NO: 236650 - DNA, 120 bp, Artificial Sequence
  ENSG00000120278_42 (sequence is synthesized)
tagagaaaaccaaggtcaataaaatgcagattgacttaactattagaaaagatgggatgacttctgggaaccacttaactcttcaaatgactgttgaaagagaaaaagcaaaactgaaat

SEQ ID NO: 236651 - DNA, 120 bp, Artificial Sequence
  ENSG00000120278_43 (sequence is synthesized)
cccaccagaccattttgtgtgcctgtttctaatcgatacaaagttaagcatgagctaaaatcagacaaagcactttaaatttatcctttccagagcgctttgcacatgcaccctcctgag

SEQ ID NO: 236652 - DNA, 120 bp, Artificial Sequence
  ENSG00000120278_44 (sequence is synthesized)
tttgggattctgccaaatgaccaacttgatcctggccctgaggagtcattggctgcaggaatagggcaagaatctatttcctaaactacacataacatgggagcctttttttcgttgttt

SEQ ID NO: 236653 - DNA, 120 bp, Artificial Sequence
  ENSG00000120278_45 (sequence is synthesized)
tcaggtatattaaagaatgaaatctttggttactaggtgctgactaataaataacaccttttatattctgaccatttgtcacatttcattgtgatactgtatactgatctaactccttat

SEQ ID NO: 236654 - DNA, 120 bp, Artificial Sequence
  ENSG00000120278_46 (sequence is synthesized)
gaaaggcaacaaacaaaaataagacattgaataaaaagcaaaatcaaagaagctaaagagaaaaatgaaggcagatatattgcaactttataacatattctattttattgaagactgcaa

SEQ ID NO: 236655 - DNA, 120 bp, Artificial Sequence
  ENSG00000120278_47 (sequence is synthesized)
ttaatgcagcaagaatgctttctcaagcggtggcctttgtattctcattttaatcaggtgtacattctatggcctctcccccatgctgttagtttctattttaaaagatacaataatata

SEQ ID NO: 236656 - DNA, 120 bp, Artificial Sequence
  ENSG00000120278_48 (sequence is synthesized)
tgtagggaaaggggcctgggctcttcatttaaaggtaagcagtaatattgagtaagtgacataattctttttctctttgttaagtcctatgcctctttttcttaactgtaaaacatagaa

SEQ ID NO: 236657 - DNA, 120 bp, Artificial Sequence
  ENSG00000120278_49 (sequence is synthesized)
tatgagcgtttttatcttacaaataggtacctaaggcatgtgattttatttttaaataacaaaaaataacccaagtttcttgcttctccaaagtattcttctcatagcttataaaagaaa

SEQ ID NO: 236658 - DNA, 120 bp, Artificial Sequence
  ENSG00000120278_50 (sequence is synthesized)
gtccacattgaatagcatggtctgggaacattccttctttattgtgtttatttgaacatgatatgagtttccaagatgaaatgatcaaaaaagataagtaccacaagaaagtttttttgt

SEQ ID NO: 236659 - DNA, 120 bp, Artificial Sequence
  ENSG00000120278_51 (sequence is synthesized)
agtaccacaagaaagtttttttgtttggttggtttttttgtttgtttgtttttttcttgagactgagtctctccctgttgcccaagttggagtgcaatcttggctcactgcagcctccac

SEQ ID NO: 236660 - DNA, 90 bp, Artificial Sequence
  ENSG00000120278_52 (sequence is synthesized)
aagtatgtttttagaggtgtgtgtaagtgcatttgtattacctatgaacaaaattacctgactcttgtcccaggaaagctgtttcgcatt

SEQ ID NO: 236661 - DNA, 120 bp, Artificial Sequence
  ENSG00000120278_53 (sequence is synthesized)
aaattacctgactcttgtcccaggaaagctgtttcgcattttcgctttttgattggtattatccagttctatgtagttcatattattgttctgtctgactctcagaaattacttcttcac

SEQ ID NO: 236662 - DNA, 120 bp, Artificial Sequence
  ENSG00000120278_54 (sequence is synthesized)
gccagtgtcttgttgcatgactttgatgtcacctataggaatacacctcactgcacgtaagtgggtatcttactgtataaaaggtctacatggctttaggttttaggacaaatgtgtaga

SEQ ID NO: 236663 - DNA, 120 bp, Artificial Sequence
  ENSG00000120278_55 (sequence is synthesized)
tttatagaccatttctgttggccaggacacagattttgagagctgtgtgtatatatatataatcatgtttgtatttttttcctgaaagttatcaattgcttttgtttaaaacagtttgtt

SEQ ID NO: 236664 - DNA, 120 bp, Artificial Sequence
  ENSG00000120278_56 (sequence is synthesized)
ttagaggtggggtggggatgtatataacgaggaaaagttatatgtactttaaagtatgtcaagttcttactagtttcctgtactgaaggttcaattttttttatataagtttacttttca

SEQ ID NO: 236665 - DNA, 120 bp, Artificial Sequence
  ENSG00000120278_57 (sequence is synthesized)
cctgctctattctttgtggggaaaaaatgcatctagaaaaacatagtttaaatactgtatataagataatgaaagttagtaacgtccattatttaataaagtttgtaaagtacaaggtaa

SEQ ID NO: 236666 - DNA, 120 bp, Artificial Sequence
  ENSG00000120278_58 (sequence is synthesized)
tggggaaaaccttggacactgtgcatccacctgctataactggcaaactaaggatgacagagtgttcaatgatgctgttcaacttgaaccctgagttgacacacggacccctctgcgcta

SEQ ID NO: 236667 - DNA, 120 bp, Artificial Sequence
  ENSG00000120278_59 (sequence is synthesized)
gtatccagggcataggacgtctgaaggaaagatggagccattcttggtggggcggaagaggcaggaaactgctgcctggacaaatcgtgttctgggccaaagcatcacaggcgagtgaaa

SEQ ID NO: 236668 - DNA, 120 bp, Artificial Sequence
  ENSG00000120278_60 (sequence is synthesized)
ggctgcagggcgctccggcagcccgagccggcgcagcgcagcccgcaccctccccgcccgacctgcgagcgccgcccgggcatgcgaagccgtccctccccgggaaaggagagtgaatat

SEQ ID NO: 236669 - DNA, 120 bp, Artificial Sequence
  ENSG00000120278_61 (sequence is synthesized)
ggctgcagggcgctccggcagcccgagccggcgcagcgcagcccgcaccctccccgcccgacctgcgagcgccgcccgggcatgcgaagccgtccctccccgggtgaagactgatgagaa

SEQ ID NO: 236670 - DNA, 120 bp, Artificial Sequence
  ENSG00000120278_62 (sequence is synthesized)
gcgccgcccgggcatgcgaagccgtccctccccgggtgaagactgatgagaagagtctgtgggtgaagacattgaaaaggtttcaactataaaaagacagagtctcactttgtcgcccag

SEQ ID NO: 236671 - DNA, 77 bp, Artificial Sequence
  ENSG00000120278_63 (sequence is synthesized)
tcgagctccatctttaaatgtgttctgcctgtgcttgcaggaaccggtgaggctgtgaagagaatagtaaaacgctg

SEQ ID NO: 236672 - DNA, 120 bp, Artificial Sequence
  ENSG00000120278_64 (sequence is synthesized)
caggaaccggtgaggctgtgaagagaatagtaaaacgctgcattctcacgggggttcaaagctttttcctctgaaacgcaatgaactgttctaccacttcctacacctcgagacaagtgt

SEQ ID NO: 236673 - DNA, 120 bp, Artificial Sequence
  ENSG00000120278_65 (sequence is synthesized)
caactatgtattttttagacaaaaaatttgaaagctttttatgttttatgatattttatgaacatgagcttttctatctgaagaactttaaagcacttatgaaaagtatgatgatactca

SEQ ID NO: 236674 - DNA, 120 bp, Artificial Sequence
  ENSG00000120278_66 (sequence is synthesized)
tggggtcactttagagtacacaagaaaacagacgggaagaggtttgttgacatgaaatgctgacctgctgacctgctgtgagatattgaacacgttatttttcttcccccatggtcgttc

SEQ ID NO: 236675 - DNA, 120 bp, Artificial Sequence
  ENSG00000120278_67 (sequence is synthesized)
ttctgaccatcttgaaagatagccaagaaagctttttcttctaattatttccagttattgtaggttcattcagacctgcaattaaacaaattatccatgttttgagaatattgattttaa

SEQ ID NO: 236676 - DNA, 120 bp, Artificial Sequence
  ENSG00000120278_68 (sequence is synthesized)
acattaaatgtttacatttctatatagagagaattcattctctgccccctaccaccagattttagccttaaaggcaagttatttagttttgcttattctcatacactgaacagttgttta

SEQ ID NO: 236677 - DNA, 120 bp, Artificial Sequence
  ENSG00000120278_69 (sequence is synthesized)
aaatggtgcatcttttatatcttagatttatagtgcaatgaagacatactctaaagttcatatttttatttttatggttcagtatatttgcaggaagaaaggactagagatttttcaggc

SEQ ID NO: 236678 - DNA, 79 bp, Artificial Sequence
  ENSG00000120278_70 (sequence is synthesized)
ctgcaacctccacctcctgggttcgaatgattcttctgcctcagtagctagtttttgtgtttttagtagagacggggtt

SEQ ID NO: 236679 - DNA, 82 bp, Artificial Sequence
  ENSG00000120278_71 (sequence is synthesized)
cccggggcactttctatactaatgttcaaagcacattcacatctattgtaccttttatctcccactctccatctccaggttt

SEQ ID NO: 236680 - DNA, 120 bp, Artificial Sequence
  ENSG00000120278_72 (sequence is synthesized)
ctattgtaccttttatctcccactctccatctccaggtttatattttcattggtactttatcagaacactttgtactgtgatagcaactcttactcaaatttggtaaaacaaacagaaat

SEQ ID NO: 236681 - DNA, 120 bp, Artificial Sequence
  ENSG00000120278_73 (sequence is synthesized)
gagtaaattgctcttgaaggagtacagcctctaagactcattggttcagtgactcagaaacatcactgaggactcagtttcttcccatctctctgctccaccatccgtggggttggcttc

SEQ ID NO: 236682 - DNA, 120 bp, Artificial Sequence
  ENSG00000120278_74 (sequence is synthesized)
tttctcaggcagtttcccctaagtggtcacaagatgtctactagccacaaatggaataagaggttcccttgtccatgtgcaccaggagacagaaacctcttcacagcctttcaatacata

SEQ ID NO: 236683 - DNA, 120 bp, Artificial Sequence
  ENSG00000120278_75 (sequence is synthesized)
ttgtcccttcttttgatctgatgtggccacttacatcatgaagggcagtaaccatactcaatgcccgcactgatgggcttacatccggcaggatccacctctagggctggggatggctta

SEQ ID NO: 236684 - DNA, 120 bp, Artificial Sequence
  ENSG00000120278_76 (sequence is synthesized)
gctccagctatgccatatgactatgtgtagaagaaacaaggaagtggttaccttggggagaagtagagaacaaatgctgggtaagaaaccaatagcaccattaaaatggggccattgtac

SEQ ID NO: 236685 - DNA, 120 bp, Artificial Sequence
  ENSG00000120278_77 (sequence is synthesized)
gatattttgctaatgacttctgtagtttcgcttttaaaactgttctgtgaaaataccttatgcagtgctttcttaaaagccccatttgtttacttttactaagctgaaagcacactttac

SEQ ID NO: 236686 - DNA, 120 bp, Artificial Sequence
  ENSG00000120278_78 (sequence is synthesized)
gtctgggagcaaccaaataacagatttgctctcctttgaggactcatcattcagttaaacatttttgaataatgacagtgggtcttgggtttcaaagatgagacccaatttctgcacttg

SEQ ID NO: 236687 - DNA, 120 bp, Artificial Sequence
  ENSG00000120278_79 (sequence is synthesized)
catgaatgctggaagtgggtctcgcagggtgagaggagtcaccaggaaaggagagtgaatatctatggatattgccctggcccttaagaaggtgaagactgatgagaagagtctgtgggt

SEQ ID NO: 236688 - DNA, 120 bp, Artificial Sequence
  ENSG00000120278_80 (sequence is synthesized)
ggacctgtcagccttgggtgtagcacctgcaaggaggacatgattctcctgcggtgacagcctgaccgggccccccacccaccaaggcaggaccacggcgacctggggagcatgctgcca

SEQ ID NO: 236689 - DNA, 120 bp, Artificial Sequence
  ENSG00000120279_0 (sequence is synthesized)
ttccttttatgcgaacacaagtatatgaggggttgtgtaaaaattatttttctcttgctgtactacaaagagatagaatcaaactgctttttttcgacatactggtttttctttctgttt

SEQ ID NO: 236690 - DNA, 120 bp, Artificial Sequence
  ENSG00000120279_1 (sequence is synthesized)
ttcttctctttcttctatttcttgtggatattatggctaataacacaacaagtttagggagtccatggccagaaaacttttgggaggaccttatcatgtccttcactgtatccatggcaa

SEQ ID NO: 236691 - DNA, 120 bp, Artificial Sequence
  ENSG00000120279_2 (sequence is synthesized)
tcgggctggtacttggaggatttatttgggctgtgttcatttgtctgtctcgaagaagaagagccagtgctcccatctcacagtggagttcaagcaggagatctaggtcttcttacaccc

SEQ ID NO: 236692 - DNA, 120 bp, Artificial Sequence
  ENSG00000120279_3 (sequence is synthesized)
acggcctcaacagaactggattttaccgccacagtggctgtgaacgtcgaagcaacctcagcctggccagtctcaccttccagcgacaagcttccctggaacaagcaaattcctttccaa

SEQ ID NO: 236693 - DNA, 120 bp, Artificial Sequence
  ENSG00000120279_4 (sequence is synthesized)
gaaaatcaagtttcagagcttctactttccatccctttctgcaatgtccaccacttcctgtggaaactgagagtcagctggtgactctcccttcttccaatatctctcccaccatcagca

SEQ ID NO: 236694 - DNA, 120 bp, Artificial Sequence
  ENSG00000120279_5 (sequence is synthesized)
cttcccacagtctgagccgtcctgactactggtccagtaacagtcttcgagtgggcctttcaacaccgcccccacctgcctatgagtccatcatcaaggcattcccagattcctgagtag

SEQ ID NO: 236695 - DNA, 120 bp, Artificial Sequence
  ENSG00000120279_6 (sequence is synthesized)
ggtggcttttggtttttgtttctttcttgtcttgtcttttattgaaaggaaatcaaaaataggctaaacagaattttgagggcatggcccaaataactcatgagttccaagttgaaacat

SEQ ID NO: 236696 - DNA, 120 bp, Artificial Sequence
  ENSG00000120279_7 (sequence is synthesized)
ggttgtgcaagttggacattacaatgtaaaacacattttcttcaaacacgttttcccttttgtttcaaaaaatgtaatattttcccccaagcgttttatatttatgtattttgtattcaa

SEQ ID NO: 236697 - DNA, 120 bp, Artificial Sequence
  ENSG00000120279_8 (sequence is synthesized)
tgtgaggcttattaaaaatagtgattctaatgtaagaatcagctaagatgcattatatatattttaattaaaattaaaacttcagatatttgtggattacaatcctcatttacttccaat

SEQ ID NO: 236698 - DNA, 120 bp, Artificial Sequence
  ENSG00000120279_9 (sequence is synthesized)
gtgactaaaaagagaaaaaaaatcactgtgtcactttaaagaaaaatcttctaagggatttggattttactttctttagaatgacaagtgaatcatattgacattttacaatcttagatt

SEQ ID NO: 236699 - DNA, 120 bp, Artificial Sequence
  ENSG00000120279_10 (sequence is synthesized)
tttctttttttttcttttgagacagggtcttgatccgtcgcccaggcgggagttgcagtagcatgatcaggactcactgcagcctctatctcccaggctcaagtaatcctcccatcttag

SEQ ID NO: 236700 - DNA, 120 bp, Artificial Sequence
  ENSG00000120279_11 (sequence is synthesized)
tgccccaagtagctgggactacaggggtgcactaccacaccgggttgaatttttttttaattttagtagagatgaagtgtcactatgttaccaaggctggtctcaaactcctaaactcag

SEQ ID NO: 236701 - DNA, 120 bp, Artificial Sequence
  ENSG00000120279_12 (sequence is synthesized)
ctggaattagcctggccaatcttggatttttaatggaatatgtgggcacaaaatgacagaacataggacattctaaagttccttgatttgatcattataagaagtgtgggactcaagcac

SEQ ID NO: 236702 - DNA, 120 bp, Artificial Sequence
  ENSG00000120279_13 (sequence is synthesized)
aggaaactgaactcttttggtgtcattggatgtttcatttttgacactaattttttctggacaaactctttatgtgtttttcccaagaatagttatctacttcctggaggcaaaatcctt

SEQ ID NO: 236703 - DNA, 120 bp, Artificial Sequence
  ENSG00000120279_14 (sequence is synthesized)
ggatttactaacatgatgatttaccttttcttcaccgttgtcgttacattgttagaaaagcaacaggaaaaaatccaattcatttgacctaaaaacaagcctcaagtttaaaaccaagct

SEQ ID NO: 236704 - DNA, 120 bp, Artificial Sequence
  ENSG00000120279_15 (sequence is synthesized)
cacgtttttcttaagggaaaaattttctttcttaaacttacatctagcaacttggaaagcactttctctggggatcttcttttgtaactttgcagacaaataagtatgagtcactgggga

SEQ ID NO: 236705 - DNA, 120 bp, Artificial Sequence
  ENSG00000120279_16 (sequence is synthesized)
gagagtttgttattgaaatagatgttgcccatgaagaattctccttcctggattgactcttaatcatcaggcatcattcctggtttgcttctctacgaatctcaattccaacttctctgc

SEQ ID NO: 236706 - DNA, 120 bp, Artificial Sequence
  ENSG00000120279_17 (sequence is synthesized)
agagtctgtacagtgattaagccatgccagatggtctttggtgcacacagttatttaagaatccacttccacaggtggctgcccttgtaaggaagaatgcatccctaaatgtggccacca

SEQ ID NO: 236707 - DNA, 120 bp, Artificial Sequence
  ENSG00000120279_18 (sequence is synthesized)
gagagttccagtgggcagatgtctgtggctgcccttctcatttaaggacatgagttcactggagtattactcaaaaagtctgtggttcatttccagtattgtgaatatttagtttatgtg

SEQ ID NO: 236708 - DNA, 120 bp, Artificial Sequence
  ENSG00000120279_19 (sequence is synthesized)
gccgtttctttgtttctttgaacagtgggattttcagtgaaaaagtaccctctttttcatttcctattgcagtggtcacagctaatagtgtctgaacatggttcaagaataagagattcc

SEQ ID NO: 236709 - DNA, 120 bp, Artificial Sequence
  ENSG00000120279_20 (sequence is synthesized)
atgtagcattttctttattattttcatttcccttatattatccatcattccttaaggacaattattcttaataatgcttatagaaaatgttctctaattaaacatgccaaaaggaaaaag

SEQ ID NO: 236710 - DNA, 120 bp, Artificial Sequence
  ENSG00000120279_21 (sequence is synthesized)
taagagaaagagggagcaagaagaaaatggaagaaaaagggaaaaaagctaaccggataaccaatttgttataagttggttttcaacaaagaaatttagcagccaagtaaggtttcaagg

SEQ ID NO: 236711 - DNA, 120 bp, Artificial Sequence
  ENSG00000120279_22 (sequence is synthesized)
gaatattaacttggtatcagggctacttttttttttttttttttacttgcatgtcatccttaatgtctaacatgaaaaatcagcaaagagtatggtttttatcaagaatttgtgttggga

SEQ ID NO: 236712 - DNA, 120 bp, Artificial Sequence
  ENSG00000120279_23 (sequence is synthesized)
gtaaaaactgctttatagctcccaaattaggaagagaagagcagaaatcctctggggcatttaaccatctggcagaattgttgctgcacccttatcccagttataagacagtcaaaatga

SEQ ID NO: 236713 - DNA, 120 bp, Artificial Sequence
  ENSG00000120279_24 (sequence is synthesized)
ctatttcctaaatattgtgagtgtatgaaatgtgaaattaaagcaaaaactggagacttttaatgtatttctttaatttgaaatgttttgtggattgtgaaataaaaataaatttatgtc

SEQ ID NO: 236714 - DNA, 120 bp, Artificial Sequence
  ENSG00000120280_0 (sequence is synthesized)
agtctactggtctcatcagtgaaaggcttgtgaaaatttctggaaagagcattggctggcttgttcatctctctgtttggtcagttgctgtgtttctgccggatcagatgagcagattgg

SEQ ID NO: 236715 - DNA, 120 bp, Artificial Sequence
  ENSG00000120280_1 (sequence is synthesized)
ttagtgaaggtcagtgtgagaagaagattgtttctgagcttgagaagcttctggaggattgaagagtatttgaagtctgtgtcaaacatccatatcataagtggaattttggagatattc

SEQ ID NO: 236716 - DNA, 120 bp, Artificial Sequence
  ENSG00000120280_2 (sequence is synthesized)
aaagaatgctgtcagaagggtatctcagtggacttgagtactggaatgacatccactggagttgtgcctcttataatgagcaggtggctggggaaaaggaagaggagacaaattctgttg

SEQ ID NO: 236717 - DNA, 120 bp, Artificial Sequence
  ENSG00000120280_3 (sequence is synthesized)
ctaccctttcctattcctctgtggatgaaacacaagtcagaagtctctacgtgagctgcaaatcatctggcaagtttatctcttcagtgcattcaagagagagccaacatagcagaagtc

SEQ ID NO: 236718 - DNA, 120 bp, Artificial Sequence
  ENSG00000120280_4 (sequence is synthesized)
agagagtcacagtgctgcagacaaaccccaatcctgtgtttgaaagcccaaacttggctgcagttgaaatatgtagagatgccagcagagagacctacttggttccatcttcttgcaaaa

SEQ ID NO: 236719 - DNA, 120 bp, Artificial Sequence
  ENSG00000120280_5 (sequence is synthesized)
gtatttgcaagaattataatgacttacagattgcagggggccaggtgatggccattaattcagtgacaacagattttccctctgagagcagttttgaatatggccctttgctgaagtcat

SEQ ID NO: 236720 - DNA, 120 bp, Artificial Sequence
  ENSG00000120280_6 (sequence is synthesized)
ctgagattcctttacccatggaggattccatttctactcagcccagtgactttccccaaaaacctatccagcggtactcatcctattggagaataacaagcatcaaagagaaaagcagct

SEQ ID NO: 236721 - DNA, 120 bp, Artificial Sequence
  ENSG00000120280_7 (sequence is synthesized)
tacccagattctggcgtctgaactcatcatgacaagtgtagaccaaatcagtcttcaagtgtctagagagaagaatctggagacctcaaaagccagagatatagtctttagccgcctatt

SEQ ID NO: 236722 - DNA, 120 bp, Artificial Sequence
  ENSG00000120280_8 (sequence is synthesized)
gcaattgatgtcaactgaaattactgaaattagcactcctagtctccatatttctcagtatagcaatgtaaatccatagagaggatgcttccattactgtctcgcatttacttaaacatg

SEQ ID NO: 236723 - DNA, 120 bp, Artificial Sequence
  ENSG00000120280_9 (sequence is synthesized)
aagcaacactttatccatttattctgagaatgtgcaggaggggttagtgaaggggaattaagggctagagaagtaaagatcagctggaagtcatgtgtgaatcatggagaaatctcataa

SEQ ID NO: 236724 - DNA, 120 bp, Artificial Sequence
  ENSG00000120280_10 (sequence is synthesized)
tattacacttgatgaaggaatatggtaagaggagccataaggaatgatttcaaagagaggtgtgtacagcaaggaagcaaaaataaaaatgatcaaaaaagaaacggttaattcatttga

SEQ ID NO: 236725 - DNA, 120 bp, Artificial Sequence
  ENSG00000120280_11 (sequence is synthesized)
atgatcaaaaaagaaacggttaattcatttgaagaaacataggaattaaaaaagaagacagtcaaatgagatgaaacaaaaaggccaaaaggtggccgggtgtagtggctcacgcctgta

SEQ ID NO: 236726 - DNA, 60 bp, Artificial Sequence
  ENSG00000120280_12 (sequence is synthesized)
cgcctgtaatcccagcatttcggaggctgatgtgggtggattacctgacgtcaggaattc

SEQ ID NO: 236727 - DNA, 120 bp, Artificial Sequence
  ENSG00000120289_0 (sequence is synthesized)
agaggcggcttctgaaaagccaaggtagtatctgcctgctgaaggtgttctcaggatttcatttgctcttctccaggaaccacatcacctgcccttctgcctacactcctgcctgctgtg

SEQ ID NO: 236728 - DNA, 120 bp, Artificial Sequence
  ENSG00000120289_1 (sequence is synthesized)
cctaaccacagccatcatgcctcggggtcagaagagtaagctccgtgcccgtgagaaacgccagcggacccgtggtcagacccaggatctcaaggttggtcagcctactgcagcagagaa

SEQ ID NO: 236729 - DNA, 120 bp, Artificial Sequence
  ENSG00000120289_2 (sequence is synthesized)
agaagagtctccttcctcttcctcatctgttttgagggatactgcctccagctcccttgcttttggcattccccaggagcctcagagagagccacccaccacctctgctgctgcagctat

SEQ ID NO: 236730 - DNA, 120 bp, Artificial Sequence
  ENSG00000120289_3 (sequence is synthesized)
gtcatgcactggatctgataaaggcgacgagagccaagatgaggaaaatgcaagttcctcccaggcctcaacatccactgagagatcactcaaagattctctaaccaggaagacgaagat

SEQ ID NO: 236731 - DNA, 120 bp, Artificial Sequence
  ENSG00000120289_4 (sequence is synthesized)
gttagtgcagttcctgctgtacaagtataaaatgaaagagcccactacaaaggcagaaatgctgaagatcatcagcaaaaagtacaaggagcacttccctgagatcttcaggaaagtctc

SEQ ID NO: 236732 - DNA, 120 bp, Artificial Sequence
  ENSG00000120289_5 (sequence is synthesized)
tcagcgcacggagctggtctttggccttgccttgaaggaggtcaaccccaccactcactcctacatcctcgtcagcatgctaggccccaacgatggaaaccagagcagtgcctggaccct

SEQ ID NO: 236733 - DNA, 120 bp, Artificial Sequence
  ENSG00000120289_6 (sequence is synthesized)
tccaaggaatgggcttctgatgcctctactgagtgtgatcttcttaaatggcaactgtgcccgtgaagaggaaatctgggaattcctgaatatgctggggatctatgatggaaagaggca

SEQ ID NO: 236734 - DNA, 120 bp, Artificial Sequence
  ENSG00000120289_7 (sequence is synthesized)
ccttatctttggggaaccccgaaagctcatcacccaagatctggtacaggaaaaatatctggaataccagcaggtgcccaacagtgatcccccacgctatcaattcctgtggggtccaag

SEQ ID NO: 236735 - DNA, 120 bp, Artificial Sequence
  ENSG00000120289_8 (sequence is synthesized)
agctcatgcagaaaccagcaagatgaaagtcctggagtttttggccaaggtgaatgacaccacccccaataacttcccactgctttatgaagaggctttgagagatgaagaagagagagc

SEQ ID NO: 236736 - DNA, 120 bp, Artificial Sequence
  ENSG00000120289_9 (sequence is synthesized)
cgtggcactacagccatgactagtgcgtattccagggccacatccagtagctcttcccaacccatgtgagatctaaggcaaattgttcactttgtggttgaaagacctgctgctttctct

SEQ ID NO: 236737 - DNA, 120 bp, Artificial Sequence
  ENSG00000120289_10 (sequence is synthesized)
gttcctgtgatgcatgaataactcattgatttatctctttgttgtattttccatgatgtttcttaaaatagaaagtttatttagattcagaatataaatttagaaatggcatgcatcaca

SEQ ID NO: 236738 - DNA, 120 bp, Artificial Sequence
  ENSG00000120289_11 (sequence is synthesized)
catttattgctgtttatcaggttggtttagtgataataattttgtttttgaaatacaaatagaaaatcctgaaataatttttgtgatacagagcaaaataacacggcatgggagtaaggt

SEQ ID NO: 236739 - DNA, 120 bp, Artificial Sequence
  ENSG00000120289_12 (sequence is synthesized)
tatccttagaaatttaaaataactccacagtaaaataggtagaatctgaagatagaaagggaagaaaagtaaaagttgctttattcgtggtttgtcttactcagttcagtctttttttgc

SEQ ID NO: 236740 - DNA, 120 bp, Artificial Sequence
  ENSG00000120289_13 (sequence is synthesized)
tcataaatttaaaagttacatacctggtttgcttagattattcaagaatgtggaggcctgggccaaggtcaatgacagtgtctccattgtcttccctccattaagagaagactttaagag

SEQ ID NO: 236741 - DNA, 120 bp, Artificial Sequence
  ENSG00000120289_14 (sequence is synthesized)
atgagggagagagagccagagacagtgttgcaactgggcctggcatgtttcagtgtggtgtccagcagtgtctcccactccttgtgaagtctgaggtatattctttacttttgattaaga

SEQ ID NO: 236742 - DNA, 120 bp, Artificial Sequence
  ENSG00000120289_15 (sequence is synthesized)
aaacacttaaccttctaattaatggagagccaaaggggagttggtgggaacaccatgtataacatatttgtatgtaaaatgatttatcttttctttttcctgtttttcagtgttcttttt

SEQ ID NO: 236743 - DNA, 120 bp, Artificial Sequence
  ENSG00000120289_16 (sequence is synthesized)
ttaaattgtagatttatttagtttcagaatctaagtttatgaatggcatgaatcactcatttattaaaatatatcaggttggagagtgagaatttttgcattatgtaaaacaatttaaaa

SEQ ID NO: 236744 - DNA, 120 bp, Artificial Sequence
  ENSG00000120289_17 (sequence is synthesized)
atcttttaagtctttttctgtgatctagaacaagataatatggcattggaatatggaatttgtgaaaaggaaattaccttgcaataaagttggtgggaccaggaagtagagaaaaaaaaa

SEQ ID NO: 236745 - DNA, 120 bp, Artificial Sequence
  ENSG00000120306_0 (sequence is synthesized)
acttgctctgagacaggtgcggcaagtctactgcgggctggtccgggctcctcaggttcagacccgaccgttatccagtcggttcgtggagaggagaggtgcactttacaggtccccgat

SEQ ID NO: 236746 - DNA, 120 bp, Artificial Sequence
  ENSG00000120306_1 (sequence is synthesized)
gaaccaagagaaccctccaccatatccaggccctggtccaacggccccatacccaccttatccaccacaaccaatgggtccaggacctatggggggaccctacccacctcctcaagggta

SEQ ID NO: 236747 - DNA, 120 bp, Artificial Sequence
  ENSG00000120306_2 (sequence is synthesized)
cccctaccaaggatacccacagtacggctggcagggtggacctcaggagcctcctaaaaccacagtgtatgtggtagaagaccaaagaagagatgagctaggaccatccacctgcctcac

SEQ ID NO: 236748 - DNA, 120 bp, Artificial Sequence
  ENSG00000120306_3 (sequence is synthesized)
cctgtcctgccagctctgctgccacctctgacaggtgtgcctgcccccatctcttctgattgctgttaacaaatgactagctttgcacagacacctctaccttcagcactatgggattct

SEQ ID NO: 236749 - DNA, 120 bp, Artificial Sequence
  ENSG00000120306_4 (sequence is synthesized)
agattaatgggggttgctactgtttaattcagtgacttgatctttttaatgtccaaaatccatttcttattgatctttaaagatgtgctaaatgacttttttggccaaaggcttagttgt

SEQ ID NO: 236750 - DNA, 120 bp, Artificial Sequence
  ENSG00000120306_5 (sequence is synthesized)
gaaaaatataatttttaaattatacattcaaggtagtggccaaatgtaacacatcaatcatggaatgatttctctgctaacagccgcctgtatgtttcaataaatttgtccaaagctcaa

SEQ ID NO: 236751 - DNA, 120 bp, Artificial Sequence
  ENSG00000120306_6 (sequence is synthesized)
ctgctctctgctgctgctgcctcctggacaacttgaactgagcagctaagatccgagtatttccctacagccctgctacctcctgttacaggaataaacaactactgttgcacaatttcc

SEQ ID NO: 236752 - DNA, 120 bp, Artificial Sequence
  ENSG00000120306_7 (sequence is synthesized)
acttgctctgagacaggtgcggcaagtctactgcgggctggtccgggctcctcaggttcagacccgaccgttatccagtcggttcgtggagaggagagtgtatgtggtagaagaccaaag

SEQ ID NO: 236753 - DNA, 120 bp, Artificial Sequence
  ENSG00000120306_8 (sequence is synthesized)
gctgccacctctgacagctgactgtgaattgcttccttggactgaagaataaacctatgaaacacaagaaagttgaaaattaagccacatgactattgaattcatcgaaatcaatagcta

SEQ ID NO: 236754 - DNA, 120 bp, Artificial Sequence
  ENSG00000120306_9 (sequence is synthesized)
ccttcttggctgagaaggaataaaggcttaaaagtagattctgctttcttatttaatataggaatcaggcagggaacagtggtgtgggcctacagtcccagatactcaggaggctgaggt

SEQ ID NO: 236755 - DNA, 90 bp, Artificial Sequence
  ENSG00000120306_10 (sequence is synthesized)
gggaggattgtttgagcccaggtgtctgagtctattaaaaaaaaaagcgggggggttgcgggagttgggcacagtggctcacacctgtaa

SEQ ID NO: 236756 - DNA, 120 bp, Artificial Sequence
  ENSG00000120306_11 (sequence is synthesized)
agcactctgagaggccgaggcaggaggactgcttgagcctgggagttcaagactagcccaggcaacatgatgagacccatctctacaaaaaataaatttaaaatattagtcaggcacagt

SEQ ID NO: 236757 - DNA, 120 bp, Artificial Sequence
  ENSG00000120306_12 (sequence is synthesized)
ctgggacatgctcacctgaccagaccagcccagccgtcctgtcctgccagctctgctgccacctctgacagggtggcgccaggctgccatagcagcaagtccgattttcctccatcagct

SEQ ID NO: 236758 - DNA, 120 bp, Artificial Sequence
  ENSG00000120306_13 (sequence is synthesized)
ggcccgcccagcccagccagcccgagaagccgcagctgacagctagctccctgccgactctgccttccctccgaagcagtggacgtgctgataaatgtttaccggtgctctctttaaaaa

SEQ ID NO: 236759 - DNA, 120 bp, Artificial Sequence
  ENSG00000120306_14 (sequence is synthesized)
acctggaatgtctgcagcaggacgatccctctgtggagcccaggacatacggaatgctgagtagaaaccacactgaatgaatagcattgggacttagaacagctacttgcacagaacaag

SEQ ID NO: 236760 - DNA, 120 bp, Artificial Sequence
  ENSG00000120314_0 (sequence is synthesized)
aaacggggtcacagcaggacaaggaagtagccgatctcccagatgcggtctcttcgctccgctccacccgcaccagcagcggcccacccacctctcctgtaagaggaagaacgtcccgga

SEQ ID NO: 236761 - DNA, 120 bp, Artificial Sequence
  ENSG00000120314_1 (sequence is synthesized)
gacacttccggccccgccccccgaggcggaagcggagtgccaggctactcctcccgcagtgtgggtggttccgaggctgactaccctgcggcggcgcggctcgcagtccttctcagcatg

SEQ ID NO: 236762 - DNA, 120 bp, Artificial Sequence
  ENSG00000120314_2 (sequence is synthesized)
gaccgcacttgtgaggagaggcccgctgaggatgggagcgacgaggaggacccagactccatggaagccccaacccggatccgggacactccggaagacatcgtgctggaagctccggct

SEQ ID NO: 236763 - DNA, 120 bp, Artificial Sequence
  ENSG00000120314_3 (sequence is synthesized)
agtgggctggcgttccatccggcccgtgacctactggctgcaggggacgtggacggggacgtgttcgtcttttcctactcttgccaagagggagaaaccaaggagctctggtcatcaggt

SEQ ID NO: 236764 - DNA, 120 bp, Artificial Sequence
  ENSG00000120314_4 (sequence is synthesized)
caccatctcaaggcctgccgagctgtggccttctctgaagatgggcagaagctcattactgtctccaaggacaaagccatccatgttctagatgtggagcagggccaactggaaagacgt

SEQ ID NO: 236765 - DNA, 120 bp, Artificial Sequence
  ENSG00000120314_5 (sequence is synthesized)
gtttccaaggctcatggtgcccccatcaatagtcttctgctggtggatgagaatgttctggccactggggatgacacaggtggtatctgtctctgggaccagcggaaggagggcccctta

SEQ ID NO: 236766 - DNA, 120 bp, Artificial Sequence
  ENSG00000120314_6 (sequence is synthesized)
atggatatgaggcaacatgaagagtacatcgcagacatggctctggatccagccaaaaagctgctgctgacagccagcggggatggctgccttggcatcttcaacattaagaggcgtcgg

SEQ ID NO: 236767 - DNA, 120 bp, Artificial Sequence
  ENSG00000120314_7 (sequence is synthesized)
tttgagctgctctcagaacctcagtctggggacctgacctctgtcactctcatgaaatgggggaagaaggtagcctgtggctccagtgaaggtaccatctacctcttcaattggaatggc

SEQ ID NO: 236768 - DNA, 120 bp, Artificial Sequence
  ENSG00000120314_8 (sequence is synthesized)
tttggggccacaagtgaccgctttgccctgagagctgaatctatcgactgcatggttccagtcaccgagagtctgctgtgtactggctccactgatggagtcatcagggctgtgaacatc

SEQ ID NO: 236769 - DNA, 120 bp, Artificial Sequence
  ENSG00000120314_9 (sequence is synthesized)
ctaccgaaccgagtggtgggcagtgtgggccagcacactggggagcctgtggaggagctggccctctcccactgtggccgcttcctggccagtagtggccatgaccagcgcctcaagttt

SEQ ID NO: 236770 - DNA, 120 bp, Artificial Sequence
  ENSG00000120314_10 (sequence is synthesized)
tgggacatggcccagctgcgagctgtggtggtggatgactaccgtcggcgcaaaaaaaagggaggaccactgcgggctctgagcagcaagacttggagcaccgatgacttcttcgcagga

SEQ ID NO: 236771 - DNA, 120 bp, Artificial Sequence
  ENSG00000120314_11 (sequence is synthesized)
ctgagggaagagggagaagactccatggctcaggaagaaaaggaggagactggggatgacagtgactgaaggaatgaattgaatcttgagacgggtcctcaccaggcaagagtcttgctt

SEQ ID NO: 236772 - DNA, 120 bp, Artificial Sequence
  ENSG00000120314_12 (sequence is synthesized)
attgggctgcatccccagagaggatatgaattattttttgaaaagacagggttttgccatcgtccaggctggagtgcgctggcttgatcttggctcactgcagcctcaatgtccccaggc

SEQ ID NO: 236773 - DNA, 120 bp, Artificial Sequence
  ENSG00000120314_13 (sequence is synthesized)
gggactacaggtgtgcactaccacaccaggccaatttttgttttttttttttggtagaaacgggtctgttttgcccaggctggtcttcaactcctggactcaaatgatccacctgcctct

SEQ ID NO: 236774 - DNA, 120 bp, Artificial Sequence
  ENSG00000120314_14 (sequence is synthesized)
gtcacccaggctggagtacagtgggttgatcatggctcactgcatccttgacttcctgggctcaagtgatccacctcagcctgcctggtagctgagacttaacaggcatctgccaccatg

SEQ ID NO: 236775 - DNA, 120 bp, Artificial Sequence
  ENSG00000120314_15 (sequence is synthesized)
acttaacaggcatctgccaccatgcttgactaatttttgtgatttttttttggtagagaccaggggtttcactatgttgaccaagctggtcttggaactcctgggctcaagtgatcctcc

SEQ ID NO: 236776 - DNA, 75 bp, Artificial Sequence
  ENSG00000120314_16 (sequence is synthesized)
aagccaacacacccggcctggatatgaatttataataccctacagtgcaacacaagaagatgcactcaaagcact

SEQ ID NO: 236777 - DNA, 120 bp, Artificial Sequence
  ENSG00000120314_17 (sequence is synthesized)
taccctacagtgcaacacaagaagatgcactcaaagcactgatgtgaggaagtacttgccccgtagcagctattcactctaccagtgtaaacaaactctaagctagggcaagacagcaca

SEQ ID NO: 236778 - DNA, 120 bp, Artificial Sequence
  ENSG00000120314_18 (sequence is synthesized)
gacacaagtatatactaaccaggggtttaatataaatacaaccagcatagaaagacccaaaactatacagaaaccaaaaccagaatgccatgtggtggaggcaaagggcagaatttctga

SEQ ID NO: 236779 - DNA, 120 bp, Artificial Sequence
  ENSG00000120314_19 (sequence is synthesized)
cccctttggctcagctgcccttccccacaaataaaaaccaacaaagaggacaaatcaggacaataaagaagattcatgctaagctgtggcagaggggggaaggtatgatcgggtgggggt

SEQ ID NO: 236780 - DNA, 120 bp, Artificial Sequence
  ENSG00000120314_20 (sequence is synthesized)
gggacaaggaacggccatggaagatcactgggtcaggttggaccctgggctgggagcgggagggcaaggcccctcaccacaacttaacccaaacctaagctgcccccaggtgccataggt

SEQ ID NO: 236781 - DNA, 120 bp, Artificial Sequence
  ENSG00000120314_21 (sequence is synthesized)
ccctgtcccagcagggaggctgatgggcctgggcccatgcccctccccacctttgggggtcagaaagtggccacccaggcctgctgggatggggcctgacacaggctctgcatgcccatt

SEQ ID NO: 236782 - DNA, 120 bp, Artificial Sequence
  ENSG00000120314_22 (sequence is synthesized)
cagggtgcctgtggagaaagaatggagtcactgtttaaccatggtacctgcctcagccccagcagaccacaggaggttggccccagactcactgagtgcctgcagcagccgtacagacac

SEQ ID NO: 236783 - DNA, 120 bp, Artificial Sequence
  ENSG00000120314_23 (sequence is synthesized)
agcatccttggccacctcatgcccatcccggccatctagggtcagcacaacccagatgaggccgctgaagggcaccggatgcccaggaatcaccacctggtaccagaagcggtgccagcc

SEQ ID NO: 236784 - DNA, 120 bp, Artificial Sequence
  ENSG00000120314_24 (sequence is synthesized)
agcaggtcctatgcccaaacacttggtgaggaacacagggctgcccagcttcattcgttggcacagcaactgcagggtagcccgagccccttggaaccctaacttgtcccttgccaaagc

SEQ ID NO: 236785 - DNA, 120 bp, Artificial Sequence
  ENSG00000120314_25 (sequence is synthesized)
caactggctgccctctggctgtggggaccgcaagaagggacccacaagctgctggcgaagtcgctgcttcaggtctggcttgagccactccacagccacctgctctccacagaggtgtga

SEQ ID NO: 236786 - DNA, 120 bp, Artificial Sequence
  ENSG00000120314_26 (sequence is synthesized)
ctgccctgtaggaaaaatgcaaagacaagggcaggtctaaaccctgggcccaagcctccaggtggtgagccctttggagctacacagtcctgttatttgtagccttcccatttcctggta

SEQ ID NO: 236787 - DNA, 120 bp, Artificial Sequence
  ENSG00000120314_27 (sequence is synthesized)
gtgtgaccatgggtaagaaaagacaatgaagccttcagcctccattatttgcaaagggagtataacacactgctaccttacaagtttccttggagaagtactggttaattgcaggctttg

SEQ ID NO: 236788 - DNA, 120 bp, Artificial Sequence
  ENSG00000120314_28 (sequence is synthesized)
tctgcctcataaccatcataatggctaatctttactgggaaaacttgctgtaagtcagtcagtgtgctaagtaccgtacacccattatgttacttaattctcataacagtctgaggaaac

SEQ ID NO: 236789 - DNA, 120 bp, Artificial Sequence
  ENSG00000120314_29 (sequence is synthesized)
agattctatagtagtaaaaagctcagttggattcccttgagcaaatcaatttctctaacagtttcctcatagcttgagggtcctgtgcctattttgcggtgtgggggtgggggaaggttg

SEQ ID NO: 236790 - DNA, 120 bp, Artificial Sequence
  ENSG00000120314_30 (sequence is synthesized)
agaattaagtcaggaggtaatgctcgggaagtgtcacaaatttaggtaagcggtggtggtagcaccattggaagttttaaaaatctgagatcaaatagtaaaaggttgcaaattctggca

SEQ ID NO: 236791 - DNA, 120 bp, Artificial Sequence
  ENSG00000120314_31 (sequence is synthesized)
ttcccttaataatgaatggttggtaaccatatgtccatttgtgtaattatttgaatgctgtctccttcactaatgtttttcaaacgtctttgaccttgcctcacagagaaatacctttta

SEQ ID NO: 236792 - DNA, 120 bp, Artificial Sequence
  ENSG00000120314_32 (sequence is synthesized)
cattatatatgatgctctgtgatacaattgctgattttattctattattgtgtacatgtacacaaaatgctgatcgtagcttactagtccgttatatgactagaatgtgaaaaaacactg

SEQ ID NO: 236793 - DNA, 120 bp, Artificial Sequence
  ENSG00000120314_33 (sequence is synthesized)
ttctggagtgtaatctgtcatcggttttgttctctattttatctccaacctctagtctagggtagatgctcaacacatgtttgattttgaacaaaagatacaggttagaggcagtggaaa

SEQ ID NO: 236794 - DNA, 120 bp, Artificial Sequence
  ENSG00000120314_34 (sequence is synthesized)
agttgaagatgttatgcttatcagatttacttaatgaatttaaacctcaacccctcattagctgtaatggccttgagcgtgttaacttctgtattttcatctttgaaagggggaattata

SEQ ID NO: 236795 - DNA, 120 bp, Artificial Sequence
  ENSG00000120314_35 (sequence is synthesized)
cctacccttgcagaggggacaagtttgcagtacagcacctaagcagctcttcaacaaatgtaggttcccttctactactatccatatttatggtgccaggcacttgggagttgccctaga

SEQ ID NO: 236796 - DNA, 120 bp, Artificial Sequence
  ENSG00000120314_36 (sequence is synthesized)
catccacctttcttcacattccacacaactttgttgcttcccttgtcttaaaaaaggttctggaggaaaattcttggttctccccttccccaccctcagccatgactattgtgaaaaggt

SEQ ID NO: 236797 - DNA, 120 bp, Artificial Sequence
  ENSG00000120314_37 (sequence is synthesized)
tccttttccgaggattaaattcaaacttctgcttggctcatgtggtctcatgcccaccccagcccatctttctagattcagtcatgctactctcctgctacaaggaaccctcctcattcc

SEQ ID NO: 236798 - DNA, 120 bp, Artificial Sequence
  ENSG00000120314_38 (sequence is synthesized)
ttatctctgctgcctccagtatctggcccttgctctctgccaggcaaattctactcttgtatgatccaacccacatgtcaccaccttagctttccagggctctcttctcccttcccaagt

SEQ ID NO: 236799 - DNA, 120 bp, Artificial Sequence
  ENSG00000120314_39 (sequence is synthesized)
attcattcaatttgtgaatgtttattaagctactttttcacgttcagcactgggatagagaaaatgagcaggctcagttctgcctacctggaactcactggcaattaagcatgtattcat

SEQ ID NO: 236800 - DNA, 120 bp, Artificial Sequence
  ENSG00000120314_40 (sequence is synthesized)
tctgccctttttgaggatctgctctgaggcaggcacttgggggtattccataaacagtactcacctcaaagttgtttacaggctggtgcctctcccccacctccattttgatcttgcctc

SEQ ID NO: 236801 - DNA, 120 bp, Artificial Sequence
  ENSG00000120314_41 (sequence is synthesized)
tttttcagcacgtactctcaatgtactgtaattaattgtggctttctctagctcctgcagacctgaagtgcaagagcctgctctaccttactgatttttagatttctaacttctggggct

SEQ ID NO: 236802 - DNA, 120 bp, Artificial Sequence
  ENSG00000120314_42 (sequence is synthesized)
ggtcttttgtcattgatgtaacaaatatctcctccacagtggtccagacccaatctttgtccaggctggggctttcaaagatgataaagaggggttgggtgggatcacaaagaaatcttg

SEQ ID NO: 236803 - DNA, 120 bp, Artificial Sequence
  ENSG00000120314_43 (sequence is synthesized)
cgcaaatataccttgaactaacatatattgaaaaaagcaggacctaacatttcaaactcactgaaaatggagaaatgagatggtaaactttttgggcttagaggtgtagaagcaggaact

SEQ ID NO: 236804 - DNA, 120 bp, Artificial Sequence
  ENSG00000120314_44 (sequence is synthesized)
cttaggtaggtgggaaggctgctctgtctagttggtctctgcactcaatgcaacccaggctgggtctggagtcatttaccctccttgccctctccccagcttttcctactcttgccaaga

SEQ ID NO: 236805 - DNA, 120 bp, Artificial Sequence
  ENSG00000120314_45 (sequence is synthesized)
cacttgctatgctcagtataaagtgccgggcagaacgcgtttggccccaaccagcacccccgccccagcctaccttccaccagggcctttttggccatggcagcggcccggtgcgagctg

SEQ ID NO: 236806 - DNA, 120 bp, Artificial Sequence
  ENSG00000120314_46 (sequence is synthesized)
aatttgagcagagcgatctgcccgggcgccggtccggggctgggcagcagccgcgcctcctgcaagccgggacccagcggctgcagcgcgagcagcagcgcgctgcgggtcagattcggc

SEQ ID NO: 236807 - DNA, 120 bp, Artificial Sequence
  ENSG00000120314_47 (sequence is synthesized)
gatggttgtgcagcgtggcgatggcggcctgcgcgccgcgcctcgagctgtagcgggcataggcgaagccgcggttcaggccgctgaaggtcatcatcaggcggaactcgtagaggcggc

SEQ ID NO: 236808 - DNA, 120 bp, Artificial Sequence
  ENSG00000120314_48 (sequence is synthesized)
ccacgcgctggaacagcgggataagctggtgctcgtacacgtcctgaggcagccgcccgatgaacacctctgacccagctggcggcgggctgcccacccagcctgtgggaagagggtatg

SEQ ID NO: 236809 - DNA, 120 bp, Artificial Sequence
  ENSG00000120314_49 (sequence is synthesized)
caaggccaccgtcaggcgacgctttcgaattctgagcccacggacccagcgcgcgggggtgggaggcgatgtgaacaaaggtctgtgaaatgggtttacacccgtaccctgggtggttgg

SEQ ID NO: 236810 - DNA, 120 bp, Artificial Sequence
  ENSG00000120314_50 (sequence is synthesized)
cataattaggtgactgcgctaacaagggggctggcacagagtaggtacaccttgagattggccccctccctcgacggggcgggtggacgtggagccacagttcctcctttgctggggggt

SEQ ID NO: 236811 - DNA, 120 bp, Artificial Sequence
  ENSG00000120314_51 (sequence is synthesized)
ataaatccgggtagttcgcagtttctgacagtgaaggctcggagcagcccctcccccaaagggggctggtgtagccggacaggcggaggggctgggactaccgtacctgggggtggcccg

SEQ ID NO: 236812 - DNA, 120 bp, Artificial Sequence
  ENSG00000120314_52 (sequence is synthesized)
ccatacttcctctgcccgttcacctgcaccaggcggatgcctgtctccctgacccacgcctccagcgccgccttgttctctggattcaccctctcacaccacagctgagagggaaaggaa

SEQ ID NO: 236813 - DNA, 120 bp, Artificial Sequence
  ENSG00000120314_53 (sequence is synthesized)
ggttggaatggcggatcgccaagcgcgcccccacctctcctgtggtactggggtccctaaagccgacccccgctccggcggggctcgccggcccccaagtcgccagccgcttacctcaca

SEQ ID NO: 236814 - DNA, 120 bp, Artificial Sequence
  ENSG00000120314_54 (sequence is synthesized)
atcccgcttggactgcatggctctccagctggccccctcgtaccctctttataacttcctccccaccggcctctggaagcttccctacccctccaccccgcaagctctcattggctctga

SEQ ID NO: 236815 - DNA, 120 bp, Artificial Sequence
  ENSG00000120314_55 (sequence is synthesized)
gcgcgaccccgcctcccaggggggtggaggtatccactgcacgtgcgccgcccgggcttcgctcagaccttcaggtgaaagctgcaaagtcgcgggtgcgtatgtacgggggctgcctcc

SEQ ID NO: 236816 - DNA, 120 bp, Artificial Sequence
  ENSG00000120314_56 (sequence is synthesized)
cgaggaggagctcccaagccgcagggtggacgctggagacaagaacctcagggtcacaagtttactgtttttctcccttttccatccctacattggtctgctggggaaggcggggctagg

SEQ ID NO: 236817 - DNA, 120 bp, Artificial Sequence
  ENSG00000120314_57 (sequence is synthesized)
catcactgacacacgcagactccgtggttgaggcattttattggacctttggcaattggtggtggggaggcatctgctccaactggtgcggggccctgcagatgggaccatctcaggctg

SEQ ID NO: 236818 - DNA, 120 bp, Artificial Sequence
  ENSG00000120314_58 (sequence is synthesized)
ggtccttgtagcccaggagcacagactggactaagcctcctgggccttgtatgaaaaaggtgttgtacctggccgtttttgccagtaataatcaataaaataaccataataaaaatcaaa

SEQ ID NO: 236819 - DNA, 120 bp, Artificial Sequence
  ENSG00000120318_0 (sequence is synthesized)
acccagaacctcggacgagcggcgggcacccgcgagcggacggcggccgcgtagtgagcaatggcctgagcccccatggctgcccctcaggacctggacatcgctgtgtggctggccacg

SEQ ID NO: 236820 - DNA, 120 bp, Artificial Sequence
  ENSG00000120318_1 (sequence is synthesized)
gtgcacctggagcagtatgcagacacgttccgacggcatggcctggctacagcaggtgcagcccggggcctgggccacgaggagttgaagcagttgggcatcagcgccacagggcaccgg

SEQ ID NO: 236821 - DNA, 120 bp, Artificial Sequence
  ENSG00000120318_2 (sequence is synthesized)
aaacgcattctacgcctgctacagacaggcaccgaagagggctccctggatcccaaatcagatagtgccatggaaccatcccccagcccagccccgcaagcccagccccctaagcccgtg

SEQ ID NO: 236822 - DNA, 120 bp, Artificial Sequence
  ENSG00000120318_3 (sequence is synthesized)
ccgaagcccaggaccgtgtttggtggactcagtggccctgccaccactcagagacctgggctgagcccagccctcgggggaccaggagtgtccaggagcccagagcccagcccaaggcct

SEQ ID NO: 236823 - DNA, 120 bp, Artificial Sequence
  ENSG00000120318_4 (sequence is synthesized)
cctcctctccccacttcctcctctgagcagtcttcagccctaaatactgtggagatgatgcctaattccatctacttcggcctggactcaagaggcagggcacaggcagctcaggacaag

SEQ ID NO: 236824 - DNA, 120 bp, Artificial Sequence
  ENSG00000120318_5 (sequence is synthesized)
gccccagacagctcccaaatctctgcccccacccctgccctcaggcccacaacaggcacagtgcacatcatggatcctggttgcctgtactatggtgtccaacctgtggggactccagga

SEQ ID NO: 236825 - DNA, 120 bp, Artificial Sequence
  ENSG00000120318_6 (sequence is synthesized)
gcccccgacagaagagagagcagaggtgtttgtcagggcagggctgaacacaggctcagcagacaggatctggaggcacgggaggatgctggctatgccagccttgagctacctggagac

SEQ ID NO: 236826 - DNA, 120 bp, Artificial Sequence
  ENSG00000120318_7 (sequence is synthesized)
tccaccctcttatcgcccaccctggaaacagaggagaccagtgatgacctcatttcaccctatgccagcttctccttcacggcagaccgcctcacgcccctgctcagtggctggctagac

SEQ ID NO: 236827 - DNA, 120 bp, Artificial Sequence
  ENSG00000120318_8 (sequence is synthesized)
aagctctcccctcagggaaactatgtcttccagagacgctttgtgcagttcaatgggaggagtctgatgtactttggcagtgacaaggaccccttccctaagggtgtgatacctttgact

SEQ ID NO: 236828 - DNA, 120 bp, Artificial Sequence
  ENSG00000120318_9 (sequence is synthesized)
gccattgagatgacccgcagcagcaaggacaacaagttccaggtcatcaccggccagagggtgttcgtgttccgcacagagagcgaggctcagcgggacatgtggtgctccacgctgcag

SEQ ID NO: 236829 - DNA, 120 bp, Artificial Sequence
  ENSG00000120318_10 (sequence is synthesized)
tcctgtctgaaggagcagcgcctcctgggccacccccggcccccccaaccaccccgacccctccgcacgggcatgctggagctgcgtggacacaaggccaaggtgtttgctgccttgagc

SEQ ID NO: 236830 - DNA, 120 bp, Artificial Sequence
  ENSG00000120318_11 (sequence is synthesized)
cctggagagctggcactgtacaagagtgagcaggccttctctctgggcatcgggatctgcttcatcgaactgcagggctgcagcgtccgggagaccaagagtcgaagctttgacctgctc

SEQ ID NO: 236831 - DNA, 120 bp, Artificial Sequence
  ENSG00000120318_12 (sequence is synthesized)
acaccccatcgctgcttcagcttcacagccgagtctgggggtgctcggcagagctgggcggccgctctgcaggaagcagtaaccgagaccctgtctgactacgaggtggctgagaagatc

SEQ ID NO: 236832 - DNA, 120 bp, Artificial Sequence
  ENSG00000120318_13 (sequence is synthesized)
tggtctaatcgggccaaccggcagtgtgcggactgtgggtcctcccgcccagattgggctgctgtcaatttgggggtggtcatctgcaagcagtgtgcaggtcagcaccgggccctgggt

SEQ ID NO: 236833 - DNA, 120 bp, Artificial Sequence
  ENSG00000120318_14 (sequence is synthesized)
tctgggatctccaaggtgcagagcctgaagctggacacgagtgtctggagtaatgagatagtacagttattcattgtcctgggaaatgatcgtgccaaccgcttctgggcagggacccta

SEQ ID NO: 236834 - DNA, 120 bp, Artificial Sequence
  ENSG00000120318_15 (sequence is synthesized)
cccccaggtgagggactacatccagatgcgacccctggcccccggggagagttcatctcccgaaagtaccgtctgggtctcttccggaagccccaccctcagtacccagatcatagccag

SEQ ID NO: 236835 - DNA, 120 bp, Artificial Sequence
  ENSG00000120318_16 (sequence is synthesized)
cttctccaggcactgtgtgcagctgtggcaagacccaacctgctgaagaacatgacccagctcctctgtgttgaggcctttgaaggcgaggagccctggttccccccagcccctgatggc

SEQ ID NO: 236836 - DNA, 120 bp, Artificial Sequence
  ENSG00000120318_17 (sequence is synthesized)
agctgccctggcctcttgccctcagacccctcccctggtgtgtacaatgaggtggtggtgcgtgctacttacagcggcttcctgtactgcagtcccgtcagcaacaaagctggaccctca

SEQ ID NO: 236837 - DNA, 120 bp, Artificial Sequence
  ENSG00000120318_18 (sequence is synthesized)
ccccctcgcaggggccgggatgctcccccgcgcctttggtgtgtgctgggagcagctctggaaatgtttgcatcggaaaacagccctgaacccctcagcctcatacagccccaggatatt

SEQ ID NO: 236838 - DNA, 120 bp, Artificial Sequence
  ENSG00000120318_19 (sequence is synthesized)
gtatgtctgggtgtgagccccccacccactgacccaggtgacaggttccccttttcctttgagctcatcctcgctggggggaggatccagcattttggcacagatggagctgacagtctg

SEQ ID NO: 236839 - DNA, 120 bp, Artificial Sequence
  ENSG00000120318_20 (sequence is synthesized)
gaggcctggactagtgctgtgggcaagtggttctccccgctgagctgccaccagctgctgggccccgggctgctgcggctgggccgcctatggctgcggtccccctcccatacagccccg

SEQ ID NO: 236840 - DNA, 120 bp, Artificial Sequence
  ENSG00000120318_21 (sequence is synthesized)
ggtgcatctgcggcggctacaggagatcagtgtggtttctgcagctgacaccccagataagaaagagcatttggtcctggtggagacaggaaggaccctgtatctgcaaggagagggccg

SEQ ID NO: 236841 - DNA, 120 bp, Artificial Sequence
  ENSG00000120318_22 (sequence is synthesized)
gctggacttcacggcatggaacgcagccattgggggcgcggctggtgggggcggcacagggctgcaggagcagcagatgagccggggtgacatccccatcatcgtggatgcctgcatcag

SEQ ID NO: 236842 - DNA, 120 bp, Artificial Sequence
  ENSG00000120318_23 (sequence is synthesized)
ttttgttacccagcatgggctccggctggaaggtgtataccggaaagggggcgctcgtgcccgcagcctgagactcctggctgagttccgtcgggatgcccggtcggtgaagctccgacc

SEQ ID NO: 236843 - DNA, 120 bp, Artificial Sequence
  ENSG00000120318_24 (sequence is synthesized)
aggggagcactttgtggaggatgtcactgacacactcaaacgcttctttcgtgagctcgatgaccctgtgacctctgcacggttgctgcctcgctggagggaggctgctgagctgcccca

SEQ ID NO: 236844 - DNA, 120 bp, Artificial Sequence
  ENSG00000120318_25 (sequence is synthesized)
gaagaatcagcgcctggagaaatataaagatgtgattggctgcctgccgcgggtcaaccgccgcacactggccaccctcattgggcatctctatcgggtgcagaaatgtgcggctctaaa

SEQ ID NO: 236845 - DNA, 120 bp, Artificial Sequence
  ENSG00000120318_26 (sequence is synthesized)
ccagatgtgcacgcggaacttggctctgctgtttgcacccagcgtgttccagacggatgggcgaggggagcacgaggtgcgagtgctgcaagagctcattgatggctacatctctgtctt

SEQ ID NO: 236846 - DNA, 120 bp, Artificial Sequence
  ENSG00000120318_27 (sequence is synthesized)
tgatatcgattctgaccaggtagctcagattgacttggaggtcagtcttatcaccacctggaaggacgtgcagctgtctcaggctggagacctcatcatggaagtttatatagagcagca

SEQ ID NO: 236847 - DNA, 120 bp, Artificial Sequence
  ENSG00000120318_28 (sequence is synthesized)
gctcccagacaactgtgtcaccctgaaggtgtccccaaccctgactgctgaggagctgactaaccaggtactggagatgcgggggacagcagctgggatggacttgtgggtgacttttga

SEQ ID NO: 236848 - DNA, 120 bp, Artificial Sequence
  ENSG00000120318_29 (sequence is synthesized)
gattcgcgagcatggggagctggagcggccactgcatcccaaggaaaaggtcttagagcaggctttacaatggtgccagctcccagagccctgctcagcttccctgctcttgaaaaaagt

SEQ ID NO: 236849 - DNA, 120 bp, Artificial Sequence
  ENSG00000120318_30 (sequence is synthesized)
ccccctggcccaagctggctgcctcttcacaggtatccgacgtgagagcccacgggtggggctgttgcggtgtcgtgaggagccacctcgcttgctgggaagccgcttccaggagaggtt

SEQ ID NO: 236850 - DNA, 120 bp, Artificial Sequence
  ENSG00000120318_31 (sequence is synthesized)
ctttctgctgcgtggccgctgcctgctgctgctcaaggagaagaaaagctctaaaccagaacgggagtggcctttggaaggtgccaaggtctacctgggaatccgcaagaagttaaagcc

SEQ ID NO: 236851 - DNA, 120 bp, Artificial Sequence
  ENSG00000120318_32 (sequence is synthesized)
cccaacaccgtggggcttcacattgatactagagaagatgcacctctacttgtcctgcactgacgaggatgaaatgtgggattggaccaccagcatccttaaagcccagcacgatgacca

SEQ ID NO: 236852 - DNA, 120 bp, Artificial Sequence
  ENSG00000120318_33 (sequence is synthesized)
gcagccagtggtcttacgacgccattcctcctctgaccttgcccgtcagaagtttggcactatgcctttgctgcctatccgtggggatgacagtggagccaccctcctctctgccaatca

SEQ ID NO: 236853 - DNA, 120 bp, Artificial Sequence
  ENSG00000120318_34 (sequence is synthesized)
gaccctgcggcgactacacaaccggaggaccctgtccatgttctttccaatgaagtcatcccaggggtctgtggaggagcaagaggagctggaggagcctgtgtacgaggagccagtgta

SEQ ID NO: 236854 - DNA, 120 bp, Artificial Sequence
  ENSG00000120318_35 (sequence is synthesized)
tgaggaagtaggggccttccctgagttgatccaggacacttctacctccttctccaccacacgggagtggacagtgaagccagagaaccccctcaccagccagaagtcattggatcaacc

SEQ ID NO: 236855 - DNA, 120 bp, Artificial Sequence
  ENSG00000120318_36 (sequence is synthesized)
ctttctctccaagtcaagcacccttggccaggaggagaggccacctgagccccctccaggccccccttcaaagagcagtccccaggcacgggggtccctagaggaacagctgctccagga

SEQ ID NO: 236856 - DNA, 120 bp, Artificial Sequence
  ENSG00000120318_37 (sequence is synthesized)
gctcagcagcctcatcctgaggaaaggagagaccactgcaggcctgggaagtccttcccagccatccagcccccaatcccccagccccactggccttccaacacagacacctggcttccc

SEQ ID NO: 236857 - DNA, 120 bp, Artificial Sequence
  ENSG00000120318_38 (sequence is synthesized)
cacccaacccccatgcacttccagtccaccctccagccagcccctcacatgaccctaggaccagcagtctgagagggtaggtaccagaagacccagaaactcttatcgtggcactgttgc

SEQ ID NO: 236858 - DNA, 120 bp, Artificial Sequence
  ENSG00000120318_39 (sequence is synthesized)
agcttcctctgccctggctggaaagactccagaatccagtgtggtgctgtggaaggagcactggactaaaggcttcagtggctgcgtgtcccaggacaggtcatggcccctctctgggcc

SEQ ID NO: 236859 - DNA, 120 bp, Artificial Sequence
  ENSG00000120318_40 (sequence is synthesized)
cagcccatttatctataccatgaggtaactgaagtaaggagagcagtgaatgtcaaactgtgtttcttagagccataagccccacatattatccctgaacaagggcagctcctgctttat

SEQ ID NO: 236860 - DNA, 120 bp, Artificial Sequence
  ENSG00000120318_41 (sequence is synthesized)
atatttgatacgtaggggttccatgagagattttgggttttaaaggaatggttttactgcattaaagaaaaaaaatgctttggaaaccagaggcctgggtgatgttaaagtctatcctgt

SEQ ID NO: 236861 - DNA, 120 bp, Artificial Sequence
  ENSG00000120318_42 (sequence is synthesized)
cccacttcctacattctgggactaccgtgaagcctggagtagggagagcgagtttgggagctgggactcggggagtcaaaaatagatgagtaattgtcaataaacctgggaaccaaaaga

SEQ ID NO: 236862 - DNA, 120 bp, Artificial Sequence
  ENSG00000120318_43 (sequence is synthesized)
gtgcagtcaggcaggagcagagctttgacccagacccagggtgggcaggaactgaggggccaactctagcactgacttactgtgaacctggggcaagccccttcccctctctgggcctca

SEQ ID NO: 236863 - DNA, 120 bp, Artificial Sequence
  ENSG00000120318_44 (sequence is synthesized)
gtttccttaacttcaaatgaagtcccttccctaagtagagagccattgctgttgttctgggatggctctgcttccagatcgcaggcctttcagcatctttctttggaggaagattggagg

SEQ ID NO: 236864 - DNA, 120 bp, Artificial Sequence
  ENSG00000120318_45 (sequence is synthesized)
ctggtgctcactgtccaggcctcagactctggggcagagagggggattctcagcctgagccctcccttcaccctgcccctccccccagcaatggcctgagcccccatggctgcccctcag

SEQ ID NO: 236865 - DNA, 120 bp, Artificial Sequence
  ENSG00000120318_46 (sequence is synthesized)
agatgtgacgatatggagatgagggagagggagggctgagaggggctcagaattggaaggagggaagtccattgtgtgtgtgggcggggcagtgactgcatgactgatgtcagcatttaa

SEQ ID NO: 236866 - DNA, 120 bp, Artificial Sequence
  ENSG00000120318_47 (sequence is synthesized)
agtagctggcttagcagctgtacccactgcttgtggatttaatgccaatcttataaaatctggggcaggacccaggggctggcacacatggctcagttcctgtcctcatgggtcattgag

SEQ ID NO: 236867 - DNA, 120 bp, Artificial Sequence
  ENSG00000120318_48 (sequence is synthesized)
ttttctctgcttttcgctaccccggtcactctcatttctctcccctattccttgtctcttcccccatccccctttctcctgtcctccccctgcctctacagtggttctccccgctgagct

SEQ ID NO: 236868 - DNA, 120 bp, Artificial Sequence
  ENSG00000120318_49 (sequence is synthesized)
ctccgccccatcacttcccaccctgggggatcatccagagacttggctcagggggaggtgggaagggggcagagacacatccatcctgcatttgtgcctaaaaatccctccctctgtacc

SEQ ID NO: 236869 - DNA, 120 bp, Artificial Sequence
  ENSG00000120322_0 (sequence is synthesized)
tggcgctgcaggataagaaggcacaaaccagaaccgcagctgcagctccattaaccggcaaaaagcagcagaacctggaagtccacggggagcttggatgccaaagggaggacggctggg

SEQ ID NO: 236870 - DNA, 120 bp, Artificial Sequence
  ENSG00000120322_1 (sequence is synthesized)
tcctctggagaggactactcactggcatatttctgaggtatctgtagaaaaccacagcctcagatactggggactttacagtcccacagaaccgtcctcccaggaagctgaattcagcaa

SEQ ID NO: 236871 - DNA, 120 bp, Artificial Sequence
  ENSG00000120322_2 (sequence is synthesized)
gaacaatggaggccagcgggaagctcatttgcagacaaaggcaagtccttttttcctttctccttttgggcttatctctggcgggcgcggcggaacctagaagctattctgtggtggagg

SEQ ID NO: 236872 - DNA, 120 bp, Artificial Sequence
  ENSG00000120322_3 (sequence is synthesized)
aaactgagggcagctcctttgtcaccaatttagcaaaggacctgggtctggagcagagggaattctccaggcggggggttagggttgtttccagagggaacaaactacatttgcagctca

SEQ ID NO: 236873 - DNA, 120 bp, Artificial Sequence
  ENSG00000120322_4 (sequence is synthesized)
atcaggagaccgcggatttgttgctaaatgagaaattggaccgtgaggatctgtgcggtcacacagagccctgtgtgctacgtttccaagtgttgctagagagtcccttcgagttttttc

SEQ ID NO: 236874 - DNA, 120 bp, Artificial Sequence
  ENSG00000120322_5 (sequence is synthesized)
aagctgagctgcaagtaatagacataaacgaccactctccagtatttctggacaaacaaatgttggtgaaagtatcagagagcagtcctcctgggactgcgtttcctctgaagaatgctg

SEQ ID NO: 236875 - DNA, 120 bp, Artificial Sequence
  ENSG00000120322_6 (sequence is synthesized)
aagacttagatataggccaaaacaatattgagaactatataatcagccccaactcctattttcgggtcctcacccgcaaacgcagtgatggcaggaaatacccagagctggtgctggaca

SEQ ID NO: 236876 - DNA, 120 bp, Artificial Sequence
  ENSG00000120322_7 (sequence is synthesized)
aagcgctggaccgagaggaagaagctgagctcaggttaacactcacagcactggatggtggctctccgcccagatctggcactgctcaggtctacattgaagttgtcgatgtcaatgata

SEQ ID NO: 236877 - DNA, 120 bp, Artificial Sequence
  ENSG00000120322_8 (sequence is synthesized)
atgcccctgaatttgagcagcctttctatagggtgcagatctctgaggacagtccaataagcttcctggttgtgaaggtctctgccacggatgtagacacaggagtcaacggagagattt

SEQ ID NO: 236878 - DNA, 120 bp, Artificial Sequence
  ENSG00000120322_9 (sequence is synthesized)
cctattcacttttccaagcttcagatgagataagcaaaacttttaaggtcgatttcttgacaggagaaattcgactaaagaaacaacttgatttcgaaaaatttcagtcctatgaagtca

SEQ ID NO: 236879 - DNA, 120 bp, Artificial Sequence
  ENSG00000120322_10 (sequence is synthesized)
atatcgaggcgagagatgctggaggcttttctggaaaatgcaccgttctgattcaagtgatagatgtgaacgaccatgccccagaagttaccatgtctgcatttaccagcccaatacctg

SEQ ID NO: 236880 - DNA, 120 bp, Artificial Sequence
  ENSG00000120322_11 (sequence is synthesized)
tcttctgtggggaacttttacaccctactaacagagacaccactagacagagaaagcagagccgagtacaacgtcactatcaccgtcactgacttagggacacccaggctgacaacacat

SEQ ID NO: 236881 - DNA, 86 bp, Artificial Sequence
  ENSG00000120322_12 (sequence is synthesized)
caccgtcactgacttagggacacccaggctgacaacacatctcaatatgaccgtgctggtgtcggacgtcaatgacaacgcccccg

SEQ ID NO: 236882 - DNA, 120 bp, Artificial Sequence
  ENSG00000120322_13 (sequence is synthesized)
gccacagacagagactcgggcaccaacgcccaggtcacctactcgctgctgccgccccaggatccgcacctgcccctcgcctccctggtctccatcaacacagacaacggccacctgttc

SEQ ID NO: 236883 - DNA, 120 bp, Artificial Sequence
  ENSG00000120322_14 (sequence is synthesized)
acctgttcgccctcaggtcgctggactacgaggccctgcaggcgttcgagttccgggtgggcgcttcagaccgcggctccccggctttgagcagcgaggcgctggtgcgcgtgctggtgc

SEQ ID NO: 236884 - DNA, 68 bp, Artificial Sequence
  ENSG00000120322_15 (sequence is synthesized)
aggccacggagcccgggctgttcgggacgcggccaagcagaggctggtggtgctggtcaaggacaatg

SEQ ID NO: 236885 - DNA, 64 bp, Artificial Sequence
  ENSG00000120322_16 (sequence is synthesized)
gcgagcctccgcctgccgcttccggaggctgccccagcccagggccaggccgactctctcaccg

SEQ ID NO: 236886 - DNA, 120 bp, Artificial Sequence
  ENSG00000120322_17 (sequence is synthesized)
gaggctgccccagcccagggccaggccgactctctcaccgtctacctggtggtggcgttggcctcggtgtcttcgctcttcctcttctcggtgctcctgttcgtggcggtgctgctgtgt

SEQ ID NO: 236887 - DNA, 120 bp, Artificial Sequence
  ENSG00000120322_18 (sequence is synthesized)
aggaggagcagggcggcctcggtgggtcgctgctcagtgcctgagggcccctttccagggcatctggtggacgtgaggggcaccgggagcctgtctcagaactatcagtacgaggtgtgc

SEQ ID NO: 236888 - DNA, 120 bp, Artificial Sequence
  ENSG00000120322_19 (sequence is synthesized)
ctggcaggaggctcagggacgaatgagttccagctcctgaaaccagtattacctaatattcagggccattcttttgggccagaaatggaacaaaactctaactttaggaatggctttggt

SEQ ID NO: 236889 - DNA, 120 bp, Artificial Sequence
  ENSG00000120322_20 (sequence is synthesized)
ttcagccttcagttaaagtaattgatttcatattatatattttaatttttatgatcaattcaaaggaatggttttctgtcaacttagcataaattttaaattacactacatttgcccata

SEQ ID NO: 236890 - DNA, 120 bp, Artificial Sequence
  ENSG00000120324_0 (sequence is synthesized)
ggatgctatgcaagtcactaataaaggaagacacggacagatgaacttaaaagagaagctttagctgccaaagattgggaaagggaaaggacaaaaaagacccctgggctacacggcgta

SEQ ID NO: 236891 - DNA, 120 bp, Artificial Sequence
  ENSG00000120324_1 (sequence is synthesized)
ggtgcagggtttcctactgctgttcttttatgctgggagctgtggctgtaaccaactaggaaataacgtatgcagcagctatggctgtcagagagttgtgcttcccaagacaaaggcaag

SEQ ID NO: 236892 - DNA, 120 bp, Artificial Sequence
  ENSG00000120324_2 (sequence is synthesized)
tcctgtttctttttcttttttggggagtgtccttggcaggttctgggtttggacgttattcggtgactgaggaaacagagaaaggatcctttgtggtcaatctggcaaaggatctgggac

SEQ ID NO: 236893 - DNA, 120 bp, Artificial Sequence
  ENSG00000120324_3 (sequence is synthesized)
tagcagagggggagctggctgcaaggggaaccagggtggtttccgatgataacaaacaatacctgctcctggattcacataccgggaatttgctcacaaatgagaaactggaccgagaga

SEQ ID NO: 236894 - DNA, 120 bp, Artificial Sequence
  ENSG00000120324_4 (sequence is synthesized)
agctgtgtggccctaaagagccctgtatgctgtatttccaaattttaatggatgatccctttcagatttaccgggctgagctgagagtcagggatataaatgatcacgcgccagtatttc

SEQ ID NO: 236895 - DNA, 120 bp, Artificial Sequence
  ENSG00000120324_5 (sequence is synthesized)
aggacaaagaaacagtcttaaaaatatcagaaaatacagctgaagggacagcatttagactagaaagagcacaggatccagatggaggacttaacggtatccaaaactacacgatcagcc

SEQ ID NO: 236896 - DNA, 120 bp, Artificial Sequence
  ENSG00000120324_6 (sequence is synthesized)
ccaactcttttttccatattaacattagtggcggtgatgaaggcatgatatatccagagctagtgttggacaaagcactggatcgggaggagcagggagagctcagcttaaccctcacag

SEQ ID NO: 236897 - DNA, 120 bp, Artificial Sequence
  ENSG00000120324_7 (sequence is synthesized)
cgctggatggtgggtctccatccaggtctgggacctctactgtacgcatcgttgtcttggacgtcaatgacaatgccccacagtttgcccaggctctgtatgagacccaggctccagaaa

SEQ ID NO: 236898 - DNA, 120 bp, Artificial Sequence
  ENSG00000120324_8 (sequence is synthesized)
acagccccattgggttccttattgttaaggtatgggcagaagatgtagactctggagtcaacgcggaagtatcctattcattttttgatgcctcagaaaatattcgaacaacctttcaaa

SEQ ID NO: 236899 - DNA, 120 bp, Artificial Sequence
  ENSG00000120324_9 (sequence is synthesized)
tcaatcctttttctggggaaatctttctcagagaattgcttgattatgagttagtaaattcttacaaaataaatatacaggcaatggacggtggaggcctttctgcaagatgtagggttt

SEQ ID NO: 236900 - DNA, 120 bp, Artificial Sequence
  ENSG00000120324_10 (sequence is synthesized)
tagtggaagtattggacaccaatgacaatccccctgaactgatcgtatcatcattttccaactctgttgctgagaattctcctgagacgccgctggctgtttttaagattaatgacagag

SEQ ID NO: 236901 - DNA, 120 bp, Artificial Sequence
  ENSG00000120324_11 (sequence is synthesized)
actctggagaaaatggaaagatggtttgctacattcaagagaatctgccattcctactaaaaccttctgtggagaatttttacatcctaattacagaaggcgcgctggacagagagatca

SEQ ID NO: 236902 - DNA, 120 bp, Artificial Sequence
  ENSG00000120324_12 (sequence is synthesized)
gagccgagtacaacatcactatcaccgtcactgacttggggacacccaggctgaaaaccgagcacaacataacggtcctggtctccgacgtcaatgacaacgcccccgccttcacccaaa

SEQ ID NO: 236903 - DNA, 120 bp, Artificial Sequence
  ENSG00000120324_13 (sequence is synthesized)
cgtcagcgccacagacagagactcgggcaccaacgcccaggtcacctactcgctgctgccgccccaagacccgcacctgcccctcgcctccctggtctccatcaacgcggacaacggcca

SEQ ID NO: 236904 - DNA, 120 bp, Artificial Sequence
  ENSG00000120324_14 (sequence is synthesized)
cctgttcgccctcaggtcgctggactacgaggccctgcaggctttcgagttccgcgtgggcgccacagaccgcggctcccccgcgctgagcagagaggcgctggtgcgcgtgctggtgct

SEQ ID NO: 236905 - DNA, 87 bp, Artificial Sequence
  ENSG00000120324_15 (sequence is synthesized)
ctgctcaaggccacggagcccgggctgttcggtgtgtgggcgcacaatggggacgcagccaagcacaggctcgtggtgcttgtcaag

SEQ ID NO: 236906 - DNA, 120 bp, Artificial Sequence
  ENSG00000120324_16 (sequence is synthesized)
ctgagcgagcgcgacgcagccaagcacaggctcgtggtgcttgtcaaggacaatggcgagcctcctcgctcggccaccgccacgctgcacttgctcctggtggacggcttctcccagccc

SEQ ID NO: 236907 - DNA, 120 bp, Artificial Sequence
  ENSG00000120324_17 (sequence is synthesized)
tctcccggaggcggccccggcccaggcccaggccgaggccgacttgctcaccgtctacctggtggtggcgttggcctcggtgtcttcgctcttcctcctctcggtgctcctgttcgtggc

SEQ ID NO: 236908 - DNA, 120 bp, Artificial Sequence
  ENSG00000120324_18 (sequence is synthesized)
cggctgtgcaggaggagcagggcggcctcggtgggtcgctgctcggtgcccgagggtccttttccagggcatctggtggacgtgaggggcgctgagaccctgtcccagagctaccagtat

SEQ ID NO: 236909 - DNA, 120 bp, Artificial Sequence
  ENSG00000120324_19 (sequence is synthesized)
gtatgaggtgtgtctgacgggaggccccgggaccagtgagttcaagttcttgaaaccagttatttcggatattcaggcacagggccctgggaggaagggtgaagaaaattccaccttccg

SEQ ID NO: 236910 - DNA, 120 bp, Artificial Sequence
  ENSG00000120324_20 (sequence is synthesized)
aaatagctttggatttaatattcagtaaagtctgtttttagtttcatatacttttggtgtgttacatagccatgtttctattagtttacttttaaatctcaaatttaagttattatgcaa

SEQ ID NO: 236911 - DNA, 120 bp, Artificial Sequence
  ENSG00000120324_21 (sequence is synthesized)
cttcaagcattattttcaagtagtatacccctgtggttttacaatgtttcatcatttttttgcattaataacaactgggtttaatttaatgagtatttttttctaaatgatagtgttaag

SEQ ID NO: 236912 - DNA, 120 bp, Artificial Sequence
  ENSG00000120324_22 (sequence is synthesized)
gttttaattctttccaactgcccaaggaattaattactattatatctcattacagaaatctgaggttttgattcatttcagagcttgcatctcatgattctaatcacttctgtctatagt

SEQ ID NO: 236913 - DNA, 120 bp, Artificial Sequence
  ENSG00000120324_23 (sequence is synthesized)
gtacttgctctatttaagaaggcatatctacatttccaaactcattctaacattctatatattcgtgtttgaaaaccatgtcatttatttctacatcatgtatttaaaaagaaatatttc

SEQ ID NO: 236914 - DNA, 120 bp, Artificial Sequence
  ENSG00000120324_24 (sequence is synthesized)
tctactactatgctcatgacaaaatgaaacaaagcatattgtgagcaatactgaacatcaataatacccttagtttatatacttattattttatctttaagcatgctacttttacttggc

SEQ ID NO: 236915 - DNA, 120 bp, Artificial Sequence
  ENSG00000120324_25 (sequence is synthesized)
caatattttcttatgttaacttttgctgatgtataaaacagactatgccttataattgaaataaaattataatctgcctgaaaatgaataaaaataaaacattttgaaatgtgtggttga

SEQ ID NO: 236916 - DNA, 120 bp, Artificial Sequence
  ENSG00000120327_0 (sequence is synthesized)
cagatcctttagtgccgagcattcaaaacagtgataatgcagtgtatggacttttctggattcaaattcaaacaaaccaacagcaaaggacattttggagagaactggggaaaaccaaat

SEQ ID NO: 236917 - DNA, 120 bp, Artificial Sequence
  ENSG00000120327_1 (sequence is synthesized)
gcagtataaattacaccaaggaattattgctcaagttgttgattgtgaacgttttattacaattatcttttagaaggccttacctattaaaaatacttagtgaagtatttaaaggaaaaa

SEQ ID NO: 236918 - DNA, 120 bp, Artificial Sequence
  ENSG00000120327_2 (sequence is synthesized)
aaatgatgtctgggatttgtttcgaatgttccggatgtatttatgaattactttttcaaagaggaaaacttttttaatgaaaaaaaaaacatggagacacatggtggcgctacaggataa

SEQ ID NO: 236919 - DNA, 120 bp, Artificial Sequence
  ENSG00000120327_3 (sequence is synthesized)
gacgaaaacagtacataggctggcacggtgagcttcgctattcaggagaacagaaagcatccaacccactgaaaagacaggcattaaaggagcttcgcctacagagctgctggaggatac

SEQ ID NO: 236920 - DNA, 120 bp, Artificial Sequence
  ENSG00000120327_4 (sequence is synthesized)
actctccagggggttcctgttaaaaaccagagcttcagcttccaaaattacggctgagcttcagtttttccacaagagattgcctaaaggaaccatggagatcagaggggcactcgatct

SEQ ID NO: 236921 - DNA, 120 bp, Artificial Sequence
  ENSG00000120327_5 (sequence is synthesized)
gcgaaaaaggcaagttctaatattccttgttttgctgggattgtctcgggcaggtactgaatctgcacactattctgtggcagaggaaacagaaattggctcttttgtggctaatctagc

SEQ ID NO: 236922 - DNA, 120 bp, Artificial Sequence
  ENSG00000120327_6 (sequence is synthesized)
gagggacctagggctgggggtggaggagctgtcttcacgtgaagcccgggtagtgtctgatgataataaaaagtatttgcaccttgatttgctgactgggaatttgctcctaaatgagaa

SEQ ID NO: 236923 - DNA, 120 bp, Artificial Sequence
  ENSG00000120327_7 (sequence is synthesized)
actagaccgagacgagctgtgtggctccaccgagccctgtgtgctgcattttcaggtggttttggaaaaccctttacagttttttcggtttgagctgtgtgtcaaagacataaatgatca

SEQ ID NO: 236924 - DNA, 120 bp, Artificial Sequence
  ENSG00000120327_8 (sequence is synthesized)
ctcccctacatttctagacaaggaaatacttattaaaatatcagaaggtaccactgttggagctacctttctaatggagagtgctcaagatttggatgtcggaagcaacagtctccaaaa

SEQ ID NO: 236925 - DNA, 120 bp, Artificial Sequence
  ENSG00000120327_9 (sequence is synthesized)
ctacacaattagccccaattctcacttctacattaaaattcccgacagtagtgacagaaagatatacccagagctggtcctagatagagctttagattatgaacaggaagctgaactcag

SEQ ID NO: 236926 - DNA, 120 bp, Artificial Sequence
  ENSG00000120327_10 (sequence is synthesized)
attaacactcacagcagtggatggtggatccccgcccaagtctgggacaactttggttctcatcaaggtgttggacatcaatgataatgcccctgagtttcctcagagtctctatgaggt

SEQ ID NO: 236927 - DNA, 120 bp, Artificial Sequence
  ENSG00000120327_11 (sequence is synthesized)
gcaagtccccgaggacagaccccttggctcctggattgccaccatctcagctaaggatctggatgcaggaaactatggaaaaatatcttacacatttttccatgcatcagaagatattcg

SEQ ID NO: 236928 - DNA, 120 bp, Artificial Sequence
  ENSG00000120327_12 (sequence is synthesized)
taaaacatttgaaattaatccaatatctggggaagttaatttgagatcacccctggattttgaagtaatacagtcctacactataaatattcaggcaacagatggtgggggtctttcagg

SEQ ID NO: 236929 - DNA, 120 bp, Artificial Sequence
  ENSG00000120327_13 (sequence is synthesized)
aaaatgcacccttctagttaaagttatggatataaacgacaacccaccagaagtgaccatatcgtcgattacaaagagaattccagagaatgcctcagagaccctagtagctctttttag

SEQ ID NO: 236930 - DNA, 120 bp, Artificial Sequence
  ENSG00000120327_14 (sequence is synthesized)
tatcctagaccaagactctggagacaatgggaggatgatttgctctattcaagataacctcccttttttcctgaaaccgaccttcaagaactttttcactctagtttctgaaaaagcact

SEQ ID NO: 236931 - DNA, 120 bp, Artificial Sequence
  ENSG00000120327_15 (sequence is synthesized)
ggacagagagagccaagccgagtacaacatcacgatcaccgtcacagacttggggacacccaggctgaaaaccgagtacaacataaccgtgctgctctctgacgtcaatgacaacgcccc

SEQ ID NO: 236932 - DNA, 90 bp, Artificial Sequence
  ENSG00000120327_16 (sequence is synthesized)
gtcagcgccacagacagagactcaggcaccaacgcccaggtcaactactcgctgctgccgccccaggaccggcacctgcccctcgcctcc

SEQ ID NO: 236933 - DNA, 120 bp, Artificial Sequence
  ENSG00000120327_17 (sequence is synthesized)
gctgctgccgccccaggaccggcacctgcccctcgcctccttggtctccatcaacgcggacaatggccacctgtttgccctcaggtcgctggactacgaggccctacaggagttcgagtt

SEQ ID NO: 236934 - DNA, 82 bp, Artificial Sequence
  ENSG00000120327_18 (sequence is synthesized)
tcaggtcgctggactacgaggccctacaggagttcgagtttcgcgtgggcgccacagaccgcgggtccccggcgttgagcag

SEQ ID NO: 236935 - DNA, 68 bp, Artificial Sequence
  ENSG00000120327_19 (sequence is synthesized)
aggccacggagcccgggctgttcgggacgcggccaagcacaggctggtggtgctggtcaaggacaatg

SEQ ID NO: 236936 - DNA, 120 bp, Artificial Sequence
  ENSG00000120327_20 (sequence is synthesized)
cctggtggacggcttctcccagccctacctgccgctccctgaggcggccccggcccaggcccaggccgactccctcaccgtctacctggtggtggcattggcctcggtgtcgtcgctctt

SEQ ID NO: 236937 - DNA, 120 bp, Artificial Sequence
  ENSG00000120327_21 (sequence is synthesized)
ggctgtgcaggaggagcagggcggcctcggtgggtcgctgctcggtgcccgagggtccctttccagggcatctggtggacgtgagcggcaccgggaccctgtcccagagctaccaatacg

SEQ ID NO: 236938 - DNA, 120 bp, Artificial Sequence
  ENSG00000120327_22 (sequence is synthesized)
gtgagcggcaccgggaccctgtcccagagctaccaatacgaggtgtgtctgacaggaggttccgggacaaatgagttcaaatttctgaagccgattatccccaattttcaagttcatgac

SEQ ID NO: 236939 - DNA, 120 bp, Artificial Sequence
  ENSG00000120327_23 (sequence is synthesized)
actggtaggaatatgggggaaatcgagaactttcgaaatagctttggacttaacattcaataaaacaatttattttaaatgtctaatttttggttattcttggcaagctgatggtacttt

SEQ ID NO: 236940 - DNA, 120 bp, Artificial Sequence
  ENSG00000120327_24 (sequence is synthesized)
ttgcataatcttttgtggattcttggttgtactgtagttgcatgcatgattatagctcttgtttttctcacagtttctttaaaaatctttattagtggctataatgacgtggaaatgtaa

SEQ ID NO: 236941 - DNA, 120 bp, Artificial Sequence
  ENSG00000120327_25 (sequence is synthesized)
tctgtgttttctggtttttcatttatttggccaaaatgttatattaatggagttattgctatttttgctgtgataatggtattatgcaagaccatattctcaattatttggatatgcaaa

SEQ ID NO: 236942 - DNA, 120 bp, Artificial Sequence
  ENSG00000120327_26 (sequence is synthesized)
ctaaagtattaagagctaatgtcattatatatgtaacttaaatctagacaccatcaaagcataaaataaaaataaaaagcgttgctgaatctgggtcgaaaatgtagtgcgtttatccca

SEQ ID NO: 236943 - DNA, 120 bp, Artificial Sequence
  ENSG00000120327_27 (sequence is synthesized)
ctattctctctgaaaatgttctttagaaagggtaacaaagatgctatccctccattttcagttctggagaaccttattagtttttcaaatatttactttatgatgaaacttaagtggtca

SEQ ID NO: 236944 - DNA, 120 bp, Artificial Sequence
  ENSG00000120327_28 (sequence is synthesized)
cattggaaattattaatttcttaagtaattttttctgtaactgcttttgttgataatcctgttgtggaggaagagtcttataatgctctgggctttgctgtcactctttggttttcttaa

SEQ ID NO: 236945 - DNA, 120 bp, Artificial Sequence
  ENSG00000120327_29 (sequence is synthesized)
tttaattctatttatttatgttttttgagacagggtctcattccattgacctggctggaatgcagtggcaccatcatggctcactgccgccttgacttcctgggttcaggtgattctcct

SEQ ID NO: 236946 - DNA, 120 bp, Artificial Sequence
  ENSG00000120327_30 (sequence is synthesized)
gcctcagcctcctgagtagctggatcaccagcacaggccactacggcctggctaattcttttgtattttttttgtacagatggaatcttgccatgtttcccagtctggtctggaactcct

SEQ ID NO: 236947 - DNA, 120 bp, Artificial Sequence
  ENSG00000120327_31 (sequence is synthesized)
tggctcaagcgatctgcccgccttagctagttttttgtttttgttttttgagacaaagtctcactttgttgtccaggctagagagtagtggcaggatcttggctcactgcagcctcgaca

SEQ ID NO: 236948 - DNA, 120 bp, Artificial Sequence
  ENSG00000120327_32 (sequence is synthesized)
tcctgggctcaggcaatcctcctgcttcggcctattaaatagctcaaactacaggcacccgccacgatgcctagctaaatttttgtatatgtggtagagatggagttttgccatgtggcc

SEQ ID NO: 236949 - DNA, 120 bp, Artificial Sequence
  ENSG00000120327_33 (sequence is synthesized)
gtgatccacctgctttggcctcccaacgtgctaggattacaggcatgagccattacgtctggcctagttttctttaaatacaccgtgtttactagcttaaattttgtgttgtttattact

SEQ ID NO: 236950 - DNA, 120 bp, Artificial Sequence
  ENSG00000120327_34 (sequence is synthesized)
tagcttaaattttgtgttgtttattactaaagcagaaaataatttagggtcttatcctgggtaaaatagccttccatcagatgagtacaaagcaagaacttcataagaaattgaaatgaa

SEQ ID NO: 236951 - DNA, 120 bp, Artificial Sequence
  ENSG00000120327_35 (sequence is synthesized)
gattcaaactgttaaagaaatgatttagtttcactttcctattaattattgagtaaatataaaacatcattaacactttgtggcctctctcagatgcctacaaagaaggaatgggtaggc

SEQ ID NO: 236952 - DNA, 120 bp, Artificial Sequence
  ENSG00000120327_36 (sequence is synthesized)
atttatggtttatagttgcctcatcatgtaacatattatatctcagctctaaaagaaagttctatagaagattatagatagagattttgataactggaatgtagtatggatatagggctg

SEQ ID NO: 236953 - DNA, 120 bp, Artificial Sequence
  ENSG00000120327_37 (sequence is synthesized)
gtgtacatatacattttgaaattgctcttacaagattaaatactattatagaccagatgatgtagtaaaatggaatttcacttgccattgtgaaataggtgaaacaaattccagtttcct

SEQ ID NO: 236954 - DNA, 120 bp, Artificial Sequence
  ENSG00000120327_38 (sequence is synthesized)
tagatttcttccctctactttatgcaattatcactgattttatttttcgttgtaacaagtagttatttgttgtgtggatttcttaaaattgacatttaaacaataaaatcctgaaaagaa

SEQ ID NO: 236955 - DNA, 120 bp, Artificial Sequence
  ENSG00000120328_0 (sequence is synthesized)
agtacacgcggagaactgggaagacagaaagaacaatcctttaagggagaacctagaagccattcaacaaggttaaaatcttcaggcttccgaggatttggtagacagatcagaggcacg

SEQ ID NO: 236956 - DNA, 120 bp, Artificial Sequence
  ENSG00000120328_1 (sequence is synthesized)
tttcccacaactgcgaagaggcgctgaggcaattctgcaagaagattttggggttttggaaaagaagctatggaaaacggaggggcaggcactctgcagataaggcaagtcctgcttttc

SEQ ID NO: 236957 - DNA, 120 bp, Artificial Sequence
  ENSG00000120328_2 (sequence is synthesized)
tttgttttgctgggaatgtctcaggcgggctctgaaactgggaactttttggtgatggaggaattgcagagcgggagctttgtaggaaatttggcaaagaccctgggactcgaggtgagt

SEQ ID NO: 236958 - DNA, 120 bp, Artificial Sequence
  ENSG00000120328_3 (sequence is synthesized)
gagctgtcttcgcggggggctcgggtggtttctaatgataacaaagagtgtttgcagctggacacaaacactggggatttgctcctgagagaaatgctagacagggaggagctctgtggc

SEQ ID NO: 236959 - DNA, 120 bp, Artificial Sequence
  ENSG00000120328_4 (sequence is synthesized)
tccaatgagccttgtgtgctgtatttccaagtgttaatgaaaaaccccacgcagtttttacaaattgagctccaggtcagggatataaatgatcactctcccgtcttcttggaaaaagaa

SEQ ID NO: 236960 - DNA, 120 bp, Artificial Sequence
  ENSG00000120328_5 (sequence is synthesized)
atgctcttagaaatcccagagaacagtcctgttggtgctgtgttcttgcttgaaagtgcaaaggatttagatgtaggaatcaatgctgtaaaaagctacacaataaatccgaactctcat

SEQ ID NO: 236961 - DNA, 120 bp, Artificial Sequence
  ENSG00000120328_6 (sequence is synthesized)
ttccacgttaaaataagagtcaatccagacaataggaaataccctgagttagttctggacaaggcgctggattatgaagagcgcccggagctcagtttcatcctcactgctctggatggc

SEQ ID NO: 236962 - DNA, 120 bp, Artificial Sequence
  ENSG00000120328_7 (sequence is synthesized)
gggtcccctcccaggtctggaactgccttggtcagggtggtggttgtagatattaatgacaactcccctgagtttgagcaggctttttatgaggtgaagattctggagaatagcatcctt

SEQ ID NO: 236963 - DNA, 120 bp, Artificial Sequence
  ENSG00000120328_8 (sequence is synthesized)
ggctccctggttgtgaccgtctcagcctgggatttagactctggaacaaacagtgaactatcctataccttttcccatgcctcagaagatattcgcaagacatttgaaattaatcaaaag

SEQ ID NO: 236964 - DNA, 120 bp, Artificial Sequence
  ENSG00000120328_9 (sequence is synthesized)
tctggtgacattactttaacagcacctttggattttgaagcaattgagtcatactcaataatcattcaagccacagatgggggaggactttttggaaaatctacagtcagaattcaggtg

SEQ ID NO: 236965 - DNA, 120 bp, Artificial Sequence
  ENSG00000120328_10 (sequence is synthesized)
atggatgtaaacgacaacgctcctgaaatcactgtgtcatcaattaccagtccaatcccagaaaacactccagagactgtggttatggttttcaggatacgagacagagactctggggac

SEQ ID NO: 236966 - DNA, 120 bp, Artificial Sequence
  ENSG00000120328_11 (sequence is synthesized)
aacggaaagatggtttgttctatcccggaggacatcccattcgtgctaaaatcttcggtaaataattactacactttggaaacagagagaccgctggacagagagagcagagccgagtac

SEQ ID NO: 236967 - DNA, 120 bp, Artificial Sequence
  ENSG00000120328_12 (sequence is synthesized)
aacatcaccatcaccgtcaccgacttggggacccccaggctaaaaaccgagcacaacataaccgtgctggtctccgacgtcaatgacaacgcccccgccttcacccaaacttcctacgcc

SEQ ID NO: 236968 - DNA, 120 bp, Artificial Sequence
  ENSG00000120328_13 (sequence is synthesized)
acaacagccccgccctgcacatcggcagcatcagcgccacagacagagactcgggcaccaacgcccaggtcaactactcgctgctgccgtcccaggacccgcacctgcccctcgcctccc

SEQ ID NO: 236969 - DNA, 120 bp, Artificial Sequence
  ENSG00000120328_14 (sequence is synthesized)
ctgcccctcgcctccctggtctccatcaacgcggacaacggccacctgtttgccctcaggtcgctggactacgaggccctgcaggggttccagttccgcgtgggcgccacagaccacggc

SEQ ID NO: 236970 - DNA, 120 bp, Artificial Sequence
  ENSG00000120328_15 (sequence is synthesized)
tggtggacggcttctcccagccctacctgcctctcccggaggcggccccggcccaggcccaggccgactcgctcactgtctacctggtggtggcgttggcctcagtgtcgtcgctcttcc

SEQ ID NO: 236971 - DNA, 120 bp, Artificial Sequence
  ENSG00000120328_16 (sequence is synthesized)
gcggctgtgcaggaggagcagggcggccccggtcggtcgctgctcggtgcctgagggcccctttccaggacatctggtggacgtgagtggcaccgggaccctgtcccagagctaccacta

SEQ ID NO: 236972 - DNA, 120 bp, Artificial Sequence
  ENSG00000120328_17 (sequence is synthesized)
ccgggaccctgtcccagagctaccactatgaggtgtgtgtgactggaggctccaggtcaaataagttcaaatttctgaaaccaattatccccaacttcctaccccagagcacaggtagtg

SEQ ID NO: 236973 - DNA, 120 bp, Artificial Sequence
  ENSG00000120328_18 (sequence is synthesized)
aagtcgaagaaaatcccccatttcagaataatttgggtttctgataaagaatgaaaaataaaacctgtgtttatgaatacatttataattaggaacttatcgtgaggtgcctgtaaagta

SEQ ID NO: 236974 - DNA, 120 bp, Artificial Sequence
  ENSG00000120328_19 (sequence is synthesized)
gtatttttgatcacttcaaatacatactcttcaagtcaagaaataaatttctttacatagaaaaggatacagatttagtaccaagaacacttcacaaagcaggaaatgtgcatgtgtaat

SEQ ID NO: 236975 - DNA, 120 bp, Artificial Sequence
  ENSG00000120328_20 (sequence is synthesized)
ggtttatgtcaaacaattatgcttaatataaagtctattaagtggtaagtcttgtttgagatattttaaattgctttccattgttttcaatatttactgtgacttttgttttctgagttg

SEQ ID NO: 236976 - DNA, 120 bp, Artificial Sequence
  ENSG00000120328_21 (sequence is synthesized)
attagaatgctgttcgagtatacctaccctagtttcagaagcatagattgtagtgtacctttttaaactttatttttttaaaaaaagttgttttatgaatcatacactattttcacactt

SEQ ID NO: 236977 - DNA, 120 bp, Artificial Sequence
  ENSG00000120328_22 (sequence is synthesized)
ttaatctcagaagaaacatatgtgacatggtattttagtaatgaccaaatagacggtcttagagattcagtaagttcactaaggtccactaactaataagtgacaaaactgagcatccat

SEQ ID NO: 236978 - DNA, 120 bp, Artificial Sequence
  ENSG00000120328_23 (sequence is synthesized)
cctagatctgcctgactctaagtcagtgactttgctcccattccatactgtttttgtcattggatatcacctggcaagtttctgcctaactaaagagaagaaaagtttttatcgtattca

SEQ ID NO: 236979 - DNA, 120 bp, Artificial Sequence
  ENSG00000120328_24 (sequence is synthesized)
tactactgttcaatctttatttagaaataaactttatctatgatttcattttcttataaaccagtaatcttgcttttctgggtaaattttcagctattattactaatgctctgatctgcc

SEQ ID NO: 236980 - DNA, 120 bp, Artificial Sequence
  ENSG00000120328_25 (sequence is synthesized)
caaatcttaagtaaaaaacaaaattgaaagagcaacctatgccttctcattgtctcctgaacatataactatcatttcacagaaaagattaatggtcctgattaggaatagtacataatt

SEQ ID NO: 236981 - DNA, 120 bp, Artificial Sequence
  ENSG00000120328_26 (sequence is synthesized)
ttgatggcattattagttaattattttctttacattgtagtatatttccagagtcacccatgcttacatttgtaatatattttcctgatttgagagtttgtttttagcagtttttcttac

SEQ ID NO: 236982 - DNA, 120 bp, Artificial Sequence
  ENSG00000120328_27 (sequence is synthesized)
ctatactgcactgctgaatcaggaaaatttaagaaaaagaatagatttaaatgtgtaatatcaaagagaaatatagatgatcattaaatttttagaaattttggggagttaaggagaagc

SEQ ID NO: 236983 - DNA, 120 bp, Artificial Sequence
  ENSG00000120328_28 (sequence is synthesized)
attgtttgttaaaaatatataaccgattcttatatttaaaataggtaatttttgcatagttgtgttctaaatatattataaactagtgccagtaactctaataaagctagtattactgca

SEQ ID NO: 236984 - DNA, 68 bp, Artificial Sequence
  ENSG00000120328_29 (sequence is synthesized)
aggccacggagcccgggctattcgggacgcggccaagcacaggctggtggtgctggtcaaggacaatg

SEQ ID NO: 236985 - DNA, 120 bp, Artificial Sequence
  ENSG00000120329_0 (sequence is synthesized)
gcggcggagcgtagggttgagcggcttcccccgcactggggtgagagcccagaacaggcggtagagccaccccaccacccccaactccattccccgcgctcgctgcggctggacgtgaaa

SEQ ID NO: 236986 - DNA, 120 bp, Artificial Sequence
  ENSG00000120329_1 (sequence is synthesized)
agccggtctcacgctctggggagttagtcgccttccactgggaccctcagacgagtgagcgaacatgaagtccggtcctggcatccaagccgccatcgacctcacagcgggggccgcagg

SEQ ID NO: 236987 - DNA, 120 bp, Artificial Sequence
  ENSG00000120329_2 (sequence is synthesized)
ggggacagcgtgtgtactgactgggcagcccttcgacacaataaaagtgaagatgcagacgttccctgacctgtacaagggcctcaccgactgcttcctgaagacatacgctcaagtggg

SEQ ID NO: 236988 - DNA, 120 bp, Artificial Sequence
  ENSG00000120329_3 (sequence is synthesized)
tctccggggcttctacaagggcaccggcccggcacttatggcctacgtcgccgaaaactcggtcctcttcatgtgctacgggttctgccagcagtttgtcaggaaagtggctggaatgga

SEQ ID NO: 236989 - DNA, 120 bp, Artificial Sequence
  ENSG00000120329_4 (sequence is synthesized)
caagcaggcaaagctgagtgatctccagactgcagccgcggggtccttcgcctctgcatttgctgcactggctctctgccccactgagcttgtgaagtgccggctacagaccatgtatga

SEQ ID NO: 236990 - DNA, 120 bp, Artificial Sequence
  ENSG00000120329_5 (sequence is synthesized)
atggactctcgagtactctacttcaagaagtaccgggttatttctttttctttggtggctatgaactgagccgatcgttttttgcgtcagggagatcaaaagatgaactaggccctgtcc

SEQ ID NO: 236991 - DNA, 120 bp, Artificial Sequence
  ENSG00000120329_6 (sequence is synthesized)
atttgatgttaagtggtggagttgctggaatttgcctgtggcttgtcgtgttcccagtggattgtattaaatccagaattcaagttctttccatgtatgggaaacaggcaggatttattg

SEQ ID NO: 236992 - DNA, 120 bp, Artificial Sequence
  ENSG00000120329_7 (sequence is synthesized)
gtaccctcttaagtgttgtgagaaatgaaggaatagtagccttatattctggactgaaagctactatgattcgagcaatccctgccaatggggcactgtttgtggcctacgaatacagca

SEQ ID NO: 236993 - DNA, 120 bp, Artificial Sequence
  ENSG00000120329_8 (sequence is synthesized)
ggaagatgatgatgaaacagttggaagcatactgaagtgtcttggtgaacctggatccgagtccatgagtttgaggactacagttcatcacagggttcagcagagtacaagaccactgtc

SEQ ID NO: 236994 - DNA, 120 bp, Artificial Sequence
  ENSG00000120329_9 (sequence is synthesized)
taattttgacttcatgggaattttggttttatcttcccttcttctaccctaaatcttaactttatggaagggcctctattttacatcatataatttctgcccataattgtattgaaatag

SEQ ID NO: 236995 - DNA, 120 bp, Artificial Sequence
  ENSG00000120329_10 (sequence is synthesized)
gaaagttgctgctcttgcacttgctggaatgtacagggtgggctggttggccctatgtacctaatctgaaaaactaaatatcgttctgtcagggcctttgcataaagccatttgtgtgta

SEQ ID NO: 236996 - DNA, 120 bp, Artificial Sequence
  ENSG00000120332_0 (sequence is synthesized)
gagacgagaaccagggacgaccagcaagtaccaaggtctgcggcaggaggagaccggctcacaggagcagcagcattggaagaggcacccagcagcctcccaggcatcctggagggtctg

SEQ ID NO: 236997 - DNA, 120 bp, Artificial Sequence
  ENSG00000120332_1 (sequence is synthesized)
ctccctgtctttccaaggatgagtctccaggagatgttccgcttccctatggggctcctgcttggctctgtgctcctggtggcttcggccccagccactctggagcctcccggctgcagc

SEQ ID NO: 236998 - DNA, 120 bp, Artificial Sequence
  ENSG00000120332_2 (sequence is synthesized)
aacaaggagcaacaggtcactgtcagccacacctacaagatcgatgtgcccaagtctgccttggttcaggttgacgctgaccctcagcccctcagtgacgatggggcttcgctcttggcc

SEQ ID NO: 236999 - DNA, 120 bp, Artificial Sequence
  ENSG00000120332_3 (sequence is synthesized)
ctgggggaggccagggaggaacagaacatcatcttcaggcacaacatccgccttcagacgccacagaaggactgcgagttggcaggcagtgtccaggacctcctggcccgggtgaagaag

SEQ ID NO: 237000 - DNA, 120 bp, Artificial Sequence
  ENSG00000120332_4 (sequence is synthesized)
ctggaggaagagatggtggagatgaaggaacagtgtagtgcccagcgctgctgccagggagtcactgatctaagccgccactgcagcggccacgggaccttctccctggagacctgcagc

SEQ ID NO: 237001 - DNA, 120 bp, Artificial Sequence
  ENSG00000120332_5 (sequence is synthesized)
cagctgccactgcgaagagggcagggagggccccgcctgcgagcggctggcctgccccggggcgtgcagcggccacgggcgttgcgtggacgggcgctgcctgtgccatgagccctacgt

SEQ ID NO: 237002 - DNA, 120 bp, Artificial Sequence
  ENSG00000120332_6 (sequence is synthesized)
gccgactgcggctacccggcctgccctgagaactgcagcggacacggcgagtgcgtgcgcggcgtgtgccagtgccacgaagacttcatgtcggaggactgcagcgagaagcgctgtccc

SEQ ID NO: 237003 - DNA, 120 bp, Artificial Sequence
  ENSG00000120332_7 (sequence is synthesized)
ggcgactgcagcggccacggcttctgtgacacgggcgagtgctactgcgaggagggcttcacaggcctggactgtgcccaggtggtcaccccacagggcctgcagctgctcaagaacacg

SEQ ID NO: 237004 - DNA, 120 bp, Artificial Sequence
  ENSG00000120332_8 (sequence is synthesized)
gaggattctctgctggtgagctgggagccctccagccaggtggatcactacctcctcagctactaccccctggggaaggagctctctgggaagcagatccaagtgcccaaggagcagcac

SEQ ID NO: 237005 - DNA, 120 bp, Artificial Sequence
  ENSG00000120332_9 (sequence is synthesized)
agctatgagattcttggtttgctgcctggaaccaagtacatagtcaccctgcgtaacgtcaagaatgaagtttctagcagcccacagcatctacttgccaccacagaccttgctgtgctt

SEQ ID NO: 237006 - DNA, 120 bp, Artificial Sequence
  ENSG00000120332_10 (sequence is synthesized)
ggcactgcctgggtgacagatgagactgagaactcccttgacgtggagtgggaaaacccctcaactgaggtggactactacaagctgcgatatggccccatgacaggacaggaggtagct

SEQ ID NO: 237007 - DNA, 120 bp, Artificial Sequence
  ENSG00000120332_11 (sequence is synthesized)
gaggtcactgtgcccaagagcagtgaccccaagagccgatatgacatcactggtctgcacccggggactgagtataagatcacggtggtgcccatgagaggagagctggagggcaagccg

SEQ ID NO: 237008 - DNA, 120 bp, Artificial Sequence
  ENSG00000120332_12 (sequence is synthesized)
atcctcctgaatggcaggacagaaattgacagtccaaccaatgttgtcactgatcgagtgactgaagacacagcaactgtctcctgggacccagtgcaggctgtcatagacaagtatgta

SEQ ID NO: 237009 - DNA, 120 bp, Artificial Sequence
  ENSG00000120332_13 (sequence is synthesized)
gtgcgctacacttctgctgatggggacaccaaggaaatggcagtgcacaaggatgagagcagcactgtcctgacgggcctgaagccaggagaggcatacaaggtctacgtgtgggctgaa

SEQ ID NO: 237010 - DNA, 120 bp, Artificial Sequence
  ENSG00000120332_14 (sequence is synthesized)
aggggcaaccaggggagcaagaaagctgacaccaatgccctcacagaaattgacagcccagcaaacctggtgactgaccgggtgactgagaataccgccaccatctcctgggacccggta

SEQ ID NO: 237011 - DNA, 120 bp, Artificial Sequence
  ENSG00000120332_15 (sequence is synthesized)
caggccaccattgacaagtacgtggtgcgctacacctctgctgacgaccaagagaccagagaggttctggtggggaaggagcagagcagcactgtcctgacaggcctgaggccaggtgtg

SEQ ID NO: 237012 - DNA, 120 bp, Artificial Sequence
  ENSG00000120332_16 (sequence is synthesized)
gagtacacagtgcatgtctgggcccagaagggggaccgagagagcaagaaggctgacaccaacgccccgacagatattgacagccccaaaaacctggtgactgaccgggtgacagagaat

SEQ ID NO: 237013 - DNA, 120 bp, Artificial Sequence
  ENSG00000120332_17 (sequence is synthesized)
atggccacggtctcctgggacccggtgcaggccgccattgacaagtacgtggtgcgctacacctctgctggtggagagaccagggaggttccggtggggaaggagcagagcagcacagtc

SEQ ID NO: 237014 - DNA, 120 bp, Artificial Sequence
  ENSG00000120332_18 (sequence is synthesized)
ctgacaggcctgagaccgggtatggagtacatggtgcacgtgtgggcccagaagggggaccaggagagcaagaaggccgacaccaaggcccagacagacattgacagcccccaaaacctg

SEQ ID NO: 237015 - DNA, 120 bp, Artificial Sequence
  ENSG00000120332_19 (sequence is synthesized)
gtgaccgaccgggtgacagagaatatggccactgtctcctgggacccggtgcgggccaccattgacaggtatgtggtgcgctacacctctgccaaggacggagagaccagggaggttccg

SEQ ID NO: 237016 - DNA, 120 bp, Artificial Sequence
  ENSG00000120332_20 (sequence is synthesized)
gtggggaaggagcagagtagcactgtcctgacgggcctgaggccgggtgtggagtacacggtgcacgtgtgggcccagaagggggcccaggagagcaagaaggctgacaccaaggcccag

SEQ ID NO: 237017 - DNA, 120 bp, Artificial Sequence
  ENSG00000120332_21 (sequence is synthesized)
agacattgacagcccccaaaacctggtcactgactgggtgacagagaatacagccactgtctcctgggacccggtgcaggccaccattgacaggtatgtggtgcactacacgtctgccaa

SEQ ID NO: 237018 - DNA, 120 bp, Artificial Sequence
  ENSG00000120332_22 (sequence is synthesized)
cggagagaccagggaggttccagtggggaaggagcagagcagcactgtcctgacgggcctgaggccgggcatggagtacacggtgcacgtgtgggcccagaaggggaaccaggagagcaa

SEQ ID NO: 237019 - DNA, 120 bp, Artificial Sequence
  ENSG00000120332_23 (sequence is synthesized)
gaaggctgacaccaaggcccagacagaaattgacggccccaaaaacctagtgactgactgggtgacggagaatatggccactgtctcctgggacccggttcaggccaccattgacaagta

SEQ ID NO: 237020 - DNA, 120 bp, Artificial Sequence
  ENSG00000120332_24 (sequence is synthesized)
catggtgcgctacacctctgctgacggagagaccagggaggttccggtggggaaggagcacagcagcactgtcctgacgggcctgagaccaggcatggagtacatggtgcacgtgtgggc

SEQ ID NO: 237021 - DNA, 120 bp, Artificial Sequence
  ENSG00000120332_25 (sequence is synthesized)
ccagaagggggcccaggagagcaagaaggctgacaccaaggcccagacagaactcgaccctcccagaaaccttcgtccatctgctgtaacgcagtctggtggcatattgacctggacgcc

SEQ ID NO: 237022 - DNA, 120 bp, Artificial Sequence
  ENSG00000120332_26 (sequence is synthesized)
cccctctgctcagatccacggctacattctgacttaccagttcccagatggcacagttaaggagatgcagctgggacgggaagaccagaggtttgcgttgcaaggccttgagcaaggcgc

SEQ ID NO: 237023 - DNA, 120 bp, Artificial Sequence
  ENSG00000120332_27 (sequence is synthesized)
cacctaccctgtctcccttgttgcctttaagggtggtcgccggagcagaaatgtatccaccaccctctccacagttggtgcccgtttcccacacccttcggactgcagtcaggttcagca

SEQ ID NO: 237024 - DNA, 120 bp, Artificial Sequence
  ENSG00000120332_28 (sequence is synthesized)
gaacagcaatgccgccagtggtctgtacaccatctacctgcatggcgatgccagccggcccctgcaggtgtactgtgacatggaaacggacggaggtggctggattgtcttccagaggcg

SEQ ID NO: 237025 - DNA, 120 bp, Artificial Sequence
  ENSG00000120332_29 (sequence is synthesized)
gaacactgggcagctggatttcttcaagcgatggaggagctatgtggaaggctttggggaccccatgaaggagttctggcttggacttgacaagctacacaacctcaccaccggcactcc

SEQ ID NO: 237026 - DNA, 120 bp, Artificial Sequence
  ENSG00000120332_30 (sequence is synthesized)
agcgcggtatgaggtgagagtggatttacagactgccaatgaatctgcctatgctatatatgatttcttccaagtggcctccagcaaggagcggtataagctgacagttgggaaatacag

SEQ ID NO: 237027 - DNA, 120 bp, Artificial Sequence
  ENSG00000120332_31 (sequence is synthesized)
aggcacggcaggggatgctcttacttaccacaatggatggaagtttacaacttttgacagagacaatgatatcgcactcagcaactgtgccctgacacatcatggtggctggtggtataa

SEQ ID NO: 237028 - DNA, 120 bp, Artificial Sequence
  ENSG00000120332_32 (sequence is synthesized)
gaactgccacttggccaaccctaatggcagatatggggagaccaagcacagtgagggggtgaactgggagccttggaaaggacatgaattctccattccttacgtggagttgaaaatccg

SEQ ID NO: 237029 - DNA, 120 bp, Artificial Sequence
  ENSG00000120332_33 (sequence is synthesized)
ccctcatggctacagcagggagcctgtcctgggcagaaagaagcggacgctgagaggaaggctgcgaacgttctgatggcccgtgtgagcagtcctcgcaggagacaccaccagctgtgg

SEQ ID NO: 237030 - DNA, 120 bp, Artificial Sequence
  ENSG00000120332_34 (sequence is synthesized)
cagcttggggcggggtgggtagtggtcactgcggtctgggagtgctcagatagcccgcagaacaaatcatgtcaccaagcttcaagccatggaggttccttccctctcacctgcattttt

SEQ ID NO: 237031 - DNA, 120 bp, Artificial Sequence
  ENSG00000120332_35 (sequence is synthesized)
gcccgtctttatgagggtcttgaaaatcaaaatagtagttgcacagtatgtgtaggaaagacagtactggaacggcaaggtttctcagcttatcttcagcaacatatatactggattagg

SEQ ID NO: 237032 - DNA, 120 bp, Artificial Sequence
  ENSG00000120332_36 (sequence is synthesized)
gcaagagaaggaatcacccagcacttcaccagttggaaatctctggaaatttacatctatgtatttaaagttctgctaatgcaaatcttttctctggaaagaagcacagaggaggagttc

SEQ ID NO: 237033 - DNA, 120 bp, Artificial Sequence
  ENSG00000120332_37 (sequence is synthesized)
tgatgacccaggggttagggctgagacaaccggacgtttgtcacctcctttcccattgggtttttaggaaaacagtgtgaacctcccccttttaatttctggtgttatgaggaagaataa

SEQ ID NO: 237034 - DNA, 120 bp, Artificial Sequence
  ENSG00000120332_38 (sequence is synthesized)
aggggataaaaggggctaagatggactcatgtttagctaagttctgacttgtatccagcatgctggagaccaaagctgccgccttactgctatttttaagtgccctcttttcagtcattt

SEQ ID NO: 237035 - DNA, 120 bp, Artificial Sequence
  ENSG00000120332_39 (sequence is synthesized)
gcataattgcgtccatagagctgcatatgttgtgaataaattctcactcatttcaactttgaataatttgactgtcttgataattggttcctcccaaagactcttctgcaactcccattc

SEQ ID NO: 237036 - DNA, 120 bp, Artificial Sequence
  ENSG00000120332_40 (sequence is synthesized)
atgcccaccaggcctcagactccctcttttccccgccctgcactattggagccctgggttttgtgggagtgctcagcaccgtgagtcttactgtttgatcggacagttagcaagatcaga

SEQ ID NO: 237037 - DNA, 120 bp, Artificial Sequence
  ENSG00000120332_41 (sequence is synthesized)
tcctttttgcttattttctatcactttggagggttttctgtagcaaaatcagtgaccaatgaagtaacttaaattcctattgaagaaaaaaaataataaaccacttgatttaaaaaaaaa

SEQ ID NO: 237038 - DNA, 120 bp, Artificial Sequence
  ENSG00000120333_0 (sequence is synthesized)
agtttgtagcggacaacatggcggccttcatgctgggctcgctgctgcggacgttcaagcagatggttccttcatcagcttcaggccaagttcgaagtcactatgtagactggagaatgt

SEQ ID NO: 237039 - DNA, 120 bp, Artificial Sequence
  ENSG00000120333_1 (sequence is synthesized)
ggcgcgatgtgaagagacgaaaaatggcctatgaatacgcagatgagaggctacgtattaattcactcaggaagaataccattttgccaaaaattcttcaggatgtggctgatgaagaaa

SEQ ID NO: 237040 - DNA, 120 bp, Artificial Sequence
  ENSG00000120333_2 (sequence is synthesized)
ttgctgccctcccccgggatagctgtcctgttagaatcagaaatcggtgtgttatgacgtcccgtccgcgtggtgtgaagcggcgctggaggcttagtcgtatagtcttccgtcacttag

SEQ ID NO: 237041 - DNA, 120 bp, Artificial Sequence
  ENSG00000120333_3 (sequence is synthesized)
ctgaccatgggcaactttctgggatccagcgagcgacatggtaaatgagctccagaacctattgagcttgcagggaagccaagcttgcagttccagcaagcaaagattttttttaataga

SEQ ID NO: 237042 - DNA, 120 bp, Artificial Sequence
  ENSG00000120333_4 (sequence is synthesized)
ccaaaccctaatctctacaggggcccagtacagttgtttggcctacctgatgctatctctaaactacttttaaaatgaagacatttgggtgtttcatgtcagtgaattatcttttctctt

SEQ ID NO: 237043 - DNA, 120 bp, Artificial Sequence
  ENSG00000120333_5 (sequence is synthesized)
ggacttaacaaacatactgttcccatacatagtacaaagagtagcataataaatattttctgtgaatgttttttataccctccttttaagtttaatcttttagtaacatataggggtttt

SEQ ID NO: 237044 - DNA, 120 bp, Artificial Sequence
  ENSG00000120333_6 (sequence is synthesized)
tgtattaagagcattatttcataaaatgctatcttatacataatccaactaattgacatgtagctcatgtatggcagtttgtaatcctggactagctttgctgacctgcagagctcccct

SEQ ID NO: 237045 - DNA, 120 bp, Artificial Sequence
  ENSG00000120333_7 (sequence is synthesized)
taactattattgttagataaacagattggatagcaaggctgctgttctggattatctaatgctccacttcttcttgtgatggctgaacaaaagaaccactaagtgttttcttgtccatcc

SEQ ID NO: 237046 - DNA, 120 bp, Artificial Sequence
  ENSG00000120333_8 (sequence is synthesized)
acagtatatattccctatttttatgtttatttaatccataacagaaatgagtaagggtagcacaaagttctcattcagtaactcaacagtgtgatcatcagcccagtgataaaaatatac

SEQ ID NO: 237047 - DNA, 120 bp, Artificial Sequence
  ENSG00000120333_9 (sequence is synthesized)
atactgaatggaagtacctacttaacatcaggaaaatattcctggagaacttaataaatcaggaggtgaggggtgagatttttttctgcacacagagggaacaaaagcacaaagaagcaa

SEQ ID NO: 237048 - DNA, 120 bp, Artificial Sequence
  ENSG00000120333_10 (sequence is synthesized)
aggcactctgtagcatcagagaaccacagtcacttcagtagatcagaaatatgaagcacaagacaaggcccgtattgtggaggatctcacaaatcatgtgaaggaattaagactgacata

SEQ ID NO: 237049 - DNA, 120 bp, Artificial Sequence
  ENSG00000120333_11 (sequence is synthesized)
ccaggtattacagagttttaagcacaggaatgacatcatcagtttgtaatacaggtaagtgacagctgtgtggcagatggccatgagaggaaaaagctacaggcaagacaaccagttagg

SEQ ID NO: 237050 - DNA, 120 bp, Artificial Sequence
  ENSG00000120333_12 (sequence is synthesized)
aggatgtcttagttgttgaggaagatgaaggcctgaactaacattgtggtattagtagaggagagaggacagatttttaaagttttaggaaagaaaattgggcaagacttacaagactga

SEQ ID NO: 237051 - DNA, 120 bp, Artificial Sequence
  ENSG00000120333_13 (sequence is synthesized)
ttatatctaagaggtaaagatggttctctgggttcctgataaaagtgtctagatagatggtagagggcaattccaagagggcaactccaagatagaaaatttggaaaaagaacaaattta

SEQ ID NO: 237052 - DNA, 120 bp, Artificial Sequence
  ENSG00000120333_14 (sequence is synthesized)
ggggaaacagaagataagcgagttcaggttccagtcatgcggtgttggagatgcctgtgtcatctgatgaagactagtacgcagctggatagcagagtccgaaactcaggtggaggtgaa

SEQ ID NO: 237053 - DNA, 120 bp, Artificial Sequence
  ENSG00000120333_15 (sequence is synthesized)
gttatgagggaattatcacaatctagtttggattcatatttcttaaatatgtatgacaacttaccaactggaatgttctagctaatatctcaacttagaatccatctcactaccaatggg

SEQ ID NO: 237054 - DNA, 120 bp, Artificial Sequence
  ENSG00000120333_16 (sequence is synthesized)
caaacacttgtgttctaaagttacttgcaagtagtttatactgccaacttgatatatatacatgctatagtttgaacattttgtgtacttccaaaattcacattaaaatctaatccacaa

SEQ ID NO: 237055 - DNA, 120 bp, Artificial Sequence
  ENSG00000120333_17 (sequence is synthesized)
gggcaactttctgggatccagcgagcgacatgcctcaactcaatacagttgtttttatacttctttttcaagtgaaaggtaaaaacactggtttattctcttctgaacaaggttctcaat

SEQ ID NO: 237056 - DNA, 120 bp, Artificial Sequence
  ENSG00000120333_18 (sequence is synthesized)
gggctgaagtgatcctccagccttagtagctgggattacgggcgccagccttcatgcctggcttcaattgctttctctgatctaactgtgttggctaatacctccaggaaaataaagtaa

SEQ ID NO: 237057 - DNA, 120 bp, Artificial Sequence
  ENSG00000120333_19 (sequence is synthesized)
tggagatcacaggcactggtcctgacttcagggggaataggagtaattcctactaaaagcctgatttttctgacatactcctagacaaataaatcataaaactgttctaatgaagaaaaa

SEQ ID NO: 237058 - DNA, 120 bp, Artificial Sequence
  ENSG00000120333_20 (sequence is synthesized)
ggacaacatggcggccttcatgctgggctcgctgctgcggacgttcaagcaggtcaggcctctacttttatccacaccgctacccctcaccgctgaatctcataacccacgggtccccca

SEQ ID NO: 237059 - DNA, 120 bp, Artificial Sequence
  ENSG00000120334_0 (sequence is synthesized)
tttgtgtctcttgtgaacccacttgtggagcgagagggaatttgggagggccaggggttagtctggcctctgtcttagctgtcattttggcggttttttttttttttcttcaggggattt

SEQ ID NO: 237060 - DNA, 120 bp, Artificial Sequence
  ENSG00000120334_1 (sequence is synthesized)
cagtctccacatagttttggagccggacttttgaagaatgattcgtgaatccggaatgggtgacagcgtcatcacggcattttattgacagaccatggattcttacagtgcaccagagtc

SEQ ID NO: 237061 - DNA, 120 bp, Artificial Sequence
  ENSG00000120334_2 (sequence is synthesized)
aactcctagtgcatcctcaagacctgaagattactttataggtgccactcctctgcagaaacgattagaatcggtcaggaagcagagttcatttatcctgactccacctcgaaggaaaat

SEQ ID NO: 237062 - DNA, 120 bp, Artificial Sequence
  ENSG00000120334_3 (sequence is synthesized)
tccccagtgttcgcagttgcaggaagatgttgaccctcaaaaggttgcattccttctgcataaacagtggactttatatagtttaactcccttatataaattctcctatagtaatctcaa

SEQ ID NO: 237063 - DNA, 120 bp, Artificial Sequence
  ENSG00000120334_4 (sequence is synthesized)
agagtattctagacttctcaatgcttttattgttgctgaaaagcaaaaaggacttgctgtggaagtgggagaagacttcaacatcaaagtgattttttctactctcctaggaatgaaagg

SEQ ID NO: 237064 - DNA, 120 bp, Artificial Sequence
  ENSG00000120334_5 (sequence is synthesized)
aacacaaagggacccggaagcatttcttgtccagattgtgtcaaaatctcaattgccatctgagaatagagaaggtaaagtgctgtggactggctggttctgctgtgtatttggagacag

SEQ ID NO: 237065 - DNA, 120 bp, Artificial Sequence
  ENSG00000120334_6 (sequence is synthesized)
tcttctggagactgtttcagaagatttcacctgtctgcccttattccttgcaaatggagcagagtctaacacagcaataattggaacttggtttcagaaaacctttgactgttatttcag

SEQ ID NO: 237066 - DNA, 120 bp, Artificial Sequence
  ENSG00000120334_7 (sequence is synthesized)
ggactgcatgcaaaatggaccattatgtggctactactgaatttctttggtctgtaccctgtagccctcaaagtctggacatttctttcgcaatacatccagaggatgcaaaagctctat

SEQ ID NO: 237067 - DNA, 120 bp, Artificial Sequence
  ENSG00000120334_8 (sequence is synthesized)
gggacagtgtccacaaaacacctggggaggttacccaggaagaagttgacctattcatggattgcctttattcacatttccatagacatttcaaaattcatttatcagccacaagattag

SEQ ID NO: 237068 - DNA, 120 bp, Artificial Sequence
  ENSG00000120334_9 (sequence is synthesized)
ttcgtgtttcaacatctgtagcttcagcacatactgatggaaaaataaagattctgtgtcataaataccttattggagtgttagcatatttgacagaactggcaatttttcaaattgagt

SEQ ID NO: 237069 - DNA, 120 bp, Artificial Sequence
  ENSG00000120334_10 (sequence is synthesized)
gaagccttatgtggactataagttatagattatatactcttattgataacttgcctaattgctatgctgaaagagactgcaggagaaataggcatctatctctgcatctgttttccccac

SEQ ID NO: 237070 - DNA, 120 bp, Artificial Sequence
  ENSG00000120334_11 (sequence is synthesized)
catgcctttggagttgccaagatggaagccaagaaggatctagaagaacaaagaatatggtagtagatgagccacagccaggtgcccatgtactaatcatgataacctgacatgccattc

SEQ ID NO: 237071 - DNA, 120 bp, Artificial Sequence
  ENSG00000120334_12 (sequence is synthesized)
cccatgtactaatcatgataacctgacatgccattctcaaaatgctgagttgttaatttcttgtcatctttaaatatatatatataggctgggcttggtggctcacacctgtaattccag

SEQ ID NO: 237072 - DNA, 120 bp, Artificial Sequence
  ENSG00000120334_13 (sequence is synthesized)
ggtctctgacaggctcagctggagagggacgggttgggacgcactgtccttttgcccttccccctccgcgagcagaagctgactccgcaggagcgagggtcgcagagctgggtgagcgga

SEQ ID NO: 237073 - DNA, 86 bp, Artificial Sequence
  ENSG00000120334_14 (sequence is synthesized)
aggctggagtacagtggcacgatcttggttgactgcaacctctgtctcctgggctcaagtgatccttccaccttagccttactcgg

SEQ ID NO: 237074 - DNA, 120 bp, Artificial Sequence
  ENSG00000120334_15 (sequence is synthesized)
aaaataaaaaagaaataaaataaataaatacagcgtttattatgtttaaactcttaggattcaaatgagatgtatctaatggatatttctgatttgggtctttaaaacctttaatctctt

SEQ ID NO: 237075 - DNA, 120 bp, Artificial Sequence
  ENSG00000120334_16 (sequence is synthesized)
ctgatttgggtctttaaaacctttaatctcttttaagcattttagacttgcattcagaaagaattctgtcttctaaagacattttcctagcatttcactgcggagaactggcaatcaaaa

SEQ ID NO: 237076 - DNA, 120 bp, Artificial Sequence
  ENSG00000120334_17 (sequence is synthesized)
tcccctcaaaagggaactaaagattaatatacacatttttttagtcattaatatgcttctgttttaaatacagttcaactcctgttgcaatgttgaattaaatgtttattttaaaatgaa

SEQ ID NO: 237077 - DNA, 120 bp, Artificial Sequence
  ENSG00000120334_18 (sequence is synthesized)
tttcttgtccagattctgtgtcataaataccttattggagtgttagcatatttgacagaactggcaatttttcaaattgagtgaagccttatgtggactataagttatagattatatact

SEQ ID NO: 237078 - DNA, 120 bp, Artificial Sequence
  ENSG00000120334_19 (sequence is synthesized)
attttagttgcttcactgatacggaatcggcgaggcgccaaggaggcttcctgcgtggggccgcagagcgagtcgggaaacgattttaaactgaagaggcggcggagggccgaattccct

SEQ ID NO: 237079 - DNA, 120 bp, Artificial Sequence
  ENSG00000120334_20 (sequence is synthesized)
agatgctttgtattggtcccggacctgctttaactttgtatttgccctgttgtgtggtcattatcttacaatacttgcgtgttgaggtgtgtttaaacactacgtgcttaacactggcta

SEQ ID NO: 237080 - DNA, 120 bp, Artificial Sequence
  ENSG00000120334_21 (sequence is synthesized)
agtattggcattggggcggttggatttaggtattggtggcaatgtagaaaagtgatcaagtcagagccccttcacggactaatcacaagagaaacaacaaagctttacttgtgtgctgtg

SEQ ID NO: 237081 - DNA, 120 bp, Artificial Sequence
  ENSG00000120334_22 (sequence is synthesized)
aaccacaactgcaagtggaattgtcaagagaactagccctgccaagctcaggaaaacttctgaggagatggcacatggaaaatggataagatttactgagacaaacgggagtagagaagt

SEQ ID NO: 237082 - DNA, 120 bp, Artificial Sequence
  ENSG00000120334_23 (sequence is synthesized)
gtttttaattggcgataaggtgaataaaaaggcagggagaacagtagagtgatcatctgtctagagtagggggtgcatgtttgggtatagggctgtcatttaacctcttaaagaattgtc

SEQ ID NO: 237083 - DNA, 120 bp, Artificial Sequence
  ENSG00000120334_24 (sequence is synthesized)
tactggaactttcttcactcccatccccccaccccccaatgttgtatacaaaaccttagaggaagtgtatgcagaatgttggattttggaaaggctaatgtcgatggatcttggggaaga

SEQ ID NO: 237084 - DNA, 120 bp, Artificial Sequence
  ENSG00000120334_25 (sequence is synthesized)
actgaagtagtagaaaatgaacctggataggatcagataataagatcaaatacagtagtgccttgaaagccagacaggaattctgatttgacttcatatagatgtgtgggaactgttatg

SEQ ID NO: 237085 - DNA, 120 bp, Artificial Sequence
  ENSG00000120334_26 (sequence is synthesized)
ggatctcaagcaaggtaatgataaaagtggtgacaatgaaagactgatgatggattagggaaaggggctaagattgggaacaagataagtagctataattgagaatgaaagtgaagccca

SEQ ID NO: 237086 - DNA, 120 bp, Artificial Sequence
  ENSG00000120334_27 (sequence is synthesized)
gagactctgtcttcaaaaaagaaatatgtgagaatttgatgataaagttaacaaagttaactttttagatgtaaaggtgatgttgaaggaagagtaaaagatgatgaaagtttttttagt

SEQ ID NO: 237087 - DNA, 120 bp, Artificial Sequence
  ENSG00000120334_28 (sequence is synthesized)
ggggaaagaaaatgaaaaggaagaatggaattattactgagcaaaacagagtacagtagttggcaaagaaagattgaataagatgtgaagcgatgattagttttgaacttaatgagtttg

SEQ ID NO: 237088 - DNA, 120 bp, Artificial Sequence
  ENSG00000120334_29 (sequence is synthesized)
acggaggttggaaatgcaggactgggttgcagctgtaatggtctgaagacagagatttaggagtcatatagaatgattattttcctatgtagaatgaatgattttcagaatctggggcca

SEQ ID NO: 237089 - DNA, 120 bp, Artificial Sequence
  ENSG00000120334_30 (sequence is synthesized)
cctactattggaacatgaggaaaaaaaaagaatcagtaaataaattggaactataaaaagtaaggaggagaaaagcccctaaaaaatggaatgtcagaggaaacaaggtcccagaaagtt

SEQ ID NO: 237090 - DNA, 120 bp, Artificial Sequence
  ENSG00000120334_31 (sequence is synthesized)
tagaggagtaaggatgaacaaacttgatgaacaaagtatttggccatggttttggcaaaaacaatgatcttcgaaagtacagtttctttgtagtgatagatggaagaaagagattgctga

SEQ ID NO: 237091 - DNA, 120 bp, Artificial Sequence
  ENSG00000120334_32 (sequence is synthesized)
agatttctagtaaaatatttattagtaactggaggcaataggtgtagacgacgtttccaggagattggtctcagaaggaatgagacgaattggatttaaacacaaatttttaatgttaga

SEQ ID NO: 237092 - DNA, 120 bp, Artificial Sequence
  ENSG00000120334_33 (sequence is synthesized)
aatactagaatatgcttggcagtgaaagaaaaggatcctgtataggagtgattaaagatgatagagatgtgaagtacagcctggttgtggtggtgcacgcttgtagtcctagctactcga

SEQ ID NO: 237093 - DNA, 90 bp, Artificial Sequence
  ENSG00000120334_34 (sequence is synthesized)
ttgtggtggtgcacgcttgtagtcctgcctgagcccagcaggtggaggctgcagtgatatcaggccactgcactccagcctggacaacag

SEQ ID NO: 237094 - DNA, 120 bp, Artificial Sequence
  ENSG00000120334_35 (sequence is synthesized)
agagcgcgaacccaaacacagatcgccgctggggtccaagcgcccttcaactccgcccgctagtgcccaagattaccgggaaggaattcaacgaatcagtggtgaggtgccgccgccatg

SEQ ID NO: 237095 - DNA, 120 bp, Artificial Sequence
  ENSG00000120337_0 (sequence is synthesized)
catgacattgcatccttcacccatcacttgtgaatttttgttttccacagctctcatttctccaaaaatgtgtttgagccacttggaaaatatgcctttaagccattcaagaactcaagg

SEQ ID NO: 237096 - DNA, 120 bp, Artificial Sequence
  ENSG00000120337_1 (sequence is synthesized)
agctcagagatcatcctggaagctgtggctcttttgctcaatagttatgttgctatttctttgctccttcagttggctaatctttatttttctccaattagagactgctaaggagccctg

SEQ ID NO: 237097 - DNA, 120 bp, Artificial Sequence
  ENSG00000120337_2 (sequence is synthesized)
tatggctaagtttggaccattaccctcaaaatggcaaatggcatcttctgaacctccttgcgtgaataaggtgtctgactggaagctggagatacttcagaatggcttatatttaattta

SEQ ID NO: 237098 - DNA, 120 bp, Artificial Sequence
  ENSG00000120337_3 (sequence is synthesized)
tggccaagtggctcccaatgcaaactacaatgatgtagctccttttgaggtgcggctgtataaaaacaaagacatgatacaaactctaacaaacaaatctaaaatccaaaatgtaggagg

SEQ ID NO: 237099 - DNA, 120 bp, Artificial Sequence
  ENSG00000120337_4 (sequence is synthesized)
gacttatgaattgcatgttggggacaccatagacttgatattcaactctgagcatcaggttctaaaaaataatacatactggggtatcattttactagcaaatccccaattcatctccta

SEQ ID NO: 237100 - DNA, 120 bp, Artificial Sequence
  ENSG00000120337_5 (sequence is synthesized)
gagacttgatttgatctcctcattcccttcagcacatgtagaggtgccagtgggtggattggagggagaagatattcaatttctagagtttgtctgtctacaaaaatcaacacaaacaga

SEQ ID NO: 237101 - DNA, 120 bp, Artificial Sequence
  ENSG00000120337_6 (sequence is synthesized)
actcctctgcacgtgaattttcatctatcatgcctatctgaaagagactcaggggaagagccaaagacttttggttggatctgcagagatacttcattaatccatgataaaacaaatatg

SEQ ID NO: 237102 - DNA, 120 bp, Artificial Sequence
  ENSG00000120337_7 (sequence is synthesized)
gatgacagaggacatgtgcttttcaaagaatctttatctaattcttgaattcatgagtggaaaaatggagttctattcccatggaagatttacctggtatgcaaaaaggatctggggcag

SEQ ID NO: 237103 - DNA, 120 bp, Artificial Sequence
  ENSG00000120337_8 (sequence is synthesized)
actgataggatggccacagatatgcctaccataccctactttagatatggtggtgttagaagataaagaacaatctgagaactattggaatagaggtacaagtggcataaaatggaatgt

SEQ ID NO: 237104 - DNA, 120 bp, Artificial Sequence
  ENSG00000120337_9 (sequence is synthesized)
acgctatctggaaatttctcttggttttatcttcctcaggatgcagggtgctttaaaaagccttatcaaaggagtcattccgaaccctcacgtagagctttgtgagaccttactgttggt

SEQ ID NO: 237105 - DNA, 120 bp, Artificial Sequence
  ENSG00000120337_10 (sequence is synthesized)
gtgtgtgtctaaacattgctaattgtaaagaaagagtaaccattagtaatcattaggtttaaccccagaatggtattatcattactggattatgtcatgtaatgatttagtatttttagc

SEQ ID NO: 237106 - DNA, 120 bp, Artificial Sequence
  ENSG00000120337_11 (sequence is synthesized)
tagctttccacagtttgcaaagtgctttcgtaaaacagttagcaattctatgaagttaattgggcaggcatttgggggaaaattttagtgatgagaatgtgatagcatagcatagccaac

SEQ ID NO: 237107 - DNA, 120 bp, Artificial Sequence
  ENSG00000120337_12 (sequence is synthesized)
tttcctcaactcataggacaagtgactacaagaggcaatgggtagtcccctgcattgcactgtctcagctttagaattgttatttctgctatcgtgttataagactctaaaacttagcga

SEQ ID NO: 237108 - DNA, 120 bp, Artificial Sequence
  ENSG00000120337_13 (sequence is synthesized)
attcacttttcaggaagcatattcccctttagcccaaggtgagcagagtgaagctacaacagatctttcctttaccagcacactttttttttttttcctgcctgaatcagggagatccag

SEQ ID NO: 237109 - DNA, 120 bp, Artificial Sequence
  ENSG00000120337_14 (sequence is synthesized)
gatgctgttcaggccttatcccaaccaaattcccctcttcactttgcagggcccatcttagtcaaatgtgctaacttctaaaataataaatagcactaattcaaaatttttggactctta

SEQ ID NO: 237110 - DNA, 120 bp, Artificial Sequence
  ENSG00000120337_15 (sequence is synthesized)
aattagctacttgcaggttcttgttgaaaggtatataatattacattgtaaacaaatttaaaatatttatggatatttgtgaaaagctgcattatgttaaataatattacatgtaaagct

SEQ ID NO: 237111 - DNA, 120 bp, Artificial Sequence
  ENSG00000120341_0 (sequence is synthesized)
cgctgaaggaaggtgggaagccatcagagcaggaagataaaataactgcacaacttactcaaaacccaggacaaattcagagagtcaaggatggaactttgggctccccagaggctgccc

SEQ ID NO: 237112 - DNA, 120 bp, Artificial Sequence
  ENSG00000120341_1 (sequence is synthesized)
cagacacgagggaaggccacagcaccctcaaaggatccagaccgagggtttcggagagatggacatcatcggcctgtccctcactcttggcacaatggagagaggtttcaccaatggcaa

SEQ ID NO: 237113 - DNA, 120 bp, Artificial Sequence
  ENSG00000120341_2 (sequence is synthesized)
gacaaccgtgggagcccccagccacagcaggagcccagggcagaccatcagcagcagccccattatgcatccaggccaggggactggcatcagcctgtgtctggagttgactattacgaa

SEQ ID NO: 237114 - DNA, 120 bp, Artificial Sequence
  ENSG00000120341_3 (sequence is synthesized)
ggtggttatcgcaatcagttgtattcaaggccaggttatgagaattcatatcagagctatcagtctcccacaatgagggaggaatatgcttatggaagttattactatcatggacaccca

SEQ ID NO: 237115 - DNA, 120 bp, Artificial Sequence
  ENSG00000120341_4 (sequence is synthesized)
cagtggctgcaggaagaaagagtgccaaggcaacggagtccttatatctggcacgaagattaccgagagcaaaagtaccttgatgaacatcattatgaaaaccagcacagtccatttgga

SEQ ID NO: 237116 - DNA, 120 bp, Artificial Sequence
  ENSG00000120341_5 (sequence is synthesized)
acaaatagtgagacccacttccaatctaacagtaggaacccttgtaaagacagccctgcttccaactctggacaggagtggccgggggagctgtttccagggagcctgcttgctgaggcc

SEQ ID NO: 237117 - DNA, 120 bp, Artificial Sequence
  ENSG00000120341_6 (sequence is synthesized)
cagaaaaataagccatcattggctagtgagtccaaccttctccagcagcgtgagtctggtctcagctccagcagctatgagctcagtcagtacatcagagatgccccggagcgggatgat

SEQ ID NO: 237118 - DNA, 120 bp, Artificial Sequence
  ENSG00000120341_7 (sequence is synthesized)
cccccagcttcagcagcttggagtccagttcaggctgatgtctcctcagctggtcccaaagcacccatgaagttctacatccctcatgttcctgtgagtttcgggccaggaggtcagctg

SEQ ID NO: 237119 - DNA, 120 bp, Artificial Sequence
  ENSG00000120341_8 (sequence is synthesized)
gtgcatgtaggtcccagctctcccactgacgggcaagcagcccttgttgaactgcacagcatggaggttattcttaatgattccgaagagcaagaggagatgagaagtttctcaggaccc

SEQ ID NO: 237120 - DNA, 120 bp, Artificial Sequence
  ENSG00000120341_9 (sequence is synthesized)
ttgattagggaagatgtacataaggtggatattatgacgttttgccagcagaaagcagctcagagctgcaaatctgagacactggggagcagagactcagctctactgtggcagctcttg

SEQ ID NO: 237121 - DNA, 120 bp, Artificial Sequence
  ENSG00000120341_10 (sequence is synthesized)
gttctcctttgtcgccagaatgggtccatggtggggtctgacatcgctgagctgctaatgcaagactgcaagaagctggagaagtacaagcggcagccccctgtggccaacctcatcaac

SEQ ID NO: 237122 - DNA, 120 bp, Artificial Sequence
  ENSG00000120341_11 (sequence is synthesized)
ctgaccgatgaggactggccagtgctgagctctgggaccccgaacctgctcacgggagagatcccccccagtgtggagacacctgcgcagatcgtggagaaattcactaggctgctctac

SEQ ID NO: 237123 - DNA, 120 bp, Artificial Sequence
  ENSG00000120341_12 (sequence is synthesized)
tatggaaggaagaaggaagccttggagtgggccatgaagaaccacttgtggggccatgctttgttcctgtccagcaagatggacccacagacctacagctgggtcatgagtggcttcacc

SEQ ID NO: 237124 - DNA, 120 bp, Artificial Sequence
  ENSG00000120341_13 (sequence is synthesized)
agcacgctggcgctcaatgacccactgcagaccctcttccagctcatgtcggggaggattccacaggcagccacgtgttgtggagaaaagcagtggggagactggaggcctcacttggct

SEQ ID NO: 237125 - DNA, 120 bp, Artificial Sequence
  ENSG00000120341_14 (sequence is synthesized)
gtgattctgtcgaatcaggctggggacccagagctgtatcagcgtgcgattgttgccattggggacaccctggctgggaaggggcttgtggaggcagctcacttctgctatctcatggct

SEQ ID NO: 237126 - DNA, 120 bp, Artificial Sequence
  ENSG00000120341_15 (sequence is synthesized)
cacgtgccctttggccactacaccgtgaagacagaccatctggtcttgctgggcagcagccacagtcaagagtttttgaaatttgcaacaactgaggcaatccagaggacggaaatcttc

SEQ ID NO: 237127 - DNA, 120 bp, Artificial Sequence
  ENSG00000120341_16 (sequence is synthesized)
ccaaatccttcatcccttctttccaggtgtataagctcctttatgcttcccgtctggcagattatggcctcgtgtcccaggctttgcattactgcgaagccattggtgcagctgtcttga

SEQ ID NO: 237128 - DNA, 120 bp, Artificial Sequence
  ENSG00000120341_17 (sequence is synthesized)
gccagggagagagcagtcaccctgtgctattagtggaactcatcaagctagcagagaaactgaagctgtcagatcctctggttttagaaagacgcagtggagacagggacctggagccag

SEQ ID NO: 237129 - DNA, 120 bp, Artificial Sequence
  ENSG00000120341_18 (sequence is synthesized)
attggctagcgcaacttcggaggcagctggagcaaaaggtagcaggagacattggggatcctcatcctactcgctcagatatttcgggagccggaggaacaacaacagaaaacactttct

SEQ ID NO: 237130 - DNA, 120 bp, Artificial Sequence
  ENSG00000120341_19 (sequence is synthesized)
accaggacttttctggatgtcaaggctactctgaagcccctgggtaccgctcagctctgtggctgacacctgagcagacctgcctgctccagcccagcccacagcagccctttcccctcc

SEQ ID NO: 237131 - DNA, 120 bp, Artificial Sequence
  ENSG00000120341_20 (sequence is synthesized)
agccgggctcctacccagcaggagggggtgcagggcagacagggacaccgaggcctttttactcagttcctgagacccatctaccagggactggcagcagcgtggcagtgacagaggcca

SEQ ID NO: 237132 - DNA, 120 bp, Artificial Sequence
  ENSG00000120341_21 (sequence is synthesized)
ctggaggaacagtctgggaggaaatgctgcagacacacctgggccctggagagaacacagtgtctcaagaaacttcccagcctcctgatggccaagaggtcatttccaaaccacagacac

SEQ ID NO: 237133 - DNA, 120 bp, Artificial Sequence
  ENSG00000120341_22 (sequence is synthesized)
cattggctgctagaccacgaagtatttctgagagttccgccagttcagccaaggaggatgagaaggagtcctctgatgaggctgataaaaactctccccgaaatactgcccagagaggca

SEQ ID NO: 237134 - DNA, 120 bp, Artificial Sequence
  ENSG00000120341_23 (sequence is synthesized)
agctcggagatgggaaggagcatacaaagagctcagggtttggctggttcagctggtttcgatcgaagcccaccaagaacgcatcccccgctggagacgaggactcctcagacagccctg

SEQ ID NO: 237135 - DNA, 120 bp, Artificial Sequence
  ENSG00000120341_24 (sequence is synthesized)
actctgaggagacccccagagcatcttctccccaccaggctggcctgggcctctcactgacaccttcccctgagtccccacctctgccggatgttagtgccttctccaggggcagaggtg

SEQ ID NO: 237136 - DNA, 120 bp, Artificial Sequence
  ENSG00000120341_25 (sequence is synthesized)
ggggtgaaggccgaggatccgcatccagcgggggagcagctgcgggcgctggggttggaggcttgtctggaccagagagtgtttcctttgagctctgctccaaccctggtgttcttcttc

SEQ ID NO: 237137 - DNA, 120 bp, Artificial Sequence
  ENSG00000120341_26 (sequence is synthesized)
ctccacctgccttaaaaggggctgttcctctttacaacccatctcaggtgcctcagctgcccacggccactagcctgaatcggccaaatcgcctagctcagcgtcgctatcccacccagc

SEQ ID NO: 237138 - DNA, 120 bp, Artificial Sequence
  ENSG00000120341_27 (sequence is synthesized)
catgctgagaataaacacacgtcccaggctcatctcccaggactgaaactttcttgctctctttttctcaatctcccagcccctctctaccatattgggaccctcaagaggtttgtgcta

SEQ ID NO: 237139 - DNA, 120 bp, Artificial Sequence
  ENSG00000120341_28 (sequence is synthesized)
gcccgatgcctccaccgggcacttagaaggcaagaggacaggatctctcaagacacagcacaattcagtctcttaagattagcttcacaatgatggaaattatttcatcaggtggaaagt

SEQ ID NO: 237140 - DNA, 120 bp, Artificial Sequence
  ENSG00000120341_29 (sequence is synthesized)
ctgggtctaatagcagactgcacatgagcagagtgacatggtggtggcacttatggtggtggcttgagagccttggggaaattagggccctaacagctagaatcaaagatgataccgcag

SEQ ID NO: 237141 - DNA, 120 bp, Artificial Sequence
  ENSG00000120341_30 (sequence is synthesized)
ggccctgtagcaagaaatgggaagcagggggaggggcaggggctcagaacaatattctagaccaactttgactacttcctgtcttagtaatagaccaatacatggctctatttagcaaag

SEQ ID NO: 237142 - DNA, 120 bp, Artificial Sequence
  ENSG00000120341_31 (sequence is synthesized)
tttttatactgaaacttgattattgctgccctttataatttcctcttcaatgatatttcagcagtttccctcttggtcctagttttgtgcacatttttttgaatgtggttcagattaatt

SEQ ID NO: 237143 - DNA, 120 bp, Artificial Sequence
  ENSG00000120341_32 (sequence is synthesized)
atatttctctcactttcttagctggtcctattttttcacattctggcatgtggctatcaagttagattgctgtaggcatcatattgtcatggtaactactgaacctaatgatgcagatgg

SEQ ID NO: 237144 - DNA, 120 bp, Artificial Sequence
  ENSG00000120341_33 (sequence is synthesized)
cctgggagaaaggaaacagtaaggacattttccaagggactgttttagcccttgttgggttttatggatccatttttcattttctcatgtgaatttcagctaccgccggctcccttattt

SEQ ID NO: 237145 - DNA, 120 bp, Artificial Sequence
  ENSG00000120341_34 (sequence is synthesized)
gggattgttatctgtgcaggtctgtgcaaggagatgccccgtgggccccacattacagcattggcgggggcctcaggccacaggtcctcctctgcaaagaggtgggctgatgcctttgtg

SEQ ID NO: 237146 - DNA, 120 bp, Artificial Sequence
  ENSG00000120341_35 (sequence is synthesized)
tggtattgtgccctttggccactgggtggcaccctggctccacaagctaactttgttcctttaaaaaaacaacattttacatgtggaggcttgtgggtccgtgttaggcagccctgggcc

SEQ ID NO: 237147 - DNA, 120 bp, Artificial Sequence
  ENSG00000120341_36 (sequence is synthesized)
tgttctgagagcctacccaggcaaaactggaaaatggaagaagtttatgtttagtccctctttggggccctagcatccctacaatgacttggtgcacaagctacttagagtcccactggt

SEQ ID NO: 237148 - DNA, 120 bp, Artificial Sequence
  ENSG00000120341_37 (sequence is synthesized)
gacattctctgttggccatagcattaggcttttcctgcaggaggccctcaatcagctctcagtgaatgaatgcatggacagaacgatttgctccctagaggccctccctgttctgtatct

SEQ ID NO: 237149 - DNA, 120 bp, Artificial Sequence
  ENSG00000120341_38 (sequence is synthesized)
ctctatccccctccccatacgtgttaagagtcactaagctcttacgttgtgccaggcattttctttgcactatttcctttaattattacacatttaccctatgaagaagtgaagtgaagc

SEQ ID NO: 237150 - DNA, 120 bp, Artificial Sequence
  ENSG00000120341_39 (sequence is synthesized)
aaagattttaatcgtcacttatggaggaggaaaaccaaggcacagggagatgaaataacttgtctcagatggtacagtgagggtgtgggtgagttggattcggaatccaggcagtcagcc

SEQ ID NO: 237151 - DNA, 120 bp, Artificial Sequence
  ENSG00000120341_40 (sequence is synthesized)
tgcaaagcccttttaactgttgcaccacactgcctaccactgaggcagtgtacccagctcattgcctgttccttccaggttcctggtctctgatagcacatggctagcttgtcaaagaat

SEQ ID NO: 237152 - DNA, 120 bp, Artificial Sequence
  ENSG00000120341_41 (sequence is synthesized)
cccttctgtgccaaatgtacaataagtgtgtatgggctaatatgtctcccctcctatgtttacgttggtttatgttgaatgaggaaattcttggaaataaagtcctacccccaggaataa

SEQ ID NO: 237153 - DNA, 120 bp, Artificial Sequence
  ENSG00000120341_42 (sequence is synthesized)
acagtttacagtatctgccagctgtgagtaacagcaggctgtcatgatgggatatagcagaagcagcagcagcaactcctgatttaggggcaatcgatgaagataaaataactgcacaac

SEQ ID NO: 237154 - DNA, 120 bp, Artificial Sequence
  ENSG00000120341_43 (sequence is synthesized)
ttagtaggacagccttagggagagattgtggggaaaacaccattgatgcggggctttgtacatttccaccacgctgcttactcttttttgccccctggtggaattctgctgcctctgcat

SEQ ID NO: 237155 - DNA, 120 bp, Artificial Sequence
  ENSG00000120341_44 (sequence is synthesized)
cgtcctagctgggccacttggcttgattttcttattcttaaagtggcagtaggaactagacttcatagggttcctgtgaagattaagaggatgtgtgtgaatgggctttgtagagccaga

SEQ ID NO: 237156 - DNA, 120 bp, Artificial Sequence
  ENSG00000120341_45 (sequence is synthesized)
agaaaatgtatgcataaatgttttgcacctggaaggccctcagtaaatgctgttccgcttttttccttaaaaggctgctgctccttcaatttggtatgctgacatccagtggtggtgctg

SEQ ID NO: 237157 - DNA, 120 bp, Artificial Sequence
  ENSG00000120341_46 (sequence is synthesized)
tggcattagtgtgtgagtttcacaggagccacactgcttagtcttgcatcctggctcatccgtagctcaccctgtaactttgggcaaggttacctcactgtcttgtatttcagttttctc

SEQ ID NO: 237158 - DNA, 120 bp, Artificial Sequence
  ENSG00000120341_47 (sequence is synthesized)
atctataaaattaagatgataataatcatagtacctgccctacagggacattgcaaaaattaaatgagttaggcccttagaaatgggcctggtatatgctaggtacagttggcccttgaa

SEQ ID NO: 237159 - DNA, 86 bp, Artificial Sequence
  ENSG00000120341_48 (sequence is synthesized)
ggaaattcttcctgcttctccatgctcttgatttggaggcaggaaaggactgtgaatgttgcaatggaatgcgtttgaaggcaagg

SEQ ID NO: 237160 - DNA, 120 bp, Artificial Sequence
  ENSG00000120341_49 (sequence is synthesized)
ggactgtgaatgttgcaatggaatgcgtttgaaggcaagggccccagtctccactcctagcctctttcacttccccttcctcgcaattactctttattgccaagagaagattacgcagaa

SEQ ID NO: 237161 - DNA, 120 bp, Artificial Sequence
  ENSG00000120341_50 (sequence is synthesized)
gacagcctctccatgaagcatcttccaagtggctgatactacgaagactccataaagtcccacttaccagcacaggatggaacagatcctatgtcaatacatccagacttttggctagaa

SEQ ID NO: 237162 - DNA, 120 bp, Artificial Sequence
  ENSG00000120341_51 (sequence is synthesized)
cctttcataagaggggaagaatgagtgcctgatattgttaatacctccctttctacctcaggcctttgcaaattgatgttcagagggtcactggagtgagagggaggaggggggcgtctt

SEQ ID NO: 237163 - DNA, 120 bp, Artificial Sequence
  ENSG00000120341_52 (sequence is synthesized)
ggaaatttccatttctcttttcaaacccaaaataggaatgactcttgctgtttgtcagatttgctgaaaattgctcctcacaaagaacatttttttttgtacatgtaattgtaaatacag

SEQ ID NO: 237164 - DNA, 120 bp, Artificial Sequence
  ENSG00000120341_53 (sequence is synthesized)
gtttagtacgttaatgttctatagttctgatattgataataattaaacccagataattttatagcaaatgcttgtctctggctgatttttacagaggaagaaagtacattggtggtctct

SEQ ID NO: 237165 - DNA, 120 bp, Artificial Sequence
  ENSG00000120341_54 (sequence is synthesized)
tccctgaagtctttctaataatggttttattgtgtgatcaagtgtgaatagctggaaagagccctttgttaatgaggaatctagggacagatcctcttaacttctaagtctactctaatt

SEQ ID NO: 237166 - DNA, 120 bp, Artificial Sequence
  ENSG00000120341_55 (sequence is synthesized)
ttattatttttccaatttaaaaaatatgaacaaaaagctcctctgatgcaagtcagtcactttactaactgaactaagtgttgtatattttgttccataaaaagttgtttttaacctctt

SEQ ID NO: 237167 - DNA, 120 bp, Artificial Sequence
  ENSG00000120341_56 (sequence is synthesized)
aatcatgttttttctctagcttactttaagaatacagtgtataatacatataacatatacaatatgtgttaattgactgtttatattatcaataaggcttccagtcaacagtgggctatc

SEQ ID NO: 237168 - DNA, 120 bp, Artificial Sequence
  ENSG00000120341_57 (sequence is synthesized)
agcagctgagtttttggggagtcaaaaatcatatgtggatttttgactttgcagggctcagtgcccatcatgtccacattgttcaaagctcaactgtactttattacagtgtcttttatt

SEQ ID NO: 237169 - DNA, 120 bp, Artificial Sequence
  ENSG00000120341_58 (sequence is synthesized)
gttaatttgcaatctaataagatctggactgttttttttgggcctaccagatctgactatagattttttgttcttgatacctgtataggacaggaatgatgattaaaacatacttctcaa

SEQ ID NO: 237170 - DNA, 120 bp, Artificial Sequence
  ENSG00000120370_0 (sequence is synthesized)
gcggccggggaaaaacccggatgagctgggcagcagtgttggcagtcgcggctgcgagatttgggcacttttgggggtgccggtggcccgggccgatggcgcaaggttgggcaggattct

SEQ ID NO: 237171 - DNA, 120 bp, Artificial Sequence
  ENSG00000120370_1 (sequence is synthesized)
ctgaggaggaactgaggagactaaagcagactaaagatccatttgaaccacagcgacgtctccccgcgaagaaaagtcgacaacaacttcagcgagaaaaagcccttgtagagcaaagcc

SEQ ID NO: 237172 - DNA, 120 bp, Artificial Sequence
  ENSG00000120370_2 (sequence is synthesized)
aaaaacttgggcttcaagatggatcaacctcattacttccagagcagctgctttcagcaccaaaacagagagttaacgttcaaaaaccacctttttcttcccctactcttccgagtcatt

SEQ ID NO: 237173 - DNA, 120 bp, Artificial Sequence
  ENSG00000120370_3 (sequence is synthesized)
tcactctcacctcccccgttggtgatggacaaccacagggcattgaaagtcagccaaaggaactgggacttgagaattcccatgatggtcacaacaatgttgagattctacctccaaagc

SEQ ID NO: 237174 - DNA, 120 bp, Artificial Sequence
  ENSG00000120370_4 (sequence is synthesized)
cagattgcaaattggagaaaaagaaagtggaattgcaagaaaaatctcgttgggaagtcctccaacaagaacaacggctaatggaagagaaaaataaacgtaaaaaagctcttttggcta

SEQ ID NO: 237175 - DNA, 120 bp, Artificial Sequence
  ENSG00000120370_5 (sequence is synthesized)
aagctattgcagaaagatccaaaagaactcaggcagagaccatgaaactaaagcggatccagaaggagttgcaggctttagatgacatggtgtcagctgacattggaattctcaggaacc

SEQ ID NO: 237176 - DNA, 120 bp, Artificial Sequence
  ENSG00000120370_6 (sequence is synthesized)
ggattgatcaggccagcttagactattcatacgctcggaagcggtttgacagggctgaagcagagtacattgcagcaaagctagatatacagcgcaagactgagataaaagagcaactca

SEQ ID NO: 237177 - DNA, 120 bp, Artificial Sequence
  ENSG00000120370_7 (sequence is synthesized)
ctgaacacctttgtacgatcatacagcaaaatgagctccgaaaggccaagaagttggaggagttgatgcaacaactagatgtagaagccgatgaagagactttggagcttgaggtggagg

SEQ ID NO: 237178 - DNA, 120 bp, Artificial Sequence
  ENSG00000120370_8 (sequence is synthesized)
tcgagagattgctacacgaacaagaagtagaatcaaggagaccagtggttcgtttagagaggccatttcagcctgcggaggagagtgtgacattagaatttgctaaagagaacagaaagt

SEQ ID NO: 237179 - DNA, 120 bp, Artificial Sequence
  ENSG00000120370_9 (sequence is synthesized)
gatgaccagtgtggaaattccagtagcatcccctttcttagtccaaactgcccaaatcaagaaggtaatgacatttcagctgctttggccacatgaagttctggtattcttttgagctaa

SEQ ID NO: 237180 - DNA, 120 bp, Artificial Sequence
  ENSG00000120370_10 (sequence is synthesized)
tatggtattgagtaaagtatactttttgcagtagatcatgccctgacctccaataaaaacctctttaaaacaatgctgatttttgaattcatgattagttttagtaaattaataggtttg

SEQ ID NO: 237181 - DNA, 120 bp, Artificial Sequence
  ENSG00000120370_11 (sequence is synthesized)
gccattctaaaatccaaaattatgataactgtatttctaggggtatgtttcaccttgattttggcccggttctttcagtgttccgtttaccctttttactgaaagtaagtgacttaaaag

SEQ ID NO: 237182 - DNA, 120 bp, Artificial Sequence
  ENSG00000120370_12 (sequence is synthesized)
gatggaagaaaaactacatggttggagtgtttttagatcagataaatatagaaaagtaaaatggaaaatgatactcaatacctagttaaactcatttcacttctcctgggagacgtatta

SEQ ID NO: 237183 - DNA, 120 bp, Artificial Sequence
  ENSG00000120370_13 (sequence is synthesized)
agactggaagtcctattttatttaatcagtatcagtaaaaagacaaaaattacagtgtgaacaagagaaaaacaggaatagaagaaaaaagttgcaggttgaattatctatctggatatt

SEQ ID NO: 237184 - DNA, 120 bp, Artificial Sequence
  ENSG00000120370_14 (sequence is synthesized)
actagagttgtaaaacacaacttggaaactggaatttatgtgaagaaccaaacaacttaaaccagcatcacttttgtcttcaatttgccttccagtgattttagtttacaacctgcgttt

SEQ ID NO: 237185 - DNA, 120 bp, Artificial Sequence
  ENSG00000120370_15 (sequence is synthesized)
tgttatttgaaacacacacacttatatataaacacatgtaattttactattttattgtctttcctttaatcgatgaattgattaaatttagacaattaaaacatttctaaagtgagactg

SEQ ID NO: 237186 - DNA, 120 bp, Artificial Sequence
  ENSG00000120370_16 (sequence is synthesized)
aaaataatatagaaaatctcattgctacttgtgattatcaaaaaaagtatgtattttctttctaaagttatctataaatatgtttttgatatgttggacatgaattaccctgtcatgaag

SEQ ID NO: 237187 - DNA, 120 bp, Artificial Sequence
  ENSG00000120370_17 (sequence is synthesized)
cgtttaaattgttaaaatgctgattttcttattagtttgttaattgcctgttactagtacttgaccaatacattgtgctatatgtaaatgtgtaaataaatattgtaattttctcacaaa

SEQ ID NO: 237188 - DNA, 120 bp, Artificial Sequence
  ENSG00000120370_18 (sequence is synthesized)
attgatcaggccagcttagactattcatacgctcggtgagttggggaaattgaatctgaacaaggagtatgatttaattaatgtttattgccagctgttccaggggcttttatgtatatc

SEQ ID NO: 237189 - DNA, 120 bp, Artificial Sequence
  ENSG00000120370_19 (sequence is synthesized)
aaccccattcagtgctgtatttattcttcttttgtgctaattcaagtgtctcctcttcagtgaagtcttccttaactctgccctactagttaaccttgttcgtgtgccattagagcagtt

SEQ ID NO: 237190 - DNA, 120 bp, Artificial Sequence
  ENSG00000120370_20 (sequence is synthesized)
cttgcattatttatttacgttttagtctttgctgcgaaaccctcagctatttaatgtttggaagtgtttttgctcatctttcagcatctagcaaagtaaatatctgagtggtttcgccaa

SEQ ID NO: 237191 - DNA, 120 bp, Artificial Sequence
  ENSG00000120370_21 (sequence is synthesized)
aactgttactctgacaccaagtctgtgttctttccattaaaatttttgatatctgatatagtcctataggattgaagtctagtcctcactttagctttcatcagagtaagaggatctagt

SEQ ID NO: 237192 - DNA, 120 bp, Artificial Sequence
  ENSG00000120370_22 (sequence is synthesized)
ttagtttttaaaagcttatgaatattttaagcatatcctctgtcttggaaatttgaaatattttctctttttttttcctttcaattatactctgtatgaaatggtttaatatatgtttcc

SEQ ID NO: 237193 - DNA, 120 bp, Artificial Sequence
  ENSG00000120370_23 (sequence is synthesized)
ttggtttcaaccattggcattttttaaaagagaaaaaataccatggagtatttttaaaatgaactaacacatgtaatgaattacatggactttgcagacagataaaagggcaaaaaaata

SEQ ID NO: 237194 - DNA, 120 bp, Artificial Sequence
  ENSG00000120370_24 (sequence is synthesized)
tgtccaatttcagggttttcagccctttcaacattgctttaatcatcctggtttgtcttttttcacaagggaatgctgtgttaatgactcagttttctatcttactctgttacactagaa

SEQ ID NO: 237195 - DNA, 120 bp, Artificial Sequence
  ENSG00000120370_25 (sequence is synthesized)
atgaatcagaatgcctcattaggccagggtaaaccacaacatcagaatgtttatataacaatttattaaagcggaaatgcttgattgtggtttttaataaactgttgagtgtttaagaaa

SEQ ID NO: 237196 - DNA, 120 bp, Artificial Sequence
  ENSG00000120370_26 (sequence is synthesized)
gtttttcccctagactttcaagatagagaatggggtaggagaaccactagaattatcaacgtttaatgttaattttttattttcttagaggaattataattatttgctgcccacacaaag

SEQ ID NO: 237197 - DNA, 120 bp, Artificial Sequence
  ENSG00000120370_27 (sequence is synthesized)
ctaattgttttctgctgatatataaaaaatacaagacaaaagaaaagtcaacaaaagacatgaatagatatttcctagaaaaggaaatatgaagagatgctcatcaccaccaaggagcag

SEQ ID NO: 237198 - DNA, 120 bp, Artificial Sequence
  ENSG00000120370_28 (sequence is synthesized)
gcaaattggagaaaaagaaagtggaattgttagtaagtctatgtgaaaagtccatgagacttttcatttaacccgttttttcccaatgggctttaaggaaatataatttgtttattttaa

SEQ ID NO: 237199 - DNA, 120 bp, Artificial Sequence
  ENSG00000120370_29 (sequence is synthesized)
aaagcagactaaagggtacaagtgccctggcctctggtctgactccagtagactcatgaggagacaaaccacaaagttatgtgatagtagatattgcaagaacttgcttcagagacaaga

SEQ ID NO: 237200 - DNA, 120 bp, Artificial Sequence
  ENSG00000120436_0 (sequence is synthesized)
ggatcccagcaagcgtcctttatgtatgaaaaggaagaagaaaatttccccatgaaacatattcaaagtagagaacaatctttttgattccattgttattttaattgtatacagacatag

SEQ ID NO: 237201 - DNA, 120 bp, Artificial Sequence
  ENSG00000120436_1 (sequence is synthesized)
gagtctttgcataattagacttttccttctttcaggactgtggatgcaaagccctggacccccagacgttataggacattactcctcagctttgcagcccggtgatgtgaagcgaaacac

SEQ ID NO: 237202 - DNA, 120 bp, Artificial Sequence
  ENSG00000120436_2 (sequence is synthesized)
catttccccttttttatggcggaagaaaacagaacacaactgcaaaggggcttttccctcccctgctcatcctctttccccaaatgaattttggtttgctgtggactctattctgctgag

SEQ ID NO: 237203 - DNA, 120 bp, Artificial Sequence
  ENSG00000120436_3 (sequence is synthesized)
gaactgttcttgttgggcaaatgtagatcttgtctactctgtggcaggaaaaggccttttctttcattttgtaagaaagagcacagagttcctcctgtacctgctccagctgtgcctgca

SEQ ID NO: 237204 - DNA, 120 bp, Artificial Sequence
  ENSG00000120436_4 (sequence is synthesized)
gcccctcacggccgggtgatgccattcccaaactgctcagcccccagcactgtggtggccacagctgtgggtgtcttgctggggctggagtgtgggctgggtctgctgggcaacgcggtg

SEQ ID NO: 237205 - DNA, 120 bp, Artificial Sequence
  ENSG00000120436_5 (sequence is synthesized)
gcgctgtggaccttcctgttccgggtcagggtgtggaagccgtacgctgtctacctgctcaacctggccctggctgacctgctgttggctgcgtgcctgcctttcctggccgccttctac

SEQ ID NO: 237206 - DNA, 120 bp, Artificial Sequence
  ENSG00000120436_6 (sequence is synthesized)
ctgagcctccaggcttggcatctgggccgtgtgggctgctgggccctgcacttcctgctggacctcagccgcagcgtggggatggccttcctggccgccgtggctttggaccggtacctc

SEQ ID NO: 237207 - DNA, 120 bp, Artificial Sequence
  ENSG00000120436_7 (sequence is synthesized)
cgtgtggtccaccctcggcttaaggtcaacctgctgtctcctcaggcggccctgggggtctcgggcctcgtctggctcctgatggtcgccctcacctgcccgggcttgctcatctctgag

SEQ ID NO: 237208 - DNA, 120 bp, Artificial Sequence
  ENSG00000120436_8 (sequence is synthesized)
ggtgccacagtttctactccagggcagacggctccttcagcatcatctggcaggaagcactctcctgccttcagtttgtcctcccctttggcctcatcgtgttctgcaatgcaggcatca

SEQ ID NO: 237209 - DNA, 120 bp, Artificial Sequence
  ENSG00000120436_9 (sequence is synthesized)
tcagggctctccagaaaagactccgggagcctgagaaacagcccaagcttcagcgggcccaggcactggtcaccttggtggtggtgctgtttgctctgtgctttctgccctgcttcctgg

SEQ ID NO: 237210 - DNA, 120 bp, Artificial Sequence
  ENSG00000120436_10 (sequence is synthesized)
ccagagtcctgatgcacatcttccagaatctggggagctgcagggccctttgtgcagtggctcatacctcggatgtcacgggcagcctcacctacctgcacagtgtgctcaaccccgtgg

SEQ ID NO: 237211 - DNA, 120 bp, Artificial Sequence
  ENSG00000120436_11 (sequence is synthesized)
tatactgcttctccagccccaccttcaggagctcctatcggagggtcttccacaccctccgaggcaaagggcaggcagcagagcccccagatttcaaccccagagactcctattcctgac

SEQ ID NO: 237212 - DNA, 120 bp, Artificial Sequence
  ENSG00000120436_12 (sequence is synthesized)
aacagccagcgtcctcaacgcccgtgtttatggaactacctgcgacctaaataataattactcctactttgggattctggaagaagaagaagtcttaagactgcaatacaaggatcagag

SEQ ID NO: 237213 - DNA, 120 bp, Artificial Sequence
  ENSG00000120436_13 (sequence is synthesized)
cataaacatgggcacagttgctgcaggtgtggtcttatactttgttgaccagggtggtcctctgtgattttaccttgtagagtggcaaatcaaaatgaacaagctagaacctcctcctac

SEQ ID NO: 237214 - DNA, 120 bp, Artificial Sequence
  ENSG00000120436_14 (sequence is synthesized)
ccaactatgatgcagattcagttgctgaactgaaaagtcgggcagctactccatctccacacttgaagaaatgtaatttgctaaatcagtgaaggaagagaagaaagccgggtgatggca

SEQ ID NO: 237215 - DNA, 120 bp, Artificial Sequence
  ENSG00000120436_15 (sequence is synthesized)
tctttccaactcttacttggtctcagcaagtcattttcatttattatgcttcagttttaaatacaaaaaaaaaactatgttttcttcccacctgctgtgcagactggggatgaccgacat

SEQ ID NO: 237216 - DNA, 120 bp, Artificial Sequence
  ENSG00000120436_16 (sequence is synthesized)
cagaaagtgccctggttctaaaaagagactctgctgtatataaggtactgtcgtacatgctagcctttatttggaacataacatttttgttttcataaaattttgcttcatttttctaga

SEQ ID NO: 237217 - DNA, 120 bp, Artificial Sequence
  ENSG00000120437_0 (sequence is synthesized)
agcttgcaggcagcgcagggcagacggcggcaggagaagcaagatgaatgcaggctcagatcctgtggtcatcgtctcggcggcgcggaccatcataggttccttcaatggtgccttagc

SEQ ID NO: 237218 - DNA, 120 bp, Artificial Sequence
  ENSG00000120437_1 (sequence is synthesized)
tgctgttcctgtccaggacctgggctccactgtcatcaaagaagtcttgaagagggccactgtggctccggaagatgtgtctgaggtcatctttggacatgtcttggcagcaggctgtgg

SEQ ID NO: 237219 - DNA, 120 bp, Artificial Sequence
  ENSG00000120437_2 (sequence is synthesized)
gcagaatcctgttagacaagccagtgtgggtgcaggaattccctactctgttccagcatggagctgccagatgatctgtgggtcaggcctaaaagctgtgtgccttgcagtccagtcaat

SEQ ID NO: 237220 - DNA, 120 bp, Artificial Sequence
  ENSG00000120437_3 (sequence is synthesized)
agggataggagactccagcattgtggttgcaggaggcatggaaaatatgagcaaggctcctcacttggcttacttgagaacaggagtaaagataggtgagatgccactgactgacagtat

SEQ ID NO: 237221 - DNA, 120 bp, Artificial Sequence
  ENSG00000120437_4 (sequence is synthesized)
actctgtgatggtcttacagatgcatttcacaactgtcatatgggtattacagctgaaaatgtagccaaaaaatggcaagtgagtagagaagatcaggacaaggttgcagttctgtccca

SEQ ID NO: 237222 - DNA, 120 bp, Artificial Sequence
  ENSG00000120437_5 (sequence is synthesized)
gaacaggacagagaatgcacagaaagctggccattttgacaaagagattgtaccagttttggtgtcaactagaaaaggtcttattgaagttaaaacagatgagtttcctcgccatgggag

SEQ ID NO: 237223 - DNA, 120 bp, Artificial Sequence
  ENSG00000120437_6 (sequence is synthesized)
gaataaatgatggtgctgcagctgtcgttcttatgaagaagtcagaagctgataaacgtgggcttacacctttagcacggatagtttcctggtcccaagtgggtgtggagccttccatta

SEQ ID NO: 237224 - DNA, 120 bp, Artificial Sequence
  ENSG00000120437_7 (sequence is synthesized)
tgggaataggaccaattccagccataaagcaagctgttacaaaagcaggttggtcactggaagatgttgacatatttgaaatcaatgaagcctttgcagctgtctctgctgcaatagtta

SEQ ID NO: 237225 - DNA, 120 bp, Artificial Sequence
  ENSG00000120437_8 (sequence is synthesized)
aagaacttggattaaacccagagaaggtcaatattgaaggaggggctatagccttgggccaccctcttggagcatctggctgtcgaattcttgtgaccctgttacacacactggagagaa

SEQ ID NO: 237226 - DNA, 120 bp, Artificial Sequence
  ENSG00000120437_9 (sequence is synthesized)
tgggcagaagtcgtggtgttgcagccctgtgcattgggggtgggatgggaatagcaatgtgtgttcagagagaatgaattgcttaaactttgaacaacctcaatttctttttaaactaat

SEQ ID NO: 237227 - DNA, 120 bp, Artificial Sequence
  ENSG00000120437_10 (sequence is synthesized)
aaagtactaggttgcaatatgtgaaatcagaggaccaaagtacagatggaaaccatttcctacatcacaaaaacccaagtttacagcttgtactttactttaatgtgtaatactcaactc

SEQ ID NO: 237228 - DNA, 120 bp, Artificial Sequence
  ENSG00000120437_11 (sequence is synthesized)
aaggtacaagacaattgcatttaacattgttataaataaaaggaacatcagatcaatcattaagggctccagagtgaacagcatcttcataacttccatgtttatcatctttactttctg

SEQ ID NO: 237229 - DNA, 120 bp, Artificial Sequence
  ENSG00000120437_12 (sequence is synthesized)
ggggcggaactgctaggtggtctgagcccggctttgggctggggtcgggctgtcacacaatggctagaagtcgtgacttcgtctccttcgtgccgcatggttttcaacgcccttgacccg

SEQ ID NO: 237230 - DNA, 120 bp, Artificial Sequence
  ENSG00000120437_13 (sequence is synthesized)
ccggttccttttgtttgggaagcatggggtcgcatccagtccttcggatttggggaaatagaagggctacagcggcgtccctaggccgttctggaggtcgcctgtccagccctcggctgc

SEQ ID NO: 237231 - DNA, 120 bp, Artificial Sequence
  ENSG00000120437_14 (sequence is synthesized)
gtaccagttttggtgtcaactagaaaaggtgagtatatcatagtggtttaaacatcaacctatttataggtaagagtaacatctaaaagagtaatacataggaatctttagaaattatat

SEQ ID NO: 237232 - DNA, 120 bp, Artificial Sequence
  ENSG00000120437_15 (sequence is synthesized)
cttagttatgtttttcaggttgcaaatatatgtcctggatacatgaatgtggggagggggtatgctgggtttacaggacacggtaacatgggacctatgtcagcactcaagcactcttgg

SEQ ID NO: 237233 - DNA, 120 bp, Artificial Sequence
  ENSG00000120437_16 (sequence is synthesized)
ttccagagcgtccatgaccactgtgcacacacagcaggtttcatgagaagctggagcactggctcatggttgttaggaggcaccagctgacctgtttcctgtataggctcaacctcctca

SEQ ID NO: 237234 - DNA, 120 bp, Artificial Sequence
  ENSG00000120437_17 (sequence is synthesized)
gaagtggacacccattacttctcgctgtttctgtgtgatctccatttcacatttctaaagggtggatcttttggggtcactcgctattttctaatacagaatgctcccgtcaagctccct

SEQ ID NO: 237235 - DNA, 120 bp, Artificial Sequence
  ENSG00000120437_18 (sequence is synthesized)
tattgataactgatatctcttatgtcctgccagcagtgcacgattggctttgagactgcctgatccactcactcgtaaccagccaagtactatgacccaaactatagcagaatttggcac

SEQ ID NO: 237236 - DNA, 120 bp, Artificial Sequence
  ENSG00000120437_19 (sequence is synthesized)
aaacaggtccctggtagctactttcctcaggaaggcctatggatttggaaaacacaggtgtctcataaggacatactcataaattgttttcatgtacaataattcttgtgtgtactttcc

SEQ ID NO: 237237 - DNA, 120 bp, Artificial Sequence
  ENSG00000120437_20 (sequence is synthesized)
attcccagcacacttacttctgtctctggactaatcttgagtaattggttttcctttgcttaggtcttattgaagttaaaacagatgagtttcctcgccatgggagcaacatagaagcca

SEQ ID NO: 237238 - DNA, 120 bp, Artificial Sequence
  ENSG00000120438_0 (sequence is synthesized)
agtagctcctgggacatcgctcgggtacgctccacgccgtcgcagccactgctgtggtcgccggtcggccgaggggccgcgatactggttgcccgcggtgtaagcagaattcgacgtgta

SEQ ID NO: 237239 - DNA, 120 bp, Artificial Sequence
  ENSG00000120438_1 (sequence is synthesized)
tcgctgccgtcaagatggaggggcctttgtccgtgttcggtgaccgcagcactggggaaacgatccgctcccaaaacgttatggctgcagcttcgattgccaatattgtaaaaagttctc

SEQ ID NO: 237240 - DNA, 120 bp, Artificial Sequence
  ENSG00000120438_2 (sequence is synthesized)
ttggtccagttggcttggataaaatgttggtggatgatattggtgatgtaaccattactaacgatggtgcaaccatcctgaagttactggaggtagaacatcctgcagctaaagttcttt

SEQ ID NO: 237241 - DNA, 120 bp, Artificial Sequence
  ENSG00000120438_3 (sequence is synthesized)
gtgagctggctgatctgcaagacaaagaagttggagatggaactacttcagtggttattattgcagcagaactcctaaaaaatgcagatgaattagtcaaacagaaaattcatcccacat

SEQ ID NO: 237242 - DNA, 120 bp, Artificial Sequence
  ENSG00000120438_4 (sequence is synthesized)
cagttattagtggctatcgacttgcttgcaaggaagcagtgcgttatatcaatgaaaacctaattgttaacacagatgaactgggaagagattgcctgattaatgctgctaagacatcca

SEQ ID NO: 237243 - DNA, 120 bp, Artificial Sequence
  ENSG00000120438_5 (sequence is synthesized)
tgtcttccaaaatcattggaataaatggtgatttctttgctaacatggtagtagatgctgtacttgctattaaatacacagacataagaggccagccacgctatccagtcaactctgtta

SEQ ID NO: 237244 - DNA, 120 bp, Artificial Sequence
  ENSG00000120438_6 (sequence is synthesized)
atattttgaaagcccatgggagaagtcaaatggagagtatgctcatcagtggctatgcactcaactgtgtggtgggatcccagggcatgcccaagagaatcgtaaatgcaaaaattgctt

SEQ ID NO: 237245 - DNA, 120 bp, Artificial Sequence
  ENSG00000120438_7 (sequence is synthesized)
gccttgacttcagcctgcaaaaaacaaaaatgaagcttggtgtacaggtggtcattacagaccctgaaaaactggaccaaattagacagagagaatcagatatcaccaaggagagaattc

SEQ ID NO: 237246 - DNA, 120 bp, Artificial Sequence
  ENSG00000120438_8 (sequence is synthesized)
agaagatcctggcaactggtgccaatgttattctaaccactggtggaattgatgatatgtgtctgaagtattttgtggaggctggtgctatggcagttagaagagttttaaaaagggacc

SEQ ID NO: 237247 - DNA, 120 bp, Artificial Sequence
  ENSG00000120438_9 (sequence is synthesized)
ttgaagctgcaatgttgggacaggcagaagaagtggtacaggagagaatttgtgatgatgagctgatcttaatcaaaaatactaaggctcgtacgtctgcatcgattatcttacgtgggg

SEQ ID NO: 237248 - DNA, 120 bp, Artificial Sequence
  ENSG00000120438_10 (sequence is synthesized)
caaatgatttcatgtgtgatgagatggagcgctctttacatgatgcactttgtgtagtgaagagagttttggagtcaaaatctgtggttcccggtgggggtgctgtagaagcagcccttt

SEQ ID NO: 237249 - DNA, 120 bp, Artificial Sequence
  ENSG00000120438_11 (sequence is synthesized)
ccatataccttgaaaactatgcaaccagcatggggtctcgggaacagcttgcgattgcagagtttgcaagatcacttcttgttattcccaatacactagcagttaatgctgcccaggact

SEQ ID NO: 237250 - DNA, 120 bp, Artificial Sequence
  ENSG00000120438_12 (sequence is synthesized)
ccacagatctggttgcaaaattaagagcttttcataatgaggcccaggttaacccagaacgtaaaaatctaaaatggattggtcttgatttgagcaatggtaaacctcgagacaacaaac

SEQ ID NO: 237251 - DNA, 120 bp, Artificial Sequence
  ENSG00000120438_13 (sequence is synthesized)
aagcaggggtgtttgaaccaaccatagttaaagttaagagtttgaaatttgcaacagaagctgcaatcaccattcttcgaattgatgatcttattaaattacatccagaaagtaaagatg

SEQ ID NO: 237252 - DNA, 120 bp, Artificial Sequence
  ENSG00000120438_14 (sequence is synthesized)
ataaacatggaagttatgaagatgctgttcactctggagcccttaatgattgatctgatgttccttttatttataacaatgttaaatgcaattgtcttgtaccttgagttgagtattaca

SEQ ID NO: 237253 - DNA, 120 bp, Artificial Sequence
  ENSG00000120438_15 (sequence is synthesized)
cattaaagtaaagtacaagctgtaaacttgggtttttgtgatgtaggaaatggtttccatctgtactttggtcctctgatttcacatattgcaacctagtactttattagtttaaaaaga

SEQ ID NO: 237254 - DNA, 120 bp, Artificial Sequence
  ENSG00000120438_16 (sequence is synthesized)
aattgaggttgttcaaagtttaagcaattcattctctctgaacacacattgctattcccatcccacccccaatgcacagggctgcaacaccacgacttctgcccattctctccagtgtgt

SEQ ID NO: 237255 - DNA, 120 bp, Artificial Sequence
  ENSG00000120438_17 (sequence is synthesized)
gtaacagggtcacaagaattcgacagccagatgctccaagagggtggcccaaggctatagcccctccttcaatattgacctaacgggggagaaaagatttagattgtttattcttctgtg

SEQ ID NO: 237256 - DNA, 120 bp, Artificial Sequence
  ENSG00000120438_18 (sequence is synthesized)
gacacagtttaaaatcttaaacttgtctttttcctcttaatgtatcagcatgctaccctttcaaactcaaattttcattttaactgcttaggaataaatttacacctttgtgaaaattca

SEQ ID NO: 237257 - DNA, 120 bp, Artificial Sequence
  ENSG00000120438_19 (sequence is synthesized)
tttgtttttattttttgtagaaatgggtttcgctatgttgcccaaaggggtctcaaactcctggcatcaagcgatcctcctgcctcggcctcgcagtgttgggattacacctgtgagcca

SEQ ID NO: 237258 - DNA, 120 bp, Artificial Sequence
  ENSG00000120438_20 (sequence is synthesized)
cagtgtctggccccatttacactcttagtaggtggtttttaaataattaacacagatttgtagatttgggaaatacgggggctgttggatgtcatttacctttaggctgaaattactgtc

SEQ ID NO: 237259 - DNA, 120 bp, Artificial Sequence
  ENSG00000120438_21 (sequence is synthesized)
tttttgatgtaatagttgtaaactgtgttgtcttaacgttttgattaataactaaattttaatttgaaaaccttcaatttaaatgttttagcatttaagtagtaatatttgaagttaaaa

SEQ ID NO: 237260 - DNA, 120 bp, Artificial Sequence
  ENSG00000120438_22 (sequence is synthesized)
acttggaccagtatcttttttctcatttgactaccacattttctcctaataatagattttagtggctatgcttatgggatagattaaacttgccatgatctgaagagggagggttttttc

SEQ ID NO: 237261 - DNA, 120 bp, Artificial Sequence
  ENSG00000120438_23 (sequence is synthesized)
cactggggaaacgatccgctcccaaaacgaaagggcctcggggccccgcagccggacccagcccacccgccgttctctggggcagggcgctgtggccccacttttcccacagcgaggagg

SEQ ID NO: 237262 - DNA, 120 bp, Artificial Sequence
  ENSG00000120438_24 (sequence is synthesized)
agccccgccgcgcgcggcagggttttgagaccggcaacgcgtggatgtggtgtccggggcggcgttggaaacgcgccctccgcgggaaagcgggcctcccgggctcgcacgtgcgggcca

SEQ ID NO: 237263 - DNA, 120 bp, Artificial Sequence
  ENSG00000120438_25 (sequence is synthesized)
caggttttattttaggaccatttaccagaaaaagagtaggtccatccgcgcgccctcggatgagcccggtgccctgtccgcccgcagctgcagtcgaggtcgggcgtccggcgtccagcc

SEQ ID NO: 237264 - DNA, 120 bp, Artificial Sequence
  ENSG00000120438_26 (sequence is synthesized)
gtatccgggttgacagcttcttacagtagagttagcccaggaaacgccactcgagtgcattgaccccaggagacggcagcgctaacttagcagagcgtttgctgtcaggcctttggatac

SEQ ID NO: 237265 - DNA, 120 bp, Artificial Sequence
  ENSG00000120438_27 (sequence is synthesized)
ctacagagcttactgtttcttgatagattcctaatttttttcgtaaacaaatctgaaagtcaccaccttccccgttgactaccgatttctctcctcacagataaagagagttttaatgag

SEQ ID NO: 237266 - DNA, 120 bp, Artificial Sequence
  ENSG00000120438_28 (sequence is synthesized)
caaaaaacttgcagaatctgaaggaaaaggctggtatagctgtacgaagtggcagagcatgaaattggtggttattactttttttttttttccccgccatcagattccaccccgcatcaa

SEQ ID NO: 237267 - DNA, 120 bp, Artificial Sequence
  ENSG00000120438_29 (sequence is synthesized)
agctgtgccaaataggctcgctttgtttagggacagggtcccacctgtcgcccagacgagagtgccatcatagctcactgcattctccaagcacaggtccgcgccgccgcatccggcttt

SEQ ID NO: 237268 - DNA, 120 bp, Artificial Sequence
  ENSG00000120438_30 (sequence is synthesized)
gactagacattgtttctgtatagtatatctaaatatcctgtgtaggcaggacttaagggaactttatgtagacttattttattaaaatgccattttttttgagaaattgatggtcttggc

SEQ ID NO: 237269 - DNA, 120 bp, Artificial Sequence
  ENSG00000120438_31 (sequence is synthesized)
gactttatcagaatccacgtactggaaggtgatattaaaggtgaacgtgtattataatggggctgtgttgatttctataagtggttcatattttttcctgcgaatttcttaggatgtaac

SEQ ID NO: 237270 - DNA, 120 bp, Artificial Sequence
  ENSG00000120438_32 (sequence is synthesized)
tgtagtcccagctactaaggaggctgaggtaggagtattaattgaacccaggagtgccagtccaatgtgggcaacatagcaagaccctgtctcgggagtgggtgcgtgtgtgcgcatgtg

SEQ ID NO: 237271 - DNA, 120 bp, Artificial Sequence
  ENSG00000120438_33 (sequence is synthesized)
cgtgtgtgcgcatgtgttgcgcgcacgcgtgcgtagtagcagcagtatcaattttgtgcaataaaattttgaataaccaattttatgcaaattgatatcaatagagaggagtaatgctgt

SEQ ID NO: 237272 - DNA, 120 bp, Artificial Sequence
  ENSG00000120438_34 (sequence is synthesized)
attgaaattacctgttgccttccctgcttttttagggtgaaaaggtaataaaaagcatgtctaaaagtgatatgaattgcagatagtgataatgttgtaacattttggtgacaagtaatg

SEQ ID NO: 237273 - DNA, 120 bp, Artificial Sequence
  ENSG00000120440_0 (sequence is synthesized)
agtgctccctccagcctccgcgcatttcagctggcgctgcagctgctgcacagagacccacagaggccaccctcggaaccagcgcccaatgagagggcgggacctgtgttcctccacaca

SEQ ID NO: 237274 - DNA, 120 bp, Artificial Sequence
  ENSG00000120440_1 (sequence is synthesized)
aagccaggcgctgggatctttgagaaccaccaccccagcctttacccttaacattccatccgaggcaaaccacactgagcagccgcctgcaggcctgggagcaaggctacaggaagcagg

SEQ ID NO: 237275 - DNA, 120 bp, Artificial Sequence
  ENSG00000120440_2 (sequence is synthesized)
tgtttccatccctcccaggcgaggccgcccaacaccaacactggagaagaagaaaaaacctcatttgatggcggaagatgaaccttcaggggccctcttgaagccgctggtttttcgcgt

SEQ ID NO: 237276 - DNA, 120 bp, Artificial Sequence
  ENSG00000120440_3 (sequence is synthesized)
tgacgagaccaccccggctgtggtgcaaagcgtcctcctggagagggggtggaataagtttgataagcaggagcagaacgcggaggactggaacctgtactggaggacatcctctttccg

SEQ ID NO: 237277 - DNA, 120 bp, Artificial Sequence
  ENSG00000120440_4 (sequence is synthesized)
aatgaccgaacacaacagtgttaaaccgtggcagcagctaaaccaccaccctggaaccaccaagcttaccaggaaagactgtttggccaaacacctgaagcacatgaggaggatgtatgg

SEQ ID NO: 237278 - DNA, 120 bp, Artificial Sequence
  ENSG00000120440_5 (sequence is synthesized)
cacttccctgtaccagttcatccccctgacgttcgtcatgcccaatgactataccaagttcgtggctgaatactttcaggagaggcagatgctgggcaccaagcatagctattggatttg

SEQ ID NO: 237279 - DNA, 120 bp, Artificial Sequence
  ENSG00000120440_6 (sequence is synthesized)
caagcctgctgagttatctcgtgggagggggatactaattttcagtgactttaaagacttcatctttgatgatatgtacatagtgcagaaatatatctccaatcctttacttattggcag

SEQ ID NO: 237280 - DNA, 120 bp, Artificial Sequence
  ENSG00000120440_7 (sequence is synthesized)
atataaatgtgatctccgcatctatgtttgtgttactggctttaagcctttgaccatttatgtttatcaggaagggttggttcggtttgccacggaaaagtttgacctcagtaatttgca

SEQ ID NO: 237281 - DNA, 120 bp, Artificial Sequence
  ENSG00000120440_8 (sequence is synthesized)
aaacaattatgcccatttgaccaacagcagcatcaataaatccggggcctcttatgagaagatcaaagaagtgattggtcatggttgtaaatggacgctcagcagatttttttcctacct

SEQ ID NO: 237282 - DNA, 120 bp, Artificial Sequence
  ENSG00000120440_9 (sequence is synthesized)
tcgtagctgggatgtggacgatctgcttttgtggaagaaaatccaccgcatggttattctcaccattctcgccattgcaccatctgtcccctttgctgccaattgctttgagctctttgg

SEQ ID NO: 237283 - DNA, 120 bp, Artificial Sequence
  ENSG00000120440_10 (sequence is synthesized)
gtttgatattttgattgatgacaacttgaaaccatggcttttagaggtcaactacagcccagccttgaccttggattgttcaacagatgtgttggtgaagagaaaacttgtccatgatat

SEQ ID NO: 237284 - DNA, 120 bp, Artificial Sequence
  ENSG00000120440_11 (sequence is synthesized)
ctgactgtcttccttatgattctctttcgttcacaagcagaatgtacaacgaggatgactctgtggtggagaaagctgtgagtgtgcgtcctgaagctgcacctgcctcccagctggaag

SEQ ID NO: 237285 - DNA, 120 bp, Artificial Sequence
  ENSG00000120440_12 (sequence is synthesized)
gagagatgagtgggcaggattttcatctgtcaacaagggagatgccacaaagcaagcccaagttacggagcaggcacacgcctcacaagacactcatgccctacgcgtccctcttccagt

SEQ ID NO: 237286 - DNA, 120 bp, Artificial Sequence
  ENSG00000120440_13 (sequence is synthesized)
cgcactcctgcaagaccaagacctccccgtgtgtcctgtcagaccgtggcaaagctccagatccccaagcaggcaactttgttcttgtttttcctttcaatgaagcaactctcggagctt

SEQ ID NO: 237287 - DNA, 120 bp, Artificial Sequence
  ENSG00000120440_14 (sequence is synthesized)
ccaggaatggattaaatgtcaaaagaataatccaagagctccagaaactaatgaataagcaacattcctaagtggtaaaaaatcaaatcaagaaaaagtgacatggatttttaaaaacca

SEQ ID NO: 237288 - DNA, 120 bp, Artificial Sequence
  ENSG00000120440_15 (sequence is synthesized)
aggatcctgtcctagagaaagcaatagttcaagtccctacctgtgccaccagcatgttaactatgacattgggactgaagatgtggccatatgtataaatataacagctctgacaaagca

SEQ ID NO: 237289 - DNA, 120 bp, Artificial Sequence
  ENSG00000120440_16 (sequence is synthesized)
caatatgttcaagtggtgattaaactacattacatcccatgtttatttgctcaggtgtcttgaaagaattctacaaataccacacagcctcccaccagtaattgaatgtgctacactacg

SEQ ID NO: 237290 - DNA, 120 bp, Artificial Sequence
  ENSG00000120440_17 (sequence is synthesized)
attatgctatgtatgtatttaaagaggagaaaaagattattctaatatttttaaaggattattaggtgaaaacagtacaaaagaagccaggagttaactttctgtgtgtttttttttaaa

SEQ ID NO: 237291 - DNA, 120 bp, Artificial Sequence
  ENSG00000120440_18 (sequence is synthesized)
tcaaccagttatttgttaaaattattttgttaacttaagatcagacaatcattcagagtgagataaatcactgaaagccctaatgactctgttgtttacaaatcctgggcttgaaatcag

SEQ ID NO: 237292 - DNA, 120 bp, Artificial Sequence
  ENSG00000120440_19 (sequence is synthesized)
actttgcaccaaagagctccctgtgggggcatctttgggctgtatttaaatagtggccccttggccttgtcaccatttgtttaccatcacagcatgtgaggtcatggcctcccagatcaa

SEQ ID NO: 237293 - DNA, 120 bp, Artificial Sequence
  ENSG00000120440_20 (sequence is synthesized)
agtatgctgtcattcctgccacataaaaagcatctgcagtcctaagacataaaaattccagtaggttacttgaaaacattattctagtgaaagtagtcagatacaaaaggccacatgttg

SEQ ID NO: 237294 - DNA, 120 bp, Artificial Sequence
  ENSG00000120440_21 (sequence is synthesized)
tatgactccgttgatatggaatgtcagaattggcaaatccatcaaaagcagattggtggcttaggggaggggtaatgaggagtgcctactgatgggtagggggcttccctttggggtgac

SEQ ID NO: 237295 - DNA, 120 bp, Artificial Sequence
  ENSG00000120440_22 (sequence is synthesized)
agaaatgttctggaactatatagaggtgatggttgcacaacacggggaattcactaagtatcactcatggtacattttgtgttatgtgtgttttaccacaataaaaaagttaaaagctgg

SEQ ID NO: 237296 - DNA, 120 bp, Artificial Sequence
  ENSG00000120440_23 (sequence is synthesized)
gcgcatttcagctggcgctgcagctgctgcacagagacccacagaggccaccctcggaaccagcgcccaatgagagggcgggacctgtgttcctccacacaaagccaggcgctgggttcg

SEQ ID NO: 237297 - DNA, 120 bp, Artificial Sequence
  ENSG00000120440_24 (sequence is synthesized)
atgacacctgaaattcctggtgttgaatcacatggtttaacccttcagctggatcccggtcaaatggaaagttgctctggggctctgtcctgtaagcagtgaatgtgccaaaaagataaa

SEQ ID NO: 237298 - DNA, 120 bp, Artificial Sequence
  ENSG00000120440_25 (sequence is synthesized)
caccaaaactaggagctgtcggctaaggaggctgccgtccctgggagccgctctctcctactgcatcctgttgtccctcagtcttctgggcaaatcagtgggccctcatctagagatcgg

SEQ ID NO: 237299 - DNA, 120 bp, Artificial Sequence
  ENSG00000120440_26 (sequence is synthesized)
gattcccgcagtgatggaatacattatttttggctgacttccttgccatggggccccatacacccaggaatatcatcaagatctttgagaaccaccaccccagcctttacccttaacatt

SEQ ID NO: 237300 - DNA, 120 bp, Artificial Sequence
  ENSG00000120440_27 (sequence is synthesized)
agcctcctgagtagctgggactacagcaaaaatctgcaattggcatttcccatgtgatgctgcgtgttgagggctcatctgcttctcgtccaggacgacatttccagcttcatctttgat

SEQ ID NO: 237301 - DNA, 120 bp, Artificial Sequence
  ENSG00000120440_28 (sequence is synthesized)
ttcatctttgatcttaaccctcccggaggcatacttggtttcctgacagccgctgcaatacacagtcttgacggtgccatccgggtactccctcctcttgaaccgggctgtgtggatttc

SEQ ID NO: 237302 - DNA, 120 bp, Artificial Sequence
  ENSG00000120440_29 (sequence is synthesized)
tttctgcccgttgctgagcacaatggttttgtcgccgttcctgagaggagaaacacatggaaataaggtctcttcctgtccatccttgagatgttccaccgtcccgtcgggaaacacgat

SEQ ID NO: 237303 - DNA, 120 bp, Artificial Sequence
  ENSG00000120440_30 (sequence is synthesized)
ttctttggagccattggggtagaatttttctgcagaatgcagtttttcagtatatgttacattgaatctgtttagaaacatgttctatgcaaataatctataaaatattcatgagattta

SEQ ID NO: 237304 - DNA, 120 bp, Artificial Sequence
  ENSG00000120451_0 (sequence is synthesized)
atgcctcgctcccgtcgacgtcgacccggaagctgtcgccggcggccggccggcggtcagccttcacacaggcccggctgcggagcgcagtcgcccaggtttacggcggcagagggccga

SEQ ID NO: 237305 - DNA, 120 bp, Artificial Sequence
  ENSG00000120451_1 (sequence is synthesized)
ggctcccggagaggaccgcgatgagtccacttcaggtcggggctgagtgtgggcgcgcggttcccggcggcgtgtgacccagtcttcgccggccgctgcccgctgcgtgtgtaagtgtcc

SEQ ID NO: 237306 - DNA, 120 bp, Artificial Sequence
  ENSG00000120451_2 (sequence is synthesized)
gtgggccccagggccttgcagcgcccgccccgaggccccgaagaggccttccgcctggggcagtgtgaaggccacagagttttcctccaaagccacacctcagctggaaggggcgagttg

SEQ ID NO: 237307 - DNA, 120 bp, Artificial Sequence
  ENSG00000120451_3 (sequence is synthesized)
gagggctctgttagtggtagccatggggagacgcggagctgcagctgtcgctttgcagtgcctgtaggactttgagggcctggagccccggttccctgaacagcacccagatcgccccat

SEQ ID NO: 237308 - DNA, 120 bp, Artificial Sequence
  ENSG00000120451_4 (sequence is synthesized)
atctgagacacagttcatgccccccttccctaactctgaagtaaaatcttgagggctgtcatctggggaagccaccttgtccgttcagccatgaagacagaaacagtgccaccgttccag

SEQ ID NO: 237309 - DNA, 120 bp, Artificial Sequence
  ENSG00000120451_5 (sequence is synthesized)
gaaactccagctggatcgagctgtcacctcaataacctgttgagtagccggaagctgatggctgtgggggtcttgcttggctggctcctggtcatacaccttctggtcaacgtgtggctg

SEQ ID NO: 237310 - DNA, 120 bp, Artificial Sequence
  ENSG00000120451_6 (sequence is synthesized)
ctgtgccttctgtcggcattgctagtggtgctgggaggatggctgggctccagcctcgctggagtggcttcaggtcgactgcatctggaacgcttcatcccgttggccacctgtcctcca

SEQ ID NO: 237311 - DNA, 120 bp, Artificial Sequence
  ENSG00000120451_7 (sequence is synthesized)
tgccctgaggcagaaaggcagctggaacgggagatcaaccgcaccatccagatgattattcgagattttgtgttatcttggtaccgttccgtgagccaggagccagcctttgaggaagaa

SEQ ID NO: 237312 - DNA, 120 bp, Artificial Sequence
  ENSG00000120451_8 (sequence is synthesized)
atggaggcagccatgaaagggttggtccaggagcttcggagaaggatgagcgtgatggacagtcatgctgttgcccagagtgttctgactctctgcggttgtcacctgcagagctacatt

SEQ ID NO: 237313 - DNA, 120 bp, Artificial Sequence
  ENSG00000120451_9 (sequence is synthesized)
caggcaaaggaggccactgcagggaagaatggtccagttgagccttcccacctctgggaggcttactgccgggcgactgccccacatcctgctgtgcacagccccagtgctgaagtcacc

SEQ ID NO: 237314 - DNA, 120 bp, Artificial Sequence
  ENSG00000120451_10 (sequence is synthesized)
tatacgcgtggcgttgtgaatttgttgcttcaagggctggtgcccaagccccacttggagactcgtaccggacgccatgtagtggtcgaactcatcacatgcaatgtaatcttaccactg

SEQ ID NO: 237315 - DNA, 120 bp, Artificial Sequence
  ENSG00000120451_11 (sequence is synthesized)
atcagcaggctgtcagatcctgactggatccaccttgtactcgtgggtatcttttccaaggccagagatccagcaccctgcccagccagtgcccccgaacagccctcagtgccgacatct

SEQ ID NO: 237316 - DNA, 120 bp, Artificial Sequence
  ENSG00000120451_12 (sequence is synthesized)
ctgccactgattgctgaggtagagcagcttccagaagggagagcttctccagtagcagccccagtattcctaagttacagtgagccagagggttctgcaggcccctctccagaggttgaa

SEQ ID NO: 237317 - DNA, 120 bp, Artificial Sequence
  ENSG00000120451_13 (sequence is synthesized)
gaaggccacgaagctgtagagggagatttgggtgggatgtgtgaagaaagaaaagtaggaaacaactcatctcatttcctacagccaaatgttcgaggtcccctgttcttatgtgaagac

SEQ ID NO: 237318 - DNA, 120 bp, Artificial Sequence
  ENSG00000120451_14 (sequence is synthesized)
tcagagctggagtctccgctgtctgaactgggcaaagaaaccatcatgctcatgactccaggcagctttctctctgacaggattcaggatgccctgtgtgccctagagagttcccaggct

SEQ ID NO: 237319 - DNA, 120 bp, Artificial Sequence
  ENSG00000120451_15 (sequence is synthesized)
ctggaacccaaagatggtgaggcatctgaaggagcagaggctgaggagggtccagggacagaaacagagacaggcctgccggtctccacactgaattcctgcccagagatccatattgac

SEQ ID NO: 237320 - DNA, 120 bp, Artificial Sequence
  ENSG00000120451_16 (sequence is synthesized)
acagcagacaaggagatagaacaaggagatgttaccgcctctgttacagctttgctggaggggccagaaaagacctgcccctcacggccgtcatgcttagagaaggatctcaccaatgat

SEQ ID NO: 237321 - DNA, 120 bp, Artificial Sequence
  ENSG00000120451_17 (sequence is synthesized)
gtgagctcccttgatcctactctgccaccagttctgctttcctcctctccacctggtcctctcagctcagccaccttcagctttgagcccctaagcagtcccgatggtccagttatcatc

SEQ ID NO: 237322 - DNA, 120 bp, Artificial Sequence
  ENSG00000120451_18 (sequence is synthesized)
cagaaccttcgtatcactggcaccattacagcccgagagcacagtggcactggattccacccatacacactctatactgtgaagtacgagacagcccttgacggtgaaaacagcagcggc

SEQ ID NO: 237323 - DNA, 120 bp, Artificial Sequence
  ENSG00000120451_19 (sequence is synthesized)
ctgcagcagctggcctaccacactgtgaatcgtcgctatcgggagttcttgaatctgcagacccgtctggaggagaaaccagatctacgaaagttcatcaaaaatgtgaagggtcctaaa

SEQ ID NO: 237324 - DNA, 120 bp, Artificial Sequence
  ENSG00000120451_20 (sequence is synthesized)
aagctctttccagatcttccattgggaaacatggacagtgacagagtagaagcccgtaagagcctcctagaatcattcctaaagcaactctgtgccattccggagatcgctaacagtgag

SEQ ID NO: 237325 - DNA, 120 bp, Artificial Sequence
  ENSG00000120451_21 (sequence is synthesized)
gaggtgcaggagttccttgctctgaacacagatgctcgtattgcctttgtcaagaaaccatttatggtctctagaatagacaagatggtggtgagtgccattgtggacaccttgaagaca

SEQ ID NO: 237326 - DNA, 120 bp, Artificial Sequence
  ENSG00000120451_22 (sequence is synthesized)
gcgtttcctcgctctgaaccccagagccccacagaggagctgagtgaggccgagaccgaaagcaagccccagacagaaggcaagaaggctagcaagtctaggctgaggttctcatccagt

SEQ ID NO: 237327 - DNA, 120 bp, Artificial Sequence
  ENSG00000120451_23 (sequence is synthesized)
aaaatttctccagcactaagtgtgactgaagcacaagacaagattctttattgtctccaggaaggcaatgtggagtctgagactctatccatgtctgcgatggaatcttttattgaaaaa

SEQ ID NO: 237328 - DNA, 120 bp, Artificial Sequence
  ENSG00000120451_24 (sequence is synthesized)
cagacaaagttactggaaatgcagccaacaaaagccccagaaaaagatcctgaacaacctcccaaaggacgtgtggacagttgcgtgtcagatgcagccgtgccagcccaagaccccagc

SEQ ID NO: 237329 - DNA, 120 bp, Artificial Sequence
  ENSG00000120451_25 (sequence is synthesized)
aacagcgatccaggaacagagacagagttagctgacacagccctggatctgctcctcttgctactaacagaacagtggaaatggctatgtaccgaaaacatgcaaaagtttcttcgtctt

SEQ ID NO: 237330 - DNA, 120 bp, Artificial Sequence
  ENSG00000120451_26 (sequence is synthesized)
atctttgggaccctagttcaaaggtggctagaggtgcaggtagctaatttaacaagtccacagcgctgggtgcagtacctcctgcttcttcaggagtccatctggcctggtggagttttg

SEQ ID NO: 237331 - DNA, 120 bp, Artificial Sequence
  ENSG00000120451_27 (sequence is synthesized)
aggctttgcagagcctgatgggagtcctcccagatctcgtagtagaaattcttggggtgaacaaatgccggctgagctggggtctagtcctggagtcactacaacaacccctcatcaaca

SEQ ID NO: 237332 - DNA, 120 bp, Artificial Sequence
  ENSG00000120451_28 (sequence is synthesized)
ggcatttgatttactgccttggggacatcatcctggaattcttggatctcagtgcctctgttgaggagtctgctgctaccacctctgcctcagataccccaggcaactctaagaggatgg

SEQ ID NO: 237333 - DNA, 120 bp, Artificial Sequence
  ENSG00000120451_29 (sequence is synthesized)
gtgtctcctcttagctggttattcacgccttcttcccaggtcagggaagtagagttactcggccaccagagaccagtcaggaagcccgtgccctcttcaagtaggctacagctaagaagg

SEQ ID NO: 237334 - DNA, 120 bp, Artificial Sequence
  ENSG00000120451_30 (sequence is synthesized)
cctaggttctcggtggctcacttctctcccacttctgctccatttgtagcaggtgacaggggtctgtgtgtcccagttgtatgcacgtttatttccctgttccttttgtgatgttgggat

SEQ ID NO: 237335 - DNA, 120 bp, Artificial Sequence
  ENSG00000120451_31 (sequence is synthesized)
tgttgctggtgagtagatcctgtttcctttgggaaaagaagctgtgaggtagaggaatgaaccccttttgcttctccttttgccatcctccctgagattgtttgccagaatcctggccct

SEQ ID NO: 237336 - DNA, 120 bp, Artificial Sequence
  ENSG00000120451_32 (sequence is synthesized)
gtgcacacatgtgcttaatccaccagcacacaagctctagatagaacaggaaaaaaactgtggccagatttccttggaggagaaaacaaccttctcagctctctgttcctacccggaaac

SEQ ID NO: 237337 - DNA, 120 bp, Artificial Sequence
  ENSG00000120451_33 (sequence is synthesized)
taaaaattcattcagggccattctcaaaaaccagactcctgggtctaatctagtttcccaacagttccagaagaagaaggagggaagaaaatttttcaaggaacttcttgctcatgtgtt

SEQ ID NO: 237338 - DNA, 120 bp, Artificial Sequence
  ENSG00000120451_34 (sequence is synthesized)
gctgtttcccaacacatcagccttatggaagatgtcatgaggctgcttgcctgggaggctacactttcctttccagaagacttcaaagctgactgccaaagcttctggtaaatccacccc

SEQ ID NO: 237339 - DNA, 120 bp, Artificial Sequence
  ENSG00000120451_35 (sequence is synthesized)
acccttcacaccctttcctgaaaggcatttataccacccattttatttattggctttgctcccaaccccctgccctagagcaattgagtttttgaatttttgaccctctctctgtcttca

SEQ ID NO: 237340 - DNA, 120 bp, Artificial Sequence
  ENSG00000120451_36 (sequence is synthesized)
gcaaaactgcatgacaagctgcatattcagcctcagtttttccaaggagaatggaaagcacttgcctcctgtcttaagaatgcacaaagagtaggactagcaaggctgggggatgaaatc

SEQ ID NO: 237341 - DNA, 120 bp, Artificial Sequence
  ENSG00000120451_37 (sequence is synthesized)
tcccttcctaagtctttgacagagaacttttattattctgaacagataagattagcaaacttacaaggaatagcttcttatttcccattccttacggttataatcagtcctttaacaaca

SEQ ID NO: 237342 - DNA, 120 bp, Artificial Sequence
  ENSG00000120451_38 (sequence is synthesized)
ccagcatgaaggcaaaggtgttttgtcagactgcaacatctattagaaaggcaaggcaactgggaattgctggagaaggataaatcaggaggaattgctggtagaaaaggctgcagacag

SEQ ID NO: 237343 - DNA, 120 bp, Artificial Sequence
  ENSG00000120451_39 (sequence is synthesized)
tcacagggaagtgctgtatattaaatgcatgtgaatagctggcaaaaagatgtcaaggatgtcactgggagccctttggcttcacactcgcctgttagcgccttgctttcgctgaattac

SEQ ID NO: 237344 - DNA, 120 bp, Artificial Sequence
  ENSG00000120451_40 (sequence is synthesized)
cagagcctaccactcggaggaaggtcttggagttagactgatgagaaggcaatggggtgtcaaaaacaagtgtcaaagttctcttagattctgaagtcggtgatgagcacacaattaaag

SEQ ID NO: 237345 - DNA, 120 bp, Artificial Sequence
  ENSG00000120451_41 (sequence is synthesized)
tggtttgtggaagaaagttgtaaaatctttttacttttttgcccctctggaggcttttaaccctaaattgtgtctgatgtattcgggaggcttaggtgtgcaattcttgcccaaaggcaa

SEQ ID NO: 237346 - DNA, 120 bp, Artificial Sequence
  ENSG00000120451_42 (sequence is synthesized)
ggagatgaatgagatgtctcatggcctcttctagccttaaaagttgaccattacagtgactttatggctccaaagttcttgaagcatctccagccctagactttgacaagaaaaggtagc

SEQ ID NO: 237347 - DNA, 120 bp, Artificial Sequence
  ENSG00000120451_43 (sequence is synthesized)
tcagcatctctactttccgtgagtacctgcaggagtccagccaatgtattagagctgatcattaagctccttcagtgagggctaagatcctattctcgatgagcatagggggacagcctt

SEQ ID NO: 237348 - DNA, 120 bp, Artificial Sequence
  ENSG00000120451_44 (sequence is synthesized)
gttttatgccacttttctctccccatacctaccttcccctcatgtgtacttagccacctgtgttgctttgaatctgctgccagttctggctcaaatgtggcacaaaatcagtacatcaga

SEQ ID NO: 237349 - DNA, 120 bp, Artificial Sequence
  ENSG00000120451_45 (sequence is synthesized)
cacaccatgaaatccctgtggctataaattctaaggaatcttttgacacttccagcccaaagaacttatttttatttcgtattatataagagtccccacctctactccacgtaccccaaa

SEQ ID NO: 237350 - DNA, 120 bp, Artificial Sequence
  ENSG00000120451_46 (sequence is synthesized)
aagataagctgtcctcagatcctccttctacccaggagggaaataatggatattgccaagggaacaatcagaactcatctggctttgaaaacgacctgccaagtttggctagcaggttca

SEQ ID NO: 237351 - DNA, 120 bp, Artificial Sequence
  ENSG00000120451_47 (sequence is synthesized)
gacaacaagagagtaacaattggtagagagccacaggtagaaaagatactcccagctgacagggtgataaaaggcagggaagaattgggcctgtgctgatccaggaaggttttattgttt

SEQ ID NO: 237352 - DNA, 120 bp, Artificial Sequence
  ENSG00000120451_48 (sequence is synthesized)
gcttgttttttgtatttactcgtgactaaattttattcatttaagtcagaattttgatatttgaaataagactactttcccttttcttactatctataaaaaagacgaggcagggatgct

SEQ ID NO: 237353 - DNA, 120 bp, Artificial Sequence
  ENSG00000120451_49 (sequence is synthesized)
gtgttctttctgtcaaattctaaatgtgatctttgccattgcttatttgaattcaagaaagctatactttttcatcacatataactcacagtttcatttttgcattgttggattagactt

SEQ ID NO: 237354 - DNA, 120 bp, Artificial Sequence
  ENSG00000120451_50 (sequence is synthesized)
aataaaacctaaatggaaaataaattcctaaatctgagcctaggagcatgtataaattttatttttattattattatacattaagttctagggaacatgtgcacaacatgcaggtttgtt

SEQ ID NO: 237355 - DNA, 65 bp, Artificial Sequence
  ENSG00000120451_51 (sequence is synthesized)
tccccctcccccgacctcacaacaggccccagtgtgtgatgttcaccttcctgtgtccaagtgtt

SEQ ID NO: 237356 - DNA, 120 bp, Artificial Sequence
  ENSG00000120451_52 (sequence is synthesized)
tcaattcccacctatgagtgagagcatgtataaattttaaaatcaatacaagctactccaatttccattttggaaatttccagtttacaaggtgattttcttattgttgtaaagaaacac

SEQ ID NO: 237357 - DNA, 120 bp, Artificial Sequence
  ENSG00000120451_53 (sequence is synthesized)
ttacaaggtgattttcttattgttgtaaagaaacacataatgtgagatctaccctcttaagtgtacagtacattatttatttattttgagacggtacattattaactagaagcagcacag

SEQ ID NO: 237358 - DNA, 120 bp, Artificial Sequence
  ENSG00000120451_54 (sequence is synthesized)
aaattactgccttcttccctcttttgtgtcttgcctttcttcctggtgcttcagcactaagggttttgctccctctccctgccctttcccctccacggactcaattttcttctgaatggg

SEQ ID NO: 237359 - DNA, 120 bp, Artificial Sequence
  ENSG00000120451_55 (sequence is synthesized)
tggccattttaattaccttcccccttccccaccccacctctctgcccttgcccttgctgctgagaaaggcaggctcaggataactacctggggactgagaatgagccaggcttgctgttc

SEQ ID NO: 237360 - DNA, 120 bp, Artificial Sequence
  ENSG00000120451_56 (sequence is synthesized)
atagtgtccagggaatctgcagccgtaagagaagatagattctctgttacaggggttacagggatgaaaaatgccttgagagtatcagaaagcttttattgactaccttgttgtctacaa

SEQ ID NO: 237361 - DNA, 120 bp, Artificial Sequence
  ENSG00000120451_57 (sequence is synthesized)
acagtttctaaaggccgggaggttcaagatcaaggtaccagcagaactggtgtctggcaagggcccttttccttgttcatagacagctgtcttctccctgtgtcctcatatggcaaaagg

SEQ ID NO: 237362 - DNA, 120 bp, Artificial Sequence
  ENSG00000120451_58 (sequence is synthesized)
ggtgagaagtctctctcaggtttcttttataagggcatttacctttgcccccatgacctaatcacctccccaaaggccccacctcctactgccatcaccttgagggttaggattttgaca

SEQ ID NO: 237363 - DNA, 120 bp, Artificial Sequence
  ENSG00000120451_59 (sequence is synthesized)
cactattggttttggcttcttttcccatggcgttgtttgttttactcctcaaggaaaaagatttttatggccatggaaaaaaggaaagatagttggcactaagtcattagctggtattcg

SEQ ID NO: 237364 - DNA, 120 bp, Artificial Sequence
  ENSG00000120451_60 (sequence is synthesized)
accttcctactggataaggctttgctagatagcctggcccctctccttgtcctgttgcataaagtgctgtgaggcgactgcttgcttggcggtttccatctgtggatgtggatggactga

SEQ ID NO: 237365 - DNA, 120 bp, Artificial Sequence
  ENSG00000120451_61 (sequence is synthesized)
ccctgcacctctgacccctgcagatggtggtgagtgccattgtggacaccttgaagacagcgtttcctcgctctgaaccccagagccccacagaggagctgagtgaggccgagaccgaaa

SEQ ID NO: 237366 - DNA, 120 bp, Artificial Sequence
  ENSG00000120451_62 (sequence is synthesized)
aaattggtgggaaatatactttagctctaatataatgctggccccgaaagatttctcggagaggattcagccttcctgggagggaggctggtgtgcaaatgcagcatcaaggtggctaga

SEQ ID NO: 237367 - DNA, 120 bp, Artificial Sequence
  ENSG00000120451_63 (sequence is synthesized)
gagtttccccaacccctactgcccgcttgcttcccacgtcgagccacgctgattggcctgttggtttatgggagggatcggggaggagaatgccgtttcaaggttctctgctccctggat

SEQ ID NO: 237368 - DNA, 120 bp, Artificial Sequence
  ENSG00000120451_64 (sequence is synthesized)
ttgcttcaggagttttgaagtttagtgctggacagcagcaatcacattctttcagagatgtgaagggtcctaaaaagctctttccagatcttccattgggaaacatggacagtgacagag

SEQ ID NO: 237369 - DNA, 120 bp, Artificial Sequence
  ENSG00000120451_65 (sequence is synthesized)
ccacagcggaatcaagcagcagaacagggcacaaacacaggaagttctaatccagcaggatgagatcatgctgataatattgataactcattaaacttatttttggcatgctttggcata

SEQ ID NO: 237370 - DNA, 120 bp, Artificial Sequence
  ENSG00000120457_0 (sequence is synthesized)
gagagagattgttccagctgctctcgctagagaaagggagtgacccaaggggccgcgagtgaagggacaggatggcttaggtacctctgcccacaggaccccacaacagggagaggttcc

SEQ ID NO: 237371 - DNA, 120 bp, Artificial Sequence
  ENSG00000120457_1 (sequence is synthesized)
agctacagctcctccgtggggtcatggcaggggctggggagtcccctcaaaagccctgagcccccctgcaccgccgctaagggacaccccagaagttagcatcagtgggactcggaagct

SEQ ID NO: 237372 - DNA, 120 bp, Artificial Sequence
  ENSG00000120457_2 (sequence is synthesized)
ccgatctcaacaaggccagaagctcatagaactttctgaagggagcaggtcatcagccttagcatgagccccggagcatcagtgtctgctggccgttgtgtgcatcccagctatggctgg

SEQ ID NO: 237373 - DNA, 120 bp, Artificial Sequence
  ENSG00000120457_3 (sequence is synthesized)
cgattctaggaatgccatgaaccaggacatggagattggagtcactccctgggaccccaagaagattccaaaacaggcccgcgattatgtccccattgccacagaccgtacgcgcctgct

SEQ ID NO: 237374 - DNA, 120 bp, Artificial Sequence
  ENSG00000120457_4 (sequence is synthesized)
ggccgagggcaagaagccacgccagcgctacatggagaagagtggcaagtgcaacgtgcaccacggcaacgtccaggagacctaccggtacctgagtgacctcttcaccaccctggtgga

SEQ ID NO: 237375 - DNA, 120 bp, Artificial Sequence
  ENSG00000120457_5 (sequence is synthesized)
cctcaagtggcgcttcaacttgctcgtcttcaccatggtttacactgtcacctggctgttcttcggcttcatttggtggctcattgcttatatccggggtgacctggaccatgttggcga

SEQ ID NO: 237376 - DNA, 120 bp, Artificial Sequence
  ENSG00000120457_6 (sequence is synthesized)
ccaagagtggattccttgtgttgaaaacctcagtggcttcgtgtccgctttcctgttctccattgagaccgaaacaaccattgggtatggcttccgagtcatcacagagaagtgtccaga

SEQ ID NO: 237377 - DNA, 120 bp, Artificial Sequence
  ENSG00000120457_7 (sequence is synthesized)
catggtggggtgcatgtttgtcaagatcagccagcccaagaagagagcggagaccctcatgttttccaacaacgcagtcatctccatgcgggacgagaagctgtgcctcatgttccgggt

SEQ ID NO: 237378 - DNA, 120 bp, Artificial Sequence
  ENSG00000120457_8 (sequence is synthesized)
gggcgacctccgcaactcccacatcgtggaggcctccatccgggccaagctcatcaagtcccggcagaccaaagagggggagttcatccccctgaaccagacagacatcaacgtgggctt

SEQ ID NO: 237379 - DNA, 120 bp, Artificial Sequence
  ENSG00000120457_9 (sequence is synthesized)
tgacacgggcgacgaccgcctcttccttgtgtctcctctgatcatctcccatgagatcaaccagaagagccctttctgggagatgtctcaggctcagctgcatcaggaagagtttgaagt

SEQ ID NO: 237380 - DNA, 120 bp, Artificial Sequence
  ENSG00000120457_10 (sequence is synthesized)
tgtggtcattctagaagggatggtggaagccacaggcatgacctgccaagcccggagctcctacatggatacagaggtgctctggggccaccgattcacaccagtcctcaccttggaaaa

SEQ ID NO: 237381 - DNA, 120 bp, Artificial Sequence
  ENSG00000120457_11 (sequence is synthesized)
gggcttctatgaggtggactacaacaccttccatgatacctatgagaccaacacacccagctgctgtgccaaggagctggcagaaatgaagagggaaggccggctcctccagtacctccc

SEQ ID NO: 237382 - DNA, 120 bp, Artificial Sequence
  ENSG00000120457_12 (sequence is synthesized)
cagccccccactgctggggggctgtgctgaggcagggctggatgcagaggctgagcagaatgaagaagatgagcccaaggggctgggtgggtccagggaggccaggggctcggtgtgagg

SEQ ID NO: 237383 - DNA, 120 bp, Artificial Sequence
  ENSG00000120457_13 (sequence is synthesized)
ggtgcagcctccctaagacctcctgtcactggcttcagtgaacacagacactgcagagcctgggagcaggggaggggaatagttgagtgtgctgtttgggggctcaggagccatcaaggc

SEQ ID NO: 237384 - DNA, 120 bp, Artificial Sequence
  ENSG00000120457_14 (sequence is synthesized)
cagggcctccctgagccagtggcatcctgcctgggccccccatggcagtgctgcctcttgtaggtgctggctaagggccaggccaggatgagtttccccatggtgaatgttaccggatgg

SEQ ID NO: 237385 - DNA, 120 bp, Artificial Sequence
  ENSG00000120457_15 (sequence is synthesized)
catctgttctctccatgccctgggtcacttccttttttgggtctcacagacccctccaggggctgacacctagagagaaccatcaccttgtccctcattccttccaccctgaggcttgct

SEQ ID NO: 237386 - DNA, 120 bp, Artificial Sequence
  ENSG00000120457_16 (sequence is synthesized)
gtggactcagagaggagacttacctgatgagagctcaaacctctagtctgggatgagctcacagagccctcatgagttaagatccatccatatcacataggcaattccttttaaatcaga

SEQ ID NO: 237387 - DNA, 120 bp, Artificial Sequence
  ENSG00000120457_17 (sequence is synthesized)
taccaacgacccattactgagaggtacagagcgtacagcccttggtgttctctgctgttatctgccaaatgtgtgtgtttttcctctgctgtgttctgtgtgtccagtgtagcctattgg

SEQ ID NO: 237388 - DNA, 120 bp, Artificial Sequence
  ENSG00000120457_18 (sequence is synthesized)
agaatcggtctcattagagtgactcttagaaggtggcctgggactagacagcccctctgagcacatgcatagtggcatcagcagcttcctggcctactcccaatcacactgtgccctgca

SEQ ID NO: 237389 - DNA, 120 bp, Artificial Sequence
  ENSG00000120457_19 (sequence is synthesized)
tgcacctcccaccaagggggaaccccagcagctggggcttttcgagtgctttttggcccaagaatctcagagtgcttctaatcatcacagtagtttttgtgttttgttttgttttgtttt

SEQ ID NO: 237390 - DNA, 120 bp, Artificial Sequence
  ENSG00000120457_20 (sequence is synthesized)
tgttttgttttgttttgtttttttcacaatctcagccagcctgcggtgtgacctggggagaaagttgagtgtcaggggacatgatgagccagttggccctgaaacaggaatggggcaaag

SEQ ID NO: 237391 - DNA, 90 bp, Artificial Sequence
  ENSG00000120457_21 (sequence is synthesized)
atgatgagccagttggccctgaaacaggaatggggcaaagagaaaggagagccaggagcatttaaaaatcagcatctgggccaggcaaga

SEQ ID NO: 237392 - DNA, 65 bp, Artificial Sequence
  ENSG00000120457_22 (sequence is synthesized)
tcagcatctgccccagttgtggccaagacactctgacctcagggctcagcaccttcaccatcaag

SEQ ID NO: 237393 - DNA, 120 bp, Artificial Sequence
  ENSG00000120457_23 (sequence is synthesized)
tgctgaaaagcccctgggcctccctccacaggcagagttacaaccgggagggctgggcagggagggcagggagattgcctggggaaggcaaagggaatggctgcccctcccaggctggaa

SEQ ID NO: 237394 - DNA, 120 bp, Artificial Sequence
  ENSG00000120457_24 (sequence is synthesized)
acaagagggcaagcggggtcagcaggagaattcgggggcagggtgagtgttaagaaaaaaagagtagagaagagcctgaaaatcagcaacttccagggcttttctgatctggaggcccaa

SEQ ID NO: 237395 - DNA, 120 bp, Artificial Sequence
  ENSG00000120457_25 (sequence is synthesized)
gagcaagggtggaggggggcagattgtcaggtcccgaaatgtgtgttgacacacacgggcttcgggttagctggcctgacatggagatagagtgccaatgttcccaggccacagaattat

SEQ ID NO: 237396 - DNA, 120 bp, Artificial Sequence
  ENSG00000120457_26 (sequence is synthesized)
ggaggcctcacccacagtattcacagctctcaactggcctttgagaatggaagccttttcctgccctggatatggcgcttcttcctgggagaggagcagagccacagagaggtaggaagt

SEQ ID NO: 237397 - DNA, 120 bp, Artificial Sequence
  ENSG00000120457_27 (sequence is synthesized)
tgaggcagagcaaagggaaggcttcagagcttaggcccggttcatctcagaagtgttttctaggcctggggctgaaaggaagaggggtggggcagcctgggacgggaactgcctctgtgg

SEQ ID NO: 237398 - DNA, 120 bp, Artificial Sequence
  ENSG00000120457_28 (sequence is synthesized)
gctccccactcccagggaggggctccataagctttgctcctgggctggatcttgagaggtgggcagggtcttcccaccagtggcagggtgtgcagttgtggtcccaagccttggagggaa

SEQ ID NO: 237399 - DNA, 120 bp, Artificial Sequence
  ENSG00000120457_29 (sequence is synthesized)
tggggaatgggctggcacccggctcagggaaagcagaagcagacagtgccccagcaggggagctgcatgcccccaggagtctcagaaaggcagcccatcactaaggctggatgcctttca

SEQ ID NO: 237400 - DNA, 120 bp, Artificial Sequence
  ENSG00000120457_30 (sequence is synthesized)
gcagagctacagctggagccctccggctgaggccagcactcgcctgggactccctggaccccagggttactaacagcaaaaccattccacacccccttgccagatctaagcctgtcttag

SEQ ID NO: 237401 - DNA, 120 bp, Artificial Sequence
  ENSG00000120457_31 (sequence is synthesized)
gaccgtcagtgcccccaggttagagctcatgggggtcaactaagcgagggagggaaggcgaaggcaaagctggccttgcacctggacagcggcctggctcctccccacacctgccttcat

SEQ ID NO: 237402 - DNA, 120 bp, Artificial Sequence
  ENSG00000120457_32 (sequence is synthesized)
ttatgactctgaaacatcccccacctgaccaagggagccactctccagttctctcactccaccagggccctccgtgagccaggaccaggtcacatctctcagccaagtctagaagctctg

SEQ ID NO: 237403 - DNA, 120 bp, Artificial Sequence
  ENSG00000120457_33 (sequence is synthesized)
gctagaggagaggaagcgtgcagagggtcctctgccaaagctccctgcctggcccgagcccgggcatgctgggattagtgcaacaccgccccagtgtgcctcctctgccttctatcatgc

SEQ ID NO: 237404 - DNA, 120 bp, Artificial Sequence
  ENSG00000120457_34 (sequence is synthesized)
cagtttaaaagcaagaagactcccccttcacatcctgaggaaatccccttcctggtgaccaactgatgcaatgaaagtttgaaaagttcttcattttctagaagttcttgaataaacatg

SEQ ID NO: 237405 - DNA, 120 bp, Artificial Sequence
  ENSG00000120457_35 (sequence is synthesized)
tgaataaacatggacttactaaatgcagagtctgatgatggacagagtttcaaggggtcactttcaaaacatttaattaatttatttatgtagagacagggtctcgctctgtcgcccagg

SEQ ID NO: 237406 - DNA, 120 bp, Artificial Sequence
  ENSG00000120457_36 (sequence is synthesized)
cactgctcctgcatacaaaccactcagaggccactgcccttggttctgtgatggctctgagcccatgccatcacatctgatggaccccagagagctgagccgtggtttaagatggggtca

SEQ ID NO: 237407 - DNA, 120 bp, Artificial Sequence
  ENSG00000120457_37 (sequence is synthesized)
tgcgctggtcattcccacagtcttgagtatctccaaaatcccaaagtgatatttcactttcggaccctgaaagtttggagagctggtttcttgccttaatttaagctctctgagaatgtc

SEQ ID NO: 237408 - DNA, 120 bp, Artificial Sequence
  ENSG00000120457_38 (sequence is synthesized)
ccctgtagggagaagcctccaggaactcagaatagaactcgttcccactcattttccttgctccaccaatctgacgcctgacagatgtcaccactgcctgaaggatcctgtccccaggcc

SEQ ID NO: 237409 - DNA, 120 bp, Artificial Sequence
  ENSG00000120457_39 (sequence is synthesized)
agggcagaatgggcattgcctttgactctccccttcagactcccctcccaccggcctcctgtgtagtcagagaacccactgcccatcgcctcctgctgctgctttgaggttgaggtcctg

SEQ ID NO: 237410 - DNA, 120 bp, Artificial Sequence
  ENSG00000120457_40 (sequence is synthesized)
gcttgagcagttaccttgctggagaagaggagcccctgccatctggggagcactgtccctgctcgtgatctgtaacagtggggcgctttttcacaccccttatctcacggcttgcttcca

SEQ ID NO: 237411 - DNA, 120 bp, Artificial Sequence
  ENSG00000120457_41 (sequence is synthesized)
gcccccatcaatcctgtgcctcatgtgaggtgagccccagagaaacttaaattgcttgtactgaagttgccaaaaaccaaaagttgcccgttgtcatttttaagactgtgccctgaacac

SEQ ID NO: 237412 - DNA, 120 bp, Artificial Sequence
  ENSG00000120457_42 (sequence is synthesized)
acctctgcccatgcgccatggagcatgtgttaggtgcctgccgtgggtcaggcacttgattctcaaaacactgccgagaagctcttaccaacgtgacagttgaggctgagagaggttcat

SEQ ID NO: 237413 - DNA, 120 bp, Artificial Sequence
  ENSG00000120457_43 (sequence is synthesized)
gagcttgctcaaggccacgggtagtaataagaggcatggccttggtgccaagtgcctcccaaacaaacagccggggccgtggtcctgcctaaactctcacatccacggcaccacgctggg

SEQ ID NO: 237414 - DNA, 120 bp, Artificial Sequence
  ENSG00000120457_44 (sequence is synthesized)
cccaggcaacagagataaggagagccctggctcttgggatggggtcgcgccgattcacatgctgtgccacggagccccggcttccatccatgatgtgcccctgtggcgggataattggga

SEQ ID NO: 237415 - DNA, 120 bp, Artificial Sequence
  ENSG00000120457_45 (sequence is synthesized)
aacaacctttttctgattcccagagaactaatgagctgcaaaaagagattagacagggaagaattgctttcggggagaagccacttactcggctcgccttggtttttgctaacaacgtct

SEQ ID NO: 237416 - DNA, 120 bp, Artificial Sequence
  ENSG00000120457_46 (sequence is synthesized)
ccttaaactgctgtcaaatctttttctccctgtgtaggattcatcaatcttcgtatgcaaaagaacaccactgcactgcactgctaaaaattcacacaataaaatggactttaacttgca

SEQ ID NO: 237417 - DNA, 120 bp, Artificial Sequence
  ENSG00000120458_0 (sequence is synthesized)
gcttggaagatggctgcgccctgtggctcggagctgcccgccaactcgccgctaaaaattccgaagatggaggtgctttccccggcttctcctggtggcctgagcgacggaaatccatcg

SEQ ID NO: 237418 - DNA, 120 bp, Artificial Sequence
  ENSG00000120458_1 (sequence is synthesized)
tgagcgacggaaatccatcgctgtccgacccttccacgcctcggggtgcctccccgctcgggccgggcagtgcggcgggctcgggggcagcggcgtccgggggtctcgggctggggctgg

SEQ ID NO: 237419 - DNA, 120 bp, Artificial Sequence
  ENSG00000120458_2 (sequence is synthesized)
tcctcggtctccttctcccctggtggcggcggtggcggggctgcggcagccgccgccgccgcctgccggggcatgtcgtggacgccagccgagacgaacgcgctcatcgcagtgtggggc

SEQ ID NO: 237420 - DNA, 120 bp, Artificial Sequence
  ENSG00000120458_3 (sequence is synthesized)
aacgagcggctggtggaggcgcggtaccagcagctggagggagccggcacggtgttcggcagcaaggcccccgggccagccatgtacgagcgcgtgtcccgggccctggccgagctgggc

SEQ ID NO: 237421 - DNA, 120 bp, Artificial Sequence
  ENSG00000120458_4 (sequence is synthesized)
tacgagcggaccccgtcccagtgccgggagcgcatcaagacccttcgcaggtgttacagtcgggtgaaagaacatggtgttgggaaaagaaagagcagttacacatttgaacagttggaa

SEQ ID NO: 237422 - DNA, 120 bp, Artificial Sequence
  ENSG00000120458_5 (sequence is synthesized)
caggtgtttggtcagggaggatgggatgctcagccctgccagcctgtacttattaacagtagtggcttgtaccaggagctggagtcagatggcagcactatggaggactattcacaggag

SEQ ID NO: 237423 - DNA, 120 bp, Artificial Sequence
  ENSG00000120458_6 (sequence is synthesized)
gactggggaaaccacagtcaggatctccatggctatccaacagatcaggaattggatgaaatacctgtcacaaagagaacattaaaaataaaacaagagtcttctgaagaagcacagaag

SEQ ID NO: 237424 - DNA, 120 bp, Artificial Sequence
  ENSG00000120458_7 (sequence is synthesized)
agagacatcatgcagaatattgtacagattttggaatcggtacagttgaaatgggaactttttcagagctggacagacttttcaaggctccatctttctaataaactggccatttttgga

SEQ ID NO: 237425 - DNA, 120 bp, Artificial Sequence
  ENSG00000120458_8 (sequence is synthesized)
attggttataacacccgttggaaagaggatatccgttaccattatgctgagatcagctcccaggtgccccttggcaagcgacttcgggagtacttcaactctgagaagcctgaaggacgg

SEQ ID NO: 237426 - DNA, 120 bp, Artificial Sequence
  ENSG00000120458_9 (sequence is synthesized)
agcgaagctaggtgcttggagctgcacatggaaattgactggatacccattgcccactccaaaccaactggtgggaatgttgttcaatatttattgcctgggggtattcctaaaagccca

SEQ ID NO: 237427 - DNA, 120 bp, Artificial Sequence
  ENSG00000120458_10 (sequence is synthesized)
ggcctttatgccattggctatgaagaatgtattgagaggcccctctcaccacacatggagcaaagttccctggacccaggaaaagagggccgggttgacctggaaaccctttcagcacaa

SEQ ID NO: 237428 - DNA, 120 bp, Artificial Sequence
  ENSG00000120458_11 (sequence is synthesized)
gcctcattacaggtggaaatagaacccacccgaattatctattgctacctcgggattgctgaggtcaggactctacagcagtgcttatttttacatttccaagcgaataccaaaaccttc

SEQ ID NO: 237429 - DNA, 120 bp, Artificial Sequence
  ENSG00000120458_12 (sequence is synthesized)
agcaaagattgggttggtattaacgggtttttgtctcagaactgtattgtggatcccggagtttcccccaaatccatctacatcaaatttgtagaagtagagagggattttctttccgca

SEQ ID NO: 237430 - DNA, 120 bp, Artificial Sequence
  ENSG00000120458_13 (sequence is synthesized)
ggctctttagttgagtgcctggaaaaagccattggataccccttaaaatttaacaactgaatgtcatccttcataaggatttgggctcttagctccttcttctctactcacttcccatta

SEQ ID NO: 237431 - DNA, 120 bp, Artificial Sequence
  ENSG00000120458_14 (sequence is synthesized)
cccggaccacccctcatccagatgccgccgtcagactcttcatggaaaccctttcttcaattgggccagtacgacttctaaggaatcatagtagacttgggccagaaaaaacagacctca

SEQ ID NO: 237432 - DNA, 120 bp, Artificial Sequence
  ENSG00000120458_15 (sequence is synthesized)
cctgaaaatgctcattttgagcaagcaagatatatagcgaacttgcatggtgggtcagctatttcttttttaaaaacagaaaaacaatttttaaatggattttagagccctaatataaac

SEQ ID NO: 237433 - DNA, 120 bp, Artificial Sequence
  ENSG00000120458_16 (sequence is synthesized)
aaatgtaggtacattccatattggacaaaacttatactttgagtttcatatgaaattgaaaaattgtatttttttcacaatgtttcatttttacacatctctatgtctctatataagtaa

SEQ ID NO: 237434 - DNA, 120 bp, Artificial Sequence
  ENSG00000120458_17 (sequence is synthesized)
tatttacaaccctgaataaataagcaatagataatggcaagttaaatcttgattcacagttaaaaagactttttcaatatcacccttagctactattgtatataatttagattttcattt

SEQ ID NO: 237435 - DNA, 120 bp, Artificial Sequence
  ENSG00000120458_18 (sequence is synthesized)
ttttcaccagccaagtgttttgctatttccaatcagtattgcttgcaaagacctttgtttctgtgatgtaccaactttacagttgtgttgccatttaaacctttttttaaaaaaaaaaaa

SEQ ID NO: 237436 - DNA, 120 bp, Artificial Sequence
  ENSG00000120458_19 (sequence is synthesized)
cgggagcgcatcaagctggttcgatgcccagaactgaatgctgtgctccagctgtggcctcaccggtgctgaatagagaggaagagccaccttcatagcttacatgagctggagtcagat

SEQ ID NO: 237437 - DNA, 120 bp, Artificial Sequence
  ENSG00000120458_20 (sequence is synthesized)
aatctgttcctcactccagcgccctcatgcccccacccttctcttcagctcggggcttcggcgcgcctcgtccccgcccttcgccccgggagaggagcgggcggcgtgggagggctcgcg

SEQ ID NO: 237438 - DNA, 120 bp, Artificial Sequence
  ENSG00000120458_21 (sequence is synthesized)
gagaaaggcccaggggagtggacgacctccgcccggcagccacatcctcagcagcagagacccggagccatccgcccgcgggcgagccaggcccgagggcagccccggagaccgcggtgg

SEQ ID NO: 237439 - DNA, 120 bp, Artificial Sequence
  ENSG00000120458_22 (sequence is synthesized)
agtattgaccagttataaacacaaagtgagtgagtcattgatagccagattcagaatgaagtgcaagctgataggattcagtcctggacagttccccacaaagactgaggctccagagag

SEQ ID NO: 237440 - DNA, 120 bp, Artificial Sequence
  ENSG00000120458_23 (sequence is synthesized)
ctggttcgatgcccagaactgaatgctgtgctccagctgtggcctcaccggtgctgaatagagaggaagagccaccttcatagcttacatgtgattcctctgcttatacaacccaatact

SEQ ID NO: 237441 - DNA, 120 bp, Artificial Sequence
  ENSG00000120458_24 (sequence is synthesized)
ctaaatggaacagaattatttttattcttgtccttttaaaatcatgtctgcagtgaaattaagctttaagctcctagctagaaatccactggtgaccttgaagaattttatacttgtaga

SEQ ID NO: 237442 - DNA, 120 bp, Artificial Sequence
  ENSG00000120458_25 (sequence is synthesized)
gctggtttctgatgttacatataaatgtatgcatctcattatataagagctatatttataaatctgacattggacagtgtttgacactagaataaaagcctggttttggaaagtatggaa

SEQ ID NO: 237443 - DNA, 120 bp, Artificial Sequence
  ENSG00000120458_26 (sequence is synthesized)
gtgaaaatagttaacatattggcttatggagagcaatctcacgtttaggataaatttagtctggcagtgcctacaaattaagtctgaggtgaactacttttgaacagttgagttagaaag

SEQ ID NO: 237444 - DNA, 120 bp, Artificial Sequence
  ENSG00000120458_27 (sequence is synthesized)
tatttggtagccaccagggaaaagagatcttatttcaagaaaataattagtgaaactcagtaaagtagaagggagattagaaggaacaaagggaggcagagatgggatagagactggttg

SEQ ID NO: 237445 - DNA, 120 bp, Artificial Sequence
  ENSG00000120458_28 (sequence is synthesized)
caacttaactaaatttggaagctgggattaagcccttgatttatcttttgaaatgccatataagatagcataagatgtaccattaaattcaggaaactgggctaataatcagaaatatgt

SEQ ID NO: 237446 - DNA, 120 bp, Artificial Sequence
  ENSG00000120458_29 (sequence is synthesized)
gttagaaataaagaccatggtaaaaatggaagggttgtacaagagaataaaattattcaggttttgtctgtggatttgcataatgatatttatttgctgtgtgccacatggcagaaaagg

SEQ ID NO: 237447 - DNA, 120 bp, Artificial Sequence
  ENSG00000120458_30 (sequence is synthesized)
aagtgaaataacacccctctgtcccgtccttttccccagaaagaaatcactggcttcatttgttggtttgtttagctggcagcttgagttggtagaacagacgagtagattgtctagctt

SEQ ID NO: 237448 - DNA, 120 bp, Artificial Sequence
  ENSG00000120458_31 (sequence is synthesized)
tagacgtaggtattagtgtactgtttcttgatcattgatgtttgagacctggaatttgtagcattattgatttgacctctgttttaaattttagcggcttccacaaagactgagttagta

SEQ ID NO: 237449 - DNA, 120 bp, Artificial Sequence
  ENSG00000120458_32 (sequence is synthesized)
aggaatacaactatgtaagtaatatgttttactagctaatttgtctaggcaattatttttaccctgtattcattccttcttaatcaagagtaaggcaggtattctttgctttgggaaatt

SEQ ID NO: 237450 - DNA, 120 bp, Artificial Sequence
  ENSG00000120458_33 (sequence is synthesized)
cttctttctgtcctcccttccctcactttttccaaattctgggcacaacagcagctctctctcttctgtggcaggtgtgcatcctattggctggctggtatttcttgttttttttccccc

SEQ ID NO: 237451 - DNA, 120 bp, Artificial Sequence
  ENSG00000120458_34 (sequence is synthesized)
ttattctttttaaatgggggtgggggtataaaaatatgtgtatggggtacatgcaataatgttgtaatgtttcttgttgtttaatggataattaattgcaaaataattgttttaattata

SEQ ID NO: 237452 - DNA, 120 bp, Artificial Sequence
  ENSG00000120458_35 (sequence is synthesized)
acatgtttgagtaaatgctaaattagtatttttttctaatataataatgaatttgaaatctagcattcctgtaacaatgtgtctatgtttgtctgtctgtgtctgtctaatagtaattaa

SEQ ID NO: 237453 - DNA, 120 bp, Artificial Sequence
  ENSG00000120471_0 (sequence is synthesized)
ccctgagaggccgtgctcgggctcgcctgctcagctcactccgaaagcctctgctcagacctgcacccagtcacagcagcacagatgtgcaggaggagaccatttccacggaccctccga

SEQ ID NO: 237454 - DNA, 120 bp, Artificial Sequence
  ENSG00000120471_1 (sequence is synthesized)
ctcctaggaggcagtcccttagggactggccctaacaacaaatgaggagaagccaagttctctgctttctgcagacagggcctcccctggatgggatcttcctctgaggcgagcttcaga

SEQ ID NO: 237455 - DNA, 120 bp, Artificial Sequence
  ENSG00000120471_2 (sequence is synthesized)
tctgctcaagcttcctgcagtggggccaggaggcagggcctgggcaggggagaccagaacctctcggtgatgcctccgaatggcagggctcagacacacacacctggctgggtttcagat

SEQ ID NO: 237456 - DNA, 120 bp, Artificial Sequence
  ENSG00000120471_3 (sequence is synthesized)
tgtctggatcctgacaggccttggtctaggtctctccaggcctttccttcctggagccacagtgcttagagacaggccactggggtcagcatttgagctcagctatgatcagaaaaaagc

SEQ ID NO: 237457 - DNA, 83 bp, Artificial Sequence
  ENSG00000120471_4 (sequence is synthesized)
caaaaacaaacaaacaaacagaaagcaccgtcgagaaatggctccagcgctgactagcggccacctcatttccccccttgacc

SEQ ID NO: 237458 - DNA, 120 bp, Artificial Sequence
  ENSG00000120471_5 (sequence is synthesized)
ccagcgctgactagcggccacctcatttccccccttgaccactgggccagttgggtggctaggttgcctcattttgcatccttctgtatccccaaatctgaaataaaagctggaaaaaaa

SEQ ID NO: 237459 - DNA, 120 bp, Artificial Sequence
  ENSG00000120471_6 (sequence is synthesized)
gtctcgtctggatcttggtcctcagcaactgtctggatcctgacagtgcagtaagagcttgcctggcctgtgtgcagagctgcctcatcctgaaattctgggagttgaaagccccagggc

SEQ ID NO: 237460 - DNA, 120 bp, Artificial Sequence
  ENSG00000120471_7 (sequence is synthesized)
aacccttaaccaatgggggaaaagcattggtgtgtaaatcccccagcttccctgggtgggctgcagctgagccatagtctacatgacacttccgaggatccccagtgggcatgacctcaa

SEQ ID NO: 237461 - DNA, 120 bp, Artificial Sequence
  ENSG00000120471_8 (sequence is synthesized)
tcgcccacattggatgccacaacctgcactggcttttctcccttccctgtgggtctctctctgcacttcctcccttgtgcattctaggttcaccttccaaataaatgatgtgcactcagg

SEQ ID NO: 237462 - DNA, 120 bp, Artificial Sequence
  ENSG00000120471_9 (sequence is synthesized)
atcctgacaggtctctccaggcctttccttcctggagccacagtgcttagagacaggccactggggtcagcatttgagctcagctatgatcagaaaaaagcaccgttgaggttgcagtga

SEQ ID NO: 237463 - DNA, 120 bp, Artificial Sequence
  ENSG00000120471_10 (sequence is synthesized)
gtgggaagttggaaaaaataatctgcaaggtaaacaccttcaagtcaatttcaagaggctggctagaaaccgccaggacttcagggggccctgtctcgcgggtctccctgcgccctcagc

SEQ ID NO: 237464 - DNA, 120 bp, Artificial Sequence
  ENSG00000120471_11 (sequence is synthesized)
actttggcttggtataaggccaccttgtccctgaagagaggcctattttaagctgagcaagaaaaggtgagaaagactaaaatcagctttgtgcagagacgccaatttctgctgcacaca

SEQ ID NO: 237465 - DNA, 120 bp, Artificial Sequence
  ENSG00000120471_12 (sequence is synthesized)
tggaaacgatgtgcacatacagcgagctggcccagctcccggccacgtggctcacactgtccgtgctcacccacccgttgccttcacccccagcagcactggttgtgaaaagggtaactg

SEQ ID NO: 237466 - DNA, 120 bp, Artificial Sequence
  ENSG00000120471_13 (sequence is synthesized)
aaaccgagacggtcttttgcctgccacagccccgggcagactctgctctcaccgtggtgccgacatcccaagttttcagactcaccaggacccagtgacagcatctgggtcctcagagct

SEQ ID NO: 237467 - DNA, 120 bp, Artificial Sequence
  ENSG00000120471_14 (sequence is synthesized)
gcatgcggactgtccccagttcagagcattggacagagctgggaactgacagccctgatcaatagtcccaagaggaaggccagccctcctcctcctcggaatcctgggtttctaggaggc

SEQ ID NO: 237468 - DNA, 120 bp, Artificial Sequence
  ENSG00000120471_15 (sequence is synthesized)
agaaaggttttctgagaaacaaggcttttggaaggaaggtggtgcctggctgcatccagaaagtgagagctaaatggagaggctgaacaaaggacgcatgtggagcgcatggggagggaa

SEQ ID NO: 237469 - DNA, 120 bp, Artificial Sequence
  ENSG00000120471_16 (sequence is synthesized)
ggctggggtgcagggctccgggcctgctcttctgcgtccaccccggatcctgcttttgtccagatgggcctcggagcaccagtcacttactccaagaagtcgtttcctgtggccaataat

SEQ ID NO: 237470 - DNA, 120 bp, Artificial Sequence
  ENSG00000120471_17 (sequence is synthesized)
gaagatgacgcactcggaagcttgtgggctctgaggagggggtaaggatgcaggggccatgcattcatcccagcacaggcagcgcatggctccggaagcagacacaggccaggcctgggc

SEQ ID NO: 237471 - DNA, 120 bp, Artificial Sequence
  ENSG00000120471_18 (sequence is synthesized)
caggagtctgccaggagccaggagcgcctacacctccctggaggcccacacttctctccccagaagctcacacgcagcgtctgaggtgcagggcccaggtgtgctggggtgacaaagccc

SEQ ID NO: 237472 - DNA, 120 bp, Artificial Sequence
  ENSG00000120471_19 (sequence is synthesized)
ctgtggtgatgggagggaggaagcgccggtttatgtctgttctttgggctgatttgctgtctctgtctttgtctctaatgtcctttgcaccactgaccttgaggagccttttgttcctcc

SEQ ID NO: 237473 - DNA, 120 bp, Artificial Sequence
  ENSG00000120471_20 (sequence is synthesized)
tgtcccagtttggtttccatgggaacctgagtggcagcgtcatcactttgctgaggtgaaatgcccctggatgccatgaatacctaggggaaaacctgccagagaagaataaaccatcca

SEQ ID NO: 237474 - DNA, 120 bp, Artificial Sequence
  ENSG00000120471_21 (sequence is synthesized)
agagacggcgctgcagggcctcacagtctgcttccatttcctctcaggtttcagatcccttagttttgggtgcccaagttcacggagggtgccggggaatagaagctctgtcagtctcgt

SEQ ID NO: 237475 - DNA, 120 bp, Artificial Sequence
  ENSG00000120471_22 (sequence is synthesized)
ctggatcttggtcctcagcaactgtctggatcctgacaggtgtgtgataattacttagtgaattcatgggtgtgggccgtgatagaattaagtgatttgatgtcctctcgataaatccag

SEQ ID NO: 237476 - DNA, 120 bp, Artificial Sequence
  ENSG00000120471_23 (sequence is synthesized)
gtaacgacatagggttttttgagtttgaccctctcctgaaatttgccatctgacaaaatgacatcatggcagagttgtaaactgctgtggatgtattttatttaatttctcaaattaaaa

SEQ ID NO: 237477 - DNA, 120 bp, Artificial Sequence
  ENSG00000120471_24 (sequence is synthesized)
taaaaggtaacggtacacttaagagtggtcactacagccaagctaattgacacccactgaactttctggaatgggccataggatgctggacaataggacagatttggaatgagcagtctt

SEQ ID NO: 237478 - DNA, 120 bp, Artificial Sequence
  ENSG00000120471_25 (sequence is synthesized)
ccattccaactttagtttctgcaaagctgttgagagcatggagccaggctgcggggtctgggttcaaatcctgactctaccacttaggagctgtgtgtacatgggcaggacaactggcct

SEQ ID NO: 237479 - DNA, 120 bp, Artificial Sequence
  ENSG00000120471_26 (sequence is synthesized)
gcctgagtctcagtgtaggtgtctgtaaaatggaatgataatagcttccatctcacagattcactgtgtgggtaaaatgatagatatgaaatgctaagaacagcacctgtacgtagtatg

SEQ ID NO: 237480 - DNA, 120 bp, Artificial Sequence
  ENSG00000120471_27 (sequence is synthesized)
tcctacatatcttactgttatcattagcatattttgtttattccaagatacatttttgttggcccatttgatatctatgaaatctaaagattttttttcctgtcttgggagatagaataa

SEQ ID NO: 237481 - DNA, 120 bp, Artificial Sequence
  ENSG00000120471_28 (sequence is synthesized)
tgatgtgccttacaatggattgtgttttagattcactgaaattcattattgttgtttttatccctggtctgtaacatgatatttggtaaataacaaggactccatacgttttgcaaagag

SEQ ID NO: 237482 - DNA, 120 bp, Artificial Sequence
  ENSG00000120471_29 (sequence is synthesized)
tgctgaggtttcagatcccttagttttgggtgcccaagttcacggagggtgccggggaatagaagctctgtcagtctcgtctggatcttggtcctcagcaactgtctggatcctgacagg

SEQ ID NO: 237483 - DNA, 76 bp, Artificial Sequence
  ENSG00000120498_0 (sequence is synthesized)
gttgttgaaaacctggttacaaatgataattcacctaacataccagaggcaattgatagactcttcagcgacatag

SEQ ID NO: 237484 - DNA, 120 bp, Artificial Sequence
  ENSG00000120498_1 (sequence is synthesized)
aacataccagaggcaattgatagactcttcagcgacatagcaaatatcaacagggagtctatggctgaaataacagacattcagattgaagaaatggcagtaaacctatggaactgggca

SEQ ID NO: 237485 - DNA, 120 bp, Artificial Sequence
  ENSG00000120498_2 (sequence is synthesized)
cttaccataggaggaggttggcttgtaaatgaagagcagaaaattagattacattatgttgcttgcaagttgctgagtatgtgtgaagcctcatttgcctcagaacaaagtattcaacga

SEQ ID NO: 237486 - DNA, 120 bp, Artificial Sequence
  ENSG00000120498_3 (sequence is synthesized)
ctgattatgatgaatatgagaataggaaaagaatggttggatgctggaaattttctaatcgctgatgaatgttttcaagctgctgtggccagtctggagcaattatacgtcaaattaatt

SEQ ID NO: 237487 - DNA, 120 bp, Artificial Sequence
  ENSG00000120498_4 (sequence is synthesized)
caaaggagctcccctgaggctgacttgaccatggagaagattactgttgagagtgaccacttcagagtgctttcttaccaagcagagtcagcagttgctcaaggggattttcaaagagca

SEQ ID NO: 237488 - DNA, 120 bp, Artificial Sequence
  ENSG00000120498_5 (sequence is synthesized)
tctatgtgtgtactgcaatgtaaagatatgttgatgaggctcccccagatgacttcaagtcttcatcatctctgttacaactttggagtagaaacccagaagaataataaatatgaagaa

SEQ ID NO: 237489 - DNA, 120 bp, Artificial Sequence
  ENSG00000120498_6 (sequence is synthesized)
agttctttctggcttagccaaagctatgatattgggaagatggataagaaatctactgggccagaaatgctggctaaagttctacggctattagccacgaattatttggattgggatgac

SEQ ID NO: 237490 - DNA, 120 bp, Artificial Sequence
  ENSG00000120498_7 (sequence is synthesized)
accaaatattatgataaggctctcaatgctgtaaacctagcaaacaaggaacatttaagttctcctgggcttttcttaaaaatgaaaatcctcttgaaaggcgaaacatctaatgaagaa

SEQ ID NO: 237491 - DNA, 120 bp, Artificial Sequence
  ENSG00000120498_8 (sequence is synthesized)
ctccttgaagctgtcatggaaatactacatcttgacatgcccttagacttctgtctgaacattgctaaactgctgatggatcatgaaagagaatctgttgggtttcatttcctgacgatt

SEQ ID NO: 237492 - DNA, 120 bp, Artificial Sequence
  ENSG00000120498_9 (sequence is synthesized)
attcatgaacgttttaagtcatcggaaaatattggaaaagttctgatactccatactgacatgcttttacaaaggaaggaagaacttcttgccaaggagaagattgaagaaatcttttta

SEQ ID NO: 237493 - DNA, 120 bp, Artificial Sequence
  ENSG00000120498_10 (sequence is synthesized)
gctcaccaaacaggaagacaactgacagcagaatcaatgaactggttacacaacattctgtggagacaagctgccagtagttttgaggtacaaaattacactgatgccctacaatggtac

SEQ ID NO: 237494 - DNA, 120 bp, Artificial Sequence
  ENSG00000120498_11 (sequence is synthesized)
tattattctctgaggttttattcaactgatgaaatggatctggacttcaccaagctgcagaggaacatggcttgctgttacctgaatttgcaacaacttgataaggccaaagaggcagtg

SEQ ID NO: 237495 - DNA, 120 bp, Artificial Sequence
  ENSG00000120498_12 (sequence is synthesized)
caataattactttagagaatatattaacagatgaagagtcagaagataatgatctagttgcagagagaggttcacctaccatgcttctaagtttagctgcccagtttgctctagagaatg

SEQ ID NO: 237496 - DNA, 120 bp, Artificial Sequence
  ENSG00000120498_13 (sequence is synthesized)
gacaacaaattgtggcagaaaaagctttggaatatttagctcaacattcagaagaccaggaacaagttcttacagctgtaaagtgtttgcttcgttttcttcttccaaaaattgctgaaa

SEQ ID NO: 237497 - DNA, 120 bp, Artificial Sequence
  ENSG00000120498_14 (sequence is synthesized)
tgccggaatctgaagataagaagaaagaaatggatcgacttttgacttgcctgaatagagcctttgtgaaactttctcagccttttggtgaagaagccttaagtttggagtcaagagcta

SEQ ID NO: 237498 - DNA, 120 bp, Artificial Sequence
  ENSG00000120498_15 (sequence is synthesized)
atgaagctcagtggtttcgaaaaacagcttggaacttggctgtgcaatgtgacaaagatccagtgatgatgagagagttttttatactttcttataagatgtcccagttttgtccttctg

SEQ ID NO: 237499 - DNA, 120 bp, Artificial Sequence
  ENSG00000120498_16 (sequence is synthesized)
atcaagtaattctgattgcacggaaaacatgtttacttatggcagttgcagttgatctagagcaagggagaaaagcttcaacagcttttgaacagaccatgttcctgagtcgtgcacttg

SEQ ID NO: 237500 - DNA, 120 bp, Artificial Sequence
  ENSG00000120498_17 (sequence is synthesized)
aggagatccagacatgcaatgacatccataatttcctgaaacaaacagggaccttctcaaatgattcatgtgagaaattgcttctgctgtacgagtttgaagttagagccaaattgaatg

SEQ ID NO: 237501 - DNA, 120 bp, Artificial Sequence
  ENSG00000120498_18 (sequence is synthesized)
atccattactggaaagcttcctggaatcagtgtgggagttgcctcatttagaaactaaaacttttgaaacaattgcaataatagcaatggaaaagcctgcacactatcctttgattgctc

SEQ ID NO: 237502 - DNA, 120 bp, Artificial Sequence
  ENSG00000120498_19 (sequence is synthesized)
tcaaggccttgaaaaaggctttattgctctacaaaaaggaagaaccaattgatatatcacaatacagcaaatgtatgcacaacttggttaacctctcagtgccagatggggcgtcgaatg

SEQ ID NO: 237503 - DNA, 120 bp, Artificial Sequence
  ENSG00000120498_20 (sequence is synthesized)
tagagctctgtcccctggaagaagtttggggctattttgaagatgctctgagccacattagccgcactaaagactacccagaaatggagattctctggctgatggtcaagtcctggaata

SEQ ID NO: 237504 - DNA, 120 bp, Artificial Sequence
  ENSG00000120498_21 (sequence is synthesized)
ccggagtacttatgtttagcaggagcaagtatgcatctgctgaaaagtggtgtggcctggccttgcgtttccttaaccaccttacctccttcaaggaaagctatgaaactcagatgaata

SEQ ID NO: 237505 - DNA, 120 bp, Artificial Sequence
  ENSG00000120498_22 (sequence is synthesized)
tgctgtatagtcagcttgtggaagcattgagtaacaacaagggcccagtttttcatgaacatggctactggagcaagtcagattaggcaagctcatggccacatgaagaagatacattgt

SEQ ID NO: 237506 - DNA, 120 bp, Artificial Sequence
  ENSG00000120498_23 (sequence is synthesized)
cccgagatgctgactgtttaaatttttgccagagtttctcttgagcttttgtttctgtttgctcagaccctgttttcatgttgttgaataaactttctaaaataaaagcatgctgaattt

SEQ ID NO: 237507 - DNA, 120 bp, Artificial Sequence
  ENSG00000120498_24 (sequence is synthesized)
gtgcgctgtggacggaggttgtggagagagcagggcggcattggtggctgcggctgaggcttgagccagagatttaaaaatggacaatgatgattttttttccatggactttaaagatgg

SEQ ID NO: 237508 - DNA, 120 bp, Artificial Sequence
  ENSG00000120498_25 (sequence is synthesized)
ggagttttctgaacgtcctcgtgcgctgtggacggaggttgtggagagagcagggcggcattggtggctgcggctgaggcttgagccagagatttaaaaatggacaatgatgattttttt

SEQ ID NO: 237509 - DNA, 120 bp, Artificial Sequence
  ENSG00000120498_26 (sequence is synthesized)
agtatcacctcagcatacacagattgaaaaatgttagaaaccaggaagacaactctacttttttgcattgggggaataaacaaaccaactaaccaactaaaataatacacttactccaac

SEQ ID NO: 237510 - DNA, 120 bp, Artificial Sequence
  ENSG00000120500_0 (sequence is synthesized)
agagctggagactgatgtgaacttcatctctctccccagaaaaggctcaacatcaactatatagccaacatgtccaaggtgtttaagaagaccagctccaatgggaagctctccatctac

SEQ ID NO: 237511 - DNA, 120 bp, Artificial Sequence
  ENSG00000120500_1 (sequence is synthesized)
ctggggaaacgggacttcgtggaccatgtggacacggtggaacccattgacggtgttgtcctggttgatcctgagtacttaaaatgtcgaaagttgtttgtcatgttgacatgtgccttt

SEQ ID NO: 237512 - DNA, 120 bp, Artificial Sequence
  ENSG00000120500_2 (sequence is synthesized)
cgctatggccgtgatgacttggaagtgattggtctgacgttccgaaaagatctgtatgtgcagaccctgcaagtggtcccagctgaatccagcagccctcaggggcccctcacagtccta

SEQ ID NO: 237513 - DNA, 120 bp, Artificial Sequence
  ENSG00000120500_3 (sequence is synthesized)
caggagcgactactgcacaagctaggggacaatgcctacccctttaccctgcagatggtgaccaacctgccctgttctgtgacactgcagccaggtcctgaagatgcaggaaagccctgt

SEQ ID NO: 237514 - DNA, 120 bp, Artificial Sequence
  ENSG00000120500_4 (sequence is synthesized)
gggattgactttgaagtgaagagtttctgtgctgaaaacccagaggagacagtctccaagagagactatgtgcggctggttgtccggaaagtacaatttgcaccaccggaggcaggccct

SEQ ID NO: 237515 - DNA, 120 bp, Artificial Sequence
  ENSG00000120500_5 (sequence is synthesized)
tgtttctatcaacaactgcaccaacaaggtcatcaaaaaaatcaagatttcagttgaccagatcacagatgttgtcctgtattcactagacaagtacaccaagactgtgttcattcagga

SEQ ID NO: 237516 - DNA, 120 bp, Artificial Sequence
  ENSG00000120500_6 (sequence is synthesized)
attcacggagactgtagctgctaattccagcttctcccagagctttgcagtaaccccaatcctggctgccagctgccagaaacggggcctggcactggatggcaaacttaagcatgaaga

SEQ ID NO: 237517 - DNA, 120 bp, Artificial Sequence
  ENSG00000120500_7 (sequence is synthesized)
taccaacctggcctctagcacaattattagaccgggaatggacaaagagctgctggggatcctggtgtcctacaaagtcagagtcaacctgatggtgtcctgtggtggcatcctaggaga

SEQ ID NO: 237518 - DNA, 120 bp, Artificial Sequence
  ENSG00000120500_8 (sequence is synthesized)
cctgacagccagcgatgttggtgtggagctacccttggtcctgatccatccgaagccatctcatgaggccgctagctctgaggacatagtcatcgaggagtttacgcggaaaggcgagga

SEQ ID NO: 237519 - DNA, 120 bp, Artificial Sequence
  ENSG00000120500_9 (sequence is synthesized)
ggagagccagaaggctgtggaggctgagggagatgaggggagctgagcacctcgctctggtgcccgtctgtgtgggagcccccactgtaacactctaataaatcagtttgttcagatgtg

SEQ ID NO: 237520 - DNA, 120 bp, Artificial Sequence
  ENSG00000120500_10 (sequence is synthesized)
tggaatacaagattgggaagccccattcccctcttcccatttccaccctccatgttatgacgatagaaatgtgaaaatgcttccttggggtgctttcaatacatgtgcagtggaaacata

SEQ ID NO: 237521 - DNA, 120 bp, Artificial Sequence
  ENSG00000120500_11 (sequence is synthesized)
tgatgtgaacttcatctctctccccagaaaaggctcaacatcaactatatagccaacatgtccaaggtgtttaagaagaccagctccaatgggaaggtgagagaacctggcccagctggg

SEQ ID NO: 237522 - DNA, 120 bp, Artificial Sequence
  ENSG00000120500_12 (sequence is synthesized)
ctgggttgggggtttcaggggaatccattcaaaaatgattgtgagaataacatgggaagttgttccacaacagctctccatctacctggggaaacgggacttcgtggaccatgtggacac

SEQ ID NO: 237523 - DNA, 120 bp, Artificial Sequence
  ENSG00000120500_13 (sequence is synthesized)
ggtggaacccattggtcagtgagtccaaaaaagggaagcctggggaaagaggaatggaaactagggagtaaaagaaagtccaggaaagaccgtgcagaaaaggaggcaaattaaagggaa

SEQ ID NO: 237524 - DNA, 120 bp, Artificial Sequence
  ENSG00000120509_0 (sequence is synthesized)
ggagggtcagctcgttgcaccctggcccggcctcttttcgaccctgcggagcatccgcttccggttcccagactgaattgtcagtgagcggagtctgaggtcgctgtggactgcccactg

SEQ ID NO: 237525 - DNA, 120 bp, Artificial Sequence
  ENSG00000120509_1 (sequence is synthesized)
ggccttgcccgagatggacagccggattccttatgatgactacccggtggttttcttgcctgcctatgagaatcctccagcatggattcctcctcatgagagggtacaccacccggacta

SEQ ID NO: 237526 - DNA, 120 bp, Artificial Sequence
  ENSG00000120509_2 (sequence is synthesized)
caacaatgagttgacccagtttctgccccgaaccatcacactgaagaagcctcctggagctcagttgggatttaacatccgaggaggaaaggcctcccagctaggcatcttcatctccaa

SEQ ID NO: 237527 - DNA, 120 bp, Artificial Sequence
  ENSG00000120509_3 (sequence is synthesized)
ggtgattcctgactctgatgcacatagagcaggactgcaggaaggggaccaagttctagctgtgaatgatgtggatttccaagatattgagcacagcaaggctgttgagatcctgaagac

SEQ ID NO: 237528 - DNA, 120 bp, Artificial Sequence
  ENSG00000120509_4 (sequence is synthesized)
cagcccacagcccttcatgtggactctgtcatgacatgctaactagacttcaggggagccacttctgttttcagcccctccctggaatagtgagttgggaggatggggagacagctaacc

SEQ ID NO: 237529 - DNA, 120 bp, Artificial Sequence
  ENSG00000120509_5 (sequence is synthesized)
aactgcattacccaaaccatattgcacttttagttccctagttttctaggtgagcttcattccctgaaaggaggatgatgatatctaggcataacctagcctgtgaggaacctagttagg

SEQ ID NO: 237530 - DNA, 120 bp, Artificial Sequence
  ENSG00000120509_6 (sequence is synthesized)
aaagacaactgacatttattgaatatcatgcactagtcccttacatatgtcatattttaattatagaaatcagtagcaaaaagaatcttggggattttccatctgacttccctggccatc

SEQ ID NO: 237531 - DNA, 120 bp, Artificial Sequence
  ENSG00000120509_7 (sequence is synthesized)
ttatcccatccttgcactaccagaagattcatacacttttgagactccagtgagacgctgttttcaccccttcctcctcctagcctctctcccaaaaagtaaaacacaatgctgaagaaa

SEQ ID NO: 237532 - DNA, 120 bp, Artificial Sequence
  ENSG00000120509_8 (sequence is synthesized)
ttttcgaccctgcggagcatccgcttccggttcccagactgaattgtcagtgagcggagtctgaggtcgctgtggactgcccactggattgtgaaaaatgaggtcctctttctagagtac

SEQ ID NO: 237533 - DNA, 120 bp, Artificial Sequence
  ENSG00000120509_9 (sequence is synthesized)
agctaagttaagagttttcttctgtcttccttctctcctccaaccttaacacctagatatgggctgggcctgtagactgactgccttggaatgggttggagctgctgtctgaaacttgct

SEQ ID NO: 237534 - DNA, 120 bp, Artificial Sequence
  ENSG00000120519_0 (sequence is synthesized)
gagactttcctgtcactggctactactactcccaaccctcctcaaagccgccggagcaacccccaggtctttactttacaatcggcaatttgacttgctctgctgcatgtctggagggac

SEQ ID NO: 237535 - DNA, 120 bp, Artificial Sequence
  ENSG00000120519_1 (sequence is synthesized)
caaggaaagtgtggagacgctccaaggattaggtgatcggagcttgaaaagaaaaaaagccaaacaaataaacaaaacccacccaccctaacaaatatgaggctgctggagagaatgagg

SEQ ID NO: 237536 - DNA, 120 bp, Artificial Sequence
  ENSG00000120519_2 (sequence is synthesized)
aaagactggttcatggtcggaatagtgctggcgatcgctggagctaaactggagccgtccataggggtgaatgggggaccactgaagccagaaataactgtatcctacattgctgttgca

SEQ ID NO: 237537 - DNA, 120 bp, Artificial Sequence
  ENSG00000120519_3 (sequence is synthesized)
acaatattctttaacagtggactatcattgaaaacagaggagctgaccagtgctttggtgcatctaaaactgcatctttttattcagatctttactcttgcattcttcccagcaacaata

SEQ ID NO: 237538 - DNA, 120 bp, Artificial Sequence
  ENSG00000120519_4 (sequence is synthesized)
tggctttttcttcagcttttatcaatcacacccatcaacgaatggcttttaaaaggtttgcagacagtaggttgcatgcctccgcctgtgtcttctgcagtgattttaaccaaggcagtt

SEQ ID NO: 237539 - DNA, 120 bp, Artificial Sequence
  ENSG00000120519_5 (sequence is synthesized)
ggtggaaatgaggcagctgcaatatttaattcagcctttggaagttttttgggcatcgttataacacccctgctcctgctgctttttcttggttcatcttcttctgtgcctttcacatct

SEQ ID NO: 237540 - DNA, 120 bp, Artificial Sequence
  ENSG00000120519_6 (sequence is synthesized)
attttttctcagctttttatgactgttgtggttcctctcatcattggacagattgtccgaagatacatcaaggattggcttgagagaaagaagcctccttttggtgctatcagcagcagt

SEQ ID NO: 237541 - DNA, 120 bp, Artificial Sequence
  ENSG00000120519_7 (sequence is synthesized)
gtactcctcatgatcatctacacaacattctgtgacacgttctctaacccaaatattgacctggataaattcagccttgttctcatactgttcataatattttctatccagctgagtttt

SEQ ID NO: 237542 - DNA, 120 bp, Artificial Sequence
  ENSG00000120519_8 (sequence is synthesized)
atgcttttaactttcatcttttcaacaaggaataattcgggtttcacaccagcagacacagtggctatcattttctgttctacacacaaatcccttacattgggaattccgatgctgaag

SEQ ID NO: 237543 - DNA, 120 bp, Artificial Sequence
  ENSG00000120519_9 (sequence is synthesized)
atcgtgtttgcaggccatgagcatctctctttaatatctgtacccttgctcatctaccacccagctcagatccttctgggaagtgtgttggtgccaacaatcaagtcttggatggtatca

SEQ ID NO: 237544 - DNA, 120 bp, Artificial Sequence
  ENSG00000120519_10 (sequence is synthesized)
aggcagaagggagtgaagctgacaaggccgacagtataacaaaggaggtggactttctgtagcaatgtatatatgtacaggattgtacatactagcaattctgaagacttgtacttgtga

SEQ ID NO: 237545 - DNA, 120 bp, Artificial Sequence
  ENSG00000120519_11 (sequence is synthesized)
atatgagatcctgtttaagtgccttaaaatgtatttgacaagagcgttatttccaaaatatgctttgttgattactgccaggggtggtacaatatttgggggttaattttgctttcctaa

SEQ ID NO: 237546 - DNA, 120 bp, Artificial Sequence
  ENSG00000120519_12 (sequence is synthesized)
tgcaggaatcagtcatggtaagtgacaaaaagcaaacatgctttccctgcagcacctttgtgcaatacaaccctatagtagttactgtaatgtttgaaatgaggtcacaccatcaggaaa

SEQ ID NO: 237547 - DNA, 120 bp, Artificial Sequence
  ENSG00000120519_13 (sequence is synthesized)
atgcccttctgatgacagtgaaaatttccaaagtcttattcatgcatactttgatttactgtgtgattctttttttctacgactgtgacatgcctcttccttatcaactcagcaggggtc

SEQ ID NO: 237548 - DNA, 120 bp, Artificial Sequence
  ENSG00000120519_14 (sequence is synthesized)
atagatcgaatagatgctgaaaagcgtaagatatatgcattccttgacatcatttttaaagacattccttcaaatagtttccacacagaaattcctcactcccattatgagagattgtgg

SEQ ID NO: 237549 - DNA, 120 bp, Artificial Sequence
  ENSG00000120519_15 (sequence is synthesized)
ttatatgtcttaaatttattataagctgcttcaaagaaagggtctgaatgtttgaattatgagtgaaatcatgtgaaattttgagttaaactctgtgatttgattttcagggtctttaaa

SEQ ID NO: 237550 - DNA, 120 bp, Artificial Sequence
  ENSG00000120519_16 (sequence is synthesized)
atatatcttaatatcttcttcctctttattcaataatttctgtcttgcacttacacactcataacagccaaatatgaggcacaaaaatgttacaatcagtttgaaagcagcatcaattaa

SEQ ID NO: 237551 - DNA, 120 bp, Artificial Sequence
  ENSG00000120519_17 (sequence is synthesized)
tggtagattctattcacattccacaacccagaccaaatttttttcctattacgcagatgtgctgagcactttccagattgcccctgttggccaaaagcagcctgttacatcctggaatta

SEQ ID NO: 237552 - DNA, 120 bp, Artificial Sequence
  ENSG00000120519_18 (sequence is synthesized)
agcacacttaaggtatttgagacaatttattaatgaaaatttccttggcagatttgacaaatgttggcaatatttttttagaagttaaatcatattgctttcatgaataaatgaaaatat

SEQ ID NO: 237553 - DNA, 120 bp, Artificial Sequence
  ENSG00000120519_19 (sequence is synthesized)
aaaggtcatggatgcaaacaaatgttacatatacacattctgtctctccagatgaaaagaacatgcaaaaccatttaataaccaaaatatcaagtaaaattagttcccaacggggcagca

SEQ ID NO: 237554 - DNA, 120 bp, Artificial Sequence
  ENSG00000120519_20 (sequence is synthesized)
gctttcaaatgagtgtccaatatttgcttctgctatagctgcaagaactgtaactggacccaagtagagaatgaagccacgtatagaactacgagaacacttttctgtgtttcccccatg

SEQ ID NO: 237555 - DNA, 120 bp, Artificial Sequence
  ENSG00000120519_21 (sequence is synthesized)
ccgtcctgtcacatcctcttacacgtcctctcttgatttgatagacaatattggcatcctgggtctcactgaggccgtgctatgtcctcagcagctgtttttgttgtttcgttattatgc

SEQ ID NO: 237556 - DNA, 120 bp, Artificial Sequence
  ENSG00000120519_22 (sequence is synthesized)
ccacaacaaaaaatcattccttagaaactcaccaagtttatctactgtgtaaatttatattattgttactaccaggtctcatcttttgtcaatgtcattgaataaatttcataagagtta

SEQ ID NO: 237557 - DNA, 120 bp, Artificial Sequence
  ENSG00000120519_23 (sequence is synthesized)
taggtaattgtgcttacctatggagcacaggaaggctcttaggttttgttcctacaagtttctttgaattttggagtaaatggaagtgtctgtctgtctgtcatctatctgccctatcat

SEQ ID NO: 237558 - DNA, 120 bp, Artificial Sequence
  ENSG00000120519_24 (sequence is synthesized)
aaaaatctttctccctaacattaaaatactgatccccgcccccaacttatctacctctattgtctaacacctatagtaggtgtgatcatgggataaaattcaactgaaaatgctatgata

SEQ ID NO: 237559 - DNA, 120 bp, Artificial Sequence
  ENSG00000120519_25 (sequence is synthesized)
acattttatcgtttgctttaaaaatgtgctttgttttcaaataatctttacatagtgaactttggtggcgttagtgatatgtttatgcctatttcttttttttacacaaattccttggca

SEQ ID NO: 237560 - DNA, 120 bp, Artificial Sequence
  ENSG00000120519_26 (sequence is synthesized)
ccttggcatattttttcataaagaacaaaaaataaaatcaaaatttatttttaattcatgcttattgggatttaattattcagagcttaaaatattttgttatgtttatacactgtaaag

SEQ ID NO: 237561 - DNA, 120 bp, Artificial Sequence
  ENSG00000120519_27 (sequence is synthesized)
tttatgcatttgttttgtctaaatgtatttatgaaagaaatacattagattatatttatgtttactcatttttccacctggattttttttaatggttgttacaaaattagattttttaat

SEQ ID NO: 237562 - DNA, 120 bp, Artificial Sequence
  ENSG00000120519_28 (sequence is synthesized)
gggtaataatgttggtattttcatgttttttcttagtattaaaatttttgtgggttttttaaaatttttccctattctgttaaaaattaacacacctctagctaatgttcagtgtttgtg

SEQ ID NO: 237563 - DNA, 120 bp, Artificial Sequence
  ENSG00000120519_29 (sequence is synthesized)
ctaaataccaaattttttcaaaaggattggttaagtcataaagtggattatttatgatgactggaagatgaaaataattatatgattaaacaaagaatgtttcagaaatcacaagagaaa

SEQ ID NO: 237564 - DNA, 120 bp, Artificial Sequence
  ENSG00000120519_30 (sequence is synthesized)
taacagtggactatcattgaaaacagagcttcttacttaatgcgattctgcgaagcagccaactttgtgggatgcaggagttgaagaaggaagaatgccacagctgtcagcatttctcta

SEQ ID NO: 237565 - DNA, 120 bp, Artificial Sequence
  ENSG00000120519_31 (sequence is synthesized)
aggactgacttcttttgtaagcacctaagaaaccttcagagtcatccagctaatttggatctaatgaaatgccgtgatctcgtgctttatcgtggtatctaagcagcaatcaaagccatt

SEQ ID NO: 237566 - DNA, 120 bp, Artificial Sequence
  ENSG00000120519_32 (sequence is synthesized)
tcttccatcaaaagcccttttcaaaagaatacaacattaagtcattttcaaaagccatataacttaagatgtcctagattgtatcattgtgtaatattaaaccacttctaaagcctgcta

SEQ ID NO: 237567 - DNA, 120 bp, Artificial Sequence
  ENSG00000120519_33 (sequence is synthesized)
gggattacgatttatatgtcttattaggtcctaaaatagttcatttttgcatacaagagacagtgaattattattgacttgagtttatttggaagcatttgtgttggtcccattcaagtt

SEQ ID NO: 237568 - DNA, 120 bp, Artificial Sequence
  ENSG00000120519_34 (sequence is synthesized)
tgatttatattgaacatttcttatatgactcatacattgatttaatgacatgtattctaaaatttgttttagtaatttgttaaaattataaaggacactgtgctaatgcaatgctgagtc

SEQ ID NO: 237569 - DNA, 120 bp, Artificial Sequence
  ENSG00000120519_35 (sequence is synthesized)
ttcagttttatgacaacttctagttttttgaaattttgttgtattgaagtgaaatatggttacatttaaaattcatatttagttcacttcaaacctgtagtttcagaggctttgtcactt

SEQ ID NO: 237570 - DNA, 120 bp, Artificial Sequence
  ENSG00000120519_36 (sequence is synthesized)
agccgactgtggcagggcgaatttgtttaaacaagtatcaattaagtgcttatggccacaaggcacggtgctggggatagaaacaaaggtgagcaggagacttaggggctgagaaaaggt

SEQ ID NO: 237571 - DNA, 120 bp, Artificial Sequence
  ENSG00000120519_37 (sequence is synthesized)
cctgagtagggcagaagatgcaggcttttatttttctgtaaaaattattatcttttatcctattagcagaaaagcaaatatagcaaactctaaactttagatgtgtgctgtttgtttcaa

SEQ ID NO: 237572 - DNA, 120 bp, Artificial Sequence
  ENSG00000120519_38 (sequence is synthesized)
gcccagagctatgagcctgactctcagcaaatgaatgagatggtcagataaagggttacaagagaaatcggtgtctaatgaaaatatttctacgtcccaattagagccctggttttaagc

SEQ ID NO: 237573 - DNA, 120 bp, Artificial Sequence
  ENSG00000120519_39 (sequence is synthesized)
aatgcttgatgctgtcaatgagactctggtataatcagtaaatgatgtggagtgtcttcttaagtttattttaatggattttgaccttattacatatgaataaacaaactatgatgcaga

SEQ ID NO: 237574 - DNA, 120 bp, Artificial Sequence
  ENSG00000120519_40 (sequence is synthesized)
ccactggctaacttgaataatccagaaggcttggaatatctatccatcaaatttgggcattaaaataaataccaagagtccatcctccagggagtgaagctgacaaggccgacagtataa

SEQ ID NO: 237575 - DNA, 120 bp, Artificial Sequence
  ENSG00000120519_41 (sequence is synthesized)
tggaagttttttggtaagtaaacatagtttaacttgtctattacaacttttgctgtgatattgtgtatatgaaagatttagtgaaagctggatttgttttactctttggttaagtataaa

SEQ ID NO: 237576 - DNA, 120 bp, Artificial Sequence
  ENSG00000120519_42 (sequence is synthesized)
aattgttgaatcttttcatgtgccagtatccataccctgaagaaaagtagttaatgaataaagcaaatgttctcttacaatatattttggaggtttgggttttaaaattccatttaatga

SEQ ID NO: 237577 - DNA, 120 bp, Artificial Sequence
  ENSG00000120519_43 (sequence is synthesized)
aatatattgatcatttaatgaggtcttttagattattattattttgtatcatgggactgaggattttgaaaaggaaacatgacccagctggtcagaaagggaatgctaatttacttgttg

SEQ ID NO: 237578 - DNA, 120 bp, Artificial Sequence
  ENSG00000120519_44 (sequence is synthesized)
acatgccatttattttgtacatttcactgtcaaagaagctactggcttggatgcttctgagaaatctatgtgaaaaaaaatttgaaaggaagatatgactaatgagtaatttgcaagtaa

SEQ ID NO: 237579 - DNA, 120 bp, Artificial Sequence
  ENSG00000120519_45 (sequence is synthesized)
tctatatatatatatatataaagattcaaaagtagttcagctttcataagtagaaccaatataaggacgttgttttagcatttttaatcattatttttaaataaatgatgtaacagaggc

SEQ ID NO: 237580 - DNA, 120 bp, Artificial Sequence
  ENSG00000120519_46 (sequence is synthesized)
acagaggcttgatttgtgttatgaaagattgagaaactaaattttctgttgatttaatttttttgtgccttaaaactttgttaaattcctgaagttaattatcatattgtattttttggg

SEQ ID NO: 237581 - DNA, 120 bp, Artificial Sequence
  ENSG00000120519_47 (sequence is synthesized)
gcataactcattagcagatatgtagtgcagtgatttacaaataattgagagtaaaatcagtgatgtataaactagttcatgagtctaggtaaaatatcaattacctctgtttaaaatgct

SEQ ID NO: 237582 - DNA, 120 bp, Artificial Sequence
  ENSG00000120519_48 (sequence is synthesized)
ctgttaattattattgtatgtatttaaatgtagttaaagcttttaaacatgttgttacatagtgttaattctacatagtgctacacagcttttagtgtcacatagccttacagagtttat

SEQ ID NO: 237583 - DNA, 120 bp, Artificial Sequence
  ENSG00000120519_49 (sequence is synthesized)
aatgatgtagcatctgcaaaatatatgcatagcttatatcctatttttatagagccagtaatggtttttgtgatgctgtattacttctgggttttagacaataaagtctgtttaacaaaa

SEQ ID NO: 237584 - DNA, 120 bp, Artificial Sequence
  ENSG00000120519_50 (sequence is synthesized)
gcctccgcctgtgtcttctgcagtgattttaaccaaggcagttggtggaaatgaggaccctccttgcctggtgtcatttcttgagctctcctgggaggagattagtctaaaacaacaaag

SEQ ID NO: 237585 - DNA, 120 bp, Artificial Sequence
  ENSG00000120519_51 (sequence is synthesized)
cattcccattattaacagtctgagaaaatttgtttctctaattaacccttttgttggaataaccttaaattttagtgagtatatttctgttttgatatgttttcttttgtgcagtattaa

SEQ ID NO: 237586 - DNA, 120 bp, Artificial Sequence
  ENSG00000120519_52 (sequence is synthesized)
gtgcacacaccaaaaaagagaaatgaaaaggtactctcgtgcttgattgaaatctctaagccattattcttctcccaaatagatacgctatcaagtgtgttatcatttatcatgaaatga

SEQ ID NO: 237587 - DNA, 120 bp, Artificial Sequence
  ENSG00000120526_0 (sequence is synthesized)
agtctctgtgcgaggcgtgaagcgcggacctttcaacaagggctttattaattctcacgctgcggccctggaaagcgatggaggtggcggctaattgctccctacgggtgaagagacctc

SEQ ID NO: 237588 - DNA, 120 bp, Artificial Sequence
  ENSG00000120526_1 (sequence is synthesized)
tgttggatccccgcttcgagggttacaagctctctcttgagccgctgccttgttaccagctggagcttgacgcagctgtggcagaggtaaaacttcgagatgatcaatatacactggaac

SEQ ID NO: 237589 - DNA, 120 bp, Artificial Sequence
  ENSG00000120526_2 (sequence is synthesized)
acatgcatgcttttggaatgtataattacctgcactgtgattcatggtatcaagacagtgtctactatattgatacccttggaagaattatgaatttaacagtaatgctggacactgcct

SEQ ID NO: 237590 - DNA, 120 bp, Artificial Sequence
  ENSG00000120526_3 (sequence is synthesized)
taggaaaaccacgagaggtgtttcgacttcctacagatttgacagcatgtgacaaccgtctttgtgcatctatccatttctcatcttctacctgggttaccttgtcagatggaactggaa

SEQ ID NO: 237591 - DNA, 120 bp, Artificial Sequence
  ENSG00000120526_4 (sequence is synthesized)
gattgtatgtcattggaacaggtgaacgtggaaatagcgcttctgaaaaatgggagattatgtttaatgaagaacttggggatccttttattataattcacagtatctcactgctaaatg

SEQ ID NO: 237592 - DNA, 120 bp, Artificial Sequence
  ENSG00000120526_5 (sequence is synthesized)
ctgaagaacattctatagctaccctacttcttcgaatagagaaagaggaattggatatgaaaggaagtggtttctatgtttctctggagtgggtcactatcagtaagaaaaatcaagata

SEQ ID NO: 237593 - DNA, 120 bp, Artificial Sequence
  ENSG00000120526_6 (sequence is synthesized)
ataaaaaatatgaaattattaagcgtgatattctccgtggaaagtcagtgccacattatgctgctattgagcctgatggaaatggtctaatgattgtatcctacaagtctttaacatttg

SEQ ID NO: 237594 - DNA, 120 bp, Artificial Sequence
  ENSG00000120526_7 (sequence is synthesized)
ttcaggctggtcaagatcttgaagaaaatatggatgaagacatatcagagaaaatcaaagaacctctgtattactggcaacagactgaagatgatttgacagtaaccatacggcttccag

SEQ ID NO: 237595 - DNA, 120 bp, Artificial Sequence
  ENSG00000120526_8 (sequence is synthesized)
aagacagtactaaggaggacattcaaatacagtttttgcctgatcacatcaacattgtactgaaggatcaccagtttttagaaggaaaactctattcatctattgatcatgaaagcagta

SEQ ID NO: 237596 - DNA, 120 bp, Artificial Sequence
  ENSG00000120526_9 (sequence is synthesized)
catggataattaaagagagtaatagcttggagatttccttgattaagaagaatgaaggactgacctggccagagctagtaattggagataaacaaggggaacttataagagattcagccc

SEQ ID NO: 237597 - DNA, 120 bp, Artificial Sequence
  ENSG00000120526_10 (sequence is synthesized)
agtgtgctgcaatagctgaacgtttgatgcatttgacctctgaagaactgaatccaaatccagataaagaaaaaccaccttgcaatgctcaagagttagaagaatgtgatattttctttg

SEQ ID NO: 237598 - DNA, 120 bp, Artificial Sequence
  ENSG00000120526_11 (sequence is synthesized)
aagagagctccagtttatgcagatttgatggcaatacattaaaaactactcatgtggtgaatcttggaagcaaccagtaccttttctctgtcatagtggatcctaaagaaatgccctgct

SEQ ID NO: 237599 - DNA, 120 bp, Artificial Sequence
  ENSG00000120526_12 (sequence is synthesized)
tctgtttgcgccatgatgttgatgccctactctggcaaccacactccagcaaacaagatgatatgtgggagcacatcgcaactttcaatgctttaggctatgtccaagcatcaaagagag

SEQ ID NO: 237600 - DNA, 120 bp, Artificial Sequence
  ENSG00000120526_13 (sequence is synthesized)
acaaaaaattttttgcctgtgctccaaattactcgtatgcagccctttgtgagtgccttcgtcgagtattcatctatcgtcagcctgctcccatgtccactgtactttacaacagaaagg

SEQ ID NO: 237601 - DNA, 120 bp, Artificial Sequence
  ENSG00000120526_14 (sequence is synthesized)
aaggcaggcaagtaggacaggttgctaagcagcaagtagcaagcctagaaaccaatgatcctattttaggatttcaggcaacaaatgagagattatttgttcttactaccaaaaacctct

SEQ ID NO: 237602 - DNA, 120 bp, Artificial Sequence
  ENSG00000120526_15 (sequence is synthesized)
ttttaataaaagtaaatacagagaattaattattctaacatattggcctctttgtactggaaaagtattcagtggtacctggaggtctggacagttatactgtaacctcttaagttttaa

SEQ ID NO: 237603 - DNA, 120 bp, Artificial Sequence
  ENSG00000120526_16 (sequence is synthesized)
ctgtggaatgaagctgcagatttagagaacattggcttctgaaaaaaaaaaagagtgaagatagtactagcaagtatacttattttttaaaacaggctagaatctcatgttttatatgaa

SEQ ID NO: 237604 - DNA, 120 bp, Artificial Sequence
  ENSG00000120526_17 (sequence is synthesized)
agatgtacaattcagtgtttaaaaataaaaatatttattgtgtactctgttcgttgattagttgctacaggctgtacctataagatgtacaggataatagttaaatgttgagtattgtac

SEQ ID NO: 237605 - DNA, 120 bp, Artificial Sequence
  ENSG00000120526_18 (sequence is synthesized)
atatgtatttaagtggattgaataactgagtctacatggaggaggaaatgctagagaacagcaggtctaatattttttaagtttactgagagacctttattattattttcaaattaagta

SEQ ID NO: 237606 - DNA, 120 bp, Artificial Sequence
  ENSG00000120526_19 (sequence is synthesized)
tagctttatgtaacttttagccagttgctctgccacagacatagacaaagagagataagatttcacattatccatcactgcataacaaaccacaccaaaactcagtggtttaaaacaagg

SEQ ID NO: 237607 - DNA, 120 bp, Artificial Sequence
  ENSG00000120526_20 (sequence is synthesized)
acttttattatttttcacgattcagtgagttggctgtctctgctgtacagggcctctcagcctccagtagactagacgaatcttctttccatagtagagaaaacatcttaagagagcaag

SEQ ID NO: 237608 - DNA, 120 bp, Artificial Sequence
  ENSG00000120526_21 (sequence is synthesized)
ctccaatatgcaagagcttatcgatcctgtacatctatcatatttactaatgttccattggacaaagcaaatcacatggccaagtctagagtcagaatgaggggactacacaagctgaca

SEQ ID NO: 237609 - DNA, 120 bp, Artificial Sequence
  ENSG00000120526_22 (sequence is synthesized)
gcggatggtatgactcattgggggccattgatggaacaatcttaccacacaaggacaaattataatttatccttgtggctctctttatttttctaacaacttcaacaaaataatcctgtt

SEQ ID NO: 237610 - DNA, 120 bp, Artificial Sequence
  ENSG00000120526_23 (sequence is synthesized)
tatatgttatagtttcttgccacaaattttgttttttcaaacttacctttccaggtttgttttagtatgtatgtacctggaaatttttattactttttataccatttcaagatatgtatc

SEQ ID NO: 237611 - DNA, 120 bp, Artificial Sequence
  ENSG00000120526_24 (sequence is synthesized)
ttatataaacctcaagttggattttatattttaataaggaagttaagaccttcatttaagaggcagaagattaagataagaaatataagatagaaaagctttgttcctaacatatctttt

SEQ ID NO: 237612 - DNA, 120 bp, Artificial Sequence
  ENSG00000120526_25 (sequence is synthesized)
gcctgtctgggcaagtatttgactcaactaaattttaatgaacgaatgaatgacagagaggaggaaaaaagatgaggattgcatacatgttctaaaccctttgtcagattgcagtttcct

SEQ ID NO: 237613 - DNA, 120 bp, Artificial Sequence
  ENSG00000120526_26 (sequence is synthesized)
agagagtattgaggtgctaggtagaaagttaggaaaggtcctgaggactggtattgacaattggagtcctaatagtactctattcgtattaggaaagagagactagataccaaacatcac

SEQ ID NO: 237614 - DNA, 120 bp, Artificial Sequence
  ENSG00000120526_27 (sequence is synthesized)
gagatcatagagatggaaaactgtatagtaaccaaaaaccaaaacagtgatatttccagaactttttagtattgttgtaaaacttcatgaaacaaaagaccatttaaatagtgaattatt

SEQ ID NO: 237615 - DNA, 120 bp, Artificial Sequence
  ENSG00000120526_28 (sequence is synthesized)
aaaaatctttatgatgggaaagtagatctaaattttctctaaaattttccccaaagataatatcctcttagggaacataagaaaaatgtataataaaaatgtggtgcttaattaaccatg

SEQ ID NO: 237616 - DNA, 120 bp, Artificial Sequence
  ENSG00000120526_29 (sequence is synthesized)
actatgtatatattgccaattttagtaatcaatattctttgtgcatgtgatttttttgcatgattaatgttgaattgaaagctctcaggataattaatcctaaatattgtcgcatgttga

SEQ ID NO: 237617 - DNA, 120 bp, Artificial Sequence
  ENSG00000120526_30 (sequence is synthesized)
cctacgttaaaagatgaataggtctagagccgtgatttcaagctattttcctgaaatgcttcagggattccataaacatttaaacaatgttctaaggtacatatacttagaacattgaga

SEQ ID NO: 237618 - DNA, 120 bp, Artificial Sequence
  ENSG00000120526_31 (sequence is synthesized)
ttttctttgctaagattattgattttgtattgaagggtcccatgtccatcgttttcaatgctttatctccagggttggagcatgcctgctgtggcagaggtaaaacttcgagatgatcaa

SEQ ID NO: 237619 - DNA, 120 bp, Artificial Sequence
  ENSG00000120533_0 (sequence is synthesized)
gtgtgcttaggtgcccgagctactgagggtctaagtccgggcagccgaagagtgtggtaggtaacggtcctcagcgcaagggtcatttcgtcgctgggaagggacggccctcgcccgcgg

SEQ ID NO: 237620 - DNA, 120 bp, Artificial Sequence
  ENSG00000120533_1 (sequence is synthesized)
tgatggtggttagcaagatgaacaaagatgcgcagatgagagcagcgattaaccaaaagttgatagaaactggagaaagagaacgcctcaaagagttgctgagagctaaattaattgaat

SEQ ID NO: 237621 - DNA, 120 bp, Artificial Sequence
  ENSG00000120533_2 (sequence is synthesized)
gtggctggaaggatcagttgaaggcacactgtaaagaggtaattaaagaaaaaggactagaacacgttactgttgatgacttggtggctgaaatcactccaaaaggcagagccctggtac

SEQ ID NO: 237622 - DNA, 120 bp, Artificial Sequence
  ENSG00000120533_3 (sequence is synthesized)
ctgacagtgtaaagaaggagctcctacaaagaataagaacattccttgctcagcatgccagcctttaagattgaattagattgtgttgttgtggttttatttctgaaagtaaaacttgcc

SEQ ID NO: 237623 - DNA, 120 bp, Artificial Sequence
  ENSG00000120533_4 (sequence is synthesized)
ataaattagaaaacaatttcccaaaataaaatccttttttgtatgatggtatacagttttcagtaatgatgtatacattgtattgatttttttccctaaatgtgttattttaataaatat

SEQ ID NO: 237624 - DNA, 120 bp, Artificial Sequence
  ENSG00000120533_5 (sequence is synthesized)
ctcatgaatgagtttgaagtttgcttggattttgaaatgaatgggactttgtctttattactaattcaccaaatttgttgagcgcaaaagcaattaatgtagtttaagtatttagtatgt

SEQ ID NO: 237625 - DNA, 120 bp, Artificial Sequence
  ENSG00000120533_6 (sequence is synthesized)
acagttctctgtgttaacagctgagaagtaagcaaccttttctgactgcatatggtgtattcctcttttgagtccccataatattttataaattgtaatgccccatcttgtactacagtt

SEQ ID NO: 237626 - DNA, 120 bp, Artificial Sequence
  ENSG00000120533_7 (sequence is synthesized)
gtcttattcgtattgtttataaactttgagggttaggactgggtcttactcatctttatgtgccttccttatgcttcaaagaatttaccatctaatggaagagaacatttgcaagttggc

SEQ ID NO: 237627 - DNA, 120 bp, Artificial Sequence
  ENSG00000120533_8 (sequence is synthesized)
tccataccaagctccttccacatactctactcatctgaactttgaatgcagaatctttaaattgcaaccccacatactaaggtcaagaaagaacttaatgggaattaatctccacccatt

SEQ ID NO: 237628 - DNA, 120 bp, Artificial Sequence
  ENSG00000120533_9 (sequence is synthesized)
agctttaccctgacatcaggattgccaaatccaatggactcttgtctattcttacgtgacttctgctggaaaatgcgaatgttgaccatcctgccacttggaactctcttcccactcctc

SEQ ID NO: 237629 - DNA, 120 bp, Artificial Sequence
  ENSG00000120533_10 (sequence is synthesized)
acattgcttttgctaccactggaagttccttctgtttcttgtggagtaccttttgctgtctgggacttgtagataatggtgtttcctagggctccctccagggccctctgcctcactaac

SEQ ID NO: 237630 - DNA, 120 bp, Artificial Sequence
  ENSG00000120533_11 (sequence is synthesized)
tggatatacttttcctgagcaaatcccaggaaacttgcgtcagaccgtgacttcaaatacaggttgataaatgctaaactgtctccaaaccagacttcatcctagcctccacacccagac

SEQ ID NO: 237631 - DNA, 120 bp, Artificial Sequence
  ENSG00000120533_12 (sequence is synthesized)
tttttagaatatcctcacttcaaactgaccttacctaaaataatgactttttcccccaataattgcccctgctatattccttatttctgaatggtacctcctagctatatagattatctg

SEQ ID NO: 237632 - DNA, 120 bp, Artificial Sequence
  ENSG00000120533_13 (sequence is synthesized)
aggagcttactgaaatgctgattctgaagataaggggcatggctttaagattctgtatttctggcgagtacccaactggtgctcatgctgctgattgagaaccacttctgaatatagcaa

SEQ ID NO: 237633 - DNA, 120 bp, Artificial Sequence
  ENSG00000120533_14 (sequence is synthesized)
ggctgtaaattatccactacgtgccctcgtaattgtcttagttcaagcccagattattgtagtagacttagtatttctttgccttagttgatctgtgacccctccaatatctattccaca

SEQ ID NO: 237634 - DNA, 120 bp, Artificial Sequence
  ENSG00000120533_15 (sequence is synthesized)
ctgttgcctaagtggccttagtaaaattcaagtctggttattttattcccctgcttggaatttctcaatgtagaatgaaactcattcagcattaacacataggcccttcttgatctgaca

SEQ ID NO: 237635 - DNA, 120 bp, Artificial Sequence
  ENSG00000120533_16 (sequence is synthesized)
tcgtgtttctctagttagactaaagaatccccactatgaagttgtttcatccgtaagtacctttgaacccagaagccccctttctcatatgtttctcattcctgtttgcccttcagagtt

SEQ ID NO: 237636 - DNA, 120 bp, Artificial Sequence
  ENSG00000120533_17 (sequence is synthesized)
cagctttagttgctaaaacattcagacatccctctgacttagatcccccactactgtttttctgtgagaagcagctatgcataattcctcttcaacacagtagttcttgaaattttgcag

SEQ ID NO: 237637 - DNA, 120 bp, Artificial Sequence
  ENSG00000120533_18 (sequence is synthesized)
gcctctcctggaaaggaggaaatgacttctctgactttgtatgatgcttatttgtggatgaatgggcaagggaaaaaatgaaggaacaagtgaatgaacagtatgggagtatgagaaaag

SEQ ID NO: 237638 - DNA, 120 bp, Artificial Sequence
  ENSG00000120533_19 (sequence is synthesized)
gtataaattgggtatagttgagaaaaggattcaaattgatctttggttcgagagacaatttcatctttctgatgaatttaaagtgtagtctttgaaccagctgggcttaattatgtaaag

SEQ ID NO: 237639 - DNA, 120 bp, Artificial Sequence
  ENSG00000120533_20 (sequence is synthesized)
ttttgagcctgagataagcacacaatcacaaaacctacccaaacaagttttttgtttcacttcatctcttataaaacaatgttctaaagtaagtgatagggatgctcatcattctgctac

SEQ ID NO: 237640 - DNA, 120 bp, Artificial Sequence
  ENSG00000120533_21 (sequence is synthesized)
ctattatcacaatgaaaacaatcataaatagtacacaggaaaggtgagaaatagcggatagttcttatttcatagtactgtatatggaaataaaccaaatttgctcatagagatactatt

SEQ ID NO: 237641 - DNA, 120 bp, Artificial Sequence
  ENSG00000120533_22 (sequence is synthesized)
ttattacctcaaaaatatataaaaatgaaaacgttatgaaaatattttaaaatgggatttaaaaataattgagaacatcacagcaatttagaatactaaagagcatagctttaaaatgat

SEQ ID NO: 237642 - DNA, 120 bp, Artificial Sequence
  ENSG00000120533_23 (sequence is synthesized)
agtgctgagaactccccacctctaccccaccacctgtaggcttctttgacaacttacaaatgttctctagtttgtatctagaatcacttatatctttcaaataaaccaactttgtgaaca

SEQ ID NO: 237643 - DNA, 120 bp, Artificial Sequence
  ENSG00000120533_24 (sequence is synthesized)
aaaaaaaagcaaacccacactgcattagcccagtgccaagcacataagtgtttaataaagagtaatgatattattaacacacttgaaatgtatcaccccttcagttaatagaatggtaaa

SEQ ID NO: 237644 - DNA, 120 bp, Artificial Sequence
  ENSG00000120533_25 (sequence is synthesized)
atttaatcttgtaatggtttcctcttggtggcatatgtagacctaattcccaaatttttagaaattttctgtttctgttaagcgtgagcacttaagattttctctggcatcagaatatgg

SEQ ID NO: 237645 - DNA, 120 bp, Artificial Sequence
  ENSG00000120533_26 (sequence is synthesized)
aatctcatgtctttcagcaactttattgtttcttatgttttaacttaaatggaacactttagggttggcagacttatagaaattatctctttcctgtctttaacagtgaatatttgaaaa

SEQ ID NO: 237646 - DNA, 120 bp, Artificial Sequence
  ENSG00000120533_27 (sequence is synthesized)
gtccgggcagccgaagagtgtggtaggtaacggtcctcagcgcaagggtcatttcgtcgctgggaagggacggccctcgcccgcggtgatggtggtgagctatgcccgtggtcctcaggg

SEQ ID NO: 237647 - DNA, 120 bp, Artificial Sequence
  ENSG00000120533_28 (sequence is synthesized)
ccgggacccgggcccagcccaggctcctttcgatgtactgtctttcgttagcgtccccgacccgcgctcgcgggcctgtagggctctccgacagggcgtgctaccggagttggcctgaaa

SEQ ID NO: 237648 - DNA, 120 bp, Artificial Sequence
  ENSG00000120533_29 (sequence is synthesized)
ccagtcctcgctttgttttctggctcctcctctcccgcctctcccgctgtctccgccctgttctattttccctaagaatgtctgaactgggagggataccctagcgcccttgttttacca

SEQ ID NO: 237649 - DNA, 120 bp, Artificial Sequence
  ENSG00000120533_30 (sequence is synthesized)
gtgagaaaactgaggcctttaagaattaagtgacttgtccaaggtcactatccgtattttaggagccaagacgagatcaagttcaatattccaggagtggtactgactagaccttgtagt

SEQ ID NO: 237650 - DNA, 120 bp, Artificial Sequence
  ENSG00000120533_31 (sequence is synthesized)
tattttgaaaatgttagcctccaattacaaaagcaagcatttcctagttctcactcaacttctccttttccctgttcctctcaaaaaagaaaaaaaaaatcaactctggtaactcattgc

SEQ ID NO: 237651 - DNA, 120 bp, Artificial Sequence
  ENSG00000120533_32 (sequence is synthesized)
cagtctgaattttcaataggccagatggaagacaacaaaagtaatctcaagttagtgacagattaggtgggaaaacgttagtttacgccaagttttatttaatttaaacttttaagtggc

SEQ ID NO: 237652 - DNA, 120 bp, Artificial Sequence
  ENSG00000120533_33 (sequence is synthesized)
tttaacgctttcaaaacctaactttcctcttctttcaacatcattttggtttgggttgtctgtttttactgacaattgaggactttgtaagttaggaattagtttgagatttgttttctt

SEQ ID NO: 237653 - DNA, 120 bp, Artificial Sequence
  ENSG00000120533_34 (sequence is synthesized)
cttatcccaccagcagtgtgtgtgtaaacacacacatccacacacttaggtttagcagttgtaattgtgggttcatcctagtgaagagtaaagcaaaacacttagagccttatctagtaa

SEQ ID NO: 237654 - DNA, 120 bp, Artificial Sequence
  ENSG00000120533_35 (sequence is synthesized)
taatctttttttgatgtttagtatgtatgacttctcccaatttttggatgcagtctctgcagaagtgatcggcagttatgttcagttttggagctcctagggtcaaagtacttgagttca

SEQ ID NO: 237655 - DNA, 120 bp, Artificial Sequence
  ENSG00000120533_36 (sequence is synthesized)
gaatacagagtttgttaaaggaaacatgctgcagacatgatttttttaaaatctcttgctggttcagattttctttctgtttttaaggaaaagcactacctgtgttgcctcttgtaaaga

SEQ ID NO: 237656 - DNA, 120 bp, Artificial Sequence
  ENSG00000120533_37 (sequence is synthesized)
gttaaaattgcctacctgcctcctagcatagtctgggagtaacaaatgagatactaggtttcagtgttcttgtactctagaacagtgcaccaatgcaagttgatacagttgttcaagcaa

SEQ ID NO: 237657 - DNA, 120 bp, Artificial Sequence
  ENSG00000120533_38 (sequence is synthesized)
caaggcagctgagtggaaggatactacagagattcctagtctgaggaaccagaagaatggaattgccattctcagaagaagaacaaacaggatgaattggtagaaaatcaaaagttggat

SEQ ID NO: 237658 - DNA, 120 bp, Artificial Sequence
  ENSG00000120533_39 (sequence is synthesized)
tttggccctattaagattgaaagacctaattaaatattaagatgagaatgtcacatagtggatgtctagggatagtgaaagtggtttgcagggaaagagaatttgtttgggatgtgacat

SEQ ID NO: 237659 - DNA, 120 bp, Artificial Sequence
  ENSG00000120533_40 (sequence is synthesized)
ttttaacctgagaagttaaatgatttaggttgaggattgaagatttgtaaaagtggatatggcaaaaggataagaaaatattttattgcacctgtgatgccattagttgcatatacactg

SEQ ID NO: 237660 - DNA, 120 bp, Artificial Sequence
  ENSG00000120533_41 (sequence is synthesized)
ccacttttttgccatcgagagaaagaaaacactgggggcatgccaattactgaatcgttaaaatgtggggagaacaacggtcttacagtcaatgaaataccattgtcattttgtagttta

SEQ ID NO: 237661 - DNA, 120 bp, Artificial Sequence
  ENSG00000120533_42 (sequence is synthesized)
gaagggcctgataggctgggatcaaagaggtgggtagcctgtgaagttagaggtaatgggggaaatagtagagctaaagggtaagaagttgaggttaaagaatggattttggaatttgaa

SEQ ID NO: 237662 - DNA, 120 bp, Artificial Sequence
  ENSG00000120533_43 (sequence is synthesized)
tattcctgttggtagaggacggtggagagtatataacgtggccaaataatagagcttcttgaaaagtattttagcccctccacttcatttaatttcactcattaaatgagacccagatga

SEQ ID NO: 237663 - DNA, 120 bp, Artificial Sequence
  ENSG00000120533_44 (sequence is synthesized)
aatgaaaggcctagaatttaagtacttgcatgagatcaaagaactatttagcatttgaaccaagattaggccacagttaaagttttgtaactggaaggcagggaatttttagttgaacac

SEQ ID NO: 237664 - DNA, 120 bp, Artificial Sequence
  ENSG00000120533_45 (sequence is synthesized)
gtgtcctttttttaaaaaaaccagtctacactctaaaaacatgatcttaacccttcctctatgaaaatctttcttacagataatgattttaaatgatatgatttgttttttgcttttgca

SEQ ID NO: 237665 - DNA, 120 bp, Artificial Sequence
  ENSG00000120533_46 (sequence is synthesized)
taatttaggtttgttaagtattgcaggacttggagggaagtggtgatgtagaaagatgagcaagatatggctcttaaagagtaatttgatggagaagaaaaagtacatacctgaattaca

SEQ ID NO: 237666 - DNA, 120 bp, Artificial Sequence
  ENSG00000120533_47 (sequence is synthesized)
actggagacataatgttacctgggttttaacagggagacaatgttgtggaaccagcttcatttaccaagctctcaaccttggagcagcaagtgctgtttccactctctaaaacattcttc

SEQ ID NO: 237667 - DNA, 120 bp, Artificial Sequence
  ENSG00000120539_0 (sequence is synthesized)
ttttcctcacactaaatcgaaaactctccctgttggtcctgatctgtttcagtcaggcaaattacatcctgggaaaacgtcagatgacaggggaggccactcgcttcctgctcatccagt

SEQ ID NO: 237668 - DNA, 120 bp, Artificial Sequence
  ENSG00000120539_1 (sequence is synthesized)
ttcgacactttctgtgctttcattagcttccagacctcagccctggccctcgctttactgtacagtcagaactggtttctacgcctcgcgagggtgggaggtcgtgtatgggaggaggac

SEQ ID NO: 237669 - DNA, 120 bp, Artificial Sequence
  ENSG00000120539_2 (sequence is synthesized)
cgcttcccaccagcctcgttgggaagccaggagaaatctcttcaaatcctgcgattcagagtcaagtcccagtcgtcctttttctggtcggcccagaactgtttgtgcctcctccctcat

SEQ ID NO: 237670 - DNA, 120 bp, Artificial Sequence
  ENSG00000120539_3 (sequence is synthesized)
gaggaatgatgtcagtggggccgcggtcgccgcccacgaagagtgtaaggctgcgaagtcggggctttcccgacgccccctccgtccgcgtctgcgtaggggaggtgacgagggcggggc

SEQ ID NO: 237671 - DNA, 120 bp, Artificial Sequence
  ENSG00000120539_4 (sequence is synthesized)
gcggcggcggggtgacgtcacggccgcgcgcggcgtgggcggagcctcactttgaacccagttggcgggagtggctgctcgcggaggggcagtgtctgcggggccgctgtatgctgtcca

SEQ ID NO: 237672 - DNA, 120 bp, Artificial Sequence
  ENSG00000120539_5 (sequence is synthesized)
gcgatggatcccaccgcgggaagcaagaaggagcctggaggaggcgcggcgactgaggagggcgtgaataggatcgcagtgccaaaaccgccctccattgaggaattcagcatagtgaag

SEQ ID NO: 237673 - DNA, 120 bp, Artificial Sequence
  ENSG00000120539_6 (sequence is synthesized)
cccattagccggggcgccttcgggaaagtgtatctggggcagaaaggcggcaaattgtatgcagtaaaggttgttaaaaaagcagacatgatcaacaaaaatatgactcatcaggtccaa

SEQ ID NO: 237674 - DNA, 120 bp, Artificial Sequence
  ENSG00000120539_7 (sequence is synthesized)
gctgagagagatgcactggcactaagcaaaagcccattcattgtccatttgtattattcactgcagtctgcaaacaatgtctacttggtaatggaatatcttattgggggagatgtcaag

SEQ ID NO: 237675 - DNA, 120 bp, Artificial Sequence
  ENSG00000120539_8 (sequence is synthesized)
tctctcctacatatatatggttattttgatgaagagatggctgtgaaatatatttctgaagtagcactggctctagactaccttcacagacatggaatcatccacagggacttgaaaccg

SEQ ID NO: 237676 - DNA, 120 bp, Artificial Sequence
  ENSG00000120539_9 (sequence is synthesized)
gacaatatgcttatttctaatgagggtcatattaaactgacggattttggcctttcaaaagttactttgaatagagatattaatatgatggatatccttacaacaccatcaatggcaaaa

SEQ ID NO: 237677 - DNA, 120 bp, Artificial Sequence
  ENSG00000120539_10 (sequence is synthesized)
cctagacaagattattcaagaaccccaggacaagtgttatcgcttatcagctcgttgggatttaacacaccaattgcagaaaaaaatcaagaccctgcaaacatcctttcagcctgtctg

SEQ ID NO: 237678 - DNA, 120 bp, Artificial Sequence
  ENSG00000120539_11 (sequence is synthesized)
tctgaaacatcacagctttctcaaggactcgtatgccctatgtctgtagatcaaaaggacactacgccttattctagcaaattactaaaatcatgtcttgaaacagttgcctccaaccca

SEQ ID NO: 237679 - DNA, 120 bp, Artificial Sequence
  ENSG00000120539_12 (sequence is synthesized)
ggaatgcctgtgaagtgtctaacttctaatttactccagtctaggaaaaggctggccacatccagtgccagtagtcaatcccacaccttcatatccagtgtggaatcagaatgccacagc

SEQ ID NO: 237680 - DNA, 120 bp, Artificial Sequence
  ENSG00000120539_13 (sequence is synthesized)
agtcccaaatgggaaaaagattgccaggaaagtgatgaagcattgggcccaacaatgatgagttggaatgcagttgaaaagttatgcgcaaaatctgcaaatgccattgagacgaaaggt

SEQ ID NO: 237681 - DNA, 120 bp, Artificial Sequence
  ENSG00000120539_14 (sequence is synthesized)
ttcaataaaaaggatctggagttagctctttctcccattcataacagcagtgcccttcccaccactggacgctcttgtgtaaaccttgctaaaaaatgcttctctggggaagtttcttgg

SEQ ID NO: 237682 - DNA, 120 bp, Artificial Sequence
  ENSG00000120539_15 (sequence is synthesized)
taatataaatatggacactgacacaagtcagttaggtttccatcagtcaaatcagtgggctgtggattctggtgggatatctgaagagcaccttgggaaaagaagtttaaaaagaaattt

SEQ ID NO: 237683 - DNA, 120 bp, Artificial Sequence
  ENSG00000120539_16 (sequence is synthesized)
tgagttggttgactccagtccttgtaaaaaaattatacagaataaaaaaacttgtgtagagtataagcataacgaaatgacaaattgttatacaaatcaaaatacaggcttaacagttga

SEQ ID NO: 237684 - DNA, 120 bp, Artificial Sequence
  ENSG00000120539_17 (sequence is synthesized)
agtgcaggaccttaagctatcagtgcacaaaagtcaacaaaatgactgtgctaataaggagaacattgtcaattcttttactgataaacaacaaacaccagaaaaattacctataccaat

SEQ ID NO: 237685 - DNA, 120 bp, Artificial Sequence
  ENSG00000120539_18 (sequence is synthesized)
gatagcaaaaaaccttatgtgtgaactcgatgaagactgtgaaaagaatagtaagagggactacttaagttctagttttctatgttctgatgatgatagagcttctaaaaatatttctat

SEQ ID NO: 237686 - DNA, 120 bp, Artificial Sequence
  ENSG00000120539_19 (sequence is synthesized)
gaactctgattcatcttttcctggaatttctataatggaaagtccattagaaagtcagcccttagattcagatagaagcatcaaagaatcctcttttgaagaatcaaatattgaagatcc

SEQ ID NO: 237687 - DNA, 120 bp, Artificial Sequence
  ENSG00000120539_20 (sequence is synthesized)
acttattgtaacaccagattgccaagaaaagacctcaccaaaaggtgtcgagaaccctgctgtacaagagagtaaccaaaaaatgttaggtcctcctttggaggtgctgaaaacgttagc

SEQ ID NO: 237688 - DNA, 120 bp, Artificial Sequence
  ENSG00000120539_21 (sequence is synthesized)
ctctaaaagaaatgctgttgcttttcgaagttttaacagtcatattaatgcatccaataactcagaaccatccagaatgaacatgacttctttagatgcaatggatatttcgtgtgccta

SEQ ID NO: 237689 - DNA, 120 bp, Artificial Sequence
  ENSG00000120539_22 (sequence is synthesized)
cagtggttcatatcccatggctataacccctactcaaaaaagaagatcctgtatgccacatcagaccccaaatcagatcaagtcgggaactccataccgaactccgaagagtgtgagaag

SEQ ID NO: 237690 - DNA, 120 bp, Artificial Sequence
  ENSG00000120539_23 (sequence is synthesized)
aggggtggcccccgttgatgatgggcgaattctaggaaccccagactaccttgcacctgagctgttactaggcagggcccatggtcctgcggtagactggtgggcacttggagtttgctt

SEQ ID NO: 237691 - DNA, 120 bp, Artificial Sequence
  ENSG00000120539_24 (sequence is synthesized)
gtttgaatttctaacaggaattccccctttcaatgatgaaacaccacaacaagtattccagaatattctgaaaagagatatcccttggccagaaggtgaagaaaagttatctgataatgc

SEQ ID NO: 237692 - DNA, 120 bp, Artificial Sequence
  ENSG00000120539_25 (sequence is synthesized)
tcaaagtgcagtagaaatacttttaaccattgatgatacaaagagagctggaatgaaagagctaaaacgtcatcctctcttcagtgatgtggactgggaaaatctgcagcatcagactat

SEQ ID NO: 237693 - DNA, 120 bp, Artificial Sequence
  ENSG00000120539_26 (sequence is synthesized)
gcctttcatcccccagccagatgatgaaacagatacctcctattttgaagccaggaatactgctcagcacctgactgtatctggatttagtctgtagcacaaaaattttccttttagtct

SEQ ID NO: 237694 - DNA, 120 bp, Artificial Sequence
  ENSG00000120539_27 (sequence is synthesized)
agccttgtgttatagaatgaacttgcataattatatactccttaatactagattgatctaagggggaaagatcattatttaacctagttcaatgtgcttttaatgtacgttacagctttc

SEQ ID NO: 237695 - DNA, 120 bp, Artificial Sequence
  ENSG00000120539_28 (sequence is synthesized)
acagagttaaaaggctgaaaggaatatagtcagtaatttatcttaacctcaaaactgtatataaatcttcaaagcttttttcatttatttattttgtttattgcactttatgaaaactga

SEQ ID NO: 237696 - DNA, 120 bp, Artificial Sequence
  ENSG00000120539_29 (sequence is synthesized)
agcatcaataaaattagaggacactattgagagtgagccactagcttgattttctttctcctctgatttcagttcactgttcagtttagcattaaaataataaaataatcatacagttcc

SEQ ID NO: 237697 - DNA, 120 bp, Artificial Sequence
  ENSG00000120549_0 (sequence is synthesized)
agaactgcgctctgaagtttccagagagcgaggagcttttgcggcaggcagagacaatggaagaaaatgaaagccagaaatgtgagccgtgccttccttactcagcagacagaagacaga

SEQ ID NO: 237698 - DNA, 120 bp, Artificial Sequence
  ENSG00000120549_1 (sequence is synthesized)
tgcaggaacaaggcaaaggcaatctgcatgtaacatcaccagaagatgcagaatgccgcagaaccaaggaacgcctttctaatggaaacagtcgtggttcagtttccaagtcttcccgca

SEQ ID NO: 237699 - DNA, 120 bp, Artificial Sequence
  ENSG00000120549_2 (sequence is synthesized)
atatcccaaggagacacaccctaggggggccccgaagttccaaggaaatactgggaatgcaaacatctgagatggatcggaagagagaagcgttcctagaacatctgaagcagaagtacc

SEQ ID NO: 237700 - DNA, 120 bp, Artificial Sequence
  ENSG00000120549_3 (sequence is synthesized)
cccaccacgcctctgcaatcatgggtcaccaagagaggctgagagaccagacaaggagccccaaactgtctcacagtcctcaaccacccagtctgggtgacccggtcgagcatttatcag

SEQ ID NO: 237701 - DNA, 120 bp, Artificial Sequence
  ENSG00000120549_4 (sequence is synthesized)
agacgtccgctgattctttggaagccatgtctgagggggatgctccaacccctttttccagaggcagccggactcgtgcgagccttcctgtggtgaggtcaaccaaccagacgaaagaaa

SEQ ID NO: 237702 - DNA, 120 bp, Artificial Sequence
  ENSG00000120549_5 (sequence is synthesized)
gatctctgggggttctctatctccagtatggagatgaaaccaagcagctcaggatgccgaatgaaatcacaagtgcagacacaatccgtgctctcttcgtaagtgcctttccacagcagc

SEQ ID NO: 237703 - DNA, 120 bp, Artificial Sequence
  ENSG00000120549_6 (sequence is synthesized)
tcaccatgaaaatgctggaatcgcccagtgtcgccatttacatcaaagatgaaagcagaaatgtctattatgaattaaatgatgtaaggaacattcaagacagatcactcctcaaagtgt

SEQ ID NO: 237704 - DNA, 120 bp, Artificial Sequence
  ENSG00000120549_7 (sequence is synthesized)
acaacaaggatcctgcacatgcgtttaatcacacaccaaaaactatgaatggagacatgaggatgcagagagaacttgtttatgcaagaggagatggccctggggcccctcgccccggat

SEQ ID NO: 237705 - DNA, 120 bp, Artificial Sequence
  ENSG00000120549_8 (sequence is synthesized)
ctactgctcatccaccccatgcgattccaaattccccaccgtctactccagtgccccattccatgcccccctccccgtccagaattccttatgggggcacccgctccatggttgttcctg

SEQ ID NO: 237706 - DNA, 120 bp, Artificial Sequence
  ENSG00000120549_9 (sequence is synthesized)
gcaatgccaccatccccagggacagaatctccagcctgccagtctccagacccatctctccaagcccaagcgccattttagaaagaagagatgtcaagcctgatgaagacatgagtggca

SEQ ID NO: 237707 - DNA, 120 bp, Artificial Sequence
  ENSG00000120549_10 (sequence is synthesized)
aaaacattgcaatgtacagaaatgagggtttctatgctgatccttacctttatcacgagggacggatgagcatagcctcatcccatggtggacacccactggatgtccccgaccacatca

SEQ ID NO: 237708 - DNA, 120 bp, Artificial Sequence
  ENSG00000120549_11 (sequence is synthesized)
ttgcatatcaccgcaccgccatccggtcagcgagtgcttattgtaacccctcaatgcaagcggaaatgcatatggaacaatcactgtacagacagaaatcaaggaaatatccggatagcc

SEQ ID NO: 237709 - DNA, 120 bp, Artificial Sequence
  ENSG00000120549_12 (sequence is synthesized)
atttgcctacactgggctccaaaacaccccctgcctctcctcacagagtcagtgacctgaggatgatagacatgcacgctcactataatgcccacggcccccctcacaccatgcagccag

SEQ ID NO: 237710 - DNA, 120 bp, Artificial Sequence
  ENSG00000120549_13 (sequence is synthesized)
accgggcctctccgagccgccaggcctttaaaaaggagccaggcaccttggtgtatatagaaaagccacggagcgctgcaggattatccagccttgtagacctcggccctcctctaatgg

SEQ ID NO: 237711 - DNA, 120 bp, Artificial Sequence
  ENSG00000120549_14 (sequence is synthesized)
agaagcaagtttttgcctacagcacggcgacaatacccaaagacagagagaccagagagaggatgcaagccatggagaaacagattgccagtttaactggccttgttcagtctgcgcttt

SEQ ID NO: 237712 - DNA, 120 bp, Artificial Sequence
  ENSG00000120549_15 (sequence is synthesized)
ttaaagggcccattacaagttatagcaaagatgcgtctagcgagaaaatgatgaaaaccacagccaacaggaaccacacagatagtgcaggaacgccccatgtgtctggtgggaagatgc

SEQ ID NO: 237713 - DNA, 120 bp, Artificial Sequence
  ENSG00000120549_16 (sequence is synthesized)
tcagtgctctggagtccacggtgcctcccagccagcctccacctgtgggcacctcagccatccacatgagcctgcttgagatgaggcggagcgtggcggaactcaggctccagctccagc

SEQ ID NO: 237714 - DNA, 120 bp, Artificial Sequence
  ENSG00000120549_17 (sequence is synthesized)
agatgcggcagctccagctgcagaaccaggagttgctgagggcaatgatgaagaaggccgagctggaaatcagtggcaaagtgatggaaacaatgaagagactggaggatcccgtgcagc

SEQ ID NO: 237715 - DNA, 120 bp, Artificial Sequence
  ENSG00000120549_18 (sequence is synthesized)
gacagcgcgtcctagtggagcaagagagacaaaaatatcttcatgaggaagagaagatcgtcaagaagttgtgcgagttggaagactttgttgaagacttgaagaaggactccacggcag

SEQ ID NO: 237716 - DNA, 120 bp, Artificial Sequence
  ENSG00000120549_19 (sequence is synthesized)
ccagccgattggttactctgaaagacgtggaagacggggctttcctcctgcgtcaagtgggagaggctgtagctaccctgaaaggagaatttccaaccttacaaaacaagatgcgagcca

SEQ ID NO: 237717 - DNA, 120 bp, Artificial Sequence
  ENSG00000120549_20 (sequence is synthesized)
tcctgcgcatagaagtggaggccgtgcggtttctgaaggaggagccacacaagctggacagtctcctgaagcgtgtgcgcagcatgacagacgtcctgaccatgctgcggagacatgtca

SEQ ID NO: 237718 - DNA, 120 bp, Artificial Sequence
  ENSG00000120549_21 (sequence is synthesized)
ctgatgggctcctgaaaggcacggacgcagcccaagccgcacagtacatggctatggaaaaggccacagccgcagaagtcctgaagagtcaggaggaggcagcccacacctccggccagc

SEQ ID NO: 237719 - DNA, 120 bp, Artificial Sequence
  ENSG00000120549_22 (sequence is synthesized)
ccttccacagcacaggtgcccctggcgatgcgaagtcggaagtggtgcctttgtccggcatgatggttcgccacgcgcagagctcccctgtggtcatccagccctcccagcactccgtgg

SEQ ID NO: 237720 - DNA, 120 bp, Artificial Sequence
  ENSG00000120549_23 (sequence is synthesized)
ccctgctgaaccctgctcagaacttgcctcacgtggccagctccccagccgtcccccaggaagcaacctccactctgcagatgtcgcaggctccgcagtccccacagatacccatgaatg

SEQ ID NO: 237721 - DNA, 120 bp, Artificial Sequence
  ENSG00000120549_24 (sequence is synthesized)
ggtctgccatgcagagcttgttcattgaagaaatccacagtgtgagtgccaagaacagggcagtgtctatcgagaaagcagaaaagaaatgggaggaaaaaaggcaaaatctggatcact

SEQ ID NO: 237722 - DNA, 120 bp, Artificial Sequence
  ENSG00000120549_25 (sequence is synthesized)
ataatgggaaagagtttgagaagctcctagaagaagctcaggccaatatcatgaagtcaataccaaatctggagatgccgccagccacaggcccactgccaaggggagatgccccagtgg

SEQ ID NO: 237723 - DNA, 120 bp, Artificial Sequence
  ENSG00000120549_26 (sequence is synthesized)
acaaggtggaactttcagaagattctccaaattcggaacaggacttggaaaagctggggggaaagtcgccccctcctcctccgccacctcctcgtcgaagctacctgccaggatcgggac

SEQ ID NO: 237724 - DNA, 120 bp, Artificial Sequence
  ENSG00000120549_27 (sequence is synthesized)
tcaccaccacgaggtcaggcgatgtggtctacaccggcagaaaggagaacatcaccgctaaggcaagcagtgaagatgctggaccaagcccacagaccagagctacaaaatatccagcag

SEQ ID NO: 237725 - DNA, 120 bp, Artificial Sequence
  ENSG00000120549_28 (sequence is synthesized)
aggagcctgcttcagcctggaccccatccccaccgcctgtcaccacctcctcctcaaaggatgaggaggaagaagaagaagaaggagacaaaataatggcagaactccaggcattccaga

SEQ ID NO: 237726 - DNA, 120 bp, Artificial Sequence
  ENSG00000120549_29 (sequence is synthesized)
agtgttcctttatggatgtaaattcaaacagtcatgctgagccatcccgggctgacagtcacgttaaagacactaggtcgggcgccacagtgccacccaaggagaagaagaatttggaat

SEQ ID NO: 237727 - DNA, 120 bp, Artificial Sequence
  ENSG00000120549_30 (sequence is synthesized)
gacctagtgaccctcctaagtgggaaagaggaatggagaatagtatttctgatgcatcaagaacatcagaatataaaactgagatcataatgaaggaaaattccatatccaatatgagtt

SEQ ID NO: 237728 - DNA, 120 bp, Artificial Sequence
  ENSG00000120549_31 (sequence is synthesized)
tactcagagacagtagaaactattcccaggaaactgtgcctaaggccagtttcggtttctctggcattagtccattagaagatgaaataaacaaagggtctaaaatctcaggcctgcaat

SEQ ID NO: 237729 - DNA, 120 bp, Artificial Sequence
  ENSG00000120549_32 (sequence is synthesized)
actctatacctgacaccgagaaccagacgctgaattacggaaagacaaaggagatggaaaagcaaaatacggataagtgtcacgtttcctctcacactagactaacagaatcaagcgtgc

SEQ ID NO: 237730 - DNA, 120 bp, Artificial Sequence
  ENSG00000120549_33 (sequence is synthesized)
atgattttaaaacagaagatcaagaggttatcacgacagattttggccaagttgttctaagacccaaggaggcaaggcatgctaacgtgaaccctaatgaggatggagaatcaagttcaa

SEQ ID NO: 237731 - DNA, 120 bp, Artificial Sequence
  ENSG00000120549_34 (sequence is synthesized)
gttctcccactgaagaaaatgcagccactgacaatattgccttcatgattaccgaaaccactgtccaggttctttccagtggggaggtgcatgatattgttagccaaaagggagaagaca

SEQ ID NO: 237732 - DNA, 120 bp, Artificial Sequence
  ENSG00000120549_35 (sequence is synthesized)
tacagacggttaatatcgatgccagaaaagagatgaccccccgacaagaagggactgacaatgaggatccagtcgtgtgcctggacaagaaaccagtgatcatcattttcgatgagccca

SEQ ID NO: 237733 - DNA, 120 bp, Artificial Sequence
  ENSG00000120549_36 (sequence is synthesized)
tggacatccggtctgcctataagagactttcaactatctttgaggaatgtgatgaggaattagagagaatgatgatggaggaaaagatagaggaggaggaagaggaggaaaatggggatt

SEQ ID NO: 237734 - DNA, 120 bp, Artificial Sequence
  ENSG00000120549_37 (sequence is synthesized)
ctgtagtccagaataataacacttcccagatgtctcataagaaggtggccccaggcaatcttagaaccggacaacaggtggaaacaaagtcacagccacactccctggccacagagacca

SEQ ID NO: 237735 - DNA, 120 bp, Artificial Sequence
  ENSG00000120549_38 (sequence is synthesized)
gaaacccaggaggacaggaaatgaacagaacggagctgaacaagttcagccacgtggattctccaaattcggaatgcaagggtgaggacgcgaccgatgaccagtttgaaagccccaaga

SEQ ID NO: 237736 - DNA, 120 bp, Artificial Sequence
  ENSG00000120549_39 (sequence is synthesized)
aaaagtttaaattcaaattccctaagaagcaactcgccgctctcactcaagccattcgcaccggaactaaaacagggaagaagactttgcaagtggtagtctatgaagaagaggaagagg

SEQ ID NO: 237737 - DNA, 120 bp, Artificial Sequence
  ENSG00000120549_40 (sequence is synthesized)
atggcaccctgaaacagcacaaagaagccaagcgcttcgaaatcgctaggtctcaacctgaagacacccctgaaaacacagtgaggaggcaagagcagcccagcatcgagagtacatctc

SEQ ID NO: 237738 - DNA, 120 bp, Artificial Sequence
  ENSG00000120549_41 (sequence is synthesized)
cgatttcaagaactgatgaaattagaaaaaacacctacagaacattggatagcctggagcagaccattaaacagctcgaaaatacaatcagtgaaatgagtcccaaagccctagttgata

SEQ ID NO: 237739 - DNA, 120 bp, Artificial Sequence
  ENSG00000120549_42 (sequence is synthesized)
cctcatgttcttccaacagagattctgttgcaagttcatcccacatagcccaagaggcctctccccgacccttgctagttccggatgaaggtcccactgccctagagccccctacgtcga

SEQ ID NO: 237740 - DNA, 120 bp, Artificial Sequence
  ENSG00000120549_43 (sequence is synthesized)
taccttcagcttcacgtaagggctccagcggggccccacagacgagcaggatgcctgtccccatgagtgccaagaacagacccggaaccctggacaaacccggcaagcagtccaaactgc

SEQ ID NO: 237741 - DNA, 120 bp, Artificial Sequence
  ENSG00000120549_44 (sequence is synthesized)
aggatccccgccaatatcgtcaggctaatggaagtgctaagaaatctggtggggactttaagcctacttccccctccttacctgcttctaagattccagccctttctcccagctctggga

SEQ ID NO: 237742 - DNA, 120 bp, Artificial Sequence
  ENSG00000120549_45 (sequence is synthesized)
aaagcagttctctgccctcttctagtggtgacagctctaacctccctaatccacctgctactaaaccatcgattgcttctaaccctctcagcccccaaacaggaccacctgctcactctg

SEQ ID NO: 237743 - DNA, 120 bp, Artificial Sequence
  ENSG00000120549_46 (sequence is synthesized)
cctccctcatcccttctgtctctaatggctctttgaagtttcagagcctcactcatacaggtaaaggtcaccatctttcattctcaccgcagagtcaaaatggccgagcaccccctcctt

SEQ ID NO: 237744 - DNA, 120 bp, Artificial Sequence
  ENSG00000120549_47 (sequence is synthesized)
tgtcattttcctcctcccctccttctcctgcctcctccgtctcactgaatcaaggtgccaagggcaccaggaccatccatactcccagcctcaccagctacaaggcacagaatggaagtt

SEQ ID NO: 237745 - DNA, 120 bp, Artificial Sequence
  ENSG00000120549_48 (sequence is synthesized)
caagcaaagccaccccatccacagcaaaagaaacctcttaaaggtcaaatcctattaggcacaagtcggagttacatttaaaaaaaattaacagtctacaacaactgttttcacaagaga

SEQ ID NO: 237746 - DNA, 120 bp, Artificial Sequence
  ENSG00000120549_49 (sequence is synthesized)
atgtaacatattgctgtatcgtttgaggcttaatgctaaatatgtgctaaatactggattaatagatttcagtaaagctcgttcgttttgtttggttttctttttacctagttgctatag

SEQ ID NO: 237747 - DNA, 120 bp, Artificial Sequence
  ENSG00000120549_50 (sequence is synthesized)
tgtctacagtctatactcaatacctataaaatgcagtaagcatgtgttacagaaagaggttctggtgggagagaaaggtgcgtgtgagacaggagaattgtcttaagcatataaaacatg

SEQ ID NO: 237748 - DNA, 120 bp, Artificial Sequence
  ENSG00000120549_51 (sequence is synthesized)
tatgattccagaattttagtatgttttgtataaaactatttttcattacggagactagaagtgaacagagaattacacaagtgtgactatacaaattgtaaaacagatactataatattt

SEQ ID NO: 237749 - DNA, 120 bp, Artificial Sequence
  ENSG00000120549_52 (sequence is synthesized)
ccttttattttagtgttatttagctttattacagatttctatttttgtcaaaacttcatggttcctttcaagatcttttttgccaaaacattttgatactatagcattgtacatttgaaa

SEQ ID NO: 237750 - DNA, 120 bp, Artificial Sequence
  ENSG00000120549_53 (sequence is synthesized)
gtagtgttctagactataaaaccaatgaacttctacatgagccctacagacaggcatgtgtagaaggcaatttatcaaacctattgcactgccatgaaaagtgtgtataataatttgcta

SEQ ID NO: 237751 - DNA, 85 bp, Artificial Sequence
  ENSG00000120549_54 (sequence is synthesized)
caacatgttgagattctctagttgttttctttggcgtatctaaccccttcttttgttttctgagacctggtaacccacgctcttg

SEQ ID NO: 237752 - DNA, 120 bp, Artificial Sequence
  ENSG00000120549_55 (sequence is synthesized)
ccttcttttgttttctgagacctggtaacccacgctcttgcattgtggattttaaaatgtatactctgtacggttctgtaaaccgaaaaacttttgtaaatatataaatatacatagaca

SEQ ID NO: 237753 - DNA, 120 bp, Artificial Sequence
  ENSG00000120549_56 (sequence is synthesized)
taaaaatactgtatgtgacagcacatagagtagttttcccacaccaaagttaatttttatgcatgctttaaaagtatatatcgggaccggcagaaatggaagtatccatacatttttaaa

SEQ ID NO: 237754 - DNA, 120 bp, Artificial Sequence
  ENSG00000120549_57 (sequence is synthesized)
aagcaacaagtttgcacagctagagtgtttttgtaaataaatgtatttgtataacacagtcatgtaatatacagaactataagcagagactttgcaaaactaaataaagggctgcatgct

SEQ ID NO: 237755 - DNA, 120 bp, Artificial Sequence
  ENSG00000120549_58 (sequence is synthesized)
tattattttttgtaccttgtcactataactacttcctagtcaaagaacgaaatgtaactgttaccgagttaaatgtttttccgctttgagggatgtaaccacatccactcagaggacact

SEQ ID NO: 237756 - DNA, 120 bp, Artificial Sequence
  ENSG00000120549_59 (sequence is synthesized)
acttttctgaaagctctggggtgactaatgatgagttcctaataaattaattgcaagtgtggtgccttggatgtggcctgttggctcgctttcttctctgtggcttatcaaggtgtagat

SEQ ID NO: 237757 - DNA, 120 bp, Artificial Sequence
  ENSG00000120549_60 (sequence is synthesized)
gacagaaagcaaacctggatacagagtttccaccctcagttcctggaggggctcttattattttctctctttttaaaaaacttccagtagaagtaaagtggaaataaaatgtctttatca

SEQ ID NO: 237758 - DNA, 120 bp, Artificial Sequence
  ENSG00000120549_61 (sequence is synthesized)
acacatggaagaaacatttctcgttagttcagcattggttttagttatgctgatttccgggacaggaaaaatgccttcctactcagaattaactttcatagagtagaaacaaaacctctg

SEQ ID NO: 237759 - DNA, 120 bp, Artificial Sequence
  ENSG00000120549_62 (sequence is synthesized)
aatgtccgtgaaatagttttaacaagagtggatactgctcctttaaaccacatattttgactaaaagcttccttctgtaaaaaacccaaggcttgcatttagtcaccatgaagacaggca

SEQ ID NO: 237760 - DNA, 120 bp, Artificial Sequence
  ENSG00000120549_63 (sequence is synthesized)
aagctgaaagcattggagagaggggtggtttcgaggtctctgcaagtctagaaagtttcttctagaaaagaaaggctcacggaaaatgtaagatgcagagagaacttgtttatgcaagag

SEQ ID NO: 237761 - DNA, 120 bp, Artificial Sequence
  ENSG00000120549_64 (sequence is synthesized)
aagcaagtcactgacttagtttataccaaatattgtgctttctttgtaagataacggtttacatagacatcctggatctgggggcatgaagaaagtctaaataaacctttgttacacttt

SEQ ID NO: 237762 - DNA, 120 bp, Artificial Sequence
  ENSG00000120549_65 (sequence is synthesized)
atgccagtgtcagcttctctccgaaaactgggtaatacgaaatggtctttattggttgtgaacactcgagctgagaaacattttaggatctttgtgtcttttgtgatgattttgtttctg

SEQ ID NO: 237763 - DNA, 120 bp, Artificial Sequence
  ENSG00000120549_66 (sequence is synthesized)
aagaggaagctgtctaaaatattcaagtgtgcaaccaaggatttagatgaagccagcaaacaaaggaatcatgtaatcaggacctgagcgaatgtgcttactcacggcgttagttacaca

SEQ ID NO: 237764 - DNA, 120 bp, Artificial Sequence
  ENSG00000120549_67 (sequence is synthesized)
ctccaaattttaactgttaacacacggtgccagaccaggtggcttttctttggtgaatgtagtgtttcatctgaacacctcgggaagcagagacaaaccaacctgtggttgaactgccct

SEQ ID NO: 237765 - DNA, 120 bp, Artificial Sequence
  ENSG00000120549_68 (sequence is synthesized)
taacgtcaccactactaacgtctatgttgactgtattgtgttagaagcacattaacactccgtcacaatgcccgacccccaccccagtaattatccagacgcatggcccacctggcacac

SEQ ID NO: 237766 - DNA, 120 bp, Artificial Sequence
  ENSG00000120549_69 (sequence is synthesized)
aggaaatggtagagctggaatgatgggactcctctcacaaatgtattcttcctttcctcctttcccgtccatcctttgctatgtacatggggggtttctaccaggtccagtagagcacaa

SEQ ID NO: 237767 - DNA, 120 bp, Artificial Sequence
  ENSG00000120549_70 (sequence is synthesized)
caagacttagctcaggccttgaactgtgtttggttggttttctttgattgaattattctcagaagggctgtgttgccaggccctgtgggttgatcatgtgaccgcctttctgacaaaatg

SEQ ID NO: 237768 - DNA, 120 bp, Artificial Sequence
  ENSG00000120549_71 (sequence is synthesized)
agagcctcggtggtttgcagcagtggaaccaggcaggcccagttgtgggtaggagaggccgtcacctgttgaggcctcccccccacacccccgcatcgccctgccctggcagagcccagc

SEQ ID NO: 237769 - DNA, 120 bp, Artificial Sequence
  ENSG00000120549_72 (sequence is synthesized)
ccccagtccccggagagcgcgcctgaggacggacggacggacggacggacagacctagggacggagggccaggggcaggggagatccaagaggccccgcgctggaatgcagttttctcgg

SEQ ID NO: 237770 - DNA, 120 bp, Artificial Sequence
  ENSG00000120549_73 (sequence is synthesized)
ggagagggctgcgcgcttctcgccaagcaagcgggaggcgcactggggccgccgccgttcccgcgctcctccctctcctctgcacccactgtcacgctacccgcccgcgggggagcctcg

SEQ ID NO: 237771 - DNA, 120 bp, Artificial Sequence
  ENSG00000120549_74 (sequence is synthesized)
agagcctccaggtgaattgaaagtcgtttccgggggaggacggagagggtgctgcagtcctggcatgccctgaaactgcaagtcgggcagaaacgacccggcggaggagcagggcgcgca

SEQ ID NO: 237772 - DNA, 120 bp, Artificial Sequence
  ENSG00000120549_75 (sequence is synthesized)
gcgccctgcgcagcatccccgggctgccagaagaggccaccactcggctggcagccgcgagcggcggccgaacctcggccccagactcgggcccccggcacgctcgcccgggagataccc

SEQ ID NO: 237773 - DNA, 120 bp, Artificial Sequence
  ENSG00000120549_76 (sequence is synthesized)
cttccccctcttgcgcatttcgcagctgcgctggtgtggggcatgagagcgaggtggctccaggtctccgcggagcagctgccagtgggagagcgaggagaggcgagggggcggcagcct

SEQ ID NO: 237774 - DNA, 120 bp, Artificial Sequence
  ENSG00000120549_77 (sequence is synthesized)
cggcccgaaacggagatcctggggtcctaaatttgtggccgattgcactgtgtcctggagacggagtggaaccacagcccagagcccctgggaatcatccctgaaagactgcattacttc

SEQ ID NO: 237775 - DNA, 120 bp, Artificial Sequence
  ENSG00000120549_78 (sequence is synthesized)
cccagcactttccgtccagctgcacttcatactgtaactgtgtccgttgaaaagtgaagctcaaaggattttttagaatctgctgccccagcaggtaacattctggagttttgttgtttt

SEQ ID NO: 237776 - DNA, 120 bp, Artificial Sequence
  ENSG00000120549_79 (sequence is synthesized)
tttttttttcttgttgttttttctgccatttaaaatgtccaaaccctctcgcttggctagacctttcttctctaatgcagcttctaagctgccatcagctaggcgggatgatttgaacag

SEQ ID NO: 237777 - DNA, 120 bp, Artificial Sequence
  ENSG00000120549_80 (sequence is synthesized)
ccctttattttcttcaccactcccctacaaaattttaaattcttgaaatcttttgctaattgagattttcatcttgtgcaaacacagggcatttttggcagttggagaacaaagcaatcc

SEQ ID NO: 237778 - DNA, 120 bp, Artificial Sequence
  ENSG00000120549_81 (sequence is synthesized)
aaggtaaacagctgtaggctttggattggtgtgtaagaaatatgcgtggcccgcatgtcttagaaatgtaattaaaggaacgatttagttatagtccacttttttggggggatgtggttt

SEQ ID NO: 237779 - DNA, 120 bp, Artificial Sequence
  ENSG00000120549_82 (sequence is synthesized)
tgtggagtaacatgtcctacactattctaccagaatttggaatttttccatgaagatgtacggaaatctgatgttgaatatgaaaatggcccccaaatggaattccaaaaggttaccaca

SEQ ID NO: 237780 - DNA, 120 bp, Artificial Sequence
  ENSG00000120549_83 (sequence is synthesized)
acacctgggaagccttttccatcctggccaattgtgatgctgatgctaaaataccttcattgcttaatcccatcactgccaattgcttcaaatagtggatggaatgggctttaaaaaaaa

SEQ ID NO: 237781 - DNA, 120 bp, Artificial Sequence
  ENSG00000120549_84 (sequence is synthesized)
aaaagaaaacagcccagacatggaggggggttttacctgacagctccgaaggaagaccctggagtccgttccagacaaaaacttccagaagaattagattttctgctttaactgccgcct

SEQ ID NO: 237782 - DNA, 120 bp, Artificial Sequence
  ENSG00000120563_0 (sequence is synthesized)
aggaaaggattactcgcgcctcgttagaatcagacatggcttcaggggatgcaggacgctcccctgagctgcctgtcaccgactaagtggagcagtgtttcttccgcagactcaactgag

SEQ ID NO: 237783 - DNA, 120 bp, Artificial Sequence
  ENSG00000120563_1 (sequence is synthesized)
aagtcagcctctggggcaggcaccaggaatctgccttttcagttctgtctccggcaggctttgaggatgaaggctgcgggcattctgaccctcattggctgcctggtcacaggcgccgag

SEQ ID NO: 237784 - DNA, 120 bp, Artificial Sequence
  ENSG00000120563_2 (sequence is synthesized)
tccaaaatctacactcgttgcaaactggcaaaaatattctcgagggctggcctggacaattactggggcttcagccttggaaactggatctgcatggcatattatgagagcggctacaac

SEQ ID NO: 237785 - DNA, 120 bp, Artificial Sequence
  ENSG00000120563_3 (sequence is synthesized)
gctgaaggagaacaaccactgccatgtcgcctgctcagccttgatcactgatgacctcacagatgcaattatctgtgccaggaaaattgttaaagagacacaaggaatgaactattggca

SEQ ID NO: 237786 - DNA, 120 bp, Artificial Sequence
  ENSG00000120563_4 (sequence is synthesized)
aggctggaagaaacattgtgagggcagagacctgtccgagtggaaaaaaggctgtgaggtttcctaaactggaactggacccaggatgctttgcagcaacgccctaggatttgcagtgaa

SEQ ID NO: 237787 - DNA, 120 bp, Artificial Sequence
  ENSG00000120563_5 (sequence is synthesized)
tgtccaaatgcctgtgtcatcttgtcccgtttcctcccaatattccttctcaaacttggagagggaaaattaagctatacttttaagaaaataaatatttccatttaaatgtcttcaccc

SEQ ID NO: 237788 - DNA, 120 bp, Artificial Sequence
  ENSG00000120563_6 (sequence is synthesized)
agaagtatgaaagccaatcacaatttcccaacaattaggatccatcattcaccatttggttggtccctgctgctaagaattccaaactacaagggaaaaagttaaactcagctagatttc

SEQ ID NO: 237789 - DNA, 120 bp, Artificial Sequence
  ENSG00000120563_7 (sequence is synthesized)
cctgcctgctcaagaccacaaccccagtggcaacataattcttggtgaggatgaaaaaacgaaatctatacttgccttgagaaagcattcatgcaaaataaagcccagattcataagtaa

SEQ ID NO: 237790 - DNA, 120 bp, Artificial Sequence
  ENSG00000120594_0 (sequence is synthesized)
agactgctgcagccctaaccttcccagggctcagctctttggagctgcccattcctccggctgcgagaaaggacgcgcgccctgcgtcgggcgaagaaaagaagcaaaacttgtcgggag

SEQ ID NO: 237791 - DNA, 120 bp, Artificial Sequence
  ENSG00000120594_1 (sequence is synthesized)
ggtttcgtcatcaacctccttcccgcaaacctaaacctcctgccggggccatccctagacagaggaaagttcctgcagagccgaccagccctagtggatctggggcaggcagcggcgctg

SEQ ID NO: 237792 - DNA, 120 bp, Artificial Sequence
  ENSG00000120594_2 (sequence is synthesized)
gctgtggaattagatctgttttgaacccagtggagcgcatcgctggggctcggaagtcaccgtccgcgggcaccgggttggcgctgcccgagtggaaccgacagtttgcgagcctcggct

SEQ ID NO: 237793 - DNA, 120 bp, Artificial Sequence
  ENSG00000120594_3 (sequence is synthesized)
gcaagtggcctctcctccccgcggttgttgttcagtgtcgggtgagggctgcgagtgtggcaagttgcaaagagagcctcagaggtccgaagagcgctgcgctcctactcgcgttcgctt

SEQ ID NO: 237794 - DNA, 120 bp, Artificial Sequence
  ENSG00000120594_4 (sequence is synthesized)
cttcctcttctcggttccctactgtgaaatcgcagcgacatttacaaaggcctccgggtcctaccgagaccgatccgcagcgtttggcccggtcgtgcctattgcatcgggagcccccga

SEQ ID NO: 237795 - DNA, 120 bp, Artificial Sequence
  ENSG00000120594_5 (sequence is synthesized)
gcaccggcgaaggactggcgggtggggtagggaggtggcggcggcggcatggcgaggttcccgaaggccgacctggccgctgcaggagttatgttactttgccacttcttcacggaccag

SEQ ID NO: 237796 - DNA, 120 bp, Artificial Sequence
  ENSG00000120594_6 (sequence is synthesized)
tttcagttcgccgatgggaaacccggagaccaaatccttgattggcagtatggagttactcaggccttccctcacacagaggaggaggtggaagttgattcacacgcgtacagccacagg

SEQ ID NO: 237797 - DNA, 120 bp, Artificial Sequence
  ENSG00000120594_7 (sequence is synthesized)
tggaaaagaaacttggactttctcaaggcggtagacacgaaccgagcaagcgtcggccaagactctcctgagcccagaagcttcacagacctgctgctggatgatgggcaggacaataac

SEQ ID NO: 237798 - DNA, 120 bp, Artificial Sequence
  ENSG00000120594_8 (sequence is synthesized)
actcagatcgaggaggatacagaccacaattactatatatctcgaatatatggtccatctgattctgccagccgggatttatgggtgaacatagaccaaatggaaaaagataaagtgaag

SEQ ID NO: 237799 - DNA, 120 bp, Artificial Sequence
  ENSG00000120594_9 (sequence is synthesized)
attcatggaatattgtccaatactcatcggcaagctgcaagagtgaatctgtccttcgattttccattttatggccacttcctacgtgaaatcactgtggcaaccgggggtttcatatac

SEQ ID NO: 237800 - DNA, 120 bp, Artificial Sequence
  ENSG00000120594_10 (sequence is synthesized)
actggagaagtcgtacatcgaatgctaacagccacacagtacatagcacctttaatggcaaatttcgatcccagtgtatccagaaattcaactgtcagatattttgataatggcacagca

SEQ ID NO: 237801 - DNA, 120 bp, Artificial Sequence
  ENSG00000120594_11 (sequence is synthesized)
cttgtggtccagtgggaccatgtacatctccaggataattataacctgggaagcttcacattccaggcaaccctgctcatggatggacgaatcatctttggatacaaagaaattcctgtc

SEQ ID NO: 237802 - DNA, 120 bp, Artificial Sequence
  ENSG00000120594_12 (sequence is synthesized)
ttggtcacacagataagttcaaccaatcatccagtgaaagtcggactgtccgatgcatttgtcgttgtccacaggatccaacaaattcccaatgttcgaagaagaacaatttatgaatac

SEQ ID NO: 237803 - DNA, 120 bp, Artificial Sequence
  ENSG00000120594_13 (sequence is synthesized)
caccgagtagagctacaaatgtcaaaaattaccaacatttcggctgtggagatgaccccattacccacatgcctccagtttaacagatgtggcccctgtgtatcttctcagattggcttc

SEQ ID NO: 237804 - DNA, 120 bp, Artificial Sequence
  ENSG00000120594_14 (sequence is synthesized)
aactgcagttggtgtagtaaacttcaaagatgttccagtggatttgatcgtcatcggcaggactgggtggacagtggatgccctgaagagtcaaaagagaagatgtgtgagaatacagaa

SEQ ID NO: 237805 - DNA, 120 bp, Artificial Sequence
  ENSG00000120594_15 (sequence is synthesized)
ccagtggaaacttcttctcgaaccaccacaaccgtaggagcgacaaccacccagttcagggtcctaactaccaccagaagagcagtgacttctcagtttcccaccagcctccctacagaa

SEQ ID NO: 237806 - DNA, 120 bp, Artificial Sequence
  ENSG00000120594_16 (sequence is synthesized)
gatgataccaagatagcactacatctaaaagataatggagcttctacagatgacagtgcagctgagaagaaagggggaaccctccacgctggcctcatcattggaatcctcatcctggtc

SEQ ID NO: 237807 - DNA, 120 bp, Artificial Sequence
  ENSG00000120594_17 (sequence is synthesized)
ctcattgtagccacagccattcttgtgacagtctatatgtatcaccacccaacatcagcagccagcatcttctttattgagagacgcccaagcagatggcctgcgatgaagtttagaaga

SEQ ID NO: 237808 - DNA, 120 bp, Artificial Sequence
  ENSG00000120594_18 (sequence is synthesized)
ggctctggacatcctgcctatgctgaagttgaaccagttggagagaaagaaggctttattgtatcagagcagtgctaaaatttctaggacagaacaacaccagtactggtttacaggtgt

SEQ ID NO: 237809 - DNA, 120 bp, Artificial Sequence
  ENSG00000120594_19 (sequence is synthesized)
taagactaaaattttgcctatacctttaagacaaacaaacaaacacacacacaaacaagctctaagctgctgtagcctgaagaagacaagatttctggacaagctcagcccaggaaacaa

SEQ ID NO: 237810 - DNA, 120 bp, Artificial Sequence
  ENSG00000120594_20 (sequence is synthesized)
agggtaaacaaaaaactaaaacttatacaagataccatttacactgaacatagaattccctagtggaatgtcatctatagttcactcggaacatctcccgtggacttatctgaagtatga

SEQ ID NO: 237811 - DNA, 120 bp, Artificial Sequence
  ENSG00000120594_21 (sequence is synthesized)
caagattataatgcttttggcttaggtgcagggttgcaaagggatcagaaaaaaaaaatcataataaagctttagttcatgagggatcgacacctttggttcaaatgttctctgatgtct

SEQ ID NO: 237812 - DNA, 120 bp, Artificial Sequence
  ENSG00000120594_22 (sequence is synthesized)
caaagataactgttttccaaagcctgaaccctttcactcaaaagagcaatgatgaatgtctcaagattgctaagaaaaacagcccatgcaagagtgagaacaaacacaaaataagagatt

SEQ ID NO: 237813 - DNA, 120 bp, Artificial Sequence
  ENSG00000120594_23 (sequence is synthesized)
ttctacattttcaaaacagatgtgtggcaaaaggatgttgtttttctggtctagatccatctgtaccaacaagttcatcactttacagaacgaatctttttatccgtacaggaggttcaa

SEQ ID NO: 237814 - DNA, 120 bp, Artificial Sequence
  ENSG00000120594_24 (sequence is synthesized)
accatgtctgcctcttcctttgtaatgaatgacctttctatgagctgtgacaaaatttccgaacaattaactaaggatttgggaagagggggtggcaaacggggctttctgttttcctgc

SEQ ID NO: 237815 - DNA, 120 bp, Artificial Sequence
  ENSG00000120594_25 (sequence is synthesized)
ctcagcatgaaaacatctgatttatgctttatggaagccttacctccaatccccaactgttaagtcccatgaaaccacagttgctctgggctgatggaaacaaaaggaaacagtatgaag

SEQ ID NO: 237816 - DNA, 120 bp, Artificial Sequence
  ENSG00000120594_26 (sequence is synthesized)
agttccttaatcatttttgaaacaaaaatgttaagggattttaaacatatgattatttttaattttatgccttttcagtactaaacacccatttcattgctgattcctgtctaagaagcc

SEQ ID NO: 237817 - DNA, 120 bp, Artificial Sequence
  ENSG00000120594_27 (sequence is synthesized)
attcacgtcagcatggcgatagaaagaatgaaaaaaccctgctgaatcatacagtaattttctttaaagcacatagtagttacataaatatatatatataaatatatttttgtttataac

SEQ ID NO: 237818 - DNA, 120 bp, Artificial Sequence
  ENSG00000120594_28 (sequence is synthesized)
taacacaaggcaggatcttgtgactctaagagtgcgttttgtcatcaaggcaaaacagatgcaagatgcatcactgcattacttccatagagttgtaaaataatccttaatattagaata

SEQ ID NO: 237819 - DNA, 120 bp, Artificial Sequence
  ENSG00000120594_29 (sequence is synthesized)
tttttctgtcacttagcaaaagtggttcagttcattgccgcgcccatcatgttcttgactatttgatccactttttcgtttatgtcaaccccttccctctctggctaaataaagtggatg

SEQ ID NO: 237820 - DNA, 120 bp, Artificial Sequence
  ENSG00000120594_30 (sequence is synthesized)
cagaaagctccttaaatggagatatcgattgccttggaatcacaatcctgattttgaaaattcctcatgaatgaagaaaggaatggcatcccttgagaaggaaagtggttaatatacata

SEQ ID NO: 237821 - DNA, 120 bp, Artificial Sequence
  ENSG00000120594_31 (sequence is synthesized)
ctgagctcctaaagtttaaattcaggtactgagtgtacaatttcaccaacattctaacccatgaaacttttacactctgtgccaagaaactgttggcttttgtaaggtacagtgctcaac

SEQ ID NO: 237822 - DNA, 120 bp, Artificial Sequence
  ENSG00000120594_32 (sequence is synthesized)
atttgcagattcaggtctcaagaagcagagatgtctcataagcagcattttcccaacagtttagcatctgtacacatctgccttggtcatcagtccactcacagagtaccatactttatc

SEQ ID NO: 237823 - DNA, 120 bp, Artificial Sequence
  ENSG00000120594_33 (sequence is synthesized)
atcacaagtgtctgacgtgaacgaatgccattttctattccatatattttgctttacaattttaagtatttgatgaagatggtaactttttcctaacttagttaactattaaaaaaaatt

SEQ ID NO: 237824 - DNA, 120 bp, Artificial Sequence
  ENSG00000120594_34 (sequence is synthesized)
ttgaaaagcaaggtgattgaaggattgtgatgacaatctctttgcagcagctatgtatggtttatgtgaagtatccccacttattcttgtggagcaggtttggtgagacagcaataacca

SEQ ID NO: 237825 - DNA, 120 bp, Artificial Sequence
  ENSG00000120594_35 (sequence is synthesized)
aatgacatgccaatattactggtgcaactggtattctacaaatgcataaggaacacatagacgacttccttttaggataaaatgatgcttctttcactaccttttgtggtagctgtggct

SEQ ID NO: 237826 - DNA, 120 bp, Artificial Sequence
  ENSG00000120594_36 (sequence is synthesized)
tccaatagcaactgtttgacagttatataaatcttgcatgtgtattcttagtttgtgtcccttaagtactacttaattctcaagtagtaatgttattcttatacccttcagcgttctatt

SEQ ID NO: 237827 - DNA, 120 bp, Artificial Sequence
  ENSG00000120594_37 (sequence is synthesized)
ttgattcaaaacaattgattcaaaacaattttgaatcaattttctattttgattcaaaacaattgataattctgtaaaaaaacataaacactgaattcttcagtgaaccaaagcaacaaa

SEQ ID NO: 237828 - DNA, 120 bp, Artificial Sequence
  ENSG00000120594_38 (sequence is synthesized)
taatagagaaaacttcttgaaactggagtgtgggaaaacttcttaacagaactaagagttaaaggtagtgagaagtgtgtggtgtgtgaattctttagtggtaaggggaaatgtgggcta

SEQ ID NO: 237829 - DNA, 120 bp, Artificial Sequence
  ENSG00000120594_39 (sequence is synthesized)
aatccttttctttcatgaaactctcattctattttatatttctggtttgttcttgttcccatgtgagaaaacatacagtttctgaaaattcaaaatggtcatcaatgctttggactttac

SEQ ID NO: 237830 - DNA, 120 bp, Artificial Sequence
  ENSG00000120594_40 (sequence is synthesized)
ataattatgtattagagaaggtgcaactgtacattacttaatatactatgaacataatagaataacaaaaaaagataacaaagagatgcaaacttctggataaatcagataaatggtgct

SEQ ID NO: 237831 - DNA, 120 bp, Artificial Sequence
  ENSG00000120594_41 (sequence is synthesized)
acagaggaatttagttatttcagcttaattatttgtaaaaataataatcagtgactaggtaaagatactgaaactcaagaaaaatatcttgacccatttatgtctagtgttccattattg

SEQ ID NO: 237832 - DNA, 90 bp, Artificial Sequence
  ENSG00000120594_42 (sequence is synthesized)
ttgacccatttatgtatgggagttatttagagcctactgctcaaggtcatcaccaaggtctggttgcaaaaattcaaaaaattgcaacct

SEQ ID NO: 237833 - DNA, 120 bp, Artificial Sequence
  ENSG00000120594_43 (sequence is synthesized)
actgaccataaatggtggcttgtgtgtgaagggtttggacttcaagatatactaacacctagaaaactaaaagtgcaattgacccccaattactattttagtttgaggtatcaagggcat

SEQ ID NO: 237834 - DNA, 120 bp, Artificial Sequence
  ENSG00000120594_44 (sequence is synthesized)
ttgccaatctcttatatgtagcttctagagttgtgctgtccaatattatatccactagccaacgtggcttttgaaattaaaattaattaaaattaaattaaaaatgtaattcttcagtca

SEQ ID NO: 237835 - DNA, 120 bp, Artificial Sequence
  ENSG00000120594_45 (sequence is synthesized)
caccagccacatttcaaaggctcaatagccacgcctggcttgtggctaccatattggataacaagaaacacttccgtggttgaagaaaattttaatggacaatgctgtgtttcatttgaa

SEQ ID NO: 237836 - DNA, 120 bp, Artificial Sequence
  ENSG00000120594_46 (sequence is synthesized)
ttcgttgtccttgaagaaaagggaagaagaggaaagaaacaagatttggtagctcttgggcatatccaagcatttttgattttagagaggccctatggagtaatgaaaaaaatacaagct

SEQ ID NO: 237837 - DNA, 120 bp, Artificial Sequence
  ENSG00000120594_47 (sequence is synthesized)
gacacagctttaaatccccactgtgttatcttgggaaaatcacttcaacctccttgagtctcaatttgcaattttggaaaagaaaaacaatttttgtcctgtctttcttgcaagattatt

SEQ ID NO: 237838 - DNA, 120 bp, Artificial Sequence
  ENSG00000120594_48 (sequence is synthesized)
atgcaacctgattaaatgtacagatgtgcagactcttaaaaaccttatgttaatgtaacccatataaagtacgacttttggtcgagtaccagcacaaatttgcattcaaaggaagaatag

SEQ ID NO: 237839 - DNA, 120 bp, Artificial Sequence
  ENSG00000120594_49 (sequence is synthesized)
ttcatcagtgcaaaaagcgttcaaaggtaatcagttcatcacgtatcttgagaaaaagagaatgcattcaaaacacaaagcaaaattgcttcagtttcttttctgcccatctgaatattt

SEQ ID NO: 237840 - DNA, 120 bp, Artificial Sequence
  ENSG00000120594_50 (sequence is synthesized)
cctttagtatttgtcccacatgacatccatcccatgtatttatccactctttcacaacattgcctatgaacatccttcaactggctcagttctttattgcatagagccacttagcttctc

SEQ ID NO: 237841 - DNA, 120 bp, Artificial Sequence
  ENSG00000120594_51 (sequence is synthesized)
caaaaggaggcttccatttagaaggcactatctcaaacataaataatttcatatttattttatcactgtaacactaaggagctatggcattaaaatataaaactatttggaacttaatgt

SEQ ID NO: 237842 - DNA, 120 bp, Artificial Sequence
  ENSG00000120594_52 (sequence is synthesized)
aaacctttgcacatgcagactatataaagggaataaaattattttaaattatgctaatatccagatacatattctaaggttagtatcatttatcagtttttcgcaacagattcttatgtt

SEQ ID NO: 237843 - DNA, 120 bp, Artificial Sequence
  ENSG00000120594_53 (sequence is synthesized)
acatcttcatgagggagtataaatttgatcacgtccctagtgtctattgcccacttgagaaaggttttgccaggatccacagatcgcttcaagatgctttcgtttatgataggaaattaa

SEQ ID NO: 237844 - DNA, 120 bp, Artificial Sequence
  ENSG00000120594_54 (sequence is synthesized)
tatttaaataagactaattgaaaactagattatctggttctaatttcttcctcctgtgaaatgttcttttggtttgtatttctttaggtattttccaagttactgctgcttttacttcac

SEQ ID NO: 237845 - DNA, 120 bp, Artificial Sequence
  ENSG00000120594_55 (sequence is synthesized)
tcacgacctccaaccccacttttgttatcagcgtcatatgccagagtcatggcagatccagcctggacaacatagtgagacccatctctatcaaatatacatatatatatatatatatac

SEQ ID NO: 237846 - DNA, 79 bp, Artificial Sequence
  ENSG00000120594_56 (sequence is synthesized)
acacacacacacacacacacaaatatacatatatatcaaatatatatgtatatttgatagagatgatagcccaagtgtg

SEQ ID NO: 237847 - DNA, 89 bp, Artificial Sequence
  ENSG00000120594_57 (sequence is synthesized)
gtgttagccaagtgtggtttctcaagtgtaagagttgcttgagcccatgagttagaggctgctgtgagctatgatcatgccactgcact

SEQ ID NO: 237848 - DNA, 120 bp, Artificial Sequence
  ENSG00000120594_58 (sequence is synthesized)
aaaccccatctctaaataaaaaaaaagaatcgtgagacatcatgtaatccaacctcttaatgttacagataagtaaactgaggcccaaagagatatagtaatagtcccagtgtcagtaaa

SEQ ID NO: 237849 - DNA, 120 bp, Artificial Sequence
  ENSG00000120594_59 (sequence is synthesized)
ctgggtcttgaacttaaatgtttgtttcagttctcattgccttcatctcttaattgtcggcacttaaggccaaccaagcagcttagacagcgcagtccactcaacggtaactttatttgc

SEQ ID NO: 237850 - DNA, 120 bp, Artificial Sequence
  ENSG00000120594_60 (sequence is synthesized)
tatattgacaatctgctctgttctgtaatatagaacattggatcaatctttatctttttgctgacttaaggaggctgctattgttgcaatatccagagatttcaagttctagccattgcg

SEQ ID NO: 237851 - DNA, 120 bp, Artificial Sequence
  ENSG00000120594_61 (sequence is synthesized)
gggtctttgtggtgttttcaatttctcctctctccacccctgcccccatctgtggccatctaagttagcaatacaatttattttggccatttaaaatttttctgcctttgttttatttct

SEQ ID NO: 237852 - DNA, 120 bp, Artificial Sequence
  ENSG00000120594_62 (sequence is synthesized)
tcccaaatatatttgaaaatgaatgatctatatagctgattttctgaccacatatataattgcaatttttatttgctcttcaaactattacaacatttttgtccttataaggttttttgg

SEQ ID NO: 237853 - DNA, 120 bp, Artificial Sequence
  ENSG00000120594_63 (sequence is synthesized)
gcagataatgcgaggtctgtggtgttaccttttatatactcctattaccttatgtttgtgaagcattttacattttacagagcactttgattcatctccctatttgttcatttatttaac

SEQ ID NO: 237854 - DNA, 120 bp, Artificial Sequence
  ENSG00000120594_64 (sequence is synthesized)
tgttcagttcactgaaatatttattgaacacctactggaaccaagtgactgtgctagtaacttgtgatatacagtagtgagagtccaggcatgtaaccgatcattataatacaataacat

SEQ ID NO: 237855 - DNA, 120 bp, Artificial Sequence
  ENSG00000120594_65 (sequence is synthesized)
ccctaaaccagactttacaagtagataggatcaacaatactctatcaattttcaactccaattttctattctacttaaaatgggaactagaaactgtttgcctgaagaatgtgtctgaaa

SEQ ID NO: 237856 - DNA, 120 bp, Artificial Sequence
  ENSG00000120594_66 (sequence is synthesized)
cataatatatcactgcatgtctgtgctgtagacctgttaattttatctgtgagaaaaaaagttactcaaaattctccctgacctaagaatactttctagttcactgcagtcttactgacc

SEQ ID NO: 237857 - DNA, 120 bp, Artificial Sequence
  ENSG00000120594_67 (sequence is synthesized)
agatgcaacagttgaagtttgatttctcgacccaatatttctattgggttttgaattattaatatcactgttttgaggtattcagaaacaccagtgtatcaaaaaagcatttgcacttta

SEQ ID NO: 237858 - DNA, 120 bp, Artificial Sequence
  ENSG00000120594_68 (sequence is synthesized)
ggtgtgtgtggtggttatgtcatttattagaccatcccagacataagacaatcagggaaatcagaaaactccagcctcaaatgtgtctataatttcctgttctaccattgtcatatcata

SEQ ID NO: 237859 - DNA, 120 bp, Artificial Sequence
  ENSG00000120594_69 (sequence is synthesized)
acatggtattacttcttaaggttttgattaagttgatctagcctcaacttaaattgtaatacatctgcctaattattgtctggaataacttttcaaccatccaatgcccactgctctcac

SEQ ID NO: 237860 - DNA, 120 bp, Artificial Sequence
  ENSG00000120594_70 (sequence is synthesized)
aatgattattgtagagaagtaaaatggtaattattcaagtaaagtcacataatttctggagtcagtttttcataacaagtttatggaatacatcatcattggcttcttcataatatattt

SEQ ID NO: 237861 - DNA, 120 bp, Artificial Sequence
  ENSG00000120594_71 (sequence is synthesized)
attatgagtgaccaaattttgcctggaggagcaaaatgctcaaaacttgttattataggttaatttccagctcactgttgacactgaaagattctgtgttactttaaacccaggataaaa

SEQ ID NO: 237862 - DNA, 120 bp, Artificial Sequence
  ENSG00000120594_72 (sequence is synthesized)
ggctggaaaaaaaattaaatgtaagtcataaactagtactcagcttttcctagtttctaaggcttattaacatttgcaaattactcaataaatgtctttcataatggaataacataaaag

SEQ ID NO: 237863 - DNA, 120 bp, Artificial Sequence
  ENSG00000120594_73 (sequence is synthesized)
cttttgatttggcagatagtgatattttatttattttcattctggttgaaaaaaatctcagtggcttctcttcattccacgagaattttgatttttaacagcagtctctctttttctcag

SEQ ID NO: 237864 - DNA, 120 bp, Artificial Sequence
  ENSG00000120594_74 (sequence is synthesized)
cattgcaaatatatatgtatatatacattcatgaccaaagtatcgcttactgaccatgcagctgtaaaccttctgtgcctatcaaacaaatacatagcatgaaactaattttagaagttt

SEQ ID NO: 237865 - DNA, 120 bp, Artificial Sequence
  ENSG00000120594_75 (sequence is synthesized)
catgggggaattttaggggaaagtataaacctaagagtgagtgaatggagatgattcatggaaaaaaaaataaaaatctaaatgtgctattaggcagagttattaacttcttttagttgt

SEQ ID NO: 237866 - DNA, 61 bp, Artificial Sequence
  ENSG00000120594_76 (sequence is synthesized)
tgggattacaggcatatgccactacacccagctcccgacctcaggtgatccgcccacctcc

SEQ ID NO: 237867 - DNA, 120 bp, Artificial Sequence
  ENSG00000120594_77 (sequence is synthesized)
gcctcccaaagtgctggaattacaggcctgagccaccgtgcctggccgagttattaacttcttaagagcaatgtgctaataaatactcattgatgaccagctcaaatttaggtcattcag

SEQ ID NO: 237868 - DNA, 120 bp, Artificial Sequence
  ENSG00000120594_78 (sequence is synthesized)
acatccagacactggggcacatattctgcaagcaatgctgagacccctgacatagagaaagcaaaggatatgcctatgattagtctaaaatgcagccatcaccccccatacctcttctat

SEQ ID NO: 237869 - DNA, 120 bp, Artificial Sequence
  ENSG00000120594_79 (sequence is synthesized)
ggcattcatcctaacatcatggaggcctttgtcctagagaattatgtgacttgccctagagaattagtgaatgaccaaaaagagactttccatttatcttcctttgacttaaaaggcatg

SEQ ID NO: 237870 - DNA, 120 bp, Artificial Sequence
  ENSG00000120594_80 (sequence is synthesized)
aaaataaggcaaaaaaatcaataaaataattttcctgaggaaaggttaagagatggcactttcctttccgggcccagagctggatttctctgagatttgaccatctcaggactcagacag

SEQ ID NO: 237871 - DNA, 120 bp, Artificial Sequence
  ENSG00000120594_81 (sequence is synthesized)
actccagtgctattttctggacatttgtggtgaagcctcagccaccatgttcaaggtggtttgaatgaaaacatactcagattgtcacatttatagcagggaaataaaaactcaaattag

SEQ ID NO: 237872 - DNA, 120 bp, Artificial Sequence
  ENSG00000120594_82 (sequence is synthesized)
gcatcctgcagcaggctactctgaaaataacattaggcaacatcagagcttcacttgcaaagaaatgttaaaatcattttagggaaatcagtgaagtctctttagaaacagacatcttgt

SEQ ID NO: 237873 - DNA, 120 bp, Artificial Sequence
  ENSG00000120594_83 (sequence is synthesized)
gtatggcgtaacccagtcttggggccctcacggagaagagggggaagtcttttcattgattggtcaaaacaaatctctcatttgcctgatttgaagcatttcaacagtgcctggagagta

SEQ ID NO: 237874 - DNA, 120 bp, Artificial Sequence
  ENSG00000120594_84 (sequence is synthesized)
cattattttcaggggaaaaaaaggagagagtcttttttatatgccagctgggatcatgggaacttcgaatgccaggaatttactactgtttctggtaattctgtgtgtagtcatttgaaa

SEQ ID NO: 237875 - DNA, 120 bp, Artificial Sequence
  ENSG00000120594_85 (sequence is synthesized)
tgttgaagtgtgaaaagagaagaaattgggcacttcttgcggcgggggagggggggggggcggtggctttccagattttatgccagttgcaccagcatgcagaatatttgtaatgcattt

SEQ ID NO: 237876 - DNA, 120 bp, Artificial Sequence
  ENSG00000120594_86 (sequence is synthesized)
caaagtggatataatggcaccctttgtcagaatcacaaagctcactgcggcactgctacaagaggacactgaggaaaatctggccctatgaacctagtcaaccccaagcaaaaagaatga

SEQ ID NO: 237877 - DNA, 120 bp, Artificial Sequence
  ENSG00000120594_87 (sequence is synthesized)
ctatgtgtgtgagtgcagcacatggccagttcgtttctcactgttttggaaagccctgtgtgccaaaccaaggacgtgtctttcagggaaaggttaattttccgaagtttattaaaatag

SEQ ID NO: 237878 - DNA, 120 bp, Artificial Sequence
  ENSG00000120594_88 (sequence is synthesized)
aacttggaaaaccaagcattttgaatttattccagtcctctgggcatcattcctatttcttctgccatgtcaaggagaaattccaagcctgcattctgtcatgctaaaataaccagccca

SEQ ID NO: 237879 - DNA, 120 bp, Artificial Sequence
  ENSG00000120594_89 (sequence is synthesized)
tacttctcggtgaccttctgttgaacgtacctgagcctgcaaatgtaaaaatgattgtatctgaatctgcactaatggtgtctgagagcaaaaagagtgtgacctctattggaaaccttt

SEQ ID NO: 237880 - DNA, 120 bp, Artificial Sequence
  ENSG00000120594_90 (sequence is synthesized)
gttcaaattcaataattcagagatgctacatacttctgcaagcttcctgattatgttcactgtaatattaatgacctaagtttgaatgtatttccttacagtccattaatttgacatcca

SEQ ID NO: 237881 - DNA, 120 bp, Artificial Sequence
  ENSG00000120594_91 (sequence is synthesized)
tcttttacctggggattattacaattgcaataagtcattaatgttttcttcacacagcttcttaaaccaagtttctctgcagctctttcggttctgcttacagtgtgtgggaaatctgat

SEQ ID NO: 237882 - DNA, 120 bp, Artificial Sequence
  ENSG00000120594_92 (sequence is synthesized)
ttttttcccctagtaatagtttgataagaaatttagtgtattgactgcctcagtgacacaatttatctttaaaggtgtggaagctggtggggaccaaatgttacctgtgtttttgctgtt

SEQ ID NO: 237883 - DNA, 120 bp, Artificial Sequence
  ENSG00000120594_93 (sequence is synthesized)
gattgctattttcagaagcaaaccatgtttttcacttacagtaggagtcaacaaatttgggattttagaagggggaggagggagctatttgtgtaagactgctgtcatatttgactacat

SEQ ID NO: 237884 - DNA, 120 bp, Artificial Sequence
  ENSG00000120594_94 (sequence is synthesized)
attaaaaacagtaaatgagcattttgttttaatttcttaaataccttgtctttcaacatacgttttgtttcctttcttccattagtgttcaaaaggttctacccattgtggaagaaattc

SEQ ID NO: 237885 - DNA, 120 bp, Artificial Sequence
  ENSG00000120594_95 (sequence is synthesized)
tgtgtgcagaattcagaggcacaaggctgatggcaagatagaaagttattttgcttctaaacccaccccgatgtggaaactgatactagctagagggagctgtagaaaacaaagatttca

SEQ ID NO: 237886 - DNA, 120 bp, Artificial Sequence
  ENSG00000120594_96 (sequence is synthesized)
ggattgcacagtgtgtgggcaatgggatggagactttttcccctattcccagccacagtgcccaagcgttcaagtctcctggatcagacagatgggattttagctgctgctttaaatcct

SEQ ID NO: 237887 - DNA, 120 bp, Artificial Sequence
  ENSG00000120594_97 (sequence is synthesized)
agtgctggaataagtcaaggtacttcagttcagctcttgcctctgtcactaatcttgctttatgaactcctttgattttctgaataagttccagaaggttctctattattctgtccttct

SEQ ID NO: 237888 - DNA, 120 bp, Artificial Sequence
  ENSG00000120594_98 (sequence is synthesized)
tccaaactggaaatggctgtatctaattctcaggatattttggatgtgtgcctcaggtaatttatgtggaatgtgtaaagcaagatgtctccaattctgaatattccttccccttttccc

SEQ ID NO: 237889 - DNA, 120 bp, Artificial Sequence
  ENSG00000120594_99 (sequence is synthesized)
aatcctccactcttggactacctttataacaacaccgagtacgcacagacctgaacccatgcccaagaagcacacacaatgactggagctgtcgggaattcctgtcagtggcattccctg

SEQ ID NO: 237890 - DNA, 120 bp, Artificial Sequence
  ENSG00000120594_100 (sequence is synthesized)
agcactggctctgtacaactcaattataattttttaagaatcatacctctgtatagatcttttggactgtactgattaaactttgatattgtggagtaaattcagaagtgcaattttaaa

SEQ ID NO: 237891 - DNA, 120 bp, Artificial Sequence
  ENSG00000120594_101 (sequence is synthesized)
ggcgacggcagcgcctcctccgccaccaaactcctggggctccgcgggggcttggggccacctcctcctgagcccggaggaaccctctcccgataggttccagcgtgactccctcccact

SEQ ID NO: 237892 - DNA, 120 bp, Artificial Sequence
  ENSG00000120616_0 (sequence is synthesized)
acagtggagttttaatgtccgccatgttggccatggcgtattgaagagagcgagcgagagaggagcggagcggcacagcctcccaccctcccggctggtgttagtgcccggacggcgggc

SEQ ID NO: 237893 - DNA, 120 bp, Artificial Sequence
  ENSG00000120616_1 (sequence is synthesized)
tctgcgctccgcccctcaagtccccggcagcggttggcgagtggggaccgaacccccggttctccatgatcccgctggccggggccgtttccccagagcggagaggtatctgctgcgcct

SEQ ID NO: 237894 - DNA, 120 bp, Artificial Sequence
  ENSG00000120616_2 (sequence is synthesized)
gagatgagtaaactgtcgtttcgggcgcgggcgctagacgcctcgaagccgctgccggttttccgctgtgaggatctgcccgacctgcacgaatacgcctcgataaacagggccgtgccg

SEQ ID NO: 237895 - DNA, 120 bp, Artificial Sequence
  ENSG00000120616_3 (sequence is synthesized)
cagatgcccaccggaatggagaaggaagaggagtcggaacatcatcttcagcgggctatttcagcacagcaggtgtatggcgagaagagggataatatggttataccggtcccagaggca

SEQ ID NO: 237896 - DNA, 120 bp, Artificial Sequence
  ENSG00000120616_4 (sequence is synthesized)
gaaagtaatattgcttactatgagtctatatatcctggggaatttaagatgccaaagcagctcattcacatacagccttttagtttggatgctgaacagcctgattatgatttggattct

SEQ ID NO: 237897 - DNA, 120 bp, Artificial Sequence
  ENSG00000120616_5 (sequence is synthesized)
gaagatgaagtatttgtgaataaactgaaaaagaaaatggacatctgcccattgcaatttgaggagatgattgaccgcctagaaaaaggcagtggtcagcagccagtcagtctgcaggaa

SEQ ID NO: 237898 - DNA, 120 bp, Artificial Sequence
  ENSG00000120616_6 (sequence is synthesized)
gccaaactactgctaaaagaagatgatgaactaattagagaagtttatgaatattggattaaaaagagaaaaaactgtcgagggccatctcttattccatcagtaaaacaagagaagcga

SEQ ID NO: 237899 - DNA, 120 bp, Artificial Sequence
  ENSG00000120616_7 (sequence is synthesized)
gatggttccagcacaaatgatccttatgtggcttttagaaggcgtactgaaaaaatgcagactcgaaaaaatcgcaaaaatgatgaagcctcttacgaaaaaatgcttaagctgcgacga

SEQ ID NO: 237900 - DNA, 120 bp, Artificial Sequence
  ENSG00000120616_8 (sequence is synthesized)
gatctaagtcgagctgttactattctagagatgataaaaagaagagaaaaaagtaaaagagagctattgcacttaacactggaaattatggaaaagaggtataatttgggcgactacaat

SEQ ID NO: 237901 - DNA, 120 bp, Artificial Sequence
  ENSG00000120616_9 (sequence is synthesized)
ggagagatcatgtctgaggttatggcacagagacagccaatgaaacctacttatgccatccccatcatccctattactaatagcagtcaatttaaacaccaggaagcaatggatgtgaag

SEQ ID NO: 237902 - DNA, 120 bp, Artificial Sequence
  ENSG00000120616_10 (sequence is synthesized)
gagttcaaagttaataagcaagataaagccgatcttatccgaccgaaacggaaatatgaaaagaagcccaaagtcttaccatcgtctgccgctgctactccccaacagacgagtcctgct

SEQ ID NO: 237903 - DNA, 120 bp, Artificial Sequence
  ENSG00000120616_11 (sequence is synthesized)
gcactgccagtcttcaatgctaaagatctgaatcagtatgactttcccagctcagacgaagaacctctctcccaggttttgtctggctcttcggaagctgaggaagacaatgatcctgat

SEQ ID NO: 237904 - DNA, 120 bp, Artificial Sequence
  ENSG00000120616_12 (sequence is synthesized)
ggtccttttgctttccgtaggaaagcaggctgtcagtactatgctcctcacttagaccaaactggcaactggccttggactagtcctaaagatggaggattaggggatgtgcgatataga

SEQ ID NO: 237905 - DNA, 120 bp, Artificial Sequence
  ENSG00000120616_13 (sequence is synthesized)
tactgcttaactactctcaccgtaccccaaaggtgtattggatttgcacgaagacgggttgggcgcggtggaagggtcttactggacagagctcattcagactatgacagtgtgtttcac

SEQ ID NO: 237906 - DNA, 120 bp, Artificial Sequence
  ENSG00000120616_14 (sequence is synthesized)
catctggatttggaaatgctttcctcaccacaacattctccagtcaatcagtttgccaatacctcagaaacaaatacctcggacaaatctttctctaaagacctcagtcagatactagtc

SEQ ID NO: 237907 - DNA, 120 bp, Artificial Sequence
  ENSG00000120616_15 (sequence is synthesized)
aatatcaaatcatgtagatggcggcattttaggcctcggacaccatccctacatgacagtgacaatgatgaactctcctgtagaaaattatataggagtataaaccgaacaggaacagca

SEQ ID NO: 237908 - DNA, 120 bp, Artificial Sequence
  ENSG00000120616_16 (sequence is synthesized)
gtaaaagtagcagtggttcagcacactttgcatttacagccgaacaataccagcaacatcaacagcaactggcactcatgcagaaacagcagcttgcacaaattcagcaacagcaagcaa

SEQ ID NO: 237909 - DNA, 120 bp, Artificial Sequence
  ENSG00000120616_17 (sequence is synthesized)
atagtaattcctccaccaacacatcacagggttttgtttctaagactttggattctgctagtgcacagtttgctgcttctgctttggtgacatcagaacaactgatgggattcaagatga

SEQ ID NO: 237910 - DNA, 120 bp, Artificial Sequence
  ENSG00000120616_18 (sequence is synthesized)
aggatgatgtggtgcttggaatcggggtgaatggcgtccttccagcctcaggagtatacaagggcttacacctcagtagtactacaccaacagcacttgtacatacaagtccatcaacgg

SEQ ID NO: 237911 - DNA, 120 bp, Artificial Sequence
  ENSG00000120616_19 (sequence is synthesized)
caggttcagctttgttacagccttcaaatattacacagacttcaagttcccacagtgcactgagtcatcaagtaactgctgccaattctgcaacaactcaggttctgattgggaacaaca

SEQ ID NO: 237912 - DNA, 120 bp, Artificial Sequence
  ENSG00000120616_20 (sequence is synthesized)
ttcgattaactgtaccttcatcagttgccactgtaaactctattgccccaataaatgcacgacatatacctaggactttaagtgctgttccatcatctgccttaaagctggccgctgcag

SEQ ID NO: 237913 - DNA, 120 bp, Artificial Sequence
  ENSG00000120616_21 (sequence is synthesized)
caaactgtcaagtttccaaggtcccatcttcatcctctgtagattcagttccaagggaaaatcatgaatcagaaaagccagcactgaacaacatagcagacaacacagtagcgatggagg

SEQ ID NO: 237914 - DNA, 120 bp, Artificial Sequence
  ENSG00000120616_22 (sequence is synthesized)
tgacgtagcttcctccgagtggaactgcagcctggggacttgattaggtgctatgcatcagtagcattttgaatgcaagggatgatggaaagcagcacatgcgtttctgtggcagctgtg

SEQ ID NO: 237915 - DNA, 120 bp, Artificial Sequence
  ENSG00000120616_23 (sequence is synthesized)
gggacttgacagcaatgctcatctctcatgcttcaatttttcttttcttactgttaataggaaaaaaatcaacatctgtaaattaagaatacagcaattatctgtacagtactgcatatt

SEQ ID NO: 237916 - DNA, 120 bp, Artificial Sequence
  ENSG00000120616_24 (sequence is synthesized)
tgtaatacccttgtatatatgttacttgaatacagaaatgttcatttgtgatgctttgcacttgggggtggggggtgggagggaaatcaattgcaacaaagagtgtgagatgtgagattg

SEQ ID NO: 237917 - DNA, 120 bp, Artificial Sequence
  ENSG00000120616_25 (sequence is synthesized)
tatagagatgaagtgtcatcacatcatgtgcatggtgcggaacctgctgttttatctatttattgtgccgtgtttacagttttttgtacactgtaccttcattggttcctgtgctgtagt

SEQ ID NO: 237918 - DNA, 120 bp, Artificial Sequence
  ENSG00000120616_26 (sequence is synthesized)
aaatgtgttaggtagctgtggactccttggtattttgtaaatggtataacataacttggttcccctctgggtccttgagttttctgtgtatcatgtgaaaaaaaatggtgacatacatac

SEQ ID NO: 237919 - DNA, 120 bp, Artificial Sequence
  ENSG00000120616_27 (sequence is synthesized)
agaattttacaaaaaaaaaaaaaaaaaaaaaggcatcagtttttttaaaaatggggaatgtactattaaatggggatcttcctggtctactatcattaggacaagtaacaagctaaaaat

SEQ ID NO: 237920 - DNA, 120 bp, Artificial Sequence
  ENSG00000120616_28 (sequence is synthesized)
gaagtctcttgaatctttccatccccaacttgcccacaaagctgtgggtggtttctggtacttaaagcactaatattatgttgctgctctgcgaacagcccagtagtcccatttccttcc

SEQ ID NO: 237921 - DNA, 120 bp, Artificial Sequence
  ENSG00000120616_29 (sequence is synthesized)
acaccaaaaagtgttaaatcaagtatgcaaatggagtccttacaactggagtttatgttgtcttgccctttttttagcacaaaaaaaattgtacttttttattgtcgaattgtttaaaag

SEQ ID NO: 237922 - DNA, 120 bp, Artificial Sequence
  ENSG00000120616_30 (sequence is synthesized)
acttcattctttacttgttcttacgaaaaggatataagggagaagaatgcagtaattgctgtacgtgtatcatcattccagtttctaaaaacagccagccagcttttttccttttaagat

SEQ ID NO: 237923 - DNA, 120 bp, Artificial Sequence
  ENSG00000120616_31 (sequence is synthesized)
tctccagaaggctgcaaggccagaaccacaaatatcgggtgccttcctttggaaatatttgacctctcttctgtgaagagaatggtacttaacagactactactagtgctttgtcagtac

SEQ ID NO: 237924 - DNA, 120 bp, Artificial Sequence
  ENSG00000120616_32 (sequence is synthesized)
cgaagtctgaatgcccagtccaatggcatacattatccttaaggtttttaatcccacctggaaaaattgtgatagaattctcacaaaataaacccagggcattacatgttgacaaactaa

SEQ ID NO: 237925 - DNA, 120 bp, Artificial Sequence
  ENSG00000120616_33 (sequence is synthesized)
agcgctcgcctgcttgccatcgcaaagttgttaaccccagagtcttctggctgtgctgcctcctctgcttttaatcttctgtggatatttctccgatttcccccaaaagcccacagatcc

SEQ ID NO: 237926 - DNA, 120 bp, Artificial Sequence
  ENSG00000120616_34 (sequence is synthesized)
tgggggaagccaccccattcggccaccgatcatggaagaaagtattactttttatttaccaaacattttaaagatgttggaagatccatatgctgcctggaggctgttgtttctagggac

SEQ ID NO: 237927 - DNA, 120 bp, Artificial Sequence
  ENSG00000120616_35 (sequence is synthesized)
atggaaaagaggtaatgtatattttaataatgttagaggaagtatagtgccattaacattttgtatattgagttaatttatttcctatgcaataatctaattacagaaatatcttttttt

SEQ ID NO: 237928 - DNA, 120 bp, Artificial Sequence
  ENSG00000120616_36 (sequence is synthesized)
tttaaatatgtggtatgatactttttatacttttacatgttttcctctattttctttaaaagtgactggattcacttaagttaaaacataccaagtatttccatttcaaagtggtctttt

SEQ ID NO: 237929 - DNA, 120 bp, Artificial Sequence
  ENSG00000120616_37 (sequence is synthesized)
ttggtccttgagttgcatgtaggacttgagttaattgatagtactgcttcttttttaatgcatataaaatttaaaacactggattgttaaatagaaaagggtaaagaaagagggagaaag

SEQ ID NO: 237930 - DNA, 120 bp, Artificial Sequence
  ENSG00000120616_38 (sequence is synthesized)
gcccatatatcttaccactcaagcatttggcaaggtacacaatgaaaacttaaagaaaacttctgccctatttctagtccctatccccaaagaaaaccacttttaaatttcttgtgatta

SEQ ID NO: 237931 - DNA, 120 bp, Artificial Sequence
  ENSG00000120616_39 (sequence is synthesized)
cttttagaaaaattagttttaaagcccaggcaattctaattagcagaaagatccttagcaccattttaggcattactttcaacttcaccaaatctttcaccaaaattgctacattaaaat

SEQ ID NO: 237932 - DNA, 120 bp, Artificial Sequence
  ENSG00000120616_40 (sequence is synthesized)
tccagcttttgattttttcccaacaatcctctatttatatgccatgataaagctataagccaaaaaagtaaaaggaagaaacaaaaggaattatgtaatctttgagagaaattgaatagt

SEQ ID NO: 237933 - DNA, 120 bp, Artificial Sequence
  ENSG00000120616_41 (sequence is synthesized)
caaagtttaactacaatcttgccttaaatgtaattggtgtttataattatatctcagtcagctagttattaatggttataaagataaatacttataaaactaactttccaaaattttctt

SEQ ID NO: 237934 - DNA, 120 bp, Artificial Sequence
  ENSG00000120616_42 (sequence is synthesized)
ctttttcctgctttatttaggtataattgacaaataaaaattatatattttatatgttggtcaaagggtacagacttacagttatgaaatgaatacattctggagacctaatgtacagca

SEQ ID NO: 237935 - DNA, 120 bp, Artificial Sequence
  ENSG00000120616_43 (sequence is synthesized)
tggttaataacaatgtattatatacttgaaatttgctaagagtagatcttaagtaatctcaccacatatacacacaaggtaattatgtgaggtgatggatatgttaattagcttgattgt

SEQ ID NO: 237936 - DNA, 120 bp, Artificial Sequence
  ENSG00000120616_44 (sequence is synthesized)
tttgctttccgtaggaaagcaggctgtcagtactatgctgtaagtttcagagtgtctttgtaaataacaaactatttacctttaactgacaaaattaaataatttggattttttttttta

SEQ ID NO: 237937 - DNA, 120 bp, Artificial Sequence
  ENSG00000120616_45 (sequence is synthesized)
ttgcacgaagacgggttgggcgcggtggaaggtaaggtatttctgtattcctagcagaaggatattttaggcattagggtgattgaatctaacttttaaagtcaggtaatccctctgaac

SEQ ID NO: 237938 - DNA, 120 bp, Artificial Sequence
  ENSG00000120616_46 (sequence is synthesized)
aactcattagttcctatttgctattcttaactgatctgttgactaaaatatttttgttgctgtgctgcctggttcttacacatccatagtttttgacataactctattgggtccctagtg

SEQ ID NO: 237939 - DNA, 120 bp, Artificial Sequence
  ENSG00000120616_47 (sequence is synthesized)
gacctgcttttctccccaaggtggaaaacctcagataaattatcaaggggtagaattgtgagaaagggcaacagatgaagacaagtgtaaatcctgattgcacacagtgtattaagttaa

SEQ ID NO: 237940 - DNA, 120 bp, Artificial Sequence
  ENSG00000120616_48 (sequence is synthesized)
agaaactgcaaaaaagttgtttcacactagctagtataatgggtttaacctgacagtgaaaaggatccatgcataacctgatcttgacatcccagtttgttaggatctaattgttcttcc

SEQ ID NO: 237941 - DNA, 120 bp, Artificial Sequence
  ENSG00000120616_49 (sequence is synthesized)
tttgtttaaaccttgtagaattccttccttcatactctaaatgcctttatgcgagttgcttgtatggggacaggaaacaaatagcaaaacacataaactcaaggaatggagagacgttaa

SEQ ID NO: 237942 - DNA, 120 bp, Artificial Sequence
  ENSG00000120616_50 (sequence is synthesized)
tgtataatgtgcggggaaaattaaaagggaaagcaaataatagtatcaaggtgctttttcaggaagaaacccaagcgtatatttatgataaactaatggcttatacatatatttttttca

SEQ ID NO: 237943 - DNA, 120 bp, Artificial Sequence
  ENSG00000120616_51 (sequence is synthesized)
tcttcaactcttaattgcagagggtttttttttattatttaaacattggttaagaattatctaggcactaaaatacattttatttagtccgtttttttccatcactgctgacatcaggag

SEQ ID NO: 237944 - DNA, 120 bp, Artificial Sequence
  ENSG00000120616_52 (sequence is synthesized)
cagtgaaaattctctacgttagctatattttattctattactaacattaatcaatgttattattttgacttggagccatttataatgtttatataaataacataagaggccaggcatggt

SEQ ID NO: 237945 - DNA, 120 bp, Artificial Sequence
  ENSG00000120616_53 (sequence is synthesized)
agatcgcaccattgcactccagtctgggtgacagagtaaaactccatctctctcaatcaatcagtcaatcaatcaataacataagaatatatcctctagagtagtggatctcaaatattt

SEQ ID NO: 237946 - DNA, 120 bp, Artificial Sequence
  ENSG00000120616_54 (sequence is synthesized)
atatcctctagagtagtggatctcaaatattttgtctataagaaatgttaatggtatactatgttttttgttgcttttcttctctcttctccctttccccccaaaaggaatgaagttttt

SEQ ID NO: 237947 - DNA, 120 bp, Artificial Sequence
  ENSG00000120616_55 (sequence is synthesized)
gcttaaatatagaataaatgtgttcgcaacattttataaagcattcattttggtgctttgtaatggaagtgaaaatctttagttgaaaaacaatttgttaaaagaacttttattagaaat

SEQ ID NO: 237948 - DNA, 120 bp, Artificial Sequence
  ENSG00000120616_56 (sequence is synthesized)
tgaggttgtagcctataaaaaccaaacactaaaataatcaactttaaagcttttaaatattcagtatgagttggccttttggcagttgggggtaaaaagaaaaagctttaatatataatc

SEQ ID NO: 237949 - DNA, 120 bp, Artificial Sequence
  ENSG00000120616_57 (sequence is synthesized)
ctctacgcaaagtaaaagtagcagtggttcagcacactttggtatgttgactgttaatgatgtacgtttctatagaaatgtcaggtccaaccatttcccatttgttcgactatgtggtct

SEQ ID NO: 237950 - DNA, 120 bp, Artificial Sequence
  ENSG00000120616_58 (sequence is synthesized)
gttacatttatggcttaaagtccttttctcttaaacagttaaaaaaaaaatcttggtctaagtatttatttgaatcctgttgctataggagtttgtatgtgtgtgtcttcatttaaacat

SEQ ID NO: 237951 - DNA, 120 bp, Artificial Sequence
  ENSG00000120616_59 (sequence is synthesized)
acctgcatacaaagatggtttatttctatttaatatgtgacatttgtttcctggatatagtccgtgaaccacaagatttatcatatttttcaataatatgagaagaaaatgggccgtaaa

SEQ ID NO: 237952 - DNA, 120 bp, Artificial Sequence
  ENSG00000120616_60 (sequence is synthesized)
ttgttaaccattttatgttcagatatttctctagtttttacctagtttgctttaacatagagaccagcaagtgaatatatatgcataaccttatatgttgacacaataattcagaataat

SEQ ID NO: 237953 - DNA, 120 bp, Artificial Sequence
  ENSG00000120616_61 (sequence is synthesized)
ttgttaaagataaactaatttttcagagaagaacatttaaagggttaatatttttgaaacgttttcagataatatctatttgattattgtggcttctatttgaaatgtgtctaaaataaa

SEQ ID NO: 237954 - DNA, 120 bp, Artificial Sequence
  ENSG00000120616_62 (sequence is synthesized)
tgctgtttatttaaaatattcctataatcttagctgtctgttttaaagcataagtttgtgttatttgaagcctatatattgtagaaattcaccattgaattatgttactactgatttttg

SEQ ID NO: 237955 - DNA, 120 bp, Artificial Sequence
  ENSG00000120616_63 (sequence is synthesized)
taaaggtaatctgaggactatgaagatatttatcattcccctaattcaccctgtagggttatagttaagttgcttcataaatatgaacatttgctctgattcttaaagacctccagaaaa

SEQ ID NO: 237956 - DNA, 120 bp, Artificial Sequence
  ENSG00000120616_64 (sequence is synthesized)
tgttccgtaaactaatttacttggtggttaaaaaaaagtacagttgacccctgaacaacatgagggttaggggcaccccccaattgcagtccaaaattcatgtataacttttgactcccc

SEQ ID NO: 237957 - DNA, 120 bp, Artificial Sequence
  ENSG00000120616_65 (sequence is synthesized)
aaaaacttgactaatagtctgctcctgaccagaattaccaataacataaacagtccattagtccattaacataaacagtccaaacatacatgttttgtatgttatatgtattctgtactt

SEQ ID NO: 237958 - DNA, 63 bp, Artificial Sequence
  ENSG00000120616_66 (sequence is synthesized)
cttaaaataagctaggaaaaagaacatgttattaagaaatttatgcagattgcttgagcccag

SEQ ID NO: 237959 - DNA, 120 bp, Artificial Sequence
  ENSG00000120616_67 (sequence is synthesized)
atggtgaaacctcatctctacaaaaaatgcagaaattcactgggtgtggtggtgagcgcctgtagtctcagctactcaggagactgaggtggtaggagcccagaaggtcaaggctgcagt

SEQ ID NO: 237960 - DNA, 120 bp, Artificial Sequence
  ENSG00000120616_68 (sequence is synthesized)
gagccaagatcatgccactgcattccaggcttcacagcaaagcaaaaccctgtttcaaaaaaaaaagaaattcataaaggagagaaaatacatttactaatcattaagtgtaagtggatc

SEQ ID NO: 237961 - DNA, 120 bp, Artificial Sequence
  ENSG00000120616_69 (sequence is synthesized)
tttactaatcattaagtgtaagtggatcatcataaaggtctttatccttgtcatcttcacattgagggggaggaggggttggtcttgtcatctgagaggtgacagaggcagaagataatt

SEQ ID NO: 237962 - DNA, 120 bp, Artificial Sequence
  ENSG00000120616_70 (sequence is synthesized)
tacaaataagtagacccaggcagttcaaacccatgttattcaagggtcagctgtacttctatgaaatggaagtctttcagctcatgagaaaaataatcacaattcagaaatcagctggaa

SEQ ID NO: 237963 - DNA, 120 bp, Artificial Sequence
  ENSG00000120616_71 (sequence is synthesized)
gataaagctattttagggactaacagcttatttataatcccattaatgttactgtctttatcaccaaaagccagtttctctctacttttatagtcttaagaatcaaaataaagaactttt

SEQ ID NO: 237964 - DNA, 120 bp, Artificial Sequence
  ENSG00000120616_72 (sequence is synthesized)
caataaagacttacttatagtgttagtatagaggttttaacagtataaacctgtcataggttaccctgataattaagctttctaagctgtaaaaattctttaagacttctcagaaaatag

SEQ ID NO: 237965 - DNA, 120 bp, Artificial Sequence
  ENSG00000120616_73 (sequence is synthesized)
gcatgttccatcaatctccatcttctccaccccttaaatagagaagttgaagtgtataactatcctaaatatttaaggattttataatgctctttttttatgaaaaatgttttgctatac

SEQ ID NO: 237966 - DNA, 120 bp, Artificial Sequence
  ENSG00000120616_74 (sequence is synthesized)
tgctttaggcatattaataacagttgtaaaaattgtttgatttgtgtttgcccaaagaacattaaaagatgagcattaccaaaagcttagctgaaaagaaatcattagtaaccttgtaat

SEQ ID NO: 237967 - DNA, 120 bp, Artificial Sequence
  ENSG00000120616_75 (sequence is synthesized)
ttttcttctttatcatttctttcctccatatatgcgatacaactatttatttatttatttaagacaggatctttctctgtcacccagactggagtatagtggcacagtcatggctcactg

SEQ ID NO: 237968 - DNA, 120 bp, Artificial Sequence
  ENSG00000120616_76 (sequence is synthesized)
cagcctcaacttcccaggctcagtgatcccccaacctcagcctcctgggtagctaggactgcaggcgtatgccaccatgactggctaattttttgtaagagatagggtctatgttgccca

SEQ ID NO: 237969 - DNA, 120 bp, Artificial Sequence
  ENSG00000120616_77 (sequence is synthesized)
ttggcctcccaaagtgctagggttacaggggtgagccactgcacccagcctcaatactactttttaaaaatgagtttatctattttttttcctgttgtcttaattattttcaatttctcc

SEQ ID NO: 237970 - DNA, 120 bp, Artificial Sequence
  ENSG00000120616_78 (sequence is synthesized)
tattttttttcctgttgtcttaattattttcaatttctccttaaattttgctagatcttctaatacttagaggatagatacctacagactactgtagggtaacactgttcatttatattt

SEQ ID NO: 237971 - DNA, 120 bp, Artificial Sequence
  ENSG00000120616_79 (sequence is synthesized)
gtgaatattccagagacctaaagcttttctctgcatactttataaagtatattacaatgcagccatatcataagtgcatttcacttaatccaactccaggcccctgaagaaaaaaaaaac

SEQ ID NO: 237972 - DNA, 120 bp, Artificial Sequence
  ENSG00000120616_80 (sequence is synthesized)
ttcaacattgtaaaagttgaatttcattttgaacctagggatttcttaaataactattctaagtttctcctgaggtttttctaataagtagtcatataataattcccacattattgtttg

SEQ ID NO: 237973 - DNA, 120 bp, Artificial Sequence
  ENSG00000120616_81 (sequence is synthesized)
tttcattttgaaatgatacttcaactgaattacagatagtcttgttttaaaaataacaaatattttggaataagataattttttaagaatatgtgcacaattgcttttggctttaaaaat

SEQ ID NO: 237974 - DNA, 120 bp, Artificial Sequence
  ENSG00000120616_82 (sequence is synthesized)
ccaccggaatggagaaggaagaggagtcggtacagccatttaaacagggtgcagtgtattgacagttcaaggaagtccaggagtcgcgtggatttgtgtgctacaattttgttgtggaaa

SEQ ID NO: 237975 - DNA, 120 bp, Artificial Sequence
  ENSG00000120616_83 (sequence is synthesized)
attgtactgtaatacttctcttggtactgtaagaatttttaatgtagaaattatgctctgtaatgttgtttttggaaataaaactgtttaaactctttgggttgtttaaccttttaaagt

SEQ ID NO: 237976 - DNA, 120 bp, Artificial Sequence
  ENSG00000120616_84 (sequence is synthesized)
gaaatagctgtgacagtgaaatgttacttttgagagtagtgtcttaaatctaactttacagataagccaagtgtatgtagtagctcagattgtctagttgggcactgactttcagcacat

SEQ ID NO: 237977 - DNA, 120 bp, Artificial Sequence
  ENSG00000120616_85 (sequence is synthesized)
tgtctcatgagacactacctcttaatttattttacttgtatcaactttagagtagcatggccatttgtttattttttaataagtgatttgtttttaaaaattaaagtacttgtgactgca

SEQ ID NO: 237978 - DNA, 120 bp, Artificial Sequence
  ENSG00000120616_86 (sequence is synthesized)
gtcttatgattatccctcattgtttcccaccagagttcatctctaattaccaactgttgtcatagaaccttgcatctaaccagcagaaaagtggctttcgcctgaatatacagggtttag

SEQ ID NO: 237979 - DNA, 120 bp, Artificial Sequence
  ENSG00000120616_87 (sequence is synthesized)
acctctacgcaaagtaaaagtagcagtggttcagcacactttgaactgagctctccatagacaaacataagtagcataacacagtgtctttcctcagacatcattctgtacagtaaatca

SEQ ID NO: 237980 - DNA, 120 bp, Artificial Sequence
  ENSG00000120645_0 (sequence is synthesized)
aagcccctccccttctctgggccttgatttcccctcctgctcagtggggacgttcttggtcctccttcttgcccactctacccagtcgccgagtctggcgaagcagagctgtctgggggt

SEQ ID NO: 237981 - DNA, 120 bp, Artificial Sequence
  ENSG00000120645_1 (sequence is synthesized)
caccgcagcaggagggaccgagcttagatacgaaaaaagacttctacacggcaagagccacagaaaggacgctccagctggctcagcagaggggcatctctccctttcaagaacaaaagg

SEQ ID NO: 237982 - DNA, 120 bp, Artificial Sequence
  ENSG00000120645_2 (sequence is synthesized)
tggcaggtacccgggggccctggggcagaacgaggtaaattctgcacggacttccacatctaagaccccagaaatctccagccggctccctccgaccgaatgagaccgtgctgcaccagt

SEQ ID NO: 237983 - DNA, 120 bp, Artificial Sequence
  ENSG00000120645_3 (sequence is synthesized)
tctgctgcccagccgccgacgcctgctccgacctggcctcccaaagattgaaatgctagaacataagtacggcggtcacctggtgtcccggcgcgccgcttgcaccatccaaaccgcctt

SEQ ID NO: 237984 - DNA, 120 bp, Artificial Sequence
  ENSG00000120645_4 (sequence is synthesized)
ccgccaataccagctcagcaagaacttcgagaaaatccgcaactcgcttctggagagccgcctgccacggcggatctccctgcgcaaggtgcggtcacccacggccgagagcctggcggc

SEQ ID NO: 237985 - DNA, 120 bp, Artificial Sequence
  ENSG00000120645_5 (sequence is synthesized)
cgagaaagcgctcatggagggctacggcctcgtggggctgccgctggtgcgctcgccctccctgccgcccaccttcgcaggcaccctcaccgagctggaggactccttcaccgagcaggt

SEQ ID NO: 237986 - DNA, 120 bp, Artificial Sequence
  ENSG00000120645_6 (sequence is synthesized)
gcaatccctggccaagtccatcgacgacgcgctcagcacgtggagcctcaagaccatgtgctccctgcgggagagtggcgcttaccagctccaccaggccctgcaggcggccgcggggcc

SEQ ID NO: 237987 - DNA, 120 bp, Artificial Sequence
  ENSG00000120645_7 (sequence is synthesized)
ggcgccggagagcgcgggccccgggcccggggatgacgccgcggagacccccggcctgcccccggcccacagcgggaccctcatgatggctttccgggacgtcacggtgcagatcgccaa

SEQ ID NO: 237988 - DNA, 120 bp, Artificial Sequence
  ENSG00000120645_8 (sequence is synthesized)
ggacgtcacggtgcagatcgccaaccagaacatatccgtctcctcctccacggctctgtcggtggccaactgcctgggcgctcagacggtccaggcccccgcagagcccgcggcgggcaa

SEQ ID NO: 237989 - DNA, 120 bp, Artificial Sequence
  ENSG00000120645_9 (sequence is synthesized)
ggccgagcagggcgagacctctgggcgggaggccccggaagcccccgccgtgggccgggaggacgcgtcagccgaggactcatgcgcagaggctgcggctagtggggcggcggatggggc

SEQ ID NO: 237990 - DNA, 120 bp, Artificial Sequence
  ENSG00000120645_10 (sequence is synthesized)
cacagcccccaaaacagaggaggaagaggaggaggaggagacggcggaggtggggagaggggccgaggccgaggcaggcgacttggagcagctgagcagcagcagcacgtccaccaagtc

SEQ ID NO: 237991 - DNA, 120 bp, Artificial Sequence
  ENSG00000120645_11 (sequence is synthesized)
ctgagcctgccgcgctaccactgcgagaacccagccagctgcaagtcgcccacgctctccaccgacaccctgcgcaagcggctctaccgcatcggcctcaacctcttcaacataaacccc

SEQ ID NO: 237992 - DNA, 120 bp, Artificial Sequence
  ENSG00000120645_12 (sequence is synthesized)
gacaagggcatccagttcctgatctcacgcggcttcatcccggacacccccatcggtgtggcccatttcctcctccagcgaaagggcctcagccgccagatgattggagagttcctgggc

SEQ ID NO: 237993 - DNA, 120 bp, Artificial Sequence
  ENSG00000120645_13 (sequence is synthesized)
aacagcaagaagcagttcaaccgcgacgtgctggactgcgtggtggacgagatggacttctccagcatggagctggacgaggccctgcgcaagttccaggcacacatccgtgtgcagggg

SEQ ID NO: 237994 - DNA, 120 bp, Artificial Sequence
  ENSG00000120645_14 (sequence is synthesized)
gaggctcagaaggtggagcggctcattgaggccttcagccagcgctactgcatgtgcaaccccgaagtggttcagcagttccacaaccccgacaccatcttcatcctcgccttcgccatc

SEQ ID NO: 237995 - DNA, 120 bp, Artificial Sequence
  ENSG00000120645_15 (sequence is synthesized)
atcctcctcaacaccgacatgtacagccccaacatcaagcctgaccggaagatgatgctggaggacttcatccgaaaccttcgaggtgtggacgatggcgctgacatccccagggagctg

SEQ ID NO: 237996 - DNA, 120 bp, Artificial Sequence
  ENSG00000120645_16 (sequence is synthesized)
gtggtaggcatctatgagaggatacagcagaaggagctcaagtccaatgaggaccacgtcacgtacgtcaccaaggtggagaagtccattgtgggcatgaagacagtgctgtccgtgccc

SEQ ID NO: 237997 - DNA, 120 bp, Artificial Sequence
  ENSG00000120645_17 (sequence is synthesized)
caccgccgcctggtgtgctgcagccggctcttcgaggtgacggatgtgaacaagctgcagaagcaggcagcgcatcagagggaggtgttcctcttcaatgacctgctggtgattctcaaa

SEQ ID NO: 237998 - DNA, 120 bp, Artificial Sequence
  ENSG00000120645_18 (sequence is synthesized)
ctttgcccgaagaagaagagctcctccacgtacaccttttgcaagtcagttggcctgctgggcatgcagttccagctctttgagaacgagtattactctcatggcatcacactggtgacc

SEQ ID NO: 237999 - DNA, 120 bp, Artificial Sequence
  ENSG00000120645_19 (sequence is synthesized)
ccgctctcgggctccgagaagaagcaggtgctgcatttctgtgccctgggctcggacgagatgcagaagttcgtggaggacctgaaggagtccattgctgaggtgacggagctggagcag

SEQ ID NO: 238000 - DNA, 120 bp, Artificial Sequence
  ENSG00000120645_20 (sequence is synthesized)
atccgaatagagtgggagctggagaagcagcagggaacaaagacactctccttcaagccctgcggagcccagggggacccacagtcaaagcaaggatcgccgacagccaaaagggaagcc

SEQ ID NO: 238001 - DNA, 120 bp, Artificial Sequence
  ENSG00000120645_21 (sequence is synthesized)
gcgctcagggagaggccggcggagagcacggtggaggtattaatcaatgcctccccagcccgactcaccattttaccaatttcaagagatacaattaaaagttactgctagcatgggtaa

SEQ ID NO: 238002 - DNA, 80 bp, Artificial Sequence
  ENSG00000120645_22 (sequence is synthesized)
gccctcgcgctccccgccgccagcccaggcgcaggcagggcgcaggcggcggcgggcggcatggagagcctgctggagaa

SEQ ID NO: 238003 - DNA, 120 bp, Artificial Sequence
  ENSG00000120645_23 (sequence is synthesized)
agagcctgctggagaatccggtgcgcgccgtgctctacctcaaggagctcacggccatcgtgcagaaccagcagagcctcatccacacccagcgagagcgtatcgacgagctggagcggc

SEQ ID NO: 238004 - DNA, 120 bp, Artificial Sequence
  ENSG00000120645_24 (sequence is synthesized)
ggctggacgagctgagcgctgagaaccgcagcctgtgggagcaccagcagctgctgcaagcccagcctccgcccgggctcgtccccccgtcatcggccccgctgccggccgctccggcca

SEQ ID NO: 238005 - DNA, 120 bp, Artificial Sequence
  ENSG00000120645_25 (sequence is synthesized)
ccgctcctgccgccgccgccagggcccaggaacctctccaggaccagggacagcgctcagcagccgcgccgcatcccgcgcccgatcggccgccgcgtcagcaccacggacagctcctgg

SEQ ID NO: 238006 - DNA, 120 bp, Artificial Sequence
  ENSG00000120645_26 (sequence is synthesized)
agcagccccagcggggccctggcagcagggctcacacaccccagtcgccccacaagcatctggggacacaaggggccgtgactgacaaggagaaggagcgtcccccgagttgctgcgctg

SEQ ID NO: 238007 - DNA, 120 bp, Artificial Sequence
  ENSG00000120645_27 (sequence is synthesized)
ctgccggagccctccttcagcacaaatccccctccgccctcggcaagggcgtcctgagcaggagacctgagaatgagaccgtgctgcaccagttctgctgcccagccgccgacgcctgct

SEQ ID NO: 238008 - DNA, 120 bp, Artificial Sequence
  ENSG00000120645_28 (sequence is synthesized)
ccgacctggcctcccaaagtgatggctcctgcacccaggccggtgggggcatggaggactccgtggtggcagcggcggcggtggcagccggcagacccagtgcccatgccccgaaggctc

SEQ ID NO: 238009 - DNA, 120 bp, Artificial Sequence
  ENSG00000120645_29 (sequence is synthesized)
gaaggctcaagcccaggagctgcaggaggaggaggagcggccgggggcaggggctgcctccccaagggctggcccccagcacaaggcctcccccggccggcagcagcctgccctggcgac

SEQ ID NO: 238010 - DNA, 120 bp, Artificial Sequence
  ENSG00000120645_30 (sequence is synthesized)
acaacaggcttcaaacgtcccagcacaactccgggctgggggccgagaggggagcgccggtgccgccgccagacctgcagcctagccccccgagacagcagaccccaccactgccgccgc

SEQ ID NO: 238011 - DNA, 120 bp, Artificial Sequence
  ENSG00000120645_31 (sequence is synthesized)
cgccacccacgcccccgggcaccctggtgcagtgccagcaaattgtcaaggtcattgtcctggacaagccctgcctggcccgcatggagcccctgctgagccaggctctctcctgctaca

SEQ ID NO: 238012 - DNA, 120 bp, Artificial Sequence
  ENSG00000120645_32 (sequence is synthesized)
gtcctctgactcctgcggctccacacccctgggcggtcccggctctccggtcaaggtcacccaccagcctccgctgcccccgcccccacccccctacaaccaccctcaccagttctgtcc

SEQ ID NO: 238013 - DNA, 120 bp, Artificial Sequence
  ENSG00000120645_33 (sequence is synthesized)
cccaggctccctgctgcacgggcaccgctactccagtggctcaaggagcctggtgtagactctgccccaccaccctgctgtcctgggagggctggccactggggggcctgggctgcccct

SEQ ID NO: 238014 - DNA, 120 bp, Artificial Sequence
  ENSG00000120645_34 (sequence is synthesized)
ccactgctccccataccctggcacgatgcgttcctggtcactgatcaccatcattttgggaagagaatcccaatccctggcacctgggtttgcctcatccaaccatccttccctttctca

SEQ ID NO: 238015 - DNA, 120 bp, Artificial Sequence
  ENSG00000120645_35 (sequence is synthesized)
gctgcaccccctctgcagatctgaagacacacctcactctcccagggccctacacagccagacccggcgaggcctcctcttcccctggccaccactttcccccattggaccatggactga

SEQ ID NO: 238016 - DNA, 120 bp, Artificial Sequence
  ENSG00000120645_36 (sequence is synthesized)
agaaaacgagctgagggtctaacgagcttgcaggctttgagtctgttagtgcccggggcctcgggccttgggcagcagcatgaggctgggccggccggcagtggagcactagacagagtg

SEQ ID NO: 238017 - DNA, 120 bp, Artificial Sequence
  ENSG00000120645_37 (sequence is synthesized)
gctggctcgcagcccagaactagtgcctctgtagctgcactgaggggaggagggttggtcccacccctggagggacaggtgggaggagtgaggagggggctttttctgccacccccgccc

SEQ ID NO: 238018 - DNA, 120 bp, Artificial Sequence
  ENSG00000120645_38 (sequence is synthesized)
ccaagcctgaaactctcaggagtctacttcttggtccccagggacattggctgtcctgaccatgtccttccccctcctcccagggcctctgcttcctcaggagctgcccagactccagaa

SEQ ID NO: 238019 - DNA, 120 bp, Artificial Sequence
  ENSG00000120645_39 (sequence is synthesized)
aagcctggaaaaagggaggcgggaaggggagcactttcggctttctataggtcagtccagcagggccacgggatcgcgaggtcatgtatctgcaaaatgcacctttttaaagagtgtctt

SEQ ID NO: 238020 - DNA, 120 bp, Artificial Sequence
  ENSG00000120645_40 (sequence is synthesized)
agttccccagccccagctaatacccggccaatgccgtgtacgcaccggcatgtgcacgcaaacacgcatgagaaccaggccattccttccgctgtggaagcagaactggagacggggcag

SEQ ID NO: 238021 - DNA, 120 bp, Artificial Sequence
  ENSG00000120645_41 (sequence is synthesized)
gaatgtgcccagcagagatggggctcagcccgaggcagggctccctcctgcatgaggctcggcccgaggcagggctccctcctgcatgagtctgtggcctccaggagggacttgggtgca

SEQ ID NO: 238022 - DNA, 120 bp, Artificial Sequence
  ENSG00000120645_42 (sequence is synthesized)
gatgtaagcaagaaaaaccggggctccagaggcatgtgcatttcccctgcgcccctcagcctttaaatattccctcctcctagaaggttctagaccccccccttccagcaggggtgccca

SEQ ID NO: 238023 - DNA, 120 bp, Artificial Sequence
  ENSG00000120645_43 (sequence is synthesized)
agagtccctggaccctcaaaattgcaaaggagacccaagcggggctcgctgacctcccagggcccagcaagatgggatagccagccttaggtggccccacgagcccaagcctggggaagg

SEQ ID NO: 238024 - DNA, 120 bp, Artificial Sequence
  ENSG00000120645_44 (sequence is synthesized)
gcccctccccagccagacgagaggcagccaccccagagaccacaggagccgtaccatggcctgcgcagtcaggccctatcaggatgtgtctgtcccaagcctggccaggctccagtcctg

SEQ ID NO: 238025 - DNA, 120 bp, Artificial Sequence
  ENSG00000120645_45 (sequence is synthesized)
tgccagtagctcactgctgtcctatgtgcaggtcccccaacacttggagcctgtggttaaggcctcctgggagaggcagtgagcatgagtcaaaggtgacatggacttgaatctccccac

SEQ ID NO: 238026 - DNA, 120 bp, Artificial Sequence
  ENSG00000120645_46 (sequence is synthesized)
cccgccccgcctgcagtagccgggccaggtaggaggcaaggatcattccctgctcccagaggttccagatgacctagtttcgttttgtgtgtgtgtgtgtgtggtcacccagacgtcact

SEQ ID NO: 238027 - DNA, 120 bp, Artificial Sequence
  ENSG00000120645_47 (sequence is synthesized)
gtgatatcacctagtgaatctatttctggccctgtcttcgtcggcccagtttctgtaacttgcagccaatttgccctctcccctgtggctgccagcccatctgcccctctgtgtccttgc

SEQ ID NO: 238028 - DNA, 120 bp, Artificial Sequence
  ENSG00000120645_48 (sequence is synthesized)
tgccctggccctcctctgttttctgtaacagatgctccagtcattgcctttcagagtggagcagatgacagatggggtgcacgcattcagacacctctgatgcccttagccagggcaggg

SEQ ID NO: 238029 - DNA, 120 bp, Artificial Sequence
  ENSG00000120645_49 (sequence is synthesized)
atcgtccttaaagtgaaggcctggacaggaggagtcagggacttgggaggaggtggagctgtggggatgggagtggaggaatcaaaatgagggaagctgaaaatagaatgaaaacgatga

SEQ ID NO: 238030 - DNA, 120 bp, Artificial Sequence
  ENSG00000120645_50 (sequence is synthesized)
ctaagaggcagggagtgcgaggtatgggggaataggaactatgagctaaatatacttatggggtgggggccgtgggggccagggacactctcccagacagccctgacccgccaggcagga

SEQ ID NO: 238031 - DNA, 120 bp, Artificial Sequence
  ENSG00000120645_51 (sequence is synthesized)
ccccgtcccctgctcacacagctcttcaaacttaccaaggacaggcaggaccccgtcccctgctcacacagctcttcaagcttaccaaggacaggcagaaccccgtcccctgctcacaca

SEQ ID NO: 238032 - DNA, 120 bp, Artificial Sequence
  ENSG00000120645_52 (sequence is synthesized)
gctcttcaagcttaccaaggacaggcaggaccccgtcccctgctcacacagctcttcaaacttaccaagtgccctctcccctgttgagggcacagcaaccccaggccctccctcccacct

SEQ ID NO: 238033 - DNA, 120 bp, Artificial Sequence
  ENSG00000120645_53 (sequence is synthesized)
cagctgaagccccaatcttccaaatcggaaccagcaagtcttagggctggcacgcatctgggcctctagctgagaacccggactctcaggcacctcagtgcccctgccccagggcagagg

SEQ ID NO: 238034 - DNA, 120 bp, Artificial Sequence
  ENSG00000120645_54 (sequence is synthesized)
cccaccccgtgggttggtgcagtggctgccctgggctccacgggcagcacagggagtctgtccaggaagcagcccagccggggtcagtattccgtggagccagtcctgagctgggagggg

SEQ ID NO: 238035 - DNA, 120 bp, Artificial Sequence
  ENSG00000120645_55 (sequence is synthesized)
catttaacacccctgagggcctggggcaggacacagctggccctcctcattgtcaggggaagcaagtgcccaacatctgtaacctcccttccctgctcagtccccaggccaaggttggga

SEQ ID NO: 238036 - DNA, 120 bp, Artificial Sequence
  ENSG00000120645_56 (sequence is synthesized)
cccctctccatccctgtccccagagcctagacctcagggacctaggaaaagcctcctgctccctccccacggcagcagacagggcagggcctccagcccccagagggccggtggggggtg

SEQ ID NO: 238037 - DNA, 120 bp, Artificial Sequence
  ENSG00000120645_57 (sequence is synthesized)
ctctcgggccttcctgctctcctaaggttgcggggacagtagagtgctgagccccagacccagtcaccccaagatggccccactctatccactctctagacctttgggaaatctgggtcc

SEQ ID NO: 238038 - DNA, 120 bp, Artificial Sequence
  ENSG00000120645_58 (sequence is synthesized)
ctctcctgatttgatccattcggccccaactccagagtcgggaatgggagatgaaactagttttccacccacttttggacaagtcccacccctagatctgaagcaagctctaccagcagc

SEQ ID NO: 238039 - DNA, 120 bp, Artificial Sequence
  ENSG00000120645_59 (sequence is synthesized)
gtgtcctggaagcctgcctgcctgcctgcccgtctgcacaggtgtcttgatccagccctgcgtcttcgagcccctgtgccaccggtccccacggcccgccaggagtctctttgtacccac

SEQ ID NO: 238040 - DNA, 120 bp, Artificial Sequence
  ENSG00000120645_60 (sequence is synthesized)
taggcttccctgatgaccatctgtctgtccgtccctgtttttgctgtacataactcctgctgcaccctctccccgcacacccgtcacccatgagagagagaaacctctctagggaaaggc

SEQ ID NO: 238041 - DNA, 120 bp, Artificial Sequence
  ENSG00000120645_61 (sequence is synthesized)
agggtggctgcacccagcaactaatccaaatggcaaatattttgtaacaaaatagcccagaggtattttatctgttcaattcatagagttttagagattatattgaaagatgtcacttga

SEQ ID NO: 238042 - DNA, 120 bp, Artificial Sequence
  ENSG00000120645_62 (sequence is synthesized)
cctaattaagccacgagctctttctcccctttccccagcctgctgccctccgaggccgagctcccagactaacacagtggagacggagctcacggcaccctagggccatccttcctgtgt

SEQ ID NO: 238043 - DNA, 120 bp, Artificial Sequence
  ENSG00000120647_0 (sequence is synthesized)
gtttttcagttgcgttccctgactcggagtcttagtgtgtcgttatttggacaagaggcacattgacccaatttggagacgtattttggaaggaggtgtgaaaaagacagcatgaacttt

SEQ ID NO: 238044 - DNA, 120 bp, Artificial Sequence
  ENSG00000120647_1 (sequence is synthesized)
accccaacacacacccctgtctgcagaaagcgaacagttgtctccaaacgtggtgttgccgtcagtggtcccaccaagaggaggggaatggcagattcactggagtcaacccccttgcct

SEQ ID NO: 238045 - DNA, 120 bp, Artificial Sequence
  ENSG00000120647_2 (sequence is synthesized)
tcccccgaagatcgtctggccaaactccatccttctaaggagctcctggaatattatcaaaagaagatggctgagtgtgaggcagaaaatgaggacttgctgaagaaactggaactctac

SEQ ID NO: 238046 - DNA, 120 bp, Artificial Sequence
  ENSG00000120647_3 (sequence is synthesized)
aaagaagcttgtgaaggacagcataaacttgaatgtgatttgcagcagagggaggaagagattgctgaattgcagaaagctctaagtgatatgcaggtctgcctcttccaggaacgggaa

SEQ ID NO: 238047 - DNA, 120 bp, Artificial Sequence
  ENSG00000120647_4 (sequence is synthesized)
catgttttacgcctctactcagaaaatgaccgactgagaatcagggagctagaagacaagaaaaagattcagaatctcttggctcttgtgggaacagatgctggagaagtgacctatttt

SEQ ID NO: 238048 - DNA, 120 bp, Artificial Sequence
  ENSG00000120647_5 (sequence is synthesized)
tgtaaggagcctcctcacaaagtcaccattctccaaaagactatccaggctgtaggtgaatgtgagcagagtgaatcttcagctttcaaagcagatcctaaaataagcaaaagaagacca

SEQ ID NO: 238049 - DNA, 120 bp, Artificial Sequence
  ENSG00000120647_6 (sequence is synthesized)
tcgagagagagaaaagaaagttctgagcattaccaaagagacatacagacactcatcctacaggtggaagcactgcaggctcagctgggagagcagaccaaactttctcgagaacaaatt

SEQ ID NO: 238050 - DNA, 120 bp, Artificial Sequence
  ENSG00000120647_7 (sequence is synthesized)
gaagggctcatcgaggacagacggattcaccttgaggaaatacaagttcagcaccagagaaatcagaacaaaatcaaagagctaaccaaaaatcttcaccacacccaagaactgctctat

SEQ ID NO: 238051 - DNA, 120 bp, Artificial Sequence
  ENSG00000120647_8 (sequence is synthesized)
gagagcaccaaagattttctgcaactcagatctgaaaaccaaaataaagagaagtcatggatgcttgaaaaagataatttgatgtcaaagattaagcaatatagggtgcagtgtaagaag

SEQ ID NO: 238052 - DNA, 120 bp, Artificial Sequence
  ENSG00000120647_9 (sequence is synthesized)
agtgttgcccgttatgcatgagagtcaccatgctcaaagtgaatatattaagtccctaaaagataagttagtacaagagaaaaagctgtccaatatgtaccaagagcagtgcatttcctt

SEQ ID NO: 238053 - DNA, 120 bp, Artificial Sequence
  ENSG00000120647_10 (sequence is synthesized)
agaagaagaacttgcccgaattcgtgaggaagagggaatgaggagagagatcttcaaggatcgcactaacaagatggggaagcgtttacagataatgacaaaacgctatgaggcattgga

SEQ ID NO: 238054 - DNA, 120 bp, Artificial Sequence
  ENSG00000120647_11 (sequence is synthesized)
gcgtcgacgtatcctggaagtagaaggctttaagacagatattaaagttctccgacagaaactgaaagacttggagcaaatgttgtataaggcaacagttaatgcccgggcaaaccagga

SEQ ID NO: 238055 - DNA, 120 bp, Artificial Sequence
  ENSG00000120647_12 (sequence is synthesized)
tcttgcccttctgtgtgaggtccgtgacagcaatagacgggcacataagatacaaggagaactgaagaatcttaagtcgaaagtgtttggtctggagaatgaacttagactctgttaatg

SEQ ID NO: 238056 - DNA, 120 bp, Artificial Sequence
  ENSG00000120647_13 (sequence is synthesized)
tctacttttggaaatggcccccatttagaagaggtgtgcttcttgaaacctgaggacaaggtcatctgctgccagaaaatgtaaacctgagttgactagagtggtggtattcattattgt

SEQ ID NO: 238057 - DNA, 120 bp, Artificial Sequence
  ENSG00000120647_14 (sequence is synthesized)
aaagacagcttgaagaatcggggaccactaggaaagcttttcttgcatactcagcttgctttatcatttttgctgtccttttaacacttgcgaggagtaggggcctggtcctgaatgact

SEQ ID NO: 238058 - DNA, 120 bp, Artificial Sequence
  ENSG00000120647_15 (sequence is synthesized)
tggaggctttcattatttatcctgtctgtattgaccggtttttgttttttcagaaggcagtgatgatgaaaacttaggaagaaggtattttgcaataagcttggctgagtgtccatggga

SEQ ID NO: 238059 - DNA, 120 bp, Artificial Sequence
  ENSG00000120647_16 (sequence is synthesized)
agaatactttccctaaagagagagaagcactcacagaggctgcctttctcctgagctcggggagaaggcagcacatcacaacctgtcacattgaaataggcgctcattctgctatttcac

SEQ ID NO: 238060 - DNA, 120 bp, Artificial Sequence
  ENSG00000120647_17 (sequence is synthesized)
cttccgtcctgagcagagcctgaattacgtttttgggcaatttcatggtgtttcaccagagggcgctagagactcaaacgaaatgtccatctggaaagattcgggagacactttgccgag

SEQ ID NO: 238061 - DNA, 120 bp, Artificial Sequence
  ENSG00000120647_18 (sequence is synthesized)
gggatgaagctgagatgatgcttgtatggaaagtttgatatttttatcagtcacatggcttttgaaaaatgatgtatatattttaaattaactattttcaataaaatatttcactcaaaa

SEQ ID NO: 238062 - DNA, 120 bp, Artificial Sequence
  ENSG00000120647_19 (sequence is synthesized)
gacttttgtttttcagttgcgttccctgactcggagtcttagtgtgtcgttatttggacaagaggcacattgacccaatttggagacgtattttggaaggaggcgaacagttgtctccaa

SEQ ID NO: 238063 - DNA, 120 bp, Artificial Sequence
  ENSG00000120647_20 (sequence is synthesized)
atccttccgcagctgcacgacgcctgtgtgtctggcctttccttcttcttctcttccccggcagcacagtgtggctgtttgtctccttgcccgccaaagttctgcccagtccaacgactc

SEQ ID NO: 238064 - DNA, 120 bp, Artificial Sequence
  ENSG00000120647_21 (sequence is synthesized)
ccttggtaaggggtcggggaggggcacaagctcttctttactagaggttggagtgcaatggcattatcttggctcactgtaacctcaaacttctgggctgaagcgatcctcctccctcag

SEQ ID NO: 238065 - DNA, 120 bp, Artificial Sequence
  ENSG00000120647_22 (sequence is synthesized)
aaaattggaaaagtgttgcccgttatgcatgagagtcaccatgctcaaagtgaatatattaaggtaatgtccttatgtcgtaacgaagttgtttatttttctgggagagttgaaggaatt

SEQ ID NO: 238066 - DNA, 120 bp, Artificial Sequence
  ENSG00000120647_23 (sequence is synthesized)
cacacacccctgtctgcagaaagtaagacatttgcttattttcaagttgttaagaaatcgagacttgtatagccttagtctaagcataggaactggaaaggtattggaaacatatttcct

SEQ ID NO: 238067 - DNA, 120 bp, Artificial Sequence
  ENSG00000120647_24 (sequence is synthesized)
ctaaagttttttttctttgagacagagtttcactctgtgcccaggatggggtgcagtggtgcaatcattgctcattgcagccttgacctcctgcactcaagcaatcctcccacctcagcc

SEQ ID NO: 238068 - DNA, 60 bp, Artificial Sequence
  ENSG00000120647_25 (sequence is synthesized)
tcctcccacctcagcctcccagagtgctgttgagacatcccctttagaaaatatgaaatg

SEQ ID NO: 238069 - DNA, 120 bp, Artificial Sequence
  ENSG00000120647_26 (sequence is synthesized)
cgtctagctacctgcaggacatctcactttgataactcaaagtactttaattgttcactgtttcttcagtgttcctggtttccattaatgacttcatctattcagttgcctgagcaaaaa

SEQ ID NO: 238070 - DNA, 88 bp, Artificial Sequence
  ENSG00000120647_27 (sequence is synthesized)
ttaaattagatttagaggcagtatcactctattgcccaggctggagtacagtggcgctctcttggctcactgcagcctccacctcctg

SEQ ID NO: 238071 - DNA, 120 bp, Artificial Sequence
  ENSG00000120647_28 (sequence is synthesized)
atatagggtgcagtgtaagaagaaagaagataaaattggaaaagtgttgcccgttatgcatgagagtcaccatgctcaaagtgaatatattaaggcaacagttaatgcccgggcaaacca

SEQ ID NO: 238072 - DNA, 120 bp, Artificial Sequence
  ENSG00000120656_0 (sequence is synthesized)
agacgctgctgcctgtgagtcttgggccctggcagttgaggaacaagagcgggaggagggagtcaggacccagacctacagtgggtcagtgttcgaaggaccaggttgtggacgagacgg

SEQ ID NO: 238073 - DNA, 120 bp, Artificial Sequence
  ENSG00000120656_1 (sequence is synthesized)
ggctgtgaggattcaggctcttgggaagggactgactgagaggatcaggctcggagaagacgcggctgtggggacccgggctctaagacgggacttagggaacggggacggatgcgagtt

SEQ ID NO: 238074 - DNA, 120 bp, Artificial Sequence
  ENSG00000120656_2 (sequence is synthesized)
ctccggcatctgagggaaagtggtctgagaggagcaggattatgaggacccgcactcctacgaggaaagggtcagaaaggaacggggcgtgaagacacaggctccggagagttaattggc

SEQ ID NO: 238075 - DNA, 120 bp, Artificial Sequence
  ENSG00000120656_3 (sequence is synthesized)
cttggtcctcacagctccaaaaagaaacaggatctcgataagctctatgagctgaagtccaaagctcggcagattatgaaccagtttggcccctcagccctaatcaacctctccaatttc

SEQ ID NO: 238076 - DNA, 120 bp, Artificial Sequence
  ENSG00000120656_4 (sequence is synthesized)
tcatccataaaaccggaaccagccagcacccctccacaaggctccatggccaatagtactgcagtggtaaagataccaggcactcctggggcaggaggtcgtcttagccctgaaaacaat

SEQ ID NO: 238077 - DNA, 120 bp, Artificial Sequence
  ENSG00000120656_5 (sequence is synthesized)
gaagtggatcctaatgagcagttggatgaagatgtggaggagatgctgctgcagattgctgatgattttatcgagagtgtggtgacagcagcctgtcagcttgcgcggcatcgcaagtct

SEQ ID NO: 238078 - DNA, 120 bp, Artificial Sequence
  ENSG00000120656_6 (sequence is synthesized)
agcaccctggaggtgaaagatgtccagctgcatttagagcgccagtggaacatgtggatcccaggatttggctctgaagaaatccgaccctacaaaaaagcttgcaccacagaagctcac

SEQ ID NO: 238079 - DNA, 120 bp, Artificial Sequence
  ENSG00000120656_7 (sequence is synthesized)
aaacagagaatggcattgatccggaaaacaaccaagaaataacacacggaaaggtcagggaatggacagcaatgtatttggagatacttgagctgagaactcagccatctcatccttgga

SEQ ID NO: 238080 - DNA, 120 bp, Artificial Sequence
  ENSG00000120656_8 (sequence is synthesized)
tttttttttttaatgctttacagagaagcatatattttttattaacagtgcagcaatatctataatgactgagaggatctgccaaaagaataaagcctcctaccccaacttccggtccct

SEQ ID NO: 238081 - DNA, 120 bp, Artificial Sequence
  ENSG00000120656_9 (sequence is synthesized)
tttccctgccatctcaaagaggagcaatgtatcttccagagaagattttatttgtggtttattatataagtgactgaatatgggacaaagcattatggtctttttgggtaagacagtatt

SEQ ID NO: 238082 - DNA, 120 bp, Artificial Sequence
  ENSG00000120656_10 (sequence is synthesized)
agcaggatttgtaaagggttttgtttccttctcccttccccttttccctgtactttgtaatgtcagtgtttatatgaatatgactttcatttgcttttccagaataaagaagttattaat

SEQ ID NO: 238083 - DNA, 120 bp, Artificial Sequence
  ENSG00000120656_11 (sequence is synthesized)
gtacctttgaaatcccagagggagtcaggacaagcaagcctggattgtagctctctagtcagcaggtggcagcatcgttattcattttggtgtttgagaaaaactcagggattttccatc

SEQ ID NO: 238084 - DNA, 120 bp, Artificial Sequence
  ENSG00000120656_12 (sequence is synthesized)
attttaccccaagggaggccataacatcagcaggagtttgagtccagcttctcggccataagaattgagtagggtgaccttctctcacggccctcaactgaagaggcatccttgttttgg

SEQ ID NO: 238085 - DNA, 86 bp, Artificial Sequence
  ENSG00000120656_13 (sequence is synthesized)
gcagttaaatccagatgtcagctgacttctgccatgacttctgccacagattcactgtgtaacctggggcccaacctccgagacca

SEQ ID NO: 238086 - DNA, 120 bp, Artificial Sequence
  ENSG00000120656_14 (sequence is synthesized)
acttcaactgaccttcttcagactgagggctgttcccagtatatacatcaggtcactgaggtaggacaaaagagtgctacagccctattattttatagtttttatgaatgcctaggaact

SEQ ID NO: 238087 - DNA, 120 bp, Artificial Sequence
  ENSG00000120656_15 (sequence is synthesized)
ccaaaaggaacctgttcgtacaataacattcagtacaaagtatgtaatccaggaagtgaccagtccgatgtgtgctatgacccctctgaacctcccatgatcacagtctttgaagtaaga

SEQ ID NO: 238088 - DNA, 120 bp, Artificial Sequence
  ENSG00000120656_16 (sequence is synthesized)
agtcggggagggccgcgcagtcggaccggctgctgagacgaacgcttcactggggcagtctctgcatatcatggggagatagacgctgctgcctgtagcttttgaaaatggctgcctctc

SEQ ID NO: 238089 - DNA, 120 bp, Artificial Sequence
  ENSG00000120658_0 (sequence is synthesized)
gcagatccccgctctcccgggcgccgctactcacacaggcttccagccgccacggggcgtcctctgtctgctgcagcggcggcggcagcagagggaacggcgactgcagcccggccgcgt

SEQ ID NO: 238090 - DNA, 120 bp, Artificial Sequence
  ENSG00000120658_1 (sequence is synthesized)
ctcccagctccgtgcccgggacagagtccgggagaagcaaaggaggaggaggacgccgaggctaggaggagccgcgccgcgcccggcgccccactccgcgcagcgggttgcctccgctcc

SEQ ID NO: 238091 - DNA, 120 bp, Artificial Sequence
  ENSG00000120658_2 (sequence is synthesized)
ccatacggcggccccaggtcctttgctgccagcatgatgtcgtatttataatatgtggaggagagagagctcaccatgctcaggtaaagggatggtatgtgcaccacaaataacaagcag

SEQ ID NO: 238092 - DNA, 120 bp, Artificial Sequence
  ENSG00000120658_3 (sequence is synthesized)
aagcctctgatatgtcagaaccatgctgtcttccatgagacttcctttgtgaagagcatccatttaaaagacttttatgaatacatggtttcaatcaagtccccagagaacacatttgtc

SEQ ID NO: 238093 - DNA, 120 bp, Artificial Sequence
  ENSG00000120658_4 (sequence is synthesized)
ttctgagctgctggcagttttgagaatctgatgacctccgaggggaccctgcactcagccatcaaagtgttcctgcccctctggacactcataattcaatggtagatgcaggtggagttg

SEQ ID NO: 238094 - DNA, 120 bp, Artificial Sequence
  ENSG00000120658_5 (sequence is synthesized)
agaacatcacccagcttccccaggagcttcctcagatgatggctgcagcagccgatggtttggggagtatagcgatagacacgacccagctcaacatgtccgtgacagatcccacagcct

SEQ ID NO: 238095 - DNA, 120 bp, Artificial Sequence
  ENSG00000120658_6 (sequence is synthesized)
gggctacagccatgaataacctgggcatggttcccgtagggttgcctggacagcagctcgtgtctgactcaatctgtgtcccaggctttgatccaagcctcaacatgatgactggaatca

SEQ ID NO: 238096 - DNA, 120 bp, Artificial Sequence
  ENSG00000120658_7 (sequence is synthesized)
cccccattaacccaatgataccaggccttggactggtacctcccccaccaccaacagaagtggctgttgtcaaagaaataatccactgcaaaagctgtactctttttcctcaaaatccaa

SEQ ID NO: 238097 - DNA, 120 bp, Artificial Sequence
  ENSG00000120658_8 (sequence is synthesized)
atcttccacctccttccacaagagaacgacctcctgggtgtaagaccgtgtttgtcggaggattaccagaaaatgctactgaggaaattattcaagaagtctttgaacagtgcggtgata

SEQ ID NO: 238098 - DNA, 120 bp, Artificial Sequence
  ENSG00000120658_9 (sequence is synthesized)
ttacagcaattcggaaaagcaagaagaatttttgtcacattcgctttgcagaggaattcatggttgataaagccatttacctttctggttataggatgcgattagggtctagcaccgaca

SEQ ID NO: 238099 - DNA, 120 bp, Artificial Sequence
  ENSG00000120658_10 (sequence is synthesized)
aaaaggattcaggccgccttcatgtggactttgcccaggccagggatgacttctatgagtgggaatgcaagcagaggatgcgtgcccgggaggagcggcaccggcgcaagctggaggagg

SEQ ID NO: 238100 - DNA, 120 bp, Artificial Sequence
  ENSG00000120658_11 (sequence is synthesized)
accggctcaggcccccatccccgcctgccataatgcactactcggagcacgaagccgctctgctggctgaaaagctgaaagatgatagcaagttttcagaggctatcacagtgctgcttt

SEQ ID NO: 238101 - DNA, 120 bp, Artificial Sequence
  ENSG00000120658_12 (sequence is synthesized)
ccacccatgagcaagagatggaggaagccaaggagaattttaaaaatgccttaactgggattctcactcaatttgagcagattgtggccgttttcaacgcttctaccagacaaaaagctt

SEQ ID NO: 238102 - DNA, 120 bp, Artificial Sequence
  ENSG00000120658_13 (sequence is synthesized)
gggaccatttctcgaaagcccagcgcaagaacatagacatttggcgaaagcattctgaggagctccggaatgctcaaagtgagcagctcatgggcatccgccgcgaagaagaaatggaaa

SEQ ID NO: 238103 - DNA, 120 bp, Artificial Sequence
  ENSG00000120658_14 (sequence is synthesized)
tgtctgatgatgagaactgtgacagccctacaaagaaaatgagagtcgatgaatcagccctggctgcccaggcctacgctctgaaagaggagaatgacagtctccgctggcagctggatg

SEQ ID NO: 238104 - DNA, 120 bp, Artificial Sequence
  ENSG00000120658_15 (sequence is synthesized)
cctacaggaatgaggtggagctgctgaaacaagaaaaagaacagcttttccgaacagaagaaaacctcaccaaggaccagcaactgcagtttctgcagcaaaccatgcaaggcatgcagc

SEQ ID NO: 238105 - DNA, 120 bp, Artificial Sequence
  ENSG00000120658_16 (sequence is synthesized)
agcaattgctaaccatccaggaggagttaaacaacaaaaagtcagaattggaacaagcaaaggaagagcagtcccatacacaagcgttactaaaagtcctgcaggaacaattaaaaggta

SEQ ID NO: 238106 - DNA, 120 bp, Artificial Sequence
  ENSG00000120658_17 (sequence is synthesized)
ccaaggaattggtcgagaccaatggccacagccatgaggattcaaatgaaatcaatgtgttgacagttgcattagtcaaccaagaccgagagaacaatattgagaaaagaagccaaggct

SEQ ID NO: 238107 - DNA, 120 bp, Artificial Sequence
  ENSG00000120658_18 (sequence is synthesized)
taaaatcagagaaagaagctctgctaataggtatcatatcaacgtttcttcacgtccatccttttggagccaacatagaatatctttggtcatacatgcagcagctggactccaagatat

SEQ ID NO: 238108 - DNA, 120 bp, Artificial Sequence
  ENSG00000120658_19 (sequence is synthesized)
ctgcaaatgaaatagaaatgcttttgatgaggctgccacgcatgttcaaacaggaattcacgggtgtgggagccacgctggaaaaaagatggaagctgtgtgcctttgaaggaattaaaa

SEQ ID NO: 238109 - DNA, 120 bp, Artificial Sequence
  ENSG00000120658_20 (sequence is synthesized)
ctacctaactgcgaagagcaaagcatctctggaaatgaaaccatgtgaacctggccagggcggtgcgacggggaagcaggaggtgtggggttggtccagcacgcaacctttgtggagcca

SEQ ID NO: 238110 - DNA, 120 bp, Artificial Sequence
  ENSG00000120658_21 (sequence is synthesized)
tcgaagcctgcctttagttatatctgtggcgttctcttgtaagtggaaatgtaattgtgtaccagtttcttaaaataaacaaagcttcatactgtgacagatctgtttcctatgaaaacc

SEQ ID NO: 238111 - DNA, 120 bp, Artificial Sequence
  ENSG00000120658_22 (sequence is synthesized)
aaacaatgattccacagtcataatgatggcaaaatcttaaaatgtgctacatttgagaatagctcaccaagcaaaatatttaaagttaatgatggtgtagcaatgattgttgctaggcta

SEQ ID NO: 238112 - DNA, 120 bp, Artificial Sequence
  ENSG00000120658_23 (sequence is synthesized)
tggtgtagcaatgattgttgctaggctacagagttgtatatgtaatgtatagctgaaatcattaaatgacattttcctgaaagtctttctgttttagtaaaaaaaaaaaaaaaaaaaaaa

SEQ ID NO: 238113 - DNA, 120 bp, Artificial Sequence
  ENSG00000120658_24 (sequence is synthesized)
ggtactttgcattacataaggagttttctaggcattttgttatgttttgtgatgttaatatgagcttattccctttggccttcatgcaaaataaagtcttcatagtttggggctggaaaa

SEQ ID NO: 238114 - DNA, 120 bp, Artificial Sequence
  ENSG00000120659_0 (sequence is synthesized)
gcccgctcgcccgcgcgccccaggacccaaagccgggctccaagtcggcgccccacgtcgaggctccgccgcagcctccggagttggccgcagacaagaaggggagggagcgggagaggg

SEQ ID NO: 238115 - DNA, 120 bp, Artificial Sequence
  ENSG00000120659_1 (sequence is synthesized)
aggagagctccgaagcgagagggccgagcgccatgcgccgcgccagcagagactacaccaagtacctgcgtggctcggaggagatgggcggcggccccggagccccgcacgagggccccc

SEQ ID NO: 238116 - DNA, 120 bp, Artificial Sequence
  ENSG00000120659_2 (sequence is synthesized)
tgcacgccccgccgccgcctgcgccgcaccagccccctgccgcctcccgctccatgttcgtggccctcctggggctggggctgggccaggttgtctgcagcgtcgccctgttcttctatt

SEQ ID NO: 238117 - DNA, 120 bp, Artificial Sequence
  ENSG00000120659_3 (sequence is synthesized)
tcagagcgcagatggatcctaatagaatatcagaagatggcactcactgcatttatagaattttgagactccatgaaaatgcagattttcaagacacaactctggagagtcaagatacaa

SEQ ID NO: 238118 - DNA, 120 bp, Artificial Sequence
  ENSG00000120659_4 (sequence is synthesized)
aattaatacctgattcatgtaggagaattaaacaggcctttcaaggagctgtgcaaaaggaattacaacatatcgttggatcacagcacatcagagcagagaaagcgatggtggatggct

SEQ ID NO: 238119 - DNA, 120 bp, Artificial Sequence
  ENSG00000120659_5 (sequence is synthesized)
catggttagatctggccaagaggagcaagcttgaagctcagccttttgctcatctcactattaatgccaccgacatcccatctggttcccataaagtgagtctgtcctcttggtaccatg

SEQ ID NO: 238120 - DNA, 120 bp, Artificial Sequence
  ENSG00000120659_6 (sequence is synthesized)
atcggggttgggccaagatctccaacatgacttttagcaatggaaaactaatagttaatcaggatggcttttattacctgtatgccaacatttgctttcgacatcatgaaacttcaggag

SEQ ID NO: 238121 - DNA, 120 bp, Artificial Sequence
  ENSG00000120659_7 (sequence is synthesized)
acctagctacagagtatcttcaactaatggtgtacgtcactaaaaccagcatcaaaatcccaagttctcataccctgatgaaaggaggaagcaccaagtattggtcagggaattctgaat

SEQ ID NO: 238122 - DNA, 120 bp, Artificial Sequence
  ENSG00000120659_8 (sequence is synthesized)
tccatttttattccataaacgttggtggattttttaagttacggtctggagaggaaatcagcatcgaggtctccaacccctccttactggatccggatcaggatgcaacatactttgggg

SEQ ID NO: 238123 - DNA, 120 bp, Artificial Sequence
  ENSG00000120659_9 (sequence is synthesized)
gtgttatgtatttcctggatgtttggaaacattttttaaaacaagccaagaaagatgtatataggtgtgtgagactactaagaggcatggccccaacggtacacgactcagtatccatgc

SEQ ID NO: 238124 - DNA, 120 bp, Artificial Sequence
  ENSG00000120659_10 (sequence is synthesized)
tcttgaccttgtagagaacacgcgtatttacagccagtgggagatgttagactcatggtgtgttacacaatggtttttaaattttgtaatgaattcctagaattaaaccagattggagca

SEQ ID NO: 238125 - DNA, 120 bp, Artificial Sequence
  ENSG00000120659_11 (sequence is synthesized)
attacggggtgaccttatgagaaactgcatgtgggctatgggaggggttggtccctggtcatgtgccccttcgcagctgaagtggagagggtgtcatctagcgcaattgaaggatcatct

SEQ ID NO: 238126 - DNA, 120 bp, Artificial Sequence
  ENSG00000120659_12 (sequence is synthesized)
gaaggggcaaattcttttgaattgttacatcatgctggaacctgcaaaaaatactttttctaatgaggagagaaaatatatgtatttttatataatatctaaagttatatttcagatgta

SEQ ID NO: 238127 - DNA, 120 bp, Artificial Sequence
  ENSG00000120659_13 (sequence is synthesized)
atgttttctttgcaaagtattgtaaattatatttgtgctatagtatttgattcaaaatatttaaaaatgtcttgctgttgacatatttaatgttttaaatgtacagacatatttaactgg

SEQ ID NO: 238128 - DNA, 120 bp, Artificial Sequence
  ENSG00000120659_14 (sequence is synthesized)
tgcactttgtaaattccctggggaaaacttgcagctaaggaggggaaaaaaatgttgtttcctaatatcaaatgcagtatatttcttcgttctttttaagttaatagattttttcagact

SEQ ID NO: 238129 - DNA, 120 bp, Artificial Sequence
  ENSG00000120659_15 (sequence is synthesized)
tgtcaagcctgtgcaaaaaaattaaaatggatgccttgaataataagcaggatgttggccaccaggtgcctttcaaatttagaaactaattgactttagaaagctgacattgccaaaaag

SEQ ID NO: 238130 - DNA, 120 bp, Artificial Sequence
  ENSG00000120659_16 (sequence is synthesized)
gatacataatgggccactgaaatctgtcaagagtagttatataattgttgaacaggtgtttttccacaagtgccgcaaattgtaccttttttgttttttcaaaatagaaaagttattagt

SEQ ID NO: 238131 - DNA, 120 bp, Artificial Sequence
  ENSG00000120659_17 (sequence is synthesized)
ggtttatcagcaaaaaagtccaattttaatttagtaaatgttatcttatactgtacaataaaaacattgcctttgaatgttaattttttggtacaaaaataaatttatatgaaaacctgc

SEQ ID NO: 238132 - DNA, 120 bp, Artificial Sequence
  ENSG00000120659_18 (sequence is synthesized)
ctgaaagcaaatggtgtggccgaagctgcctctctggtggcatagctaagaccaagctgcacgcagtgaaaacacagtttgttttcactgacaacaaggcagaatgtgtaccagggatgt

SEQ ID NO: 238133 - DNA, 120 bp, Artificial Sequence
  ENSG00000120659_19 (sequence is synthesized)
gacgtggggaaccaggaagaggacagtctgaggatcattattaaagggactccatccaagaaggtttccagccagaggcaagctgtagccagaagaaaagaatgagagatcacctgaata

SEQ ID NO: 238134 - DNA, 120 bp, Artificial Sequence
  ENSG00000120659_20 (sequence is synthesized)
atagaacagaaactgctgaaatattgaacacagatctagatcaaatgaaggaacatattcaggatgaagcataaataaaggccaggcgtggtggctcatgcctggaatctcagctctttg

SEQ ID NO: 238135 - DNA, 120 bp, Artificial Sequence
  ENSG00000120659_21 (sequence is synthesized)
ggaggccgaggctattctccatctcctgggctccagtgatcctcacgcctcggccacccaaagtgctgggattatagaagtgaaccactgcgcctggcctattgaaggtttttaatcttc

SEQ ID NO: 238136 - DNA, 120 bp, Artificial Sequence
  ENSG00000120659_22 (sequence is synthesized)
atgcgccgcgccagcagagactacaccaagtacctgcgtggctcggaggagatgggcggcggccccggagccccgcacgagggccccctgcacgctccatgttcgtggccctcctggggc

SEQ ID NO: 238137 - DNA, 120 bp, Artificial Sequence
  ENSG00000120662_0 (sequence is synthesized)
gtactcacagttctttcctgatcttccccgccgcctcctgtattgcctctttatggaatcactccatatactgagttacacagcatggtttgcccgtgctgctgccccgcgggctgtcgc

SEQ ID NO: 238138 - DNA, 120 bp, Artificial Sequence
  ENSG00000120662_1 (sequence is synthesized)
ttctgacctgcctacactcagaactttccccaaagcatcagagtaatactgttactgtgatgggtaatggagaagtcgtgctgttctcagcgtgttgctttgtcgcccacgctggttgca

SEQ ID NO: 238139 - DNA, 120 bp, Artificial Sequence
  ENSG00000120662_2 (sequence is synthesized)
accttcgcctcccaggttcaagcgattatcctgcctcagcttcccgagcagctaggactacaggatctcagctaaacgggaagcatttttgaaaagtgattgcacaattgagagtgaaaa

SEQ ID NO: 238140 - DNA, 120 bp, Artificial Sequence
  ENSG00000120662_3 (sequence is synthesized)
tgattgcacaattgagagtgaaaattactgagtcctgaacaggcaacttacattctaataccagctctgtctccatccagccgactgaatagtcgtgattaaatgctgagatgaatcgtc

SEQ ID NO: 238141 - DNA, 120 bp, Artificial Sequence
  ENSG00000120662_4 (sequence is synthesized)
acctgtgtgtttggctttttagacatccatctcttaatggttacctccagtgtcacatccagctccattctcatcaatttagacagatacatcttgatacaaggctgcaagtttttagac

SEQ ID NO: 238142 - DNA, 120 bp, Artificial Sequence
  ENSG00000120662_5 (sequence is synthesized)
aaaacaggaattgcattcttcatctgttaagtaagaattggtccaggagatattgccatcaagacaccaagatgctctggaagcataaagcactacagaaatatatggagaacctgagta

SEQ ID NO: 238143 - DNA, 120 bp, Artificial Sequence
  ENSG00000120662_6 (sequence is synthesized)
aggagtaccaaacacttgagcaatgtctgcagcatatccctgtgaatgaggaaaaccgaaggtccttgaacagaaggcatgctgagttggcacctcttgcagccatttaccaagaaattc

SEQ ID NO: 238144 - DNA, 120 bp, Artificial Sequence
  ENSG00000120662_7 (sequence is synthesized)
aggagactgaacaagcaattgaagaattagaatcaatgtgtaaaagcctaaataaacaagatgaaaagcagttacaagaacttgcactggaagaaaggcaaaccattgatcaaaaaatca

SEQ ID NO: 238145 - DNA, 120 bp, Artificial Sequence
  ENSG00000120662_8 (sequence is synthesized)
ccttgtgccaaaggagaaatatgacaaaaatgatgttattttagaggtgacagctggaaggactactggaggtgacatctgccaacaatttacccgagaaatatttgacatgtaccagaa

SEQ ID NO: 238146 - DNA, 120 bp, Artificial Sequence
  ENSG00000120662_9 (sequence is synthesized)
ttattcgtgctataaacactggcaatttgaacttctgaattatacaccagcagattatggtggactacatcatgcagccgcccgaatttccggtgacggtgtctataagcatttgaagta

SEQ ID NO: 238147 - DNA, 120 bp, Artificial Sequence
  ENSG00000120662_10 (sequence is synthesized)
tgagggtgggattcaccgagttcagcgcatccccgaggtgggcctgtcctcaaggatgcagcgcattcacacaggaacgatgtcggttattgtccttcctcagccagatgaggtggatgt

SEQ ID NO: 238148 - DNA, 120 bp, Artificial Sequence
  ENSG00000120662_11 (sequence is synthesized)
gaaattggaccccaaggatttgcgaatagatacatttcgagccaaaggagcaggagggcagcatgttaataaaactgatagtgccgtcagacttgtccacatccccacagggctagtagt

SEQ ID NO: 238149 - DNA, 120 bp, Artificial Sequence
  ENSG00000120662_12 (sequence is synthesized)
agaatgccaacaagaaagatcacagataaaaaataaagaaatagcctttcgtgtgttgagagctagactctaccagcagattattgagaaagacaagcgtcagcaacaaagtgctagaaa

SEQ ID NO: 238150 - DNA, 120 bp, Artificial Sequence
  ENSG00000120662_13 (sequence is synthesized)
actgcaggtgggaacaagagcccagtcagagcgaattcggacatataatttcacccaggatagagtcagtgaccacaggatagcatatgaagttcgtgatattaaggaatttttatgtgg

SEQ ID NO: 238151 - DNA, 120 bp, Artificial Sequence
  ENSG00000120662_14 (sequence is synthesized)
tgggaagggcctggatcagctaattcagagactgcttcaatcagcagatgaagaagccattgctgaacttttggatgaacaccttaaatcagcaaaataaatactaacttattattattt

SEQ ID NO: 238152 - DNA, 120 bp, Artificial Sequence
  ENSG00000120662_15 (sequence is synthesized)
atgattatataaatgaaatggacctatatcaagaggcagactgaagcttggaaatcattatgaatatttgtaaattacagctttaagaacacattacacataaatatatgttttgtaatt

SEQ ID NO: 238153 - DNA, 120 bp, Artificial Sequence
  ENSG00000120662_16 (sequence is synthesized)
agtcacatttcctgacctaagaatttattttaggtttcctgtaaagtacaatccaactcatcaagtagaaaataagcatgcatcattgaaaagagaaagtattgagaattgattgtgtca

SEQ ID NO: 238154 - DNA, 120 bp, Artificial Sequence
  ENSG00000120662_17 (sequence is synthesized)
tttaggacaagtcacttgttctctttatatgccttttttccccagccatctatgaattaatttaaatatatttttaatctactacttcaggaaaatatggtaaaatttagtaaaatatga

SEQ ID NO: 238155 - DNA, 120 bp, Artificial Sequence
  ENSG00000120662_18 (sequence is synthesized)
attttagacttccttataaaccttttatttaaatacaaagtaccttggcctatagtggatgcttatgcctgtaatcccagtgctttgaagggccaaagggggaagatctcttgaggtaag

SEQ ID NO: 238156 - DNA, 120 bp, Artificial Sequence
  ENSG00000120662_19 (sequence is synthesized)
aatttgagaccagcctgggcaaaatagaccccatgtctacaaaaaaactcaaaacataaagaaaaaccataatactgttaatcatgttaaagttaagacttagactgcaacttttaaata

SEQ ID NO: 238157 - DNA, 120 bp, Artificial Sequence
  ENSG00000120662_20 (sequence is synthesized)
aaaattatgaagaatatgagtcattcaataacaatgagcatctgggtacagacagtaaagccctttgattgctgtatgaattccacactatataaacaataagctgatattttaaataga

SEQ ID NO: 238158 - DNA, 87 bp, Artificial Sequence
  ENSG00000120662_21 (sequence is synthesized)
tgtgtaaaaatgcagtagtgtaatcatagctcactttaaccttgaactcctggactcaagcaatcctccaacctcagcctcccaagt

SEQ ID NO: 238159 - DNA, 120 bp, Artificial Sequence
  ENSG00000120662_22 (sequence is synthesized)
ggcgggtctcggaaggttccgacctcagtaaagagagctaacgtgtattcttctttttcttaggaaagtattccatgctacatgtgcaagaaacttggaaaacactgaaaagtagaaaaa

SEQ ID NO: 238160 - DNA, 120 bp, Artificial Sequence
  ENSG00000120662_23 (sequence is synthesized)
taggcatattgaggaatttgcctgtaggagatactgaaaattattttacctctgatcttgattagaaccatattgtcccatttttttttgaaacttttggtgtatatctactaaacactg

SEQ ID NO: 238161 - DNA, 120 bp, Artificial Sequence
  ENSG00000120662_24 (sequence is synthesized)
tggcataggctcatcaatcacagtggcttactattatagcagagttgttagctaggagaagacagtagaaaggagggaagcatttgcttagggagaaatatgtgaattagagaaaattcc

SEQ ID NO: 238162 - DNA, 120 bp, Artificial Sequence
  ENSG00000120662_25 (sequence is synthesized)
cctgaggaacttagatacgtatcttgcctcaaaatcatttttctctattattgaaagcaaaggtatattaaggtttttactttaaataactttataaaataatataagtattactaatta

SEQ ID NO: 238163 - DNA, 120 bp, Artificial Sequence
  ENSG00000120662_26 (sequence is synthesized)
aagttacttgacttccttggatatctagatccttaaagttaaagaattatacaagataataatattttcttcaaactttagaaaatgactttatgaaccgccttaagtttgtatgttttc

SEQ ID NO: 238164 - DNA, 120 bp, Artificial Sequence
  ENSG00000120662_27 (sequence is synthesized)
atagctttcaagagcttgtttacacactcaattctagattctagatactttctagaaaataactgacttaactcattcaattgatatatttgttagttgtactcctactcatatgcttca

SEQ ID NO: 238165 - DNA, 120 bp, Artificial Sequence
  ENSG00000120662_28 (sequence is synthesized)
gttaattatatatgttgaacaggtaggaagcagtgctgtttttatttattttaatatgttattcatacatttgaagaattatgttctttctgtaggcagctgaattttttttttttttga

SEQ ID NO: 238166 - DNA, 120 bp, Artificial Sequence
  ENSG00000120669_0 (sequence is synthesized)
gccccaggacccagcacgtgcgcagcggccatggcttcctcaattatctgccaggagcactgccagatctcgggccaggcaaaaatagacatcttattagttggagatgtcactgtgggc

SEQ ID NO: 238167 - DNA, 120 bp, Artificial Sequence
  ENSG00000120669_1 (sequence is synthesized)
tacctggctgatactgtacagaaactatttgcaaacatagcagaagtcaccatcaccatcagtgacacgaaggaggcagcagcgcttttggatgattgcatattcaacatggttctcttg

SEQ ID NO: 238168 - DNA, 120 bp, Artificial Sequence
  ENSG00000120669_2 (sequence is synthesized)
aaggtgccttcttcactaagtgccgaggagctggaagccatcaagttaattagatttggcaaaaagaaaaatacacattcactgtttgtttttataatccctgaaaattttaaaggttgt

SEQ ID NO: 238169 - DNA, 120 bp, Artificial Sequence
  ENSG00000120669_3 (sequence is synthesized)
atttcagggcatggaatggatattgctttaactgaaccactgacaatggaaaaaatgagtaatgtggtaaaatactggacaacatgtccctcaaacactgttaagactgaaaacgcaact

SEQ ID NO: 238170 - DNA, 120 bp, Artificial Sequence
  ENSG00000120669_4 (sequence is synthesized)
gggcctgaagaacttggattgcccctgcagaggtcctacagcgaacacctgggatattttcctactgatctatttgcctgctctgaatctttaaggaatggcaatgggcttgaattaaat

SEQ ID NO: 238171 - DNA, 120 bp, Artificial Sequence
  ENSG00000120669_5 (sequence is synthesized)
gcttcgttgtcagagttcgagaaaaacaaaaagatctctcttcttcattcaagcaaggaaaaactaagaagggaaagaatcaaatattgctgtgagcagctgcgtactctcttgccgtat

SEQ ID NO: 238172 - DNA, 120 bp, Artificial Sequence
  ENSG00000120669_6 (sequence is synthesized)
gtaaaagggagaaagaatgatgcggcttcagttcttgaggcaacagttgattatgtgaaatatatccgggagaaaatctctccagccgttatggcccagattacagaagcacttcagagc

SEQ ID NO: 238173 - DNA, 120 bp, Artificial Sequence
  ENSG00000120669_7 (sequence is synthesized)
aacatgaggttttgtaagaaacaacaaacacccattgagctgtctctcccaggcactgtcatggcacagcgggaaaacagtgtgatgagcacttactcccctgagagagggctccaattc

SEQ ID NO: 238174 - DNA, 120 bp, Artificial Sequence
  ENSG00000120669_8 (sequence is synthesized)
cctcagagaatgctattggtgatccatataaaactcacatttccagtgcagcgctgtctctgaattccttgcatactgtcagatattattctaaagtcaccccttcctacgatgcaactg

SEQ ID NO: 238175 - DNA, 120 bp, Artificial Sequence
  ENSG00000120669_9 (sequence is synthesized)
ctgtaacaaatcagaacatttcaattcatttaccttcagccatgcccccggtctcaaagcttctccctcggcactgcacttctgggttgggccagacgtgcactacacatcccaactgtc

SEQ ID NO: 238176 - DNA, 120 bp, Artificial Sequence
  ENSG00000120669_10 (sequence is synthesized)
tgcaacagttttgggcgtattaaaagcacatgtttgaaattcacactctcaaccacctactgggcgcagtttgacaatctaggaaaagtggaacaaagaatgattttgaaagctccaccc

SEQ ID NO: 238177 - DNA, 120 bp, Artificial Sequence
  ENSG00000120669_11 (sequence is synthesized)
aaagacctaatatcaaaagagttggcatggtttggcttctgataaatgcactcaaagcttctgcagatagaaagaccagcagcgaaaaagctggccacacactgtcactcatcttcatac

SEQ ID NO: 238178 - DNA, 120 bp, Artificial Sequence
  ENSG00000120669_12 (sequence is synthesized)
acacttggatccccgccagccagagagctacaagaacaaatggcctcagtgacctacactctcttttctcaaaaaatattccacaatttatgaaaaaagcatgctataaggaagatccat

SEQ ID NO: 238179 - DNA, 120 bp, Artificial Sequence
  ENSG00000120669_13 (sequence is synthesized)
gtagacacgataaaatgattagattgggaaggtgtgttgataccttgtgtcactgagtacagatattacaacttgattcttatttttagtatccctgtgaattactgtcactcatttcta

SEQ ID NO: 238180 - DNA, 120 bp, Artificial Sequence
  ENSG00000120669_14 (sequence is synthesized)
ggtggtcttttccttatttgacattttagagagtttccttcttcattcaccatccaaactaagatatgcagagagatgctgaaagaggggtttacctcctcacttgacaactaatgaata

SEQ ID NO: 238181 - DNA, 120 bp, Artificial Sequence
  ENSG00000120669_15 (sequence is synthesized)
aattgatgtgtgcttttgcatttcacaatcccttgagtgaaacgatggctaataggtaaatatttctttctggaccttaagttacagactagcaggttttttgtttttcatctcttcctc

SEQ ID NO: 238182 - DNA, 120 bp, Artificial Sequence
  ENSG00000120669_16 (sequence is synthesized)
cctatgggtattagaaaggacagttgaaaataagggggaaaaaggtttgttttatatttcactgaattgttcttatatgtaagttttattattaaataaaatactcagttttcaccctga

SEQ ID NO: 238183 - DNA, 120 bp, Artificial Sequence
  ENSG00000120669_17 (sequence is synthesized)
gcagcttctgtttctggtgagccctcaggaagcttacaatcatggcaggaggcaaagtggagccaatgtgtcacatagcaagaggaggagcaagagagagagaaaggagaggccccaaac

SEQ ID NO: 238184 - DNA, 120 bp, Artificial Sequence
  ENSG00000120669_18 (sequence is synthesized)
aggttccacctccaacattgggcatcacatttcaccataagatttggaggggacaaaacatccaagccacatcagttatcaacccagcattgttatttgttttgcttaaacagtaagctg

SEQ ID NO: 238185 - DNA, 120 bp, Artificial Sequence
  ENSG00000120669_19 (sequence is synthesized)
tcgcccagttatctaatactgtacaacagattactctgaaacttggtagtggaaatcaacaaactgtttatcatatctcatgattttgtgagtcaccagtttgggcagagcttggctctg

SEQ ID NO: 238186 - DNA, 120 bp, Artificial Sequence
  ENSG00000120669_20 (sequence is synthesized)
tgattcttctcagtgtggtgttaaccatggcactccgtgatgttcagccagcaaaactggcctgtctggagattccagcgcagcgtcatccacacatgtggtcttctggtgggtgtggct

SEQ ID NO: 238187 - DNA, 120 bp, Artificial Sequence
  ENSG00000120669_21 (sequence is synthesized)
gcaggttgtgctcaaatgggctgttcttccctgtggtctcatcacttctccacatggtatctccagcaagctagaaggacctcttacatgaaggcttaggattccatgagaccagtgtga

SEQ ID NO: 238188 - DNA, 120 bp, Artificial Sequence
  ENSG00000120669_22 (sequence is synthesized)
aagctacatcttctgaaatgctggtcccagaactgtcatagagtcactctccagatatcttttgattaaagcaggcacaggccagtgaagattcaagaggagaggaaatggaccctgact

SEQ ID NO: 238189 - DNA, 120 bp, Artificial Sequence
  ENSG00000120669_23 (sequence is synthesized)
ctttgttggagaaataagtaattttcagtgactttaatcttaactcttatctttttaacccaaatttcagattcttgtttgcagtagaacaggctcttcactgtatacaagattttgtct

SEQ ID NO: 238190 - DNA, 120 bp, Artificial Sequence
  ENSG00000120669_24 (sequence is synthesized)
gagttgcaaaaattctctccccatgaatttccctgtattaccatcttttgctcctgcatttccccactcagtcttggctgccacaatcaaagggacataaagtacaaggacacttttttc

SEQ ID NO: 238191 - DNA, 120 bp, Artificial Sequence
  ENSG00000120669_25 (sequence is synthesized)
ttgcctctgtagtagaaatcttagcagtatacagctgctctaggcctgtcaaataaatatatactattggtttttaaaacattaataaattagaaaactaccctttaatgtatgccacca

SEQ ID NO: 238192 - DNA, 120 bp, Artificial Sequence
  ENSG00000120675_0 (sequence is synthesized)
agtcactgccgcggcgccttgagtctccgggccgccttgccatggctgcccgtggtgtcatcgctccagttggcgagagtttgcgctacgctgagtacttgcagccctcggccaaacggc

SEQ ID NO: 238193 - DNA, 120 bp, Artificial Sequence
  ENSG00000120675_1 (sequence is synthesized)
cagacgccgacgtcgaccagcagagactggtaagaagtttgatagctgtaggactgggtgttgcagctcttgcatttgcaggtcgctacgcatttcggatctggaaacctctagaacaag

SEQ ID NO: 238194 - DNA, 120 bp, Artificial Sequence
  ENSG00000120675_2 (sequence is synthesized)
ttatcacagaaactgcaaagaagatttcaactcctagcttttcatcctactataaaggaggatttgaacagaaaatgagtaggcgagaagctggtcttattttaggtgtaagcccatctg

SEQ ID NO: 238195 - DNA, 120 bp, Artificial Sequence
  ENSG00000120675_3 (sequence is synthesized)
ctggcaaggctaagattagaacagctcataggagagtcatgattttgaatcacccagataaaggtggatctccttacgtagcagccaaaataaatgaagcaaaagacttgctagaaacaa

SEQ ID NO: 238196 - DNA, 120 bp, Artificial Sequence
  ENSG00000120675_4 (sequence is synthesized)
ccaccaaacattgatgcttaaggaccacactgaaggaaaaaaaaagaggggacttcgaaaaaaaaaaaagccctgcaaaatattctaaaacatggtcttcttaattttctatatggattg

SEQ ID NO: 238197 - DNA, 120 bp, Artificial Sequence
  ENSG00000120675_5 (sequence is synthesized)
accacagtcttatcttccaccattaagctgtataacaataaaatgttaatagtcttgctttttattatcttttaaagatctccttaaattctataactgatcttttttcttattttgttt

SEQ ID NO: 238198 - DNA, 76 bp, Artificial Sequence
  ENSG00000120675_6 (sequence is synthesized)
attaaaaatatgatcaagaatgcaattgggatttgtgagcaatgagtagacctcttattgtttatatttgtaccct

SEQ ID NO: 238199 - DNA, 120 bp, Artificial Sequence
  ENSG00000120675_7 (sequence is synthesized)
gagcaatgagtagacctcttattgtttatatttgtaccctcattgtcaatttttttttagggaatttgggactctgcctatataaggtgttttaaatgtcttgagaacaagcactggctg

SEQ ID NO: 238200 - DNA, 120 bp, Artificial Sequence
  ENSG00000120675_8 (sequence is synthesized)
atacctcttggagatatgatctgaaatgtaatggaatttattaaatggtgtttagtaaagtaggggttaaggacttgttaaagaaccccactatctctgagaccctatagccaaagcatg

SEQ ID NO: 238201 - DNA, 120 bp, Artificial Sequence
  ENSG00000120675_9 (sequence is synthesized)
aggacttggagagctactaaaatgattcaggtttacaaaatgagccctgtgaggaaaggttgagagaagtctgaggagtttgtatttaattatagtcttccagtactgtatattcattca

SEQ ID NO: 238202 - DNA, 120 bp, Artificial Sequence
  ENSG00000120675_10 (sequence is synthesized)
ttactcattctacaaatatttattgaccccttttgatgtgcaaggcactatcgtgcgtcccctgagagttgcaagtatgaagcagtcatggatcatgaaccaaaggaacttatatgtaga

SEQ ID NO: 238203 - DNA, 120 bp, Artificial Sequence
  ENSG00000120675_11 (sequence is synthesized)
ggaaggataaatcacaaatagtgaatactgttagatacagatgatatattttaaaagttcaaaggaagaaaagaatgtgttaaacactgcatgagaggaggaataagtggcatagagcta

SEQ ID NO: 238204 - DNA, 120 bp, Artificial Sequence
  ENSG00000120675_12 (sequence is synthesized)
ggctttagaaaagaaaaatattccgataccatatgattggtgaggtaagtgttattctgagatgagaattagcagaaatagatatatcaatcggagtgattagagtgcagggtttctgga

SEQ ID NO: 238205 - DNA, 120 bp, Artificial Sequence
  ENSG00000120675_13 (sequence is synthesized)
aagcaaggtttggacagagtggtcatcaaaggccagccctgtgacttacactgcattaaattaatttcttagaacatagtccctgatcattatcactttactattccaaaggtgagagaa

SEQ ID NO: 238206 - DNA, 120 bp, Artificial Sequence
  ENSG00000120675_14 (sequence is synthesized)
cagattcagatagagtgccagcattgtttcccagtattcctttacaaatcttgggttcattccaggtaaactgaactactgcattgtttctatcttaaaatactttttagatatcctaga

SEQ ID NO: 238207 - DNA, 120 bp, Artificial Sequence
  ENSG00000120675_15 (sequence is synthesized)
tgcatctttcaacttctaacattctgtagtttaggagttctcaaccttggcattattgacatgttaggccaaataattttttttgtgggaggtctcttgtgcgttttagatgattagcaa

SEQ ID NO: 238208 - DNA, 120 bp, Artificial Sequence
  ENSG00000120675_16 (sequence is synthesized)
taatccctgacctgttatctactaaagactagtcgtttctcatcagttgtgacaacaaaaatggttccagatattgccaaatgccctttagaggacagtaatcgcccccagttgagaacc

SEQ ID NO: 238209 - DNA, 120 bp, Artificial Sequence
  ENSG00000120675_17 (sequence is synthesized)
atttcagtaaaactttaattactattttttcttttggtttataaaataatgatcctgaattaaattgatggaaccttgaagtcgataaaatatatttcttgctttaaagtccccatacgt

SEQ ID NO: 238210 - DNA, 120 bp, Artificial Sequence
  ENSG00000120675_18 (sequence is synthesized)
gtcctactaattttctcatgctttagtgttttcacttttctcctgttatccttgtacctaagaatgccatcccaatccccagatgtccacctgcccaaagtctaggcatagctgaaggcc

SEQ ID NO: 238211 - DNA, 120 bp, Artificial Sequence
  ENSG00000120675_19 (sequence is synthesized)
aagctaaaatgtatccctctttttctggtacatgcagcaaaagtaatatgaattatcagctttctgagagcaggcattgtatctgtcttgtttggtgttacattggcacccaataaatat

SEQ ID NO: 238212 - DNA, 120 bp, Artificial Sequence
  ENSG00000120675_20 (sequence is synthesized)
ttgttgagtgaatgaataaattcccatagcactttattcttcacatggtacataactataggggctatagcttggtaccttgtgaagcaactcttggtgtaacataccttatttctcata

SEQ ID NO: 238213 - DNA, 120 bp, Artificial Sequence
  ENSG00000120675_21 (sequence is synthesized)
ctaaaatgcaagaacctttagagcaaggatcttgccattcatctttgtaacctctttactctggagcacttgcatttagcaggcatcataaagttttacgtaccaagaaaatgttgctgt

SEQ ID NO: 238214 - DNA, 120 bp, Artificial Sequence
  ENSG00000120675_22 (sequence is synthesized)
tttctgaatactatgcatcaaaaaatgttaccactaatttttaaagctctgctaaggaatattggggcaccctcagatgcaccttttaattgatgtcatattttcctaatccatacttta

SEQ ID NO: 238215 - DNA, 120 bp, Artificial Sequence
  ENSG00000120675_23 (sequence is synthesized)
ttcatgagaatttgagtcaccccagcattagcttggaatttccttatttcccatttgctttgcaggtgccttggagtcagatctggttttgaatactatcttcctgttatgtgatcttgg

SEQ ID NO: 238216 - DNA, 120 bp, Artificial Sequence
  ENSG00000120675_24 (sequence is synthesized)
gcagttacttaattttctagtcaataacccgtatctataaaatagagaaaataatcctacacaccggggcctgttgtggggcggggagaggggggagggatcgcatttggagatatacta

SEQ ID NO: 238217 - DNA, 87 bp, Artificial Sequence
  ENSG00000120675_25 (sequence is synthesized)
gcggggagaggggggagggatcgcatttggagatatactaatgtaaatgacaagttaattggtgcagcacaccaacatggctcatgt

SEQ ID NO: 238218 - DNA, 120 bp, Artificial Sequence
  ENSG00000120675_26 (sequence is synthesized)
aaaatcctgtcaaataaggttatagtagagaataaggatgtgtaaagcatttagtcacgtaaatgcttaaaaaaatgtaatttttacttctttcactgcctcatttaattagttttatct

SEQ ID NO: 238219 - DNA, 120 bp, Artificial Sequence
  ENSG00000120675_27 (sequence is synthesized)
ttaataataccttggattcagggtaaagtttcagttatgtcccagtaatcatttattttaccctcgaatctgcaatttggatagaacatggtggggacagctcgtctctattccttgcag

SEQ ID NO: 238220 - DNA, 120 bp, Artificial Sequence
  ENSG00000120675_28 (sequence is synthesized)
cattaacaggctggaggcaccacttctctggccagcaagttgggcctggttgttggctgagagcctcagttcctttctgcacaggttcctctttacataggcttctcaacagggctacta

SEQ ID NO: 238221 - DNA, 120 bp, Artificial Sequence
  ENSG00000120675_29 (sequence is synthesized)
gagcatcgtcaccatagcagctgtcttataacagagagtggtcggtctgagagacaaaaaatggaagctgccaaattgttctgggtctggaaactgtcagggcatcacttgtgccatatt

SEQ ID NO: 238222 - DNA, 120 bp, Artificial Sequence
  ENSG00000120675_30 (sequence is synthesized)
cagttggcctaagaattacagagcctgcctcgattcaaagggagaggatagagaggactgaaggaatcagtgctcatctttaatatgcagcaggacaggtttgggattttttttccccct

SEQ ID NO: 238223 - DNA, 120 bp, Artificial Sequence
  ENSG00000120675_31 (sequence is synthesized)
cttaagaacaaagtcaggcatgtataattgaactacagttacttgaaatataagcccagaaagtttcagataataaatacaactatttttctgctgttacccttgtacctaaagatgcca

SEQ ID NO: 238224 - DNA, 120 bp, Artificial Sequence
  ENSG00000120675_32 (sequence is synthesized)
tcctaatccccagatctccacaactatacctacatagtagaaggttaaaatgtatccctctttttctggtgcatccagcaaaagtaatatcatgaattatgagctctctgagagcaagga

SEQ ID NO: 238225 - DNA, 120 bp, Artificial Sequence
  ENSG00000120675_33 (sequence is synthesized)
tcatatcagtcttgtttattgttgcagtgaacaagtacagttgcagatattcaggagtaattatctaaatggcagtaggcttataaaactgaattttcaccagccacaccctccccccaa

SEQ ID NO: 238226 - DNA, 120 bp, Artificial Sequence
  ENSG00000120675_34 (sequence is synthesized)
ctccttatctgtaaaaagcttatttgagtggttacctgtcttcagtaaagattgcgcttgcatatttgctgtcattgcatattctgcttaattaagctctgttgatattgcagtttctgt

SEQ ID NO: 238227 - DNA, 120 bp, Artificial Sequence
  ENSG00000120675_35 (sequence is synthesized)
gcatacttacatcttagatgcaatctgagggcctaggaaggccttttaaaaataaaacaattccgattgcagagaaagtgtaagtcaaggacagttaattcaaggggaacatagaaagct

SEQ ID NO: 238228 - DNA, 120 bp, Artificial Sequence
  ENSG00000120675_36 (sequence is synthesized)
atttagattttagttgatggtgccagtcttcagcgtaaagtcaaaagtggagggaagtttagtaaggaaaaaatgttgggcttggaatacattgtttagtcttcaaagcactttactttt

SEQ ID NO: 238229 - DNA, 120 bp, Artificial Sequence
  ENSG00000120675_37 (sequence is synthesized)
tatgaaatatattttagacattcagcaaatattgaatacttactatatcaggcagtaaagatataaattcattcttaaaatgtgcaacatgttcaaactgaaaaaaatacattcttaaac

SEQ ID NO: 238230 - DNA, 120 bp, Artificial Sequence
  ENSG00000120675_38 (sequence is synthesized)
aggaaactttttccttcatactttttaattaacaagacatataagagttgcattaatgggcgtgcttatgattgatcacccagcagcatcattagaaataatatattttattcatgtgca

SEQ ID NO: 238231 - DNA, 120 bp, Artificial Sequence
  ENSG00000120675_39 (sequence is synthesized)
gaaatcttttggttgtcctggggaaccttgaacacagaaaagagcttttattgataaggtaattgaacacacttgacaattagcttaatatggtttaataccatttgtgggagaagatga

SEQ ID NO: 238232 - DNA, 120 bp, Artificial Sequence
  ENSG00000120675_40 (sequence is synthesized)
atcagccaggctctttacgtcaagaatatgaagtttctcttgagtcaaccaacttaagatgagctacggagactgcagtgaaaagttaaatatccaagtacaccagccaatttcacacag

SEQ ID NO: 238233 - DNA, 120 bp, Artificial Sequence
  ENSG00000120675_41 (sequence is synthesized)
tggaaccatgctgtcctcgggcaccctgcacctcgcccaacagtcatcaactagatggaggctcctggctgcaaggaggatttgatgggaatgagtaaatgtgtcagcatagtccgtccc

SEQ ID NO: 238234 - DNA, 120 bp, Artificial Sequence
  ENSG00000120675_42 (sequence is synthesized)
ttctaatggaaaagcaacccaaagagcaaatcctattaatggctggatcagtatcatctacttgtcaaaaacattccatgaattatgagtcaaaattttatttatggtggcattacacac

SEQ ID NO: 238235 - DNA, 120 bp, Artificial Sequence
  ENSG00000120675_43 (sequence is synthesized)
attaagagatgaggacttctgttagcataatttattagctggaaaagttgagaaggttctctggactcatttttataggtggaacctaagtgatctggataattgcccaccagcaaaatt

SEQ ID NO: 238236 - DNA, 120 bp, Artificial Sequence
  ENSG00000120675_44 (sequence is synthesized)
gctgggcatggtggacaaagaaaatgttccttctaatgattttttatgagctgagtagctattgttcccagctgagtgctcttttcctctttttattgttgctgagcaaaagaatttata

SEQ ID NO: 238237 - DNA, 120 bp, Artificial Sequence
  ENSG00000120675_45 (sequence is synthesized)
aaaagctctttcttttgtattaaaaaccctgctcaattgaaatgcaagttcattaagtaatcttcatttctcttcctgccataataaccctttccctctctgttcgattcaacagtatct

SEQ ID NO: 238238 - DNA, 120 bp, Artificial Sequence
  ENSG00000120675_46 (sequence is synthesized)
agcagcactgctccaaattttaagtctgaacagactatattacatagatgtagagaaatactcaatcttcagcattaagagggagcttaatttcacacgggtggaatatgatcactcagg

SEQ ID NO: 238239 - DNA, 120 bp, Artificial Sequence
  ENSG00000120675_47 (sequence is synthesized)
ctagatgttggccataaatttcaaattagtatctcaacttagcaggggggatcaacagtggcaaacttcaattatgacaggataaaaatcacatagagatattggttcaatatggacatc

SEQ ID NO: 238240 - DNA, 120 bp, Artificial Sequence
  ENSG00000120675_48 (sequence is synthesized)
taaactataatgctaaaagccaataattagaataagttcattttaagaaaagcattaataatattagctaacgtttagtacctgtgccaaacattctacctatgttaccttgattttcat

SEQ ID NO: 238241 - DNA, 120 bp, Artificial Sequence
  ENSG00000120675_49 (sequence is synthesized)
agccagcctaagaggtactattatgtatccccattttacaggttaagaaacaggctcagaggagtttaggatcttttccaagattacatagccagtaagtggtggcactaggaaccaaat

SEQ ID NO: 238242 - DNA, 120 bp, Artificial Sequence
  ENSG00000120675_50 (sequence is synthesized)
tcagactctgaatcgcatgctgtttatattatattgcactcattctaaatatgtgggaatcagaatgaaggggcttgtatgacttttggctcattttttgatgcatgtgacctgggatta

SEQ ID NO: 238243 - DNA, 120 bp, Artificial Sequence
  ENSG00000120675_51 (sequence is synthesized)
taaatgtgaaattaggtttacgaaaggatccagtgtcattgtgcatcatgggcaaggagtacctaatctctttaattcttccctggaagcttacgatgtccatccaagtgcacatagcaa

SEQ ID NO: 238244 - DNA, 120 bp, Artificial Sequence
  ENSG00000120675_52 (sequence is synthesized)
aagttctgttgtaaagtttagcagagtgactttctttgactcagagtgatgacggaggaagctttgataagattttatctgaaatgttcatggacaagagctttcaaggagaacatccag

SEQ ID NO: 238245 - DNA, 120 bp, Artificial Sequence
  ENSG00000120675_53 (sequence is synthesized)
agcaaggttctgaagacagctcatgaaggtgaagcagcagacctggcacaagaaatgaagagagagctcagtgtattaaagatgaaaacaagaaaaccgaatatattgaaaggagcagag

SEQ ID NO: 238246 - DNA, 120 bp, Artificial Sequence
  ENSG00000120675_54 (sequence is synthesized)
aggcaatgaaaacaagacaactgaaatgaggtaacttgcagcaattgaaagggaatttcagtacttttatagaattcttaaaaattgtttcctgctgtttattttcaattttgaacaggg

SEQ ID NO: 238247 - DNA, 120 bp, Artificial Sequence
  ENSG00000120675_55 (sequence is synthesized)
ttatttgtccatgccatactttttttgccaaattccaaaattgtgtatagttctatagttgtctggtggagtcaatggaactttagttaccagtctaagaatgtgtctttgagattgtcc

SEQ ID NO: 238248 - DNA, 120 bp, Artificial Sequence
  ENSG00000120675_56 (sequence is synthesized)
agttaattctctatttccagtagctgtaataaatggtgaaaaggtttctgactcctggagaaagtttctaactccttatgactaatattcataacagacttgtgagttccttgaacatgg

SEQ ID NO: 238249 - DNA, 120 bp, Artificial Sequence
  ENSG00000120675_57 (sequence is synthesized)
atacacctatatgcaagagtgtattccaaagctaactcagtgatctttccatttatctattcttggattagtggtgcctttgctctttccttctgtaaatgtgaatagttaagagttgac

SEQ ID NO: 238250 - DNA, 120 bp, Artificial Sequence
  ENSG00000120675_58 (sequence is synthesized)
tgcagaagtgtttacactttggcttccatgcctctggaatgtttgtgctttggtggtgagatgtgagactatatttgtatagtctgcatctctcaggctgccccagaatgttgtacagtg

SEQ ID NO: 238251 - DNA, 120 bp, Artificial Sequence
  ENSG00000120675_59 (sequence is synthesized)
cagtgctgaagaaagcagcaggtacacacagaaatgcagcctttcctggttaaccctgcttggatctgagttacactttgtttcctgacttcttgggacttaggtaatcagtttgccttc

SEQ ID NO: 238252 - DNA, 120 bp, Artificial Sequence
  ENSG00000120675_60 (sequence is synthesized)
tactctatctcattttgtactcgcttacatactacattcttgtttgggctttcgtttcttcttgtaagcagagattttttaaaatccaatatgtgaaaatacggatgcactacaattaaa

SEQ ID NO: 238253 - DNA, 120 bp, Artificial Sequence
  ENSG00000120675_61 (sequence is synthesized)
taaataaaatgctgttgtgtttgttttgctttaaaattgtaaaggataaacaataagatagttttatctatgtggttttcccgatgcagttaaaataaaacctaatctgctaaaattgaa

SEQ ID NO: 238254 - DNA, 120 bp, Artificial Sequence
  ENSG00000120675_62 (sequence is synthesized)
ggtcaggaaagctcaggcaagcccaccctcaggcactacagctagactccgagcttactgggcagtcatctgattcgaccaacatcagttcgcagggcttaagcccagtcccttacggcg

SEQ ID NO: 238255 - DNA, 120 bp, Artificial Sequence
  ENSG00000120675_63 (sequence is synthesized)
gcctggggagggaccaggcccaagtatataaagctccctgagggtccgcgttggctttgcgcctgtgagtgtgattcaagaacgtcccagtgcccttggctcctttcggagtgtgacccc

SEQ ID NO: 238256 - DNA, 120 bp, Artificial Sequence
  ENSG00000120675_64 (sequence is synthesized)
gtgcttgcacgggacacgttacccagctcgggtgagaagggtatcttccgggaacctcgcctttaatagcacaacgagcgcagagtccactggatctgcgagaagaaaccgcgctaacta

SEQ ID NO: 238257 - DNA, 120 bp, Artificial Sequence
  ENSG00000120675_65 (sequence is synthesized)
aataaggttatacttagacttaaaattatgagtaggtggcagaggagaaaatatcaaatttttatattttaaagcctcaaatctaaaagtatcccactcccctaaaaaaacaaaacaaaa

SEQ ID NO: 238258 - DNA, 120 bp, Artificial Sequence
  ENSG00000120685_0 (sequence is synthesized)
aggaaagaggggcccaagctggcggcgcagtgttgagtttacttgggcgcgactggctttattgtaggtccccatgagctggtgggggctgtaggggtaaccaggcagggcgtctggcgc

SEQ ID NO: 238259 - DNA, 120 bp, Artificial Sequence
  ENSG00000120685_1 (sequence is synthesized)
tgttggggctgcgtttttccggagtccccctatgcgaggccgtgcccctcttcgcccggctcctggtgctccccagccgccggcccgctcccggaagctgcagcagctggtaacaaagag

SEQ ID NO: 238260 - DNA, 120 bp, Artificial Sequence
  ENSG00000120685_2 (sequence is synthesized)
agagcctgccgggccgcctgctgccggggccgaggtatccaggagtcgggcggagcggctggggatgagcgcgagccggaccatgcgtccgggttcgcggcggtgagggtcgcggccggc

SEQ ID NO: 238261 - DNA, 120 bp, Artificial Sequence
  ENSG00000120685_3 (sequence is synthesized)
gaggcgcaggtgcgggtcgagagaccggcgcctccctccccgccgcccgtggactctgagcgcaggtgtttctactctgccggccgctccacctgggaaagcgccttcaagagctacctc

SEQ ID NO: 238262 - DNA, 120 bp, Artificial Sequence
  ENSG00000120685_4 (sequence is synthesized)
tggcggcacctggccctcagctgcagggaaaccgcactcaaacctgccgccgagcccgggtttttctgcaaaactcagaggacctggctcttgcccgaggtgccctgaaccattgtgtga

SEQ ID NO: 238263 - DNA, 120 bp, Artificial Sequence
  ENSG00000120685_5 (sequence is synthesized)
ataagctggggaagcctgactggagtgttttttctttttaataaaaagagtttttctgaatctcaatttttagaaattttttttgcgaagtttgcaatactctctacctcttcgcatcct

SEQ ID NO: 238264 - DNA, 120 bp, Artificial Sequence
  ENSG00000120685_6 (sequence is synthesized)
ctcttgctcgtggagtctttttcctcctcagctataaatattttttactatcggcggagcagaccagggatgaacgtcttttaattgcaagtataactgttaaaaccacgtcgggatagt

SEQ ID NO: 238265 - DNA, 120 bp, Artificial Sequence
  ENSG00000120685_7 (sequence is synthesized)
agtcaagatggataaaaagtcctttgaaatggtgctggatgaaattagaaaggctgttttgacagaatacaaattaaaagcaattgaatatgtgcatggatacttttctagtgaacaggt

SEQ ID NO: 238266 - DNA, 120 bp, Artificial Sequence
  ENSG00000120685_8 (sequence is synthesized)
ggttgatttgctgagatatttttcctgggccgagccccagttgaaggcaatgaaagcattacagcataaaatggtggctgtccagccaacagaagtggtcaatatactcaactgtttcac

SEQ ID NO: 238267 - DNA, 120 bp, Artificial Sequence
  ENSG00000120685_9 (sequence is synthesized)
tttcagtaaagacaaactagttgctcttgaactgttagcctcgaacattattgatgcacagaattctcgtcctattgaagatttattcagggtaaatatgtctgagaagaaacggtgcaa

SEQ ID NO: 238268 - DNA, 120 bp, Artificial Sequence
  ENSG00000120685_10 (sequence is synthesized)
gagaatacttgaacaggctttcaaggggggctgcaaagctcctcatgctatgatatcttcttgtggaacaatcccaggaaatccatatcccaaaggaagacctagccgcataaatggaat

SEQ ID NO: 238269 - DNA, 120 bp, Artificial Sequence
  ENSG00000120685_11 (sequence is synthesized)
tttcccaggaactcctttgaaaaaagatggtgaagaatgtactaacgaaggcaaaggaatagctgcacgaattcttgggccatccaaaccacctccttcaacatataatccacataaacc

SEQ ID NO: 238270 - DNA, 120 bp, Artificial Sequence
  ENSG00000120685_12 (sequence is synthesized)
tgttccttatccgatacctccatgccgaccacatgcaactattgcaccaagtgcttataacaatgcaggtctggtaccattagcgaatgtcatagctccacctccacctccatatactcc

SEQ ID NO: 238271 - DNA, 120 bp, Artificial Sequence
  ENSG00000120685_13 (sequence is synthesized)
taatcctgtaggaacagagaatgaagacctttcgaatccgtcaaaacctatacagaatcaaacattttccaccccagcaagtcaactcttttctcctcatggttctaatccttcaacacc

SEQ ID NO: 238272 - DNA, 120 bp, Artificial Sequence
  ENSG00000120685_14 (sequence is synthesized)
tgctgcaactcctgttcctactgcatccccagtcaaggcaattaatcatccatcagcatcagcagctgccaccgtttctggaatgaacctgctgaatactgtccttcctgtgttcccagg

SEQ ID NO: 238273 - DNA, 120 bp, Artificial Sequence
  ENSG00000120685_15 (sequence is synthesized)
gcaggtctcctcagccgttcacacacctcagccatcaataccaaacccaacagttatcagaaccccttcattgcccactgcacctgttacatccatccacagtacaaccaccactcctgt

SEQ ID NO: 238274 - DNA, 120 bp, Artificial Sequence
  ENSG00000120685_16 (sequence is synthesized)
tccttccattttttctggcctagtgtcactgccaggtccttctgccactcctaccgcagccactcctaccccaggacctacaccacggtccactcttggttccagtgaagcatttgcttc

SEQ ID NO: 238275 - DNA, 120 bp, Artificial Sequence
  ENSG00000120685_17 (sequence is synthesized)
tacttctgcacctttcactagcctccccttttccaccagctcttctgctgcttctaccagcaacccaaattctgcttcattgtcatcagtttttgcagggctccctttgcccttaccacc

SEQ ID NO: 238276 - DNA, 120 bp, Artificial Sequence
  ENSG00000120685_18 (sequence is synthesized)
aacatcccaaggcctatccaacccgactcctgtaattgctggtggctctactcccagcgttgccggtccacttggtgtgaacagtcctcttttgtctgcgttaaaaggttttctgacatc

SEQ ID NO: 238277 - DNA, 120 bp, Artificial Sequence
  ENSG00000120685_19 (sequence is synthesized)
caatgacaccaatttaatcaactcctctgctttatcctctgctgtcacaagtgggctggcttcactatcttctcttactcttcagaactctgactcttctgcttcagcccctaacaagtg

SEQ ID NO: 238278 - DNA, 120 bp, Artificial Sequence
  ENSG00000120685_20 (sequence is synthesized)
ctatgccccatcagccatccctaccccacagaggacttccactccagggttggccctgttcccaggcctgccgtctcccgtggctaactcaacttccactcccctgacattgcctgtaca

SEQ ID NO: 238279 - DNA, 120 bp, Artificial Sequence
  ENSG00000120685_21 (sequence is synthesized)
tcagcttccacgtcagtgccagttagctgtggctcctcagcctcccttttgcgtggcccccacccaggtacctcagatctgcatatttcatctacccctgctgcaacaactcttcctgtt

SEQ ID NO: 238280 - DNA, 120 bp, Artificial Sequence
  ENSG00000120685_22 (sequence is synthesized)
atgatcaaaactgagcccacaagtcctactccctcggccttcaaaggtccatctcattctgggaatccctctcatggcactttaggtttgtcagggacattgggccgtgcatatacttca

SEQ ID NO: 238281 - DNA, 120 bp, Artificial Sequence
  ENSG00000120685_23 (sequence is synthesized)
acatccgtgcccatcagtttatctgcttgccttaatcctgcattgtcaggtctctccagcttgagtactcctttaaatggttcaaatcctctttcctctatttcccttccaccacatggt

SEQ ID NO: 238282 - DNA, 120 bp, Artificial Sequence
  ENSG00000120685_24 (sequence is synthesized)
tcctccactcccattgcaccagtattcactgctcttccttcttttacttctttgaccaacaattttcctttaactggcaacccatctcttaatccgtcagtatctctcccagggtcatta

SEQ ID NO: 238283 - DNA, 120 bp, Artificial Sequence
  ENSG00000120685_25 (sequence is synthesized)
atagccacctcatctaccgctgccacctccacatctctccctcatcctagctcaacggcagctgttctctcagggctttctgcttcagcaccagtctcagcagcacctttccccctcaac

SEQ ID NO: 238284 - DNA, 120 bp, Artificial Sequence
  ENSG00000120685_26 (sequence is synthesized)
ctgtccactgctgttccctcacttttctctgttactcaaggacctctgtcatcttcaaatccctcctatccaggcttttctgtctctaataccccaagcgttacccctgctcttccctca

SEQ ID NO: 238285 - DNA, 120 bp, Artificial Sequence
  ENSG00000120685_27 (sequence is synthesized)
ttcccggggctgcaggcgccctctacagtcgcagctgtcacaccactacctgtggctgccacagccccatccccagctccagtcctcccaggattcgcctcagcattcagttccaatttc

SEQ ID NO: 238286 - DNA, 120 bp, Artificial Sequence
  ENSG00000120685_28 (sequence is synthesized)
aactccgctcttgttgcacaagccggtttatcatctggacttcaagctgcaggcagttctgtttttccaggccttttgtccctcccgggtatccctgggtttcctcagaatccttcacaa

SEQ ID NO: 238287 - DNA, 120 bp, Artificial Sequence
  ENSG00000120685_29 (sequence is synthesized)
tcatccttgcaagaattacagcataatgcggctgcgcagtcagcattgttacagcaggtccattcagcttcggctctggaaagctatccagctcagcctgatgggtttcctagttatcct

SEQ ID NO: 238288 - DNA, 120 bp, Artificial Sequence
  ENSG00000120685_30 (sequence is synthesized)
tcagcgccaggaacaccattttctttgcaaccaagcctgtcccagagtgggtggcagtgaatacttttaacttttattctccttcagagcaacatcagaattgcctgagaactgcaatga

SEQ ID NO: 238289 - DNA, 120 bp, Artificial Sequence
  ENSG00000120685_31 (sequence is synthesized)
acaatctgacaaatgtgaagctggccaaaagtcggaaaatgagaatgagggtaatcctggagaaattgtgacaacaatttgaaaattgtggttgcattttaaagtgtgaacactccccta

SEQ ID NO: 238290 - DNA, 120 bp, Artificial Sequence
  ENSG00000120685_32 (sequence is synthesized)
tgtaaatatgctgacaataaattgtatggagaatggtatttaaaaagtgtttggagacttttcacctgtcctataaaattttgaattgtgtatgtgatctacatagaaagaatattaaag

SEQ ID NO: 238291 - DNA, 120 bp, Artificial Sequence
  ENSG00000120685_33 (sequence is synthesized)
agtaggttgaactctttatagccgaatacagccttaaatatgcttgtatagcatccactggcagaagtaatagttgtgcctcagacttgggggttgcatgtggccctgggggagttacta

SEQ ID NO: 238292 - DNA, 120 bp, Artificial Sequence
  ENSG00000120685_34 (sequence is synthesized)
cccttggtatgcatgagcggttcctattagcatcagtgggaactcagtactctgtatgtatccacaaaagggaacttgagacccacagttattcttaatttctgatattaacaaccgtac

SEQ ID NO: 238293 - DNA, 120 bp, Artificial Sequence
  ENSG00000120685_35 (sequence is synthesized)
atactgctgaatttaactcaaaatatttcaggtaagtgaaagtggtgcttaatgtagactatagaatgactttcaggtgttttcaactgaaagtatatatccagaactgcatccttatag

SEQ ID NO: 238294 - DNA, 120 bp, Artificial Sequence
  ENSG00000120685_36 (sequence is synthesized)
aaatacaagtaagacttaggataatttgccttcaaaacagttttcctaatctcagcagtatccagtgagtgaagaacacttgactgactcttgggccacctctgttacttactgtactat

SEQ ID NO: 238295 - DNA, 120 bp, Artificial Sequence
  ENSG00000120685_37 (sequence is synthesized)
ggaagctcctggtgaatgtttacaattatgggatgtagtatttctatttgtactttaagtcaaatgcttatatgaaatatgtgacaacaaatagagaagactggctctgttagtaattat

SEQ ID NO: 238296 - DNA, 120 bp, Artificial Sequence
  ENSG00000120685_38 (sequence is synthesized)
gcagtatgtactctatttaaggatctgtggtagtataacatgagtgaatgtcattaattttgaagtaataactgccacatgtgggaagtaggggagtaaggagaatgaattccaatctgt

SEQ ID NO: 238297 - DNA, 120 bp, Artificial Sequence
  ENSG00000120685_39 (sequence is synthesized)
gattaaaagtgtaaactatagactctactgtagtacatttcaggatctagaagttttacttttataaagatggtgtccggaagatgttgctaatgtattttacttcaacatagggaacaa

SEQ ID NO: 238298 - DNA, 120 bp, Artificial Sequence
  ENSG00000120685_40 (sequence is synthesized)
actttttaagtatattaataaacctgtatggttagtttttaacagttttttaaaataaactatggatatgacaaatattctgtgttttactaagtgcttggataggctttctaattttgt

SEQ ID NO: 238299 - DNA, 120 bp, Artificial Sequence
  ENSG00000120685_41 (sequence is synthesized)
atacgtgctagagttaattattgaacatttttatccaaatttagttgtaactctgtttatactactgattgctcattcgtttaaatgatattttaatgtaaaagtcataaccaacatatg

SEQ ID NO: 238300 - DNA, 120 bp, Artificial Sequence
  ENSG00000120685_42 (sequence is synthesized)
aacagacagatttatgtctttaaacacagaatgtaagctatagtttaatctgataccagttgctggaagttgccatttgtttttcttaaatctatacccataaaacttcttttaagatta

SEQ ID NO: 238301 - DNA, 120 bp, Artificial Sequence
  ENSG00000120685_43 (sequence is synthesized)
cttgcacaagacttcagatagggccacaattatgggagctggaaagaatctggctcccttaccaccagtgggtcctttcccctgcctcacaggcatgcacatgctctctctgtaggtaaa

SEQ ID NO: 238302 - DNA, 120 bp, Artificial Sequence
  ENSG00000120685_44 (sequence is synthesized)
aagtacagcatctggcttagcttcagatacttccagttttctaaagaccagtgctttgaatgctttttgttacttaggtaagctccatcaactgtaaaataagtattggtggatttatgg

SEQ ID NO: 238303 - DNA, 120 bp, Artificial Sequence
  ENSG00000120685_45 (sequence is synthesized)
atttcaaaaggcagaacaactaacatactgaattcctgattccagtctatgttctactggagttgtcagaatgccaaatgctaacgcaaacagtgcttttttcttctaaaaggaggaaag

SEQ ID NO: 238304 - DNA, 120 bp, Artificial Sequence
  ENSG00000120685_46 (sequence is synthesized)
agggtgggaatgagaggatgaattcctatcagtttaggaggatgttgccattgggagttcttgcgtaatttgagattgtaaaacctagaaggtttcttgtctttgttatgtaggaggaaa

SEQ ID NO: 238305 - DNA, 120 bp, Artificial Sequence
  ENSG00000120685_47 (sequence is synthesized)
caggaattcttggtttaacttaggctgggcctgggaggagtttgctgtttacaatgagatctaaccccttattggagatgattttaaaaatctctggccacctctatggccatctttggc

SEQ ID NO: 238306 - DNA, 120 bp, Artificial Sequence
  ENSG00000120685_48 (sequence is synthesized)
aagatctgcatttggaatttaatagcaaccacatttattaaagcaaagaaatttccctcatttgttgtcccatgtagtccagtagtatgatatgcggggacatttttagccttttgtccc

SEQ ID NO: 238307 - DNA, 120 bp, Artificial Sequence
  ENSG00000120685_49 (sequence is synthesized)
atgcatttaacttcaaaaagtcaagtatatgcgtttggcagaaaagacaaataatgtaagtatagcaggttctgcctgccatgccattcactgaacttatccctgcaatgagcatgcagt

SEQ ID NO: 238308 - DNA, 120 bp, Artificial Sequence
  ENSG00000120685_50 (sequence is synthesized)
gggaaataggaatctctggttgtttcatttggtgtcagttttcacttaactctagacataaacctccatataaaatcaactgtattaaataggagtttttataataaattgaatagctgc

SEQ ID NO: 238309 - DNA, 120 bp, Artificial Sequence
  ENSG00000120685_51 (sequence is synthesized)
ttttttttttttttttttttacttgggaaaaaatgtagaagcgttttaagtgtctaattagtgtgtgttaatgtgtctaacaaaatacagtcaaaagcatagtggtacattctgatttcc

SEQ ID NO: 238310 - DNA, 120 bp, Artificial Sequence
  ENSG00000120685_52 (sequence is synthesized)
ttccaaatgtgaataagtatctagtgtacttattacatatatgactataacttataaaatgaaggggcttaacaagattgtttaatttgattttttgtatttcagttatttgctttgcct

SEQ ID NO: 238311 - DNA, 120 bp, Artificial Sequence
  ENSG00000120685_53 (sequence is synthesized)
tatttataagacagcagaaaggattatatgcaaaacagacttactgaatttcgaataatatacttcacagtagaaagattcatatcagggaatggctgatttttatggtccttccaacag

SEQ ID NO: 238312 - DNA, 120 bp, Artificial Sequence
  ENSG00000120685_54 (sequence is synthesized)
aggaataaattctaaggtttttgttttgtttttaacattttaagattgtatttgacaaatatggaaacagtagcttttatgtcttgtctgcagttaacttgtttttctgtcaattgtttt

SEQ ID NO: 238313 - DNA, 120 bp, Artificial Sequence
  ENSG00000120685_55 (sequence is synthesized)
actcctgtaggcactggtactcagaggagctgtctgtcaggtcagccaatgatagtggtcctctctgcactacagctgcagggtacactttctcctggatggcaccctcaggccagcatc

SEQ ID NO: 238314 - DNA, 120 bp, Artificial Sequence
  ENSG00000120685_56 (sequence is synthesized)
tttccagaaagtgttcttgaatatagtatatatgtaaaattaacagtgtgtatttaaaacttgacaagctaaggtagagatgctaggggataaaagagcactcactcagtttctggtaat

SEQ ID NO: 238315 - DNA, 120 bp, Artificial Sequence
  ENSG00000120685_57 (sequence is synthesized)
acatttttttcctaacatagtccataaatatttatatcctgtgtttttctttttatccaaatatctgtttattatggtggcaaatatttgattaaagtttaaaatgaacttttatttatt

SEQ ID NO: 238316 - DNA, 120 bp, Artificial Sequence
  ENSG00000120686_0 (sequence is synthesized)
agcacactagaggaagtcgtgctacccccgcggagttgtcgtgtgttctggattcattccggcaccaccatgtcgaaggtttcctttaagatcacgctgacgtcggacccacggctgccg

SEQ ID NO: 238317 - DNA, 120 bp, Artificial Sequence
  ENSG00000120686_1 (sequence is synthesized)
tacaaagtactcagtgttcctgaaagtacacctttcacagcagtcttaaagtttgcagcagaagaatttaaagttcctgctgcaacaagtgcaattattaccaatgatggaataggaata

SEQ ID NO: 238318 - DNA, 120 bp, Artificial Sequence
  ENSG00000120686_2 (sequence is synthesized)
aatcctgcacagactgctggaaatgtttttctaaaacatggttcagaactgcggattattcctagagatcgtgttggaagttgttaatatctgctacttggaacatacgattgcctttca

SEQ ID NO: 238319 - DNA, 120 bp, Artificial Sequence
  ENSG00000120686_3 (sequence is synthesized)
gaataaatattggtattttttgttgttgtaaaattgaaatcaggcatttaacatactatgaaaacaccaggagtcaatgattaatgaaaggtgactcatctgtccctttttgttgtccat

SEQ ID NO: 238320 - DNA, 120 bp, Artificial Sequence
  ENSG00000120686_4 (sequence is synthesized)
actcttcctatgaagagggaatgcgtatgaattaaggctactactgtcacagaagatcatagtctttgatgctacctcacaacacaaacaggtagttcgttgggggcaaatgaattagcc

SEQ ID NO: 238321 - DNA, 120 bp, Artificial Sequence
  ENSG00000120686_5 (sequence is synthesized)
aactgttaactggaagcttttgataatttttttttttagaacaatttggaacattaaaatttactgaatcgtatatattcatctgagataaaaatataaaaagaattatggaccctggat

SEQ ID NO: 238322 - DNA, 120 bp, Artificial Sequence
  ENSG00000120686_6 (sequence is synthesized)
ggcaatttgcttgatagcatctgatttgcagactcataatttgatttttaattaaatatataggttgtgatgaagtgaatagacatatcagtgaacagttaactatattaaatttttatc

SEQ ID NO: 238323 - DNA, 120 bp, Artificial Sequence
  ENSG00000120686_7 (sequence is synthesized)
atttactttttttaagattcagacctcagttatataaatttcagtttaatatcaaccaaaaaattaaaattttaatctaacccttatgtgtataaattggtgtcccataccagcttttaa

SEQ ID NO: 238324 - DNA, 120 bp, Artificial Sequence
  ENSG00000120686_8 (sequence is synthesized)
tggtggacctatagaatccagtacttttaatggtgggaatttacagtagaagcatcctttgctgagttatacattcctttatcaatctcttttgatacaacatttaaaacaagtagcttc

SEQ ID NO: 238325 - DNA, 120 bp, Artificial Sequence
  ENSG00000120686_9 (sequence is synthesized)
aagaaaccactggtgttttgaggatagtatttctaaatagcattcaggaacagagtattattgcacagatctgaagatcaaaaaaaagctcaaggaaatacagatcggaagtgctgatga

SEQ ID NO: 238326 - DNA, 120 bp, Artificial Sequence
  ENSG00000120686_10 (sequence is synthesized)
gttatatttattgaaaacccaacttttaaggaagtgctaagatcagtcacccatgtgaataagaagccaggaaaggaaagatggggaagcccagatcaccaggcttctattaaggaggaa

SEQ ID NO: 238327 - DNA, 120 bp, Artificial Sequence
  ENSG00000120686_11 (sequence is synthesized)
agcaacagaggaaacagtgaaggggaacagaagggggtagcaaagtgttacagaaaagcggactggatagacaaaactgcagaaggtgtatgttggggagaactgaaagggaaaacaaaa

SEQ ID NO: 238328 - DNA, 120 bp, Artificial Sequence
  ENSG00000120686_12 (sequence is synthesized)
tacttgacatagtcttaagtagaagaaggcagttagagaaaacaaagtatctactggccttgtcaacatacagacttcaaaataccccttatgagaatccaaagaatgatgtgtgtaagg

SEQ ID NO: 238329 - DNA, 120 bp, Artificial Sequence
  ENSG00000120686_13 (sequence is synthesized)
tgaaagacgaaatcaaagcccattaatgattcagaatcagtgcttgacctcctgtattctgaatggtgaactctggaagcagggattgtgtctggctctttttagagctggaaatgtagt

SEQ ID NO: 238330 - DNA, 120 bp, Artificial Sequence
  ENSG00000120686_14 (sequence is synthesized)
ggctttcattaaatacttgctgtaaagtctttctaagaccaattattatcttagcatgtttcagtatcttctctatcataggccctaagttcattgggggaaaaaaaataagaagattca

SEQ ID NO: 238331 - DNA, 120 bp, Artificial Sequence
  ENSG00000120686_15 (sequence is synthesized)
acagaatcagcatttgaagtgtaccattggtagttgtttatgaaattaccagatattcataaatgtgacaaatgaacagcaggattatgaattatcaaaggaaaaagtatttgctgaggt

SEQ ID NO: 238332 - DNA, 81 bp, Artificial Sequence
  ENSG00000120686_16 (sequence is synthesized)
aggattatgaattatcaaaggaaaaagtatttgctgaggtgaaaaaatctgatgtttgaggaagaggcagactctctgtcg

SEQ ID NO: 238333 - DNA, 120 bp, Artificial Sequence
  ENSG00000120686_17 (sequence is synthesized)
tttttgtatttttagcagagacagggaggaagtttttatttttataaacaaaatctgatgttcagaggccccgtttcttacaataaatgttgagtcttagttaagcaggaatttatgaac

SEQ ID NO: 238334 - DNA, 120 bp, Artificial Sequence
  ENSG00000120686_18 (sequence is synthesized)
agtcttagttaagcaggaatttatgaacacccatttcctgactttttgctttaatttagatttttctccatcctgtttctagcacaaaaatttgcctgctgtgttacaaaaataaattta

SEQ ID NO: 238335 - DNA, 120 bp, Artificial Sequence
  ENSG00000120686_19 (sequence is synthesized)
tgttgtcctgtgccataaagtgatatatttaatatttttattctttggttttgaacattgtaagttcctaaaaacattttattaaacaagtagacattttgttattaaaaaaatgtgatc

SEQ ID NO: 238336 - DNA, 120 bp, Artificial Sequence
  ENSG00000120686_20 (sequence is synthesized)
tgtaatttctttgtgcagaatgatttgaagtattgtattcagtttacatgcgttattggtttataattaatatctaatgaaaatacatgttgttatattgtaaaccatattgtctgttct

SEQ ID NO: 238337 - DNA, 120 bp, Artificial Sequence
  ENSG00000120686_21 (sequence is synthesized)
tattattagagctcttaatcagcacaccttttgagtcagtatataatacatgtagtaaagaaaaaaagggcaaagatgattaatgaccataagtcagagaaattagtttatagtcatctg

SEQ ID NO: 238338 - DNA, 120 bp, Artificial Sequence
  ENSG00000120686_22 (sequence is synthesized)
ccacagacatagtagtgatgtttcgtccaacaacagaccgcatatatgaccgtggtcccatattactatatttttactgtgctttatctatgtttggatacacaagtacttaccatcatt

SEQ ID NO: 238339 - DNA, 120 bp, Artificial Sequence
  ENSG00000120686_23 (sequence is synthesized)
ttacagttgtttacagtattaggtacagtaacatgctctacaggtttgtagcctaggagcaataggccataccaaatagcctaagtttgtagtaggtgacatcaactaggtttgtacaag

SEQ ID NO: 238340 - DNA, 120 bp, Artificial Sequence
  ENSG00000120686_24 (sequence is synthesized)
tacattctgatgttcacatagtgacaaaattgcctaaggaagcatttctcagaatttgttcctgtgattcagtgatacataacagtacttgcaaatgcctgtccattttacagacggaaa

SEQ ID NO: 238341 - DNA, 120 bp, Artificial Sequence
  ENSG00000120686_25 (sequence is synthesized)
aaaaaaaaaaaaaagttgagaagaaaatggggttattgtaactggctaggttggtaggttccaaacctgggtgataacagagtcgcctaggaaattaaaaatacagatttttggaaacca

SEQ ID NO: 238342 - DNA, 120 bp, Artificial Sequence
  ENSG00000120686_26 (sequence is synthesized)
agtattttaacataatggagctgttttttagggattatataccagtctttacctgtgtgtctgagtaataagttgtttcattgtgtatattgattgtagatgtttttggctacaagtaac

SEQ ID NO: 238343 - DNA, 120 bp, Artificial Sequence
  ENSG00000120686_27 (sequence is synthesized)
agaaaacctaatagtggcttaagcattaagagtatttattatatataacaaaaagtctgtagataagattgctttctaattggagtattttttgacctacctcttaaggtagttgtgaga

SEQ ID NO: 238344 - DNA, 120 bp, Artificial Sequence
  ENSG00000120686_28 (sequence is synthesized)
tagtgactgtaaagtgcttcatagcttggattatttatagaaagcattcattaagtgctattattttttttaaatatagtcatttacatttcaaggggctgagtctacattcagatcttc

SEQ ID NO: 238345 - DNA, 120 bp, Artificial Sequence
  ENSG00000120686_29 (sequence is synthesized)
tcaaatgtctttaagagttgcatgcactttgacccatcatttccatgtggcttcattactaggtttatgttatcaaaaagtaggatgatagttaagacttactttcagatataagaagca

SEQ ID NO: 238346 - DNA, 120 bp, Artificial Sequence
  ENSG00000120686_30 (sequence is synthesized)
tgagaatttttatgaaaactaaaaaggtgctgatttttaaatgttttttaaaatgcaacattatatcacattatattctatatactcatattttactagtcttgattccaaaattgcaat

SEQ ID NO: 238347 - DNA, 120 bp, Artificial Sequence
  ENSG00000120686_31 (sequence is synthesized)
caaaattgcaatttcatagaatctttatcatagttttcaaattttctatatgagcatgtggactgtcagtaaaatttgttgttttgaaaagtttctagttttttaaaacatgtttgaatt

SEQ ID NO: 238348 - DNA, 120 bp, Artificial Sequence
  ENSG00000120686_32 (sequence is synthesized)
ttctgtttcataagaaacaatttttttcatccaaaattattagaaatatctataatgcaactttttggacatgacacttgaaaaagtagcttgatctgttagaaatggcacccaaatgtg

SEQ ID NO: 238349 - DNA, 120 bp, Artificial Sequence
  ENSG00000120686_33 (sequence is synthesized)
ttggggccggacaagacggggctgggttggggatgatccgagcttttccaacaactaccccacgcagtcttcatctcttcacttcatctactttcctggctcgcgcccttccaggagcct

SEQ ID NO: 238350 - DNA, 120 bp, Artificial Sequence
  ENSG00000120688_0 (sequence is synthesized)
gtagttgggaacagcggaacgctggtcccggggactgagtaaggtgtctggatcggagggaggttcgggtgggcatcgggcggctggaagagctcgactcgtcccgctgggaaagcgcga

SEQ ID NO: 238351 - DNA, 120 bp, Artificial Sequence
  ENSG00000120688_1 (sequence is synthesized)
gtctgagtggaaccctggacgacttgcagagcggctggcgcagtcatggcggactactggaagtcacagccaaagaaattctgtgattactgcaagtgctggatagcagacaataggcct

SEQ ID NO: 238352 - DNA, 120 bp, Artificial Sequence
  ENSG00000120688_2 (sequence is synthesized)
agtgttgaatttcatgaaagaggaaagaatcataaggaaaatgtggcaaaaaggatcagtgagattaaacagaaaagcctggataaggcaaaggaagaagaaaaggcatcaaaggagttt

SEQ ID NO: 238353 - DNA, 120 bp, Artificial Sequence
  ENSG00000120688_3 (sequence is synthesized)
gctgcaatggaggcagctgccctgaaagcataccaagaggatttgaaaagacttggcttagagtcagaaattttggagccaagcataacaccagtaaccagcactatcccacctacctcg

SEQ ID NO: 238354 - DNA, 120 bp, Artificial Sequence
  ENSG00000120688_4 (sequence is synthesized)
acatcaaatcaacagaaagaaaagaaagaaaagaagaaaagaaaaaaagatccttcaaagggcagatgggtagaaggcataacctctgagggttaccattactattatgatcttatctca

SEQ ID NO: 238355 - DNA, 120 bp, Artificial Sequence
  ENSG00000120688_5 (sequence is synthesized)
ggagcatctcagtgggagaaacctgaaggatttcaaggagacttaaaaaagacagcagtgaagaccgtttgggtagaaggtttaagtgaagatggttttacctattactataatacagaa

SEQ ID NO: 238356 - DNA, 120 bp, Artificial Sequence
  ENSG00000120688_6 (sequence is synthesized)
acaggagaatccagatgggagaaacctgatgatttcattccacacactagtgatctgccttctagtaaggtcaatgaaaattcacttggcaccctagatgaatccaaatcatcagattcg

SEQ ID NO: 238357 - DNA, 120 bp, Artificial Sequence
  ENSG00000120688_7 (sequence is synthesized)
catagtgattctgatggggaacaggaagcagaagaaggaggggtctctacagagacagaaaagccaaaaataaagtttaaggaaaaaaataaaaatagtgatggaggaagtgacccagaa

SEQ ID NO: 238358 - DNA, 120 bp, Artificial Sequence
  ENSG00000120688_8 (sequence is synthesized)
acacagaaagaaaaaagtattcagaaacagaattcattaggttcaaatgaagaaaaatcgaaaactcttaagaaatcaaacccatatggagaatggcaagaaattaaacaagaggttgag

SEQ ID NO: 238359 - DNA, 120 bp, Artificial Sequence
  ENSG00000120688_9 (sequence is synthesized)
gtcacttctcttggagttatggcagatggagtggccccagtcttcaaaaagagaagaactgaaaatggaaaatctagaaatttaaggcaacgaggtgatgatcaatagttgcaggagagc

SEQ ID NO: 238360 - DNA, 120 bp, Artificial Sequence
  ENSG00000120688_10 (sequence is synthesized)
tttttgtacatgcttttaggacagaatggagacttatacacccaaagtttatctgtgtttgtttgtaagtattatgatgctaaaaatttagatttattctaaatgtatttgatgtgaatt

SEQ ID NO: 238361 - DNA, 120 bp, Artificial Sequence
  ENSG00000120688_11 (sequence is synthesized)
aaaataaatattttttcatgtgaaatttattttggttcctaaaatggaagcctaccacattgcattgtaatacagtgtattatgttcagtgtctaaaaactgctaattaagtcataattt

SEQ ID NO: 238362 - DNA, 120 bp, Artificial Sequence
  ENSG00000120688_12 (sequence is synthesized)
aagatgctatgtatctgttatttaaaacatggagaaacagggcctttattccattcatattcataagagcatatttatcctgcattgaaaatgcattacttttgcacattgatattaact

SEQ ID NO: 238363 - DNA, 120 bp, Artificial Sequence
  ENSG00000120688_13 (sequence is synthesized)
gttgtccaacaaataagtatcggagtacgtgagaatattcccagcccagtgatgatttggttctgaggctgatgtgagaaagctgatgtaaaaaatgtatgcatattggcttaccttact

SEQ ID NO: 238364 - DNA, 120 bp, Artificial Sequence
  ENSG00000120688_14 (sequence is synthesized)
caatttaaagtcaaaagccaacagccaggagcagctcaggtacttcagatgtgcttaatatggagtgaaaactggaccagaggtggaaagatgtatttgccccagttcacttcaaagcag

SEQ ID NO: 238365 - DNA, 120 bp, Artificial Sequence
  ENSG00000120688_15 (sequence is synthesized)
caaacgttgtttaagcattttagtttgaaccaggcattgtgttaggaatccagggataaagatgaatgaaatgtatttctgttcttcaggagttcacattctagcatatgccttttttcc

SEQ ID NO: 238366 - DNA, 120 bp, Artificial Sequence
  ENSG00000120688_16 (sequence is synthesized)
cccagtcatgcactctttttagcagtcttatatgtactagaaaagattttttaaagtttatttaaagctgtgtagatgaaggcttgatctaaaatagtataaggtctccagcttcagtaa

SEQ ID NO: 238367 - DNA, 120 bp, Artificial Sequence
  ENSG00000120688_17 (sequence is synthesized)
aagtttttagtgtttacttaaattagtaatttctcactttctgtctggttaaaatgtcttaaaaagtagaattttcttctttaatccgtttagtagttacctcccttttacttttcaaat

SEQ ID NO: 238368 - DNA, 120 bp, Artificial Sequence
  ENSG00000120688_18 (sequence is synthesized)
ttacctcccttttacttttcaaattcacaaaattacatttctcataaattgtatagtatttaacttataatagttaatatttgtctttttaagatgactgtacatgtaagaaaaaagctt

SEQ ID NO: 238369 - DNA, 120 bp, Artificial Sequence
  ENSG00000120690_0 (sequence is synthesized)
aatctacaggagccattttaacagctaaaacttgtcggattgctttttattttcaagctcaaaagacgatagagaaagaatacttgaaggccaagaagcttgagagaagaaaaatttcag

SEQ ID NO: 238370 - DNA, 120 bp, Artificial Sequence
  ENSG00000120690_1 (sequence is synthesized)
aaaaattgtctcaatttgactagaatatcaatgaaccaggaaaactgaagcaccttccctaaagaaaacttgggtatacaattactccacagacagagctgagggttttttacccaaatc

SEQ ID NO: 238371 - DNA, 120 bp, Artificial Sequence
  ENSG00000120690_2 (sequence is synthesized)
agtcactggattttgctgcctgatacgtgaatcttcttggaatttttctcatgtggatctaaggggaatgctttattatggctgctgttgtccaacagaacgacctagtatttgaatttg

SEQ ID NO: 238372 - DNA, 120 bp, Artificial Sequence
  ENSG00000120690_3 (sequence is synthesized)
ctagtaacgtcatggaggatgaacgacagcttggtgatccagctatttttcctgccgtaattgtggaacatgttcctggtgctgatattctcaatagttatgccggtctagcctgtgtgg

SEQ ID NO: 238373 - DNA, 120 bp, Artificial Sequence
  ENSG00000120690_4 (sequence is synthesized)
aagagcccaatgacatgattactgagagttcactggatgttgctgaagaagaaatcatagacgatgatgatgatgacatcacccttacagttgaagcttcttgtcatgacggggatgaaa

SEQ ID NO: 238374 - DNA, 120 bp, Artificial Sequence
  ENSG00000120690_5 (sequence is synthesized)
caattgaaactattgaggctgctgaggcactcctcaatatggattcccctggccctatgctggatgaaaaacgaataaataataatatatttagttcacctgaagatgacatggttgttg

SEQ ID NO: 238375 - DNA, 120 bp, Artificial Sequence
  ENSG00000120690_6 (sequence is synthesized)
ccccagtcacccatgtgtccgtcacattagatgggattcctgaagtgatggaaacacagcaggtgcaagaaaaatatgcagactcaccgggagcctcatcaccagaacagcctaagagga

SEQ ID NO: 238376 - DNA, 120 bp, Artificial Sequence
  ENSG00000120690_7 (sequence is synthesized)
aaaaaggaagaaaaactaaaccaccacgaccagattccccagccactacgccaaatatatctgtgaagaagaaaaacaaagatggaaagggaaacacaatttatctttgggagtttttac

SEQ ID NO: 238377 - DNA, 120 bp, Artificial Sequence
  ENSG00000120690_8 (sequence is synthesized)
tggcactgctccaggacaaggctacttgtcctaaatacatcaagtggacccagcgagagaaaggcatttttaaattggtggattctaaagcagtgtccaggttgtgggggaagcacaaaa

SEQ ID NO: 238378 - DNA, 120 bp, Artificial Sequence
  ENSG00000120690_9 (sequence is synthesized)
acaaacctgatatgaattatgagaccatgggaagagcactcaggtactattaccaaaggggtattctggcaaaagtggaaggtcagcgcttggtgtatcagtttaaagaaatgccaaaag

SEQ ID NO: 238379 - DNA, 120 bp, Artificial Sequence
  ENSG00000120690_10 (sequence is synthesized)
atcttatatatataaatgatgaggatccaagttccagcatagagtcttcagatccatcgctatcttcatcagccacttcaaataggaatcaaaccagccggtcgagagtatcttcaagtc

SEQ ID NO: 238380 - DNA, 120 bp, Artificial Sequence
  ENSG00000120690_11 (sequence is synthesized)
caggggtaaaaggaggagccactacagttctaaaaccagggaattctaaagctgcaaaacccaaagatcctgtggaagttgcacaaccatcagaagttttgaggacagtgcagcccacgc

SEQ ID NO: 238381 - DNA, 120 bp, Artificial Sequence
  ENSG00000120690_12 (sequence is synthesized)
agtctccatatcctacccagctcttccggactgttcatgtagtacagccagtacaggctgtcccagagggagaagcagctagaaccagtaccatgcaggatgaaacattaaattcttccg

SEQ ID NO: 238382 - DNA, 120 bp, Artificial Sequence
  ENSG00000120690_13 (sequence is synthesized)
ttcagagtattaggactatacaggctccaacccaagttccagtggttgtgtctcctaggaatcagcagttgcatacagtaacactccaaacagtgccactcacaacagttatagccagca

SEQ ID NO: 238383 - DNA, 120 bp, Artificial Sequence
  ENSG00000120690_14 (sequence is synthesized)
cagatccatcagcaggtactggatctcagaagtttattttacaagccattccatcatcacagcccatgacagtactgaaagaaaatgtcatgctgcagtcacaaaaggcgggctctcctc

SEQ ID NO: 238384 - DNA, 120 bp, Artificial Sequence
  ENSG00000120690_15 (sequence is synthesized)
gtgtggcttcctctccatccttcagtgctactgcacctgtggtgaccttttctcctcgcagttcacagctggttgctcacccacctggcactgtaatcacttcagttatcaaaactcaag

SEQ ID NO: 238385 - DNA, 120 bp, Artificial Sequence
  ENSG00000120690_16 (sequence is synthesized)
aaacaaaaactcttacacaggaagtagagaaaaaggaatctgaagatcatttgaaagagaacactgagaaaacggagcagcagccacagccttatgtgatggtagtgtccagttccaatg

SEQ ID NO: 238386 - DNA, 120 bp, Artificial Sequence
  ENSG00000120690_17 (sequence is synthesized)
gatttacttctcaggtagctatgaaacaaaacgaactgctggaacccaactctttttagttaatataccaaagcttatgaataattgtttgttaattgaacattttcaattatatgcaga

SEQ ID NO: 238387 - DNA, 120 bp, Artificial Sequence
  ENSG00000120690_18 (sequence is synthesized)
ctgactgattctaagataaattctaaggaggtttctaattttgtaattgttaaaaatagagttaattttgactttgttagatgagggaggaaaactcaactgtttctctttgttatctaa

SEQ ID NO: 238388 - DNA, 120 bp, Artificial Sequence
  ENSG00000120690_19 (sequence is synthesized)
atgtttcagaattcaatcgtgaaggaacaggcattttacactatgaagacattcttttgagatttttatttcagttgctatatcataagcatttttaaagtttcttttctaattttacat

SEQ ID NO: 238389 - DNA, 120 bp, Artificial Sequence
  ENSG00000120690_20 (sequence is synthesized)
tgtattagattttctgattcttttgtaaatacagaacttaaatagaaggcaacaggaaatttatataggaactattttcattccacttgtgtaagttaagtcttgactctttcaaatgca

SEQ ID NO: 238390 - DNA, 120 bp, Artificial Sequence
  ENSG00000120690_21 (sequence is synthesized)
aaaaacctattttatgctttgttaaaattatggtgtcacttagattgactttagttgactgcactatataatatagaactatgaatatgtagaataacatgaaaaattggaggtgctggt

SEQ ID NO: 238391 - DNA, 120 bp, Artificial Sequence
  ENSG00000120690_22 (sequence is synthesized)
ggtatggctgaccctgtttcagaagcaggatagtataaaagcatcagcctaagaatggcactcccactaactagctatgtaatcttgacctctttgggctttagttcctctcataaaagg

SEQ ID NO: 238392 - DNA, 120 bp, Artificial Sequence
  ENSG00000120690_23 (sequence is synthesized)
aagagatgtattggattagactagatgatcaccactttctcttctagttctaatttttttaattctaatacctatattttcaagttatgtcaattaaatcattatcaggttatttcctaa

SEQ ID NO: 238393 - DNA, 120 bp, Artificial Sequence
  ENSG00000120690_24 (sequence is synthesized)
tgtaagaatagctaaaatgttgcagagaaataagtgacccaacaaaatttattcatctgttatgggtaagatctgccataaattcttcctaaataatttgtttactaactctttaggcca

SEQ ID NO: 238394 - DNA, 120 bp, Artificial Sequence
  ENSG00000120690_25 (sequence is synthesized)
ctgtgctttgcggtccattagtaaacttgtgttgctaagtgctaaacagaatactgctattttgagagagtcaagactctttcttaagggccaagaaagcaacttgagccttgggctaat

SEQ ID NO: 238395 - DNA, 120 bp, Artificial Sequence
  ENSG00000120690_26 (sequence is synthesized)
ctggctgagtagtcagttataaaagcataattgctttatattttggatcattttttactgggggcggacttggggggggttgcatacaaagataacatatatatccaactttctgaaatg

SEQ ID NO: 238396 - DNA, 120 bp, Artificial Sequence
  ENSG00000120690_27 (sequence is synthesized)
aaatgtttttagattactttttcaactgtaaataatgtacatttaatgtcacaagaaaaaaatgtcttctgcaaattttctagtataacagaaatttttgtagatgaaaaaaatcattat

SEQ ID NO: 238397 - DNA, 120 bp, Artificial Sequence
  ENSG00000120690_28 (sequence is synthesized)
ttatgtttagaggtctaatgctatgttttcatattacagagtgaatttgtatttaaacaaaaatttaaattttggaatcctctaaacatttttgtatctttaattggtttattattaaat

SEQ ID NO: 238398 - DNA, 120 bp, Artificial Sequence
  ENSG00000120690_29 (sequence is synthesized)
catataaaaattctcagtgtctgttttcaggcaaaagtttcttaaagaataagtgtgcagagaatattactagaacatcagcattacttaatgtttataaataaatttcattagtcagaa

SEQ ID NO: 238399 - DNA, 120 bp, Artificial Sequence
  ENSG00000120690_30 (sequence is synthesized)
cccggctccaaagaggtggggtcggtataaaggggttgaggtcaccgggaaggggtaaaagcgcgacgggacctgagctgaaggacgggatctcaagcctcaagtccctgcgccatcccg

SEQ ID NO: 238400 - DNA, 120 bp, Artificial Sequence
  ENSG00000120690_31 (sequence is synthesized)
ccgtctctgtgtcctcccctggggcccaaaacctccatcctccttctaggctcgctggctcaaggccaaggagctcagcgcgccgcctccgcccggaacgcaaacagctgttcccagaga

SEQ ID NO: 238401 - DNA, 120 bp, Artificial Sequence
  ENSG00000120690_32 (sequence is synthesized)
cgtctccgctctcaactttgccaactactccgcacgcactttgaccagcggagcaaccgggacctgtgggtcggggtcctctggcggagttaaaaaaaaaagaggtgaaactgcgggacc

SEQ ID NO: 238402 - DNA, 120 bp, Artificial Sequence
  ENSG00000120690_33 (sequence is synthesized)
ttgcagcggagcggccccgcccctcctctcccctacgacgcccacgcgctcggatggggcttgttccctagctcgggagcgtgtgggcagcagcagcggcggcggcggcggcggcggcgg

SEQ ID NO: 238403 - DNA, 120 bp, Artificial Sequence
  ENSG00000120693_0 (sequence is synthesized)
cgccgccgccgccgctgctgcagccgctgtctcggtccccgccgccgccgccgggccctgcaggcgctgggcgcgcgcagccaggcaagttggccaccctgttcaagggcttaggagaaa

SEQ ID NO: 238404 - DNA, 120 bp, Artificial Sequence
  ENSG00000120693_1 (sequence is synthesized)
gcaagttggccaccctgttcaagggcttaggagaaagtcaacacacttcgcaacttgaattggtcccagctgctcccagaagaacgggcgggttggtccctatgccacccctggagagct

SEQ ID NO: 238405 - DNA, 120 bp, Artificial Sequence
  ENSG00000120693_2 (sequence is synthesized)
actcgccgcccactttgccgtgaagggctgtgcggttcccgtgcgcgccggagcctgctgtggcctcttatgcactccaccacccccatcagctccctcttctccttcaccagccccgca

SEQ ID NO: 238406 - DNA, 120 bp, Artificial Sequence
  ENSG00000120693_3 (sequence is synthesized)
gtgaagagactgctaggctggaagcaaggagatgaagaggaaaagtgggcagagaaggcagtggactctctagtgaagaagttaaagaagaagaagggagccatggacgagctggagagg

SEQ ID NO: 238407 - DNA, 120 bp, Artificial Sequence
  ENSG00000120693_4 (sequence is synthesized)
gctctcagctgcccggggcagcccagcaaatgcgtcacgattccccgctccctggacgggcggctgcaggtgtcccaccgcaagggcctgccccatgtgatttactgtcgcgtgtggcgc

SEQ ID NO: 238408 - DNA, 120 bp, Artificial Sequence
  ENSG00000120693_5 (sequence is synthesized)
tggccggatctgcagtcccaccacgagctgaagccgctggagtgctgtgagttcccatttggctccaagcagaaagaagtgtgcattaacccttaccactaccgccgggtggagactcca

SEQ ID NO: 238409 - DNA, 120 bp, Artificial Sequence
  ENSG00000120693_6 (sequence is synthesized)
gtactgcctcctgtgctcgtgccaagacacagtgaatataacccccagctcagcctcctggccaagttccgcagcgcctccctgcacagtgagccactcatgccacacaacgccacctat

SEQ ID NO: 238410 - DNA, 120 bp, Artificial Sequence
  ENSG00000120693_7 (sequence is synthesized)
cctgactctttccagcagcctccgtgctctgcactccctccctcacccagccacgcgttctcccagtccccgtgcacggccagctaccctcactccccaggaagtccttctgagccagag

SEQ ID NO: 238411 - DNA, 120 bp, Artificial Sequence
  ENSG00000120693_8 (sequence is synthesized)
agtccctatcaacactcagactttcgaccagtttgttacgaggagccccagcactggtgctcggtcgcctactatgaactgaacaaccgagttggggagacattccaggcttcctcccga

SEQ ID NO: 238412 - DNA, 120 bp, Artificial Sequence
  ENSG00000120693_9 (sequence is synthesized)
agtgtgctcatagatgggttcaccgacccttcaaataacaggaacagattctgtcttggacttctttctaatgtaaacagaaactcaacgatagaaaataccaggagacatataggaaag

SEQ ID NO: 238413 - DNA, 120 bp, Artificial Sequence
  ENSG00000120693_10 (sequence is synthesized)
ggtgtgcacttgtactacgtcgggggagaggtgtatgccgagtgcgtgagtgacagcagcatctttgtgcagagccggaactgcaactatcaacacggcttccacccagctaccgtctgc

SEQ ID NO: 238414 - DNA, 120 bp, Artificial Sequence
  ENSG00000120693_11 (sequence is synthesized)
aagatccccagcggctgcagcctcaaggtcttcaacaaccagctcttcgctcagctcctggcccagtcagttcaccacggctttgaagtcgtgtatgaactgaccaagatgtgtactatc

SEQ ID NO: 238415 - DNA, 120 bp, Artificial Sequence
  ENSG00000120693_12 (sequence is synthesized)
cggatgagttttgttaagggttggggtgctgagtatcatcgccaggatgtcaccagcaccccctgctggattgagattcatcttcatgggccactgcagtggctggacaaagttctgact

SEQ ID NO: 238416 - DNA, 120 bp, Artificial Sequence
  ENSG00000120693_13 (sequence is synthesized)
cagatgggctctccacataaccccatttcttcagtgtcttaacagtcatgtcttaagctgcatttccataggatagaggctattgcagggagtggcttgtatcatttcagatttgcaact

SEQ ID NO: 238417 - DNA, 120 bp, Artificial Sequence
  ENSG00000120693_14 (sequence is synthesized)
gaagtttctaaaaacatgtgtaaatacatagaatgtatactgttcttattttttttaatcaccgtttgttttgtgctttctagttaacctgatgccagtacagtgcaattggaaaagcag

SEQ ID NO: 238418 - DNA, 120 bp, Artificial Sequence
  ENSG00000120693_15 (sequence is synthesized)
gactttggtgcctgtgctataagcagcagattttgtgggaggaaacacttgagaggcgatattgtcaacagtatttgaagggtgttagcagaataaaagacagctttagtcagccgtgtc

SEQ ID NO: 238419 - DNA, 120 bp, Artificial Sequence
  ENSG00000120693_16 (sequence is synthesized)
attataaagcatgttgtgtggcctcacagaaacattgaaactgtttatacagcaaaagtcaggtattagcagcactaaagcaaatatcactcagatgaaacaaagcagtgaaacccctac

SEQ ID NO: 238420 - DNA, 120 bp, Artificial Sequence
  ENSG00000120693_17 (sequence is synthesized)
agtttaaatgatgtcacttttagtgctgttggcaagaaaaaaaaaacaacaaacttgtacaatgaattaatgagataggccatagaaactttatttctaaggttgacatacctatagctg

SEQ ID NO: 238421 - DNA, 120 bp, Artificial Sequence
  ENSG00000120693_18 (sequence is synthesized)
ggctcctgtgctcatattcagtggtacattttaaacaaactgtgatcggaaaagaaaaaaaactgtgaagccaaaagtcatgttccctcagtctaccactgtaaaaacagagtctaatat

SEQ ID NO: 238422 - DNA, 120 bp, Artificial Sequence
  ENSG00000120693_19 (sequence is synthesized)
gggaaaataaatatgaaaatagcatgaaatgctgtttcccagattgcaagataagaccagaacttggtccaagagccagccacccagggagactcctgctttccacagaggagaccaggt

SEQ ID NO: 238423 - DNA, 120 bp, Artificial Sequence
  ENSG00000120693_20 (sequence is synthesized)
tcctgtcgtgctggttgttcgtgtcaggcagtcctgcaaactttgagtctgcgcagcgtgccagaatagcttgtgtttcagtcctgtgtcaagaagcaggtgaaaccaaaggttggagaa

SEQ ID NO: 238424 - DNA, 120 bp, Artificial Sequence
  ENSG00000120693_21 (sequence is synthesized)
aagcatcacacgtcgacttacactttctcatttcccacgttccagtctcctgggaagggcactctttcgccacgttttcctgcctcttggcaaatattaactctttgcagatcactaaag

SEQ ID NO: 238425 - DNA, 120 bp, Artificial Sequence
  ENSG00000120693_22 (sequence is synthesized)
agttatttaacctagtgtctagtgattatctaacctggaaataaattcccaaggaaagtgataataatttcataatcatctgcaatttctggggaacagtggtactgaataataagacat

SEQ ID NO: 238426 - DNA, 120 bp, Artificial Sequence
  ENSG00000120693_23 (sequence is synthesized)
cttttaaaaatatacacaatattaaaaacctgttcttattttactttagatgagggaggaaaatcccccaaatttctaggtactttcatatatatacttgccatgcactaaacactgcat

SEQ ID NO: 238427 - DNA, 120 bp, Artificial Sequence
  ENSG00000120693_24 (sequence is synthesized)
tgcttggaaaaatatttcacaccctctttaaaaatgtacaatttaagatggcagttatgcttgtaacagacagcacttcagtaatccaagaagtttcttcatttatacattttatctcaa

SEQ ID NO: 238428 - DNA, 120 bp, Artificial Sequence
  ENSG00000120693_25 (sequence is synthesized)
ctctttctagcattagtgcacatggtagtttttctaattaaattgtattcaaggtagaaatgatcatgtgagaaagatatatgattgagctactactgtcacctcttacagttactagtg

SEQ ID NO: 238429 - DNA, 120 bp, Artificial Sequence
  ENSG00000120693_26 (sequence is synthesized)
ttagctaatagaaactttcatatatacacatagaaaagaattattacattttacattgaaaaatgtaatatatggcccatgtagtgtatagaaaaatctgtagtttattggttcatcaac

SEQ ID NO: 238430 - DNA, 120 bp, Artificial Sequence
  ENSG00000120693_27 (sequence is synthesized)
tatgtattgtgcacctacctatgggtgtcaggtacaatgttaggtactgtagaatcaaatgtaaataagagacagtcccagccctcagggagccgagaacctaatagtgaatctgtttgt

SEQ ID NO: 238431 - DNA, 120 bp, Artificial Sequence
  ENSG00000120693_28 (sequence is synthesized)
acagacatcttcatgtttcagaacttttaaaacaaaacaaaataatgtaatctatcatcttttgcttgaaagaatgtgattgatttcttatctctgttttgaaattatttccttactctt

SEQ ID NO: 238432 - DNA, 120 bp, Artificial Sequence
  ENSG00000120693_29 (sequence is synthesized)
ctgcaaagtcaggtaatggattccttgtataaatgctacttttcttccatgtctcaaagttgttttttttcctcccctttcttccctgttttccaataattctccatgtccccttttctt

SEQ ID NO: 238433 - DNA, 120 bp, Artificial Sequence
  ENSG00000120693_30 (sequence is synthesized)
agaaaaggcattaatatggtgaatcttgtatgggaaccattccatgggagaacttcaacacagtttttgctccagagatcaaacatagctttcgtgatctctctaccagctatctaactt

SEQ ID NO: 238434 - DNA, 61 bp, Artificial Sequence
  ENSG00000120693_31 (sequence is synthesized)
aaacatagctttcgtgatctctctaccagctatctaacttatcctccagagtgcagtggcg

SEQ ID NO: 238435 - DNA, 66 bp, Artificial Sequence
  ENSG00000120693_32 (sequence is synthesized)
cccaagtagttgggactacaggcagccagaatggtctctatctcttgaccttgtgatccgcccgcc

SEQ ID NO: 238436 - DNA, 88 bp, Artificial Sequence
  ENSG00000120693_33 (sequence is synthesized)
ctctggtaatcttacacctttacagaattaatctaaactggtggctcataaatgacattaaaaacaaaaaaaaaatctggatgcagtg

SEQ ID NO: 238437 - DNA, 89 bp, Artificial Sequence
  ENSG00000120693_34 (sequence is synthesized)
atcttacacctttacagaattaatctaaactggtggctcataaatgacattaaaaacaaaaaaaaaatctggatgcagtggctcattcg

SEQ ID NO: 238438 - DNA, 120 bp, Artificial Sequence
  ENSG00000120693_35 (sequence is synthesized)
ctatgatcatacaacttcattctagcctgggtgacaaagtgacaccctgtctctaaacaaaaatcaagaaacaaaaaacttgtatttccctgcagctttgggaagccagaacacaatatt

SEQ ID NO: 238439 - DNA, 120 bp, Artificial Sequence
  ENSG00000120693_36 (sequence is synthesized)
gcagtgaatctgaattttctgtgacaaataaattattaaattggcacatatgatcatcaccagtcatgtctcatcaaaagcctttattatgatgcttgtacattttgaagaatttagaat

SEQ ID NO: 238440 - DNA, 120 bp, Artificial Sequence
  ENSG00000120693_37 (sequence is synthesized)
taatgagaagttaaccctttagtcattgtaacacaatcatattttaatcagctttttcttttgctaccaagagtttcaaaaaataaatgcagtatttgatttcaggctgctaaatgggct

SEQ ID NO: 238441 - DNA, 120 bp, Artificial Sequence
  ENSG00000120693_38 (sequence is synthesized)
catttagcattcattccttgatgtagacattaaaaaaaaaactgaatagcattctttccaggataactaataaagcagacatgctaagcctataaatacatcagcactgcagcacacgtt

SEQ ID NO: 238442 - DNA, 120 bp, Artificial Sequence
  ENSG00000120693_39 (sequence is synthesized)
taaggttgccacggacaaggatcacacaatagagaacactgtagtaacatttcggtctgctcacaagacccagaacattgatcagtttttgttgttggtttattatttttctgttaaaaa

SEQ ID NO: 238443 - DNA, 120 bp, Artificial Sequence
  ENSG00000120693_40 (sequence is synthesized)
attgtgaaaagtttgttttagctagatgatattttaatagctgcgagtgctttggaactataaagatgtcactacttaacacatataccttatgttttgttttgttttgttttacactca

SEQ ID NO: 238444 - DNA, 120 bp, Artificial Sequence
  ENSG00000120693_41 (sequence is synthesized)
gtataaatcaggagaagttagccaaccatctagcatttagaatcctcttttttattgtcttctaaggatatggatgttcccataacagcaacaaaacagcaacaaaaacatttcataaat

SEQ ID NO: 238445 - DNA, 90 bp, Artificial Sequence
  ENSG00000120693_42 (sequence is synthesized)
cataacagcaacaaaacagcaacaaaaacatttcataaatatcacttgatagactgtaagcacctgcttaactttgtgtcccaaatattt

SEQ ID NO: 238446 - DNA, 120 bp, Artificial Sequence
  ENSG00000120693_43 (sequence is synthesized)
catgcatttcacattttgtctttccctgttacgattttaatagcagaactgtatgacaagtttaggtgatcctagcatatgttaaattcaaattaatgtaaaacagattaacaacaacaa

SEQ ID NO: 238447 - DNA, 120 bp, Artificial Sequence
  ENSG00000120693_44 (sequence is synthesized)
agaaactgtctatttgagtgaagtcatgctttctattataataacttggcttcggttatccatcaaatgcacacttatactgttatctgattgtttataataaagaatactgtacttata

SEQ ID NO: 238448 - DNA, 120 bp, Artificial Sequence
  ENSG00000120693_45 (sequence is synthesized)
agggcccagaaacatgtgaggaacagcagctcagaagggtctccagactgatgggccggtgatcctatattcttgttgggctgacaactcttctggtttcgggctccaggtgctggcaag

SEQ ID NO: 238449 - DNA, 120 bp, Artificial Sequence
  ENSG00000120694_0 (sequence is synthesized)
gggtcggtagttcagcgccggcgccggtgtgcgagccgcggcagagtgaggcaggcaacccgaggtgcggagcgacctgcggaggctgagccccgctttctcccagggtttcttatcagc

SEQ ID NO: 238450 - DNA, 120 bp, Artificial Sequence
  ENSG00000120694_1 (sequence is synthesized)
cagccgccgctgtccccgggggagtaggaggctcctgacaggccgcggctgtctgtgtgtccttctgagtgtcagaggaacggccagaccccgcgggccggagcagaacgcggccagggc

SEQ ID NO: 238451 - DNA, 120 bp, Artificial Sequence
  ENSG00000120694_2 (sequence is synthesized)
agaaagcggcggcaggagaagcaggcagggggccggaggacgcagaccgagacccgaggcggaggcggaccgcgagccggccatgtcggtggtggggttggacgtgggctcgcagagctg

SEQ ID NO: 238452 - DNA, 120 bp, Artificial Sequence
  ENSG00000120694_3 (sequence is synthesized)
ctacatcgcggtagcccgggccgggggcatcgagaccatcgccaatgagttcagcgaccggtgcaccccgtcagtcatatcatttggatcaaaaaatagaacaatcggagttgcagccaa

SEQ ID NO: 238453 - DNA, 120 bp, Artificial Sequence
  ENSG00000120694_4 (sequence is synthesized)
aaatcagcaaatcactcatgcaaacaatacggtgtctaacttcaaaagatttcatggccgagcattcaatgaccccttcattcaaaaggagaaggaaaacttgagttacgatttggttcc

SEQ ID NO: 238454 - DNA, 120 bp, Artificial Sequence
  ENSG00000120694_5 (sequence is synthesized)
attgaaaaatggtggagttggaataaaggtaatgtacatgggtgaagaacatctatttagtgtggagcagataacagccatgttgttgactaagctgaaggaaactgctgaaaacagcct

SEQ ID NO: 238455 - DNA, 120 bp, Artificial Sequence
  ENSG00000120694_6 (sequence is synthesized)
caagaaaccagtaacagattgtgttatttcagtcccctccttctttacagatgctgagaggcgatctgtgttagatgctgcacagattgttggcctaaactgtttaagacttatgaatga

SEQ ID NO: 238456 - DNA, 120 bp, Artificial Sequence
  ENSG00000120694_7 (sequence is synthesized)
catgacagctgttgctttgaattacggaatttataagcaggatctcccaagcctggatgagaaacctcggatagtggtttttgttgatatgggacattcagcttttcaagtgtctgcttg

SEQ ID NO: 238457 - DNA, 120 bp, Artificial Sequence
  ENSG00000120694_8 (sequence is synthesized)
tgcttttaacaagggaaaattgaaggtactgggaacagcttttgatcctttcttaggaggaaaaaacttcgatgaaaagttagtggaacatttttgtgcagaatttaaaactaagtacaa

SEQ ID NO: 238458 - DNA, 120 bp, Artificial Sequence
  ENSG00000120694_9 (sequence is synthesized)
gttggatgcaaaatccaaaatacgagcactcctacgtctgtatcaggaatgtgaaaaactgaaaaagctaatgagctctaacagcacagaccttccactgaatatcgaatgctttatgaa

SEQ ID NO: 238459 - DNA, 120 bp, Artificial Sequence
  ENSG00000120694_10 (sequence is synthesized)
tgataaagatgtttccggaaagatgaacaggtcacaatttgaagaactctgtgctgaacttctgcaaaagatagaagtacccctttattcactgttggaacaaactcatctcaaagtaga

SEQ ID NO: 238460 - DNA, 120 bp, Artificial Sequence
  ENSG00000120694_11 (sequence is synthesized)
agatgtgagtgcagttgagattgttggaggcgctacacgaattccagctgtgaaggaaagaattgccaaattctttggaaaagatattagcacaacactcaatgcagatgaagcagtagc

SEQ ID NO: 238461 - DNA, 120 bp, Artificial Sequence
  ENSG00000120694_12 (sequence is synthesized)
cagaggatgtgcattacagtgtgcaatactttccccggcatttaaagttagagaattttccgtcacagatgcagttccttttccaatatctctgatctggaaccatgattcagaagatac

SEQ ID NO: 238462 - DNA, 120 bp, Artificial Sequence
  ENSG00000120694_13 (sequence is synthesized)
tgaaggtgttcatgaagtctttagtcgaaaccatgctgctcctttctccaaagttctcacctttctgagaagggggccttttgagctagaagctttctattctgatccccaaggagttcc

SEQ ID NO: 238463 - DNA, 120 bp, Artificial Sequence
  ENSG00000120694_14 (sequence is synthesized)
atatccagaagcaaaaataggccgctttgtagttcagaatgtttctgcacagaaagatggagaaaaatctagagtaaaagtcaaagtgcgagtcaacacccatggcattttcaccatctc

SEQ ID NO: 238464 - DNA, 120 bp, Artificial Sequence
  ENSG00000120694_15 (sequence is synthesized)
tacggcatctatggtggagaaagtcccaactgaggagaatgaaatgtcttctgaagctgacatggagtgtctgaatcagagaccaccagaaaacccagacactgataaaaatgtccagca

SEQ ID NO: 238465 - DNA, 120 bp, Artificial Sequence
  ENSG00000120694_16 (sequence is synthesized)
agacaacagtgaagctggaacacagccccaggtacaaactgatgctcaacaaacctcacagtctcccccttcacctgaacttacctcagaagaaaacaaaatcccagatgctgacaaagc

SEQ ID NO: 238466 - DNA, 120 bp, Artificial Sequence
  ENSG00000120694_17 (sequence is synthesized)
aaatgaaaaaaaagttgaccagcctccagaagctaaaaagcccaaaataaaggtggtgaatgttgagctgcctattgaagccaacttggtctggcagttagggaaagaccttcttaacat

SEQ ID NO: 238467 - DNA, 120 bp, Artificial Sequence
  ENSG00000120694_18 (sequence is synthesized)
gtatattgagacagagggtaagatgataatgcaagataaattggaaaaagaaaggaatgatgctaaaaatgcagttgaggaatatgtgtatgagttcagagacaagctgtgtggaccata

SEQ ID NO: 238468 - DNA, 120 bp, Artificial Sequence
  ENSG00000120694_19 (sequence is synthesized)
tgaaaaatttatatgtgagcaggatcatcaaaattttttgagactcctcacagaaactgaagactggctgtatgaagaaggagaggaccaagctaaacaagcatatgttgacaagttgga

SEQ ID NO: 238469 - DNA, 120 bp, Artificial Sequence
  ENSG00000120694_20 (sequence is synthesized)
agaattaatgaaaattggcactccagttaaagttcggtttcaggaagctgaagaacggccaaaaatgtttgaagaactaggacagaggctgcagcattatgccaagatagcagctgactt

SEQ ID NO: 238470 - DNA, 120 bp, Artificial Sequence
  ENSG00000120694_21 (sequence is synthesized)
gatgaataatgtcatgaatgctcaggctaaaaagagtcttgatcaggatccagttgtacgtgctcaggaaattaaaacaaaaatcaaggaattgaacaacacatgtgaacccgttgtaac

SEQ ID NO: 238471 - DNA, 120 bp, Artificial Sequence
  ENSG00000120694_22 (sequence is synthesized)
acaaccgaaaccaaaaattgaatcacccaaactggaaagaactccaaatggcccaaatattgataaaaaggaagaagatttagaagacaaaaacaattttggtgctgaacctccacatca

SEQ ID NO: 238472 - DNA, 120 bp, Artificial Sequence
  ENSG00000120694_23 (sequence is synthesized)
gaatggtgaatgttaccctaatgagaaaaattctgttaatatggacttggactagataaccttaaattggcctattccttcaattaataaaatatttttgccatagtatgtgactctaca

SEQ ID NO: 238473 - DNA, 120 bp, Artificial Sequence
  ENSG00000120694_24 (sequence is synthesized)
taacatactgaaactatttatattttcttttttaaggatatttagaaattttgtgtattatatggaaaaagaaaaaaagcttaagtctgtagtctttatgatcctaaaagggaaaattgc

SEQ ID NO: 238474 - DNA, 120 bp, Artificial Sequence
  ENSG00000120694_25 (sequence is synthesized)
cttggtaactttcagattcctgtggaattgtgaattcatactaagctttctgtgcagtctcaccatttgcatcactgaggatgaaactgacttttgtcttttggagaaaaaaaactgtac

SEQ ID NO: 238475 - DNA, 120 bp, Artificial Sequence
  ENSG00000120694_26 (sequence is synthesized)
tgcttgttcaagagggctgtgattaaaatctttaagcatttgttcctgccaaggtagttttcttgcattttgctctccattcagcatgtgtgtgggtgtggatgtttataaacaagacta

SEQ ID NO: 238476 - DNA, 120 bp, Artificial Sequence
  ENSG00000120694_27 (sequence is synthesized)
agtctgacttcataagggctttctaaaaccatttctgtccaagagaaaatgactttttgctttgatattaaaaattcaatgagtaaaacaaaagctagtcaaatgtgttagcagcatgca

SEQ ID NO: 238477 - DNA, 120 bp, Artificial Sequence
  ENSG00000120694_28 (sequence is synthesized)
gaacaaaaactttaaactttctctctcactatacagtatattgtcatgtgaaagtgtggaatggaagaaatgtcgatcctgttgtaactgattgtgaacacttttatgagctttaaaata

SEQ ID NO: 238478 - DNA, 120 bp, Artificial Sequence
  ENSG00000120694_29 (sequence is synthesized)
aagttcatcttatggtgtcatttctaaactgttgattttgtcactaatttaaaaaatgagatgagggagaatatgaattattctagcagaaatgaagttagtgtccagtttttctttttt

SEQ ID NO: 238479 - DNA, 120 bp, Artificial Sequence
  ENSG00000120694_30 (sequence is synthesized)
actgcttatgttctctcttttctaagtgaaaatgtttttctcctgacagaaaaatagcatatgtttattacattaaagcattttaaaaatactataaagtgaataaaacttaaaatcttg

SEQ ID NO: 238480 - DNA, 120 bp, Artificial Sequence
  ENSG00000120694_31 (sequence is synthesized)
ccacccagaagaaaacattgttaacacttcgttatacatccttggagccttttacccctaatgatgggggtatatttgtgtgagtgtctatgttatagtgctgtaggctgtttttaaaaa

SEQ ID NO: 238481 - DNA, 120 bp, Artificial Sequence
  ENSG00000120694_32 (sequence is synthesized)
ctctgtgccagggaaattagtaaatacagtcaagtgttgtaactgcataaatgtagtgagttcattataaagacgtacttaaaaataccaatcttgctattggtagatttaggtgtttct

SEQ ID NO: 238482 - DNA, 120 bp, Artificial Sequence
  ENSG00000120694_33 (sequence is synthesized)
catttttgctgttctaaataatgctgcaatgaatctatctggttgttttgtaagcacaaaattgaagtagtgttggaggtaggggagaagacacatgcacttaggataggtgacaaccag

SEQ ID NO: 238483 - DNA, 120 bp, Artificial Sequence
  ENSG00000120694_34 (sequence is synthesized)
ctcctcactagggtgcaacagtttattctttttttttttttggtagagctggggtttcgctatgttgcccaagttcgtcttgaactcctgggctcaagcaatctgtctgcctcagcctcc

SEQ ID NO: 238484 - DNA, 120 bp, Artificial Sequence
  ENSG00000120694_35 (sequence is synthesized)
caaagtgctgggattacatggtgtgagccaccatgcccagccatttatgatcttgatgagggccaactttccctcttccacaagggattaatcttagaactatagccaatttattataag

SEQ ID NO: 238485 - DNA, 120 bp, Artificial Sequence
  ENSG00000120694_36 (sequence is synthesized)
tactatttagctactctgtgctccacacatcacggagtaatatcttcaaactatgaggtttagtaacacttgactgctgaggtttatttcctcagctctgatgcttcctgggtgaagatg

SEQ ID NO: 238486 - DNA, 120 bp, Artificial Sequence
  ENSG00000120694_37 (sequence is synthesized)
taagttattaaattaactcaaattttaaagctaacacttcattccatctagaccaggtagctcgtcatttgtacgtctgataggtgcttcaacatctcagaattggcttatttttcatgc

SEQ ID NO: 238487 - DNA, 120 bp, Artificial Sequence
  ENSG00000120694_38 (sequence is synthesized)
attgcatattgtactcatttgtaatattggaatgtaaaatgttcttactaagaatctttatgtcagctattcaacatttccctactttataatttctagctgctttaccatttagcaact

SEQ ID NO: 238488 - DNA, 120 bp, Artificial Sequence
  ENSG00000120694_39 (sequence is synthesized)
ttaaatttttatgcagttaatatgtttctttggtttttatgttttctgaatgtctttaatgcacattaatgtatacttagtagatacacatttacacattgagaagtgaagataggtttg

SEQ ID NO: 238489 - DNA, 120 bp, Artificial Sequence
  ENSG00000120694_40 (sequence is synthesized)
tgttctgtgtacaattaggacatccattaaaaaagatttttaaaaactgtgaatgggaaaacatgtttttcctcctgtcctaaaatagaacctgatgacgggagggagcatcagtcagtc

SEQ ID NO: 238490 - DNA, 120 bp, Artificial Sequence
  ENSG00000120694_41 (sequence is synthesized)
tggcctaaatcagtgtactgcgcttttggatgcgggcaaaagtattgtcatgttgattactttataataacgtattaatatcattggctcaaacagttgtgatatatacctagtaatcat

SEQ ID NO: 238491 - DNA, 120 bp, Artificial Sequence
  ENSG00000120694_42 (sequence is synthesized)
cgaggatctcaaagatatgcaccagtttgaataaatgctgtttaaagattaaattttacaattcattttaaattgtcattttgtgacaatatttctaaacaacgtccatttttaataaca

SEQ ID NO: 238492 - DNA, 120 bp, Artificial Sequence
  ENSG00000120694_43 (sequence is synthesized)
taacagattgtgttatttcagtaagtataattcagcaaggcagtgtgttttatttcatttttgcgttctttgtattacttttaagtatgaaatgtgggaaagctgttctttagttactag

SEQ ID NO: 238493 - DNA, 120 bp, Artificial Sequence
  ENSG00000120694_44 (sequence is synthesized)
cagaagcggcaaaggttcttgactggaaatcaaaatctcttgtgagactttttgaaaatacagattttgactggttccatttgtgagtattctaatacagttagttgctgcactatcagg

SEQ ID NO: 238494 - DNA, 120 bp, Artificial Sequence
  ENSG00000120694_45 (sequence is synthesized)
cttgtacatttaacacaggagcttttcacaggtgaaagaattctaccctccgttgagaaaccagtgtattaggagttttaaaacgtagcttaccagtagtgacaaaacctaaatttttaa

SEQ ID NO: 238495 - DNA, 120 bp, Artificial Sequence
  ENSG00000120694_46 (sequence is synthesized)
cactagcaagcctgttaccttcagtggacaattactagttagactatcaaagggtacttgaaatggacaaaagtcatcttttatttggacaccaaaaaggtaaattctgctcacccaggt

SEQ ID NO: 238496 - DNA, 120 bp, Artificial Sequence
  ENSG00000120694_47 (sequence is synthesized)
gtcttgggtcacttcttgataggttgtggggtatgcttttggacttaaatacagcatggtctttgctctatagtatgagcaacgtggccggctgagatcagtcagcaacaagcctttatg

SEQ ID NO: 238497 - DNA, 120 bp, Artificial Sequence
  ENSG00000120694_48 (sequence is synthesized)
agtttaaaaaatttttttttatctactgaactgtagataggtgatcatttatcaaatattgctttaagcctgtactatttgaatgtgttaggctaggtattgtggatatacagaggtgat

SEQ ID NO: 238498 - DNA, 120 bp, Artificial Sequence
  ENSG00000120694_49 (sequence is synthesized)
tacagcatctctttcttgagcttttggtagtttattatgattacagatgaacaaaaaatcagttaaggaaaaaaatcagtttttatgctgaaaagttttactcatatttctgttaggttt

SEQ ID NO: 238499 - DNA, 120 bp, Artificial Sequence
  ENSG00000120694_50 (sequence is synthesized)
ttggaaaactgttaaatattggtaaaaatatgtttttaggtatacatgtttagaaatacagttgtttaaagttcagaaaaaaactttttaaggttgatcagctatttagctcagatctaa

SEQ ID NO: 238500 - DNA, 120 bp, Artificial Sequence
  ENSG00000120694_51 (sequence is synthesized)
aaattggtaggaactatagttgctgtagttgtatattaaattcttaatttttttggataagcggtgtcctagcaggttgtggttaaaatgtaagtattgcataatgagtctgatactgtc

SEQ ID NO: 238501 - DNA, 120 bp, Artificial Sequence
  ENSG00000120694_52 (sequence is synthesized)
tgtgatacgtggttatgtttcactgtattcacgccatatgttttgtctagcacatctccatatattgaaaagtgatagagcattgttctgaaatcagaaagagagtaataattaattcca

SEQ ID NO: 238502 - DNA, 120 bp, Artificial Sequence
  ENSG00000120694_53 (sequence is synthesized)
agaaaatcagtgtgaagtcaggtataaaaggaatgtaatgtgttcacctttaattgtttcaagttaatagtcaagcttcctgcatgtgtaattttatgtaacagtgagattcctaagaaa

SEQ ID NO: 238503 - DNA, 120 bp, Artificial Sequence
  ENSG00000120694_54 (sequence is synthesized)
tctttactaggctttttcttcttggtaatgaagagttttattttaggtaaagatgttaacaggaaacggttgctaaggttgagctccataaagatgatgtaattgtcttagcatactctt

SEQ ID NO: 238504 - DNA, 120 bp, Artificial Sequence
  ENSG00000120694_55 (sequence is synthesized)
aagtgttcttgtttaggaaagaaaaggctttttacagttattttctatgtagtcatttaaaagtcaaaaatatcttagagatttattcctgactgatttggatttcatgttataatttaa

SEQ ID NO: 238505 - DNA, 120 bp, Artificial Sequence
  ENSG00000120694_56 (sequence is synthesized)
atatagtcttgagtctcttagtctttcattgtttgagtagtaatatttaagattctagttacaaatgtgattgaaaataaccagactatttgttgtttcaaccaaattaggtactgggaa

SEQ ID NO: 238506 - DNA, 120 bp, Artificial Sequence
  ENSG00000120694_57 (sequence is synthesized)
tggccataattctttctcatcccaagttttatatagttttagggataggatgaagacaaaactaacgaattttgcagtttaattttttttaacaaaaaaatctttctgcttgatataaca

SEQ ID NO: 238507 - DNA, 120 bp, Artificial Sequence
  ENSG00000120694_58 (sequence is synthesized)
tgattggctgagttcttgtgaaaaaattggatggcaataaatcataacagagcacagtacagttggaatttcacggcacactaaatatttctattagaatacattgtatttttttagtag

SEQ ID NO: 238508 - DNA, 120 bp, Artificial Sequence
  ENSG00000120694_59 (sequence is synthesized)
tctgaaattctagaataatatgtgaaataattgagatttggtttttccatactgaggtgggaacatcgtatttaggagtttatttaacaataaactgtagtccatttatttatctttgat

SEQ ID NO: 238509 - DNA, 120 bp, Artificial Sequence
  ENSG00000120694_60 (sequence is synthesized)
ttaaaaatgtggcagagtggtgtgactgttatacattggccagtattaatctgaatatggataaccatttgtatacaagaaaacaaaattacatttaagcagtagcttgatttttttttt

SEQ ID NO: 238510 - DNA, 120 bp, Artificial Sequence
  ENSG00000120694_61 (sequence is synthesized)
ttttttttagcattaaatatgaagtctgtgtaatcggttacaatgttaaaaaaatcaaacttcagcctgagtatttagaaaatggaaatgtctgtttggtttgtaggaagagtttgacaa

SEQ ID NO: 238511 - DNA, 120 bp, Artificial Sequence
  ENSG00000120694_62 (sequence is synthesized)
ggtataagttggaactgtgttaacactaaaatttgttttgtatcattttttttaaaccccagagtctacatatttagaatttagcttgagttaactagaagactggaattaacctttcct

SEQ ID NO: 238512 - DNA, 120 bp, Artificial Sequence
  ENSG00000120694_63 (sequence is synthesized)
acacttctcccagcgggactacgattcccaacatgctctccggacagctggccggcctccccaccatcccggtgtctggggtctctgcaaaaatggggtctgtctccgcccgcccagcct

SEQ ID NO: 238513 - DNA, 120 bp, Artificial Sequence
  ENSG00000120694_64 (sequence is synthesized)
ccctttagcgttaaggatcggacaccacctcccggtagtaaattgtgactattccgagttttggagtcattcttcgttgcctgttttattagggcagcaaaacgcctgtggctagggcgg

SEQ ID NO: 238514 - DNA, 120 bp, Artificial Sequence
  ENSG00000120694_65 (sequence is synthesized)
gagtgggcggaggcaggtttgagccaatggcacgggagcggccctgtcgctgccatggcaacggcggccgttctccggggaccggctgcccattgggtagaatctttccagaaggctcga

SEQ ID NO: 238515 - DNA, 120 bp, Artificial Sequence
  ENSG00000120696_0 (sequence is synthesized)
agtagttctcccgggcgcctagcgggatcgccagcgcggcagtgggggcttccgcggctgcaagccagcgggtcctgtgagggcgagcggaggcggagaaagggcgcgggagtgagagag

SEQ ID NO: 238516 - DNA, 120 bp, Artificial Sequence
  ENSG00000120696_1 (sequence is synthesized)
ggtgagtcagccactgtctatgcaataaagggaggcctcaccgcgggatagggctgaattcagaagtgcggcccgtgccgcagtctgttccaggacgcggcttgtcttagcgtcagcgag

SEQ ID NO: 238517 - DNA, 120 bp, Artificial Sequence
  ENSG00000120696_2 (sequence is synthesized)
ggaaggttgaggaggagccagagcctggtcctgcagcctttctcgccgtcagcgcccgtcgccatctccaccatgcagtcccgggaagacgtcccgcgctctcgccgcctcgccagtccc

SEQ ID NO: 238518 - DNA, 120 bp, Artificial Sequence
  ENSG00000120696_3 (sequence is synthesized)
cgtggtgggaggcggcccaagaggatttccaagccctcggtttcggcctttttcacgggtccagaggagttaaaggacacggcccattctgcagccctgctggcacagctcaagtccttc

SEQ ID NO: 238519 - DNA, 120 bp, Artificial Sequence
  ENSG00000120696_4 (sequence is synthesized)
tacgacgcgcggctgctgtgtgatgtgaccatcgaggtggtgacgcctggcagcgggcctggcacgggtcgcctcttttcctgcaatcgcaacgtgctagcagctgcgtgtccctacttc

SEQ ID NO: 238520 - DNA, 120 bp, Artificial Sequence
  ENSG00000120696_5 (sequence is synthesized)
aagagcatgttcacaggtggcatgtacgagagccagcaggccagcgtgaccatgcacgatgtggacgccgagtccttcgaggtgttggtcgactactgctacacgggtcgtgtgtctctc

SEQ ID NO: 238521 - DNA, 120 bp, Artificial Sequence
  ENSG00000120696_6 (sequence is synthesized)
agtgaggccaatgtgcagcgcctgtacgcggcctccgacatgctacagctggaatatgtgcgggaagcctgtgcctccttcttagcccgacgtcttgacctgaccaactgcaccgccatc

SEQ ID NO: 238522 - DNA, 120 bp, Artificial Sequence
  ENSG00000120696_7 (sequence is synthesized)
ctcaagtttgcagacgccttcgaccatcacaagcttcgatctcaggcccagtcctacatagctcacaacttcaagcagctcagccgaatgggttcaattcgggaggagactctagcagat

SEQ ID NO: 238523 - DNA, 120 bp, Artificial Sequence
  ENSG00000120696_8 (sequence is synthesized)
ctaaccctggcccagctgctggctgtcctacgcctggatagtctggacatagagagtgagcggactgtatgccatgtagctgtgcagtggctggaggctgctgccaaagagcggggtccc

SEQ ID NO: 238524 - DNA, 120 bp, Artificial Sequence
  ENSG00000120696_9 (sequence is synthesized)
agtgctgcagaagtcttcaagtgcgtgcgctggatgcacttcactgaagaagatcaggactacttagaagggctgctgaccaagcccatcgtgaagaagtactgcctggacgttattgaa

SEQ ID NO: 238525 - DNA, 120 bp, Artificial Sequence
  ENSG00000120696_10 (sequence is synthesized)
ggggccctgcagatgcgctatggtgacctgttgtacaagtctctggtgccagtgccaaacagcagcagcagcagtagcagcagcaactctcttgtatctgcagcagaaaatccaccccag

SEQ ID NO: 238526 - DNA, 120 bp, Artificial Sequence
  ENSG00000120696_11 (sequence is synthesized)
agactgggtatgtgtgccaaggagatggtgatcttctttggacatcctagagatccctttctctgctatgacccttactcgggggacatttacacaatgccatcccctttgaccagcttt

SEQ ID NO: 238527 - DNA, 120 bp, Artificial Sequence
  ENSG00000120696_12 (sequence is synthesized)
gctcacactaagactgtcacctcctcagctgtctgtgtgtccccagaccatgacatctatctagctgctcagcccaggaaagacctctgggtgtataaaccagctcagaatagttggcag

SEQ ID NO: 238528 - DNA, 120 bp, Artificial Sequence
  ENSG00000120696_13 (sequence is synthesized)
caacttgcagatcgcttgctgtgtcgtgagggcatggatgtggcatatctcaatggctacatctacattttggggggacgagaccctattactggagttaagttgaaggaagtggaatgc

SEQ ID NO: 238529 - DNA, 120 bp, Artificial Sequence
  ENSG00000120696_14 (sequence is synthesized)
tacagtgttcagagaaaccagtgggcattggtggctcctgtccctcattccttctattcctttgaactcatagtggttcagaactatctttatgctgtcaacagtaagcgcatgctttgc

SEQ ID NO: 238530 - DNA, 120 bp, Artificial Sequence
  ENSG00000120696_15 (sequence is synthesized)
tatgatcctagccacaatatgtggctgaactgtgcttctcttaaacgtagtgactttcaggaagcatgtgtcttcaatgatgaaatctattgtatctgtgacatcccagtcatgaaggtc

SEQ ID NO: 238531 - DNA, 120 bp, Artificial Sequence
  ENSG00000120696_16 (sequence is synthesized)
tacaacccagctaggggagaatggaggcggattagtaatattcctttggattcagagacccacaactaccagattgtcaatcatgaccaaaagttgcttctcatcacttctacaacccca

SEQ ID NO: 238532 - DNA, 120 bp, Artificial Sequence
  ENSG00000120696_17 (sequence is synthesized)
caatggaaaaagaaccgagtgacagtgtatgagtatgatactagggaagatcagtggattaatataggtaccatgttaggccttttgcagtttgactctggctttatttgcctttgtgct

SEQ ID NO: 238533 - DNA, 120 bp, Artificial Sequence
  ENSG00000120696_18 (sequence is synthesized)
cgtgtttatccttcctgccttgaacctggtcagagttttattactgaggaagatgatgcacggagtgagtctagtactgaatgggacttagatggattcagtgagctggactctgagtca

SEQ ID NO: 238534 - DNA, 120 bp, Artificial Sequence
  ENSG00000120696_19 (sequence is synthesized)
aaatgcacaggatcagcagggttctttgtaaatagtattttgagacactaagatgtttctactgctacggaatgtattttaaacacatatcgtttctttttcttggaaaaaaagttgatt

SEQ ID NO: 238535 - DNA, 120 bp, Artificial Sequence
  ENSG00000120696_20 (sequence is synthesized)
aggaccacagatttggtttagaaagggtaatattttgaaatactacaaggtttagacagtccatgaaatcgacctgtttaataatttaccatcctgaaagtccagaattaaaatatggaa

SEQ ID NO: 238536 - DNA, 120 bp, Artificial Sequence
  ENSG00000120696_21 (sequence is synthesized)
gcaagaactatataattgattaggatgcttggtaggtttttttcattgttcaaatattcattgcacagtggattgttttgattagttagtatgctttttttttaattaattcagtcttct

SEQ ID NO: 238537 - DNA, 120 bp, Artificial Sequence
  ENSG00000120696_22 (sequence is synthesized)
gttaatttttaagttttggttagtgccacaaggaatttaactttttgatttgtataatagaaaactgaactaggaattgttagcggggttttgaaggatgtgtactttccttcaaaataa

SEQ ID NO: 238538 - DNA, 120 bp, Artificial Sequence
  ENSG00000120696_23 (sequence is synthesized)
agtggtagattttcaaaattttacactagtcagttctttatattctaagttaaatgtagtttgtaaaattattttggttttcttctacaaaggaaaaaattggatttatatatataaggt

SEQ ID NO: 238539 - DNA, 90 bp, Artificial Sequence
  ENSG00000120696_24 (sequence is synthesized)
tcttctacaaaggaaaaaattggatttatatatataaggttactgcataatgatttcattttgataatgtgcagaatggcctcataagct

SEQ ID NO: 238540 - DNA, 120 bp, Artificial Sequence
  ENSG00000120696_25 (sequence is synthesized)
tttttattttggaatataaaatgtgtatttggtatatgtgaccaattttctatcccaaaaaacacccattcttagtaatgtcatgaattaaacacccttctaaaccaaaaaaaaaaaaaa

SEQ ID NO: 238541 - DNA, 120 bp, Artificial Sequence
  ENSG00000120696_26 (sequence is synthesized)
aaacggtaacttgctttttatgtttgtgtttttaatttatgcccaatacatgctttactgactcagaggaacaattcctggacatataattgggtaatgcaaatttttatccactggtca

SEQ ID NO: 238542 - DNA, 120 bp, Artificial Sequence
  ENSG00000120696_27 (sequence is synthesized)
tgatttgtcttaaaatgtttacttgcctccctaaaatattttggctgtgtaggtttggtgtttgtcctagaggattcttcaacagaaagtgatttattctttactgttttgtgaggtaat

SEQ ID NO: 238543 - DNA, 120 bp, Artificial Sequence
  ENSG00000120696_28 (sequence is synthesized)
atggtttagaacatatgtataagctaaaaacagtattttactcagatcagtagttatcgtgtctatcagctataaaaaaaatcaactgccagccaagaactttaaaactttaagctgtgt

SEQ ID NO: 238544 - DNA, 120 bp, Artificial Sequence
  ENSG00000120696_29 (sequence is synthesized)
attatagaaccgttttgtgtagcattggaatattgtccattttgtaagtcattgtgaatgttcttaattatcagcttgaaggtatttttgtattaaaagttgacattgaagaacctaagt

SEQ ID NO: 238545 - DNA, 120 bp, Artificial Sequence
  ENSG00000120696_30 (sequence is synthesized)
ggatgatgggatttggggccagtagtgaaagtatgtttcctctaaaatatttccctaaacagtggtatacatggttattttattatgagatttgtatatgttctgtgtttctctgtgaac

SEQ ID NO: 238546 - DNA, 120 bp, Artificial Sequence
  ENSG00000120696_31 (sequence is synthesized)
aatgtttcagtctctctgtcaccatatgtaaggggaagtccacaaatatagactacattgcacaaaactaaaattgttaattacaagaaaatataggtgcttaccttttgaaggtttatt

SEQ ID NO: 238547 - DNA, 120 bp, Artificial Sequence
  ENSG00000120696_32 (sequence is synthesized)
aatacatatggttgtcacaatacgtatatatgataaatggtgtacatatacagatgtttatggtgtataaatttttctatacccaattagaattatcttcctgattctttattcaataac

SEQ ID NO: 238548 - DNA, 120 bp, Artificial Sequence
  ENSG00000120696_33 (sequence is synthesized)
atgctaattcctcttctatgttctatagtgacagaatgctaacttttcttataccctggcagaggacagaggagtctggtctaggatggggaactgaatttttgaacgaaaaggaaagag

SEQ ID NO: 238549 - DNA, 120 bp, Artificial Sequence
  ENSG00000120696_34 (sequence is synthesized)
aaaggatgaaaaaacaaacaaacaaaaaaacacacgataatgtttcttagtcattttgattggccatttgaacagtctacaagtttaacgttatttccagtgaagtaggatggctgacct

SEQ ID NO: 238550 - DNA, 120 bp, Artificial Sequence
  ENSG00000120696_35 (sequence is synthesized)
agcaatacatgtttcttcaaaagggtaaacatgctttagtgacctaaagctaaattttgtacatttgacatcagggatgttataagtactgcacttaatacaaagctatttctcaattgt

SEQ ID NO: 238551 - DNA, 120 bp, Artificial Sequence
  ENSG00000120696_36 (sequence is synthesized)
gttatttttgagacaaatttttcttcaccattaacttcttgttggtagctttttgttttgtaaaaattgagagatggcaatgcttatctcaaccagattatccatctgcagaattaaggt

SEQ ID NO: 238552 - DNA, 120 bp, Artificial Sequence
  ENSG00000120696_37 (sequence is synthesized)
atgcaactggtaaataaaagacaaatgctccagtttgtctttctcaacctttgagttcttaacctttgagttaaaacctagtctaaatagtgggaatgtcttggtttacagtaaggtttt

SEQ ID NO: 238553 - DNA, 120 bp, Artificial Sequence
  ENSG00000120696_38 (sequence is synthesized)
cttgggaaggatcttggttttgtgatctatttgtgaattaaggagtagatgttaaccattattttatagataagtgatttgtacatggttagttataaataaaactggtactagaaccca

SEQ ID NO: 238554 - DNA, 120 bp, Artificial Sequence
  ENSG00000120697_0 (sequence is synthesized)
gtggaggtgcgggattgggcgggctgccacggcatggagaatggctccgcttctgttgcagctggcggtgctcggcgcggcgctggcggccgcagccctcgtactgatttccatcgttgc

SEQ ID NO: 238555 - DNA, 120 bp, Artificial Sequence
  ENSG00000120697_1 (sequence is synthesized)
atttacaactgctacaaaaatgccagcactccatcgacatgaagaagagaaattcttcttaaatgccaaaggccagaaagaaactttacccagcatatgggactcacctaccaaacaact

SEQ ID NO: 238556 - DNA, 120 bp, Artificial Sequence
  ENSG00000120697_2 (sequence is synthesized)
ttctgtcgttgtgccttcatacaatgaagaaaaacggttgcctgtgatgatggatgaagctctgagctatctagagaagagacagaaacgagatcctgcgttcacttatgaagtgatagt

SEQ ID NO: 238557 - DNA, 120 bp, Artificial Sequence
  ENSG00000120697_3 (sequence is synthesized)
agttgatgatggcagtaaagatcagacctcaaaggtagcttttaaatattgccagaaatatggaagtgacaaagtacgtgtgataaccctggtgaagaatcgtggaaaaggtggagcgat

SEQ ID NO: 238558 - DNA, 120 bp, Artificial Sequence
  ENSG00000120697_4 (sequence is synthesized)
tagaatgggtatattcagttctcgaggagaaaagatccttatggcagatgctgatggagccacaaagtttccagatgttgagaaattagaaaaggggctaaatgatctacagccttggcc

SEQ ID NO: 238559 - DNA, 120 bp, Artificial Sequence
  ENSG00000120697_5 (sequence is synthesized)
tgtggatctcgagctcatttagaaaaagaatcaattgctcagcgttcttacttccgtactcttctcatgtatgggttccactttctggtgtggttcctttgtgtcaaaggaatcagggac

SEQ ID NO: 238560 - DNA, 120 bp, Artificial Sequence
  ENSG00000120697_6 (sequence is synthesized)
acacagtgtgggttcaaattatttactcgagaagcagcttcacggacgttttcatctctacacgttgaacgatgggcatttgatgtagaactactgtacatagcacagttctttaaaatt

SEQ ID NO: 238561 - DNA, 120 bp, Artificial Sequence
  ENSG00000120697_7 (sequence is synthesized)
ccaatagcagaaattgctgtcaactggacagaaattgaaggttctaaattagttccattctggagctggctacaaatgggtaaagacctactttttatacgacttcgatatttgactggt

SEQ ID NO: 238562 - DNA, 120 bp, Artificial Sequence
  ENSG00000120697_8 (sequence is synthesized)
gcctggaggcttgagcaaactcggaaaatgaattaggttgtttgcagtcttcagttgtgttcttatgcttcagtgtcacatttcatttcatttgaaactaaaattttaagtaaagctgaa

SEQ ID NO: 238563 - DNA, 120 bp, Artificial Sequence
  ENSG00000120697_9 (sequence is synthesized)
aagctgaaataaacttcttgtcattgtctgccttttgataattttaaagaaataactttccataagtaaaaaattatatatctctttggatataaatgatttttaaaagatgtttattta

SEQ ID NO: 238564 - DNA, 120 bp, Artificial Sequence
  ENSG00000120697_10 (sequence is synthesized)
ataacttaaggtcttcatgtgaactctacatttttctgctttttaaaaaatagccattatcctaaagcaaacaaaaatcctgttattaacatccaagccagagcagtcatgaatagtttt

SEQ ID NO: 238565 - DNA, 120 bp, Artificial Sequence
  ENSG00000120697_11 (sequence is synthesized)
atttgcgaacaaataagctcactcaaatcacattaaaaatcactcaaggagaataatttataggtattgtttttctacctttaatttttatttttctatctttcaatttctatttgttcc

SEQ ID NO: 238566 - DNA, 120 bp, Artificial Sequence
  ENSG00000120697_12 (sequence is synthesized)
cttggaacccatgaggctagttttacctctgtgagtttctgagttgtaatagagatacaatattatgcaatgatattctaaattattatttgacttgaaacttctgaactactcagcttt

SEQ ID NO: 238567 - DNA, 120 bp, Artificial Sequence
  ENSG00000120697_13 (sequence is synthesized)
gaattatttgatttctgtgaatctgatcttcagatttatggtataagctttatatctgccatgtaagcttctttaaaacatgccaaggtagagatgtagttgtgttctatttgtctttaa

SEQ ID NO: 238568 - DNA, 87 bp, Artificial Sequence
  ENSG00000120697_14 (sequence is synthesized)
cggccgagaaacctgaactttctgtgcgctcattgtccgcaccacgttctgctctgcaggtcccggagctgagggctcctaagcatc

SEQ ID NO: 238569 - DNA, 120 bp, Artificial Sequence
  ENSG00000120699_0 (sequence is synthesized)
gcagacgcgcgggcgggaagatggcggctgggttcaaaaccgtggaacctctggagtattacaggagatttctgaaagagaactgccgtcctgatggaagagaacttggtgaattcagaa

SEQ ID NO: 238570 - DNA, 120 bp, Artificial Sequence
  ENSG00000120699_1 (sequence is synthesized)
ccacaactgtcaacatcggttcaattagtaccgcagatggttctgctttagtgaagttgggaaatactacagtaatctgtggagttaaagcagaatttgcagcaccatcaacagatgccc

SEQ ID NO: 238571 - DNA, 120 bp, Artificial Sequence
  ENSG00000120699_2 (sequence is synthesized)
ctgataaaggatacgttgttcctaatgtggatctaccacccctgtgttcatcgagattccggtctggacctcctggagaagaggcccaagtggctagccagttcattgcagatgtcattg

SEQ ID NO: 238572 - DNA, 120 bp, Artificial Sequence
  ENSG00000120699_3 (sequence is synthesized)
aaaattcacagataattcagaaagaggacttatgcatttctccaggaaagcttgtctgggttctatactgtgatctcatttgcctcgactacgatggaaacattttggatgcctgcacat

SEQ ID NO: 238573 - DNA, 120 bp, Artificial Sequence
  ENSG00000120699_4 (sequence is synthesized)
aagaaaagttatttgaatattagaactcatccagttgcaacttcctttgctgtgtttgatgacactttgcttatagttgaccctactggagaggaggaacatctggcaacaggaacctta

SEQ ID NO: 238574 - DNA, 120 bp, Artificial Sequence
  ENSG00000120699_5 (sequence is synthesized)
acaatagtaatggatgaggaaggcaaactctgttgtcttcacaaaccaggtggaagtgggctaactggagctaaacttcaggactgtatgagccgagcagttacaagacacaaagaagtt

SEQ ID NO: 238575 - DNA, 120 bp, Artificial Sequence
  ENSG00000120699_6 (sequence is synthesized)
aaaaaactgatggatgaagtaattaagagtatgaaacccaaataaacagccaccacattttcaaaacagatttgtaaaaattgtatttgttaacactgtgcacaaacgttttatactaaa

SEQ ID NO: 238576 - DNA, 120 bp, Artificial Sequence
  ENSG00000120699_7 (sequence is synthesized)
taaatatcaaactacattcttctgaaagatgtttctattatttcttaggtcacttccatatatattatgtatagtgaaaccatttttaaaaagcaatgacttaggcaaaccaaccctagt

SEQ ID NO: 238577 - DNA, 120 bp, Artificial Sequence
  ENSG00000120699_8 (sequence is synthesized)
ttgttaaaccatttccctgtttttatttaaaaatgataaggttgtgcttctgtataaagtttgtacatctagcaatgtaaaatactgacacattaaaaaaaacaaaaagtagaaactcaa

SEQ ID NO: 238578 - DNA, 120 bp, Artificial Sequence
  ENSG00000120699_9 (sequence is synthesized)
gctagggagcacaccccttctgggggctcgagacctccctgggtggagcagaactgcagcggctgcaggtcccggagagtctgggagaggtcgaggttgacagaggaggtgggtaggggg

SEQ ID NO: 238579 - DNA, 120 bp, Artificial Sequence
  ENSG00000120699_10 (sequence is synthesized)
cgcgggcgccaggggcgatggaagcggcgatgatgccaggccgggtgggtgcgctccagtgtgaaaaaacttacaagtctctgagcacacaaagagataagattccaagggaaaattaaa

SEQ ID NO: 238580 - DNA, 120 bp, Artificial Sequence
  ENSG00000120699_11 (sequence is synthesized)
gaaccgaagaaaaggagagtgaaactccaggaaactccgaggtcaggaatttgggggaatctaggggaaaagggacttctccgagaactggtagcgcggaggaggggacgcctgaggagc

SEQ ID NO: 238581 - DNA, 120 bp, Artificial Sequence
  ENSG00000120699_12 (sequence is synthesized)
gagttacaaagttagctttatttattagattgtaatatacacctgtaattctactcttgatttggtagttgggtgtcaatttttaatgtttaatttcccaagagctttcactatgagtgt

SEQ ID NO: 238582 - DNA, 120 bp, Artificial Sequence
  ENSG00000120699_13 (sequence is synthesized)
tagataatatgacccaagtttaatgactaagtgaacaattgtcaaatgtagcaaaatgaaacaacttttaaaatctgagtcaccattttaaaaaaattgttatatcatttgagacattaa

SEQ ID NO: 238583 - DNA, 120 bp, Artificial Sequence
  ENSG00000120699_14 (sequence is synthesized)
cagatttttggtgacatccttttagccagtgatgacatgtaatctgtgtaaatgtgtagaaaattgaaattgttgaaaagaaaaatttgagggaatactggctaccatttactgagtact

SEQ ID NO: 238584 - DNA, 120 bp, Artificial Sequence
  ENSG00000120699_15 (sequence is synthesized)
tgctatgttccagacacctttttaggtgctttacagaattatccactttaatgcctataacaatcatttgttacttgtcttcacctcctgttttacagatgactttcagtaacctgtcca

SEQ ID NO: 238585 - DNA, 120 bp, Artificial Sequence
  ENSG00000120699_16 (sequence is synthesized)
ggtacataagactcataagtaaaacttagacataaatctgactccaaagcctgtgcttctttgactacagtataccctgtgttatttaacctcagttgagattcttctttcgtaaacctg

SEQ ID NO: 238586 - DNA, 120 bp, Artificial Sequence
  ENSG00000120699_17 (sequence is synthesized)
gagtgatgtataacagtaagatttgagaacttgctccttgtcaggttttatgcctgggatttaacaggtctatctcatttggcccttattaacagtccctaggagtagacactattttct

SEQ ID NO: 238587 - DNA, 120 bp, Artificial Sequence
  ENSG00000120699_18 (sequence is synthesized)
tcccatttgacaagatgaggagtttaaggtaagaggttaaataacttgcctgaagtctctcagccagtaagtatggctctgacatttgaactggcttagtaattgcagagcatttgcttt

SEQ ID NO: 238588 - DNA, 120 bp, Artificial Sequence
  ENSG00000120699_19 (sequence is synthesized)
gggattaccggtgtgagccaccgcgcccagctgagcttttgctctttaccactaaagcagcagttcctaaatcttgctctatcatctggagaacaaattaagattcttggctagtagttg

SEQ ID NO: 238589 - DNA, 120 bp, Artificial Sequence
  ENSG00000120699_20 (sequence is synthesized)
ggggcacaaacccagttactattttttaaaagatctccaggtaatcttgccgagcagcactgtagtgtagtccactgtactgtagtgccttcttatcttgtagagctattgtgaggatca

SEQ ID NO: 238590 - DNA, 120 bp, Artificial Sequence
  ENSG00000120699_21 (sequence is synthesized)
gcaccaatgtccgtagaggccctgacacaattccctaagctgatatttgatagagccttccataactgattgctaaattgtcttcataatttttcagtagcttctttcaataggaaacat

SEQ ID NO: 238591 - DNA, 120 bp, Artificial Sequence
  ENSG00000120699_22 (sequence is synthesized)
atttctaaaaggatcatgcctcgtttggaaggtttttgtgtgtgtgaagccagtggactttcttaaagtttttaaaaaatggataaaataaataggattccaaaggaaatccattatgtt

SEQ ID NO: 238592 - DNA, 120 bp, Artificial Sequence
  ENSG00000120699_23 (sequence is synthesized)
gaaatagttatctatgagtataaactccgaagacacgatatagtagtatatatacttggtttaaaattaaccttcgtaaacaagatctagtggcgagactagtagtaactcctgggattt

SEQ ID NO: 238593 - DNA, 120 bp, Artificial Sequence
  ENSG00000120699_24 (sequence is synthesized)
gcagacgcgcgggcgggaagatggcggctgggttcaactaaagggtgcaaacgaaaacatctgtggtctccgtggttgttaaagttgcagaaccgtggaacctctggagtattacaggag

SEQ ID NO: 238594 - DNA, 120 bp, Artificial Sequence
  ENSG00000120699_25 (sequence is synthesized)
gtctgggttctatactgtgatctcatttgcctcgactacgatggaaacattttggatgcctgcacatttgctttgctagcggctttaaaaaatggtggaagtgggctaactggagctaaa

SEQ ID NO: 238595 - DNA, 120 bp, Artificial Sequence
  ENSG00000120705_0 (sequence is synthesized)
gtcacaggccccatgtgagcggattgcaacacatgcagctgcctggagagagggagccggtgtcctacgtcagagccgccgccgccgcggagccgccgccggggaggagcagccgctgcc

SEQ ID NO: 238596 - DNA, 120 bp, Artificial Sequence
  ENSG00000120705_1 (sequence is synthesized)
gcccaggactgggcccttagggaggaggaggcgagaagatggcggacgaccccagtgctgccgacaggaacgtggagatctggaagatcaagaagctcattaagagcttggaggcggccc

SEQ ID NO: 238597 - DNA, 120 bp, Artificial Sequence
  ENSG00000120705_2 (sequence is synthesized)
gcggcaatggcaccagcatgatatcattgatcattcctcccaaagaccagatttcacgagtggcaaaaatgttagcggatgagtttggaactgcatctaacattaagtcacgagtaaacc

SEQ ID NO: 238598 - DNA, 120 bp, Artificial Sequence
  ENSG00000120705_3 (sequence is synthesized)
gcctttcagtcctgggagccattacatctgtacaacaaagactcaaactttataacaaagtacctccaaatggtctggttgtatactgtggaacaattgtaacagaagaaggaaaggaaa

SEQ ID NO: 238599 - DNA, 120 bp, Artificial Sequence
  ENSG00000120705_4 (sequence is synthesized)
agaaagtcaacattgactttgaacctttcaaaccaattaatacgtcattgtatttgtgtgacaacaaattccatacagaggctcttacagcactactttcagatgatagcaagtttggat

SEQ ID NO: 238600 - DNA, 120 bp, Artificial Sequence
  ENSG00000120705_5 (sequence is synthesized)
tcattgtaatagatggtagtggtgcactttttggcacactccaaggaaacacaagagaagtcctgcacaaattcactgtggatctcccaaagaaacacggtagaggaggtcagtcagcct

SEQ ID NO: 238601 - DNA, 120 bp, Artificial Sequence
  ENSG00000120705_6 (sequence is synthesized)
tgcgttttgcccgtttaagaatggaaaagcgacataactatgttcggaaagtagcagagactgctgtgcagctgtttatttctggggacaaagtgaatgtggctggtctagttttagctg

SEQ ID NO: 238602 - DNA, 120 bp, Artificial Sequence
  ENSG00000120705_7 (sequence is synthesized)
gatccgctgactttaaaactgaactaagtcaatctgatatgtttgatcagaggttacaatcaaaagttttaaaattagttgatatatcctatggtggtgaaaatggattcaaccaagcta

SEQ ID NO: 238603 - DNA, 120 bp, Artificial Sequence
  ENSG00000120705_8 (sequence is synthesized)
ttgagttatctactgaagtcctctccaacgtgaaattcattcaagagaagaaattaataggacgatactttgatgaaatcagccaggacacgggcaagtactgttttggcgttgaagata

SEQ ID NO: 238604 - DNA, 120 bp, Artificial Sequence
  ENSG00000120705_9 (sequence is synthesized)
cactaaaggctttggaaatgggagctgtagaaattctaatagtctatgaaaatctggatataatgagatatgttcttcattgccaaggcacagaagaggagaaaattctctatctaactc

SEQ ID NO: 238605 - DNA, 120 bp, Artificial Sequence
  ENSG00000120705_10 (sequence is synthesized)
cagagcaagaaaaggataaatctcatttcacagacaaagagaccggacaggaacatgagcttatcgagagcatgcccctgttggaatggtttgctaacaactataaaaaatttggagcta

SEQ ID NO: 238606 - DNA, 120 bp, Artificial Sequence
  ENSG00000120705_11 (sequence is synthesized)
cgttggaaattgtcacagataaatcacaagaagggtctcagtttgtgaaaggatttggtggaattggaggtatcttgcggtaccgagtagatttccagggaatggaataccaaggaggag

SEQ ID NO: 238607 - DNA, 120 bp, Artificial Sequence
  ENSG00000120705_12 (sequence is synthesized)
acgatgaattttttgaccttgatgactactaggtagtcgacatgggtccggcaaaacgtgcctcaccctccagcatccaacccaaggagcatacccatggtggaatccaaacagatccct

SEQ ID NO: 238608 - DNA, 120 bp, Artificial Sequence
  ENSG00000120705_13 (sequence is synthesized)
gccttacaattggaacatttccagaacttaatccatgagcattggatattgaaaagaaaaccgaaacaaaaccagacccagccctacactttggtttgtcatggtgtcagcgcagcagcc

SEQ ID NO: 238609 - DNA, 120 bp, Artificial Sequence
  ENSG00000120705_14 (sequence is synthesized)
tacaactaagttcctaaacgccactttggactaatttaaaaaagaatcccagtttttacttttactggatggtgaaattggttgctcttgtattttatgaaaaaaaatgatttttttaac

SEQ ID NO: 238610 - DNA, 120 bp, Artificial Sequence
  ENSG00000120705_15 (sequence is synthesized)
tattttgattggagaaaaattaaattgctgcatttcgcagtgacccatttacatggcattctcagcttagactgcgtaagaagaaatatatgtggtgaaatgttggaaccatttctctct

SEQ ID NO: 238611 - DNA, 120 bp, Artificial Sequence
  ENSG00000120705_16 (sequence is synthesized)
tggtctctgtttaatgttgaaagggtgagctaataggaggcactttcaacttcactccctcacgctaccccgtccccctccagactggcagtttcaaggatgcaaattgcattgcaaaat

SEQ ID NO: 238612 - DNA, 120 bp, Artificial Sequence
  ENSG00000120705_17 (sequence is synthesized)
caaactgactcatgaagcatttgggccagtgcactgtttacttccatctgtttgcagacacatttgtgcccggcgtttgggagccctttgtatcaatgttctgacaagggtccctataac

SEQ ID NO: 238613 - DNA, 120 bp, Artificial Sequence
  ENSG00000120705_18 (sequence is synthesized)
cttaacctactcgaaaccggtttgggatggatatgatggggcttctgtgctattgctgggattgggagaaataaaacatgcaatttaagtggaagcgaagaaatttaaagaggattttat

SEQ ID NO: 238614 - DNA, 120 bp, Artificial Sequence
  ENSG00000120705_19 (sequence is synthesized)
tttgcttgggtcaatccttgttaaaagggaggtggatgtgttttccttgtgttggatggcatgagattatgtgaatgttttgatttattaaaatgaactgcaaggtttttcacaggaacg

SEQ ID NO: 238615 - DNA, 120 bp, Artificial Sequence
  ENSG00000120705_20 (sequence is synthesized)
acagacatgtatgactgcatgtaattataaactcctgacctcctggtggggttggagcatctgtttcaaatgtgggacttacaagcacttctcacatgagaaattaggggcgggtgggaa

SEQ ID NO: 238616 - DNA, 120 bp, Artificial Sequence
  ENSG00000120705_21 (sequence is synthesized)
gggatgggacacagcttctggcaccatggatttaagaccatgttggatccaaaagttggcctgaaaccctgaagcttatgcttcacagctgggctgtaagtcagacttgaacccagctga

SEQ ID NO: 238617 - DNA, 120 bp, Artificial Sequence
  ENSG00000120705_22 (sequence is synthesized)
tatgcaaggtcatggcgtgcccagggtggtgacagttgaacaaagtgtatagtacgtgcccagtggtagcgatggaaaaaagtataccaaatggactttgaaggaccaaaggttttaaaa

SEQ ID NO: 238618 - DNA, 120 bp, Artificial Sequence
  ENSG00000120705_23 (sequence is synthesized)
gtcaattggtatcacctccacactgactagggtagtggggtgcatttggttttcaaattgggtacttttaacactttagtgcctgactgctgttctttactgacttgattcagtcactcg

SEQ ID NO: 238619 - DNA, 120 bp, Artificial Sequence
  ENSG00000120705_24 (sequence is synthesized)
tagctttattggtctgaaccagctccttgttcccaggttacagacctgcctatcgttccaataatcctgtttcacttgaatgaagggagtatgtcttaaatgtaaagtttctggttctca

SEQ ID NO: 238620 - DNA, 120 bp, Artificial Sequence
  ENSG00000120705_25 (sequence is synthesized)
cactgtactctgaggtccaaatactgtctgtcaatgtgtaacctgatgtctcaaccccctgtgagaagagtccattatttggtgttcaccaacgtgggagacttcaccggaacaggcttt

SEQ ID NO: 238621 - DNA, 120 bp, Artificial Sequence
  ENSG00000120705_26 (sequence is synthesized)
tttgctttgggctctgctatttgtttgcagaacacccaagagcgagcaaacatgctctcttcacagcagtaccttagggttttgccattgtaaatgggtctgatgtgatatgacaagacc

SEQ ID NO: 238622 - DNA, 120 bp, Artificial Sequence
  ENSG00000120705_27 (sequence is synthesized)
agagaaattggatgtaaatttacatttttgaatatgcttgttgtttcacatgatacatttagggtatgcagctccttttgtagtttttatttttactatttaagtttggaaatgatgcca

SEQ ID NO: 238623 - DNA, 120 bp, Artificial Sequence
  ENSG00000120705_28 (sequence is synthesized)
aatttttgtatttctttaatcaatgtgttctcttcggtgatatatattgcattatatattgatgtgtgtatcaatatatattgatatgtattacacttacacatacaaacacatataaga

SEQ ID NO: 238624 - DNA, 120 bp, Artificial Sequence
  ENSG00000120705_29 (sequence is synthesized)
gggggtgaaaaccgtagcctttgcattctctatagcctctgcagagagatactaagcagcaaaatcttggtgttgtgatgtacagaaatggagaagagtattaaaccatatttaagaata

SEQ ID NO: 238625 - DNA, 120 bp, Artificial Sequence
  ENSG00000120705_30 (sequence is synthesized)
atagtagaatggcctgcctcaggccatgtgaaaagttgatttcagcacaagaatttgacattctggtttccagcccaggattgtcatttatgggtagatttgcaattttagaatgacagc

SEQ ID NO: 238626 - DNA, 120 bp, Artificial Sequence
  ENSG00000120705_31 (sequence is synthesized)
ttatatgaaacaggatgtgcttaattgtactgaaggcccaattcacagacgttaaccctctgggcgaagcattgatgaaagctttgataagccaaagtgcccctaaaaccaatgagaaca

SEQ ID NO: 238627 - DNA, 120 bp, Artificial Sequence
  ENSG00000120705_32 (sequence is synthesized)
agcgccgcgtccggcaccctccgtgccctcttggttcccggacccctcaggatggacgcccccgcgccgcatggccggatgaggagaaccaggcactagccaactcccgccttctggatc

SEQ ID NO: 238628 - DNA, 82 bp, Artificial Sequence
  ENSG00000120705_33 (sequence is synthesized)
acgtgattgtatgtatgagacaaggtaccaaaaatgtaaaaaggaatatttagtatttttattaactcttttgcctcagtaa

SEQ ID NO: 238629 - DNA, 120 bp, Artificial Sequence
  ENSG00000120705_34 (sequence is synthesized)
ggaatatttagtatttttattaactcttttgcctcagtaaaagcattattttttatcttctttagtcattaggtcgaataggtgtgtttgtatctactagggaaactttaatatatatcc

SEQ ID NO: 238630 - DNA, 120 bp, Artificial Sequence
  ENSG00000120705_35 (sequence is synthesized)
tgttgactgatccctaatcgtaggacgatactttgatgaaatcagccaggacacgggcaagtactgttttggcgttgaagatacactaaaggctttggaaatgggagctgtagaaattct

SEQ ID NO: 238631 - DNA, 120 bp, Artificial Sequence
  ENSG00000120708_0 (sequence is synthesized)
ctcacttccctggagccgcccgcttgcccgtcggtcgctagctcgctcggtgcgcgtcgtcccgctccatggcgctcttcgtgcggctgctggctctcgccctggctctggccctgggcc

SEQ ID NO: 238632 - DNA, 120 bp, Artificial Sequence
  ENSG00000120708_1 (sequence is synthesized)
ccgccgcgaccctggcgggtcccgccaagtcgccctaccagctggtgctgcagcacagcaggctccggggccgccagcacggccccaacgtgtgtgctgtgcagaaggttattggcacta

SEQ ID NO: 238633 - DNA, 120 bp, Artificial Sequence
  ENSG00000120708_2 (sequence is synthesized)
ataggaagtacttcaccaactgcaagcagtggtaccaaaggaaaatctgtggcaaatcaacagtcatcagctacgagtgctgtcctggatatgaaaaggtccctggggagaagggctgtc

SEQ ID NO: 238634 - DNA, 120 bp, Artificial Sequence
  ENSG00000120708_3 (sequence is synthesized)
cagcagccctaccactctcaaacctttacgagaccctgggagtcgttggatccaccaccactcagctgtacacggaccgcacggagaagctgaggcctgagatggaggggcccggcagct

SEQ ID NO: 238635 - DNA, 120 bp, Artificial Sequence
  ENSG00000120708_4 (sequence is synthesized)
tcaccatcttcgcccctagcaacgaggcctgggcctccttgccagctgaagtgctggactccctggtcagcaatgtcaacattgagctgctcaatgccctccgctaccatatggtgggca

SEQ ID NO: 238636 - DNA, 120 bp, Artificial Sequence
  ENSG00000120708_5 (sequence is synthesized)
ggcgagtcctgactgatgagctgaaacacggcatgaccctcacctctatgtaccagaattccaacatccagatccaccactatcctaatgggattgtaactgtgaactgtgcccggctgc

SEQ ID NO: 238637 - DNA, 120 bp, Artificial Sequence
  ENSG00000120708_6 (sequence is synthesized)
tgaaagccgaccaccatgcaaccaacggggtggtgcacctcatcgataaggtcatctccaccatcaccaacaacatccagcagatcattgagatcgaggacacctttgagacccttcggg

SEQ ID NO: 238638 - DNA, 120 bp, Artificial Sequence
  ENSG00000120708_7 (sequence is synthesized)
ctgctgtggctgcatcagggctcaacacgatgcttgaaggtaacggccagtacacgcttttggccccgaccaatgaggccttcgagaagatccctagtgagactttgaaccgtatcctgg

SEQ ID NO: 238639 - DNA, 120 bp, Artificial Sequence
  ENSG00000120708_8 (sequence is synthesized)
gcgacccagaagccctgagagacctgctgaacaaccacatcttgaagtcagctatgtgtgctgaagccatcgttgcggggctgtctgtagagaccctggagggcacgacactggaggtgg

SEQ ID NO: 238640 - DNA, 120 bp, Artificial Sequence
  ENSG00000120708_9 (sequence is synthesized)
gctgcagcggggacatgctcactatcaacgggaaggcgatcatctccaataaagacatcctagccaccaacggggtgatccactacattgatgagctactcatcccagactcagccaaga

SEQ ID NO: 238641 - DNA, 120 bp, Artificial Sequence
  ENSG00000120708_10 (sequence is synthesized)
cactatttgaattggctgcagagtctgatgtgtccacagccattgaccttttcagacaagccggcctcggcaatcatctctctggaagtgagcggttgaccctcctggctcccctgaatt

SEQ ID NO: 238642 - DNA, 120 bp, Artificial Sequence
  ENSG00000120708_11 (sequence is synthesized)
accagctggcctctaagtatctgtaccatggacagaccctggaaactctgggcggcaaaaaactgagagtttttgtttatcgtaatagcctctgcattgagaacagctgcatcgcggccc

SEQ ID NO: 238643 - DNA, 120 bp, Artificial Sequence
  ENSG00000120708_12 (sequence is synthesized)
acgacaagagggggaggtacgggaccctgttcacgatggaccgggtgctgacccccccaatggggactgtcatggatgtcctgaagggagacaatcgctttagcatgctggtagctgcca

SEQ ID NO: 238644 - DNA, 120 bp, Artificial Sequence
  ENSG00000120708_13 (sequence is synthesized)
tccagtctgcaggactgacggagaccctcaaccgggaaggagtctacacagtctttgctcccacaaatgaagccttccgagccctgccaccaagagaacggagcagactcttgggagatg

SEQ ID NO: 238645 - DNA, 120 bp, Artificial Sequence
  ENSG00000120708_14 (sequence is synthesized)
ccaaggaacttgccaacatcctgaaataccacattggtgatgaaatcctggttagcggaggcatcggggccctggtgcggctaaagtctctccaaggtgacaagctggaagtcagcttga

SEQ ID NO: 238646 - DNA, 120 bp, Artificial Sequence
  ENSG00000120708_15 (sequence is synthesized)
aaaacaatgtggtgagtgtcaacaaggagcctgttgccgagcctgacatcatggccacaaatggcgtggtccatgtcatcaccaatgttctgcagcctccagccaacagacctcaggaaa

SEQ ID NO: 238647 - DNA, 120 bp, Artificial Sequence
  ENSG00000120708_16 (sequence is synthesized)
gaggggatgaacttgcagactctgcgcttgagatcttcaaacaagcatcagcgttttccagggcttcccagaggtctgtgcgactagcccctgtctatcaaaagttattagagaggatga

SEQ ID NO: 238648 - DNA, 120 bp, Artificial Sequence
  ENSG00000120708_17 (sequence is synthesized)
agcattagcttgaagcactacaggaggaatgcaccacggcagctctccgccaatttctctcagatttccacagagactgtttgaatgttttcaaaaccaagtatcacactttaatgtaca

SEQ ID NO: 238649 - DNA, 120 bp, Artificial Sequence
  ENSG00000120708_18 (sequence is synthesized)
tgggccgcaccataatgagatgtgagccttgtgcatgtgggggaggagggagagagatgtactttttaaatcatgttccccctaaacatggctgttaacccactgcatgcagaaacttgg

SEQ ID NO: 238650 - DNA, 120 bp, Artificial Sequence
  ENSG00000120708_19 (sequence is synthesized)
atgtcactgcctgacattcacttccagagaggacctatcccaaatgtggaattgactgcctatgccaagtccctggaaaaggagcttcagtattgtggggctcataaaacatgaatcaag

SEQ ID NO: 238651 - DNA, 120 bp, Artificial Sequence
  ENSG00000120708_20 (sequence is synthesized)
caatccagcctcatgggaagtcctggcacagtttttgtaaagcccttgcacagctggagaaatggcatcattataagctatgagttgaaatgttctgtcaaatgtgtctcacatctacac

SEQ ID NO: 238652 - DNA, 120 bp, Artificial Sequence
  ENSG00000120708_21 (sequence is synthesized)
gtggcttggaggcttttatggggccctgtccaggtagaaaagaaatggtatgtagagcttagatttccctattgtgacagagccatggtgtgtttgtaataataaaaccaaagaaacata

SEQ ID NO: 238653 - DNA, 120 bp, Artificial Sequence
  ENSG00000120708_22 (sequence is synthesized)
tcatactcacagaggagtatggattaactccttctcagcagccagggagcccagcatcccagacagcatatttaacccagaggccaactgactgctggggcagatttgtggtcatgaaca

SEQ ID NO: 238654 - DNA, 120 bp, Artificial Sequence
  ENSG00000120708_23 (sequence is synthesized)
tgtgctttgtgtcctctgaccattagacagattgtgggtcacaacgttgagtatacagtgggagcttaataagtgcttattccctgggcagggagttcttcatttcaggggtgaccactt

SEQ ID NO: 238655 - DNA, 120 bp, Artificial Sequence
  ENSG00000120708_24 (sequence is synthesized)
gaagccctgagaggtgagcatcctttggctcctgctgctgcctcatttgtgcagctagattgagcccaagacctgctctggtccaagatgaacataccacctgccatgaggtgaccctca

SEQ ID NO: 238656 - DNA, 120 bp, Artificial Sequence
  ENSG00000120708_25 (sequence is synthesized)
ggatatccactgcagccatgggctggggtcatcctgtcctgttgcttcagctaaccgtgtctctagcagccacactactctgagggctgactacagaatccagcagcttttgtctgggag

SEQ ID NO: 238657 - DNA, 120 bp, Artificial Sequence
  ENSG00000120708_26 (sequence is synthesized)
ttgtattagtgtaaaaaaaaatgtcctcaataagcaggagtttgcatgagaactggttgctgacaaggaaggaaataatttctggaaaatatagataacaaaatgagatcctgcagaagg

SEQ ID NO: 238658 - DNA, 120 bp, Artificial Sequence
  ENSG00000120708_27 (sequence is synthesized)
attggaatctctttttctggaggcctttgagaataaaccacacaattatccaacctgtattgtgaaggaataagtccttcttgaattcaggaattaacacctgggaggagggatggagtt

SEQ ID NO: 238659 - DNA, 120 bp, Artificial Sequence
  ENSG00000120708_28 (sequence is synthesized)
cagactctttctgagcttatgagaagagaagccccctaaactaaaatacagccctccttggtccaaaaggtgccttctctcttctgctgtatcttctttgttttcaaacccaacagttac

SEQ ID NO: 238660 - DNA, 120 bp, Artificial Sequence
  ENSG00000120708_29 (sequence is synthesized)
cctggaaatcaaaaaggaagtacaactcaacatagctcttgcctgggaccaaccagcaccatttggctaaagatggttatcatctgttaaacaaagaaataaataaatgggttcaacgta

SEQ ID NO: 238661 - DNA, 120 bp, Artificial Sequence
  ENSG00000120708_30 (sequence is synthesized)
tttctgtattcgcgtggatgctgtccgcgcgattcccagcactcctcttacagcatctcacctcagtgtatgttccttgcctccagtgcagttgaacctcagtcctgcctctcctcatgt

SEQ ID NO: 238662 - DNA, 120 bp, Artificial Sequence
  ENSG00000120708_31 (sequence is synthesized)
gtgcattcacctttcttggtgctctctccccatgggccaagttctaccatgagttatgaaacattatggagaaaacatgtctttggaaatgtgagccagaaagcccaccagtgcccctca

SEQ ID NO: 238663 - DNA, 120 bp, Artificial Sequence
  ENSG00000120708_32 (sequence is synthesized)
ccatcttcgcccctagcaacgaggcctgggcctccttgccagctgtgagatgacctccgtctgcccgggggactcttatggggaactgccttacttccccgaggggtgggcatgatgaat

SEQ ID NO: 238664 - DNA, 120 bp, Artificial Sequence
  ENSG00000120708_33 (sequence is synthesized)
gggagtctgcagtcatttcctactgtttcaggaagctttctccttaaccccttagaaaaggctgtggaacttgagctaaaatatgtcttaccaggttgcgtctaatgccccccgttccct

SEQ ID NO: 238665 - DNA, 120 bp, Artificial Sequence
  ENSG00000120708_34 (sequence is synthesized)
actgggcagaaagacttgggtgcttcctgaggagggatccttggcagaagagaggcctgggctcacgagggctgagaacatgtttcccagagttgcaaggacccatctcttaaacacaga

SEQ ID NO: 238666 - DNA, 120 bp, Artificial Sequence
  ENSG00000120708_35 (sequence is synthesized)
caacctctgaaccctaatttcagacccttcaaaatgaatattaagctcattttggtctaagaaacaaaaaacaaatgaacatgaaactcattttggtcttataaggtctgagaaacccct

SEQ ID NO: 238667 - DNA, 120 bp, Artificial Sequence
  ENSG00000120708_36 (sequence is synthesized)
tctaaacttcaagctgctttaagaaataacattttattacctgcaaatacacacagtactttggagatttataatagtctcttattctaatagaagccattagggaaccagtttcaataa

SEQ ID NO: 238668 - DNA, 120 bp, Artificial Sequence
  ENSG00000120708_37 (sequence is synthesized)
acaggtaaatctgtaagactagtttgtaattaggatatctgtttccagtgtccattcctgcctctgttatctaaatgtctgggaacaagagctgtgctctgctgtgtttaaaatgattaa

SEQ ID NO: 238669 - DNA, 120 bp, Artificial Sequence
  ENSG00000120708_38 (sequence is synthesized)
aaatcaccaattagttgagttcacgtagacaggcatttgacttattgagttgttttaagaagactataacaagccttaagccccccagaaacagcctgtctttgggctttcccacatgcc

SEQ ID NO: 238670 - DNA, 120 bp, Artificial Sequence
  ENSG00000120708_39 (sequence is synthesized)
atttctgttccatgtgtgggctggtttctggggtttaagctgtagacaacccaccctctttgtgcctgcttctccttgggccctctattccacagcttgtggaacccacattttgctact

SEQ ID NO: 238671 - DNA, 120 bp, Artificial Sequence
  ENSG00000120708_40 (sequence is synthesized)
gggactgccctgggtggaggcccaggcttgggacacattgcctcccaagaggggcctagcaggaactcttctgcaggagaggtagaggatggctcctgtaggggaacatagagcaggttc

SEQ ID NO: 238672 - DNA, 120 bp, Artificial Sequence
  ENSG00000120708_41 (sequence is synthesized)
ccctgaatgcccttgaacatggagaattcattgaccagacattcagcttgacctaacctgtgaaattctccatcttctttataaagtgttcccttccttgcctcccctggaaaggtcagt

SEQ ID NO: 238673 - DNA, 120 bp, Artificial Sequence
  ENSG00000120708_42 (sequence is synthesized)
ggtgtgtggctgcagcagcacagtgtcctctgagccctggacctgcactgtggcttccagaggtggcagttcccacatggggtactagaataaatggcctatcaggctgtgtgtgctttg

SEQ ID NO: 238674 - DNA, 120 bp, Artificial Sequence
  ENSG00000120708_43 (sequence is synthesized)
ggatcacatgtccccaccctaggaccctggttccaaccatacgcatgttctcttggagcccagaacagcagagaagccaccagtgtggacacagaagtcaagggtctgatttccagcctg

SEQ ID NO: 238675 - DNA, 120 bp, Artificial Sequence
  ENSG00000120708_44 (sequence is synthesized)
gcttctgactgctctggggccgcaggaatacggttccttcccccatgcccagcaggcatttgtcttacaactggaggggaaggcatgttcctcttggcaaggactgctcaggaggaagtg

SEQ ID NO: 238676 - DNA, 120 bp, Artificial Sequence
  ENSG00000120708_45 (sequence is synthesized)
caacacagagagacaaacacgctggggctggctggcactgacaggcctcgcaggtgtggatggctgttagctgggagcttcgctgtctaagctcctctcccatgcttttcttctgggttg

SEQ ID NO: 238677 - DNA, 120 bp, Artificial Sequence
  ENSG00000120708_46 (sequence is synthesized)
ctcgaaggacgggggtctgcaagaaaatgatgttcccacatagttggcagcacgtgaacagcaattgatccctttgcatcacctcctcttactgtttagatttggtaaatatttcttcct

SEQ ID NO: 238678 - DNA, 120 bp, Artificial Sequence
  ENSG00000120708_47 (sequence is synthesized)
tccctcttctgaccctccattttgccgatctttccttcttataacacatacttactaggtacctgctacttcccgggtgggcctatgtgccaggagtatagaggtgaacaaggaaggcaa

SEQ ID NO: 238679 - DNA, 120 bp, Artificial Sequence
  ENSG00000120708_48 (sequence is synthesized)
agttctattctcagtagagctaatactctatctggagagagacaacaaacaaatcaacaaggtagccaggggctgtgataatttatgtcaagtgggcaggtaaatcgggagtgacagtag

SEQ ID NO: 238680 - DNA, 120 bp, Artificial Sequence
  ENSG00000120708_49 (sequence is synthesized)
tgcagggaggattggaaagtcagggagttctctctggaggaggtggcttttgatctgcagcctaaaggatgagaatgggtccattatacaaaatgctggggcaagagcacacccagtaga

SEQ ID NO: 238681 - DNA, 120 bp, Artificial Sequence
  ENSG00000120708_50 (sequence is synthesized)
ggggagagtaatagcaaaggctcagggcaggaagggcaagggagaggccagtgggtgaggtcacatgtgaagggcatacaatgggcaaagacaaggccagagtggccaggcccaatcctc

SEQ ID NO: 238682 - DNA, 120 bp, Artificial Sequence
  ENSG00000120708_51 (sequence is synthesized)
caggacttgcagacctgggaaagagtgcatctccatcctgggagcagcaggaaaccactcaggcctttagaagatccttctggcagctgtgtagagaatgggtggtgtgatccttccatg

SEQ ID NO: 238683 - DNA, 120 bp, Artificial Sequence
  ENSG00000120708_52 (sequence is synthesized)
catgggctcatgtacgtgattaccagtaactgtcgagtgacagtgtgaggagggctgcaagccatgagtgtaggcacagcagacagactcacctttgtctggcggtgagatggggtggga

SEQ ID NO: 238684 - DNA, 120 bp, Artificial Sequence
  ENSG00000120708_53 (sequence is synthesized)
agtgtgccaagttgacctcccaaagaaatgatattttagtggaagaatgaatagaatcagagaagcaaagtaagagggaagagcagagaggacagcagggacaaggacttgggggcagga

SEQ ID NO: 238685 - DNA, 120 bp, Artificial Sequence
  ENSG00000120708_54 (sequence is synthesized)
agaggaaaggcaggttaaggacatgaaagatggccaggctggctggagctcaggcccagcaaggccccctgggggccatggtcatgggtgagcttgggtttggcttctgttttcgtcttg

SEQ ID NO: 238686 - DNA, 120 bp, Artificial Sequence
  ENSG00000120708_55 (sequence is synthesized)
cctgatataaagtgccctaccactctcaaacctttacgagaccctgggagtcgttggatccaccaccactcagctgtacacggaccgcacggagaagctgaggcctgagatggaggggcc

SEQ ID NO: 238687 - DNA, 120 bp, Artificial Sequence
  ENSG00000120708_56 (sequence is synthesized)
accatttattgttttatttcctggagaaaatacatcattttatcccagccttaataacccatcccagtgtatactccttcatcttcatggataatgaccctgctacatgctctgaacaaa

SEQ ID NO: 238688 - DNA, 120 bp, Artificial Sequence
  ENSG00000120709_0 (sequence is synthesized)
agagctgctccggccgcggccctgggagctggaggaaccgcgactcagcaggcatgactggagagggaagtcccaatggtgctagaatggtgctgcagtggcagaagacggctcacaagt

SEQ ID NO: 238689 - DNA, 120 bp, Artificial Sequence
  ENSG00000120709_1 (sequence is synthesized)
gaggtctggaagaacaacagggaagacatccatcatttgctccaaagtgtgcaagtcaaatcctggggagaatcatgataaccctgatcactgagcagctacagaagcagactctggatg

SEQ ID NO: 238690 - DNA, 120 bp, Artificial Sequence
  ENSG00000120709_2 (sequence is synthesized)
agctgaaatgcacacgcttcagcatcagtctgcctttgcctgatcatgcagacatctccaactgtgggaactctttccagcttgtgtctgaaggtgcttcctggaggggcctgccccact

SEQ ID NO: 238691 - DNA, 120 bp, Artificial Sequence
  ENSG00000120709_3 (sequence is synthesized)
gttcctgtgctgagttccaggacagcctcaacttcagctaccatccctcaggcctgagcctgcacctcagaccacccagtcggggaaactcccccaaggagcagcccttctcccaagtcc

SEQ ID NO: 238692 - DNA, 120 bp, Artificial Sequence
  ENSG00000120709_4 (sequence is synthesized)
taagacctgagcccccagatccagagaagcttcctgtgccccctgcccctccatccaagaggcactgccgctcactctcagtgcccgtggacctgtctcgctggcagccggtgtggcggc

SEQ ID NO: 238693 - DNA, 120 bp, Artificial Sequence
  ENSG00000120709_5 (sequence is synthesized)
ccgccccctccaagctgtggactcccataaagcaccggggcagtggtggagggggtgggccgcaggtgcctcaccagagccccccaaagcgggtctccagcctcaggttcctccaagctc

SEQ ID NO: 238694 - DNA, 120 bp, Artificial Sequence
  ENSG00000120709_6 (sequence is synthesized)
ccagtgcctcttctcaatgtgccccagctcacagaccctacagccctcctttcttcagcctggccctggcccaagattcctctcgaccctgcgccgcctcccctcaaagtggctcctggg

SEQ ID NO: 238695 - DNA, 120 bp, Artificial Sequence
  ENSG00000120709_7 (sequence is synthesized)
agagtgatgctgagtccttgtcaccttgcccacctcagcgccgcttctccctgtcacccagtctgggcccgcaggcaagccgcttcttgccctctgcccggagctctcccgcatcctccc

SEQ ID NO: 238696 - DNA, 120 bp, Artificial Sequence
  ENSG00000120709_8 (sequence is synthesized)
cagagctgccctggcgacctcgaggtctccgcaaccttccccgaagccgctcacagccttgtgatctggatgcccgcaaaactggggtcaagcggcgccacgaggaagacccccggcgtc

SEQ ID NO: 238697 - DNA, 120 bp, Artificial Sequence
  ENSG00000120709_9 (sequence is synthesized)
tgcggccttcgttggactttgacaagatgaatcagaaaccatactcaggaggtctttgtctccaagaaacagcccgggaaggcagcagcatctctccaccatggttcatggcctgtagcc

SEQ ID NO: 238698 - DNA, 120 bp, Artificial Sequence
  ENSG00000120709_10 (sequence is synthesized)
ccccacccctctctgcttcctgcagccccactgggggttcctcccaggtgctgagtgaaagcgaagaggaggaggagggggctgtgcggtggggtcggcaggcgctgagcaagcggacac

SEQ ID NO: 238699 - DNA, 120 bp, Artificial Sequence
  ENSG00000120709_11 (sequence is synthesized)
tgtgccagcgggactttggggacctggacttgaatttgattgaggaaaactaaaactgagaggctacttcctggggccacacagactgactctctcatggctactaacaagtgtcgagtc

SEQ ID NO: 238700 - DNA, 120 bp, Artificial Sequence
  ENSG00000120709_12 (sequence is synthesized)
cccaaggctgggggccgagcctgggaatgggggtgagtggagggctccgactcagggcagctggaaatcttctcgctccagcaagctcgaccatgccaagagactggccgggacaagata

SEQ ID NO: 238701 - DNA, 120 bp, Artificial Sequence
  ENSG00000120709_13 (sequence is synthesized)
aacggagctggtggcgggagggacagccccagagcagacccttcctatggcggccctgagtgtgagtatccctgccaccaagagagcaatgggcagggaaggaaggggtctgccgacccc

SEQ ID NO: 238702 - DNA, 120 bp, Artificial Sequence
  ENSG00000120709_14 (sequence is synthesized)
agctcggggaatttcactagcccctttgcttcaaagggcacttgtgtcttagaatttggccagggtggggggttgagtcagcctcctcagagaaactgcgtgagagtgtgtgcgtgcatg

SEQ ID NO: 238703 - DNA, 120 bp, Artificial Sequence
  ENSG00000120709_15 (sequence is synthesized)
ggagtgtacttgtggaaaggtgtgtttgcgtagccttagggaaggaaggcaattgctccttaacagcagagtatcatgatacccccaggatcttgagttttttacaggatgttgggtttg

SEQ ID NO: 238704 - DNA, 120 bp, Artificial Sequence
  ENSG00000120709_16 (sequence is synthesized)
ctcaaggagtcaagaggagggcaccaagttttccttttttctaaatagctctggaaccaggcttgtaatccatagcatcaccgactctgcaaaggatttcattttggggtacagcagggt

SEQ ID NO: 238705 - DNA, 120 bp, Artificial Sequence
  ENSG00000120709_17 (sequence is synthesized)
cgatctagtatattggggaatgcaggtggggggtgtcaccatattttttctgagctggcctttttttctcatcagattgtccaggctatattccacctgcctcttttgccctcttgagta

SEQ ID NO: 238706 - DNA, 120 bp, Artificial Sequence
  ENSG00000120709_18 (sequence is synthesized)
gagttgcacacagcacatgggcaactgaagcagggttgaggggctctctctctctctcctctgctgatgggacccttttcccctcaccctctgcccttctaagtcatagactaggtagga

SEQ ID NO: 238707 - DNA, 120 bp, Artificial Sequence
  ENSG00000120709_19 (sequence is synthesized)
aggccctatattggtccccagcatctactgaggcagacctgcaacagaagtggcattcagtccccagcagacatgggtgagctcaccccagcactgctgttgggaaggtgactgcaggaa

SEQ ID NO: 238708 - DNA, 120 bp, Artificial Sequence
  ENSG00000120709_20 (sequence is synthesized)
accaattcttacaagatccaggcccagcctttttgacctgcttgagagggaagaaggggtgtttagcatttaatagtttgcttgtcttccactcctgccaggaagtgtttatttgcctct

SEQ ID NO: 238709 - DNA, 120 bp, Artificial Sequence
  ENSG00000120709_21 (sequence is synthesized)
aattgggcctgagagaccatagggaggttggggctcactgagggattggctgaggatgtataaagcaaaggctgtgagaagcagttgggagtttggttgtcattggattgaatttacttt

SEQ ID NO: 238710 - DNA, 120 bp, Artificial Sequence
  ENSG00000120709_22 (sequence is synthesized)
tttgtttctcacccgcaacttgagccaggacagctggtccaagtggccacagtgatgggtttaagtaccttggtagggctggcaccagtggaaacacatactgaagctgccaccacaata

SEQ ID NO: 238711 - DNA, 120 bp, Artificial Sequence
  ENSG00000120709_23 (sequence is synthesized)
gcttgtgaggttttatccagctgtggttagaccctgcatgaccaaatttgacctgcccttgtttatggcaagaagggcatttttctcttcaatttccagggtttcctaggacccagttcc

SEQ ID NO: 238712 - DNA, 120 bp, Artificial Sequence
  ENSG00000120709_24 (sequence is synthesized)
tcatgtaagggaggaagaccaaggtctttgtgttttcttcctcatggaattgaacctgacattttctggatctcctgcatgtcaggagcatcagtgaggcttcagcctcctcgtctccac

SEQ ID NO: 238713 - DNA, 120 bp, Artificial Sequence
  ENSG00000120709_25 (sequence is synthesized)
tccagagaggaggtggctatgtcttcttaagcctctggccctcagaggctcctccctatctcctggctagttaccactaggctaccaggtctctaggggcctgagagaggccctctagag

SEQ ID NO: 238714 - DNA, 120 bp, Artificial Sequence
  ENSG00000120709_26 (sequence is synthesized)
aatccagggaaactgtgagcccaggagttgcccatctatggtttcattcctcccctggctcttctccctcttcaggccataatttccctggtgccaatttcttttcctcctggggcatcc

SEQ ID NO: 238715 - DNA, 120 bp, Artificial Sequence
  ENSG00000120709_27 (sequence is synthesized)
tcatcccagggctctctgctgtagattggctgtgccagcttccaacaggttactggcaatgccagtgagtttctgtaggccctaagctgaagaagtgaggcagtgattctgcctccatcc

SEQ ID NO: 238716 - DNA, 120 bp, Artificial Sequence
  ENSG00000120709_28 (sequence is synthesized)
tggtttccccaaagccccagggcaccatccttaggggagaaggtctacagttatcattattttaattccattactttcagtctggaaaactaagctagtcagaactgtcatcttgcttcc

SEQ ID NO: 238717 - DNA, 120 bp, Artificial Sequence
  ENSG00000120709_29 (sequence is synthesized)
caatctaagaacctgtggccctggaacacttttcaagaattggttcattttgctttacacagtagatctgttccaacagttctgtgtaaaccaaatgctatttttcaatgcatttggact

SEQ ID NO: 238718 - DNA, 120 bp, Artificial Sequence
  ENSG00000120709_30 (sequence is synthesized)
gctgaccatttaaaagcagcctatgattgcttctttttgtaaagcaagcaacctccctccactttagctgttttgactatttgaattttcacatattgggcttacccagagtggagcaca

SEQ ID NO: 238719 - DNA, 120 bp, Artificial Sequence
  ENSG00000120709_31 (sequence is synthesized)
cctccagggcatgtggctgacactgggtcaatgtctgcatctgtgctgtgtgtgtagtgtggttggccagtaggtgagtatccctgtgtgtgtgagtgaagccactccccaggctggtgc

SEQ ID NO: 238720 - DNA, 120 bp, Artificial Sequence
  ENSG00000120709_32 (sequence is synthesized)
tctcctcctgtgcccagtgactgcccagtggcagctcagctgcccttcactcccacctgctgccaaagtccctgtgctaatgggattacaaatacaaaaagtggaaaaaaattttcgtaa

SEQ ID NO: 238721 - DNA, 120 bp, Artificial Sequence
  ENSG00000120709_33 (sequence is synthesized)
actttgttttatattaaaagaaaaatccataagtctgtgtgtgttaaacatgaggttctgcctctgtggctgtgtttgaaaaaataaagttttattagaataatccattttcccaagcaa

SEQ ID NO: 238722 - DNA, 120 bp, Artificial Sequence
  ENSG00000120709_34 (sequence is synthesized)
tcataatcacaatcccattacctcatcctgctgggggggagggggcggagagagaagagagggagtgaacagccctgggctatcctgagctttacaaagtgttctgggtgagggcaaatt

SEQ ID NO: 238723 - DNA, 120 bp, Artificial Sequence
  ENSG00000120709_35 (sequence is synthesized)
acagaaccaagtggaaacgtccccgcaaccattataagtcctgggtttttaaggttcaggccgatccggcagctgcaagaggggctcctgggactccgagcaggccctaatccgcgcttg

SEQ ID NO: 238724 - DNA, 120 bp, Artificial Sequence
  ENSG00000120709_36 (sequence is synthesized)
gaccacacttcccagcagccttcacgccgcggacgggtcctttgctgggggaagggggattccttcgaagaggtggtcgtggagggcggggcagcagagcagactcagcaggcatgactg

SEQ ID NO: 238725 - DNA, 120 bp, Artificial Sequence
  ENSG00000120709_37 (sequence is synthesized)
aaagcagatagattatggcaagtgcacacctggctaccagtgctttctgcaccaggtcctcaagcagggaatgaagagtcttagaaccaatggattccactcctttggatgacctcctgg

SEQ ID NO: 238726 - DNA, 120 bp, Artificial Sequence
  ENSG00000120709_38 (sequence is synthesized)
gagagggaaataagcagtgcaagtttgtagacttggtggctcctgcctcctcccctccctggctcagtgaggacgacccccgccactggctctactttccagctgatcacagctatttac

SEQ ID NO: 238727 - DNA, 120 bp, Artificial Sequence
  ENSG00000120709_39 (sequence is synthesized)
ctgtcccagtcttgagtaaggcacaaaatatttacagaaaacagatgtctttcagaggacttgctgctaagtgtaatagtgaagattacttgcattactgctactttccaatcaattaaa

SEQ ID NO: 238728 - DNA, 120 bp, Artificial Sequence
  ENSG00000120709_40 (sequence is synthesized)
agctgaaatgcacacgcttcagcatcagtctggtaaaagaccagtcttcctgcttctccacgaccccctcccccttttttctgaggctgattgttgctattactttactcttgtcctgtg

SEQ ID NO: 238729 - DNA, 120 bp, Artificial Sequence
  ENSG00000120709_41 (sequence is synthesized)
ctgtatgaatcatggtacttaacctggaagagcccactaatggctcaaaacccagcccaaaaggaagggggcagggatttttccaccgatagagaagggacagcaaaacttgggtggaga

SEQ ID NO: 238730 - DNA, 120 bp, Artificial Sequence
  ENSG00000120709_42 (sequence is synthesized)
agggtttgagatgttggaagatgtggattgtttgacttactaactttgggaagacaagaggaagaacacttaatgtccctaacatccctgtagctcatgaatcgcagaggagaactgaag

SEQ ID NO: 238731 - DNA, 120 bp, Artificial Sequence
  ENSG00000120709_43 (sequence is synthesized)
agggcttcctagaaatctgtcagtgtgtcctgaatccaaatcatgatggatattctctctttcttagcctttgcctgatcatgcagacatctccaactgtgggaactctttccagcttgt

SEQ ID NO: 238732 - DNA, 120 bp, Artificial Sequence
  ENSG00000120709_44 (sequence is synthesized)
gtctggtaaggcatcgtgtgtgtttgtgtacgtgtgtgtacccattcctctctccacacatttctatcattggtttccagtgaccagggctagcgagcctacctctagaaccttcttgcc

SEQ ID NO: 238733 - DNA, 120 bp, Artificial Sequence
  ENSG00000120709_45 (sequence is synthesized)
gtggggacttgtataatctaattttttgaataggtaatacattcacatggttcaaaatttaaaaaataacaacaaaaaggttatgctgagaaaagtctctcttactctcccgttccctat

SEQ ID NO: 238734 - DNA, 120 bp, Artificial Sequence
  ENSG00000120709_46 (sequence is synthesized)
ctacccagcttctaccacctccctaaaagtattagtttcttatacagtatatgtgactagaatttctttatataaaaagaagcaaatgtatatatttatttcctttcttttttaagttct

SEQ ID NO: 238735 - DNA, 120 bp, Artificial Sequence
  ENSG00000120709_47 (sequence is synthesized)
cggatacatgtgcagaacgtgcaggttcgttacataggtgtacatgtgccatggtggttagctgcatctattttatttccacgtttttaacacaaaaggttgcatactatatattatttt

SEQ ID NO: 238736 - DNA, 78 bp, Artificial Sequence
  ENSG00000120709_48 (sequence is synthesized)
acgtttttaacacaaaaggttgcatactatatattattttgtacctttaaaaaaaaaaatgggaccgggcctagtggg

SEQ ID NO: 238737 - DNA, 120 bp, Artificial Sequence
  ENSG00000120709_49 (sequence is synthesized)
tttctgttttcctcgttccctcagccccacgaaccccgggagatttaaaccgcgccttactagtgatgtccattcactaggaacctgcttccccagaaaggagatgtgtgaagattcttt

SEQ ID NO: 238738 - DNA, 120 bp, Artificial Sequence
  ENSG00000120709_50 (sequence is synthesized)
gtcctctaggatacagacagtgagtgtaggagttagcacagaaccttgctatgccaggcagggaatgaagagtcttagaaccaatggattccactcctttggatgacctcctggatgact

SEQ ID NO: 238739 - DNA, 120 bp, Artificial Sequence
  ENSG00000120709_51 (sequence is synthesized)
agatcacctgggggcgtgtgcttgctctggaaatgaacctgcttccccagaaaggagatgtgtgaagattctttgtcctctaggatacagacagtgagtgtaggagttagcacagaacct

SEQ ID NO: 238740 - DNA, 120 bp, Artificial Sequence
  ENSG00000120709_52 (sequence is synthesized)
tgctatgccagggcacagtgacagcccgggcttcaccctgaaacaccaaacaagaacaggaggcagggaatgaagagtcttagaaccaatggattccactcctttggatgacctcctgga

SEQ ID NO: 238741 - DNA, 120 bp, Artificial Sequence
  ENSG00000120709_53 (sequence is synthesized)
actttctgcgatattttggagggggtgactcgttagtgaggaaaccacccccatccctaaatcaaagcgccaggctcgttcccaacagcgctgtccgagagacactttgagagagacacg

SEQ ID NO: 238742 - DNA, 120 bp, Artificial Sequence
  ENSG00000120709_54 (sequence is synthesized)
acacggagctgcgccctccatgggtggcttggggggattctgcgagccggagctgtccccctactctcctcagggactcgttggttcgcgccagcgccttttaagggcaccgtggggcga

SEQ ID NO: 238743 - DNA, 120 bp, Artificial Sequence
  ENSG00000120725_0 (sequence is synthesized)
ctggaattgtgggagttgtgtctgccactcggctgccggaggccgaaggccagctattacttctctactgaggccaactgtgagccctggtgtgtttcattggcaggagaagaggctaat

SEQ ID NO: 238744 - DNA, 120 bp, Artificial Sequence
  ENSG00000120725_1 (sequence is synthesized)
taagtgaaactgaaaggtccctgactatggctccccagagcctgccttcatctaggatggctcctctgggcatgctgcttgggctgctgatggccgcctgcttcaccttctgcctcagtc

SEQ ID NO: 238745 - DNA, 120 bp, Artificial Sequence
  ENSG00000120725_2 (sequence is synthesized)
atcagaacctgaaggagtttgccctgaccaacccagagaagagcagcaccaaagaaacagagagaaaagaaaccaaagccgaggaggagctggatgccgaagtcctggaggtgttccacc

SEQ ID NO: 238746 - DNA, 120 bp, Artificial Sequence
  ENSG00000120725_3 (sequence is synthesized)
cgacgcatgagtggcaggcccttcagccagggcaggctgtccctgcaggatcccacgtacggctgaatcttcagactggggaaagagaggcaaaactccaatatgaggacaagttccgaa

SEQ ID NO: 238747 - DNA, 120 bp, Artificial Sequence
  ENSG00000120725_4 (sequence is synthesized)
ataatttgaaaggcaaaaggctggatatcaacaccaacacctacacatctcaggatctcaagagtgcactggcaaaattcaaggagggggcagagatggagagttcaaaggaagacaagg

SEQ ID NO: 238748 - DNA, 120 bp, Artificial Sequence
  ENSG00000120725_5 (sequence is synthesized)
caaggcaggctgaggtaaagcggctcttccgccccattgaggaactgaagaaagactttgatgagctgaatgttgtcattgagactgacatgcagatcatggtacggctgatcaacaagt

SEQ ID NO: 238749 - DNA, 120 bp, Artificial Sequence
  ENSG00000120725_6 (sequence is synthesized)
tcaatagttccagctccagtttggaagagaagattgctgcgctctttgatcttgaatattatgtccatcagatggacaatgcgcaggacctgctttcctttggtggtcttcaagtggtga

SEQ ID NO: 238750 - DNA, 120 bp, Artificial Sequence
  ENSG00000120725_7 (sequence is synthesized)
gccatcgaagggggagccctgcagaagctgctggtcatcctggccacggagcagccgctcactgcaaagaagaaggtcctgtttgcactgtgctccctgctgcgccacttcccctatgcc

SEQ ID NO: 238751 - DNA, 120 bp, Artificial Sequence
  ENSG00000120725_8 (sequence is synthesized)
cagcggcagttcctgaagctcggggggctgcaggtcctgaggaccctggtgcaggagaagggcacggaggtgctcgccgtgcgcgtggtcacactgctctacgacctggtcacggagaag

SEQ ID NO: 238752 - DNA, 120 bp, Artificial Sequence
  ENSG00000120725_9 (sequence is synthesized)
atgttcgccgaggaggaggctgagctgacccaggagatgtccccagagaagctgcagcagtatcgccaggtacacctcctgccaggcctgtgggaacagggctggtgcgagatcacggcc

SEQ ID NO: 238753 - DNA, 120 bp, Artificial Sequence
  ENSG00000120725_10 (sequence is synthesized)
cacctcctggcgctgcccgagcatgatgcccgtgagaaggtgctgcagacactgggcgtcctcctgaccacctgccgggaccgctaccgtcaggacccccagctcggcaggacactggcc

SEQ ID NO: 238754 - DNA, 120 bp, Artificial Sequence
  ENSG00000120725_11 (sequence is synthesized)
agcctgcaggctgagtaccaggtgctggccagcctggagctgcaggatggtgaggacgagggctacttccaggagctgctgggctctgtcaacagcttgctgaaggagctgagatgaggc

SEQ ID NO: 238755 - DNA, 120 bp, Artificial Sequence
  ENSG00000120725_12 (sequence is synthesized)
cccacaccaggactggactgggatgccgctagtgaggctgaggggtgccagcgtgggtgggcttctcaggcaggaggacatcttggcagtgctggcttggccattaaatggaaacctgaa

SEQ ID NO: 238756 - DNA, 120 bp, Artificial Sequence
  ENSG00000120725_13 (sequence is synthesized)
ggccatcctctttctgctgtgtgtctgtgtagactgggcacagccctgtggccggggggtcaggtgagtggttgggtgatgggctctgctgacgtgcagggctcagcccagggcatccag

SEQ ID NO: 238757 - DNA, 120 bp, Artificial Sequence
  ENSG00000120725_14 (sequence is synthesized)
gaacaggctccagggcaggaacctgggcccaggagttgcaagtctctgcttcttaccaagcagcagctctgtaccttgggaagtcgcttaattgctctgagcttgtttcctcatctgtca

SEQ ID NO: 238758 - DNA, 120 bp, Artificial Sequence
  ENSG00000120725_15 (sequence is synthesized)
attacttctctactgaggccaactgtgagccctggtgtgtttcattggcaggagaagaggctaattaagtgaaactgaaagaacaaataaaatgatgagtccagtttctgtggctgattt

SEQ ID NO: 238759 - DNA, 120 bp, Artificial Sequence
  ENSG00000120725_16 (sequence is synthesized)
cacagacccctcgagagacagcacggctatggaaagagcatggctttggggccaaactggctttgaattctgactctactgctctgtggctgcatgaactctggcacgtccctgactatg

SEQ ID NO: 238760 - DNA, 120 bp, Artificial Sequence
  ENSG00000120725_17 (sequence is synthesized)
aatcccggagatccctctccgtcatccagctgaggcgggaaatggaggaacagacgtggcttacgagttcgagtcccattcccgaaaaggctgtttgtcaacctcctgaatagcataata

SEQ ID NO: 238761 - DNA, 120 bp, Artificial Sequence
  ENSG00000120725_18 (sequence is synthesized)
caaagtttaaatagggtatgccttagaagggattcgcgagagtccctggcttagactcgacttttatgctctctggttgttctgtttgccaaggaatggtggaaagcgccagatattggg

SEQ ID NO: 238762 - DNA, 120 bp, Artificial Sequence
  ENSG00000120725_19 (sequence is synthesized)
acaaggagccatttcggttttaccaactcagactgagattgtggctgagtttgataagtgcagactgctattctttcttaagacctctccctttggagcacattaaaagtggagagaact

SEQ ID NO: 238763 - DNA, 120 bp, Artificial Sequence
  ENSG00000120725_20 (sequence is synthesized)
gctgtcaccttggtccacggtcttcgggatctttccaggaggttttcgaatagattaagccagtcactcctactgctgacctctgcaggaccggcctccctagtgccctgcagtgggatt

SEQ ID NO: 238764 - DNA, 120 bp, Artificial Sequence
  ENSG00000120725_21 (sequence is synthesized)
ggaccttgaagcttgttcctggtcagaatagaagtggggagctatcttcattccattcagccagctttgggggcacgcctgctgtgtgtcgggccctctcctcaaccccaaggtccaggt

SEQ ID NO: 238765 - DNA, 120 bp, Artificial Sequence
  ENSG00000120725_22 (sequence is synthesized)
gtctgccactcggctgccggaggccgaaggccagctattacttctctactgaggccaactgtgagccctggtgtgtttcattggcaggagaagaggctaattaagtgaaactgaaagggc

SEQ ID NO: 238766 - DNA, 120 bp, Artificial Sequence
  ENSG00000120725_23 (sequence is synthesized)
atatctcttgttggatggctggacccaccatggtagatggaggcttcagaattatctagaagtggtagaagactcgttatacctctatgcaggaaatgtctgacatgtccctgactatgg

SEQ ID NO: 238767 - DNA, 120 bp, Artificial Sequence
  ENSG00000120725_24 (sequence is synthesized)
ctctctctctctctctctcactctgtgtacgtgtgtgtgtatactgaggaaaggccatgtgaagacatggcaagagggcagccatctgcaagctaagatgagagtcttcagctggaacct

SEQ ID NO: 238768 - DNA, 120 bp, Artificial Sequence
  ENSG00000120725_25 (sequence is synthesized)
cacacccagggatggccagtcacctatccagagcctggtgtggtgctgtgaactcaatccctgtctttcagtgtgattggtgccccagggagccaggttgctgggggaagctctcgtggc

SEQ ID NO: 238769 - DNA, 120 bp, Artificial Sequence
  ENSG00000120725_26 (sequence is synthesized)
gggagttgtgtctgccactcggctgccggaggccgaagggcccaatccccacccccagtcttgtctgaattgtgtggaagacatgaggcactgagagaggtgggggccgagtggcctcct

SEQ ID NO: 238770 - DNA, 120 bp, Artificial Sequence
  ENSG00000120725_27 (sequence is synthesized)
ctcaagagtgcactggcaaaattcaaggagggggcagagatggagagttcaaaggaagacaagatggacaatgcgcaggacctgctttcctttggtggtcttcaagtggtgatcaatggg

SEQ ID NO: 238771 - DNA, 120 bp, Artificial Sequence
  ENSG00000120725_28 (sequence is synthesized)
agataaagcctataatgccctttcttcaatgagacacattcttcggagagggaatggccaagagctgagcccagattgtattttggcatttgattgttgctgccgtgccttgaatatagc

SEQ ID NO: 238772 - DNA, 120 bp, Artificial Sequence
  ENSG00000120725_29 (sequence is synthesized)
agctggcacgtcttacatgtctggagcaggagaaagagagcaagggggacatgctgcacatttttaaatggccagatcctgtgagaactcacttttgtgaaaacagcaagggggaaatcc

SEQ ID NO: 238773 - DNA, 120 bp, Artificial Sequence
  ENSG00000120725_30 (sequence is synthesized)
gcccctatgacttagtcacctcccactaggcccctcctccaatattagggattacaatttgatatgagatttgggtggggacacaaattcaaaccatatcagaagccttcaatggcaccc

SEQ ID NO: 238774 - DNA, 120 bp, Artificial Sequence
  ENSG00000120725_31 (sequence is synthesized)
atccagctgaggcgggaaatggaggaacagacgtggcttacgagttcgagtcccattcccgaaaaggctgtttgtcaacctcctgaatagcataatacaaagtttaaatagggacaaaca

SEQ ID NO: 238775 - DNA, 120 bp, Artificial Sequence
  ENSG00000120727_0 (sequence is synthesized)
gtttgtttggactggagaagggaggcggcgggcgaagcgcacgtcgagcgggggagcggcgctgcctgtggagatccgcggaggccgacaggattcgttggctgccgtccccgctgctgt

SEQ ID NO: 238776 - DNA, 120 bp, Artificial Sequence
  ENSG00000120727_1 (sequence is synthesized)
gcattgggttaaaaacgacaaccaacatcagccatgaaagatccaagtcgcagcagtactagcccaagcatcatcaatgaagatgtgattattaacggtcattctcatgaagatgacaat

SEQ ID NO: 238777 - DNA, 120 bp, Artificial Sequence
  ENSG00000120727_2 (sequence is synthesized)
ccatttgcagagtacatgtggatggaaaatgaagaagaattcaacagacaaatagaagaggagttatgggaagaagaatttattgaacgctgtttccaagaaatgctggaagaggaagaa

SEQ ID NO: 238778 - DNA, 120 bp, Artificial Sequence
  ENSG00000120727_3 (sequence is synthesized)
gagcatgaatggtttattccagctcgagatctcccacaaactatggaccaaatccaagaccagtttaatgaccttgttatcagtgatggctcttctctggaagatcttgtggtcaagagc

SEQ ID NO: 238779 - DNA, 120 bp, Artificial Sequence
  ENSG00000120727_4 (sequence is synthesized)
aatctgaatccaaatgcaaaggagtttgttcctggggtgaagtacggaaatatttgagtagacggggccctcttttggtggatgtagcacaatttccacactgtgaaggcagtattagaa

SEQ ID NO: 238780 - DNA, 120 bp, Artificial Sequence
  ENSG00000120727_5 (sequence is synthesized)
gacttaattgtaaaagctctcttgtcactgtgttacacttatgcattgccaaagtttttgttagtcttgcatgcttaataaaagtgctgagactgttactaagtaaaaagctgtcaaaca

SEQ ID NO: 238781 - DNA, 120 bp, Artificial Sequence
  ENSG00000120727_6 (sequence is synthesized)
ttggccccatggcttgatgtgaagacagcaaggaaagaagcaccagtcaagttgtgaacaagcaccaaattaaaagacctaaaccttaccaaattgtctttttttgaggctaatctatca

SEQ ID NO: 238782 - DNA, 120 bp, Artificial Sequence
  ENSG00000120727_7 (sequence is synthesized)
cttgttaatgtctaaactttaaaatcagtacatttaatttgagttccaactgttaagcatatttctcagacttaaatttgattatgtccccatcaaaaagaatctccattttctgaaggt

SEQ ID NO: 238783 - DNA, 120 bp, Artificial Sequence
  ENSG00000120727_8 (sequence is synthesized)
ctgttagttaatttgagataatttgttaaaggcaagtatgtcatattactgaggctacaagttagtcagcagatgagtgccagtccagccttttctggtatgttattgttagaaatattg

SEQ ID NO: 238784 - DNA, 120 bp, Artificial Sequence
  ENSG00000120727_9 (sequence is synthesized)
agttctaatgttacatctgaggaagtatgtaatttgagaattgtaacttctaagggattcactgcatcatagctatgcctgtatggagtctaacatatgaccaataccaacccataatcc

SEQ ID NO: 238785 - DNA, 120 bp, Artificial Sequence
  ENSG00000120727_10 (sequence is synthesized)
agctgaacaaagatactgtaacatgatttgagtggtgcttttccttgctttgttaaccatcacgagagtctgcagcacaacttttaacaaagctagaacagttttggcttcttaaacttc

SEQ ID NO: 238786 - DNA, 120 bp, Artificial Sequence
  ENSG00000120727_11 (sequence is synthesized)
atatttgggtaggttaagctgccatacgtgttcagtgtgaatagtgtttaagttgaaaatattgtaaaaaaattatattttttcaaaaatatttaaaaaaataaataatagtagaactga

SEQ ID NO: 238787 - DNA, 120 bp, Artificial Sequence
  ENSG00000120727_12 (sequence is synthesized)
ctggggtttggggagagaggggcggagggactggcgggctcttggcgtcttgggggaacgctgcaaccgtcgacgggcctgatcagaagatcgtctttctcccgtttcttcgccatcgct

SEQ ID NO: 238788 - DNA, 120 bp, Artificial Sequence
  ENSG00000120727_13 (sequence is synthesized)
accccttatttttggttgtattgcagctcatgccctggaaaaaagaacctttggggtactgggaacccttaccctaggagggcgttgagttagatgaactttaaggtcctcttacctttt

SEQ ID NO: 238789 - DNA, 120 bp, Artificial Sequence
  ENSG00000120727_14 (sequence is synthesized)
aataattttctgtgcttactctcctccttccccaccatcgccaccagaaataaataaggcttgtggtgaacttaggtcttcaaaacatttgttgcagcagccagcagtgatattttttag

SEQ ID NO: 238790 - DNA, 120 bp, Artificial Sequence
  ENSG00000120727_15 (sequence is synthesized)
ggactcctaaaaggggtcttacctgcttccttttgtttcttttttccctgatttggcacccgtatcaactcataaaaaccccaaactctagaaagaatttggcttccaatttgccttgga

SEQ ID NO: 238791 - DNA, 120 bp, Artificial Sequence
  ENSG00000120727_16 (sequence is synthesized)
aggtgtagcagctgacagcctttgacgtttatttcaacggaaagtagatgttcatgttgggtgtgctggctaatgttgaaacgtggtggcattgttttttcacagatttcattagcacag

SEQ ID NO: 238792 - DNA, 120 bp, Artificial Sequence
  ENSG00000120727_17 (sequence is synthesized)
ttagatcaggtgttggtttatattttcattaagtcgcttttgaaatttcttctggcgtaggttgtgtttgcaataagtaaaagttctctacaataatttttaatgagactccactatttg

SEQ ID NO: 238793 - DNA, 120 bp, Artificial Sequence
  ENSG00000120727_18 (sequence is synthesized)
cttttgtgattctgtttccagttagtgaaagacaggatatttggggaaaattagtctgtttatactacttgtcagttgtgaacttgaataaaactttttcacacacacacaaaatcacag

SEQ ID NO: 238794 - DNA, 120 bp, Artificial Sequence
  ENSG00000120727_19 (sequence is synthesized)
gataggtaacttgacaagaactatagaacccacttgtgtttctttaagggatggaggttagggaatggagatttcctctaatgattcaaggctgtgcacgttgctccttaggaactcaaa

SEQ ID NO: 238795 - DNA, 120 bp, Artificial Sequence
  ENSG00000120727_20 (sequence is synthesized)
ggactggagaagggaggcggcgggcgaagcgcacgtcgagcgggggagcggcgctgcctgtggagatccgcggaggccgacaggattcgttggctgccgtccccgctgctgtgcattgga

SEQ ID NO: 238796 - DNA, 66 bp, Artificial Sequence
  ENSG00000120727_21 (sequence is synthesized)
catctatttaagaattctacatctctttccccttcagaaattgtgctgcttctggccgggacttga

SEQ ID NO: 238797 - DNA, 120 bp, Artificial Sequence
  ENSG00000120727_22 (sequence is synthesized)
gttagttttttgtacaaacatgtttttatagtccattctggccctcaatatgattgtacttgtccctgaaatgtgtttatcttgtcctttatgtataaagtatgtagactgatgtgccac

SEQ ID NO: 238798 - DNA, 120 bp, Artificial Sequence
  ENSG00000120727_23 (sequence is synthesized)
ggaagatgggcgggtgtgggaacagtggtacgcccccattcctgccttccagagagaacgtgcgacagcgttcctgctacacccggcagccggccgtaggggcgcgctggaaaggctgct

SEQ ID NO: 238799 - DNA, 120 bp, Artificial Sequence
  ENSG00000120727_24 (sequence is synthesized)
gcgcgtgcacacgtgtgcagccttggagacagacttcggggtcgcgcgttctcgcgcgcgctctctagtggcttcggagggcagagctgacagaacaagagggcggggttggcggcgacg

SEQ ID NO: 238800 - DNA, 120 bp, Artificial Sequence
  ENSG00000120729_0 (sequence is synthesized)
ggacaggcaagcacatcagatgtcactgtttggcagctgataaaagtcagtggtgctataatactaagcacagagccactagattagtctgtgagggaaggagatgcctcttccttccct

SEQ ID NO: 238801 - DNA, 120 bp, Artificial Sequence
  ENSG00000120729_1 (sequence is synthesized)
tcaatagtgggttaaacccagctggcaccctctggaactacgggaacaatattcttcaagagaaggtcactctaccaaagccaggagcacagtattctcaggatctcaacaaggaagagc

SEQ ID NO: 238802 - DNA, 120 bp, Artificial Sequence
  ENSG00000120729_2 (sequence is synthesized)
agaccaaggttgcttctgattccttacaaccttccgtaattccaggcttgtggccccaaattcagggccccacccttccaggaacaaatcattatagtaataatttgccttcatcttcca

SEQ ID NO: 238803 - DNA, 120 bp, Artificial Sequence
  ENSG00000120729_3 (sequence is synthesized)
tataccaactaagcatgtttaactacgaacgtccaaaacacttcatccagtcccaaaacccatgtggctccagattgcagcctcctggaccagaaacctccagcttctctagccagacca

SEQ ID NO: 238804 - DNA, 120 bp, Artificial Sequence
  ENSG00000120729_4 (sequence is synthesized)
aacagtcttccattatcatccagccccgccagtgtacagagcaaagattttctgcctcctcaacactgagctctcacatcaccatgtcctcctctgctttccctgcttctccccagcagc

SEQ ID NO: 238805 - DNA, 120 bp, Artificial Sequence
  ENSG00000120729_5 (sequence is synthesized)
atgctggctccaacccaggccaaagggttacaaccacctataaccagtccccagccagcttcctcagctccatattaccatcacagcctgattacaatagcagtaaaatcccttccgcta

SEQ ID NO: 238806 - DNA, 120 bp, Artificial Sequence
  ENSG00000120729_6 (sequence is synthesized)
tggattccaactatcaacagtcctcagctggccaacctataaatgcaaagccatcccaaactgcaaatgctaagcccataccaagaactcctgatcatgaaatacaaggatcaaaagaag

SEQ ID NO: 238807 - DNA, 120 bp, Artificial Sequence
  ENSG00000120729_7 (sequence is synthesized)
ctttgattcaagatttggaaagaaagctgaaatgcaaggacacccttcttcataatggaaatcaacgtctaacatatgaagagaagatggctcgcagattgctaggaccacagaatgcag

SEQ ID NO: 238808 - DNA, 120 bp, Artificial Sequence
  ENSG00000120729_8 (sequence is synthesized)
ctgctgtgtttcaagctcaggatgacagtggtgcacaagactcgcagcaacacaactcagaacatgcgcgactgcaagttcctacatcacaagtaagaagtagatcaacctcaaggggag

SEQ ID NO: 238809 - DNA, 120 bp, Artificial Sequence
  ENSG00000120729_9 (sequence is synthesized)
tgccagagaacatgtcgattgatgaaggaagattctgcagaatggacttcaaagtgagtggactgccagctcctgatgtgtcatggtatctaaatggaagaacagttcaatcagatgatt

SEQ ID NO: 238810 - DNA, 120 bp, Artificial Sequence
  ENSG00000120729_10 (sequence is synthesized)
tgcacaaaatgatagtgtctgagaagggtcttcattcactcatctttgaagtagtcagagcttcagatgcaggggcttatgcatgtgttgccaagaatagagcaggagaagccaccttca

SEQ ID NO: 238811 - DNA, 120 bp, Artificial Sequence
  ENSG00000120729_11 (sequence is synthesized)
ctgtgcagctggatgtccttgcaaaagaacataaaagagcaccaatgtttatctacaaaccacagagcaaaaaagttttagagggagattcagtgaaactagaatgccagatctcggcta

SEQ ID NO: 238812 - DNA, 120 bp, Artificial Sequence
  ENSG00000120729_12 (sequence is synthesized)
tacctccaccaaagcttttctggaaaagaaataatgaaatggtacaattcaacactgaccgaataagcttatatcaagataacactggaagagttactttactgataaaagatgtaaaca

SEQ ID NO: 238813 - DNA, 120 bp, Artificial Sequence
  ENSG00000120729_13 (sequence is synthesized)
agaaagatgctgggtggtatactgtgtcagcagttaatgaagctggagtgactacatgtaacacaagattagacgttacggcacgtccaaaccaaactcttccagctcctaagcagttac

SEQ ID NO: 238814 - DNA, 120 bp, Artificial Sequence
  ENSG00000120729_14 (sequence is synthesized)
gggttcgaccaacattcagcaaatatttagcacttaatgggaaaggtttgaatgtaaaacaagcttttaacccagaaggagaatttcagcgtttggcagctcaatctggactctatgaaa

SEQ ID NO: 238815 - DNA, 120 bp, Artificial Sequence
  ENSG00000120729_15 (sequence is synthesized)
gtgaagaactttaataactttaccaacattggaaaacagccaactacaccattagtaatatatttgattacatttttttgaaattaatccatagctgtattaacagattatggttttaat

SEQ ID NO: 238816 - DNA, 120 bp, Artificial Sequence
  ENSG00000120729_16 (sequence is synthesized)
taggtaatatagttaatatatatttataatattatttatcctttgactcttgcacattctatgtacccctccgatttgtgaagcctacaggaaatctgggtatatggatttgtaactgca

SEQ ID NO: 238817 - DNA, 120 bp, Artificial Sequence
  ENSG00000120729_17 (sequence is synthesized)
gaagactatcttaaaatacaggattttaacatttaagtcatgcacatttaacaattacaggttataaattagtatcaactttttaaacacatctaatgcttgtaataacgtttactggta

SEQ ID NO: 238818 - DNA, 120 bp, Artificial Sequence
  ENSG00000120729_18 (sequence is synthesized)
ctgctttctaaatactgttttacccgttttctcttgtaggaatactaacatggtatagattatctgagtgttccacagttgtatgtcaaaagaaaataaaattcaaatatttaaaacgga

SEQ ID NO: 238819 - DNA, 120 bp, Artificial Sequence
  ENSG00000120729_19 (sequence is synthesized)
ggggggatgtttaattcaagaaaaccaatagctatttggcaataaatagatacagctttggaattttcaaatgtttttttcttcctagtctgactgttggtcagagacatccacttcaca

SEQ ID NO: 238820 - DNA, 120 bp, Artificial Sequence
  ENSG00000120729_20 (sequence is synthesized)
ggaaagaaagctgaaatgcaaggacacccttcttcataatggaaatcaagtgggcaagatgtctattttgtacaaaaggccaattaaactataaaatctaattttaataaggaagttcta

SEQ ID NO: 238821 - DNA, 120 bp, Artificial Sequence
  ENSG00000120729_21 (sequence is synthesized)
gctcacagatctaggtccatatatcaacaaggaataagattatctaaaaagaaggaatatttgggccctattccatttctctctgcatgaaatcacctcttggtttacagtagtaaaaga

SEQ ID NO: 238822 - DNA, 120 bp, Artificial Sequence
  ENSG00000120729_22 (sequence is synthesized)
aattctgggcttcttgctagagtggtagtatgttagtgcactgtactttaagggcttaaaagctgaatatatagaacttaccagggctgttcaaatacagccaaaataggaatgttcctt

SEQ ID NO: 238823 - DNA, 120 bp, Artificial Sequence
  ENSG00000120729_23 (sequence is synthesized)
tcaactgtaactacttaattctgcttcattcaagctaacaattgcatgtaaacattcttactttgttttaatttcaagcaacacaactcagaacatgcgcgactgcaagttcctacatca

SEQ ID NO: 238824 - DNA, 80 bp, Artificial Sequence
  ENSG00000120733_0 (sequence is synthesized)
gaacggcggccgcgggtggtgcggagggaggccttgcgggcggatcgggcgcttggcggcggaggtggtgggaggcggcg

SEQ ID NO: 238825 - DNA, 120 bp, Artificial Sequence
  ENSG00000120733_1 (sequence is synthesized)
cggcctccccggtgggcaagcggctgctgctgctgttcgcggacactgcggcctcagcctcggcctcggctcccgcggcggcagcggcgagcggagatccggggcctgcgctgcgcactc

SEQ ID NO: 238826 - DNA, 120 bp, Artificial Sequence
  ENSG00000120733_2 (sequence is synthesized)
actcgagcctggcgggccggcacggtgcgggccatgagcggggcggtgccccaggacctagcgatctttgtagaatttgatggctgtaactggaagcaacactcctgggtaaaagttcat

SEQ ID NO: 238827 - DNA, 120 bp, Artificial Sequence
  ENSG00000120733_3 (sequence is synthesized)
gctgaggaagttatcgtgcttctgctggaagggtctcttgtatgggcgccccgtgaggacccagtccttctccagggcattcgagtctccattgcacaatggccagccctgacttttact

SEQ ID NO: 238828 - DNA, 120 bp, Artificial Sequence
  ENSG00000120733_4 (sequence is synthesized)
ccccttgtagataaactgggtttgggttctgtggttccagtggaatatcttctggatcgagagcttcggttcctgtcagatgccaatgggttgcatctgtttcagatgggaacagatagc

SEQ ID NO: 238829 - DNA, 120 bp, Artificial Sequence
  ENSG00000120733_5 (sequence is synthesized)
caaaaccagattcttttggaacatgctgcactgagagaaacagttaatgctttgatcagtgaccaaaagctacaagagatattcagccgaggtccctacagtgttcaaggtcacagggtc

SEQ ID NO: 238830 - DNA, 120 bp, Artificial Sequence
  ENSG00000120733_6 (sequence is synthesized)
aaaatatatcagccagagggggaagaagggtggctctatggtgttgtgagccatcaggactccatcactcgtcttatggaggtgtctgtaactgagagtggtgagatcaagtcggtagat

SEQ ID NO: 238831 - DNA, 120 bp, Artificial Sequence
  ENSG00000120733_7 (sequence is synthesized)
cccagactaatccatgtgatgctgatggataattcagcgcctcaaagcgaggggggtacgttaaaagcagtaaaatcttccaaaggaaagaagaagagagaaagcatagaggggaaagat

SEQ ID NO: 238832 - DNA, 120 bp, Artificial Sequence
  ENSG00000120733_8 (sequence is synthesized)
ggccggaggaggaaaagtgcttcggactctgggtgtgaccctgcatcaaagaaattaaaaggagacaggggtgaagtagacagtaatgggagcgatggaggtgaggcaagccgagggccc

SEQ ID NO: 238833 - DNA, 120 bp, Artificial Sequence
  ENSG00000120733_9 (sequence is synthesized)
tggaaaggagggaatgccagtggagagccagggctggatcagagagccaagcagccaccgtctacatttgtcccccagataaaccgcaacattcgctttgccacttacaccaaagaaaac

SEQ ID NO: 238834 - DNA, 120 bp, Artificial Sequence
  ENSG00000120733_10 (sequence is synthesized)
ggcaggactctggtggtgcaggatgagcctgtaggtggggacacacctgcatctttcactccatattctacagccacaggtcagacacctttggccccagaggtgggtggagccgaaaac

SEQ ID NO: 238835 - DNA, 120 bp, Artificial Sequence
  ENSG00000120733_11 (sequence is synthesized)
aaagaggcaggaaaaacactggaacaagttggccagggcatagtggcttccgcagctgtggtcactaccgccagctccaccccaaacacagtgaggatctcagacactggccttgcagca

SEQ ID NO: 238836 - DNA, 120 bp, Artificial Sequence
  ENSG00000120733_12 (sequence is synthesized)
gggactgtgccagaaaaacagaaaggcagccggtcgcaggcctcgggagagaattcaagaaattctattctggcctcttctggatttggagcacctctccctagttcatcgcaacctttg

SEQ ID NO: 238837 - DNA, 120 bp, Artificial Sequence
  ENSG00000120733_13 (sequence is synthesized)
acttttggaagtggaaggagccagtccaatggtgttctagccacagagaacaaacctttgggcttctcttttggctgtagctctgcacaagaggcacagaaagacactgatctctccaaa

SEQ ID NO: 238838 - DNA, 120 bp, Artificial Sequence
  ENSG00000120733_14 (sequence is synthesized)
aacttgttttttcaatgcatgtcccaaactttacctaccagtaactacttcactactgtttcagagagtttggctgatgattcttctagtcgggactcattcaaacaaagccttgagagc

SEQ ID NO: 238839 - DNA, 120 bp, Artificial Sequence
  ENSG00000120733_15 (sequence is synthesized)
ctgagctcaggcctgtgtaaaggcagatccgttcttggaacagacactaagccaggctctaaggctggcagctctgtggaccggaaagtgcctgcagagtccatgcccaccctcactcca

SEQ ID NO: 238840 - DNA, 120 bp, Artificial Sequence
  ENSG00000120733_16 (sequence is synthesized)
gccttcccacggagcctcctaaatgcccgtaccccagagaatcatgaaaatctatttttacagccccccaaattgtcccgagaagagccttctaatcctttcctggcatttgtggagaaa

SEQ ID NO: 238841 - DNA, 120 bp, Artificial Sequence
  ENSG00000120733_17 (sequence is synthesized)
gttgaacacagccctttcagtagttttgcatctcaggcatcaggtagctcctcttctgctaccactgtcacctccaaggtggcacccagctggcccgagtctcactcctctgcagattcg

SEQ ID NO: 238842 - DNA, 120 bp, Artificial Sequence
  ENSG00000120733_18 (sequence is synthesized)
gcatctttagcaaagaagaaacccctcttcattacaactgactcctccaagctagtatctggtgttctgggctcagctcttaccagtgggggcccaagcctctctgccatggggaatggc

SEQ ID NO: 238843 - DNA, 120 bp, Artificial Sequence
  ENSG00000120733_19 (sequence is synthesized)
cgctccagctcgcccaccagcagcctcactcagcccattgagatgccaactctctcctctagccccacagaggagaggccaactgtggggcctgggcagcaggacaatcccctcctcaaa

SEQ ID NO: 238844 - DNA, 120 bp, Artificial Sequence
  ENSG00000120733_20 (sequence is synthesized)
acctttagtaacgtctttggcaggcactcaggcggctttctgtcctccccggcagatttttcacaggagaacaaagctccttttgaagctgtgaaaaggttctcactggatgaacgaagc

SEQ ID NO: 238845 - DNA, 120 bp, Artificial Sequence
  ENSG00000120733_21 (sequence is synthesized)
ttggcttgcagacaagactcggactccagcaccaacagtgacctgtcagatttgagtgactctgaggagcagctgcaggctaagacaggcctgaagggaattccagagcacctgatgggg

SEQ ID NO: 238846 - DNA, 120 bp, Artificial Sequence
  ENSG00000120733_22 (sequence is synthesized)
aagctgggccccaatggggagcgcagtgctgagctgttgctgggcaaaagcaaagggaagcaggcccccaagggccggcctcggactgcccccctgaaagttggccagtcagtgctgaaa

SEQ ID NO: 238847 - DNA, 120 bp, Artificial Sequence
  ENSG00000120733_23 (sequence is synthesized)
gatgtaagcaaagtgaagaagctgaagcaatctggagagcccttcctgcaggatgggtcatgcatcaatgtggcacctcatctgcacaagtgtcgtgaatgccgcctggagcggtaccgg

SEQ ID NO: 238848 - DNA, 120 bp, Artificial Sequence
  ENSG00000120733_24 (sequence is synthesized)
aagtttaaggaacaggagcaagatgattctactgtagcctgccgtttctttcacttccggaggttgatcttcactcgaaaaggggtactccgtgtggaggggtttttaagcccccagcaa

SEQ ID NO: 238849 - DNA, 120 bp, Artificial Sequence
  ENSG00000120733_25 (sequence is synthesized)
agtgaccctgatgccatgaacctgtggattccctcttcctccctagcagaagggatagatctagagacctcaaaatacatcctggccaatgttggggaccagttctgccagctcgtaatg

SEQ ID NO: 238850 - DNA, 120 bp, Artificial Sequence
  ENSG00000120733_26 (sequence is synthesized)
tctgagaaggaggccatgatgatggtggagccacaccagaaagtggcatggaagcgagctgtgcgtggtgtacgggagatgtgtgatgtgtgtgaaacaactctcttcaacatccactgg

SEQ ID NO: 238851 - DNA, 120 bp, Artificial Sequence
  ENSG00000120733_27 (sequence is synthesized)
gtttgtcgcaaatgtggatttggggtctgccttgactgttaccggctcaggaaaagccggccacgcagtgagacagaagagatgggtgatgaagaagttttctcctggttgaagtgtgca

SEQ ID NO: 238852 - DNA, 120 bp, Artificial Sequence
  ENSG00000120733_28 (sequence is synthesized)
gacagtcccacgaaccagagaatctcatgcccacacaaattattcctggcacagctctttacaatattggagacatggtacatgctgcccggggcaagtggggaattaaagcaaactgcc

SEQ ID NO: 238853 - DNA, 120 bp, Artificial Sequence
  ENSG00000120733_29 (sequence is synthesized)
cttgtatcagtcgacagaacaaatctgtattgagacctgccgtcaccaatgggatgtcacagcttcctagcataaaccctagtgcctcttctggaaacgaaactaccttctctggtggag

SEQ ID NO: 238854 - DNA, 120 bp, Artificial Sequence
  ENSG00000120733_30 (sequence is synthesized)
gaggaccggcaccagtaacaactccagagccggaccatgttcccaaagccgacagcactgacatcagatctgaagagcctctgaaaacagacagttcggcatcaaatagcaatagtgaac

SEQ ID NO: 238855 - DNA, 120 bp, Artificial Sequence
  ENSG00000120733_31 (sequence is synthesized)
tgaaagccatcaggcctccttgccctgacacggccccaccctcctccgccctgcactggttggcagatttagcaactcagaaggctaaagaagaaacaaaagaagcagggtccctgaggt

SEQ ID NO: 238856 - DNA, 120 bp, Artificial Sequence
  ENSG00000120733_32 (sequence is synthesized)
cggtgctcaataaagagtctcattcaccctttgggctggactcgttcaactccactgcaaaggtctctccgctgactccaaagctttttaacagtctgttgctgggtcccactgcctcca

SEQ ID NO: 238857 - DNA, 120 bp, Artificial Sequence
  ENSG00000120733_33 (sequence is synthesized)
acaacaaaaccgaagggtctagccttcgagacctccttcactccgggccgggaaaacttcctcaaacccccttggacacaggcataccctttcccccggtcttctctacatcctcagcag

SEQ ID NO: 238858 - DNA, 120 bp, Artificial Sequence
  ENSG00000120733_34 (sequence is synthesized)
gagtgaagagcaaggccagcctacccaactttcttgaccacatcattgcctcagtggtagaaaataagaaaacctcagatgcttcaaagcgggcctgcaacttgactgatacccagaagg

SEQ ID NO: 238859 - DNA, 120 bp, Artificial Sequence
  ENSG00000120733_35 (sequence is synthesized)
aagtgaaggagatggtgatggggttaaatgtgctagatccccatacttctcactcctggctttgtgatgggaggcttctgtgtctccatgaccccagcaacaaaaacaattggaagatct

SEQ ID NO: 238860 - DNA, 120 bp, Artificial Sequence
  ENSG00000120733_36 (sequence is synthesized)
tccgggagtgttggaagcaaggtcagccagtgctggtttcgggggtacataaaaagctcaagtctgagctctggaagccagaagcctttagccaggaatttggagaccaggatgtagact

SEQ ID NO: 238861 - DNA, 120 bp, Artificial Sequence
  ENSG00000120733_37 (sequence is synthesized)
tggtgaactgcaggaactgtgctataatttccgatgtgaaagttcgggatttctgggatggtttcgagatcatatgcaaacgactacggtcagaagatgggcagccaatggtgctcaaac

SEQ ID NO: 238862 - DNA, 120 bp, Artificial Sequence
  ENSG00000120733_38 (sequence is synthesized)
tcaaggactggcctcctggggaagattttcgagacatgatgccaaccaggtttgaagatctgatggagaaccttcctctgccagaatataccaaacgagatggcaggctcaatctggcct

SEQ ID NO: 238863 - DNA, 120 bp, Artificial Sequence
  ENSG00000120733_39 (sequence is synthesized)
ctaggctacctagctactttgtaaggcctgatctgggccccaagatgtacaacgcctatgggttgataacagcagaagatagaagagttggtacaacaaatcttcacttagatgtgtctg

SEQ ID NO: 238864 - DNA, 120 bp, Artificial Sequence
  ENSG00000120733_40 (sequence is synthesized)
atgctgttaatgtgatggtgtatgttgggattcccatcggggagggtgctcatgatgaagaggtactcaagacaattgacgagggagatgccgatgaggtgacgaagcagaggattcatg

SEQ ID NO: 238865 - DNA, 120 bp, Artificial Sequence
  ENSG00000120733_41 (sequence is synthesized)
atggaaaagagaagccaggtgctttatggcacatctatgcagccaaggatgcagagaagatccgggagctgctccgaaaggttggagaagaacaaggccaagagaacccccctgatcatg

SEQ ID NO: 238866 - DNA, 120 bp, Artificial Sequence
  ENSG00000120733_42 (sequence is synthesized)
acccaattcatgaccaaagttggtacctggaccagaccctccgtaagcgactctatgaggagtatggcgtgcaaggctgggctattgtgcagttcctaggtgatgctgttttcatacctg

SEQ ID NO: 238867 - DNA, 120 bp, Artificial Sequence
  ENSG00000120733_43 (sequence is synthesized)
ctggagccccacaccaggttcacaatctatacagttgcataaaagtagcagaagactttgtatctccagaacatgtaaagcactgtttccgcctgactcaggaattcaggcatctctcta

SEQ ID NO: 238868 - DNA, 120 bp, Artificial Sequence
  ENSG00000120733_44 (sequence is synthesized)
acactcatacaaatcatgaggataaactgcaggtgaagaacatcatttaccatgcagtgaaagatgcggttggcaccctcaaggctcatgaatccaaactggcaaggtcctaggcatgga

SEQ ID NO: 238869 - DNA, 120 bp, Artificial Sequence
  ENSG00000120733_45 (sequence is synthesized)
gaaactccaagctcctctgtgaagcaggtctttcactcacaacacttaacagggaacggcagggctctttgctggagcagaggcccttcacccagagccagtgtggtcagtattccaaac

SEQ ID NO: 238870 - DNA, 120 bp, Artificial Sequence
  ENSG00000120733_46 (sequence is synthesized)
tctccagccactctcttctacgctgcctcaacactgaaggttgacacaggaaagtcgtactgttcacacacacagtttgagactccaagccaagagtgccacatccctatcctgtggcct

SEQ ID NO: 238871 - DNA, 120 bp, Artificial Sequence
  ENSG00000120733_47 (sequence is synthesized)
tttggaaatccaaattgcctgaacatggcggggctttcctgcacattctcctgatttgagattcacgggcacacctttcttttcttttcctcttgtgcctagttaagtggaaatgtgttt

SEQ ID NO: 238872 - DNA, 120 bp, Artificial Sequence
  ENSG00000120733_48 (sequence is synthesized)
ggagataggggaaatcacataactggtacaagtatggggtaattgcttaaacatgcctggtggaagtctgatagcgtctctgcacgtgacctctgacaaagcccatcccaggagacgggg

SEQ ID NO: 238873 - DNA, 120 bp, Artificial Sequence
  ENSG00000120733_49 (sequence is synthesized)
tgaagctattccccacactctcctgtgaacactggagtcttgcaagacccagggagaacccactgcttttcccaggaggctccaggattaggaaatgtgtgtatttagtgaaaaataggt

SEQ ID NO: 238874 - DNA, 120 bp, Artificial Sequence
  ENSG00000120733_50 (sequence is synthesized)
ttgtagtgaaatagttactatttcatgaaagtagatatttttagaatttttgaaataccacagttgttttcctggattataaggaaaggcacattacatttagtcttcctttcgatataa

SEQ ID NO: 238875 - DNA, 120 bp, Artificial Sequence
  ENSG00000120733_51 (sequence is synthesized)
aactctttgaagaaatatgatttttagaaatcagctacccattatagcacaaaatcagccaaagcagaatttttaaaaattggcttttttaggattctttttctccccctcccatcttag

SEQ ID NO: 238876 - DNA, 120 bp, Artificial Sequence
  ENSG00000120733_52 (sequence is synthesized)
tcttaccttgagggaacagtcatatgagaaggaactttgtcacatctaagctgtggtgtgttccccatgtgtgtgtacaacactggtgactccaggaaccattttcacctattaccagtg

SEQ ID NO: 238877 - DNA, 120 bp, Artificial Sequence
  ENSG00000120733_53 (sequence is synthesized)
ttccctggggactcctcttaatgtttccaaatgggaaggacagttgatttccaacatgaggttttttgttttttatccagaaatattttcagcaaaactttccaactgagtggagtctga

SEQ ID NO: 238878 - DNA, 120 bp, Artificial Sequence
  ENSG00000120733_54 (sequence is synthesized)
ttaaggatttatttgaaaatggtgggattcattggcccataggtacattggaaaatgtatatctctccagctgtactgtagtgccctgcaggctgtttatatgttcacagttactttttt

SEQ ID NO: 238879 - DNA, 120 bp, Artificial Sequence
  ENSG00000120733_55 (sequence is synthesized)
ttttttttttaaataaaagtcatttaatgtagaatacttttaatttcactttctgtattttaattttgttgaagggctgattgggatttccatgttcttattaaaaatctaacaaatctg

SEQ ID NO: 238880 - DNA, 120 bp, Artificial Sequence
  ENSG00000120733_56 (sequence is synthesized)
atctttaaaccagttcatggttgactgatagcacaaagagattcttagcatcttgtcaagatacatacctcagggtctttgtatgggtaaagaatatagaaaaggttgctaagaatactg

SEQ ID NO: 238881 - DNA, 90 bp, Artificial Sequence
  ENSG00000120733_57 (sequence is synthesized)
attagccaggcgtggtggtggttgcctgtaatcccagctactcagggagaatcgcttgaacccgggaggccaagatcatgccactgcact

SEQ ID NO: 238882 - DNA, 120 bp, Artificial Sequence
  ENSG00000120733_58 (sequence is synthesized)
aaaaaaaaaaaagaaaaaaaagagattagtctcccaaaagttactgttgaaaatcggacaccagccaaaccagcagatgtttgtgggagtattctctgtcttccagaacgactacggtca

SEQ ID NO: 238883 - DNA, 120 bp, Artificial Sequence
  ENSG00000120733_59 (sequence is synthesized)
tggaaagtaggtctgtgtttttatctggtcacattcagcagtatgggtgcaggtgtagaacaggtgaatggaaaaactaagaggaactctgggacagctttttaaagaatctagacctac

SEQ ID NO: 238884 - DNA, 120 bp, Artificial Sequence
  ENSG00000120733_60 (sequence is synthesized)
taaatgttatgttaacaagctttactattagcagagaatgcatactgttttggtcgactggtgaaaattcttagtctgattcctgttgtctcattttacttctgtttaggtcccaggagt

SEQ ID NO: 238885 - DNA, 120 bp, Artificial Sequence
  ENSG00000120733_61 (sequence is synthesized)
cttgcattatcttgctgtgtgtagatcccttatatatgtgttttccatggatgccttttgagttgttcagctttagccactgtacatttttttgctctctccacagtctgtctaattaag

SEQ ID NO: 238886 - DNA, 120 bp, Artificial Sequence
  ENSG00000120733_62 (sequence is synthesized)
agatattcagccgaggtccctacagtgttcaaggtcacagggtcaaaatatatcagccagagggggaagaagggtggctctatggtgttgtgagccatcaggactccatcactcgtaatg

SEQ ID NO: 238887 - DNA, 120 bp, Artificial Sequence
  ENSG00000120733_63 (sequence is synthesized)
actggaaaataagcatctatacgcccagctctgcccttgaataataaattatattctggggcataatgggacttgaaaaaataaatgaataaaaaattaaaaacagacagccgggcgtgg

SEQ ID NO: 238888 - DNA, 80 bp, Artificial Sequence
  ENSG00000120733_64 (sequence is synthesized)
ataaatgaataaaaaattaaaaacagacagccgggcgtggttgctcgctcctgtaatttcagtctttttggaggctgatg

SEQ ID NO: 238889 - DNA, 80 bp, Artificial Sequence
  ENSG00000120738_0 (sequence is synthesized)
gagagatcccagcgcgcagaacttggggagccgccgccgccatccgccgccgcagccagcttccgccgccgcaggaccgg

SEQ ID NO: 238890 - DNA, 120 bp, Artificial Sequence
  ENSG00000120738_1 (sequence is synthesized)
gcccgcgcccagggcgagtcggggtcgccgcctgcacgcttctcagtgttccccgcgccccgcatgtaacccggccaggcccccgcaactgtgtcccctgcagctccagccccgggctgc

SEQ ID NO: 238891 - DNA, 120 bp, Artificial Sequence
  ENSG00000120738_2 (sequence is synthesized)
acccccccgccccgacaccagctctccagcctgctcgtccaggatggccgcggccaaggccgagatgcagctgatgtccccgctgcagatctctgacccgttcggatcctttcctcactc

SEQ ID NO: 238892 - DNA, 120 bp, Artificial Sequence
  ENSG00000120738_3 (sequence is synthesized)
gcccaccatggacaactaccctaagctggaggagatgatgctgctgagcaacggggctccccagttcctcggcgccgccggggccccagagggcagcggcagcaacagcagcagcagcag

SEQ ID NO: 238893 - DNA, 120 bp, Artificial Sequence
  ENSG00000120738_4 (sequence is synthesized)
cagcgggggcggtggaggcggcgggggcggcagcaacagcagcagcagcagcagcaccttcaaccctcaggcggacacgggcgagcagccctacgagcacctgaccgcagagtcttttcc

SEQ ID NO: 238894 - DNA, 120 bp, Artificial Sequence
  ENSG00000120738_5 (sequence is synthesized)
tgacatctctctgaacaacgagaaggtgctggtggagaccagttaccccagccaaaccactcgactgccccccatcacctatactggccgcttttccctggagcctgcacccaacagtgg

SEQ ID NO: 238895 - DNA, 120 bp, Artificial Sequence
  ENSG00000120738_6 (sequence is synthesized)
caacaccttgtggcccgagcccctcttcagcttggtcagtggcctagtgagcatgaccaacccaccggcctcctcgtcctcagcaccatctccagcggcctcctccgcctccgcctccca

SEQ ID NO: 238896 - DNA, 120 bp, Artificial Sequence
  ENSG00000120738_7 (sequence is synthesized)
gagcccacccctgagctgcgcagtgccatccaacgacagcagtcccatttactcagcggcacccaccttccccacgccgaacactgacattttccctgagccacaaagccaggccttccc

SEQ ID NO: 238897 - DNA, 120 bp, Artificial Sequence
  ENSG00000120738_8 (sequence is synthesized)
gggctcggcagggacagcgctccagtacccgcctcctgcctaccctgccgccaagggtggcttccaggttcccatgatccccgactacctgtttccacagcagcagggggatctgggcct

SEQ ID NO: 238898 - DNA, 120 bp, Artificial Sequence
  ENSG00000120738_9 (sequence is synthesized)
gggcaccccagaccagaagcccttccagggcctggagagccgcacccagcagccttcgctaacccctctgtctactattaaggcctttgccactcagtcgggctcccaggacctgaaggc

SEQ ID NO: 238899 - DNA, 120 bp, Artificial Sequence
  ENSG00000120738_10 (sequence is synthesized)
cctcaataccagctaccagtcccagctcatcaaacccagccgcatgcgcaagtaccccaaccggcccagcaagacgcccccccacgaacgcccttacgcttgcccagtggagtcctgtga

SEQ ID NO: 238900 - DNA, 120 bp, Artificial Sequence
  ENSG00000120738_11 (sequence is synthesized)
tcgccgcttctcccgctccgacgagctcacccgccacatccgcatccacacaggccagaagcccttccagtgccgcatctgcatgcgcaacttcagccgcagcgaccacctcaccaccca

SEQ ID NO: 238901 - DNA, 120 bp, Artificial Sequence
  ENSG00000120738_12 (sequence is synthesized)
catccgcacccacacaggcgaaaagcccttcgcctgcgacatctgtggaagaaagtttgccaggagcgatgaacgcaagaggcataccaagatccacttgcggcagaaggacaagaaagc

SEQ ID NO: 238902 - DNA, 120 bp, Artificial Sequence
  ENSG00000120738_13 (sequence is synthesized)
cctcttcggccacctcctctctctcttcctacccgtccccggttgctacctcttacccgtccccggttactacctcttatccatccccggccaccacctcatacccatcccctgtgccca

SEQ ID NO: 238903 - DNA, 120 bp, Artificial Sequence
  ENSG00000120738_14 (sequence is synthesized)
cctccttctcctctcccggctcctcgacctacccatcccctgtgcacagtggcttcccctccccgtcggtggccaccacgtactcctctgttccccctgctttcccggcccaggtcagca

SEQ ID NO: 238904 - DNA, 120 bp, Artificial Sequence
  ENSG00000120738_15 (sequence is synthesized)
gcttcccttcctcagctgtcaccaactccttcagcgcctccacagggctttcggacatgacagcaaccttttctcccaggacaattgaaatttgctaaagggaaaggggaaagaaaggga

SEQ ID NO: 238905 - DNA, 120 bp, Artificial Sequence
  ENSG00000120738_16 (sequence is synthesized)
aaagggagaaaaagaaacacaagagacttaaaggacaggaggaggagatggccataggagaggagggttcctcttaggtcagatggaggttctcagagccaagtcctccctctctactgg

SEQ ID NO: 238906 - DNA, 120 bp, Artificial Sequence
  ENSG00000120738_17 (sequence is synthesized)
agtggaaggtctattggccaacaatcctttctgcccacttccccttccccaattactattccctttgacttcagctgcctgaaacagccatgtccaagttcttcacctctatccaaagaa

SEQ ID NO: 238907 - DNA, 120 bp, Artificial Sequence
  ENSG00000120738_18 (sequence is synthesized)
cttgatttgcatggattttggataaatcatttcagtatcatctccatcatatgcctgaccccttgctcccttcaatgctagaaaatcgagttggcaaaatggggtttgggcccctcagag

SEQ ID NO: 238908 - DNA, 120 bp, Artificial Sequence
  ENSG00000120738_19 (sequence is synthesized)
ccctgccctgcacccttgtacagtgtctgtgccatggatttcgtttttcttggggtactcttgatgtgaagataatttgcatattctattgtattatttggagttaggtcctcacttggg

SEQ ID NO: 238909 - DNA, 120 bp, Artificial Sequence
  ENSG00000120738_20 (sequence is synthesized)
ggaaaaaaaaaaaagaaaagccaagcaaaccaatggtgatcctctattttgtgatgatgctgtgacaataagtttgaacctttttttttgaaacagcagtcccagtattctcagagcatg

SEQ ID NO: 238910 - DNA, 120 bp, Artificial Sequence
  ENSG00000120738_21 (sequence is synthesized)
tgtcagagtgttgttccgttaacctttttgtaaatactgcttgaccgtactctcacatgtggcaaaatatggtttggtttttctttttttttttttttgaaagtgttttttcttcgtcct

SEQ ID NO: 238911 - DNA, 120 bp, Artificial Sequence
  ENSG00000120738_22 (sequence is synthesized)
tttggtttaaaaagtttcacgtcttggtgccttttgtgtgatgcgccttgctgatggcttgacatgtgcaattgtgagggacatgctcacctctagccttaaggggggcagggagtgatg

SEQ ID NO: 238912 - DNA, 120 bp, Artificial Sequence
  ENSG00000120738_23 (sequence is synthesized)
atttgggggaggctttgggagcaaaataaggaagagggctgagctgagcttcggttctccagaatgtaagaaaacaaaatctaaaacaaaatctgaactctcaaaagtctatttttttaa

SEQ ID NO: 238913 - DNA, 120 bp, Artificial Sequence
  ENSG00000120738_24 (sequence is synthesized)
ctgaaaatgtaaatttataaatatattcaggagttggaatgttgtagttacctactgagtaggcggcgatttttgtatgttatgaacatgcagttcattattttgtggttctattttact

SEQ ID NO: 238914 - DNA, 120 bp, Artificial Sequence
  ENSG00000120738_25 (sequence is synthesized)
ttgtacttgtgtttgcttaaacaaagtgactgtttggcttataaacacattgaatgcgctttattgcccatgggatatgtggtgtatatccttccaaaaaattaaaacgaaaataaagta

SEQ ID NO: 238915 - DNA, 120 bp, Artificial Sequence
  ENSG00000120742_0 (sequence is synthesized)
agatcgaggcggcgggctgcacattcccgttgttgcgttgcgtttccttcctctttcactccgcgctcacggcggcggccaaagcggcggcgacggcggcgcgagaacgacccggcggcc

SEQ ID NO: 238916 - DNA, 120 bp, Artificial Sequence
  ENSG00000120742_1 (sequence is synthesized)
agttctcttcctcctgcgcacctgccccgctcggtcagtcagtcggcggccggcgcccggcttgtgctcagacctcgcgcttgcggcgcccaggcccagcggccgtagctagcgtctggc

SEQ ID NO: 238917 - DNA, 120 bp, Artificial Sequence
  ENSG00000120742_2 (sequence is synthesized)
ctgagaacctcggcgctccggcggcgcgggcaccacgagccgagcctcgcagcggctccagaggaggcaggcgagtgagcgagtccgaggggtggccggggcaggtggtggcgccgcgaa

SEQ ID NO: 238918 - DNA, 120 bp, Artificial Sequence
  ENSG00000120742_3 (sequence is synthesized)
gatggtcgccaagcaaaggatccgtatggccaacgagaagcacagcaagaacatcacccagcgcggcaacgtcgccaagacctcgagaaatgcccccgaagagaaggcgtctgtaggacc

SEQ ID NO: 238919 - DNA, 120 bp, Artificial Sequence
  ENSG00000120742_4 (sequence is synthesized)
ctggttattggctctcttcatttttgttgtctgtggttctgcaattttccagattattcaaagtatcaggatgggcatgtgaagtgactgaccttaagatgtttccattctcctgtgaat

SEQ ID NO: 238920 - DNA, 120 bp, Artificial Sequence
  ENSG00000120742_5 (sequence is synthesized)
tttaacttgaactcattcctgatgtttgataccctggttgaaaacaattcagtaaagcatcctgcctcagaatgactttcctatcatgcttcatgtgtcattccaaggtttcttcatgag

SEQ ID NO: 238921 - DNA, 120 bp, Artificial Sequence
  ENSG00000120742_6 (sequence is synthesized)
tcattccaagttttctagtccataccacagtgccttgcaaaaaacaccacatgaataaagcaataaaatttgattgttaagatacagtagtggaccctacttattcagtcaattaagagt

SEQ ID NO: 238922 - DNA, 120 bp, Artificial Sequence
  ENSG00000120742_7 (sequence is synthesized)
aagtttttttatgtggttattaaaacagtatgaacaattagtctaactctgcatagacagggtctagattttgttaacccaaatgtataactgcagttagcttaaattacaatttgaagt

SEQ ID NO: 238923 - DNA, 120 bp, Artificial Sequence
  ENSG00000120742_8 (sequence is synthesized)
cttgtggtttttatatagctaggcactttattactcttttgaactgaaagcacactcccttataggttcatgtaactgtcctgtaataaggtgcttataaatggaacaactacacagcct

SEQ ID NO: 238924 - DNA, 120 bp, Artificial Sequence
  ENSG00000120742_9 (sequence is synthesized)
agttttgccacaacctttagcatctaaaaagttttaaaagcttctaaatgtctaatataaagggagatgcttatagccacaacatctattttaccaatattgtttccattacactacctt

SEQ ID NO: 238925 - DNA, 120 bp, Artificial Sequence
  ENSG00000120742_10 (sequence is synthesized)
ggattttgcatgagtgagtatagtaacccaagatgccataaaaaaaaaacttgatcgttttctgacttaatcagttactgtggtttcactaaaagctaccgtggtggagtgaagtcagtc

SEQ ID NO: 238926 - DNA, 120 bp, Artificial Sequence
  ENSG00000120742_11 (sequence is synthesized)
agggaaggtttgtttatgttacatttatttcaccagaactattttaatatatcaaaggggtttactatgccaaacaaaattctagggaaaaatactgctaaaaatggatgcctcatcaga

SEQ ID NO: 238927 - DNA, 120 bp, Artificial Sequence
  ENSG00000120742_12 (sequence is synthesized)
ccataagacattttagcatgttaaatagcacttttaatagcaaaaaaaggcacatcaactgcgaagttatccttagtttgcaaatgctttttctagattaatgatttttcaatcattagg

SEQ ID NO: 238928 - DNA, 120 bp, Artificial Sequence
  ENSG00000120742_13 (sequence is synthesized)
gtactagacacatcagcctaaagtggcatctggaattgaatggatttactgataatgatcagtctttagtcttccctttgttatatgactttataggttatgattgatcaaatttacgtt

SEQ ID NO: 238929 - DNA, 120 bp, Artificial Sequence
  ENSG00000120742_14 (sequence is synthesized)
ttactaatggtaagggtgagggtcatagggcaggttttgggttttctagtactgttgaaaactgcaagtattggctatttgtatacttagccataacttggtgaaaaaaaacctgagcag

SEQ ID NO: 238930 - DNA, 120 bp, Artificial Sequence
  ENSG00000120742_15 (sequence is synthesized)
tgtctatgtattaatgcgttggaaagaaagctgcttgtgtttgctttgttaattgcctcaggatatttcttttaaaataagctgttttaagaggaacagaagggaaatctgctacctagt

SEQ ID NO: 238931 - DNA, 120 bp, Artificial Sequence
  ENSG00000120742_16 (sequence is synthesized)
ctatacacagcgtgaacctcacagggggcttctgataccctcaaacatggagaacagtaagggagcagagtggttaaggactttcaggaacttaactattctggaataaggaatgaatca

SEQ ID NO: 238932 - DNA, 120 bp, Artificial Sequence
  ENSG00000120742_17 (sequence is synthesized)
actgaccttgggccagcaggtttttaactaaattgttacttgcctttctcacccagttaatcagtctctgtacttgtttccctttttgaaacaagtgtcttggttaactaattctgtttt

SEQ ID NO: 238933 - DNA, 120 bp, Artificial Sequence
  ENSG00000120742_18 (sequence is synthesized)
atggttgtgctaaattcatagcaggtgccttattctttgcttttagtcaaaccattccatatcagaattttccttggtttactatagatatttggctttaagttgttgtttgtgtttttt

SEQ ID NO: 238934 - DNA, 120 bp, Artificial Sequence
  ENSG00000120742_19 (sequence is synthesized)
aatgtacaatgttctgataaatttgactgttaaattgctatagctagcaatcattttacatatgtaaaattgcattccctttgtatttcatgtgtaattcaccaattaagtgcagtttat

SEQ ID NO: 238935 - DNA, 120 bp, Artificial Sequence
  ENSG00000120742_20 (sequence is synthesized)
attcaggttggattatgcatgtttaggtaaacgaaagctgtgtcttacttgatttattctttaaaaataaagttccctgaatatttgatgcttttcttctaaacggaaatgattttacag

SEQ ID NO: 238936 - DNA, 120 bp, Artificial Sequence
  ENSG00000120742_21 (sequence is synthesized)
ttatctgagtgtaccttttatagttagtagaaaatgattttaaagaatgtttagtattgtacttaaatggtatgcagaggcacagatgtaaggtttataactggaaataggtggtaagaa

SEQ ID NO: 238937 - DNA, 120 bp, Artificial Sequence
  ENSG00000120742_22 (sequence is synthesized)
aaatatatagaaagcacaatgatttgaatatttttccacttaggatttcctaatctccttgtcatccaattcaagctcaagatgaagcacaattctttgatctccctttgccagttgaat

SEQ ID NO: 238938 - DNA, 120 bp, Artificial Sequence
  ENSG00000120742_23 (sequence is synthesized)
tttatagatcatctaatgttgagcacagtatgagaataaatattggggttgtcaacattactcagttactctttgtggtttaactctaacatttcaacaagttgtcaattaattgtatct

SEQ ID NO: 238939 - DNA, 120 bp, Artificial Sequence
  ENSG00000120742_24 (sequence is synthesized)
gttgggttgtatataatgttgctcaaaataattaagtggacttccaaaaataagatttccattgtaacaggatgcattgtgatgggctttgacttacattaaagaaatgtggatagtcaa

SEQ ID NO: 238940 - DNA, 120 bp, Artificial Sequence
  ENSG00000120742_25 (sequence is synthesized)
actcaccaccatcttggtagtgtgcaagactctgggacggcatgagaaaggcagaaagggagcaaaggagctggtggggtgtcacagggcctatgtatgaggcagatgtgagttctgcat

SEQ ID NO: 238941 - DNA, 120 bp, Artificial Sequence
  ENSG00000120742_26 (sequence is synthesized)
ccagttttgcaatttatccatttacctgcctgagacttggaaacacctactttatagtcctgattcaagtgttggcggatggaagggaggagactcctgaccctcagaatgacctaaatg

SEQ ID NO: 238942 - DNA, 120 bp, Artificial Sequence
  ENSG00000120742_27 (sequence is synthesized)
acttcacaagggcccgtgtaacaccagtattgcagacccatgtgtcacaaattcaactagcacattgtttttctcccccttcttctatttctgtagaagatgaatccgcaggcaagaatg

SEQ ID NO: 238943 - DNA, 120 bp, Artificial Sequence
  ENSG00000120742_28 (sequence is synthesized)
atggatgggtgaaagggagggggaatacgaaagcccagaggcggagacttcacttccgattgccacgctatatcaagaaagccaacagtctggcctttccgcaagccacaagaaaaggca

SEQ ID NO: 238944 - DNA, 120 bp, Artificial Sequence
  ENSG00000120742_29 (sequence is synthesized)
gatcagactccccggctcctcgggtagttctcaaaggcaaagacaaaaataagaaactagtctgaagaaagagagtccctcgcttcttcagaactcacctgtcaagagcggcgtggacgg

SEQ ID NO: 238945 - DNA, 120 bp, Artificial Sequence
  ENSG00000120742_30 (sequence is synthesized)
cgccatgttgtcccggaaagagaaaccgctcgggtgagagttcaccagggccgaacccggcccctacacgtctcctcatgcgtggagacagcgaattggtgtttccggagccatcagcct

SEQ ID NO: 238946 - DNA, 120 bp, Artificial Sequence
  ENSG00000120742_31 (sequence is synthesized)
cggggccaattcacttccggttacggagtgacgcggaaaaggcgcccaaacgcgcacgcgcaaatctagggcgacgcttgacagagcttgggagggtgcgcctgctttcgccctccttct

SEQ ID NO: 238947 - DNA, 120 bp, Artificial Sequence
  ENSG00000120742_32 (sequence is synthesized)
ccggtcagtagtgagtcctacctgcgtagttctcaacccacctgccgaggactccacataattctgtttcgtctgaaccaaattacttgttccacatatgcacagagggtggtgctccag

SEQ ID NO: 238948 - DNA, 120 bp, Artificial Sequence
  ENSG00000120742_33 (sequence is synthesized)
aaacttctcccagcttaatttgtactcacaggagatcaaaaaggaggtcaggtcttggtaatgatccagttggaataaatgttaagaccggacaaaacctaacgaaatgagaatttagaa

SEQ ID NO: 238949 - DNA, 120 bp, Artificial Sequence
  ENSG00000120742_34 (sequence is synthesized)
ttcaaatgcaaatttccttattaagaatgtgaaactcaaagatcaatggcttttcaaaagcagcacaccaaactgtcaaagtggtgatccctcttcatttgacatgctcacaaagaggag

SEQ ID NO: 238950 - DNA, 120 bp, Artificial Sequence
  ENSG00000120742_35 (sequence is synthesized)
aataagacaagaaagcaagctaacccagaaacagtgaggtgacagtgcgcctcaaacacaggaaaataaaatgcataactatactgattggatgctgctcaaaatcagcctacatgccat

SEQ ID NO: 238951 - DNA, 120 bp, Artificial Sequence
  ENSG00000120742_36 (sequence is synthesized)
ctttggtacgtgtgaacaaagttaccaattcctattctaactatgatatactcaaaactgtacaatcagtaatgggatgctctaaagacaaaagaactgcaaaccctttttaaaaaatta

SEQ ID NO: 238952 - DNA, 120 bp, Artificial Sequence
  ENSG00000120742_37 (sequence is synthesized)
aataccttgtggataatgtggaacaaaccaaatgaatacttatgtgaatgtgatattctcaaattatcatccctggtattccagagtaacaagattcttggtggtgacagaaggcaatac

SEQ ID NO: 238953 - DNA, 120 bp, Artificial Sequence
  ENSG00000120742_38 (sequence is synthesized)
gtggtgacagaaggcaatacaaataagatagaagttaaataaaaaccttgtagtcttcaatttaaataaaactatacgtataaaactttaatttaaataaaattatgattgttacatctt

SEQ ID NO: 238954 - DNA, 120 bp, Artificial Sequence
  ENSG00000120742_39 (sequence is synthesized)
tagaaacaatgatcaatgcaacagcaaataagaatctctagaacctaaatacctttttttttgctagactcagccaatttttcaagaaaccctattaccttttaatgtttccttcaatga

SEQ ID NO: 238955 - DNA, 120 bp, Artificial Sequence
  ENSG00000120742_40 (sequence is synthesized)
tgtaatggttagaaatgtacaaattaatcctagaatgacttgtcttaccatatagcaaagaagtcactaaggattaattgatcaaagatgagacaatttgagcatcaataagaaaaataa

SEQ ID NO: 238956 - DNA, 120 bp, Artificial Sequence
  ENSG00000120742_41 (sequence is synthesized)
tgagacaatttgagcatcaataagaaaaataactacaatggactgaaacacataccttttaaatccacagctcattaagaatgggactaaaaaggccaggcgtggtggctcacgcctgta

SEQ ID NO: 238957 - DNA, 120 bp, Artificial Sequence
  ENSG00000120756_0 (sequence is synthesized)
atcaagattaatatctgtagtaataggcagaacacttcagtgtggaattgcttcttttctttggtcaaacactaactttggcagaggatagacacagcttaggaagactgaattttaagt

SEQ ID NO: 238958 - DNA, 120 bp, Artificial Sequence
  ENSG00000120756_1 (sequence is synthesized)
cttctgaattgtttttctggacttccaaatctcaagtgataagaccagcagaagcagatataaagacctgaagatagtcttttctgtccaaagatggaaaacagtactactaccatttct

SEQ ID NO: 238959 - DNA, 120 bp, Artificial Sequence
  ENSG00000120756_2 (sequence is synthesized)
cgggaggagcttgaagaactacaagaggcatttaataaaatagatattgacaatagtgggtatgtcagtgactatgaacttcaagacctgtttaaggaagcaagccttcctctgcctggc

SEQ ID NO: 238960 - DNA, 120 bp, Artificial Sequence
  ENSG00000120756_3 (sequence is synthesized)
tacaaggtgcgcgagattgtggagaaaattctatcagttgctgacagcaacaaagatggcaaaatcagttttgaagagtttgtgtcactaatgcaagaattaaaaagcaaagatatcagc

SEQ ID NO: 238961 - DNA, 120 bp, Artificial Sequence
  ENSG00000120756_4 (sequence is synthesized)
aaaacattccgaaaaataattaacaagagggaagggattactgctattggaggaacttcaactatttccagtgagggcacacagcattcttattcagaggaagaaaaagtggcttttgtt

SEQ ID NO: 238962 - DNA, 120 bp, Artificial Sequence
  ENSG00000120756_5 (sequence is synthesized)
aactggataaacaaagccctggagaatgaccctgactgtaagcatcttatacccatgaatcccaatgatgatagtcttttcaagtcacttgcagatggcatccttctttgcaaaatgatc

SEQ ID NO: 238963 - DNA, 120 bp, Artificial Sequence
  ENSG00000120756_6 (sequence is synthesized)
aacttatctgaaccagatacaattgatgaaagagccatcaataagaaaaagctcacgccattcactatttctgaaaatttaaacctagctctgaattctgcctcagccattggttgtaca

SEQ ID NO: 238964 - DNA, 120 bp, Artificial Sequence
  ENSG00000120756_7 (sequence is synthesized)
gtggtcaacattggtgcatcagatctcaaagaaggaaaacctcacttggtcttgggacttctctggcagatcatcaaagttggcctttttgctgatattgagatttccaggaatgaagct

SEQ ID NO: 238965 - DNA, 120 bp, Artificial Sequence
  ENSG00000120756_8 (sequence is synthesized)
ctgattgcattgttaaatgaaggtgaggaactagaggagctgatgaagctttctcccgaggaattactgctgcgatgggtgaactaccatctgaccaatgcaggatggcataccatcagc

SEQ ID NO: 238966 - DNA, 120 bp, Artificial Sequence
  ENSG00000120756_9 (sequence is synthesized)
aacttcagccaagacattaaggactcgagagcctattttcatctgcttaatcagattgcccctaaaggtggggaagatggacctgccattgccattgacctttcaggaattaatgagaca

SEQ ID NO: 238967 - DNA, 120 bp, Artificial Sequence
  ENSG00000120756_10 (sequence is synthesized)
aatgacctgaagcgtgctggactcatgcttcaagaagcagataaactgggctgcaaacagtttgttactcctgcagatgtggtttcaggcaatcctaaacttaatttagcttttgtagct

SEQ ID NO: 238968 - DNA, 120 bp, Artificial Sequence
  ENSG00000120756_11 (sequence is synthesized)
aatttgtttaacacatacccgtgcctgcacaagccgaataataatgacatcgatatgaatttactggaaggagagagcaaggaagagagaacatttcggaactggatgaattccttggga

SEQ ID NO: 238969 - DNA, 120 bp, Artificial Sequence
  ENSG00000120756_12 (sequence is synthesized)
gtcaacccatacattaatcatttgtacagtgaccttgcagatgctttagtgatctttcagctctatgagatgatccgagtgccagtcaactggagccatgtcaacaaacctccttatcct

SEQ ID NO: 238970 - DNA, 120 bp, Artificial Sequence
  ENSG00000120756_13 (sequence is synthesized)
gcccttggagggaacatgaagaagattgaaaactgtaactatgcagtggaacttgggaagaacaaggccaaattctccttggttggcattgctgggcaggacctaaatgaagggaattca

SEQ ID NO: 238971 - DNA, 120 bp, Artificial Sequence
  ENSG00000120756_14 (sequence is synthesized)
acacttaccctggcattggtatggcagctgatgagaaggtacacattgaatgtgttatcggatcttggagagggtgaaaaagtaaatgatgaaattataattaaatgggtcaatcagact

SEQ ID NO: 238972 - DNA, 120 bp, Artificial Sequence
  ENSG00000120756_15 (sequence is synthesized)
cttcaaggataaatctataagcacaagtttacctgtcctagatttaatagatgccattgcaccaaatgcagttcgtcaagaaatgatcaggagagaaaacttatctgatgaggacaagct

SEQ ID NO: 238973 - DNA, 120 bp, Artificial Sequence
  ENSG00000120756_16 (sequence is synthesized)
gaacaatgctaaatacgccatttcagttgctcgaaagatcggtgcccggatatatgcattacctgatgacctcgtagaagtgaaaccaaagatggttatgacggtgtttgcatgcttaat

SEQ ID NO: 238974 - DNA, 120 bp, Artificial Sequence
  ENSG00000120756_17 (sequence is synthesized)
gggaaaaggactgaacagaataaaataatcatttcatatgattttctgccacattaaacatattgtatgcctcacagtttacaggattctgaaatgtagtgggtgtaaaaccagagatta

SEQ ID NO: 238975 - DNA, 120 bp, Artificial Sequence
  ENSG00000120756_18 (sequence is synthesized)
tttgtatgctcaaaatagttatatattcattaatgaattcaatatcctgttcatactagttagagctggtcagcctttttgggtaacacagttaatttaccaactgatacagataataga

SEQ ID NO: 238976 - DNA, 120 bp, Artificial Sequence
  ENSG00000120756_19 (sequence is synthesized)
atatattcataatcaagctgatacttcatgattaaattatttttgttgcttaaaagtcgtattagacaagactaaatcattcttttttatggttcaaaaaagatgaatacaaacgttttt

SEQ ID NO: 238977 - DNA, 120 bp, Artificial Sequence
  ENSG00000120756_20 (sequence is synthesized)
gcaggttctgctgtgaaatgtggtttgatttttttggtgtgttaattttgatcataaatgcattcatactcataatccagtttaatccttttatttgcttcctccaactatttaaagtgg

SEQ ID NO: 238978 - DNA, 120 bp, Artificial Sequence
  ENSG00000120756_21 (sequence is synthesized)
tccaaaaacacttttctgtaagtttctatactgtctaaaaccttatggtgaccagaattgtttattaatatcaaacttttttatatatgagaactaattcttgaataaaccccaaagttc

SEQ ID NO: 238979 - DNA, 120 bp, Artificial Sequence
  ENSG00000120756_22 (sequence is synthesized)
actctcttgtttaagtagcagcagctttttacttaaaatttaattttaactacattgatactttacacatcctagtttggtaacacagctttaactatgtcatgcaacatatatatgttg

SEQ ID NO: 238980 - DNA, 120 bp, Artificial Sequence
  ENSG00000120756_23 (sequence is synthesized)
gtaggatgttattagagagatatgtgtgcatatatatttttttgcacctgaatcacccagcttttcataagtggtatgtttaattggtcattcagccaaccatcagtattttccccccac

SEQ ID NO: 238981 - DNA, 120 bp, Artificial Sequence
  ENSG00000120756_24 (sequence is synthesized)
aacatgtgtaacacttttcagtctgtggatatctgatacattaagatttctttttataagtattcattttgaatgtgcatatagttatttgaccccttccaaatacttgtagccaaacat

SEQ ID NO: 238982 - DNA, 120 bp, Artificial Sequence
  ENSG00000120756_25 (sequence is synthesized)
tggctagaacatcccaagatatgctgacactgtcctgttagcttcatattatacttgctagtttaggtctctatagaagccctatataatttagaatatgcccactgaatatctttaata

SEQ ID NO: 238983 - DNA, 120 bp, Artificial Sequence
  ENSG00000120756_26 (sequence is synthesized)
gaaagtaacataaagctagtattcaatgtagagtattttcatatgtttttcacagcccgttacaaattggcaatgtttggttaatgtttgtattacttggaaatcgctacagcttggact

SEQ ID NO: 238984 - DNA, 120 bp, Artificial Sequence
  ENSG00000120756_27 (sequence is synthesized)
atttttttctaaatttttagcattagtccatttctgctgctaacaattgaatccagaaatctactttctccatcttccactgttagtgccagtgagcaatactgttgtgcaacaaaaatg

SEQ ID NO: 238985 - DNA, 120 bp, Artificial Sequence
  ENSG00000120756_28 (sequence is synthesized)
tcactttatctcagtgtgaatgagtagtctaaattccctttctaccattgatttaaatatatatattggtaagagagactgcccatgtgtttagaatagaattttttaaatgaaatgatc

SEQ ID NO: 238986 - DNA, 120 bp, Artificial Sequence
  ENSG00000120756_29 (sequence is synthesized)
aacaggtggaatttgaaatatattcttctacaaaagagatttctttcccttttatattttgatgattgttttcttaagattaagatatgttcttgctcttttataagattatttaaatta

SEQ ID NO: 238987 - DNA, 120 bp, Artificial Sequence
  ENSG00000120756_30 (sequence is synthesized)
tgtttccctctgattttttttcaccattgtatttactaagttattggatttacatgaaatctggcactttagggtgttctttttctcacagagtatatttaataaaaatgctgtgtatat

SEQ ID NO: 238988 - DNA, 120 bp, Artificial Sequence
  ENSG00000120756_31 (sequence is synthesized)
agtggcgcgagcgcagcggctacgcgggcgcggagaggtagccgcagagtggacctgcaggtacttggatctccagtgggagctgccctctcgaaggcaggacagcggtggcggcagata

SEQ ID NO: 238989 - DNA, 120 bp, Artificial Sequence
  ENSG00000120756_32 (sequence is synthesized)
aattctccataggaacactatcaagtctttttccataaaagtcagataaaagaaagatcacatttcttgatattctttgaagcaactttatttttattgtcatgcttcatcctgcccgaa

SEQ ID NO: 238990 - DNA, 120 bp, Artificial Sequence
  ENSG00000120756_33 (sequence is synthesized)
tactgccaagtctttctcaggcacctggaatctgctcctcagcctctgttgtcctgggtctaatgtagagcaaaaggctgagaggaagctcttctattctccatcatcggtcttcagtgg

SEQ ID NO: 238991 - DNA, 120 bp, Artificial Sequence
  ENSG00000120756_34 (sequence is synthesized)
agccgcagagtggacctgcaggtacttggatctccagtgggagctgccctctcgaaggcaggacagcggtggcggcagggaaggccagcgttggattgtgtaggttgcaaaatgcagtac

SEQ ID NO: 238992 - DNA, 120 bp, Artificial Sequence
  ENSG00000120756_35 (sequence is synthesized)
ctcagacttgcaactctgaaaagcactgtttgaaatctctgtaaagagtgaaaaacttcaagttttaaccaatgagtgttttagaggttaaagtttaaactctgacttggaagcacgctg

SEQ ID NO: 238993 - DNA, 120 bp, Artificial Sequence
  ENSG00000120756_36 (sequence is synthesized)
gggcgcggagaggtagccgcagagtggacctgcaggtacttggatctccagtgggagctgccctctcgaaggcaggacagcggtggcggcagagacagagtctccctgtgttgcccaggc

SEQ ID NO: 238994 - DNA, 120 bp, Artificial Sequence
  ENSG00000120756_37 (sequence is synthesized)
aatggccatggatatattgttattgttctgatatgaaacaaagaatttagagtttcatgaagttatacgtgctctgtccccacaattctgattcagaccaaaatgtgttaagcttaatag

SEQ ID NO: 238995 - DNA, 120 bp, Artificial Sequence
  ENSG00000120756_38 (sequence is synthesized)
cctttttacaagtttgctttaataaatttgaagatgaaggcaatccctctagtcagacactttatataactattttcatctttatcaagtcatagtacttaatgttctttgagatgtcct

SEQ ID NO: 238996 - DNA, 120 bp, Artificial Sequence
  ENSG00000120756_39 (sequence is synthesized)
gtaaatgtattctttttttacaattggtataacgttctgaatgtttattggttatccactcatttattcaacagatatttatcaattacctaatacctatacagtgttatgcaggatgta

SEQ ID NO: 238997 - DNA, 120 bp, Artificial Sequence
  ENSG00000120756_40 (sequence is synthesized)
ctcagactcaagttggatcatcagaatctctcttgtgttgctgtgaatgatttgcattgaaattcccagctagaactggaggaaagaggattacaaaccaggagatataaagacctgaag

SEQ ID NO: 238998 - DNA, 120 bp, Artificial Sequence
  ENSG00000120756_41 (sequence is synthesized)
agtggacctgcaggtacttggatctccagtgggagctgccctctcgaaggcaggacagcggtggcggcagccacggtgttggatacacttgtatgaggcttcagctgtgctgcataaatt

SEQ ID NO: 238999 - DNA, 120 bp, Artificial Sequence
  ENSG00000120756_42 (sequence is synthesized)
tcttgaagaacctgtgagccagaagcaaaatttcaggacagggggcacacactgaacttgaagaaacattttccaagatgctaaaagtatggcttctactcatttttcccaaaaactgaa

SEQ ID NO: 239000 - DNA, 120 bp, Artificial Sequence
  ENSG00000120756_43 (sequence is synthesized)
gtacttcctctgtaccttatattgcttagttaaatgtttccaaaggcttcatgctttttttataatattgctttttctagatataaagacctgaagatagtcttttctgtccaaagatgg

SEQ ID NO: 239001 - DNA, 120 bp, Artificial Sequence
  ENSG00000120784_0 (sequence is synthesized)
tggggctgggagccgggcgccactgtggccgctgcttttctgagggaaaagagcgcggagtgggccaggttttgcaggccgggccaaggtggagaaaaggttcctgtggagcctcaggcc

SEQ ID NO: 239002 - DNA, 120 bp, Artificial Sequence
  ENSG00000120784_1 (sequence is synthesized)
ggtgtgctttttttcccgggactgagcttctgcagccctgaggcctggaggcccgggcggtagtaactgtgccggaccaggttcgtgggtgcggcctgtggtgcagttggagaccgaggc

SEQ ID NO: 239003 - DNA, 120 bp, Artificial Sequence
  ENSG00000120784_2 (sequence is synthesized)
cccgcgcatcctcgtccgcgcttcagccacttaggctcggccgtagcgaaaaggcccaagagggaagtcagaggtggcggttagttggggccagggaagcgtggagggtgggttccaatc

SEQ ID NO: 239004 - DNA, 120 bp, Artificial Sequence
  ENSG00000120784_3 (sequence is synthesized)
gagtcaagaaaagcctggggtgtcctgaactctgcctgcttccccagccctgccagtttccagagaaggcgcttgagaaggagaaacgaatcgctgctgctcttctaaaagccggttccc

SEQ ID NO: 239005 - DNA, 120 bp, Artificial Sequence
  ENSG00000120784_4 (sequence is synthesized)
tctctggtgtctgtggaccctgcttctgaagtacatgaaccttgaggaaaattgaccagttctagcagttctaaaatcatggctcgtgatttggtgatgttcagagatgtggctgtagac

SEQ ID NO: 239006 - DNA, 120 bp, Artificial Sequence
  ENSG00000120784_5 (sequence is synthesized)
ttttctcaggaagaatgggaatgcctgaactcatatcagaggaatttgtacagagatgtgatattagagaactatagcaacttggtgtcactggcaggatgttctatttctaagccagat

SEQ ID NO: 239007 - DNA, 120 bp, Artificial Sequence
  ENSG00000120784_6 (sequence is synthesized)
gtgatcaccctattggaacaagggaaagagccctggatggttgtgagggatgagaaaagaagatggactctagatttggaatccagatatgacactaaaaagttatttcaaggaaaggat

SEQ ID NO: 239008 - DNA, 120 bp, Artificial Sequence
  ENSG00000120784_7 (sequence is synthesized)
atttatgaaatgaacttatctcagtggaaggtaatggaaagaattaaaagctgtggacttgaagaacaagaaagtcctcatgaggtgtgtttcaggcaagtgacaaaaaccacctctgaa

SEQ ID NO: 239009 - DNA, 120 bp, Artificial Sequence
  ENSG00000120784_8 (sequence is synthesized)
aaaatgcctacttacagaaaactcacatctcttcctctgtatcagaaaagtcataacagagagaaaccctacgaatgtggggaatgtgggaaggcttttagagtacgacaacaacttact

SEQ ID NO: 239010 - DNA, 120 bp, Artificial Sequence
  ENSG00000120784_9 (sequence is synthesized)
atactggtgagaaaccctatgaatgtaaagaatgtggaaaagcctttagacagtgtgcccacctcagtcgacatcagagaattcatacttctgacaaactctatgaatgtaaaaaatgtg

SEQ ID NO: 239011 - DNA, 120 bp, Artificial Sequence
  ENSG00000120784_10 (sequence is synthesized)
gaatgtaaaaaatgtggaaagatcttcacatgtggctcagaccttcgagtacatcagagaattcatattggtgagaagccgtatgaatgtaaagaatgtgggaaagcctttagagttaga

SEQ ID NO: 239012 - DNA, 120 bp, Artificial Sequence
  ENSG00000120784_11 (sequence is synthesized)
ggacaacttaatctccatcaaaggattcacacgggtgagaaaccctatgaatgtaaagaatgtgggaaggcctttaggcagtatgcacaccttactcgacatcagagactgaacattgct

SEQ ID NO: 239013 - DNA, 120 bp, Artificial Sequence
  ENSG00000120784_12 (sequence is synthesized)
gagaagtgctatgagtgtaaggaatgtggtcaggcctttctgtgtagtacaggccttcgactacatcacaaacttcatactggagaaaaaccctatgaatgtaaggagtgtggaaaggcc

SEQ ID NO: 239014 - DNA, 120 bp, Artificial Sequence
  ENSG00000120784_13 (sequence is synthesized)
tttagagtgcggcagcaacttactctccatcagagaattcacactggtgagaagccttatgattgtaaggaatgtgggaagactttcagtcgtggctatcatctaactctccatcagaga

SEQ ID NO: 239015 - DNA, 120 bp, Artificial Sequence
  ENSG00000120784_14 (sequence is synthesized)
atacatactggtgaaaagccctatgaatgtaaggaatgtcagaagttctttcgtcgttactcagaacttatttcacatcagggtattcacattggagagaaaccttatgaatgtaaggaa

SEQ ID NO: 239016 - DNA, 120 bp, Artificial Sequence
  ENSG00000120784_15 (sequence is synthesized)
tgtgggaaggcatttaggctgttctcacagcttactcaacatcagagtattcattttggtgagaaaccctttaagtgtaaggaatgtgagaagacttttagactgctttcacaacttacc

SEQ ID NO: 239017 - DNA, 120 bp, Artificial Sequence
  ENSG00000120784_16 (sequence is synthesized)
caacatcaaagtattcatactggtgaaaagccctatgactgtaaggaatgtggaaaggcctttagacttcattcatcactgattcaacatcagagaattcattctggtgagaaaccatac

SEQ ID NO: 239018 - DNA, 120 bp, Artificial Sequence
  ENSG00000120784_17 (sequence is synthesized)
aaatgtaaggaatgtaaaaaggcatttagacaacattcacatcttacttaccatcagcgaattcataatgtaacttaataattattagaactcttcctttgcgaattttatgttgagcat

SEQ ID NO: 239019 - DNA, 120 bp, Artificial Sequence
  ENSG00000120784_18 (sequence is synthesized)
aggaagtacattctagaggaaaggtttttgaacgtgggaatcccttttgcttcatgctcacaactaagcataggaagttttatttaaaggaaagaatatgttaatgaacatatagaagcc

SEQ ID NO: 239020 - DNA, 120 bp, Artificial Sequence
  ENSG00000120784_19 (sequence is synthesized)
tttcatcacctttgaaaccatgttaaactttaggaaattcatcctagaaaagaactttattacaggactgaatgtggaaaagcttttgatcttacctattattatctccatattcttcca

SEQ ID NO: 239021 - DNA, 120 bp, Artificial Sequence
  ENSG00000120784_20 (sequence is synthesized)
tctgtgtatatacacacgaaggttgctagggaaccacttcattctgaaaatgtgtaaatgaaaggaaagtcatttagtctgcatttcctgtaggaactgtatttcagggcaaccagaagt

SEQ ID NO: 239022 - DNA, 120 bp, Artificial Sequence
  ENSG00000120784_21 (sequence is synthesized)
taaggaggtaaagttcttctttattagaaaattccaggctaatgaatgcagaaagaataatagaaaattatattagaaaaactattgtgtaacacataatgaaataatggatctaggcat

SEQ ID NO: 239023 - DNA, 120 bp, Artificial Sequence
  ENSG00000120784_22 (sequence is synthesized)
gattctctgtacaggttgacaccattcagtgaaggttgtgaactttatagtgaatagatgagactgacaacgtctgaacccactcatcatctcaacttcacaaaaagcaagagagtaaaa

SEQ ID NO: 239024 - DNA, 120 bp, Artificial Sequence
  ENSG00000120784_23 (sequence is synthesized)
attacgtgcctcctaatgtgctacagtaagatatacacatcttgccaaaaatattgaacctgaatttaagcctcaagagccaactcccagtttagagaaaattcaaggaatggaagagta

SEQ ID NO: 239025 - DNA, 120 bp, Artificial Sequence
  ENSG00000120784_24 (sequence is synthesized)
aattacatgacacaaaaaggagcaattaaatctaaaataagggtaattctacaagaggaatcacctggtttcccaaccaataaaatggcattttaagaaataaggtggaactcctaggta

SEQ ID NO: 239026 - DNA, 120 bp, Artificial Sequence
  ENSG00000120784_25 (sequence is synthesized)
taacaataattgggagaatggaatattgacaatattagataatattaagaaactttgttatgtgtgataatagcattgtggttatgtaaaagtgtatttgttagagataatttctgaagt

SEQ ID NO: 239027 - DNA, 120 bp, Artificial Sequence
  ENSG00000120784_26 (sequence is synthesized)
ctatacacaggagatgatatatctggaatgtccttttgttcatacaaaagaaaaatgaggatgaataacaagtttggcaaaatgatggtaacctaagtcttggatacatggtttttattt

SEQ ID NO: 239028 - DNA, 120 bp, Artificial Sequence
  ENSG00000120784_27 (sequence is synthesized)
gttttgtttttgctattctacttttgtgtatttaaaattttccatgatgttcttttaaagatcaaattatccatgaaattatagccagtttaaaatgaattattttaaaaaaaatttctg

SEQ ID NO: 239029 - DNA, 120 bp, Artificial Sequence
  ENSG00000120784_28 (sequence is synthesized)
gggcaacaagagcaaaactctatctcaaagaaaaaaagaaaatttctacatattaaaacttgtggatgttgccaaagctctacacattgggattggaatattaattacactataatgacg

SEQ ID NO: 239030 - DNA, 120 bp, Artificial Sequence
  ENSG00000120784_29 (sequence is synthesized)
actataatgacgataatgtattcaggaagttaaaatgtaggtccacattttatttagttgacctctctatctctatattatagtacccatggtatgcaccttttttttttttttttttga

SEQ ID NO: 239031 - DNA, 120 bp, Artificial Sequence
  ENSG00000120784_30 (sequence is synthesized)
ggattacaggcgtgagccaccatgcccgactctcacttcatatgtttaaagaatgagtaaaagaaagcaattactactgctaaatgtgggaaataatggactagacctgtactaatatat

SEQ ID NO: 239032 - DNA, 120 bp, Artificial Sequence
  ENSG00000120784_31 (sequence is synthesized)
taatatatggtagtcactagcaacctgttgagcacttgaaattgagttattgagcactgaaatgtggctagtccaaattcaaatggtgtttttttgtaaaacacaagattctgaagactt

SEQ ID NO: 239033 - DNA, 120 bp, Artificial Sequence
  ENSG00000120784_32 (sequence is synthesized)
aaatggtgtttttttgtaaaacacaagattctgaagacttagttattttaaaaaagttaagtatctcaatttttcatattgagtacatattgaaataatattttagatatattggttcaa

SEQ ID NO: 239034 - DNA, 120 bp, Artificial Sequence
  ENSG00000120784_33 (sequence is synthesized)
aattgttataggaaaatttatatatgtagctcacgtatttctattgtcagcgctggcataaacaataaaaagtagacttggtttttttgtgtgtgtttctttaaaagataccaatatagt

SEQ ID NO: 239035 - DNA, 120 bp, Artificial Sequence
  ENSG00000120784_34 (sequence is synthesized)
caagacctttgcagttttgatcacagaaatatgaaagattacacagctacagctatatgaatgataaaagtgacagctatggatttttaaagttataagttgctatactacatatatgta

SEQ ID NO: 239036 - DNA, 120 bp, Artificial Sequence
  ENSG00000120784_35 (sequence is synthesized)
taggtatatatatttatatttatacacacactatacatgtattttaaaatattgaaaatccagaattattttatggtaaaaattactaaaattgacttcacatgctgaatgaagagagcc

SEQ ID NO: 239037 - DNA, 120 bp, Artificial Sequence
  ENSG00000120784_36 (sequence is synthesized)
catgctgaatgaagagagcctgagtagaccaacaaacaaatgaaaaattaagacggttagaagatacgctttctaaaagaatacatttagaatctaactttaaaaaaaaaaaatcctact

SEQ ID NO: 239038 - DNA, 120 bp, Artificial Sequence
  ENSG00000120784_37 (sequence is synthesized)
ctcctgagccagagtggtctcagagagactccgagaacctaattttttacaagtaaaatctttgaagaattggtaattgctaaatttttccaacatactattctacaagactaacctaaa

SEQ ID NO: 239039 - DNA, 120 bp, Artificial Sequence
  ENSG00000120784_38 (sequence is synthesized)
actgattataagaactaggtgaggagggctggcaaaacgaaaatctagacattttccgtatgaagagaaatctggtaattctaatttctatgggaaattatatccaacagtttagaatag

SEQ ID NO: 239040 - DNA, 120 bp, Artificial Sequence
  ENSG00000120784_39 (sequence is synthesized)
aaaatcatttatgtggaataacttggaccagatccatccagctttaattatatatttagattctaggcattctaccttcagaacatcataatgatagtaaaagagatacgattctggccc

SEQ ID NO: 239041 - DNA, 120 bp, Artificial Sequence
  ENSG00000120784_40 (sequence is synthesized)
ttttttttttttttttagctttctatgtattaagaatggaatgaattttatgtatgtaaaagtgtaacccaacaccttaaaattaccttctcaaaattaataaagacagagttcttataa

SEQ ID NO: 239042 - DNA, 120 bp, Artificial Sequence
  ENSG00000120784_41 (sequence is synthesized)
tctcaaaattaataaagacagagttcttataaatgattgcatcagttggacttcggtgatttcaccgtggtcatccattatgaactgtatttgctgttataattgggaagccatgatgtt

SEQ ID NO: 239043 - DNA, 120 bp, Artificial Sequence
  ENSG00000120784_42 (sequence is synthesized)
cagtgtattacatcattatattccatttctcaaatggaatatgaaacttgatagcatttgaaaccatttcccaggaaacactagtgcttgatggtatttttagaaagcattctgtggtta

SEQ ID NO: 239044 - DNA, 120 bp, Artificial Sequence
  ENSG00000120784_43 (sequence is synthesized)
aatgagcatattaaaattaataattaagaaaataaaactatagcttctccaaataatgaagtaatgagagtttaattgattttatttaacttaatgtatctgaagcaccttttaccctgt

SEQ ID NO: 239045 - DNA, 120 bp, Artificial Sequence
  ENSG00000120784_44 (sequence is synthesized)
aactttcactcttaatgcttgtgagtatgggatatgaacccattttaacagataagtgctgtaaccaaaacaggtgacagcaaaggtggaaagttcggacctcatgtcaggtggttagtt

SEQ ID NO: 239046 - DNA, 120 bp, Artificial Sequence
  ENSG00000120784_45 (sequence is synthesized)
gtgttggaaggtggatgtgaggtatgtttccctggatgtggcatcatgttctaaagtcacctgttctttctgaatattgaactgttgcttttctgcagaaataaaatttctgaatcaaca

SEQ ID NO: 239047 - DNA, 120 bp, Artificial Sequence
  ENSG00000120784_46 (sequence is synthesized)
acagccagcgtcagagtcaggcaccaccgcgcagccttctctgcggcaccatcctaatcccccgctagagaacggcacacgcgcacgcagcagccccgtgcacggaaacactactccgcc

SEQ ID NO: 239048 - DNA, 120 bp, Artificial Sequence
  ENSG00000120784_47 (sequence is synthesized)
gccccctgacctagtagtcgctggcacaagctgcgcccggagacgtgggagcgttctcttgttttccgagtgcgcggactcatcgggtcacagtttatgcttttatgacgcgggaacaca

SEQ ID NO: 239049 - DNA, 120 bp, Artificial Sequence
  ENSG00000120784_48 (sequence is synthesized)
acagatttgagaagcctcggattaaggaataatttatgaagctccgttgactaccgtggagagatcataatttggggttcaagattccaggaatatgtaaatgtttctagttggttcact

SEQ ID NO: 239050 - DNA, 120 bp, Artificial Sequence
  ENSG00000120784_49 (sequence is synthesized)
ttactccacaaggaagaatccatgccagtgataagcttaatgaaatgtgtgggagcacctttatattttgcacaaatcatatggaacatcagagaaatttcactggaaagaaatgcagag

SEQ ID NO: 239051 - DNA, 120 bp, Artificial Sequence
  ENSG00000120784_50 (sequence is synthesized)
tccaaaggttccggtgaggcgtcgctgggggcggggcggggctcgcagcctccgcctgtctccgagccgagaaccaaatgaaaaataaaaaggcggaatattgtttttttaaattttgga

SEQ ID NO: 239052 - DNA, 120 bp, Artificial Sequence
  ENSG00000120784_51 (sequence is synthesized)
ccagaagcgctgccctatcagaaggattctggaaataacgctggatgaggcagagccacagtcacagatccgatgtcagccctgccagtttccagagaaggcgcttgagaaggagaaacg

SEQ ID NO: 239053 - DNA, 120 bp, Artificial Sequence
  ENSG00000120784_52 (sequence is synthesized)
gaactatagcaacttggtgtcactgggtaagcctagcatatctgtgtcagataatttagacattcacaggactgaatttctgggctgtctttgtttttttccaaagacgaagtctcgctg

SEQ ID NO: 239054 - DNA, 120 bp, Artificial Sequence
  ENSG00000120784_53 (sequence is synthesized)
aggcccaagagggaagtcagaggtgaacgccccaggatgaaggtcccctgcaaaacgctgggacctagatttggggtggcggttagttggggccagggaagcgtggagggtgggttccaa

SEQ ID NO: 239055 - DNA, 120 bp, Artificial Sequence
  ENSG00000120784_54 (sequence is synthesized)
taggccctaccttcaaataccatcaccttgggattcgtgtttcaacataggaattgttacgggaacacaaacattcagcccataacagattttatcaaagaagtacttcatgaaatgtaa

SEQ ID NO: 239056 - DNA, 120 bp, Artificial Sequence
  ENSG00000120798_0 (sequence is synthesized)
gttgctaatgcgcaggcgctggcgggatagcgcgccgccgagccgagaaagaggtcacgaactctgaccccccagaaatacccaaacacagaaagctctctccgccgtgaatctcgatcc

SEQ ID NO: 239057 - DNA, 120 bp, Artificial Sequence
  ENSG00000120798_1 (sequence is synthesized)
cacatcccgtcggctttcttcaacctctcttcccggagcgccccccaatccacgagtggcagccgcgggactgtcgcgtcggcgcccgacgccggagtcagcagggcgcaaaagcgccgg

SEQ ID NO: 239058 - DNA, 120 bp, Artificial Sequence
  ENSG00000120798_2 (sequence is synthesized)
tagatcatggcaaccatagaagaaattgcacatcaaattattgaacaacagatgggagagattgttacagagcagcaaactgggcagaaaatccagattgtgacagcacttgatcataat

SEQ ID NO: 239059 - DNA, 120 bp, Artificial Sequence
  ENSG00000120798_3 (sequence is synthesized)
acccaaggcaagcagttcattctgacaaatcacgacggctctactccaagcaaagtcattctggccaggcaagattccactccgggaaaagttttccttacaactccagatgcagcaggt

SEQ ID NO: 239060 - DNA, 120 bp, Artificial Sequence
  ENSG00000120798_4 (sequence is synthesized)
gtcaaccagttattttttaccactcctgatctgtctgcacaacacctgcagctcctaacagataattctccagaccaaggaccaaataaggtttttgatctttgcgtagtatgtggagac

SEQ ID NO: 239061 - DNA, 120 bp, Artificial Sequence
  ENSG00000120798_5 (sequence is synthesized)
aaagcatcaggacgtcattatggagcagtaacttgtgaaggctgcaaaggattttttaaaagaagcatccgaaaaaatttagtatattcatgtcgaggatcaaaggattgtattattaat

SEQ ID NO: 239062 - DNA, 120 bp, Artificial Sequence
  ENSG00000120798_6 (sequence is synthesized)
aagcaccaccgaaaccgctgtcaatactgcaggttacagagatgtattgcgtttggaatgaagcaagactctgtccaatgtgaaagaaaacccattgaagtatcacgagaaaaatcttcc

SEQ ID NO: 239063 - DNA, 120 bp, Artificial Sequence
  ENSG00000120798_7 (sequence is synthesized)
aactgtgccgcttcaacagaaaaaatctatatccgaaaggaccttcgtagcccattaactgcaactccaacttttgtaacagatagtgaaagtacaaggtcaacaggactgttagattca

SEQ ID NO: 239064 - DNA, 120 bp, Artificial Sequence
  ENSG00000120798_8 (sequence is synthesized)
ggaatgttcatgaatattcatccatctggagtaaaaactgagtcagctgtgctgatgacatcagataaggctgaatcatgtcagggagatttaagtacattggccaatgtggttacatca

SEQ ID NO: 239065 - DNA, 120 bp, Artificial Sequence
  ENSG00000120798_9 (sequence is synthesized)
ttagcgaatcttggaaaaactaaagatctttctcaaaatagtaatgaaatgtctatgattgaaagcttaagcaatgatgatacctctttgtgtgaatttcaagaaatgcagaccaacggt

SEQ ID NO: 239066 - DNA, 120 bp, Artificial Sequence
  ENSG00000120798_10 (sequence is synthesized)
gatgtttcaagggcatttgacactcttgcaaaagcattgaatcctggagagagcacagcctgccagagctcagtagcgggcatggaaggaagtgtacacctaatcactggagattcaagc

SEQ ID NO: 239067 - DNA, 120 bp, Artificial Sequence
  ENSG00000120798_11 (sequence is synthesized)
ataaattacaccgaaaaagaggggccacttctcagcgattcacatgtagctttcaggctcaccatgccttctcctatgcctgagtacctgaatgtgcactacattggggagtctgcctcc

SEQ ID NO: 239068 - DNA, 120 bp, Artificial Sequence
  ENSG00000120798_12 (sequence is synthesized)
agactgctgttcttatcaatgcactgggcactttcgattccttctttccaggctctagggcaagaaaacagcatatcactggtgaaagcttactggaatgaactttttactcttggtctt

SEQ ID NO: 239069 - DNA, 120 bp, Artificial Sequence
  ENSG00000120798_13 (sequence is synthesized)
gcccagtgctggcaagtgatgaatgtagcaactatattagcaacatttgtcaattgtcttcacaatagtcttcaacaagataaaatgtcaacagaaagaagaaaattattgatggagcac

SEQ ID NO: 239070 - DNA, 120 bp, Artificial Sequence
  ENSG00000120798_14 (sequence is synthesized)
atcttcaaactacaggagttttgtaacagcatggttaaactctgcattgatggatacgaatatgcctacctgaaggcaatagtactcttcagtccagatcatccaagcctagaaaacatg

SEQ ID NO: 239071 - DNA, 120 bp, Artificial Sequence
  ENSG00000120798_15 (sequence is synthesized)
gaacagatagagaaatttcaggaaaaggcttatgtggaattccaagattatataaccaaaacatatccagatgacacctacaggttatccagactactactcagattgccagctttaaga

SEQ ID NO: 239072 - DNA, 120 bp, Artificial Sequence
  ENSG00000120798_16 (sequence is synthesized)
tgcagattataactctcaaataattggtcacagcatttgaaaactgtgactgcagtgctgtaaacttaactgttctttgccagaacacaagacaccaaattgaactcactgcttttgagg

SEQ ID NO: 239073 - DNA, 120 bp, Artificial Sequence
  ENSG00000120798_17 (sequence is synthesized)
catctggaaatttttactttaaaaagtaaccagaatccaaggtatttttattttagcttcccttaagaatttttgaagtgactgggcaggcagcagaaattaaatgaatttttcttcctg

SEQ ID NO: 239074 - DNA, 120 bp, Artificial Sequence
  ENSG00000120798_18 (sequence is synthesized)
attcctttaaatgaatatgaaacactacaaatttattcttggtgaagatgatacctgaagctgtcacctcttgattatctaaactaagcgctcattctattttataaaacaaataaatta

SEQ ID NO: 239075 - DNA, 120 bp, Artificial Sequence
  ENSG00000120798_19 (sequence is synthesized)
gtctcttttttctgaattgtgttctagtcatatttaacttcattatgaactagtaaaaatacttaatggtcagaaatccctaaggagttagttccttgcattttactctgccataataat

SEQ ID NO: 239076 - DNA, 120 bp, Artificial Sequence
  ENSG00000120798_20 (sequence is synthesized)
ttttgtttaattaccatatcaaaataagattattttatgcttactggtataatgacagtattagaactataggaaataattgaatacatattttttgtcttctctaaatatcatggtgtc

SEQ ID NO: 239077 - DNA, 120 bp, Artificial Sequence
  ENSG00000120798_21 (sequence is synthesized)
ccttagcatatactactctcattgctggcagtgagacaggccattcatgatcttaagagttgccatttttaatgtatattattagttacaagcactttatatagcagaaaattgtttttg

SEQ ID NO: 239078 - DNA, 120 bp, Artificial Sequence
  ENSG00000120798_22 (sequence is synthesized)
tgtttttgagaataagctagtgttgatattttaatatttttagcttactgctcgtgtttttgtttttgttttcgtttatagaggtgggtttcactgttgcccaggctggtctcaaactcc

SEQ ID NO: 239079 - DNA, 82 bp, Artificial Sequence
  ENSG00000120798_23 (sequence is synthesized)
acgtgccaccgtgcctggcctactgctgtctttgaaaataatagagactagccaggtgtagtggctcatgcctataatccca

SEQ ID NO: 239080 - DNA, 70 bp, Artificial Sequence
  ENSG00000120798_24 (sequence is synthesized)
gtctctgtaaaaagaaagaaagtaataaagactaattgagcccaaaatgtttcactatttcaaaaaagat

SEQ ID NO: 239081 - DNA, 120 bp, Artificial Sequence
  ENSG00000120798_25 (sequence is synthesized)
agcccaaaatgtttcactatttcaaaaaagatatttaaattgttgctctttcattccataaaaaggatctgatctctctcccacttttctgacctgagttagagcttcccaaacctgtca

SEQ ID NO: 239082 - DNA, 120 bp, Artificial Sequence
  ENSG00000120798_26 (sequence is synthesized)
tgtatgggttttagccaatttcttttagatcactaaaaaaactcacccaatatgtcaaataatggatttatcatagccagtacatgttctcaaggcaagtttaaacattattttgaagct

SEQ ID NO: 239083 - DNA, 120 bp, Artificial Sequence
  ENSG00000120798_27 (sequence is synthesized)
attgataattttttaaaataaagaaatattcactgatttttttcactgtaaagcacgggagggctgctttaacaacagtataagaatcagcctgaagccttgttactgctacaacaaatt

SEQ ID NO: 239084 - DNA, 120 bp, Artificial Sequence
  ENSG00000120798_28 (sequence is synthesized)
cattttagactcctcggatgtcttccacagtaatttattcttttagcaaacctgatactgataactgtttctttgctttgatttcttgatgaattattttggtatgtttgttgattttta

SEQ ID NO: 239085 - DNA, 120 bp, Artificial Sequence
  ENSG00000120798_29 (sequence is synthesized)
aagcaaacacggataatgcactcagagtacattttttgtaaagatttttgcaatagaagaaaagtgaagtttttgtggggatgtggattttattgcttactactttatagtaatcaaaag

SEQ ID NO: 239086 - DNA, 120 bp, Artificial Sequence
  ENSG00000120798_30 (sequence is synthesized)
tttgaaaatatcaacttacagtctttaccagtttactaagggaaacttttttccctatttaaaacatgatcttagtcaacaattttatttataattatcagctaaattacatttagtata

SEQ ID NO: 239087 - DNA, 120 bp, Artificial Sequence
  ENSG00000120798_31 (sequence is synthesized)
atactcaaatggaaaaatcagtagtttatacctttataaatacagtttagtaagccaaggaatcagggaaataatcctttaaaataatgtactaatagttaagatgtttcaggtgttttt

SEQ ID NO: 239088 - DNA, 120 bp, Artificial Sequence
  ENSG00000120798_32 (sequence is synthesized)
tctgattaaatttgctactatatttggaagactttaaaactatattaaaatgtgacttgcattacaaatttctgtgtcttaccagtatatttgtaaatatattattcattttccttttca

SEQ ID NO: 239089 - DNA, 120 bp, Artificial Sequence
  ENSG00000120798_33 (sequence is synthesized)
gggagagccgcgcgcagcgccggggcttccagggcgcacggctaacgccggcacgagtgagacgtgggagaggccgaccctcggctagtggccgcaagtcccggcctgcatcccgtcact

SEQ ID NO: 239090 - DNA, 120 bp, Artificial Sequence
  ENSG00000120798_34 (sequence is synthesized)
agggtcgtcgctgcctgtgggcctggatcttttcagaagaaatggaacggccccagggttctcactgcagggggcatgtccaagcttccgatagatagctcttttgttaagaaataattc

SEQ ID NO: 239091 - DNA, 120 bp, Artificial Sequence
  ENSG00000120798_35 (sequence is synthesized)
ttccaactcgggcagataccatttttgtgcagtacgaatgttgccaggttgtcccataatcttcagtagatcatggcaaccatagaagaaattgcacatcaaattattgaacaacagatg

SEQ ID NO: 239092 - DNA, 120 bp, Artificial Sequence
  ENSG00000120798_36 (sequence is synthesized)
cgatgtggagaaatagaagccctcatatgttgcaagtggggatgtaaaatggtgcagttacctgggaaaagagttcagtagttcttcaaaaggttaaacatggagttatcatatgactca

SEQ ID NO: 239093 - DNA, 120 bp, Artificial Sequence
  ENSG00000120798_37 (sequence is synthesized)
gcagcttcactcttgtcagcccaagagaaatgaaaaatatatatctatgcaagaatgtgtatataaatagtcatagcagcattatttataatagtcaaaaagtggagacaacccaaatgt

SEQ ID NO: 239094 - DNA, 120 bp, Artificial Sequence
  ENSG00000120798_38 (sequence is synthesized)
aaattattgaacaacagatgggagaggatagaattttgtggcaatagaatcggtagtttaaaagattgttacagagcagcaaactgggcagaaaatccagattgtgacagcacttgatca

SEQ ID NO: 239095 - DNA, 120 bp, Artificial Sequence
  ENSG00000120798_39 (sequence is synthesized)
gtcttcacaatagtcttcaacaagatgccaaggtaattgcagccctcattcatttcacaagacgagcaatcactgatttataaatgcttaactatagaatggcttatgactacccaaaac

SEQ ID NO: 239096 - DNA, 120 bp, Artificial Sequence
  ENSG00000120798_40 (sequence is synthesized)
agtgccccatcaacaaatggggaaaattgccttttgagctcaggaataatttataaattggggactaccttttagttctttagcatattctatttcttattgttttatataatttttaaa

SEQ ID NO: 239097 - DNA, 120 bp, Artificial Sequence
  ENSG00000120798_41 (sequence is synthesized)
tcatttgcttcctccttatgtttaacagcagaggggtaatcaccttaaaatgtcatcaaaaatagatctactagaaggcagcatcacattcccatcttacttatggactcctacccctgg

SEQ ID NO: 239098 - DNA, 120 bp, Artificial Sequence
  ENSG00000120798_42 (sequence is synthesized)
ttcatgtcttatatgcctgtaatggttataaagcctaccttcaggaaagctatggttgactaattactaatggatgggttttaaacatgtccctctacaataaattaaaatctttattgt

SEQ ID NO: 239099 - DNA, 120 bp, Artificial Sequence
  ENSG00000120798_43 (sequence is synthesized)
cgtttggaatgaagcaagactgtatgtattagcttttaaggagaaaatactttttaaagattccagcaaactacaagagtattgaaattaacaaaatatgtcaaatatgtatacttttta

SEQ ID NO: 239100 - DNA, 120 bp, Artificial Sequence
  ENSG00000120798_44 (sequence is synthesized)
gtttacagttttccaactaaaaatataagaatacagacctacgtatgtacttttttatttattcaactaatatttattgaatacctgtgtaaaaagcacgtatttgtagtttgtgtttgg

SEQ ID NO: 239101 - DNA, 120 bp, Artificial Sequence
  ENSG00000120798_45 (sequence is synthesized)
caaaaagaatgagagatgcaaattggtttgttttactaatctaaagcaactttgttgaacttgcacataatttctaaagattgatggttatctttggagtttagtatggtagccatgtct

SEQ ID NO: 239102 - DNA, 120 bp, Artificial Sequence
  ENSG00000120798_46 (sequence is synthesized)
cctattagcagcattaagcttacctacagcttacatttctaattgtctgtaaatcctatattgtgatataatagtttaacacatttttgtagctgtccaatgtgaaagaaaacccattga

SEQ ID NO: 239103 - DNA, 120 bp, Artificial Sequence
  ENSG00000120798_47 (sequence is synthesized)
gaatgtggtaagttctgtgacaggtcattgtatcaggtgcaatgggagcacagaagaaaattgaaaggaatgaagggaaggaaggaaggaaagaaattaaagagctgtagagtgagtagg

SEQ ID NO: 239104 - DNA, 120 bp, Artificial Sequence
  ENSG00000120798_48 (sequence is synthesized)
aatgcttttgagggaattctttttagagggtacaatctgagcctagttttggtgggatcagtaggagttcagcatcaatactgacatcttcatttttttaaatggttgtgtcctattact

SEQ ID NO: 239105 - DNA, 120 bp, Artificial Sequence
  ENSG00000120798_49 (sequence is synthesized)
agatctttctcaaaatagtaatgaaatgtctatgattgaaagcttaagcaatgatgatacctctttgtgtgaatttcaagaaatgcagaccaacggtgatgtttcaagctcaccatgcct

SEQ ID NO: 239106 - DNA, 120 bp, Artificial Sequence
  ENSG00000120798_50 (sequence is synthesized)
aaaacatattattatatgaaaatatgaagatgcttctcccccttaattatgcaagattttaaaaagagactttaggccaggcatgtggcttatacctgtaatcccagcactttggaaggc

SEQ ID NO: 239107 - DNA, 120 bp, Artificial Sequence
  ENSG00000120798_51 (sequence is synthesized)
tgaggcgggcatatcacttgagttctagaccagcctggccagttttttaggcttaaatcttaattccagaatcctatgtagaattgttattttattgcggtgtttggtcaagctcatagc

SEQ ID NO: 239108 - DNA, 120 bp, Artificial Sequence
  ENSG00000120800_0 (sequence is synthesized)
actcaggctcctccttgtctccaacatggcggcgcccaggggctcaagccgcacgtgagaaagtctgggcatctgggaatcggagagtatagcctgtgagccgctttcccctccttactg

SEQ ID NO: 239109 - DNA, 120 bp, Artificial Sequence
  ENSG00000120800_1 (sequence is synthesized)
tcggttgcatcccttcgacactcccgaggccgtcgcgggccactggccctctgcagccatgaagacaaagcccgtttcccacaagaccgagaacacctaccggtttcttacatttgctga

SEQ ID NO: 239110 - DNA, 120 bp, Artificial Sequence
  ENSG00000120800_2 (sequence is synthesized)
acgactggggaatgttaatattgatattattcaccggattgatagaactgcaagctatgaggaggaggttgaaacctacttttttgagggtctgctgaaatggagagaattaaacctcac

SEQ ID NO: 239111 - DNA, 120 bp, Artificial Sequence
  ENSG00000120800_3 (sequence is synthesized)
agaacacttcggaaaattttacaaagaagttattgacaaatgccaatcattcaatcagttggtgtatcaccaaaacgagatagttcagagtttgaagactcacctgcaagttaagaacag

SEQ ID NO: 239112 - DNA, 120 bp, Artificial Sequence
  ENSG00000120800_4 (sequence is synthesized)
ttttgcctatcaaccccttttggatttggttgtacagttggcacgagatctgcagatggatttctacccacactttccagagttttttttgactatcacctcgatcctggagactcagga

SEQ ID NO: 239113 - DNA, 120 bp, Artificial Sequence
  ENSG00000120800_5 (sequence is synthesized)
cacagagttgttagaatgggctttcacctcgttatcatatctttataagtacctgtggagactgatggtgaaggacatgtccagtatatacagcatgtacagcacactcctggctcataa

SEQ ID NO: 239114 - DNA, 120 bp, Artificial Sequence
  ENSG00000120800_6 (sequence is synthesized)
aaaactacatataagaaattttgctgctgaaagttttacttttttgatgagaaaggtctctgataaaaacgcacttttcaatttaatgtttcttgatcttgataaacatccagaaaaagt

SEQ ID NO: 239115 - DNA, 120 bp, Artificial Sequence
  ENSG00000120800_7 (sequence is synthesized)
tgaaggtgttggacagttgctctttgaaatgtgcaaaggagttagaaatatgtttcactcctgtacaggccaggcagtgaagctaattttgcgaaagctaggaccagtcactgaaacaga

SEQ ID NO: 239116 - DNA, 120 bp, Artificial Sequence
  ENSG00000120800_8 (sequence is synthesized)
aactcaactaccatggatgttaattggagaaacactcaaaaacatggtcaaatccactgtatcctacatctccaaggaacattttggtacattttttgaatgtttgcaagaatcgctctt

SEQ ID NO: 239117 - DNA, 120 bp, Artificial Sequence
  ENSG00000120800_9 (sequence is synthesized)
ggatctacacacaaaagtaacaaaaactaactgttgtgaaagttctgaacagattaaaaggttgttggaaacataccttatacttgtaaaacatggaagtgggacaaagatacccacgcc

SEQ ID NO: 239118 - DNA, 120 bp, Artificial Sequence
  ENSG00000120800_10 (sequence is synthesized)
tgctgatgtctgtaaggtgttatctcaaacactgcaagtagccagtctctccacatcttgctgggagaccctcttggatgtaatttctgctttgatcctgggtgaaaatgtttccttgcc

SEQ ID NO: 239119 - DNA, 120 bp, Artificial Sequence
  ENSG00000120800_11 (sequence is synthesized)
ggagaccctcatcaaagaaaccatagaaaaaatatttgagagcagatttgaaaaacgtttaattttcagtttttctgaagtcatgtttgccatgaagcagtttgagcagctttttctacc

SEQ ID NO: 239120 - DNA, 120 bp, Artificial Sequence
  ENSG00000120800_12 (sequence is synthesized)
aagctttctgtcatatattgtgaattgcttcttaattgatgatgctgtagtcaaagatgaagctctggccattctggccaagctcattctgaacaaagcagcacctcccactgctggctc

SEQ ID NO: 239121 - DNA, 120 bp, Artificial Sequence
  ENSG00000120800_13 (sequence is synthesized)
gatggcaattgaaaagtaccctctggttttctcaccgcagatggtgggattctatataaagcagaagaagactagatccaagggaagaaacgaacagtttccagtattggaccatctttt

SEQ ID NO: 239122 - DNA, 120 bp, Artificial Sequence
  ENSG00000120800_14 (sequence is synthesized)
atctataattaagttacccccaaataaagatactacttacctttcacaatcttgggcagccctcgtggtgttacctcatattagacctcttgagaaagagaaggtgataccactcgtcac

SEQ ID NO: 239123 - DNA, 120 bp, Artificial Sequence
  ENSG00000120800_15 (sequence is synthesized)
cggcttcatagaggcactcttcatgactgttgacaaaggaagctttgggaaaggaaacttatttgttctttgtcaagctgtaaatactctactaagtttggaagaatcttctgaacttct

SEQ ID NO: 239124 - DNA, 120 bp, Artificial Sequence
  ENSG00000120800_16 (sequence is synthesized)
tcatttggttcctgtggaacgtgtgaagaatttagtattaacctttcccctggagccatctgtgttgctgttgactgatctctattatcagagattagccttgtgtggctgcaaagggcc

SEQ ID NO: 239125 - DNA, 120 bp, Artificial Sequence
  ENSG00000120800_17 (sequence is synthesized)
actttcccaggaggctttaatggaattatttcccaagttacaagcaaacatttcaactggtgtatccaagattcggcttttgacaataaggatcctaaaccattttgatgtccagcttcc

SEQ ID NO: 239126 - DNA, 120 bp, Artificial Sequence
  ENSG00000120800_18 (sequence is synthesized)
agaatcaatggaggatgatgggctctcagagcggcagtctgtctttgctatattacgccaggcagaacttgttccagcaactgtgaatgattatagagagaagcttcttcatttgagaaa

SEQ ID NO: 239127 - DNA, 120 bp, Artificial Sequence
  ENSG00000120800_19 (sequence is synthesized)
actaagacatgatgtggtacagactgctgtccctgatgggccgttacaggaggtgccgcttcgttatttgttaggcatgctatatattaatttcagtgcactctgggatcctgttattga

SEQ ID NO: 239128 - DNA, 120 bp, Artificial Sequence
  ENSG00000120800_20 (sequence is synthesized)
actcataagttctcatgcacacgaaatggaaaataagcaattttggaaagtctactatgagcatctagaaaaagcagctacgcatgctgagaaggaactacagaatgatatgacagatga

SEQ ID NO: 239129 - DNA, 120 bp, Artificial Sequence
  ENSG00000120800_21 (sequence is synthesized)
gaagtccgttggagatgaaagttgggagcagacccaggaaggagatgttggagctctttatcatgagcagttagcattgaaaactgactgtcaggaaagacttgaccacaccaacttcag

SEQ ID NO: 239130 - DNA, 120 bp, Artificial Sequence
  ENSG00000120800_22 (sequence is synthesized)
attcctgctctggagagctctgaccaaattcccagaaagagtagagccacggtccagggagctttccccgcttttcttgagatttatcaacaatgagtattacccagcagatctgcaagt

SEQ ID NO: 239131 - DNA, 120 bp, Artificial Sequence
  ENSG00000120800_23 (sequence is synthesized)
tgctccaacccaggatctacggagaaaaggcaaagggatggtggcagaggaaatcgaagaggaacctgccgcaggagatgatgaagagttggaggaagaggcagtgccccaagatgaatc

SEQ ID NO: 239132 - DNA, 120 bp, Artificial Sequence
  ENSG00000120800_24 (sequence is synthesized)
ctcacagaagaaaaagacgaggagagctgcagcaaagcaattaattgctcatttgcaagttttctctaaattttcaaatccacgggccttatatctggaatccaaactatatgagttata

SEQ ID NO: 239133 - DNA, 120 bp, Artificial Sequence
  ENSG00000120800_25 (sequence is synthesized)
tcttcagttgttgctacaccaagatcaaatggtgcaaaaaataaccttggattgcataatgacatataaacatcctcatgtcctcccttacagggaaaacttacaaaggttgcttgaaga

SEQ ID NO: 239134 - DNA, 120 bp, Artificial Sequence
  ENSG00000120800_26 (sequence is synthesized)
cagaagctttaaggaagagatagtgcattttagcatttcagaagataatgctgtagtgaaaacagcccaccgagcagatctatttcctattctgatgagaattttgtatgggcgaatgaa

SEQ ID NO: 239135 - DNA, 120 bp, Artificial Sequence
  ENSG00000120800_27 (sequence is synthesized)
gaataagactgggagtaaaactcaggggaaatctgcttcaggcacccgcatggccattgtcctgcggttcctggccgggacccaacctgaggagatccagatattcttagacctgctgtt

SEQ ID NO: 239136 - DNA, 120 bp, Artificial Sequence
  ENSG00000120800_28 (sequence is synthesized)
tgaacctgtgaggcatttcaagaatggagagtgccattctgcagtcattcaagcagtagaagacttggatttgtctaaagttcttcctttaggtcgtcagcacggtatcttaaacagcct

SEQ ID NO: 239137 - DNA, 120 bp, Artificial Sequence
  ENSG00000120800_29 (sequence is synthesized)
tgagatagtattgaaaaacattagtcatctgatcagcgcatacctgccgaagattttgcagatactgctctgtatgacagcaaccgtatcacacatccttgaccaacgagaaaagataca

SEQ ID NO: 239138 - DNA, 120 bp, Artificial Sequence
  ENSG00000120800_30 (sequence is synthesized)
gctgagatttattaatccattgaaaaatttaagacgtcttggaatcaaaatggtaactgatatctttttggactgggaatcatatcagtttagaacagaagaaattgatgctgtgtttca

SEQ ID NO: 239139 - DNA, 120 bp, Artificial Sequence
  ENSG00000120800_31 (sequence is synthesized)
tggtgcagtttggccccagatcagcaggcttggatctgagagtcaatattctcctactcctctgctgaaactgatcagtatctggagcagaaacgcaagatatttccctttgctggctaa

SEQ ID NO: 239140 - DNA, 120 bp, Artificial Sequence
  ENSG00000120800_32 (sequence is synthesized)
acagaagcctgggcacccagaatgtgatatcctgaccaatgtttttgcaattctctcagcgaagaatctttctgatgccacagccagtattgtaatggacatagttgatgaccttcttaa

SEQ ID NO: 239141 - DNA, 120 bp, Artificial Sequence
  ENSG00000120800_33 (sequence is synthesized)
ccttccagatttcgagcctacagaaacagttttgaacttgctggtaactggatgtgtataccctggcatagcagaaaacatcggtgagtctatcacaataggaggaagattaattctacc

SEQ ID NO: 239142 - DNA, 120 bp, Artificial Sequence
  ENSG00000120800_34 (sequence is synthesized)
tcatgtacctgcaattcttcagtatctcagcaaaaccacaataagcgcagaaaaggtgaaaaagaaaaagaatagagcacaagtcagtaaagagcttggcattctttcaaagatcagcaa

SEQ ID NO: 239143 - DNA, 120 bp, Artificial Sequence
  ENSG00000120800_35 (sequence is synthesized)
gtttatgaaagacaaagaacaaagttctgtactcattacgcttctccttccattcctccaccgtggcaatattgctgaggatacagaggttgatattctggtgacagtacaaaacttgtt

SEQ ID NO: 239144 - DNA, 120 bp, Artificial Sequence
  ENSG00000120800_36 (sequence is synthesized)
aaagcattgtgtggaccctacaagcttcctcaagcctatagcaaaacttttctcagttattaagaacaaattgtcaagaaaattgctttgtacggtttttgagactctttctgattttga

SEQ ID NO: 239145 - DNA, 120 bp, Artificial Sequence
  ENSG00000120800_37 (sequence is synthesized)
aagcttaacgccttcgatcaaagacatcttgatgatatcaacttcgacgttcgctttgagactttccagaccatcacctcttacattaaagaaatgcaaattgtggatgttaactaccta

SEQ ID NO: 239146 - DNA, 120 bp, Artificial Sequence
  ENSG00000120800_38 (sequence is synthesized)
attccagttatgcataattgtttctataatctagagttaggagatatgagtttaagtgataatgccagcatgtgcctgatgagtatcatcaaaaagctagctgccttgaatgtcacagag

SEQ ID NO: 239147 - DNA, 120 bp, Artificial Sequence
  ENSG00000120800_39 (sequence is synthesized)
aaagactatagagaaatcatccaccgttcactcctggagaaattgagaaaaggtctgaagagccagacagagagtattcagcaggattataccacaatactttcctgtttaattcaaacc

SEQ ID NO: 239148 - DNA, 120 bp, Artificial Sequence
  ENSG00000120800_40 (sequence is synthesized)
tttccaaaccaactggaattcaaagacttggtacaacttactcattaccatgacccagaaatggacttctttgagaacatgaagcacattcagatccacagaagagcaagagccttgaag

SEQ ID NO: 239149 - DNA, 120 bp, Artificial Sequence
  ENSG00000120800_41 (sequence is synthesized)
aaacttgcaaaacaactaatggaaggcaaagttgttctgtcttctaaatctcttcagaattacatcatgccttatgccatgactccaatttttgatgagaaaatgctcaagcatgaaaat

SEQ ID NO: 239150 - DNA, 120 bp, Artificial Sequence
  ENSG00000120800_42 (sequence is synthesized)
ataaccactgctgccacagagattattggagccatttgcaaacatctctcttggtcagcgtatatgtattacttgaaacatttcattcatgtcttacaaacgggacagatcaatcaaaaa

SEQ ID NO: 239151 - DNA, 120 bp, Artificial Sequence
  ENSG00000120800_43 (sequence is synthesized)
ctgggtgtcagtttgctagtaatagtgttagaagcattccactttgaccacaaaactcttgaagaacaaatgggaaaaattgagaatgaagaaaacgcaattgaagcaattgagttacca

SEQ ID NO: 239152 - DNA, 120 bp, Artificial Sequence
  ENSG00000120800_44 (sequence is synthesized)
gagcctgaggccatggaattagagcgtgtggatgaggaagagaaggaatatacatgcaagagtttgtcagacaacggacaaccgggaacccctgatccagctgactctggaggaacatca

SEQ ID NO: 239153 - DNA, 120 bp, Artificial Sequence
  ENSG00000120800_45 (sequence is synthesized)
gctaaagaatccgagtgtatcacaaagcctgtctctttccttcctcaaaacaaggaagaaatagagagaacaattaaaaatatccaaggaaccataaccggggatattctccccaggcta

SEQ ID NO: 239154 - DNA, 120 bp, Artificial Sequence
  ENSG00000120800_46 (sequence is synthesized)
cataaatgccttgcatctacgactaaaagggaagaagaacacaagcttgtcaagtcaaaggttgtgaatgatgaggaagtcgttcgagttccattagcttttgccatggttaaactaatg

SEQ ID NO: 239155 - DNA, 120 bp, Artificial Sequence
  ENSG00000120800_47 (sequence is synthesized)
cagtcccttccacaagaagttatggaagctaatctgccaagtattttgctgaaagtgtgtgccctactcaagaacagagcccaagaaatcagagacattgcacgcagcactcttgcgaaa

SEQ ID NO: 239156 - DNA, 120 bp, Artificial Sequence
  ENSG00000120800_48 (sequence is synthesized)
ataatagaggatcttggtgtgcacttcctcctatatgttttaaaagaattacagactactcttgtccgtggataccaggtccatgtgctgactttcaccgttcacatgctgctgcaaggc

SEQ ID NO: 239157 - DNA, 120 bp, Artificial Sequence
  ENSG00000120800_49 (sequence is synthesized)
ctcaccaataagctgcaggtcggagatttggactcttgtttagatataatgattgagatttttaaccatgagttgtttggtgctgttgctgaagagaaggaagtaaagcagatcctctcc

SEQ ID NO: 239158 - DNA, 120 bp, Artificial Sequence
  ENSG00000120800_50 (sequence is synthesized)
aaagtcatggaagcacgaagaagcaaaagttacgactcttatgaaatcctcggcaagtttgtaggaaaagatcaggttacaaaactcatccttccattaaaagagatcttacaaaatacc

SEQ ID NO: 239159 - DNA, 120 bp, Artificial Sequence
  ENSG00000120800_51 (sequence is synthesized)
acgagtttgaaactggcccggaaagttcatgaaactttacgccgaatcacagtgggattaattgtaaatcaggaaatgacagctgaatccattctattactcagttatggtttgatcagt

SEQ ID NO: 239160 - DNA, 120 bp, Artificial Sequence
  ENSG00000120800_52 (sequence is synthesized)
gaaaatcttcccctgttaacagagaaagaaaaaaatccagtagccccagcaccagatccacgtctaccaccccagagctgccttctgcttcccccaactccagttcgaggtggacagaaa

SEQ ID NO: 239161 - DNA, 120 bp, Artificial Sequence
  ENSG00000120800_53 (sequence is synthesized)
gctgttgtgagcaggaaaaccaacatgcacatatttattgagtccgggcttcggctgctgcatctgagtctgaagacttccaagatcaagtcttcaggtgaatgtgtcctggaaatgctg

SEQ ID NO: 239162 - DNA, 120 bp, Artificial Sequence
  ENSG00000120800_54 (sequence is synthesized)
gatccttttgtgtctctcctcatagactgcctgggctccatggatgtgaaggtgatcacaggtgctttacagtgcctcatctgggtcttgaggttcccgctaccttccatagaaacaaaa

SEQ ID NO: 239163 - DNA, 120 bp, Artificial Sequence
  ENSG00000120800_55 (sequence is synthesized)
gcagagcagctgacaaaacacctcttccttctgctgaaggactatgcaaagctcggggccgccaggggccagaacttccaccttgtggtcaattgtttcaagtgtgtgaccatacttgtc

SEQ ID NO: 239164 - DNA, 120 bp, Artificial Sequence
  ENSG00000120800_56 (sequence is synthesized)
aagaaagtcaagtcttaccagataactgaaaaacagctccaagttctactggcctatgctgaggaggacatttatgatacttcaagacaagccactgcctttggtcttctgaaggcaatt

SEQ ID NO: 239165 - DNA, 120 bp, Artificial Sequence
  ENSG00000120800_57 (sequence is synthesized)
ttatcaagaaagctgttggtcccagaaatcgatgaggtcatgcggaaagtatccaagttggcagtctctgcacaaagcgaacctgccagggtccagtgtagacaggtttttctgaaatat

SEQ ID NO: 239166 - DNA, 120 bp, Artificial Sequence
  ENSG00000120800_58 (sequence is synthesized)
attcttgactatcccctgggtgacaaattgagaccaaacttggaattcatgctcgctcaactgaattacgaacatgagaccgggagagagtccaccttggaaatgatcgcctatctcttt

SEQ ID NO: 239167 - DNA, 120 bp, Artificial Sequence
  ENSG00000120800_59 (sequence is synthesized)
gacacgttccctcaggggctgctccatgagaactgcggaatgttctttatccctctttgtctaatgacgatcaatgatgactctgccacgtgcaaaaagatggcatccatgacaatcaag

SEQ ID NO: 239168 - DNA, 120 bp, Artificial Sequence
  ENSG00000120800_60 (sequence is synthesized)
tccctacttggtaaaatcagcctcgagaaaaaagattggctgtttgatatggttaccacttggtttggagcaaaaaagcgcttaaatagacaacttgctgccctgatctgtggcttgttt

SEQ ID NO: 239169 - DNA, 120 bp, Artificial Sequence
  ENSG00000120800_61 (sequence is synthesized)
gtggaaagtgaaggagttgattttgagaaaagacttggaactgtccttcctgtgattgaaaaggaaattgatcctgaaaactttaaagatatcatggaagaaactgaagaaaaagctgca

SEQ ID NO: 239170 - DNA, 120 bp, Artificial Sequence
  ENSG00000120800_62 (sequence is synthesized)
gatcgccttctgtttagttttcttacactgataactaaacttatcaaggaatgtaatattattcagtttaccaaacccgctgagactttgagtaaaatctggagtcatgtgcattctcac

SEQ ID NO: 239171 - DNA, 120 bp, Artificial Sequence
  ENSG00000120800_63 (sequence is synthesized)
ctgagacatccacacaactgggtgtggctcacagcagcccagatttttggattactctttgcctcttgccagccagaggagcttattcaaaaatggaataccaaaaagaccaaaaaacac

SEQ ID NO: 239172 - DNA, 120 bp, Artificial Sequence
  ENSG00000120800_64 (sequence is synthesized)
ctcccagaacctgtagcaatcaagttcctagccagtgaccttgaccaaaagatgaaaagtatctctctcgcctcttgccatcaattgcattccaaattcttggatcagtctctaggagaa

SEQ ID NO: 239173 - DNA, 120 bp, Artificial Sequence
  ENSG00000120800_65 (sequence is synthesized)
caggttgttaagaatttgttgttcgcagccaaagtcttgtatttactggaactttattgtgaggataagcaaagtaagataaaagaagacctggaagaacaagaagctttagaagatggt

SEQ ID NO: 239174 - DNA, 120 bp, Artificial Sequence
  ENSG00000120800_66 (sequence is synthesized)
gtggcctgtgcagatgagaaggcggagtctgacggagaagagaaggaagaggtgaaggaagagctcggcaggccggccacgctgctgtggttgatccagaagctgtcccggattgcaaaa

SEQ ID NO: 239175 - DNA, 120 bp, Artificial Sequence
  ENSG00000120800_67 (sequence is synthesized)
ctggaagctgcttattcgccgagaaaccccttaaagagaacatgcatctttaagttcctcggcgccgtagcaatggatcttgggatagacaaggtaaagccgtatctcccaatgatcata

SEQ ID NO: 239176 - DNA, 120 bp, Artificial Sequence
  ENSG00000120800_68 (sequence is synthesized)
gctcctttgtttcgggaactcaacagcacctattcagagcaagatcctttgctgaagaatctatcccaggaaatcatagaattactcaaaaagctggttgggcttgagagcttctcatta

SEQ ID NO: 239177 - DNA, 120 bp, Artificial Sequence
  ENSG00000120800_69 (sequence is synthesized)
gcctttgcctctgtacagaaacaggctaatgagaaaagggcactccggaaaaagaggaaggccctggagtttgtaactaatcctgatattgctgccaagaaaaaaatgaagaaacacaaa

SEQ ID NO: 239178 - DNA, 120 bp, Artificial Sequence
  ENSG00000120800_70 (sequence is synthesized)
aataaaagtgaagcaaagaagagaaagatagagttcctgcgtccaggatataaggccaagagacaaaaaagccatagcctgaaagatttagcaatggtggagtaatgtctccctgtgctg

SEQ ID NO: 239179 - DNA, 120 bp, Artificial Sequence
  ENSG00000120800_71 (sequence is synthesized)
agtaatgtctccctgtgctgatacaagcatgaactttctggaatattctgctagtctgaaattacagtaggttgtctggggtaggggggaggcgtttttttttttttttgagacaaggtc

SEQ ID NO: 239180 - DNA, 86 bp, Artificial Sequence
  ENSG00000120800_72 (sequence is synthesized)
tgggtttgtgcctcctaggcacacaacactatgcccggcaaattttttgtattttgtattttttgtagaaacaggatttcgccatg

SEQ ID NO: 239181 - DNA, 78 bp, Artificial Sequence
  ENSG00000120800_73 (sequence is synthesized)
tgtgcctcctaggcacacaacactatgcccggcaaattttttgtattttgtattttttgtagaaggctcaactgatcc

SEQ ID NO: 239182 - DNA, 120 bp, Artificial Sequence
  ENSG00000120800_74 (sequence is synthesized)
agccaccctgctcaaccaggttttattatttaagttagttaaactttggatagattgtataatatatagtttaatgtaatcatgctcatattttttaaataaataaaacactatactact

SEQ ID NO: 239183 - DNA, 120 bp, Artificial Sequence
  ENSG00000120800_75 (sequence is synthesized)
ctgggactacaggcacgtagcactgcacccagctctcttagccttattttgttgttgacttttttcattgtctgtgttaaatatctaatttctattttcatgtttctgtgttttataata

SEQ ID NO: 239184 - DNA, 120 bp, Artificial Sequence
  ENSG00000120800_76 (sequence is synthesized)
tatccatttaaatctattgagttgctcttctagccttttaggcaaataaaacaactcatattttagaattaatgtgcaaacaaataatgtgcttttgccttttcagaattttgtatgggc

SEQ ID NO: 239185 - DNA, 120 bp, Artificial Sequence
  ENSG00000120800_77 (sequence is synthesized)
ttttttttgtagtacatatcttcctgtaataccaatgaattcactcttttgtgtgacattccaagtgagaacacactattagagtagtttgaaatcattacaaatgtctgttcttttcac

SEQ ID NO: 239186 - DNA, 120 bp, Artificial Sequence
  ENSG00000120800_78 (sequence is synthesized)
tgttcttttcacaattttttcctaagtatatttaaataacaatatatagaatagcaaatgagagttcttcatttggatatgtttatgtttgtgaatataattttccatttctactttata

SEQ ID NO: 239187 - DNA, 120 bp, Artificial Sequence
  ENSG00000120800_79 (sequence is synthesized)
gctctcagttttgcaaatcactcctagaagttatattttataattgttttatttatacttctgtacacatattaaaattttccttccctctgcccccctgtgctattttttatttgatat

SEQ ID NO: 239188 - DNA, 120 bp, Artificial Sequence
  ENSG00000120800_80 (sequence is synthesized)
gttatcttgagatgcagtagaaggctctggagccagactgcctgtttgaatcttgacccttccacttactgctagtgtaacctgggaaaattatttgaaatctcgattccccagtctctt

SEQ ID NO: 239189 - DNA, 120 bp, Artificial Sequence
  ENSG00000120800_81 (sequence is synthesized)
ccccagtctcttcagataataaatgggggtagtaatattctctccctcagggttgctgtgaggatgatgagtgaatacttgtaaaaaacttagaatgggccgggcacagtggctcacacc

SEQ ID NO: 239190 - DNA, 120 bp, Artificial Sequence
  ENSG00000120802_0 (sequence is synthesized)
gggttggtgcgagcttccagcttggccgcagttggttcgtagttcggctctggggtcttttgtgtccgggtctggcttggctttgtgtccgcgagtttttgttccgctccgcagcgctct

SEQ ID NO: 239191 - DNA, 120 bp, Artificial Sequence
  ENSG00000120802_1 (sequence is synthesized)
tcccgggcaggagccgtgaggctcggaggcggcagcgcggtccccggccaggagcaagcgcgccggcgtgagcggcggcggcaaaggctgtggggagggggcttcgcagatccccgagat

SEQ ID NO: 239192 - DNA, 120 bp, Artificial Sequence
  ENSG00000120802_2 (sequence is synthesized)
gccggagttcctggaagacccctcggtcctgacaaaagacaagttgaagagtgagttggtcgccaacaatgtgacgctgccggccggggagcagcgcaaagacgtgtacgtccagctcta

SEQ ID NO: 239193 - DNA, 120 bp, Artificial Sequence
  ENSG00000120802_3 (sequence is synthesized)
cctgcagcacctcacggctcgcaaccggccgccgctccccgccggcaccaacagcaaggggcccccggacttctccagtgacgaagagcgcgagcccaccccggtcctcggctctggggc

SEQ ID NO: 239194 - DNA, 120 bp, Artificial Sequence
  ENSG00000120802_4 (sequence is synthesized)
cgccgccgcgggccggagccgagcagccgtcggcaggaaagccacaaaaaaaactgataaacccagacaagaagataaagatgatctagatgtaacagagctcactaatgaagatctttt

SEQ ID NO: 239195 - DNA, 120 bp, Artificial Sequence
  ENSG00000120802_5 (sequence is synthesized)
ggatcagcttgtgaaatacggagtgaatcctggtcctattgtgggaacaaccaggaagctatatgagaaaaagcttttgaaactgagggaacaaggaacagaatcaagatcttctactcc

SEQ ID NO: 239196 - DNA, 120 bp, Artificial Sequence
  ENSG00000120802_6 (sequence is synthesized)
tctgccaacaatttcttcttcagcagaaaatacaaggcagaatggaagtaatgattctgacagatacagtgacaatgaagaaggaaagaagaaagaacacaagaaagtgaagtccactag

SEQ ID NO: 239197 - DNA, 120 bp, Artificial Sequence
  ENSG00000120802_7 (sequence is synthesized)
ggatattgttcctttttctgaacttggaactactccctctggtggtggattttttcagggtatttcttttcctgaaatctccacccgtcctcctttgggcagtaccgaactacaggcagc

SEQ ID NO: 239198 - DNA, 120 bp, Artificial Sequence
  ENSG00000120802_8 (sequence is synthesized)
taagaaagtacatacttctaagggagacctacctagggagcctcttgttgccacaaacttgcctggcaggggacagttgcagaagttagcctctgaaaggaatttgtttatttcatgcaa

SEQ ID NO: 239199 - DNA, 120 bp, Artificial Sequence
  ENSG00000120802_9 (sequence is synthesized)
gtctagccatgataggtgtttagagaaaagttcttcgtcatcttctcagcctgaacacagtgccatgttggtctctactgcagcttctccttcactgattaaagaaaccaccactggtta

SEQ ID NO: 239200 - DNA, 120 bp, Artificial Sequence
  ENSG00000120802_10 (sequence is synthesized)
ctataaagacatagtagaaaatatttgcggtagagagaaaagtggaattcaaccattatgtcctgagaggtcccatatttcagatcaatcgcctctctccagtaaaaggaaagcactaga

SEQ ID NO: 239201 - DNA, 120 bp, Artificial Sequence
  ENSG00000120802_11 (sequence is synthesized)
agagtctgagagctcacaactaatttctccgccacttgcccaggcaatcagagattatgtcaattctctgttggtccagggtggggtaggtagtttgcctggaacttctaactctatgcc

SEQ ID NO: 239202 - DNA, 120 bp, Artificial Sequence
  ENSG00000120802_12 (sequence is synthesized)
cccactggatgtagaaaacatacagaagagaattgatcagtctaagtttcaagaaactgaattcctgtctcctccaagaaaagtccctagactgagtgagaagtcagtggaggaaaggga

SEQ ID NO: 239203 - DNA, 120 bp, Artificial Sequence
  ENSG00000120802_13 (sequence is synthesized)
ttcaggttcctttgtggcatttcagaacatacctggatccgaactgatgtcttcttttgccaaaactgttgtctctcattcactcactaccttaggtctagaagtggctaagcaatcaca

SEQ ID NO: 239204 - DNA, 120 bp, Artificial Sequence
  ENSG00000120802_14 (sequence is synthesized)
gcatgataaaatagatgcctcagaactatcttttcccttccatgaatctattttaaaagtaattgaagaagaatggcagcaagttgacaggcagctgccttcactggcatgcaaatatcc

SEQ ID NO: 239205 - DNA, 120 bp, Artificial Sequence
  ENSG00000120802_15 (sequence is synthesized)
ggcaacacagatattatcagttccaaaagtagatgatgaaatcctagggtttatttctgaagccactccactaggaggtattcaagcagcctccactgagtcttgcaatcagcagttgga

SEQ ID NO: 239206 - DNA, 120 bp, Artificial Sequence
  ENSG00000120802_16 (sequence is synthesized)
cttagcactctgtagagcatatgaagctgcagcatcagcattgcagattgcaactcacactgcctttgtagctaaggctatgcaggcagacattagtcaagctgcacagattcttagctc

SEQ ID NO: 239207 - DNA, 120 bp, Artificial Sequence
  ENSG00000120802_17 (sequence is synthesized)
agatcctagtcgtacccaccaagcgcttgggattctgagcaaaacatatgatgcagcctcatatatttgtgaagctgcatttgatgaagtgaagatggctgcccataccatgggaaatgc

SEQ ID NO: 239208 - DNA, 120 bp, Artificial Sequence
  ENSG00000120802_18 (sequence is synthesized)
cactgtaggtcgtcgatacctctggctgaaggattgcaaaattaatttagcttctaagaataagctggcttccactccctttaaaggtggaacattatttggaggagaagtatgcaaagt

SEQ ID NO: 239209 - DNA, 120 bp, Artificial Sequence
  ENSG00000120802_19 (sequence is synthesized)
aattaaaaagcgtggaaataaacactagtaaaattaaggacaaaaagacatctatcttatctttcaggtactttatgccaacattttcttttctgttaaggttgttttagtttccagata

SEQ ID NO: 239210 - DNA, 120 bp, Artificial Sequence
  ENSG00000120802_20 (sequence is synthesized)
gggctaattacaaaatgttaagcttctacccatcaaattacagtataaaagtaattgcctgtgtagaactacttgtcttttctaaagatttgcgtagataggaagcctggtacaaacaat

SEQ ID NO: 239211 - DNA, 120 bp, Artificial Sequence
  ENSG00000120802_21 (sequence is synthesized)
ttaacgctttctagatcacatattagtctctaagttgttttctgtttcctgctttacttatgtttttacaattctccaaaactaagaaaattctaattaggatataaggagtatttactg

SEQ ID NO: 239212 - DNA, 120 bp, Artificial Sequence
  ENSG00000120802_22 (sequence is synthesized)
ttcaatagaataatatgcatcctcctttatacctaggacagaattaaacatttgttacacattcagaacagtgatgttgttctttttgatacttttatctcagtatcttttcacgttcca

SEQ ID NO: 239213 - DNA, 120 bp, Artificial Sequence
  ENSG00000120802_23 (sequence is synthesized)
taacttgtccatatttttgctcatattttcttacttttctttgttatttattcatgtctgcaacatcaatcatagtagtctagatcaatgcaactcaaagcaccagtctacaaactgtta

SEQ ID NO: 239214 - DNA, 120 bp, Artificial Sequence
  ENSG00000120802_24 (sequence is synthesized)
cttatccacaggcaagataagcatgcacaagaatttaaatctagagatactttttaggtcaatgacaggatttgattttttagcaaaattttattaatagctaaagcaatgtattgattt

SEQ ID NO: 239215 - DNA, 120 bp, Artificial Sequence
  ENSG00000120802_25 (sequence is synthesized)
acactctgatgcaagtaatttatctcttcattgactggtagcaaccaattcatggaccagtaccatggaccacactttgagaaacacttctttggataataatagatatcctgggatagt

SEQ ID NO: 239216 - DNA, 120 bp, Artificial Sequence
  ENSG00000120802_26 (sequence is synthesized)
gcatgttcaccatctattttgtcagataatggggccttttaaaaaataatactttgctttcatgatatattgtattttgtggaaagttaagtttagcaatatagactctaaaagcaaatt

SEQ ID NO: 239217 - DNA, 120 bp, Artificial Sequence
  ENSG00000120802_27 (sequence is synthesized)
aaatttttttaagccataagaaattatactatatcccagtatctgtatgtctgtataaagcagtgtattatcatgttttcatttctgtgattgtaagttaagagtcttaactgcagaggt

SEQ ID NO: 239218 - DNA, 120 bp, Artificial Sequence
  ENSG00000120802_28 (sequence is synthesized)
attgtggaaagtagtagccttaagcataataaaatatggtctcttgggtactccctctggccattaccacattcttagattatatgtgtccatctttgcagctttctgagagtaatttta

SEQ ID NO: 239219 - DNA, 120 bp, Artificial Sequence
  ENSG00000120802_29 (sequence is synthesized)
tttgttgtcttctgaaatgtacatgtatacatgtacctactgagtgctatgtgatttttaaaaatgtattactgtagaatgcttctgcaaattcaataaagttgttaaatttgaacagtg

SEQ ID NO: 239220 - DNA, 120 bp, Artificial Sequence
  ENSG00000120802_30 (sequence is synthesized)
ctaaagggcagagcaaagactccagtaacactcaagcaaagaagagttgagcacaatcaggtgggagaaaaaacagaggaaagaagagtagaaagggatattcttaaggaaatgttcccc

SEQ ID NO: 239221 - DNA, 120 bp, Artificial Sequence
  ENSG00000120802_31 (sequence is synthesized)
tatgaagcatctacaccaacaggaattagtgctagttgccgcagaccaatcaaaggggctgcaggccggccattagaactcagtgatttcaggatggaggagtctttttcatctaaatat

SEQ ID NO: 239222 - DNA, 120 bp, Artificial Sequence
  ENSG00000120802_32 (sequence is synthesized)
ttgtggcagtttttttgtttttggtctatcaagctatggaaaccaaccaagtaaatcccttctctaattttcttcatgttgaccctagaaaatccaactgaatggtatctctttggcacg

SEQ ID NO: 239223 - DNA, 120 bp, Artificial Sequence
  ENSG00000120802_33 (sequence is synthesized)
ttcaacttggtctcctattttcaataactgttgaaaaacatttgtgtacacttgttgactccaagaactaaaaataatgtgatttcgcctcaataaatgtagtatttcattgaaaagcaa

SEQ ID NO: 239224 - DNA, 120 bp, Artificial Sequence
  ENSG00000120802_34 (sequence is synthesized)
acaaaatatatataaatggacttcattaaaatgtttttgaactttggactagtaggagatcactttgtgccatatgaataatcttttttagctctggaactttttgtaggctttattttt

SEQ ID NO: 239225 - DNA, 120 bp, Artificial Sequence
  ENSG00000120802_35 (sequence is synthesized)
ttaatgtgggcatcttatttcatttttgaaaaaatgtatatgttttttgtgtatttgggaaacgaagggtgaaacatggtagtataatgtgaagctacacatttaaatacttagaattct

SEQ ID NO: 239226 - DNA, 120 bp, Artificial Sequence
  ENSG00000120802_36 (sequence is synthesized)
tacagaaaagattttaagaattattctctgctgaataaaaactgcaaatatgtgaaacataatgaaattcagtaagaggaaaagtaacttggttgtactttttgtaactgcaacaaagtt

SEQ ID NO: 239227 - DNA, 120 bp, Artificial Sequence
  ENSG00000120802_37 (sequence is synthesized)
tgatggtgtttatgaggaaaagtacagcaataatctcttctgtaacctttattaatagtaatgttgttgtagccctatcatactcactttttaagacacagtatcatgaaagtcctattt

SEQ ID NO: 239228 - DNA, 120 bp, Artificial Sequence
  ENSG00000120802_38 (sequence is synthesized)
cagtaagacccatttacatacagtagatttttagcagagatcttttagtgtaacatacatattttagagaattgttggctagctgtacatgttttgaaaagctgtttagctagctataag

SEQ ID NO: 239229 - DNA, 120 bp, Artificial Sequence
  ENSG00000120802_39 (sequence is synthesized)
gctataattggaaatttgtattttttatttacagcaaaacatttattcagtcatccagtttgctaccaaaatatgttttagataagtgtgtgtatgtttgtttagaagttagaaattgta

SEQ ID NO: 239230 - DNA, 120 bp, Artificial Sequence
  ENSG00000120802_40 (sequence is synthesized)
aacactggtcttatgtttcatttggattcattattgcattgtcttgttaccagaaacaaattttgccgagctttttttgccctatatttcccagcataatttgattagaaagtacaaaaa

SEQ ID NO: 239231 - DNA, 120 bp, Artificial Sequence
  ENSG00000120802_41 (sequence is synthesized)
actttttaatgtgttgatgcttgaatagagctattctcaagctggaataactgagactgaatggacaagtggatcttcaaaaggcggacctctgcaggcattaactagggaatctacaag

SEQ ID NO: 239232 - DNA, 120 bp, Artificial Sequence
  ENSG00000120802_42 (sequence is synthesized)
agggtcaagaagaactccaaggaaaagggtggaaacttcagaacattttcgtatagatggtccagtaatttcagagagtactcccatagctgaaactataatggcttcaagcaacgaatc

SEQ ID NO: 239233 - DNA, 120 bp, Artificial Sequence
  ENSG00000120802_43 (sequence is synthesized)
cttagttgtcaatagggtgactggaaatttcaagcatgcatctcctattctgccaatcactgaattctcagacatacccagaagagcaccaaagaaaccattgacaagagctgaagtggg

SEQ ID NO: 239234 - DNA, 120 bp, Artificial Sequence
  ENSG00000120802_44 (sequence is synthesized)
ccgtgtacaggtataaataacctcctgacaacactaatccatgttttagcctttaatggttgacacccagattccagcacgctcaataaacttaattctgttgttaaatgatactaaaaa

SEQ ID NO: 239235 - DNA, 120 bp, Artificial Sequence
  ENSG00000120802_45 (sequence is synthesized)
aaaatttaaaacaatattggcaagatacacaaattttattcgtgtcattagagtaattctgtaatttgatttaaatactttttattgaaaattctaagaagcaacatagtacaaattcat

SEQ ID NO: 239236 - DNA, 120 bp, Artificial Sequence
  ENSG00000120802_46 (sequence is synthesized)
aattttccatcacctgaaattgcaagttaactttgtcttttttgctacaaatctcatttttctgagagaataaagtattacaagtaaaggcaaagtttctcgtacttacctgtacctatc

SEQ ID NO: 239237 - DNA, 120 bp, Artificial Sequence
  ENSG00000120802_47 (sequence is synthesized)
acctccacagaagtaactactattattaattcaatgcctgtctttcaagttttatatttcacatacacatctgtctaatacatggtattattttatactttaagaataaaaaatttatat

SEQ ID NO: 239238 - DNA, 120 bp, Artificial Sequence
  ENSG00000120802_48 (sequence is synthesized)
aggtgcggggctgtccctgcgccccctcgcgtcgccccttccccgcggggctgcaggcgccggagcggagaggccagaagttggggccgcggggttcgcgttctttgacgtgtgggtctg

SEQ ID NO: 239239 - DNA, 120 bp, Artificial Sequence
  ENSG00000120802_49 (sequence is synthesized)
ggaggtgtggagttgcgttggcggcggttgttttgcacgcagtcgacgccgcttccctggaccaccagccgcctgcagcgggcgtttagacggggacttccgtgccctttcgaaagctct

SEQ ID NO: 239240 - DNA, 120 bp, Artificial Sequence
  ENSG00000120802_50 (sequence is synthesized)
ttttttttttttaacaattttaaactgattttccccatatagttctgaattttagaattttcctataatatccaatttatgtaaagaaatctaattcattgtacaagaaagtataaggat

SEQ ID NO: 239241 - DNA, 120 bp, Artificial Sequence
  ENSG00000120802_51 (sequence is synthesized)
attttttgttaaaatatttgaagaatgaggcttcatatgtgaggcactaagttgtgtttgtaggctgtgttgcttaaatctttactaagggaaaatttctaatattacagagataaaata

SEQ ID NO: 239242 - DNA, 88 bp, Artificial Sequence
  ENSG00000120802_52 (sequence is synthesized)
aaagtacaaaaagtacttgcttttatattacatcataagcagtagttaataaagttgtatactcttaagaggtgggcattatgattat

SEQ ID NO: 239243 - DNA, 120 bp, Artificial Sequence
  ENSG00000120802_53 (sequence is synthesized)
ataaagttgtatactcttaagaggtgggcattatgattattttttatttttttattttttatgagatggagtctcactcttgtcacccagactgtagtgcagtggcacgatctgggctcg

SEQ ID NO: 239244 - DNA, 120 bp, Artificial Sequence
  ENSG00000120802_54 (sequence is synthesized)
gattacaggtgtgatccactgcacccggccggcattatgattttgtgtactcttgaaatggttatctttgtggatgatttttttttttaagctgaaacttacctcatgaataacttgatt

SEQ ID NO: 239245 - DNA, 120 bp, Artificial Sequence
  ENSG00000120802_55 (sequence is synthesized)
aataacttgattaaagtagtaggtgattaaaatttcaatagaatcaaatgagacaaaaattttaaactgactcatttgagtttcaactttacagtcattgaccataaagcacactaaaaa

SEQ ID NO: 239246 - DNA, 120 bp, Artificial Sequence
  ENSG00000120802_56 (sequence is synthesized)
tgtaagttatttttaaatacatctgaaataaaaatacttactaaaaaggaagaagccgaagatgtatatttagaccagcacacaattttgatttcaattagccttattctaatatttagc

SEQ ID NO: 239247 - DNA, 120 bp, Artificial Sequence
  ENSG00000120802_57 (sequence is synthesized)
ttttagatctttcatacacattttcacgtactttgcaattgagaccagaaagacttgtaggtctttctgcagaatgagtgggtccttgcaaagtgagtgggaaacttactcctagatcag

SEQ ID NO: 239248 - DNA, 120 bp, Artificial Sequence
  ENSG00000120802_58 (sequence is synthesized)
aaatgtttgcctctctgagtaaaatgtttctttcagatgagccatagagggggcaccttttactcaacttttctttgttttgaaactttgtttcccatactgttttcagccttttgttta

SEQ ID NO: 239249 - DNA, 120 bp, Artificial Sequence
  ENSG00000120802_59 (sequence is synthesized)
taattagaaattgtgagaagcttcatttagtgtttaaaaatgtggggagataaatcagacttaacatgtatgtaagatcaattcacttaaaagtatggtccaaatagcaaaaataggacc

SEQ ID NO: 239250 - DNA, 120 bp, Artificial Sequence
  ENSG00000120802_60 (sequence is synthesized)
aggtgaaacatgtagtcattttttaaaaacatgtacttggtcttttgtgtgtgtctgttttattccattagaataaatgtgtccttgatgtaaatgcaaagcatttcttcctgattaaat

SEQ ID NO: 239251 - DNA, 120 bp, Artificial Sequence
  ENSG00000120802_61 (sequence is synthesized)
tgtagatgtagactttacaatataattcaataataaaaagtaattaacctctagttttgtcgttgcaataaatggttttcagatagcacaaactgtgatttctggataacatttcttatg

SEQ ID NO: 239252 - DNA, 120 bp, Artificial Sequence
  ENSG00000120802_62 (sequence is synthesized)
aaaaaaaaaaaaaaggttatttaaaagaaaatgttacccaaagtcagttttacttttagttgctcttttgcatttttgatgccattactatctcttttagataggtaatccaaaatggac

SEQ ID NO: 239253 - DNA, 120 bp, Artificial Sequence
  ENSG00000120802_63 (sequence is synthesized)
tattttaacaacaatgtctttaagttacttgcttggctgtgcggtttgtatgattacagttcaacttagaaagtgttctccaataatgagttgctcttaatttaatggaattgctaaggc

SEQ ID NO: 239254 - DNA, 120 bp, Artificial Sequence
  ENSG00000120802_64 (sequence is synthesized)
ctaatattactataaaccaatttggtagtgagtttgcatgtttatgttatacaggttattatctagtaagtgaacactttaattcatatggaaatgattactggactttgtttacagaaa

SEQ ID NO: 239255 - DNA, 120 bp, Artificial Sequence
  ENSG00000120805_0 (sequence is synthesized)
cccgcccccgcctggagtccgacgtggaagttgctggctgactgggcttgcgaggaaaccgcctcggagctgcagccgaaggccaaggaatcactgaagatcggcgagggaggacagggg

SEQ ID NO: 239256 - DNA, 120 bp, Artificial Sequence
  ENSG00000120805_1 (sequence is synthesized)
gttcatcatgggtggctttttctcaagtatattttccagtctgtttggaactcgggaaatgagaattttaattttgggattagatggagcaggaaaaaccacaattttgtacagattaca

SEQ ID NO: 239257 - DNA, 120 bp, Artificial Sequence
  ENSG00000120805_2 (sequence is synthesized)
agtgggagaagttgttactactatacctaccattggatttaatgtagagacggtgacgtacaaaaaccttaaattccaagtctgggatttaggaggacagacaagtatcaggccatactg

SEQ ID NO: 239258 - DNA, 120 bp, Artificial Sequence
  ENSG00000120805_3 (sequence is synthesized)
gagatgttactattcaaacacagatgcagtcatttatgtagtagacagttgtgaccgagaccgaattggcatttccaaatcagagttagttgccatgttggaggaagaagagctgagaaa

SEQ ID NO: 239259 - DNA, 120 bp, Artificial Sequence
  ENSG00000120805_4 (sequence is synthesized)
agccattttagtggtgtttgcaaataaacaggacatggaacaggccatgacttcctcagagatggcaaattcacttgggttacctgccttgaaggaccgaaaatggcagatattcaaaac

SEQ ID NO: 239260 - DNA, 120 bp, Artificial Sequence
  ENSG00000120805_5 (sequence is synthesized)
gtcagcaaccaaaggcaccggccttgatgaggcaatggaatggttagttgaaacattaaaaagcagacagtaattcagtccattcttctcccctgaaatgaagactacatcacctctctc

SEQ ID NO: 239261 - DNA, 120 bp, Artificial Sequence
  ENSG00000120805_6 (sequence is synthesized)
cctttggaaacagtcaagtgtacttcacactactagatgttaaaactatatgattattggcatatactgactgactgcaatatttgtagtaaatagggaaaataagtatttagttggagg

SEQ ID NO: 239262 - DNA, 120 bp, Artificial Sequence
  ENSG00000120805_7 (sequence is synthesized)
gataatttgatcgaatcacctgaatgttctatgtaatgtaaaatattcttttcttgctttcttgtgttaaggtatatattctatttgtatggaattcttattcaaatacagttctattaa

SEQ ID NO: 239263 - DNA, 120 bp, Artificial Sequence
  ENSG00000120805_8 (sequence is synthesized)
agagtatactcctattggatgaaaaaaacctatttttgaatagtagttgcagcttgtttgtataaatactaaaaaatatcttaacagatttttttccccttaaaatgaattatctttcca

SEQ ID NO: 239264 - DNA, 120 bp, Artificial Sequence
  ENSG00000120805_9 (sequence is synthesized)
aagattagactcagtatgagagtaggtgaggaacatagtttgtgtaatataatctttatttgcttacctgaccactttttattaagctgttttgtttaaaagcttttggttataggcatg

SEQ ID NO: 239265 - DNA, 120 bp, Artificial Sequence
  ENSG00000120805_10 (sequence is synthesized)
aatattgttttgatggttaacttcactgacttatctgtaagtgtcattttatagtactttacagttgtcaaaaaaaatcttacatatattgatctagttgatcggtagaggaagcttgtg

SEQ ID NO: 239266 - DNA, 120 bp, Artificial Sequence
  ENSG00000120805_11 (sequence is synthesized)
aagtaggtaggacaggttatgatgtcttcactgtatggacgtgaacccagggttctaataggttggcttgcccaaggtcacctgctagcttgtaaggtaggaatagggctcaaagtaaaa

SEQ ID NO: 239267 - DNA, 120 bp, Artificial Sequence
  ENSG00000120805_12 (sequence is synthesized)
cttttggttcagaagcttgactcataaactatactatatattcccaaaaatgtcagtattgacaacacagtctaactcttaaataaaattatgctaattagttacattcaaaataatgtt

SEQ ID NO: 239268 - DNA, 120 bp, Artificial Sequence
  ENSG00000120805_13 (sequence is synthesized)
aattcataacacattaaagagaaaatttcacattaaaggaaggtttaaaaatctattttcagattataaaaggtgtctttactggttttcattccttttatctacatgtaattggacatg

SEQ ID NO: 239269 - DNA, 120 bp, Artificial Sequence
  ENSG00000120805_14 (sequence is synthesized)
taaacttgttaaaaatcaaaatcttactgattgtacagggagaaattaagcattctgttttaaaaattaggcttattgctagactgtaagtttaaaaacaattcatgttcaaaggagctt

SEQ ID NO: 239270 - DNA, 120 bp, Artificial Sequence
  ENSG00000120805_15 (sequence is synthesized)
ttcaaattacccagtccaccacagaatcagctaatgtgacagaagtaaatatagtgcgtcataattgctaaaaacagggtgaatttctttcacttaagttggaaaaccagcctctaaaaa

SEQ ID NO: 239271 - DNA, 120 bp, Artificial Sequence
  ENSG00000120805_16 (sequence is synthesized)
attaggtgctggtaatgagagcttaataccatggttccctgcaggtctcagaaacattagtagttcctttcttggccctcactgtccttccagtgttggcctctggcctcttcccctcac

SEQ ID NO: 239272 - DNA, 120 bp, Artificial Sequence
  ENSG00000120805_17 (sequence is synthesized)
atttatgttcattctccgggcttatattcattctctgctgctttctcccttcacccgtgggactctcacccttcttgctcattctccagcacccattcctactttagtctctttgaaatc

SEQ ID NO: 239273 - DNA, 120 bp, Artificial Sequence
  ENSG00000120805_18 (sequence is synthesized)
ttttttggagattttccttcagctacaaatgttccagtacaaccaatattactcctgaggggcaaagactttttcatatttatgtccctagtatctggtatggcgcctggcatatggcat

SEQ ID NO: 239274 - DNA, 120 bp, Artificial Sequence
  ENSG00000120805_19 (sequence is synthesized)
ttcagaatatgttcatagttgaaacagtaggatagatatttgtcatcttgacaagtagccctttgcaatttatacttgagttcactcctggtcaatggcacatggctggaaaatgcagaa

SEQ ID NO: 239275 - DNA, 120 bp, Artificial Sequence
  ENSG00000120805_20 (sequence is synthesized)
agcaagttcacttacagcctgaggcttataaagcttgtacagctgcctcccggcagtccaggaaaactgcaaaaaatgggaagtaaggtcctggcaggcagacccggcatgtagccgctg

SEQ ID NO: 239276 - DNA, 120 bp, Artificial Sequence
  ENSG00000120805_21 (sequence is synthesized)
gccatcttgaatcctagggcatgaagttgccccaaagttcagcacttggttaagcctgatccctctggtttatcacaaagaataggatgggataaagaaagtggacacttaaataagcta

SEQ ID NO: 239277 - DNA, 120 bp, Artificial Sequence
  ENSG00000120805_22 (sequence is synthesized)
taaattatatggtccttgtctagcaggagacaactgcacaggtatactaccagcgtttggatattgatatatacatggcaaatctgaatattgttttatgagaggcctggcaatgggtaa

SEQ ID NO: 239278 - DNA, 120 bp, Artificial Sequence
  ENSG00000120805_23 (sequence is synthesized)
aacaccaaacttgaaatcagaacataggtgcaaatggccactcctgtagtttcttttctgtaaaatgggatctggacgaatgataccaaacgtttctttctaacattgtattttataact

SEQ ID NO: 239279 - DNA, 120 bp, Artificial Sequence
  ENSG00000120805_24 (sequence is synthesized)
ctggcctatgattgtgttgtgtcttgcattaaaaaaaaaaatttgagagtggtagaattacttctgttatctgaaatacctgagatgcactttaaactgttgaaatgtaagctctgaggg

SEQ ID NO: 239280 - DNA, 120 bp, Artificial Sequence
  ENSG00000120805_25 (sequence is synthesized)
cagggaccgtatcttatttactgttagtatccgttgcatctagtgtggtgcacctggcacacagtaggcactcaataaatatgtattgattaaaaacaaagacgtcttcaatatgccaga

SEQ ID NO: 239281 - DNA, 90 bp, Artificial Sequence
  ENSG00000120805_26 (sequence is synthesized)
ttccaaatcagagttagttgccatgttggagagacggggtctacctatggtgcccaggctggtcccaaactcctgtagtgttgggattac

SEQ ID NO: 239282 - DNA, 120 bp, Artificial Sequence
  ENSG00000120805_27 (sequence is synthesized)
gcgttctcctccgtcctctctcggttccccttgattcctgcggggtccagggacccggacagcttggggacgtccgcagagcctgggttcgagttctttacccttatcatgaagttttcc

SEQ ID NO: 239283 - DNA, 120 bp, Artificial Sequence
  ENSG00000120805_28 (sequence is synthesized)
gaagttgctggctgactgggcttgcgaggaaaccgcctcggagctgcagccgaaggccaaggaatcactgaagatcggcgagggaggacagggggttcatcatggccattggatttaatg

SEQ ID NO: 239284 - DNA, 120 bp, Artificial Sequence
  ENSG00000120805_29 (sequence is synthesized)
ccgtgcccagccaatgtttatcaacattcttttgactccatcacatctgagggatatggtacatatatccaccagaaacagtgaatcattaaggcattgattctaacatgtgtgggacag

SEQ ID NO: 239285 - DNA, 120 bp, Artificial Sequence
  ENSG00000120805_30 (sequence is synthesized)
cagaagccatctgtgcatttgtgtgtgcttgcagctatgcacgtccacgtgtaatttttctcccgtgttgaggatgaaactttgatttacttagcagcttatttcataagttcctcaagc

SEQ ID NO: 239286 - DNA, 120 bp, Artificial Sequence
  ENSG00000120805_31 (sequence is synthesized)
gttttctctcactggtcttcaggtgcatctgtcttctcaaccacacctacctgattacagttacttagataagcaaattctttgccaatttttagccttttccctgcctcacctcaccct

SEQ ID NO: 239287 - DNA, 120 bp, Artificial Sequence
  ENSG00000120805_32 (sequence is synthesized)
gtggaagttgctggctgactgggcttgcgaggaaaccgcctcggagctgcagccgaaggccaaggaatcactgaagatcggcgagggaggacagggggttcatcatgggaagaagagctg

SEQ ID NO: 239288 - DNA, 120 bp, Artificial Sequence
  ENSG00000120805_33 (sequence is synthesized)
actactatacctagtaagtgttggtatgatgagctaattgtagggactttctggtctccatccaacataactatttctttctttcttttttgtttgttttagtagagatcaggtatcatc

SEQ ID NO: 239289 - DNA, 120 bp, Artificial Sequence
  ENSG00000120805_34 (sequence is synthesized)
ttttcacctaagaaggatggcagagaaaagggatgggacacctgccctttgaccacccagccatgaccttattacaagtgagttctggaggatgtctgcagatgggctgtgagattgaaa

SEQ ID NO: 239290 - DNA, 120 bp, Artificial Sequence
  ENSG00000120805_35 (sequence is synthesized)
gctgcagccatggctgtgtccatgctgtagtttagaactgaagtttagctttttttcttttggtctgtttatttgctgccagccaaaattctgctttttatagtacatccacaactgtac

SEQ ID NO: 239291 - DNA, 120 bp, Artificial Sequence
  ENSG00000120805_36 (sequence is synthesized)
gttttatggccagtttggcatttgtctgctaatctgctgtagcgtttcatgtaataatacgggtatttctagtcggcaaatgaaactttattcttggttcttggcccgctgattgaggga

SEQ ID NO: 239292 - DNA, 120 bp, Artificial Sequence
  ENSG00000120805_37 (sequence is synthesized)
actgcattctcacaagcatcaggtggctttttctcaagtatattttccagtctgtttggaactcgggaaatgagaattttaattttgggattagatggagcaggaaaaaccacaattttg

SEQ ID NO: 239293 - DNA, 120 bp, Artificial Sequence
  ENSG00000120805_38 (sequence is synthesized)
gttgttactactatacctaaactgctggcttttaaaaaatatcctgaagatggtattgatcttgctaattgatgttttgtgcacacacctgcacatgtgtgggggagcagagcatactat

SEQ ID NO: 239294 - DNA, 120 bp, Artificial Sequence
  ENSG00000120820_0 (sequence is synthesized)
aagaaacccgagacgttccgaagtcaacgcaagcaaaggggagtgcgggtcggggaggaatattcttttggaaacgtaatattggccttggggctctccagccctttgggacttccaatg

SEQ ID NO: 239295 - DNA, 120 bp, Artificial Sequence
  ENSG00000120820_1 (sequence is synthesized)
ggatcttagaagcagccgaagcagcgtgagggcggcagcccagggccagccacgatttgaacgctctgccttgcagctcttctggaccgaggagcccaaagccctaccctcaccattcac

SEQ ID NO: 239296 - DNA, 120 bp, Artificial Sequence
  ENSG00000120820_2 (sequence is synthesized)
caggtcctgtgggaagagcagcgtggaggtgggctgaggttagaaggtgcagagcgtggaagaagattgtgagctgagtattggacatctgttcttgaatagtccctgggcctgccatag

SEQ ID NO: 239297 - DNA, 120 bp, Artificial Sequence
  ENSG00000120820_3 (sequence is synthesized)
gaaaggaagttctccagggttacagttcttatccgcgtgaatacacatggctctgttacgaaaaattaatcaggtgctgctgttccttctgatcgtgaccctctgtgtgattctgtataa

SEQ ID NO: 239298 - DNA, 120 bp, Artificial Sequence
  ENSG00000120820_4 (sequence is synthesized)
gaaagttcataaggggactgtgcccaagaatgacgcagatgatgaatccgagactcctgaagaactggaagaagagattcctgtggtgatttgtgctgcagcagggaggatgggtgccac

SEQ ID NO: 239299 - DNA, 120 bp, Artificial Sequence
  ENSG00000120820_5 (sequence is synthesized)
tatggctgccatcaatagcatctacagcaacactgacgccaacatcttgttctatgtagtgggactccggaatactctgactcgaatacgaaaatggattgaacattccaaactgagaga

SEQ ID NO: 239300 - DNA, 120 bp, Artificial Sequence
  ENSG00000120820_6 (sequence is synthesized)
aataaactttaaaatcgtggaattcaacccgatggtcctcaaagggaagatcagaccagactcatcgaggcctgaattgctccagcctctgaactttgttcgattttatctccctctact

SEQ ID NO: 239301 - DNA, 120 bp, Artificial Sequence
  ENSG00000120820_7 (sequence is synthesized)
ccttggccctgggccacgcggcggctttctcagatgactgcgatttgccctctgctcaggacataaacagactcgtgggacttcagaacacatatatgggctatctggactaccggaaga

SEQ ID NO: 239302 - DNA, 120 bp, Artificial Sequence
  ENSG00000120820_8 (sequence is synthesized)
aggccatcaaggaccttggcatcagccccagcacctgctctttcaatcctggtgtgattgttgccaacatgacagaatggaagcaccagcgcatcaccaagcaattggagaaatggatgc

SEQ ID NO: 239303 - DNA, 120 bp, Artificial Sequence
  ENSG00000120820_9 (sequence is synthesized)
aaaagaatgtggaggaaaacctctatagcagctccctgggaggaggggtggccacctccccaatgctgattgtgtttcatgggaaatattccacaattaaccccctgtggcacataaggc

SEQ ID NO: 239304 - DNA, 120 bp, Artificial Sequence
  ENSG00000120820_10 (sequence is synthesized)
acctgggctggaatccagatgccagatattcggagcattttctgcaggaagctaaattactccactggaatggaagacataaaccttgggacttccctagtgttcacaacgacttatggg

SEQ ID NO: 239305 - DNA, 120 bp, Artificial Sequence
  ENSG00000120820_11 (sequence is synthesized)
aaagctggtttgttcctgaccctgcagggatatttaaactcaatcaccatagctgatataactctacccttaaaatattccctgtatagaaatgtggaattgtccctttgtagccaacta

SEQ ID NO: 239306 - DNA, 120 bp, Artificial Sequence
  ENSG00000120820_12 (sequence is synthesized)
taacattgttctttatgaatattacctttgatacatatgatccacaatataaaaaccaaaaactactgtgtgcaaattataccttggaccatataggcattgattaacttctttaagtac

SEQ ID NO: 239307 - DNA, 120 bp, Artificial Sequence
  ENSG00000120820_13 (sequence is synthesized)
atgtgataactatggaaatcaagattatgtgactgaaaaacataaaggaagagacccatctagataacagcaatcaacctgcttaattctgaatgacaattatatccacaaatttttaaa

SEQ ID NO: 239308 - DNA, 120 bp, Artificial Sequence
  ENSG00000120820_14 (sequence is synthesized)
acttctacatgtatttttcacatgaagatctccttaacaggttgccaaccttttcttttataaaactattacatttaaaatatggacgtctgaaaaataaaatattcatcatttttatga

SEQ ID NO: 239309 - DNA, 120 bp, Artificial Sequence
  ENSG00000120820_15 (sequence is synthesized)
acaagcaacgtgagagaagctcgggtagaggttcgaagagctgggagcgcagggcggggacctcgcacgggagggtgcgggcgggagcctgcctcgcgagcccgggccacggcggctgct

SEQ ID NO: 239310 - DNA, 120 bp, Artificial Sequence
  ENSG00000120820_16 (sequence is synthesized)
cccgaccgtgactgggacccgggcagggaaggtcgctacaaagcctgccgggcgaaccgaaggcagctttgtgcggagccatgccaggaagcttgggaaccgtgagccacaagagaacag

SEQ ID NO: 239311 - DNA, 120 bp, Artificial Sequence
  ENSG00000120820_17 (sequence is synthesized)
cgttgttttttgcatgttttgcacttagccagaggaagtctggcgcatccgagccggccagccgagcacatctggaagtggtttctggggccgcccctctctgccagcgcaactcctggg

SEQ ID NO: 239312 - DNA, 120 bp, Artificial Sequence
  ENSG00000120820_18 (sequence is synthesized)
ccaagaatgacgcagaatctcactctgttgccccagctcaaatacagtggcacaatagcagctccctgcagcctcgacctccagggctcaagcaatcctccggcctcagcaccccaggaa

SEQ ID NO: 239313 - DNA, 120 bp, Artificial Sequence
  ENSG00000120820_19 (sequence is synthesized)
gttggaactacaggataccagtcttactgggataaggcctaccaaatggcttcattttaacttatttgcctttttaaaggcaattaagtgcatggacatcctgagatgctggaagctaag

SEQ ID NO: 239314 - DNA, 120 bp, Artificial Sequence
  ENSG00000120820_20 (sequence is synthesized)
acgttaacaaacggactctggaggacacaattcagtccatagcagtatctacacctcaataaactgttctaaaagagagagagagagaaggaagtcacataaagacaaatgtcatctgaa

SEQ ID NO: 239315 - DNA, 120 bp, Artificial Sequence
  ENSG00000120820_21 (sequence is synthesized)
attttcttacagaggcaatgttaagaaagaaaagggggcagtcaattaaaacctttcctcaaaagatataaatcagaggaatcaagatcctgtggagcgaggagtccctgattatacatt

SEQ ID NO: 239316 - DNA, 120 bp, Artificial Sequence
  ENSG00000120820_22 (sequence is synthesized)
ttcctagtaagctgttgaaaaatgtgacttgaatcttttccaccaaacaatcttcatttatcttagttgagtttcccctcctaacatagatttttttattaaggattattatataaagtc

SEQ ID NO: 239317 - DNA, 120 bp, Artificial Sequence
  ENSG00000120820_23 (sequence is synthesized)
aattttgctttttaaggtttatttttataatttataatttttcgttatcggagttttaaaatagagaagataaaaataagtctaatacaagcactattatcccatcattgtattgcctag

SEQ ID NO: 239318 - DNA, 120 bp, Artificial Sequence
  ENSG00000120832_0 (sequence is synthesized)
actgatggcctggttggcgctgctgagaactgtcgggagcttcttgagaccgaggaccgaaatcccggctccaggcctcggggactgcggactgtggggaggctggccggagagagaggg

SEQ ID NO: 239319 - DNA, 120 bp, Artificial Sequence
  ENSG00000120832_1 (sequence is synthesized)
aaggacggggcctggcccccgggactccctgtgccttgcttggagctgacgccgacggtttattgcagggaactgacaagatcacattttgagaagaagttggaaagaatcccaagtgga

SEQ ID NO: 239320 - DNA, 120 bp, Artificial Sequence
  ENSG00000120832_2 (sequence is synthesized)
tgaactgaatatctggatgaggacaagatctgtggggagagactgtaagatagaatgagtccatttaagtcccaggacggtggaaactagctagtagattgcagccatgttgtggaagct

SEQ ID NO: 239321 - DNA, 120 bp, Artificial Sequence
  ENSG00000120832_3 (sequence is synthesized)
gctgctgagatcccagtcctgcaggctgtgttctttcagaaagatgcgatcacctccaaaatacagacctttcttagcatgcttcacctatacaactgataaacagtcgagcaaagaaaa

SEQ ID NO: 239322 - DNA, 120 bp, Artificial Sequence
  ENSG00000120832_4 (sequence is synthesized)
tacaagaacagtggaaaagctctataaatgttcagttgacattaggaaaattcgtagattaaaaggatgggtacttttagaggatgaaacctatgttgaagaaattgcgaatattttaca

SEQ ID NO: 239323 - DNA, 120 bp, Artificial Sequence
  ENSG00000120832_5 (sequence is synthesized)
agaactaggtgccgatgagactgctgtagccagtattttggaacgctgcccggaagcaattgtctgtagtccaaccgctgttaacacccagagaaaactctggcagttggtctgcaaaaa

SEQ ID NO: 239324 - DNA, 120 bp, Artificial Sequence
  ENSG00000120832_6 (sequence is synthesized)
tgaggaagagttaatcaagttaatagagcagtttccagaatctttctttactattaaagaccaagagaaccagaagctgaatgttcagttctttcaagagttgggactaaaaaatgtggt

SEQ ID NO: 239325 - DNA, 120 bp, Artificial Sequence
  ENSG00000120832_7 (sequence is synthesized)
gctctgaggccaacatgaaagtttggctactaaaattgttaagccaaaacccatttattttgttaaattctcccacagctataaaggaaacactagaatttctccaggagcaaggtttca

SEQ ID NO: 239326 - DNA, 120 bp, Artificial Sequence
  ENSG00000120832_8 (sequence is synthesized)
ccagctttgaaattctccagcttctatccaaactcaaaggatttctttttcaactttgcccaagaagtatacagaatagtatttccttctctaaaaatgcttttaaatgcacagatcatg

SEQ ID NO: 239327 - DNA, 120 bp, Artificial Sequence
  ENSG00000120832_9 (sequence is synthesized)
acctgaagcaattagttttgaaatgtcctgcccttttatattattctgttccagttttagaagagagaatgcaaggattattgagagaaggaatttccatagctcagataagagagacgc

SEQ ID NO: 239328 - DNA, 120 bp, Artificial Sequence
  ENSG00000120832_10 (sequence is synthesized)
caatggttcttgaattaacaccacagatagtacagtacaggataaggaaactgaattcctcaggctacagaataaaggatggacatctagcaaatctaaatggatcaaaaaaagagtttg

SEQ ID NO: 239329 - DNA, 120 bp, Artificial Sequence
  ENSG00000120832_11 (sequence is synthesized)
aagctaattttggcaaaattcaggccaaaaaagtaaggccattatttaaccctgtggcaccattaaatgttgaagaatgacatactgactgttgttgcttctttctagcagtgcagggtg

SEQ ID NO: 239330 - DNA, 120 bp, Artificial Sequence
  ENSG00000120832_12 (sequence is synthesized)
aaactaactagcaaagacaaaaattcaggcagtttgtagacaccagtaattttaagaacctgcttagcttctgtgttgtatttaagttatctctaaatagataaattctgactcatgtgc

SEQ ID NO: 239331 - DNA, 120 bp, Artificial Sequence
  ENSG00000120832_13 (sequence is synthesized)
gtgccatattataaaatataaatcatatttattttaataaggttggtaacttttaccttgaaccattatttcaaaaactcatatactattaaatggcatatcagtgtgatactttataag

SEQ ID NO: 239332 - DNA, 120 bp, Artificial Sequence
  ENSG00000120832_14 (sequence is synthesized)
gggactccctgtgccttgcttggagctgacgccgacgggtgagtcgcccccttcctctgctcctgggcgtgttcctcaccagcggcgccgcagcggtcagggcccgcaaaaccccacgcc

SEQ ID NO: 239333 - DNA, 120 bp, Artificial Sequence
  ENSG00000120832_15 (sequence is synthesized)
tcgccagacgctcagctcagcctgccgggtttctctggaaaagcggaggccccacagtgaatgtgcggccttttgatcggtcctggagatcttccgtggaccctcgtttttccttgctta

SEQ ID NO: 239334 - DNA, 120 bp, Artificial Sequence
  ENSG00000120832_16 (sequence is synthesized)
taaacgttggtcaatttgaaactggcagcagggcatatgtgttacgaaagaagaactttattgaaaccagtggtggtgtagagaagaccatactaaccataactgtgtattacagaagtg

SEQ ID NO: 239335 - DNA, 120 bp, Artificial Sequence
  ENSG00000120832_17 (sequence is synthesized)
aatttcactccccaaaaatgcttaagaaacaagcatcctagaacagcccacattgtgatttaacaaacatttaccaaaagcattgctatatgtgggggcacagggctaagagcaggcagg

SEQ ID NO: 239336 - DNA, 120 bp, Artificial Sequence
  ENSG00000120832_18 (sequence is synthesized)
actctggagccaacctgtggggtttgagtccaaattctgccggttttttgttttttgtttttttttttagctgagtaaccttgggcaagttcctttacctgcgtctgtttcctcatttta

SEQ ID NO: 239337 - DNA, 120 bp, Artificial Sequence
  ENSG00000120832_19 (sequence is synthesized)
aaatgagttgttgtgatgatttaatgatttagtatatgtgaagagttttctgcatattctaagtgatttatggtattaactcgtttgatctttgcagtcacccaggagatagtatcacca

SEQ ID NO: 239338 - DNA, 120 bp, Artificial Sequence
  ENSG00000120832_20 (sequence is synthesized)
ttttcctgatgccaaactgaggctcagagaggtgaagtaacttcttcaagtcacaacacaactgttgtccaggaatcaggcagtctggctctgctaacccagttttacccactgcattaa

SEQ ID NO: 239339 - DNA, 120 bp, Artificial Sequence
  ENSG00000120832_21 (sequence is synthesized)
tgtaccgcatccacttgttcactcagtttcacctgacaaatactaattttgtctctctgtggaacaagttctttgctgggtgcagggaataaagcagaacaccgttcagttcctgccttc

SEQ ID NO: 239340 - DNA, 120 bp, Artificial Sequence
  ENSG00000120832_22 (sequence is synthesized)
ccaacgcttgtaaatctagtgcaggtcattcatggccgggctgcagggtgtccatgaatcctgctaaaatcatttgcgaaatgttgtgagcgtgggtcttttcttctggaaagagagtct

SEQ ID NO: 239341 - DNA, 120 bp, Artificial Sequence
  ENSG00000120832_23 (sequence is synthesized)
gtgactctcaggttctgagttgatctgtgatccaaacagaggtgtgaagaagtgttgttttagcagatctgtgcctagtatgcctgatacacagcttgaacttcaaacaaacagcaacaa

SEQ ID NO: 239342 - DNA, 120 bp, Artificial Sequence
  ENSG00000120832_24 (sequence is synthesized)
aattcctactggttggaagaatgaagaacttgtaagagcataataagtgctgcagtagcgtccggagcagggtgctgtggaagagcacacagaaggccacctgcccaggaatgcctccta

SEQ ID NO: 239343 - DNA, 120 bp, Artificial Sequence
  ENSG00000120832_25 (sequence is synthesized)
gaggcagtgaaggcagctgggtgaaggatagggaagcagttcattggaacactgtggtgaccagtctgtccatgtagtgttgagacagaaacaacacgtgaacagctgcagctgttgtac

SEQ ID NO: 239344 - DNA, 120 bp, Artificial Sequence
  ENSG00000120832_26 (sequence is synthesized)
taaaagttggagcattttgggcatggaatctggcccacagtcttcaaagaccacatggtagaaaccagtagagcaccagggactgacaggaagcaaatgcagctggtgcaggagagggaa

SEQ ID NO: 239345 - DNA, 120 bp, Artificial Sequence
  ENSG00000120832_27 (sequence is synthesized)
atgggaattagggtggtggcagagcccaaagaggccttgtaggccatggtaaggcatttctatgttttattttactttgtctttatcctaaaatgccattggcaagtttattgcagggaa

SEQ ID NO: 239346 - DNA, 120 bp, Artificial Sequence
  ENSG00000120832_28 (sequence is synthesized)
ggatgaactgaatatctggatgaggacaagatctgtggggagagactgtaagacctgtaaagagtgagggaaggctgccaacaggctaaattgagccgtactacacacttttgtggcaag

SEQ ID NO: 239347 - DNA, 120 bp, Artificial Sequence
  ENSG00000120833_0 (sequence is synthesized)
cttcccatagccgcggcctcaactaaaagtggccattgacctttcaagctttcgagcagtgatgcaatagaatagtatttcaaagaaaaatgcttatcgaaattttggatccggttttcc

SEQ ID NO: 239348 - DNA, 120 bp, Artificial Sequence
  ENSG00000120833_1 (sequence is synthesized)
cgtgattgttaagggtttcttttaaaaagtaggtcacatttcaagtaggtcatatttcgggggcgggtgcgcagacaaggagatgagtttccactaaggccagggggcctccaacggggt

SEQ ID NO: 239349 - DNA, 120 bp, Artificial Sequence
  ENSG00000120833_2 (sequence is synthesized)
tggaggtgagaatcccaggtagggtagaggtgccgagatccttccgaatcccagccctggggcgtcagccctgcagggaatggcagagacactctccggactgagggaaccgaggccagt

SEQ ID NO: 239350 - DNA, 120 bp, Artificial Sequence
  ENSG00000120833_3 (sequence is synthesized)
caccaagccccttccgggcgcgcaggcgatcagtgggtgaccgcggctgcgagggactttgtcatccgtcctccaggatctggggagaaagagccccatcccttctctctctgccaccat

SEQ ID NO: 239351 - DNA, 120 bp, Artificial Sequence
  ENSG00000120833_4 (sequence is synthesized)
ttcggacaccccgcagggactcgttttgggattcgcactgacttcaaggaaggacgcgaacccttctctgaccccagctcgggcggccacctgtctttgccgcggtgacccttctctcat

SEQ ID NO: 239352 - DNA, 120 bp, Artificial Sequence
  ENSG00000120833_5 (sequence is synthesized)
gaccctgcggtgccttgagccctccgggaatggcggggaagggacgcggagccagtgggggaccgcggggtcggcggaggagccatccccgcaggcggcgcgtctggcgaaggccctgcg

SEQ ID NO: 239353 - DNA, 120 bp, Artificial Sequence
  ENSG00000120833_6 (sequence is synthesized)
ggagctcggtcagacaggatggtactggggaagtatgactgttaatgaagccaaagagaaattaaaagaggcaccagaaggaactttcttgattagagatagctcgcattcagactacct

SEQ ID NO: 239354 - DNA, 120 bp, Artificial Sequence
  ENSG00000120833_7 (sequence is synthesized)
actaacaatatctgttaaaacatcagctggaccaactaatcttcgaatcgaataccaagacggaaaattcagattggactctatcatatgtgtcaaatccaagcttaaacaatttgacag

SEQ ID NO: 239355 - DNA, 120 bp, Artificial Sequence
  ENSG00000120833_8 (sequence is synthesized)
tgtggttcatctgatcgactactatgttcagatgtgcaaggataagcggacaggtccagaagccccccggaacggcactgttcacctttatctgaccaaaccgctctacacgtcagcacc

SEQ ID NO: 239356 - DNA, 120 bp, Artificial Sequence
  ENSG00000120833_9 (sequence is synthesized)
atctctgcagcatctctgtaggctcaccattaacaaatgtaccggtgccatctggggactgcctttaccaacaagactaaaagattacttggaagaatataaattccaggtataaatgtt

SEQ ID NO: 239357 - DNA, 120 bp, Artificial Sequence
  ENSG00000120833_10 (sequence is synthesized)
tctctttttttaaacatgtctcacatagagtatctccgaatgcagctatgtaaaagagaaccaaaacttgagtgctctggataactatatggaatgctttctaagaacagctgaagctaa

SEQ ID NO: 239358 - DNA, 120 bp, Artificial Sequence
  ENSG00000120833_11 (sequence is synthesized)
ctaatttaaatttaacagcttgaagaggtagctaggtgtttaaagttcctccagatacttttacctgagtgatgcttcccttcctaaggctgaccaagacctgttgatccttttagatta

SEQ ID NO: 239359 - DNA, 120 bp, Artificial Sequence
  ENSG00000120833_12 (sequence is synthesized)
aaaataaaatgtcgcatgtaaaggctgaagtcgcgttttatcagaatgccttgccttcttaggttcttttccattatgtcaaaggtccaggctccagtaggagagaaagaactcctcata

SEQ ID NO: 239360 - DNA, 120 bp, Artificial Sequence
  ENSG00000120833_13 (sequence is synthesized)
ggaatactgaagaagtgggaaggaaccaagctgacacaggcctcactgcaatttgatatgcctgctgatcagagtctcttgggcattttatattttgcattctgatgtacctaggagttt

SEQ ID NO: 239361 - DNA, 120 bp, Artificial Sequence
  ENSG00000120833_14 (sequence is synthesized)
tgttaaacagatgatgtatgtgagtatttatcccattttatgcaattaaccaaatcaaccaaaaaaagtgaccatgaagtcctgtatttgtctttttactacatgtaggaactctcatgt

SEQ ID NO: 239362 - DNA, 120 bp, Artificial Sequence
  ENSG00000120833_15 (sequence is synthesized)
gaatgagtactgtagtaatccattctatgggagccttatttcagaaatatttcaaactggtgcaaatggaaaagactttctcttttcctttaaagctaaagacaagaatatcatgctata

SEQ ID NO: 239363 - DNA, 120 bp, Artificial Sequence
  ENSG00000120833_16 (sequence is synthesized)
caggtgcaactcaatccccgttaataaaaaccaatgtaggtataggcattctaccctttgaaatagctgtgtcccaacctgttgccattgattttttggaaatggctttagaaatatcca

SEQ ID NO: 239364 - DNA, 120 bp, Artificial Sequence
  ENSG00000120833_17 (sequence is synthesized)
agttgtccttgaattgtctaaccatggacataaacagttgtctcccttctactgtgtagaatactttgacttaattttcttccagatacagggggatacctgcctgtttttcaaagtgtt

SEQ ID NO: 239365 - DNA, 120 bp, Artificial Sequence
  ENSG00000120833_18 (sequence is synthesized)
tatttactgctgttactatttgattagaatgtattaaataaaaaaaacctgatttctacaagttgcacttattgagttctagagaacgtacactttcatggtaatagaggattgccataa

SEQ ID NO: 239366 - DNA, 120 bp, Artificial Sequence
  ENSG00000120833_19 (sequence is synthesized)
aaacttacgtcaagtgaaataagccaattattcaacaaaaggtagaacattacttgccattctgtaaagttatgggctgtacctgccccctttgcaatttggaaagcatggtttagaaac

SEQ ID NO: 239367 - DNA, 120 bp, Artificial Sequence
  ENSG00000120833_20 (sequence is synthesized)
tacaggcattgtcaagtggccgggtcttttataatttgaataggcataacactgatgtcctctgtgtttccaaaaacatggtttagaaactacaaacattatgacatggccagtctttta

SEQ ID NO: 239368 - DNA, 120 bp, Artificial Sequence
  ENSG00000120833_21 (sequence is synthesized)
caagttgagtaggcataatactaaagaaaaatacaaagttttgtggccacttattttttgctatgttagtctgcataactgttataaatgtaccatcttttctagagtccagacattatt

SEQ ID NO: 239369 - DNA, 120 bp, Artificial Sequence
  ENSG00000120833_22 (sequence is synthesized)
tattttatggctttaaaattttcctgcatagctacaatcctgtggtgtgtcaccataaaggtggaccctgtgtgaatgagaaaattcagttataaattgtaataaaacctgcttactgga

SEQ ID NO: 239370 - DNA, 120 bp, Artificial Sequence
  ENSG00000120833_23 (sequence is synthesized)
caagggaggcgcgtcggtctgggaagtcgcgcgcactcgctgctcctgggaccgacgtttaactcttgccaagtctcgtcgcagccgccgcggctggcgggccttgggcttcccctgaag

SEQ ID NO: 239371 - DNA, 120 bp, Artificial Sequence
  ENSG00000120833_24 (sequence is synthesized)
gaagcatgagccctctcgcccgcagccaccctcaccgcgtggcccgcggacagtgcgcgccggggtcccgggtgcacagcctcaggataccccgtgcccgcagctcgggcgcccgcggca

SEQ ID NO: 239372 - DNA, 120 bp, Artificial Sequence
  ENSG00000120833_25 (sequence is synthesized)
gcggctctgccccgcggcctagcgttgctgcctgctttctccagccccttctcggcgtctggaagtgtctggagtttcttttttttatttcccctaaactgccattcaaattaataatcc

SEQ ID NO: 239373 - DNA, 120 bp, Artificial Sequence
  ENSG00000120833_26 (sequence is synthesized)
tcctaataacctgatctcccgctcctccccaccggcctgcctcccgccctcgctccttcctccctccctccctctctccttcccacctccagggtcgcagccggagggaaacccggcagc

SEQ ID NO: 239374 - DNA, 120 bp, Artificial Sequence
  ENSG00000120833_27 (sequence is synthesized)
agtccgagagtggaggtgtcccagcccgtagggggcgtcgccgcgcggtgggggatggggtcgaggcaatgatcctcgaggcttttgtgtgccctctgcgcacggaactccgaccgccgc

SEQ ID NO: 239375 - DNA, 120 bp, Artificial Sequence
  ENSG00000120833_28 (sequence is synthesized)
ctccgagcgcggggctggttgcatccccgggcatctcgttcccaaattaaacgttaacgggggaaacaagggcagacgcccctcctctcccgggcccctcccacctccccttttcccccc

SEQ ID NO: 239376 - DNA, 120 bp, Artificial Sequence
  ENSG00000120833_29 (sequence is synthesized)
acctgatcaaggggaccgcctccggtccccggccgtgggcaccgggacgagcacggcgtccccacgccatcgatgtgtcttagagccggagagtctggtttccgaggacccacagtcgct

SEQ ID NO: 239377 - DNA, 120 bp, Artificial Sequence
  ENSG00000120833_30 (sequence is synthesized)
cctgcacgcccaccccccgcaaaagtgcggccaggagggtcgcatcgagggggcgccgccgggatgtttagaggaacccacccccgtggcaggccaagggccaaggatcgctatccttcc

SEQ ID NO: 239378 - DNA, 120 bp, Artificial Sequence
  ENSG00000120833_31 (sequence is synthesized)
gcgcggcgttggtggtttgcattttccgcagcgctcgcgaccgcccgctcggccccggcctcgcctcggagccccgcgagggctgcgcgctcgggccgattcctcgacagcgcccgcggc

SEQ ID NO: 239379 - DNA, 120 bp, Artificial Sequence
  ENSG00000120833_32 (sequence is synthesized)
ggcgagaaccaccgcagccatcctggtccgggagcgaccgccgcggcacccccaaccccgccagagcgggcaccaggaagcggggggaggggagcgaggagcctcccgggcggagatgcg

SEQ ID NO: 239380 - DNA, 120 bp, Artificial Sequence
  ENSG00000120833_33 (sequence is synthesized)
gcgcctccccaaggaagcagctaggaagcggggtcgaggtgggaagcaaagaataagatggaaatacgtcccttgcttccaagggaccgcggagagcacgctcgcagggtcctgggtcct

SEQ ID NO: 239381 - DNA, 120 bp, Artificial Sequence
  ENSG00000120833_34 (sequence is synthesized)
tgggaatgcgtaaggaaagtggttctccagggactcaggcctggcggagcgcagagcgcgggaagagcttcttggaaatagcttcttagcacgctggaagatttactgttttccgcagct

SEQ ID NO: 239382 - DNA, 120 bp, Artificial Sequence
  ENSG00000120833_35 (sequence is synthesized)
gctcagggttaggctcccgggctcgaaccccggccggggaaagcgtcgggcgcctccctttgcacggggtgcaatcagcaagtcggtgccgcgggccccgcaggcccagcagcatctggc

SEQ ID NO: 239383 - DNA, 120 bp, Artificial Sequence
  ENSG00000120833_36 (sequence is synthesized)
tcccgggcggagctgcggctgcagcccaggatcttggcggccaagttcagggactgacactgccgcgagggcggctgcccgggcgtcgagagtaggctgcgaagcccccgccgagcgcgg

SEQ ID NO: 239384 - DNA, 120 bp, Artificial Sequence
  ENSG00000120833_37 (sequence is synthesized)
cttccatggtcggcgcgcccagggtactgccgctttcaagtacagtcaggcaattcgcgcggcacgctgtctctaggcatctgaaaaaagaaaaaagaaaaaaagtaaagtatctggcaa

SEQ ID NO: 239385 - DNA, 120 bp, Artificial Sequence
  ENSG00000120833_38 (sequence is synthesized)
atcattctggctttccaaatccgtatcctaaaagcttacagttgtggcacagttgaaattttggtagcaacagggggagggagagggaaaagttctctcgcttgcgattccggtctttcc

SEQ ID NO: 239386 - DNA, 120 bp, Artificial Sequence
  ENSG00000120833_39 (sequence is synthesized)
gtgtgggccacgggctttccctcccggggaggcaccggcagattgcaagtatcccggtaattgtgggggtggggggagcacaaatgttcagacttcttaaatacggacggtctctgagcc

SEQ ID NO: 239387 - DNA, 120 bp, Artificial Sequence
  ENSG00000120833_40 (sequence is synthesized)
ttcttagaaagcagagtgggccggggagatggtgcaggcagatgaaatcaagaatgcaggggagatggatggttgtgattgggtttggattagggcaaagttcaaaagagtttagggaag

SEQ ID NO: 239388 - DNA, 120 bp, Artificial Sequence
  ENSG00000120833_41 (sequence is synthesized)
attgtaaacttgaagtagtaattatcacttgggaattcccatttcttagtgactggtaaggtagtcataaagcagcgaacagaagctattgtactagagctgtgcttttacaacaagtac

SEQ ID NO: 239389 - DNA, 84 bp, Artificial Sequence
  ENSG00000120833_42 (sequence is synthesized)
agaagctattgtactagagctgtgcttttacaacaagtacatagcagtgctttctacatagaaggctgttcatagcaggctttg

SEQ ID NO: 239390 - DNA, 120 bp, Artificial Sequence
  ENSG00000120833_43 (sequence is synthesized)
tacaggagttgggttttccactttttaaagggcatggcttttatttctaacttctgatttttttctaatttacctaaatctttattttacttaaataatgttaaaagtgtcatgcttcat

SEQ ID NO: 239391 - DNA, 120 bp, Artificial Sequence
  ENSG00000120833_44 (sequence is synthesized)
cagccagtgtgtcatgctgcagatgttcttttggttcattagaagaaaatcttaagaagagcttcagaaagttgattttttaaaaaagaaagaaaactggctcgccgtttgtgttcataa

SEQ ID NO: 239392 - DNA, 120 bp, Artificial Sequence
  ENSG00000120833_45 (sequence is synthesized)
aatggacccaaatttttattaaattcctactgaaagtatttgtggtggcccggtaaactttcgctcacacaccaccttttttttttttcttttttagagctaaaaaaattattgccaatt

SEQ ID NO: 239393 - DNA, 120 bp, Artificial Sequence
  ENSG00000120833_46 (sequence is synthesized)
cagcaccatctctgcagcatctctgtaggctcaccattaacaaatgtaccggtgccatctggggactgcctttaccaacaagactaaaagattacttggaagaatataaattccagccag

SEQ ID NO: 239394 - DNA, 120 bp, Artificial Sequence
  ENSG00000120833_47 (sequence is synthesized)
ctgttttttatcctggttagaagaattttgtgttttcttttagctatggatctttgaacattaccctatgatcgaagagttttgagttgggtttttagatgttggttgtcatggagaaac

SEQ ID NO: 239395 - DNA, 120 bp, Artificial Sequence
  ENSG00000120833_48 (sequence is synthesized)
gctaacaaacagatgtgttcccagaagatgatgggcatagggtgtgtttttgcaagtcatttttcccatttacgtagattattcttatttccaattgatcctcaatagataagagtgcca

SEQ ID NO: 239396 - DNA, 120 bp, Artificial Sequence
  ENSG00000120833_49 (sequence is synthesized)
ttgagctttattttcatctgtcaggcaattaagaaaaaagtaaaggaaacaaaaaagctataatatactaaggaaattcttagattctttggtaaaattaaaagaatcttggtgcatgaa

SEQ ID NO: 239397 - DNA, 120 bp, Artificial Sequence
  ENSG00000120833_50 (sequence is synthesized)
cgaggagcctcccgggcggagatgcggcagctcccgcacctccgcaccccgggttggtgcctcggggccccgcagcgctttagggcggagaaccaagtttgtgtgggtgcttcttcctgg

SEQ ID NO: 239398 - DNA, 120 bp, Artificial Sequence
  ENSG00000120833_51 (sequence is synthesized)
cgcagctcggagcgccggggaagagagagtccgaaccgcggctctgccccgcggcctagcgttgctgcctgctttctccagccccttctcggcgtctggaagtgcgatcagtgggtgacc

SEQ ID NO: 239399 - DNA, 120 bp, Artificial Sequence
  ENSG00000120837_0 (sequence is synthesized)
ccttcgcagccattttctgtccaaccaaacagccgattggagacgggagccaaccagggctgcattggaggttgaaatcacaaagattagacacctttttagataggtgttcttcagcac

SEQ ID NO: 239400 - DNA, 120 bp, Artificial Sequence
  ENSG00000120837_1 (sequence is synthesized)
cactgacaacacggttctgacagtatttcatgacaatggatggtgacagttctacaacagatgcttctcaactaggaatctctgcagactatattggaggaagtcattatgttatacagc

SEQ ID NO: 239401 - DNA, 120 bp, Artificial Sequence
  ENSG00000120837_2 (sequence is synthesized)
ctcatgatgatactgaggacagcatgaatgatcatgaagacacaaatggttcaaaagaaagtttcagagaacaagatatatatcttccaatagcaaacgtggctaggataatgaaaaatg

SEQ ID NO: 239402 - DNA, 120 bp, Artificial Sequence
  ENSG00000120837_3 (sequence is synthesized)
ccatacctcaaacgggaaagattgcaaaagatgccaaagaatgtgttcaagaatgtgtaagtgagttcatcagttttataacatctgaagcaagtgaaaggtgccatcaagagaaacgga

SEQ ID NO: 239403 - DNA, 120 bp, Artificial Sequence
  ENSG00000120837_4 (sequence is synthesized)
aaacaatcaatggagaagatattctctttgctatgtctactttaggctttgacagttatgtggaacctctgaaattataccttcagaaattcagagaggctatgaaaggagaaaagggaa

SEQ ID NO: 239404 - DNA, 120 bp, Artificial Sequence
  ENSG00000120837_5 (sequence is synthesized)
ttggtggagcagtcacagctacagatggactaagtgaagagcttacagaggaggcatttactaaccagttaccagctggcttaataaccacagacggtcaacaacaaaatgttatggttt

SEQ ID NO: 239405 - DNA, 120 bp, Artificial Sequence
  ENSG00000120837_6 (sequence is synthesized)
acacaacatcatatcaacagatttctggtgttcagcaaattcagttttcatgatctgaagaaatgatggaatggggagtgtagagaaatgagagtctgtatgattctggaacagagacat

SEQ ID NO: 239406 - DNA, 120 bp, Artificial Sequence
  ENSG00000120837_7 (sequence is synthesized)
cagaaggaaagactggtgaaaagatgtatctttgtatattaatagctgtaatgtagcttcctgatgcttgactaattgaggtgttaattctgacttgagaatctttttcatgaatgattt

SEQ ID NO: 239407 - DNA, 120 bp, Artificial Sequence
  ENSG00000120837_8 (sequence is synthesized)
taaagaaaaatttggattttaaaggtattaaaatatttttgttttgtacgagagtttgttgctctgtatgactcctgtatgcattgtatattgcaatttattactgtcagagatttgtag

SEQ ID NO: 239408 - DNA, 120 bp, Artificial Sequence
  ENSG00000120837_9 (sequence is synthesized)
acagtttcttattttcatattgaatcatgttacttttgtaattcaagtaagcggctgggttaattcatgatgtttgcccttttaataaaatataagggtagagttcattttgaatgcaag

SEQ ID NO: 239409 - DNA, 120 bp, Artificial Sequence
  ENSG00000120837_10 (sequence is synthesized)
ttgcctttattataaatttgagtttgtcttggttataccttgcatgataacctagctagatttctagcatttgctgtatttattaaaattattatttttttggtaaaacattaatagttt

SEQ ID NO: 239410 - DNA, 120 bp, Artificial Sequence
  ENSG00000120837_11 (sequence is synthesized)
aagcagcatcatttttttaaaaaatgtaattgaataagtgtgaatgcagaagcaaatattgtctgccctgttaaacttggtgcccattaacagtgtttacactgttcatcgtgcctgtta

SEQ ID NO: 239411 - DNA, 120 bp, Artificial Sequence
  ENSG00000120837_12 (sequence is synthesized)
atgtagttttagttactggagcttttttaagactagatttggttttgagttacatttttaagaatgtgggaatatatttaagtttaatgtagtcctagtgctcttgaaatggtgcccctt

SEQ ID NO: 239412 - DNA, 120 bp, Artificial Sequence
  ENSG00000120837_13 (sequence is synthesized)
tcatttggtacatgattttttttcaaatcatatcttcaagtactatagtattctcttacagaagaggagttttatagtctgatggtaaatgtcttcattttacctttttaattgaaatgt

SEQ ID NO: 239413 - DNA, 120 bp, Artificial Sequence
  ENSG00000120837_14 (sequence is synthesized)
gcatgggtgagtggatgaaatggagaacagagtgagtgctgtgaacggtgtgaaatagaagccaacttctagtatgctgtcttcatctctgcaataaactaaacgtaaataatgtaactt

SEQ ID NO: 239414 - DNA, 120 bp, Artificial Sequence
  ENSG00000120837_15 (sequence is synthesized)
tgtataatttagtagtatgtacttggattgtttctttttgaaaagtgaggatttgtattttctcatctattctttttggtgttaattaacttgagggatttcttttttaagtttttaata

SEQ ID NO: 239415 - DNA, 120 bp, Artificial Sequence
  ENSG00000120837_16 (sequence is synthesized)
tcaaaaattgctattgtatagtttgcctaaaaggaagttggagtgaatatcatctttgaaggacactcaaatttataaggtagaagcaatttcccagatataggctgaacagaaacattt

SEQ ID NO: 239416 - DNA, 120 bp, Artificial Sequence
  ENSG00000120837_17 (sequence is synthesized)
actttgccagaaggagcctttaggagtatatgtgggctaatcagaggttaataatgtcctcatctcctactctccatttaaaaaacaaacttcattgtagtaaattcaaataggaaaaaa

SEQ ID NO: 239417 - DNA, 120 bp, Artificial Sequence
  ENSG00000120837_18 (sequence is synthesized)
tgggggagtagttaagcaaaatcaacagtcatcctactatgttgaaagaaccaatgttaatattttgataaatatcatttgtccttttactttgctaaatatgtatatttttataaaaat

SEQ ID NO: 239418 - DNA, 120 bp, Artificial Sequence
  ENSG00000120837_19 (sequence is synthesized)
gggctcatattgtgcataccattttgtaacctgcttttttcacttaacaatatattgggaacatcttttccaggtcatgcatagtcttctgcatcatttttattggtttattattctgct

SEQ ID NO: 239419 - DNA, 120 bp, Artificial Sequence
  ENSG00000120837_20 (sequence is synthesized)
gtatgactcaatcataattcatttaatcttctattggatattttgactatttacatcttttcacagttataaacagcacttcactgaatcccatgtacatccatgactgttttcttaaat

SEQ ID NO: 239420 - DNA, 120 bp, Artificial Sequence
  ENSG00000120837_21 (sequence is synthesized)
tctttgaattgctgggttaccaaatatgcaaaattttaaggcttttgatacttcgttatgagtgtatttttgagatattttccacttgatccaagcagtgtgtcactatataactgataa

SEQ ID NO: 239421 - DNA, 120 bp, Artificial Sequence
  ENSG00000120837_22 (sequence is synthesized)
aagcacttggtctttgattatcagatactgtctctaaaattattttaaagattaatatttgttcaagtagagaatgaagataaaaaaggaatttgaggccaggtatggggtgtctcatgc

SEQ ID NO: 239422 - DNA, 120 bp, Artificial Sequence
  ENSG00000120837_23 (sequence is synthesized)
atacaaaattagcagggtgtggtggtgcacacctgtagtcccttactccctggtggctgaggcattatcccttgaacctgggaggcagagcctaaagtgagccgagatcgcgccactgca

SEQ ID NO: 239423 - DNA, 120 bp, Artificial Sequence
  ENSG00000120837_24 (sequence is synthesized)
acagcaagactcttgtctcaaacaaacaggaatttgagtaaattttaaattagtatatactacaacaaatttccaaacttcataatttgctagtagtgctaactaaaattttacaccagg

SEQ ID NO: 239424 - DNA, 120 bp, Artificial Sequence
  ENSG00000120837_25 (sequence is synthesized)
taaaatcaggtcaccttttttatgtattgacttcattgttggacttcatactctgatgggaaagaaaatggacattctgaatgtgtcaggtgcataatatcctaatttatgcttgtcaga

SEQ ID NO: 239425 - DNA, 120 bp, Artificial Sequence
  ENSG00000120837_26 (sequence is synthesized)
gctggggtctctgtcttccttggcccatgttgcatttaactgaatgtcatgttttctcctctggaacttcttatgtatgcaagctcccatgttaacctatcataaaaatgttttttataa

SEQ ID NO: 239426 - DNA, 80 bp, Artificial Sequence
  ENSG00000120837_27 (sequence is synthesized)
gctgaggagcggcgggacgcgggccaggccacctcaccctcgccgccgttgagctccgggcccggggccgaggaggggcc

SEQ ID NO: 239427 - DNA, 80 bp, Artificial Sequence
  ENSG00000120837_28 (sequence is synthesized)
cattttgtgcggggagccggccgaggggcgggagacgcggcccgggccctggccccgtagccccggcggcggcgcgagtc

SEQ ID NO: 239428 - DNA, 80 bp, Artificial Sequence
  ENSG00000120837_29 (sequence is synthesized)
ggaggcaggcgttgggcgcggggccggggcggccgggcgagtcaggggatgcgctctgggggcggcctcctggcactcgc

SEQ ID NO: 239429 - DNA, 120 bp, Artificial Sequence
  ENSG00000120837_30 (sequence is synthesized)
gcactcgcagggctgacaggtcgccgggaccaggccgtggggccggggccacccaggcacctgcgtggggaggaaggcatggctttagcttccccgcagcctggtttgcgcgtaaagaat

SEQ ID NO: 239430 - DNA, 120 bp, Artificial Sequence
  ENSG00000120837_31 (sequence is synthesized)
attgatgcatcatcctgtgacagtttataagtgttgaatctgttacgtttgttagtactttgaaaagtattgaaaaactgtttttctcctcatagatggatggtgacagttctacaacag

SEQ ID NO: 239431 - DNA, 120 bp, Artificial Sequence
  ENSG00000120837_32 (sequence is synthesized)
agctacgtgaccagcacatagcatgaacctggtaaatactaagcgctcactcagtaaatatttgttggctggcttactgacaatctacagtctgttttataagtttttataggatgtttt

SEQ ID NO: 239432 - DNA, 120 bp, Artificial Sequence
  ENSG00000120837_33 (sequence is synthesized)
tatatataggcgaatggctggcatattctaagcatcaaagattaggttgacttattgagtgaaaggtactaagtgccatagagctttaaagaacagaacatttgtttttgaattgcagaa

SEQ ID NO: 239433 - DNA, 120 bp, Artificial Sequence
  ENSG00000120837_34 (sequence is synthesized)
aggataaatcagaaagattaaaggaggatagagaacactgggattaaagtctggggcaggattttaatggtagaaagacagaggaaaggaagacagaaggcgtgaaatgatagaaagcta

SEQ ID NO: 239434 - DNA, 120 bp, Artificial Sequence
  ENSG00000120837_35 (sequence is synthesized)
aaacttgcagaactgaagacacatacagttaagcagatgatgtgcggcttctcttcaaaggagggaggatgagatcgaatgtctgtggggtacactacgtgccaaacactgtctttagca

SEQ ID NO: 239435 - DNA, 120 bp, Artificial Sequence
  ENSG00000120837_36 (sequence is synthesized)
gctttctagtctttatttaattctgacaactctaggaaatacttttatcttcacttttagaagactgaggtttagcgaggctaatgctgttagtccaaatgataatcatgttgctaattc

SEQ ID NO: 239436 - DNA, 120 bp, Artificial Sequence
  ENSG00000120860_0 (sequence is synthesized)
gaactcggggtccaccgcccgctgaggagatggatgaggacgggcttcctctcatggggtcaggcatagacctgaccaaggtgccagctattcaacagaaaagaacggtggcttttctaa

SEQ ID NO: 239437 - DNA, 120 bp, Artificial Sequence
  ENSG00000120860_1 (sequence is synthesized)
accaatttgtggtgcacactgtacagttcctcaaccgcttttctacagtttgtgaggagaaactggcagacctttcacttcgtatccaacaaattgaaacaactctcaatattttagatg

SEQ ID NO: 239438 - DNA, 120 bp, Artificial Sequence
  ENSG00000120860_2 (sequence is synthesized)
caaagttgtcatctatcccaggcctagatgatgtcacagttgaagtatctcctttaaatgtcaccagtgtcacaaatggagcacatcctgaagccacttcagagcaaccacagcagaaca

SEQ ID NO: 239439 - DNA, 120 bp, Artificial Sequence
  ENSG00000120860_3 (sequence is synthesized)
aaaatatcttaactgtagccaaggatccaagatatgccagatatctcaaaatggttcaagtgggtgtaccagtgatggcaataagaaacaaaatgatatcagaaggactagacccagatc

SEQ ID NO: 239440 - DNA, 120 bp, Artificial Sequence
  ENSG00000120860_4 (sequence is synthesized)
ttcttgagaggccagatgctccagtgcctgatggcgaaagtgagaaaactgtagaagaaagttcagatagcgaatcttcttttagtgattaagcttaattttgataagaattacatatgc

SEQ ID NO: 239441 - DNA, 120 bp, Artificial Sequence
  ENSG00000120860_5 (sequence is synthesized)
atgcataggggtacatttacattctgtaagagattgagcctgaactctcttagtcataaaaacatcaaatggccacatgtccactaccaagcttcttctatgttaaaaaaataataataa

SEQ ID NO: 239442 - DNA, 120 bp, Artificial Sequence
  ENSG00000120860_6 (sequence is synthesized)
agcagttttaacctgccagtatgtcttgttgctaaaataaagggcctcaaaatgaaaaataggataacctaaataaagtacaattagtgctacaaatactaagatagaatattttagaga

SEQ ID NO: 239443 - DNA, 120 bp, Artificial Sequence
  ENSG00000120860_7 (sequence is synthesized)
acccatgctggagtgtagtggagtgaacttagctcactgcagcctagacctcctgcctcagcgccccaagtagctggaactacagaaactggcagacctttcacttcgtatccaacaaat

SEQ ID NO: 239444 - DNA, 120 bp, Artificial Sequence
  ENSG00000120860_8 (sequence is synthesized)
aataaataaagggctcaattaggtagattctagatacctaggaaatcaattcatcattatctcaataaatttattattaatttgtaaacagttgatagttttattagctttcttaaaagt

SEQ ID NO: 239445 - DNA, 120 bp, Artificial Sequence
  ENSG00000120860_9 (sequence is synthesized)
tttgttaaaatagtatcaccacctatatataattcatgctttgtatcagcactctggggacaagtaaagcagaatttttattttaatgcatgaatatacttgcattttaaggaaccaata

SEQ ID NO: 239446 - DNA, 120 bp, Artificial Sequence
  ENSG00000120860_10 (sequence is synthesized)
tagtgttgaaatgtaaccttctctgaaatgatatttaaatatttgtagatatttggaaacatatctcatattaaattattggtatttaaattgggggagatgatttttttctgcaattta

SEQ ID NO: 239447 - DNA, 120 bp, Artificial Sequence
  ENSG00000120860_11 (sequence is synthesized)
tggagaagtatctggaaagggactgtcccaggattactagcagaaagaagcaaatactcttatccccatagcccttatcatcaagctgaaaaataaagaacaaagcaacaagtaaacaca

SEQ ID NO: 239448 - DNA, 120 bp, Artificial Sequence
  ENSG00000120860_12 (sequence is synthesized)
tgccgagcgaggaggcgggctctccggaagccgccgagtgattagtgccagctattcaacagaaaagaacggtggcttttctaaaccaatttgtggtgcacactgtacagttcctcaacc

SEQ ID NO: 239449 - DNA, 120 bp, Artificial Sequence
  ENSG00000120860_13 (sequence is synthesized)
tttgtggtgcacactgtacagttcctcaaccgcttttctacagtttgtgaggagtagagttggggtttcaccatgttgaccatcctgacctcagatgatacacctgcctcggcctcccaa

SEQ ID NO: 239450 - DNA, 120 bp, Artificial Sequence
  ENSG00000120860_14 (sequence is synthesized)
tctaagaaacgagcagatgttcttggttgaaactgatagtgttaagcagcaggttggaaggaagaaaaataaacatgtaaaacttctaatagtaaaattttaaaaccttaacatagaaaa

SEQ ID NO: 239451 - DNA, 120 bp, Artificial Sequence
  ENSG00000120860_15 (sequence is synthesized)
tgaagtttgggaaaaacaaattagctgtgttattttgaagggcttcctgaagttaatactttctttgcctgtaaaaaagaaaatcagtctatataggactaggaaaaagcttcaaataat

SEQ ID NO: 239452 - DNA, 120 bp, Artificial Sequence
  ENSG00000120860_16 (sequence is synthesized)
tattttcttcaaaataattagaaatttttctaggttcttagaagaaatgtacttttaaaatattttattgtaaaatttttaaacatacacaaaaatagacctggattcaccagttttcac

SEQ ID NO: 239453 - DNA, 120 bp, Artificial Sequence
  ENSG00000120860_17 (sequence is synthesized)
aattgcttcatctatttttttggtcacttgctgaaattaattccagacatcttgtcatctcaccctgcataaatttttgagcatctctgaaaagttttgacattttcttttgtaacattt

SEQ ID NO: 239454 - DNA, 120 bp, Artificial Sequence
  ENSG00000120868_0 (sequence is synthesized)
acttctacgcgcgcgggcatgagccgtggcaggagtgcgcggcggcagcggtggccgccccttggggcttggggtgtgtttatttgcataagcgggcgcgcgccgtccgggctgggtgga

SEQ ID NO: 239455 - DNA, 120 bp, Artificial Sequence
  ENSG00000120868_1 (sequence is synthesized)
tccggcgggatttgactgctccgctgtccagaggcggagaagaagaggtagcgagtggacgtgactgctctatcccgggcaaaagggatagaaccagaggtggggagtctgggcagtcgg

SEQ ID NO: 239456 - DNA, 120 bp, Artificial Sequence
  ENSG00000120868_2 (sequence is synthesized)
cgacccgcgaagacttgaggtgccgcagcggcatccggagtagcgccgggctccctccggggtgcagccgccgtcgggggaagggcgccacaggccgggaagacctcctccctttgtgtc

SEQ ID NO: 239457 - DNA, 120 bp, Artificial Sequence
  ENSG00000120868_3 (sequence is synthesized)
cagtagtggggtccaccggagggcggcccgtgggccgggcctcaccgcggcgctccgggactgtggggtcaggctgcgttgggtggacgcccacctcgccaaccttcggaggtccctggg

SEQ ID NO: 239458 - DNA, 120 bp, Artificial Sequence
  ENSG00000120868_4 (sequence is synthesized)
ggtcttcgtgcgccccggggctgcagagatccaggggaggcgcctgtgaggcccggacctgccccggggcgaagggtatgtggcgagacagagccctgcacccctaattcccggtggaaa

SEQ ID NO: 239459 - DNA, 120 bp, Artificial Sequence
  ENSG00000120868_5 (sequence is synthesized)
actcctgttgccgtttccctccaccggcctggagtctcccagtcttgtcccggcagtgccgccctccccactaagacctaggcgcaaaggcttggctcatggttgacagctcagagagag

SEQ ID NO: 239460 - DNA, 120 bp, Artificial Sequence
  ENSG00000120868_6 (sequence is synthesized)
aaagatctgagggaagatggatgcaaaagctcgaaattgtttgcttcaacatagagaagctctggaaaaggacatcaagacatcctacatcatggatcacatgattagtgatggattttt

SEQ ID NO: 239461 - DNA, 120 bp, Artificial Sequence
  ENSG00000120868_7 (sequence is synthesized)
aacaatatcagaagaggaaaaagtaagaaatgagcccactcaacagcaaagagcagctatgctgattaaaatgatacttaaaaaagataatgattcctacgtatcattctacaatgctct

SEQ ID NO: 239462 - DNA, 120 bp, Artificial Sequence
  ENSG00000120868_8 (sequence is synthesized)
actacatgaaggatataaagatcttgctgcccttctccatgatggcattcctgttgtctcttcttccagtggtaaagattcagttagtggaataacttcgtatgtaaggacagtcctgtg

SEQ ID NO: 239463 - DNA, 120 bp, Artificial Sequence
  ENSG00000120868_9 (sequence is synthesized)
tgaaggtggagtaccacagaggccagttgtttttgtcacaaggaagaagctggtgaatgcaattcagcagaagctctccaaattgaaaggtgaaccaggatgggtcaccatacatggaat

SEQ ID NO: 239464 - DNA, 120 bp, Artificial Sequence
  ENSG00000120868_10 (sequence is synthesized)
ggcaggctgtgggaagtctgtattagctgcagaagctgttagagatcattcccttttagaaggttgtttcccagggggagtgcattgggtttcagttgggaaacaagacaaatctgggct

SEQ ID NO: 239465 - DNA, 120 bp, Artificial Sequence
  ENSG00000120868_11 (sequence is synthesized)
tctgatgaaactgcagaatctttgcacacggttggatcaggatgagagtttttcccagaggcttccacttaatattgaagaggctaaagaccgtctccgcattctgatgcttcgcaaaca

SEQ ID NO: 239466 - DNA, 120 bp, Artificial Sequence
  ENSG00000120868_12 (sequence is synthesized)
cccaaggtctctcttgatcttggatgatgtttgggactcttgggtgttgaaagcttttgacagtcagtgtcagattcttcttacaaccagagacaagagtgttacagattcagtaatggg

SEQ ID NO: 239467 - DNA, 120 bp, Artificial Sequence
  ENSG00000120868_13 (sequence is synthesized)
tcctaaatatgtagtccctgtggagagttccttaggaaaggaaaaaggacttgaaattttatccctttttgttaatatgaagaaggcagatttgccagaacaagctcatagtattataaa

SEQ ID NO: 239468 - DNA, 120 bp, Artificial Sequence
  ENSG00000120868_14 (sequence is synthesized)
agaatgtaaaggctctccccttgtagtatctttaattggtgcacttttacgtgattttcccaatcgctgggagtactacctcaaacagcttcagaataagcagtttaagagaataaggaa

SEQ ID NO: 239469 - DNA, 120 bp, Artificial Sequence
  ENSG00000120868_15 (sequence is synthesized)
atcttcgtcttatgattatgaggctctagatgaagccatgtctataagtgttgaaatgctcagagaagacatcaaagattattacacagatctttccatccttcagaaggacgttaaggt

SEQ ID NO: 239470 - DNA, 120 bp, Artificial Sequence
  ENSG00000120868_16 (sequence is synthesized)
gcctacaaaggtgttatgtattctctgggacatggaaactgaagaagttgaagacatactgcaggagtttgtaaataagtctcttttattctgtgatcggaatggaaagtcgtttcgtta

SEQ ID NO: 239471 - DNA, 120 bp, Artificial Sequence
  ENSG00000120868_17 (sequence is synthesized)
ttatttacatgatcttcaagtagattttcttacagagaagaattgcagccagcttcaggatctacataagaagataatcactcagtttcagagatatcaccagccgcatactctttcacc

SEQ ID NO: 239472 - DNA, 120 bp, Artificial Sequence
  ENSG00000120868_18 (sequence is synthesized)
agatcaggaagactgtatgtattggtacaactttctggcctatcacatggccagtgccaagatgcacaaggaactttgtgctttaatgttttccctggattggattaaagcaaaaacaga

SEQ ID NO: 239473 - DNA, 120 bp, Artificial Sequence
  ENSG00000120868_19 (sequence is synthesized)
acttgtaggccctgctcatctgattcatgaatttgtggaatacagacatatactagatgaaaaggattgtgcagtcagtgagaattttcaggagtttttatctttaaatggacaccttct

SEQ ID NO: 239474 - DNA, 120 bp, Artificial Sequence
  ENSG00000120868_20 (sequence is synthesized)
tggacgacagccatttcctaatattgtacaactgggtctctgtgagccggaaacttcagaagtttatcagcaagctaagctgcaggccaagcaggaggtcgataatggaatgctttacct

SEQ ID NO: 239475 - DNA, 120 bp, Artificial Sequence
  ENSG00000120868_21 (sequence is synthesized)
ggaatggataaacaaaaaaaacatcacgaatctttcccgcttagttgtccgcccccacacagatgctgtttaccatgcctgcttttctgaggatggtcagagaatagcttcttgtggagc

SEQ ID NO: 239476 - DNA, 120 bp, Artificial Sequence
  ENSG00000120868_22 (sequence is synthesized)
ttctagaaatcaaggctcatgaggatgaagtgctttgttgtgcattctctacagatgacagatttatagcaacctgctcagtggataaaaaagtgaagatttggaattctatgactgggg

SEQ ID NO: 239477 - DNA, 120 bp, Artificial Sequence
  ENSG00000120868_23 (sequence is synthesized)
aactagtacacacctatgatgagcactcagagcaagtcaattgctgccatttcaccaacagtagtcatcatcttctcttagccactgggtcaagtgactgcttcctcaaactttgggatt

SEQ ID NO: 239478 - DNA, 120 bp, Artificial Sequence
  ENSG00000120868_24 (sequence is synthesized)
tgaatcaaaaagaatgtcgaaataccatgtttggtcatacaaattcagtcaatcactgcagattttcaccagatgataagcttttggctagttgttcagctgatggaaccttaaagcttt

SEQ ID NO: 239479 - DNA, 120 bp, Artificial Sequence
  ENSG00000120868_25 (sequence is synthesized)
gggatgcgacatcagcaaatgagaggaaaagcattaatgtgaaacagttcttcctaaatttggaggaccctcaagaggatatggaagtgatagtgaagtgttgttcgtggtctgctgatg

SEQ ID NO: 239480 - DNA, 120 bp, Artificial Sequence
  ENSG00000120868_26 (sequence is synthesized)
gtgcaaggataatggtggcagcaaaaaataaaatctttctttttgacattcatactagtggcctattgggagaaatccacacgggccatcacagcaccatccagtactgtgacttctccc

SEQ ID NO: 239481 - DNA, 120 bp, Artificial Sequence
  ENSG00000120868_27 (sequence is synthesized)
cacaaaaccatttggcagtggttgctttgtcccagtactgtgtagagttgtggaatacagactcacgttcaaaggtggctgattgcagaggacatttaagttgggttcatggtgtgatgt

SEQ ID NO: 239482 - DNA, 120 bp, Artificial Sequence
  ENSG00000120868_28 (sequence is synthesized)
tttctcctgatggatcatcatttttgacatcttctgatgaccagacaatcaggctctgggagacaaagaaagtatgtaagaactctgctgtaatgttaaagcaagaagtagatgttgtgt

SEQ ID NO: 239483 - DNA, 120 bp, Artificial Sequence
  ENSG00000120868_29 (sequence is synthesized)
ttcaagaaaatgaagtgatggtccttgcagttgaccatataagacgtctgcaactcattaatggaagaacaggtcagattgattatctgactgaagctcaagttagctgctgttgcttaa

SEQ ID NO: 239484 - DNA, 120 bp, Artificial Sequence
  ENSG00000120868_30 (sequence is synthesized)
gtccacatcttcagtacattgcatttggagatgaaaatggagccattgagattttagaacttgtaaacaatagaatcttccagtccaggtttcagcacaagaaaactgtatggcacatcc

SEQ ID NO: 239485 - DNA, 120 bp, Artificial Sequence
  ENSG00000120868_31 (sequence is synthesized)
agttcacagccgatgagaagactcttatttcaagttctgatgatgctgaaattcaggtatggaattggcaattggacaaatgtatctttctacgaggccatcaggaaacagtgaaagact

SEQ ID NO: 239486 - DNA, 120 bp, Artificial Sequence
  ENSG00000120868_32 (sequence is synthesized)
ttagactcttgaaaaattcaagactgctttcttggtcatttgatggaacagtgaaggtatggaatattattactggaaataaagaaaaagactttgtctgtcaccagggtacagtacttt

SEQ ID NO: 239487 - DNA, 120 bp, Artificial Sequence
  ENSG00000120868_33 (sequence is synthesized)
cttgtgacatttctcacgatgctaccaagttttcatctacctctgctgacaagactgcaaagatctggagttttgatctccttttgccacttcatgaattgaggggccacaacggctgtg

SEQ ID NO: 239488 - DNA, 120 bp, Artificial Sequence
  ENSG00000120868_34 (sequence is synthesized)
tgcgctgctctgccttctctgtggacagtaccctgctggcaacgggagatgacaatggagaaatcaggatatggaatgtctcaaacggtgagcttcttcatttgtgtgctccgctttcag

SEQ ID NO: 239489 - DNA, 120 bp, Artificial Sequence
  ENSG00000120868_35 (sequence is synthesized)
aagaaggagctgctacccatggaggctgggtgactgacctttgcttttctccagatggcaaaatgcttatctctgctggaggatatattaagtggtggaacgttgtcactggggaatcct

SEQ ID NO: 239490 - DNA, 120 bp, Artificial Sequence
  ENSG00000120868_36 (sequence is synthesized)
cacagaccttctacacaaatggaaccaatcttaagaaaatacacgtgtcccctgacttcaaaacatatgtgactgtggataatcttggtattttatatattttacagactttagaataaa

SEQ ID NO: 239491 - DNA, 120 bp, Artificial Sequence
  ENSG00000120868_37 (sequence is synthesized)
atagttaagcattaatgtagttgaactttttaaatttttgaattggaaaaaaattctaatgaaaccctgatatcaactttttataaagctcttaattgttgtgcagtattgcattcatta

SEQ ID NO: 239492 - DNA, 120 bp, Artificial Sequence
  ENSG00000120868_38 (sequence is synthesized)
caaaagtgtttgtggttggatgaataatattaatgtagctttttcccaaatgaacatacctttaatcttgtttttcatgatcatcattaacagtttgtccttaggatgcaaatgaaaatg

SEQ ID NO: 239493 - DNA, 120 bp, Artificial Sequence
  ENSG00000120868_39 (sequence is synthesized)
tgaatacataccttgttgtactgttggtaaaattctgtcttgatgcattcaaaatggttgacataattaatgagaagaatttggaagaaattggtattttaatactgtctgtatttatta

SEQ ID NO: 239494 - DNA, 120 bp, Artificial Sequence
  ENSG00000120868_40 (sequence is synthesized)
ctgttatgcaggctgtgcctcagggtagcagtggcctgctttttgaaccacacttaccccaagggggttttgttctcctaaatacaatcttagaggttttttgcactctttaaatttgct

SEQ ID NO: 239495 - DNA, 120 bp, Artificial Sequence
  ENSG00000120868_41 (sequence is synthesized)
ttaaaaatattgtgtctgtgtgcatagtctgcagcatttcctttaattgactcaataagtgagtcttggatttagcaggcccccccaccttttttttttgtttttggagacagagtcttg

SEQ ID NO: 239496 - DNA, 90 bp, Artificial Sequence
  ENSG00000120868_42 (sequence is synthesized)
ggcgtgagccaccgtgcctggccaggccccttctcttttaatggagacagggtcttgcactaatacctcattgcagcctcagactcctgg

SEQ ID NO: 239497 - DNA, 78 bp, Artificial Sequence
  ENSG00000120868_43 (sequence is synthesized)
cacacccagctaatttttaagttttcttgtagagacagggtctcactatgttgtctaggctggtcttgaactcttggc

SEQ ID NO: 239498 - DNA, 120 bp, Artificial Sequence
  ENSG00000120868_44 (sequence is synthesized)
ttgtgaagtaaaacttgtatgttggaaagagtagattttattggtctacccttttctcactgtagctgctggcagccctgtgccatatctggactctagttgtcagtatctgagttggac

SEQ ID NO: 239499 - DNA, 120 bp, Artificial Sequence
  ENSG00000120868_45 (sequence is synthesized)
actattcctgctccctcttgtttcttacatatcagacttcttacttgaatgaaacctgatctttcctaatcctcacttttttcttttttaaaaagcagtttctccactgctaaatgttag

SEQ ID NO: 239500 - DNA, 120 bp, Artificial Sequence
  ENSG00000120868_46 (sequence is synthesized)
tcattgaggtggggccaattttaatcataagccttaataagatttttctaagaaatgtgaaatagaacaattttcatctaattccatttacttttagatgaatggcattgtgaatgccat

SEQ ID NO: 239501 - DNA, 120 bp, Artificial Sequence
  ENSG00000120868_47 (sequence is synthesized)
tcttttaatgaatttcaagagaattctctggttttctgtgtaattccagatgagtcactgtaactctagaagattaaccttccagccaacctattttcctttcccttgtctctctcatcc

SEQ ID NO: 239502 - DNA, 120 bp, Artificial Sequence
  ENSG00000120868_48 (sequence is synthesized)
tcttttccttccttctttcctttctcttcttttatctccaaggttaatcaggaaaaatagcttttgacaggggaaaaaactcaataactagctatttttgacctcctgatcaggaacttt

SEQ ID NO: 239503 - DNA, 120 bp, Artificial Sequence
  ENSG00000120868_49 (sequence is synthesized)
agttgaagcgtaaatctaaagaaacattttctctgaaatatattattaagggcaatggagataaattaatagtagatgtggttcccagaaaatataatcaaaattcaaagattttttttg

SEQ ID NO: 239504 - DNA, 120 bp, Artificial Sequence
  ENSG00000120868_50 (sequence is synthesized)
tttctgtaactggaactaaatcaaatgattactagtgttaatagtagataacttgtttttattgttggtgcatattagtataactgtggggtaggtcggggagagggtaagggaatagat

SEQ ID NO: 239505 - DNA, 120 bp, Artificial Sequence
  ENSG00000120868_51 (sequence is synthesized)
cactcagatgtattttagataagctatttagcctttgatggaatcataaatacagtgaatacaatcctttgcattgttaaggaggttttttgtttttaaatggtgggtcaaggagctagt

SEQ ID NO: 239506 - DNA, 120 bp, Artificial Sequence
  ENSG00000120868_52 (sequence is synthesized)
ttacaggcttactgtgatttaagcaaatgtgaaaagtgaaaccttaattttatcaaaagaaatttctgtaaatggtatgtctccttagaatacccaaatcataattttatttgtacacac

SEQ ID NO: 239507 - DNA, 120 bp, Artificial Sequence
  ENSG00000120868_53 (sequence is synthesized)
tgttaggggctcatctcatgtaggcagagtataaagtattaccttttggaattaaaagccactgactgttataaagtataacaacacacatcaggttttaaaaagccttgaatggccctt

SEQ ID NO: 239508 - DNA, 120 bp, Artificial Sequence
  ENSG00000120868_54 (sequence is synthesized)
cctgtaatcccagctccttgggaggctaagacaggaggattccttgagccctggagtttgagtccagcctgggtgacatagcaagaccctgtcttaaaagaaaaatgggaagaaagacaa

SEQ ID NO: 239509 - DNA, 120 bp, Artificial Sequence
  ENSG00000120868_55 (sequence is synthesized)
gcaagaccctgtcttaaaagaaaaatgggaagaaagacaaggtaacatgaagaaagaagagatacctagtatgatggagctgcaaatttcatggcagttcatgcagtcggtcaagaggag

SEQ ID NO: 239510 - DNA, 120 bp, Artificial Sequence
  ENSG00000120868_56 (sequence is synthesized)
gattttgttttgtagtttgcagatgagcatttctaaagcattttcccttgctgtatttttttgtattataaattacattggacttcatatatataatttttttttacattatatgtctct

SEQ ID NO: 239511 - DNA, 120 bp, Artificial Sequence
  ENSG00000120868_57 (sequence is synthesized)
cattgcatttggagatgaaaatggagccattgaggtattcagtgctagtcttcagaatctttctgtacagaattaaataaaactaattatatgtctggcattgtgcacttctatttttat

SEQ ID NO: 239512 - DNA, 120 bp, Artificial Sequence
  ENSG00000120868_58 (sequence is synthesized)
ttatttttatttttgaaatggggtcttgctgtgtcacccacgctgagtacagtgacacgatcacagccgactgcagccttgaccttctgagctcaagtgattttcccacttaagcctcct

SEQ ID NO: 239513 - DNA, 120 bp, Artificial Sequence
  ENSG00000120868_59 (sequence is synthesized)
gtgattttcccacttaagcctcctgagtagctgggactaaaggtgtacgtcaccatgcccgactaattttttttttttgtagagatggggtcccctgtgttgcccaggctggtctcaaac

SEQ ID NO: 239514 - DNA, 120 bp, Artificial Sequence
  ENSG00000120868_60 (sequence is synthesized)
atggtttgtatccattataccttctatcactttgctatcaaaattgctttgggtttgtcttattgtagatgtaatcttttgaagagagtgtgaccagttcactgaaaactgcatgttaaa

SEQ ID NO: 239515 - DNA, 120 bp, Artificial Sequence
  ENSG00000120868_61 (sequence is synthesized)
tttaaattctagatatttactgtttctcttagcagtgtgaggttaatgatgttatacctaaaattttttgatctctaacagtgctgctgatactactttttgttttttaaaggaactttg

SEQ ID NO: 239516 - DNA, 120 bp, Artificial Sequence
  ENSG00000120875_0 (sequence is synthesized)
ctggctggggcagtgcgctgagcgccggaggagcgtaggcagggcagcgctggcgccagtggcgacaggagccgcgcgaccggcaaaaatacacgggaggccgtcgccgaaaagagtccg

SEQ ID NO: 239517 - DNA, 120 bp, Artificial Sequence
  ENSG00000120875_1 (sequence is synthesized)
cggtcctctctcgtaaacacactctcctccaccggcgcctccccctccgctctgcgcgccgcccggctgggcgcccgaggccgctccgactgctatgtgaccgcgaggctgcgggaggaa

SEQ ID NO: 239518 - DNA, 120 bp, Artificial Sequence
  ENSG00000120875_2 (sequence is synthesized)
ggggacagggaagaagaggctctcccgcgggagcccttgaggaccaagtttgcggccacttctgcaggcgtcccttcttagctctcgcccgcccctttctgcagcctaggcggcccgggt

SEQ ID NO: 239519 - DNA, 120 bp, Artificial Sequence
  ENSG00000120875_3 (sequence is synthesized)
tctcttctcttcctcgcgcgcccagccgcctcggttcccggcgaccatggtgacgatggaggagctgcgggagatggactgcagtgtgctcaaaaggctgatgaaccgggacgagaatgg

SEQ ID NO: 239520 - DNA, 120 bp, Artificial Sequence
  ENSG00000120875_4 (sequence is synthesized)
cggcggcgcgggcggcagcggcagccacggcaccctggggctgccgagcggcggcaagtgcctgctgctggactgcagaccgttcctggcgcacagcgcgggctacatcctaggttcggt

SEQ ID NO: 239521 - DNA, 120 bp, Artificial Sequence
  ENSG00000120875_5 (sequence is synthesized)
caacgtgcgctgtaacaccatcgtgcggcggcgggctaagggctccgtgagcctggagcagatcctgcccgccgaggaggaggtacgcgcccgcttgcgctccggcctctactcggcggt

SEQ ID NO: 239522 - DNA, 120 bp, Artificial Sequence
  ENSG00000120875_6 (sequence is synthesized)
catcgtctacgacgagcgcagcccgcgcgccgagagcctccgcgaggacagcaccgtgtcgctggtggtgcaggcgctgcgccgcaacgccgagcgcaccgacatctgcctgctcaaagg

SEQ ID NO: 239523 - DNA, 120 bp, Artificial Sequence
  ENSG00000120875_7 (sequence is synthesized)
cggctatgagaggttttcctccgagtacccagaattctgttctaaaaccaaggccctggcagccatcccacccccggttccccccagtgccacagagcccttggacctgggctgcagctc

SEQ ID NO: 239524 - DNA, 120 bp, Artificial Sequence
  ENSG00000120875_8 (sequence is synthesized)
ctgtgggaccccactacacgaccaggggggtcctgtggagatccttcccttcctctacctcggcagtgcctaccatgctgcccggagagacatgctggacgccctgggcatcacggctct

SEQ ID NO: 239525 - DNA, 120 bp, Artificial Sequence
  ENSG00000120875_9 (sequence is synthesized)
gttgaatgtctcctcggactgcccaaaccactttgaaggacactatcagtacaagtgcatcccagtggaagataaccacaaggccgacatcagctcctggttcatggaagccatagagta

SEQ ID NO: 239526 - DNA, 120 bp, Artificial Sequence
  ENSG00000120875_10 (sequence is synthesized)
catcgatgccgtgaaggactgccgtgggcgcgtgctggtgcactgccaggcgggcatctcgcggtcggccaccatctgcctggcctacctgatgatgaagaaacgggtgaggctggagga

SEQ ID NO: 239527 - DNA, 120 bp, Artificial Sequence
  ENSG00000120875_11 (sequence is synthesized)
ggccttcgagttcgttaagcagcgccgcagcatcatctcgcccaacttcagcttcatggggcagctgctgcagttcgagtcccaggtgctggccacgtcctgtgctgcggaggctgctag

SEQ ID NO: 239528 - DNA, 120 bp, Artificial Sequence
  ENSG00000120875_12 (sequence is synthesized)
cccctcgggacccctgcgggagcggggcaagacccccgccacccccacctcgcagttcgtcttcagctttccggtctccgtgggcgtgcactcggcccccagcagcctgccctacctgca

SEQ ID NO: 239529 - DNA, 120 bp, Artificial Sequence
  ENSG00000120875_13 (sequence is synthesized)
cagccccatcaccacctctcccagctgttagagccgccctgggggccccagaaccagagctggctcccagcaagggtaggacgggccgcatgcgggcagaaagttgggactgagcagctg

SEQ ID NO: 239530 - DNA, 120 bp, Artificial Sequence
  ENSG00000120875_14 (sequence is synthesized)
ggagcaggcgaccgagctccttccccatcatttctccttggccaacgacgaggccagccagaatggcaataaggactccgaatacataataaaagcaaacagaacactccaacttagagc

SEQ ID NO: 239531 - DNA, 120 bp, Artificial Sequence
  ENSG00000120875_15 (sequence is synthesized)
aataacggctgccgcagcagccagggaagaccttggtttggtttatgtgtcagtttcacttttccgatagaaatttcttacctcatttttttaagcagtaaggcttgaagtgatgaaacc

SEQ ID NO: 239532 - DNA, 120 bp, Artificial Sequence
  ENSG00000120875_16 (sequence is synthesized)
cacagatcctagcaaatgtgcccaaccagctttactaaagggggaggaagggagggcaaagggatgagaagacaagtttcccagaagtgcctggttctgtgtacttgtccctttgttgtc

SEQ ID NO: 239533 - DNA, 120 bp, Artificial Sequence
  ENSG00000120875_17 (sequence is synthesized)
gttgttgtagttaaaggaatttcattttttaaaagaaatcttcgaaggtgtggttttcatttctcagtcaccaacagatgaataattatgcttaataataaagtatttattaagactttc

SEQ ID NO: 239534 - DNA, 120 bp, Artificial Sequence
  ENSG00000120875_18 (sequence is synthesized)
ttcagagtatgaaagtacaaaaagtctagttacagtggatttagaatatatttatgttgatgtcaaacagctgagcaccgtagcatgcagatgtcaaggcagttaggaagtaaatggtgt

SEQ ID NO: 239535 - DNA, 120 bp, Artificial Sequence
  ENSG00000120875_19 (sequence is synthesized)
cttgtagatatgtgcaaggtagcatgatgagcaacttgagtttgttgccactgagaagcaggcgggttgggtgggaggaggaagaaagggaagaattaggtttgaattgctttttaaaaa

SEQ ID NO: 239536 - DNA, 120 bp, Artificial Sequence
  ENSG00000120875_20 (sequence is synthesized)
aaaaagaaaagaaaaagacagcatctcactatgttgccaaggctcatcttgagaagcaggcgggttgggtgggaggaggaagaaagggaagaattaggtttgaattgcttttttaaaaaa

SEQ ID NO: 239537 - DNA, 120 bp, Artificial Sequence
  ENSG00000120875_21 (sequence is synthesized)
ggtttgaattgcttttttaaaaaaaaagaaaagaaaaaaaaagacagcatctcactatgttgccaaggctcatctcaagctcttgggctcaagagatcctcccacctcggcctcctgagt

SEQ ID NO: 239538 - DNA, 120 bp, Artificial Sequence
  ENSG00000120875_22 (sequence is synthesized)
tcatgaccaatgtgaattgcttttgaagctggttcatgggcatgtaggccaccgaagcaattttagaccacagtaagtcaagcttttttccctccgatgatcactgggtggttgcagcat

SEQ ID NO: 239539 - DNA, 120 bp, Artificial Sequence
  ENSG00000120875_23 (sequence is synthesized)
gtctgtgatcaatatgccatattacactaaggtgctcctggaaaattgggtgcagttcaaattttcctacagcaaatcatttggcaaggccagccattggggaaaccagacaactagaga

SEQ ID NO: 239540 - DNA, 120 bp, Artificial Sequence
  ENSG00000120875_24 (sequence is synthesized)
taaccctgaaatgaatccttttgtaaattgaagcaccatcttttctttttttgcataaattggaggttttaattttagggcagttacctgaagtgaaatataccaacaatttcttgtgtt

SEQ ID NO: 239541 - DNA, 120 bp, Artificial Sequence
  ENSG00000120875_25 (sequence is synthesized)
ctttaaattcctagttaggtgaatatttttgaaggtcctcttttgaataaagaggggaatggacaccacatttcaggtcttctcgaagtgtggaagggcaagagagcatcagtgagctga

SEQ ID NO: 239542 - DNA, 120 bp, Artificial Sequence
  ENSG00000120875_26 (sequence is synthesized)
tggtggattgcttacatcggattccattggtatgaatttcccaaactggaaatcaaagcgccagggtggggttggggctgactgctggtgagggggctggccgctggctcccgtgacgtg

SEQ ID NO: 239543 - DNA, 120 bp, Artificial Sequence
  ENSG00000120875_27 (sequence is synthesized)
cgtcatgggcacgcaggcgccattttgaatctatcgtcggcacgtgggtgccattttgaatccttagttgggcctttctaaatggagaatggctttggagggagacacgttttctgtggg

SEQ ID NO: 239544 - DNA, 120 bp, Artificial Sequence
  ENSG00000120875_28 (sequence is synthesized)
gagggtttgggggggagggaggagggaacaagctacatgctattttgtttgtagtattgtggaacagtcttgttatggagtgccagcttagaggttgttgcaaacttgtctagaagtgag

SEQ ID NO: 239545 - DNA, 120 bp, Artificial Sequence
  ENSG00000120875_29 (sequence is synthesized)
agcatggttttttttagccctttgagagtctacatctaatgaacattcttgctcacccataaataacgtcaagcctcaatgtcaccgtcacgttgggatactctttctcatctggcatcc

SEQ ID NO: 239546 - DNA, 120 bp, Artificial Sequence
  ENSG00000120875_30 (sequence is synthesized)
tagacaggacaaggttggttacctttccttccatgaaccatgaacctgtgacggcatcattcatcctgacttcaccaagctccgcctgtgggtgaggccagagctcccactggcaatttt

SEQ ID NO: 239547 - DNA, 120 bp, Artificial Sequence
  ENSG00000120875_31 (sequence is synthesized)
tagaagagccagaggctccctgcttcctctagaaataacagttcagggtgaagcatggagggtttcagttcccagacaatggaaccatttagagacaacacagttggacatttccacttt

SEQ ID NO: 239548 - DNA, 120 bp, Artificial Sequence
  ENSG00000120875_32 (sequence is synthesized)
ttccttgattcctggaagtccagtgggttctgcagctgaaaaagccctgggtcccagcagcagagagacaggacagaggggatgcttgggcggggagggacggtaacctgcagaacagat

SEQ ID NO: 239549 - DNA, 120 bp, Artificial Sequence
  ENSG00000120875_33 (sequence is synthesized)
tccatttttatagaacgagtacacgtttgctaaaacagtcctgctttcccagactggattcccaccacagggacagtcggaactcaggactagctccagcgacatctttcctccgaattc

SEQ ID NO: 239550 - DNA, 120 bp, Artificial Sequence
  ENSG00000120875_34 (sequence is synthesized)
aagccttctatcacaatgtcaaaacagctatttataaagccattttcattgtacttgataacagcacgagtcccaaaacttttagaaataaaataggacattggcttgattgaaaagagg

SEQ ID NO: 239551 - DNA, 120 bp, Artificial Sequence
  ENSG00000120875_35 (sequence is synthesized)
gactttttaaaaattgttctttcgtcagaagccttttggatgacttacaatagctctgatgaagataccaccccagcgtcagtccaataggtcagtgagtttcaacaggcatccatccct

SEQ ID NO: 239552 - DNA, 120 bp, Artificial Sequence
  ENSG00000120875_36 (sequence is synthesized)
cccatgaagggattctggtgatgggaagtttctgtaatgacaggaaagcattgaccctcattgattgtcaactttggtattagccatgaaagacaggatgctcattgggtgttctgtaga

SEQ ID NO: 239553 - DNA, 120 bp, Artificial Sequence
  ENSG00000120875_37 (sequence is synthesized)
gtgaggaatgctgcctattccctcccagaacgtctgacccaggggtgtgtgttgaggagccctgggggaaatggaccaagttttcccacagagcagtattaggctgaagagcaggtgact

SEQ ID NO: 239554 - DNA, 120 bp, Artificial Sequence
  ENSG00000120875_38 (sequence is synthesized)
ggtaggccccagctcccatcattccctcccaaagccattttgttcagttgctcatccacgctggattccagagagttttccaatttgggaagccatgagaaaggtttttaaatcttggga

SEQ ID NO: 239555 - DNA, 120 bp, Artificial Sequence
  ENSG00000120875_39 (sequence is synthesized)
agatggagagagggacataggatagttgactccaacatgacaggaagaggctggagattgggaattggccatcaaccaagcctgtagtagtaaagccatggtcccgcattggaattactt

SEQ ID NO: 239556 - DNA, 120 bp, Artificial Sequence
  ENSG00000120875_40 (sequence is synthesized)
ggggaacttatacagttctgatacccaggctctcctagaccagttcaaccaattctaggtgggggactcaggcatcagtgtgtttcgtagctccccgggtgttttccctgtgcagccgag

SEQ ID NO: 239557 - DNA, 120 bp, Artificial Sequence
  ENSG00000120875_41 (sequence is synthesized)
cttgggaaactgccatgctttttggatgtcaaggcgctgttggaggctgggtgtgacagcacagagccaggttgtcttgtggaaaccacagccacgggtttgccactggctcagcatggc

SEQ ID NO: 239558 - DNA, 120 bp, Artificial Sequence
  ENSG00000120875_42 (sequence is synthesized)
ctcactgccagtcccagcctggctgagggacaagatggtttctcttgggagttcctgagtggagcacccttccaggctttttgaaagccagctgatctgtggagccttgttaagggactc

SEQ ID NO: 239559 - DNA, 120 bp, Artificial Sequence
  ENSG00000120875_43 (sequence is synthesized)
aatacggtgtttggatattgatgtttttccttgagactgtcttgtccatcaataaagatggaggatgtctcctctttgaaccccgcttccccaccagtactctctctcccttagagttta

SEQ ID NO: 239560 - DNA, 120 bp, Artificial Sequence
  ENSG00000120875_44 (sequence is synthesized)
tgagttattcaaggaggagacttcttaaagacagcaacgcaattcttgtaacttgtgtaaatagccccatctttcagagtgataccatttctacatttgataatgcctgtattcctgtag

SEQ ID NO: 239561 - DNA, 120 bp, Artificial Sequence
  ENSG00000120875_45 (sequence is synthesized)
gatgtatatagtttaggggattttttttttgtttggttttgttttttagaagtcaatatgtctggttttatttattgcttgaaaaagatcatttgaaaaaaataaatacattttcaacca

SEQ ID NO: 239562 - DNA, 120 bp, Artificial Sequence
  ENSG00000120875_46 (sequence is synthesized)
gcagttcagacccccccacacccatcaaagagccgctcctcccccccgcaggcgccttcgccgcctccctcccttcctttcctttccgctcctcttccgacctgtccacccgggaggaag

SEQ ID NO: 239563 - DNA, 120 bp, Artificial Sequence
  ENSG00000120875_47 (sequence is synthesized)
ggagctggaaagggggcggaaacctctcccctccaaaaagcacaacaaaactgttcagtgcggaggagccgggttcgcccctgccggacagcggggggctttgttccccgcagttgtttc

SEQ ID NO: 239564 - DNA, 120 bp, Artificial Sequence
  ENSG00000120875_48 (sequence is synthesized)
ctgcccatttgacctgtcagctgctggggaaacgctgctgttgacctttggttgaactgctaaggcgattttgctgatttttctttctttttccgcgagggctgtcttttgctcctccaa

SEQ ID NO: 239565 - DNA, 120 bp, Artificial Sequence
  ENSG00000120875_49 (sequence is synthesized)
atgagcccagtccccctcccttctccccaaagcgctccaagagaaagtgccaggaaggggcttgtcccggaaggcctggcggctgagcggggccaggtcctggttaggccaccagggtgg

SEQ ID NO: 239566 - DNA, 120 bp, Artificial Sequence
  ENSG00000120875_50 (sequence is synthesized)
gcgtccgcgccattgtttgagcttgtcggcgctggtgggagagatgagggcaattcctctgggacgcaagtcccctcgaatggccggggctggccgggatgttccccgcacggcgctgcc

SEQ ID NO: 239567 - DNA, 120 bp, Artificial Sequence
  ENSG00000120875_51 (sequence is synthesized)
ctcgagtccccccgatggagagcgcgggcgcgccttccttcgctggcgtccaaacccgggaccagctagaacacagcagggctgggactgggttccagccccacgtggagtctggatttg

SEQ ID NO: 239568 - DNA, 120 bp, Artificial Sequence
  ENSG00000120875_52 (sequence is synthesized)
ttttgttgtgttttgctttccttcctggaagaaatcccgaggggaccgccctagagcggcagctccaggacctcggcccttgggcttccgggggtgcagccacttaggccccgctcccgg

SEQ ID NO: 239569 - DNA, 120 bp, Artificial Sequence
  ENSG00000120875_53 (sequence is synthesized)
ggagagagggattattttttaagatttatccccagggcgcgcggcatttccctgtccctcgtgaatcccgttgagagtcctccctccccaacctcctccatttccccagccagaccgatt

SEQ ID NO: 239570 - DNA, 120 bp, Artificial Sequence
  ENSG00000120875_54 (sequence is synthesized)
cgagagccctggagattctgggcgaggctagtgactgggtagtacaggcctctagccccaccattgctctctctgtcttcagttccccaggagggcaatggcatcaaacagcacagctct

SEQ ID NO: 239571 - DNA, 120 bp, Artificial Sequence
  ENSG00000120875_55 (sequence is synthesized)
gggggatgtcaatattgcataccttttctacctaaagggaaaatgactcgcttttctgcttgcaaatatggtagtttctgcttacaaatgtaatacaatgcccatgacagccaaggactg

SEQ ID NO: 239572 - DNA, 120 bp, Artificial Sequence
  ENSG00000120875_56 (sequence is synthesized)
gaagcataagttgctaggtcttacaggtgattttttacaatgaagcaaactcactatgttagacaccatttacattggatgtctccaactaacaaaagtaactaaagacagatgtaggtg

SEQ ID NO: 239573 - DNA, 120 bp, Artificial Sequence
  ENSG00000120875_57 (sequence is synthesized)
taaattgagagtgaaatttgaccctttagaccgtcacaacttccttgggcttatcctgggtgcttataggagaggtgggctccacccacaaaaatggactgctcagaaaaatgagggaga

SEQ ID NO: 239574 - DNA, 120 bp, Artificial Sequence
  ENSG00000120875_58 (sequence is synthesized)
cttaccgggaggcagttcctggctaacgaagaggaagcacgatgggaagaaaagttcactccaacggaagccagtttgctgaacatagcagatcgcccaggaggactgggagagactgca

SEQ ID NO: 239575 - DNA, 120 bp, Artificial Sequence
  ENSG00000120885_0 (sequence is synthesized)
gcggcgtcgccaggaggagcgcgcgggcacagggtgccgctgaccgaggcgtgcaaagactccagaattggaggcatgatgaagactctgctgctgtttgtggggctgctgctgacctgg

SEQ ID NO: 239576 - DNA, 120 bp, Artificial Sequence
  ENSG00000120885_1 (sequence is synthesized)
gagagtgggcaggtcctgggggaccagacggtctcagacaatgagctccaggaaatgtccaatcagggaagtaagtacgtcaataaggaaattcaaaatgctgtcaacggggtgaaacag

SEQ ID NO: 239577 - DNA, 120 bp, Artificial Sequence
  ENSG00000120885_2 (sequence is synthesized)
ataaagactctcatagaaaaaacaaacgaagagcgcaagacactgctcagcaacctagaagaagccaagaagaagaaagaggatgccctaaatgagaccagggaatcagagacaaagctg

SEQ ID NO: 239578 - DNA, 120 bp, Artificial Sequence
  ENSG00000120885_3 (sequence is synthesized)
aaggagctcccaggagtgtgcaatgagaccatgatggccctctgggaagagtgtaagccctgcctgaaacagacctgcatgaagttctacgcacgcgtctgcagaagtggctcaggcctg

SEQ ID NO: 239579 - DNA, 120 bp, Artificial Sequence
  ENSG00000120885_4 (sequence is synthesized)
gttggccgccagcttgaggagttcctgaaccagagctcgcccttctacttctggatgaatggtgaccgcatcgactccctgctggagaacgaccggcagcagacgcacatgctggatgtc

SEQ ID NO: 239580 - DNA, 120 bp, Artificial Sequence
  ENSG00000120885_5 (sequence is synthesized)
atgcaggaccacttcagccgcgcgtccagcatcatagacgagctcttccaggacaggttcttcacccgggagccccaggatacctaccactacctgcccttcagcctgccccaccggagg

SEQ ID NO: 239581 - DNA, 120 bp, Artificial Sequence
  ENSG00000120885_6 (sequence is synthesized)
cctcacttcttctttcccaagtcccgcatcgtccgcagcttgatgcccttctctccgtacgagcccctgaacttccacgccatgttccagcccttccttgagatgatacacgaggctcag

SEQ ID NO: 239582 - DNA, 120 bp, Artificial Sequence
  ENSG00000120885_7 (sequence is synthesized)
caggccatggacatccacttccatagcccggccttccagcacccgccaacagaattcatacgagaaggcgacgatgaccggactgtgtgccgggagatccgccacaactccacgggctgc

SEQ ID NO: 239583 - DNA, 120 bp, Artificial Sequence
  ENSG00000120885_8 (sequence is synthesized)
ctgcggatgaaggaccagtgtgacaagtgccgggagatcttgtctgtggactgttccaccaacaacccctcccaggctaagctgcggcgggagctcgacgaatccctccaggtcgctgag

SEQ ID NO: 239584 - DNA, 120 bp, Artificial Sequence
  ENSG00000120885_9 (sequence is synthesized)
aggttgaccaggaaatacaacgagctgctaaagtcctaccagtggaagatgctcaacacctcctccttgctggagcagctgaacgagcagtttaactgggtgtcccggctggcaaacctc

SEQ ID NO: 239585 - DNA, 120 bp, Artificial Sequence
  ENSG00000120885_10 (sequence is synthesized)
acgcaaggcgaagaccagtactatctgcgggtcaccacggtggcttcccacacttctgactcggacgttccttccggtgtcactgaggtggtcgtgaagctctttgactctgatcccatc

SEQ ID NO: 239586 - DNA, 120 bp, Artificial Sequence
  ENSG00000120885_11 (sequence is synthesized)
tggatgttgcttttgcacctacgggggcatctgagtccagctccccccaagatgagctgcagccccccagagagagctctgcacgtcaccaagtaaccaggccccagcctccaggccccc

SEQ ID NO: 239587 - DNA, 120 bp, Artificial Sequence
  ENSG00000120885_12 (sequence is synthesized)
aactccgcccagcctctccccgctctggatcctgcactctaacactcgactctgctgctcatgggaagaacagaattgctcctgcatgcaactaattcaataaaactgtcttgtgagctg

SEQ ID NO: 239588 - DNA, 120 bp, Artificial Sequence
  ENSG00000120885_13 (sequence is synthesized)
atcgcttggagggtcctctttttatgttgagttgctgcttcccggcatgccttcattttgctatggggggcaggcaggggggatggaaaataagtagaaacaaaaaagcagtggctaaga

SEQ ID NO: 239589 - DNA, 120 bp, Artificial Sequence
  ENSG00000120885_14 (sequence is synthesized)
tggtatagggactgtcataccagtgaagaataaaagggtgaagaataaaagggatatgatgacaaggttgatccacttcaagaattgcttgctttcaggaagagagatgtgtttcaacaa

SEQ ID NO: 239590 - DNA, 120 bp, Artificial Sequence
  ENSG00000120885_15 (sequence is synthesized)
gccaactaaaatatattgctgcaaatggaagcttttctgttctattataaaactgtcgatgtattctgaccaaggtgcgacaatctcctaaaggaatacactgaaagttaaggagaagaa

SEQ ID NO: 239591 - DNA, 120 bp, Artificial Sequence
  ENSG00000120885_16 (sequence is synthesized)
tcagtaagtgtaaggtgtacttggtattataatgcataattgatgttttcgttatgaaaacatttggtgcccagaagtccaaattatcagttttatttgtaagagctattgcttttgcag

SEQ ID NO: 239592 - DNA, 120 bp, Artificial Sequence
  ENSG00000120885_17 (sequence is synthesized)
cggttttatttgtaaaagctgttgatttcgagttgtaagagctcagcatcccaggggcatcttcttgactgtggcatttcctgtccaccgccggtttatatgatcttcatacctttccct

SEQ ID NO: 239593 - DNA, 120 bp, Artificial Sequence
  ENSG00000120885_18 (sequence is synthesized)
ggaccacaggcgtttctcggcttttagtctgaaccatagctgggctgcagtaccctacgctgccagcaggtggccatgactacccgtggtaccaatctcagtcttaaagctcaggctttt

SEQ ID NO: 239594 - DNA, 120 bp, Artificial Sequence
  ENSG00000120885_19 (sequence is synthesized)
cgttcattaacattctctgatagaattctggtcatcagatgtactgcaatggaacaaaactcatctggctgcatcccaggtgtgtagcaaagtccacatgtaaatttatagcttagaata

SEQ ID NO: 239595 - DNA, 120 bp, Artificial Sequence
  ENSG00000120885_20 (sequence is synthesized)
ttcttaagtcactgtcccttgtctctctttgaagttataaacaacaaacttaaagcttagcttatgtccaaggtaagtattttagcatggctgtcaaggaaattcagagtaaagtcagtg

SEQ ID NO: 239596 - DNA, 120 bp, Artificial Sequence
  ENSG00000120885_21 (sequence is synthesized)
tgattcacttaatgatatacattaattagaattatggggtcagaggtatttgcttaagtgatcataattgtaaagtatatgtcacattgtcacattaatgtcacactgtttcaaaagtta

SEQ ID NO: 239597 - DNA, 120 bp, Artificial Sequence
  ENSG00000120885_22 (sequence is synthesized)
aacactggcagggcagcctgctgtcggcttagaggggatgggcagtgtggagggcctggcagagcaagaggactcatccttccaaagggactttctctgggaagcctgctcctcgggcca

SEQ ID NO: 239598 - DNA, 120 bp, Artificial Sequence
  ENSG00000120885_23 (sequence is synthesized)
ctgcgaaccctctctactctccgaagggaattgtccttcctggcttccactacttccacccctgaatgcacaggcagcccggcccaagtctcccactagggatgcagatggattcggtgt

SEQ ID NO: 239599 - DNA, 120 bp, Artificial Sequence
  ENSG00000120885_24 (sequence is synthesized)
gcgctgtggtgaatggggagcgtctgctggggtgaaggtttaggtgcacattgcagaggacgtggctggtctctgggatgcagtccctctgtggaggtggcatggggagggacggatgca

SEQ ID NO: 239600 - DNA, 120 bp, Artificial Sequence
  ENSG00000120885_25 (sequence is synthesized)
tgacctaaggggggtattttcagtgtctgacatgatcgataccactctggacaaggaggccaggatgcagaaagcctgtgtgcctcgctgattgtcggggaggatgtggcttggacaaga

SEQ ID NO: 239601 - DNA, 120 bp, Artificial Sequence
  ENSG00000120885_26 (sequence is synthesized)
gcctggttcctccgatgccagggttcttgtttcttccactcaacattgctgtcctgcagtccctccctccctgcacctcctgccttcgctttcattcgaggtgtccatggcaagtctggt

SEQ ID NO: 239602 - DNA, 120 bp, Artificial Sequence
  ENSG00000120885_27 (sequence is synthesized)
catttccccccatttcctcaggaataaaagtgcagcagtgcctgctgtggggacagctgagggcagtgaggccctggggagctgctgcaggcagcaggtgggcgggacgccagcaggctg

SEQ ID NO: 239603 - DNA, 120 bp, Artificial Sequence
  ENSG00000120885_28 (sequence is synthesized)
gccaggaggagcgcgcgggcacagggtgccgctgaccgatggggaaactgagacctggagacctgccgcgttgcgggagacccaggctagcaggtgacagagctggcctgcaccgagctc

SEQ ID NO: 239604 - DNA, 120 bp, Artificial Sequence
  ENSG00000120885_29 (sequence is synthesized)
cttcctgcagcatatcctctgcgaagatgcggatctctcagttgtggctttcggcttgcatgcatgagtcatctagttttcttctaaattctctagctctctggacactgttgcctaggc

SEQ ID NO: 239605 - DNA, 120 bp, Artificial Sequence
  ENSG00000120885_30 (sequence is synthesized)
gcgaagaccagtactatctgcgggtcaccacggtgagctgtgtcccggccacatgctgtggctcgggagcccgagctgtgatcgggagcaggggcatgtgtgcttttgactgagcattta

SEQ ID NO: 239606 - DNA, 120 bp, Artificial Sequence
  ENSG00000120885_31 (sequence is synthesized)
gcctcatcacccactcagggaaaatataaccctgctttacaaaggagcaaagtaagagaggttccacagcttggccaaggtgtgatagctgacagatgacttggacgggtatttgaacct

SEQ ID NO: 239607 - DNA, 120 bp, Artificial Sequence
  ENSG00000120885_32 (sequence is synthesized)
gactgcctggctgccaagcctgtattttgttgttgttgtttttgttttggtgcacaaatctgtgaataaaccagaagcctctgttcttttctcaaagctacaaggctgccctctggcatg

SEQ ID NO: 239608 - DNA, 120 bp, Artificial Sequence
  ENSG00000120885_33 (sequence is synthesized)
tcttttctcaaagctacaaggctgccctctggcatgtaaaatggcttatgaattagtacatcactctctgccagtgataaaaacttctctctaggccagacatggtggctcatgcctgta

SEQ ID NO: 239609 - DNA, 78 bp, Artificial Sequence
  ENSG00000120885_34 (sequence is synthesized)
tgagaccagcctgggcaacacagcaagattccctctctacaaaaaatacaaaaatcagtcaggtgtggtggcacacac

SEQ ID NO: 239610 - DNA, 120 bp, Artificial Sequence
  ENSG00000120885_35 (sequence is synthesized)
ataataaaataaagttaaaaaatcaaataaaacttatttctagtactgggaactcttctttttcttttctttcttccctccaggccctctggattccttttctaccctactctgaccaag

SEQ ID NO: 239611 - DNA, 120 bp, Artificial Sequence
  ENSG00000120885_36 (sequence is synthesized)
ggctgcttctaaagcaaatgtttggaaaccacttttattctttggggtgctccctgggctggtcatttgcagatgacatttgccccaacacatgagtgtctgtgaaccaggtccgttctg

SEQ ID NO: 239612 - DNA, 120 bp, Artificial Sequence
  ENSG00000120885_37 (sequence is synthesized)
tccactgagctgtacttacgtctagatgtataagaagcatggggtcagctctctaggtttccttggagaagcaggaggacttccttatcagaagcctgacttctgttgcagagcgcatgc

SEQ ID NO: 239613 - DNA, 120 bp, Artificial Sequence
  ENSG00000120885_38 (sequence is synthesized)
ggctttcggcttgcatgcatgagtcatctagttttcttctaaattctctagctctctggacactgttgcctgtaagtatgaggctgcggatttcagtatatgctgcaaccaccgaaatcc

SEQ ID NO: 239614 - DNA, 120 bp, Artificial Sequence
  ENSG00000120885_39 (sequence is synthesized)
gactttttctgcctcctaatgcatctgaggtgcatcagagaaaagtcacacaagatccaccaggcctcagacctctgattccacagtctcattttacagatgataatctgaggcctggag

SEQ ID NO: 239615 - DNA, 120 bp, Artificial Sequence
  ENSG00000120885_40 (sequence is synthesized)
aggtttaggactggtgccaacactaaacagcaaataagtatcagaattgggattcgagccaaagcctcttgaccttccagaatttctggacctagttaaaaaaaatatgatttttattat

SEQ ID NO: 239616 - DNA, 120 bp, Artificial Sequence
  ENSG00000120885_41 (sequence is synthesized)
aatgttaagttataataatagtggagcattgggcacaactgaaatggccaatcttgtgagaatggtaaaataaacttaggtccgtgagtaagtggagtattacatagccataaaagtatg

SEQ ID NO: 239617 - DNA, 120 bp, Artificial Sequence
  ENSG00000120885_42 (sequence is synthesized)
cccttaaagaatatttgaagatggtgaatgtgaagaatcttgtataaactgcatggaagacagaaggaaatataccacagtgctaacctttgcctctgggtgatatgaattaccgaggcg

SEQ ID NO: 239618 - DNA, 120 bp, Artificial Sequence
  ENSG00000120885_43 (sequence is synthesized)
tcccactggaggggagggagggggtcactgcgcggtgccctgctgggttgccatggtgacccgcagtcctcccaggctgtgtcagctgatgctgaggctgcaattaagaagcagggaagg

SEQ ID NO: 239619 - DNA, 120 bp, Artificial Sequence
  ENSG00000120885_44 (sequence is synthesized)
ttcatttgcttctgaaagcatcagggagtgagatcttggatctggttttgttatgagcctggcccagggcctaatgcccagattcatttcaatagatgtttctaagccctgatcacatgc

SEQ ID NO: 239620 - DNA, 120 bp, Artificial Sequence
  ENSG00000120885_45 (sequence is synthesized)
tagttccaagcaggctctggatggggtggcggcaggggcccagacaggcgtggcgtccaaccttcaggaagcttatctaataggggtgatatggttagggttaaggcaggcacacagcac

SEQ ID NO: 239621 - DNA, 120 bp, Artificial Sequence
  ENSG00000120885_46 (sequence is synthesized)
gatggattcggtgtgaagggctggctgctgttgcctccggctcttgaaagtcaagttcaggtggtgctgagactccctgggggctgcagcgctgtgaggcgtgcaaagactccagaattg

SEQ ID NO: 239622 - DNA, 120 bp, Artificial Sequence
  ENSG00000120885_47 (sequence is synthesized)
ctttcaggggcccctggcagagaggtgtttctggctggctttgtctctctggcatgacaaaggctctgttcctgctggaggcatttcagggctcagtgggcagctggggcagagcccgtg

SEQ ID NO: 239623 - DNA, 120 bp, Artificial Sequence
  ENSG00000120885_48 (sequence is synthesized)
gcggatgaaggaccagtgtgacaagtgccgggagatcttgtctgtgggtgagtcggggtccagaccacaagccgtcccccctgatcccttgtgtcctggggtcactggggcctcactggt

SEQ ID NO: 239624 - DNA, 120 bp, Artificial Sequence
  ENSG00000120885_49 (sequence is synthesized)
tctttgcgcctgattacttctcatgagaggcactccttgttaatgtgctactgagtgtccagatgggcctgctgggctgagcgggctttggatgtgaaccatttcaggaaggggaacccc

SEQ ID NO: 239625 - DNA, 120 bp, Artificial Sequence
  ENSG00000120889_0 (sequence is synthesized)
agcctggacacataaatcagcacgcggccggagaaccccgcaatctctgcgcccacaaaatacaccgacgatgcccgatctactttaagggctgaaacccacgggcctgagagactataa

SEQ ID NO: 239626 - DNA, 120 bp, Artificial Sequence
  ENSG00000120889_1 (sequence is synthesized)
gagcgttccctaccgccatggaacaacggggacagaacgccccggccgcttcgggggcccggaaaaggcacggcccaggacccagggaggcgcggggagccaggcctgggccccgggtcc

SEQ ID NO: 239627 - DNA, 120 bp, Artificial Sequence
  ENSG00000120889_2 (sequence is synthesized)
ccaagacccttgtgctcgttgtcgccgcggtcctgctgttggtctcagctgagtctgctctgatcacccaacaagacctagctccccagcagagagcggccccacaacaaaagaggtcca

SEQ ID NO: 239628 - DNA, 120 bp, Artificial Sequence
  ENSG00000120889_3 (sequence is synthesized)
gcccctcagagggattgtgtccacctggacaccatatctcagaagacggtagagattgcatctcctgcaaatatggacaggactatagcactcactggaatgacctccttttctgcttgc

SEQ ID NO: 239629 - DNA, 120 bp, Artificial Sequence
  ENSG00000120889_4 (sequence is synthesized)
gctgcaccaggtgtgattcaggtgaagtggagctaagtccctgcaccacgaccagaaacacagtgtgtcagtgcgaagaaggcaccttccgggaagaagattctcctgagatgtgccgga

SEQ ID NO: 239630 - DNA, 120 bp, Artificial Sequence
  ENSG00000120889_5 (sequence is synthesized)
agtgccgcacagggtgtcccagagggatggtcaaggtcggtgattgtacaccctggagtgacatcgaatgtgtccacaaagaatcaggtacaaagcacagtggggaagtcccagctgtgg

SEQ ID NO: 239631 - DNA, 120 bp, Artificial Sequence
  ENSG00000120889_6 (sequence is synthesized)
aggagacggtgacctccagcccagggactcctgcctctccctgttctctctcaggcatcatcataggagtcacagttgcagccgtagtcttgattgtggctgtgtttgtttgcaagtctt

SEQ ID NO: 239632 - DNA, 120 bp, Artificial Sequence
  ENSG00000120889_7 (sequence is synthesized)
tactgtggaagaaagtccttccttacctgaaaggcatctgctcaggtggtggtggggaccctgagcgtgtggacagaagctcacaacgacctggggctgaggacaatgtcctcaatgaga

SEQ ID NO: 239633 - DNA, 120 bp, Artificial Sequence
  ENSG00000120889_8 (sequence is synthesized)
tcgtgagtatcttgcagcccacccaggtccctgagcaggaaatggaagtccaggagccagcagagccaacaggtgtcaacatgttgtcccccggggagtcagagcatctgctggaaccgg

SEQ ID NO: 239634 - DNA, 120 bp, Artificial Sequence
  ENSG00000120889_9 (sequence is synthesized)
cagaagctgaaaggtctcagaggaggaggctgctggttccagcaaatgaaggtgatcccactgagactctgagacagtgcttcgatgactttgcagacttggtgccctttgactcctggg

SEQ ID NO: 239635 - DNA, 120 bp, Artificial Sequence
  ENSG00000120889_10 (sequence is synthesized)
agccgctcatgaggaagttgggcctcatggacaatgagataaaggtggctaaagctgaggcagcgggccacagggacaccttgtacacgatgctgataaagtgggtcaacaaaaccgggc

SEQ ID NO: 239636 - DNA, 120 bp, Artificial Sequence
  ENSG00000120889_11 (sequence is synthesized)
gagatgcctctgtccacaccctgctggatgccttggagacgctgggagagagacttgccaagcagaagattgaggaccacttgttgagctctggaaagttcatgtatctagaaggtaatg

SEQ ID NO: 239637 - DNA, 120 bp, Artificial Sequence
  ENSG00000120889_12 (sequence is synthesized)
cagactctgccatgtcctaagtgtgattctcttcaggaagtcagaccttccctggtttaccttttttctggaaaaagcccaactggactccagtcagtaggaaagtgccacaattgtcac

SEQ ID NO: 239638 - DNA, 120 bp, Artificial Sequence
  ENSG00000120889_13 (sequence is synthesized)
atgaccggtactggaagaaactctcccatccaacatcacccagtggatggaacatcctgtaacttttcactgcacttggcattatttttataagctgaatgtgataataaggacactatg

SEQ ID NO: 239639 - DNA, 120 bp, Artificial Sequence
  ENSG00000120889_14 (sequence is synthesized)
gaaatgtctggatcattccgtttgtgcgtactttgagatttggtttgggatgtcattgttttcacagcacttttttatcctaatgtaaatgctttatttatttatttgggctacattgta

SEQ ID NO: 239640 - DNA, 120 bp, Artificial Sequence
  ENSG00000120889_15 (sequence is synthesized)
acattgtaagatccatctacacagtcgttgtccgacttcacttgatactatatgatatgaaccttttttgggtggggggtgcggggcagttcactctgtctcccaggctggagtgcaatg

SEQ ID NO: 239641 - DNA, 85 bp, Artificial Sequence
  ENSG00000120889_16 (sequence is synthesized)
gtctagatataggggctctctatgttgctcagggtggtctcgaattcctggactcaagcagtctgcccacctcagactcccaaag

SEQ ID NO: 239642 - DNA, 120 bp, Artificial Sequence
  ENSG00000120889_17 (sequence is synthesized)
tcctggactcaagcagtctgcccacctcagactcccaaagcggtggaattagaggcgtgagcccccatgcttggccttacctttctacttttataattctgtatgttattattttatgaa

SEQ ID NO: 239643 - DNA, 120 bp, Artificial Sequence
  ENSG00000120889_18 (sequence is synthesized)
catgaagaaactttagtaaatgtacttgtttacatagttatgtgaatagattagataaacataaaaggaggagacatacaatgggggaagaagaagaagtcccctgtaagatgtcactgt

SEQ ID NO: 239644 - DNA, 120 bp, Artificial Sequence
  ENSG00000120889_19 (sequence is synthesized)
ctgggttccagccctccctcagatgtactttggcttcaatgattggcaacttctacaggggccagtcttttgaactggacaaccttacaagtatatgagtattatttataggtagttgtt

SEQ ID NO: 239645 - DNA, 120 bp, Artificial Sequence
  ENSG00000120889_20 (sequence is synthesized)
tacatatgagtcgggaccaaagagaactggatccacgtgaagtcctgtgtgtggctggtccctacctgggcagtctcatttgcacccatagcccccatctatggacaggctgggacagag

SEQ ID NO: 239646 - DNA, 120 bp, Artificial Sequence
  ENSG00000120889_21 (sequence is synthesized)
gcagatgggttagatcacacataacaatagggtctatgtcatatcccaagtgaacttgagccctgtttgggctcaggagatagaagacaaaatctgtctcccacgtctgccatggcatca

SEQ ID NO: 239647 - DNA, 120 bp, Artificial Sequence
  ENSG00000120889_22 (sequence is synthesized)
agggggaagagtagatggtgcttgagaatggtgtgaaatggttgccatctcaggagtagatggcccggctcacttctggttatctgtcaccctgagcccatgagctgccttttagggtac

SEQ ID NO: 239648 - DNA, 120 bp, Artificial Sequence
  ENSG00000120889_23 (sequence is synthesized)
agattgcctacttgaggaccttggccgctctgtaagcatctgactcatctcagaaatgtcaattcttaaacactgtggcaacaggacctagaatggctgacgcattaaggttttcttctt

SEQ ID NO: 239649 - DNA, 120 bp, Artificial Sequence
  ENSG00000120889_24 (sequence is synthesized)
gtgtcctgttctattattgttttaagacctcagtaaccatttcagcctctttccagcaaacccttctccatagtatttcagtcatggaaggatcatttatgcaggtagtcattccaggag

SEQ ID NO: 239650 - DNA, 120 bp, Artificial Sequence
  ENSG00000120889_25 (sequence is synthesized)
tttttggtcttttctgtctcaaggcattgtgtgttttgttccgggactggtttgggtgggacaaagttagaattgcctgaagatcacacattcagactgttgtgtctgtggagttttagg

SEQ ID NO: 239651 - DNA, 120 bp, Artificial Sequence
  ENSG00000120889_26 (sequence is synthesized)
agtggggggtgacctttctggtctttgcacttccatcctctcccacttccatctggcatcccacgcgttgtcccctgcacttctggaaggcacagggtgctgctgcctcctggtctttgc

SEQ ID NO: 239652 - DNA, 120 bp, Artificial Sequence
  ENSG00000120889_27 (sequence is synthesized)
ctttgctgggccttctgtgcaggacgctcagcctcagggctcagaaggtgccagtccggtcccaggtcccttgtcccttccacagaggccttcctagaagatgcatctagagtgtcagcc

SEQ ID NO: 239653 - DNA, 120 bp, Artificial Sequence
  ENSG00000120889_28 (sequence is synthesized)
tgtcagccttatcagtgtttaagatttttcttttatttttaatttttttgagacagaatctcactctctcgcccaggctggagtgcaacggtacgatcttggctcagtgcaacctccgcc

SEQ ID NO: 239654 - DNA, 89 bp, Artificial Sequence
  ENSG00000120889_29 (sequence is synthesized)
ccaggccaagctattcttttaaagtaagcttcctgacgacatgaaataattgggggttttgttgtttagttacattaggctttgctata

SEQ ID NO: 239655 - DNA, 120 bp, Artificial Sequence
  ENSG00000120889_30 (sequence is synthesized)
ttgggggttttgttgtttagttacattaggctttgctatatccccaggccaaatagcatgtgacacaggacagccatagtatagtgtgtcactcgtggttggtgtcctttcatgcttctg

SEQ ID NO: 239656 - DNA, 120 bp, Artificial Sequence
  ENSG00000120889_31 (sequence is synthesized)
ccctgtcaaaggtccctatttgaaatgtgttataatacaaacaaggaagcacattgtgtacaaaatacttatgtatttatgaatccatgaccaaattaaatatgaaaccttatataaaaa

SEQ ID NO: 239657 - DNA, 120 bp, Artificial Sequence
  ENSG00000120889_32 (sequence is synthesized)
agagattttccaagtgtttgtttttactctagttccccttctcatcccccttcctcagggtgtctctgagttgtaaggccccattctgtccccagccccagggctccttgtccagtgtcc

SEQ ID NO: 239658 - DNA, 120 bp, Artificial Sequence
  ENSG00000120889_33 (sequence is synthesized)
cagcccccagcccagccctgcgccccactgtcctctgggaggggggtgcttcatgggcccctcccttcctgctaaggagactgcttcttttttaggtggtggtggggaccctgagcgtgt

SEQ ID NO: 239659 - DNA, 120 bp, Artificial Sequence
  ENSG00000120889_34 (sequence is synthesized)
cacctggtatgttcaagatgggtctctaatccttgcccctcctccccttgtctccatgagcttccagtctgtttcctttgcacttccttgttctttattccacagagaggcattgggtgc

SEQ ID NO: 239660 - DNA, 120 bp, Artificial Sequence
  ENSG00000120889_35 (sequence is synthesized)
ctccagttcaaggctctgtccttctggagccttcctgctaggatggtatcaagacacacaaatgaatgagacagccaaagaaactgataggaaccttgagagagaattgagtgggacaga

SEQ ID NO: 239661 - DNA, 120 bp, Artificial Sequence
  ENSG00000120889_36 (sequence is synthesized)
tgaacgcggcactgtccttatcttctggctggcgacttttttgttcccagaccaaactgagggtggggctgcccaataatgagatgcaggtgaatctcgctgcccaataagaagatgcag

SEQ ID NO: 239662 - DNA, 120 bp, Artificial Sequence
  ENSG00000120889_37 (sequence is synthesized)
gtcctcatggctgccctgactctctgaagtggcctgggtgctctgggctgactgtgggggacacatggccattttgagcaccacataggctggtgagccctgctgcagcccaggtgacat

SEQ ID NO: 239663 - DNA, 120 bp, Artificial Sequence
  ENSG00000120889_38 (sequence is synthesized)
cctcaccccacagcctgcaccctagggatggggtgtctgcctgagcacagcactgggggcctggccccagcagcgggtcctggatgtgctgagtctgggctgcctgcggtgacctcactg

SEQ ID NO: 239664 - DNA, 120 bp, Artificial Sequence
  ENSG00000120896_0 (sequence is synthesized)
cgcgcgcgccccgacggacggagagcactcgcacgtccctcctctccggcccagccccggcccgcagtccagatccgagacccaaactccgcccgccccgccgcgcgactctcacggtcc

SEQ ID NO: 239665 - DNA, 80 bp, Artificial Sequence
  ENSG00000120896_1 (sequence is synthesized)
ccggcgcccggcccggcccggcccgtcctgacccggtcacgagggccgcgacggcccgcgcttctccttgcccttcctcc

SEQ ID NO: 239666 - DNA, 120 bp, Artificial Sequence
  ENSG00000120896_2 (sequence is synthesized)
tcgagcgcccgcgccaggcagcagccgggcagggatgctcctgcgctcccgggcggcctcgggcccagccacctgctcgccggggaagaggacacgcagaggagcagctggcttgcccgg

SEQ ID NO: 239667 - DNA, 120 bp, Artificial Sequence
  ENSG00000120896_3 (sequence is synthesized)
agtcctcccaccttgacccaagcatgcagggcccaccccgcagcctccgcgctgggctcagcctggacgacttcatccctggccacctccagtcccacatagggtcttcctcccggggga

SEQ ID NO: 239668 - DNA, 120 bp, Artificial Sequence
  ENSG00000120896_4 (sequence is synthesized)
cacgggtgcccgtgatccggaatggtggctccaacacccttaatttccagttccacgaccccgcgcccaggactgtgtgcaatgggggctacacaccaagacgagatgcttcccagcacc

SEQ ID NO: 239669 - DNA, 120 bp, Artificial Sequence
  ENSG00000120896_5 (sequence is synthesized)
cggaccctgcgtggtatcagacctggccaggccctgggagcaagccctctgcaagcacaaagatccctgcctcccagcacacccagaactggtcagccacgtggaccaaggacagcaagc

SEQ ID NO: 239670 - DNA, 120 bp, Artificial Sequence
  ENSG00000120896_6 (sequence is synthesized)
gtcgggacaagcgctgggtcaagtacgagggaatcgggcccgtggacgagagcggcatgcccattgccccccgatccagcgttgacagacccagagactggtaccggagaatgttccagc

SEQ ID NO: 239671 - DNA, 120 bp, Artificial Sequence
  ENSG00000120896_7 (sequence is synthesized)
agattcaccggaaaatgccagacttgcagctggactggaccttcgaggagccacccagagaccccaggcatctaggagcccagcaaagacctgcccacaggcccggcccggcaacatctt

SEQ ID NO: 239672 - DNA, 120 bp, Artificial Sequence
  ENSG00000120896_8 (sequence is synthesized)
ccagtggaagaagctgggaccactctgaagagttacctagaagcaccttcaactacagacctggagcattctccactgtgctgcagccctcaaatcaggtgctcagacgccgggaaaaag

SEQ ID NO: 239673 - DNA, 120 bp, Artificial Sequence
  ENSG00000120896_9 (sequence is synthesized)
tagacaatgtctggacggaagagtcctggaaccagtttctgcaggaactagagactgggcagaggcccaagaaaccgctggtggacgaccctggtgagaagccctcccagcccattgagg

SEQ ID NO: 239674 - DNA, 120 bp, Artificial Sequence
  ENSG00000120896_10 (sequence is synthesized)
tgctgctggagagagagctggccgagctgagcgccgagctggacaaggacctgcgggcaattgagacccgactgccgtcccccaagagctcgccggcgccccgacgggccccggagcagc

SEQ ID NO: 239675 - DNA, 120 bp, Artificial Sequence
  ENSG00000120896_11 (sequence is synthesized)
ggcccccggccggcccggcctcagcctggagctccagctacccacatgcaccttacctgggttccgcccggtccctgagtccccacaaaatggctgatggaggaagccccttcctaggtc

SEQ ID NO: 239676 - DNA, 120 bp, Artificial Sequence
  ENSG00000120896_12 (sequence is synthesized)
ggagggactttgtctacccttcctcaacccgagaccctagtgcctctaacggagggggcagcccagccaggagggaagagaagaagagaaaggccgccaggctcaagtttgacttccagg

SEQ ID NO: 239677 - DNA, 120 bp, Artificial Sequence
  ENSG00000120896_13 (sequence is synthesized)
cgcagtcccccaaggagctgactctgcagaagggtgacattgtctacatccacaaggaggtggacaagaactggctggagggagagcaccacggccgcctgggcatcttccctgctaatt

SEQ ID NO: 239678 - DNA, 120 bp, Artificial Sequence
  ENSG00000120896_14 (sequence is synthesized)
agggggacctggaggtggagctgtccttccgcaagggagagcacatctgcctgatccgcaaggtgaacgagaactggtacgagggacgcatcacgggcacggggcgccaaggcatattcc

SEQ ID NO: 239679 - DNA, 120 bp, Artificial Sequence
  ENSG00000120896_15 (sequence is synthesized)
ctgccagctacgtgcaggtgtctcgtgaaccccggctccggctctgtgacgacggcccccagctccccacgtctccccgcctgaccgctgccgcccgctcagcccgtcaccccagctccc

SEQ ID NO: 239680 - DNA, 120 bp, Artificial Sequence
  ENSG00000120896_16 (sequence is synthesized)
cctcagccctgcgcagcccagctgaccccatcgacttggggggacagacctccccccgtcgcactggcttctccttccccacccaggagcctagaccccagacccagaatcttggcaccc

SEQ ID NO: 239681 - DNA, 120 bp, Artificial Sequence
  ENSG00000120896_17 (sequence is synthesized)
ctggtccagctctgtcccactctcgaggtcccagccatcccctggacctggggacctcctctcctaacacctctcagatacactggaccccgtaccgggcgatgtaccagtacaggcccc

SEQ ID NO: 239682 - DNA, 120 bp, Artificial Sequence
  ENSG00000120896_18 (sequence is synthesized)
agaacgaagacgagctggagctgcgcgagggggacagggtggatgtcatgcagcagtgtgacgatggctggtttgtgggtgtctcccggaggacccagaaattcggaacgttccctggaa

SEQ ID NO: 239683 - DNA, 120 bp, Artificial Sequence
  ENSG00000120896_19 (sequence is synthesized)
attacgttgccccggtgtgagtggtctccatggcaacttggagccagccaggatggggtggggagcggtggcactcgtgggagggagaggacccccgcccacatcctccttccccaggac

SEQ ID NO: 239684 - DNA, 120 bp, Artificial Sequence
  ENSG00000120896_20 (sequence is synthesized)
ctgagctcccagcatctgcagacgacccccgcagcctttccctcggacccccctcgaagccccctggactgattcccacccacgactcacaggcattcctcccacagccctttcatttcc

SEQ ID NO: 239685 - DNA, 120 bp, Artificial Sequence
  ENSG00000120896_21 (sequence is synthesized)
tccccaccccactccccaaatacagaggtctgctttgaagcggagaccatttccaggccttattgagaccagaccccaagtcccccacccccatcctgctccagcgtttcctctaacagg

SEQ ID NO: 239686 - DNA, 120 bp, Artificial Sequence
  ENSG00000120896_22 (sequence is synthesized)
gaccagctctccgctttgcccccacggggttcctctaaccagaaccagcttcctagcctcgtagagaccaaaggccgcccccgcctgctggggttcctcccagcaccccagcttgctggc

SEQ ID NO: 239687 - DNA, 120 bp, Artificial Sequence
  ENSG00000120896_23 (sequence is synthesized)
tgccctctttgccttctggcctccagctgggtgtgggggggcggagcaaggcgggggacagacgcagcaccttcttagcgatctaggcctggcaagagctctggccccaaggcctcctct

SEQ ID NO: 239688 - DNA, 120 bp, Artificial Sequence
  ENSG00000120896_24 (sequence is synthesized)
tcccaggggctgccaagtcctggccctggccctggcatatcaccccgcactgtggggccaggcaccactagcctggctcaaatattccccagggagactgctgtgtgctgcccgcctgcc

SEQ ID NO: 239689 - DNA, 120 bp, Artificial Sequence
  ENSG00000120896_25 (sequence is synthesized)
tgctggctctcccccagccccacatcccctctggaagagaatgtaaaataaacctggacacaagggaccttgtctctgcggccttttccttggggtaggggatgcctcctcctgtctagg

SEQ ID NO: 239690 - DNA, 120 bp, Artificial Sequence
  ENSG00000120896_26 (sequence is synthesized)
agatgggaattccttctgtggagggctgtgctgggagacaggtgggacaggtgtgtgtgtaagaggaggaggatggaaaaacaccattattacctccaaagatctctgcccttgggtgtc

SEQ ID NO: 239691 - DNA, 120 bp, Artificial Sequence
  ENSG00000120896_27 (sequence is synthesized)
aggcaggttgcggcagcccccacaattgggcagctgtgtggcaagaagtgctgggagaatgaacagtgccaggccctggtagcagggagacaccagagatgggggactgaatgtggcctt

SEQ ID NO: 239692 - DNA, 120 bp, Artificial Sequence
  ENSG00000120896_28 (sequence is synthesized)
aggcagaaaagatggcagagggagggtgaacccagggcccatctgtgggtatgggctccaatttcctaaattgtttgtggttataaccatggcttccaccttgtctggcaccgggtccac

SEQ ID NO: 239693 - DNA, 120 bp, Artificial Sequence
  ENSG00000120896_29 (sequence is synthesized)
atcttttctgagacctgctagaaggtcagagccctagagaataagagaagcttgctgctggtgagggggtatggccaggattcctggagtcggaagagcttcagcttcaccatcttggga

SEQ ID NO: 239694 - DNA, 120 bp, Artificial Sequence
  ENSG00000120896_30 (sequence is synthesized)
attgtgcccctgggagccggcaggcacgggcagcctgcaggcgggtgcctggcgtggcctgtttcctgggtccttgagctagtacccagctggtcctgaccccctcccacagccggcccc

SEQ ID NO: 239695 - DNA, 80 bp, Artificial Sequence
  ENSG00000120896_31 (sequence is synthesized)
cccggccgggtgagtgggagacgcgggaggaggaagggggctgtcccaggccgggcgggagggaacgtggcgcggccggg

SEQ ID NO: 239696 - DNA, 120 bp, Artificial Sequence
  ENSG00000120896_32 (sequence is synthesized)
gaaggaaccgcagagccgtgtccgggagggaccgcagcgccactctctgcggggcgccgttcccgcgccaccgagggcagctaactcctagcagaggaccggggtcgcggccgccggggg

SEQ ID NO: 239697 - DNA, 120 bp, Artificial Sequence
  ENSG00000120896_33 (sequence is synthesized)
ttccccgcgcagcgactcgggaagtaggacatcctgtggagagcccaggacccgggagacgccctgggaggaggtggcagggatgggggcgatggggggtcagagcggtctaggggtgac

SEQ ID NO: 239698 - DNA, 120 bp, Artificial Sequence
  ENSG00000120896_34 (sequence is synthesized)
actcccggggcgtgctgggcaggtgagaggccgtggcggggatgccctcttggcaccctgggccacacctcctggcaggagcccggcccgtgcgctgaggcctgcccttacgccggcccg

SEQ ID NO: 239699 - DNA, 120 bp, Artificial Sequence
  ENSG00000120896_35 (sequence is synthesized)
gtgcgctggccttgcttttcacagtcgatctttgaccgctgcctcccacccccacggtgcgctgcccctcactgcccagcctctccccgcccccaggtgctgctggagagagagctggcc

SEQ ID NO: 239700 - DNA, 120 bp, Artificial Sequence
  ENSG00000120896_36 (sequence is synthesized)
gggggcagcccagccaggagggaagagaagaaggtaaggaggggaccaggtgtgggggacctggagtggtcccaaggctgccatcctggatctgccacccgcccaactgagagagcccac

SEQ ID NO: 239701 - DNA, 120 bp, Artificial Sequence
  ENSG00000120896_37 (sequence is synthesized)
gcgcgggcgcctctaggaccccgcgtcccgcccgctctcctcccctcccgagccgcgaacttttccggaggcggcggcctcggctgccgctgggtcccggggtcgcgggccctgattgcg

SEQ ID NO: 239702 - DNA, 120 bp, Artificial Sequence
  ENSG00000120896_38 (sequence is synthesized)
gaaattcccaggcaccttgaggagctaggagtgggtcttggcaaatggggaaggaaagcgtttggaagagggtgcaagtcgagtttccccagcctgagtggtgagggcaagtccacaaag

SEQ ID NO: 239703 - DNA, 120 bp, Artificial Sequence
  ENSG00000120896_39 (sequence is synthesized)
acttgcagctggactggaccttcgaggagccacccagaggtgaggggatgcgggcccacctgcctgccatagccctgcgcctgcgtccgcccctccctggggctgggactcgcagccccg

SEQ ID NO: 239704 - DNA, 120 bp, Artificial Sequence
  ENSG00000120896_40 (sequence is synthesized)
cctggctttggggctctccagttggctcagttcaacctgagaggtttttatagctcatttccagagcacttcaaatcccccgaccccaggcatctaggagcccagcaaagacctgcccac

SEQ ID NO: 239705 - DNA, 120 bp, Artificial Sequence
  ENSG00000120896_41 (sequence is synthesized)
gccagaagaagctgggaccactctgaagagttacctagaagcaccttcaactacagacctggagcattctccactgtgctgcagccctcaaatcaggtgctcagacgccgggaaaaagta

SEQ ID NO: 239706 - DNA, 120 bp, Artificial Sequence
  ENSG00000120896_42 (sequence is synthesized)
ggccctgattgcgccgtttccccgcgcagagctcgccggcgccccgacgggccccggagcagcggcccccggccggaccctagtgcctctaacggagggggcagcccagccaggagggaa

SEQ ID NO: 239707 - DNA, 120 bp, Artificial Sequence
  ENSG00000120896_43 (sequence is synthesized)
gtgggggtgggggctccggtccctggggtggcgggggaacctggatgggcacagtgaagccaggccttggagggcgggagaagatgggagaggaaatggggaaccccattggtgctgtaa

SEQ ID NO: 239708 - DNA, 120 bp, Artificial Sequence
  ENSG00000120896_44 (sequence is synthesized)
cggctgggctgggcggaggacgggcagccgaggtccggcctccagcggcgcgcaccggcctcgggccctcctgggcgctggcgggctcgctcctccataaataaaatacagggcgtcgac

SEQ ID NO: 239709 - DNA, 120 bp, Artificial Sequence
  ENSG00000120896_45 (sequence is synthesized)
tttcgcaagtgaccccgaggagcctttctaagcggactccacgtcagcccgacgaccgggcgcccgccccgtccggcccccgggccccagcctcggggacccccgccccttcccctagtt

SEQ ID NO: 239710 - DNA, 120 bp, Artificial Sequence
  ENSG00000120896_46 (sequence is synthesized)
ggaacgcgcgctctgccactccctggccgggatttctctgggcctccctttcctcatctataagatgagatcatcacctactcggagttgttttgaagatgtagtaaatgtcgtaaagct

SEQ ID NO: 239711 - DNA, 120 bp, Artificial Sequence
  ENSG00000120899_0 (sequence is synthesized)
ccttttactcagccacagcctccggagccgttgcacacctacctgcccggccgacttacctgtacttgccgccgtcccggctcacctggcggtgcccgaggagtagtcgctggagtccgc

SEQ ID NO: 239712 - DNA, 120 bp, Artificial Sequence
  ENSG00000120899_1 (sequence is synthesized)
gcctccctgggactgcaatgtgccgatcttagctgctgcctgagaggatgtctggggtgtccgagcccctgagtcgagtaaagttgggcacgttacgccggcctgaaggccctgcagagc

SEQ ID NO: 239713 - DNA, 120 bp, Artificial Sequence
  ENSG00000120899_2 (sequence is synthesized)
ccatggtggtggtaccagtagatgtggaaaaggaggacgtgcgtatcctcaaggtctgcttctatagcaacagcttcaatcctgggaaaaacttcaaactggtcaaatgcactgtccaga

SEQ ID NO: 239714 - DNA, 120 bp, Artificial Sequence
  ENSG00000120899_3 (sequence is synthesized)
cggagatccgggagatcatcacctccatcctgctgagcgggcggatcgggcccaacatccggttggctgagtgctatgggctgaggctgaagcacatgaagtccgatgagatccactggc

SEQ ID NO: 239715 - DNA, 120 bp, Artificial Sequence
  ENSG00000120899_4 (sequence is synthesized)
tgcacccacagatgacggtgggtgaggtgcaggacaagtatgagtgtctgcacgtggaagccgagtggaggtatgaccttcaaatccgctacttgccagaagacttcatggagagcctga

SEQ ID NO: 239716 - DNA, 120 bp, Artificial Sequence
  ENSG00000120899_5 (sequence is synthesized)
aggaggacaggaccacgctgctctatttttaccaacagctccggaacgactacatgcagcgctacgccagcaaggtcagcgagggcatggccctgcagctgggctgcctggagctcaggc

SEQ ID NO: 239717 - DNA, 120 bp, Artificial Sequence
  ENSG00000120899_6 (sequence is synthesized)
ggttcttcaaggatatgccccacaatgcacttgacaagaagtccaacttcgagctcctagaaaaggaagtggggctggacttgtttttcccaaagcagatgcaggagaacttaaagccca

SEQ ID NO: 239718 - DNA, 120 bp, Artificial Sequence
  ENSG00000120899_7 (sequence is synthesized)
aacagttccggaagatgatccagcagaccttccagcagtacgcctcgctcagggaggaggagtgcgtcatgaagttcttcaacactctcgccggcttcgccaacatcgaccaggagacct

SEQ ID NO: 239719 - DNA, 120 bp, Artificial Sequence
  ENSG00000120899_8 (sequence is synthesized)
accgctgtgaactcattcaaggatggaacattactgtggacctggtcattggccctaaagggatccgccagctgactagtcaggacgcaaagcccacctgcctggccgagttcaagcaga

SEQ ID NO: 239720 - DNA, 120 bp, Artificial Sequence
  ENSG00000120899_9 (sequence is synthesized)
tcaggtccatcaggtgcctcccgctggaggagggccaggcagtacttcagctgggcattgaaggtgccccccaggccttgtccatcaaaacctcatccctagcagaggctgagaacatgg

SEQ ID NO: 239721 - DNA, 120 bp, Artificial Sequence
  ENSG00000120899_10 (sequence is synthesized)
ctgacctcatagacggctactgccggctgcagggtgagcaccaaggctctctcatcatccatcctaggaaagatggtgagaagcggaacagcctgccccagatccccatgctaaacctgg

SEQ ID NO: 239722 - DNA, 120 bp, Artificial Sequence
  ENSG00000120899_11 (sequence is synthesized)
aggcccggcggtcccacctctcagagagctgcagcatagagtcagacatctacgcagagattcccgacgaaaccctgcgaaggcccggaggtccacagtatggcattgcccgtgaagatg

SEQ ID NO: 239723 - DNA, 120 bp, Artificial Sequence
  ENSG00000120899_12 (sequence is synthesized)
tggtcctgaatcgtattcttggggaaggcttttttggggaggtctatgaaggtgtctacacaaatcacaaaggggagaaaatcaatgtagctgtcaagacctgcaagaaagactgcactc

SEQ ID NO: 239724 - DNA, 120 bp, Artificial Sequence
  ENSG00000120899_13 (sequence is synthesized)
tggacaacaaggagaagttcatgagcgaggcagtgatcatgaagaacctcgaccacccgcacatcgtgaagctgatcggcatcattgaagaggagcccacctggatcatcatggaattgt

SEQ ID NO: 239725 - DNA, 120 bp, Artificial Sequence
  ENSG00000120899_14 (sequence is synthesized)
atccctatggggagctgggccactacctggagcggaacaagaactccctgaaggtgctcaccctcgtgctgtactcactgcagatatgcaaagccatggcctacctggagagcatcaact

SEQ ID NO: 239726 - DNA, 120 bp, Artificial Sequence
  ENSG00000120899_15 (sequence is synthesized)
gcgtgcacagggacattgctgtccggaacatcctggtggcctcccctgagtgtgtgaagctgggggactttggtctttcccggtacattgaggacgaggactattacaaagcctctgtga

SEQ ID NO: 239727 - DNA, 120 bp, Artificial Sequence
  ENSG00000120899_16 (sequence is synthesized)
agcagcccttcttctggctggagaacaaggatgtcatcggggtgctggagaaaggagaccggctgcccaagcctgatctctgtccaccggtcctttataccctcatgacccgctgctggg

SEQ ID NO: 239728 - DNA, 120 bp, Artificial Sequence
  ENSG00000120899_17 (sequence is synthesized)
actacgaccccagtgaccggccccgcttcaccgagctggtgtgcagcctcagtgacgtttatcagatggagaaggacattgccatggagcaagagaggaatgctcgctaccgaaccccca

SEQ ID NO: 239729 - DNA, 120 bp, Artificial Sequence
  ENSG00000120899_18 (sequence is synthesized)
aaatcttggagcccacagccttccaggaacccccacccaagcccagccgacctaagtacagaccccctccgcaaaccaacctcctggctccaaagctgcagttccaggttcctgagggtc

SEQ ID NO: 239730 - DNA, 120 bp, Artificial Sequence
  ENSG00000120899_19 (sequence is synthesized)
tgtgtgccagctctcctacgctcaccagccctatggagtatccatctcccgttaactcactgcacaccccacctctccaccggcacaatgtcttcaaacgccacagcatgcgggaggagg

SEQ ID NO: 239731 - DNA, 120 bp, Artificial Sequence
  ENSG00000120899_20 (sequence is synthesized)
acttcatccaacccagcagccgagaagaggcccagcagctgtgggaggctgaaaaggtcaaaatgcggcaaatcctggacaaacagcagaagcagatggtggaggactaccagtggctca

SEQ ID NO: 239732 - DNA, 120 bp, Artificial Sequence
  ENSG00000120899_21 (sequence is synthesized)
ggcaggaggagaagtccctggaccccatggtttatatgaatgataagtccccattgacgccagagaaggaggtcggctacctggagttcacagggcccccacagaagcccccgaggctgg

SEQ ID NO: 239733 - DNA, 120 bp, Artificial Sequence
  ENSG00000120899_22 (sequence is synthesized)
gcgcacagtccatccagcccacagctaacctggaccggactgatgacctggtgtacctcaatgtcatggagctggtgcgggccgtgctggagctcaagaatgagctctgtcagctgcccc

SEQ ID NO: 239734 - DNA, 120 bp, Artificial Sequence
  ENSG00000120899_23 (sequence is synthesized)
ccgagggctacgtggtggtggtgaagaatgtggggctgaccctgcggaagctcatcgggagcgtggatgatctcctgccttccttgccgtcatcttcacggacagagatcgagggcaccc

SEQ ID NO: 239735 - DNA, 120 bp, Artificial Sequence
  ENSG00000120899_24 (sequence is synthesized)
agaaactgctcaacaaagacctggcagagctcatcaacaagatgcggctggcacagcagaacgccgtgacctccctaagtgaggagtgcaagaggcagatgctgacggcttcacacaccc

SEQ ID NO: 239736 - DNA, 120 bp, Artificial Sequence
  ENSG00000120899_25 (sequence is synthesized)
tggctgtggacgccaagaacctgctcgacgctgtggaccaggccaaggttctggccaatctggcccacccacctgcagagtgacggagggtgggggccacctgcctgcgtcttccgcccc

SEQ ID NO: 239737 - DNA, 120 bp, Artificial Sequence
  ENSG00000120899_26 (sequence is synthesized)
tgcctgccatgtacctcccctgccttgctgttggtcatgtgggtcttccagggggaaggccaaggggagtcaccttcccttgccactttgcacgacgccctctccccacccctacccctg

SEQ ID NO: 239738 - DNA, 120 bp, Artificial Sequence
  ENSG00000120899_27 (sequence is synthesized)
gctgtactgctcaggctgcagctggacagaggggactctgggctatggacacagggtgacggtgacaaagatggctcagagggggactgctgctgcctggccactgctccctaagccagc

SEQ ID NO: 239739 - DNA, 120 bp, Artificial Sequence
  ENSG00000120899_28 (sequence is synthesized)
ctggtccatgcagggggctcctgggggtggggaggtgtcacatggtgcccctagctttatatatggacatggcaggccgatttgggaaccaagctattcctttcccttcctcttcggccc

SEQ ID NO: 239740 - DNA, 120 bp, Artificial Sequence
  ENSG00000120899_29 (sequence is synthesized)
tcagatgtcccttgatgcacagagaagctggggaggagctttgttttgggggtcaggcagccagtgagatgagggatgggcctggcattcttgtacagtgtatattgaaatttatttaat

SEQ ID NO: 239741 - DNA, 120 bp, Artificial Sequence
  ENSG00000120899_30 (sequence is synthesized)
gtgagtttggtctggactgacagcatgtgccctcctgagggaggacctggggcacagtccaggaacaagctaattgggagtccaggcacaggatgctgtgttgtcaacaaaccaagcatc

SEQ ID NO: 239742 - DNA, 120 bp, Artificial Sequence
  ENSG00000120899_31 (sequence is synthesized)
agggggaagaagcagagagatgcggccaagataggaccttgggccaaatccgctctcttcctgcccctctttctctttcttcctttactttcccttgcttttccctcttttcttactcct

SEQ ID NO: 239743 - DNA, 120 bp, Artificial Sequence
  ENSG00000120899_32 (sequence is synthesized)
cctctttctctccccaacccccattctcatctgcacccttcttttctcatgtgtttgcataaacattcttttaacttctttctatttgacttgtggttgaattaaaattgtcccatttgc

SEQ ID NO: 239744 - DNA, 120 bp, Artificial Sequence
  ENSG00000120899_33 (sequence is synthesized)
gcagttcccgcctcctcaggtccgggcgggtccctggccggggtagcacggaagggtctcccaggcggcgtagtagggcttccgtgttactggaaacctacttccggctgcaaatgggaa

SEQ ID NO: 239745 - DNA, 120 bp, Artificial Sequence
  ENSG00000120899_34 (sequence is synthesized)
aaggagcctctaccttaaccaatccccgggaacctcaggcccgcggatgggagaaaccagagatgccaacttcctgcttccgaagtagtggctgggtcttaaagcaccgatgtttctgca

SEQ ID NO: 239746 - DNA, 120 bp, Artificial Sequence
  ENSG00000120899_35 (sequence is synthesized)
ttgaatagccctggaagacagaattcttgtctctccaaagatctggcagacttattcccaattataagagatccttgcaaaggaggtgtcttgcttcaccttcaccttccactgtgattg

SEQ ID NO: 239747 - DNA, 120 bp, Artificial Sequence
  ENSG00000120899_36 (sequence is synthesized)
taagttttctgaggcctcgccagccatgcggaactgaataggactagcaacttcatagacggttgtgaagacaagctagacggcagatgaaagttcttggcacagagtgaacacttgata

SEQ ID NO: 239748 - DNA, 120 bp, Artificial Sequence
  ENSG00000120899_37 (sequence is synthesized)
aactatatggcagggagggctggaacggggcttgtttgaagagcaatatgagccagggttatagacctgagtttggggtaagagtggaacatccaaatggaagagtccagcagctgaaag

SEQ ID NO: 239749 - DNA, 120 bp, Artificial Sequence
  ENSG00000120899_38 (sequence is synthesized)
aatggcgggctctcttgatcctctccctgacctggattccaggcctctcggaaaagggggccaggagggggcagggagaggctgcaatcgctgcagattctcactcaggcagcaggacct

SEQ ID NO: 239750 - DNA, 120 bp, Artificial Sequence
  ENSG00000120899_39 (sequence is synthesized)
cgctgacctgccgtcggtggaagtcaaaagcatccccttgcctgaagcaggcactgaaatgttggcctccagctctgggaggtgggcaggacaggcaaggtgtcaggaggggaagatcca

SEQ ID NO: 239751 - DNA, 120 bp, Artificial Sequence
  ENSG00000120899_40 (sequence is synthesized)
tatggccagggtttcggtgagaaggagctggagacccaggaaacagtggcttgtgtctagcttagggagcttttcttcaagtttctgaagaatggggaggacagctctggaacaacagtc

SEQ ID NO: 239752 - DNA, 120 bp, Artificial Sequence
  ENSG00000120899_41 (sequence is synthesized)
cattgacgccagagaaggaggtcggctaccgtgagtgttcccgcccttcttcggggggtttcctcttggcaccttgtgcagagccaccatccttgcccaccgcccagggcagggagcagc

SEQ ID NO: 239753 - DNA, 120 bp, Artificial Sequence
  ENSG00000120899_42 (sequence is synthesized)
ggagtctgtctgcattccctgcagcatcggccatgatttaattcagagcatgtggggcaggccagcttcccctccgctccctccaccccattcctctccctgcctagcaccctgcccttc

SEQ ID NO: 239754 - DNA, 120 bp, Artificial Sequence
  ENSG00000120899_43 (sequence is synthesized)
tctctctcagtggccacatccttaggcccctcctcagatcatccccctcctgcattagtttggaggagctggaaattctctcttcctcatttcctgctctgttggaagctcccgtgggaa

SEQ ID NO: 239755 - DNA, 120 bp, Artificial Sequence
  ENSG00000120899_44 (sequence is synthesized)
aagttaagcagtgccacctgcctgtcccagttcagattcatcttctgtaggcctgagggacagaggagagaaagtgagaggggcagctgagccctcaggctctctccagaagaccctgtt

SEQ ID NO: 239756 - DNA, 120 bp, Artificial Sequence
  ENSG00000120899_45 (sequence is synthesized)
gcaggcagggagggaagagccagcagtaagcccggggcctggaggggtggcattgaggaggaggatgatgacagccatcacagagaactggacacaagtcaggcatgggcctgggaccat

SEQ ID NO: 239757 - DNA, 120 bp, Artificial Sequence
  ENSG00000120899_46 (sequence is synthesized)
ttattatcttctgaggcacagggtgattaggtaacttgtccaaattcacacagctaataattggcaaagttcagatttgaacccaagccttctgactttagggtcccttctgagctcacc

SEQ ID NO: 239758 - DNA, 120 bp, Artificial Sequence
  ENSG00000120899_47 (sequence is synthesized)
agctcaccctcttatcttacaaatgaaaattaaggctcggaatgtgagctgcctagagtggtcacagagctctttggcggcagaggtgagaatagaaggccaggtgtggtggctcacacc

SEQ ID NO: 239759 - DNA, 84 bp, Artificial Sequence
  ENSG00000120899_48 (sequence is synthesized)
caggagtttgagactggattaagaaaattaggcctggtgatgcatgcctgcaagcccagcggctcaggaggccgaggcaggagg

SEQ ID NO: 239760 - DNA, 120 bp, Artificial Sequence
  ENSG00000120899_49 (sequence is synthesized)
tgcctgcaagcccagcggctcaggaggccgaggcaggaggattgcctgagcctagaaggtgaggctacagtgagctgtgatcacgccactgtgctccagcctcggtgcaagccctgcctc

SEQ ID NO: 239761 - DNA, 120 bp, Artificial Sequence
  ENSG00000120899_50 (sequence is synthesized)
gcaccactgcaatccccccatcttgctgggactttgcctttttcttcctataaaagggacaacagtgctgtccctgactactgcaaaaccagggagaccaggaggttccttcccctgccc

SEQ ID NO: 239762 - DNA, 120 bp, Artificial Sequence
  ENSG00000120899_51 (sequence is synthesized)
gcttcctggattcagagttaatttccctgaagtctcctggtggtagaggggaaggggctcatttgatgtcagcaggtacgaagggaagggttggagtgctgagaactgccccccacttgc

SEQ ID NO: 239763 - DNA, 120 bp, Artificial Sequence
  ENSG00000120899_52 (sequence is synthesized)
gtgcacaggtaggggtggagggagtggccagcggtatggaagccaggccttcaccagatcctcaaggcctctgggtagaagcagggcttgtgggtgacacagagcagtgttggaatccca

SEQ ID NO: 239764 - DNA, 120 bp, Artificial Sequence
  ENSG00000120899_53 (sequence is synthesized)
ctagaggatccttctagccttaatagtgtttgattctctcttcatctcccagagaaactcccagttcctcctcaccccggctcccccatactgaccaatctgcatggcctagtcctggta

SEQ ID NO: 239765 - DNA, 120 bp, Artificial Sequence
  ENSG00000120899_54 (sequence is synthesized)
aaagaagagtcctttccaatcgggctggtggtggagttggccacagtggtgcctgcccaggaaagaatcattccgtgcccctggctctccccaactcactggccacctgcgtcttcccct

SEQ ID NO: 239766 - DNA, 120 bp, Artificial Sequence
  ENSG00000120899_55 (sequence is synthesized)
ggctacgtggtggtggtgaaggtgagagcagggctgggttggggaggtggaggcggctcaagtccgccctggaaggaaaggggactgcgcttcctgttggctggcccagcagatcctctt

SEQ ID NO: 239767 - DNA, 120 bp, Artificial Sequence
  ENSG00000120899_56 (sequence is synthesized)
gggggacaagcaccaccccaggagagctcttcccaggggaaacctggctctctccaatagctaggagtggcggccatcctgcccctttctccccccagaatgtggggctgaccctgcgga

SEQ ID NO: 239768 - DNA, 120 bp, Artificial Sequence
  ENSG00000120899_57 (sequence is synthesized)
ccaggaagggcctgcctttgagacttgtcactccctgagatccatcgtggcaccaaatgtttgccgagctccgccctgggagggaggcctgcagcctgggaactgggagacctgggtccc

SEQ ID NO: 239769 - DNA, 120 bp, Artificial Sequence
  ENSG00000120899_58 (sequence is synthesized)
cgcatgtccaaagtcacaacctcttccctcttgactggatccttcctgtgagcattgaaacctgctctactggctatcatcctaaatgacaaatcagtcctctttcaacccacgaccccc

SEQ ID NO: 239770 - DNA, 120 bp, Artificial Sequence
  ENSG00000120899_59 (sequence is synthesized)
gtcttatgccacattttgctgcccttgtggactctgagcttggtgctgcctgttgtctgcctgcccctgacctgaaggacatgcccagctccttctctcatccttgcctctcttttgcat

SEQ ID NO: 239771 - DNA, 120 bp, Artificial Sequence
  ENSG00000120899_60 (sequence is synthesized)
cttcgtaatacatattcactttttaaaaaaggaatggctctttgaagctaatggctatctaaatctttcttttctattgtccagcacagtgtgaataaatacatacaggctatgattcca

SEQ ID NO: 239772 - DNA, 120 bp, Artificial Sequence
  ENSG00000120899_61 (sequence is synthesized)
gggaacctcaggcccgcggatgggagaaaccagagatgccaacttcctgcttccgaagtagtggctgggtcttaaagcaccgaataggactagcaacttcatagacggttgtgaagacaa

SEQ ID NO: 239773 - DNA, 120 bp, Artificial Sequence
  ENSG00000120903_0 (sequence is synthesized)
gtgtgtgtgtgtgagagagagagagaacagcgtgagcctgtgtgcttgtgtgctgagccctcatcccctcctggggccaggcttgggtttcacctgcagaatcgcttgtgctgggctgcc

SEQ ID NO: 239774 - DNA, 120 bp, Artificial Sequence
  ENSG00000120903_1 (sequence is synthesized)
tgggctgtcctcagtggcacctgcatgaagccgttctggctgccagagctggacagccccaggaaaacccacctctctgcagagcttgcccagctgtccccgggaagccaaatgcctctc

SEQ ID NO: 239775 - DNA, 120 bp, Artificial Sequence
  ENSG00000120903_2 (sequence is synthesized)
atgtaagtcttctgctcgacggggtgtctcctaaaccctcactcttcagcctctgtttgaccatgaaatgaagtgactgagctctattctgtacctgccactctatttctggggtgactt

SEQ ID NO: 239776 - DNA, 120 bp, Artificial Sequence
  ENSG00000120903_3 (sequence is synthesized)
ttgtcagctgcccagaatctccaagccaggctggttctctgcatcctttcaatgacctgttttcttctgtaaccacaggttcggtggtgagaggaagcctcgcagaatccagcagaatcc

SEQ ID NO: 239777 - DNA, 120 bp, Artificial Sequence
  ENSG00000120903_4 (sequence is synthesized)
tcacagaatccagcagcagctctgctggggacatggtccatggtgcaacccacagcaaagccctgacctgacctcctgatgctcaggagaagccatgggcccctcctgtcctgtgttcct

SEQ ID NO: 239778 - DNA, 120 bp, Artificial Sequence
  ENSG00000120903_5 (sequence is synthesized)
gtccttcacaaagctcagcctgtggtggctccttctgaccccagcaggtggagaggaagctaagcgcccacctcccagggctcctggagacccactctcctctcccagtcccacggcatt

SEQ ID NO: 239779 - DNA, 120 bp, Artificial Sequence
  ENSG00000120903_6 (sequence is synthesized)
gccgcagggaggctcgcataccgagactgaggaccggctcttcaaacacctcttccggggctacaaccgctgggcgcgcccggtgcccaacacttcagacgtggtgattgtgcgctttgg

SEQ ID NO: 239780 - DNA, 120 bp, Artificial Sequence
  ENSG00000120903_7 (sequence is synthesized)
actgtccatcgctcagctcatcgatgtggatgagaagaaccaaatgatgaccaccaacgtctggctaaaacaggagtggagcgactacaaactgcgctggaaccccactgattttggcaa

SEQ ID NO: 239781 - DNA, 120 bp, Artificial Sequence
  ENSG00000120903_8 (sequence is synthesized)
catcacatctctcagggtcccttctgagatgatctggatccccgacattgttctctacaacaatgcagatggggagtttgcagtgacccacatgaccaaggcccacctcttctccacggg

SEQ ID NO: 239782 - DNA, 120 bp, Artificial Sequence
  ENSG00000120903_9 (sequence is synthesized)
cactgtgcactgggtgcccccggccatctacaagagctcctgcagcatcgacgtcaccttcttccccttcgaccagcagaactgcaagatgaagtttggctcctggacttatgacaaggc

SEQ ID NO: 239783 - DNA, 120 bp, Artificial Sequence
  ENSG00000120903_10 (sequence is synthesized)
caagatcgacctggagcagatggagcagactgtggacctgaaggactactgggagagcggcgagtgggccatcgtcaatgccacgggcacctacaacagcaagaagtacgactgctgcgc

SEQ ID NO: 239784 - DNA, 120 bp, Artificial Sequence
  ENSG00000120903_11 (sequence is synthesized)
cgagatctaccccgacgtcacctacgccttcgtcatccggcggctgccgctcttctacaccatcaacctcatcatcccctgcctgctcatctcctgcctcactgtgctggtcttctacct

SEQ ID NO: 239785 - DNA, 120 bp, Artificial Sequence
  ENSG00000120903_12 (sequence is synthesized)
gccctccgactgcggcgagaagatcacgctgtgcatttcggtgctgctgtcactcaccgtcttcctgctgctcatcactgagatcatcccgtccacctcgctggtcatcccgctcatcgg

SEQ ID NO: 239786 - DNA, 120 bp, Artificial Sequence
  ENSG00000120903_13 (sequence is synthesized)
cgagtacctgctgttcaccatgatcttcgtcaccctgtccatcgtcatcaccgtcttcgtgctcaatgtgcaccaccgctcccccagcacccacaccatgccccactgggtgcggggggc

SEQ ID NO: 239787 - DNA, 120 bp, Artificial Sequence
  ENSG00000120903_14 (sequence is synthesized)
ccttctgggctgtgtgccccggtggcttctgatgaaccggcccccaccacccgtggagctctgccaccccctacgcctgaagctcagcccctcttatcactggctggagagcaacgtgga

SEQ ID NO: 239788 - DNA, 120 bp, Artificial Sequence
  ENSG00000120903_15 (sequence is synthesized)
tgccgaggagagggaggtggtggtggaggaggaggacagatgggcatgtgcaggtcatgtggccccctctgtgggcaccctctgcagccacggccacctgcactctggggcctcaggtcc

SEQ ID NO: 239789 - DNA, 120 bp, Artificial Sequence
  ENSG00000120903_16 (sequence is synthesized)
acattgccgaccacctgcggtctgaggatgctgactcttcggtgaaggaggactggaagtatgttgccatggtcatcgacaggatcttcctctggctgtttatcatcgtctgcttcctgg

SEQ ID NO: 239790 - DNA, 120 bp, Artificial Sequence
  ENSG00000120903_17 (sequence is synthesized)
ggaccatcggcctctttctgcctccgttcctagctggaatgatctgactgcacctccctcgagctggctcccagggcacccccgctgaccatcttttgaccgtctctgctacagctgcct

SEQ ID NO: 239791 - DNA, 120 bp, Artificial Sequence
  ENSG00000120903_18 (sequence is synthesized)
ctggtgtcccctttgggatgagcaggtgcctctccgcggagtctggacactgacccagggattgcaggcttccatccagcttaacgttattgtaccagggctgacagcctgctgggtgca

SEQ ID NO: 239792 - DNA, 120 bp, Artificial Sequence
  ENSG00000120903_19 (sequence is synthesized)
aagccctgttttggatacggaggagctggggaagctctgcagaaggtcgcaatagtgtggtgaccaagtggggcagagtaagattctcctggaggagcagtgcagaccctaagtgacaga

SEQ ID NO: 239793 - DNA, 120 bp, Artificial Sequence
  ENSG00000120903_20 (sequence is synthesized)
agggtcaaccagggggacagtggggccagggtgacgaggaagggaatgcagacctcaaaggaggggccgtgggggcaaaggggagggttcttggatgtggaagggctttgaacaatgttt

SEQ ID NO: 239794 - DNA, 120 bp, Artificial Sequence
  ENSG00000120903_21 (sequence is synthesized)
agatttggagatgagcccaaagtgccagggagaacagccaggtgaggtgggaggttggagagccaggtgaggtctctgtaagtcaggctggggttgaagtttggagtctgtccgagtttg

SEQ ID NO: 239795 - DNA, 120 bp, Artificial Sequence
  ENSG00000120903_22 (sequence is synthesized)
cagggtgctgagctgtatggtccagcaggggagtaataagggctcttctggaaggggaggaagcgggaggcagggcctgcacctgatgtggaggtacagggcagatcttccctaccgggg

SEQ ID NO: 239796 - DNA, 120 bp, Artificial Sequence
  ENSG00000120903_23 (sequence is synthesized)
agggatggatggttggatacaggtggctgggctattccatccatctggaagcacatttgagcctccaggcttctccttgacgtcattcctctccttccttgctgcaaaatggctctgcac

SEQ ID NO: 239797 - DNA, 120 bp, Artificial Sequence
  ENSG00000120903_24 (sequence is synthesized)
cagccggcccccaggaggtctggcagagctgagagccatggcctgcaggggctccatatgtccctacgcgtgcagcaggcaaacaagaaagaccatcctgagctgctcctgacccacctc

SEQ ID NO: 239798 - DNA, 120 bp, Artificial Sequence
  ENSG00000120903_25 (sequence is synthesized)
aaactcatctcatttggcctgtcctccctcccttcacccctccttccctccccaggaaccctgttccctgtgcctggctccatcaggaggaggcctcacttgggagttgaagatctttgc

SEQ ID NO: 239799 - DNA, 120 bp, Artificial Sequence
  ENSG00000120903_26 (sequence is synthesized)
ctttagttcctttgattctgaacttctcaaaggcaggtactctgcctgttatttttcccacccccagcacctagcacagcgccgggtgagtggggtcagcacttagggcgtttgttctga

SEQ ID NO: 239800 - DNA, 120 bp, Artificial Sequence
  ENSG00000120903_27 (sequence is synthesized)
gtggttgaggggagcaagctggattgtttgggccccaggactgttgtgtagatggcaaagctgtggtcccgtcccttatcagcctgcctcgtctctcccagagccccgaggtgtgttgac

SEQ ID NO: 239801 - DNA, 120 bp, Artificial Sequence
  ENSG00000120903_28 (sequence is synthesized)
ctgctctgaacccttcagagcagcctgtgtgtgcaccttggaatgcaatgcaccaccccacagtctgaggctgcacccaggatcccaggccgagctgctgctcctgggatcgggcaacag

SEQ ID NO: 239802 - DNA, 120 bp, Artificial Sequence
  ENSG00000120903_29 (sequence is synthesized)
acctccccccaactctgtccagactggagggtgggacattggcagctaacagatgtgggcatcgggttctcgggacagcatggaggctccaggcaggaagccgagcagggcgagcttcca

SEQ ID NO: 239803 - DNA, 120 bp, Artificial Sequence
  ENSG00000120903_30 (sequence is synthesized)
gtttccttttggtcctaggggtcccctccttccaaaccccaaaatgtctctccctgacactctcaggggaaaccagcctggctgtgacgccctggcccaggccctgccatgcctcacttc

SEQ ID NO: 239804 - DNA, 120 bp, Artificial Sequence
  ENSG00000120903_31 (sequence is synthesized)
tctcccacaacccccctgctcatggcacatctggtctctggctcctgtctactcgtgtgcatgcagcccccagcgccccctctcctcccacttgctctccggaggcctcagagctctcgg

SEQ ID NO: 239805 - DNA, 120 bp, Artificial Sequence
  ENSG00000120903_32 (sequence is synthesized)
gtccaggctcccagacccactctcctgagacagtgatgttcacttctgttatccatgtctcccatccatcttgcatgtgaataaagagattaaataaagctgcacctactgctgactcaa

SEQ ID NO: 239806 - DNA, 120 bp, Artificial Sequence
  ENSG00000120903_33 (sequence is synthesized)
caaagctcagcctgtggtggctccttctgaccccagcagatgagcaaactgaggctcagtgaggctgagtggctctgatttgatggcaggtggagaggaagctaagcgcccacctcccag

SEQ ID NO: 239807 - DNA, 120 bp, Artificial Sequence
  ENSG00000120903_34 (sequence is synthesized)
gaaggagatcccagaccacccaccgctttccccctgctccttcctctaccccagccctgccctcacgcacagcagtgacttggggtggggttggggatggctcttcccagggcggctacg

SEQ ID NO: 239808 - DNA, 120 bp, Artificial Sequence
  ENSG00000120903_35 (sequence is synthesized)
tgacctgttttcttctgtaaccacaggatgcatgaccctaagagccctttcttgggcttgctcaggttcggtggtgagaggaagcctcgcagaatccagcagaatcctcacagaatccag

SEQ ID NO: 239809 - DNA, 120 bp, Artificial Sequence
  ENSG00000120903_36 (sequence is synthesized)
acctgccactctatttctggggtgacttttgtcagctgcccagaatctccaagccaggctggttctctgcatcctttcaatgacctgttttcttctgtaaccacagacctcagtcctgat

SEQ ID NO: 239810 - DNA, 120 bp, Artificial Sequence
  ENSG00000120903_37 (sequence is synthesized)
aatttgactattctaggaacatcctataaaaggaatcataatgtctttgtctttttgtaactggcttattttacatagcataatgccctcaagtttcatccacgttgtagcatgggtcag

SEQ ID NO: 239811 - DNA, 120 bp, Artificial Sequence
  ENSG00000120903_38 (sequence is synthesized)
aatttctgtcctttttaaggacaaataatattccactgtatggatagaccacatttgttcaaccattcatctgtcgctggataccggagttgcttccactttttacacagctgattgatg

SEQ ID NO: 239812 - DNA, 120 bp, Artificial Sequence
  ENSG00000120903_39 (sequence is synthesized)
cacagtgggccaggattcgccatgcacaggaggagacaggagtactcatctgatactagagaaaaggaggcttcaccggaaaatcaaagagcttgcccagctgtccccgggaagccaaat

SEQ ID NO: 239813 - DNA, 120 bp, Artificial Sequence
  ENSG00000120903_40 (sequence is synthesized)
acttgctcagagcccgttcccagcaccgcagctccctccactattctgggctgggtggggagccctggctgctccaagggggctgcttggcccaattctgggcatccccggggtgtgcta

SEQ ID NO: 239814 - DNA, 120 bp, Artificial Sequence
  ENSG00000120903_41 (sequence is synthesized)
gctttgccctaggctgctccctggaagcgaggttgacacaactccttccccacacacaggagtggagcgactacaaactgcgctggaaccccactgattttggcaacatcacatctctca

SEQ ID NO: 239815 - DNA, 120 bp, Artificial Sequence
  ENSG00000120903_42 (sequence is synthesized)
gttaatagatggggtgatgtcaagatcacagtgggccaggattcgccatgcacaggaggagacaggagtactcatctgatactagagaaaaggaggcttcaccggaaaatcaaaggttcg

SEQ ID NO: 239816 - DNA, 120 bp, Artificial Sequence
  ENSG00000120907_0 (sequence is synthesized)
gaattccgaatcatgtgcagaatgctgaatcttcccccagccaggacgaataagacagcgcggaaaagcagattctcgtaattctggaattgcatgttgcaaggagtctcctggatcttc

SEQ ID NO: 239817 - DNA, 120 bp, Artificial Sequence
  ENSG00000120907_1 (sequence is synthesized)
gcacccagcttcgggtagggagggagtccgggtcccgggctaggccagcccggcaggtggagagggtccccggcagccccgcgcgcccctggccatgtctttaatgccctgccccttcat

SEQ ID NO: 239818 - DNA, 120 bp, Artificial Sequence
  ENSG00000120907_2 (sequence is synthesized)
gtggccttctgagggttcccagggctggccagggttgtttcccacccgcgcgcgcgctctcacccccagccaaacccacctggcagggctccctccagccgagaccttttgattcccggc

SEQ ID NO: 239819 - DNA, 120 bp, Artificial Sequence
  ENSG00000120907_3 (sequence is synthesized)
tcccgcgctcccgcctccgcgccagcccgggaggtggccctggacagccggacctcgcccggccccggctgggaccatggtgtttctctcgggaaatgcttccgacagctccaactgcac

SEQ ID NO: 239820 - DNA, 120 bp, Artificial Sequence
  ENSG00000120907_4 (sequence is synthesized)
ccaaccgccggcaccggtgaacatttccaaggccattctgctcggggtgatcttggggggcctcattcttttcggggtgctgggtaacatcctagtgatcctctccgtagcctgtcaccg

SEQ ID NO: 239821 - DNA, 120 bp, Artificial Sequence
  ENSG00000120907_5 (sequence is synthesized)
acacctgcactcagtcacgcactactacatcgtcaacctggcggtggccgacctcctgctcacctccacggtgctgcccttctccgccatcttcgaggtcctaggctactgggccttcgg

SEQ ID NO: 239822 - DNA, 120 bp, Artificial Sequence
  ENSG00000120907_6 (sequence is synthesized)
cagggtcttctgcaacatctgggcggcagtggatgtgctgtgctgcaccgcgtccatcatgggcctctgcatcatctccatcgaccgctacatcggcgtgagctacccgctgcgctaccc

SEQ ID NO: 239823 - DNA, 120 bp, Artificial Sequence
  ENSG00000120907_7 (sequence is synthesized)
aaccatcgtcacccagaggaggggtctcatggctctgctctgcgtctgggcactctccctggtcatatccattggacccctgttcggctggaggcagccggcccccgaggacgagaccat

SEQ ID NO: 239824 - DNA, 120 bp, Artificial Sequence
  ENSG00000120907_8 (sequence is synthesized)
ctgccagatcaacgaggagccgggctacgtgctcttctcagcgctgggctccttctacctgcctctggccatcatcctggtcatgtactgccgcgtctacgtggtggccaagagggagag

SEQ ID NO: 239825 - DNA, 120 bp, Artificial Sequence
  ENSG00000120907_9 (sequence is synthesized)
cggggcctcaagtctggcctcaagaccgacaagtcggactcggagcaagtgacgctccgcatccatcggaaaaacgccccggcaggaggcagcgggatggccagcgccaagaccaagacg

SEQ ID NO: 239826 - DNA, 120 bp, Artificial Sequence
  ENSG00000120907_10 (sequence is synthesized)
cacttctcagtgaggctcctcaagttctcccgggagaagaaagcggccaaaacgctgggcatcgtggtcggctgcttcgtcctctgctggctgccttttttcttagtcatgcccattggg

SEQ ID NO: 239827 - DNA, 120 bp, Artificial Sequence
  ENSG00000120907_11 (sequence is synthesized)
tctttcttccctgatttcaagccctctgaaacagtttttaaaatagtattttggctcggatatctaaacagctgcatcaaccccatcatatacccatgctccagccaagagttcaaaaag

SEQ ID NO: 239828 - DNA, 120 bp, Artificial Sequence
  ENSG00000120907_12 (sequence is synthesized)
gcctttcagaatgtcttgagaatccagtgtctctgcagaaagcagtcttccaaacatgccctgggctacaccctgcacccgcccagccaggccgtggaagggcaacacaaggacatggtg

SEQ ID NO: 239829 - DNA, 120 bp, Artificial Sequence
  ENSG00000120907_13 (sequence is synthesized)
cgcatccccgtgggatcaagagagaccttctacaggatctccaagacggatggcgtttgtgaatggaaatttttctcttccatgccccgtggatctgccaggattacagtgtccaaagac

SEQ ID NO: 239830 - DNA, 120 bp, Artificial Sequence
  ENSG00000120907_14 (sequence is synthesized)
caatcctcctgtaccacagcccgggtgagaagtaaaagctttttgcaggtctgctgctgtgtagggccctcaacccccagccttgacaagaaccatcaagttccaaccattaaggtccac

SEQ ID NO: 239831 - DNA, 120 bp, Artificial Sequence
  ENSG00000120907_15 (sequence is synthesized)
accatctccctcagtgagaacggggaggaagtctaggacaggaaagatgcagaggaaaggggaataatcttaggtacccaccccacttccttctcggaaggccagctcttcttggaggac

SEQ ID NO: 239832 - DNA, 120 bp, Artificial Sequence
  ENSG00000120907_16 (sequence is synthesized)
aagacaggaccaatcaaagaggggacctgctgggaatggggtgggtggtagacccaactcatcaggcagcgggtagggcacagggaagagggagggtgtctcacaaccaaccagttcaga

SEQ ID NO: 239833 - DNA, 120 bp, Artificial Sequence
  ENSG00000120907_17 (sequence is synthesized)
atgatacggaacagcatttccctgcagctaatgctttcttggtcactctgtgcccacttcaacgaaaaccaccatgggaaacagaatttcatgcacaatccaaaagactataaatatagg

SEQ ID NO: 239834 - DNA, 120 bp, Artificial Sequence
  ENSG00000120907_18 (sequence is synthesized)
attatgatttcatcatgaatattttgagcacacactctaagtttggagctatttcttgatggaagtgaggggattttattttcaggctcaacctactgacagccacatttgacatttatg

SEQ ID NO: 239835 - DNA, 120 bp, Artificial Sequence
  ENSG00000120907_19 (sequence is synthesized)
gagttacgtcagcgagagctgcaaagttccttgctattcttttctggtgtcggggagctgaatattaaaagggtgattgtggagttaccggttatctgcatttttttttcttttcttatt

SEQ ID NO: 239836 - DNA, 120 bp, Artificial Sequence
  ENSG00000120907_20 (sequence is synthesized)
ttgactctttttaaaaaatgcaggtaaagtgacagcggttcaggagcttaaagacatcagtggtggaggggtgagtcagcgggtgcaaaaggacaaggatttggtgcctcggagacacgg

SEQ ID NO: 239837 - DNA, 120 bp, Artificial Sequence
  ENSG00000120907_21 (sequence is synthesized)
tcccctctccgcctccagagaagagcaggcaggcagctcccgggaccgaagccgggtccacatcccccgcgcgcgagctggtggctcagcagcggcgcttcaggtggacgcggtcaaacg

SEQ ID NO: 239838 - DNA, 120 bp, Artificial Sequence
  ENSG00000120907_22 (sequence is synthesized)
atgccccgcagcctcctgggtctcagcacatattccacacctacgtcccctgacctgtgctcctagaagctggagagagcaggagccttcggtggggcagctcaaaatgtaggtaactgc

SEQ ID NO: 239839 - DNA, 120 bp, Artificial Sequence
  ENSG00000120907_23 (sequence is synthesized)
atttttagagcaagtcctgaaactccaccctttctgatacatccaatttctcagcttgagggaaacttggcagtgaggtttacctttgactgcactttgaatggatgctgctcctcattt

SEQ ID NO: 239840 - DNA, 120 bp, Artificial Sequence
  ENSG00000120907_24 (sequence is synthesized)
cccaaagatgagagtgaggggcactcatgatgtcttggaatgtagtgttctctatccttgggtcaggagagggttgaaagaaccaaccagggtggtatggcttttcccaagagaaaacaa

SEQ ID NO: 239841 - DNA, 120 bp, Artificial Sequence
  ENSG00000120907_25 (sequence is synthesized)
tagacctgagcatcattctttcaatttaactactagagagaaaatccattaaacagttccaagatcagatgatgataggctttctctctaatatctttaaagagcaagaggttggtgtgg

SEQ ID NO: 239842 - DNA, 120 bp, Artificial Sequence
  ENSG00000120907_26 (sequence is synthesized)
ctgttaatttcttgcaaagatagaggctgttcacttactgcacagccatttcaacatggcttacaaaagcctttcttgacaaatcacttacctgttccagaactctgttatgaaaatcca

SEQ ID NO: 239843 - DNA, 120 bp, Artificial Sequence
  ENSG00000120907_27 (sequence is synthesized)
gagcttataatattttgaaaggcaaaagattgtctcccattacttcttatctgcttcactattgcataatgaatgagcttcacctgtggcatgttggaatgagccttatgatccaagtac

SEQ ID NO: 239844 - DNA, 120 bp, Artificial Sequence
  ENSG00000120907_28 (sequence is synthesized)
attattcccgaactttgaaaaatactaatgcttagcttcagacaatactgatggatcaccaaagaactgtctaacgcaggagtttgcaaacattttttgatagaaggccatttgttctgg

SEQ ID NO: 239845 - DNA, 120 bp, Artificial Sequence
  ENSG00000120907_29 (sequence is synthesized)
taaaagatccagtagtcaactcaacttcatctattcctacttttctgcaagagcttggggaacatgctatattttgctttatgtataccaaattttggtaaaccataataactcagtaca

SEQ ID NO: 239846 - DNA, 120 bp, Artificial Sequence
  ENSG00000120907_30 (sequence is synthesized)
ggcgtgagccaccgtgcccggcccaactattttttttttttatcttttttaacagtgcaatcctttctgtggatgaaatcttgctcagaagctcaatatgcaaaagaaagaaaaacagca

SEQ ID NO: 239847 - DNA, 120 bp, Artificial Sequence
  ENSG00000120907_31 (sequence is synthesized)
tcaatatgcaaaagaaagaaaaacagcagggctggacggatgttgggagtggggtaagaccccaaccactcagaaccacccccccaacacacacacacattctctccatggtgactggtg

SEQ ID NO: 239848 - DNA, 120 bp, Artificial Sequence
  ENSG00000120907_32 (sequence is synthesized)
aggggcctctagagggtacatagtacaccatggagcacggtttaagcaccactggactacacattcttctgtggcagttatcttaccttcccatagacacccagcccatagccattggtt

SEQ ID NO: 239849 - DNA, 120 bp, Artificial Sequence
  ENSG00000120907_33 (sequence is synthesized)
cagcttcccgtccacgactgttgtccttactgcccaaggaaggggagcatgaaacccaccactggtcctgcgacccactgtctttggaatccaccccaggagcccaggagccttgcctga

SEQ ID NO: 239850 - DNA, 120 bp, Artificial Sequence
  ENSG00000120907_34 (sequence is synthesized)
cacttggatttacttctttatcaagcatccatctgactaaggcacaaatccaacatgttactgttactgatacaggaaaaacagtaacttaaggaatgatcatgaatgcaaagggaaaga

SEQ ID NO: 239851 - DNA, 120 bp, Artificial Sequence
  ENSG00000120907_35 (sequence is synthesized)
ggaaaagagccttcagggacaaatagctcgattttttgtaaatcagtttcatacaacctccctcccccatttcattcttaaaagttaattgagaatcatcagccacgtgtagggtgtgag

SEQ ID NO: 239852 - DNA, 120 bp, Artificial Sequence
  ENSG00000120907_36 (sequence is synthesized)
aagaaggaaaaaatgactcacccagctttaaacaaccagttcaccatgcagcagtgctggggttggaggtgatggagaaggaaaatttggaaggtgtttcaaggaaagacacctgtgggg

SEQ ID NO: 239853 - DNA, 120 bp, Artificial Sequence
  ENSG00000120907_37 (sequence is synthesized)
tttggtgaccagttggaatgtaagaggcaaaaaaaagggagaaggaactagatacatattcttctggcaggaactgttaattgggttcctgctcccatcttgcactacagtgagagagat

SEQ ID NO: 239854 - DNA, 120 bp, Artificial Sequence
  ENSG00000120907_38 (sequence is synthesized)
aacctggtctcctaccattggaaagcatatcatctgtgctctggaggatgagacaatcaaagaaaacaagtaaataagaaaacttaaaaactgtgatatgtaccgtgaaataaataagcc

SEQ ID NO: 239855 - DNA, 120 bp, Artificial Sequence
  ENSG00000120907_39 (sequence is synthesized)
gtccctgcagccctgtgaacaactttgacaacctcctgcaccaaattctcaacaatgtttccatcccagtctcagggcacagagagcctggtgggttccttccacaccacactctctacc

SEQ ID NO: 239856 - DNA, 88 bp, Artificial Sequence
  ENSG00000120907_40 (sequence is synthesized)
gatggctcactgcagcctagaaccctgggttcaagtgatcctctcttctcagcctcctgagtagttggaactacagacatgcaccacc

SEQ ID NO: 239857 - DNA, 120 bp, Artificial Sequence
  ENSG00000120907_41 (sequence is synthesized)
tcagcctcctgagtagttggaactacagacatgcaccaccgtgcccagccaatcttcaggcattcctaccactcttgttgagagagagggctcagaacaaatgccaactgcctctttcca

SEQ ID NO: 239858 - DNA, 120 bp, Artificial Sequence
  ENSG00000120907_42 (sequence is synthesized)
ctcctcctttccagagtggcatccaccttctatggaatagcaaagccaagtggacagcagagagagagagaggcagagagagagagagaggcagagagagagagaggtttactaagaaaa

SEQ ID NO: 239859 - DNA, 120 bp, Artificial Sequence
  ENSG00000120907_43 (sequence is synthesized)
gaataaagatgaggaatattttaaaatattataatccttatacatatttaaaactatcttttccacttggttatttgcattttgttgttttatggtttttgcaaatgtttagacatttaa

SEQ ID NO: 239860 - DNA, 120 bp, Artificial Sequence
  ENSG00000120907_44 (sequence is synthesized)
aatatttatatagtcaaatattttcatgttttttcattgaatgtgccttctcagggatgctcagagagaccttccacaatgtaagtctgtttcctcctcattcttttagagcatcatttg

SEQ ID NO: 239861 - DNA, 120 bp, Artificial Sequence
  ENSG00000120907_45 (sequence is synthesized)
tgcactaggctgcgggagaggaaagagattaaaaactgaaaccagggcagggatgagtgtgctatccacagctgagaagtgaaacacccatgtttaatagggactgacccaggaaaatca

SEQ ID NO: 239862 - DNA, 120 bp, Artificial Sequence
  ENSG00000120907_46 (sequence is synthesized)
gaattttatgatgccaccgtggagaaagggttcagaatgctgatctccaggtagctggagacctaggcagtctgcaaatgaggagtcagctggaagctatggctatgtattatgtgacat

SEQ ID NO: 239863 - DNA, 120 bp, Artificial Sequence
  ENSG00000120907_47 (sequence is synthesized)
cgcttgttcctaagtgaaaactggatatcccaaccttctggcccagtaggtttcatggttaagacctggtagtgagaacattttaggaactatttgcttgggcaggcaatttttcactct

SEQ ID NO: 239864 - DNA, 120 bp, Artificial Sequence
  ENSG00000120907_48 (sequence is synthesized)
agtgtttggagaaagaagaccaaaagcatcatctcacagggagcagaatgtgaccagcctggctaatgaggaaatgagagggatcctcaacttgagaacccgctctactgaagtctgaac

SEQ ID NO: 239865 - DNA, 120 bp, Artificial Sequence
  ENSG00000120907_49 (sequence is synthesized)
ttggaaaaatggacacattgggtttggagtaagaattcttactctacaaaaggataaaattgtgatcacattgatgcatgatgcctaggatattaaaaatgcatgattaattaaatgtta

SEQ ID NO: 239866 - DNA, 120 bp, Artificial Sequence
  ENSG00000120910_0 (sequence is synthesized)
cacgagggcccgggccgcgagcagccgcggccgtcccggtcgccacccttagcagcggtcgcggtcggtgccgaagcggtgttccccgccttagccgctggcgcctcccaagagagcggc

SEQ ID NO: 239867 - DNA, 120 bp, Artificial Sequence
  ENSG00000120910_1 (sequence is synthesized)
cggtgggccctcgtcctgtcagtggcgtcggaggccggcgctgcggtggccgcgcccttctggtgctcggacaccgctgaggagccggggccgggcacggctggctgacggctccgggca

SEQ ID NO: 239868 - DNA, 120 bp, Artificial Sequence
  ENSG00000120910_2 (sequence is synthesized)
gctaaggctgcccgaggagaaggcggcggccgcggcgtaggcgcacgtccggcgggctcctggagcctggaggaggccgaggggaccatgtccgggaggcgcttccacctctccaccacc

SEQ ID NO: 239869 - DNA, 120 bp, Artificial Sequence
  ENSG00000120910_3 (sequence is synthesized)
gaccgcgtcatcaaagctgtcccctttcctccaacccaacggcttactttcaaggaagtatttgagaatgggaaacctaaagttgatgttttaaaaaaccatttggtaaaggaaggacga

SEQ ID NO: 239870 - DNA, 120 bp, Artificial Sequence
  ENSG00000120910_4 (sequence is synthesized)
ctggaagaggaagtagccttaaagataatcaatgatggggctgccatcctgaggcaagagaagactatgatagaagtagatgctccaatcacagtatgtggtgatattcatggacaattc

SEQ ID NO: 239871 - DNA, 120 bp, Artificial Sequence
  ENSG00000120910_5 (sequence is synthesized)
tttgacctaatgaagttatttgaagttggaggatcacctagtaacacacgctacctctttctgggtgactatgtggacagaggctatttcagtatagagtgtgtgctgtatttatggagt

SEQ ID NO: 239872 - DNA, 120 bp, Artificial Sequence
  ENSG00000120910_6 (sequence is synthesized)
ttaaagattaatcatcccaaaacattgtttctgcttcggggaaatcatgaatgcaggcatcttacagactatttcaccttcaaacaggaatgtcgaatcaaatattcggaacaggtgtat

SEQ ID NO: 239873 - DNA, 120 bp, Artificial Sequence
  ENSG00000120910_7 (sequence is synthesized)
gatgcctgtatggagacatttgactgtcttcctcttgctgccctcttaaaccagcagtttctctgtgtacatggaggaatgtcacctgaaattacttctttagatgacattaggaaatta

SEQ ID NO: 239874 - DNA, 120 bp, Artificial Sequence
  ENSG00000120910_8 (sequence is synthesized)
gacaggtttacggaacctcccgcctttggacctgtgtgtgacctgctttggtctgatccctcagaggattatggcaatgagaagaccttggagcactatacccacaacactgtccgaggg

SEQ ID NO: 239875 - DNA, 120 bp, Artificial Sequence
  ENSG00000120910_9 (sequence is synthesized)
ttgtgaatttttgcagaacaataatttactatcaattatcagagcccatgaagcccaagatgctgggtatcgaatgtacaggaagagccaagccacaggctttccatcacttattacaat

SEQ ID NO: 239876 - DNA, 120 bp, Artificial Sequence
  ENSG00000120910_10 (sequence is synthesized)
tttctctgcccccaattacctagatgtctataacaataaagctgctgtgttgaaatatgaaaacaatgtcatgaatatcaggcagtttaactgttctccacacccctactggcttccaaa

SEQ ID NO: 239877 - DNA, 120 bp, Artificial Sequence
  ENSG00000120910_11 (sequence is synthesized)
ctttatggatgttttcacatggtctttgccttttgttggggaaaaagtcacagagatgctggtaaatgtgctcaacatatgctctgatgacgaactgatttctgatgatgaagcagaagg

SEQ ID NO: 239878 - DNA, 120 bp, Artificial Sequence
  ENSG00000120910_12 (sequence is synthesized)
aagcactacagttcgtaaggagatcatcaggaataagatcagagccattgggaagatggcacgggtcttttcaattcttcggcaagaaagtgagagtgtgctgactctcaagggcctgac

SEQ ID NO: 239879 - DNA, 120 bp, Artificial Sequence
  ENSG00000120910_13 (sequence is synthesized)
tcccacaggcacactccctctgggcgtcctctcaggaggcaagcagactatcgagacagccacagtagaagcggtagaggcccgggaagccatcagagggttctcgcttcagcacaagat

SEQ ID NO: 239880 - DNA, 120 bp, Artificial Sequence
  ENSG00000120910_14 (sequence is synthesized)
ccggagttttgaagaagcgcgaggtctggaccgaattaatgagcgaatgccaccccgaaaggatagcatacacgctggtgggccaatgaaatctgtaacctcagcacactcacatgctgc

SEQ ID NO: 239881 - DNA, 120 bp, Artificial Sequence
  ENSG00000120910_15 (sequence is synthesized)
gcacaggagcgaccaagggaagaaagcccattcatgacttagagtcctgccgtggctcaggtggatctaaaactcaagaacaaattctatttatttattattggaaaatgaaaagcaact

SEQ ID NO: 239882 - DNA, 120 bp, Artificial Sequence
  ENSG00000120910_16 (sequence is synthesized)
caaaacaacttcaacgtggaggtgcatttataattcagtctgcatttattctgtaaaaaggtggctgttttataaattcttttaatttatgttcaatatatataaaaagtgcatctgttt

SEQ ID NO: 239883 - DNA, 120 bp, Artificial Sequence
  ENSG00000120910_17 (sequence is synthesized)
tgtttttcccttttttctccataattttaagaaatgaatctgattgttgtcaacacatttgtgaagtcttgtgctataaaggggaacttcccctaataaaagggccttggaaacctcaaa

SEQ ID NO: 239884 - DNA, 120 bp, Artificial Sequence
  ENSG00000120910_18 (sequence is synthesized)
gaggtattgttaacctattatccacaacttttcaaaagtatctttacaaagataattgtgctttcaaatcatctaaaataaatggctctaaagtagcttcatattctcctggcctatatc

SEQ ID NO: 239885 - DNA, 120 bp, Artificial Sequence
  ENSG00000120910_19 (sequence is synthesized)
tataacaataaagagtctgcgacacattcttttgattatcctcaatgatgggaaatcttcgtcctttgagggtggatttgatttttggacagccaaaagtcattcggagtcaagactgat

SEQ ID NO: 239886 - DNA, 120 bp, Artificial Sequence
  ENSG00000120910_20 (sequence is synthesized)
gttccgggcccgggtaggggctggcaggagagaaggggccggctgcggggagggctggctgagaagaagcgaaaatgggcggttagcagcagggacccggagccggaggagccgagagca

SEQ ID NO: 239887 - DNA, 120 bp, Artificial Sequence
  ENSG00000120910_21 (sequence is synthesized)
gcgcgtgcgccgagctctactgcctcgcgggaaggcggaagggtggggagggcggcgctcggggcgggaggcccggccgggtccgctaggacagcggggccgctgggaagttgtgagagc

SEQ ID NO: 239888 - DNA, 120 bp, Artificial Sequence
  ENSG00000120913_0 (sequence is synthesized)
agacacacccaggcagcccaccctgcccaggacctggggatgcggggcgggagagcgcggccggcgtgggagagctttatggggctgccccctcgatcgtctgcgaagtggggcgcgggg

SEQ ID NO: 239889 - DNA, 120 bp, Artificial Sequence
  ENSG00000120913_1 (sequence is synthesized)
cagtccctggaccggctctgctgtgctccgggcagtcgggggcttgcgggcgctccggggaggatgcgggcaccaccggctggacggtcgcagcctgcagggggccctggggacagcctg

SEQ ID NO: 239890 - DNA, 80 bp, Artificial Sequence
  ENSG00000120913_2 (sequence is synthesized)
cctcatccccccggcgggctcgggccaggtggcagcgcctgggctcgccgcgcggaggcggcggcttctcgggctagggg

SEQ ID NO: 239891 - DNA, 120 bp, Artificial Sequence
  ENSG00000120913_3 (sequence is synthesized)
ggtccgggagccccgggcgggctctccccagagtcgggtagacggcagcgggagcggtggcgtctccccgccttccctccctcccgggcctgggcgcccagccggacaggtgagcggcag

SEQ ID NO: 239892 - DNA, 80 bp, Artificial Sequence
  ENSG00000120913_4 (sequence is synthesized)
ccctccccggcgccgggctcctctccgcgcccctgtcggcgcggaaccctggcctcgtccgcggcccagctccctggagc

SEQ ID NO: 239893 - DNA, 120 bp, Artificial Sequence
  ENSG00000120913_5 (sequence is synthesized)
ctcgcatcagcgggggcgcccccgcgagctgcgctctccccggccggagcgctcctcctccagcccccagcccgcagggtactttgccctcggagcgaaggaggctccagaactggtaga

SEQ ID NO: 239894 - DNA, 120 bp, Artificial Sequence
  ENSG00000120913_6 (sequence is synthesized)
gccgggccatcgggctgggcacctccccgcggcgcccgcagcgcggagtccactgaccggctcaaaggtatggcgttgacggtggatgtggccgggccagcgccctggggcttccgtatc

SEQ ID NO: 239895 - DNA, 120 bp, Artificial Sequence
  ENSG00000120913_7 (sequence is synthesized)
acagggggcagggatttccacacgcccatcatggtgactaaggtggccgagcggggcaaagccaaggacgctgacctccggcctggagacataatcgtggccatcaacggggaaagcgcg

SEQ ID NO: 239896 - DNA, 120 bp, Artificial Sequence
  ENSG00000120913_8 (sequence is synthesized)
gagggcatgctgcatgccgaggcccagagcaagatccgccagagcccctcgcccctgcggctgcagctggaccggtctcaggctacgtctccagggcagaccaatggggacagctccttg

SEQ ID NO: 239897 - DNA, 120 bp, Artificial Sequence
  ENSG00000120913_9 (sequence is synthesized)
ccagcccaacctccctcagcccgagggccggcagccccttctcaccaccaccctctagcagctccctcactggagaggcagccatcagccgcagcttccagagtctggcatgttccccgg

SEQ ID NO: 239898 - DNA, 120 bp, Artificial Sequence
  ENSG00000120913_10 (sequence is synthesized)
gcctccccgctgctgaccgcctgtcctactcaggccgccctggaagccgacaggccggcctcggccgcgctggcgactcggcggtgctggtgctgccgccttccccgggccctcgttcct

SEQ ID NO: 239899 - DNA, 120 bp, Artificial Sequence
  ENSG00000120913_11 (sequence is synthesized)
ccaggcccagcatggactcggaagggggaagcctcctcctggacgaggactcggaagtcttcaagatgctgcaggaaaatcgcgagggacgggcggccccccgacagtccagctcctttc

SEQ ID NO: 239900 - DNA, 120 bp, Artificial Sequence
  ENSG00000120913_12 (sequence is synthesized)
ggctcttgcaggaagccctggaggctgaggagagaggtggcacgccagccttcttgcccagctcactgagcccccagtcctccctgcccgcctccagggccctggccacccctcccaagc

SEQ ID NO: 239901 - DNA, 120 bp, Artificial Sequence
  ENSG00000120913_13 (sequence is synthesized)
tccacacttgtgagaagtgcagtaccagcatcgcgaaccaggctgtgcgcatccaggagggccggtaccgccaccccggctgctacacctgtgccgactgtgggctgaacctgaagatgc

SEQ ID NO: 239902 - DNA, 120 bp, Artificial Sequence
  ENSG00000120913_14 (sequence is synthesized)
gcgggcacttctgggtgggtgacgagctgtactgtgagaagcatgcccgccagcgctactccgcacctgccaccctcagctctcgggcctgagcccgccatgccctcagcctgcctcact

SEQ ID NO: 239903 - DNA, 120 bp, Artificial Sequence
  ENSG00000120913_15 (sequence is synthesized)
gctgggccagggtcatgcctatataagttggcatggcagggacaatggtgggcagttgctcttacatgagctaagtttggagacctgaggcccctttgtcctcgctgggtgggccaaggt

SEQ ID NO: 239904 - DNA, 120 bp, Artificial Sequence
  ENSG00000120913_16 (sequence is synthesized)
ctgggacctgtcttggactgtgggagactcaccctcaccttgccaggcctctcccctgcaggactggcattgcactagtctgaggtggccactgcctttgatcaacctttgtgtgcgagg

SEQ ID NO: 239905 - DNA, 120 bp, Artificial Sequence
  ENSG00000120913_17 (sequence is synthesized)
gtctaagtagggtcgaacacagaagtgggaaggagaggggtgggccaggggctaatggtgtcactgtgtaaagtttttgacatactagctctataaatatatgaatatggacaaaataaa

SEQ ID NO: 239906 - DNA, 120 bp, Artificial Sequence
  ENSG00000120913_18 (sequence is synthesized)
gggagcggtggcgtctccccgccttccctccctcccgggcctgggcgcccagccggacaggtgagcggcagccaggtatggcgttgacggtggatgtggccgggccagcgccctggggct

SEQ ID NO: 239907 - DNA, 120 bp, Artificial Sequence
  ENSG00000120913_19 (sequence is synthesized)
tctcctgctgccttacagtgcccccagagccggctaggggcatggacttcacctcctggtcctctcttcctcaggtatggcgttgacggtggatgtggccgggccagcgccctggggctt

SEQ ID NO: 239908 - DNA, 120 bp, Artificial Sequence
  ENSG00000120913_20 (sequence is synthesized)
cctccttaaggtcctcctactccagcccaacctccctcagccgagggccggcagccccttctcaccaccaccctctagcagctccctcactggagaggcagccatcagccgcagccggcc

SEQ ID NO: 239909 - DNA, 120 bp, Artificial Sequence
  ENSG00000120913_21 (sequence is synthesized)
atagaacgttttactggagaaccctgagagcagagggatgcgaggccaactgctggtagcagcctggtggggtgagggtctagggttgttttcttaagatccagaagtttttgctttagc

SEQ ID NO: 239910 - DNA, 120 bp, Artificial Sequence
  ENSG00000120913_22 (sequence is synthesized)
ttaaggatgtgtgcaattttccatgtggcttcataattcatccatgactttgaattttaaaatggagagaagttggcttcccaggaaatggtgcccctggccctgggcatcggcccacct

SEQ ID NO: 239911 - DNA, 120 bp, Artificial Sequence
  ENSG00000120913_23 (sequence is synthesized)
ggctgtctccaaggctctccttcccagtggctggtgcgggctccgggagctcagctgagtcccattggggtggcaacggaaagggagcaggggagtggggagtacggagatgcaggctgg

SEQ ID NO: 239912 - DNA, 120 bp, Artificial Sequence
  ENSG00000120913_24 (sequence is synthesized)
aaactggcctccaggaacaactgtgaggttgaaggcgagatttccatgttgggagcaaatttaagagccccagatggacacggcacacctggagacaggcactgctgcctgagtgtggcc

SEQ ID NO: 239913 - DNA, 120 bp, Artificial Sequence
  ENSG00000120913_25 (sequence is synthesized)
cagggagggctcggctccccaaagctccacggggcaggcccagacctcccagcagagtagggacaggctggttagcccagactcccgcctctgaggagaggaaccagctctccttgggaa

SEQ ID NO: 239914 - DNA, 120 bp, Artificial Sequence
  ENSG00000120913_26 (sequence is synthesized)
gagggcctctgccctggccggccctgactcccaggggacttcgaccccttgcttcatccctttatgtttctatctcctcagtgcaaaagggcagcgtgcttcctctctgctggttccgtg

SEQ ID NO: 239915 - DNA, 120 bp, Artificial Sequence
  ENSG00000120913_27 (sequence is synthesized)
ggatcggagccaggccccagtgtgcaatgtctttgcacacagataatagcgtgcgtgacagaggactctgtgcttagctgtcacctgctgccttcctgctgcccggtccccggcagaacc

SEQ ID NO: 239916 - DNA, 120 bp, Artificial Sequence
  ENSG00000120913_28 (sequence is synthesized)
cgcatgcctccctccctctctggaccctggcagtctctgcgccctggctccgagggaaggggcagggggcccgctggtcggcgagggctgggagcccccgacaccttggctccaagggaa

SEQ ID NO: 239917 - DNA, 120 bp, Artificial Sequence
  ENSG00000120913_29 (sequence is synthesized)
tgggactgagccctgatggtggaggaggggagactgagggggtgctggcatcccctccacttgccagcccctgccccccatgctccagcaagccccctgcctggcagcctgggcagcccc

SEQ ID NO: 239918 - DNA, 120 bp, Artificial Sequence
  ENSG00000120913_30 (sequence is synthesized)
ccagccaagctggtgagacaacctctgatcctgaggaccggccgcccaccaagggttgggcccccggggccaggttgatctaccgacaccttccacttctttcctgggagagactgctgg

SEQ ID NO: 239919 - DNA, 120 bp, Artificial Sequence
  ENSG00000120913_31 (sequence is synthesized)
cttcattggtgattgatttggaggggggaaaaagggcagggtggctcaggctttaggcccaggtactggggaggcctgaggagccctcctggagctcaggaggccgaggctgccttaagc

SEQ ID NO: 239920 - DNA, 120 bp, Artificial Sequence
  ENSG00000120913_32 (sequence is synthesized)
atcatgccactgcattccagcctgggagagagagaggacctgtctgttgaaaaaaacacaaaaacaaatgaatgcatgtggccagtgccaggtgagctgccctgggggttcactggagtt

SEQ ID NO: 239921 - DNA, 120 bp, Artificial Sequence
  ENSG00000120913_33 (sequence is synthesized)
agttgaggcaggggacagtagtctcccctgccagcctaggattttgggcgtcattcacccactacccctagtgctagtcccagaggatgctgcggagggggcagcctcagctctcttttc

SEQ ID NO: 239922 - DNA, 120 bp, Artificial Sequence
  ENSG00000120913_34 (sequence is synthesized)
agagaagatcaaagctgggcttcccagggtgcctggctggtccctgccggcagctttgtgctctccggctctttgtgaaaggaatcttggcgcagatgtttgtgttgcctcctcaggcac

SEQ ID NO: 239923 - DNA, 120 bp, Artificial Sequence
  ENSG00000120913_35 (sequence is synthesized)
ctgtagatataatttacaccatgatatcattgtctcaccttttgcctgggtggctgcctgagaaaggtctttctttttatagaaaagatcaaggctgtctggcgcgggactccatgagcc

SEQ ID NO: 239924 - DNA, 120 bp, Artificial Sequence
  ENSG00000120913_36 (sequence is synthesized)
ccaggcgctggtcagaaacggggtagtctctttggcgccacctagtgtccagtttggcccatggcggggcccattcacggggcaacactgggcttctgggcacagcgggaatacagaaag

SEQ ID NO: 239925 - DNA, 120 bp, Artificial Sequence
  ENSG00000120913_37 (sequence is synthesized)
atacagcactcctcatgccttcctggaggtagaaggccagtggcagcgactgagctggcatgaatgaataagaggatgtggcactgagcgccaagggctaccttggaacgcaccgaggag

SEQ ID NO: 239926 - DNA, 120 bp, Artificial Sequence
  ENSG00000120913_38 (sequence is synthesized)
cgtcccgtgagttcaaagcagtggccgtgatgcaaaaggagggctgggtcttggagacgtggagaagaggaatgctgagtgatggggtggctgctggggggatgcttagctcagagcagt

SEQ ID NO: 239927 - DNA, 120 bp, Artificial Sequence
  ENSG00000120913_39 (sequence is synthesized)
gggacactgagataagatcggaggggagctgtcaatgccagaagtggtttgaacttccccttgaggctctagggacattttgttttgagacatggtcttgctctattgcccaggctggag

SEQ ID NO: 239928 - DNA, 63 bp, Artificial Sequence
  ENSG00000120913_40 (sequence is synthesized)
tgcagcctccacctcccaggctcaagagatcctcccaagtttttttttttttttaagagatgg

SEQ ID NO: 239929 - DNA, 120 bp, Artificial Sequence
  ENSG00000120913_41 (sequence is synthesized)
tatgttgcccaggctggtctcgaacttcgggccccaagccatcctcccaccttggctttccaaagtgttgggattacaagcgtgagctaaccttgcccagcctctgggaacacttggaag

SEQ ID NO: 239930 - DNA, 120 bp, Artificial Sequence
  ENSG00000120913_42 (sequence is synthesized)
cttggaaggttttaagcagagaagtgacaggttggaaaagatggtttggattattgatatggacagattcccacctgtatgtagcacgccatgctgggccagcagtgtcataggagtgga

SEQ ID NO: 239931 - DNA, 120 bp, Artificial Sequence
  ENSG00000120913_43 (sequence is synthesized)
gggggataagtggggactggggacatgtgaaatgatgggcattccagtgaggcatcgaatgccttctgagggctttgtaggttccagctcaaatccccctctggctcttgttctttggtg

SEQ ID NO: 239932 - DNA, 120 bp, Artificial Sequence
  ENSG00000120913_44 (sequence is synthesized)
tggcagccatctctcctcccaggggtcctgagggtttcagcaccagggttctctgcagccacacaatcagcccggctcgggagcaaactcccctggaagaacggagttatgagttggtca

SEQ ID NO: 239933 - DNA, 120 bp, Artificial Sequence
  ENSG00000120913_45 (sequence is synthesized)
gcagaggaggctggggacaggcagtttttggtcttttacctctgatcttgtccccaacctaagccagctagctgcgtgctcccactccctctgccgcacgccgcccgtctatgttcccgg

SEQ ID NO: 239934 - DNA, 120 bp, Artificial Sequence
  ENSG00000120913_46 (sequence is synthesized)
actttgtccagtgcagtgccctcttcccttcctgcactgaggagattaactgaagtgacagattagagttagaagtggcccaaaggagcatctggtacaaccccctttggttagagaagg

SEQ ID NO: 239935 - DNA, 120 bp, Artificial Sequence
  ENSG00000120913_47 (sequence is synthesized)
gaaagtgacttttccaaagctgcacagctagacagtcataatggctaagctctgggggtgcttttgatgtgctagggatacttccaatgctttaactcacttaatcctcacaacccgaga

SEQ ID NO: 239936 - DNA, 120 bp, Artificial Sequence
  ENSG00000120913_48 (sequence is synthesized)
taggtactgttaccatcctctctgcagacgaggaaaccgaggaccaggaggttcagtaaatggtccaagtactcctagctagtaaggaatggatctacagcctgcctcccaggtttctgg

SEQ ID NO: 239937 - DNA, 120 bp, Artificial Sequence
  ENSG00000120913_49 (sequence is synthesized)
cttgtggggggcagagtttgtccctctgtcatcagaggcagccttccaggcacagctctggtcacctctggtcacaactggaggtcaccacagccctccccagcgctctgtaggctctca

SEQ ID NO: 239938 - DNA, 120 bp, Artificial Sequence
  ENSG00000120913_50 (sequence is synthesized)
gctttgtgcttcctcccacgggtactagctccagctgagcttgcaggaaacccacttcctgaagccaggacttccccatgggaagtgcaggggccactgggcagcctgagggctgaccct

SEQ ID NO: 239939 - DNA, 120 bp, Artificial Sequence
  ENSG00000120913_51 (sequence is synthesized)
gctcaggacactgtctgtctcaggaactcatggcagtggtttaccttgtcaggagtgcatggacgggctgcccctcccattccttcaagcatcactcagagagccctggcctggctctag

SEQ ID NO: 239940 - DNA, 120 bp, Artificial Sequence
  ENSG00000120913_52 (sequence is synthesized)
gcttgggactgcggctgccacaggaagggggcatccccctactttgggtgttgggtcagatcctgcccccgtgcccgccagggctcaggttcctctgagctggtcctgggccaggacgca

SEQ ID NO: 239941 - DNA, 120 bp, Artificial Sequence
  ENSG00000120913_53 (sequence is synthesized)
tctgcatggcggtggtggggaggaggggtgcgccatggcctggaggggagtgtgtgttggggtgtgtgtgtggaggttcttttgagtcacacacaaagcattgtgctgagacactgcatt

SEQ ID NO: 239942 - DNA, 120 bp, Artificial Sequence
  ENSG00000120913_54 (sequence is synthesized)
cctgctggctgggcttcctgtttccagatgcattcctgtcccagagtcaccacagagactgtttggaatcccgccccacattctccaaattcagggcgcgatctggcaaaggctccctcc

SEQ ID NO: 239943 - DNA, 120 bp, Artificial Sequence
  ENSG00000120913_55 (sequence is synthesized)
cccaccctcttactttggagggagtctgggctccctcctacccagggagggctggcagggctctggcacggccggggtgtgattccacacatcttcttggtcttgcataaggcagttcct

SEQ ID NO: 239944 - DNA, 120 bp, Artificial Sequence
  ENSG00000120913_56 (sequence is synthesized)
ggagacccagcactctggttctctctctgcctgtgagaagcggaatgggtactgtctaggaggactgggcagggtgggggcaacccagaggacccatggctagcagggaagggcctgggc

SEQ ID NO: 239945 - DNA, 120 bp, Artificial Sequence
  ENSG00000120913_57 (sequence is synthesized)
ttgaatgtgactctgttgagacatggccagcaattctggcacttggctgtcattcggctggcctgcgcagagattggctgtgggcctcagtttccccattttataaagttttaaaatctg

SEQ ID NO: 239946 - DNA, 120 bp, Artificial Sequence
  ENSG00000120913_58 (sequence is synthesized)
gccagtgccccgggactgcaggcggccaggcccacctgggcagccatggcctccttctcctggccacaggcatgctctgctcctgagccagggaggccatgcttctggtcgtgggccacc

SEQ ID NO: 239947 - DNA, 120 bp, Artificial Sequence
  ENSG00000120913_59 (sequence is synthesized)
tgtgctgtgcccaagacctgcccagcagtgcccagtagcccgtccatctcctgcacccctcccctcatccccctcccctcccatcctgctgacttcctccctgcccagtatgtttctctt

SEQ ID NO: 239948 - DNA, 120 bp, Artificial Sequence
  ENSG00000120913_60 (sequence is synthesized)
agagtcgggtagacggcagcgggagcggtggcgtctccccgccttccctccctcccgggcctgggcgcccagccggacaggtatggcgttgacggtggatgtggccgggccagcgccctg

SEQ ID NO: 239949 - DNA, 120 bp, Artificial Sequence
  ENSG00000120913_61 (sequence is synthesized)
cttttctgggctgggcagtctggtgggagtgtgtgagaggaatgctgtgggctgcagaggcaggggtgctgtgtccttgtggcctcctgacatggccaaggctgcagagagctggaggct

SEQ ID NO: 239950 - DNA, 120 bp, Artificial Sequence
  ENSG00000120913_62 (sequence is synthesized)
caggatgcccttatagtgcctctggaaattacaggttccccctgctggtaggcacatgccttggtgagcagaggccaagtgaaaaaagcccctctccctctggttgggaatgaggacttg

SEQ ID NO: 239951 - DNA, 120 bp, Artificial Sequence
  ENSG00000120913_63 (sequence is synthesized)
cctcatgaagggatcccgggccggtgccctaggcagggcccatggtggtctgtctggagatgtgatgtggctcgtgaattcctgcggaaactatctctaggtccttcaggtgaccgcaca

SEQ ID NO: 239952 - DNA, 120 bp, Artificial Sequence
  ENSG00000120913_64 (sequence is synthesized)
tccgctggtcggcgagggccgggggccccctggtgtcgggcctgggaacagccgggctaggccctcctgggtgtgttggcccaaggctctggccctgactcctccccggctgcctcctcc

SEQ ID NO: 239953 - DNA, 120 bp, Artificial Sequence
  ENSG00000120913_65 (sequence is synthesized)
caacaggccggcctcggccgcgctggcgactcggcggtgctggtgctgccgccttccccgggccctcgttcctccaggcccaggtaccagcaggccccggagggtcgggttggggtcttg

SEQ ID NO: 239954 - DNA, 120 bp, Artificial Sequence
  ENSG00000120913_66 (sequence is synthesized)
gaaggctgggaggggcaggagggagacgggcttccccgagagggatggggtcccccaagcccagttggctcctccacctcccagattcctccccctcccccacgctcttctcctgccccc

SEQ ID NO: 239955 - DNA, 120 bp, Artificial Sequence
  ENSG00000120913_67 (sequence is synthesized)
gaggttcccttccgtaccccgggccctgactggatgggtcagtgaaccagtgttcttaagtgcctgtgaggtgctcaccccaggactaggcacggagccgagcagagcgcgaagccccag

SEQ ID NO: 239956 - DNA, 120 bp, Artificial Sequence
  ENSG00000120913_68 (sequence is synthesized)
cccctgcccataaggagctgacggtccgggagggtccgggagggtcaccagcgtgctcccacagagtagtgggcagtagccagctgggatgggaaagtgtcattcgagtgataaaagcgg

SEQ ID NO: 239957 - DNA, 120 bp, Artificial Sequence
  ENSG00000120913_69 (sequence is synthesized)
tggcagggcctggggctgggcctccagggagggcttcttggaggaagagggatttgacttggcctcttggccttagaaaaaacatcaagacttaaacagcattaagagggtggcaggaag

SEQ ID NO: 239958 - DNA, 120 bp, Artificial Sequence
  ENSG00000120913_70 (sequence is synthesized)
cactgtggaaggtggaggctggcggccagagggctttggggtgtgggagtgagagaatgggggcctgatagcatgaaagggcgccagtggaggccaagcccctgcagtgagggccctcgg

SEQ ID NO: 239959 - DNA, 120 bp, Artificial Sequence
  ENSG00000120913_71 (sequence is synthesized)
gaagggaatcaggctgaggagtgccctaacccaggaaagccattaaatactgatgccaggcgagcaagacatacggaggcttgccagagttccgttattcatgtgacagacactgactgt

SEQ ID NO: 239960 - DNA, 120 bp, Artificial Sequence
  ENSG00000120913_72 (sequence is synthesized)
gcccatctgagggaccagatgtgtgcagagtttggggataggtggccatgaccccactcctgcccttggggagctccgttcattggggcagatgggcctggccagctcccatggaagtga

SEQ ID NO: 239961 - DNA, 120 bp, Artificial Sequence
  ENSG00000120913_73 (sequence is synthesized)
gcgctgctgtgggagttactactcccacagcccctgtccttaaggtgctcagcaccaatgccctctagaacagtggggagaaggggagggagatgacaggacaggtaggagagtggccag

SEQ ID NO: 239962 - DNA, 120 bp, Artificial Sequence
  ENSG00000120913_74 (sequence is synthesized)
agaggcttcataattcatctatgactttgaattttaaaatggagagaagctggtttcccaggaaatggtgcccctggccctgggcactggcccgcctggctgtctccaaggctctccttc

SEQ ID NO: 239963 - DNA, 120 bp, Artificial Sequence
  ENSG00000120913_75 (sequence is synthesized)
ccagtggctggtgtgggctcctggacctcagttgagtcccattggggtggcaatggaaagggagcaggggagtggggagtacagagatgcaggctggaaactggcctccaggaacaactg

SEQ ID NO: 239964 - DNA, 120 bp, Artificial Sequence
  ENSG00000120913_76 (sequence is synthesized)
tgaggttgaaggtgagatttccattttgggagcaaatgtaagaggccatatggacagggcacacctggagattggcaggtggctggttctaacgctgatgtttagctccaaggggcattt

SEQ ID NO: 239965 - DNA, 120 bp, Artificial Sequence
  ENSG00000120913_77 (sequence is synthesized)
gaggcagcacagggagagagcagtgactttgccaaggaggcctcagcgtccttagctgcagacgggcgacagctgccccgtagccctgggcttcatcttcgtgtggcttgagagctcaga

SEQ ID NO: 239966 - DNA, 120 bp, Artificial Sequence
  ENSG00000120913_78 (sequence is synthesized)
tgtgacaaggcatggaaaagcactttgaaagccacaccgaggcattgcgctcctgttgccatctccagttattatctaatcacactgttattaccaggtcattagagagggagcacctgc

SEQ ID NO: 239967 - DNA, 120 bp, Artificial Sequence
  ENSG00000120913_79 (sequence is synthesized)
ttcacctgacactgagcacagatggccccaggtggccttggatgggcaaactcggccttgtacctgcctccttcatgcccttgcccagcctcagccatggatctggcaagatcaccttcc

SEQ ID NO: 239968 - DNA, 120 bp, Artificial Sequence
  ENSG00000120913_80 (sequence is synthesized)
tccttacctggtgccactgtcagcgtgactttagggtttctcttataagggtgctttccaagaccacctcctcagagcatctttgggaggatgctgtggttggtgggctctcaccacatg

SEQ ID NO: 239969 - DNA, 120 bp, Artificial Sequence
  ENSG00000120913_81 (sequence is synthesized)
gtgcagtaccagcatcgcgtgagtgtggaggggggtgggggacctgagccttcacaggggagtggggagggggacagggcactggatgctttcaggaagggccgggcccatcaggggcta

SEQ ID NO: 239970 - DNA, 120 bp, Artificial Sequence
  ENSG00000120913_82 (sequence is synthesized)
gcactgggtacccagtcggggactctaggggaagcagtgttgcacagctttgggggcattagttacaggcttcttaggagcctaggctagctgcttccggctgcatctcctctccctctc

SEQ ID NO: 239971 - DNA, 120 bp, Artificial Sequence
  ENSG00000120913_83 (sequence is synthesized)
ctccttttcccatcccttttgatttctctttgatcatttcaaagcctctggagatctgcccggaggtacagcacatcctcttggaaaatcttgctctttccccttcttccccctttggag

SEQ ID NO: 239972 - DNA, 83 bp, Artificial Sequence
  ENSG00000120913_84 (sequence is synthesized)
ttggaaaatcttgctctttccccttcttccccctttggagcaggctgcatttttcccgatgtgggctcatttttcttattttt

SEQ ID NO: 239973 - DNA, 77 bp, Artificial Sequence
  ENSG00000120913_85 (sequence is synthesized)
gcagtggtgcaattgtgtctcagcctcccgagttgttggggctacaggctcccgccaccactcccagctaatttttg

SEQ ID NO: 239974 - DNA, 120 bp, Artificial Sequence
  ENSG00000120913_86 (sequence is synthesized)
atgcccagccgaggtgggctcatttttctcattaagtggcatttataatgcaaccacattctctggaaggttgctgaaaccccccctcaggtaaatttctgaagtgtgtagtgtgggagg

SEQ ID NO: 239975 - DNA, 120 bp, Artificial Sequence
  ENSG00000120913_87 (sequence is synthesized)
ggcaggtgattgactttaggcaaatcccttaacctctctgggctttagtgttttcatctgcagagtgggagaatatccagtccccctgctgtgcagagatagggaatgtgtgttgaaaaa

SEQ ID NO: 239976 - DNA, 120 bp, Artificial Sequence
  ENSG00000120913_88 (sequence is synthesized)
gcatgttttccatcctggttctcaaaggtgtgtgtgtcgggtcccttggagggtttgttaaatgccgatggctgggccccaccccagagcctcctctccaggaggccaacaggcctgaga

SEQ ID NO: 239977 - DNA, 120 bp, Artificial Sequence
  ENSG00000120913_89 (sequence is synthesized)
atgtgcatttctcacgaattccccagtgatgcggatgctgctggctgtgggacccaggaccacactgagaatcactgctctgttaaaaatccaggcaatgtgggacggacttacagtctt

SEQ ID NO: 239978 - DNA, 120 bp, Artificial Sequence
  ENSG00000120913_90 (sequence is synthesized)
tatgtgagaggaacaacttttaaaaaaaatttttaatatttttaatagagtttcactctgttgctcaggcaggagcgcagtagtgccgtcatggctcactgcagccccaaactcctgggc

SEQ ID NO: 239979 - DNA, 65 bp, Artificial Sequence
  ENSG00000120913_91 (sequence is synthesized)
ctacaggcgtgtgccaccatttggtttcaaactcctggccttaagtgatctgtccacctgggatc

SEQ ID NO: 239980 - DNA, 90 bp, Artificial Sequence
  ENSG00000120913_92 (sequence is synthesized)
ctaggcattgacttatttatttttattatttttaattaggggtcccagcagtggcagcggtggtgggggtttgtgtgtgttagggggttt

SEQ ID NO: 239981 - DNA, 120 bp, Artificial Sequence
  ENSG00000120913_93 (sequence is synthesized)
ggggtcccagcagtggcagcggtggtgggggtttgtgtgtgttagggggtttgtcaaagtgagattcctgtgtgcagcttcaagaatcaagtctcgggccgggtgcagtggctcacgcct

SEQ ID NO: 239982 - DNA, 84 bp, Artificial Sequence
  ENSG00000120913_94 (sequence is synthesized)
agggtggattacctgaggttgggagggcaagaccgtcctggctaacacggtaaaacccgtctctactaaaaatacaaaaactta

SEQ ID NO: 239983 - DNA, 90 bp, Artificial Sequence
  ENSG00000120913_95 (sequence is synthesized)
cttgtaatcccagctactcaggaggctggtgcaggagtatcgcttgaacccggaaggtagagattgctgtgagctgagatcacaccattg

SEQ ID NO: 239984 - DNA, 120 bp, Artificial Sequence
  ENSG00000120913_96 (sequence is synthesized)
aaaaaaaaaaaaaaaaaaaaagtctagtctctgagaaggctttgggctccacccaggtcctgatgctacagtggggaccaggccccctgggcatggtggcctcctgcttggtgctgtggc

SEQ ID NO: 239985 - DNA, 120 bp, Artificial Sequence
  ENSG00000120913_97 (sequence is synthesized)
ccgcggcttcctgcctggattggctcctggctccagagctagaggctcaggaaatcccacaggggtatggcgttgacggtggatgtggccgggccagcgccctggggcttccgtatcaca

SEQ ID NO: 239986 - DNA, 120 bp, Artificial Sequence
  ENSG00000120913_98 (sequence is synthesized)
caggtatggcgttgacggtggatgtggccgggccagcgccctggggcttccgtatcacagggggcagggatttccacacgcccatcatggtgactaaggcagccatttggggtgattact

SEQ ID NO: 239987 - DNA, 120 bp, Artificial Sequence
  ENSG00000120913_99 (sequence is synthesized)
agaacaagagccccggagttcttggcagtctcctcttgacctgggcccaggctgggaacattcacaggagggctgtgcaggcagccacctgcaaggtggccgagcggggcaaagccaagg

SEQ ID NO: 239988 - DNA, 120 bp, Artificial Sequence
  ENSG00000120915_0 (sequence is synthesized)
gccctggccttcgcgcatctcccaggttagctgcgtgtccgggtgctaggctgcagacccgccgccatgacgctgcgcgcggccgtcttcgaccttgacggggtgctggcgctgccagcg

SEQ ID NO: 239989 - DNA, 120 bp, Artificial Sequence
  ENSG00000120915_1 (sequence is synthesized)
gtgttcggcgtcctcggccgcacggaggaggccctggcgctgcccagaggacttctgaatgatgctttccagaaagggggaccagagggtgccactacccggcttatgaaaggagagatc

SEQ ID NO: 239990 - DNA, 120 bp, Artificial Sequence
  ENSG00000120915_2 (sequence is synthesized)
acactttcccagtggataccactcatggaagaaaactgcaggaagtgctccgagaccgctaaagtctgcctccccaagaatttctccataaaagaaatctttgacaaggcgatttcagcc

SEQ ID NO: 239991 - DNA, 120 bp, Artificial Sequence
  ENSG00000120915_3 (sequence is synthesized)
agaaagatcaaccgccccatgctccaggcagctctcatgctcaggaagaaaggattcactactgccatcctcaccaacacctggctggacgaccgtgctgagagagatggcctggcccag

SEQ ID NO: 239992 - DNA, 120 bp, Artificial Sequence
  ENSG00000120915_4 (sequence is synthesized)
ctgatgtgtgagctgaagatgcactttgacttcctgatagagtcgtgtcaggtgggaatggtcaaacctgaacctcagatctacaagtttctgctggacaccctgaaggccagccccagt

SEQ ID NO: 239993 - DNA, 120 bp, Artificial Sequence
  ENSG00000120915_5 (sequence is synthesized)
gaggtcgtttttttggatgacatcggggctaatctgaagccagcccgtgacttgggaatggtcaccatcctggtccaggacactgacacggccctgaaagaactggagaaagtgaccgga

SEQ ID NO: 239994 - DNA, 120 bp, Artificial Sequence
  ENSG00000120915_6 (sequence is synthesized)
atccagcttctcaataccccggcccctctgccgacctcttgcaatccaagtgacatgagccatgggtacgtgacagtaaagcccagggtccgtctgcattttgtggagctgggctccggc

SEQ ID NO: 239995 - DNA, 120 bp, Artificial Sequence
  ENSG00000120915_7 (sequence is synthesized)
cctgctgtgtgcctctgccatggatttcccgagagttggtattcttggaggtaccagatccctgctctggcccaggcaggttaccgggtcctagctatggacatgaaaggctatggagag

SEQ ID NO: 239996 - DNA, 120 bp, Artificial Sequence
  ENSG00000120915_8 (sequence is synthesized)
tcatctgctcctcccgaaatagaagaatattgcatggaagtgttatgtaaggagatggtaaccttcctggataaactgggcctctctcaagcagtgttcattggccatgactggggtggc

SEQ ID NO: 239997 - DNA, 120 bp, Artificial Sequence
  ENSG00000120915_9 (sequence is synthesized)
atgctggtgtggtacatggctctcttctaccccgagagagtgagggcggtggccagtttgaatactcccttcataccagcaaatcccaacatgtcccctttggagagtatcaaagccaac

SEQ ID NO: 239998 - DNA, 120 bp, Artificial Sequence
  ENSG00000120915_10 (sequence is synthesized)
ccagtatttgattaccagctctacttccaagaaccaggagtggctgaggctgaactggaacagaacctgagtcggactttcaaaagcctcttcagagcaagcgatgagagtgttttatcc

SEQ ID NO: 239999 - DNA, 120 bp, Artificial Sequence
  ENSG00000120915_11 (sequence is synthesized)
aagcgggaggactttttgtaaatagcccagaagagcccagcctcagcaggatggtcactgaggaggaaatccagttctatgtgcagcagttcaagaagtctggtttcagaggtcctctaa

SEQ ID NO: 240000 - DNA, 120 bp, Artificial Sequence
  ENSG00000120915_12 (sequence is synthesized)
actggtaccgaaacatggaaaggaactggaagtgggcttgcaaaagcttgggacggaagatcctgattccggccctgatggtcacggcggagaaggacttcgtgctcgttcctcagatgt

SEQ ID NO: 240001 - DNA, 120 bp, Artificial Sequence
  ENSG00000120915_13 (sequence is synthesized)
cccagcacatggaggactggattccccacctgaaaaggggacacattgaggactgtgggcactggacacagatggacaagccaaccgaggtgaatcagatcctcattaagtggctggatt

SEQ ID NO: 240002 - DNA, 120 bp, Artificial Sequence
  ENSG00000120915_14 (sequence is synthesized)
ctgatgcccggaacccaccggtggtctcaaagatgtagaacgcagcgtgtgcccacgctcagcaggtgtgccatccttccacctgctggggcaccattcttagtatacagaggtggcctt

SEQ ID NO: 240003 - DNA, 120 bp, Artificial Sequence
  ENSG00000120915_15 (sequence is synthesized)
acacacatcttgcatggatggcagcattgttctgaaggggtttgcagaaaaaaaagattttctttacataaagtgaatcaaatttgacattattttagatcccagagaaatcaggtgtga

SEQ ID NO: 240004 - DNA, 120 bp, Artificial Sequence
  ENSG00000120915_16 (sequence is synthesized)
ttagttctccaggcatgaatgcatcgtccctttatctgtaagaacccttagtgtcctgtagggggacagaatggggtggccaggtggtgatttctctttgaccaatgcatagtttggcag

SEQ ID NO: 240005 - DNA, 120 bp, Artificial Sequence
  ENSG00000120915_17 (sequence is synthesized)
aaaaatcagccgttcatttagaagaatcttagcagagattgggatgccttactcaataaagctaagatgactatgctgctggctgtctttgttcttggagaggtggagtgactgttcacg

SEQ ID NO: 240006 - DNA, 120 bp, Artificial Sequence
  ENSG00000120915_18 (sequence is synthesized)
gagaatgcacggcatggggatgaaccctttccctctgcttttgagccctgttctgggctccaaggtgctgtatgatctaggccgtgctggccaggagacaatcctatggggatggcagtg

SEQ ID NO: 240007 - DNA, 120 bp, Artificial Sequence
  ENSG00000120915_19 (sequence is synthesized)
gtgtcttgtgctctgtcccctagagcagtcactggccacaggtagccacctgcctttctcccggcttccctagcagagtttgctcaggcacaaatgtgcacctggagcatttgaaatgtg

SEQ ID NO: 240008 - DNA, 120 bp, Artificial Sequence
  ENSG00000120915_20 (sequence is synthesized)
ctagtgaggctgaggaagagaattttaaatttcattgaattgtaatcagtttaaagttaaatagcagcagctgccatgaggctcaggcagatccagctcatcttcccctctgccccctcc

SEQ ID NO: 240009 - DNA, 120 bp, Artificial Sequence
  ENSG00000120915_21 (sequence is synthesized)
tccctatcttcccctctaccctctcctgcctcctgtcacatccggttaggctcccatctcactgatgtgtctcctgcagtggtctctcccctgccctgcttccagccccagagtcctgga

SEQ ID NO: 240010 - DNA, 120 bp, Artificial Sequence
  ENSG00000120915_22 (sequence is synthesized)
gcagcagcctcctcacgggtcttgccgcccacatggttggatcctgaaactcgcagggcctcccccaactgcccctgcccacccccagcccggccccatcaccctccaattcctaaccgc

SEQ ID NO: 240011 - DNA, 120 bp, Artificial Sequence
  ENSG00000120915_23 (sequence is synthesized)
gcagacccgccgccatgacgctgcgcgcggccgtcttcgaccttgacggggtgctggcgctgccagcggtgttcggcgtcctcggccgcacggaggaggccctggcgctgcccaggactt

SEQ ID NO: 240012 - DNA, 90 bp, Artificial Sequence
  ENSG00000120915_24 (sequence is synthesized)
gtgctctcccaccaggtcacctaaaacgaccagcagagacacccaagaggctgagctgtgaggatcacctgaacctgagcctgggaagtg

SEQ ID NO: 240013 - DNA, 120 bp, Artificial Sequence
  ENSG00000120915_25 (sequence is synthesized)
agccctgagctctccagctctgaactttaagttgcccaaccagggtcccctcggcatgcatagggctgactctaaccccaggcctgagcacacagcctggagttcctaccctctagggag

SEQ ID NO: 240014 - DNA, 120 bp, Artificial Sequence
  ENSG00000120915_26 (sequence is synthesized)
ctgtggcttcaagatcttaagcagtaagagcttggaggagtcttagagcttgtccagggcaaaatccaccctctactgataaggaccccaggattgagagcttacctctatgggggtcac

SEQ ID NO: 240015 - DNA, 120 bp, Artificial Sequence
  ENSG00000120915_27 (sequence is synthesized)
ctcgtgtatgcaggtggagtggagtggggcccctgcccaggtctcctccattgcagtccactggcccctctccatccaggcgccatgtttccaattcccccacctggagctcatccttgt

SEQ ID NO: 240016 - DNA, 120 bp, Artificial Sequence
  ENSG00000120915_28 (sequence is synthesized)
ctccctcctgggttgggtatgagtgaagggtcagagttgagatttgatttgagctcatccccatggcccctagatccagcactcttcccacaagaccttatttttgctgcagcactgtgg

SEQ ID NO: 240017 - DNA, 89 bp, Artificial Sequence
  ENSG00000120915_29 (sequence is synthesized)
actcgacctaggaagtccagctggcctcacctctcaatcctccctcataacaggacaccccacctgctactgggaactgggtgatgacc

SEQ ID NO: 240018 - DNA, 78 bp, Artificial Sequence
  ENSG00000120915_30 (sequence is synthesized)
ccctgccgtgccagtgggtcagtctagcagtcctcggtagaagttgtgagttaagctcatttggggttccatttgtaa

SEQ ID NO: 240019 - DNA, 120 bp, Artificial Sequence
  ENSG00000120915_31 (sequence is synthesized)
tattttgttttccaacatcataatctttgcagaattcttaggttatggtgagagccacctgtttttattgagtaggttggccagggcctcttctcagccattttcatgtaacactggggt

SEQ ID NO: 240020 - DNA, 120 bp, Artificial Sequence
  ENSG00000120915_32 (sequence is synthesized)
ctttcactgagaaatctgggtcatgcacaatccagcaacggactgaaacggccctggcattctgcagacgctgtggggcctgggtccactgggcctggtgcttggtcgctgccctctcct

SEQ ID NO: 240021 - DNA, 120 bp, Artificial Sequence
  ENSG00000120925_0 (sequence is synthesized)
gcactccaaattagaaaggggacgtctagtgggttgcccgggaggggtggcgggagcggtcctggaaataatctgtcctctgtcgccgggaactggcgaggtagttccttcgcggtggag

SEQ ID NO: 240022 - DNA, 120 bp, Artificial Sequence
  ENSG00000120925_1 (sequence is synthesized)
agacctggaatggccaaatatcaaggtgaagttcaaagtttgaaactggatgatgattcagttatagaaggagtaagcgaccaagtacttgtggcagttgtggtcagtttcgctttgatt

SEQ ID NO: 240023 - DNA, 120 bp, Artificial Sequence
  ENSG00000120925_2 (sequence is synthesized)
gctaccctggtatatgcacttttcagaaatgtacatcaaaacattcacccagaaaaccaggagctagtaagggtacttcgagaacagcttcaaacagaacaggatgcacctgctgccact

SEQ ID NO: 240024 - DNA, 120 bp, Artificial Sequence
  ENSG00000120925_3 (sequence is synthesized)
cgacagcagttctacactgacatgtactgtcccatctgcctgcaccaagcctccttcccggtggagaccaactgtggacatcttttttgtggtgcctgcattattgcttactggcgatat

SEQ ID NO: 240025 - DNA, 120 bp, Artificial Sequence
  ENSG00000120925_4 (sequence is synthesized)
ggttcatggcttggggcaatcagttgtccaatctgtagacaaacggtaaccttactcctaacagtatttggtgaagatgatcagtctcaggatgttctgagattgcatcaggatattaat

SEQ ID NO: 240026 - DNA, 120 bp, Artificial Sequence
  ENSG00000120925_5 (sequence is synthesized)
gattataaccggagattctcagggcaacccagatctattatggagagaattatggatctacccactttactgaggcatgcattcagggaaatgttttcagtcgggggccttttctggatg

SEQ ID NO: 240027 - DNA, 120 bp, Artificial Sequence
  ENSG00000120925_6 (sequence is synthesized)
tttcgcatcaggataatactttgtttaatgggagcttttttctatcttatatcacctctagattttgtacctgaagccttgtttggaattctaggctttctagatgatttctttgtcatc

SEQ ID NO: 240028 - DNA, 120 bp, Artificial Sequence
  ENSG00000120925_7 (sequence is synthesized)
tttttattgcttatctacatctctattatgtatcgagaagtgataacccaaaggctaactagatgaaaaagaaaacaaaactgagtttactaggatatctgagctaatgtagaacatcaa

SEQ ID NO: 240029 - DNA, 120 bp, Artificial Sequence
  ENSG00000120925_8 (sequence is synthesized)
acagaaggacccatggcagtataaagcaatgaagcaatggagtattatctcacaaatataaaaccactataagacaaacatttgattatcatttgacaaatacctaggtataactggaat

SEQ ID NO: 240030 - DNA, 120 bp, Artificial Sequence
  ENSG00000120925_9 (sequence is synthesized)
tttcatgtttgaagttctaatattaagtttagaattataatgatctacagttgtatcttgattctatgttgtctggaaaaaatatggaattatataaaaagggatgcttttatatatttt

SEQ ID NO: 240031 - DNA, 120 bp, Artificial Sequence
  ENSG00000120925_10 (sequence is synthesized)
tcttttccccagaattacttagattaattagatgtatagtaaaatattgttaaatgtcagtttatccatcttatccttctcagcaggtacctatatgataatatatagctgtgaaactca

SEQ ID NO: 240032 - DNA, 120 bp, Artificial Sequence
  ENSG00000120925_11 (sequence is synthesized)
tctaaatatttttgttccaataaaatattatatactattggggaaaattcagtatttcttttagtgctagctaagttttgtgcatttggagcagttctgccttttcattctggtataatt

SEQ ID NO: 240033 - DNA, 120 bp, Artificial Sequence
  ENSG00000120925_12 (sequence is synthesized)
aattatttgctatcagctgaaactgaaagaagaaacttgaacttcatacttcgatatcatattctagtttacagaacacattttaatcaatagaagaattaagatgaaaaacatggccgg

SEQ ID NO: 240034 - DNA, 120 bp, Artificial Sequence
  ENSG00000120925_13 (sequence is synthesized)
catttatctccagtcagcacacttgatgttcacagttagacatttaaacaagagctcatcctttcgtagtagatataaaagtaatttgtaaagggaagattgttttaggaacctgggcga

SEQ ID NO: 240035 - DNA, 120 bp, Artificial Sequence
  ENSG00000120925_14 (sequence is synthesized)
tgctgcaaacacagagtagcctgatgcatttctgaggaaggtgaatcttcgtgtctttgagcatcaagccaataggaaggtactgggaacggtatttacatttgacaaaagaaattactg

SEQ ID NO: 240036 - DNA, 120 bp, Artificial Sequence
  ENSG00000120925_15 (sequence is synthesized)
gttagctatagcaacagattggacaaattttgttagttttctgttgtcagaaatttttataatactgtctcaggatggcagcacacagctcagattcatgtcttgagccaaacaagtgaa

SEQ ID NO: 240037 - DNA, 120 bp, Artificial Sequence
  ENSG00000120925_16 (sequence is synthesized)
tgtatctgagaagactcagtaccacatggtactgggagatcttactcacttcagctggcgttgctcattagtgaatgtatgacagcaggatgtgaggggatgcccaggagtcagtgttag

SEQ ID NO: 240038 - DNA, 120 bp, Artificial Sequence
  ENSG00000120925_17 (sequence is synthesized)
cattgtcatctgagatcactgctattaatatcatccattaatttattagtgagcttcactatatgcagactgggagataaggagaaaatctgtcacattctctctagctaatcagatcag

SEQ ID NO: 240039 - DNA, 120 bp, Artificial Sequence
  ENSG00000120925_18 (sequence is synthesized)
ctaccaattaatgagattctgaatgaaatatcaatatgtgtttttctaatttggacctaggacagagctgttgcttgtcatagagaaaaacaataatgcttaaacatagcacattataat

SEQ ID NO: 240040 - DNA, 120 bp, Artificial Sequence
  ENSG00000120925_19 (sequence is synthesized)
taaagcaggtttctcacatacttttcattttatcctttggataattttgtgaggaacgcaggacaccaacttccctttcatagatacaatccccatgctattgatgaaagtgtttttgaa

SEQ ID NO: 240041 - DNA, 120 bp, Artificial Sequence
  ENSG00000120925_20 (sequence is synthesized)
tgaagtcatacaacaaataactgatcaaagtggcattacaccaaaatttcttagtaggactcctgcatagaatgtttagatagacgtgaaagttgttaagaggaacagcaagagagaaac

SEQ ID NO: 240042 - DNA, 120 bp, Artificial Sequence
  ENSG00000120925_21 (sequence is synthesized)
tggttctttggaagtctttcgtgctacattatacctccatcagagtaagacagcttaggcactcctaagaggaaaggtctgtggagatgacatgaatccgaattctacacttccaaatca

SEQ ID NO: 240043 - DNA, 120 bp, Artificial Sequence
  ENSG00000120925_22 (sequence is synthesized)
aataggtaaaagggtggcatacatcacagaaaaacatttcagctgcagtcaccaacttgaaaagcgagtgagtaggagtttgtcacactgccatgtaccagactggaaatgcatttccta

SEQ ID NO: 240044 - DNA, 120 bp, Artificial Sequence
  ENSG00000120925_23 (sequence is synthesized)
ccaattacacatttggtgtgggggaatggtgatgtcattttttgacaggattttattttgtgtgcatgcattctgctccaagtgtcacaattctggttacaataattataatatttggag

SEQ ID NO: 240045 - DNA, 120 bp, Artificial Sequence
  ENSG00000120925_24 (sequence is synthesized)
ttactactaagactttcctgaaagaggtgtattgtaccaaattttgtaacataaaaaaatactaaatgatcttaaagcttcctaaattgtgaaaagggtatgtgctaacatctcagaact

SEQ ID NO: 240046 - DNA, 120 bp, Artificial Sequence
  ENSG00000120925_25 (sequence is synthesized)
ttagacctgcttgttgtcatctttaccgatctctgatgataaatgcagaagggatctgagagtttttaaagcaagtagagtcaatcagagttttgaacatcatagtaatacttccgtgat

SEQ ID NO: 240047 - DNA, 120 bp, Artificial Sequence
  ENSG00000120925_26 (sequence is synthesized)
tcagagttagatcatataaatcaaagtaacaatttggattttttttaaacaacaatatcataactgtcataaaacagatggtccaaccccaggagcagataataacttgggcagctctgt

SEQ ID NO: 240048 - DNA, 120 bp, Artificial Sequence
  ENSG00000120925_27 (sequence is synthesized)
ggggaacaagacggggaaaacaactgttctaactgcccactagaacagtggtttcaactactacaattctcagtgtttgagaggtacaagggaagaaaggactatgtggatcccttgtgg

SEQ ID NO: 240049 - DNA, 120 bp, Artificial Sequence
  ENSG00000120925_28 (sequence is synthesized)
ctatgcagatacctacctcacagagttgttgtagaagactggtggtttggttcaaaccttgtgattaaagagtttgtcaagcattttattcttttgaataaaagcaacatatctaaaaca

SEQ ID NO: 240050 - DNA, 120 bp, Artificial Sequence
  ENSG00000120925_29 (sequence is synthesized)
gtggagaggtacgtccggcgcgcggcggccacgcccaccctatcggggcccgcggagccgcggacggcggggtctggccttcttggggtagctctggccgccgaggctctgcggggcggc

SEQ ID NO: 240051 - DNA, 120 bp, Artificial Sequence
  ENSG00000120925_30 (sequence is synthesized)
ttagaggaagacacatttcttctcttttgtaaagtgaggtttaccaacaagtattctttgactatgagaaatcttggccaggcacagtagctaacgcctataatcctagcactttgggag

SEQ ID NO: 240052 - DNA, 120 bp, Artificial Sequence
  ENSG00000120925_31 (sequence is synthesized)
ggagtttgagaccagccttggaaacatgatgaaaccccatctctagaaaaaacaccaaaaaattggacaagagtgttggcacatgcctgtagtccctgcttcttgggaggctgaaatggg

SEQ ID NO: 240053 - DNA, 86 bp, Artificial Sequence
  ENSG00000120925_32 (sequence is synthesized)
atagtgagccatgatcgcactattgcactcccacctgggtggcagtgagacccttcctcaaaaaacaagaaaagaaaaagaaaaaa

SEQ ID NO: 240054 - DNA, 120 bp, Artificial Sequence
  ENSG00000120925_33 (sequence is synthesized)
aaattagaaaggggacgtctagtgggttgcccgggaggggtggcgggagcggtcctggaaataatctgtcctctgtcgccgggaactggcgaggtagttccttcgcggtggagaggtgtc

SEQ ID NO: 240055 - DNA, 120 bp, Artificial Sequence
  ENSG00000120925_34 (sequence is synthesized)
cagttgtccaatctgtagacaaacgggttcatcagagaagagcagccgtgcaagtgagcagacccatcaagaggctgttgcatgcctggacacacagaactctcctgcctgtacagtcgg

SEQ ID NO: 240056 - DNA, 120 bp, Artificial Sequence
  ENSG00000120925_35 (sequence is synthesized)
atgcaggtcagggcctcagcatataccccatgaccgaatgctcccttcagcctcaccacgtttatgcttcacgttactagactgtgtttccatcctttggttctcaggttaaatgttccc

SEQ ID NO: 240057 - DNA, 120 bp, Artificial Sequence
  ENSG00000120925_36 (sequence is synthesized)
tcctcactcagactacccaaaagtaggcagtgcaaaagtagtgcaaaagtaggcagtgaccctcccctccccttaccccagggcactctgaggcattcagacatctcagcacagcatcat

SEQ ID NO: 240058 - DNA, 120 bp, Artificial Sequence
  ENSG00000120925_37 (sequence is synthesized)
tgttagttttgtccacccagatattcacagatgtaccattatgcctgccaccacagtagtgctcaacacattaaagattaataaataaagcaagggaaagacaggaaagggcagaagaca

SEQ ID NO: 240059 - DNA, 120 bp, Artificial Sequence
  ENSG00000120925_38 (sequence is synthesized)
aggaaagatcacttcttactcagtcatggctgccgcccaggtctaagccaccctcacttctcacctaaaggatcacagcgaccttccaggcagtctcccaggcaccaagtgcctggctcc

SEQ ID NO: 240060 - DNA, 120 bp, Artificial Sequence
  ENSG00000120925_39 (sequence is synthesized)
ctacatgcaacgcagcccgatgatcatctcaagtgtgactctgctggaaagcctgctctccctttcccacagagtaaaggtaaagtcctcacgccagcctgcaaggccccatgtgacctt

SEQ ID NO: 240061 - DNA, 120 bp, Artificial Sequence
  ENSG00000120925_40 (sequence is synthesized)
ggttgctcatttcctctctaacctcatctcacatttgtccccacagctcactctgctccagccatccagccctccttgctgtcctttgagcaggctgaagacgcccagcctcaggagctc

SEQ ID NO: 240062 - DNA, 120 bp, Artificial Sequence
  ENSG00000120925_41 (sequence is synthesized)
tgccctggccagtccctctgactgctaggctcctccgccgggcatcctcacagccaactctcaccaactccagatcttcgcacaatagccatttcctctgttaggcctgtcctgtccacc

SEQ ID NO: 240063 - DNA, 120 bp, Artificial Sequence
  ENSG00000120925_42 (sequence is synthesized)
ataaggaaacttgcaactccctcagcccacagagcacctctcaccggctaacatactctgtggtcacgtgtttgctatctgcctccctaatgtctttgagaacattagctccctgagggc

SEQ ID NO: 240064 - DNA, 120 bp, Artificial Sequence
  ENSG00000120925_43 (sequence is synthesized)
agaaatctccttcactgacatatcccaagcccccagaactatgcgtgcagcatagtcagtaactatttgttgaatcaatgaatgagaaaacaatatcagggaactctaagttgaaataca

SEQ ID NO: 240065 - DNA, 120 bp, Artificial Sequence
  ENSG00000120925_44 (sequence is synthesized)
ctttctcagttcacaatgttatccattctgacctttatcagacacaggcacagaggacctcagagatattcccagcagtctcaatatccatggtaatgctaataaactactattctggca

SEQ ID NO: 240066 - DNA, 120 bp, Artificial Sequence
  ENSG00000120937_0 (sequence is synthesized)
aggaggagcaccccgcaggctgagggcaggtgggaagcaaacccggacgcatcgcagcagcagcagcagcagcagaagcagcagcagcagcctccgcagtccctccagagacatggatcc

SEQ ID NO: 240067 - DNA, 120 bp, Artificial Sequence
  ENSG00000120937_1 (sequence is synthesized)
ccagacagcaccttcccgggcgctcctgctcctgctcttcttgcatctggctttcctgggaggtcgttcccacccgctgggcagccccggttcagcctcggacttggaaacgtccgggtt

SEQ ID NO: 240068 - DNA, 120 bp, Artificial Sequence
  ENSG00000120937_2 (sequence is synthesized)
ccgggaggtagccaccgagggcatccgtgggcaccgcaaaatggtcctctacaccctgcgggcaccacgaagccccaagatggtgcaagggtctggctgctttgggaggaagatggaccg

SEQ ID NO: 240069 - DNA, 120 bp, Artificial Sequence
  ENSG00000120937_3 (sequence is synthesized)
gatcagctcctccagtggcctgggctgcaaagtgctgaggcggcattaagaggaagtcctggctgcagacacctgcttctgattccacaaggggctttttcctcaaccctgtggccgcct

SEQ ID NO: 240070 - DNA, 120 bp, Artificial Sequence
  ENSG00000120937_4 (sequence is synthesized)
ttgaagtgactcatttttttaatgtatttatgtatttatttgattgttttatataagatggtttcttacctttgagcacaaaatttccacggtgaaataaagtcaacattataagcttta

SEQ ID NO: 240071 - DNA, 120 bp, Artificial Sequence
  ENSG00000120942_0 (sequence is synthesized)
gcgggcctccagaggccggcgcacaagatggcggctctggcggcctaaagaaggcggccgcggctcagccgtgggctctaacgcggggctgggggccggagacagacttcgcccaggtga

SEQ ID NO: 240072 - DNA, 120 bp, Artificial Sequence
  ENSG00000120942_1 (sequence is synthesized)
cgggtagtaggggcggcgccgcttggcctcgtggggtgtaagacccacttgctgttgcccccggaccttgccgccacaccagccctgtcctggggcggaaccgaaggaaggtcgggccct

SEQ ID NO: 240073 - DNA, 120 bp, Artificial Sequence
  ENSG00000120942_2 (sequence is synthesized)
gctgccccgccccgtccttcctccttcccgggcggtcactgtgcgtggctcacttttagagtttacttcaaccacgtggagcttccatggcggcctctcaggtcctgggggagaagatta

SEQ ID NO: 240074 - DNA, 120 bp, Artificial Sequence
  ENSG00000120942_3 (sequence is synthesized)
acatcctgtcgggagagactgtcaaagctggggacagggacccgctggggaacgactgtcccgagcaagataggctcccccagcgctcctggaggcagaagtgtgcctcctacgtgttgg

SEQ ID NO: 240075 - DNA, 120 bp, Artificial Sequence
  ENSG00000120942_4 (sequence is synthesized)
ccctgaggccctggagcttcagtgcctcactcacaccggtggccctgggcagtgcccttgcctacagatcccacggtgtcctggatcccaggctcttggtgggttgtgccgtggctgtcc

SEQ ID NO: 240076 - DNA, 120 bp, Artificial Sequence
  ENSG00000120942_5 (sequence is synthesized)
tggctgtgcacggggccggtaatttggtcaacacttactatgacttttccaagggcattgaccacaaaaagagtgatgacaggacacttgtggaccgaatcttggagccgcaggatgtcg

SEQ ID NO: 240077 - DNA, 120 bp, Artificial Sequence
  ENSG00000120942_6 (sequence is synthesized)
tccggttcggagtcttcctctacacgttgggctgcgtctgtgccgcttgcctctactacctgtcccctctgaaactggagcacttggctcttatctactttggaggcctgtctggctcct

SEQ ID NO: 240078 - DNA, 120 bp, Artificial Sequence
  ENSG00000120942_7 (sequence is synthesized)
ttctctacacaggaggaattggattcaagtacgtggctctgggagacctcatcatcctcatcacttttggcccgctggctgtgatgttcgcctacgccatccaggtggggtccctggcca

SEQ ID NO: 240079 - DNA, 120 bp, Artificial Sequence
  ENSG00000120942_8 (sequence is synthesized)
tcttcccactggtctatgccatccccctcgccctcagcaccgaggccattctccattccaacaacaccagggacatggagtccgaccgggaggctggtatcgtcacgctggccatcctca

SEQ ID NO: 240080 - DNA, 120 bp, Artificial Sequence
  ENSG00000120942_9 (sequence is synthesized)
tcggccccacgttctcctacattctctacaacacactgctcttcctgccctacctggtcttcagcatcctggccacacactgcaccatcagcctggcactccccctgcttaccattccca

SEQ ID NO: 240081 - DNA, 120 bp, Artificial Sequence
  ENSG00000120942_10 (sequence is synthesized)
tggccttctcccttgagagacagtttcgaagccaggccttcaacaaactgccccagaggactgccaagctcaacctcctgctgggacttttctatgtctttggcatcattctggcaccag

SEQ ID NO: 240082 - DNA, 120 bp, Artificial Sequence
  ENSG00000120942_11 (sequence is synthesized)
caggcagtctgcccaaaatttaaggggacaagtagctccccccacgacatgtctccctttcttagaatatattaaagtcagagtctctgaggaaggaatgtgatttggcagtcagggtac

SEQ ID NO: 240083 - DNA, 120 bp, Artificial Sequence
  ENSG00000120942_12 (sequence is synthesized)
taagcatgggtgggaactcctgccttataaaaattgtttttgtgttcttaaagataatatgttgtttttctgttttttgttttttccattttatggggaatttaaaaaccattcttgtat

SEQ ID NO: 240084 - DNA, 120 bp, Artificial Sequence
  ENSG00000120942_13 (sequence is synthesized)
cagaaggtgaattaggcgcatggtctttgttttattaataatttccactagagggtgttctcaggtcactttgcagtgaagtggacttagttcctccttgttctgtacaaaatgtctcca

SEQ ID NO: 240085 - DNA, 120 bp, Artificial Sequence
  ENSG00000120942_14 (sequence is synthesized)
gactttgtaaaggagctgcccagtttggcctcctgtcccgaaaagaccctaataactaggcagagtgttgtcctgctttcttcgtctcgtaggatgtgctatgattggtgccaggcctca

SEQ ID NO: 240086 - DNA, 120 bp, Artificial Sequence
  ENSG00000120942_15 (sequence is synthesized)
agatacgctgcctgagacagagagagtccctcattaacagcctgtgtggctgtcagctttttgcctaaattgtgattcagatgcttttgttctctctcctttcacttattgccacagttg

SEQ ID NO: 240087 - DNA, 120 bp, Artificial Sequence
  ENSG00000120942_16 (sequence is synthesized)
aggaaaagtgtcagattaccctgcagcaagacaagccaaggactgggagggaaaaaaaaaccactctggaggcaactgagaaaatcactgcttttggataggaatcagtagggtggctgt

SEQ ID NO: 240088 - DNA, 120 bp, Artificial Sequence
  ENSG00000120942_17 (sequence is synthesized)
tttccctttgttgaatctactagagtgacaggaaggactcccagccctttcagtaactatcaggagccctgaaacggtagaggcactgccatccttgtgggatactcaaagcccacaggg

SEQ ID NO: 240089 - DNA, 120 bp, Artificial Sequence
  ENSG00000120942_18 (sequence is synthesized)
cttttccctccctattgcatcttctgatgctccccacacctaccctccacctctccacctctgtggtgttcccatttgtgtgtttcccatctgtggagccagactgagcaatagcttagc

SEQ ID NO: 240090 - DNA, 120 bp, Artificial Sequence
  ENSG00000120942_19 (sequence is synthesized)
agcgagtcagggacagctgccactttccacagagccacaggatgggcagagcagggacccagggaatgaatagccagtggacaaacagtcttgagctctgttcagccagagtgatgggcc

SEQ ID NO: 240091 - DNA, 120 bp, Artificial Sequence
  ENSG00000120942_20 (sequence is synthesized)
ctgccagttaaggggctgtgtcttcatccttgaagacagatgtgcaatattgaccctgcctctccccagggctttgtggaaagatagttgagggctttagtgagatcacactcagagtgg

SEQ ID NO: 240092 - DNA, 120 bp, Artificial Sequence
  ENSG00000120942_21 (sequence is synthesized)
ggcaattccagcatttatcctggctgcgtttcattgcattgtctgtgaagtataatttctgggccagaattgctcagttgcatttgatccaggactatagattggaaatgggtcatcatt

SEQ ID NO: 240093 - DNA, 120 bp, Artificial Sequence
  ENSG00000120942_22 (sequence is synthesized)
gttttctgttgtgattatagccattctagtaggcgtttaaggtcatggcctgcagaaaatgatgtaagaactagttcttaatctttcagatcaagctaatgatgatatggaaccttgagt

SEQ ID NO: 240094 - DNA, 120 bp, Artificial Sequence
  ENSG00000120942_23 (sequence is synthesized)
atctttcagatcaagctaatgatgatatggaaccttgagttcgaattgattggtttacttggaaaaaaacatgtttgaaaattgcaaaagttccgccgggcgcggtggctcatgcctgta

SEQ ID NO: 240095 - DNA, 120 bp, Artificial Sequence
  ENSG00000120942_24 (sequence is synthesized)
gcaaaagttcctctaaagttaaatcaaaggtggtttgtctagcagagagccagaatcttctaatagtgggcagagcccagagacaaggggaagaaagatgaccttctccccagtccttcc

SEQ ID NO: 240096 - DNA, 120 bp, Artificial Sequence
  ENSG00000120942_25 (sequence is synthesized)
cagcaccatttttgtttcacaccaggcttgtggcattttggtgctcacaggggttttgccttctgacctctccttggagtaggccattctcatgcagggctcaccctgaggcaggaggac

SEQ ID NO: 240097 - DNA, 120 bp, Artificial Sequence
  ENSG00000120942_26 (sequence is synthesized)
caagggctccctgcgtccacggaccacgtatgccttggtggtcactcccatcggggctatcagttctgcactgtgccctggtgcggattttaatgcatatttttatatataaatgttccc

SEQ ID NO: 240098 - DNA, 120 bp, Artificial Sequence
  ENSG00000120942_27 (sequence is synthesized)
aaaggccaaatttgttgccaggttttatacgcaggtcaccataatttgtattatgttccctgagtcaatgaaggttttctttagacttcttaattaaaaagagaagaaagaaaatgttca

SEQ ID NO: 240099 - DNA, 120 bp, Artificial Sequence
  ENSG00000120942_28 (sequence is synthesized)
ggtgtgagagtttggaccactgcatcacatcagctgtcagtaaggacagtcctcatctagccactgaagcagagtgcccacatcaggagcagccagtgctcaagctcccagaaactgcct

SEQ ID NO: 240100 - DNA, 120 bp, Artificial Sequence
  ENSG00000120942_29 (sequence is synthesized)
agtgacctgccttctagacctgcctcctgagaatggggctggccaccttcgaggagagggaagtgagccccttcctgcctcggggtgggcagcatctggagctgacaattgtatgcatgt

SEQ ID NO: 240101 - DNA, 120 bp, Artificial Sequence
  ENSG00000120942_30 (sequence is synthesized)
tcaggacacaggatactcaactcttcgggttcagtgtgctgtgtggagggagaggaagttgacacacgtgaaccatagaataaacaacgaccacagaacatcaaggtagagatggggctg

SEQ ID NO: 240102 - DNA, 120 bp, Artificial Sequence
  ENSG00000120942_31 (sequence is synthesized)
gttgctgcctgagagagtaagactcgaagttttccttaatcagcctcttttggctgtgcagttagacaactggagcattgaggcaggtgtgccaagggcactctgaccactgccaaggtc

SEQ ID NO: 240103 - DNA, 120 bp, Artificial Sequence
  ENSG00000120942_32 (sequence is synthesized)
aaagccttctgcagaatgaaaactccgacacttccttgctgagaaacaaacaagagagaatggcggggcatttaatcatccacagctgccaatacctaatcaagatgaatggcctggaga

SEQ ID NO: 240104 - DNA, 120 bp, Artificial Sequence
  ENSG00000120942_33 (sequence is synthesized)
gacaaggccagggaaagcatcccgtgaagcaggagcgctgagcccaagtctcctgcgagtcaggggagcccctcagccctgggccacattgaggccaagggaataccaggtgggaggccc

SEQ ID NO: 240105 - DNA, 120 bp, Artificial Sequence
  ENSG00000120942_34 (sequence is synthesized)
tcagattcaggggaagtgctgagggggtcagaggtcaccatggtcaccaatgagggccttccagctgacacttgccttggccaaagacctttactgagagcctgctctgtcccaggaggc

SEQ ID NO: 240106 - DNA, 120 bp, Artificial Sequence
  ENSG00000120942_35 (sequence is synthesized)
aagataaacgaggcacacccctgccctttgaggacacacagtgaactaatagcaaaagctacatgcatacattatcctgccacctcaagtgtcaacatagacacttgtccctagagatcc

SEQ ID NO: 240107 - DNA, 120 bp, Artificial Sequence
  ENSG00000120942_36 (sequence is synthesized)
ttaaagcccctctgaaggacaggccactcacagccatgtgtgagacatagaggcataaaggctgtggggaaatgagggcagaagagatgaacttctccatgccccattgttccagactgc

SEQ ID NO: 240108 - DNA, 120 bp, Artificial Sequence
  ENSG00000120948_0 (sequence is synthesized)
aaaccatctgctacgttacgtggggggaggtcagctcctatacagccacacttttttcaatcttcagcttttcaggcctaggtcctggttttattttagctttcagagcttctctgtagg

SEQ ID NO: 240109 - DNA, 120 bp, Artificial Sequence
  ENSG00000120948_1 (sequence is synthesized)
cttgaatttccaggaggcagcccgagtccctggggagagggtcatcgtggctctcgtcggtgccttccacctctggacaggcaaccggtgggagaggacgccggtgggcggggggaggag

SEQ ID NO: 240110 - DNA, 120 bp, Artificial Sequence
  ENSG00000120948_2 (sequence is synthesized)
gcggccctagcgccattttgtgggagcgaagcggtggctgggctgcgcttgggtccgtcgctgcttcggtgtccctgtcgggcttcccagcagcggcctagcgggaaaagtaaaagatgt

SEQ ID NO: 240111 - DNA, 120 bp, Artificial Sequence
  ENSG00000120948_3 (sequence is synthesized)
ctgaatatattcgggtaaccgaagatgagaacgatgagcccattgaaataccatcggaagacgatgggacggtgctgctctccacggttacagcccagtttccaggggcgtgtgggcttc

SEQ ID NO: 240112 - DNA, 120 bp, Artificial Sequence
  ENSG00000120948_4 (sequence is synthesized)
gctacaggaatccagtgtctcagtgtatgagaggtgtccggctggtagaaggaattctgcatgccccagatgctggctggggaaatctggtgtatgttgtcaactatccaaaagataaca

SEQ ID NO: 240113 - DNA, 120 bp, Artificial Sequence
  ENSG00000120948_5 (sequence is synthesized)
aaagaaaaatggatgagacagatgcttcatcagcagtgaaagtgaaaagagcagtccagaaaacatccgatttaatagtgttgggtctcccatggaaaacaaccgaacaggacctgaaag

SEQ ID NO: 240114 - DNA, 120 bp, Artificial Sequence
  ENSG00000120948_6 (sequence is synthesized)
agtattttagtacctttggagaagttcttatggtgcaggtcaagaaagatcttaagactggtcattcaaaggggtttggctttgttcgttttacggaatatgaaacacaagtgaaagtaa

SEQ ID NO: 240115 - DNA, 120 bp, Artificial Sequence
  ENSG00000120948_7 (sequence is synthesized)
tgtcacagcgacatatgatagatggacgatggtgtgactgcaaacttcctaattctaagcaaagccaagatgagcctttgagaagcagaaaagtgtttgtggggcgctgtacagaggaca

SEQ ID NO: 240116 - DNA, 120 bp, Artificial Sequence
  ENSG00000120948_8 (sequence is synthesized)
tgactgaggatgagctgcgggagttcttctctcagtacggggatgtgatggatgtcttcatccccaagccattcagggcctttgcctttgttacatttgcagatgatcagattgcgcagt

SEQ ID NO: 240117 - DNA, 120 bp, Artificial Sequence
  ENSG00000120948_9 (sequence is synthesized)
ctctttgtggagaggacttgatcattaaaggaatcagcgttcatatatccaatgccgaacctaagcacaatagcaatagacagttagaaagaagtggaagatttggtggtaatccaggtg

SEQ ID NO: 240118 - DNA, 120 bp, Artificial Sequence
  ENSG00000120948_10 (sequence is synthesized)
gctttgggaatcagggtggatttggtaatagcagagggggtggagctggtttgggaaacaatcaaggtagtaatatgggtggtgggatgaactttggtgcgttcagcattaatccagcca

SEQ ID NO: 240119 - DNA, 120 bp, Artificial Sequence
  ENSG00000120948_11 (sequence is synthesized)
tgatggctgccgcccaggcagcactacagagcagttggggtatgatgggcatgttagccagccagcagaaccagtcaggcccatcgggtaataaccaaaaccaaggcaacatgcagaggg

SEQ ID NO: 240120 - DNA, 120 bp, Artificial Sequence
  ENSG00000120948_12 (sequence is synthesized)
agccaaaccaggccttcggttctggaaataactcttatagtggctctaattctggtgcagcaattggttggggatcagcatccaatgcagggtcgggcagtggttttaatggaggctttg

SEQ ID NO: 240121 - DNA, 120 bp, Artificial Sequence
  ENSG00000120948_13 (sequence is synthesized)
gctcaagcatggattctaagtcttctggctggggaatgtagacagtggggttgtggttggttggtatagaatggtgggaattcaaatttttctaaactcatggtaagtatattgtaaaat

SEQ ID NO: 240122 - DNA, 120 bp, Artificial Sequence
  ENSG00000120948_14 (sequence is synthesized)
acatatgtactaagaattttcaaaattggtttgttcagtgtggagtatattcagcagtatttttgacatttttctttagaaaaaggaagagctaaaggaattttataagttttgttacat

SEQ ID NO: 240123 - DNA, 120 bp, Artificial Sequence
  ENSG00000120948_15 (sequence is synthesized)
gaaaggttgaaatattgagtggttgaaagtgaactgctgtttgcctgattggtaaaccaacacactacaattgatatcaaaaggtttctcctgtaatattttatccctggacttgtcaag

SEQ ID NO: 240124 - DNA, 120 bp, Artificial Sequence
  ENSG00000120948_16 (sequence is synthesized)
tgaattctttgcatgttcaaaacggaaaccattgattagaactacattctttaccccttgttttaatttgaaccccaccatatggatttttttccttaagaaaatctccttttaggagat

SEQ ID NO: 240125 - DNA, 120 bp, Artificial Sequence
  ENSG00000120948_17 (sequence is synthesized)
catggtgtcacagtgtttggttcttttgttttgttttttaacacttgtctcccctcatacacaaaagtacaatatgaagccttcatttaatctctgcagttcatctcatttcaaatgttt

SEQ ID NO: 240126 - DNA, 120 bp, Artificial Sequence
  ENSG00000120948_18 (sequence is synthesized)
atggaagaagcacttcattgaaagtagtgctgtaaatattctgccataggaatactgtctacatgctttctcattcaagaattcgtcatcacgcatcacaggccgcgtctttgacggtgg

SEQ ID NO: 240127 - DNA, 120 bp, Artificial Sequence
  ENSG00000120948_19 (sequence is synthesized)
gtgtcccatttttatccgctactctttatttcatggagtcgtatcaacgctatgaacgcaaggctgtgatatggaaccagaaggctgtctgaacttttgaaaccttgtgtgggattgatg

SEQ ID NO: 240128 - DNA, 120 bp, Artificial Sequence
  ENSG00000120948_20 (sequence is synthesized)
gtggtgccgaggcatgaaaggctagtatgagcgagaaaaggagagagcgcgtgcagagacttggtggtgcataatggatattttttaacttggcgagatgtgtctctcaatcctgtggct

SEQ ID NO: 240129 - DNA, 120 bp, Artificial Sequence
  ENSG00000120948_21 (sequence is synthesized)
ttggtgagagagtgtgcagagagcaatgatagcaaataatgtacgaatgttttttgcattcaaaggacatccacatctgttggaagacttttaagtgagtttttgttcttagataaccca

SEQ ID NO: 240130 - DNA, 120 bp, Artificial Sequence
  ENSG00000120948_22 (sequence is synthesized)
cttctgttactgatatgtaagtgtggcaatgtgaactgaagctgatgggctgagaacatggactgagcttgtggtgtgctttgcaggaggacttgaagcagagttcaccagtgagctcag

SEQ ID NO: 240131 - DNA, 120 bp, Artificial Sequence
  ENSG00000120948_23 (sequence is synthesized)
gtgtctcaaagaagggtggaagttctaatgtctgttagctacccataagaatgctgtttgctgcagttctgtgtcctgtgcttggatgctttttataagagttgtcattgttggaaattc

SEQ ID NO: 240132 - DNA, 120 bp, Artificial Sequence
  ENSG00000120948_24 (sequence is synthesized)
ttaaataaaactgatttaaataatatgtgtctttgttttgcagccctgaatgcaaagaattcatagcagttaattccccttttttgacccttttgagatggaactttcataaagtttctt

SEQ ID NO: 240133 - DNA, 120 bp, Artificial Sequence
  ENSG00000120948_25 (sequence is synthesized)
ggcagtagtttattttgcttcaaataaacttatttgaaaagttgtctcaagtcaaatggattcatcacctgtcatgcattgacacctgatacccagacttaattggtatttgttcttgca

SEQ ID NO: 240134 - DNA, 120 bp, Artificial Sequence
  ENSG00000120948_26 (sequence is synthesized)
ttggccaaagtgaaaatttttttttttcttttgaaatctagttttgaataagtctgggtgaccgcacctaaaatggtaagcagtaccctccggctttttcttagtgcctctgtgcatttg

SEQ ID NO: 240135 - DNA, 120 bp, Artificial Sequence
  ENSG00000120948_27 (sequence is synthesized)
ggtgatgttctatttacatggcctgtgtaaatctccattgggaagtcatgccttctaaaaagattcttatttgggggagtgggcaaaatgttgattattttctaatgctttgtagcaaag

SEQ ID NO: 240136 - DNA, 120 bp, Artificial Sequence
  ENSG00000120948_28 (sequence is synthesized)
catatcaattgaaaagggaatatcagcaccttcctagtttgggatttgaaaagtggaattaattgcagtagggataaagtagaagaaaccacaaattatcttgtgcctgaaatccattaa

SEQ ID NO: 240137 - DNA, 120 bp, Artificial Sequence
  ENSG00000120948_29 (sequence is synthesized)
gaggcctgatagctttaagaattagggtgggttgtctgtctggaagtgttaagtggaatgggctttgtcctccaggaggtgggggaatgtggtaacattgaatacagttgaataaaatcg

SEQ ID NO: 240138 - DNA, 120 bp, Artificial Sequence
  ENSG00000120948_30 (sequence is synthesized)
cttacaaaactcacactctcacaatgcattgttaagtatgtaaaagcaataacattgattctctgttgtacttttttgtaactaattctgtgagagttgagctcattttctagttggaag

SEQ ID NO: 240139 - DNA, 120 bp, Artificial Sequence
  ENSG00000120948_31 (sequence is synthesized)
aatgtgatatttgttgtgttggtagtttacctaatgcccttacctaattagattatgataaataggtttgtcattttgcaagttacataaacatttatcaatgaagtcatcctttagact

SEQ ID NO: 240140 - DNA, 120 bp, Artificial Sequence
  ENSG00000120948_32 (sequence is synthesized)
tgtaatcgccacattgtttcattattcagtttcctctgtaaagggatcttgagttgttttaattttttttttctgcatctgaatctgcatgatttccaaaccctgtaccatctgaatttt

SEQ ID NO: 240141 - DNA, 120 bp, Artificial Sequence
  ENSG00000120948_33 (sequence is synthesized)
gcattttagcacttgcactattactcagcagcagtaacatggtaacacttaaaatggtactcggggacctccaaagactaaactgacaagccttcaaggagcccaggggtaagttaactt

SEQ ID NO: 240142 - DNA, 120 bp, Artificial Sequence
  ENSG00000120948_34 (sequence is synthesized)
gtcaacggcatggtttaatcccttctttacacttgtgtaaatttcagttactggtcatagaaggctttcaatgttgagtggccttttattaacatgtttatggtactgcatagatacggg

SEQ ID NO: 240143 - DNA, 120 bp, Artificial Sequence
  ENSG00000120948_35 (sequence is synthesized)
tatttattttaccctaagaagattttgaagtttaaaagtacttaaactatttggcaaagatttgtttttaaaaatctatttggtcaatctaaatgcattcattctaaaaaattttttgaa

SEQ ID NO: 240144 - DNA, 120 bp, Artificial Sequence
  ENSG00000120948_36 (sequence is synthesized)
ccagataaataaaatttttttttgacaccacagtttagtgtctggagtcttactggaaaaacacgatttctttttatatgtgatatacagatgctggaaagttacctttaaaaattgagt

SEQ ID NO: 240145 - DNA, 120 bp, Artificial Sequence
  ENSG00000120948_37 (sequence is synthesized)
ctctaaagaaaaaagaaaataataaaaattgagtctcaagaagttgtacttcatatgcacaagagaaatgaggccaagactcacagtaagcttttacatggaatggtaacttttagttag

SEQ ID NO: 240146 - DNA, 120 bp, Artificial Sequence
  ENSG00000120948_38 (sequence is synthesized)
actgaaaaacttgaatgttagctattaaaaccttttaggaaggaatagccagctaaaaccaaatgagatttttaaagttaaatcagcacttaagttgtgtccttagtaggaaaaagtagg

SEQ ID NO: 240147 - DNA, 120 bp, Artificial Sequence
  ENSG00000120948_39 (sequence is synthesized)
aagttaactactccgtaatccaagagataatgtgtaacagtaagaatgattttgttgttgttgagtatgagcaaagtagcccctaagtgtgtattagggttctgtacttaactgttgtgt

SEQ ID NO: 240148 - DNA, 120 bp, Artificial Sequence
  ENSG00000120948_40 (sequence is synthesized)
gatgtgtgcttttgttaggcatcactgtgcccaagtatttcatgttcattgtaaagaggaaaaatacagatttctctataatgtcaccacttatttctaatgccacttttcatcttgtgg

SEQ ID NO: 240149 - DNA, 120 bp, Artificial Sequence
  ENSG00000120948_41 (sequence is synthesized)
aaatgccatgttttgattcagtcttctgaatttgaacattattcaggttatttccaattgctgggaatatccttactgctaaaataaattcttagcattggaattgctaggtcaaagatt

SEQ ID NO: 240150 - DNA, 120 bp, Artificial Sequence
  ENSG00000120948_42 (sequence is synthesized)
atgcatgctttttaagggcttttgaaatgtattgccagtctgtggcctgccaccctccctgaacatgcctggtcttgcttaaaatgtattgccaaatagtccttgggaagtttatgttgt

SEQ ID NO: 240151 - DNA, 120 bp, Artificial Sequence
  ENSG00000120948_43 (sequence is synthesized)
ctttaacaatgtgaaatagtactactattcacgttccttttgtctgacaatttgataagtgaataattgtatcccaccattctgtagtattggtttttaacatggaaattttagtcaata

SEQ ID NO: 240152 - DNA, 120 bp, Artificial Sequence
  ENSG00000120948_44 (sequence is synthesized)
cacttagaaaagatagcggcagggtgtgttcatgaaatccttttgtcttgttgaagtctttggcccttagtgcatgctgaatattttatgcttgtttgaaatatttagtttattacttct

SEQ ID NO: 240153 - DNA, 120 bp, Artificial Sequence
  ENSG00000120948_45 (sequence is synthesized)
ccaaactaaacctttgttcattttgttcttccttttcgctatggatggaaaagagaaaaggttatttgtcaagttaatagtttcttacatagttatatgttaaaacataaagagaatcag

SEQ ID NO: 240154 - DNA, 120 bp, Artificial Sequence
  ENSG00000120949_0 (sequence is synthesized)
ctgagtcatctctgcacgtgtttgcccccttttttcttcgctgcttgtagctaagtgttcctggaaccaatttgatacgggagaactaaggctgaaacctcggaggaacaaccacttttg

SEQ ID NO: 240155 - DNA, 120 bp, Artificial Sequence
  ENSG00000120949_1 (sequence is synthesized)
aagtgacttcgcggcgtgcgttgggtgcggactaggtggccgcggcgggagtgtgctggagcctgaagtccacgcgcgcggctgagaaccgccgggaccgcacgtgggcgccgcgcgctt

SEQ ID NO: 240156 - DNA, 120 bp, Artificial Sequence
  ENSG00000120949_2 (sequence is synthesized)
cccccgcttcccaggtgggcgccggccgccaggccacctcacgtccggccccggggatgcgcgtcctcctcgccgcgctgggactgctgttcctgggggcgctacgagccttcccacagg

SEQ ID NO: 240157 - DNA, 120 bp, Artificial Sequence
  ENSG00000120949_3 (sequence is synthesized)
atcgacccttcgaggacacctgtcatggaaaccccagccactactatgacaaggctgtcaggaggtgctgttaccgctgccccatggggctgttcccgacacagcagtgcccacagaggc

SEQ ID NO: 240158 - DNA, 120 bp, Artificial Sequence
  ENSG00000120949_4 (sequence is synthesized)
ctactgactgcaggaagcagtgtgagcctgactactacctggatgaggccgaccgctgtacagcctgcgtgacttgttctcgagacgacctcgtggagaagacgccgtgtgcatggaact

SEQ ID NO: 240159 - DNA, 120 bp, Artificial Sequence
  ENSG00000120949_5 (sequence is synthesized)
cctcccgtgtctgcgaatgtcgacccggcatgttctgttccacgtctgccgtcaactcctgtgcccgctgcttcttccattctgtctgtccggcagggatgattgtcaagttcccaggca

SEQ ID NO: 240160 - DNA, 120 bp, Artificial Sequence
  ENSG00000120949_6 (sequence is synthesized)
cggcgcagaagaacacggtctgtgagccggcttccccaggggtcagccctgcctgtgccagcccagagaactgcaaggaaccctccagtggcaccatcccccaggccaagcccaccccgg

SEQ ID NO: 240161 - DNA, 120 bp, Artificial Sequence
  ENSG00000120949_7 (sequence is synthesized)
tgtccccagcaacctccagtgccagcaccatgcctgtaagagggggcacccgcctcgcccaggaagctgcttctaaactgacgagggctcccgactctccctcctctgtgggaaggccta

SEQ ID NO: 240162 - DNA, 120 bp, Artificial Sequence
  ENSG00000120949_8 (sequence is synthesized)
gttcagatccaggtctgtccccaacacagccatgcccagaggggtctggtgattgcagaaagcagtgtgagcccgactactacctggacgaggccggccgctgcacggcctgcgtgagct

SEQ ID NO: 240163 - DNA, 120 bp, Artificial Sequence
  ENSG00000120949_9 (sequence is synthesized)
gttctcgagatgaccttgtggagaagacgccatgtgcatggaactcctcccgcacctgcgaatgtcgacctggcatgatctgtgccacatcagccaccaactcctgtgcccgctgtgtcc

SEQ ID NO: 240164 - DNA, 120 bp, Artificial Sequence
  ENSG00000120949_10 (sequence is synthesized)
cctacccaatctgtgcagcagagacggtcaccaagccccaggatatggctgagaaggacaccacctttgaggcgccacccctggggacccagccggactgcaaccccaccccagagaatg

SEQ ID NO: 240165 - DNA, 120 bp, Artificial Sequence
  ENSG00000120949_11 (sequence is synthesized)
gcgaggcgcctgccagcaccagccccactcagagcttgctggtggactcccaggccagtaagacgctgcccatcccaaccagcgctcccgtcgctctctcctccacggggaagcccgttc

SEQ ID NO: 240166 - DNA, 120 bp, Artificial Sequence
  ENSG00000120949_12 (sequence is synthesized)
tggatgcagggccagtgctcttctgggtgatcctggtgttggttgtggtggtcggctccagcgccttcctcctgtgccaccggagggcctgcaggaagcgaattcggcagaagctccacc

SEQ ID NO: 240167 - DNA, 120 bp, Artificial Sequence
  ENSG00000120949_13 (sequence is synthesized)
tgtgctacccggtccagacctcccagcccaagctagagcttgtggattccagacccaggaggagctcaacgcagctgaggagtggtgcgtcggtgacagaacccgtcgcggaagagcgag

SEQ ID NO: 240168 - DNA, 120 bp, Artificial Sequence
  ENSG00000120949_14 (sequence is synthesized)
ggttaatgagccagccactgatggagacctgccacagcgtgggggcagcctacctggagagcctgccgctgcaggatgccagcccggccgggggcccctcgtcccccagggaccttcctg

SEQ ID NO: 240169 - DNA, 120 bp, Artificial Sequence
  ENSG00000120949_15 (sequence is synthesized)
gaaaatctacatcatgaaggctgacaccgtgatcgtggggaccgtgaaggctgagctgccggagggccggggcctggcggggccagcagagcccgagttggaggaggagctggaggcgga

SEQ ID NO: 240170 - DNA, 120 bp, Artificial Sequence
  ENSG00000120949_16 (sequence is synthesized)
ccataccccccactaccccgagcaggagacagaaccgcctctgggcagctgcagcgatgtcatgctctcagtggaagaggaagggaaagaagaccccttgcccacagctgcctctggaaa

SEQ ID NO: 240171 - DNA, 120 bp, Artificial Sequence
  ENSG00000120949_17 (sequence is synthesized)
gtgaggcctgggctgggctggggctaggagggcagcagggtggcctctgggaggccaggatggcactgttggcaccgaggttgggggcagaggcccatctggcctgaactgaggctccag

SEQ ID NO: 240172 - DNA, 120 bp, Artificial Sequence
  ENSG00000120949_18 (sequence is synthesized)
catctagtggtggaccggccggtcactgcaggggtctggtggtctctgcttgcatccccaacttagctgtcccctgacccagagcctaggggatccggggcttgtacagaagagacagtc

SEQ ID NO: 240173 - DNA, 120 bp, Artificial Sequence
  ENSG00000120949_19 (sequence is synthesized)
caaggggactggatcccagcagtgatgttggttgaggcagcaaacagatggcaggatgggcactgccgagaacagcattggtcccagagccctgggcatcagaccttaaccaccaggccc

SEQ ID NO: 240174 - DNA, 120 bp, Artificial Sequence
  ENSG00000120949_20 (sequence is synthesized)
acagcccagcgagggagaggtcgtgaggccagctcccggggcccctgtaaccctactctcctctctccctggacctcagaggtgacacccattgggcccttccggcatgcccccagttac

SEQ ID NO: 240175 - DNA, 120 bp, Artificial Sequence
  ENSG00000120949_21 (sequence is synthesized)
tgtaaatgtggcccccagtgggcatggagccagtgcctgtggttgtttctccagagtcaaaagggaagtcgagggatggggcgtcgtcagctggcactgtctctgctgcagcggccacac

SEQ ID NO: 240176 - DNA, 120 bp, Artificial Sequence
  ENSG00000120949_22 (sequence is synthesized)
tgtactctgcactggtgtgagggcccctgcctggactgtgggaccctcctggtgctgcccaccttccctgtcctgtagccccctcggtgggcccagggcctagggcccaggatcaagtca

SEQ ID NO: 240177 - DNA, 120 bp, Artificial Sequence
  ENSG00000120949_23 (sequence is synthesized)
ctcatctcagaatgtccccaccaatccccgccacagcaggcgcctcgggtcccagatgtctgcagccctcagcagctgcagaccgcccctcaccaacccagagaacctgctttactttgc

SEQ ID NO: 240178 - DNA, 120 bp, Artificial Sequence
  ENSG00000120949_24 (sequence is synthesized)
ccagggacttcctccccatgtgaacatggggaacttcgggccctgcctggagtccttgaccgctctctgtgggccccacccactctgtcctgggaaatgaagaagcatcttccttaggtc

SEQ ID NO: 240179 - DNA, 120 bp, Artificial Sequence
  ENSG00000120949_25 (sequence is synthesized)
tgccctgcttgcaaatccactagcaccgaccccaccacctggttccggctctgcacgctttggggtgtggatgtcgagaggcaccacggcctcacccaggcatctgctttactctggacc

SEQ ID NO: 240180 - DNA, 120 bp, Artificial Sequence
  ENSG00000120949_26 (sequence is synthesized)
ataggaaacaagaccgtttggaggtttcatcaggattttgggtttttcacatttcacgctaaggagtagtggccctgacttccggtcggctggccagctgactccctagggccttcagac

SEQ ID NO: 240181 - DNA, 120 bp, Artificial Sequence
  ENSG00000120949_27 (sequence is synthesized)
gtgtatgcaaatgagtgatggataaggatgagtcttggagttgcgggcagcctggagactcgtggacttaccgcctggaggcaggcccgggaaggctgctgtttactcatcgggcagcca

SEQ ID NO: 240182 - DNA, 120 bp, Artificial Sequence
  ENSG00000120949_28 (sequence is synthesized)
cgtgctctctggaggaagtgatagtttctgaaaccgctcagatgttttggggaaagttggagaagccgtggccttgcgagaggtggttacaccagaacctggacattggccagaagaagc

SEQ ID NO: 240183 - DNA, 120 bp, Artificial Sequence
  ENSG00000120949_29 (sequence is synthesized)
ttaagtgggcagacactgtttgcccagtgtttgtgcaaggatggagtgggtgtctctgcatcacccacagccgcagctgtaaggcacgctggaaggcacacgcctgccaggcagggcagt

SEQ ID NO: 240184 - DNA, 120 bp, Artificial Sequence
  ENSG00000120949_30 (sequence is synthesized)
ctggcgcccatgatgggagggattgacatgtttcaacaaaataatgcacttccttacctagtggcccttcacacaacttttgaatctctaaaaatccataaaatccttaaagaactgtaa

SEQ ID NO: 240185 - DNA, 120 bp, Artificial Sequence
  ENSG00000120952_0 (sequence is synthesized)
cctgaagctactggttggttccctgagaggtcccagaactctgcaaagtgagtccagcgctgagatttttcttgcagatccatcaggatgagcatccaggccccaccgagactactggag

SEQ ID NO: 240186 - DNA, 120 bp, Artificial Sequence
  ENSG00000120952_1 (sequence is synthesized)
ctggcggggcagagcctgctgagagaccaggccttgtccatctctgccatggaggagctgcccagggtgctctatctcccactcttcagggaggccttcagcaggagacacttccagact

SEQ ID NO: 240187 - DNA, 120 bp, Artificial Sequence
  ENSG00000120952_2 (sequence is synthesized)
ctgacggtgatggtgcaggcctggcctttcacctgcctccctctggtatcgctgatgaagacgcttcatctggagccattgaaagcattgctggaagggcttcatatgctgcttacacag

SEQ ID NO: 240188 - DNA, 120 bp, Artificial Sequence
  ENSG00000120952_3 (sequence is synthesized)
cttcaagtgctggatttgcgggatgttgatgagaatttctgggccagatggcctggagcctgggccctgtcctgcttcccagaggccatgagtaagaggcagacagcagaggactgtcca

SEQ ID NO: 240189 - DNA, 120 bp, Artificial Sequence
  ENSG00000120952_4 (sequence is synthesized)
aggcagacagcagaggactgtccaaggacgggagagcaccagcccttaaaggtgttcatagacatctgcctcaaggaaataccccaggatgaatgcctgagatacctcttccagtgggtt

SEQ ID NO: 240190 - DNA, 120 bp, Artificial Sequence
  ENSG00000120952_5 (sequence is synthesized)
taccaaaggagaggtttagtacacctgtgctgtagtaagctggtcaattatctaacgccaattaaatatctcagaaagtcattgaaaataatatacattaatagtattggggagctggaa

SEQ ID NO: 240191 - DNA, 120 bp, Artificial Sequence
  ENSG00000120952_6 (sequence is synthesized)
tctccaggtgccatcattacacgtcagataatgaactcgagggatggttagtcaccagattcacctctgtgttcctcaggctggaacacctccagttgcttaaaataaaattgatcacct

SEQ ID NO: 240192 - DNA, 120 bp, Artificial Sequence
  ENSG00000120952_7 (sequence is synthesized)
gggcacctggaacagctgatcaggtgcctccagaaccccttggagaacttggaattaacttgtggcaacctattagaagaggacttgaagtgtctctcccagttcccaagcctcggttac

SEQ ID NO: 240193 - DNA, 120 bp, Artificial Sequence
  ENSG00000120952_8 (sequence is synthesized)
tcggttacctaaagcatctgaatctcagctacgtgctgctgttccgcatcagtcttgaacccctaggagctctgctagagaaaattgctgcctctctcgagaccctcgtgttagagggct

SEQ ID NO: 240194 - DNA, 120 bp, Artificial Sequence
  ENSG00000120952_9 (sequence is synthesized)
gtcagatccactactcccaactcagtgccatcctgcctggcctgagctgctgctcccagctcaccaccttctactttggcagcaattgcatgtctattgacgccctgaaggacctgctgc

SEQ ID NO: 240195 - DNA, 120 bp, Artificial Sequence
  ENSG00000120952_10 (sequence is synthesized)
gccacaccagtgggctgagcaagttaagcctggagacgtatcctgcccctgaggagagtttgaattccttggttcgtgtcaattgggagatcttcaccccacttcgggctgagctgatgt

SEQ ID NO: 240196 - DNA, 120 bp, Artificial Sequence
  ENSG00000120952_11 (sequence is synthesized)
gtacactgagggaattcaggcagcccaagaggatcttcattggccccaccccctgcccttcctgtggctcatcaccgtctgaggaactggagctccatctttgctgctagggaaggcgtg

SEQ ID NO: 240197 - DNA, 120 bp, Artificial Sequence
  ENSG00000120952_12 (sequence is synthesized)
cccagtggggtagagaaatccaaagttctcttccaggcacttggacactaaaatctactatgtaggtgcaaactatttttctcttttcttatttatttcattttttaataattccaaaat

SEQ ID NO: 240198 - DNA, 120 bp, Artificial Sequence
  ENSG00000120963_0 (sequence is synthesized)
ggcgcggcgtgcgcgggcacgaggcgtagtggtctcccctaaggctgaggcggcggcgggcgcgcggcggcggcgggcgtgcgaggctgttgtgctcccggctctcgtgtttcccctcct

SEQ ID NO: 240199 - DNA, 120 bp, Artificial Sequence
  ENSG00000120963_1 (sequence is synthesized)
gagcgggtggaggaggcccaagcggtgctgggcgcgctcccccttcctttccctccggcgtcctctcccggccctctcgcgctgcactgtctctccgacgcaagactgtcccggcccgga

SEQ ID NO: 240200 - DNA, 120 bp, Artificial Sequence
  ENSG00000120963_2 (sequence is synthesized)
tatggctcgtggacagcagaaaattcagtctcagcagaaaaatgccaaaaagcaagctggacaaaagaagaaacaaggacatgaccaaaaggctgctgccaaagctgccttaatatatac

SEQ ID NO: 240201 - DNA, 120 bp, Artificial Sequence
  ENSG00000120963_3 (sequence is synthesized)
ctgcactgtctgtaggacacaaatgccagaccctaagaccttcaagcagcactttgagagcaagcatcctaagactccacttcctccagaattagctgatgttcaggcataaggttgttt

SEQ ID NO: 240202 - DNA, 120 bp, Artificial Sequence
  ENSG00000120963_4 (sequence is synthesized)
acaggtgaattcatgacacctttgactcttctactgtctcagaccttaggtaacatacctgcagctgcttttctaacaaactgttgatcagcaaaaataaaggggctacagaaacactca

SEQ ID NO: 240203 - DNA, 120 bp, Artificial Sequence
  ENSG00000120963_5 (sequence is synthesized)
tttttatgctgttccctcttgggcttcatgcaaagacaattctgtgtaaatgtacagttgactctgatttggaaatatgaaaatcagtccatccttgttataaaaaatttttttacaatt

SEQ ID NO: 240204 - DNA, 120 bp, Artificial Sequence
  ENSG00000120963_6 (sequence is synthesized)
gtaattatattgatgttcatattgtgtaaaataactcatttaataaaatagtactttgatttacgacatcacaggataaatggttttagaaattctgttctaactttccacattatttgc

SEQ ID NO: 240205 - DNA, 120 bp, Artificial Sequence
  ENSG00000120963_7 (sequence is synthesized)
cttataaaaatctaatgaattcatcagctagaattgcaagtgcaattcttatatccctttctctgctcagtggcaggttcctcagttaaactagagcagactgattcattaaaattgtgc

SEQ ID NO: 240206 - DNA, 120 bp, Artificial Sequence
  ENSG00000120963_8 (sequence is synthesized)
atacgattttatgggcagctgatgatctaggtgaaaaatgacttatctgctgccttagtatattgcggttatgtgtcattgtacccctctgatcatttcctgtgtttgagttggaatatt

SEQ ID NO: 240207 - DNA, 120 bp, Artificial Sequence
  ENSG00000120963_9 (sequence is synthesized)
taaaattgcagtatgacctggctctaactgccagtcaggtgtaccctgtagataactgatagcttcctaaaagcggttggattgtcagtgagcccttgtgaaaggttaggttctaatgta

SEQ ID NO: 240208 - DNA, 120 bp, Artificial Sequence
  ENSG00000120963_10 (sequence is synthesized)
tatgccgtaatgaaataatcattaagcctattgtttaatgcaaaatatggaacaaatgtgaactggtaaaggtcgatcttgatactatattctttgaaaattcttgaagttctttaattt

SEQ ID NO: 240209 - DNA, 120 bp, Artificial Sequence
  ENSG00000120963_11 (sequence is synthesized)
aagttactatttggccatttttacaaatggattttgcattaacaggaagattggaatgacttgtggctggattaattcccagaaccctctccctcctttcttttctaagtgagttgttga

SEQ ID NO: 240210 - DNA, 120 bp, Artificial Sequence
  ENSG00000120963_12 (sequence is synthesized)
ttttaggagtttgctttgtgctgttacctaaaatcagagactggtgtacagtatgacttccatctgaacttgaaaagtattaaaatgggtcaatattcacattcttttagatctcaggat

SEQ ID NO: 240211 - DNA, 120 bp, Artificial Sequence
  ENSG00000120963_13 (sequence is synthesized)
gggaaaatgggtttgttcagatggatatggtaaatcttacccaattaaggaaggctaattttagagttcttctaatttgcttgtgtcaactcttaacttgtaaaactgctgttaactcgg

SEQ ID NO: 240212 - DNA, 120 bp, Artificial Sequence
  ENSG00000120963_14 (sequence is synthesized)
tttaaatttttaaattaatataatagaaagaacactaaaatacttactggtaactgcttagagccatttatctgatcctgtggattacagaatgcattccctcttctgctgtagcttatc

SEQ ID NO: 240213 - DNA, 120 bp, Artificial Sequence
  ENSG00000120963_15 (sequence is synthesized)
attgctttgttttgtagctctgcatattttgcccaccttgtcttccctgtaagtttaagacgtttccaaggaaaagcttcagggctgatagtttcttagcaattcctattcttatgccct

SEQ ID NO: 240214 - DNA, 120 bp, Artificial Sequence
  ENSG00000120963_16 (sequence is synthesized)
tactttaaaatagtccttttattttgtgtattttatttcctaagtttcagatgtaatatctgttgtttcctaacatgtcgattaccagaacgttagaattttacctaatttcttgtggat

SEQ ID NO: 240215 - DNA, 120 bp, Artificial Sequence
  ENSG00000120963_17 (sequence is synthesized)
attgcagaagttctggttaaatcacaacttaaaagtttttaaaagtgctttgagcatatgtatatgtttagtgacaaatcatataaaaccattcacaagttttggttttttttttttcgt

SEQ ID NO: 240216 - DNA, 120 bp, Artificial Sequence
  ENSG00000120963_18 (sequence is synthesized)
ttgttttagtgactaattcaggatgaaagtttttttgttcttgtatttaacccttttttataagcagctgaagacaccatatttaacactatatctcagtgatagggaaatagctgcatt

SEQ ID NO: 240217 - DNA, 120 bp, Artificial Sequence
  ENSG00000120963_19 (sequence is synthesized)
gatcttacatgagcataatcatccttatacttcatgaggggattattagtacaatccccattttactgtgtttgagttaaaaaccaaacatccctgtaatttaatttgaagattctttaa

SEQ ID NO: 240218 - DNA, 120 bp, Artificial Sequence
  ENSG00000120963_20 (sequence is synthesized)
cagattgcagcaaagttcattataaaactgttatggtgtcttcaaagacttgataaaataacactgagagagaattggtccatttgtatgctgtatttctattacttgccaaaaggaatg

SEQ ID NO: 240219 - DNA, 120 bp, Artificial Sequence
  ENSG00000120963_21 (sequence is synthesized)
gggttaagattaaacttgtttccattctcttcacatggatattcatccccatgtttaactgacacactgggggctcagttgtgtgctgtaatgtcttattaaagaagatattaaagaaaa

SEQ ID NO: 240220 - DNA, 120 bp, Artificial Sequence
  ENSG00000120963_22 (sequence is synthesized)
agcctgggaggagcgggaaaagggtcgcagcgcctgaggcccggccgccgcccgagtggatgagcgagcgagcgacttgtgaaacacgccgcggcccggtcaccaaccaggaccgggatc

SEQ ID NO: 240221 - DNA, 120 bp, Artificial Sequence
  ENSG00000120963_23 (sequence is synthesized)
gcgggaaggggatgagttcgggcgcctgccaggccctgcaggtggccgggtcgcaggccagccgcggaagcggagcggtaaccttacccccggcgacagccgccggtcagctgccagagt

SEQ ID NO: 240222 - DNA, 120 bp, Artificial Sequence
  ENSG00000120963_24 (sequence is synthesized)
gtggcgctcccggtggacgcaggggccgggtttcgggcagtctcggcctccaggaggcgcgtcttggtccagggtccgtgaggactggctagatgggggctgcgtggcctttggtggcag

SEQ ID NO: 240223 - DNA, 120 bp, Artificial Sequence
  ENSG00000120963_25 (sequence is synthesized)
ggaggaggagggggtctccgaggcgggagaggcgggtttgggaaggaaggtgcgccaggctgaagctggggtcggagaagtgttgggtggagacctcactgtgggtgcgttcctcctctc

SEQ ID NO: 240224 - DNA, 120 bp, Artificial Sequence
  ENSG00000120963_26 (sequence is synthesized)
ctctccccaaaacgatggtgttaaaagctagggtcaggatgtggagcgctgcctgggcctcttcctttccgatggttatggagaatgagcctacttcctggacccaaaatccttttcttc

SEQ ID NO: 240225 - DNA, 120 bp, Artificial Sequence
  ENSG00000120963_27 (sequence is synthesized)
tgttactcatttatgttggttttaaaaggagctttggggcagagcttacttgttgcctcctacgagagcgcctcattttagaactcgtttcttccactacttccctctttgcagccccct

SEQ ID NO: 240226 - DNA, 120 bp, Artificial Sequence
  ENSG00000120963_28 (sequence is synthesized)
cggaaaaccacactgagagttgcattaaaaaccagcatgtaggtatttgtaagtgactttttccctccagtttgtcgcatttaatcaaggagcggttgtagctgcctacgattttgtaga

SEQ ID NO: 240227 - DNA, 120 bp, Artificial Sequence
  ENSG00000120963_29 (sequence is synthesized)
aaattgtgttggcttgagagcaagtcctaagttgagctgtccaaaagcaggtggttggttcgtttgaatttctgctttcagaaaggaaatcgatggggcgtgttgtcagaagttaggggc

SEQ ID NO: 240228 - DNA, 120 bp, Artificial Sequence
  ENSG00000120963_30 (sequence is synthesized)
ctacctcatgcatttagcttattttattccatttcctttacctggtgttaagttttctgtcttcagaataagaacaagtgactactgtctttattaagtctcttcggtctttttggttgc

SEQ ID NO: 240229 - DNA, 120 bp, Artificial Sequence
  ENSG00000120963_31 (sequence is synthesized)
tgtttggtgacaatggaaaatgggttgaatctattgtgtaatgttatattttagggaaagtcctaagtgcaaaagttaaaaataattttgtgtgtctaatgacattgctttgtacgagtc

SEQ ID NO: 240230 - DNA, 120 bp, Artificial Sequence
  ENSG00000120963_32 (sequence is synthesized)
acaacatggaaatatcaaaatagctagtaacttctagaaagcaaaggaacttctgaaattagtggcttaccatttttgaagattttttttaacataaaacaagatttcccacaaaatcag

SEQ ID NO: 240231 - DNA, 120 bp, Artificial Sequence
  ENSG00000120963_33 (sequence is synthesized)
tgtattaagatacataaaatacattgtgtcgaagagttaagatgtgtgagaagactggctattttgttacaaggtcctgatagtaagacattgagacaaaaaaccttgcaaaacattggt

SEQ ID NO: 240232 - DNA, 120 bp, Artificial Sequence
  ENSG00000120963_34 (sequence is synthesized)
atacataaaggctgatcacgtgactactgtcgtccaaataatacataagtatccaaacctgtttccatgggaataggtttgtaagcttgcggtaacatcggacttaaatacacttttaaa

SEQ ID NO: 240233 - DNA, 120 bp, Artificial Sequence
  ENSG00000120963_35 (sequence is synthesized)
aaaaatgtgccatttggcttagaattaataattttttttaaagcaaaaatggaagcttagtcttcaaggactgataacagctggtaatatttaccattgtttggtgggaatggggttctc

SEQ ID NO: 240234 - DNA, 120 bp, Artificial Sequence
  ENSG00000120963_36 (sequence is synthesized)
atattaggctagcacgctaaacattttcaattacgaaaatgtattaggctcgtgtgctaccctaatataaaaaccccatatttcctcagttgaaatagtcagctgactatcctgaaaagc

SEQ ID NO: 240235 - DNA, 120 bp, Artificial Sequence
  ENSG00000120963_37 (sequence is synthesized)
tctgactttcagttcatttttttaatgctagtgggaacttctccaatcagtgtatttttttagtttccttttttggggaacaggaggagctcagtaatttttatgaaatgctttgacctc

SEQ ID NO: 240236 - DNA, 120 bp, Artificial Sequence
  ENSG00000120963_38 (sequence is synthesized)
atatccattaactaattatggtcctagtcagaagaagctagcacccttccctggtgaagttgatacaaatccattgtatgttcctgtcctgcaatgatttacattcagttacagtactag

SEQ ID NO: 240237 - DNA, 120 bp, Artificial Sequence
  ENSG00000120963_39 (sequence is synthesized)
tcaaaactatatatatatgaattctacttaggatccaattttgatatatttaaaaagcaattgagactcatgatagactttatgagcaggtttaacttgtgtggtcgaataaaagccttt

SEQ ID NO: 240238 - DNA, 120 bp, Artificial Sequence
  ENSG00000120963_40 (sequence is synthesized)
aatttaaatggaaaagtaaaagtaacttttttcagtgacttgatttttttttttgttttaatccatttgggttcacgtcagatcatcggtaacaaaaagtggtatctttcagctttgtaa

SEQ ID NO: 240239 - DNA, 120 bp, Artificial Sequence
  ENSG00000120963_41 (sequence is synthesized)
aagaaccctcttaaccaagttcattccctcaaatgggaactaacgtctagagagcaaagaaacttctggaattagtggcttgctgataatctcattttataatttgttcagcaatccagc

SEQ ID NO: 240240 - DNA, 120 bp, Artificial Sequence
  ENSG00000120963_42 (sequence is synthesized)
aagaccaactttttaaaaaaattaataacagtagttttatgaaaactaagtaagaaaacagtttccacctatttctgaggtctcctttagaaggagtaacagacagcttttatttctctt

SEQ ID NO: 240241 - DNA, 120 bp, Artificial Sequence
  ENSG00000120963_43 (sequence is synthesized)
aaagttataaaaatcacaatcgcaagtcacaatgaatactgggaagggaaattacttttgcagagtgatcaagtaaatgatagcgggggctaaacttttttagtaaacttgtgaagatta

SEQ ID NO: 240242 - DNA, 120 bp, Artificial Sequence
  ENSG00000120963_44 (sequence is synthesized)
catacagtaaagtgcataaatcttgagtgtacaattcaatgaatttttataagtaaacacacttgattcaagaacattttcaggaccccataagtccccttcatgtcctgtcttcccagt

SEQ ID NO: 240243 - DNA, 120 bp, Artificial Sequence
  ENSG00000120963_45 (sequence is synthesized)
cattacccataacccccaaggtgacccctttcactatagattagctttgcctgttttgaactttaaataatgtatattccccacaactggcttctttcctttaacattgagatacaacca

SEQ ID NO: 240244 - DNA, 120 bp, Artificial Sequence
  ENSG00000120963_46 (sequence is synthesized)
agttgttacttgtaacaattttttgtttgtgtgtttgtttatttatttttgagaccagagtctcactgtcgcccaggctgcagtgcagtggtgccatcacgcgtcactgcaacctctgcc

SEQ ID NO: 240245 - DNA, 120 bp, Artificial Sequence
  ENSG00000120963_47 (sequence is synthesized)
accttaaactgcagtttaagagggtggaaaaattactcaagtgaaactataagccctgttattcgtaagaaaacgtatgacacagagcaattggagaatctcttaatttgcatgcaaaaa

SEQ ID NO: 240246 - DNA, 120 bp, Artificial Sequence
  ENSG00000120963_48 (sequence is synthesized)
taacaggaggaaaaagtaaggaatgttatatctgatttcaagtgtgaatatgaagcaaaggaacttgagatgttaacacctgaaagaaatcaagatttcctagatacccctgaaacacag

SEQ ID NO: 240247 - DNA, 120 bp, Artificial Sequence
  ENSG00000120963_49 (sequence is synthesized)
ggctcaggactagaatatggaagccctgagagaacagatagcagaggagcattatatgtccaaaatgtctgaaagtgcacagaaagccagaagcctgcacgaagaggtgggatggagaat

SEQ ID NO: 240248 - DNA, 120 bp, Artificial Sequence
  ENSG00000120963_50 (sequence is synthesized)
cccggcccggggcgggccgcgggaaggggatgagttcgggcgcctgccaggccctgcaggtggccgggtcgcaggccagccgcggaagcggagcggagctttggggcagagcttacttgt

SEQ ID NO: 240249 - DNA, 120 bp, Artificial Sequence
  ENSG00000120963_51 (sequence is synthesized)
agaagagctggaatctgaactcaggcagttcagctccagagtccaccctctggaccactactgtactgcctctcaaagaagtacttctgaaattccaaatcagagcctcttgcctgtttg

SEQ ID NO: 240250 - DNA, 120 bp, Artificial Sequence
  ENSG00000120963_52 (sequence is synthesized)
tttaagctcattacccttgaagttagtgagtggcagtaccaaaggaaaccatagtggaacacaaatgccagaccctaagaccttcaagcagcactttgagagcaagcatcctaagactcc

SEQ ID NO: 240251 - DNA, 120 bp, Artificial Sequence
  ENSG00000120963_53 (sequence is synthesized)
cggtgtcctgggtggcggggctccgggaatgtgactcagccaccgcggccccgcgatccgctcccgggccagcgcctcagtcggtgccgaggagggcggcgccgagacgggcgcgtcagc

SEQ ID NO: 240252 - DNA, 120 bp, Artificial Sequence
  ENSG00000120963_54 (sequence is synthesized)
tttgactcttctactgtctcagaccttagggtttcccaaactctcgattgcctcttgcaagcagatgacctgggagcaaatgttatggcagaacgatggactcctagcaagggccgaagc

SEQ ID NO: 240253 - DNA, 120 bp, Artificial Sequence
  ENSG00000120963_55 (sequence is synthesized)
aggtgaaatgtgggaacgttaggaatttctttaccacaaagtccctcttcatatgccagtcactaagttgtaggaatttaaaggtgtttttgggataattgtctatactgagaaggttca

SEQ ID NO: 240254 - DNA, 120 bp, Artificial Sequence
  ENSG00000120963_56 (sequence is synthesized)
ccctttaaacaaatattttttgaatggctcctgtggccaggcaaaaatctctaggtgctgggaaaacagagtgaacaaaacaaaattgctttcctcatataaaataaagatgtcttcata

SEQ ID NO: 240255 - DNA, 120 bp, Artificial Sequence
  ENSG00000120963_57 (sequence is synthesized)
agggcatataatacacttcactagcacatcatataactctacactcttagagctatataatatgctagtaagtatacctctagttatataattggttttttcttcactaaatttataatt

SEQ ID NO: 240256 - DNA, 120 bp, Artificial Sequence
  ENSG00000120992_0 (sequence is synthesized)
gcacgcgcctgagcgtgcgcccggtggggccggccgggactcgccgctcgcacgcccttgggccgcggccgggcgcccgctcttccttccgcttgcgctgtgagctgaggcggtgtatgt

SEQ ID NO: 240257 - DNA, 120 bp, Artificial Sequence
  ENSG00000120992_1 (sequence is synthesized)
gtgtatgtgcggcaataacatgtcaaccccgctgcccgccatcgtgcccgccgcccggaaggccaccgctgcggtgattttcctgcatggattgggagatactgggcacggatgggcaga

SEQ ID NO: 240258 - DNA, 120 bp, Artificial Sequence
  ENSG00000120992_2 (sequence is synthesized)
agcctttgcaggtatcagaagttcacatatcaaatatatctgcccgcatgcgcctgttaggcctgttacattaaatatgaacgtggctatgccttcatggtttgatattattgggctttc

SEQ ID NO: 240259 - DNA, 120 bp, Artificial Sequence
  ENSG00000120992_3 (sequence is synthesized)
accagattcacaggaggatgaatctgggattaaacaggcagcagaaaatataaaagctttgattgatcaagaagtgaagaatggcattccttctaacagaattattttgggagggttttc

SEQ ID NO: 240260 - DNA, 120 bp, Artificial Sequence
  ENSG00000120992_4 (sequence is synthesized)
tcagggaggagctttatctttatatactgcccttaccacacagcagaaactggcaggtgtcactgcactcagttgctggcttccacttcgggcttcctttccacagggtcctatcggtgg

SEQ ID NO: 240261 - DNA, 120 bp, Artificial Sequence
  ENSG00000120992_5 (sequence is synthesized)
tgctaatagagatatttctattctccagtgccacggggattgtgaccctttggttcccctgatgtttggttctcttacggtggaaaaactaaaaacattggtgaatccagccaatgtgac

SEQ ID NO: 240262 - DNA, 120 bp, Artificial Sequence
  ENSG00000120992_6 (sequence is synthesized)
ctttaaaacctatgaaggtatgatgcacagttcgtgtcaacaggaaatgatggatgtcaagcaattcattgataaactcctacctccaattgattgacgtcactaagaggccttgtgtag

SEQ ID NO: 240263 - DNA, 120 bp, Artificial Sequence
  ENSG00000120992_7 (sequence is synthesized)
aagtacaccagcatcattgtagtagagtgtaaaccttttcccatgcccagtcttcaaatttctaatgttttgcagtgttaaaatgttttgcaaatacatgccaataacacagatcaaata

SEQ ID NO: 240264 - DNA, 120 bp, Artificial Sequence
  ENSG00000120992_8 (sequence is synthesized)
atatctcctcatgagaaatttatgatcttttaagtttctatacatgtattcttataagacgacccaggatctactatattagaatagatgaagcaggtagcttcttttttctcaaatgta

SEQ ID NO: 240265 - DNA, 120 bp, Artificial Sequence
  ENSG00000120992_9 (sequence is synthesized)
attcagcaaaataatacagtactgccaccagattttttattacatcatttgaaaattagcagtatgcttaatgaaaatttgttcaggtataaatgagcagttaagatataaacaatttat

SEQ ID NO: 240266 - DNA, 120 bp, Artificial Sequence
  ENSG00000120992_10 (sequence is synthesized)
gaggtggtattacattattcctaataatagggataatgctgtttattgtcaagaaaaagtaaaatcgttctcttcaattaatggcccttttattttgggaccaggcttttattttccctg

SEQ ID NO: 240267 - DNA, 120 bp, Artificial Sequence
  ENSG00000120992_11 (sequence is synthesized)
atattatttctatttaatactcttttctctcaagaaaaaaaaaaaagtttgttttttctttattgtccttcatagcaggccaagtattgcctctctgcaatagacagctactgtcaatac

SEQ ID NO: 240268 - DNA, 120 bp, Artificial Sequence
  ENSG00000120992_12 (sequence is synthesized)
atgctgtaatttgacattctgggtcacagatataaggtatttaaaatctatttatgctttatagagaaaccagacattaaaacttcatgcactacttatttcgaattactgtaccttatc

SEQ ID NO: 240269 - DNA, 120 bp, Artificial Sequence
  ENSG00000120992_13 (sequence is synthesized)
caaatttacacctagctattaggatcttcaacccaggtaacaggaataattctgtggtttcatttttctgtaaacaactgaaagaataattagatcatattctagtatgttctgaaatat

SEQ ID NO: 240270 - DNA, 120 bp, Artificial Sequence
  ENSG00000120992_14 (sequence is synthesized)
ctttaagactgatcttaaaaactaacttctaagatgatttcatcttctcatagtatagagtttactttgtacacgtttgaaaccaactactgtagaagatgaggaatctattgtaatttt

SEQ ID NO: 240271 - DNA, 120 bp, Artificial Sequence
  ENSG00000120992_15 (sequence is synthesized)
ttgctttattttcatctgccagtggacttatttgaaattttcactttagtcaaattattttttgtattagtttttgatgcagacataaaaatagcaatcattttaaattgtcaaaatttc

SEQ ID NO: 240272 - DNA, 120 bp, Artificial Sequence
  ENSG00000120992_16 (sequence is synthesized)
cagattactggtaaaaattatttgaaaacaaacttatgggtaataaaggctagtcagaaccctataccataaagtgtagttaccatacagattaatatgtagcaaaaatgtatgcttgat

SEQ ID NO: 240273 - DNA, 120 bp, Artificial Sequence
  ENSG00000120992_17 (sequence is synthesized)
atttctcaactgtgttaatttttctgctgtattccagctgaccaaaacaatattaagaatgcatctttataaatgggtgctaattgataatggaaataatttagtaatggactatacagg

SEQ ID NO: 240274 - DNA, 120 bp, Artificial Sequence
  ENSG00000120992_18 (sequence is synthesized)
atgttaataatgaagccatatgtttatgtctggatttaaaaattttaaacaatcatttactatgtcatttttctttaccttgaagaacataaactgttatttcacttctacaaatcagca

SEQ ID NO: 240275 - DNA, 120 bp, Artificial Sequence
  ENSG00000120992_19 (sequence is synthesized)
agatattatttatggcaagaaatattccattgaaatattgtgctgtaacatgggaaagtgtaaatgtttttcatggtttctatcaatgtgaaataaaatttaattctgacttttctgtga

SEQ ID NO: 240276 - DNA, 120 bp, Artificial Sequence
  ENSG00000120992_20 (sequence is synthesized)
tggggtcctatcggtggtgctaatagagatatttctattctccagtgccacggggattgtgaccctttggttcccctgatgtttggttctcttacggtggaaaaactaaaaacattggtg

SEQ ID NO: 240277 - DNA, 120 bp, Artificial Sequence
  ENSG00000120992_21 (sequence is synthesized)
gcattgcggaggaagtgtggccccgggacccccgcgggccggcctagggcacggcgtcagcctctgcagcgtgtttctgcctggtgtgtgggtgagggaaacctaagtccgccaggaaat

SEQ ID NO: 240278 - DNA, 120 bp, Artificial Sequence
  ENSG00000120992_22 (sequence is synthesized)
ttcatgtaaaagctttgattgatcaagaagtgaagaatggcattccttctaacagaattattttgggagggttttctcaggtaagataaaatttgagtggaatgtcagtaccatcagtat

SEQ ID NO: 240279 - DNA, 120 bp, Artificial Sequence
  ENSG00000120992_23 (sequence is synthesized)
tgtttaattaagtttcagtgtactggaactaattaatttcttcttgaaagaactataatacacatgtacacatgtaattaaatttctaagttaacacagtttatccttttaattaattaa

SEQ ID NO: 240280 - DNA, 120 bp, Artificial Sequence
  ENSG00000120992_24 (sequence is synthesized)
aactgataacacaggcatgagtcccctctataggaggagactactgataggaacagtaaagtggaagacaagagaatttcttccctttaccttcacgtattacaggttttaggtatgaat

SEQ ID NO: 240281 - DNA, 120 bp, Artificial Sequence
  ENSG00000120992_25 (sequence is synthesized)
atgtggtgtttatttttggcatttttctttgtctctgtactttttcccctgctttctgtactccctccacagacgtagcttcctcatacggacctttctttcatggctactgcggcatat

SEQ ID NO: 240282 - DNA, 120 bp, Artificial Sequence
  ENSG00000120992_26 (sequence is synthesized)
aagctgtttgccatggaaccagtccccagatgctctaacttatcatctgtaaatcttctaagttagcaacttagtgtttggattaccttaattagggagatgtttggattaccttaatta

SEQ ID NO: 240283 - DNA, 120 bp, Artificial Sequence
  ENSG00000120992_27 (sequence is synthesized)
taacccatgggcatggtcagagtgatggggcttctggatgctggcaggagtacagcttccagaatgtgggatgttgtgagctgggtaggcagatactctgaaggtgtctgctaaatagtt

SEQ ID NO: 240284 - DNA, 82 bp, Artificial Sequence
  ENSG00000120992_28 (sequence is synthesized)
ctgggtaggcagatactctgaaggtgtctgctaaatagttattattatcttaaattctcatttagaaagtaataccaattta

SEQ ID NO: 240285 - DNA, 120 bp, Artificial Sequence
  ENSG00000120992_29 (sequence is synthesized)
aaactgggtcatgcaacttttgtttacgcgttcaaaggtttaatgtttaagggcgctaaaatggtattttaagattgccagttaatgtatcttacagtgcggtgattttatgttttgaaa

SEQ ID NO: 240286 - DNA, 120 bp, Artificial Sequence
  ENSG00000120992_30 (sequence is synthesized)
taactctggtttctggaacatattaaaatttcaaattcctcattagttgctttgggtattggataccagagatccgtggaatgttagtagggacggtgtgcaattgagagctttccagag

SEQ ID NO: 240287 - DNA, 120 bp, Artificial Sequence
  ENSG00000120992_31 (sequence is synthesized)
cagttaaaatttcagagcagattgaagagaagaactagttgattttgataagagaactagtggcaacataaggcatgcagcattctgaatagagggattagatgttcactctaatgagtt

SEQ ID NO: 240288 - DNA, 120 bp, Artificial Sequence
  ENSG00000120992_32 (sequence is synthesized)
gaaaggcaggggaggcaactcaaagatttatttggaggcttatcaaacaatttgttgtactaactacttatttttattttattttttgtttgtttgcttttttcttttgttattattttt

SEQ ID NO: 240289 - DNA, 120 bp, Artificial Sequence
  ENSG00000120992_33 (sequence is synthesized)
tatttccgatatttgcctgatttgatttgacaccagccaccaagtttgatttttttatggatatcattagtaacaagatattccctaaattgctgtgggcaagcatgtgtgttccattga

SEQ ID NO: 240290 - DNA, 120 bp, Artificial Sequence
  ENSG00000121005_0 (sequence is synthesized)
ggaagcgctaggcgcctggttctgcgcgtactggctgtacggagcaggagcaagaggtcgccgccagcctccgccgccgagcctcgttcgtgtccccgcccctcgctcctgcagctactg

SEQ ID NO: 240291 - DNA, 120 bp, Artificial Sequence
  ENSG00000121005_1 (sequence is synthesized)
ctcagaaacgctggggcgcccaccctggcagactaacgaagcagctcccttcccaccccaactgcaggtctaattttggacgctttgcctgccatttcttccaggttgagggagccgcag

SEQ ID NO: 240292 - DNA, 120 bp, Artificial Sequence
  ENSG00000121005_2 (sequence is synthesized)
aggcggaggctcgcgtattcctgcagtcagcacccacgtcgcccccggacgctcggtgctcaggcccttcgcgagcggggctctccgtctgcggtcccttgtgaaggctctgggcggctg

SEQ ID NO: 240293 - DNA, 120 bp, Artificial Sequence
  ENSG00000121005_3 (sequence is synthesized)
cagaggccggccgtccggtttggctcacctctcccaggaaacttcacactggagagccaaaaggagtggaagagcctgtcttggagattttcctggggaaatcctgaggtcattcattat

SEQ ID NO: 240294 - DNA, 120 bp, Artificial Sequence
  ENSG00000121005_4 (sequence is synthesized)
gaagtgtaccgcgcgggagtggctcagagtaaccacagtgctgttcatggctagagcaattccagccatggtggttcccaatgccactttattggagaaacttttggaaaaatacatgga

SEQ ID NO: 240295 - DNA, 120 bp, Artificial Sequence
  ENSG00000121005_5 (sequence is synthesized)
tgaggatggtgagtggtggatagccaaacaacgagggaaaagggccatcacagacaatgacatgcagagtattttggaccttcataataaattacgaagtcaggtgtatccaacagcctc

SEQ ID NO: 240296 - DNA, 120 bp, Artificial Sequence
  ENSG00000121005_6 (sequence is synthesized)
taatatggagtatatgacatgggatgtagagctggaaagatctgcagaatcctgggctgaaagttgcttgtgggaacatggacctgcaagcttgcttccatcaattggacagaatttggg

SEQ ID NO: 240297 - DNA, 120 bp, Artificial Sequence
  ENSG00000121005_7 (sequence is synthesized)
agcacactggggaagatataggcccccgacgtttcatgtacaatcgtggtatgatgaagtgaaagactttagctacccatatgaacatgaatgcaacccatattgtccattcaggtgttc

SEQ ID NO: 240298 - DNA, 120 bp, Artificial Sequence
  ENSG00000121005_8 (sequence is synthesized)
tggccctgtatgtacacattatacacaggtcgtgtgggcaactagtaacagaatcggttgtgccattaatttgtgtcataacatgaacatctgggggcagatatggcccaaagctgtcta

SEQ ID NO: 240299 - DNA, 120 bp, Artificial Sequence
  ENSG00000121005_9 (sequence is synthesized)
cctggtgtgcaattactccccaaagggaaactggtggggccatgccccttacaaacatgggcggccctgttctgcttgcccacctagttttggagggggctgtagagaaaatctgtgcta

SEQ ID NO: 240300 - DNA, 120 bp, Artificial Sequence
  ENSG00000121005_10 (sequence is synthesized)
caaagaagggtcagacaggtattatccccctcgagaagaggaaacaaatgaaatagaacgacagcagtcacaagtccatgacacccatgtccggacaagatcagatgatagtagcagaaa

SEQ ID NO: 240301 - DNA, 120 bp, Artificial Sequence
  ENSG00000121005_11 (sequence is synthesized)
tgaagtcataagcgcacagcaaatgtcccaaattgtttcttgtgaagtaagattaagagatcagtgcaaaggaacaacctgcaataggtacgaatgtcctgctggctgtttggatagtaa

SEQ ID NO: 240302 - DNA, 120 bp, Artificial Sequence
  ENSG00000121005_12 (sequence is synthesized)
agctaaagttattggcagtgtacattatgaaatgcaatccagcatctgtagagctgcaattcattatggtataatagacaatgatggtggctgggtagatatcactagacaaggaagaaa

SEQ ID NO: 240303 - DNA, 120 bp, Artificial Sequence
  ENSG00000121005_13 (sequence is synthesized)
gcattatttcatcaagtccaatagaaatggtattcaaacaattggcaaatatcagtctgctaattccttcacagtctctaaagtaacagttcaggctgtgacttgtgaaacaactgtgga

SEQ ID NO: 240304 - DNA, 120 bp, Artificial Sequence
  ENSG00000121005_14 (sequence is synthesized)
acagctctgtccatttcataagcctgcttcacattgcccaagagtatactgtcctcgtaactgtatgcaagcaaatccacattatgctcgtgtaattggaactcgagtttattctgatct

SEQ ID NO: 240305 - DNA, 120 bp, Artificial Sequence
  ENSG00000121005_15 (sequence is synthesized)
gtccagtatctgcagagcagcagtacatgctggagtggttcgaaatcacggtggttatgttgatgtaatgcctgtggacaaaagaaagacctacattgcttcttttcagaatggaatctt

SEQ ID NO: 240306 - DNA, 120 bp, Artificial Sequence
  ENSG00000121005_16 (sequence is synthesized)
ctcagaaagtttacagaatcctccaggaggaaaggcattcagagtgtttgctgttgtgtgaaactgaatacttggaagaggaccataaagactattccaaatgcaatatttctgaatttt

SEQ ID NO: 240307 - DNA, 120 bp, Artificial Sequence
  ENSG00000121005_17 (sequence is synthesized)
ataaaacatgggacattagctttgggaaaagtaatgaaaatataatggttttagaaatcctgtgttaaatattgctatattttcttagcagttatttctacagttaattacatagtcatg

SEQ ID NO: 240308 - DNA, 120 bp, Artificial Sequence
  ENSG00000121005_18 (sequence is synthesized)
attgttctacgtttcatatattatatggtgctttgtatatgccactaataaaatgaatctaaacattgaatgtgaatggccctcagaaaatcatctagtgcatttaaaaataatcgactc

SEQ ID NO: 240309 - DNA, 120 bp, Artificial Sequence
  ENSG00000121005_19 (sequence is synthesized)
taaaactgaaagaaaccttatcacattttccccagttcaatgctatgccattaccaactccaaataatctcaaataattttccacttaataactgtaaagtttttttctgttaatttagg

SEQ ID NO: 240310 - DNA, 120 bp, Artificial Sequence
  ENSG00000121005_20 (sequence is synthesized)
catatagaatattaaattctgatattgcacttcttattttatataaaataatcctttaatatccaaatgaatctgttaaaatgtttgattccttgggaatggccttaaaaataaatgtaa

SEQ ID NO: 240311 - DNA, 120 bp, Artificial Sequence
  ENSG00000121005_21 (sequence is synthesized)
taaagtcagagtggtggtatgaaaacattcctagtgatcatgtagtaaatgtagggttaagcatggacagccagagctttctatgtactgttaaaattgaggtcacatattttcttttgt

SEQ ID NO: 240312 - DNA, 120 bp, Artificial Sequence
  ENSG00000121005_22 (sequence is synthesized)
atcctggcaaatactcctgcaggccaggaagtataatagcaaaaagttgaacaaagatgaactaatgtattacattaccattgccactgatttttttttaaatggtaaatgaccttgtat

SEQ ID NO: 240313 - DNA, 120 bp, Artificial Sequence
  ENSG00000121005_23 (sequence is synthesized)
ataaatattgccatatcatggtacctataatggtgatatatttgtttctatgaaaaatgtattgtgctttgatactaaaaatctgtaaaatgttagttttggtaattttttttctgctgg

SEQ ID NO: 240314 - DNA, 120 bp, Artificial Sequence
  ENSG00000121005_24 (sequence is synthesized)
tggatttacatattaaattttttctgctggtggataaacattaaaattaatcatgtttcaaagttttattttcagttccttttgcatgcctattttgatttagaaatcactttaagataa

SEQ ID NO: 240315 - DNA, 120 bp, Artificial Sequence
  ENSG00000121005_25 (sequence is synthesized)
atgaacaaaattattgtaagtcttctaaacttggtttattgacgttagtataaataacatacaataccagatgtctacaaaatcgacctgattatttaggtatttgtatgtgaaagagaa

SEQ ID NO: 240316 - DNA, 120 bp, Artificial Sequence
  ENSG00000121005_26 (sequence is synthesized)
acacatatttagaaacacagcaagggagattttgaataaagagagagatgaatttataaagtaggaaaaaaagaatctgaaagatacaaagtgattataaaagaattgacaggacaataa

SEQ ID NO: 240317 - DNA, 120 bp, Artificial Sequence
  ENSG00000121005_27 (sequence is synthesized)
atacttcaaatacttttaggaagtaaatgagtaggagtttaggagggataaacgagataaattccatgcaatgatcaaggaaagcaagagagcagataatacaaaagaaaaagaagaagg

SEQ ID NO: 240318 - DNA, 120 bp, Artificial Sequence
  ENSG00000121005_28 (sequence is synthesized)
ttcacataaatagcttctggagtgcaaattataaagacatcaacatttttgatcatataataagtactggcttacagctaagtggttccaaatactggtaattaaaacaatgatgtatac

SEQ ID NO: 240319 - DNA, 120 bp, Artificial Sequence
  ENSG00000121005_29 (sequence is synthesized)
gttaaagattgcaaaacttaaaagcagatttttatgggaacttttttcgaaaggatacatgaccaccttcttaaatagtatgactttacatagactctttttctggtccttactgctcct

SEQ ID NO: 240320 - DNA, 120 bp, Artificial Sequence
  ENSG00000121005_30 (sequence is synthesized)
cccacaacagggaagcccgatcagttctgtcagtataaggttttcttctatttgcccttagtttagatctccatcatcaattccacttactattgtaataccttcagctggagcctgtgt

SEQ ID NO: 240321 - DNA, 120 bp, Artificial Sequence
  ENSG00000121005_31 (sequence is synthesized)
ctttctccattcctttttaatacattcgtatttcccagccccagaacccttgaaattaactcttccatgagttttcattgctgaagaaaaaccaaacattcttgtaaaaacatttaagaa

SEQ ID NO: 240322 - DNA, 120 bp, Artificial Sequence
  ENSG00000121005_32 (sequence is synthesized)
cttccatagtcttgttcatattgtttacctatcttctacacaaggcgtgtccttgggtaagttatttaacttcaatttaccttacctgtaaaatggaacaaataatatctccttaagatt

SEQ ID NO: 240323 - DNA, 120 bp, Artificial Sequence
  ENSG00000121005_33 (sequence is synthesized)
gctctacgaattaattgacacattatgtgtgatgtacttaaaggaataataaatgcataatatgaggtcagtggacgccattttctgttataatcatttttgttatctaatttggggaaa

SEQ ID NO: 240324 - DNA, 120 bp, Artificial Sequence
  ENSG00000121005_34 (sequence is synthesized)
ctattcatctgtcatatactattgatcctttggcacttaaataaatgtgaaatcctccaggaattttcctgtgattctccttgtaagaattaaatgctctctaatatgatatccctttaa

SEQ ID NO: 240325 - DNA, 120 bp, Artificial Sequence
  ENSG00000121005_35 (sequence is synthesized)
agaacgctggacaatccagtaaaggtgctgctggtaataaaacatgaaactatatcttatgcttggtcaagacgtgtcaaatctgtatctgaaatagtgaatgaatgagatcagatgttg

SEQ ID NO: 240326 - DNA, 120 bp, Artificial Sequence
  ENSG00000121005_36 (sequence is synthesized)
tccagagaaggaaaatcaaatgataaaagtgttgagagaggggcagctcttgaaggaagatggaataagaacatggaaactcctgtgtggaaagaaaaggccaagaggtctgctaaatca

SEQ ID NO: 240327 - DNA, 120 bp, Artificial Sequence
  ENSG00000121022_0 (sequence is synthesized)
aggtgtcatggctgccccaagagtctaggtaagagtttgttcccgtggtgcggagggtcaaggcccacacccggaaacctagcgaggtaaagttgcgtcttggttgtagagacgacaact

SEQ ID NO: 240328 - DNA, 120 bp, Artificial Sequence
  ENSG00000121022_1 (sequence is synthesized)
tctccgcttcctcggcgatggcggcgtccgggagcggtatggcccagaaaacctgggaactggccaacaacatgcaggaagctcagagtatcgatgaaatctacaaatacgacaagaaac

SEQ ID NO: 240329 - DNA, 120 bp, Artificial Sequence
  ENSG00000121022_2 (sequence is synthesized)
agcagcaagaaatcctggcggcgaagccctggactaaggatcaccattactttaagtactgcaaaatctcagcattggctctgctgaagatggtgatgcatgccagatcgggaggcaact

SEQ ID NO: 240330 - DNA, 120 bp, Artificial Sequence
  ENSG00000121022_3 (sequence is synthesized)
tggaagtgatgggtctgatgctaggaaaggtggatggtgaaaccatgatcattatggacagttttgctttgcctgtggagggcactgaaacccgagtaaatgctcaggctgctgcatatg

SEQ ID NO: 240331 - DNA, 120 bp, Artificial Sequence
  ENSG00000121022_4 (sequence is synthesized)
aatacatggctgcatacatagaaaatgcaaaacaggttggccgccttgaaaatgcaatcgggtggtatcatagccaccctggctatggctgctggctttctgggattgatgttagtactc

SEQ ID NO: 240332 - DNA, 120 bp, Artificial Sequence
  ENSG00000121022_5 (sequence is synthesized)
ggacatacccaaagggctacaaacctcctgatgaaggaccttctgagtaccagactattccacttaataaaatagaagattttggtgtacactgcaaacaatattatgccttagaagtct

SEQ ID NO: 240333 - DNA, 120 bp, Artificial Sequence
  ENSG00000121022_6 (sequence is synthesized)
catatttcaaatcctctttggatcgcaaattgcttgagctgttgtggaataaatactgggtgaatacgttgagttcttctagcttgcttactaatgcagactataccactggtcaggtct

SEQ ID NO: 240334 - DNA, 120 bp, Artificial Sequence
  ENSG00000121022_7 (sequence is synthesized)
ttgatttgtctgaaaagttagagcagtcagaagcccagctgggacgagggagtttcatgttgggtttagaaacgcatgaccgaaaatcagaagacaaacttgccaaagctacaagagaca

SEQ ID NO: 240335 - DNA, 120 bp, Artificial Sequence
  ENSG00000121022_8 (sequence is synthesized)
gctgtaaaactaccatagaagctatccatggattgatgtctcaggttattaaggataaactgtttaatcaaattaacatctcttaaacagtctctgagaagtactttacctgaaagacag

SEQ ID NO: 240336 - DNA, 120 bp, Artificial Sequence
  ENSG00000121022_9 (sequence is synthesized)
tatgagaaaaatattcaagtaacactttaaaaccagttacccaaaatctgattagaagtataaggtgctctgaagtgtcctaaatattaatatcctgtaataaagctctttaaaatgaaa

SEQ ID NO: 240337 - DNA, 120 bp, Artificial Sequence
  ENSG00000121022_10 (sequence is synthesized)
actacctgcccatccaggaacaagcaatttacaaatttacaaaaagtagagtttatgctacagagaagacaaaaacgggagctggtcatgccagaaaaaccaaccatgtgatttgagggt

SEQ ID NO: 240338 - DNA, 120 bp, Artificial Sequence
  ENSG00000121022_11 (sequence is synthesized)
tgggcctttgcgccatgtgacatcagccaggcctaaggggaatgaatacagcagggctggagatcaagccaaggagcaacaattcaaccaatcattcctacataaggaaaatccagtaaa

SEQ ID NO: 240339 - DNA, 120 bp, Artificial Sequence
  ENSG00000121022_12 (sequence is synthesized)
aactctggacactcaggcttagccaaagaacaccaggaaaactaccacagttaagttggatgtactactcattgcattaaggaatgcacggagaacacacaccatggggaaccctgtggt

SEQ ID NO: 240340 - DNA, 120 bp, Artificial Sequence
  ENSG00000121022_13 (sequence is synthesized)
tattactgtaactgctgtttatatcgtcatgtcccggaaaggtccctgtcttccctgaatggtctctaccaacttcacctccggttctaggtgtcatggctgccccaagagtctagagac

SEQ ID NO: 240341 - DNA, 120 bp, Artificial Sequence
  ENSG00000121022_14 (sequence is synthesized)
agatttcgattcatgtcttgacttccaacatgaggtctacacatttttcagcttttggttgaaatctggcaaagcttaggaattaaatttggattctttctgtgggcagacatctaaaaa

SEQ ID NO: 240342 - DNA, 120 bp, Artificial Sequence
  ENSG00000121022_15 (sequence is synthesized)
ggctttgtagagacgttgactgactgctctgtaaggctgcttaagttgcttggttatctgcttgcttctgtaacaggctgtgcattttagtcaccattactttaagtactgcaaaatctc

SEQ ID NO: 240343 - DNA, 120 bp, Artificial Sequence
  ENSG00000121022_16 (sequence is synthesized)
caagcggtgatttaagttgtcacttctgaacatccgtattgtcatatatgccacacaccctaccttgagcccagtgtcgacatgcaccttgtttgggtcttcaactaatcccaaactggg

SEQ ID NO: 240344 - DNA, 120 bp, Artificial Sequence
  ENSG00000121022_17 (sequence is synthesized)
gattgcagctgttttcagaaatcgagtcagcagcccaaggtctcaaaaatagctatgagctattttcttttcttttttttttaatagaaatgggtcctcgctgtgttgctcaggctgatc

SEQ ID NO: 240345 - DNA, 120 bp, Artificial Sequence
  ENSG00000121022_18 (sequence is synthesized)
ccaaagtgctgggattacaggcgtgaggcctgggcctataatagttttttgattgctggtaattatttcggaggcacacggaggctctactacctggtctctaaaatgttactccaccag

SEQ ID NO: 240346 - DNA, 120 bp, Artificial Sequence
  ENSG00000121022_19 (sequence is synthesized)
gaggctctactacctggtctctaaaatgttactccaccagttcccataagccagaaattataaaaatagagcttaagaccttttgcccttcaacaatatccatttttccctgggagtggt

SEQ ID NO: 240347 - DNA, 120 bp, Artificial Sequence
  ENSG00000121022_20 (sequence is synthesized)
gacaagtcgagggatctttacccataatatttatcttttcctgagagcatctcctgagagatttcctgctatcaggaaaagataattattacgggttatgtttgagagtaaaaagagcac

SEQ ID NO: 240348 - DNA, 120 bp, Artificial Sequence
  ENSG00000121022_21 (sequence is synthesized)
gaaagctaatggttagatagaaaggaaagctgtggtcaacaagaggacatacttctactgcctcacagttttttttacaaggctagccttgtctctcagtattcagattccacaatggtg

SEQ ID NO: 240349 - DNA, 120 bp, Artificial Sequence
  ENSG00000121022_22 (sequence is synthesized)
aactgcggaagcacctagctagagatttccacgtcatttaattttcatgacaacccagtacagtatatccatccttttgttacaaattaaaaaacaagcaaatacgttatgtaatttatg

SEQ ID NO: 240350 - DNA, 120 bp, Artificial Sequence
  ENSG00000121022_23 (sequence is synthesized)
atcatactgacataagtgaactctcaactgagcaatagtcagacctaagatcaaatctcacagctgtcactaactagttgattgaccttaggaaatttacttatccatcttcatttgtca

SEQ ID NO: 240351 - DNA, 120 bp, Artificial Sequence
  ENSG00000121022_24 (sequence is synthesized)
taatatggaaataagacctacttattggtattgtcatagagattaggtgagataatgtataaaaagagtcgtctagaatgtatgtaataggagcacagtaacttgtctttcttcttttct

SEQ ID NO: 240352 - DNA, 120 bp, Artificial Sequence
  ENSG00000121022_25 (sequence is synthesized)
cttaaatatttggaaactgttggcctgcctcactgtctaattgtggctctaattatattcatcctagctgtcttgggctgcattaatgagaccaaaatgtaattttattcaagagtttaa

SEQ ID NO: 240353 - DNA, 120 bp, Artificial Sequence
  ENSG00000121022_26 (sequence is synthesized)
ttcactgatgaccaactctgaaatagtgatcataggagactaggatattagggctactttttaatttaaggctgatataacagggaagcccacccttcaacactctgttctttgagagta

SEQ ID NO: 240354 - DNA, 120 bp, Artificial Sequence
  ENSG00000121022_27 (sequence is synthesized)
gggttaagagacaggttaataatgctgataacagctagcacttattagggttctagtatgtgtaaggcactaagcactttatatacattatttcatttatttcatcctaacaacaattat

SEQ ID NO: 240355 - DNA, 120 bp, Artificial Sequence
  ENSG00000121022_28 (sequence is synthesized)
gaatatccctatttacagaaaaggaaacctaggcacagatattacagggttgtcccaataccacagctagggaatggcaatgtcaagattcagaccttagcagatgaatgtcagaaccca

SEQ ID NO: 240356 - DNA, 120 bp, Artificial Sequence
  ENSG00000121022_29 (sequence is synthesized)
cattcttaaccattaggccagaaggttaggcctcagaacagttaggcacaaccatccaagcagtcagaatccaagattgggtgattccaaattaatggagaaaaagtctgttgaactggt

SEQ ID NO: 240357 - DNA, 120 bp, Artificial Sequence
  ENSG00000121022_30 (sequence is synthesized)
catgttactcccttatttgaatagcatattaaaaaagtatttcagacttttcccctcccctaagggggatacgttgctgcactatgacatacttattgtttccagcctgcaaaaactgtc

SEQ ID NO: 240358 - DNA, 120 bp, Artificial Sequence
  ENSG00000121022_31 (sequence is synthesized)
cttttttactttttctccccgtagtctacactccctttccatcgctctaaattccttcaatacttactctttatcttcataaaaacttttctgaaattttactttatataaggaatttaa

SEQ ID NO: 240359 - DNA, 120 bp, Artificial Sequence
  ENSG00000121022_32 (sequence is synthesized)
caagttagttacaacttagaatggtacctgaatattaacttcttggaaactttaggagttgtcagacacaagttttaactttgaaaatttaggatacctcaggtaagaacatgaaaaggc

SEQ ID NO: 240360 - DNA, 120 bp, Artificial Sequence
  ENSG00000121022_33 (sequence is synthesized)
ttaaatcaaagttctaagcagtgttacggaacactcccagtcaccttttctaggttcaactagaaagtgtgacaaaagcagcccttaagtggatctttaaagtgtgtgtgtgtgtatgtg

SEQ ID NO: 240361 - DNA, 60 bp, Artificial Sequence
  ENSG00000121022_34 (sequence is synthesized)
cgattctcccgcctcagcctcccaagtaactgggaatataggcacctgccatcatgcctg

SEQ ID NO: 240362 - DNA, 120 bp, Artificial Sequence
  ENSG00000121022_35 (sequence is synthesized)
ttaaatcctaagatattacagaagtgattgtctctctcttaaattgtgcttctaaaacagtaatttagtatcccaaattttactaccaaagattttattaggaacaaatttgggatgtgt

SEQ ID NO: 240363 - DNA, 120 bp, Artificial Sequence
  ENSG00000121022_36 (sequence is synthesized)
tctttaataacttacgaaataattatgtggaccttcagatatataggctatacaaagttgcaaagattaataacatttactttcacagaaatttgaattttaggccgggcacagtggttc

SEQ ID NO: 240364 - DNA, 120 bp, Artificial Sequence
  ENSG00000121022_37 (sequence is synthesized)
gaaactctgtctccaaaaaaaaaaaagaaagaaaagaaatttgaattgtaatgcaataattagaggcagaaaggaaggaagaaacatattgacttctataaacatttatatgttggtatc

SEQ ID NO: 240365 - DNA, 120 bp, Artificial Sequence
  ENSG00000121022_38 (sequence is synthesized)
tatgttggtatctattttaagaactggtttggtttatagggaaaagaagagaaaagagtagctaaagtgtatcctgggattggaggtcattttgggttagccttatttcactgccatctt

SEQ ID NO: 240366 - DNA, 120 bp, Artificial Sequence
  ENSG00000121022_39 (sequence is synthesized)
cactgccatcttctcagtgggtttttagaaggtagagctagtggcctgcataaaagttgcgtttttcggctgggcatggtgacgcatgcttataatcccagccctttgggaggccaaggc

SEQ ID NO: 240367 - DNA, 70 bp, Artificial Sequence
  ENSG00000121022_40 (sequence is synthesized)
cccagccctttgggaggccaaggcaggcatattgcttgagctcaatttaaaaaaaaaattagctgggcat

SEQ ID NO: 240368 - DNA, 120 bp, Artificial Sequence
  ENSG00000121022_41 (sequence is synthesized)
ttggcatcaggagtcattttagatacttgctttgagtgtgtgttttgttcatctgtctttatgtatgtcatttatcagtttatctacatttattaattatgaagcaaaaattttactatg

SEQ ID NO: 240369 - DNA, 120 bp, Artificial Sequence
  ENSG00000121022_42 (sequence is synthesized)
gcaatgtcttcaattatataagaaatagaacagaagtagtaatcaaaagtagagaattttcctttttggggtagctttacaagaattgcatctcttctgagtattggtggggttttgtca

SEQ ID NO: 240370 - DNA, 120 bp, Artificial Sequence
  ENSG00000121022_43 (sequence is synthesized)
tttcttttgccttatactttttatcatttctaaaatctaaggccttcacccgctaacctaagtttgacttctgattgttggaggatgcttgtgattatttcagaaaaaagcatagtattc

SEQ ID NO: 240371 - DNA, 120 bp, Artificial Sequence
  ENSG00000121022_44 (sequence is synthesized)
tgtcaaattatcctaagtaataaacaaggaataacagattttaatataatataatattagaatcaatctctaattacaggtttgtataattttactcaccttctaaaacagaacaattgt

SEQ ID NO: 240372 - DNA, 120 bp, Artificial Sequence
  ENSG00000121022_45 (sequence is synthesized)
cagaacaattgtatcaaattttacgttgtcattctcttgtgaaagttctagtaagtaatgaaatggtcaaaaagacatggggaagactaataaaatcacaagggaaaacttcagattggg

SEQ ID NO: 240373 - DNA, 120 bp, Artificial Sequence
  ENSG00000121022_46 (sequence is synthesized)
gtggtttgagaagtatgaataaaactaaactcattggagttacatggatggattggggctgatcttgtgtgtttgaaatagttttcaatttatgacatcatgtgatgtgtgttttttttt

SEQ ID NO: 240374 - DNA, 120 bp, Artificial Sequence
  ENSG00000121022_47 (sequence is synthesized)
aggggtgaagagctttcaccgactgggagggggacagaatatgcgtcttggatctgcaagtagagcctaagccctccgctggggctttcactcccctttctgtcgctttaatccatttgc

SEQ ID NO: 240375 - DNA, 120 bp, Artificial Sequence
  ENSG00000121022_48 (sequence is synthesized)
cctggaggccgcatagctgcccgctgctctcggttcgccagtacgctggccggggacttggtcaactcgttctcctgctgtgcccaggggctattaaactgtgggggccacttctcaggc

SEQ ID NO: 240376 - DNA, 120 bp, Artificial Sequence
  ENSG00000121022_49 (sequence is synthesized)
acctacgccccgagggagccactgcccctgcccccgctccggggcagcgaatgcagccccaggaccctccaccctcaacctacaccaccccaggccacacctcgccactcacgctcccca

SEQ ID NO: 240377 - DNA, 120 bp, Artificial Sequence
  ENSG00000121022_50 (sequence is synthesized)
tccgcggctggctgactcttactcaggggagcgggctcgcgtccggggagacacacagtgctctagaggatcgtcgcggaccgaagaggttacagcggccacctggagcgggaacagcat

SEQ ID NO: 240378 - DNA, 120 bp, Artificial Sequence
  ENSG00000121022_51 (sequence is synthesized)
aacaacaccgcgggcagcagcgaccgcagtggcccaggaatccggaccgtgtaaccagggaacctccccgaccccggcagctgcaagacccctgctcacagaactcccgcccccaaccct

SEQ ID NO: 240379 - DNA, 120 bp, Artificial Sequence
  ENSG00000121022_52 (sequence is synthesized)
cataactcgtagtcaccgatgccggcctcacggcggcgaaatcccaactctccacacccttaactcgggcacctcccccaccgcacccagccgccacgagaccccctgccgacaagaaac

SEQ ID NO: 240380 - DNA, 120 bp, Artificial Sequence
  ENSG00000121022_53 (sequence is synthesized)
aggcaagtatattaatagcagccagaagtgacacctgatggcaaggggagaaaacactgttaagaccagaacagtctgaacctttgtatgagaatgcagactataccactggtcaggtct

SEQ ID NO: 240381 - DNA, 120 bp, Artificial Sequence
  ENSG00000121039_0 (sequence is synthesized)
agagccggcccggagcgctctgacttgcaagcgggctgcgctgcggagcccagtgcccgagtgacacccgcggagagtgcagggccggggaacgcgagccctcgggggcagctgcaaggc

SEQ ID NO: 240382 - DNA, 120 bp, Artificial Sequence
  ENSG00000121039_1 (sequence is synthesized)
gttgggcagcgcttgcctgcgccgagcgagtctccccttcccggcgctccgccgccccgcaccccactctcccaccctctcgcaacttgggtcgagttgacaactcccgcggcagcccgc

SEQ ID NO: 240383 - DNA, 120 bp, Artificial Sequence
  ENSG00000121039_2 (sequence is synthesized)
tggcccgtgccgcctccgctgcgcacccctcccccggggtgagagggagccggcgcgccggttccggggacgctcgggcggcagcagcttggccatgagggcagttcgagtagtctaact

SEQ ID NO: 240384 - DNA, 120 bp, Artificial Sequence
  ENSG00000121039_3 (sequence is synthesized)
gcagttcgagtagtctaactcgcggctgtcaccgccactgcagcggagccggccggccgggcgctgcgggacgggcgggcggctgccggcaggaggcgccgagccgggtgactgccgcgg

SEQ ID NO: 240385 - DNA, 80 bp, Artificial Sequence
  ENSG00000121039_4 (sequence is synthesized)
agcggcgccgcgcactccaacccggcgggcacctcgggggcgggcgcggggcgcagccttctcgtcccggcctctgtgac

SEQ ID NO: 240386 - DNA, 120 bp, Artificial Sequence
  ENSG00000121039_5 (sequence is synthesized)
aagcgccccggagccgggagcccgattgccgggctcggggtgggcgcggacgcaggcactgggctcgtgcggggccccgggcgtcgcgatgaacatcgtggtggagttcttcgtggtcac

SEQ ID NO: 240387 - DNA, 120 bp, Artificial Sequence
  ENSG00000121039_6 (sequence is synthesized)
tttcaaagtgctctgggcgttcgtgctggccgcggcgcgctggctggtgcggcccaaggagaagagcgtggcgggccaggtgtgcctcatcaccggcgccggcagcggcctgggccgcct

SEQ ID NO: 240388 - DNA, 120 bp, Artificial Sequence
  ENSG00000121039_7 (sequence is synthesized)
cttcgcgctggagttcgcccggcgtcgggcgctgctggtgctgtgggacatcaacacgcaaagcaacgaggagacggctggcatggtgcgccacatctaccgcgacctggaggcggccga

SEQ ID NO: 240389 - DNA, 120 bp, Artificial Sequence
  ENSG00000121039_8 (sequence is synthesized)
cgccgctgcgctgcaagctgggaatggtgaggaagaaattctgccccactgtaacttgcaggtttttacctacacctgtgacgtggggaagagggagaacgtctacctgacggctgaaag

SEQ ID NO: 240390 - DNA, 120 bp, Artificial Sequence
  ENSG00000121039_9 (sequence is synthesized)
agtccgcaaggaggttggcgaagtctcagtcctggtcaataatgctggtgtggtctctgggcatcaccttctggaatgtcctgatgagctcattgagagaaccatgatggtcaattgcca

SEQ ID NO: 240391 - DNA, 120 bp, Artificial Sequence
  ENSG00000121039_10 (sequence is synthesized)
tgcacacttctggaccactaaggcttttcttcctacgatgctggagattaatcatggtcatattgtgacagttgcaagttccttgggattgttcagtactgccggagttgaggattactg

SEQ ID NO: 240392 - DNA, 120 bp, Artificial Sequence
  ENSG00000121039_11 (sequence is synthesized)
tgccagtaaatttggagttgtgggttttcatgaatccctgagccatgaactaaaggctgctgaaaaggatggaattaaaacaaccttggtttgcccttatcttgtagacactggcatgtt

SEQ ID NO: 240393 - DNA, 120 bp, Artificial Sequence
  ENSG00000121039_12 (sequence is synthesized)
cagaggctgccgaatcaggaaagaaattgagccttttctgccacctctgaagcctgattactgtgtgaagcaggccatgaaggccatcctcactgaccagcccatgatctgcactccccg

SEQ ID NO: 240394 - DNA, 120 bp, Artificial Sequence
  ENSG00000121039_13 (sequence is synthesized)
cctcatgtacatcgtgaccttcatgaagagcatcctaccatttgaagcagttgtgtgcatgtatcggttcctaggagcggacaagtgtatgtacccctttattgctcaaagaaagcaagc

SEQ ID NO: 240395 - DNA, 120 bp, Artificial Sequence
  ENSG00000121039_14 (sequence is synthesized)
cacaaacaataatgaagcaaaaaatggaatctaagaatctttttgtatggaatattacttctatcagaagatgatcaagatgtttcagtccagtgcacatcagcattgctgacattttat

SEQ ID NO: 240396 - DNA, 120 bp, Artificial Sequence
  ENSG00000121039_15 (sequence is synthesized)
ggattctaaacttgtgttgtttcttttttaaatcaactttttaaaaaaataaagtgtaaattaaccgactagagtacttggaaaatgtgatcagtacaagtgaacttaggttgttgccaa

SEQ ID NO: 240397 - DNA, 120 bp, Artificial Sequence
  ENSG00000121039_16 (sequence is synthesized)
tgtttcatgtgtgtgatttttcagaattcccagagtttactcattcttgttattaaactctagccagttgacatcttcgcaatttcaaggactgatagtgctgtattttctcacgttttc

SEQ ID NO: 240398 - DNA, 120 bp, Artificial Sequence
  ENSG00000121039_17 (sequence is synthesized)
taagtttccgttttgcaaggcctaggtgactttttcatggtgtttgtatgtttagctcttttgaaaaggaattttgaaatctccatcaactgaagtaaatgatgtctgagtgttacagta

SEQ ID NO: 240399 - DNA, 120 bp, Artificial Sequence
  ENSG00000121039_18 (sequence is synthesized)
ctccatcaactgaagtaaatgatgtctgagtgttacagtaaaggtgaccaagtctctttcttaaagtcacaatgactaaagtattagttgaatttttttttttttttttttgatggagtc

SEQ ID NO: 240400 - DNA, 73 bp, Artificial Sequence
  ENSG00000121039_19 (sequence is synthesized)
tcgctctgtcaccaggctggagtgcagtagcacaatcacggctcactgcaatctctgcctcccagtttcaagt

SEQ ID NO: 240401 - DNA, 120 bp, Artificial Sequence
  ENSG00000121039_20 (sequence is synthesized)
ttttatctctgatatacttcattaagtgtctggagacctaattatcctaaaagatcatacattttctacctatgaattttgctgcatacagaaagtgccctttcctcaggaagttgctgt

SEQ ID NO: 240402 - DNA, 120 bp, Artificial Sequence
  ENSG00000121039_21 (sequence is synthesized)
gtttcatttctttggatggactcttatctagaatacatagcagctctgcaaaggaacagtttttaaaaatgggaacttctacattgaaaagtccccatttttgtgccaactatgattagt

SEQ ID NO: 240403 - DNA, 120 bp, Artificial Sequence
  ENSG00000121039_22 (sequence is synthesized)
gagaggaagaaatcttattctatggcatatgtatggaagggtgtaaagattcttttgaaaggtttattcacattgtagaacagcaaatgacatttttacagtatttttttgtaaagcaaa

SEQ ID NO: 240404 - DNA, 120 bp, Artificial Sequence
  ENSG00000121039_23 (sequence is synthesized)
ctattttgtgccttgaatttggtatatgtgtattagtgaaacattgtaaaggtgaacttctacctctgtatctaaatgtataccatccacttgtaaatgactataaactattatgtgatt

SEQ ID NO: 240405 - DNA, 120 bp, Artificial Sequence
  ENSG00000121039_24 (sequence is synthesized)
gcttttttttttagaatgtcttgtttaaatagtggccaatgtttaaggctgttaaaataagccaacttttactaattggggagttttataaatgactgattaaatttaaagaattaactt

SEQ ID NO: 240406 - DNA, 120 bp, Artificial Sequence
  ENSG00000121039_25 (sequence is synthesized)
acatgcaattgtgtgattattagttatcagcagtgttgtaaggaaaattattgtgtttttttttatgatcattatcccactttaggtaaagaaaaatattggaatggaatagtgttggga

SEQ ID NO: 240407 - DNA, 120 bp, Artificial Sequence
  ENSG00000121039_26 (sequence is synthesized)
aacagacattaacaacctagggtgcctgcactcaaatagccgatgttactgtccctagattagagacttgattaagggcttgtttgtaccaaaagtggggaaacaatgccatgacctgtg

SEQ ID NO: 240408 - DNA, 120 bp, Artificial Sequence
  ENSG00000121039_27 (sequence is synthesized)
ttttagtttggctgcaccacagatcaaatctgcactgtgtctacatataggaaaggtcctggtgtgtgctaatgttcccaatgcaggacttgaggaagagctctgttatatgtttccatt

SEQ ID NO: 240409 - DNA, 120 bp, Artificial Sequence
  ENSG00000121039_28 (sequence is synthesized)
tctctttatcaaagataaccaaaccttatggcccttataacaatggaggcactggctgcctcttaattttcaatcatggacctaaagaagtactctgaagggtctcaacaatgccaggtg

SEQ ID NO: 240410 - DNA, 120 bp, Artificial Sequence
  ENSG00000121039_29 (sequence is synthesized)
gggacagatatactcagagattatccaggtctgcctcccagcgagcctggagtacaccagaccctcctagagaaatctgttataatttaacaacccacttatccaccttaaaactgagga

SEQ ID NO: 240411 - DNA, 120 bp, Artificial Sequence
  ENSG00000121039_30 (sequence is synthesized)
aagtcgtctttacatctaattttattcttgtgtgttataacttaaacctatttctatttttgtttgttattgcccttataagggtgtccatctccaagttcaataaactaattcatttaa

SEQ ID NO: 240412 - DNA, 120 bp, Artificial Sequence
  ENSG00000121039_31 (sequence is synthesized)
tgggaggaaggcagctgtaaagctcagtcgttggcaagccttgcagcgttagaaatttgaagctcactgtagtatttttgttttgtgtgatctttgtcctactgatcgccatgtgactca

SEQ ID NO: 240413 - DNA, 120 bp, Artificial Sequence
  ENSG00000121039_32 (sequence is synthesized)
agtgccagcctgaaagcaacctgtactctttcgccacaaggtctccttagctcttccctatggtaaactgcagtgtatgctggttactgttagtcgttttgtccccgcccacccccccgc

SEQ ID NO: 240414 - DNA, 120 bp, Artificial Sequence
  ENSG00000121039_33 (sequence is synthesized)
cacccctaactcagtatttttgagagggcagaggattgaacattttgaactagtttgaaagattgccataaaaataacacgaaggagcgtaaaaccctgggtttgtttattttactttct

SEQ ID NO: 240415 - DNA, 120 bp, Artificial Sequence
  ENSG00000121039_34 (sequence is synthesized)
cagcaaaataggtggaaggtgatttgaatcactccaaagtcaggcttggagtcccaagtctgacctggaaaatggactctagctctgcctcttatcccacacatgtgtgtgtctgtgtga

SEQ ID NO: 240416 - DNA, 120 bp, Artificial Sequence
  ENSG00000121039_35 (sequence is synthesized)
acatgtgtgtgtgttggtggtttgttttgttttgttttcctcttatgtacttgggaagcagttgctgagggtcttgcggagctctgtttcctccagtgtagcatagcagcaggtgcaggg

SEQ ID NO: 240417 - DNA, 120 bp, Artificial Sequence
  ENSG00000121039_36 (sequence is synthesized)
gtccaaagctatggtggcaaaatgaagaatgaaaggaataaattgcacactatcatttcaacatgtaacccagtgaatcaaactgaaggtaggatgtctatatacccttcatttcagggg

SEQ ID NO: 240418 - DNA, 120 bp, Artificial Sequence
  ENSG00000121039_37 (sequence is synthesized)
cccctagagaatataccttagctttccctcttccggcatcctggaaagtggatacctgtggccttcctttcactttgaaagcttacaccctcattttgactacaactaatactaaaagct

SEQ ID NO: 240419 - DNA, 120 bp, Artificial Sequence
  ENSG00000121039_38 (sequence is synthesized)
tggcatcttgcttgagattagtgtttgctatgccaaacaccttctcctctttctattgaaagcaaaacataggaaaataatttgaaatacttttaaggcatcttaaaaacatgacttttt

SEQ ID NO: 240420 - DNA, 120 bp, Artificial Sequence
  ENSG00000121039_39 (sequence is synthesized)
tctccagactgtgccaataaaatgtgttcatagcaggaaaatttggaaaatacagaaaagcactatgaagaaaacaaaatgtacccaaaatcccatcactcagataacatcactgttaat

SEQ ID NO: 240421 - DNA, 120 bp, Artificial Sequence
  ENSG00000121053_0 (sequence is synthesized)
gaagagctggaggaagtgagaggtcggctgggggtcctcaaagtgagaggggagcagaggatcctcccgtgcaggctgtggatgtcactcacttcccagctggtgaagcctcgctgcaga

SEQ ID NO: 240422 - DNA, 120 bp, Artificial Sequence
  ENSG00000121053_1 (sequence is synthesized)
gatgcatctgctcccagccctggcaggggtcctggccacactcgtcctcgcccagccctgtgagggcactgacccagcctcccctggggcagtggagacctcggtcctgcgagactgcat

SEQ ID NO: 240423 - DNA, 120 bp, Artificial Sequence
  ENSG00000121053_2 (sequence is synthesized)
agcagaggccaagttgctggtggatgctgcctacaattggacccagaagagcatcaagcagcggcttcgcagcggttcagccagccccatggacctcctgtcctacttcaaacaaccggt

SEQ ID NO: 240424 - DNA, 120 bp, Artificial Sequence
  ENSG00000121053_3 (sequence is synthesized)
agcagccaccaggacagttgttcgggccgcagattatatgcatgtggctttggggctgcttgaagagaagttacaaccccagcggtccggacccttcaatgtcactgatgtgctaacaga

SEQ ID NO: 240425 - DNA, 120 bp, Artificial Sequence
  ENSG00000121053_4 (sequence is synthesized)
accacagctgcggctgctgtcccaggccagtggctgtgctctccgggaccaggccgagcgctgcagcgacaagtaccgcaccatcactggacggtgcaacaacaagaggagacccttgct

SEQ ID NO: 240426 - DNA, 120 bp, Artificial Sequence
  ENSG00000121053_5 (sequence is synthesized)
aggggcctccaaccaggctctggctcgctggctgcccgccgagtatgaggatgggctgtcgctccccttcggctggacccccagcaggaggcgcaatggcttccttctccctcttgtccg

SEQ ID NO: 240427 - DNA, 120 bp, Artificial Sequence
  ENSG00000121053_6 (sequence is synthesized)
ggctgtctccaaccagattgtgcgcttccccaatgagagactgacctccgaccgtggccgagccctcatgttcatgcagtggggccagttcattgaccatgacctggacttctccccgga

SEQ ID NO: 240428 - DNA, 120 bp, Artificial Sequence
  ENSG00000121053_7 (sequence is synthesized)
gtccccggccagagtggccttcactgcaggcgttgactgtgagaggacctgcgcccagctgcccccctgctttcccatcaagatcccacccaatgacccccgcatcaagaaccagcgtga

SEQ ID NO: 240429 - DNA, 120 bp, Artificial Sequence
  ENSG00000121053_8 (sequence is synthesized)
ctgcatccctttcttccgctcggcaccctcatgcccccaaaacaagaacagagtccgcaaccagatcaacgcgctcacctcctttgtggacgccagcatggtgtatggcagtgaggtctc

SEQ ID NO: 240430 - DNA, 120 bp, Artificial Sequence
  ENSG00000121053_9 (sequence is synthesized)
cctctcgctgcggctccgcaaccggaccaactacctggggctgctggccatcaaccagcgctttcaagacaacggccgggccctgctgcccttcgacaacctgcacgatgacccctgtct

SEQ ID NO: 240431 - DNA, 120 bp, Artificial Sequence
  ENSG00000121053_10 (sequence is synthesized)
cctcaccaaccgctcggcgcgcatcccctgcttcctggcaggtgacacccgatcaacggaaacccccaaactggcagccatgcacaccctctttatgcgagagcacaaccggctggccac

SEQ ID NO: 240432 - DNA, 120 bp, Artificial Sequence
  ENSG00000121053_11 (sequence is synthesized)
cagatcatcacctaccgagactttctgcccctggttctgggcaaggcccgggccaggagaaccctggggcactacagggggtactgctccaatgtggacccacgggtggccaatgtcttc

SEQ ID NO: 240433 - DNA, 120 bp, Artificial Sequence
  ENSG00000121053_12 (sequence is synthesized)
accctggccttccgctttggccacacaatgctccagcccttcatgttccgcttggacagtcagtaccgggcctccgcacccaactcgcatgtcccacttagctctgccttctttgccagc

SEQ ID NO: 240434 - DNA, 120 bp, Artificial Sequence
  ENSG00000121053_13 (sequence is synthesized)
tggcggatcgtgtatgaagggggcatcgaccccatcctccggggcctcatggccacccctgccaagctgaaccgtcaggatgccatgttagtggatgagctccgggaccggctgtttcgg

SEQ ID NO: 240435 - DNA, 120 bp, Artificial Sequence
  ENSG00000121053_14 (sequence is synthesized)
caagtgaggaggattgggctggacctggcagctctcaacatgcaacgaagccgggaccacggccttccagggtacaatgcttggaggcgcttctgtgggctctcccagccccggaatttg

SEQ ID NO: 240436 - DNA, 120 bp, Artificial Sequence
  ENSG00000121053_15 (sequence is synthesized)
gcacagcttagccgggtgctgaaaaaccaggacttggcaaggaagttcctgaatttgtatggaacacctgacaacattgacatctggattggggccatcgctgagcctcttttgccgggg

SEQ ID NO: 240437 - DNA, 120 bp, Artificial Sequence
  ENSG00000121053_16 (sequence is synthesized)
gctcgagtggggcctcttctggcttgtctgttcgagaaccagttcagaagagcccgagacggagacaggttctggtggcagaaacgaggtgttttcaccaaaagacagcgcaaggccctg

SEQ ID NO: 240438 - DNA, 120 bp, Artificial Sequence
  ENSG00000121053_17 (sequence is synthesized)
agcagaatttccttgtctcgaattatatgtgacaataccggtatcaccacggtttcaagggacatcttcagagccaacatctaccctcggggctttgtgaactgcagccgtatccccagg

SEQ ID NO: 240439 - DNA, 120 bp, Artificial Sequence
  ENSG00000121053_18 (sequence is synthesized)
ttgaacctatcagcctggcgagggacatgaggcttctgcaggagtctatcccaagtctccaacttttggagacaaggggaaggggaggaccatgaggctgccttgtctccctggagcaag

SEQ ID NO: 240440 - DNA, 120 bp, Artificial Sequence
  ENSG00000121053_19 (sequence is synthesized)
tgcaggctgctgacgcttctgctggctacagctcagagctgggttccccagccaggagtgaaggctgggggctcctatcagcaatggaccttcccgccttgggagcctcttaggtattag

SEQ ID NO: 240441 - DNA, 120 bp, Artificial Sequence
  ENSG00000121053_20 (sequence is synthesized)
gctatgaatcagcgccacgtgcaaaggcttgggagccaagccatgtggtcttgcaccccaggcaagaaaagtcagctggagggtttacagcactttctactgtttcccagccctccctcc

SEQ ID NO: 240442 - DNA, 120 bp, Artificial Sequence
  ENSG00000121053_21 (sequence is synthesized)
cctccctcaccatgactaagagaccactcggtcctagcctccagacaccccacaatactcctctgagcctgaggccaggcagcatgctctgcttctaccaataaagcactgctaagggca

SEQ ID NO: 240443 - DNA, 120 bp, Artificial Sequence
  ENSG00000121057_0 (sequence is synthesized)
agtatttaatgtctctgtgttccacccgcctgggctagcacgtgggggagctgcggaagcgcggcgctgcgggccgggccgcggggcacagccgggggccggcggcggcgcgcggactcc

SEQ ID NO: 240444 - DNA, 120 bp, Artificial Sequence
  ENSG00000121057_1 (sequence is synthesized)
gcatcccgcaccccgatggtagccgaggagctggtgtaattacttcaagcctccaggatggcaatccagttccgttcgctcttccccttggcattgcctgggatgctggcgctcctcggc

SEQ ID NO: 240445 - DNA, 120 bp, Artificial Sequence
  ENSG00000121057_2 (sequence is synthesized)
tggtggtggtttttctctcgtaaaaaaggccatgtcagcagccatgatgagcagcaggtggaggctggtgctgtgcagctgagggctgaccctgccatcaaggaacctctccccgtggaa

SEQ ID NO: 240446 - DNA, 120 bp, Artificial Sequence
  ENSG00000121057_3 (sequence is synthesized)
gacgtctgtcccaaagtagtgtccacaccccccagtgtcacagagcctccagaaaaggaactgtccaccgtgagcaagctgcctgcagagcccccagcattgctccagacacacccacct

SEQ ID NO: 240447 - DNA, 120 bp, Artificial Sequence
  ENSG00000121057_4 (sequence is synthesized)
tgccgaagatcagagtcctcgggcattcttcctaacaccacagacatgagattgcgaccaggaacacgcagagatgacagtacaaagctggagctagccctgacaggtggtgaagccaaa

SEQ ID NO: 240448 - DNA, 120 bp, Artificial Sequence
  ENSG00000121057_5 (sequence is synthesized)
tcgattcctctagagtgccccctttcatccccaaagggtgtactattctccagcaaatcagctgaggtgtgtaagcaagattcccccttcagcagggtgccaaggaaggtccagccaggc

SEQ ID NO: 240449 - DNA, 120 bp, Artificial Sequence
  ENSG00000121057_6 (sequence is synthesized)
taccccgtagtccccgcagagaagcgtagctctggggagagggcaagagagacaggtggggccgaagggactggtgatgccgtgttgggggaaaaggtgcttgaagaagctctgttgtct

SEQ ID NO: 240450 - DNA, 120 bp, Artificial Sequence
  ENSG00000121057_7 (sequence is synthesized)
cgggagcatgtcttggaattggagaacagcaagggccccagcctggcctctttagagggggaagaagataaggggaagagcagctcatcccaggtggtggggccagtgcaggaggaagag

SEQ ID NO: 240451 - DNA, 120 bp, Artificial Sequence
  ENSG00000121057_8 (sequence is synthesized)
tatgtagcagagaagttgccaagtaggttcatcgagtcggctcacacagagctggcaaaggacgatgcggcgccagcacccccagtcgcagacgccaaagcccaggatagaggtgtcgag

SEQ ID NO: 240452 - DNA, 120 bp, Artificial Sequence
  ENSG00000121057_9 (sequence is synthesized)
ggagaactgggcaatgaggagagcttggatagaaatgaggagggcttggatagaaatgaggagggcttggatagaaatgaggagagcttggatagaaatgaggagggcttggatagaaat

SEQ ID NO: 240453 - DNA, 120 bp, Artificial Sequence
  ENSG00000121057_10 (sequence is synthesized)
gaggagattaagcgggctgccttccagataatctcccaagtgatctcagaagcaaccgaacaggtgctggccaccacggttggcaaggttgcaggtcgtgtgtgtcaggccagtcagctc

SEQ ID NO: 240454 - DNA, 120 bp, Artificial Sequence
  ENSG00000121057_11 (sequence is synthesized)
caagggcagaaggaagagagctgtgtcccagttcaccagaaaactgtcttgggcccagacactgcggagcctgccacagcagaggcagctgttgccccgccggatgctggcctccccttg

SEQ ID NO: 240455 - DNA, 120 bp, Artificial Sequence
  ENSG00000121057_12 (sequence is synthesized)
ccaggcctaccagcagagggctcaccaccaccaaagacctacgtgagctgcctgaagagccttctgtccagccccaccaaggacagtaagccaaatatctctgcacaccacatctccctg

SEQ ID NO: 240456 - DNA, 120 bp, Artificial Sequence
  ENSG00000121057_13 (sequence is synthesized)
gcctcctgcctggcactgaccacccccagtgaagagttgccggaccgggcaggcatcctggtggaagatgccacctgtgtcacctgcatgtcagacagcagccaaagtgtccctttggtg

SEQ ID NO: 240457 - DNA, 120 bp, Artificial Sequence
  ENSG00000121057_14 (sequence is synthesized)
gcttctccaggacactgctcagattctttcagcacttcagggcttgaagactcttgcacagagaccagctcgagccccagggacaaggccatcaccccgccactgccagaaagtactgtg

SEQ ID NO: 240458 - DNA, 120 bp, Artificial Sequence
  ENSG00000121057_15 (sequence is synthesized)
cccttcagcaatggggtgctgaagggggagttgtcagacttgggggctgaggatggatggaccatggatgcggaagcagatcattcaggaggttctgacaggaacagcatggattccgtg

SEQ ID NO: 240459 - DNA, 120 bp, Artificial Sequence
  ENSG00000121057_16 (sequence is synthesized)
gtcgacctcatcatctgggagatcgaggtgccaaagcacttagtcggtcggctaattggcaagcaggggcgctatgtgagttttctgaagcaaacatctggtgccaagatctacatttca

SEQ ID NO: 240460 - DNA, 120 bp, Artificial Sequence
  ENSG00000121057_17 (sequence is synthesized)
accctgccttacacccagagcgtccagatctgccacatagaaggctctcaacatcatgtagacaaagcgctgaacttgattgggaagaagttcaaagagctgaacctcaccaatatctac

SEQ ID NO: 240461 - DNA, 120 bp, Artificial Sequence
  ENSG00000121057_18 (sequence is synthesized)
gctcccccattgccttcactggcactgccttctctgccgatgacatcctggctcatgctgcctgatggcatcaccgtggaggtcattgtggtcaaccaggtcaatgccgggcacctgttc

SEQ ID NO: 240462 - DNA, 120 bp, Artificial Sequence
  ENSG00000121057_19 (sequence is synthesized)
gtgcagcagcacacacaccctaccttccacgcgctgcgcagcctcgaccagcagatgtacctctgttactctcagcctggaatccccaccttgcccaccccagtggaaataacggtcatc

SEQ ID NO: 240463 - DNA, 120 bp, Artificial Sequence
  ENSG00000121057_20 (sequence is synthesized)
tgtgccgcccctggtgcggacggggcctggtggcgagcccaagtggttgcctcctacgaggagaccaacgaagtggagattcgatacgtggactacggcggatataagagggtgaaagta

SEQ ID NO: 240464 - DNA, 120 bp, Artificial Sequence
  ENSG00000121057_21 (sequence is synthesized)
gacgtgctccggcaaatcaggtctgactttgtcaccctgccgtttcagggagcagaagtccttctggacagtgtgatgcccctgtcagacgatgaccagttttcaccggaagcagatgcc

SEQ ID NO: 240465 - DNA, 120 bp, Artificial Sequence
  ENSG00000121057_22 (sequence is synthesized)
gccatgagcgagatgacggggaatacagcactgcttgctcaggtgacaagttacagtccaactggtcttcctctgattcagctgtggagtgtggttggagatgaagtggtgttgataaac

SEQ ID NO: 240466 - DNA, 120 bp, Artificial Sequence
  ENSG00000121057_23 (sequence is synthesized)
cggtccctggtggagcgaggccttgcccagtgggtagacagctactacacaagcctttgacccccatgctgcttcctgagagtctttttttgcactgttgaaattgggcttggcactcaa

SEQ ID NO: 240467 - DNA, 120 bp, Artificial Sequence
  ENSG00000121057_24 (sequence is synthesized)
gtcaaagatgaacatcggaataacaaacattgtcctctccagaaagtcctttctttctccatactgtagtcctattgagaagacatttcgtctctgagaaaaaaggatggaactatgggt

SEQ ID NO: 240468 - DNA, 120 bp, Artificial Sequence
  ENSG00000121057_25 (sequence is synthesized)
tctcttcgcaaagccaaaggatagtgtttaacaagccagctggcttatgctggttctcagctgtttaaaaaaaaaaaaaaaaaggaatagaaacagtttcaaccagattgtcctattccc

SEQ ID NO: 240469 - DNA, 120 bp, Artificial Sequence
  ENSG00000121057_26 (sequence is synthesized)
cctgttccattcccctcttcttccttctatctccttccccggcaaaaaccaaacaaactggcagacaggccagggatgtatgttgcttgcttgagagggtttcttttacttcaaaatctt

SEQ ID NO: 240470 - DNA, 120 bp, Artificial Sequence
  ENSG00000121057_27 (sequence is synthesized)
tcttcagggagcaagacatgaactgactaattggtatccactacttgtacagcttacataaatgagttgatgatatttaaccagtttttataaacttcatttaggtctctaaacacagac

SEQ ID NO: 240471 - DNA, 120 bp, Artificial Sequence
  ENSG00000121057_28 (sequence is synthesized)
tttttaaattgcaactgtaaatatgaaatggtcatcacatctgaccttggtcagtggggaggggaactggtatcctgccaagcctggttgtaatttgtaaccattttctatttgtgcaaa

SEQ ID NO: 240472 - DNA, 120 bp, Artificial Sequence
  ENSG00000121057_29 (sequence is synthesized)
ctctgtaaatatgtgtttaaacaaatgtaatattttgtacaagatacactggagaacaaagggaactcaagattcttccagccacatgtcacctgtaggtagaagtaaactctgcagtgc

SEQ ID NO: 240473 - DNA, 120 bp, Artificial Sequence
  ENSG00000121057_30 (sequence is synthesized)
agcttctgctcttggcccctctggccagggcccctgtggcttcctgcacactggacaggtgactgtatggtagagactgtgatctgggaactttttgctgtacaaatctgtttaaaaaaa

SEQ ID NO: 240474 - DNA, 120 bp, Artificial Sequence
  ENSG00000121057_31 (sequence is synthesized)
aaaaaaagtaactcattgaattaacttgcagtggtgtgtttgattcttttttagactggcttcagcattgtgcagtttaaaaataagtaagtaacttacataaatcttcaattgtatgaa

SEQ ID NO: 240475 - DNA, 120 bp, Artificial Sequence
  ENSG00000121057_32 (sequence is synthesized)
gtgacttacacaggcccctgaggatgaaggtaacagtcctgtgagcactgaggctgggctgggaccaacacctgagccatggctccagcactctgattcctggcccagccatgctgctga

SEQ ID NO: 240476 - DNA, 120 bp, Artificial Sequence
  ENSG00000121057_33 (sequence is synthesized)
gtcactgtcctcgggggcggggggcgagggcgcgacgcccgggtcgcctctctgcacctcaacttaaccggagcgtgcacacccgcctgcgaggctgacccgagcgcgtcccacccaagg

SEQ ID NO: 240477 - DNA, 120 bp, Artificial Sequence
  ENSG00000121057_34 (sequence is synthesized)
tcgcccagccccgcgggcgtttacttttcaaagggagggataggagaagaaaggtgctgatcgtggtaggcggtgctgtggcgactcggaacggcatgggagccctgggcgtttcgggat

SEQ ID NO: 240478 - DNA, 120 bp, Artificial Sequence
  ENSG00000121057_35 (sequence is synthesized)
gaactccatgtacccaggaaggcattcctggcacctgtgttgtgaccatctttagaaacctggcggaattcacttgtaaagcaagatggttgtcaaggccagaggtgaggggcaaggtgt

SEQ ID NO: 240479 - DNA, 120 bp, Artificial Sequence
  ENSG00000121057_36 (sequence is synthesized)
cccagccccgcgggcgtttacttttcaaaggtcgtgtgtacacagtctgagccggagctgccccttcacttctggagcctcgcccaacttctcaccctcggctcgcccgccggcgcagcc

SEQ ID NO: 240480 - DNA, 120 bp, Artificial Sequence
  ENSG00000121057_37 (sequence is synthesized)
cctgggagttccgtgcggcgagccaggggaactgggaagatgggccgggacatcggccggttgtgatccaaccgtgtttcgggctgagggaccgttcgaaccgaattggggtctggaggc

SEQ ID NO: 240481 - DNA, 120 bp, Artificial Sequence
  ENSG00000121057_38 (sequence is synthesized)
agttttggggttacgatgtgctaggagaggcagtggctggatgcctcgaacgcgggctttctggcgttcaactcttttgtgccctagctgaaggtcttcctgtttcccttccagggaggg

SEQ ID NO: 240482 - DNA, 120 bp, Artificial Sequence
  ENSG00000121057_39 (sequence is synthesized)
aacttaaccggagcgtgcacacccgcctgcgaggctgacccgagcgcgtcccacccaaggtcgcccagccccgcgggcgtttacttttcaaaggtcgtgtaattacttcaagcctccagg

SEQ ID NO: 240483 - DNA, 120 bp, Artificial Sequence
  ENSG00000121057_40 (sequence is synthesized)
agctccacccccgggaaagcggggcactttgataacgaggtgtcctgggtttttcgagtgctgaccccagcgtagacagttcagaccgctaacttacaggttctgacaggaacagcatgg

SEQ ID NO: 240484 - DNA, 120 bp, Artificial Sequence
  ENSG00000121057_41 (sequence is synthesized)
ggactactgtgataccacttaaatgttgagaagttcaggtttacaaaaaaaaacacctcagggcaaagagagcaactccgaagagtctggcccagtgcaggaaggaagatgtcagaagag

SEQ ID NO: 240485 - DNA, 120 bp, Artificial Sequence
  ENSG00000121057_42 (sequence is synthesized)
acccttggtggcagaaccgagcactacccagcaagggctggtgctgccttggccttgggcttttaaaagcttaccagatgatgctaatgtgaagccaagttggagaaccggttgtgaaag

SEQ ID NO: 240486 - DNA, 120 bp, Artificial Sequence
  ENSG00000121058_0 (sequence is synthesized)
atctctcggcttccgttgagcaccaagcaagatggcagcttccgagacggttaggctacggcttcaatttgattacccgccgccagctaccccgcactgtacggccttctggcttctggt

SEQ ID NO: 240487 - DNA, 120 bp, Artificial Sequence
  ENSG00000121058_1 (sequence is synthesized)
cgacttgaacagatgccgagtcgtcacagatctcattagtctcatccgccagcgcttcggcttcagttctggggccttcctaggcctctacctggagggggggctcttgccccccgccga

SEQ ID NO: 240488 - DNA, 120 bp, Artificial Sequence
  ENSG00000121058_2 (sequence is synthesized)
gagcgcgcgccttgtgagagacaacgactgcctcagagttaaattagaagagagaggagttgctgagaattctgtagtcatcagtaatggtgacattaatttatctcttagaaaagcaaa

SEQ ID NO: 240489 - DNA, 120 bp, Artificial Sequence
  ENSG00000121058_3 (sequence is synthesized)
gaagcgggcatttcagttagaggagggtgaagaaactgaaccagattgcaaatattcaaagaagcattggaagagtcgagagaacaataacaataatgagaaggtcttggatctggaacc

SEQ ID NO: 240490 - DNA, 120 bp, Artificial Sequence
  ENSG00000121058_4 (sequence is synthesized)
aaaagctgtcacagatcagactgtcagcaaaaaaaacaagagaaaaaataaagcaacctgtggcacagtgggtgatgataacgaagaggccaaaagaaaatcaccaaagaaaaaggagaa

SEQ ID NO: 240491 - DNA, 120 bp, Artificial Sequence
  ENSG00000121058_5 (sequence is synthesized)
atgtgaatataaaaaaaaggctaagaatcccaagtctccgaaagtacaggcagtgaaagactgggccaatcagagatgtagttctccaaaaggttctgctagaaacagccttgttaaagc

SEQ ID NO: 240492 - DNA, 120 bp, Artificial Sequence
  ENSG00000121058_6 (sequence is synthesized)
caaaaggaaaggtagtgtaagcgtttgctcaaaagagagtcccagttcctcctcggagtctgaatcttgtgatgaatctatcagtgatggtcccagcaaagtcactttggaggccagaaa

SEQ ID NO: 240493 - DNA, 120 bp, Artificial Sequence
  ENSG00000121058_7 (sequence is synthesized)
ttcctcagagaaattaccaactgagttatcaaaggaagaaccctctaccaaaaatacaactgcagacaaactggctataaaacttggctttagccttacccccagcaagggcaagacctc

SEQ ID NO: 240494 - DNA, 120 bp, Artificial Sequence
  ENSG00000121058_8 (sequence is synthesized)
tggaacaacatcttccagttcagactctagtgcagagtcagacgaccaatgcttgatgtcatcgagcaccccggagtgtgctgcgggtttcttaaagacagtaggcctttttgcaggaag

SEQ ID NO: 240495 - DNA, 120 bp, Artificial Sequence
  ENSG00000121058_9 (sequence is synthesized)
aggtcgtccaggcccagggctgtcatcacagactgcaggtgctgctggatggaggcgttctggctcaaatggtggtggacaggctcctggtgcttctcccagtgtgtctctccctgctag

SEQ ID NO: 240496 - DNA, 120 bp, Artificial Sequence
  ENSG00000121058_10 (sequence is synthesized)
tagaagcactgacaaccagaggcaacagcaattaaatgacgtggtaaaaaattcatctactattatccagaatccagtagagacacccaagaaggactatagtctgttaccactgttagc

SEQ ID NO: 240497 - DNA, 120 bp, Artificial Sequence
  ENSG00000121058_11 (sequence is synthesized)
agctgcccctcaagttggagaaaagattgcatttaagcttttggagctaacatccagttactctcctgatgtctctgactacaaggaaggaagaatattaagccacaatccagagaccca

SEQ ID NO: 240498 - DNA, 120 bp, Artificial Sequence
  ENSG00000121058_12 (sequence is synthesized)
gcaagtagatatagaaattctttcatccttacctgccttgagagaacctgggaaatttgatttagtttatcacaatgaaaatggagccgaggtagtggagtacgctgtgacacaggagag

SEQ ID NO: 240499 - DNA, 120 bp, Artificial Sequence
  ENSG00000121058_13 (sequence is synthesized)
caagatcactgtattttggaaagagttgattgacccaagactgattattgaatctccaagtaacacatcaagtacagaacctgcctgagtatgacctctccaccttatagtttatgaatg

SEQ ID NO: 240500 - DNA, 120 bp, Artificial Sequence
  ENSG00000121058_14 (sequence is synthesized)
tcttgtttgtgaaagtgactataacccaaacttttttttttttttaaagaggatttggaagttgtatggatttttttgttatcttcactttactgcataggaaacaatctacctcatcat

SEQ ID NO: 240501 - DNA, 120 bp, Artificial Sequence
  ENSG00000121058_15 (sequence is synthesized)
ttaaaatgacatgggtgtcggttttgtagatctttggtttttttgtcaggtttaatttcagttaacaaaatgtaaaacatgacattccctgcagatattgttgtataccagtatggtttc

SEQ ID NO: 240502 - DNA, 120 bp, Artificial Sequence
  ENSG00000121058_16 (sequence is synthesized)
ttctctttctttaaatgtttttggccatcaagtagcagtcgtcagtaggagtttataataccaagaatgtgctgcgtatcttgtctcaataagttttaagtaacatttaaaaatattaaa

SEQ ID NO: 240503 - DNA, 120 bp, Artificial Sequence
  ENSG00000121058_17 (sequence is synthesized)
gcatgttatttgacctaattttttagcatttgagttgttccattaaatggagcatcttgtaaatttcaagtattttatacttgcaattgttaagagttaacaggtagttggatttgtcgc

SEQ ID NO: 240504 - DNA, 120 bp, Artificial Sequence
  ENSG00000121058_18 (sequence is synthesized)
agacaatgagttaaggaatcctttcacgtttttcccaactttaaaattaaggattctcaggtccctgtgtagagcagtgaaaataagatgtgcgtatgtgtgtgtatgcctggagaattg

SEQ ID NO: 240505 - DNA, 120 bp, Artificial Sequence
  ENSG00000121058_19 (sequence is synthesized)
gtgtttcacttcagtgagaggattggctgtgagcttcagaccaggaaatgtgtcatcttgccaggcacctggctgagtgtgctggagtgaggatcttgaacagaaacttccttttctgtt

SEQ ID NO: 240506 - DNA, 120 bp, Artificial Sequence
  ENSG00000121058_20 (sequence is synthesized)
attattcactacgaagctaaaatggccaaatatataccgtgaaaattggtttcatttaacaaaagatcagatccctccttcagctgtacacatttttaaataaaatcatattgaactaaa

SEQ ID NO: 240507 - DNA, 120 bp, Artificial Sequence
  ENSG00000121058_21 (sequence is synthesized)
aggtgcgcggcgcagggagcgggacggccgggtgggcggcgggcgggggacgcgcctgcgcacgcccgggcctgaagccgctagacctgctttgttgatgctcttgagagcatcagccaa

SEQ ID NO: 240508 - DNA, 120 bp, Artificial Sequence
  ENSG00000121058_22 (sequence is synthesized)
cacagagtgttgtggaattgtacagatggctgtcactaccctagagaacataaattgtttagtattcacctaaattaaaacaggagtaaaatcttattaaagaaagaagcccacattctg

SEQ ID NO: 240509 - DNA, 120 bp, Artificial Sequence
  ENSG00000121058_23 (sequence is synthesized)
aaacaaaatggataatcagcattatcaccttttaggagttaaattagaagagagaggagttgctgagaattctgtagtcatcagtaatggtgacattaatttatctcttagaaaagcaaa

SEQ ID NO: 240510 - DNA, 120 bp, Artificial Sequence
  ENSG00000121060_0 (sequence is synthesized)
cgtttcctcggcggcctcggagcgcgggtgcagcagttgtgtcccgacccctgggagcgccatggcagagctgtgccccctggccgaggagctgtcgtgctccatctgcctggagccctt

SEQ ID NO: 240511 - DNA, 120 bp, Artificial Sequence
  ENSG00000121060_1 (sequence is synthesized)
caaggagccggtcaccactccgtgcggccacaacttctgcgggtcgtgcctgaatgagacgtgggcagtccagggctcgccatacctgtgcccgcagtgccgcgccgtctaccaggcgcg

SEQ ID NO: 240512 - DNA, 120 bp, Artificial Sequence
  ENSG00000121060_2 (sequence is synthesized)
accgcagctgcacaagaacacggtgctgtgcaacgtggtggagcagttcctgcaggccgacctggcccgggagccacccgccgacgtctggacgccgcccgcccgcgcctctgcacccag

SEQ ID NO: 240513 - DNA, 120 bp, Artificial Sequence
  ENSG00000121060_3 (sequence is synthesized)
cccgaatgcccaggtggcctgcgaccactgcctgaaggaggccgccgtgaagacgtgcttggtgtgcatggcctccttctgtcaggagcacctgcagccgcacttcgacagccccgcctt

SEQ ID NO: 240514 - DNA, 120 bp, Artificial Sequence
  ENSG00000121060_4 (sequence is synthesized)
ccaggaccacccgctgcagccgcccgttcgcgacctgttgcgccgcaaatgttcccagcacaatcggctgcgggaatttttctgccccgagcacagcgagtgcatctgccacatctgcct

SEQ ID NO: 240515 - DNA, 120 bp, Artificial Sequence
  ENSG00000121060_5 (sequence is synthesized)
ggtggagcataagacctgctctcccgcgtccctgagccaggccagcgccgacctggaggccaccctgaggcacaaactaactgtcatgtacagtcagatcaacggggcgtcgagagcact

SEQ ID NO: 240516 - DNA, 120 bp, Artificial Sequence
  ENSG00000121060_6 (sequence is synthesized)
ggatgatgtgagaaacaggcagcaggatgtgcggatgactgcaaacagaaaggtggagcagctacaacaagaatacacggaaatgaaggctctcttggacgcctcagagaccacctcgac

SEQ ID NO: 240517 - DNA, 120 bp, Artificial Sequence
  ENSG00000121060_7 (sequence is synthesized)
aaggaagataaaggaagaggagaagagggtcaacagcaagtttgacaccatttatcagattctcctcaagaagaagagtgagatccagaccttgaaggaggagattgaacagagcctgac

SEQ ID NO: 240518 - DNA, 120 bp, Artificial Sequence
  ENSG00000121060_8 (sequence is synthesized)
caagagggatgagttcgagtttctggagaaagcatcaaaactgcgaggaatctcaacaaagccagtctacatccccgaggtggaactgaaccacaagctgataaaaggcatccaccagag

SEQ ID NO: 240519 - DNA, 120 bp, Artificial Sequence
  ENSG00000121060_9 (sequence is synthesized)
caccatagacctcaaaaacgagctgaagcagtgcatcgggcggctccaggagcccacccccagttcaggtgaccctggagagcatgacccagcgtccacacacaaatccacacgccctgt

SEQ ID NO: 240520 - DNA, 120 bp, Artificial Sequence
  ENSG00000121060_10 (sequence is synthesized)
gaagaaggtctccaaagaggaaaagaaatccaagaaacctccccctgtccctgccttacccagcaagcttcccacgtttggagccccggaacagttagtggatttaaaacaagctggctt

SEQ ID NO: 240521 - DNA, 120 bp, Artificial Sequence
  ENSG00000121060_11 (sequence is synthesized)
ggaggctgcagccaaagccaccagctcacatccgaactcaacatctctcaaggccaaggtgctggagaccttcctggccaagtccagacctgagctcctggagtattacattaaagtcat

SEQ ID NO: 240522 - DNA, 120 bp, Artificial Sequence
  ENSG00000121060_12 (sequence is synthesized)
cctggactacaacaccgcccacaacaaagtggctctgtcagagtgctatacagtagcttctgtggctgagatgcctcagaactaccggccgcatccccagaggttcacatactgctctca

SEQ ID NO: 240523 - DNA, 120 bp, Artificial Sequence
  ENSG00000121060_13 (sequence is synthesized)
ggtgctgggcctgcactgctacaagaaggggatccactactgggaggtggagctgcagaagaacaacttctgtggggtaggcatctgctacggaagcatgaaccggcagggcccagaaag

SEQ ID NO: 240524 - DNA, 120 bp, Artificial Sequence
  ENSG00000121060_14 (sequence is synthesized)
caggctcggccgcaacagcgcctcctggtgcgtggagtggttcaacaccaagatctctgcctggcacaataacgtggagaaaaccctgccctccaccaaggccacgcgggtgggcgtgct

SEQ ID NO: 240525 - DNA, 120 bp, Artificial Sequence
  ENSG00000121060_15 (sequence is synthesized)
tctcaactgtgaccacggctttgtcatcttcttcgctgttgccgacaaggtccacctgatgtataagttcagggtggactttactgaggctttgtacccggctttctgggtattttctgc

SEQ ID NO: 240526 - DNA, 120 bp, Artificial Sequence
  ENSG00000121060_16 (sequence is synthesized)
tggtgccacactctccatctgctcccccaagtaggcaggctgtaggcacttgggctgactgcctgcagaagtcccaagaccctagtgaaaatacagcaggcagaactctccttggataat

SEQ ID NO: 240527 - DNA, 120 bp, Artificial Sequence
  ENSG00000121060_17 (sequence is synthesized)
tccccaagaggtcccaaggattgggagcatgggaggggagctggcgggagggtgggaggtgggatttagccaggaaaggggtgagagtgattgtgttgtgggcgaggaggcgtttccacc

SEQ ID NO: 240528 - DNA, 120 bp, Artificial Sequence
  ENSG00000121060_18 (sequence is synthesized)
ccctggtgcctatcagggcagggtgacctactccccattgttctggaaatctccaggctgctgggcagctgggcagagctctgggaagtgaagtcatgagtgcccgattcctcttagaga

SEQ ID NO: 240529 - DNA, 120 bp, Artificial Sequence
  ENSG00000121060_19 (sequence is synthesized)
aaatccatagctactgtaggttctgtcttgggccacttggatctgaaggctgcccctttgctctctggggtagccttcagatcttggtgttttgaattcttactatagatgtttttaaag

SEQ ID NO: 240530 - DNA, 120 bp, Artificial Sequence
  ENSG00000121060_20 (sequence is synthesized)
ttccaaagtcattgagtttcaatgttacataaactccattacccgcatgttggggcttgatctcctggttattatctgtgcttgaggaaacacccacagcagtctctacccagaacagtt

SEQ ID NO: 240531 - DNA, 120 bp, Artificial Sequence
  ENSG00000121060_21 (sequence is synthesized)
tcctaaagaggcataccctcttcctccactggaaaatagtgcgttcccttcctaccctgcacacccatcgcccccacattgatggttttcaaacagcaaacttttcagctaaagcttcaa

SEQ ID NO: 240532 - DNA, 120 bp, Artificial Sequence
  ENSG00000121060_22 (sequence is synthesized)
accatgattggaatcagcctgtgttggatttgtgattcagggtcatggtgaccctgatccagtttgggtggaaatccttcctaagtatcataagaagcatcttggcagagatgctttggt

SEQ ID NO: 240533 - DNA, 120 bp, Artificial Sequence
  ENSG00000121060_23 (sequence is synthesized)
gtgggtttgctcgtgttagagtgtcctgccttcttactgacaactcttctcggtgatagcctctcttccctggattgtgacatatggaatgacagtgcaggtaccaccgaggctagcaca

SEQ ID NO: 240534 - DNA, 120 bp, Artificial Sequence
  ENSG00000121060_24 (sequence is synthesized)
gtcaagcctccagctaagctggatccctgaagcctgctatcatgcagacaggctatgcggctgcctcggaccatgctaggccacttgctggggtgtcaacctaccaccaaaggggtcttt

SEQ ID NO: 240535 - DNA, 120 bp, Artificial Sequence
  ENSG00000121060_25 (sequence is synthesized)
tagcaaacctcatggggaacaggaacattcctgttcatccctggccacaggctgcagacccagcactggcccttgcgtgagtcagagcctggggctggccctagccccttctactgactt

SEQ ID NO: 240536 - DNA, 120 bp, Artificial Sequence
  ENSG00000121060_26 (sequence is synthesized)
cctcatttaagccaattatataagctcacattgatcagggagggagggaaagagctaaagagggtcacacaagtggctattttccctgcagtgtttctgtgtggtgaaaataacccagtc

SEQ ID NO: 240537 - DNA, 120 bp, Artificial Sequence
  ENSG00000121060_27 (sequence is synthesized)
cactaaggggcgggagtgaatggatggctggattttccccaagctccttatagcctaatgttgtcaggatgtgagtatgaggaatttagcctcttatagtgaaatgagtccaactctggg

SEQ ID NO: 240538 - DNA, 120 bp, Artificial Sequence
  ENSG00000121060_28 (sequence is synthesized)
ctttgcttagaggagagctcctgtcaggcttcctataatatgaaaagaagtcaccattggggaactagagaccccagaccttttcatatggatatttgagaatgtaatgcatctcaggcc

SEQ ID NO: 240539 - DNA, 120 bp, Artificial Sequence
  ENSG00000121060_29 (sequence is synthesized)
tcgtgctggaactctagggcactctaggcaggctcagaacacttgatattcctgacagctacacacctgacatgcaggtacatacctgatcggtgtcatctcctaacaaggattttcagt

SEQ ID NO: 240540 - DNA, 120 bp, Artificial Sequence
  ENSG00000121060_30 (sequence is synthesized)
tcctcgggagagcaataatctttgtaggaaagacatccctgcaataggtgatatgtggtccttagaagttttattcctttactacttggaagaaaagttctttggtgattcttctctgct

SEQ ID NO: 240541 - DNA, 120 bp, Artificial Sequence
  ENSG00000121060_31 (sequence is synthesized)
tttgaagatgatcaaaagcatcttcattgattttctgaaacgaaagccttgtctgaaaccaattaatacttgggaaacagctgggcttggaggagtagaatgccagagataaatccatgg

SEQ ID NO: 240542 - DNA, 120 bp, Artificial Sequence
  ENSG00000121060_32 (sequence is synthesized)
ctcctgctctggctctcttctgcagaaatgagggcaacagtgaggccacttccctggcaaatgtgcagctcaggatagggaagcataagaccctctgtttaaaagagagtcaagtaggta

SEQ ID NO: 240543 - DNA, 120 bp, Artificial Sequence
  ENSG00000121060_33 (sequence is synthesized)
accaaagccaagctctgtgcaaggtgctttggagttgtaaattgaggagtgcatccttgctgtcttgaaccattctgtttgcaatggtgagaccttacataacctagccttgcagggccg

SEQ ID NO: 240544 - DNA, 120 bp, Artificial Sequence
  ENSG00000121060_34 (sequence is synthesized)
ccacacaaccctggagtcctagagttggaggaacctttgtatccatctgacttctcattttgcagaatatgatgagaaagtagaggatcgctctgttcaccactcttgctattccattag

SEQ ID NO: 240545 - DNA, 120 bp, Artificial Sequence
  ENSG00000121060_35 (sequence is synthesized)
tggggagatgcctgctagcatgtgtgaggggaacactctgatacactgggaagtatcggaaattcccagaaacacaaacataaaataactctcctagacccaggtactggggactgtctc

SEQ ID NO: 240546 - DNA, 120 bp, Artificial Sequence
  ENSG00000121060_36 (sequence is synthesized)
agtccgtgtggcatgataaataaaaggttaggatcaagtctttgtatttttcaagatgtggtagctgattattcctgttttaagtactctgaaattgatctgtgatcaataatactaata

SEQ ID NO: 240547 - DNA, 120 bp, Artificial Sequence
  ENSG00000121060_37 (sequence is synthesized)
tgttatcttttaccgtattctgcctctcactattgattttaattagttaggagtatttgagctgttatttcttgagcttaatatttttttagagttaactctttaaggagataatcatgg

SEQ ID NO: 240548 - DNA, 120 bp, Artificial Sequence
  ENSG00000121060_38 (sequence is synthesized)
ctgtagacaaggccagggctggctgacgtgccttagaaggtttgaatgcaataaagcggtgtttggcgttctcctgcattgtagtgcgggtacaaaatgctatttgttcgtcatactgtt

SEQ ID NO: 240549 - DNA, 120 bp, Artificial Sequence
  ENSG00000121060_39 (sequence is synthesized)
gtcagcagatgagccgcccactacagacggctactgcccagggacctgcccaggccccacccaagggctcccaagggttgagatttctgcagacctatagccagcacacttagtcctgcc

SEQ ID NO: 240550 - DNA, 120 bp, Artificial Sequence
  ENSG00000121060_40 (sequence is synthesized)
ctatatagagttcctcttcgggaagcttttgataaggaattctcagaccgataggatgtctgtctgggctttgctgcgggacagtctaactgtgggggctaggggaaagcaggagagtat

SEQ ID NO: 240551 - DNA, 120 bp, Artificial Sequence
  ENSG00000121060_41 (sequence is synthesized)
cgatcaaagagtaagccacacacggataatcagttactagggatggaggtgtgagggttcattatattattcattttactgttgtatatgtttgaaaatgtctataataaaaagctttaa

SEQ ID NO: 240552 - DNA, 120 bp, Artificial Sequence
  ENSG00000121060_42 (sequence is synthesized)
aaaaaaaaaagaaacaaaaatagttcaggccagcaatgggccctccatgttcagtggattttatccttgtttcaattggggtaggagttccaggaggtgtggattggaggttgtctaaag

SEQ ID NO: 240553 - DNA, 120 bp, Artificial Sequence
  ENSG00000121060_43 (sequence is synthesized)
aattgaactggcctttgtccctgcttcctgggagggagactttcagtccttgacatttccagggtaataggagtgtctttgttatttgtgaggccatgggatcacacctgagcttatgct

SEQ ID NO: 240554 - DNA, 120 bp, Artificial Sequence
  ENSG00000121060_44 (sequence is synthesized)
aaaaggtgggatgactcagagctggggctggtcaccagacagactgaccatgtgattagaggtttgaggctttgagtcagcctgacctatggggcgggggactggaggctgagtttaatc

SEQ ID NO: 240555 - DNA, 120 bp, Artificial Sequence
  ENSG00000121060_45 (sequence is synthesized)
atctggccagtgctttaatcagtacatcatgaaaccctaataaaaactctggacactaaagctcagcatagcttcctgggtggtgaagctgtggctatgccggcagggcagtgtgcccta

SEQ ID NO: 240556 - DNA, 120 bp, Artificial Sequence
  ENSG00000121060_46 (sequence is synthesized)
attccacgaagagggggcatgggagcactgtgctcaagacccttccagacctttccctgtgtcttccttggcttgtggagctgatttgtatcctttataataaaactaatcataagtata

SEQ ID NO: 240557 - DNA, 120 bp, Artificial Sequence
  ENSG00000121060_47 (sequence is synthesized)
gactgcccgagcacagaactaaatgctggtagtgagagtcgacctctctcatcagggttctgtgatgggttctatatgattccattctgtaatggcagcaggcctgaggctggaggggag

SEQ ID NO: 240558 - DNA, 120 bp, Artificial Sequence
  ENSG00000121060_48 (sequence is synthesized)
gagtgcatctgccacatctgcctggtggagcataagacctgctctcccgcgtccctgagccaggccagcgccgacctggagcaccttcagggagaacaagacccgtcttcgtgttgtcag

SEQ ID NO: 240559 - DNA, 120 bp, Artificial Sequence
  ENSG00000121060_49 (sequence is synthesized)
catggctgtggcctccccaggctctggccaagtcacttccggcccatcccgagtcactgtggggcctggacctcagtgggaaagaagttggtggcagtccccactgcggggggctgtagg

SEQ ID NO: 240560 - DNA, 120 bp, Artificial Sequence
  ENSG00000121060_50 (sequence is synthesized)
cccaagctggagtgcagtggcggaatcacagctcactgcagcctcgacttcccgggcttaagggatcctcctacctcagcctcaagagtagctgggaccacagcctcccaagtagctggg

SEQ ID NO: 240561 - DNA, 120 bp, Artificial Sequence
  ENSG00000121060_51 (sequence is synthesized)
atctgcccacctcgacctcctaaagtgctaggaggtctttaaaggcgtgcaccactgcgccccaccatctgatggtgtttagtagagggttttgaatgtcaactatgaacgttggaggtt

SEQ ID NO: 240562 - DNA, 120 bp, Artificial Sequence
  ENSG00000121060_52 (sequence is synthesized)
acctctgttccctcacgaagtcctggtggcacccaggaggccaccctgaggcacaaactaactgtcatgtacagtcagatcaacggggcgtcgagagcactggatgatgtgagaaacagg

SEQ ID NO: 240563 - DNA, 120 bp, Artificial Sequence
  ENSG00000121060_53 (sequence is synthesized)
gggaggacaagcataagtgagatgaataaggtgactttagccttgtctgttttcccctgtgttgtcctgctgttcaggcgtgtgtttgtagaagtggctcttaatcagtgtggaagggag

SEQ ID NO: 240564 - DNA, 120 bp, Artificial Sequence
  ENSG00000121060_54 (sequence is synthesized)
ctgagctcctggagttttcctaggtgtcctttattcagaaactaagagtggggcaatataagcttcataaggacaaggccttcatcactgaaactccagcacctacgacagtgcctggca

SEQ ID NO: 240565 - DNA, 120 bp, Artificial Sequence
  ENSG00000121060_55 (sequence is synthesized)
ccagatgggcacaaaacacttgcttgaatgtatagagaaatgaagttccttcttttatttgattgtttggatgttcttctatagagagatggggtcttatctgcactctgtcacccaggc

SEQ ID NO: 240566 - DNA, 88 bp, Artificial Sequence
  ENSG00000121060_56 (sequence is synthesized)
atagctcaccgcagccttgaactcttgagttgctggaactacagggtctcactctgtccaccagactggagtgcagtggcatgatctc

SEQ ID NO: 240567 - DNA, 120 bp, Artificial Sequence
  ENSG00000121060_57 (sequence is synthesized)
cctctgcctcccaggatcaagtgattcttctgcctagtctcccaagtagctgggattacaagttcgtgctactaccgcctgggttcatgaggcctaaagtccttgctgtttaaatgcccc

SEQ ID NO: 240568 - DNA, 120 bp, Artificial Sequence
  ENSG00000121060_58 (sequence is synthesized)
gaggcctaaagtccttgctgtttaaatgccccactgacatggacccttgaagagttcctgagggtccagcttgaaaatctcttaacctgtaaattgtgctgaaggaggcagctgaattat

SEQ ID NO: 240569 - DNA, 120 bp, Artificial Sequence
  ENSG00000121060_59 (sequence is synthesized)
gcaaactgcaaatatgtctgccatctgattttgtgaatgaagttttactggaacacaggtaagctcattcatttatgtattgtccatggctggttttgcactgcaactatggcagagtta

SEQ ID NO: 240570 - DNA, 120 bp, Artificial Sequence
  ENSG00000121060_60 (sequence is synthesized)
agtaattatgacagacgaaatggttgggaaagccgaaaattcttttggctctttacagtaagtttgcccacctctgctctagaagatgatttggtatctttcactgtttcagataattaa

SEQ ID NO: 240571 - DNA, 120 bp, Artificial Sequence
  ENSG00000121060_61 (sequence is synthesized)
tgaaatgaataaacacacaccaatagaatatagaaacaaaatttatgatcaaagctgagactagttacactgaggccaatctaactgccttctgagagtcagcagctttgttttactaat

SEQ ID NO: 240572 - DNA, 120 bp, Artificial Sequence
  ENSG00000121060_62 (sequence is synthesized)
cacagtaattgtgtgtgaggcgtggggtagatgtaatgaataaaaagtccaataaattaaaaagcactttaagttctttttctcttaatgagatagaacactacaagaaacaaaggttca

SEQ ID NO: 240573 - DNA, 120 bp, Artificial Sequence
  ENSG00000121060_63 (sequence is synthesized)
tttaataaatatattgaatatgtaaaaatataacctaattccctattttagtcagaggagagataagaagaagaaaaagaagatgtagtggttgggggtagaaacaggagcacacaaaaa

SEQ ID NO: 240574 - DNA, 120 bp, Artificial Sequence
  ENSG00000121060_64 (sequence is synthesized)
gaaaaaatctacagacaaagtagactctagcagtgtctagaacaaaaatagatgctcaataagtataatgatcgaatgagtataaattaaagggcctttctcacttattctgcaggcttt

SEQ ID NO: 240575 - DNA, 120 bp, Artificial Sequence
  ENSG00000121060_65 (sequence is synthesized)
aaactcagtcatcatctctcattagtgtcctttgaaatgtaacttgtctgcagagttcactcacttccctaagaatgagatgcagacagggaaggagctctcctcagggctagataaaat

SEQ ID NO: 240576 - DNA, 120 bp, Artificial Sequence
  ENSG00000121060_66 (sequence is synthesized)
ccagaggactgtctggtctgtgtttaaaggttctaagtagctatttattttgtttctccttccaaaatatctcattcctacagaaggtcacaggagactgtaatcctgtatacaattatt

SEQ ID NO: 240577 - DNA, 120 bp, Artificial Sequence
  ENSG00000121060_67 (sequence is synthesized)
ggccaacataaatcagttcagaacactgtagaatatgtacaacttcaggacactgtggtctcttctcttgggaataataaacatctcctaaattacacagagacaatttctatcatgggg

SEQ ID NO: 240578 - DNA, 120 bp, Artificial Sequence
  ENSG00000121060_68 (sequence is synthesized)
taaggggttactctgtaaaaatgcactaatgaagaaaagaagatttattatcacacagattcagtgtgctcaatgggaggatacaaaattaagagacggaggtgcatgtttttaaagata

SEQ ID NO: 240579 - DNA, 120 bp, Artificial Sequence
  ENSG00000121060_69 (sequence is synthesized)
tgtaaatatagcagtggttctccatctttagaaggacctgtagggcctgttaaaaccaagactgctgatgtccagcccaagtttctgatttagtaggtctggggttgggctagggttgcc

SEQ ID NO: 240580 - DNA, 120 bp, Artificial Sequence
  ENSG00000121060_70 (sequence is synthesized)
agaaaaaaaaaacaaaaaaacggcaatgcctagttgaatttgaatttcagagaaactttttatgttccaaattctgcaatattttatttttatctgctaaatctagcaaccctagaattt

SEQ ID NO: 240581 - DNA, 120 bp, Artificial Sequence
  ENSG00000121060_71 (sequence is synthesized)
gcatttctaacagattttgaagagatgctgatgctgctggtctagggaccttactttgagaaccactgagatataggatattacgttatcaccaaaaaggaaaaactgggggaggaggga

SEQ ID NO: 240582 - DNA, 120 bp, Artificial Sequence
  ENSG00000121060_72 (sequence is synthesized)
agctgagtagatcaggtaagagttcctgaaggaaaggacaaggacatgggatgggtctttaagggtgcctagaagctagccagaagaatactgagaggaaagctttgagcaaaggggcag

SEQ ID NO: 240583 - DNA, 120 bp, Artificial Sequence
  ENSG00000121060_73 (sequence is synthesized)
aaatgtcagaaaatgcctgacgttttaaggaaattacaagaagcttagtgttgctggtgcataaagtttaatgcaggtggtggtagataaaactaaaaggacagaggccagaaagtacta

SEQ ID NO: 240584 - DNA, 120 bp, Artificial Sequence
  ENSG00000121060_74 (sequence is synthesized)
ggaccttatgtaccctgtgaaaaagcacttaggggtttacactgtaaaacagtcagcttacccgatggggagcaatttaaaggattttaagcagagcagggacttgatcagatttgcatt

SEQ ID NO: 240585 - DNA, 120 bp, Artificial Sequence
  ENSG00000121060_75 (sequence is synthesized)
tttagaaagatcatttgggtggaggatcagaagcatgattatgtgttcaagagtatttgaaatacggttatttatggaaaccatttttaatataattctgcacagacacagactgctgga

SEQ ID NO: 240586 - DNA, 120 bp, Artificial Sequence
  ENSG00000121060_76 (sequence is synthesized)
ggctacaccagagaagggaaggaaatagaacaatactcaattcattatgaaatttatttaaagtccctgctaacttggctctcactgatgccagaaggacagcatttaatttttaaagat

SEQ ID NO: 240587 - DNA, 120 bp, Artificial Sequence
  ENSG00000121064_0 (sequence is synthesized)
acgtgatggggcgccgggtccagcctgttgctgatgctgccgtgcggtacttgtcatggagctggcactgcggcgctctcccgtcccgcggtggttgctgctgctgccgctgctgctggg

SEQ ID NO: 240588 - DNA, 120 bp, Artificial Sequence
  ENSG00000121064_1 (sequence is synthesized)
cctgaacgcaggagctgtcattgactggcccacagaggagggcaaggaagtatgggattatgtgacggtccgcaaggatgcctacatgttctggtggctctattatgccaccaactcctg

SEQ ID NO: 240589 - DNA, 120 bp, Artificial Sequence
  ENSG00000121064_2 (sequence is synthesized)
caagaacttctcagaactgcccctggtcatgtggcttcagggcggtccaggcggttctagcactggatttggaaactttgaggaaattgggccccttgacagtgatctcaaaccacggaa

SEQ ID NO: 240590 - DNA, 120 bp, Artificial Sequence
  ENSG00000121064_3 (sequence is synthesized)
aaccacctggctccaggctgccagtctcctatttgtggataatcccgtgggcactgggttcagttatgtgaatggtagtggtgcctatgccaaggacctggctatggtggcttcagacat

SEQ ID NO: 240591 - DNA, 120 bp, Artificial Sequence
  ENSG00000121064_4 (sequence is synthesized)
gatggttctcctgaagaccttcttcagttgccacaaagaattccagacagttccattctacattttctcagagtcctatggaggaaaaatggcagctggcattggtctagagctttataa

SEQ ID NO: 240592 - DNA, 120 bp, Artificial Sequence
  ENSG00000121064_5 (sequence is synthesized)
ggccattcagcgagggaccatcaagtgcaactttgcgggggttgccttgggtgattcctggatctcccctgttgattcggtgctctcctggggaccttacctgtacagcatgtctcttct

SEQ ID NO: 240593 - DNA, 120 bp, Artificial Sequence
  ENSG00000121064_6 (sequence is synthesized)
cgaagacaaaggtctggcagaggtgtctaaggttgcagagcaagtactgaatgccgtaaataaggggctctacagagaggccacagagctgtgggggaaagcagaaatgatcattgaaca

SEQ ID NO: 240594 - DNA, 120 bp, Artificial Sequence
  ENSG00000121064_7 (sequence is synthesized)
gaacacagatggggtgaacttctataacatcttaactaaaagcactcccacgtctacaatggagtcgagtctagaattcacacagagccacctagtttgtctttgtcagcgccacgtgag

SEQ ID NO: 240595 - DNA, 120 bp, Artificial Sequence
  ENSG00000121064_8 (sequence is synthesized)
agccagctcatgaatggccccatcagaaagaagctcaaaattattcctgaggatcaatcctggggaggccaggctaccaacgtctttgtgaacatggaggaggacttcatgaagccagtc

SEQ ID NO: 240596 - DNA, 120 bp, Artificial Sequence
  ENSG00000121064_9 (sequence is synthesized)
attagcattgtggacgagttgctggaggcagggatcaacgtgacggtgtataatggacagctggatctcatcgtagataccatgggtcaggaggcctgggtgcggaaactgaagtggcca

SEQ ID NO: 240597 - DNA, 120 bp, Artificial Sequence
  ENSG00000121064_10 (sequence is synthesized)
gaactgcctaaattcagtcagctgaagtggaaggccctgtacagtgaccctaaatctttggaaacatctgcttttgtcaagtcctacaagaaccttgctttctactggattctgaaagct

SEQ ID NO: 240598 - DNA, 120 bp, Artificial Sequence
  ENSG00000121064_11 (sequence is synthesized)
ggtcatatggttccttctgaccaaggggacatggctctgaagatgatgagactggtgactcagcaagaataggatggatggggctggagatgagctggtttggccttggggcacagagct

SEQ ID NO: 240599 - DNA, 120 bp, Artificial Sequence
  ENSG00000121064_12 (sequence is synthesized)
gagctgaggccgctgaagctgtaggaagcgccattcttccctgtatctaactggggctgtgatcaagaaggttctgaccagcttctgcagaggataaaatcattgtctctggaggcaatt

SEQ ID NO: 240600 - DNA, 120 bp, Artificial Sequence
  ENSG00000121064_13 (sequence is synthesized)
tggaaattatttctgcttcttaaaaaaacctaagattttttaaaaaattgatttgttttgatcaaaataaaggatgataatagatattattttttcttatgacagaagcaaatgatgtga

SEQ ID NO: 240601 - DNA, 120 bp, Artificial Sequence
  ENSG00000121064_14 (sequence is synthesized)
tttatagaaaaactgggaaatacaggtacccaaagagtaaatcaacatctgtatacccccttcccaggggtaagcactgttaccaatttagcatatgtccttgcagaatttttttttcta

SEQ ID NO: 240602 - DNA, 120 bp, Artificial Sequence
  ENSG00000121064_15 (sequence is synthesized)
tatatacatatatattttttaccaaaatgaatcattactctatgttgttttactatttgtttgacatatcagtatatctgaaacaccttttcatgtcaataaatgttcttctctaacatt

SEQ ID NO: 240603 - DNA, 120 bp, Artificial Sequence
  ENSG00000121064_16 (sequence is synthesized)
ctgttgctgatgctgccgtgcggtacttgtcatggagctggcactgcggcgctctcccgtcccgcggtggttgctgctgctgccgctgctgctgggcctgaacgcaggaagtatgggatt

SEQ ID NO: 240604 - DNA, 120 bp, Artificial Sequence
  ENSG00000121064_17 (sequence is synthesized)
cagagagagattctgtctcaaaaaaaaaaaaaaaagatgtcctcttggccttacttccagccctttgactcactatctaccagtttggttttagtttgtctttgtcagcgccacgtgaga

SEQ ID NO: 240605 - DNA, 120 bp, Artificial Sequence
  ENSG00000121064_18 (sequence is synthesized)
ttaggcacattctgggctctttctgggctttaatttcctcatcagcaagggacatggctggactgtgtcattattcaggatcttttatatgtaaattttataactttcaacctctttgga

SEQ ID NO: 240606 - DNA, 120 bp, Artificial Sequence
  ENSG00000121064_19 (sequence is synthesized)
aaaggtattagaataaattctgctcttgcagtgtacagagaagccaggacaatgtggaaatttgatgcatttccaagaaaactgatgtgtgtccagactttgagtgtcctctggcttctt

SEQ ID NO: 240607 - DNA, 120 bp, Artificial Sequence
  ENSG00000121064_20 (sequence is synthesized)
cgagttagtgcatagactgtctctgcatgcttctttctgcgctagtttattacatttagtacatttgtattgtatgaaaagcaacagcccagattatttgatccccgtgtgtgttaatct

SEQ ID NO: 240608 - DNA, 120 bp, Artificial Sequence
  ENSG00000121064_21 (sequence is synthesized)
ttccttcctgcctctccctttttttttttttgcggcggcgggggcggttggcctttctttgtttttgtttttttttctatgttcctgtcccttatttttaaaaatctcttttagcaacag

SEQ ID NO: 240609 - DNA, 120 bp, Artificial Sequence
  ENSG00000121064_22 (sequence is synthesized)
ggatatcatcaccacgctggtatcctcacatgtgtgggttttgctgagctagtagaaaatgatccaaagatgattggtgaccaaatgtctgattgcaacatttcgttttcctccgtggta

SEQ ID NO: 240610 - DNA, 120 bp, Artificial Sequence
  ENSG00000121064_23 (sequence is synthesized)
agaggtatgacatacttgatttgtacatatgtgatttcctttagattcggtgctctcctggggaccttacctgtacagcatggtaagtagatacacatctgcaccctctgggcaaacagc

SEQ ID NO: 240611 - DNA, 120 bp, Artificial Sequence
  ENSG00000121064_24 (sequence is synthesized)
ccagcagatctcttctggctgtgaccccaggaaaagagatgctggatgagtttgcctatgtggttgacactgctttttagggactagtcatccacatagagttggagacccaaagcaaga

SEQ ID NO: 240612 - DNA, 120 bp, Artificial Sequence
  ENSG00000121064_25 (sequence is synthesized)
gctcgcctcagggacaaattgaaagaaaatcagcacacatcacttttttccagatataagaaacacatttttccaatgccctaaatttttattacaaaaattttcaaatatgcagaaatg

SEQ ID NO: 240613 - DNA, 120 bp, Artificial Sequence
  ENSG00000121064_26 (sequence is synthesized)
ttgaaagatcacggtgaatacctacttaggttcagttaacaatttgctgtgtttcatccaataaacatgtggcttgtaacaatacactttgatatgtgagctcccgttctccttccttcc

SEQ ID NO: 240614 - DNA, 120 bp, Artificial Sequence
  ENSG00000121064_27 (sequence is synthesized)
gtaaaaaggggaaacactcagaggcgagcctgcttggctttttctggtgggtacagggcccatggttggtgttgtcaaacttggagtctacactgaggctccccacatatctgcaaatga

SEQ ID NO: 240615 - DNA, 120 bp, Artificial Sequence
  ENSG00000121064_28 (sequence is synthesized)
ttgcatgctggataataaatctcttgggtctaagcagtgatgtagtggctccttacagagtcagaaagccacccaggcctgcaagacttgcttgtccttcactaaatgtatggattctat

SEQ ID NO: 240616 - DNA, 120 bp, Artificial Sequence
  ENSG00000121064_29 (sequence is synthesized)
gctgatgctgccgtgcggtacttgtcatggagctggcactgcggcgctctcccgtcccgcggtggttgctgctgctgccgctgctgctgggcctgaacgcagggcggtccaggcggttct

SEQ ID NO: 240617 - DNA, 120 bp, Artificial Sequence
  ENSG00000121067_0 (sequence is synthesized)
ggggaggaggccgcgcggggtggggtctggcggtacgcgctggctgcgtcgacgtgctgacgccatgacgccccggctggtgtgtgtcggtgtgtatgtgtgtgtgtgagtgtgcgcgct

SEQ ID NO: 240618 - DNA, 120 bp, Artificial Sequence
  ENSG00000121067_1 (sequence is synthesized)
ccgagtgtgtgtgtatttgtgtatcggcggtcccgcaggtcccggatgttgcggacagtatgaggcaagcgcagggggacggggaccagcagctgtcgccgccgctctcagagatttcct

SEQ ID NO: 240619 - DNA, 120 bp, Artificial Sequence
  ENSG00000121067_2 (sequence is synthesized)
gttagacaagacaaattagagttttcctactgacttaacttgggtgaagagggaacagaaatctttgccccctgactttggaaatctcgtttaaccttcaaactggcgatgtcaagggtt

SEQ ID NO: 240620 - DNA, 120 bp, Artificial Sequence
  ENSG00000121067_3 (sequence is synthesized)
ccaagtcctccacctccggcagaaatgtcgagtggccccgtagctgagagttggtgctacacacagatcaaggtagtgaaattctcctacatgtggaccatcaataactttagcttttgc

SEQ ID NO: 240621 - DNA, 120 bp, Artificial Sequence
  ENSG00000121067_4 (sequence is synthesized)
cgggaggaaatgggtgaagtcattaaaagttctacattttcatcaggagcaaatgataaactgaaatggtgtttgcgagtaaaccccaaagggttagatgaagaaagcaaagattacctg

SEQ ID NO: 240622 - DNA, 120 bp, Artificial Sequence
  ENSG00000121067_5 (sequence is synthesized)
tcactttacctgttactggtcagctgtccaaagagtgaagttcgggcaaaattcaaattctccatcctgaatgccaagggagaagaaaccaaagctatggagagtcaacgggcatatagg

SEQ ID NO: 240623 - DNA, 120 bp, Artificial Sequence
  ENSG00000121067_6 (sequence is synthesized)
tttgtgcaaggcaaagactggggattcaagaaattcatccgtagagattttcttttggatgaggccaacgggcttctccctgatgacaagcttaccctcttctgcgaggtgagtgttgtg

SEQ ID NO: 240624 - DNA, 120 bp, Artificial Sequence
  ENSG00000121067_7 (sequence is synthesized)
caagattctgtcaacatttctggccagaataccatgaacatggtaaaggttcctgagtgccggctggcagatgagttaggaggactgtgggagaattcccggttcacagactgctgcttg

SEQ ID NO: 240625 - DNA, 120 bp, Artificial Sequence
  ENSG00000121067_8 (sequence is synthesized)
tgtgttgccggccaggaattccaggctcacaaggctatcttagcagctcgttctccggtttttagtgccatgtttgaacatgaaatggaggagagcaaaaagaatcgagttgaaatcaat

SEQ ID NO: 240626 - DNA, 120 bp, Artificial Sequence
  ENSG00000121067_9 (sequence is synthesized)
gatgtggagcctgaagtttttaaggaaatgatgtgcttcatttacacggggaaggctccaaacctcgacaaaatggctgatgatttgctggcagctgctgacaagtatgccctggagcgc

SEQ ID NO: 240627 - DNA, 120 bp, Artificial Sequence
  ENSG00000121067_10 (sequence is synthesized)
ttaaaggtcatgtgtgaggatgccctctgcagtaacctgtccgtggagaacgctgcagaaattctcatcctggccgacctccacagtgcagatcagttgaaaactcaggcagtggatttc

SEQ ID NO: 240628 - DNA, 120 bp, Artificial Sequence
  ENSG00000121067_11 (sequence is synthesized)
atcaactatcatgcttcggatgtcttggagacctctgggtggaagtcaatggtggtgtcacatccccacttggtggctgaggcataccgctctctggcttcagcacagtgcccttttctg

SEQ ID NO: 240629 - DNA, 120 bp, Artificial Sequence
  ENSG00000121067_12 (sequence is synthesized)
tgctgccactgaccaccaggtagacagcgcaatctgtggagcttttactctgttgtgaggggaagagactgcattgtggccccagacttttaaaacagcactaaataacttgggggaaac

SEQ ID NO: 240630 - DNA, 120 bp, Artificial Sequence
  ENSG00000121067_13 (sequence is synthesized)
ggggggagggaaaatgaaatgaaaaccctgttgctgcgtcactgtgttccctttggcctggctgagtttgatactgtggggattcagtttaggcgctggcccgaggatatcccagcggtg

SEQ ID NO: 240631 - DNA, 120 bp, Artificial Sequence
  ENSG00000121067_14 (sequence is synthesized)
gtacttcggagacacctgtctgcatctgactgagcagaacaaatcgtcaggtgcctggagcaaaaaggaaaaaaaaaaaagaaaggacattgagttttaacagaagggaaaaggaaagaa

SEQ ID NO: 240632 - DNA, 120 bp, Artificial Sequence
  ENSG00000121067_15 (sequence is synthesized)
gaaaagatttttgcagaatttctcaaaaatcagtttgtggattccagtagtatttatattgagagaaacaaattttagtccttctaactgtgctaaaacttggatatttgtgaaaactcc

SEQ ID NO: 240633 - DNA, 120 bp, Artificial Sequence
  ENSG00000121067_16 (sequence is synthesized)
ttaccaccatacaagcatcagaagagctctcttgttgttagcacttattgtttgcaagaacagaatacatccttttatccttttatgaaaaatgacaagtgaaggcaaaaggggaaggtt

SEQ ID NO: 240634 - DNA, 120 bp, Artificial Sequence
  ENSG00000121067_17 (sequence is synthesized)
atttgatctggaagatgagtgttctgatgtggtggcttttgcaaaaatctttattggtgttgaaaactggaaaaaataactcatccagaattcatattgtcttgacaagaactatggttc

SEQ ID NO: 240635 - DNA, 120 bp, Artificial Sequence
  ENSG00000121067_18 (sequence is synthesized)
acaagaactatggttctctgtttttagatattgtggaaaatgtttttgggcatttttctctgattttatttcttctcccccacccctttttctaaaaaacaaacaaaaaaaaaaacacac

SEQ ID NO: 240636 - DNA, 120 bp, Artificial Sequence
  ENSG00000121067_19 (sequence is synthesized)
aaaagaagagagaaggaaattttatcaattaaaaatgctgtgtgataaaatcccagcccagattgctcagctgtttgtacctgacttgccgcctgcataggagccagttctgttccttct

SEQ ID NO: 240637 - DNA, 120 bp, Artificial Sequence
  ENSG00000121067_20 (sequence is synthesized)
gactagcccctcttcctccaggggagaacttccaaatgttaatttttttttttttgaaaatataaataattactattttgtactgtgtggtatctctggtcttttgtttcactcacctgc

SEQ ID NO: 240638 - DNA, 120 bp, Artificial Sequence
  ENSG00000121067_21 (sequence is synthesized)
cttgtctcttgggtctgagtcccttgcttaagggattttgaagtcctagttttcagcttgcagagattatgtctgaaatgcctaatgagtcgcagggatttgttgagactccgtaatctc

SEQ ID NO: 240639 - DNA, 120 bp, Artificial Sequence
  ENSG00000121067_22 (sequence is synthesized)
aagttctctttgtgagctatcagcatctgccagtctcttgtcctccctgagtatctcacagtccatatcctgatgagggatcaggcccctacctctgccaaggcaagtaatggtagtggg

SEQ ID NO: 240640 - DNA, 120 bp, Artificial Sequence
  ENSG00000121067_23 (sequence is synthesized)
cttttaaactgccccccgtatgttttaagacctaatccccacctcccttcttctaactaaatataaaaagatccaggggacataaatgtggagattaaataaagggaaattattgtctct

SEQ ID NO: 240641 - DNA, 88 bp, Artificial Sequence
  ENSG00000121067_24 (sequence is synthesized)
atatagcttaaagcatttaactggaaaggaccttggaaatccttttaaaggaggatgggggtggaaatgcacaggttgcgagacggtc

SEQ ID NO: 240642 - DNA, 120 bp, Artificial Sequence
  ENSG00000121067_25 (sequence is synthesized)
tctactgtgaatcttgaggttatggtttccactagactatagtgctcaactatagtggcctattttaagtggccttataattcctaaccaaagtgacttgtgaaacagaggaccctggat

SEQ ID NO: 240643 - DNA, 120 bp, Artificial Sequence
  ENSG00000121067_26 (sequence is synthesized)
cagaccattgagttgccctgttgacgtgaagcagactgatgcctcactgtaattgtaagtggtgaaggtttaagaacaactttcatcacagtcaggaggagagtaaacttcaggatgcag

SEQ ID NO: 240644 - DNA, 120 bp, Artificial Sequence
  ENSG00000121067_27 (sequence is synthesized)
atctaccctgtaattgccatttttctaataggtagactttagaactctaatggcagctttccaagttactttagctgtttacatttcaagcttaaacatctaaccttcagaaatggttat

SEQ ID NO: 240645 - DNA, 120 bp, Artificial Sequence
  ENSG00000121067_28 (sequence is synthesized)
gttttatcattgcagtagtagcttttcatggtctgtgcagttctattcaagtatctagttaatatgatggtacagctaaagaaaacagcttcagtagtggtcagcccagaactattgctg

SEQ ID NO: 240646 - DNA, 120 bp, Artificial Sequence
  ENSG00000121067_29 (sequence is synthesized)
tggatagctgaagaaatgagaaaggctttgaattagtgggtaaagcaggcaagtagcttcattaaccttttggcagtaagaatagagttttcatcttttccttcagttgaccgtatggaa

SEQ ID NO: 240647 - DNA, 120 bp, Artificial Sequence
  ENSG00000121067_30 (sequence is synthesized)
atgtcgagtggccccgtagctgagagttggtgctacacacagtgttctcagcagctgaaaaaagttataaaagctattggtcagtgtgagatttcttaaaatgtggatgaggaacataag

SEQ ID NO: 240648 - DNA, 120 bp, Artificial Sequence
  ENSG00000121067_31 (sequence is synthesized)
tgtcgagtggccccgtagctgagagttggtgctacacacaggtaagttgaagttttcagcctgtgaatcttgcatctggggaggatttggtggacgaaaggagtaggattgcttttctac

SEQ ID NO: 240649 - DNA, 120 bp, Artificial Sequence
  ENSG00000121067_32 (sequence is synthesized)
attgggcttcttgctttctctggaacataactgccaaagagcagatagataagatacttgttagcctcaggttccttagttttccatgtggaatctaaattccctaggctagtgtttttc

SEQ ID NO: 240650 - DNA, 120 bp, Artificial Sequence
  ENSG00000121067_33 (sequence is synthesized)
agtggaggttgaaagggggaatctttgaaactagatctgcttacattgcccttgatgaaagtgtgttctgagtttcctctgttggggaaacaagtttgagatgtgcaaccccaggcagtg

SEQ ID NO: 240651 - DNA, 60 bp, Artificial Sequence
  ENSG00000121067_34 (sequence is synthesized)
ggcgcgatctcagctcactgccaccttatttcctgttagacaagacaaattagagttttc

SEQ ID NO: 240652 - DNA, 120 bp, Artificial Sequence
  ENSG00000121067_35 (sequence is synthesized)
acaggattctatgttgcattgtgggtaaaatgagcatatatcttggtttggccaagacggtcctggtttacacatattattccaacacaattattaatagcacactttttattctcaaaa

SEQ ID NO: 240653 - DNA, 120 bp, Artificial Sequence
  ENSG00000121067_36 (sequence is synthesized)
gtaattgtgaaataagaagaaggaactacaggtcattaactttgcctctgggcttatgactgcgtttaagggatgacttgcatcttgaaggttaaaagaaatctgggtcattaaggatgt

SEQ ID NO: 240654 - DNA, 120 bp, Artificial Sequence
  ENSG00000121067_37 (sequence is synthesized)
acttgctggcctgaaaaagctgtatgccccaaatgatagtatctttacttcacactgagtgacttaataaaagacatgtagatttctaggaggatagacatatgtttatgagttagtaaa

SEQ ID NO: 240655 - DNA, 120 bp, Artificial Sequence
  ENSG00000121067_38 (sequence is synthesized)
atgtacctcatgtttggttgtagaataaggaaaaaagaagggatcatcagtagctggtttcactgttttgagaaagaaatgttcattccactaggtctgttccttcatcttaagtgacaa

SEQ ID NO: 240656 - DNA, 120 bp, Artificial Sequence
  ENSG00000121067_39 (sequence is synthesized)
atgacctggaaatactactttctgaaataataatatggaataataataatatgaaataataagaataataatatgaaagatgagttgtaactacaacccatcttctcagtgggacatgtt

SEQ ID NO: 240657 - DNA, 120 bp, Artificial Sequence
  ENSG00000121067_40 (sequence is synthesized)
ctactcccttgccccatggagagagcaaaagctggaaaaaacccaaagaagaaaagccctcacaacagcagttctggggcaggacaggtctgagacattccaggtggatgagtgaacaat

SEQ ID NO: 240658 - DNA, 120 bp, Artificial Sequence
  ENSG00000121067_41 (sequence is synthesized)
attcaacatagaaaattcccaaagacaggaaataacatcctctaggtctagttgtagaattattttctaaggagtgatcaagtgaggcagaagagggaggggagagacccatcagtgtga

SEQ ID NO: 240659 - DNA, 120 bp, Artificial Sequence
  ENSG00000121067_42 (sequence is synthesized)
gttcctttgagtgcttactgtgtgctggacacttgcttggtgcttttgagatattaaccattgaatgaagtatggttatcctcccctcttttttgataatcaagtaggccccaggctctg

SEQ ID NO: 240660 - DNA, 120 bp, Artificial Sequence
  ENSG00000121067_43 (sequence is synthesized)
atctgccctgtggttaaaggctggtgagtggcaaagccaggcagaagctcagggcttctggccgagggagcccatgctcctttttatgactagcatcaccggtgaatataaggaacatag

SEQ ID NO: 240661 - DNA, 120 bp, Artificial Sequence
  ENSG00000121067_44 (sequence is synthesized)
gcagtgttgggggcctggggaacattctgctttttgtttttgagaatatagtggctcaaagtcttggttttcagatgacgacagccacaggcaagtcaccagtctgctcattgtctaaca

SEQ ID NO: 240662 - DNA, 120 bp, Artificial Sequence
  ENSG00000121067_45 (sequence is synthesized)
gtgctggaattacaggcatgagtcaccttgcccggccaaaagaacatactttcatactgagttgccacttgaaaatgaaattggaactgaaagctagagaatataagtatctttctcaga

SEQ ID NO: 240663 - DNA, 120 bp, Artificial Sequence
  ENSG00000121068_0 (sequence is synthesized)
gttagcgcaggggatccgagctgggcaggacatgtgagatagtcacagttttccagagatcacgacaagatctaaccagtcgcgcgtggtccccggcgccggagcgggccagctcagccc

SEQ ID NO: 240664 - DNA, 80 bp, Artificial Sequence
  ENSG00000121068_1 (sequence is synthesized)
gcacagagccgggtgccccttgcggtgcgccggacgggaagccccgaggagcagctgctgcgcccgccacccgggtcgtc

SEQ ID NO: 240665 - DNA, 80 bp, Artificial Sequence
  ENSG00000121068_2 (sequence is synthesized)
ccggccccggcccccgggcgcctgggccggatgtcccgatgagagagccggcgctggcggccagcgccatggcttaccac

SEQ ID NO: 240666 - DNA, 120 bp, Artificial Sequence
  ENSG00000121068_3 (sequence is synthesized)
cgccatggcttaccacccgttccacgcgccacggcccgccgacttccccatgtccgcctttctggcggcggcgcagccctccttcttcccggcactcgcgctgccgcccggcgcgctggc

SEQ ID NO: 240667 - DNA, 80 bp, Artificial Sequence
  ENSG00000121068_4 (sequence is synthesized)
gcggcagcagcggccgaggcggggctgcacgtctcggcactgggcccgcacccgcccgccgcgcatctgcgctccctcaa

SEQ ID NO: 240668 - DNA, 120 bp, Artificial Sequence
  ENSG00000121068_5 (sequence is synthesized)
gcgctccctcaagagcctggagcccgaggacgaggtggaggacgaccccaaggtgacgctggaggccaaggagctgtgggaccagttccacaagctaggcacggagatggtcatcaccaa

SEQ ID NO: 240669 - DNA, 120 bp, Artificial Sequence
  ENSG00000121068_6 (sequence is synthesized)
gtccgggaggcggatgttcccccccttcaaggtgcgagtcagcggcctggacaagaaggccaagtatatcctgctgatggacattgtagccgctgacgattgccgctataagttccacaa

SEQ ID NO: 240670 - DNA, 120 bp, Artificial Sequence
  ENSG00000121068_7 (sequence is synthesized)
ctcgcgctggatggtggcgggcaaggccgaccctgagatgcccaaacgcatgtacatccacccagacagcccagccacgggggagcagtggatggctaagcctgtggccttccacaagct

SEQ ID NO: 240671 - DNA, 120 bp, Artificial Sequence
  ENSG00000121068_8 (sequence is synthesized)
gaagctgaccaacaacatctctgacaagcacggcttcaccatcctaaactccatgcacaagtaccagccgcgcttccacatagtgcgagccaacgacatcctgaagctgccttacagcac

SEQ ID NO: 240672 - DNA, 120 bp, Artificial Sequence
  ENSG00000121068_9 (sequence is synthesized)
cttccgcacctacgtgttcccggagaccgacttcatcgccgtcactgcctaccagaatgacaagatcacacagctgaagatcgacaacaacccgtttgccaagggcttccgggacaccgg

SEQ ID NO: 240673 - DNA, 120 bp, Artificial Sequence
  ENSG00000121068_10 (sequence is synthesized)
gaacggccggcgggagaaaaggaagcagctgacgctgccgtctctacgcttgtacgaggagcactgcaaacccgagcgcgatggcgcggagtcagacgcctcgtcgtgcgaccctccccc

SEQ ID NO: 240674 - DNA, 120 bp, Artificial Sequence
  ENSG00000121068_11 (sequence is synthesized)
cgcgcgggaaccacccacctccccgggcgcagcgcccagtccgctgcgcctgcaccgggcccgagctgaggagaagtcgtgcgccgcggacagcgacccggagcctgagcggttgagcga

SEQ ID NO: 240675 - DNA, 120 bp, Artificial Sequence
  ENSG00000121068_12 (sequence is synthesized)
ggagcgtgcgggggcgccgctaggccgcagcccggctccagacagcgccagccccactcgcttgaccgaacccgagcgcgcccgggagcggcgtagtcccgagaggggcaaggagccggc

SEQ ID NO: 240676 - DNA, 120 bp, Artificial Sequence
  ENSG00000121068_13 (sequence is synthesized)
cgagagcggcggggacggcccgttcggcctgaggagcctggagaaggagcgcgccgaagctcggaggaaggacgaggggcgcaaggaggcggccgagggcaaggagcagggcctggcgcc

SEQ ID NO: 240677 - DNA, 120 bp, Artificial Sequence
  ENSG00000121068_14 (sequence is synthesized)
ttgcacgggcagcagttctttgggccgctgggagccggccagccgctcttcctgcaccctggacagttcaccatgggccctggcgccttctccgccatgggcatgggtcacctactggcc

SEQ ID NO: 240678 - DNA, 120 bp, Artificial Sequence
  ENSG00000121068_15 (sequence is synthesized)
ggaggtggcgggcctgggaccgccgcggggctggacgcaggcgggctgggtcccgcggccagcgcagcaagcaccgccgcgcccttcccgttccacctctcccagcacatgctggcatct

SEQ ID NO: 240679 - DNA, 120 bp, Artificial Sequence
  ENSG00000121068_16 (sequence is synthesized)
ctctcccagcacatgctggcatctcagggaattccaatgcccactttcggaggcctcttcccctacccctacacctacatggcagcagcagccgcagccgcctcggctttgcccgccact

SEQ ID NO: 240680 - DNA, 120 bp, Artificial Sequence
  ENSG00000121068_17 (sequence is synthesized)
agtgctgcagctgccgccgccgcagccgccggctccctctcccggagccccttcctgggcagtgcccggccccgactgcgtttcagcccctatcagatcccggtcaccatcccgcctagc

SEQ ID NO: 240681 - DNA, 120 bp, Artificial Sequence
  ENSG00000121068_18 (sequence is synthesized)
actagcctcctcaccaccgggctggcctctgagggctccaaggccgctggtggaaacagccgggagcctagccccctgcccgagctggctctccgcaaagtaggggccccatcccgcggt

SEQ ID NO: 240682 - DNA, 120 bp, Artificial Sequence
  ENSG00000121068_19 (sequence is synthesized)
gccctgtcgcccagtggctcggccaaggaggcggccaatgaactgcagagcatccagagactggtgagtgggctggagagccagcgagccctctccccaggccgggagtcgcccaagtga

SEQ ID NO: 240683 - DNA, 120 bp, Artificial Sequence
  ENSG00000121068_20 (sequence is synthesized)
ggggctgcccagctgctcccctgccacgcaggccacccgggctgcctgcccctgctgcttgggacgtgtacagcacagaatgagtatttatttaaataaaggagaaaagtgggctgcagc

SEQ ID NO: 240684 - DNA, 120 bp, Artificial Sequence
  ENSG00000121068_21 (sequence is synthesized)
agccggaatagagcctcgtctggcaagtcggggcctgggacacttccctgggcctcaacaaggatcaggctgctggaaacacagtcacttgggagctgctgggctaggtccagatccgct

SEQ ID NO: 240685 - DNA, 120 bp, Artificial Sequence
  ENSG00000121068_22 (sequence is synthesized)
ccagcgtcaaggtggcatccgaaggtgtctctggtcttccagcgaggtgggagaggcctcatccagggcccagcggtccctgcagaagccagaaggtgcaggggccaggggtgggagcat

SEQ ID NO: 240686 - DNA, 120 bp, Artificial Sequence
  ENSG00000121068_23 (sequence is synthesized)
cggagggagtcccagagccctggaccttgggcctagaccgcgtgataaaactgggttgagggatgctggaaccagttacgactgaagtcagtgtagacctgagctgggagggaacctgtt

SEQ ID NO: 240687 - DNA, 120 bp, Artificial Sequence
  ENSG00000121068_24 (sequence is synthesized)
agtctccccacctcttccctgaagagacaggcacccctcccagccgtggtcaacggagggagtggcacttctgccttgagtccccaggggaaaaaaaaaaaagatatttatgaaataaat

SEQ ID NO: 240688 - DNA, 120 bp, Artificial Sequence
  ENSG00000121068_25 (sequence is synthesized)
ggtaatttgtgtaaataagctttaaggttcccagaatatgcaaattggtattaatttattcaaaggtgtacattgctgtgtacatatatttagagattaactcatacatttaaagttttt

SEQ ID NO: 240689 - DNA, 120 bp, Artificial Sequence
  ENSG00000121068_26 (sequence is synthesized)
ttcattttacgtgagcatctatattgtacagggctgggggggcccttggctgcgggagaaggcccagagccctggaggagccaccaccccgccggcccctcgacccctcggcccctcggc

SEQ ID NO: 240690 - DNA, 120 bp, Artificial Sequence
  ENSG00000121068_27 (sequence is synthesized)
ccctccgcccgggtttggctcgcccggcccgcgggctccacctcaggttttcacttttcgctccggagcgagaacgaaacgacaaaaacgcaagaaaacaataaaacgctagaaagcgaa

SEQ ID NO: 240691 - DNA, 120 bp, Artificial Sequence
  ENSG00000121068_28 (sequence is synthesized)
gctgcgcctgcaccgggcccgaggtgagggtcggaccggaggagggacagggaggtggcggcggggggtcctcaggtcgctgggctggtcttttgctgagccacccgctaacctgaaagg

SEQ ID NO: 240692 - DNA, 120 bp, Artificial Sequence
  ENSG00000121068_29 (sequence is synthesized)
ccaggaaggaaacgtcggcgagtgtctgggatggggtttccgtcccgggactcccctacgagggcggtccccggtagccagaagatccggccggactccgagcctggccccttgggcgcc

SEQ ID NO: 240693 - DNA, 120 bp, Artificial Sequence
  ENSG00000121068_30 (sequence is synthesized)
gtgtaattctatagctgtagggtttcctctccagggctgggttccttccactgtaaatctggggtcttggattaggtgacctgcagctgccctttgcccgactccagcagctcctccgac

SEQ ID NO: 240694 - DNA, 120 bp, Artificial Sequence
  ENSG00000121068_31 (sequence is synthesized)
tcggcctccccgagagcagcccttcccgagtgtccctgatcctgctcgtcggcctccgcccaggcccctgtaatccgcgcgccctctccccgcagctgaggagaagtcgtgcgccgcgga

SEQ ID NO: 240695 - DNA, 120 bp, Artificial Sequence
  ENSG00000121068_32 (sequence is synthesized)
ggcatctcaggtaaggcctgtgaccccgcggcagcgccagcgagggagaaggcccagggagctggcggcgaggccagcggagggcctgaggggtgccagggtcgctgggatcctctggca

SEQ ID NO: 240696 - DNA, 120 bp, Artificial Sequence
  ENSG00000121068_33 (sequence is synthesized)
ggcaagaactccatccaggggaggccccgggatgccctttaggacacctgggttctgagagacgaggactgtgttgtaagtccaggggctggccagggcgccgcttctgactcccgtgtg

SEQ ID NO: 240697 - DNA, 120 bp, Artificial Sequence
  ENSG00000121068_34 (sequence is synthesized)
acctttggcaagtccctgaccctctctgggcctgcttccttccctatagccccagcgaggagtgcggtgcccatcgagactcttctcaccctcacagaccagggccacccctggcttgtg

SEQ ID NO: 240698 - DNA, 120 bp, Artificial Sequence
  ENSG00000121068_35 (sequence is synthesized)
aagtcttctctcctggcctcaggacatttttcttgagaacaaagacccttggctccctgtccattctgaaaggctaaggtggccagacagacaaagggagaaggaacatttgcattattt

SEQ ID NO: 240699 - DNA, 120 bp, Artificial Sequence
  ENSG00000121068_36 (sequence is synthesized)
tctggacagttgaccaccagccctcccagaggtctctggcccctcccaggccttctacgaagtcctctgtcctggtgaaggacaaggctggtctttcccctaccttgagttcccagcacc

SEQ ID NO: 240700 - DNA, 120 bp, Artificial Sequence
  ENSG00000121068_37 (sequence is synthesized)
tcccaggggagtgttgacgaaaatgtggctggggcacagtaaggagatccgatggggacagtggcctctttggttgcttgggtggaatattccctgtggaaagatttggaatctcttcat

SEQ ID NO: 240701 - DNA, 120 bp, Artificial Sequence
  ENSG00000121068_38 (sequence is synthesized)
tcattttcttccctctgaggtttctggcaaattgaacccctgagatcttatctcaagggaaggaaaatagcagttcaggtctgagaaagctcctttgcttcagcagcaaatattttaaaa

SEQ ID NO: 240702 - DNA, 120 bp, Artificial Sequence
  ENSG00000121068_39 (sequence is synthesized)
gttgggttggtgggtgggggggtggggggttgggaggcaggcgattctgaaatgagttttacacacagctcagtgttagggtgtgtggagtgtttgaggtatcaccatcactcatctggg

SEQ ID NO: 240703 - DNA, 120 bp, Artificial Sequence
  ENSG00000121068_40 (sequence is synthesized)
gctctgggctggaagggaagcctctggagaaagttcagggcccagaggtttaatctgcacccctgattatttgtgtatatgaatgcctcctccccagacaaactggtaataatcaccagc

SEQ ID NO: 240704 - DNA, 120 bp, Artificial Sequence
  ENSG00000121068_41 (sequence is synthesized)
atcacagaggtcatgaggaagtcagggcttctagacacagcctggccaacaggtgcatgacccgggtgagaataccagcacctgggaggcatccgttggtagggctgctggtggttacat

SEQ ID NO: 240705 - DNA, 120 bp, Artificial Sequence
  ENSG00000121068_42 (sequence is synthesized)
tcccaggccagtgcagcccatcccagacatcaggtagagccaaatcccaagagaactgaagcctccctccttcctcccaacctgggatgccaggtctgaaatgcccagtaggacctgact

SEQ ID NO: 240706 - DNA, 120 bp, Artificial Sequence
  ENSG00000121068_43 (sequence is synthesized)
gtctcaggagggggtattttctcaggcctgatgaagctgcctcttttcttcttcctgctagagccaggcctgaggctccctgggagcccagtgcaatcatcagccccctgccctcctccc

SEQ ID NO: 240707 - DNA, 120 bp, Artificial Sequence
  ENSG00000121068_44 (sequence is synthesized)
catacccactagctctggggagtaagccattatctcaaaggtcaggccgtgcaccagccagacctcatgaactcaggaaggtgcttgtccaggagttcctggctgctgtgcccttcacag

SEQ ID NO: 240708 - DNA, 120 bp, Artificial Sequence
  ENSG00000121068_45 (sequence is synthesized)
gcaaagactgcattccttcctcagctgccagtgaggtgctgccaggcattccctgtagaactttcaggccagtttatgaactggttggcacccgtgtcctcctcctggcccaggcaggag

SEQ ID NO: 240709 - DNA, 120 bp, Artificial Sequence
  ENSG00000121068_46 (sequence is synthesized)
aaccatgagcaggcagaaggagactttgcaaagtgccttccccagcatgtgtgccctctgcccttcagagcctgcagataggaggggtggcgaggacactgttctcaatgagcagaacct

SEQ ID NO: 240710 - DNA, 120 bp, Artificial Sequence
  ENSG00000121068_47 (sequence is synthesized)
ccaagacacccaaagctgcctgtttgccacctggccctatgcctgccccgttttctccctcaaggccttcacccgtgctagggcagtcacctggaatgtcctttccattacccctgctgt

SEQ ID NO: 240711 - DNA, 120 bp, Artificial Sequence
  ENSG00000121068_48 (sequence is synthesized)
aatgcccagcacagaacttgatggcaggcctttgcatggtagcctgaagcgatctcacccttctaactgggtttggccacaggcacactggctcatgcttacctgtgctgcctgtggtta

SEQ ID NO: 240712 - DNA, 120 bp, Artificial Sequence
  ENSG00000121068_49 (sequence is synthesized)
tagttatgcgaattgtggttttacatccctaaaacagaagggcacggtgtccaggggatagcacccagcccaacttcagaaagacttcaggcaagatgtctaaccctcgtcttgttctgt

SEQ ID NO: 240713 - DNA, 120 bp, Artificial Sequence
  ENSG00000121073_0 (sequence is synthesized)
agctcctatgaggcccctgccgccggtcggcgatgtccggctggagctgtcgcctccgccgccgctgctgccggtgccggttgtgagcgggtctccagtcggctcctctgggcgtctcat

SEQ ID NO: 240714 - DNA, 120 bp, Artificial Sequence
  ENSG00000121073_1 (sequence is synthesized)
ggcctctagcagctccctggtgcccgaccggctgcgcctgccgctctgcttcctgggtgtctttgtctgctatttttactatgggatcctgcaggaaaagataacaagaggaaagtatgg

SEQ ID NO: 240715 - DNA, 120 bp, Artificial Sequence
  ENSG00000121073_2 (sequence is synthesized)
ggaaggagccaagcaggagacgttcacctttgccttaactttggtcttcattcaatgtgtgatcaatgctgtgtttgccaagatcttgatccagttttttgacactgccagggtggatcg

SEQ ID NO: 240716 - DNA, 120 bp, Artificial Sequence
  ENSG00000121073_3 (sequence is synthesized)
tacccggagctggctctatgctgcctgttctatctcctatctgggtgccatggtctccagcaattcagcactacagtttgtcaactacccaactcaggtccttggtaaatcctgcaagcc

SEQ ID NO: 240717 - DNA, 120 bp, Artificial Sequence
  ENSG00000121073_4 (sequence is synthesized)
aatcccagtcatgctccttggggtgaccctcttgaagaagaagtacccgttggccaagtacctgtgtgtgctgttaattgtggctggagtggcccttttcatgtacaaacccaagaaagt

SEQ ID NO: 240718 - DNA, 120 bp, Artificial Sequence
  ENSG00000121073_5 (sequence is synthesized)
tgttgggatagaagaacacacagtcggctatggagagctactcttgctattatcgctgaccctggatggactgactggtgtttcccaggaccacatgcgggctcattaccaaacaggctc

SEQ ID NO: 240719 - DNA, 120 bp, Artificial Sequence
  ENSG00000121073_6 (sequence is synthesized)
gggaatcctgttcactggggagctctgggagttcttgagctttgctgaaaggtaccctgccatcatctataacatcctgctctttgggctgaccagtgccctgggtcagagcttcatctt

SEQ ID NO: 240720 - DNA, 120 bp, Artificial Sequence
  ENSG00000121073_7 (sequence is synthesized)
tatgacggttgtgtattttggtcccctgacctgctccatcatcactacaactcgaaagttcttcacaattttggcctctgtgatcctcttcgccaatcccatcagccccatgcagtgggt

SEQ ID NO: 240721 - DNA, 120 bp, Artificial Sequence
  ENSG00000121073_8 (sequence is synthesized)
gggcactgtgcttgtgttcctgggtcttggtcttgatgccaagtttgggaaaggagctaagaagacatcccactaggaagagagagactacctccacatcaagaatatttaagttattat

SEQ ID NO: 240722 - DNA, 120 bp, Artificial Sequence
  ENSG00000121073_9 (sequence is synthesized)
ctcaaacagtgacatctcttgggaaaatggacttaataggaatatgggactgagttccagtcttttttaataaaataaaatcaagcaaaatcacatattctaaaaaatgcacttggattt

SEQ ID NO: 240723 - DNA, 120 bp, Artificial Sequence
  ENSG00000121073_10 (sequence is synthesized)
taacaagacagagtggtggtttttgttcttcatgccctggagcagtctatggtaaataaaagagggagggaagaggcagagctggatgttcattacccaggctgctcctctcacgggtgt

SEQ ID NO: 240724 - DNA, 120 bp, Artificial Sequence
  ENSG00000121073_11 (sequence is synthesized)
ggttagcatggttgagtgggcgattcctccaagaacctgaggattatagggaggaactctgtgagatcgcagaattgtgctaatggcttctgttccgatgggtgaggcttgtcccgttag

SEQ ID NO: 240725 - DNA, 120 bp, Artificial Sequence
  ENSG00000121073_12 (sequence is synthesized)
agctggtcccattagaggacgggtggctgtccattagagccagagaatgtaaaagtcacttcctctcctaaagctcctgtgggcaaatatttcattaaaaaaacaaagttgtgttctgtc

SEQ ID NO: 240726 - DNA, 120 bp, Artificial Sequence
  ENSG00000121073_13 (sequence is synthesized)
aaaaagataacggtcctgtaagacattgggagtgtatagaaccatagaacttacgtttagtggtggtgggttgggccatgatagggctgctttctgaggctgaggtctctggtgcaggcc

SEQ ID NO: 240727 - DNA, 120 bp, Artificial Sequence
  ENSG00000121073_14 (sequence is synthesized)
ctcagagttgcctgattggaaaaatctccagggcgagggatcagtctcgaggctgccggttcccctggccctcagggatggagccaaggacccgagtcggcccccttttggtactcccag

SEQ ID NO: 240728 - DNA, 120 bp, Artificial Sequence
  ENSG00000121073_15 (sequence is synthesized)
aaaagagcaggctgctagaagaggagcctcgacctagagagcagcccagagtccaccaggtggccggagatttgggccaattaagtagggggttggaggtagtagtaggaagacctgagg

SEQ ID NO: 240729 - DNA, 120 bp, Artificial Sequence
  ENSG00000121073_16 (sequence is synthesized)
tcagtcttgccctggcaattcgtgccagcaagtgaagacccaacacttgcatgaggaagggatccaacgaggagctcattaatgggaaatattcaggagcgcggccgaagggtttgcgcc

SEQ ID NO: 240730 - DNA, 120 bp, Artificial Sequence
  ENSG00000121073_17 (sequence is synthesized)
ttcccatgtatcaccagagggcaggctgccctcatccttttgatccctctagctgttagttgcccagaccaagggcctgaattagttccaagatgcccttttgttcaagcccttgagaaa

SEQ ID NO: 240731 - DNA, 120 bp, Artificial Sequence
  ENSG00000121073_18 (sequence is synthesized)
ccttcctggaaaaacctgcaccagcaggatttgtttgctacttgttactggcacaatgaaggagagtcgtgtgtcagttgtcatgggaagacactcagtagtaaaacacagggaggtacc

SEQ ID NO: 240732 - DNA, 120 bp, Artificial Sequence
  ENSG00000121073_19 (sequence is synthesized)
tccctaagaaagactggcctggctggaagaagagggtggcaagattagccctgaggtctgtttatagactttagaccaatggcagatacccagaagcccaccggacctcacctttatctt

SEQ ID NO: 240733 - DNA, 120 bp, Artificial Sequence
  ENSG00000121073_20 (sequence is synthesized)
gctgggatgtctagtttctagatccagtaaaatcagccccttttgcaaatgagcctagtggtccttaacaaactctgcctacatccagagaggcaagataattttaaagttttcagtggc

SEQ ID NO: 240734 - DNA, 120 bp, Artificial Sequence
  ENSG00000121073_21 (sequence is synthesized)
ctttgtctgctatttttactatgggatcctgcaggaaaagatgtgagcgaccccgggggcgggccgacagtctctccccagcctgtgacagggatcccgggccttctgcctctggacccg

SEQ ID NO: 240735 - DNA, 120 bp, Artificial Sequence
  ENSG00000121073_22 (sequence is synthesized)
ggctttcctcttgtcctcctgcccggctgtcgccctcttagcaccctactacttttgcagctatggctgagcctacccagaattccagaactccaggattattttctggattcttcggac

SEQ ID NO: 240736 - DNA, 120 bp, Artificial Sequence
  ENSG00000121073_23 (sequence is synthesized)
ttggttattttcttttcttagctgtttttccccgcttggttctaagggcctgcgttttacaggctgagacttctattcctcaaacaggacccgagtcggcccccttttggtactcccaga

SEQ ID NO: 240737 - DNA, 120 bp, Artificial Sequence
  ENSG00000121073_24 (sequence is synthesized)
ctgcaagccaatcccaggtaagcaaagaagatggtcttcctcttctgtcgtcactcttcctatagtaagctctctctctgctacaactgtgtccctctcggcttcatcatcccatcatgg

SEQ ID NO: 240738 - DNA, 120 bp, Artificial Sequence
  ENSG00000121073_25 (sequence is synthesized)
ctgtctccagggactttcccccagctctccctgctgcccatcctgtcatctgtgtcacttcttgtgatgttcataggctggtaatccttaataggagctaaaggctgacctagcctgctt

SEQ ID NO: 240739 - DNA, 120 bp, Artificial Sequence
  ENSG00000121073_26 (sequence is synthesized)
gcatgtgtttatattgtcattagacaacttaattcccattttgatcatcagtttctttatctcaacttcttttccttctccactgttccctacccttgtcctgtcccttcctggactttt

SEQ ID NO: 240740 - DNA, 120 bp, Artificial Sequence
  ENSG00000121073_27 (sequence is synthesized)
cacctttgttctctacctcctccctgtcttatacttaaccctgttgctcaatccttatctaggtgccagcctggcaccctccttttgtcctctctaagccttccttctcagtcattcttt

SEQ ID NO: 240741 - DNA, 120 bp, Artificial Sequence
  ENSG00000121073_28 (sequence is synthesized)
gtgaatgatttgctttgaaatcagtgcttcctaacttttcaaatttgggcacatgtagaaagtattttttatacagcacactggggttaatggtggaggctgctgatggctgaaggtgac

SEQ ID NO: 240742 - DNA, 120 bp, Artificial Sequence
  ENSG00000121073_29 (sequence is synthesized)
taatgcgaggggcttccttgagctaaggatgtgtgggtcagcatctctacagcatctgaggatttctgcttgtaatcactttggtagaagtaactcattaactttcaagcctttctcaca

SEQ ID NO: 240743 - DNA, 120 bp, Artificial Sequence
  ENSG00000121073_30 (sequence is synthesized)
aaattctctttagtttctctaatcagagaaaaatatgagaagaatcaatgatgagacgatgcaaacccacaccatacactttcccgcgtcccacctcccttgcagttctttaacaggcca

SEQ ID NO: 240744 - DNA, 120 bp, Artificial Sequence
  ENSG00000121073_31 (sequence is synthesized)
agtggccacacagagacacagtgacagctgaattttttctcctaaaatttacttgtatatttatgaaatttgtttaaatattttagagaaaacttttctcttttttttgagacggagttt

SEQ ID NO: 240745 - DNA, 76 bp, Artificial Sequence
  ENSG00000121073_32 (sequence is synthesized)
cgctcttgttgcccaggctggagtgagtgcagtggtacgatctcagctcaccaatcgggtgagccggagtagctag

SEQ ID NO: 240746 - DNA, 82 bp, Artificial Sequence
  ENSG00000121073_33 (sequence is synthesized)
cagagaaaacttttttaaaagagaaaagaggctgagtgtggtggctcacgcctgtaattctaacactttgggaggctgaggc

SEQ ID NO: 240747 - DNA, 120 bp, Artificial Sequence
  ENSG00000121073_34 (sequence is synthesized)
aaacttttttaaaagagaaaagaggctgagtgtggtggctcacgcctgtaattctaacactttgggaggctgaggcaggagtatcgcttgagtttaggagttcgagaccagcctgggcaa

SEQ ID NO: 240748 - DNA, 120 bp, Artificial Sequence
  ENSG00000121073_35 (sequence is synthesized)
aattagctgagcatggtggcagacgcctgtggtcccagctactcggggctgaggtgggaggatcgtttgagcccaggaggtggaggctgaggtgagctgtgatcacaccactgcactccc

SEQ ID NO: 240749 - DNA, 120 bp, Artificial Sequence
  ENSG00000121073_36 (sequence is synthesized)
acctgggtgacagagtgaaaatctgtatccaaagaaaataaaaggagaaaaggaagctttatttctaatccagccttcctagggtctccctctgttgctcaggctggagtgtagtggcat

SEQ ID NO: 240750 - DNA, 120 bp, Artificial Sequence
  ENSG00000121073_37 (sequence is synthesized)
gatcatagtccactgcaaccttgatctcctggactcaagtgatccacccaccacagcctcccgagtagttgcgattataggcatgtaccacaatacctgaccaatttttttttttttttt

SEQ ID NO: 240751 - DNA, 87 bp, Artificial Sequence
  ENSG00000121073_38 (sequence is synthesized)
gcatgtaccacaatacctgaccaatttttttttttttttttgtagcgatggggtcttgctgtgttgcctaggctggccttatctccc

SEQ ID NO: 240752 - DNA, 120 bp, Artificial Sequence
  ENSG00000121073_39 (sequence is synthesized)
attcagccatagcctagaagttttgactcttaaatttcttttagtcttgctgtattatatatgtatctatatctatctgtatctctatatagatatatttatatagatacagatatctgt

SEQ ID NO: 240753 - DNA, 120 bp, Artificial Sequence
  ENSG00000121073_40 (sequence is synthesized)
gtatcctggtgccattctcttgtctctgaggaagttacataaaaccagtgttctgacatgtattttatttaaagcccccattttggagatacaaggccgactaccccaccccaccacaat

SEQ ID NO: 240754 - DNA, 120 bp, Artificial Sequence
  ENSG00000121073_41 (sequence is synthesized)
agggatggagccaaggtcccagggcgggttttctttcctaggaagtggttgctgggttctgaggagtttcccccttggcagccatgagccggcagttctggtagtgactgctgggccctg

SEQ ID NO: 240755 - DNA, 120 bp, Artificial Sequence
  ENSG00000121073_42 (sequence is synthesized)
acaagaggaaagtatggggaaggagccaagcaggagacgttcacctttgccttaactttggtcttcattcaatgtgtgatcaatgctgtgtttgccaagatctgtccttggtaaatcctg

SEQ ID NO: 240756 - DNA, 120 bp, Artificial Sequence
  ENSG00000121075_0 (sequence is synthesized)
tgtggacctgggcgagtgactcgttgtgtgctgtgcccgcaggagatgctgcaggataagggcctgtccgagagcgaggaggccttccgggccccgggcccagcgctcggagaggccagc

SEQ ID NO: 240757 - DNA, 120 bp, Artificial Sequence
  ENSG00000121075_1 (sequence is synthesized)
cccgagcccgcgctggcagcgccgggcctcagcggagccgcgctaggcagccccccgggacccggggccgacgtcgtcgccgccgccgccgcggagcagaccatcgagaacatcaaggtg

SEQ ID NO: 240758 - DNA, 120 bp, Artificial Sequence
  ENSG00000121075_2 (sequence is synthesized)
aacatcaaggtggggctgcatgagaaggagctctggaagaagttccacgaggcgggcaccgagatgatcatcactaaggctggcaggaggatgttccccagctacaaggtaaaagtcaca

SEQ ID NO: 240759 - DNA, 120 bp, Artificial Sequence
  ENSG00000121075_3 (sequence is synthesized)
ggcatgaaccccaagaccaagtatatcctgctgattgacattgtccctgccgatgaccatcgctacaagttctgtgacaacaaatggatggtggcagggaaggctgagccagccatgcca

SEQ ID NO: 240760 - DNA, 120 bp, Artificial Sequence
  ENSG00000121075_4 (sequence is synthesized)
ggaaggctgtatgtccacccggattctcctgccacaggagcccactggatgcggcagctggtctccttccagaagctgaagctgacaaacaaccacctggacccctttggccatatcatc

SEQ ID NO: 240761 - DNA, 120 bp, Artificial Sequence
  ENSG00000121075_5 (sequence is synthesized)
ctcaactctatgcacaagtaccagccgcggctccacatcgttaaggctgatgagaacaatgctttcggctccaaaaacactgctttctgcacccacgtgttcccagagacctccttcatc

SEQ ID NO: 240762 - DNA, 120 bp, Artificial Sequence
  ENSG00000121075_6 (sequence is synthesized)
tctgtgacctcctaccagaatcacaagatcacccagctgaaaattgagaacaacccttttgccaagggattccggggcagtgatgacagtgacctgcgtgtggcccgactgcagagcaaa

SEQ ID NO: 240763 - DNA, 120 bp, Artificial Sequence
  ENSG00000121075_7 (sequence is synthesized)
gaataccccgtgatttccaaaagcatcatgaggcagaggctcatctccccccagctctcagccacaccggacgtgggccccctgctcggcacccaccaggcactccagcactaccagcac

SEQ ID NO: 240764 - DNA, 120 bp, Artificial Sequence
  ENSG00000121075_8 (sequence is synthesized)
gagaacggggcacactcacagctcgcggagccgcaggacctgcccctcagcacctttcccacccagagggactcaagcctcttctatcactgcctgaaaagacgagacggtacccgccac

SEQ ID NO: 240765 - DNA, 120 bp, Artificial Sequence
  ENSG00000121075_9 (sequence is synthesized)
ctggacttaccttgcaagcgatcctatctggaagccccctcttcggtgggggaggatcactatttccgttccccccctccctacgaccagcaaatgctgagcccctcctactgcagtgag

SEQ ID NO: 240766 - DNA, 120 bp, Artificial Sequence
  ENSG00000121075_10 (sequence is synthesized)
acctgcccccacctccgctgagctgtaacatgtggacttcagtgtcgccgtacaccagctatagcgtgcagacgatggagactgtgccgtaccagcccttccccacgcacttcaccgcca

SEQ ID NO: 240767 - DNA, 120 bp, Artificial Sequence
  ENSG00000121075_11 (sequence is synthesized)
ccaccatgatgccgcggctgcccaccctctccgctcagagctcccagccaccaggaaatgcccactttagtgtctacaatcagctctcccagtctcaggtccgagagcgggggcccagcg

SEQ ID NO: 240768 - DNA, 120 bp, Artificial Sequence
  ENSG00000121075_12 (sequence is synthesized)
cctcattcccaagagagcgcggcctcccccaagggtgtgagaggaagccaccctcgccacatctaaatgctgccaatgagtttctctactctcaaaccttctccttgtcccgagaatctt

SEQ ID NO: 240769 - DNA, 120 bp, Artificial Sequence
  ENSG00000121075_13 (sequence is synthesized)
ccttacagtaccattcaggaatggggactgtggagaactggactgacggatgactctcacgtctcctccatagccccgggaccgtgttgctccagtattaacctctgtgggtggcctgca

SEQ ID NO: 240770 - DNA, 84 bp, Artificial Sequence
  ENSG00000121075_14 (sequence is synthesized)
gagcatgtatgtatttggagagcatccatcttctgacatacaactgaggtcatgacaaggaaaaaaaacaccacatttatctaa

SEQ ID NO: 240771 - DNA, 120 bp, Artificial Sequence
  ENSG00000121075_15 (sequence is synthesized)
tgaggtcatgacaaggaaaaaaaacaccacatttatctaagaagtgattttggctgcaggacctgggtctattgttatctgacatctcttgacatgcccgtgggtgggatgggagtggag

SEQ ID NO: 240772 - DNA, 120 bp, Artificial Sequence
  ENSG00000121075_16 (sequence is synthesized)
ggttcatatgagttattgagagggttttataatggttgatttactcaggggccaggtggggagttctctcccatggggaaagattctcactgctggggtgggaagattctcgctgctggg

SEQ ID NO: 240773 - DNA, 120 bp, Artificial Sequence
  ENSG00000121075_17 (sequence is synthesized)
gtgtgaggactctgtgcacaccttagagttcctggccttctctttgcaaggggagctgagaatctggttttggtagcaggaggcccactcctttgacttctggagagtctgtgagactgc

SEQ ID NO: 240774 - DNA, 120 bp, Artificial Sequence
  ENSG00000121075_18 (sequence is synthesized)
ctgagaggtgggctcagctaagccacaatgtgtactttgatagtacagctggctgctcagtgagtggcctagacattgatgactggagctctgaggtctgagggatgacgttcggaaagg

SEQ ID NO: 240775 - DNA, 120 bp, Artificial Sequence
  ENSG00000121075_19 (sequence is synthesized)
gtcatgggctaaatgtcacctgaggggtatttttaaagggtttttttttcccttcaagaggagggaaaatgcaaccagtagcatctctgtcatcattcagattttgtaataaagtacaga

SEQ ID NO: 240776 - DNA, 120 bp, Artificial Sequence
  ENSG00000121075_20 (sequence is synthesized)
agagccgggatgtgtccagccccgagggcacggcaggcagctggaccctgacccagcggcgcggagtcggagccccggccgtcccgcgctcctcggacccgaacctgcaggggacctcgg

SEQ ID NO: 240777 - DNA, 120 bp, Artificial Sequence
  ENSG00000121075_21 (sequence is synthesized)
tgatgatgggcaattatgaaacacgcctcagctggcatcatccccaggaggccacactggagctgatgtctggcatctccagggcctgttctgctctcagaaaatctacgcttctggagc

SEQ ID NO: 240778 - DNA, 120 bp, Artificial Sequence
  ENSG00000121075_22 (sequence is synthesized)
gagaaaggccaacagaaataaagatagttgaaaaaaatttgtttcttccagtaaattcagccggtgagctcagaggagcaaagagaattctccagtgtggcgctcacaaagtcctcagcc

SEQ ID NO: 240779 - DNA, 120 bp, Artificial Sequence
  ENSG00000121075_23 (sequence is synthesized)
ctgcgttttagcattgaataccaccaggccatcagtgtggctggggtgaactctccatcaaacttgggaaatcactaaactctttgcatgctgaatagctatttatatattatataaata

SEQ ID NO: 240780 - DNA, 120 bp, Artificial Sequence
  ENSG00000121075_24 (sequence is synthesized)
aataaatatatatattatatatcgctctctctcacaaatgcaggccacatgtcaaattcagctttgctttctacaaatgaatgaacttaataaaaataaacgttggagggggtatttgga

SEQ ID NO: 240781 - DNA, 80 bp, Artificial Sequence
  ENSG00000121075_25 (sequence is synthesized)
cgttggagggggtatttggaaagacatctatttaaatttttattacatgtttgatattaaaaactaagaatggtttagat

SEQ ID NO: 240782 - DNA, 120 bp, Artificial Sequence
  ENSG00000121075_26 (sequence is synthesized)
ataaggcttttttagaaaacacattagctaacaggtgatatggaacttcaagtgttttgttatatagcatggatgttttattttgcatatcggaacataaagccattttacaactgtgaa

SEQ ID NO: 240783 - DNA, 120 bp, Artificial Sequence
  ENSG00000121075_27 (sequence is synthesized)
gctgctttcatggtacaacggcagagtttcgtagttgcaacagataccctgcggcccacaaagcctaagatatttactatctggtcctttgcagaaaaagtttgcccagtcttgacctag

SEQ ID NO: 240784 - DNA, 120 bp, Artificial Sequence
  ENSG00000121075_28 (sequence is synthesized)
accccacatccccacgtccccgccctgcagtgcttgcacaggcctctcctccagcaagagaggggcacaggcggggctgggtggggcgtgggctggcaaggaagtgaaccctccacctcg

SEQ ID NO: 240785 - DNA, 120 bp, Artificial Sequence
  ENSG00000121101_0 (sequence is synthesized)
atcagtccgcattccccgcacccacccacgtcttcccgggagtcgtatcccgagcatggaggttactgagaccgttatttcttcatggcctgcctagcttaagcagtagctggaaaagat

SEQ ID NO: 240786 - DNA, 120 bp, Artificial Sequence
  ENSG00000121101_1 (sequence is synthesized)
gtctcgggctgttcgtcttccagtcccctgtcctgttcaacttggtaccttaagaaatgactccctggaagctcagcttcatgagtatgtcaaacaagggaactatgtgaaagtgaagaa

SEQ ID NO: 240787 - DNA, 120 bp, Artificial Sequence
  ENSG00000121101_2 (sequence is synthesized)
aattcttaagaaaggaatttatgttgatgcagttaactccttgggccaaacagcactttttgttgcggcgttattgggccttaggaaattcgttgatgttctggtggattatggatcaga

SEQ ID NO: 240788 - DNA, 120 bp, Artificial Sequence
  ENSG00000121101_3 (sequence is synthesized)
tccaaatcaccgctgctttgatgggagcacccctgtccatgcagcagcattttcgggcaatcagtggatccttagcaaactgctggatgcaggaggtgacctgcgactccacgatgagag

SEQ ID NO: 240789 - DNA, 120 bp, Artificial Sequence
  ENSG00000121101_4 (sequence is synthesized)
gggtcaaaacccgaagacttgggctttgacagcaggaaaggagcgtagcacccagatagtggagttcatgcagcgctgtgcctcacacatgcaggccatcatccagggcttctcttacga

SEQ ID NO: 240790 - DNA, 120 bp, Artificial Sequence
  ENSG00000121101_5 (sequence is synthesized)
cctcctgaagaagatagactccccgcagcggcttgtctacagcccgtcctggtgtgggggcctcgtgcagggaaaccctaatggctctcctaaccgactgcttaaagctggagtcatttc

SEQ ID NO: 240791 - DNA, 120 bp, Artificial Sequence
  ENSG00000121101_6 (sequence is synthesized)
tgctcaaaatatctacagctttggttttgggaagttttatcttactggggcgacacagatggcctatctaggatctcttccggtcattggagaaaaggaagtgattcaagctgatgatga

SEQ ID NO: 240792 - DNA, 120 bp, Artificial Sequence
  ENSG00000121101_7 (sequence is synthesized)
gcccaccttctctttcttcagcggcccctacatggtcatgaccaacctagtgtggaatgggagcagggtcacagtgaaagagctgaatctccccacccacccacactgcagcaggctgcg

SEQ ID NO: 240793 - DNA, 120 bp, Artificial Sequence
  ENSG00000121101_8 (sequence is synthesized)
gctggccgacttgttaattgccgagcaggaacacagcagcaagctgcggcacccctacttgctacagttgatggctgtgtgtctctcccaggacctagagaaaacccgccttgtgtacga

SEQ ID NO: 240794 - DNA, 120 bp, Artificial Sequence
  ENSG00000121101_9 (sequence is synthesized)
gcgcatcactatcggcacattgttcagtgtccttcatgaacgacggtcccagttcccagtgctgcacatggaggtgattgtgcacctgctgctccagatatctgatgccctgagatacct

SEQ ID NO: 240795 - DNA, 120 bp, Artificial Sequence
  ENSG00000121101_10 (sequence is synthesized)
gcatttccaggggtttatccaccgctccctcagctcctatgctgtccatatcatctccccaggtgaagcgaggctgaccaacctggagtacatgttggaaagcgaggacagaggtgtaca

SEQ ID NO: 240796 - DNA, 120 bp, Artificial Sequence
  ENSG00000121101_11 (sequence is synthesized)
gagggacctgactcgagtgccccttcctacgcagctatacaactgggccgcaccagaagtgatcttacagaaggcagccacagtgaaatcagacatctacagcttttctatgatcatgca

SEQ ID NO: 240797 - DNA, 120 bp, Artificial Sequence
  ENSG00000121101_12 (sequence is synthesized)
ggagattttaacagatgacataccctggaagggcttagatggctcagttgttaaaaaagccgtagtctcggggaattatttagaagctgatgtcaggcttccgaaaccttactatgatat

SEQ ID NO: 240798 - DNA, 120 bp, Artificial Sequence
  ENSG00000121101_13 (sequence is synthesized)
tgttaagtcaggcatccacgtcaagcagaaagaccgaactatgaaccttcaagatatccggtatattctgaagaatgacttaaaggattttactggagcccagagaactcaaccaaccga

SEQ ID NO: 240799 - DNA, 120 bp, Artificial Sequence
  ENSG00000121101_14 (sequence is synthesized)
gagccccagagtgcagagatacggactccatcccgatgtcaatgtctatctaggactgacttcagaacaccccagagagacacctgacatggaaatcatagaactaaaggaaatgggcag

SEQ ID NO: 240800 - DNA, 120 bp, Artificial Sequence
  ENSG00000121101_15 (sequence is synthesized)
tcaacctcattcaccaagggttcactctttattcactgaggggacactagatcctcaggccccagatccatgtctgatggccagggagactcagaatcaagatgctccttgccctgctcc

SEQ ID NO: 240801 - DNA, 120 bp, Artificial Sequence
  ENSG00000121101_16 (sequence is synthesized)
atttatggcagaagaggccagcagccccagcacaggtcagccaagcctctgcagtttcgaaatcaacgagatctactcaggctgcttgattttggaagatgacatagaagagcctccagg

SEQ ID NO: 240802 - DNA, 120 bp, Artificial Sequence
  ENSG00000121101_17 (sequence is synthesized)
agctgcttcatctttggaggcagacggacctaaccaggtagatgaactgaaatccatggaagaagagctggataagatggagagagaggcgtgttgttttggcagtgaggatgagagctc

SEQ ID NO: 240803 - DNA, 120 bp, Artificial Sequence
  ENSG00000121101_18 (sequence is synthesized)
ttcaaaagctgagacagagtactcttttgatgactgggactggcaaaacggttcactcagttcactcagccttcctgagtcaaccagagaagccaagagcaatttgaacaacatgtccac

SEQ ID NO: 240804 - DNA, 120 bp, Artificial Sequence
  ENSG00000121101_19 (sequence is synthesized)
gactgaggagtatctcatcagtaagtgtgtgctggatctaaagattatgcagacaataatgcacgagaatgatgataggctgaggaatatcgagcagatattagatgaagtcgagatgaa

SEQ ID NO: 240805 - DNA, 120 bp, Artificial Sequence
  ENSG00000121101_20 (sequence is synthesized)
gaacaggaagagcgcatgtctttatgggccacttcaagagagtttacaaatgcctacaagttacctctggccgtgggccctccatctttaaactatattcctcctgtcctacagctttca

SEQ ID NO: 240806 - DNA, 120 bp, Artificial Sequence
  ENSG00000121101_21 (sequence is synthesized)
gggggtcagaagccagacaccagtggcaactacccaaccctaccaagatttccaagaatgctgccgactctttgtgaccctggaaaacagaacacagatgaacaatttcagtgcactcaa

SEQ ID NO: 240807 - DNA, 120 bp, Artificial Sequence
  ENSG00000121101_22 (sequence is synthesized)
ggagccaaggacagtttggaaacaagcaggatccaaaataccagtagccagggaagacctagagagtccactgcccaagccaaagccacacagtttaatagtgcactcttcactctgtca

SEQ ID NO: 240808 - DNA, 120 bp, Artificial Sequence
  ENSG00000121101_23 (sequence is synthesized)
agccaccggcagggaccttctgcatcacccagctgtcactgggactctaccaggatgagtgtggaacctgtttcttctgaaatctataatgcagagtccagaaataaagatgatggaaag

SEQ ID NO: 240809 - DNA, 120 bp, Artificial Sequence
  ENSG00000121101_24 (sequence is synthesized)
gtacacttaaaatggaaaatggaggtgaaagaaatggcaaagaaagcagctactggacagctcacagtacctccttggcatcctcagagtagtctgactttagagagcgaggctgaaaat

SEQ ID NO: 240810 - DNA, 120 bp, Artificial Sequence
  ENSG00000121101_25 (sequence is synthesized)
gagcccgacgccctgctgcagccccccattaggagcccagaaaacacggattggcagcgagttattgagtatcatagggaaaatgatgagcccagaggaaatggcaagtttgacaagacg

SEQ ID NO: 240811 - DNA, 120 bp, Artificial Sequence
  ENSG00000121101_26 (sequence is synthesized)
ggcaacaatgactgtgacagtgaccagcatggcagacagcccaggcttggaagcttcaccagtatcaggcacccatctcccagacaaaaggagcaaccagagcatagtgaagccttccaa

SEQ ID NO: 240812 - DNA, 120 bp, Artificial Sequence
  ENSG00000121101_27 (sequence is synthesized)
gcaagttctgacacattggtggctgtagagaaatcttacagtcatcagtccatgcaatcaacttgttcaccagagtcttctgaggatataacagatgaatttttaactccagacggtgaa

SEQ ID NO: 240813 - DNA, 120 bp, Artificial Sequence
  ENSG00000121101_28 (sequence is synthesized)
tatttttactcctcgactgctcaagaaaacttagctctagagacctcgagtcccatagaagaggactttgaaggaatacaaggtgcatttgcccaacctcaagtctctggtgaggaaaag

SEQ ID NO: 240814 - DNA, 120 bp, Artificial Sequence
  ENSG00000121101_29 (sequence is synthesized)
ttccaaatgagaaaaattcttggaaagaatgctgagattttgcccaggtctcaatttcaacctgtacgaagtactgaagatgaacaagaagagacatcaaaggagtcaccaaaggaactg

SEQ ID NO: 240815 - DNA, 120 bp, Artificial Sequence
  ENSG00000121101_30 (sequence is synthesized)
aaagagaaagacatatcattgacggatattcaagacctgtctagtatctcctatgaaccagacagctcttttaaggaagcttcatgcaaaacacccaaaataaaccatgcacctaccagt

SEQ ID NO: 240816 - DNA, 120 bp, Artificial Sequence
  ENSG00000121101_31 (sequence is synthesized)
gtcagcactccactcagcccagggtccgtttcttcagctgccagtcagtataaagactgccttgaaagtatcacatttcaggttaagacagagtttgcctcttgctggaacagtcaagaa

SEQ ID NO: 240817 - DNA, 120 bp, Artificial Sequence
  ENSG00000121101_32 (sequence is synthesized)
tttattcaaactttgtctgatgactttataagtgtccgagagagagcaaagaaactggattctctccttacttcctctgaaactcccccttcaagactgactggtcttaaaagattgtct

SEQ ID NO: 240818 - DNA, 120 bp, Artificial Sequence
  ENSG00000121101_33 (sequence is synthesized)
tcatttattggggctggatcccccagccttgttaaggcatgtgactcatcaccaccccatgccacccagagaaggagcctgcctaaagtagaagccttctcacagcatcacattgatgag

SEQ ID NO: 240819 - DNA, 120 bp, Artificial Sequence
  ENSG00000121101_34 (sequence is synthesized)
ctgccaccaccatctcaggagctacttgatgacattgagctcttgaaacagcagcagggctcatccacggtgttgcatgagaacacagcaagtgatggaggaggcactgcaaatgatcaa

SEQ ID NO: 240820 - DNA, 120 bp, Artificial Sequence
  ENSG00000121101_35 (sequence is synthesized)
aggcacttagaagaacaagaaactgacagtaaaaaagaagatagtagtatgcttttgtccaaagaaactgaagatcttggagaggacacagagagagctcactctactctggatgaggac

SEQ ID NO: 240821 - DNA, 120 bp, Artificial Sequence
  ENSG00000121101_36 (sequence is synthesized)
ctggaaagatggctgcagccacctgaggagagcgtggagctacaagaccttcccaagggctctgaaagggagacaaatatcaaagatcaaaaagttggtgaagagaaaagaaaaagggaa

SEQ ID NO: 240822 - DNA, 120 bp, Artificial Sequence
  ENSG00000121101_37 (sequence is synthesized)
gatagcattacaccagaaagaaggaaatcagagggtgttctagggacttctgaagaagatgaactaaaatcctgtttttggaagcgactaggttggtccgaatcatccaggataatcgtg

SEQ ID NO: 240823 - DNA, 120 bp, Artificial Sequence
  ENSG00000121101_38 (sequence is synthesized)
ctggatcagagtgacttgtcagactgattggaattggatcatagacggactcctggcctgagtttgagtgtcctggttgtaagctcctttcttctctttctgcttcagttgctgtcaggg

SEQ ID NO: 240824 - DNA, 120 bp, Artificial Sequence
  ENSG00000121101_39 (sequence is synthesized)
cagcagttccagttctgtaagtctcactttgttcagctgccacaatagacatcatcgtttggccctctctgttagcagcacattcaaccatttgttttcagtcagatttctgaaaagtga

SEQ ID NO: 240825 - DNA, 120 bp, Artificial Sequence
  ENSG00000121101_40 (sequence is synthesized)
gaggtagttttgatagtaaaaatttttggttgtgcctagaatggctttggttttgttgatgttaattttcaaaaactttaactcttgttatataataaaatgtttaattttaataacaga

SEQ ID NO: 240826 - DNA, 120 bp, Artificial Sequence
  ENSG00000121101_41 (sequence is synthesized)
tgaagaattctgctgtgaacatgagtgtacggatatctctttgagatcctgctttcaattcttttggatatatacccagaaatggtattactggatcatatgagctcactctactctgga

SEQ ID NO: 240827 - DNA, 120 bp, Artificial Sequence
  ENSG00000121101_42 (sequence is synthesized)
gatgacattgttgctgtgtaaaccttccattcacctcctccatttcagcagctgtgttaccagactttgtcctgggctctggccttatggtgctgctgcaccccagcacagtctgcagaa

SEQ ID NO: 240828 - DNA, 120 bp, Artificial Sequence
  ENSG00000121101_43 (sequence is synthesized)
gccttccctcatttcacttatgggaattatctggaccaggtttctagagctcttgaaacagcagcagggctcatccacggtgttgcatgagaacacagcaagtgatggaggaggcactgc

SEQ ID NO: 240829 - DNA, 120 bp, Artificial Sequence
  ENSG00000121101_44 (sequence is synthesized)
aaagctctggagttgccacaaacagcgttgagatcagaggaagagtggagaagcaaggaggagaattaacagagcattgctgcatcctgcagtgcggaggagggaagaaattggaatcgg

SEQ ID NO: 240830 - DNA, 80 bp, Artificial Sequence
  ENSG00000121104_0 (sequence is synthesized)
gtgtgagtctcgcagtggggctgaggcaggcagccgggagagccatggcgggggccgcagcgggcggcagaggcggaggt

SEQ ID NO: 240831 - DNA, 120 bp, Artificial Sequence
  ENSG00000121104_1 (sequence is synthesized)
ctccccccgggctgggctgcagccgctcagggccacgatccccttccagctgcagcagccgcaccagcgccgggacgggggtggccgtgcagccagcgtcccatgctcggtggccccaga

SEQ ID NO: 240832 - DNA, 120 bp, Artificial Sequence
  ENSG00000121104_2 (sequence is synthesized)
ccagcgtcccatgctcggtggccccagaaaagtcagtgtgtaggcctcagccacttcaggtccggcgtacattctccctggacaccatcctcagctcctaccttctgggccagtggccac

SEQ ID NO: 240833 - DNA, 120 bp, Artificial Sequence
  ENSG00000121104_3 (sequence is synthesized)
gagatgctgatggggccttcacctgctgcaccaatgacaaggccacccagacgcccctgtcctggcaagagctagaaggtgagcgtgccagttcctgtgcacacaagcgctcagcatcct

SEQ ID NO: 240834 - DNA, 120 bp, Artificial Sequence
  ENSG00000121104_4 (sequence is synthesized)
ggggcagcacagaccaccgaaaagagatttccaagttgaagcaacaactgcagaggacgaagctgagccgcagtgggaaagagaaggagcgaggttcaccactcctaggggaccacgcag

SEQ ID NO: 240835 - DNA, 120 bp, Artificial Sequence
  ENSG00000121104_5 (sequence is synthesized)
tgcggggagcactgagggcgtcccctcccagcttcccctcagggtcccctgtcttgcgactcagcccctgcctgcacaggagcctggaagggctcaaccaagagctggaggaggtatttg

SEQ ID NO: 240836 - DNA, 120 bp, Artificial Sequence
  ENSG00000121104_6 (sequence is synthesized)
tgaaggagcagggagaagaggagctgctgaggatccttgatatccctgatgggcaccgggccccagctcctccccagagtggcagctgtgatcatcccctcctcctcctggagcctggca

SEQ ID NO: 240837 - DNA, 120 bp, Artificial Sequence
  ENSG00000121104_7 (sequence is synthesized)
accttgccagctctccttccatgtccttggcatctccccagccttgtggcctggccagtcatgaggaacatcggggtgccgccgaggagctggcatccacccccaacgacaaagcctcct

SEQ ID NO: 240838 - DNA, 120 bp, Artificial Sequence
  ENSG00000121104_8 (sequence is synthesized)
ctccaggacacccagcctttcttgaagatggcagcccatctccagtccttgcctttgctgcctcccctcgacctaatcatagctacatcttcaaacgggagcccccagaaggctgtgaga

SEQ ID NO: 240839 - DNA, 120 bp, Artificial Sequence
  ENSG00000121104_9 (sequence is synthesized)
cctgacttcctgtcctgacaagaacaaagtccatttcaacccgactggctcagccttctgccccgtcaacctgatgaagcccctcttccccggcatgggcttcatcttccgtaactgccc

SEQ ID NO: 240840 - DNA, 120 bp, Artificial Sequence
  ENSG00000121104_10 (sequence is synthesized)
ctcaaacccgggatctccccttcccccggccagccccaggccaccacctcggaaggatccggaagcctccaaggcctccccactgccattcgagccatggcagcgcaccccaccatcaga

SEQ ID NO: 240841 - DNA, 120 bp, Artificial Sequence
  ENSG00000121104_11 (sequence is synthesized)
agagcctgtgcttttccagagctccctgatggtctgagggtcccacccctgccccactttaccatagagaccagtgccttggtggcaggtccctccccaggtcccctgagatggggtatg

SEQ ID NO: 240842 - DNA, 120 bp, Artificial Sequence
  ENSG00000121104_12 (sequence is synthesized)
gaggggcccttccctctcggccttcgagcactttctttcacttactgtgtcaaagccctgggtcctctttttgatgggcaccggcccctctgaacgtgatgggacctgccttctccacta

SEQ ID NO: 240843 - DNA, 120 bp, Artificial Sequence
  ENSG00000121104_13 (sequence is synthesized)
gtagctgggcagctcacaattcacacctgtgtacctgccacatccctcacttggtggaaaacacccagaaggtcttgagtcccccacccctgggtgtcagtccaaatgactgtataggag

SEQ ID NO: 240844 - DNA, 120 bp, Artificial Sequence
  ENSG00000121104_14 (sequence is synthesized)
gcccttatttttgtcacagagcaagctggccatgaacgaaggagagaagacgccacagatttccttccctctcctccaggagaccataagatagatcccccatcctctcagccctattcc

SEQ ID NO: 240845 - DNA, 120 bp, Artificial Sequence
  ENSG00000121104_15 (sequence is synthesized)
catgcctccctctcattggaggagctgaccaaagcagccctaacgggccataacacttgaccaattcagctgctggcagagggaggaaacaagtgttttcccaagtggcattttcatctc

SEQ ID NO: 240846 - DNA, 120 bp, Artificial Sequence
  ENSG00000121104_16 (sequence is synthesized)
gctttcaccctgactaaagattgtcttaagtagcagcccagcccgcccagccccaggtgggtagtggggaggagagctggcattcctccaggtggcaaatggcgactctatactctccgc

SEQ ID NO: 240847 - DNA, 120 bp, Artificial Sequence
  ENSG00000121104_17 (sequence is synthesized)
ccgccccagggctggatggattagaaaaatgcctatttttcttgtatcgatgtagagactctattttctcccaaagacactatttttgcagctgtttgaagtttgtatattttccgtact

SEQ ID NO: 240848 - DNA, 120 bp, Artificial Sequence
  ENSG00000121104_18 (sequence is synthesized)
gcagagcttacacaaaattgaagaatgttaatgttcgagttttcttatcttgtgtttagaggttgttttttgcagatcttggtgttaatagaccaaataaataaataaatattcccagca

SEQ ID NO: 240849 - DNA, 77 bp, Artificial Sequence
  ENSG00000121104_19 (sequence is synthesized)
gaagctagtgggcgccattttgaagttgggcagaaagtgactccagtggtggaacccggagccaaccatttttagtt

SEQ ID NO: 240850 - DNA, 83 bp, Artificial Sequence
  ENSG00000121104_20 (sequence is synthesized)
tgtcctcttcatggaaaagtagtacagcatttcttcaatcaattaaaaaaacagttcaaatgtcagatcttgaagtaaatcct

SEQ ID NO: 240851 - DNA, 120 bp, Artificial Sequence
  ENSG00000121104_21 (sequence is synthesized)
ctagcctgcatttctctttccatcctctcgcatatcccagaagaaagaggtacttgaagagtttgcaagagatattagtagtacccgtggcggcctgaatgtggctgttttttcctctct

SEQ ID NO: 240852 - DNA, 120 bp, Artificial Sequence
  ENSG00000121104_22 (sequence is synthesized)
ggacagaagagagggtagctgaacaaggttcgggggagcggaaagttgggacccaagcactgtgaggcgtggccaactgcgtcacggtgctcaatcgactgtccttagaaacccgccatc

SEQ ID NO: 240853 - DNA, 120 bp, Artificial Sequence
  ENSG00000121104_23 (sequence is synthesized)
cctcctctcccgtttctcaccttccttcgcggcattgccggcggctgcggcccgacggttccgattcgggcagcggcggcagcagcaggaacggtggctccggcgggctccgtggcggcc

SEQ ID NO: 240854 - DNA, 120 bp, Artificial Sequence
  ENSG00000121104_24 (sequence is synthesized)
tctgtatcagtcccaatcctgcggacgatccctagtgcctcctgcctctcagcgtctggagcgttctgcgcaggcgccgcgggctgaagcgctttttccttcacttccggctgggtctcg

SEQ ID NO: 240855 - DNA, 120 bp, Artificial Sequence
  ENSG00000121104_25 (sequence is synthesized)
cgtcacctgacgttacgggccagagagggtgctgggaagttcgatccttttggtgaagctagtgggcgccattttgaagttgggcagaaagtgactccagtggtggaacccggagccaac

SEQ ID NO: 240856 - DNA, 120 bp, Artificial Sequence
  ENSG00000121104_26 (sequence is synthesized)
ggtgaagctagtgggcgccattttgaagttgggcagaaagtgactccagtggtggaacccggagccaaccatttttagttacacgcccctgtcctggcaagagctagaaggtgagcgtgc

SEQ ID NO: 240857 - DNA, 120 bp, Artificial Sequence
  ENSG00000121104_27 (sequence is synthesized)
atggtataaattgtttcccatgataaaggctggctgagtaggtcaggaaaggtcttgtcagaccatatgtgctgtttcaggctgcttcaaattcttttaggacagtggtggatatgagtg

SEQ ID NO: 240858 - DNA, 120 bp, Artificial Sequence
  ENSG00000121104_28 (sequence is synthesized)
gaggagctgctgaggagcccagggcacagaaggtccctgccctcatgaggcttatagtcttatggggacaacacattgatcaagccctacagatccttgatatccctgatgggcaccggg

SEQ ID NO: 240859 - DNA, 120 bp, Artificial Sequence
  ENSG00000121152_0 (sequence is synthesized)
gttacggcgctcaggcgtctcgacgcgcgcgatttaaaaccagctcaggagacgccaaggaaagatgggacctcccggcccagcactgccagccacaatgaataactcttcttcagagac

SEQ ID NO: 240860 - DNA, 120 bp, Artificial Sequence
  ENSG00000121152_1 (sequence is synthesized)
gcgaggacacccccacagtgcctcctctccttcagagcgtgtgttcccgatgcccctgcccaggaaggcgcctctcaatattcctggcaccccagtcctcgaagactttcctcagaatga

SEQ ID NO: 240861 - DNA, 120 bp, Artificial Sequence
  ENSG00000121152_2 (sequence is synthesized)
cgatgagaaggagcggctgcagcggaggcgctcgagggtctttgatctgcagttcagcactgactcacctcgcttattggcctccccctccagcaggagtattgacatttcagctactat

SEQ ID NO: 240862 - DNA, 120 bp, Artificial Sequence
  ENSG00000121152_3 (sequence is synthesized)
ccccaagtttacaaacacgcagattacggaacattactccacctgtatcaaactgtccactgaaaataaaatcactaccaagaatgcttttggtttgcacttgattgattttatgtcaga

SEQ ID NO: 240863 - DNA, 120 bp, Artificial Sequence
  ENSG00000121152_4 (sequence is synthesized)
gattcttaaacagaaagacaccgaaccaaccaactttaaagtggctgcgggtactctggatgccagcaccaagatctatgctgtgcgcgtggatgccgtccatgccgatgtatacagagt

SEQ ID NO: 240864 - DNA, 120 bp, Artificial Sequence
  ENSG00000121152_5 (sequence is synthesized)
ccttggggggctgggcaaagatgcaccgtctttggaagaagtagaaggccatgttgctgatggaagtgctactgaaatgggaacaaccaaaaaggctgtaaagccaaagaagaagcactt

SEQ ID NO: 240865 - DNA, 120 bp, Artificial Sequence
  ENSG00000121152_6 (sequence is synthesized)
acacagaactattgagcagaacataaacaacctcaatgtctccgaagcagatcggaagtgtgagattgatcccatgtttcagaagacagcagcctcatttgatgagtgcagcacagcagg

SEQ ID NO: 240866 - DNA, 120 bp, Artificial Sequence
  ENSG00000121152_7 (sequence is synthesized)
ggtgtttctgtccactctccactgccaggactacagaagtgaactgctgtttccctctgatgtccagactctctccacgggagaacctctcgagttgccagagttaggttgtgtagaaat

SEQ ID NO: 240867 - DNA, 120 bp, Artificial Sequence
  ENSG00000121152_8 (sequence is synthesized)
gacagatttaaaagcgcccttgcagcagtgtgcagaagatcgccagatctgcccttccctggccgggttccagtttacacagtgggacagtgaaacacataatgagtctgtgtcggccct

SEQ ID NO: 240868 - DNA, 120 bp, Artificial Sequence
  ENSG00000121152_9 (sequence is synthesized)
ggtagacaagtttaagaagaatgaccaggtatttgacatcaatgctgaagttgacgagagtgactgtggagacttccccgatgggtccctgggggatgactttgatgccaacgatgaacc

SEQ ID NO: 240869 - DNA, 120 bp, Artificial Sequence
  ENSG00000121152_10 (sequence is synthesized)
tgaccacaccgcagttggggatcatgaagagttcaggagctggaaggagccctgccaggttcagagctgccaggaagaaatgatttcccttggggatggagacatcaggaccatgtgccc

SEQ ID NO: 240870 - DNA, 120 bp, Artificial Sequence
  ENSG00000121152_11 (sequence is synthesized)
ccttctgtctatgaaacctggagaatattcttatttcagtcctcggaccatgtcgatgtgggctggcccggatcactggcgctttaggcctcgacgcaaacaagatgctccttcccaatc

SEQ ID NO: 240871 - DNA, 120 bp, Artificial Sequence
  ENSG00000121152_12 (sequence is synthesized)
agaaaacaaaaagaagagtacaaaaaaagattttgaaattgactttgaagatgatattgactttgatgtatattttagaaaaacaaaggctgctactattctgaccaagtccactttgga

SEQ ID NO: 240872 - DNA, 120 bp, Artificial Sequence
  ENSG00000121152_13 (sequence is synthesized)
gaaccagaattggagagctaccacccttcctacagatttcaactacaatgttgacactctggtccagcttcacctcaaaccaggcaccaggttacttaagatggcccagggccatagggt

SEQ ID NO: 240873 - DNA, 120 bp, Artificial Sequence
  ENSG00000121152_14 (sequence is synthesized)
agagactgagcattatgaagaaattgaagactatgattacaacaaccctaacgacacctccaacttttgccctggattacaggctgctgacagtgatgatgaagatttggatgacttatt

SEQ ID NO: 240874 - DNA, 120 bp, Artificial Sequence
  ENSG00000121152_15 (sequence is synthesized)
tgtgggacctgttgggaactctgacctctcaccttatccttgccatccacctaagacagcacaacagaatggtgacactccagaagcccaaggattagacatcacaacatatggggagtc

SEQ ID NO: 240875 - DNA, 120 bp, Artificial Sequence
  ENSG00000121152_16 (sequence is synthesized)
aaacttggtagctgagcctcagaaggtaaataaaattgaaattcactatgccaagactgccaaaaagatggacatgaagaaactgaagcagagcatgtggagtctgctgacagcgctctc

SEQ ID NO: 240876 - DNA, 120 bp, Artificial Sequence
  ENSG00000121152_17 (sequence is synthesized)
cggaaaggaggcagatgcagaggcaaaccacagggaagctggaaaagaagcggccctggcagaagtggctgacgagaagatgcttagcgggctcacgaaggacctgcagaggagcctgcc

SEQ ID NO: 240877 - DNA, 120 bp, Artificial Sequence
  ENSG00000121152_18 (sequence is synthesized)
ccctgtcatggctcagaacctctccatacctctggcttttgcctgtctcctacatttagccaatgaaaagaatctaaaactggaaggaacagaggacctctctgatgttcttgtgaggca

SEQ ID NO: 240878 - DNA, 120 bp, Artificial Sequence
  ENSG00000121152_19 (sequence is synthesized)
aggagattgagttcactatggagaagtcagcagcaggaggcccatcccttactcagttgccgggacatccccagtctcgggggaagaagatgccatgggcttatacccaggctgtagcca

SEQ ID NO: 240879 - DNA, 120 bp, Artificial Sequence
  ENSG00000121152_20 (sequence is synthesized)
actaccaacgtgcctgtttgtttgttgctctttccttctctccatcatagtctgggtgccagcgccctgaagctccgtgctcaactgattaaactttactgccctatggtgaccatctag

SEQ ID NO: 240880 - DNA, 120 bp, Artificial Sequence
  ENSG00000121152_21 (sequence is synthesized)
gagaggggagggcagagggggtgagggtactattctggattgagaaaacctatatccattctttatatcaatgtatagttttagtctcctaaattgatctgttattttccaaactattct

SEQ ID NO: 240881 - DNA, 120 bp, Artificial Sequence
  ENSG00000121152_22 (sequence is synthesized)
cttgtagaaaattttccagtgggcacttaatggtgcccttgaagaacttcctaatccatgtacataaaatacatcatatgtacacttataaatgtatatagaatgctcaaaaataaaatt

SEQ ID NO: 240882 - DNA, 120 bp, Artificial Sequence
  ENSG00000121152_23 (sequence is synthesized)
cttaataatagaactggcaaaatatttgagtgtccactagatgagtatcagacctagtccttacccttagggggatgcagtcctggttgttatccaggatacacacctgtcagtataagg

SEQ ID NO: 240883 - DNA, 120 bp, Artificial Sequence
  ENSG00000121152_24 (sequence is synthesized)
cagaagatgcctaagggccaagatggtttgcctcggaggagaatggaagagagagattgctgactggacattcagatgcaagactgggtcctgcttaaatcccaggattctgctggaggg

SEQ ID NO: 240884 - DNA, 120 bp, Artificial Sequence
  ENSG00000121152_25 (sequence is synthesized)
attgcttcatgtagccttctcagcatccctaggagaaacttactattgtgactctcatgttggaggaggaaacggacacccaaggtagaggaacttgcaaaagggcagccggcaaactgt

SEQ ID NO: 240885 - DNA, 120 bp, Artificial Sequence
  ENSG00000121152_26 (sequence is synthesized)
caggggtggcctgagcctggcaatctgcctccagagtctgctctcggccattgtgctatgtgctacctggataggtcatacaggctcagcagtgggtggagagcagtgctcagatttgtc

SEQ ID NO: 240886 - DNA, 120 bp, Artificial Sequence
  ENSG00000121152_27 (sequence is synthesized)
catctccacagaatgcagcacacacacaaatgtacaagttcttcccctaacctcagaggaataggggaattaactttgcttgcaatttggaacaatattatagatgttgatccaagtagt

SEQ ID NO: 240887 - DNA, 120 bp, Artificial Sequence
  ENSG00000121152_28 (sequence is synthesized)
tctgttactggctggtcctggatctctgccagaacacccgtcatcattgactggctaaatagagatcttggatataggccagaagcagtgaagtatataattggaaattgctcctgataa

SEQ ID NO: 240888 - DNA, 120 bp, Artificial Sequence
  ENSG00000121152_29 (sequence is synthesized)
taacttccttcttagccaaaaaccacacaaaacaaaaataatcccctccccacaggaatatgctttccaaattgtgtccaaaacattacctgctctgttatattgagaaggttagagact

SEQ ID NO: 240889 - DNA, 120 bp, Artificial Sequence
  ENSG00000121152_30 (sequence is synthesized)
tcagagcatgcttagaaaaagcagtggtgccacaggtgagactccacactctgtcttgctggggctgaagcctccatcactttcccaggccaggttagtgctgggcttcttgctttcctt

SEQ ID NO: 240890 - DNA, 120 bp, Artificial Sequence
  ENSG00000121152_31 (sequence is synthesized)
ctattcctgagagtagaactggctaagcccattccttccctcagtcagccccacttctctatagtgggttctgggggtggggggctgaattaccagtaaaactagaaagattgggaccaa

SEQ ID NO: 240891 - DNA, 120 bp, Artificial Sequence
  ENSG00000121152_32 (sequence is synthesized)
ctgaattaccagtaaaactagaaagattgggaccaagtgcagtggcccacacctgtaaatcctagcgctttgaaaggaagaggcaggaggattgcttgaagtcaggagttcaagaccagc

SEQ ID NO: 240892 - DNA, 75 bp, Artificial Sequence
  ENSG00000121152_33 (sequence is synthesized)
cagcctgggcaaaatagaaccccatctttaaaaaaaaagtttaaaaattagccaggtacggtaatcacttgagcc

SEQ ID NO: 240893 - DNA, 120 bp, Artificial Sequence
  ENSG00000121152_34 (sequence is synthesized)
cattccagccaggacaacagagtgagatcctatctcttaaacaaaaaaaaaaactggcgagttcaataccaacttctacaatgaaatccccttccccccacaaccctgcttctcctaagt

SEQ ID NO: 240894 - DNA, 120 bp, Artificial Sequence
  ENSG00000121152_35 (sequence is synthesized)
ttccctcattacatggttgctgtgggctatgtgtgctgtggtctgaatgtttgtgtctaaaattcacatgttggtattaagagatagggcctttgggaggtgattaggttatgagggcag

SEQ ID NO: 240895 - DNA, 120 bp, Artificial Sequence
  ENSG00000121152_36 (sequence is synthesized)
atccctcgtgaatgggattagtgctcttataaaagaggcctgaggaagcttgttcgttcctcttgcccttctgccatgtaaggatgcaatgagaaggcaccatctgtgagcaaggagccc

SEQ ID NO: 240896 - DNA, 120 bp, Artificial Sequence
  ENSG00000121152_37 (sequence is synthesized)
ctcaccagacagcaaatctgccggcgtcttgatcttggacttctcagcctctagaactgtgaacaataaatctattgtttataaattaagcagtctaagtcattttgttatagcagacaa

SEQ ID NO: 240897 - DNA, 120 bp, Artificial Sequence
  ENSG00000121152_38 (sequence is synthesized)
attgactaagacagtgggtatgcaagataagtttattttatataaaatactttgggaagtaggtgttctaggactggtgtgacagttccatgaaattatgagagaccggggatccttcca

SEQ ID NO: 240898 - DNA, 120 bp, Artificial Sequence
  ENSG00000121152_39 (sequence is synthesized)
gctcatccttctgtttcagtgtggctgctggaatccagccatcacatccatagtctaagcagcaggacgaaggactgggggaaaagagaactgctgctccctgttaaatcagtttcctgg

SEQ ID NO: 240899 - DNA, 120 bp, Artificial Sequence
  ENSG00000121152_40 (sequence is synthesized)
gggtcgatatgaatatttgccacctcagggtgccacaaaggtccccaccagcaagaaggctcccaccagatatggactcaacctgggacttttcagcctccataactgtaataaattcct

SEQ ID NO: 240900 - DNA, 120 bp, Artificial Sequence
  ENSG00000121152_41 (sequence is synthesized)
ttgtcagttacccagtttcaggtattctgttataggtaacagaaaacaaactaatacaagtggtaatgtgtccagctaaaaatttgggttctgttaaggttaaaagaaaatttgaggtag

SEQ ID NO: 240901 - DNA, 120 bp, Artificial Sequence
  ENSG00000121152_42 (sequence is synthesized)
ccagcagtatctgcctcagatgctgagaagcctcctgagataagagcgtataccatgtccataactgaagttttaacattctctgccaaacagaaccagaatttaagggcaggagaattt

SEQ ID NO: 240902 - DNA, 120 bp, Artificial Sequence
  ENSG00000121152_43 (sequence is synthesized)
gcaagatagaatttgcaatttgcaagagggaattgcaatttgcaagagaggggcaatttgcaatttgcaagagagggcaatttgcaagagagaattgtggggccctgagagagaatacat

SEQ ID NO: 240903 - DNA, 120 bp, Artificial Sequence
  ENSG00000121152_44 (sequence is synthesized)
ccaaaggaagagggaaccaggcattacaaattgaattgaacaaggacagatatctgaagggggtttgtagttcccagtaaagtatggtacagctaggtgcacttccctggccagaccacc

SEQ ID NO: 240904 - DNA, 120 bp, Artificial Sequence
  ENSG00000121152_45 (sequence is synthesized)
ctacagtgtatgatccccctggggagcaaaaggctgcaggtaacactttggtgccctagaaattctgctgtggtgcaactatagtggatcacaggcagagtggggcattgttccccttct

SEQ ID NO: 240905 - DNA, 120 bp, Artificial Sequence
  ENSG00000121152_46 (sequence is synthesized)
tagcacaggatactgggtcatttcaacaccacaaggatttgcagcatctgcggcaacgagtttggtgtcctggagcaaggaaaggaaccgttcatggtggctgaagccaagctgctcagc

SEQ ID NO: 240906 - DNA, 120 bp, Artificial Sequence
  ENSG00000121152_47 (sequence is synthesized)
actgaggcagcaagccatgatctaggtcttcgagtagaattctcagttttggttcatttaaaaatgttttttgggggaattggggatcatttatgggtaccaaaagaaaaaaaaatgaat

SEQ ID NO: 240907 - DNA, 120 bp, Artificial Sequence
  ENSG00000121152_48 (sequence is synthesized)
acaatagggtgactatagtcaataataacaattgtatattttaaaataaagaatgtaattgaaaagagtaaatgcctgaggggatggataccccattctctgtgatgtgcttatttcaca

SEQ ID NO: 240908 - DNA, 120 bp, Artificial Sequence
  ENSG00000121152_49 (sequence is synthesized)
cgccaaggaaagatgggacctcccggcccagtacttaaattcacatagctgcagagtggatatttgtcccagattaacaaagaagcatcagaaacctatggcctcccccctgcacctcca

SEQ ID NO: 240909 - DNA, 120 bp, Artificial Sequence
  ENSG00000121152_50 (sequence is synthesized)
agaaacccaaactctagaggttctagccattaagtattagagttggagaagatctcagtggacagtgtgtggtgaacctccacccctgtgacaggctcaagacttctttggatataggaa

SEQ ID NO: 240910 - DNA, 120 bp, Artificial Sequence
  ENSG00000121152_51 (sequence is synthesized)
gttacttaagatggcccagggccatagggtagagactgagcattatgaagaaattgaagactatgattacaacaaccctaacgacacctccaacttttgccctggattacagacagcaca

SEQ ID NO: 240911 - DNA, 120 bp, Artificial Sequence
  ENSG00000121152_52 (sequence is synthesized)
attttaagaaaagaagtagtgtagatgaccagccagtcagcagttagccaaggaaaagaaatgccagtcacagccctgttgtgtctcttaataagccgaggaagcatacagatgagccag

SEQ ID NO: 240912 - DNA, 120 bp, Artificial Sequence
  ENSG00000121152_53 (sequence is synthesized)
cctcctggttggtcagtttgcctggcctgggatgaagggacagtgaaaatggaagcctctgagtgaggagagtgagtactggagtcaggagaactggactcccagcctcacactgctccc

SEQ ID NO: 240913 - DNA, 120 bp, Artificial Sequence
  ENSG00000121207_0 (sequence is synthesized)
gagcaccgcgcgcggccctgcccccggcacggcccccaggtgcgctccttctccggctgcttgtagcactggtctcactgtccccgccgtcagccaccggttccttatccgtctcattcc

SEQ ID NO: 240914 - DNA, 120 bp, Artificial Sequence
  ENSG00000121207_1 (sequence is synthesized)
ccattgtggcttggctgagccggtcgccaggcctcgctgtcctcctttgccttcctctctcctcagcggccgtactttgcgccgtacctcacctggcctgcaggatgaagaaccccatgc

SEQ ID NO: 240915 - DNA, 120 bp, Artificial Sequence
  ENSG00000121207_2 (sequence is synthesized)
tggaggtggtgtctttactactggagaagctgctcctcatctccaacttcacgctctttagttcgggcgccgcgggcgaagacaaagggaggaacagtttttatgaaaccagctctttcc

SEQ ID NO: 240916 - DNA, 120 bp, Artificial Sequence
  ENSG00000121207_3 (sequence is synthesized)
accgaggcgacgtgctggaggtgccccggacccacctgacccactatggcatctacctaggagacaaccgtgttgcccacatgatgcccgacatcctgttggccctgacagacgacatgg

SEQ ID NO: 240917 - DNA, 120 bp, Artificial Sequence
  ENSG00000121207_4 (sequence is synthesized)
ggcgcacgcagaaggtggtctccaacaagcgtctcatcctgggcgttattgtcaaagtggccagcatccgcgtggacacagtggaggacttcgcctacggagctaacatcctggtcaatc

SEQ ID NO: 240918 - DNA, 120 bp, Artificial Sequence
  ENSG00000121207_5 (sequence is synthesized)
acctggacgagtccctccagaaaaaggcactgctcaacgaggaggtggcgcggagggctgaaaagctgctgggctttaccccctacagcctgctgtggaacaactgcgagcacttcgtga

SEQ ID NO: 240919 - DNA, 120 bp, Artificial Sequence
  ENSG00000121207_6 (sequence is synthesized)
cctactgcagatatggcaccccgatcagtccccagtccgacaagttttgtgagactgtgaagataattattcgtgatcagagaagtgttcttgcttcagcagtcttgggattggcgtcta

SEQ ID NO: 240920 - DNA, 120 bp, Artificial Sequence
  ENSG00000121207_7 (sequence is synthesized)
tagtctgtacgggcttggtatcatacactacccttcctgcaatttttattccattcttcctatggatggctggctaacttcatacccccatgtcagtgtgtgtattctgtatgtaaatat

SEQ ID NO: 240921 - DNA, 120 bp, Artificial Sequence
  ENSG00000121207_8 (sequence is synthesized)
gtttatatttatagagcatcaatcaatataagcattattgagaaaaatgtgacccgtaacactgtgttctggataaaaatgtgattaggaatcacgcaaagtgcttactgtgtaagccca

SEQ ID NO: 240922 - DNA, 120 bp, Artificial Sequence
  ENSG00000121207_9 (sequence is synthesized)
agaacaaaggctttctgaatcttctcaggcagttcagatttaaagcaccatccaaaccttggaaatacgacagggtgtggtagaattcagcaatatgagaaaaccagcccctaaaatgat

SEQ ID NO: 240923 - DNA, 120 bp, Artificial Sequence
  ENSG00000121207_10 (sequence is synthesized)
agccacaagagattaattgtgtttttttttctcctgtaatccttgtactgttcggctgaatttgaagattggaagacttatattgagaccagtaactttactgtaaatttactttgtttc

SEQ ID NO: 240924 - DNA, 120 bp, Artificial Sequence
  ENSG00000121207_11 (sequence is synthesized)
attgaaaaaacaaattgataaacatattaaactggaagaattttctttattcaaatgaaaacatgtttgatgactggtcaaaaaataagctcataatctatttttttcatgtagtatata

SEQ ID NO: 240925 - DNA, 120 bp, Artificial Sequence
  ENSG00000121207_12 (sequence is synthesized)
agtcaagaatgttttattgtcattatgtgaaaccaatattggcaaatagtactttaatgatgaagtaaatgaccagaaattatagaaatctgtgttttcctgtaaaaatagcactatagt

SEQ ID NO: 240926 - DNA, 120 bp, Artificial Sequence
  ENSG00000121207_13 (sequence is synthesized)
atcacttgaacaatttgatttggctttacttactaggaagcctggaattcattatttttttccttttatgtgccactgtggctactttaaatcactctgagaggtaaatggatataggat

SEQ ID NO: 240927 - DNA, 120 bp, Artificial Sequence
  ENSG00000121207_14 (sequence is synthesized)
tgaagttatgtgggtatttggcatgtgtgtgtgaaataaatatgtagatagtcacatatacacagactgagagataaattgttcttgattgctttattatcatcatactagtgtgttcat

SEQ ID NO: 240928 - DNA, 120 bp, Artificial Sequence
  ENSG00000121207_15 (sequence is synthesized)
tatagagtatctgtagaggtgaatgtaaaagtaagtccaatctattttcttatgtcattgaatttgtagtgttaacttgcatatatgttattggatgggttgtcttttaaagcatttact

SEQ ID NO: 240929 - DNA, 120 bp, Artificial Sequence
  ENSG00000121207_16 (sequence is synthesized)
aatgtactctgaaatttttaaaagccttcagatttgttttctagtcacttttttccatatcatttctaattatagtttatatccttaaaagaaggatgccacagtagtatgtaaaaccca

SEQ ID NO: 240930 - DNA, 120 bp, Artificial Sequence
  ENSG00000121207_17 (sequence is synthesized)
aacaagtagaacccaagcaaataaaattatttaaaataattttaaagtggcttagtactgccagtcatgtaaattgattctgctgagggtcttataagaattgagatataacaatggtaa

SEQ ID NO: 240931 - DNA, 120 bp, Artificial Sequence
  ENSG00000121207_18 (sequence is synthesized)
aacaagcattcaagcacttttacaaaattaccaaattcttaaaatgaagccacagctagacttgcatttcaggtattaaaattgctttcttaactgtcaagaatcacaaaataacaaatc

SEQ ID NO: 240932 - DNA, 120 bp, Artificial Sequence
  ENSG00000121207_19 (sequence is synthesized)
atattatgagtgaatatggggagggcggggccaatcagtcaatgataatctgaacaaattttaagagcagattttagattaataatgttttatcaccactaatttgcccacaacaaactc

SEQ ID NO: 240933 - DNA, 120 bp, Artificial Sequence
  ENSG00000121207_20 (sequence is synthesized)
ttctaaccacttaaaattatcttaagtatgcatacataaaagcaaccactatgagaactaccgtgttagtggtttttcacttactgtatattacccttgtaggaatagtttaaggaaatt

SEQ ID NO: 240934 - DNA, 120 bp, Artificial Sequence
  ENSG00000121207_21 (sequence is synthesized)
catttcttaaaaatatagtgtcctcaaataattaatttttttgcaaactttagttattacaggcagcaaaaaccactgtctgaaactaaatctgtgttcaaagatgaagacccctcatta

SEQ ID NO: 240935 - DNA, 120 bp, Artificial Sequence
  ENSG00000121207_22 (sequence is synthesized)
aaagccaaggacgttcttaagattggaactgacataattagtcttgacttacttcattaaagcaagattcaattccttgttcatttgagtgttcattatatgccaggcattgaccagttg

SEQ ID NO: 240936 - DNA, 120 bp, Artificial Sequence
  ENSG00000121207_23 (sequence is synthesized)
caattttatggtccagaattaatattattattcgtaaactagctataatagagtatatacagtgctgtgggaatacaggggaagaagcaattaaatctgctagaagggtaagagaaatct

SEQ ID NO: 240937 - DNA, 120 bp, Artificial Sequence
  ENSG00000121207_24 (sequence is synthesized)
gtatgcaggaggcaatgctagcattaagccaagaaatagtgtgaggtgatcttatcacactgatgtgttcaactgtttatgggaaaaggaaactaggatggttttatttgtgaaatgttc

SEQ ID NO: 240938 - DNA, 120 bp, Artificial Sequence
  ENSG00000121207_25 (sequence is synthesized)
tacaacgctagaactgttgaacttcttgggagaaaaggagaatctttgttttgttgtgctgagtttgattagttgcttaaccaagtagaaagaaaagcacatcttcctgatcacagttat

SEQ ID NO: 240939 - DNA, 82 bp, Artificial Sequence
  ENSG00000121207_26 (sequence is synthesized)
gccggcgcctgtagtcccagctactcatgaggttgaggcaggagaatggcgtgaaccgaggaggcggagcttgcagtgagtg

SEQ ID NO: 240940 - DNA, 64 bp, Artificial Sequence
  ENSG00000121207_27 (sequence is synthesized)
ctgagccattaatgtgtctcgtaacttgaggaagttcatgaattctctgggcttcatccattaa

SEQ ID NO: 240941 - DNA, 120 bp, Artificial Sequence
  ENSG00000121207_28 (sequence is synthesized)
cttgaggaagttcatgaattctctgggcttcatccattaagattcatccttatgctcctgcaagtttcttatatttatgtatttctattctgatttctgaaatgataacctagtagtgtc

SEQ ID NO: 240942 - DNA, 120 bp, Artificial Sequence
  ENSG00000121207_29 (sequence is synthesized)
tgatgaagttttttcatgcttattttattctttgtcacagatgaaagaagaataggactaattggggctaagatgaattaatgtaagtgtcagatactaggcaggtgttagggatgaaat

SEQ ID NO: 240943 - DNA, 120 bp, Artificial Sequence
  ENSG00000121207_30 (sequence is synthesized)
gatgaatgaggcatggacctgttcctcagagtttatggcccagtagacataattgtattaggactttctgcagttgacatttgcataaagctgactgactgaaggaacagaaagtgagac

SEQ ID NO: 240944 - DNA, 120 bp, Artificial Sequence
  ENSG00000121207_31 (sequence is synthesized)
agacagatatgaccaaatttatacaaaccatgtaccaacacttgaaagatgggtggatattttccaggaaacagattttgggcaggacattccatgcactggaaatagcatgaacaaatg

SEQ ID NO: 240945 - DNA, 120 bp, Artificial Sequence
  ENSG00000121207_32 (sequence is synthesized)
catgaaaattgcctacaacatgcctggcacatagctgtgaggtaccctatgagttgttgacttgaaaacatggaactgcacagggcattcaggcaagtgcaagtggttcaggggccagcg

SEQ ID NO: 240946 - DNA, 120 bp, Artificial Sequence
  ENSG00000121207_33 (sequence is synthesized)
cagagcagagtgctgagtaaagatgtcagaaaaggaaagcaatggtctggtacaagtcttgtatagaacaagaagtttagacttttgaacaggcaatcgagatttggggttcagaaagat

SEQ ID NO: 240947 - DNA, 120 bp, Artificial Sequence
  ENSG00000121207_34 (sequence is synthesized)
aaatcccaaaagtatggagaacaaaggaactcattttaaaggactagctaagatgctcaatctctaaaaaaaaaaggatctgtattcgtgagagtagagagaaaggttgtttaggaagag

SEQ ID NO: 240948 - DNA, 120 bp, Artificial Sequence
  ENSG00000121207_35 (sequence is synthesized)
tcaacagactttagcaaaatccttttatttgattcatgcataactcctgatggagtgtcaaggaagactcattcacttttctttcctgccagaaagttggttcttgcaaaatagattaac

SEQ ID NO: 240949 - DNA, 120 bp, Artificial Sequence
  ENSG00000121207_36 (sequence is synthesized)
ttgatgactatgtgtatattggatactcctaattttagctctgttagatatgtttctttctaaggacaagcaactatgtatagacttgttgtttgaattttttttcagtatatatatgtt

SEQ ID NO: 240950 - DNA, 120 bp, Artificial Sequence
  ENSG00000121207_37 (sequence is synthesized)
tcttgtttttctatttttctacttcatactgttaatgtcaaatatcaaaaatgttttccagcaatatcaagttatggcaatggcaaaagtccttgttgtagatgagaagcatataagaaa

SEQ ID NO: 240951 - DNA, 120 bp, Artificial Sequence
  ENSG00000121207_38 (sequence is synthesized)
tggttgccaatctttgttttgtatgatctatttagagttttaaccaacctagatctgtcagctaagctaattttatatttggtatacatgcatgtcaaataaagttaattttacatacta

SEQ ID NO: 240952 - DNA, 120 bp, Artificial Sequence
  ENSG00000121207_39 (sequence is synthesized)
aaggtaggctaagtaaataagcaaatggcaacgtgccttgcaggatatctcgaaatgcttagagaaaggatgtggcaatgcaggaccgcttccagagattccagagctgcccagtattgc

SEQ ID NO: 240953 - DNA, 120 bp, Artificial Sequence
  ENSG00000121207_40 (sequence is synthesized)
tgcagaagtcatcagcacgtagaagaatacagaggacttgtgcatcaaacatctcagttaatcctcagaacaatttgagtgttcccatttgactacttgaggtgacatagccaataagag

SEQ ID NO: 240954 - DNA, 120 bp, Artificial Sequence
  ENSG00000121207_41 (sequence is synthesized)
ctggagccaggactcagacataggccatcatttctaagtaaaattatttttctaaggaaaacattacacatattagaaggatgcattcctcagggttttgtgagactgtgaagataatta

SEQ ID NO: 240955 - DNA, 120 bp, Artificial Sequence
  ENSG00000121207_42 (sequence is synthesized)
tcggccagtaggtgtctctgctcctcgggcggccttgagcagtgcctaacgttgagcgtgaggctcgtgctccgggtctcgcgggcggccgcctcgggcgtcgagtcccggagattggac

SEQ ID NO: 240956 - DNA, 120 bp, Artificial Sequence
  ENSG00000121207_43 (sequence is synthesized)
agacaccagagcctggggaccgcggagtgaccgggtggggctggagggcggcgccgcgccttctggggagacgcggaggtatcaggacctgggctatgctcctgattttatacagactgc

SEQ ID NO: 240957 - DNA, 120 bp, Artificial Sequence
  ENSG00000121207_44 (sequence is synthesized)
catggctccagatataaaagaccaaataaaaagttacctaccagacactgactatcttaaacaccgaagcacaagaatgctccaaagaagaggtctatattgcttggctcatattaactt

SEQ ID NO: 240958 - DNA, 120 bp, Artificial Sequence
  ENSG00000121207_45 (sequence is synthesized)
ctgtttattttcttacgattaaggctcaaacgttgttaaaaaatgttcaaatcctacaagacactgacatgccagttcctcagctttgatggagaaaccagctttctcttcttgcagaga

SEQ ID NO: 240959 - DNA, 120 bp, Artificial Sequence
  ENSG00000121207_46 (sequence is synthesized)
tactcttcatgaaaagtggagctccaagaagagtagacatgaggaaaatatgaatttttacaaaaggaaatgtatggtgcaattataaactgtagcatgaacccataattggaagtctac

SEQ ID NO: 240960 - DNA, 120 bp, Artificial Sequence
  ENSG00000121207_47 (sequence is synthesized)
atctcacagttatagtcaagaattctggtacatataaaataagttctttcaaaatgggattcaggtattatttagaaatgcatctactgaaaagaagcataccataaaaatttatgctaa

SEQ ID NO: 240961 - DNA, 120 bp, Artificial Sequence
  ENSG00000121207_48 (sequence is synthesized)
ttatggatgagatcatggacggtttaatcgaaattacgagttggatttgtcagatgtagagtctcaatcaggccacttgaaagaccaaatgatttccttttcatctgaaaggttcagaga

SEQ ID NO: 240962 - DNA, 120 bp, Artificial Sequence
  ENSG00000121207_49 (sequence is synthesized)
gaggggagagaagagaaactgaagaattgttagaaaacataagttttctttacttctagtaccactccacgctttgtgaaaaaagttattttatgaagtcaagaagtcaatcagaagaaa

SEQ ID NO: 240963 - DNA, 120 bp, Artificial Sequence
  ENSG00000121207_50 (sequence is synthesized)
caccagggaaagtcaacacaaactggtttatctaatactttttcagtgtccaatttgcaatgcactgagttccctgctaaactatgtctatatattgggggctgggagaggagtaggtta

SEQ ID NO: 240964 - DNA, 120 bp, Artificial Sequence
  ENSG00000121207_51 (sequence is synthesized)
aaaataaataggagttgcaagtctttctcctcgggctactaataatatacctgaattttatgtttgattttgtcttccttgtctttatagtttttgcaactaatgtatatatgtctaaac

SEQ ID NO: 240965 - DNA, 120 bp, Artificial Sequence
  ENSG00000121207_52 (sequence is synthesized)
aatctattgcttaaatttacataattttcagctttacatatgtagaatcatgctgtttgttttcttctgtacctcagtttttttcactaaaaattgtcttctgaaaaaaaaaagcggagg

SEQ ID NO: 240966 - DNA, 120 bp, Artificial Sequence
  ENSG00000121207_53 (sequence is synthesized)
tatcatacttcctgatttaaaattatattacacagctatagtaaacaaatcagtatagtacttactcaaaaacagacacagtgaaacagaatggagtccagaaataaattcaaacatata

SEQ ID NO: 240967 - DNA, 120 bp, Artificial Sequence
  ENSG00000121207_54 (sequence is synthesized)
cagtaaactaatttttgacagagacaccaagaggatacagtgggaaaaggttaggctcttcaataaatagtgctgggaaaattgaatttccacatatatgcaaaatttataaaatataag

SEQ ID NO: 240968 - DNA, 120 bp, Artificial Sequence
  ENSG00000121207_55 (sequence is synthesized)
acctaaaactataaaattccttaaagagaacacaaaaagctcctggacattggccttggaaataattttttggatatcacaccaaaaaatggaaaaaaaaaaagctcaggctacaaaagc

SEQ ID NO: 240969 - DNA, 120 bp, Artificial Sequence
  ENSG00000121207_56 (sequence is synthesized)
ccagatataaaagaccaaataaaaagataagaattgctggcaacatatgcactaaacttcgttttgaaaaatccccttgatgccgatcactgagaagtgatccacaggttctcatgaata

SEQ ID NO: 240970 - DNA, 120 bp, Artificial Sequence
  ENSG00000121207_57 (sequence is synthesized)
gacggggactgccttaccttcaggactataccatcgatctcactgggccccattaccttgtggcaatgacctgaggtttgacaaaattgtaagaaccagcctcagtaacagtgtttctca

SEQ ID NO: 240971 - DNA, 120 bp, Artificial Sequence
  ENSG00000121207_58 (sequence is synthesized)
aagtcatcctgccacatgcctagtttgatactgaagattgacagcactaagggagaacttactgttataacaaactaggagaaagaaagatcaagcttttgggaacatcacgtagaagaa

SEQ ID NO: 240972 - DNA, 120 bp, Artificial Sequence
  ENSG00000121210_0 (sequence is synthesized)
agcgagctagcggcgagcgcggcgagcaacggagaggagcgcgagcagcagcatggcggggctccgacgcccgcagcccggctgctactgccgcaccgcggcggccgtgaacctcctgct

SEQ ID NO: 240973 - DNA, 120 bp, Artificial Sequence
  ENSG00000121210_1 (sequence is synthesized)
gggcgtcttccaggtcctgctgccctgctgtcgcccgggaggggctcagggacaagcgattgagccgttgccgaacgtggtggagctgtggcaggcagaagaaggggaactcctgctgcc

SEQ ID NO: 240974 - DNA, 120 bp, Artificial Sequence
  ENSG00000121210_2 (sequence is synthesized)
cactcagggtgattctgaagagggtctggaggagccttctcaagaacagagcttctcggacaaactatttagtggaaaaggcttacattttcagccatcagttttagattttggaataca

SEQ ID NO: 240975 - DNA, 120 bp, Artificial Sequence
  ENSG00000121210_3 (sequence is synthesized)
gttcctgggacatcctgtagcaaagattctccatgcttacaaccctagtagggacagcgaggttgtggtgaattcagtgtttgcagctgctggacatttccatgtaccgccagttccctg

SEQ ID NO: 240976 - DNA, 120 bp, Artificial Sequence
  ENSG00000121210_4 (sequence is synthesized)
cagggtaattccagcaatggggaaaacttccttcagaattattttcttacctactgaagaaggaagcattgaaagttccttatttattaatacctcttcgtatggagtcctttcctatca

SEQ ID NO: 240977 - DNA, 120 bp, Artificial Sequence
  ENSG00000121210_5 (sequence is synthesized)
tgtatctggaattggcactcgtagaatctctacagaagggtctgcaaagcagctaccaaatgcttattttctgcttccaaaggtccagagcattcagctgtctcaaatgcaggcagaaac

SEQ ID NO: 240978 - DNA, 120 bp, Artificial Sequence
  ENSG00000121210_6 (sequence is synthesized)
cactaatactagcctcttgcaggtgcaactggaatgcagtttacataataaagtgtgtcagcaattaaagggttgttatctggaatctgatgatgttttgcgtctacaaatgagcataat

SEQ ID NO: 240979 - DNA, 120 bp, Artificial Sequence
  ENSG00000121210_7 (sequence is synthesized)
ggtaacaatggaaaacttttcaaaagaatttgaagaaaacacacaacatttgttagatcatctctctattgtttacgtagctacagatgaatctgagacctcagatgattcagcagtaaa

SEQ ID NO: 240980 - DNA, 120 bp, Artificial Sequence
  ENSG00000121210_8 (sequence is synthesized)
tatgtatatattacattcaggaaacagccttatatggatacaggatatacgccatttctcacagagagatgctctgtctctgcagtttgaaccagtactactacctacttctacaacaaa

SEQ ID NO: 240981 - DNA, 120 bp, Artificial Sequence
  ENSG00000121210_9 (sequence is synthesized)
ctttacaaaaattgcttcttttacctgcaaagctacatcatgtgacagtggaattatagaagatgtgaagaaaacaacacacactccaacactaaaagcatgcctcttctcttctgtggc

SEQ ID NO: 240982 - DNA, 120 bp, Artificial Sequence
  ENSG00000121210_10 (sequence is synthesized)
tcaggggtattttagaatggactcttctgcaacccagtttcacatagagactcatgagaacacatcaggactttggtcaatatggtaccgcaaccattttgaccgtagtgttgtattaaa

SEQ ID NO: 240983 - DNA, 120 bp, Artificial Sequence
  ENSG00000121210_11 (sequence is synthesized)
tgatgtgtttctttccaaggagaccaagcacatgttaaagattctgaatttcactggccctttatttctacctccaggctgttggaatatattttctttgaaacttgctgttaaagacat

SEQ ID NO: 240984 - DNA, 120 bp, Artificial Sequence
  ENSG00000121210_12 (sequence is synthesized)
tgccataaatctattcaccaatgtatttttgactacaaacataggtgccatttttgcaatacctctacagatttattcagcaccaaccaaggaagggagtctgggttttgaagtgatagc

SEQ ID NO: 240985 - DNA, 120 bp, Artificial Sequence
  ENSG00000121210_13 (sequence is synthesized)
acattgtggcatgcattatttcatgggaaaatcaaaagcaggaaatcctaattggaatgggagcctttctctggatcaatctacctggaatgtggattctgaacttgcaaataaattgta

SEQ ID NO: 240986 - DNA, 120 bp, Artificial Sequence
  ENSG00000121210_14 (sequence is synthesized)
tgaaagatggaagaaatataaaaatggtgacgtctgcaagaggaatgttttgggaacaactcgatttgctcacttgaagaaatccaaggagtcagagtcctttgttttctttttgcctcg

SEQ ID NO: 240987 - DNA, 120 bp, Artificial Sequence
  ENSG00000121210_15 (sequence is synthesized)
tttgatcgcagagcctggcctcatgttaaacttcagcgcaactgcccttaggagcaggatgatcaagtactttgtggtgcagaacccgtcctcttggccggtctccttgcagctcctgcc

SEQ ID NO: 240988 - DNA, 120 bp, Artificial Sequence
  ENSG00000121210_16 (sequence is synthesized)
tctctccttgtaccctaaacccgaagccctagtgcacctgctccacagatggtttggcactgatatgcagatgattaatttcacaactggtgaattccagctcaccgaagcttgccctta

SEQ ID NO: 240989 - DNA, 120 bp, Artificial Sequence
  ENSG00000121210_17 (sequence is synthesized)
cctgggtacgcattctgaggaatccaggtttggcatcctccacttacatctgcagcctttggaaatgaaaagggttggcgtagttttcacacctgctgactatggaaaagttacctcact

SEQ ID NO: 240990 - DNA, 120 bp, Artificial Sequence
  ENSG00000121210_18 (sequence is synthesized)
catactaatccggaataacttgactgttattgacatgattggcgtggaaggatttggagcaagagagttattaaaagtgggtggaagacttcctggtgcaggaggctcactccgatttaa

SEQ ID NO: 240991 - DNA, 120 bp, Artificial Sequence
  ENSG00000121210_19 (sequence is synthesized)
ggtgcccgagtccacgctgatggactgccgtagacaactgaaagacagtaagcaaattttatctattacaaagaactttaaagttgagaatattggacctcttcctataactgtttcgtc

SEQ ID NO: 240992 - DNA, 120 bp, Artificial Sequence
  ENSG00000121210_20 (sequence is synthesized)
attgtgttcactccagactttacctcctcctgggtaattcgggacctaagtcttgtaaccgcagcggacctagaatttcgcttcactctcaatgtgactctccctcatcacctgttgccc

SEQ ID NO: 240993 - DNA, 120 bp, Artificial Sequence
  ENSG00000121210_21 (sequence is synthesized)
ttgtgtgcagacgtggttccaggacccagctgggaggagtcattttggaggctcacggtcttctttgtcagtttgtccctgttgggtgtgattttaatagccttccaacaagcacagtac

SEQ ID NO: 240994 - DNA, 120 bp, Artificial Sequence
  ENSG00000121210_22 (sequence is synthesized)
attctcatggaattcatgaaaacaagacagaggcaaaatgctagctcctcttcacagcaaaacaatggtcctatggatgtaatcagcccccattcttacaaaagcaattgcaagaacttt

SEQ ID NO: 240995 - DNA, 120 bp, Artificial Sequence
  ENSG00000121210_23 (sequence is synthesized)
ctcgatacatatggcccctctgataaaggcagggggaagaactgccttccagtgaacactccccaaagcaggatccagaatgctgcaaagaggagcccagccacctatggtcattctcag

SEQ ID NO: 240996 - DNA, 120 bp, Artificial Sequence
  ENSG00000121210_24 (sequence is synthesized)
aagaagcacaaatgctcagtgtattacagtaaacacaaaaccagcacagctgcggccagcagcaccagcacgactactgaggaaaaacagacttcacccctgggcagctcactgcctgct

SEQ ID NO: 240997 - DNA, 120 bp, Artificial Sequence
  ENSG00000121210_25 (sequence is synthesized)
gctaaagaggacatttgcactgatgccatgcgtgagaactggatcagcctcagatatgcaagtggcataaatgtcaacctgcagaagaatttaacccttcccaaaaacttactgaataaa

SEQ ID NO: 240998 - DNA, 120 bp, Artificial Sequence
  ENSG00000121210_26 (sequence is synthesized)
gaagaaaacacactgaaaaacacaattgttttcagtaatccttcttcagaatgtagtatgaaggagggaatacagacatgtatgtttcctaaggaaactgacattaaaacttcagagaac

SEQ ID NO: 240999 - DNA, 120 bp, Artificial Sequence
  ENSG00000121210_27 (sequence is synthesized)
acagccgagttcaaggaacgggagctctgtccactgaagacctccaagaaactacctgaaaaccatttaccaagaaactcacctcagtaccaccagccagacttgccagaaatttccagg

SEQ ID NO: 241000 - DNA, 120 bp, Artificial Sequence
  ENSG00000121210_28 (sequence is synthesized)
aaaaataatgggaataaccagcaagtacctgtcaagaatgaagtagatcattgtgaaaatttgaagaaggtggacacaaagccttcttcagaaaagaagattcacaaaacatctagagaa

SEQ ID NO: 241001 - DNA, 120 bp, Artificial Sequence
  ENSG00000121210_29 (sequence is synthesized)
gacatgttttctgagaaacaggacatacctttcgtagagcaagaagatccttataggaagaaaaagcttcaggagaaaagagaaggaaatttacaaaatttaaattggagtaaaagtcga

SEQ ID NO: 241002 - DNA, 120 bp, Artificial Sequence
  ENSG00000121210_30 (sequence is synthesized)
acatgtagaaagaacaagaaaaggggtgttgctccagtctcaaggcctcctgaacagagtgatctaaagcttgtgtgcagtgactttgagaggtctgagctgagcagtgacatcaatgta

SEQ ID NO: 241003 - DNA, 120 bp, Artificial Sequence
  ENSG00000121210_31 (sequence is synthesized)
agaagctggtgtatacaggaaagcactagggaggtttgtaaagcagatgccgaaattgcaagcagtttacctgctgcccagagagaggcagaaggttactaccagaagcctgagaagaaa

SEQ ID NO: 241004 - DNA, 120 bp, Artificial Sequence
  ENSG00000121210_32 (sequence is synthesized)
tgtgtggacaagttctgctccgattccagctctgactgtgggagctcctctggcagcgtgcgtgccagccggggcagctgggggagctggagcagcaccagcagctccgacggggataag

SEQ ID NO: 241005 - DNA, 120 bp, Artificial Sequence
  ENSG00000121210_33 (sequence is synthesized)
aagcccatggtggacgcccagcacttcctgccggccggagacagtgtttcacaaaatgattttccttctgaagctcccatctccttgaatctttctcataacatctgcaatcccatgacc

SEQ ID NO: 241006 - DNA, 120 bp, Artificial Sequence
  ENSG00000121210_34 (sequence is synthesized)
gtgaatagtctcccacaatacgcagagccttcctgtcccagccttcctgccgggcccacaggtgttgaagaagataaaggtctttactcacctggagacctgtggcccactccgccagtg

SEQ ID NO: 241007 - DNA, 120 bp, Artificial Sequence
  ENSG00000121210_35 (sequence is synthesized)
tgtgtgacaagcagcttaaactgcaccctggagaacggcgtgccttgtgtgattcaggagtcggccccggttcataatagtttcattgattggagtgcaacatgcgaaggccagttttcc

SEQ ID NO: 241008 - DNA, 120 bp, Artificial Sequence
  ENSG00000121210_36 (sequence is synthesized)
agcgcatactgtccattggaattgaacgattacaatgcctttccagaagaaaacatgaactatgccaatggcttcccctgtcctgcagatgttcagacagactttattgatcacaactct

SEQ ID NO: 241009 - DNA, 120 bp, Artificial Sequence
  ENSG00000121210_37 (sequence is synthesized)
cagtctacctggaacaccccacccaacatgcctgctgcctggggacatgccagtttcatcagctctccgccctacctcacaagcacccgaagcttgtctccaatgtctggactttttggt

SEQ ID NO: 241010 - DNA, 120 bp, Artificial Sequence
  ENSG00000121210_38 (sequence is synthesized)
tccatctgggccccgcaaagcgatgtgtatgaaaattgctgccccatcaaccccaccacggaacattcgacccacatggaaaaccaagcggtcgtgtgcaaggaatactacccggggttc

SEQ ID NO: 241011 - DNA, 120 bp, Artificial Sequence
  ENSG00000121210_39 (sequence is synthesized)
aacccgtttcgcgcctatatgaacctggacatatggactaccacagcgaataggaatgcaaatttcccactgtctagagactcgagttactgtgggaatgtgtgaaaataattggatttt

SEQ ID NO: 241012 - DNA, 120 bp, Artificial Sequence
  ENSG00000121210_40 (sequence is synthesized)
taaacaatgtgaataaagaggcttgtgttttgattactagtgtaaactggttattgagatagattatgacattggtggatattttggcacttttatatgaaaataaattttttaatgaaa

SEQ ID NO: 241013 - DNA, 120 bp, Artificial Sequence
  ENSG00000121210_41 (sequence is synthesized)
tggcatgctacactttgtttgttgtttgtctttgctcacttgaatgtagcttgttcactgctgtatcctcagtatctttaatggggccttgcagaaagtagttcctcaaatatttgttat

SEQ ID NO: 241014 - DNA, 120 bp, Artificial Sequence
  ENSG00000121210_42 (sequence is synthesized)
gtgagtctcatcttgtcatccaggtcaagagacaatcggacactgtctgaagaaacggtcaaaacaatatgctgtatttcagaattatatcctgaaattatattccgaaaggagttagtc

SEQ ID NO: 241015 - DNA, 120 bp, Artificial Sequence
  ENSG00000121210_43 (sequence is synthesized)
agcatgtgtgggtgacattagggagtgttttctggagggaagggcaggtgcaggaagggtaggatgagggccaggtgaggatagggtggactcaggccttgttctcttccgtaggtcttt

SEQ ID NO: 241016 - DNA, 71 bp, Artificial Sequence
  ENSG00000121210_44 (sequence is synthesized)
cagccttgaactacagtttcattgattggagtgcaacatgcgaaggccagttttccagcgcatactgtcca

SEQ ID NO: 241017 - DNA, 120 bp, Artificial Sequence
  ENSG00000121210_45 (sequence is synthesized)
tgcaacatgcgaaggccagttttccagcgcatactgtccattggaattgaacgattacaatgcctttccagaaggtaagggctcttcagacaatcccaacgccattattttattcttaga

SEQ ID NO: 241018 - DNA, 120 bp, Artificial Sequence
  ENSG00000121210_46 (sequence is synthesized)
gttatatcctagaacagaatctataattgttctagaaattaggtagaaatcattctttgagcttatgttggatttttttcgcattttagtaatgtagatcatggtttggtttattcaata

SEQ ID NO: 241019 - DNA, 120 bp, Artificial Sequence
  ENSG00000121210_47 (sequence is synthesized)
cacttttgatattactcatttctgatttaattttaagtaaacataaattttgattctacatttgctttcataaaattttaagtcattatgtgaacagctgccccattattattatgagat

SEQ ID NO: 241020 - DNA, 120 bp, Artificial Sequence
  ENSG00000121210_48 (sequence is synthesized)
tttgtaaccttctcagaattggttattttactattttctgctttttgaaaaaattatatagaagtaatatacatatataaaatatcagtggattccacctaacttctttttaatggctgt

SEQ ID NO: 241021 - DNA, 120 bp, Artificial Sequence
  ENSG00000121210_49 (sequence is synthesized)
ggagttcacagtgttgatattccagagtttgcttaatcttattgttggtcttttgaaatgtttcctgtttttcactgttattaccgttaggccatatacctattttataagtttctttaa

SEQ ID NO: 241022 - DNA, 120 bp, Artificial Sequence
  ENSG00000121210_50 (sequence is synthesized)
ttttccttctgaatcctctgtttccttggggcatgtttcataaagaggagagattctttagttaaagactgtgaacgattttgtagagcttgttaaatcttaccagcttgcttttcaggg

SEQ ID NO: 241023 - DNA, 120 bp, Artificial Sequence
  ENSG00000121211_0 (sequence is synthesized)
ccctctccccaagcgcgggcccggccagcggaagcccctgcgcccgcgccatgtcaaagaaaaaaggactgagtgcagaagaaaagagaactcgcatgatggaaatattttctgaaacaa

SEQ ID NO: 241024 - DNA, 120 bp, Artificial Sequence
  ENSG00000121211_1 (sequence is synthesized)
aagatgtatttcaattaaaagacttggagaagattgctcccaaagagaaaggcattactgctatgtcagtaaaagaagtccttcaaagcttagttgatgatggtatggttgactgtgaga

SEQ ID NO: 241025 - DNA, 120 bp, Artificial Sequence
  ENSG00000121211_2 (sequence is synthesized)
ggatcggaacttctaattattattgggcttttccaagtaaagctcttcatgcaaggaaacataagttggaggttctggaatctcagttgtctgagggaagtcaaaagcatgcaagcctac

SEQ ID NO: 241026 - DNA, 120 bp, Artificial Sequence
  ENSG00000121211_3 (sequence is synthesized)
agggaacagctaaaggcagaagtagaaaaatacaaagactgtgatccgcaagttgtggaagaaatacgccaagcaaataaagtagccaaagaagctgctaacagatggactgataacata

SEQ ID NO: 241027 - DNA, 120 bp, Artificial Sequence
  ENSG00000121211_4 (sequence is synthesized)
ttcgcaataaaatcttgggccaaaagaaaatttgggtttgaagaaaataaaattgatagaacttttggaattccagaagactttgactacatagactaaaatattccatggtggtgaagg

SEQ ID NO: 241028 - DNA, 120 bp, Artificial Sequence
  ENSG00000121211_5 (sequence is synthesized)
atgtacaagcttgtgaatatgtaaattttaaactattatctaactaagtgtactgaattgtcgtttgcctgtaactgtgtttatcattttattaatgttaaataaagtgtaaaatgcaga

SEQ ID NO: 241029 - DNA, 120 bp, Artificial Sequence
  ENSG00000121211_6 (sequence is synthesized)
tgttcttcaccccttttggtagaacaaaagcaggatgataaccatatccccccagtgctcatcaaagtaggacaataaaaatccatccatctcagtccaggcagatttacaaatgatttt

SEQ ID NO: 241030 - DNA, 67 bp, Artificial Sequence
  ENSG00000121211_7 (sequence is synthesized)
gactttcccccacccccacatgaagtgcaagatggagttgtctgagggaagtcaaaagcatgcaagc

SEQ ID NO: 241031 - DNA, 120 bp, Artificial Sequence
  ENSG00000121211_8 (sequence is synthesized)
gctcccaaagagaaaggcattagtaagtaccaaagttatactggaatgttttgggaaatatactgggatgttttgggaaatatcttaatattcattaagtcatcttttctgcaacagtct

SEQ ID NO: 241032 - DNA, 120 bp, Artificial Sequence
  ENSG00000121211_9 (sequence is synthesized)
gtcgatttctgtgaaaacgccccggtttctgccaaagggcaggagtcgctgctcttgtgccgggtgctgctggttgtgtagggcgctgttgcttttttaaggacgctctgcactgaatta

SEQ ID NO: 241033 - DNA, 120 bp, Artificial Sequence
  ENSG00000121211_10 (sequence is synthesized)
taataatgctgataaactatagctaaattcccttcacacttactgcgacgtgaaattcagataccttgtgctagctttgttcaagaaaggacgttaatgaaaaatgtatgcattactcaa

SEQ ID NO: 241034 - DNA, 120 bp, Artificial Sequence
  ENSG00000121236_0 (sequence is synthesized)
agaaggagttgggagatgagccttccgcaaactcctgacctgtgggtccgtccgttcaacggccaaaggctggcggaggagggatcccctgcctttctcggaacggaacggagcagagtc

SEQ ID NO: 241035 - DNA, 120 bp, Artificial Sequence
  ENSG00000121236_1 (sequence is synthesized)
gtgcgtggttgagtttagataaaagccgagtgagcgcgctctgttccttaagattagtttaaggtgccttggattgctctgaagagctttgaccacctgatattgcttacatctggaact

SEQ ID NO: 241036 - DNA, 120 bp, Artificial Sequence
  ENSG00000121236_2 (sequence is synthesized)
tcttggcttctcattccccagatgtgcgggtcagagaggattctacaggcaggaaacatcttagaaatcagggttgggcaggcaggagccaggagagtagctacaatgacttcaccagta

SEQ ID NO: 241037 - DNA, 120 bp, Artificial Sequence
  ENSG00000121236_3 (sequence is synthesized)
ctggtggacatacgagaagaggtgacctgccctatctgcctggagctcctaacagaacccctgagcatagactgtggccacagcttctgccaagcctgcatcacaccaaatggcagggaa

SEQ ID NO: 241038 - DNA, 120 bp, Artificial Sequence
  ENSG00000121236_4 (sequence is synthesized)
tcagtgattggtcaagaaggggaaagaagctgccctgtgtgccagaccagctaccagccagggaacctgcggcctaatcggcatctggccaacatagtgaggcggctcagagaggtagtg

SEQ ID NO: 241039 - DNA, 120 bp, Artificial Sequence
  ENSG00000121236_5 (sequence is synthesized)
ttgggccctgggaagcagctgaaagcagttctttgtgcagaccatggagaaaaactgcagctcttctgtcaggaggatgggaaggtcatttgctggctttgtgagcggtctcaggagcac

SEQ ID NO: 241040 - DNA, 120 bp, Artificial Sequence
  ENSG00000121236_6 (sequence is synthesized)
cgtggtcaccacacgttcctcgtggaggaggttgcccaggagtaccaggagaagtttcaggagtctctaaagaagctgaagaacgaggagcaggaagctgagaagctaacagcttttatc

SEQ ID NO: 241041 - DNA, 120 bp, Artificial Sequence
  ENSG00000121236_7 (sequence is synthesized)
agagagaagaaaacatcctggaagaatcagatggagcctgagagatgcaggatccagacagagtttaatcagctgcgaaatatcctagacagagtggagcaacgggagctgaaaaagctg

SEQ ID NO: 241042 - DNA, 120 bp, Artificial Sequence
  ENSG00000121236_8 (sequence is synthesized)
gaacaggaagagaagaaggggctacgaattatagaagaggctgagaatgatctggtccaccagacccagtcgctgcgagagctcatctcggatctggagcgtcgatgtcaggggtcaaca

SEQ ID NO: 241043 - DNA, 120 bp, Artificial Sequence
  ENSG00000121236_9 (sequence is synthesized)
atggagctgctgcaggatgtgagtgatgtcacagaaaggagtgagttctggaccctgaggaagccagaagctctccctacaaagctgagaagtatgttccgagccccagatctgaaaagg

SEQ ID NO: 241044 - DNA, 120 bp, Artificial Sequence
  ENSG00000121236_10 (sequence is synthesized)
atgctgcgagtgtgtagagagctgacagatgtccaaagctactgggttgacgtgaccctgaatccacacacagctaatttaaatcttgtcctggctaaaaaccggagacaagtgaggttt

SEQ ID NO: 241045 - DNA, 120 bp, Artificial Sequence
  ENSG00000121236_11 (sequence is synthesized)
gtgggagctaaagtatctggaccttcctgtctggaaaagcattatgactgtagtgtcctgggctcccagcacttctcctctggtaagcattactgggaggtagatgtggccaagaagact

SEQ ID NO: 241046 - DNA, 120 bp, Artificial Sequence
  ENSG00000121236_12 (sequence is synthesized)
gcctggatcctgggggtatgcagcaattcactgggacctacattctctttcaaccattttgctcaaaatcacagtgcttactccaggtatcagcctcagagtggatactgggtgattggg

SEQ ID NO: 241047 - DNA, 120 bp, Artificial Sequence
  ENSG00000121236_13 (sequence is synthesized)
ttacagcataaccatgaatatagggcctatgaggattcttccccttccctgcttctctccatgacagtgccccctcgccgtgttggggttttcttagattatgaggctggtactgtctcc

SEQ ID NO: 241048 - DNA, 120 bp, Artificial Sequence
  ENSG00000121236_14 (sequence is synthesized)
tactctttgtccatattttaatccttgcaactgtgtaattcctatgaccctgcgtcgtccaagctcttgaatattcttctgttcccacccacttctgataagtaccctgaggcttatcag

SEQ ID NO: 241049 - DNA, 120 bp, Artificial Sequence
  ENSG00000121236_15 (sequence is synthesized)
agtaccctgaggcttatcagcatgtgattctcccttctgatcttctgtttttctgtgttctcaattcttttgttgttttttggtttttgaatcttttttgagatggaatctcgctctgtc

SEQ ID NO: 241050 - DNA, 65 bp, Artificial Sequence
  ENSG00000121236_16 (sequence is synthesized)
gaactcctgaccgccgcgcccagacagttctttcgttttaaacagttactcagtactaggatgca

SEQ ID NO: 241051 - DNA, 120 bp, Artificial Sequence
  ENSG00000121236_17 (sequence is synthesized)
agttctttcgttttaaacagttactcagtactaggatgcacccagtggtgagagtaagcatctttgactgatgacaggtcttgaggtggatagggggcgctttcagtattttgccattaa

SEQ ID NO: 241052 - DNA, 120 bp, Artificial Sequence
  ENSG00000121236_18 (sequence is synthesized)
gcatagtatttgatgcaggttttttttgattgatgcaggggatcaaatttaggaagttctgatctgttaatttactacaagtttttgtataaaatgaaaactcgtattctacctatgtct

SEQ ID NO: 241053 - DNA, 120 bp, Artificial Sequence
  ENSG00000121236_19 (sequence is synthesized)
tttctgtaaattattgagacaattgtgtatcatttttgttctgttaatgtggcttagtacattgatttacttcaatttgttaccacaacttgctgaaatacaccattattatttgttgta

SEQ ID NO: 241054 - DNA, 120 bp, Artificial Sequence
  ENSG00000121236_20 (sequence is synthesized)
tgcaatactggatttattttgataacgtattgtttagattttgttctcatctatgttaatgaaagaaattggcctgtatttttacattcttgtaatatctttgccaggttctataaaatg

SEQ ID NO: 241055 - DNA, 120 bp, Artificial Sequence
  ENSG00000121236_21 (sequence is synthesized)
caataataagcaaataaattactttgtttttgtataagtatgtataggattgagctctaaaaccaaaccattataatgataatttgggtagcttcaaactcaaattgaagagagtcttca

SEQ ID NO: 241056 - DNA, 120 bp, Artificial Sequence
  ENSG00000121236_22 (sequence is synthesized)
ctacaatcttcactacaacctttggccttcctctctacatttaagagtagcaatagaacaataaaaaaaaatacgtctttcaaattaattgcagtaaaaacaaaagagtagtggggagag

SEQ ID NO: 241057 - DNA, 120 bp, Artificial Sequence
  ENSG00000121236_23 (sequence is synthesized)
aaaaacaatccaatacatatttttctctcagaatagaaagaaaacacaaagagaaaatatgaacaatataaagcacttaaaggaagaggatgatttcttccagcttttccacactctctt

SEQ ID NO: 241058 - DNA, 120 bp, Artificial Sequence
  ENSG00000121236_24 (sequence is synthesized)
tatgcgcaggaacaaacagctgttgagtgagctgctatgactttggtagagaggtgcaatatgttttttgaaccagctataaaagaaattaagaggtacatgtgagggtagaaacaaata

SEQ ID NO: 241059 - DNA, 120 bp, Artificial Sequence
  ENSG00000121236_25 (sequence is synthesized)
tcaaggatgagaatggcactggctgtcccatatggtatccaggagccaccaatgtctgttgagtacttcatacatgcctagtctgaattgagatgtgctcaatgtataaaatatatacca

SEQ ID NO: 241060 - DNA, 120 bp, Artificial Sequence
  ENSG00000121236_26 (sequence is synthesized)
gatttcaaatacctacttcaaaaaataatgtaaaatatctcactaataacttttcctttgtgtattgcaatgataatatgttggctctattggattaaataaagtatgttattcatttta

SEQ ID NO: 241061 - DNA, 120 bp, Artificial Sequence
  ENSG00000121236_27 (sequence is synthesized)
aagattagtttaaggtgccttggattgctctgaagagctttgaccacctgatattgcttacatctggaacttcttggcttctcattccccagatgtgcgggtcagagaggagaagtttca

SEQ ID NO: 241062 - DNA, 120 bp, Artificial Sequence
  ENSG00000121236_28 (sequence is synthesized)
aaggaaagaacaggctacaaaggctttctcctgcagcatttaccctccctctccctgggaggcttggcccaggaaagcagtcctgagcccaacttccccgcttttaatagaggagaccct

SEQ ID NO: 241063 - DNA, 120 bp, Artificial Sequence
  ENSG00000121236_29 (sequence is synthesized)
aaggagtccttgtcctgtctgtcctctgatgccatgactagaagagcttccctttgcctggtcctccactatattccttccaaacagggggaggagaggagaatcagatggagcctgaga

SEQ ID NO: 241064 - DNA, 120 bp, Artificial Sequence
  ENSG00000121236_30 (sequence is synthesized)
aagattagtttaaggtgccttggattgctctgaagagctttgaccacctgatattgcttacatctggaacttcttggcttctcattccccagatgtgcgggtcagagagaatcagatgga

SEQ ID NO: 241065 - DNA, 120 bp, Artificial Sequence
  ENSG00000121270_0 (sequence is synthesized)
gtcacctggatagcgcaaaggaaacaagagaaaggaacagagcccctcttctggcctctgggctaccatacagaaaagcagaattggcaggaactgaaaatgactaggaagaggacatac

SEQ ID NO: 241066 - DNA, 120 bp, Artificial Sequence
  ENSG00000121270_1 (sequence is synthesized)
tgggtgcccaactcttctggtggcctcgtgaatcgtggcatcgacataggcgatgacatggtttcaggacttatttataaaacctatactctccaagatggcccctggagtcagcaagag

SEQ ID NO: 241067 - DNA, 120 bp, Artificial Sequence
  ENSG00000121270_2 (sequence is synthesized)
agaaatcctgaggctccagggagggcagctgtcccaccgtgggggaagtatgatgctgccttgagaaccatgattcccttccgtcccaagccgaggtttcctgccccccagcccctggac

SEQ ID NO: 241068 - DNA, 120 bp, Artificial Sequence
  ENSG00000121270_3 (sequence is synthesized)
aatgctggcctgttctcctacctcaccgtgtcatggctcaccccgctcatgatccaaagcttacggagtcgcttagatgagaacaccatccctccactgtcagtccatgatgcctcagac

SEQ ID NO: 241069 - DNA, 120 bp, Artificial Sequence
  ENSG00000121270_4 (sequence is synthesized)
aaaaatgtccaaaggcttcaccgcctttgggaagaagaagtctcaaggcgagggattgaaaaagcttcagtgcttctggtgatgctgaggttccagagaacaaggttgattttcgatgca

SEQ ID NO: 241070 - DNA, 120 bp, Artificial Sequence
  ENSG00000121270_5 (sequence is synthesized)
cttctgggcatctgcttctgcattgccagtgtactcgggccaatattgattataccaaagatcctggaatattcagaagagcagttggggaatgttgtccatggagtgggactctgcttt

SEQ ID NO: 241071 - DNA, 120 bp, Artificial Sequence
  ENSG00000121270_6 (sequence is synthesized)
gccctttttctctccgaatgtgtgaagtctctgagtttctcctccagttggatcatcaaccaacgcacagccatcaggttccgagcagctgtttcctcctttgcctttgagaagctcatc

SEQ ID NO: 241072 - DNA, 120 bp, Artificial Sequence
  ENSG00000121270_7 (sequence is synthesized)
caatttaagtctgtaatacacatcacctcaggagaggccatcagcttcttcaccggtgatgtaaactacctgtttgaaggggtgtgctatggacccctagtactgatcacctgcgcatcg

SEQ ID NO: 241073 - DNA, 120 bp, Artificial Sequence
  ENSG00000121270_8 (sequence is synthesized)
ctggtcatctgcagcatttcttcctacttcattattggatacactgcatttattgccatcttatgctatctcctggttttcccactggcggtattcatgacaagaatggctgtgaaggct

SEQ ID NO: 241074 - DNA, 120 bp, Artificial Sequence
  ENSG00000121270_9 (sequence is synthesized)
cagcatcacacatctgaggtcagcgaccagcgcatccgtgtgaccagtgaagttctcacttgcattaagctgattaaaatgtacacatgggagaaaccatttgcaaaaatcattgaagac

SEQ ID NO: 241075 - DNA, 120 bp, Artificial Sequence
  ENSG00000121270_10 (sequence is synthesized)
ctaagaaggaaggaaaggaaactattggagaagtgcgggcttgtccagagcctgacaagtataaccttgttcatcatccccacagtggccacagcggtctgggttctcatccacacatcc

SEQ ID NO: 241076 - DNA, 120 bp, Artificial Sequence
  ENSG00000121270_11 (sequence is synthesized)
ttaaagctgaaactcacagcgtcaatggccttcagcatgctggcctccttgaatctccttcggctgtcagtgttctttgtgcctattgcagtcaaaggtctcacgaattccaagtctgca

SEQ ID NO: 241077 - DNA, 120 bp, Artificial Sequence
  ENSG00000121270_12 (sequence is synthesized)
gtgatgaggttcaagaagtttttcctccaggagagccctgttttctatgtccagacattacaagaccccagcaaagctctggtctttgaggaggccaccttgtcatggcaacagacctgt

SEQ ID NO: 241078 - DNA, 120 bp, Artificial Sequence
  ENSG00000121270_13 (sequence is synthesized)
cccgggatcgtcaatggggcactggagctggagaggaacgggcatgcttctgaggggatgaccaggcctagagatgccctcgggccagaggaagaagggaacagcctgggcccagagttg

SEQ ID NO: 241079 - DNA, 120 bp, Artificial Sequence
  ENSG00000121270_14 (sequence is synthesized)
cacaagatcaacctggtggtgtccaaggggatgatgttaggggtctgcggcaacacggggagtggtaagagcagcctgttgtcagccatcctggaggagatgcacttgctcgagggctcg

SEQ ID NO: 241080 - DNA, 120 bp, Artificial Sequence
  ENSG00000121270_15 (sequence is synthesized)
gtgggggtgcagggaagcctggcctatgtcccccagcaggcctggatcgtcagcgggaacatcagggagaacatcctcatgggaggcgcatatgacaaggcccgatacctccaggtgctc

SEQ ID NO: 241081 - DNA, 120 bp, Artificial Sequence
  ENSG00000121270_16 (sequence is synthesized)
cactgctgctccctgaatcgggacctggaacttctgccctttggagacatgacagagattggagagcggggcctcaacctctctggggggcagaaacagaggatcagcctggcccgcgcc

SEQ ID NO: 241082 - DNA, 120 bp, Artificial Sequence
  ENSG00000121270_17 (sequence is synthesized)
gtctattccgaccgtcagatctacctgctggacgaccccctgtctgctgtggacgcccacgtggggaagcacatttttgaggagtgcattaagaagacactcagggggaagacggtcgtc

SEQ ID NO: 241083 - DNA, 120 bp, Artificial Sequence
  ENSG00000121270_18 (sequence is synthesized)
ctggtgacccaccagctgcagtacttagaattttgtggccagatcattttgttggaaaatgggaaaatctgtgaaaatggaactcacagtgagttaatgcagaaaaaggggaaatatgcc

SEQ ID NO: 241084 - DNA, 120 bp, Artificial Sequence
  ENSG00000121270_19 (sequence is synthesized)
cagcaaagatagcagagaagccaaaggtagaaagtcaggctctggccacctccctggaagagtctctcaacggaaatgctgtgccggagcatcagctcacacaggaggaggagatggaag

SEQ ID NO: 241085 - DNA, 120 bp, Artificial Sequence
  ENSG00000121270_20 (sequence is synthesized)
aaggctccttgagttggagggtctaccaccactacatccaggcagctggaggttacatggtctcttgcataattttcttcttcgtggtgctgatcgtcttcttaacgatcttcagcttct

SEQ ID NO: 241086 - DNA, 120 bp, Artificial Sequence
  ENSG00000121270_21 (sequence is synthesized)
ggtggctgagctactggttggagcagggctcggggaccaatagcagccgagagagcaatggaaccatggcagacctgggcaacattgcagacaatcctcaactgtccttctaccagctgg

SEQ ID NO: 241087 - DNA, 120 bp, Artificial Sequence
  ENSG00000121270_22 (sequence is synthesized)
tgtacgggctcaacgccctgctcctcatctgtgtgggggtctgctcctcagggattttcaccaaggtcacgaggaaggcatccacggccctgcacaacaagctcttcaacaaggttttcc

SEQ ID NO: 241088 - DNA, 120 bp, Artificial Sequence
  ENSG00000121270_23 (sequence is synthesized)
gctgccccatgagtttctttgacaccatcccaataggccggcttttgaactgcttcgcaggggacttggaacagctggaccagctcttgcccatcttttcagagcagttcctggtcctgt

SEQ ID NO: 241089 - DNA, 120 bp, Artificial Sequence
  ENSG00000121270_24 (sequence is synthesized)
ccttaatggtgatcgccgtcctgttgattgtcagtgtgctgtctccatatatcctgttaatgggagccataatcatggttatttgcttcatttattatatgatgttcaagaaggccatcg

SEQ ID NO: 241090 - DNA, 120 bp, Artificial Sequence
  ENSG00000121270_25 (sequence is synthesized)
gtgtgttcaagagactggagaactatagccggtctcctttattctcccacatcctcaattctctgcaaggcctgagctccatccatgtctatggaaaaactgaagacttcatcagccagt

SEQ ID NO: 241091 - DNA, 120 bp, Artificial Sequence
  ENSG00000121270_26 (sequence is synthesized)
ttaagaggctgactgatgcgcagaataactacctgctgttgtttctatcttccacacgatggatggcattgaggctggagatcatgaccaaccttgtgaccttggctgttgccctgttcg

SEQ ID NO: 241092 - DNA, 120 bp, Artificial Sequence
  ENSG00000121270_27 (sequence is synthesized)
tggcttttggcatttcctccaccccctactcctttaaagtcatggctgtcaacatcgtgctgcagctggcgtccagcttccaggccactgcccggattggcttggagacagaggcacagt

SEQ ID NO: 241093 - DNA, 120 bp, Artificial Sequence
  ENSG00000121270_28 (sequence is synthesized)
tcacggctgtagagaggatactgcagtacatgaagatgtgtgtctcggaagctcctttacacatggaaggcacaagttgtccccaggggtggccacagcatggggaaatcatatttcagg

SEQ ID NO: 241094 - DNA, 120 bp, Artificial Sequence
  ENSG00000121270_29 (sequence is synthesized)
attatcacatgaaatacagagacaacacacccaccgtgcttcacggcatcaacctgaccatccgcggccacgaagtggtgggcatcgtgggaaggacgggctctgggaagtcctccttgg

SEQ ID NO: 241095 - DNA, 120 bp, Artificial Sequence
  ENSG00000121270_30 (sequence is synthesized)
gcatggctctcttccgcctggtggagcccatggcaggccggattctcattgacggcgtggacatttgcagcatcggcctggaggacttgcggtccaagctctcagtgatccctcaagatc

SEQ ID NO: 241096 - DNA, 120 bp, Artificial Sequence
  ENSG00000121270_31 (sequence is synthesized)
cagtgctgctctcaggaaccatcagattcaacctagatccctttgaccgtcacactgaccagcagatctgggatgccttggagaggacattcctgaccaaggccatctcaaagttcccca

SEQ ID NO: 241097 - DNA, 120 bp, Artificial Sequence
  ENSG00000121270_32 (sequence is synthesized)
aaaagctgcatacagatgtggtggaaaacggtggaaacttctctgtgggggagaggcagctgctctgcattgccagggctgtgcttcgcaactccaagatcatccttatcgatgaagcca

SEQ ID NO: 241098 - DNA, 120 bp, Artificial Sequence
  ENSG00000121270_33 (sequence is synthesized)
cagcctccattgacatggagacagacaccctgatccagcgcacaatccgtgaagccttccagggctgcaccgtgctcgtcattgcccaccgtgtcaccactgtgctgaactgtgaccaca

SEQ ID NO: 241099 - DNA, 120 bp, Artificial Sequence
  ENSG00000121270_34 (sequence is synthesized)
tcctggttatgggcaatgggaaggtggtagaatttgatcggccggaggtactgcggaagaagcctgggtcattgttcgcagccctcatggccacagccacttcttcactgagataaggag

SEQ ID NO: 241100 - DNA, 120 bp, Artificial Sequence
  ENSG00000121270_35 (sequence is synthesized)
atgtggagacttcatggaggctggcagctgagctcagaggttcacacaggtgcagcttcgaggcccacagtctgcgaccttcttgtttggagatgagaacttctcctggaagcaggggta

SEQ ID NO: 241101 - DNA, 120 bp, Artificial Sequence
  ENSG00000121270_36 (sequence is synthesized)
aatgtagggggggtggggattgctggatggaaaccctggaataggctacttgatggctctcaagaccttagaaccccagaaccatctaagacatgggattcagtgatcatgtggttctcc

SEQ ID NO: 241102 - DNA, 120 bp, Artificial Sequence
  ENSG00000121270_37 (sequence is synthesized)
ttttaacttacatgctgaataattttataataaggtaaaagcttatagttttctgatctgtgttagaagtgttgcaaatgctgtactgactttgtaaaatataaaactaaggaaaactca

SEQ ID NO: 241103 - DNA, 120 bp, Artificial Sequence
  ENSG00000121270_38 (sequence is synthesized)
actgggataaagcaagaagactgattttatgagcaggggtttgatacatcaaaggagattgcccaggatcaagggtgcggtgttgggggtgggttggggagggtggttagagaaggtttc

SEQ ID NO: 241104 - DNA, 120 bp, Artificial Sequence
  ENSG00000121270_39 (sequence is synthesized)
actaagtgatttgggcctgaggcctgagaagatgtttaaaaagagggatcaagcacaggctaaggagaggaaagagcaggcacccaaacctctgcatggccccaatatgctccctgcagg

SEQ ID NO: 241105 - DNA, 120 bp, Artificial Sequence
  ENSG00000121270_40 (sequence is synthesized)
gtagtgccccctcttctggctgctcaaggcgagatctaagcttcttctaactcctgctgtcttttcatattctctgattctgggaaacgaagaattggcaggaactgaaaatgactagga

SEQ ID NO: 241106 - DNA, 120 bp, Artificial Sequence
  ENSG00000121270_41 (sequence is synthesized)
gattggccagctggggtcacatgatcactggttggccagaagaagcggggtactttgatttacagtccagcctagactgcaccaatgggggaggtgggagtcttcccagaagaaaactga

SEQ ID NO: 241107 - DNA, 120 bp, Artificial Sequence
  ENSG00000121270_42 (sequence is synthesized)
gcggggtcaggcgtgttggggatgacgcccaggatggtgctttgcagcgacgtgcccttcagaaggcggctccgcaccagctgcaggttgcgggccgagtccacgctggtgcgcatggtg

SEQ ID NO: 241108 - DNA, 120 bp, Artificial Sequence
  ENSG00000121270_43 (sequence is synthesized)
gagccgggcagcaggacgccctcgtgggtgagcagcagcgggaggcgactggggatctggatggggctcactgatgacatgctggcagcctttcgcactgggggctgtcaaaaagagcca

SEQ ID NO: 241109 - DNA, 120 bp, Artificial Sequence
  ENSG00000121270_44 (sequence is synthesized)
gacagacagctgcccccggcctgccccgcagtcaccaaacctcagacccgcctccacgcctccgcttccggctacgcgctacggtccgtccccgggcccaaaagccatggcttcgcgctg

SEQ ID NO: 241110 - DNA, 120 bp, Artificial Sequence
  ENSG00000121270_45 (sequence is synthesized)
ccaggctctcaggacctgaggctaggagcttggccaggtgccccaccatttccttggttaaaaactgccctctccaagatctctccccttaaaattcaaatttttcatggagggcaaaca

SEQ ID NO: 241111 - DNA, 120 bp, Artificial Sequence
  ENSG00000121270_46 (sequence is synthesized)
caggatatcgttcattttttaatgtgaattaatctatcatttaaaatttttttggcttaggtaagacccaaaataatatgagagtactgtgtgcttgtccttggaagaactaaggacaca

SEQ ID NO: 241112 - DNA, 120 bp, Artificial Sequence
  ENSG00000121270_47 (sequence is synthesized)
gaaaggagaagggaaaggagacccagctaacatttattacattcctcgtatgtgccaagcactatcctgtgtttgaatttggttattctgtgaactcaccttatctggttctttctctgc

SEQ ID NO: 241113 - DNA, 120 bp, Artificial Sequence
  ENSG00000121270_48 (sequence is synthesized)
ctaatgtttacaaaaattagcttcctgctgtctcctcttcgcccctcctcttttcttctctgttatctattaatgtagatattgataccttataataattgatatagaatagatatagat

SEQ ID NO: 241114 - DNA, 120 bp, Artificial Sequence
  ENSG00000121270_49 (sequence is synthesized)
atatataatgataaatgtctaaaaaatagataatatctagtagtaataggtgttaatatctaatatctactgtctcttatctatttatactttcttccttggtgatcatctctagccctg

SEQ ID NO: 241115 - DNA, 120 bp, Artificial Sequence
  ENSG00000121270_50 (sequence is synthesized)
tagccctgcggttttaaattctatctctgtgctattatctctagccttgaagtatcttctggactccagactcaactgcctatttaatatctctcttaaatgtccatcaagcatttaaaa

SEQ ID NO: 241116 - DNA, 120 bp, Artificial Sequence
  ENSG00000121270_51 (sequence is synthesized)
tgaaataaggttttgatattcaccccctttgacgagttccccaaatcttccgtttcctgggagatggcaccatcatccttccagtggttgaggacctggaagtcacacttgattcctttc

SEQ ID NO: 241117 - DNA, 120 bp, Artificial Sequence
  ENSG00000121270_52 (sequence is synthesized)
cttccctccctcgaatccaatccaccagcaaggcctgtcagcttgacttccacatctgccccaaacctgccaccctcaccatagcccctccactgccctatccctgccactgtcacgccg

SEQ ID NO: 241118 - DNA, 120 bp, Artificial Sequence
  ENSG00000121270_53 (sequence is synthesized)
ctcccagaacctcctcatccacctctctgctcccactttcgccttcttatgagccttctaccatacagcagacagagggattttccttttttaaataattaatatatattttttatttca

SEQ ID NO: 241119 - DNA, 120 bp, Artificial Sequence
  ENSG00000121270_54 (sequence is synthesized)
atagcttttggggtacgagtgggttttggttagacggaggagttgtattgtggtgaagtcgagattttagtgcacccgtgacccgatagagtgcattgtacccaataggtagtttgtatc

SEQ ID NO: 241120 - DNA, 120 bp, Artificial Sequence
  ENSG00000121270_55 (sequence is synthesized)
tctcgccccactcccatcctctgtctctctgaccctccaaaatccattataccaggggaccccgacacctgggcggtagacctgcactggtccacagcctgttagaaaccaggccgcaca

SEQ ID NO: 241121 - DNA, 120 bp, Artificial Sequence
  ENSG00000121270_56 (sequence is synthesized)
gcaggaggtgagcagcaggccagtgagcatcaccgcctgagctccgcctcttgtcagatcagcggcagcattggattctcataggagagcgaatcttattgtgaagtgtgcatgagaggg

SEQ ID NO: 241122 - DNA, 78 bp, Artificial Sequence
  ENSG00000121270_57 (sequence is synthesized)
ataggagagcgaatcttattgtgaagtgtgcatgagagggatccaggttgcacactccttatgagaatcatcccctgc

SEQ ID NO: 241123 - DNA, 120 bp, Artificial Sequence
  ENSG00000121270_58 (sequence is synthesized)
ttaaaaaggctcctgcaggcaacatgcctgcacactaacgtgcagaaagggactgtactactcaaaaccaccaaggaagtggcagagaattggcaggaactgaaaatgactaggaagagg

SEQ ID NO: 241124 - DNA, 120 bp, Artificial Sequence
  ENSG00000121274_0 (sequence is synthesized)
acaacgcgctccctgcggggcgggcggcaacctccatgcggcctcgtccacgctcagcaccggggaagccgaggcggagaagccgcgcgcgcctcagaagctcccggacgcccagcggcg

SEQ ID NO: 241125 - DNA, 80 bp, Artificial Sequence
  ENSG00000121274_1 (sequence is synthesized)
gaagctcccggacgcccagcggcggcgcgagcggcggcggcggcagcagcagcagcagcagcacggccaccggcgggagc

SEQ ID NO: 241126 - DNA, 120 bp, Artificial Sequence
  ENSG00000121274_2 (sequence is synthesized)
atcgctccggggagcgcctgctgggcagccacgcgctgcccgcggagcagcgggacttcctgcccctagagacgaccaacaacaacaacaaccaccaccagcccggggcctgggcccgcc

SEQ ID NO: 241127 - DNA, 120 bp, Artificial Sequence
  ENSG00000121274_3 (sequence is synthesized)
gggcgggctcctcggcgtcctcgcctccctcggcgtcctcgtccccgcacccttcggccgccgtccccgccgccgatccagccgattcggcctcgggcagcagcaacaagaggaagcgcg

SEQ ID NO: 241128 - DNA, 120 bp, Artificial Sequence
  ENSG00000121274_4 (sequence is synthesized)
acaacaaggccagcacgtatggactcaactacagcctgctgcagcccagcggagggcgggccgcggggggcggccgagcagacggcggcggggtcgtgtacagcgggaccccgtggaaac

SEQ ID NO: 241129 - DNA, 120 bp, Artificial Sequence
  ENSG00000121274_5 (sequence is synthesized)
ggaggaactacaaccagggagtcgtgggtctgcatgaagaaatcagtgatttttatgaatacatgtctccaagacctgaggaggagaagatgcggatggaggtggtgaacaggatcgaga

SEQ ID NO: 241130 - DNA, 120 bp, Artificial Sequence
  ENSG00000121274_6 (sequence is synthesized)
gtgtaattaaggagctctggcccagcgctgacgtccagatatttggaagttttaaaactggactttatttacctactagtgacatcgacctagtggtgtttgggaagtgggagaacctac

SEQ ID NO: 241131 - DNA, 120 bp, Artificial Sequence
  ENSG00000121274_7 (sequence is synthesized)
ccctctggactctggaagaagctcttcggaaacacaaagtcgcagatgaggattcggtgaaagttttagacaaagcaactgtacctattattaaattaacagattcttttactgaagtga

SEQ ID NO: 241132 - DNA, 120 bp, Artificial Sequence
  ENSG00000121274_8 (sequence is synthesized)
aagttgatatcagctttaatgtacagaatggcgtgagagcagctgacctcatcaaagattttaccaagaaatatcctgtattgccatacttggttttagtattgaaacaattcctattgc

SEQ ID NO: 241133 - DNA, 120 bp, Artificial Sequence
  ENSG00000121274_9 (sequence is synthesized)
agagggaccttaatgaagtatttacaggtggaattggttcttatagtctctttttaatggcagtcagtttccttcagttacatcccagggaagatgcttgcatccccaatacaaactatg

SEQ ID NO: 241134 - DNA, 120 bp, Artificial Sequence
  ENSG00000121274_10 (sequence is synthesized)
gtgttctcttaatagaattttttgaattatatggacgacacttcaattatttaaagactggcatccggataaaggatggtggttcatatgtggccaaagatgaagtacagaaaaatatgc

SEQ ID NO: 241135 - DNA, 120 bp, Artificial Sequence
  ENSG00000121274_11 (sequence is synthesized)
tagatggctacaggccatcaatgctttatatcgaagatcctttacaaccaggtaacgatgttggaaggagttcatatggggccatgcaagtgaagcaggcctttgattatgcctacgttg

SEQ ID NO: 241136 - DNA, 120 bp, Artificial Sequence
  ENSG00000121274_12 (sequence is synthesized)
ttttgagtcatgctgtatcaccaatagcaaagtactatcccaacaatgaaacagaaagcatactaggtagaataattagagtaacagatgaagttgccacatatagagattggatatcaa

SEQ ID NO: 241137 - DNA, 120 bp, Artificial Sequence
  ENSG00000121274_13 (sequence is synthesized)
agcagtggggcttgaagaatagacctgagccttcatgcaatggaaatggtgttaccttgatagtagatactcagcagttagataaatgtaataataatctatctgaagaaaatgaagccc

SEQ ID NO: 241138 - DNA, 120 bp, Artificial Sequence
  ENSG00000121274_14 (sequence is synthesized)
ttggaaaatgtagaagtaaaacctcggaatctcttagtaaacactcttcaaactcttcatcaggtccagtgtcgtcctcttctgccacacagtccagctctagtgatgtagattccgatg

SEQ ID NO: 241139 - DNA, 120 bp, Artificial Sequence
  ENSG00000121274_15 (sequence is synthesized)
caacaccatgcaaaaccccgaaacagctgctttgccgtccgtccactgggaaccgagtagggtcgcaagatgtatccttggagtcctctcaggcagttgggaaaatgcaaagcacccaaa

SEQ ID NO: 241140 - DNA, 120 bp, Artificial Sequence
  ENSG00000121274_16 (sequence is synthesized)
ccactaacacatccaacagcaccaacaaatctcagcatggatcagcaaggctctttcgttcttccagcaaaggcttccaaggtacaactcaaacaagccatggttccttgatgacaaaca

SEQ ID NO: 241141 - DNA, 120 bp, Artificial Sequence
  ENSG00000121274_17 (sequence is synthesized)
aacaacatcaaggcaaatccaataatcagtattaccatggcaaaaagaggaaacacaagagggacgcgcccctctcagacctctgtagatagtcagcgctgcgcggtggactgtcttctc

SEQ ID NO: 241142 - DNA, 120 bp, Artificial Sequence
  ENSG00000121274_18 (sequence is synthesized)
tgtgcaatgatctcatgctcaggacagttgcgcagggactcctgggagatattcaggagcctcacactgttcagacgttgacttagcaactgcgttttttcccagctcgccacagaatgg

SEQ ID NO: 241143 - DNA, 120 bp, Artificial Sequence
  ENSG00000121274_19 (sequence is synthesized)
ggctgcttatttgataagtcatatgctacaacagggtcattttaagatttaaagcttgaatgtaaaataaatatatttctcattggctttatgcagagttatagggaatagtattcagtg

SEQ ID NO: 241144 - DNA, 120 bp, Artificial Sequence
  ENSG00000121274_20 (sequence is synthesized)
ttggtagggtgatagaaacaaaaaacagtatcagaggatgaggtggggaaggaaaacaaaggtatctgataggaagtccagattccaaaggggaaagtgatctgtgcatgtttttttttt

SEQ ID NO: 241145 - DNA, 120 bp, Artificial Sequence
  ENSG00000121274_21 (sequence is synthesized)
tctgtgcatgttttttttttaaatatttttgcatatatttaccattttattgtgtgtatatatagaagaccatataggagattgatatttgtaatagtggatttgttaataatacttttt

SEQ ID NO: 241146 - DNA, 120 bp, Artificial Sequence
  ENSG00000121274_22 (sequence is synthesized)
ttgtaaacagattttttctcaggattagtttgaaaaataatctaaattgtcatcttaacatccatatatagggaagtgattagttctattactcaatttgtttttctcagcattgaaatg

SEQ ID NO: 241147 - DNA, 120 bp, Artificial Sequence
  ENSG00000121274_23 (sequence is synthesized)
acttaatagaacccttgtgtcctgctgcaaaaatttttcctctctaaagaaaaggtttatggtggcaaatgatgtttattttattttgtaaaaaaaaaaaaatgtactatgtacttttgt

SEQ ID NO: 241148 - DNA, 120 bp, Artificial Sequence
  ENSG00000121274_24 (sequence is synthesized)
gtaaacactgaaaaatctctggtcatctccgagaattaacttgcaactgttttctatagtgctgtcgtcttgggcaatgggcaattacatgactttgtgtttgcttcctttgcagtcttt

SEQ ID NO: 241149 - DNA, 120 bp, Artificial Sequence
  ENSG00000121274_25 (sequence is synthesized)
tttttttccccccatttcttcctaataggaaaaaaaaaaaaaaaaaggtcacccatgtctggtctcattcctgttgcagtgaaacttcgagttccacagactttgcatgctggcttctct

SEQ ID NO: 241150 - DNA, 120 bp, Artificial Sequence
  ENSG00000121274_26 (sequence is synthesized)
aaccctgtgtgctgcgtgtgcctgtttctcatctcttattctttttaaaattcatgcttaactactgtgggagaataactgtaaacagctttaattaaatcatacttataaaaaactatt

SEQ ID NO: 241151 - DNA, 120 bp, Artificial Sequence
  ENSG00000121274_27 (sequence is synthesized)
ttcttatattccactctatgcttttggtattgttgatctttacaaattaaatggtctttgataatggatctattttgtattgccttattaagaccaaatacttcttgtcatcccattctt

SEQ ID NO: 241152 - DNA, 120 bp, Artificial Sequence
  ENSG00000121274_28 (sequence is synthesized)
tatcctcttctttcatggaattgttatcgttaattaaaacttttttaaacattggcttgtttcaatcatactgtaaattttggttgtagtcagctttgagtgcaatgagatgtataattc

SEQ ID NO: 241153 - DNA, 120 bp, Artificial Sequence
  ENSG00000121274_29 (sequence is synthesized)
tgttatcattacctgttgagtttgaaactcagttgggaatatttaatataatagaatgtaagtgacatttctgaaaatgctttctttcagggtgaaagctcttatgtttagcatcaatgt

SEQ ID NO: 241154 - DNA, 120 bp, Artificial Sequence
  ENSG00000121274_30 (sequence is synthesized)
gtatggctctgttaaatgcagccatttctgagacgagattcttttatatatatatacatataaagtactattggcttttaggagtttcttttatatacatttatgaaatactgaagacca

SEQ ID NO: 241155 - DNA, 120 bp, Artificial Sequence
  ENSG00000121274_31 (sequence is synthesized)
atcagaccattaatggacacttagtgtaactttttataaagaaaataatgctaaagtaagaccaaaactgatgtcatcactgaaattaacaattttcaatatgttcatattttaattcac

SEQ ID NO: 241156 - DNA, 120 bp, Artificial Sequence
  ENSG00000121274_32 (sequence is synthesized)
aatggaaaaatgtgttccaaaactggaaactcatagtactcgtgtaaactgtggaagatttcaaatgtgatgttattttgacaatgttttaaattttagagtcacattttattctgatca

SEQ ID NO: 241157 - DNA, 120 bp, Artificial Sequence
  ENSG00000121274_33 (sequence is synthesized)
gaatttttattgagatgttgagcttttgtttttgaaactagtttgtcataacattgtgcataatcacagtatttattttctaggacaattgtgaatgtgtagacttatgtttactgctaa

SEQ ID NO: 241158 - DNA, 120 bp, Artificial Sequence
  ENSG00000121274_34 (sequence is synthesized)
gggaacaattatttataaaataatattaaatccagtattagctgcctatttcagacacttaatacttgcagagatctatgttacatttaccacactgaagttttttttgttgttttttgt

SEQ ID NO: 241159 - DNA, 120 bp, Artificial Sequence
  ENSG00000121274_35 (sequence is synthesized)
ttgtttttaaagaatcaccctcattgttgaaagtaaatgtactcttagggtgcgaatattagtgttccaataagcatgtgattatattaaggtggtggtagcgggaagataattctgatt

SEQ ID NO: 241160 - DNA, 120 bp, Artificial Sequence
  ENSG00000121274_36 (sequence is synthesized)
ccattgggaatcttaggttttcgtaaatttattgggaaaatagtttttcctgtactgctgaagtttctttttggtaaacagtatctttctaaaagaaaaaagcatgaaggagaaattgag

SEQ ID NO: 241161 - DNA, 120 bp, Artificial Sequence
  ENSG00000121274_37 (sequence is synthesized)
gtgtgtatacatttcctcaaatgaccagcattgtattcgtgaatactgtgtatcttgcagtgaacagtgtggaagctgttcatttttcaatctgaagtaaaatactttcaagaactttta

SEQ ID NO: 241162 - DNA, 120 bp, Artificial Sequence
  ENSG00000121274_38 (sequence is synthesized)
atgtggactcctgtgaggtgctggaggtttgaatcatcttgaaaactttccaatcttgtctagttaccactgcagagacactaaggaatttaccagaaaaagatatttgatacaagtgat

SEQ ID NO: 241163 - DNA, 120 bp, Artificial Sequence
  ENSG00000121274_39 (sequence is synthesized)
ttaagaaatctcaacatttcctgaggccgtatcactgggcaaccagtgatgaaaactatgaatgaattgcacacctggaagattttttaagctaatgacagtttcttcaaagatgtcaat

SEQ ID NO: 241164 - DNA, 120 bp, Artificial Sequence
  ENSG00000121274_40 (sequence is synthesized)
tatttgccttggaaattttataaattgcatttctatgcacatcggcctctagtgcttaccactcggtttattattcataatctgcaattcaataaaggctttgtgttttcatttatcttc

SEQ ID NO: 241165 - DNA, 120 bp, Artificial Sequence
  ENSG00000121274_41 (sequence is synthesized)
gagtccattcatatccatgaatcataaccttcctttgctaatacttgttgaatgggattttacaaattctccctcactctggtgacatttctcaggcagtcatgtatgtgtacctggcca

SEQ ID NO: 241166 - DNA, 120 bp, Artificial Sequence
  ENSG00000121274_42 (sequence is synthesized)
ttagaaatattaatatttaaagactgttttttagaggagctgatgggttggtgaggtgtcagcacaaaatcttactggttatgttttgatgataaaagtatatccattttttccctccag

SEQ ID NO: 241167 - DNA, 120 bp, Artificial Sequence
  ENSG00000121274_43 (sequence is synthesized)
ctttaaggtgactgtgaaggtgcctggttttgaatgtctttgtttggtttggagatgtcgcactcagttttcaaatctagcttggatctgtaggacctatgttttttacaagtaattgcc

SEQ ID NO: 241168 - DNA, 120 bp, Artificial Sequence
  ENSG00000121274_44 (sequence is synthesized)
ctccagtcttcaacagttgattctgttttatttttatcctgttttgagtgtactttacctttacttgcattttgagcctcattaatatttaggttatttgatttggctccagatattcct

SEQ ID NO: 241169 - DNA, 120 bp, Artificial Sequence
  ENSG00000121274_45 (sequence is synthesized)
agatctgcacagggcaaaacatgggctatagggtgagcatttttaattgtctttttctgctggaaccttatatctctccatgtgttttctgctccttccctcccccatgaaatggtaagt

SEQ ID NO: 241170 - DNA, 120 bp, Artificial Sequence
  ENSG00000121274_46 (sequence is synthesized)
gtgacttgtgtttgcctgaacctgtggactagtgtttggggtttctggaaacactagagggtcagaaaagagtaatgaccaccgtgacgtgcaggattctcttgctgtgacatgttcatt

SEQ ID NO: 241171 - DNA, 120 bp, Artificial Sequence
  ENSG00000121274_47 (sequence is synthesized)
gcaaagccctctccagtgactaggaggtgtagttattaaggttgatctgttagaaatcaccattattaggtattagtggtagatgttgctgatacttttattggtcatgactacatctca

SEQ ID NO: 241172 - DNA, 120 bp, Artificial Sequence
  ENSG00000121274_48 (sequence is synthesized)
gttttactttaatattgatctatagtttgatcagttccttgaattctaatatgttgatttctcagtgtttctgtcactaaccaagaatgtttctaggcagttggttgcttcacagtcaaa

SEQ ID NO: 241173 - DNA, 120 bp, Artificial Sequence
  ENSG00000121274_49 (sequence is synthesized)
actaaatggtaaactatcaaaaatacattcccaattttgctgtgataaatattgaaatgttaaaattaatgaacagaagaatttattcttacccatctattcttgttctcctagttcatt

SEQ ID NO: 241174 - DNA, 120 bp, Artificial Sequence
  ENSG00000121274_50 (sequence is synthesized)
aaactttcagttattggaaaggcacattctcaaagtattttatgagcaaaatattctataaatgcgtctaacaaacctaattgaatataaaagttatatttagtagttactgttgatagt

SEQ ID NO: 241175 - DNA, 120 bp, Artificial Sequence
  ENSG00000121274_51 (sequence is synthesized)
aattttcatcagggtcatagttcatctagtaaaatatttagagaatgatgttaacattccagcattaaagtgggaacaaagatttatatatgaaattccttaaaagagttcatcttgcct

SEQ ID NO: 241176 - DNA, 120 bp, Artificial Sequence
  ENSG00000121274_52 (sequence is synthesized)
tggtttctgaccctcaagactctagctacctgccatcttgtcaaaacatttgtgggtagaataagtgttaaagatcaaattttaatatgcttctcgatatttaacatagctaagaagcca

SEQ ID NO: 241177 - DNA, 120 bp, Artificial Sequence
  ENSG00000121274_53 (sequence is synthesized)
gattttactgtagaagttatttacatgatttgaaaacttgacctaactggaagcctttttctcagtcatcttgttctaagccatcttgacttcacacccttagcgacttttctttttttt

SEQ ID NO: 241178 - DNA, 120 bp, Artificial Sequence
  ENSG00000121274_54 (sequence is synthesized)
ttggtcaaagataatgagctaaatatatatagacgttgaatgttgacaaaattattaaccagaaaaattgcttataaaggctgctgatctatttgatacctagaattaaatatttgagga

SEQ ID NO: 241179 - DNA, 120 bp, Artificial Sequence
  ENSG00000121274_55 (sequence is synthesized)
cagtttttagttaataaactgctaatgtttattttactgtctctcaggtttttggtttttttaaaaaaaatgtgtttggcctttacattttctacttaagtgtgtactttattgagttta

SEQ ID NO: 241180 - DNA, 120 bp, Artificial Sequence
  ENSG00000121274_56 (sequence is synthesized)
accttgtctgtagcctagtagcctgaaagaaaaggagacagaaccagagagatggatgtagtgcattccctttggttattacacatttgtggtagctcctggatttactgagagatattt

SEQ ID NO: 241181 - DNA, 120 bp, Artificial Sequence
  ENSG00000121274_57 (sequence is synthesized)
tagctatgtcaataagaacagctaatgatgtggaaatcaggtgttctcttgtgtatttcagtgaacatttttattagtagttgcatatcatctctagttccacattttaacttaacgtct

SEQ ID NO: 241182 - DNA, 120 bp, Artificial Sequence
  ENSG00000121274_58 (sequence is synthesized)
ttgtggcttcaccactgagctacctttcactacaccagcttctgtgtggcctggtaacatggaaggtctctcctaaggacagtctggacgtattttgggggaatgttatttatcttaaag

SEQ ID NO: 241183 - DNA, 120 bp, Artificial Sequence
  ENSG00000121274_59 (sequence is synthesized)
tggacgtattttgggggaatgttatttatcttaaagatgcctagaaacaaaacgcatatagtaccagtgagaaactatgaagtaaacaagttgctcaggccgggcatggtggctcacgcc

SEQ ID NO: 241184 - DNA, 120 bp, Artificial Sequence
  ENSG00000121274_60 (sequence is synthesized)
atggcttgaggctgggagtttgagaccttcatctcttaaaaaaacaaacaaaaacctgaatggtgaggtgtggtggaattgggtaggggagggaaaggaggacttggaaaagcattctcc

SEQ ID NO: 241185 - DNA, 120 bp, Artificial Sequence
  ENSG00000121274_61 (sequence is synthesized)
aaagccagcaacttggtgaagttcagtacttgcctcttagaggttaggccatgcctttcaaagagagtgaaatgatgggttatcagccacattcttggagttaatatttttcttcatctt

SEQ ID NO: 241186 - DNA, 120 bp, Artificial Sequence
  ENSG00000121274_62 (sequence is synthesized)
tcagtttgggttctgtgctattcatagttcttccctaagaccatttcattattaccttttatatttagttgcaatttattataatatgttgttttgtccctgaacttaatctcctaattt

SEQ ID NO: 241187 - DNA, 120 bp, Artificial Sequence
  ENSG00000121274_63 (sequence is synthesized)
taagatcctctctgatttttgcatattgaaacttacagaagtcactttaaaaaagtcttttgaaagtcctacaatcctaaaataaatcacaagcttgtttgttagacgtgtcaagagtct

SEQ ID NO: 241188 - DNA, 120 bp, Artificial Sequence
  ENSG00000121274_64 (sequence is synthesized)
ccagtctttactactaaaaagcagcactgccttaacacacattgttatgggtgaaaagtgagggacgaccagtgtagtttctggatataaagtgtgaaggactgttgagttaaacatttt

SEQ ID NO: 241189 - DNA, 120 bp, Artificial Sequence
  ENSG00000121281_0 (sequence is synthesized)
agctgaggaactgcgtgtggagtcagcccagtctggatgcacaggaggatgctggcggcacagtgagtgaggcctggtgccagagctgtgcggaccccttgttggccatggagcagcagg

SEQ ID NO: 241190 - DNA, 120 bp, Artificial Sequence
  ENSG00000121281_1 (sequence is synthesized)
cccagaggccctctccccagccctgcttgcctgcctcggagaggacagaggcctaggcccacgggggagggtgttggcagacagatgccctccaggccctggggcctccttaacggcccc

SEQ ID NO: 241191 - DNA, 120 bp, Artificial Sequence
  ENSG00000121281_2 (sequence is synthesized)
ttaacgacacgcgtgccaagggtggaggatgccagccaaggggcgctacttcctcaacgagggcgaggagggccctgaccaagatgcgctctacgagaagtaccagctcaccagccagca

SEQ ID NO: 241192 - DNA, 120 bp, Artificial Sequence
  ENSG00000121281_3 (sequence is synthesized)
tgggccgctgctgctcacgctcctgctggtggccgccactgcctgcgtggccctcatcatcattgccttcagccagggggacccctccagacaccaggccattctgggcatggcgttcct

SEQ ID NO: 241193 - DNA, 120 bp, Artificial Sequence
  ENSG00000121281_4 (sequence is synthesized)
ggtgctggcggtgtttgcggccctctctgtgctgatgtacgtcgagtgtctcctgcggcgctggctcagggccttggcgctgctcacctgggcctgcttggtggcgctgggctatgtgct

SEQ ID NO: 241194 - DNA, 120 bp, Artificial Sequence
  ENSG00000121281_5 (sequence is synthesized)
ggtgttcgacgcatggacaaaggcggcctgtgcgtgggagcaggtgcccttcttcctgttcattgtcttcgtggtgtacacactactgcccttcagcatgcggggcgctgtcgccgttgg

SEQ ID NO: 241195 - DNA, 120 bp, Artificial Sequence
  ENSG00000121281_6 (sequence is synthesized)
ggccgtctccactgcctcccacctcctggtgctcggttctttgatgggaggcttcacgacacccagtgtccgggtggggctgcagctgctggccaacgcagtcatcttcctgtgtgggaa

SEQ ID NO: 241196 - DNA, 120 bp, Artificial Sequence
  ENSG00000121281_7 (sequence is synthesized)
cctgacaggcgccttccacaagcaccaaatgcaggatgcatcccgggacctcttcacctacactgtgaagtgcatccagatccgccggaagctgcgcatcgagaagcgccagcaggagaa

SEQ ID NO: 241197 - DNA, 120 bp, Artificial Sequence
  ENSG00000121281_8 (sequence is synthesized)
cctgctgctgtcagtgcttccggcccacatctccatgggcatgaagctggccatcatcgaacggctcaaggagcatggtgaccgtcgctgcatgcctgacaacaacttccacagcctcta

SEQ ID NO: 241198 - DNA, 120 bp, Artificial Sequence
  ENSG00000121281_9 (sequence is synthesized)
cgtcaagaggcaccagaatgtcagcatcctctatgcggacatcgtgggcttcacgcagctggccagcgactgttctcccaaggagctggtggtggtgctgaatgagctctttggcaagtt

SEQ ID NO: 241199 - DNA, 120 bp, Artificial Sequence
  ENSG00000121281_10 (sequence is synthesized)
cgaccagatcgccaaggccaacgagtgcatgcgaatcaagatcctcggcgactgctactactgtgtatcgggcctgcccgtgtcgctgcctacccacgcccggaactgcgtgaagatggg

SEQ ID NO: 241200 - DNA, 120 bp, Artificial Sequence
  ENSG00000121281_11 (sequence is synthesized)
gctggacatgtgccaggccatcaagcaggtgcgggaggccacgggcgtggacatcaacatgcgtgtgggcatacactcggggaatgtgctgtgcggggtcatcgggctgcgcaagtggca

SEQ ID NO: 241201 - DNA, 120 bp, Artificial Sequence
  ENSG00000121281_12 (sequence is synthesized)
gtatgacgtgtggtcccacgacgtgtccctggccaaccggatggaggcagccggagtacccggccgggtgcacatcacggaggccacgctaaagcacctggacaaggcgtacgaggtgga

SEQ ID NO: 241202 - DNA, 120 bp, Artificial Sequence
  ENSG00000121281_13 (sequence is synthesized)
ggatgggcacgggcagcagcgggacccctacctcaaggagatgaacatccgcacctacctggtcatcgacccccggagccagcagccacccccgcccagccaacacctccccaggcccaa

SEQ ID NO: 241203 - DNA, 120 bp, Artificial Sequence
  ENSG00000121281_14 (sequence is synthesized)
gggggacgcggccctgaagatgcgggcgtcagtgcgcatgacccggtacctcgagtcctggggggcggcacggccctttgcacatctcaaccaccgtgagagcgtgagcagtggtgagac

SEQ ID NO: 241204 - DNA, 120 bp, Artificial Sequence
  ENSG00000121281_15 (sequence is synthesized)
ccacgtccccaacgggcggaggcctaagagcgttccccagcgccaccgccggaccccagacagaagcatgtcccccaaggggcggtcggaggatgactcgtacgatgacgagatgctgtc

SEQ ID NO: 241205 - DNA, 120 bp, Artificial Sequence
  ENSG00000121281_16 (sequence is synthesized)
agccattgaggggctcagctccacgaggccctgctgctccaagtccgatgacttctacacctttgggtccatcttcctggagaagggctttgagcgcgagtaccgcctggcacccatccc

SEQ ID NO: 241206 - DNA, 120 bp, Artificial Sequence
  ENSG00000121281_17 (sequence is synthesized)
ccgggcccgccacgactttgcctgcgccagcctgatcttcgtctgcatcctgctcgtccatgtcctgctcatgcccaggacggcggcactgggtgtgtccttcgggctggtggcctgtgt

SEQ ID NO: 241207 - DNA, 120 bp, Artificial Sequence
  ENSG00000121281_18 (sequence is synthesized)
actggggctggtgctgggcctgtgctttgccaccaagttctcgaggtgctgcccagctcgggggacgctctgcactatctctgagagggtggagacacagcccctgctgaggctgaccct

SEQ ID NO: 241208 - DNA, 120 bp, Artificial Sequence
  ENSG00000121281_19 (sequence is synthesized)
ggccgtcctgaccatcggcagcctgctcactgtggccatcatcaacctgcccctgatgcctttccaagttccagagctgcctgttggcaatgagacaggcctactggccgcgagcagcaa

SEQ ID NO: 241209 - DNA, 120 bp, Artificial Sequence
  ENSG00000121281_20 (sequence is synthesized)
gacaagagccctgtgtgagcccctcccgtactacacctgcagctgtgtcctgggcttcatcgcctgctcggtcttcctgaggatgagcctggagccaaaggttgtgctgctgacagtggc

SEQ ID NO: 241210 - DNA, 120 bp, Artificial Sequence
  ENSG00000121281_21 (sequence is synthesized)
cctggtggcctacctggtgctcttcaacctctccccatgctggcagtgggactgctgcggccaaggcctgggcaacctcaccaagcccaacggcaccaccagtggcacccctagctgttc

SEQ ID NO: 241211 - DNA, 120 bp, Artificial Sequence
  ENSG00000121281_22 (sequence is synthesized)
ctggaaggacctgaagaccatgaccaatttctacctggtcctgttctacatcaccctgcttacactctccagacagattgactattactgccgcttggactgcctatggaagaagaagtt

SEQ ID NO: 241212 - DNA, 120 bp, Artificial Sequence
  ENSG00000121281_23 (sequence is synthesized)
caagaaggagcacgaggagtttgagaccatggagaacgtgaaccgccttcttctggagaacgtcctgccagcccacgtggctgcccactttatcggtgacaagttaaacgaggactggta

SEQ ID NO: 241213 - DNA, 120 bp, Artificial Sequence
  ENSG00000121281_24 (sequence is synthesized)
ccatcagtcctatgactgcgtctgtgtcatgtttgcctccgtgccggacttcaaagtgttctacacagagtgcgatgtcaacaaagaagggctggagtgcctacgcctgctcaatgagat

SEQ ID NO: 241214 - DNA, 120 bp, Artificial Sequence
  ENSG00000121281_25 (sequence is synthesized)
gctcctactgaagcccaagttcagcggcgtggagaagatcaagaccatcggcagcacgtacatggcagctgcagggctcagcgtcgcctcagggcacgagaaccaggagctggagcggca

SEQ ID NO: 241215 - DNA, 120 bp, Artificial Sequence
  ENSG00000121281_26 (sequence is synthesized)
gcatgcccacattggtgtcatggtggagttcagcatcgccctgatgagtaagctggacggcatcaacaggcactccttcaactccttccgcctccgcgtcggcataaaccatgggcctgt

SEQ ID NO: 241216 - DNA, 120 bp, Artificial Sequence
  ENSG00000121281_27 (sequence is synthesized)
gattgctggagtgattggggcccgaaaacctcagtatgacatctggggaaacactgtcaatgtggccagccgaatggaaagcactggagaacttgggaaaatccaggttaccgaggagac

SEQ ID NO: 241217 - DNA, 120 bp, Artificial Sequence
  ENSG00000121281_28 (sequence is synthesized)
ctgcaccatcctccagggcctcgggtactcttgtgaatgccgtggcctgatcaacgtcaaaggcaaaggcgagctgaggacttactttgtctgtacggacactgccaagtttcaggggct

SEQ ID NO: 241218 - DNA, 120 bp, Artificial Sequence
  ENSG00000121281_29 (sequence is synthesized)
ggggctgaactgagggctcctgctggattccgaaaaggccgggaagccagtctccttccctgaagcaagcccaggagaagactctccgccccacgccaatcccaaaggcatgcagatggc

SEQ ID NO: 241219 - DNA, 120 bp, Artificial Sequence
  ENSG00000121281_30 (sequence is synthesized)
tgtgcatgttggcttctttggacctgcactggaggatttctcagacacatgcaccagattctggctcgaagcagccactgagccataatgcgcaggggaggccagaagctctgtgcctgg

SEQ ID NO: 241220 - DNA, 120 bp, Artificial Sequence
  ENSG00000121281_31 (sequence is synthesized)
tctgtaacagtttccaggccagctggagaatgttcactggttcggggctgactttgagatctttgttccctgaggtgccaggcaggcaactttagcacatgatgaaaacagacttccacc

SEQ ID NO: 241221 - DNA, 120 bp, Artificial Sequence
  ENSG00000121281_32 (sequence is synthesized)
tcagtggcctgtgggcacgcacaagtgaggtctgtttttctagacaccaagggggagtaagctgagctgtctagcacggattggagactccctctccctggtgggcctggcaatgacagc

SEQ ID NO: 241222 - DNA, 120 bp, Artificial Sequence
  ENSG00000121281_33 (sequence is synthesized)
atttctcacagaggcattctggtaaatgaagctgaaaggggtgttttacatctgtaaacggtttcaaacaggtagagagaaaaacaccacaattaacactgttactttttgccttgtctg

SEQ ID NO: 241223 - DNA, 120 bp, Artificial Sequence
  ENSG00000121281_34 (sequence is synthesized)
gcatgtttgttttaaatgaatacattaatggggtttttatccttttgaatgacttttcagacactagacataaatctcttccctccagtgtatgctctgcctttttaaccactgacatgt

SEQ ID NO: 241224 - DNA, 120 bp, Artificial Sequence
  ENSG00000121281_35 (sequence is synthesized)
aaggaggactactgtctagcatcagcttatggggtcagctggctgtggggatagagtcctgaggaatgtggtcacagcaagaaggcggggagcagcagagccttgcctttgaatgaggca

SEQ ID NO: 241225 - DNA, 120 bp, Artificial Sequence
  ENSG00000121281_36 (sequence is synthesized)
gcttgtgaggcaagcattctggagagaggtgctttgaaagtaaggtgcggcctttcacctcttccttgattactcacacatctttgcgttctcccctgccgtccttcaactgtatcttac

SEQ ID NO: 241226 - DNA, 120 bp, Artificial Sequence
  ENSG00000121281_37 (sequence is synthesized)
ttttcttaccagaaaggaatggagtctgtttagagacaacttggacaacctgtgagtgcatctcttctttcctttagtcttcacagctaactctggagagcttcaaaactagaaggatct

SEQ ID NO: 241227 - DNA, 120 bp, Artificial Sequence
  ENSG00000121281_38 (sequence is synthesized)
actccgcatgggtgcatgcagaggctcctggatctgggaagcccgccccctcacaaatgctgagccgttcttgctctgaaactgcgtgagtcaaggcaaatgcaaaaagccaggttttgg

SEQ ID NO: 241228 - DNA, 120 bp, Artificial Sequence
  ENSG00000121281_39 (sequence is synthesized)
ggatgtgtcttactgtgcttcaacttcccaaggaattgaaagtcaacctaactgtaacaacagggtgagaaatgaccaaactgcccgtgactttttctgaatggacttcataaccggaag

SEQ ID NO: 241229 - DNA, 120 bp, Artificial Sequence
  ENSG00000121281_40 (sequence is synthesized)
acttaaccggtggcctcatcaccagagcatcgccaggatttctaatgcactcagtttccctacatagcagggattcttagctaggtgtccccatgaaccccgtaaagttctacacaaagt

SEQ ID NO: 241230 - DNA, 120 bp, Artificial Sequence
  ENSG00000121281_41 (sequence is synthesized)
cttgcatacaggagcctttacaagatgattatacagggttgcagattgggtgactgaccagacttgttggggtcctgggatgagttgccccgggctgcaaattaagagtacagctaagtg

SEQ ID NO: 241231 - DNA, 120 bp, Artificial Sequence
  ENSG00000121281_42 (sequence is synthesized)
cgggggtggcggtggagggaacgaaaattgaacctgtctgcctgtgctgtgtcgtgtggctttatcagcccgaggaagggcaggtgtattctaatttgcacaaaggtgctgggtagacta

SEQ ID NO: 241232 - DNA, 120 bp, Artificial Sequence
  ENSG00000121281_43 (sequence is synthesized)
gtggcagctctcatgtgctgcacataagtggaatcagtatgaatagaagaacttgctgtataaaggaatttcatggcaacaatgctggtaagggcaattagcctcgcttaagttgccttt

SEQ ID NO: 241233 - DNA, 120 bp, Artificial Sequence
  ENSG00000121281_44 (sequence is synthesized)
tttacacaccaaaactttttacatgaagggctggtttcacatgaatactatactgaaatctgtgctctcaagatctagcagtgaccagggctgcccggcgggggctctcctggcaagtca

SEQ ID NO: 241234 - DNA, 120 bp, Artificial Sequence
  ENSG00000121281_45 (sequence is synthesized)
ggaaggtttctgttgctaatataacatagaaacacattagtgcactgggcctctctgaggtcagcatatttgtactcttggaatatttgtttttttcttcagtaacaacagaaaccccag

SEQ ID NO: 241235 - DNA, 120 bp, Artificial Sequence
  ENSG00000121281_46 (sequence is synthesized)
ttgggagtttaacaaataactgactaccactcactcatgcatttttatttccaattaaagcaaagcactgtgctgtgctcagataataatagtttgtaagtaaaagtttttagttttcag

SEQ ID NO: 241236 - DNA, 120 bp, Artificial Sequence
  ENSG00000121281_47 (sequence is synthesized)
tgttcaggttatagaatataactgaccataaaaattacctgcaggtattttctttttatgaacttgtttttaaattaccaagtaattactggtgtcattttgttttatgacagacacacg

SEQ ID NO: 241237 - DNA, 120 bp, Artificial Sequence
  ENSG00000121281_48 (sequence is synthesized)
tatctaacaaacaaacaaacagtgaccttctccatgggtcaaggacttccttacaatttctcctgagttaacttttgtgaaaataatacctaaggttttctggcttattgaggaaatttc

SEQ ID NO: 241238 - DNA, 120 bp, Artificial Sequence
  ENSG00000121281_49 (sequence is synthesized)
ctaacaaacaaacaaacaaacaaacagaagagaagatcattaaccactgtatactttgtgtatataataggtcagtgtaaagaaatatgatttgaggtggtgcatgcaagtaactagggt

SEQ ID NO: 241239 - DNA, 120 bp, Artificial Sequence
  ENSG00000121281_50 (sequence is synthesized)
ttattctatataatgaatatttatagatctgtaacatttgtttcaaaatgctgtttcatttttataaagtaccagtgtttagctgctttttatacattaaattagcaatttgaaaaactc

SEQ ID NO: 241240 - DNA, 120 bp, Artificial Sequence
  ENSG00000121281_51 (sequence is synthesized)
ggtggggcccgccttggcctgtctgctgcccgaccctggcctgcttcagggagtccggcacgtctggccacttctctgtgaatcatccatgaggcttgctcaagaatgtcggcccagcca

SEQ ID NO: 241241 - DNA, 120 bp, Artificial Sequence
  ENSG00000121281_52 (sequence is synthesized)
gcgagtggctcctttcactctggtcctcgctatgccttggggctggcccgactgccagaccctgggggaccaagggctggcctgtgagcctccctacacatctgctggcctcactctgcc

SEQ ID NO: 241242 - DNA, 60 bp, Artificial Sequence
  ENSG00000121281_53 (sequence is synthesized)
cccctccagacaccaggccattctgggcatggcgttcctggtgctggcggtgtttgcggc

SEQ ID NO: 241243 - DNA, 120 bp, Artificial Sequence
  ENSG00000121281_54 (sequence is synthesized)
cctggtgagcttggctgggctgagcccctgctctggtcaaggttgggtgcccatctctcctgcctcggggacaatttcctgagtgccctggaggcttctcccgaggatacccctccccag

SEQ ID NO: 241244 - DNA, 120 bp, Artificial Sequence
  ENSG00000121281_55 (sequence is synthesized)
tccagatttgggacgcctacaatgtggccttaaaagctgcctctggttgtcctctcccccgagctcagcaggtggatgtggggggttcccctttgtacactcagggctcctcacctttgg

SEQ ID NO: 241245 - DNA, 120 bp, Artificial Sequence
  ENSG00000121281_56 (sequence is synthesized)
gttctcaaatgcggactttgggggcccagagagcttgtgtggccagctccaggaggatgtgatgccttgagccaccacatcctgacatcccattcattcttcacggcccttctgagactc

SEQ ID NO: 241246 - DNA, 120 bp, Artificial Sequence
  ENSG00000121281_57 (sequence is synthesized)
agtttcccctctcagggatgaacccttgctcctctgctggggctcagaggctcagtgctgcagaaagcagcctgcgggacacttgtccacctctctcccagaccccgcatcctgggctag

SEQ ID NO: 241247 - DNA, 120 bp, Artificial Sequence
  ENSG00000121281_58 (sequence is synthesized)
gtcagttgataaacactgttgcctgaacacccgctgtgtgcagagacctagcagataccctggttggggcagtgctaaggattctgccttctgggagctcatttcctgagcagaattccc

SEQ ID NO: 241248 - DNA, 120 bp, Artificial Sequence
  ENSG00000121281_59 (sequence is synthesized)
gcaggcgggggccgggccacctccctgcagaccctggccggctgctggggccggggaggagagccaggtcaagttcctgtctgcttcgtctccgcagagctgaggaactgcgtgtggagt

SEQ ID NO: 241249 - DNA, 89 bp, Artificial Sequence
  ENSG00000121281_60 (sequence is synthesized)
tacagcctgggcaacagtacacaaaaaaaaacgacgtggcccgcctggggggaacatacattacacagaatataaaggtacacatttct

SEQ ID NO: 241250 - DNA, 120 bp, Artificial Sequence
  ENSG00000121281_61 (sequence is synthesized)
gggaacatacattacacagaatataaaggtacacatttctttttcattctgttttatgcagcaaataattcgttggcatcttctctgtgatgggcagcttgctaagattagactcaggcc

SEQ ID NO: 241251 - DNA, 120 bp, Artificial Sequence
  ENSG00000121281_62 (sequence is synthesized)
ccttagcttcatttccaactaagcccacgctatcaaccaagccaaacagaggaaatcagtttgggttgaattctttgctggagacaaagaatctacattcctgtgtagataatgctgtgt

SEQ ID NO: 241252 - DNA, 120 bp, Artificial Sequence
  ENSG00000121281_63 (sequence is synthesized)
ttgctctgtgcagacacagatggaagggaagagggagacagtgtggggacggagacaacaggaagagcaggagccgccaagggccatgtcctcaccatgcttagtcatgcgctcagctgg

SEQ ID NO: 241253 - DNA, 120 bp, Artificial Sequence
  ENSG00000121281_64 (sequence is synthesized)
gatgtgactcactctcattaggtagcgtggaaggagccttcggatgggtgagcctgggcgcgtctgaggaagggcaggcgggggccgggccacctccctgcagaccctggccggctgctg

SEQ ID NO: 241254 - DNA, 120 bp, Artificial Sequence
  ENSG00000121289_0 (sequence is synthesized)
ggcgggctttagggagtggtccctggctgtggatagatctgctgatgagtccaggccccggtccattctcctcgcgctgcaaggatgctcctgggatttcggagaggccgcaggagtcat

SEQ ID NO: 241255 - DNA, 120 bp, Artificial Sequence
  ENSG00000121289_1 (sequence is synthesized)
ttcaaacacatcatccatggccttttacctgcagccagcgttgctccgaaggcagctgtgccacgcacacctcctccccgcagccccaacccatctccagagagaccaagatctgctctg

SEQ ID NO: 241256 - DNA, 120 bp, Artificial Sequence
  ENSG00000121289_2 (sequence is synthesized)
gcagcagccattctggcgacaacattgactgggcggacggttgctattcctcagcctcgccagaggtcccggtctgagagtgatgtgagcagtgttgaacaggacagcttcatcgagccc

SEQ ID NO: 241257 - DNA, 120 bp, Artificial Sequence
  ENSG00000121289_3 (sequence is synthesized)
tatgccaccacctcacagctgaggcctcggccaaattggcagagtgagatgggaagaagatcttctttgccatcctttgaaacactggactatggggacgaagaggacattgaaactcag

SEQ ID NO: 241258 - DNA, 120 bp, Artificial Sequence
  ENSG00000121289_4 (sequence is synthesized)
ctgtcatccagcggcaaggaattgggggatgtcagtgcccgggaggacagaggaggccacagtgatgacctgtacgctgtgccacacagaaatcaggtgccattgttacatgaggtgaac

SEQ ID NO: 241259 - DNA, 120 bp, Artificial Sequence
  ENSG00000121289_5 (sequence is synthesized)
agtgaagacgatgaaaatatttctcatcaagatgggtttccaggctcccctcctgcaccacagcggacacaacaaaaagatggtaaacaccctgttctgaatttaaaggatgaaaaacct

SEQ ID NO: 241260 - DNA, 120 bp, Artificial Sequence
  ENSG00000121289_6 (sequence is synthesized)
ccattatgtgagaaacctccaccctccccagatataactggtagagcacgtcaaagatatacagaaataaccagagaaaagtttgaggcattaaaagaagaaaatatggacctaaacaat

SEQ ID NO: 241261 - DNA, 120 bp, Artificial Sequence
  ENSG00000121289_7 (sequence is synthesized)
atgaatcaaagccttacccttgaactaaacacaatgaaacaagcaatgaaagaactacagttaaaacttaagggaatggaaaaagagaagagaaagctcaaagaggctgagaaggcgtcg

SEQ ID NO: 241262 - DNA, 120 bp, Artificial Sequence
  ENSG00000121289_8 (sequence is synthesized)
tcacaggaagttgctgcacctgaattactttatctgcgaaaacaagctcaagaactggtggatgaaaatgatggattgaaaatgactgtccatcgtttgaatgtagaactcagtcgatat

SEQ ID NO: 241263 - DNA, 120 bp, Artificial Sequence
  ENSG00000121289_9 (sequence is synthesized)
cagacaaaattcaggcatttgtccaaggaagagagcttaaatattgaaggcctcccatccaagggccctataccaccctggttgttggatataaagtacctgtcaccattgttgctggct

SEQ ID NO: 241264 - DNA, 120 bp, Artificial Sequence
  ENSG00000121289_10 (sequence is synthesized)
tatgaagatatgatgaaagagaaggacgagctcaatgccaccctcaaggaggaaatgagaatgtttaggatgcgagtccaagaagtggtgaaagaaaatgaagaattgcaccaagagtta

SEQ ID NO: 241265 - DNA, 120 bp, Artificial Sequence
  ENSG00000121289_11 (sequence is synthesized)
aataagagtagtgctgttaccagtgaggaatggcgtcagcttcagactcaagcaaaactggttttagaggaaaacaagttgttgctggagcagttggagattcagcaaaggaaagccaag

SEQ ID NO: 241266 - DNA, 120 bp, Artificial Sequence
  ENSG00000121289_12 (sequence is synthesized)
gacagccaccaggagcgcctccaagaagtttctaagctgactaaacaactaatgctcctggaggcaaaaacccacggccaggaaaaggagctggcggagaacagggaacagctggagatt

SEQ ID NO: 241267 - DNA, 120 bp, Artificial Sequence
  ENSG00000121289_13 (sequence is synthesized)
ttacgtgccaaatgccaagaactcaaaacacactcggatggcaaaatcgcagtggaagttcataaatcaattgtgaatgaattaaaaagccaattacagaaggaagaagagaaagaaagg

SEQ ID NO: 241268 - DNA, 120 bp, Artificial Sequence
  ENSG00000121289_14 (sequence is synthesized)
gctgagatggaggagttgatggagaagctgacagtcctgcaagcgcagaagaagagcctgctgttagagaagaacagtttgacagagcaaaacaaagcactggaagccgaacttgaacga

SEQ ID NO: 241269 - DNA, 120 bp, Artificial Sequence
  ENSG00000121289_15 (sequence is synthesized)
gcacagaaaatcaataggaaatctcaaaagaaaattgaggtcctcaaaaagcaggtggaaaaagccatggggaacgaaatgtctgctcatcagtacctggcaaaccttgttggcctggca

SEQ ID NO: 241270 - DNA, 120 bp, Artificial Sequence
  ENSG00000121289_16 (sequence is synthesized)
gaaaacataacccaggaacgtgacagtcttatgtgtttggcaaaatgtttagaaagtgagaaggatggagtgcttaataaagtcataaaaagcaacattcgcctgggaaagttagaggaa

SEQ ID NO: 241271 - DNA, 120 bp, Artificial Sequence
  ENSG00000121289_17 (sequence is synthesized)
aaagtcaagggctacaagaagcaggcagcactgaagctgggggacatcagtcaccgtctgctggagcagcaggaggacttcgccggcaagacagcccagtaccggcaggagatgcggcac

SEQ ID NO: 241272 - DNA, 120 bp, Artificial Sequence
  ENSG00000121289_18 (sequence is synthesized)
ctgcaccaggtgctgaaggacaagcaggaggtgctggaccaggcgctgcagcagaacagagaaatggaaggtgaacttgaagttatttgggaatctaccttcagggaaaaccgaagaatc

SEQ ID NO: 241273 - DNA, 120 bp, Artificial Sequence
  ENSG00000121289_19 (sequence is synthesized)
cgagaacttctccaggacacactcacgaggacaggcgtgcaggacaaccccagagctctggttgcccccagcctcaatggcgtctctcaggcagacctgctggacggctgcgatgtctgc

SEQ ID NO: 241274 - DNA, 120 bp, Artificial Sequence
  ENSG00000121289_20 (sequence is synthesized)
tcctatgacctgaagtctcatgcccccacctgctagaatctgcgggagcccgtggtgtagcctcctctggcctgaaaggtctgcctcacacaggccttccctgcagggcagcccatggtg

SEQ ID NO: 241275 - DNA, 120 bp, Artificial Sequence
  ENSG00000121289_21 (sequence is synthesized)
cagcccatggtggcagccggaggtgcgtaagcccactgaacgctgcagggcagggaagaaataaatggtctcatagtttaatccattgataacattttgctttattttttaatttttttt

SEQ ID NO: 241276 - DNA, 89 bp, Artificial Sequence
  ENSG00000121289_22 (sequence is synthesized)
tttattttttaatttttttttttttttagagctagggtctcactctgttgcccatggcagcctcaaacatgtttgagatccttctgctt

SEQ ID NO: 241277 - DNA, 120 bp, Artificial Sequence
  ENSG00000121289_23 (sequence is synthesized)
aggctggtcttgaactcctggcctcaatctgtcctcctgccttggcctcccaaagtgcgggaatgacacgtgtgagccactgcgcctggcccattgtgctttattttaataacgtgctgc

SEQ ID NO: 241278 - DNA, 120 bp, Artificial Sequence
  ENSG00000121289_24 (sequence is synthesized)
attgtgctttattttaataacgtgctgctgaaatctgttttagccagggcatgttctctggccacattgccactgagatgagttctatgacacccactgctctggtgagtaggtggcctg

SEQ ID NO: 241279 - DNA, 120 bp, Artificial Sequence
  ENSG00000121289_25 (sequence is synthesized)
ctgagcaggcctgccttccagctcctagatctgcagctgggaagtgctggaagggttgggcgggcagctgagccctcgtgccatgtgtcagatggggaagtgtcacccgaggagccaggc

SEQ ID NO: 241280 - DNA, 120 bp, Artificial Sequence
  ENSG00000121289_26 (sequence is synthesized)
catggcaccggccctgatgatagctgtgcgtgagctctgggggccttttcttgtttggtcaaaaaaaacaaggtgctgctgctgttcatgccctctaagttgtacaaaccttttctgccc

SEQ ID NO: 241281 - DNA, 120 bp, Artificial Sequence
  ENSG00000121289_27 (sequence is synthesized)
ctctaagttgtacaaaccttttctgccctctcccctagcccttctctatcctcctgagcaagtactttattctcttttgtttagttgttacttttgtttgtttgttttgagacagggtct

SEQ ID NO: 241282 - DNA, 120 bp, Artificial Sequence
  ENSG00000121289_28 (sequence is synthesized)
ggtgcaatcaccacagccttgacctccaggctcaagcgatcctcccatcccagcctcctgagtaggtgagatgacaggtatacactaacatgcctggctaattttgtaaaaaaaaaattt

SEQ ID NO: 241283 - DNA, 62 bp, Artificial Sequence
  ENSG00000121289_29 (sequence is synthesized)
tacactaacatgcctggctaattttgtaaaaaaaaaatttttgtaggccagccgaggccagg

SEQ ID NO: 241284 - DNA, 90 bp, Artificial Sequence
  ENSG00000121289_30 (sequence is synthesized)
ttgaacctggaaggcggaggttgcagtgaaccaagatcacgccattataccccagcctgggcagcctgggcaacattttttttttggtag

SEQ ID NO: 241285 - DNA, 120 bp, Artificial Sequence
  ENSG00000121289_31 (sequence is synthesized)
aacgtctagcttcaagcaatcctcctgcctaggcctcccaaagtgttgggattataggtatgagccaccgcgcctggtctgggaaggtaattgattctggagccacacagctccccaccc

SEQ ID NO: 241286 - DNA, 120 bp, Artificial Sequence
  ENSG00000121289_32 (sequence is synthesized)
atgtaatgagagccctggctttgagctaagatagagtccctgccccactgccaccaccaagaagcataccagggggccatggttctgtcccatgtgtgttagatgacgtgccacctcctc

SEQ ID NO: 241287 - DNA, 120 bp, Artificial Sequence
  ENSG00000121289_33 (sequence is synthesized)
aggaaaattaccccagccgctcaggaccattcagtcccaggcatgctggagggacttggggacattgggctacaaaggaccctaactgtgggactcaggggtggcaccctgcagcatctc

SEQ ID NO: 241288 - DNA, 120 bp, Artificial Sequence
  ENSG00000121289_34 (sequence is synthesized)
cttttcagagcccctcgcagtgaagtcctgccttgtttcaggtgggaaggaggccccagtactggtccttggtcatgtgtagaagttctacgtgtgatctttgattgccagacggaaggg

SEQ ID NO: 241289 - DNA, 120 bp, Artificial Sequence
  ENSG00000121289_35 (sequence is synthesized)
tgagatagaaaatcatagttcttttatgactctataagcttgttcaacagttgaatcattgtaatttaattttattttacaagcggtagaaagactcactgggattgaaaactgtgtatc

SEQ ID NO: 241290 - DNA, 120 bp, Artificial Sequence
  ENSG00000121289_36 (sequence is synthesized)
atctccctaggagatgacctaacaaataactgtgatgctatttcaaaggcatttacggccgctctgcagcctcctgtagacaggctgacaggcggcggcagcccagcgtggctgcgcggg

SEQ ID NO: 241291 - DNA, 120 bp, Artificial Sequence
  ENSG00000121289_37 (sequence is synthesized)
gcaggagtgcttgtcagcaggaatgctgctcccgccatcgtgacctagagaaccactgttgacatccctgtctttctgccttttatgcaaacattttattcttttgagaagtgtccactt

SEQ ID NO: 241292 - DNA, 120 bp, Artificial Sequence
  ENSG00000121289_38 (sequence is synthesized)
ttgttcttatgtttctgctttaagtttttcacacagtgcaaacatactttgcaagtatggggactcctggatggcactgtgaccagggcaagggcaggtgtcccacagacactatcttct

SEQ ID NO: 241293 - DNA, 120 bp, Artificial Sequence
  ENSG00000121289_39 (sequence is synthesized)
gcccagcctcctgctgggtgccataggaaatgggcagagaagccacgagtccaggatgccaaggagggcggggcaggcaaggcagagaggcacctgggtgcttgtgagattccaggaaag

SEQ ID NO: 241294 - DNA, 120 bp, Artificial Sequence
  ENSG00000121289_40 (sequence is synthesized)
gacagaaacattggggtgcttctgggaggaactggcacgccccggcccttgcagagtggacaaggtttcaggagctacagaagggtggagagggcccccaggagcacagcaggcactcag

SEQ ID NO: 241295 - DNA, 120 bp, Artificial Sequence
  ENSG00000121289_41 (sequence is synthesized)
agcagcaggagggggtttggtcagagcttgggtgggaaatgaggccggactgcacagaggagaactgggtctgctgggaggggctcctccttccccatgctgcaagtgtctggtctgagc

SEQ ID NO: 241296 - DNA, 120 bp, Artificial Sequence
  ENSG00000121289_42 (sequence is synthesized)
agggaacccttctctttcttggtcctggtgaggtttcatacggcattggaagattcctggtcaagcagctgtagaacatgacccaggcacgcgagtgagccttgctggctttgccattat

SEQ ID NO: 241297 - DNA, 77 bp, Artificial Sequence
  ENSG00000121289_43 (sequence is synthesized)
acccaggcacgcgagtgagccttgctggctttgccattatttaaaagcagccctgggcatggtgatggcgcctatgg

SEQ ID NO: 241298 - DNA, 120 bp, Artificial Sequence
  ENSG00000121289_44 (sequence is synthesized)
cactccagcctgggcaaccaggtgagaccctgcctcaaaaataatacaataaaaagtaaaagcagccctggggaaatggagacagtggacaaagcaggctggggcaccaggtgtgcatgt

SEQ ID NO: 241299 - DNA, 120 bp, Artificial Sequence
  ENSG00000121289_45 (sequence is synthesized)
gggtgtgagtctgtcatgagagctgtcctgaatgcccttaacgccactgaactgtatgctggaaaacagtgacaacagtggattttgttatatagacaattaaaaaagaaataacaccca

SEQ ID NO: 241300 - DNA, 120 bp, Artificial Sequence
  ENSG00000121289_46 (sequence is synthesized)
catttgtccaaggaagaggtaacgtttccgattgtgaaaatcagcttttcagatttttaagcctttactgttgaattgatttccaatcttgagaggttcttatttattataatttgatgt

SEQ ID NO: 241301 - DNA, 120 bp, Artificial Sequence
  ENSG00000121289_47 (sequence is synthesized)
aagaaaagctctgtccaaggcacaatgtttctaaggaccattctgtttcttgcctccttcccttccttcttccccgtaataaaggcaataaagactgtaaaacattgggacaatacagaa

SEQ ID NO: 241302 - DNA, 120 bp, Artificial Sequence
  ENSG00000121289_48 (sequence is synthesized)
gatcttcccaccccagcctcccgaggagctgagactacaggcgcgcgccactactcccggctaattgttcaatatttttgtggaaacagggatcttgctatgttcctatggtggtcttga

SEQ ID NO: 241303 - DNA, 120 bp, Artificial Sequence
  ENSG00000121289_49 (sequence is synthesized)
gctccttagcctcctaaagtgttggtatcacaggcgtgagccactgtgcccggcgttaacaatcttctgccccagggtcggccacagttggacaggagcaccctgcctcccctgtagcat

SEQ ID NO: 241304 - DNA, 120 bp, Artificial Sequence
  ENSG00000121289_50 (sequence is synthesized)
tcgtccccgtgcccggagttaactcctggacgacgtacacctgctgcactgctggatatagccattcttcatttttccctcctccacccaccatgtacaccccatcagcaagtcccatcc

SEQ ID NO: 241305 - DNA, 120 bp, Artificial Sequence
  ENSG00000121289_51 (sequence is synthesized)
gatatacccactacatacatctgccagctgttcccatctccacccacaccccggcctccagcatctgtctggactgctgcggcagatcctcactggtttctctgcttccactctcgccct

SEQ ID NO: 241306 - DNA, 120 bp, Artificial Sequence
  ENSG00000121289_52 (sequence is synthesized)
cccttcccctaggtccattctccacgtagcagccaaggggattcttatatttatttattatttaatttagttttagagacagggtcttgtcctgatgcccaggctggagtacagtggcat

SEQ ID NO: 241307 - DNA, 66 bp, Artificial Sequence
  ENSG00000121289_53 (sequence is synthesized)
aggtattttttatttattttattttttgcctcacactctgccaagtctcaatgcctggctaatttt

SEQ ID NO: 241308 - DNA, 120 bp, Artificial Sequence
  ENSG00000121289_54 (sequence is synthesized)
tatttattttattttttgcctcacactctgccaagtctcaatgcctggctaattttaaaaattattttgtagaggccacgtgaggtggctctcacctgtaatccagcactttgggaggct

SEQ ID NO: 241309 - DNA, 75 bp, Artificial Sequence
  ENSG00000121289_55 (sequence is synthesized)
agactctgcctcaaaaaaacataattttttttttttggtagagatggggtctgggtatgctgcccaggctggtct

SEQ ID NO: 241310 - DNA, 90 bp, Artificial Sequence
  ENSG00000121289_56 (sequence is synthesized)
aagctagactctgcctcaaaaaaacataattttttttttttggtagagatggggtctgggtatgctgcccaggctggtcttaaaccttag

SEQ ID NO: 241311 - DNA, 120 bp, Artificial Sequence
  ENSG00000121289_57 (sequence is synthesized)
attaatgagtccctgctgtgtgctgatacccacaactgacagcttatggccacacggtctgtaggatagacaagcccataaataattctgtacacaatggtaaaacaagaactgctgttg

SEQ ID NO: 241312 - DNA, 120 bp, Artificial Sequence
  ENSG00000121289_58 (sequence is synthesized)
atgtgtgtaccagaagggcagtgacgtcagcctggagagttggcctgggcctggcagggagtaaggaaagaattctgggtgcagaagacagcaaataccaaggcctaaaaaagaatgaat

SEQ ID NO: 241313 - DNA, 120 bp, Artificial Sequence
  ENSG00000121289_59 (sequence is synthesized)
tatttgctgtttgggaaatggaagcccacgctgagtgctgaagcacagggactctgcgcaggaagaggaggggaagcaagaaatgaatttgggtccttgtgatggcagtggctgctgcca

SEQ ID NO: 241314 - DNA, 120 bp, Artificial Sequence
  ENSG00000121289_60 (sequence is synthesized)
tcacgctgtgtggctagggctgcacacttcatggagccggtggaagccccgtccctcatgagttgggactggagccgcaaaccgctgctgcagacccaggccttctgctctatggagcag

SEQ ID NO: 241315 - DNA, 120 bp, Artificial Sequence
  ENSG00000121289_61 (sequence is synthesized)
gcaggagccccaccctcttgggcagggctacagccacccaaactgcagctgtggatccgagcctctctgctcctgggggagccgggaacaggcagaatttgcccttccagatgcagctgc

SEQ ID NO: 241316 - DNA, 120 bp, Artificial Sequence
  ENSG00000121289_62 (sequence is synthesized)
agccgcgcaggcaggagccagggacaagtgggagccctgcctcttccaagttggcggggtgggagctcccaggtgcagctgtggctgcccccccaggcacaggacgagggcatctctgta

SEQ ID NO: 241317 - DNA, 120 bp, Artificial Sequence
  ENSG00000121289_63 (sequence is synthesized)
gcctgcaccatcggccatcccaggaaggacagcccccttcaccctccatccctgcaggctcaggggtgtctgcttccactgcctggcctctctccactccagcaactgctctgatcttgg

SEQ ID NO: 241318 - DNA, 120 bp, Artificial Sequence
  ENSG00000121289_64 (sequence is synthesized)
aggggagtcggagccaagacctgcagccatgaatggcagcaggaggaagggggtggggtccccagtaaggccccaccctcaggccagggagggcctgaattctgggggctgggctgccag

SEQ ID NO: 241319 - DNA, 120 bp, Artificial Sequence
  ENSG00000121289_65 (sequence is synthesized)
tccctctgaccagagtggaaactcgtggagccttttctgggcctgccaatggcccaatcagcacacacttcttccccgctgaggtccataaaaaccctgggctcagccagagcagcgcag

SEQ ID NO: 241320 - DNA, 120 bp, Artificial Sequence
  ENSG00000121289_66 (sequence is synthesized)
agaatagccagaggatgaagatggtagagacgaggggacaggatgaccagctgcagagagcagtaccctctctgctgatagctggagacggtggggtgaccagctacagagaggagtacc

SEQ ID NO: 241321 - DNA, 120 bp, Artificial Sequence
  ENSG00000121289_67 (sequence is synthesized)
ttctccgctgaaagctacagagaccacctgccagcagagaggagctacactctgctgcgagcttcagagacctgcagagacattggaatgacttgcctgcggagaggagccactctctcc

SEQ ID NO: 241322 - DNA, 120 bp, Artificial Sequence
  ENSG00000121289_68 (sequence is synthesized)
agggcctcctctctgttgagagctgaatggttgagctcatgggacaatctgtctccagagaggagctacccactcctctgagctcttctaacactaaataaaactcctcttcacccttca

SEQ ID NO: 241323 - DNA, 120 bp, Artificial Sequence
  ENSG00000121289_69 (sequence is synthesized)
tcatgtccttcaaaatgtttaccacgattccataatgatgcaattaatatggtgtctctgaggataatggactgacttgaggtctctccttttcaggtgcatgaacttctcacatttcat

SEQ ID NO: 241324 - DNA, 120 bp, Artificial Sequence
  ENSG00000121289_70 (sequence is synthesized)
gattgaatgcaatgagtatttaaaaaaaaatgtaaagcattaaagcccaagtattcaggttaacagggaattttgaattatacacataattttctttcttttttttttccttcgaaacgg

SEQ ID NO: 241325 - DNA, 80 bp, Artificial Sequence
  ENSG00000121289_71 (sequence is synthesized)
tgatgagtccaggccccggtccattctcctcgcgctgcaaggatgctcctgggatttcggagaggccgcaggagtcattt

SEQ ID NO: 241326 - DNA, 120 bp, Artificial Sequence
  ENSG00000121289_72 (sequence is synthesized)
aaacctccaccctccccaggtatttgccttttgaattatattatgattgaaaagcttgttttggagaatatccagattaattttatctgaaaataaagattacattttctttttcttgta

SEQ ID NO: 241327 - DNA, 120 bp, Artificial Sequence
  ENSG00000121297_0 (sequence is synthesized)
cttcttccctccgcacgttcggggttcgcggcggagcgcggcgcgggggggacgcggagagcctgggcgcagcagcatcctgcgggcggccgctctccgggggggaggctgagagcaggc

SEQ ID NO: 241328 - DNA, 120 bp, Artificial Sequence
  ENSG00000121297_1 (sequence is synthesized)
ccgccccctccctccctgtcctcagcccggcagcggcggcggcggcggcagtggcagtcgccggagaagcatcatgccgaggaggaagcagcaggcgccccggcgcgcagcagcctatgt

SEQ ID NO: 241329 - DNA, 120 bp, Artificial Sequence
  ENSG00000121297_2 (sequence is synthesized)
gccccggcgcgcagcagcctatgtttccgaagagttaaaggctgctgccctggtggacgaaggtttagacccagaggagcatacggcagatggagagccctcggccaagtacatgtgccc

SEQ ID NO: 241330 - DNA, 120 bp, Artificial Sequence
  ENSG00000121297_3 (sequence is synthesized)
ggagaaggagctcgccagggcctgccccagctaccagaactccccggccgccgagttttcctgccatgaaatggacagcgagtcacacatcagtgagaccagtgaccgaatggctgactt

SEQ ID NO: 241331 - DNA, 120 bp, Artificial Sequence
  ENSG00000121297_4 (sequence is synthesized)
tgaaagcggctccatcaagaacgaagaggagaccaaggaggtcacggtcccactggaagacacgactgtgtcggatagcctggagcagatgaaggccgtgtacaacaacttcctctccaa

SEQ ID NO: 241332 - DNA, 120 bp, Artificial Sequence
  ENSG00000121297_5 (sequence is synthesized)
ctcctactggtccaacctcaacctcaacctgcaccagccctcctcggagaagaacaacggcagcagcagcagcagcagtagcagcagcagcagctgtggcagcgggagcttcgactggca

SEQ ID NO: 241333 - DNA, 120 bp, Artificial Sequence
  ENSG00000121297_6 (sequence is synthesized)
ccagagcgccatggctaagacgctgcagcaggtgtcacagagccgcatgctcccggagcccagcctcttcagcaccgtgcagctgtaccggcagagcagcaagctctatggctccatctt

SEQ ID NO: 241334 - DNA, 120 bp, Artificial Sequence
  ENSG00000121297_7 (sequence is synthesized)
cacgggggccagcaagttccgctgtaaggactgcagcgctgcctacgacaccctggtggagttgacggtgcacatgaacgagacggggcattaccgcgacgacaaccatgagaccgataa

SEQ ID NO: 241335 - DNA, 120 bp, Artificial Sequence
  ENSG00000121297_8 (sequence is synthesized)
caacaaccccaagcgctggtccaagcctcgcaaacgctccttgctggaaatggaagggaaggaagacgcccagaaggtgctgaagtgcatgtactgtggccactcctttgagtccctgca

SEQ ID NO: 241336 - DNA, 120 bp, Artificial Sequence
  ENSG00000121297_9 (sequence is synthesized)
ggatttgagtgtccatatgatcaaaacaaaacactaccaaaaagtgcctctgaaggaacccgtcactcctgtcgccgccaaaatcatccctgccactcggaagaaagcttccctggagct

SEQ ID NO: 241337 - DNA, 120 bp, Artificial Sequence
  ENSG00000121297_10 (sequence is synthesized)
ggagctccccagctccccagattccacaggtggaacccccaaagccaccatctcagacaccaacgatgcacttcagaagaactccaacccttacatcacgccaaataatcggtacggcca

SEQ ID NO: 241338 - DNA, 120 bp, Artificial Sequence
  ENSG00000121297_11 (sequence is synthesized)
ccagaatggggccagctatgcatggcactttgaggcccggaagtcgcagatcctgaagtgcatggagtgtgggagctcgcatgacaccctgcaggagctcactgcccacatgatggtcac

SEQ ID NO: 241339 - DNA, 120 bp, Artificial Sequence
  ENSG00000121297_12 (sequence is synthesized)
tggccacttcatcaaggtcaccaactctgctatgaaaaaggggaagcccattgtggagacgcctgtcacacctaccatcacaaccctgctggatgagaaggtccagtccgtgcccctggc

SEQ ID NO: 241340 - DNA, 120 bp, Artificial Sequence
  ENSG00000121297_13 (sequence is synthesized)
agccaccaccttcacgtccccctccaatacacctgccagcatctccccaaaactgaatgtggaggtcaagaaggaagtcgacaaggagaaagcggtcactgacgagaaacctaagcaaaa

SEQ ID NO: 241341 - DNA, 120 bp, Artificial Sequence
  ENSG00000121297_14 (sequence is synthesized)
agacaagcctggcgaagaagaggagaagtgtgacatctcttccaaataccattacttgactgaaaatgacttagaagagagtcccaagggggggcttgatatcctcaaatccttggaaaa

SEQ ID NO: 241342 - DNA, 120 bp, Artificial Sequence
  ENSG00000121297_15 (sequence is synthesized)
cacagtgacatccgcaatcaacaaggcccagaacggcactcctagctgggggggctatcccagcatccatgccgcctaccaacttcccaacatgatgaagttgtccctgggctcgtcggg

SEQ ID NO: 241343 - DNA, 120 bp, Artificial Sequence
  ENSG00000121297_16 (sequence is synthesized)
gaagagcacgcccctgaaacccatgtttggcaacagtgagattgtctccccgacgaaaaaccagaccctggtctctccacccagcagccagacgtcccccatgcccaagacaaactttca

SEQ ID NO: 241344 - DNA, 120 bp, Artificial Sequence
  ENSG00000121297_17 (sequence is synthesized)
tgccatggaggagctggtgaaaaaggtcactgagaaagttgccaaagtggaggagaagatgaaggagccggatgggaagctttccccgcccaagcgggccactccctccccatgtagcag

SEQ ID NO: 241345 - DNA, 120 bp, Artificial Sequence
  ENSG00000121297_18 (sequence is synthesized)
cgaagtcggggaacccatcaagatggaggcatccagcgatgggggcttccgcagccaggagaacagccccagccccccgcgggatgggtgcaaggatgggagccccctcgctgagccggt

SEQ ID NO: 241346 - DNA, 120 bp, Artificial Sequence
  ENSG00000121297_19 (sequence is synthesized)
ggagaatggcaaggagctggtgaagcccctagccagcagtttgagtggcagcacggccatcatcaccgaccacccgcctgaacagccttttgttaaccctttgagcgccctgcagtcagt

SEQ ID NO: 241347 - DNA, 120 bp, Artificial Sequence
  ENSG00000121297_20 (sequence is synthesized)
catgaacattcacctgggcaaggccgccaagccctccctgcctgccctggaccccatgagcatgcttttcaagatgagcaacagcctggcggagaaggctgctgtggccaccccgccgcc

SEQ ID NO: 241348 - DNA, 120 bp, Artificial Sequence
  ENSG00000121297_21 (sequence is synthesized)
ctcgaccgctatttctaccacgtcaacaacgaccagcccatagacttgacaaaagggaagagtgacaaaggctgctccttgggttcagtgcttctgtcacccacgtccacagccccggca

SEQ ID NO: 241349 - DNA, 120 bp, Artificial Sequence
  ENSG00000121297_22 (sequence is synthesized)
acctcctcatccacggtgacaacggcaaagacatctgccgtcgtatcattcatgtcaaactcgccgctacgcgagaatgccttgtcagatatatccgatatgctgaagaacttgacagag

SEQ ID NO: 241350 - DNA, 120 bp, Artificial Sequence
  ENSG00000121297_23 (sequence is synthesized)
agccacacgtcaaaatcctccactccttccagcatctccgagaagtctgacattgacggggccactctggaggaggctgaggagtcgacgcccgcccagaagaggaagggccgccagtca

SEQ ID NO: 241351 - DNA, 120 bp, Artificial Sequence
  ENSG00000121297_24 (sequence is synthesized)
aactggaacccccagcacctcctgatcctccaggcccagtttgccgccagcctccggcagacctcagaagggaagtacatcatgtcagacctgagcccccaggagcggatgcatatctcc

SEQ ID NO: 241352 - DNA, 120 bp, Artificial Sequence
  ENSG00000121297_25 (sequence is synthesized)
aggttcaccgggctgtccatgaccaccatcagccactggctggccaacgtgaaataccagcttcgaaggacaggtggaacaaagttcctcaaaaacttggacactggccaccccgtcttc

SEQ ID NO: 241353 - DNA, 120 bp, Artificial Sequence
  ENSG00000121297_26 (sequence is synthesized)
ttttgtaacgattgtgcgtcccaaatcaggactccttccacgtacatcagtcacctagagtcacacttaggcttccggctacgggacttatccaaactgtccaccgaacagattaacagt

SEQ ID NO: 241354 - DNA, 120 bp, Artificial Sequence
  ENSG00000121297_27 (sequence is synthesized)
cagatagcacaaaccaagtcaccgtcagaaaaaatggtgacgtcctcccccgaggaagacctggggacttcctatcagtgcaaactttgcaatcggacctttgccagcaagcacgctgtt

SEQ ID NO: 241355 - DNA, 120 bp, Artificial Sequence
  ENSG00000121297_28 (sequence is synthesized)
aaacttcaccttagcaaaacacacgggaaatctccggaagaccaccttctgtatgtctctgagttagagaagcagtagcatttgcttttgatagaaaggactgcagtttgctttgaggga

SEQ ID NO: 241356 - DNA, 120 bp, Artificial Sequence
  ENSG00000121297_29 (sequence is synthesized)
aactgtggaaggcaccttcaggccccctctgacttgttgttcttggcacatgttcttattttaactgcagagaatcactctgggctggactgttttgtataactgtacagtgtttaatag

SEQ ID NO: 241357 - DNA, 120 bp, Artificial Sequence
  ENSG00000121297_30 (sequence is synthesized)
aggtgcataatcagctgttgttactggtaaaatatgaaggttaaaatgcagtggtaagtgtttggaactttgtgtaaacgggatttagttgtgagcatcctcccgatgcttcaagctgca

SEQ ID NO: 241358 - DNA, 120 bp, Artificial Sequence
  ENSG00000121297_31 (sequence is synthesized)
tgcattaacagacagtttaattaagcatttataacggaatcaggcacaccttttccacgagactcgagtgtgctggcatttctcaccctttcatctttagccctctgagtactttgaagc

SEQ ID NO: 241359 - DNA, 120 bp, Artificial Sequence
  ENSG00000121297_32 (sequence is synthesized)
acttttgcattaatttggttaaaaaataaaataaaataataataatgtatgaagctctgttttttaaactccttaccagcttagttataatgaataatatgaacctccatttatgcaggt

SEQ ID NO: 241360 - DNA, 120 bp, Artificial Sequence
  ENSG00000121297_33 (sequence is synthesized)
ctgcaggggtataacacgccttgaaatttaaaagaatattattttcacattgaaacatagatgtatatattgtatagatttcagactctcttatgaaaaaaaatgtgattgtggttaaat

SEQ ID NO: 241361 - DNA, 120 bp, Artificial Sequence
  ENSG00000121297_34 (sequence is synthesized)
gacctttttcttgcatttatagcaacagtgttttatgcacctgctatgctctgggcataagctgtgcctatgtatagtgtatatttctttttttcttttttttaaggtctatgggttttg

SEQ ID NO: 241362 - DNA, 120 bp, Artificial Sequence
  ENSG00000121297_35 (sequence is synthesized)
ttttttacatgcaaacattgtaaattatacagaagataccacagatagcatttataaagtatacagaaacattatctgaaagcaaagtatgatagtttgttttgctatacagtacatcta

SEQ ID NO: 241363 - DNA, 120 bp, Artificial Sequence
  ENSG00000121297_36 (sequence is synthesized)
tattgatagaggttcatgtttaaattatacatatttattagcatcatattgtcatttgttttgagcagtctgaataaacgagaccgggaaagacatccctggcaggcatcagaactattt

SEQ ID NO: 241364 - DNA, 120 bp, Artificial Sequence
  ENSG00000121297_37 (sequence is synthesized)
attttgcacatgatttttaaaggtatttattagaaatcaaagaacactcaaaataaactcagtgctcaaagggttaagtctatttgaaaaggttaaaaaaaagaacaaaaaaaaaaaaag

SEQ ID NO: 241365 - DNA, 120 bp, Artificial Sequence
  ENSG00000121297_38 (sequence is synthesized)
tgtactgtatttcctaaacattgataaagcctttaaaatgtttgtactgtaatactttgcttaaaagtcatgaggcattctgtgatccaacctctttcacttatttataagccctcttgg

SEQ ID NO: 241366 - DNA, 120 bp, Artificial Sequence
  ENSG00000121297_39 (sequence is synthesized)
ttgctattccatattgtaggatgcctttctatttcaattggtaactttctgttttgttcttcctaattattctcccaagatcccacactgcagctttatctttaggcttatgaaaggtaa

SEQ ID NO: 241367 - DNA, 120 bp, Artificial Sequence
  ENSG00000121297_40 (sequence is synthesized)
cccgtggttaccggctctccaagtgattctgttcttctccatttttggcagttaatttgcagaagtaactgacagctgacaccatatgagaacctttgtataaaatattggcatgtaaac

SEQ ID NO: 241368 - DNA, 120 bp, Artificial Sequence
  ENSG00000121297_41 (sequence is synthesized)
agcacagacaccgtaacacactctgtgccctgtttggttgttgacaatgaagcaccattatgtgactcttcatataacccttttttctacggcagcattaaaattgtctttttgctataa

SEQ ID NO: 241369 - DNA, 120 bp, Artificial Sequence
  ENSG00000121297_42 (sequence is synthesized)
gtggcagtcgccggagaagcatcatgccgaggaggaagcagcaggcgccccggcgcgcagcagaactaaggcacccatcttccgctgactttggacatcagagctccaggttctctctcc

SEQ ID NO: 241370 - DNA, 120 bp, Artificial Sequence
  ENSG00000121297_43 (sequence is synthesized)
tagaactgagacacccatctgctgctgcctgtggacatcagaactccaggttctctctcgtagaactgagacacccatcttctgatgcctttggacatcagaactccagattctgttttc

SEQ ID NO: 241371 - DNA, 120 bp, Artificial Sequence
  ENSG00000121297_44 (sequence is synthesized)
tagacctgagacacccatctgctgctgcctttggacatcagaactccaggttctctcacgtagaaccgaggcacccatcttctgctgcctttggacatcagaactccagattctcaggcc

SEQ ID NO: 241372 - DNA, 120 bp, Artificial Sequence
  ENSG00000121297_45 (sequence is synthesized)
tttgtactctaggatgtgtagcagcaacccctgccccaggttttcaggcctttggcctcagacttcaagctacacctctggcttctctggttctgaggcttttggacttggactgagcca

SEQ ID NO: 241373 - DNA, 120 bp, Artificial Sequence
  ENSG00000121297_46 (sequence is synthesized)
tgctgcaggcatccctgggtctccagcttgcatatggcctgttgtaggacttctcagcctccataatcatctccccagtgaagcatggccttgtgcaccataagcagatttgaagtttaa

SEQ ID NO: 241374 - DNA, 120 bp, Artificial Sequence
  ENSG00000121297_47 (sequence is synthesized)
gaagatgactctagatgttccacggagaatgttaggagtgagaatggccatgggaagacccactgggaggctgttgagttgcccaggatacaactagagtccaggaaggatcgcagccct

SEQ ID NO: 241375 - DNA, 120 bp, Artificial Sequence
  ENSG00000121297_48 (sequence is synthesized)
actgagaacttgaaagaccccaagttccatcctcaaagcatcctcgctgctgcatcattacaaaatccccgtgatccaccttttcaaagggagaacaaagaactgtgggcatcggaatcg

SEQ ID NO: 241376 - DNA, 120 bp, Artificial Sequence
  ENSG00000121297_49 (sequence is synthesized)
ggaagacctactgcctttaggaaaagacaaggaagagaagccctatgtttcatcagggacgaaactgattctcttgcatcgagacagactctccctgaaaactgagttcttcctgaacca

SEQ ID NO: 241377 - DNA, 120 bp, Artificial Sequence
  ENSG00000121297_50 (sequence is synthesized)
tccaatcacatcgagattttgtttctgtgcaaagggggatgctgggatccagacttgagcctttgttctccttatggaatttatgaaacatcctcagctgctgtcatatagtagaagaag

SEQ ID NO: 241378 - DNA, 120 bp, Artificial Sequence
  ENSG00000121297_51 (sequence is synthesized)
ctcctccctcaaccatcctatgtgtacaacgtttaaacaatttctttgataattttgggggttgaagactgggtggctaggtcagaagaaaggggatcaggccaggtctctctactgatc

SEQ ID NO: 241379 - DNA, 120 bp, Artificial Sequence
  ENSG00000121297_52 (sequence is synthesized)
cttcagatgaaataaggccaatcagtggaataatgaggaaagtaatatctccctagagaggctgatggggttttcatcaaatcagccaaccttttcccgtcacttacactgccatgcact

SEQ ID NO: 241380 - DNA, 120 bp, Artificial Sequence
  ENSG00000121297_53 (sequence is synthesized)
ccaagcaggccctgtccgcctgcctcctctcttttctcctcttcgtcaaaacttccctgtggttattactgataatggaatacttagggacccaggaaatgtatgtgcactggatacctc

SEQ ID NO: 241381 - DNA, 120 bp, Artificial Sequence
  ENSG00000121297_54 (sequence is synthesized)
ctctttctgaagaataactattaactcttatttcgtttatgactcaactgccccttacatcccagaagatcttcagaagccaagaagaatagaagagttgcagagatatggaaggtcttc

SEQ ID NO: 241382 - DNA, 120 bp, Artificial Sequence
  ENSG00000121297_55 (sequence is synthesized)
tccttggtggcctctgttgccttgaactgaagctgagatgggcaggctcctgatgtccagcttagattctgaggatgagcagggacaagatactagggtccatctatggagggacagacc

SEQ ID NO: 241383 - DNA, 120 bp, Artificial Sequence
  ENSG00000121297_56 (sequence is synthesized)
acaccatggtggcccaaggggacttcggtggtacaggtgtgcccaacgcccattccttgcttcagaactacaaaaaaagatacctggaaaccaggtggctaaatagcccttttaccaaac

SEQ ID NO: 241384 - DNA, 120 bp, Artificial Sequence
  ENSG00000121297_57 (sequence is synthesized)
agcagggcccaatggcagagaggattgaagagctggcctgaaatatgtgctgcaaaaaatctgattgtgtctgccccgtgcgctgtgggccatcctgcccgtagtggggcagccatctcc

SEQ ID NO: 241385 - DNA, 120 bp, Artificial Sequence
  ENSG00000121297_58 (sequence is synthesized)
cttgcaagggactccactgagcttcttaaagctgtcttcccagtgggcagggtatccccaaaggccaaatgaaaagggcagatgcatgtcatgcgatgtggccagaagacacgtggatgc

SEQ ID NO: 241386 - DNA, 120 bp, Artificial Sequence
  ENSG00000121297_59 (sequence is synthesized)
accaggatatggtaccctggctgtcttcttgatgcactggttgtcctttggttttgaacctcatgaagactttgcctaattgtgctagaagatgagcaggcacccagaggtgcccatccc

SEQ ID NO: 241387 - DNA, 120 bp, Artificial Sequence
  ENSG00000121297_60 (sequence is synthesized)
ccttgcaggccatcagcatcgctttgcccactgcaagctgaaagaagcaagacagaaagagcccgggactggctcccagcacacgggcctcacgggctgacttcagagcatggaggaggc

SEQ ID NO: 241388 - DNA, 120 bp, Artificial Sequence
  ENSG00000121297_61 (sequence is synthesized)
agtcagcagattctcctctcagcaacccgggcgttttctccactgaggctgagggccagggtcacaaaagaaggggaaaaaaatcacattttgcatgcaaaagttttccaaattaaacga

SEQ ID NO: 241389 - DNA, 120 bp, Artificial Sequence
  ENSG00000121297_62 (sequence is synthesized)
gatccattcacagaagtcctcccaccgtgctcggcgaatgattcaaagcctccacatgatttcatctgtgcagactctaatccacttacttaatgaaatacataattaacatattataat

SEQ ID NO: 241390 - DNA, 120 bp, Artificial Sequence
  ENSG00000121297_63 (sequence is synthesized)
aaaagtcaactcacagggcaccaggcaggagatgcgggtcccattttgctctaaacagagtgggcaggggcgctgttttcctctctttatcaccatgctctaggtaaagcctgcctgtgg

SEQ ID NO: 241391 - DNA, 120 bp, Artificial Sequence
  ENSG00000121297_64 (sequence is synthesized)
aacttgtgccctcttctctttctatccacaaactccataaggggttctttagcaactaagcaagaaggcttctctgttgtctccttaattaaggatgcctgctgcagggatctcactcag

SEQ ID NO: 241392 - DNA, 120 bp, Artificial Sequence
  ENSG00000121297_65 (sequence is synthesized)
ggcggcggcggcagtggcagtcgccggagaagcatcatgccgaggaggaagcagcaggcgccccggcgcgcagcagacaagagcatcaattgggtggaggttctcagcacgtggtgggtg

SEQ ID NO: 241393 - DNA, 120 bp, Artificial Sequence
  ENSG00000121297_66 (sequence is synthesized)
gagctccgaaacctccatttccaaaaaggatcgagagccagtctcctagaaatggagcccttagtggtggtccacgctggagacgatgacaaacaattggacccttgtgtccccaagctg

SEQ ID NO: 241394 - DNA, 120 bp, Artificial Sequence
  ENSG00000121297_67 (sequence is synthesized)
tgggctccctggcgatgacaccggagctgtctctattttgcctgtcgggggaatgttccagcgcattttcccttattatgacttgattaaggacacaataaacccttgccatgattttta

SEQ ID NO: 241395 - DNA, 120 bp, Artificial Sequence
  ENSG00000121310_0 (sequence is synthesized)
gagctctcagcgggagccgagacggtgcagggccggagaagcaccttcactcccagcctgcgccccgatgctgcgcgttctgtgcctcctgcgcccctggaggccccttcgggcccgcgg

SEQ ID NO: 241396 - DNA, 120 bp, Artificial Sequence
  ENSG00000121310_1 (sequence is synthesized)
ctgcgcttccgacggggcggccgggggctcagagatccaagtgcgcgccctggcgggtccggaccaagggatcactgagattctgatgaacagaccttctgcccgcaatgccttggggaa

SEQ ID NO: 241397 - DNA, 120 bp, Artificial Sequence
  ENSG00000121310_2 (sequence is synthesized)
tgtcttcgtcagtgagctgctggaaactctggcccagctgcgggaggaccggcaagtgcgtgtcctgctcttcagaagtggagtgaagggcgtgttctgtgcaggtgcagacctgaagga

SEQ ID NO: 241398 - DNA, 120 bp, Artificial Sequence
  ENSG00000121310_3 (sequence is synthesized)
gcgggaacagatgagtgaagcagaggtgggggtgtttgtccagcgactccggggcctgatgaatgacatcgcagccttccctgcacccaccattgcggctatggatgggtttgccttggg

SEQ ID NO: 241399 - DNA, 120 bp, Artificial Sequence
  ENSG00000121310_4 (sequence is synthesized)
cggaggcctagagcttgccctggcctgtgacctccgagtggcagcttcctcggcagtcatgggactgattgagaccacgcgagggctcctcccgggggcaggagggactcagaggctgcc

SEQ ID NO: 241400 - DNA, 120 bp, Artificial Sequence
  ENSG00000121310_5 (sequence is synthesized)
ccgttgtctgggggtggccctggcgaaggagctcatcttcacgggccgacgactgagtggaactgaggcccacgtactggggctggtgaatcacgctgtggcccagaacgaggaggggga

SEQ ID NO: 241401 - DNA, 120 bp, Artificial Sequence
  ENSG00000121310_6 (sequence is synthesized)
ggatggccattgaagggatgtgctatgcccagaatattccaacccgggaccggctagagggcatggcagccttcagggagaagcggactcccaaatttgttggcaaatgacccccatttt

SEQ ID NO: 241402 - DNA, 120 bp, Artificial Sequence
  ENSG00000121310_7 (sequence is synthesized)
aaccttcagcatgggagatgcatgccctgaagagcaggatccagaaggaagatttgtggccagattgccttcatcatttcacctctccagacttccatttcttcacaaggatgatgatgg

SEQ ID NO: 241403 - DNA, 120 bp, Artificial Sequence
  ENSG00000121310_8 (sequence is synthesized)
aaataaaatgactggcgtgatgcctggaaccaaggtgctgatcctaccacctactgctaccttccttagcttcaccctggctagaaataatcacgagggttgggtttgctttggaaaatg

SEQ ID NO: 241404 - DNA, 120 bp, Artificial Sequence
  ENSG00000121310_9 (sequence is synthesized)
cctgtctctctacttgaatgataaagaattaaattagatctctctgagtcttggtatcattggctctcagcccctgacctctctcagttatcaggcactcattagagatgtcagaagatt

SEQ ID NO: 241405 - DNA, 120 bp, Artificial Sequence
  ENSG00000121310_10 (sequence is synthesized)
ttaagatacccctagtttcttcctgtgaacaacagaggtaataaataaactctgacatcggttgaacatgtgtcaggggtcagactgcagatcccagtctctgccagttacttgctgtat

SEQ ID NO: 241406 - DNA, 120 bp, Artificial Sequence
  ENSG00000121310_11 (sequence is synthesized)
aaccgtggacaaattgtttaaatgctctgggcctcagcttcctcacctacaaaacaaaacttgtgaagatttagcaaaataaaaacacttcatattcaataaatatgttttaattgttaa

SEQ ID NO: 241407 - DNA, 120 bp, Artificial Sequence
  ENSG00000121310_12 (sequence is synthesized)
aaacagggtgagtctggacattctgcagtcagccactgttcttggcttccaaccaaaagcaaaactaaggcaaggcagagcacagagggtgctcaggcagaagctgcttcccctcctggt

SEQ ID NO: 241408 - DNA, 120 bp, Artificial Sequence
  ENSG00000121310_13 (sequence is synthesized)
gcagccattagctgctgtagtatctgtgacctgtcagaacctgcttccttcattttgggaatatttgaccaacctcagagcaattgctgttacgagccaaggaggtcaaagagcaatgtc

SEQ ID NO: 241409 - DNA, 120 bp, Artificial Sequence
  ENSG00000121310_14 (sequence is synthesized)
cagtcttcccattctgtccaagtcagatttatcgaccatgtttcggaaaaaggtgagcctcagggatagtttgtcaatggctgagctaatcacaaaggtgcctgggcaggaatactggca

SEQ ID NO: 241410 - DNA, 120 bp, Artificial Sequence
  ENSG00000121310_15 (sequence is synthesized)
ccagccaaatttgcattacttgttctgagcaattgagctttgtttgaagaatgggaggggataaagaagataactgatcattttctcaggtgactgacctggtgattaggagcagccttc

SEQ ID NO: 241411 - DNA, 120 bp, Artificial Sequence
  ENSG00000121310_16 (sequence is synthesized)
ttggatgcagttaggcaaagtctgaatgtcttcccttctccccccaccgctctctcctgccaccccaggagcaacatataaaaatgtgtagctccaggcatgaaagtagcttctgtctac

SEQ ID NO: 241412 - DNA, 120 bp, Artificial Sequence
  ENSG00000121310_17 (sequence is synthesized)
acaatgcaggtcaaagagaaggaactgaccaggtgtccaggcaccaaaataccaggctggtctagccccaactctccttctcacatgcccacgttcacgcaactaactcacagggttttg

SEQ ID NO: 241413 - DNA, 120 bp, Artificial Sequence
  ENSG00000121310_18 (sequence is synthesized)
gactaagacggagtgaatgtaaaacccactcccttctgcccacgttcacatggtccatgctgagggaattcagaaaaggagacagacccgggggggtgcgtcagtcaaggcaagtttctc

SEQ ID NO: 241414 - DNA, 120 bp, Artificial Sequence
  ENSG00000121310_19 (sequence is synthesized)
gaaggaaggaagcagaactcaggaggacatggactggaacagtcagggcaatttcaggctgtgacaaagctggaacggacgactgtagcaggagcaggagtcactgacattctaggccag

SEQ ID NO: 241415 - DNA, 120 bp, Artificial Sequence
  ENSG00000121310_20 (sequence is synthesized)
gccagggctaagccagagaacctattaatagtaatccacaaatagatatggggcacctcctaggaactctccttgttccaagcgtcgtacctcgtgtgatccttagcggctctctgaagc

SEQ ID NO: 241416 - DNA, 120 bp, Artificial Sequence
  ENSG00000121310_21 (sequence is synthesized)
agacagaagagggccagccatctttcttccacctttgaggcttgggaagggtgagacttgctggtgacttacaactccatcaaaggggcatggtgaaataagggcctgggctcctgactt

SEQ ID NO: 241417 - DNA, 120 bp, Artificial Sequence
  ENSG00000121310_22 (sequence is synthesized)
ctgggctagggctcttccaaaggcagagtctggagaggcctggctgtggccagaccatggggcaagtggctagaggggcgagtagacagcagaggcagctgtggcccccgggattagcac

SEQ ID NO: 241418 - DNA, 120 bp, Artificial Sequence
  ENSG00000121310_23 (sequence is synthesized)
acaggccttgagtctgtcctggtctctggaatcacggtgtctagtagaggccagcacacagcaaatatataaatgtacaaatgagtgaatgaagagaatctgattggccttaaggaactt

SEQ ID NO: 241419 - DNA, 120 bp, Artificial Sequence
  ENSG00000121310_24 (sequence is synthesized)
taccaagaagcttggctgttgctggtgaaagaatattacacaagtagggccaggattactgtcttgccaaacaggacagaacactaagcctctgtatttagttgctaatttattgtgaca

SEQ ID NO: 241420 - DNA, 120 bp, Artificial Sequence
  ENSG00000121310_25 (sequence is synthesized)
gaggagcatattgatctgtccccgtgattgtgcagttagcaaaacccaggctttgagaaaccctgtaggtcaaataccccaggctcctccacagataatctctgagggaaagacagagtt

SEQ ID NO: 241421 - DNA, 120 bp, Artificial Sequence
  ENSG00000121310_26 (sequence is synthesized)
gggctcctcccgggggcaggtaatcgcaactacagcacccgcccaattccaccccatccagggtccttcgctgctttccttttttgccctctgttctgggctctgccctcccacctgaac

SEQ ID NO: 241422 - DNA, 120 bp, Artificial Sequence
  ENSG00000121310_27 (sequence is synthesized)
agctgctggaaactctggcccagctgcgggaggaccggcaagtgcgtgtcctgctcttcagaagtggagtgaagggcgtgttctgtgcaggcccccattgccgtgcggctgggcaaagta

SEQ ID NO: 241423 - DNA, 120 bp, Artificial Sequence
  ENSG00000121310_28 (sequence is synthesized)
gaaaggtaggaggaaggagaatgggggcctgccaaagccaaggcagatacgtgtcattatgcatctgtgtaaacccacagagtgtacaccaccaagagcgaaccccagtgtacactaggg

SEQ ID NO: 241424 - DNA, 120 bp, Artificial Sequence
  ENSG00000121310_29 (sequence is synthesized)
cccccgggtggcgacagtgcatcagtgtaggttcgtcagttgcaacacgtgcctctggtgggggatggggattgcggaaggggctgtgcctgtgtagggccagggagtataggtgaactg

SEQ ID NO: 241425 - DNA, 120 bp, Artificial Sequence
  ENSG00000121310_30 (sequence is synthesized)
tattgaattgtattttccactccattttgctgtgaccctaaaactgctctaagaaaatcatctatttataaacaaataaatattcttctaagaagccaaagcagaaaacgatcaagtgga

SEQ ID NO: 241426 - DNA, 120 bp, Artificial Sequence
  ENSG00000121310_31 (sequence is synthesized)
gtgtgttaatgtcagcaaaggtttttgctgccacgaggttgaggcaaggagagaaacgtgtcccttggttagtgatgtggctatattcatcactttaatgagaataatgtctgctgagtg

SEQ ID NO: 241427 - DNA, 72 bp, Artificial Sequence
  ENSG00000121310_32 (sequence is synthesized)
tagccttccctgcacccaccattgcggctatggatgggtttgccttgggcggaggcctagagcttgccctgg

SEQ ID NO: 241428 - DNA, 120 bp, Artificial Sequence
  ENSG00000121310_33 (sequence is synthesized)
tcttttttttttttaagcttcatcatatataaatgaagagtctgatgctattgcctagacaatattaatgctgtcaagtttctattatacttggttagaaagtctccgaactaatacaga

SEQ ID NO: 241429 - DNA, 120 bp, Artificial Sequence
  ENSG00000121310_34 (sequence is synthesized)
actctgggtcactcaatggagtggctgattgcagctttcatatctagacctgtagactatagggtttgtctttttgccttaactaaataacaatcacaaaataattcagatttccaaata

SEQ ID NO: 241430 - DNA, 120 bp, Artificial Sequence
  ENSG00000121310_35 (sequence is synthesized)
tactaaaatattggtactatataattactgatattttcagtacttaaaagtagctttgtataccaaaacaccagtctaccaaaaacaagtactggcatgagtaatcccagagttgagacc

SEQ ID NO: 241431 - DNA, 120 bp, Artificial Sequence
  ENSG00000121310_36 (sequence is synthesized)
ttctgggtcaacctgaaaaacaaaacttcaacttccacctatgttactgggtgctcagaataaaggtttccggataggagagggccagggatggtgtagatggccaccatctagtggaca

SEQ ID NO: 241432 - DNA, 120 bp, Artificial Sequence
  ENSG00000121310_37 (sequence is synthesized)
aaccactctgatagggtagcaaatggttccagagttttctcagcccagaaaaaaactgtcaatatccacagtttgcatcagatttccttcttaaatagtaaatacacattacactttgag

SEQ ID NO: 241433 - DNA, 72 bp, Artificial Sequence
  ENSG00000121310_38 (sequence is synthesized)
gatttccttcttaaatagtaaatacacattacactttgagaaatggattcagctgtgttttttttcttttct

SEQ ID NO: 241434 - DNA, 120 bp, Artificial Sequence
  ENSG00000121310_39 (sequence is synthesized)
gcagtccttccacctcagcctctgaatagctgggactacaggtgcaagctactgacttggctagaatttggctgttttcactcacaaacatacgtacataccgtttttaactttaataaa

SEQ ID NO: 241435 - DNA, 73 bp, Artificial Sequence
  ENSG00000121310_40 (sequence is synthesized)
ttttgagacagggtctggagcattgacctctcaggcccaagtgatccttccacctaagactactgagtagctg

SEQ ID NO: 241436 - DNA, 120 bp, Artificial Sequence
  ENSG00000121310_41 (sequence is synthesized)
ggcccaagtgatccttccacctaagactactgagtagctgagactacaggtgcaagtcaccacgcccagctaattttttattttttgtagagatgggatctcatgatgatgcccaggctg

SEQ ID NO: 241437 - DNA, 87 bp, Artificial Sequence
  ENSG00000121310_42 (sequence is synthesized)
tctcaaagccctgtattacttcctttattgggtagttacctaaataataacacatatggcaagcaaatctaaaagaacagaggagta

SEQ ID NO: 241438 - DNA, 120 bp, Artificial Sequence
  ENSG00000121310_43 (sequence is synthesized)
taacacatatggcaagcaaatctaaaagaacagaggagtaagaagggcataaggtaaaaatcaaaggcaagatgaccagctagtcctggtttacctgtgactaccccagttttaaaagtg

SEQ ID NO: 241439 - DNA, 120 bp, Artificial Sequence
  ENSG00000121310_44 (sequence is synthesized)
gaagtcccatatcccagtaacccttcagtcacaagcaaacccaaacagcccttcatttcccaatccctctctctccccagatcatcactattgtttccatactcttccagaaatttccat

SEQ ID NO: 241440 - DNA, 120 bp, Artificial Sequence
  ENSG00000121310_45 (sequence is synthesized)
tgcatatggaaggacgtgtattatgcacatatgcttacatatttaaataaattccttttaatggcttagaggacaagaaatatctttcgaggctaatctgtttctaacaaattttaaaaa

SEQ ID NO: 241441 - DNA, 120 bp, Artificial Sequence
  ENSG00000121310_46 (sequence is synthesized)
caaaatttaaatatgcatagtaaggaattcaaacatggaagaatataaaacaaaaccttcattttatataacaaaacatttataaaccttcgtttataaaacaaaacaaaggtttggttt

SEQ ID NO: 241442 - DNA, 120 bp, Artificial Sequence
  ENSG00000121310_47 (sequence is synthesized)
tgttttataaaggcacaccagcattttgccagtttttgccaaattgctctcctgtggcatactcttttacttttctatcaataatgtatgtaaatactggtttccccagtctcggcagta

SEQ ID NO: 241443 - DNA, 120 bp, Artificial Sequence
  ENSG00000121310_48 (sequence is synthesized)
gtaggcatattgatattttagtatttgctggtctgaggtgaaagggcacagtacctcactgttttgatttgcctttcaagcgtgtagcagctgctggacatccttcacgttcgtacttct

SEQ ID NO: 241444 - DNA, 120 bp, Artificial Sequence
  ENSG00000121310_49 (sequence is synthesized)
tttccggtggaccttttacatactcttttgtaaatggtttaaaagttactttatactaacttttttgtaaatcaaggaaattcatctgtcataagcattgcaattctttttcccagtttt

SEQ ID NO: 241445 - DNA, 120 bp, Artificial Sequence
  ENSG00000121310_50 (sequence is synthesized)
ttttttttttgagacttttcctgagaaagttttataaacacttcaaataatatgatataggaagtaattcctccttgcctggaagtggggctgagactggagtgctagggctggtgtgga

SEQ ID NO: 241446 - DNA, 120 bp, Artificial Sequence
  ENSG00000121310_51 (sequence is synthesized)
accaaggccagtgacaaagcagacactgttgcttctatgtggctgtattaaaatgcacccgcccctctgcactgccccacagaccaggatttcaacacagccctgtcgacttgaaagccc

SEQ ID NO: 241447 - DNA, 120 bp, Artificial Sequence
  ENSG00000121310_52 (sequence is synthesized)
aagttcctaaccctgactttgtttcactctgctggggtaaaaccttaccgcagaggctggcatttgctgaaatgaggtcgaggaagtgggaaaggtggttgggagtccaatccaagtctc

SEQ ID NO: 241448 - DNA, 120 bp, Artificial Sequence
  ENSG00000121310_53 (sequence is synthesized)
accaatgattggataaacacagccaagtgcttcacctccctgcactgcaatctcacagctgtaaaatcacagctgggtcatcagtgatgacaccagcctagaagtgtgggtagcaccatt

SEQ ID NO: 241449 - DNA, 120 bp, Artificial Sequence
  ENSG00000121310_54 (sequence is synthesized)
agatgagtctgtgggggaggaaagcactttgtaaactagttatgttgtgcatgttggaaggatgggctgaataacaagaaacccaggtgttcagggatcagagtctggcttctttcatga

SEQ ID NO: 241450 - DNA, 120 bp, Artificial Sequence
  ENSG00000121310_55 (sequence is synthesized)
tagaaaaagaacctcagctaacaggttataggactaacgctaaagaaactgtcagcagaatggctggaaccagacccagacatctgcctccctcctttaaaacaaagctgtgcacctcag

SEQ ID NO: 241451 - DNA, 120 bp, Artificial Sequence
  ENSG00000121310_56 (sequence is synthesized)
acctgcaactatcagccttgatgccctcctcaaccaagactttttgcttttccctaggcccccattgccgtgcggctgggcaaagtagccattgaccgaggaacggaggtgagagggttt

SEQ ID NO: 241452 - DNA, 120 bp, Artificial Sequence
  ENSG00000121310_57 (sequence is synthesized)
gctcagacagcacagctgggaaaaactcaggaagtggactcttctaacagacttgaactctgacctcgtgctctacgtcagtttacacatctgcaaattggccagacagtattattgttt

SEQ ID NO: 241453 - DNA, 120 bp, Artificial Sequence
  ENSG00000121310_58 (sequence is synthesized)
acattctatcctcatctttctcccttggagagaggatgagattgaggttaagaaagggtaaatgatttgcccaaggtctcagaggaagtgagtagaaagaacccgggtctgtgtggctgc

SEQ ID NO: 241454 - DNA, 120 bp, Artificial Sequence
  ENSG00000121310_59 (sequence is synthesized)
cagtccatgctgcaagatttgtgctggcagtaatgtggcctcagggcagggcttggggtgatgccttgggtgtggctaatccatctgtccacctcaactctcccatctagttaatccatc

SEQ ID NO: 241455 - DNA, 120 bp, Artificial Sequence
  ENSG00000121310_60 (sequence is synthesized)
tgtccacctcaactctcccatctagtcactcatcacacactgaatccagaacaaagctgggaactgggatacagatggatgagttaaacatggtcactgcccccgggagggggcagatac

SEQ ID NO: 241456 - DNA, 120 bp, Artificial Sequence
  ENSG00000121310_61 (sequence is synthesized)
agacacaaatcaaggataatggtaccacgctgacaccccagaaaggttagagctttgcggtccattatgatatccatgtgtggcttttaaattaaaagtaaaatgtggtcaggcgcggtg

SEQ ID NO: 241457 - DNA, 120 bp, Artificial Sequence
  ENSG00000121310_62 (sequence is synthesized)
aataaataaataaataaataaaataaaatgttcagtttctccttcacgctaatcacagttcacgtgcttgacattcacatgcggctagtggctaccatactgggcagtgctcggttaaag

SEQ ID NO: 241458 - DNA, 120 bp, Artificial Sequence
  ENSG00000121310_63 (sequence is synthesized)
taccatactgggcagtgctcggttaaagactgttttctacagttggactgtgggaaggataaaaattccagaggaaaagtatgggcaaaggcacagaggaggataagcaagcagctcgtc

SEQ ID NO: 241459 - DNA, 120 bp, Artificial Sequence
  ENSG00000121310_64 (sequence is synthesized)
cagatgagagtgagggaagaagagagagtgcaagttcgaggcactaggctgtctgggttcaaagacctgctcttccacatactgttgtgaactttgacaaattatttcacctttctatgc

SEQ ID NO: 241460 - DNA, 120 bp, Artificial Sequence
  ENSG00000121310_65 (sequence is synthesized)
ctcaggtttctcagctgtagaatagggatactaacccttgctgtgaaaattaagttcacacacacatggtacttctcttagaatgaggctttcaagtgccagtcagtgggccctagaggc

SEQ ID NO: 241461 - DNA, 120 bp, Artificial Sequence
  ENSG00000121310_66 (sequence is synthesized)
tggagcaattgccagggcccaggtcataaaggttcagaaattaacgggtgacaggaagcgtggtgaggcagccggatgggaaggagaactcctcttctctggcaaaatgtctcagtctgt

SEQ ID NO: 241462 - DNA, 120 bp, Artificial Sequence
  ENSG00000121310_67 (sequence is synthesized)
ctcgtttctcccagcagttttgtcatagttacgaatggtgtttcttctctaggagggaaattccttctcatagctatctctgctcatatagatgtctgtaggcaatagggtgggctggct

SEQ ID NO: 241463 - DNA, 120 bp, Artificial Sequence
  ENSG00000121310_68 (sequence is synthesized)
cagcccatgcctgcttgttaacataggctgggccaggctagagggactttgtatggtacatgaccaattttagaaggttcttctcaacacaaacagtctgaccgcatccatcgtccctca

SEQ ID NO: 241464 - DNA, 120 bp, Artificial Sequence
  ENSG00000121310_69 (sequence is synthesized)
taagtcacctggagtggcttgaggagagccatagtgcttctctctgggacttttccctcaaccatctaatgtactggggttcatcctgcccacttaatgccgagaatcacagaacacagg

SEQ ID NO: 241465 - DNA, 120 bp, Artificial Sequence
  ENSG00000121310_70 (sequence is synthesized)
tccttaagaggaagaaccacatcttttgcctctgtatcagatgccactgtaaagttcaggatggagttgggaggtcaagggcttggttgtagcctgcaggctgtgttcaatgtaggggct

SEQ ID NO: 241466 - DNA, 120 bp, Artificial Sequence
  ENSG00000121310_71 (sequence is synthesized)
gtacacttgggactgacctattaaatctcttactcatgggtgagtaaaaaatgctaatctccacgttaacagatatccaaaatactcctaaggggtcctgggacttggagaaactagtgt

SEQ ID NO: 241467 - DNA, 120 bp, Artificial Sequence
  ENSG00000121310_72 (sequence is synthesized)
gaacctggattcaaagccagatttcttactgcaaagaatttttttctctactgagcagcctcatgtcagaccactgcagacggcagctgagttctcaggaggcatgaaagcagtgtgcaa

SEQ ID NO: 241468 - DNA, 120 bp, Artificial Sequence
  ENSG00000121310_73 (sequence is synthesized)
gtggaggctaatgctgatggggcacagagaatacaaaggctggcctgtcttccccaggagacaaagcagccacggaggcttatacctttgcatgcctcaagatcagagtccagagacaat

SEQ ID NO: 241469 - DNA, 120 bp, Artificial Sequence
  ENSG00000121310_74 (sequence is synthesized)
ggaaacacttggaccctggccttgtcttgggctggacaagcttaagcaactctttttgggcctgtggccctgctcccccaaaactaatattttgtaccttgttgcagaatattccaaccc

SEQ ID NO: 241470 - DNA, 120 bp, Artificial Sequence
  ENSG00000121310_75 (sequence is synthesized)
aaaaaaaaaaaaaaaacagcaaaactctcccccgccaaaaataaaaaaaaaaaagatgaatatggagggagttgtaaaattaaagaaggtacatgggtgcatgtgtgcttgtgtgtgtgt

SEQ ID NO: 241471 - DNA, 120 bp, Artificial Sequence
  ENSG00000121310_76 (sequence is synthesized)
gtgtctgtctgtctaacaacagcagaagcaggcaagggctactgtggtagtcactgttgttcctctccccattttgcttcacagtttacaagtccttccactttctctctgaggcagaaa

SEQ ID NO: 241472 - DNA, 120 bp, Artificial Sequence
  ENSG00000121310_77 (sequence is synthesized)
ctggtcatctagggcagaggctccccagatcccaggcctcctgcctccagtccccagcccgcagcccaggattaggcagagccagctgctttcccgtggctgccctgactccttacaggg

SEQ ID NO: 241473 - DNA, 120 bp, Artificial Sequence
  ENSG00000121310_78 (sequence is synthesized)
cggggcctgatgaatgacatcgggttcaagcctggccattccaaagcagttaagtttccccaagcatgctttcaagttttgacaattgctgttacctttgcctgagataccccttcttgg

SEQ ID NO: 241474 - DNA, 120 bp, Artificial Sequence
  ENSG00000121310_79 (sequence is synthesized)
ttacttgaacttttacttgtccttcaagccctccagtacctcctcctccaggaagccttcccaacccaccctctgagctttttattggagcactgatgatcctgggtcaataatgcctga

SEQ ID NO: 241475 - DNA, 120 bp, Artificial Sequence
  ENSG00000121310_80 (sequence is synthesized)
tacacatttgtcttccccatgagactgagccccatgggaacaaaggctatgtctgattcattctgtgttcccagttcccagcacccagcacagggcttggcacaaagaaagggaggcccc

SEQ ID NO: 241476 - DNA, 81 bp, Artificial Sequence
  ENSG00000121310_81 (sequence is synthesized)
tacaagtccttccactttctctctgaggcagaaagagcaagggtttttctctccattttatggttgggaaaattgaggcct

SEQ ID NO: 241477 - DNA, 120 bp, Artificial Sequence
  ENSG00000121310_82 (sequence is synthesized)
gggactaggccggaggcagcgggggaccggcaggtgggccgctcagtgcgttgaaggattcgatccccagtccctccctcccagttctaggcgccccaaaccgctccaggcctgagaggc

SEQ ID NO: 241478 - DNA, 120 bp, Artificial Sequence
  ENSG00000121310_83 (sequence is synthesized)
aatttgcggacttgggcatgggactgagtcaacctgtccccatctctgatcctgtgcttaggttctgtacggattaaaacactgacgctgggaggttgacagagttacaccaaatcacac

SEQ ID NO: 241479 - DNA, 120 bp, Artificial Sequence
  ENSG00000121310_84 (sequence is synthesized)
agaggagctgggcttcccccgacctcctccgctcaagtctccctgtccccgggaggtgcggaaggaggcaacagacgcttggcccataggtggagcaattggcgaaggcttcgcccgacg

SEQ ID NO: 241480 - DNA, 120 bp, Artificial Sequence
  ENSG00000121310_85 (sequence is synthesized)
aaggccaaaggattgggaaacactcctctgggcacctgctggatttcagccctgggaagacctgaaatgtccatcctgatttttcgtaggaggagaaacagcctagaagggatgataagg

SEQ ID NO: 241481 - DNA, 120 bp, Artificial Sequence
  ENSG00000121310_86 (sequence is synthesized)
gctacccccaccagcatctaaggagagtcttctttctgtttggagttctgtgataagacagatgactcacccagggggatggaggaggatgaccgagggcagttctctcagagagggagt

SEQ ID NO: 241482 - DNA, 120 bp, Artificial Sequence
  ENSG00000121310_87 (sequence is synthesized)
cgcacttaaaataattgggcagaagagaagcagtgaaggagtgcagaggcatcacctgaaagtttacaagtccttccactttctctctgaggcagaaagagcaagggtttttctctccat

SEQ ID NO: 241483 - DNA, 120 bp, Artificial Sequence
  ENSG00000121314_0 (sequence is synthesized)
ctttgaatttgcatgggagcaatttcagccaaacatttcaggtatcactcactaaaggataataattataatttttccaggctataaataactagtcaagctgctcattagttggtttca

SEQ ID NO: 241484 - DNA, 120 bp, Artificial Sequence
  ENSG00000121314_1 (sequence is synthesized)
tcttcaggagtgtagagacaatcctatttcagaggagagctgaacacttccggaagaataacaacgtcgaaataacagcagatgaaaacattattgcatgattcgaagaattgatctatc

SEQ ID NO: 241485 - DNA, 120 bp, Artificial Sequence
  ENSG00000121314_2 (sequence is synthesized)
atgctttaacaggtcacctgtaaattagctcatctacagtgatatttgaaatcagattgttctctctacaaacatgttcagtcctgcagataacatctttataatcctaataactggaga

SEQ ID NO: 241486 - DNA, 120 bp, Artificial Sequence
  ENSG00000121314_3 (sequence is synthesized)
attcatactaggaatattggggaatggatacattgcactagtcaactggattgactggattaagaagaaaaagatttccacagttgactacatccttaccaatttagttatcgccagaat

SEQ ID NO: 241487 - DNA, 120 bp, Artificial Sequence
  ENSG00000121314_4 (sequence is synthesized)
ttgtttgatcagtgtaatggttgtaaatggcattgtaatagtactgaacccagatgtttatacaaaaaataaacaacagatagtcatttttaccttctggacatttgccaactacttaaa

SEQ ID NO: 241488 - DNA, 120 bp, Artificial Sequence
  ENSG00000121314_5 (sequence is synthesized)
atagccagttcctctcatccactttttctctggctgaagtggaaaattgatatggtggtgcactggatcctgctgggatgctttgccatttccttgttggtcagccttatagcagcaata

SEQ ID NO: 241489 - DNA, 120 bp, Artificial Sequence
  ENSG00000121314_6 (sequence is synthesized)
gtactgagttgtgattataggtttcatgcaattgccaaacataaaagaaacattactgaaatgttccatgtgagtaaaataccatactttgaacccttgactctctttaacctgtttgca

SEQ ID NO: 241490 - DNA, 120 bp, Artificial Sequence
  ENSG00000121314_7 (sequence is synthesized)
attgtcccatttattgtgtcactgatatcatttttccttttagtaagatctttatggagacataccaagcaaataaaactctatgctaccggcagtagagaccccagcacagaagttcat

SEQ ID NO: 241491 - DNA, 120 bp, Artificial Sequence
  ENSG00000121314_8 (sequence is synthesized)
gtgagagccattaaaactatgacttcatttatcttcttttttttcctatactatatttcttctattttgatgacctttagctatcttatgacaaaatacaagttagctgtggagtttgga

SEQ ID NO: 241492 - DNA, 120 bp, Artificial Sequence
  ENSG00000121314_9 (sequence is synthesized)
gagattgcagcaattctctaccccttgggtcactcacttattttaattgttttaaataataaactgaggcagacatttgtcagaatgctgacatgtagaaaaattgcctgcatgatatga

SEQ ID NO: 241493 - DNA, 120 bp, Artificial Sequence
  ENSG00000121316_0 (sequence is synthesized)
accacgtgaagcgtcctcgcccctcagagcccggagcaggccgggctcaagaaagaggaaagttgaggacgccccacctcggagaggcggcgcccctgagtaggccaggagcctctcttg

SEQ ID NO: 241494 - DNA, 120 bp, Artificial Sequence
  ENSG00000121316_1 (sequence is synthesized)
cttgcaacttctgccaccgcgggccaccgcggccgcctgatcccgcagaggaaggtcgcggccgtggagcgatgacccgcggcggtccgggcgggcgcccggggctgccacagccgccac

SEQ ID NO: 241495 - DNA, 120 bp, Artificial Sequence
  ENSG00000121316_2 (sequence is synthesized)
tctgctgctgctgctgctgctgccgctgttgttagtcaccgcggagccgccgaaacctgcaggagtctactatgcaactgcatactggatgcctgctgaaaagacagtacaagtcaaaaa

SEQ ID NO: 241496 - DNA, 120 bp, Artificial Sequence
  ENSG00000121316_3 (sequence is synthesized)
tgtaatggacaagaatggggacgcctatggcttttacaataactctgtgaaaaccacaggctggggcatcctggagatcagagctggctatggctctcaaaccctgagcaatgagatcat

SEQ ID NO: 241497 - DNA, 120 bp, Artificial Sequence
  ENSG00000121316_4 (sequence is synthesized)
catgtttgtggctggctttttggagggttacctcactgccccacacatgaatgaccactacacaaacctctacccacagctgatcacgaaaccttccatcatggataaagtgcaggattt

SEQ ID NO: 241498 - DNA, 120 bp, Artificial Sequence
  ENSG00000121316_5 (sequence is synthesized)
tatggagaagcaagataagtggacccggaaaaatatcaaagaatacaagactgattcattttggagacatacaggctatgtgatggcacaaatagatggcctctatgtaggagcaaagaa

SEQ ID NO: 241499 - DNA, 120 bp, Artificial Sequence
  ENSG00000121316_6 (sequence is synthesized)
gagggctatattagaagggacaaagccaatgaccctgttccagattcagttcctgaatagtgttggagatctattggatctgattccctcactctctcccacaaaaaacggcagcctaaa

SEQ ID NO: 241500 - DNA, 120 bp, Artificial Sequence
  ENSG00000121316_7 (sequence is synthesized)
ggtttttaagagatgggacatgggacattgctccgctcttatcaaggttcttcctggatttgagaacatcctttttgctcactcaagctggtacacgtatgcagccatgctcaggatata

SEQ ID NO: 241501 - DNA, 120 bp, Artificial Sequence
  ENSG00000121316_8 (sequence is synthesized)
agtagtcgcctctctttcagcagttacccagggtttttggagtctctggatgatttttacattcttagcagtggattgatattgctgcagaccacaaacagtgtgtttaataaaaccctg

SEQ ID NO: 241502 - DNA, 120 bp, Artificial Sequence
  ENSG00000121316_9 (sequence is synthesized)
ctaaagcaggtaatacccgagactctcctgtcctggcaaagagtccgtgtggccaatatgatggcagatagtggcaagaggtgggcagacatcttttcaaaatacaactctggcacctat

SEQ ID NO: 241503 - DNA, 120 bp, Artificial Sequence
  ENSG00000121316_10 (sequence is synthesized)
aacaatcaatacatggttctggacctgaagaaagtaaagctgaaccacagtcttgacaaaggcactctgtacattgtggagcaaattcctacatatgtagaatattctgaacaaactgat

SEQ ID NO: 241504 - DNA, 120 bp, Artificial Sequence
  ENSG00000121316_11 (sequence is synthesized)
gttctacggaaaggatattggccctcctacaatgttcctttccatgaaaaaatctacaactggagtggctatccactgttagttcagaagctgggcttggactactcttatgatttagct

SEQ ID NO: 241505 - DNA, 120 bp, Artificial Sequence
  ENSG00000121316_12 (sequence is synthesized)
ccacgagccaaaattttccggcgtgaccaagggaaagtgactgatacggcatccatgaaatatatcatgcgatacaacaattataagaaggatccttacagtagaggtgacccctgtaat

SEQ ID NO: 241506 - DNA, 120 bp, Artificial Sequence
  ENSG00000121316_13 (sequence is synthesized)
accatctgctgccgtgaggacctgaactcacctaacccaagtcctggaggttgttatgacacaaaggtggcagatatctacctagcatctcagtacacatcctatgccataagtggtccc

SEQ ID NO: 241507 - DNA, 120 bp, Artificial Sequence
  ENSG00000121316_14 (sequence is synthesized)
acagtacaaggtggcctccctgtttttcgctgggaccgtttcaacaaaactctacatcagggcatgccagaggtctacaactttgattttattaccatgaaaccaattttgaaacttgat

SEQ ID NO: 241508 - DNA, 120 bp, Artificial Sequence
  ENSG00000121316_15 (sequence is synthesized)
ataaaatgaaggagggagatgacggactagaagactgtaaataagataccaaaggcactattttagctatgtttttcccatcagaattatgcaataaaatatattaatttgtcactttca

SEQ ID NO: 241509 - DNA, 74 bp, Artificial Sequence
  ENSG00000121316_16 (sequence is synthesized)
tcgagcgtaagccaccatgcccagctggagtcttccattttgaatgttagaaggaagagtctgtttggggccac

SEQ ID NO: 241510 - DNA, 120 bp, Artificial Sequence
  ENSG00000121316_17 (sequence is synthesized)
ccattttgaatgttagaaggaagagtctgtttggggccacattaaaggttaatcttgactccttggccatattttccaataatcagtatagcaataaacacttacctgaaatggcacaat

SEQ ID NO: 241511 - DNA, 120 bp, Artificial Sequence
  ENSG00000121316_18 (sequence is synthesized)
ccctgtatgcctcttacacttaagacaattgcagtcagttagctatgtacatctgtgtaatccactatgattctggctgtaggttcttcctggatttgagaacatcctttttgctcactc

SEQ ID NO: 241512 - DNA, 120 bp, Artificial Sequence
  ENSG00000121316_19 (sequence is synthesized)
ggaggtgaaccagaatggagagatgggcgtgatgagtgcagggattgtgtagggacggacccacaaaattatcaacaccatacggagtcacaggagtctactatgcaactgcatactgga

SEQ ID NO: 241513 - DNA, 120 bp, Artificial Sequence
  ENSG00000121318_0 (sequence is synthesized)
cacttccgtcgagcagccaatatatgcctcattctgcagcaggtaatctaagatagatgtaacagaagcaatattaagaattagcagatatgctacgtgtagtggaaggcatcttcattt

SEQ ID NO: 241514 - DNA, 120 bp, Artificial Sequence
  ENSG00000121318_1 (sequence is synthesized)
ttgttgtagttagtgagtcagtgtttggggttttggggaatggatttattggacttgtaaactgcattgactgtgccaagaataagttatctacgattggctttattctcaccggcttag

SEQ ID NO: 241515 - DNA, 120 bp, Artificial Sequence
  ENSG00000121318_2 (sequence is synthesized)
ctatttcaagaatttttctgatatggataataattacagatggatttatacagatattctctccaaatatatatgcctccggtaacctaattgaatatattagttacttttgggtaattg

SEQ ID NO: 241516 - DNA, 120 bp, Artificial Sequence
  ENSG00000121318_3 (sequence is synthesized)
gtaatcaatcaagtatgtggtttgccaccagcctcagcatcttctatttcctgaagatagcaaatttttccaactacatatttctctggttgaagagcagaacaaatatggttcttccct

SEQ ID NO: 241517 - DNA, 120 bp, Artificial Sequence
  ENSG00000121318_4 (sequence is synthesized)
tgacacagtctgggatctcaacatgtataaaagtgaatactttattaaacagattttgctaaatctgggagtcattttcttctttacactatccctaattacatgtatttttttaatcat

SEQ ID NO: 241518 - DNA, 120 bp, Artificial Sequence
  ENSG00000121318_5 (sequence is synthesized)
ttccctttggagacacaacaggcagatgcaatcgaatgtgacaggattgagagactccaacacagaagctcatgtgaaggcaatgaaagttttgatatctttcatcatcctctttatctt

SEQ ID NO: 241519 - DNA, 120 bp, Artificial Sequence
  ENSG00000121318_6 (sequence is synthesized)
gtattttataggcatggccatagaaatatcatgttttactgtgcgagaaaacaaactgctgcttatgtttggaatgacaaccacagccatctatccctggggtcactcatttatcttaat

SEQ ID NO: 241520 - DNA, 120 bp, Artificial Sequence
  ENSG00000121318_7 (sequence is synthesized)
tctaggaaacagcaagctaaagcaagcctctttgagggtactgcagcaattgaagtgctgtgagaaaaggaaaaatctcagagtcacatagacaccttgggaagagatggatgttccacg

SEQ ID NO: 241521 - DNA, 120 bp, Artificial Sequence
  ENSG00000121335_0 (sequence is synthesized)
agcacagagttgggagtgactccagagcctcctgcaagatgctgttgattctgctgtcagtggccttgctggccctgagctcagctcagaacttaaatgaagatgtcagccaggaagaat

SEQ ID NO: 241522 - DNA, 120 bp, Artificial Sequence
  ENSG00000121335_1 (sequence is synthesized)
agatgtcagccaggaagaatctccctccctaatagcaggaaatccacaaggagcacccccacaaggaggcaacaaacctcaaggtcccccatctcctccaggaaagccacaaggaccacc

SEQ ID NO: 241523 - DNA, 82 bp, Artificial Sequence
  ENSG00000121335_2 (sequence is synthesized)
acccccacaaggaggcaacaaacctcaaggtcccccacaagtcccgaagtccccgatctcctccaggaaagccacaaggacc

SEQ ID NO: 241524 - DNA, 74 bp, Artificial Sequence
  ENSG00000121335_3 (sequence is synthesized)
gccacaaggaccacccccacaaggagacaagtcccgaagtccccgaagcctcaaggtcctccacctcctccagg

SEQ ID NO: 241525 - DNA, 82 bp, Artificial Sequence
  ENSG00000121335_4 (sequence is synthesized)
cacaaggaggcaacaaacctcaaggtcccccacaacaagtcccgaagttctcgatctcctccaggaaagccacaaggaccac

SEQ ID NO: 241526 - DNA, 74 bp, Artificial Sequence
  ENSG00000121335_5 (sequence is synthesized)
aagccacaaggaccacccccacaaggagacaacaagtcccaaagtgcccgaagccccaaggtcccccacctcct

SEQ ID NO: 241527 - DNA, 78 bp, Artificial Sequence
  ENSG00000121335_6 (sequence is synthesized)
ccacaaggaggcaacaaacctcaaggtccccccaagtcccgaagttctcgatctcctccaggaaagccacaaggacca

SEQ ID NO: 241528 - DNA, 74 bp, Artificial Sequence
  ENSG00000121335_7 (sequence is synthesized)
aaggaccacccccacaaggaggcaaccagcctcaaggtcccccaaacctcaaggtcccccacctccaggaaagc

SEQ ID NO: 241529 - DNA, 89 bp, Artificial Sequence
  ENSG00000121335_8 (sequence is synthesized)
tgcccgaaacaagaaggcaacaatcctcaaggtcccccacctccagcaggaggcaatccccagcagcctcaggcacctcctgctggaca

SEQ ID NO: 241530 - DNA, 120 bp, Artificial Sequence
  ENSG00000121335_9 (sequence is synthesized)
gaggcaatccccagcagcctcaggcacctcctgctggacagccccagggaccaccacgccctcctcaagggggcagaccttccagacctccccagtgacagcctccccagtcatctagga

SEQ ID NO: 241531 - DNA, 120 bp, Artificial Sequence
  ENSG00000121335_10 (sequence is synthesized)
ttcaatgacaggaagtgaataagaagatgagagtgattcaaatgattcaaatgccatgacattggaaaaaggtcatcatagctctaacttctgtataccaataaaataattagcttgcaa

SEQ ID NO: 241532 - DNA, 120 bp, Artificial Sequence
  ENSG00000121335_11 (sequence is synthesized)
atctgctcttccccgctcactcaggtctcctgctcaggactcccttgccgagggcgcgggagattcttgctgaaggggggttccgggggcagcgcagcaacccgggggacctttcttctc

SEQ ID NO: 241533 - DNA, 120 bp, Artificial Sequence
  ENSG00000121335_12 (sequence is synthesized)
tgggttgtgtgagccctgcctccagggtctggctcgggttgcgccaggagctgttcgtggttctgaaacgatgccagctcgggcgcgggcagtggccgggcggatgagcgctgtccgtgg

SEQ ID NO: 241534 - DNA, 120 bp, Artificial Sequence
  ENSG00000121335_13 (sequence is synthesized)
tcctgaagatgttcctgggccccggcggtggcggcggcagcggtgcctaggagggccggcagcggggacggctacgagatgtcagccaggaagaatctccctccctaatagcaggaaatc

SEQ ID NO: 241535 - DNA, 120 bp, Artificial Sequence
  ENSG00000121350_0 (sequence is synthesized)
ggctgcttcctctcctggagtccagagtcccgttgctccgccgcgatattcagtaaaccactgggagtccggcagcatggaggcagcgcgccctcccccgacggcagggaagttcgtggt

SEQ ID NO: 241536 - DNA, 120 bp, Artificial Sequence
  ENSG00000121350_1 (sequence is synthesized)
ggtcggcggcggcatcgcgggcgtcacttgtgcggagcagttggctactcactttccatcggaagatattctcttggtaacagcttctcctgttattaaagcagttacaaatttcaagca

SEQ ID NO: 241537 - DNA, 120 bp, Artificial Sequence
  ENSG00000121350_2 (sequence is synthesized)
gatttctaaaatattggaagaattcgatgttgaagaacaatcaagtaccatgttaggaaaacgctttcccaacattaaggttatagaatctggcgtaaagcaactgaagagtgaagaaca

SEQ ID NO: 241538 - DNA, 120 bp, Artificial Sequence
  ENSG00000121350_3 (sequence is synthesized)
ctgcattgtaacagaagatggcaatcagcacgtatataagaaactctgtctgtgtgctggagctaaaccaaagttgatatgtgaaggaaatccttatgtattaggaatccgtgatacaga

SEQ ID NO: 241539 - DNA, 120 bp, Artificial Sequence
  ENSG00000121350_4 (sequence is synthesized)
cagtgctcaggaatttcagaaacagcttactaaagctaaaagaataatgatcatagggaacggtggtattgcacttgagttagtgtatgaaattgaaggctgtgaagtgatttgggccat

SEQ ID NO: 241540 - DNA, 120 bp, Artificial Sequence
  ENSG00000121350_5 (sequence is synthesized)
taaagataaagctatagggaatactttcttcgatgcaggagcagctgaattcttgacttcaaagctcattgctgaaaaatcagaggctaaaattgcacataaaagaaccagatatacaac

SEQ ID NO: 241541 - DNA, 120 bp, Artificial Sequence
  ENSG00000121350_6 (sequence is synthesized)
tgaaggaaggaaaaaggaagctagaagcaaatctaaagcagataatgtaggaagtgcattgggaccagattggcatgaaggcttgaatcttaaaggaacaaaagagttttctcataagat

SEQ ID NO: 241542 - DNA, 120 bp, Artificial Sequence
  ENSG00000121350_7 (sequence is synthesized)
tcaccttgaaactatgtgtgaagtaaagaaaatctaccttcaggatgagtttagaattttgaagaaaaagtccttcacttttccaagagaccataagtcagttacagctgatacagagat

SEQ ID NO: 241543 - DNA, 120 bp, Artificial Sequence
  ENSG00000121350_8 (sequence is synthesized)
gtggcctgtctatgtggaattgaccaatgaaaagatatatggctgcgatttcattgtcagtgctacaggagttacaccaaatgtagaaccttttctccatggtaacagttttgatctagg

SEQ ID NO: 241544 - DNA, 120 bp, Artificial Sequence
  ENSG00000121350_9 (sequence is synthesized)
agaagatggtggcctgaaagtggatgatcatatgcacacatcccttcctgatatctatgctgccggtgacatctgtactacatcctggcagctgagcccagtctggcagcagatgaggct

SEQ ID NO: 241545 - DNA, 120 bp, Artificial Sequence
  ENSG00000121350_10 (sequence is synthesized)
gtggacccaggctagacagatgggatggtatgcagcaaagtgcatggctgcagcgagttcaggagactctattgacatggatttcagctttgaactgtttgctcatgtgacaaaattttt

SEQ ID NO: 241546 - DNA, 120 bp, Artificial Sequence
  ENSG00000121350_11 (sequence is synthesized)
taactataaggttgtactgctgggaaaatacaatgcacagggcttaggttcagatcatgaattaatgctgagatgtaccaaaggacgagaatacatcaaagtcgtcatgcaaaatggacg

SEQ ID NO: 241547 - DNA, 120 bp, Artificial Sequence
  ENSG00000121350_12 (sequence is synthesized)
aatgatgggagctgtcttaattggtgaaaccgatttagaagaaacatttgaaaacctaatcttaaaccaaatgaatctttcatcatatggagaagatctgctagatccaaatattgatat

SEQ ID NO: 241548 - DNA, 120 bp, Artificial Sequence
  ENSG00000121350_13 (sequence is synthesized)
agaagattattttgactaaaaatggaatttcttcaggaatcatataaagttccaaatgacaccagaaaaatcacaagtcaataaaatgaatgactgtattgagttaatgatgaccacact

SEQ ID NO: 241549 - DNA, 120 bp, Artificial Sequence
  ENSG00000121350_14 (sequence is synthesized)
gaaaattacagaagtgataatgatattagtggaaaaatataaaaacataaattctaagtttgaaatcagttcaaagtttatttatagatatatctttccaatacaacactgaccgcttag

SEQ ID NO: 241550 - DNA, 120 bp, Artificial Sequence
  ENSG00000121350_15 (sequence is synthesized)
ataaaaatcttaagttatttatttctgtgttttaaacataaatatgtttacttgtgatttagctttggagcaaatttaggtaagttatctacttagccaaatgtactctagtagactaga

SEQ ID NO: 241551 - DNA, 120 bp, Artificial Sequence
  ENSG00000121350_16 (sequence is synthesized)
gacttactccttttttgttgaattgtacttctggttttataacctgaaatcatctacaagcttgtccaactctagcccacgggtctaatgcagcccagaacagctttgaatgcagcccaa

SEQ ID NO: 241552 - DNA, 120 bp, Artificial Sequence
  ENSG00000121350_17 (sequence is synthesized)
cacaaatctgtaaactttcttaaaacatgagatttttcttgcaatttttttttttttaagctcatcagctatcgtcagtgttagcatattttatgtgcggcccaagacaattcttcttcc

SEQ ID NO: 241553 - DNA, 120 bp, Artificial Sequence
  ENSG00000121350_18 (sequence is synthesized)
aatgtggctcagggaagccaaaagattggacatccctgatctacatatttaacttaaagtatcactcagtgaacctctgtcagtataatattgctttcaaaaagatggttatgtcaaaag

SEQ ID NO: 241554 - DNA, 120 bp, Artificial Sequence
  ENSG00000121350_19 (sequence is synthesized)
aaaaaatatagctaagtatataaaggcataaaaaacttaagacaattacatgaacttattctcaaatattttacattttttgtaaactttcttaaaacatgagatttttcttgcaatttt

SEQ ID NO: 241555 - DNA, 89 bp, Artificial Sequence
  ENSG00000121350_20 (sequence is synthesized)
tgtaaactttcttaaaacatgagatttttcttgcaattttttttttaagctcatcagctatcatcagtgttagcatattttatgtgcca

SEQ ID NO: 241556 - DNA, 120 bp, Artificial Sequence
  ENSG00000121350_21 (sequence is synthesized)
acttaaagtatcactcagtgagcctctgtcagtataatattgctttcaaaaagatagttatgtcaaaagaaaaaatatagctaagtatataaaggcataaaaaacttaagacgattgtat

SEQ ID NO: 241557 - DNA, 120 bp, Artificial Sequence
  ENSG00000121350_22 (sequence is synthesized)
gaacttattctcaaatattttacatttaaagggttttacataaaaatttttcccttgttttatactggaaaattatataattcatgatctctaattttcaaacattctcaaaagtttaga

SEQ ID NO: 241558 - DNA, 120 bp, Artificial Sequence
  ENSG00000121350_23 (sequence is synthesized)
tcttcagagataagctctgaaaatatagatccatacatataaaatatctatgaaattcttttaaaaactattgtctaactacaaaaataatggcatatacatgcataaaccatctttaat

SEQ ID NO: 241559 - DNA, 120 bp, Artificial Sequence
  ENSG00000121350_24 (sequence is synthesized)
tagaaaatttagtaacattcatatcaggcatcatcgatttttcttttcttagctcctgtattcttagaaccagattgctgaagcatgtttgcagccttcttctggaagttgcctgaattt

SEQ ID NO: 241560 - DNA, 120 bp, Artificial Sequence
  ENSG00000121350_25 (sequence is synthesized)
ttttcctccatctttttatcaccttgttcagaatgacaagtttgagacgattcagcctacaaaaaaaaaaaaaaaacaaagcaagcaccttggtaaaaatccagctattcagttttctca

SEQ ID NO: 241561 - DNA, 120 bp, Artificial Sequence
  ENSG00000121350_26 (sequence is synthesized)
tgagattaaatatttcaaaatattctttctgtatcagttggctttttaagtatacaggggtctagttttttatctacaaatttctattcaaatatgagctctattttgaataaaaggggc

SEQ ID NO: 241562 - DNA, 120 bp, Artificial Sequence
  ENSG00000121350_27 (sequence is synthesized)
tacgttgtgagagaagttctaaagacctcaaatgtccttagacacaatggcacttgacttgacatgcttttgcagacttgatagtatttggtttaaaacagtggtttctaaccactggaa

SEQ ID NO: 241563 - DNA, 120 bp, Artificial Sequence
  ENSG00000121350_28 (sequence is synthesized)
cagcagaaacagacttctcaactattagtaatcacaaccaaataagagcagagtgcataacaaaattagatattcaaacggagtcctcccattccaagaaactggaaacccctagtttat

SEQ ID NO: 241564 - DNA, 120 bp, Artificial Sequence
  ENSG00000121350_29 (sequence is synthesized)
gttaaaaggccagtctaaattctttcacttacatctttacagaaaactatattttctctcttccatacccagaaatctaatcagaaaactgacttttctcatgttcaactggacctaggg

SEQ ID NO: 241565 - DNA, 120 bp, Artificial Sequence
  ENSG00000121350_30 (sequence is synthesized)
gaatatgacagaaaagcatcccataggctttaatatactttttaaaatatataaaactgaaaattaatagccatttaccctgaaagagttctgcgtggactttgtcacttgcatagtaat

SEQ ID NO: 241566 - DNA, 120 bp, Artificial Sequence
  ENSG00000121350_31 (sequence is synthesized)
agcatgtgcctcattgttcagaagattagctttaggtcctattttcaaatacgaaatggtagcataagctgtaaaactgtagtcttctctgcagaaaataaaggccaacaataagaaagc

SEQ ID NO: 241567 - DNA, 120 bp, Artificial Sequence
  ENSG00000121350_32 (sequence is synthesized)
ttttgaaggaatcacggaaaacaaatttataaaagaaataactatatgcgcagtaattcttaacacattgacttgaaataataaaatttacaagaatgcaaataaagcctttaaagaaaa

SEQ ID NO: 241568 - DNA, 120 bp, Artificial Sequence
  ENSG00000121350_33 (sequence is synthesized)
ccttttttgctgcgcccttttccgcacttattgctcccagattttagaaactgcttggtggtcctcagatgacctcactagctttctcttaggcgcagggaggagtgggaggcaaattat

SEQ ID NO: 241569 - DNA, 120 bp, Artificial Sequence
  ENSG00000121350_34 (sequence is synthesized)
agccgagaaaccaaagctggctgatccgtgctcagatccttgtaatgtcagagcagacatgaggactttgtatttagacaaaaaattcagccccctttctttttatttttttttcttttt

SEQ ID NO: 241570 - DNA, 120 bp, Artificial Sequence
  ENSG00000121350_35 (sequence is synthesized)
gtctcactctgtcgcccagactggagggcagtggtgcgatcttggcttaatgcaagctttgcctcccgggttcaagcgattcttctgttgcgtcagcctgtagctgggattacaggcgcc

SEQ ID NO: 241571 - DNA, 120 bp, Artificial Sequence
  ENSG00000121350_36 (sequence is synthesized)
taccgaagtgctggcattacaggcctgagccacagcacccggccctcagccccctttgttaattatcgtaggtgattgagtttagtttccagatagttgccaagtctttagtgcatctta

SEQ ID NO: 241572 - DNA, 120 bp, Artificial Sequence
  ENSG00000121350_37 (sequence is synthesized)
accagaagtaaactccatctcagataactacgttctttgctcatccatgagaaacaacaactcatcttttcaaattttatcatgagattgcagcaatgtagtctcatcttcaggattcat

SEQ ID NO: 241573 - DNA, 120 bp, Artificial Sequence
  ENSG00000121350_38 (sequence is synthesized)
ttctaattacagttcttttgttatttccaccatatctgcctttctccattgaaatcttgaatccctcaaagtcatccatgaagttttctcataagattcaccttgaaactatgtgtgaag

SEQ ID NO: 241574 - DNA, 120 bp, Artificial Sequence
  ENSG00000121350_39 (sequence is synthesized)
cagtaatttagatagaattaacaaataccaaaaatcagtctgattagttatccattggtgactgcttctgtggcaaagatgacagaaagactgtcaaacattgaactcctttaagtgaat

SEQ ID NO: 241575 - DNA, 120 bp, Artificial Sequence
  ENSG00000121350_40 (sequence is synthesized)
tttttaaaaagcactgcttacccctgggggccattcatataataagtgtattgtagaaattgaacattttctaatgatgtacactgtaatgaaattttacttgatattcagtacatgtat

SEQ ID NO: 241576 - DNA, 120 bp, Artificial Sequence
  ENSG00000121350_41 (sequence is synthesized)
ttgtcacttaaaggttctttctgtaaactgcttcagattcttttactattcaatttttaattcttaacatctgtaaagaacgttaatattcctctttataatcaatctttcccagttagc

SEQ ID NO: 241577 - DNA, 120 bp, Artificial Sequence
  ENSG00000121350_42 (sequence is synthesized)
tttatattataagaattatgttttctatacatttctacaagtatacgttttttcttcatcattagtaacccgggttattctttctgtaagtattatgctaaccagtattttcttaatttt

SEQ ID NO: 241578 - DNA, 120 bp, Artificial Sequence
  ENSG00000121351_0 (sequence is synthesized)
gagggggtaaatattccagtggatacaagcttggactcttttcttgaagctttctttctatcagaagcatttgctgatattgctgacattgaaacattaaaagaaaatttgagaagcaat

SEQ ID NO: 241579 - DNA, 120 bp, Artificial Sequence
  ENSG00000121351_1 (sequence is synthesized)
gggcatcctgaagctgcaagtatttctcattgtgctctctgttgcattgaaccatctgaaagctacacccattgaaagtcatcaggtggaaaagcggaaatgcaacactgccacatgtgc

SEQ ID NO: 241580 - DNA, 120 bp, Artificial Sequence
  ENSG00000121351_2 (sequence is synthesized)
aacgcagcgcctggcaaattttttagttcattccagcaacaactttggtgccattctctcatctaccaacgtgggatccaatacatatggcaagaggaatgcagtagaggttttaaagag

SEQ ID NO: 241581 - DNA, 120 bp, Artificial Sequence
  ENSG00000121351_3 (sequence is synthesized)
agagccactgaattacttgcccctttagaggacaatgtaactctatagttattgttttatgttctagtgatttcctgtataatttaacagtgcccttttcatctccagtgtgaatatatg

SEQ ID NO: 241582 - DNA, 120 bp, Artificial Sequence
  ENSG00000121351_4 (sequence is synthesized)
gtctgtgtgtctgatgtttgttgctaggacatataccttctcaaaagattgttttatatgtagtactaactaaggtcccataataaaaagatagtatcttttaaaatgaaatgtttttgc

SEQ ID NO: 241583 - DNA, 120 bp, Artificial Sequence
  ENSG00000121351_5 (sequence is synthesized)
tatagatttgtattttaaaacataagaacgtcattttgggacctatatctcagtggcacaggtttaagaacgaaggagaaaaaggtagtttgaaccttggtaaattgtaaacagctaata

SEQ ID NO: 241584 - DNA, 78 bp, Artificial Sequence
  ENSG00000121351_6 (sequence is synthesized)
aaaggtagtttgaaccttggtaaattgtaaacagctaataatgaagttattcttgacatgagaaaatcagtaattgga

SEQ ID NO: 241585 - DNA, 120 bp, Artificial Sequence
  ENSG00000121351_7 (sequence is synthesized)
ctccagcctgggtggcagagtgagactcgtctcaaaaaaaagaaagaaaattagtaattgtaagtacccctgataagcaaattagtaattgtcaatacccctgttaagcaattccttttt

SEQ ID NO: 241586 - DNA, 120 bp, Artificial Sequence
  ENSG00000121351_8 (sequence is synthesized)
ctgttaagcaattcctttttgcagtatatttctgaaatgacagaatgctgttttaaaaacaaagaaataaaatcctgctcctgactcggtcaaaatattttttaaagtctattgtttgtt

SEQ ID NO: 241587 - DNA, 120 bp, Artificial Sequence
  ENSG00000121351_9 (sequence is synthesized)
gtgcttgctggtactaagaggctatttaaaagtataaaactgctttgtatccatgagggtttcattgtgtgttagcagcagtgagcttctattaaatgtatatgtcatttattttgttta

SEQ ID NO: 241588 - DNA, 120 bp, Artificial Sequence
  ENSG00000121351_10 (sequence is synthesized)
agtggctttcagcaaacctcagtcatattcttatgcagggtattgcgaaacaacttgtgttctattaatcgtgtcttcaattaaaagaccacagacttctggaaactctttgctgtataa

SEQ ID NO: 241589 - DNA, 120 bp, Artificial Sequence
  ENSG00000121351_11 (sequence is synthesized)
gaattatttcttttgtttaacaaattagacatttctggcagaggttatgtatatgatacactttttttgatagcagctgcaatgttggacagaagatgaaatgctttgctttgagtcaga

SEQ ID NO: 241590 - DNA, 120 bp, Artificial Sequence
  ENSG00000121351_12 (sequence is synthesized)
ttcttatgaatatctgcttttccctgactttgagttaggtagctttggaagtagcattaattcagataaactgccatcatgctgcgttatgccatttctaaagacactcaacttgtactt

SEQ ID NO: 241591 - DNA, 120 bp, Artificial Sequence
  ENSG00000121351_13 (sequence is synthesized)
ttaaaaaaatagaaaaaataagcatttcaatctaagtggaaatttgactcattgacttacatttctaagttaaaatttccctttatgaagtgtgccttaggttaccaaattgtagaggct

SEQ ID NO: 241592 - DNA, 120 bp, Artificial Sequence
  ENSG00000121351_14 (sequence is synthesized)
ttcgttggtggtggtaagtggtagcggtagtgagtgtatagaggcagggaaatatatttataataaattctatgtcatgaattacatattgaaataaataggtgaatatacaaatttata

SEQ ID NO: 241593 - DNA, 120 bp, Artificial Sequence
  ENSG00000121361_0 (sequence is synthesized)
attattttaactcttctccttaggacacgcagcccccaatttgtccctccggcctgggcggcccctggtcccgcgcgccagcatgggagagcgagggacctgcccgcggcccgccggcgt

SEQ ID NO: 241594 - DNA, 120 bp, Artificial Sequence
  ENSG00000121361_1 (sequence is synthesized)
gtgcaaggaggtccagccgccgcgcccgctacccggagtctgaggacgggtgtccagggacggagaggcaggtgagagggaggtggctaagctggctatggtgacaggacgatgttggcc

SEQ ID NO: 241595 - DNA, 120 bp, Artificial Sequence
  ENSG00000121361_2 (sequence is synthesized)
agaaagagtatcatcccggaggagtatgtgctggcgcgcatcgccgcagagaacctgcgcaagccgcgcatccgagaccgcctccccaaagcccgcttcatcgccaagagcggggcctgc

SEQ ID NO: 241596 - DNA, 120 bp, Artificial Sequence
  ENSG00000121361_3 (sequence is synthesized)
aacctggcgcataagaacatccgtgagcaaggacgctttctacaggacatcttcaccaccttggtggacctgaaatggcgccacacgctggtcatctttaccatgtccttcctctgcagc

SEQ ID NO: 241597 - DNA, 120 bp, Artificial Sequence
  ENSG00000121361_4 (sequence is synthesized)
tggctgctcttcgctatcatgtggtggctggtggcctttgcccatggggacatctatgcttacatggagaaaagtggaatggagaaaagtggtttggagtccactgtgtgtgtgactaat

SEQ ID NO: 241598 - DNA, 120 bp, Artificial Sequence
  ENSG00000121361_5 (sequence is synthesized)
gtcaggtctttcacttctgcttttctcttctccattgaagttcaagttaccattgggtttggagggaggatgatgacagaggaatgccctttggccatcacggttttgattctccagaat

SEQ ID NO: 241599 - DNA, 120 bp, Artificial Sequence
  ENSG00000121361_6 (sequence is synthesized)
attgtgggtttgatcatcaatgcagtcatgttaggctgcattttcatgaaaacagctcaggctcacagaagggcagaaactttgattttcagccgccatgctgtgattgccgtccgaaat

SEQ ID NO: 241600 - DNA, 120 bp, Artificial Sequence
  ENSG00000121361_7 (sequence is synthesized)
ggcaagctgtgcttcatgttccgagtgggtgacctgaggaaaagcatgatcattagtgcctctgtgcgcatccaggtggtcaagaaaacaactacacctgaaggggaggtggttcctatt

SEQ ID NO: 241601 - DNA, 120 bp, Artificial Sequence
  ENSG00000121361_8 (sequence is synthesized)
caccaactggacattcctgttgataacccaatcgagagcaataacatttttctggtggcccctttgatcatctgccacgtgattgacaagcgcagtcccctgtatgacatctcagcaact

SEQ ID NO: 241602 - DNA, 120 bp, Artificial Sequence
  ENSG00000121361_9 (sequence is synthesized)
caccgctttgtgtccattgtgactgaggaagaaggagtgtattctgtggattactccaaatttggcaacactgttaaagtagctgctccacggtgcagtgcccgagagctggatgagaaa

SEQ ID NO: 241603 - DNA, 120 bp, Artificial Sequence
  ENSG00000121361_10 (sequence is synthesized)
ccttccatccttattcagaccctccaaaagagtgaactgtctcatcaaaattctctgaggaagcgcaactccatgagaagaaacaattccatgaggaggaacaattctatccgaaggaac

SEQ ID NO: 241604 - DNA, 120 bp, Artificial Sequence
  ENSG00000121361_11 (sequence is synthesized)
aattcttccctcatggtaccaaaggtgcaatttatgactccagaaggaaatcaaaacacatcggaatcatgacagcaagataaccccaagacagtcttttatcaagttttgacggtttat

SEQ ID NO: 241605 - DNA, 120 bp, Artificial Sequence
  ENSG00000121361_12 (sequence is synthesized)
gctgggcactgccagactgaaccagagctggaacacaataatgtgtccttctacattttattacactaaatgatattcatattcaagcaacagcactttctgtagtaataaaaagtaaca

SEQ ID NO: 241606 - DNA, 120 bp, Artificial Sequence
  ENSG00000121361_13 (sequence is synthesized)
caccaagtggaggattcatggcttatgcttgtttcatacatgtagaattcgcagtgatatacttaagttatgtgcaggggtgggtatgctcgtttctctcaatttgaaacacaagaatta

SEQ ID NO: 241607 - DNA, 120 bp, Artificial Sequence
  ENSG00000121361_14 (sequence is synthesized)
cactaatagtaacaggccttgagcacaaaatttggtcaagaaatgagtctgtttgaaatgcttagttggtgaaacccagatcgctgtgttactaatgatcactctggaaatgcaaataga

SEQ ID NO: 241608 - DNA, 120 bp, Artificial Sequence
  ENSG00000121361_15 (sequence is synthesized)
ataggaggggaaaaaacaaaatcatgttaatgcgttttgtacatcagccttctcctgtctccatgataactgcatttggtaggaagcctgaggcaaaaactgcttaagtggatctgtttg

SEQ ID NO: 241609 - DNA, 120 bp, Artificial Sequence
  ENSG00000121361_16 (sequence is synthesized)
taagtggattcagttcattcgctttgtctgtcggtgactcctgaaggtttcctggtccatctcattgcggcctgttgggcagagctggacaaggtgtctttgaaggaaagctaagtcttg

SEQ ID NO: 241610 - DNA, 120 bp, Artificial Sequence
  ENSG00000121361_17 (sequence is synthesized)
tctcatttaggactgggttccccacagtgacagtcacttccttcagcatctcacttcttcttctagaatccccacagggaaatactgtattgaatattttattaaaacattttctttgta

SEQ ID NO: 241611 - DNA, 120 bp, Artificial Sequence
  ENSG00000121361_18 (sequence is synthesized)
agacccatctagacagaggaagaagctgcaacatttcagaaagcaaccaattactgaggaccgaatgacctggccttatcagcgctgaagtgttaacggccgtccctgtttggggacacg

SEQ ID NO: 241612 - DNA, 120 bp, Artificial Sequence
  ENSG00000121361_19 (sequence is synthesized)
aagaagctgcaacatttcagaaagcaaccaattactgaggaccgaatgacctggccttatcagcgctgaagtgttaacggccgtccctgtttggggaggacgggtgtccagggacggaga

SEQ ID NO: 241613 - DNA, 120 bp, Artificial Sequence
  ENSG00000121377_0 (sequence is synthesized)
gcaggtgtggatgtcaaactccatcaggtcaactagaaactaattgcatatttaaacatggcagataaagtgcagactactttattgttcttagcagttggagagttttcagtggggatc

SEQ ID NO: 241614 - DNA, 120 bp, Artificial Sequence
  ENSG00000121377_1 (sequence is synthesized)
ttagggaatgcattcattggattggtaaactgcatggactgggtcaagaagaggaaaattgcctccattgatttaatcctcacaagtctggccatatccagaatttgtctattgtgcgta

SEQ ID NO: 241615 - DNA, 120 bp, Artificial Sequence
  ENSG00000121377_2 (sequence is synthesized)
atactattagattgttttatattggtgctatatccagatgtctatgccactggtaaagaaatgagaatcattgacttcttctggacactaaccaatcatttaagtatctggtttgcaacc

SEQ ID NO: 241616 - DNA, 120 bp, Artificial Sequence
  ENSG00000121377_3 (sequence is synthesized)
tgcctcagcatttactatttcttcaagataggtaatttctttcacccacttttcctctggatgaagtggagaattgacagggtgatttcctggattctactggggtgcgtggttctctct

SEQ ID NO: 241617 - DNA, 120 bp, Artificial Sequence
  ENSG00000121377_4 (sequence is synthesized)
cagccactgagaatttgaacgctgatttcaggttttgtgtgaaggcaaagaggaaaacaaacttaacttggagttgcagagtaaataaaactcaacatgcttctaccaagttatttctca

SEQ ID NO: 241618 - DNA, 120 bp, Artificial Sequence
  ENSG00000121377_5 (sequence is synthesized)
acctggcaacgctgctccccttttgtgtgtgcctaatgtcctttttcctcttgatcctctccctgcggagacatatcaggcgaatgcagctcagtgccacagggtgcagagaccccagca

SEQ ID NO: 241619 - DNA, 120 bp, Artificial Sequence
  ENSG00000121377_6 (sequence is synthesized)
cagaagcccatgtgagagccctgaaagctgtcatttccttccttctcctctttattgcctactatttgtcctttctcattgccacctccagctactttatgccagagacggaattagctg

SEQ ID NO: 241620 - DNA, 120 bp, Artificial Sequence
  ENSG00000121377_7 (sequence is synthesized)
tgatttttggtgagtccatagctctaatctacccctcaagtcattcatttatcctaatactggggaacaataaattaagacatgcatctctaaaggtgatttggaaagtaatgtctattc

SEQ ID NO: 241621 - DNA, 120 bp, Artificial Sequence
  ENSG00000121377_8 (sequence is synthesized)
taaaaggaagaaaattccaacaacataaacaaatctgaagagaaactatgcttttctaggacaaacaaagataagatgtttctaaattaacttcagttcttgcattaatgttttatgtga

SEQ ID NO: 241622 - DNA, 120 bp, Artificial Sequence
  ENSG00000121380_0 (sequence is synthesized)
ctcttttcaggctgagtcctaaacctgaagaaagtttagagcctggggctctaaactacctgagtctttccaaacgacaagccaagaagacctgttgaaagtttcctcttaagtttcgtg

SEQ ID NO: 241623 - DNA, 120 bp, Artificial Sequence
  ENSG00000121380_1 (sequence is synthesized)
gagagagactcaggtatagaaatatccttactgccacctgacctgaagcagaagaaatcacagacagcttccagaccaggcccaacatgtgtagcaccagtgggtgtgacctggaagaaa

SEQ ID NO: 241624 - DNA, 120 bp, Artificial Sequence
  ENSG00000121380_2 (sequence is synthesized)
tccccctagatgatgatgacctaaacaccatagaattcaaaatcctcgcctactacaccagacatcatgtcttcaagagcacccctgctctcttctcaccaaagctgctgagaacaagaa

SEQ ID NO: 241625 - DNA, 120 bp, Artificial Sequence
  ENSG00000121380_3 (sequence is synthesized)
gtttgtcccagaggggcctggggaattgttcagcaaatgagtcatggacagaggtgtcatggccttgcagaaattcccaatccagtgagaaggccataaaccttggcaagaaaaagtctt

SEQ ID NO: 241626 - DNA, 120 bp, Artificial Sequence
  ENSG00000121380_4 (sequence is synthesized)
cttggaaagcattctttggagtagtggagaaggaagattcgcagagcacgcctgccaaggtctctgctcagggtcaaaggacgttggaataccaagattcgcacagccagcagtggtcca

SEQ ID NO: 241627 - DNA, 120 bp, Artificial Sequence
  ENSG00000121380_5 (sequence is synthesized)
ggtgtctttctaacgtggagcagtgcttggagcatgaagctgtggaccccaaagtcatttccattgccaaccgagtagctgaaattgtttactcctggccaccaccacaagcgacccagg

SEQ ID NO: 241628 - DNA, 120 bp, Artificial Sequence
  ENSG00000121380_6 (sequence is synthesized)
caggaggcttcaagtccaaagagatttttgtaactgagggtctctccttccagctccaaggccacgtgcctgtagcttcaagttctaagaaagatgaagaagaacaaatactagccaaaa

SEQ ID NO: 241629 - DNA, 120 bp, Artificial Sequence
  ENSG00000121380_7 (sequence is synthesized)
tgttttcaagaccatcacagaccaggtcctaatgggtgtggaccccaggggagaatcagaggtcaaagctcagggctttaaggctgcccttgtaatagacgtcacggccaagctcacagc

SEQ ID NO: 241630 - DNA, 120 bp, Artificial Sequence
  ENSG00000121380_8 (sequence is synthesized)
tattgacaaccacccgatgaacagggtcctgggctttggcaccaagtacctgaaagagaacttctcgccatggatccagcagcacggtggatgggaaaaaatacttgggatatcacatga

SEQ ID NO: 241631 - DNA, 120 bp, Artificial Sequence
  ENSG00000121380_9 (sequence is synthesized)
agaagtagactgaaatatcagatttgtcatcaggaatactctttgtctactgtggtcctgtgcacgttggcctcagatggactacaggagattacaacgtacaaggcagatggagcattg

SEQ ID NO: 241632 - DNA, 120 bp, Artificial Sequence
  ENSG00000121380_10 (sequence is synthesized)
acgttttcaaaaccattattcctgtgactggagaggcatcaggagaggtctcgttcgtctccagctcataaaatgtagcagcatcatccttgacagtgatgtttttcaggccctccattg

SEQ ID NO: 241633 - DNA, 120 bp, Artificial Sequence
  ENSG00000121380_11 (sequence is synthesized)
agaacctgaggaaatctgtaaagataagtggtgatgttgtttcaaacgttcagaacagataccatcatcctgcctttgttagctgctgtagggaaagtgcgttacagatgtctgctgacc

SEQ ID NO: 241634 - DNA, 120 bp, Artificial Sequence
  ENSG00000121380_12 (sequence is synthesized)
tcacaagagtgaaaagataaactgtgcatgtgtttccacttccgtttctagtactatttatttttaaactacacttggggtggcctaatacctaggaagatgttgctattcacgttagta

SEQ ID NO: 241635 - DNA, 120 bp, Artificial Sequence
  ENSG00000121380_13 (sequence is synthesized)
aacagcctaaagaaactcttaggtttactgctacatccatttgtttggagaggtaactgttgtctgtgcctttttgaaaaacttccatttggtacaaaatttttactccaacaccccctc

SEQ ID NO: 241636 - DNA, 120 bp, Artificial Sequence
  ENSG00000121380_14 (sequence is synthesized)
aacccttttctcagggaccacacctcttcttcccaaggtccctgggacttcctcattctttgtggtagtacaatgattggtagcaggtaaaataaatacatagaaagactactgtcaaaa

SEQ ID NO: 241637 - DNA, 120 bp, Artificial Sequence
  ENSG00000121380_15 (sequence is synthesized)
aatgacatgacagccattccgtggccagggacaccactgcccaagctggagaccacgaggattcagggactgaagccagcatgggaattcctggtttgagatcagagtcctgagtacctc

SEQ ID NO: 241638 - DNA, 120 bp, Artificial Sequence
  ENSG00000121380_16 (sequence is synthesized)
aaagattctaaggtcccagtgctttcgcttcatcctagaggctaaatgggctcccctggactcgcctggcagaactaaccacctagaagaacgttattgtaagggggaaatgcaaacagg

SEQ ID NO: 241639 - DNA, 88 bp, Artificial Sequence
  ENSG00000121380_17 (sequence is synthesized)
tgtaagggggaaatgcaaacagggtgaagacaagaggcataggtgatggacactaaaacaaagacctgatggggttaaggacacagtc

SEQ ID NO: 241640 - DNA, 120 bp, Artificial Sequence
  ENSG00000121380_18 (sequence is synthesized)
aggcacagctgccacccaccgggagggaagtgaaatctcacctcaacaagtgagtccgcagagcgagaaccgtgcgacagtgcgtctgccaatacctggaatgtaggtgttcgttgcagt

SEQ ID NO: 241641 - DNA, 120 bp, Artificial Sequence
  ENSG00000121380_19 (sequence is synthesized)
actgcctgggacatttcacacggtagatctgagctttctcgcatctgagactaaaaggaaaatgtagtccttaacagacagcagaaggaaacagattattagcaaaaagaactgctttcc

SEQ ID NO: 241642 - DNA, 120 bp, Artificial Sequence
  ENSG00000121380_20 (sequence is synthesized)
tagcaggaaaccagagaaggagttatttcatgtaagctcaagcaaaggaaattgaacaaaatcagttctttatctatcctgttattcgtatggaaataaagaagaaatgcttgcatcctg

SEQ ID NO: 241643 - DNA, 120 bp, Artificial Sequence
  ENSG00000121380_21 (sequence is synthesized)
ctgaaatattcaggagatcagttggaaagaaaggacactgccttcatccccattcccttggttgacaccagcatccagggttttccacaggatggtttgatggcctgcatttgagctaaa

SEQ ID NO: 241644 - DNA, 120 bp, Artificial Sequence
  ENSG00000121380_22 (sequence is synthesized)
gggaagtgaaatctcacctcaacaagtgagtccgcagagcgagaaccgtgcgacagtgcgtctgccaatacctggaatgtaggtgttcgttgcagtgtggccttcccagccggcctctca

SEQ ID NO: 241645 - DNA, 120 bp, Artificial Sequence
  ENSG00000121380_23 (sequence is synthesized)
ggcataggtgatggacactaaaacaaagacccgtcctcacatcttctacacacttgttattatctaagtcaatcatgaaaaatgatgaaacaggccaggcgtgttggctcacacctgtaa

SEQ ID NO: 241646 - DNA, 120 bp, Artificial Sequence
  ENSG00000121380_24 (sequence is synthesized)
aaaaaaaaaaaaagaataaagaaaaatgatgaaacagaatcagggagagaattcagaggaaaatgacatccctccaggtgtgtatgaaccaattactcatagagtcataaacagttagag

SEQ ID NO: 241647 - DNA, 120 bp, Artificial Sequence
  ENSG00000121380_25 (sequence is synthesized)
agagaatgaggcatttttcacaaaatattgagggctggagaggttgaacaatttgctcccactcacacatctaggaaagagaggagatggaaaagtaaacaatccagaaaggtcaaggcc

SEQ ID NO: 241648 - DNA, 120 bp, Artificial Sequence
  ENSG00000121380_26 (sequence is synthesized)
ctcattccatcaatgcacaattcaagtacacatacgtgggaaaccatctgaaaagttttgtaattacaatttcatctagccagcaattctccaactcattcacatgcatctcatgacatc

SEQ ID NO: 241649 - DNA, 120 bp, Artificial Sequence
  ENSG00000121380_27 (sequence is synthesized)
gttgtcagaagccttgctagagtgaacgtgcacttcatcaaacacacccctgatccgtgggagatgggattcgtttgtgctgatctactctccaggaacacaagaaactcaccattctaa

SEQ ID NO: 241650 - DNA, 120 bp, Artificial Sequence
  ENSG00000121380_28 (sequence is synthesized)
cggttcataaatcatccatttaataccccagtttcagattttgcaggaattaacatcaatgcacggtttttgagacccgccaacttgctgaaacagtgcaagccacctgcagtcctcgga

SEQ ID NO: 241651 - DNA, 120 bp, Artificial Sequence
  ENSG00000121380_29 (sequence is synthesized)
taccactcagtgatggccctaggtctccctactctgggcctgagattcacttacagctgcaaaacacacctgtgcactctcctcataggcagaacgctttcacttctcagtcatttccaa

SEQ ID NO: 241652 - DNA, 120 bp, Artificial Sequence
  ENSG00000121380_30 (sequence is synthesized)
ctgagactgttttctctggtagagaatacagaagtcaaatggactcagagtggttctgccttgtctctgccttctgttgttgagaataaaccagaaaaatcccttcttctgtcattaaca

SEQ ID NO: 241653 - DNA, 120 bp, Artificial Sequence
  ENSG00000121380_31 (sequence is synthesized)
cactcatccgcaggaggtctagacccccagagaattccttgagtctaaggcacaggtaaatggaagacccttctctctcctctctcccctctagaaagctccctcctccctgagctccct

SEQ ID NO: 241654 - DNA, 120 bp, Artificial Sequence
  ENSG00000121380_32 (sequence is synthesized)
gtccccttctttccacaatcagagcctcggaccttctgtttggtgaatatgacctgaggctctgtctagcattcagcttctattgtgggaagttaaggcactttctctcattcctcattt

SEQ ID NO: 241655 - DNA, 120 bp, Artificial Sequence
  ENSG00000121380_33 (sequence is synthesized)
agctgctgaaatattcaggagatcagttggaaagaaaggaaaaagaatgggaggagtcagcaaagaccaagataaaaatggcacttctctggaggagcagtggtggtggacccagagttc

SEQ ID NO: 241656 - DNA, 120 bp, Artificial Sequence
  ENSG00000121380_34 (sequence is synthesized)
tgagtatacctgaggcatttatgaagaacagcttcactctcaccccacctggcttctcagaacacaattagaaaaaatgactgactcaccccaaggtgtccaaaagccccaaacaagcat

SEQ ID NO: 241657 - DNA, 120 bp, Artificial Sequence
  ENSG00000121380_35 (sequence is synthesized)
ttgggaatagtccctaacttggcagcagcctcaagttcagtacaagatacccggcagagagagagcactgctttttcattgtttgcactgctgtcaaatcctactcttcaactaccatct

SEQ ID NO: 241658 - DNA, 120 bp, Artificial Sequence
  ENSG00000121380_36 (sequence is synthesized)
ctggactcacagcttccaccctttcacacaattcatgtcatcagacagagaaagtagattaggctttaagtgaagaggagtttgaagaatttacggatttctgcttcctaatagaagtga

SEQ ID NO: 241659 - DNA, 120 bp, Artificial Sequence
  ENSG00000121380_37 (sequence is synthesized)
aaagaaaaaaagaattgtgaagaaatcggacctacttctgcacttcccctctacttgatcatgtgttggtatcatattttaaaaacaagtagaaattaataaaagaggatagtgaaagca

SEQ ID NO: 241660 - DNA, 120 bp, Artificial Sequence
  ENSG00000121380_38 (sequence is synthesized)
gggctcccctggactcgcctggcagaactaaccacctagaagaacgttattgtaagggggaaatgcaaacagggtgaagacaagaggcataggtgatggacactaaaacaaagaccgaag

SEQ ID NO: 241661 - DNA, 120 bp, Artificial Sequence
  ENSG00000121381_0 (sequence is synthesized)
gtctaagaggcagacagatacattgttcttcactggtcagctgaaagtcaattcatcatcagtgatattcaaaaatcacaagtctttgctggcatgccaagtgcaatagaggcaatatat

SEQ ID NO: 241662 - DNA, 120 bp, Artificial Sequence
  ENSG00000121381_1 (sequence is synthesized)
attattttaattgctggtgaattgaccatagggatttggggaaatggattcattgtactagttaactgcattgactggctcaaaagaagagatatttccttgattgacatcatcctgatc

SEQ ID NO: 241663 - DNA, 120 bp, Artificial Sequence
  ENSG00000121381_2 (sequence is synthesized)
agcttggccatctccagaatctgtctgctgtgtgtaatatcattagatggcttctttatgctgctctttccaggtacatatggcaatagcgtgctagtaagcattgtgaatgttgtctgg

SEQ ID NO: 241664 - DNA, 120 bp, Artificial Sequence
  ENSG00000121381_3 (sequence is synthesized)
acatttgccaataattcaagtctctggtttacttcttgcctcagtatcttctatttactcaagatagccaatatatcgcacccatttttcttctggctgaagctaaagatcaacaaggtc

SEQ ID NO: 241665 - DNA, 120 bp, Artificial Sequence
  ENSG00000121381_4 (sequence is synthesized)
aattcaaagtgagtaaaattccaggtactttcaaacagttaaccctgaacctgggggtgatggttccctttatcctttgcctgatctcatttttcttgttacttttctccctagttagac

SEQ ID NO: 241666 - DNA, 120 bp, Artificial Sequence
  ENSG00000121381_5 (sequence is synthesized)
acaccaagcagattcgactgcatgctacagggttcagagaccccagtacagaggcccacatgagggccataaaggcagtgatcatctttctgctcctcctcatcgtgtactacccagtct

SEQ ID NO: 241667 - DNA, 120 bp, Artificial Sequence
  ENSG00000121381_6 (sequence is synthesized)
ttcttgttatgacctctagcgctctgattcctcagggaaaattagtgttgatgattggtgacatagtaactgtcattttcccatcaagccattcattcattctaattatgggaaatagca

SEQ ID NO: 241668 - DNA, 120 bp, Artificial Sequence
  ENSG00000121381_7 (sequence is synthesized)
agttgagggaagcttttctgaagatgttaagatttgtgaagtgtttccttagaagaagaaagccttttgttccatagagacccctaaagagtatcctgactacaaggatgaaagaaatca

SEQ ID NO: 241669 - DNA, 120 bp, Artificial Sequence
  ENSG00000121390_0 (sequence is synthesized)
gccattttgaatgtgcagctgcagcgggcgtgagttgggggaggacgggttgccgactcgcctacctagcggtctcttgattgtcgatattttgttggcataggtttatgtagagacgta

SEQ ID NO: 241670 - DNA, 120 bp, Artificial Sequence
  ENSG00000121390_1 (sequence is synthesized)
tacatatatatagacacactgtctataaatctaggcctgtatccggtgtccgaggcgaactcagtaagatgatgttaagaggaaacctgaagcaagtgcgcattgagaaaaacccggccc

SEQ ID NO: 241671 - DNA, 120 bp, Artificial Sequence
  ENSG00000121390_2 (sequence is synthesized)
cattgagaaaaacccggcccgccttcgcgccctggagtccgcggtgggcgagagcgagccggcggccgcggcagccatggcgctcgctcttgccggggagccggcaccgcccgcgcccgc

SEQ ID NO: 241672 - DNA, 120 bp, Artificial Sequence
  ENSG00000121390_3 (sequence is synthesized)
acgaggagatggggttcactatcgacatcaagagtttcctcaagccgggcgagaagacgtacacgcagcgctgccgcctcttcgtgggaaatctgcccaccgacatcacggaggaggact

SEQ ID NO: 241673 - DNA, 120 bp, Artificial Sequence
  ENSG00000121390_4 (sequence is synthesized)
tcaagaggctcttcgaacgctatggcgagcccagcgaagtcttcatcaaccgggaccgtggcttcggcttcatccgcttggaatccagaaccctggctgaaattgcaaaagcagagctgg

SEQ ID NO: 241674 - DNA, 120 bp, Artificial Sequence
  ENSG00000121390_5 (sequence is synthesized)
acggcaccattctcaagagcagacctctacggattcgcttcgctacacatggagcagccttgactgtcaagaacctttctccagttgtttccaatgagctgctagagcaagcattttctc

SEQ ID NO: 241675 - DNA, 120 bp, Artificial Sequence
  ENSG00000121390_6 (sequence is synthesized)
agtttggtccagtagagaaagctgttgtggttgtggatgatcgcggtagagctacaggaaaaggttttgtagagtttgcagcaaaacctcctgcacgaaaggctctggaaagatgtggtg

SEQ ID NO: 241676 - DNA, 120 bp, Artificial Sequence
  ENSG00000121390_7 (sequence is synthesized)
atggggcattcttgctaacaacgacccctcgtccagtcattgtggaacccatggagcagtttgatgatgaagatggcttgccagagaagctgatgcagaaaactcaacaatatcataagg

SEQ ID NO: 241677 - DNA, 120 bp, Artificial Sequence
  ENSG00000121390_8 (sequence is synthesized)
aaagagaacaaccaccacgttttgctcaacctgggacatttgaatttgagtatgcatctcgatggaaggctcttgatgaaatggaaaagcagcagcgtgagcaggttgatagaaacatca

SEQ ID NO: 241678 - DNA, 120 bp, Artificial Sequence
  ENSG00000121390_9 (sequence is synthesized)
gagaagccaaagagaaactggaggcagaaatggaagcagctaggcatgaacaccaattaatgctaatgaggcaagatctaatgaggcgtcaagaagaactcagacgcttggaagaactca

SEQ ID NO: 241679 - DNA, 120 bp, Artificial Sequence
  ENSG00000121390_10 (sequence is synthesized)
ctaagacatgaagaggagcatcggcggcgtgaggaagaaatgatccgacacagagaacaggaggaactgaggcgacagcaagagggctttaagccaaactacatggaaaatagagaacag

SEQ ID NO: 241680 - DNA, 120 bp, Artificial Sequence
  ENSG00000121390_11 (sequence is synthesized)
gaaatgagaatgggtgatatgggtccccgtggagcaataaacatgggagatgcgtttagcccagcccctgctggtaaccaaggtcctcctccaatgatgggtatgaatatgaacaacaga

SEQ ID NO: 241681 - DNA, 120 bp, Artificial Sequence
  ENSG00000121390_12 (sequence is synthesized)
gcaactatacctggcccaccaatgggtcctggtcctgccatgggaccagaaggagccgcaaatatgggaactccaatgatgccagataatggagcagtgcacaatgacagatttcctcaa

SEQ ID NO: 241682 - DNA, 120 bp, Artificial Sequence
  ENSG00000121390_13 (sequence is synthesized)
ggaccaccatctcagatgggttcacctatggggagtagaacaggttctgaaacccctcaagcaccaatgagtggtgtaggtcctgtgagtggtggtcctggtggctttggtagaggaagt

SEQ ID NO: 241683 - DNA, 120 bp, Artificial Sequence
  ENSG00000121390_14 (sequence is synthesized)
caagggggcaactttgaaggccctaataagcgtcgtagatattaaacattcgttcattcctggctatctagaaaaaaaaaagtcagtggtatgcctttatacttttacctgttatctgga

SEQ ID NO: 241684 - DNA, 120 bp, Artificial Sequence
  ENSG00000121390_15 (sequence is synthesized)
agaaatggttttattgttaatgtatgtagacttaaaagtttttttttttttgtaaaacttgaggtttttgtatttttctttattcatgagctttgtagattagaatggtaatgatgctca

SEQ ID NO: 241685 - DNA, 120 bp, Artificial Sequence
  ENSG00000121390_16 (sequence is synthesized)
tcattttgaatgttgaaatgtgtttgtgactttagctaaatataagtattccatagtactgtgaaatctatgtagttaatctcaataaagaaatcattttggataatttaaaactgttat

SEQ ID NO: 241686 - DNA, 120 bp, Artificial Sequence
  ENSG00000121390_17 (sequence is synthesized)
tagtggtattctcttacggtcttactaaactttgctgtaacagtaatgctttggttgctttaactaatcctatcattaaaaatgaaaatgattttgctttttaatttgcgcaagtagcac

SEQ ID NO: 241687 - DNA, 120 bp, Artificial Sequence
  ENSG00000121390_18 (sequence is synthesized)
taaagatagaagcttaattaatgaaagctaatgtcaataaggggtagatagagtagtatatgtgggggtgggagggtatgggagtttaatttgtataaaccactgatgttctgtgaaatc

SEQ ID NO: 241688 - DNA, 120 bp, Artificial Sequence
  ENSG00000121390_19 (sequence is synthesized)
ggaatttccagctacatttcatatagcttctgaatattcaggtattctgagacagattattaaggatatctttgtcctgtgctgatttttccaaataaatctttttcatcttgaaaaaaa

SEQ ID NO: 241689 - DNA, 120 bp, Artificial Sequence
  ENSG00000121390_20 (sequence is synthesized)
gttccggcgccggctttggcggaggggtgggacttgcaccggcgtctcttcttctaactgcagtttgtggcagcgccattttgaatgtgcagctgcagcgggcgcctgtatccggtgtcc

SEQ ID NO: 241690 - DNA, 120 bp, Artificial Sequence
  ENSG00000121390_21 (sequence is synthesized)
tatcgaaacctcaattactgttatgaatttactaaatgagttaactctgatttttctcattgtttattgaaatcagttcttaaaaaggctgaatctgatttcattgtatttctagggtga

SEQ ID NO: 241691 - DNA, 120 bp, Artificial Sequence
  ENSG00000121390_22 (sequence is synthesized)
ctttcagtcttgccacttgcctagtgaggcttttccgaacctggaaggagacgtctagaaatcccaactttgctgtgtaaggaccattagctgcaagtcagtggaagtctatagaaagca

SEQ ID NO: 241692 - DNA, 120 bp, Artificial Sequence
  ENSG00000121390_23 (sequence is synthesized)
gtgtgaattccatagtggtcttgacttcttagcaaggatttgggataagtctaaaacttcagacttaaagctttgaagcatgttaactgcatgaaatattaaacatttcgaacttcttta

SEQ ID NO: 241693 - DNA, 120 bp, Artificial Sequence
  ENSG00000121390_24 (sequence is synthesized)
tataaaaaataattttttgttcatttatgccatgccttgttttaaaaaatacttacaggacaggcatgttggctcacacctgtattcctagcactttgggaagccaaggctggaggattg

SEQ ID NO: 241694 - DNA, 120 bp, Artificial Sequence
  ENSG00000121390_25 (sequence is synthesized)
tgggaagccaaggctggaggattgcctgcgctcaggagttccatacgagcttggacaacatggcaaaatcacatctctacaaaaaatacaactagctgggtgtggtggtgcgcacctgta

SEQ ID NO: 241695 - DNA, 90 bp, Artificial Sequence
  ENSG00000121390_26 (sequence is synthesized)
gtggtgcgcacctgtagtctcagctacctgggagactgagacaggaggattgcttgagcctgggaagatgaggctgcagtgatctgtata

SEQ ID NO: 241696 - DNA, 120 bp, Artificial Sequence
  ENSG00000121390_27 (sequence is synthesized)
atttgattatagggaccccatgggtcctcttgggttactggggtgcattagggtatctgtggatcccctttacttgcaggcagtcttgtctacagtttctgcatacatatttcacatata

SEQ ID NO: 241697 - DNA, 120 bp, Artificial Sequence
  ENSG00000121390_28 (sequence is synthesized)
ctttctggggggacagttttgggcttcatccaattctcaggcaaattgagtcccaaatgggttttaacaacactgatctagggtaatgatttccaatatttttggatcatggacccccaa

SEQ ID NO: 241698 - DNA, 120 bp, Artificial Sequence
  ENSG00000121390_29 (sequence is synthesized)
cagttgaaaattgagcacacagctgtatgtttatgtgtcccaaaatgcaattgtgtatgactgtatgaatatttcaggcatattataaaacatatataaggataactgtacacataaacc

SEQ ID NO: 241699 - DNA, 120 bp, Artificial Sequence
  ENSG00000121390_30 (sequence is synthesized)
tgtcctctattgaaatgttttgggtatgtgctctttgaagaacattgatcaaggtcttactagggtaagagtctttttctgatggagcacgacacacacattggtattccctgccttggt

SEQ ID NO: 241700 - DNA, 120 bp, Artificial Sequence
  ENSG00000121390_31 (sequence is synthesized)
acaagtggaatacggttttgcagacacagtgggagtgaggatcctttgtgggattttgcaatacaaggtttcaagctgtgttgtgctgaggtatcaacaatctgtacaagagggcctgtg

SEQ ID NO: 241701 - DNA, 120 bp, Artificial Sequence
  ENSG00000121390_32 (sequence is synthesized)
gaaataaggagggacttagccaattaaattcttaataaattattagcagatctgaaaattatttggtatttaggacttaatactgtttactgtagaagataaaatgaagctgattttaat

SEQ ID NO: 241702 - DNA, 120 bp, Artificial Sequence
  ENSG00000121390_33 (sequence is synthesized)
cagcttgcagtgtaattcagaagagttaagaccagaagtactggaatcatacttcctttcaggtcaaaacattttgtgggaaatatcctgttcgtgacctaggagaaacaagacagaaaa

SEQ ID NO: 241703 - DNA, 120 bp, Artificial Sequence
  ENSG00000121390_34 (sequence is synthesized)
caaatctttcttcatttatgaatttcttactccatacaagcagtttatggatgtctgggcaatcatagcacttgccatttaaaaacatgctacaggggcacattttctgtggttaaaaat

SEQ ID NO: 241704 - DNA, 120 bp, Artificial Sequence
  ENSG00000121390_35 (sequence is synthesized)
gatctccagaataagtgtaaactgcagttttcctttgcattgagggttttggctttttatttgtaaattaaatcaagatgttacccactccttggtgtggtggtcttgctggttcgtgtt

SEQ ID NO: 241705 - DNA, 120 bp, Artificial Sequence
  ENSG00000121390_36 (sequence is synthesized)
gggaagtagtatggcagcaatgcacaaattcagaatagccaagaaatccctccttttcaacgctctgtgcctgggaaccattagaggagttttaaaaaccatccctcatagcccacaatt

SEQ ID NO: 241706 - DNA, 120 bp, Artificial Sequence
  ENSG00000121390_37 (sequence is synthesized)
ttgggtcaactctcaaaattgggaataagaaaactggcactgttgggagaaaaatcgttcttactgaaacatgaactggctcaggcaagcaaatagcgggagtcggcacaggaaggagtg

SEQ ID NO: 241707 - DNA, 120 bp, Artificial Sequence
  ENSG00000121390_38 (sequence is synthesized)
tgtgctgcggggatgcgtggtggcgtcaccttcaaaactaaagtggtgccaggcggacagatgagtccttgatcttgtttcctgatcttgtttccatttgactgaattctgaaccttcat

SEQ ID NO: 241708 - DNA, 120 bp, Artificial Sequence
  ENSG00000121390_39 (sequence is synthesized)
gaagaaatgatccgacacagagaacaggaggaactgaggcgacagcaagagggctttaagccaaactacatggaaaattatgtctgccatttcctaaggtgataaaagaaaatgtggctg

SEQ ID NO: 241709 - DNA, 120 bp, Artificial Sequence
  ENSG00000121406_0 (sequence is synthesized)
agaatcttccggcgtctttccggtggtggtcgtttttgctgcctgcgagcgcgtccgcgggctgggcgtttccggctcgctgggtccgggccaggtaactggagccggaaaccggtggag

SEQ ID NO: 241710 - DNA, 120 bp, Artificial Sequence
  ENSG00000121406_1 (sequence is synthesized)
gtggtgtccgcccgcagaggagcttgcctggtctcggtctgagcgtcgcccagcgatttgccaccgcacgcacgccggatcccgggctttaccgcccgcctttccaggccccgccccgcc

SEQ ID NO: 241711 - DNA, 120 bp, Artificial Sequence
  ENSG00000121406_2 (sequence is synthesized)
taaagtcccatggccgaggcagcgctagtgattacgccgcagggccatgtgacctttgaggatattgctgtgtacttctcccaggaggagtggggcctccttgatgaagctcaaaggtgc

SEQ ID NO: 241712 - DNA, 120 bp, Artificial Sequence
  ENSG00000121406_3 (sequence is synthesized)
ctgtatcatgatgtgatgctggagaacttttcgcttatggcctcagtaggttgtttgcatggaatagaggctgaggaggccccttctgagcagactctttctgcgcaaggagtgtcacag

SEQ ID NO: 241713 - DNA, 120 bp, Artificial Sequence
  ENSG00000121406_4 (sequence is synthesized)
gccaggactccaaagctaggtccttccatcccaaatgctcattcttgtgagatgtgtatcctggtcatgaaagacattttgtacctcagtgagcatcaggggacacttccctggcagaaa

SEQ ID NO: 241714 - DNA, 120 bp, Artificial Sequence
  ENSG00000121406_5 (sequence is synthesized)
ccttatacgtctgtggccagtgggaaatggttttcatttggttctaacctgcaacagcaccagaaccaggacagtggagagaaacacatcagaaaggaggagagcagtgccttgcttctg

SEQ ID NO: 241715 - DNA, 120 bp, Artificial Sequence
  ENSG00000121406_6 (sequence is synthesized)
aatagctgcaaaattcctctgtcagacaatcttttcccatgcaaagatgttgagaaggattttccaaccatcctgggccttctccaacaccagaccacccacagcagacaagagtatgca

SEQ ID NO: 241716 - DNA, 120 bp, Artificial Sequence
  ENSG00000121406_7 (sequence is synthesized)
catagaagcagggagacctttcaacaaagacgttacaaatgtgagcaagttttcaatgagaaagttcatgttactgagcatcagagagtccacactggagaaaaagcttataagcgtagg

SEQ ID NO: 241717 - DNA, 120 bp, Artificial Sequence
  ENSG00000121406_8 (sequence is synthesized)
gaatatgggaaatccttgaactctaaatacttatttgttgaacaccagagaacccataatgcagaaaagccttatgtgtgcaatatatgtgggaaatcattcctccataaacaaacactc

SEQ ID NO: 241718 - DNA, 120 bp, Artificial Sequence
  ENSG00000121406_9 (sequence is synthesized)
gttgggcaccagcagagaattcacactagagaaaggtcttatgtgtgcatcgaatgtgggaaatccttgagctccaaatactcacttgtggaacaccagagaacccataatggagaaaag

SEQ ID NO: 241719 - DNA, 120 bp, Artificial Sequence
  ENSG00000121406_10 (sequence is synthesized)
ccttatgtgtgcaatgtatgtgggaaatcattccgccacaaacaaacatttgttggccatcagcagagaatccacactggagagaggccttatgtgtgtatggaatgtgggaaatctttt

SEQ ID NO: 241720 - DNA, 120 bp, Artificial Sequence
  ENSG00000121406_11 (sequence is synthesized)
attcattcctatgaccgcattcgacaccagagagttcacactggagaaggggcttatcagtgcagtgaatgtgggaaatccttcatatacaaacagtcacttcttgatcaccatagaatc

SEQ ID NO: 241721 - DNA, 120 bp, Artificial Sequence
  ENSG00000121406_12 (sequence is synthesized)
cacacgggagaaaggccttatgagtgcaaagaatgtgggaaggccttcattcacaaaaaaagacttcttgagcaccagagaattcatactggagaaaagccttatgtgtgcatcatatgt

SEQ ID NO: 241722 - DNA, 120 bp, Artificial Sequence
  ENSG00000121406_13 (sequence is synthesized)
gggaaatcatttatccgctcgtctgactacatgcgacaccagagaattcacactggagaaagggcttatgaatgcagtgactgtgggaaagccttcatctccaaacaaacacttcttaag

SEQ ID NO: 241723 - DNA, 120 bp, Artificial Sequence
  ENSG00000121406_14 (sequence is synthesized)
catcacaaaatccacactagagaaaggccttatgaatgcagtgaatgtggaaaaggcttctaccttgaggttaaacttcttcagcaccaaagaatccatactagagaacaactttgtgag

SEQ ID NO: 241724 - DNA, 120 bp, Artificial Sequence
  ENSG00000121406_15 (sequence is synthesized)
tgcaatgaatgtggaaaagtcttcagccaccaaaaaagacttcttgagcaccagaaagttcacactggcgaaaagccctgtgagtgcagtgaatgtgggaaatgctttagacaccgcacc

SEQ ID NO: 241725 - DNA, 120 bp, Artificial Sequence
  ENSG00000121406_16 (sequence is synthesized)
caacaccagaaagttcacagtggagagaggccttataactgcactgcatgtgagaaggcctttatctataaaaacaaacttgttgagcatcagcgaatccacaccggagaaaagccgtat

SEQ ID NO: 241726 - DNA, 120 bp, Artificial Sequence
  ENSG00000121406_17 (sequence is synthesized)
gaatgtggtaaatgtgggaaagccttcaacaaaagatattcccttgtcaggcaccagaaggtacatataacagaagagccctagcaattgttgggatgtgtaattgtcttattcactgta

SEQ ID NO: 241727 - DNA, 120 bp, Artificial Sequence
  ENSG00000121406_18 (sequence is synthesized)
ggacaccagagagctgatttttcaagggatccaacagacagaaattcaccctcatacatctgcatatcactagttgaaagattcactacaaggtccaagtacttgggaagctttctagag

SEQ ID NO: 241728 - DNA, 120 bp, Artificial Sequence
  ENSG00000121406_19 (sequence is synthesized)
attacttgtactttctaatctgcccagtgttacaacagacactaccatgtggcatatcctcaccgttttcatcagtcactcacatgtgctcaaggaatgcagaccactgtgcttaccaaa

SEQ ID NO: 241729 - DNA, 120 bp, Artificial Sequence
  ENSG00000121406_20 (sequence is synthesized)
ttctgaagggaataatataataaaagcctgttgagggtcctcttccatcttgctgaactgttcgaggcaaagacaaaacccaactttgaccaagaagagcaatctggattcttgtagccc

SEQ ID NO: 241730 - DNA, 120 bp, Artificial Sequence
  ENSG00000121406_21 (sequence is synthesized)
atggaggtttaccttcttcataggttttttttttttttatgtgattgccatagtgggatattccctctcccacattacccaagagggaaatgggctgtcttaccatgtgctgatgtatgt

SEQ ID NO: 241731 - DNA, 120 bp, Artificial Sequence
  ENSG00000121406_22 (sequence is synthesized)
gctctgccagtgtgaagggtgaacagctccaactttatgtccccccagggacatagtatgagatcggaaaatagttcttagtcctgtttgtcttaatttttattggtttccaaggtctcc

SEQ ID NO: 241732 - DNA, 120 bp, Artificial Sequence
  ENSG00000121406_23 (sequence is synthesized)
taggaaggagagcagagctgtgtggtcctaatcatggtgtcgatgccagatttatttgtaggtccagaggtctccctgagaagaggcatttgtgacaaactcaagtgctgggacctgcat

SEQ ID NO: 241733 - DNA, 120 bp, Artificial Sequence
  ENSG00000121406_24 (sequence is synthesized)
gaattgtttatttgcagtgatgcttcatatttcccagcactgttcatggtatcttatttcccaggtccttcattgtagccatgggcactgaaggactgaattggtaggtaggtcactggt

SEQ ID NO: 241734 - DNA, 120 bp, Artificial Sequence
  ENSG00000121406_25 (sequence is synthesized)
tgtaagacctactggggccaggtaagaacagtaattggcccagacaggtaggtgtgataaacagagtagaaaagattgtggccaagaagagtgaatgtgtcccatccaaaggtgcatcca

SEQ ID NO: 241735 - DNA, 120 bp, Artificial Sequence
  ENSG00000121406_26 (sequence is synthesized)
gatatgtctgtgttactatggcttcatggtttgggggtatatagaaattctcaggacctcagacctttgattctcctttagcaacacacatcgtcagcataaggcatctaaagattttgt

SEQ ID NO: 241736 - DNA, 120 bp, Artificial Sequence
  ENSG00000121406_27 (sequence is synthesized)
ggactcataacttatgtactgtttttgagatgattgctgcacgggcaggaaagcaggatttgagagaacatacaccttgccttccagatatgtggtttttgtgattcacccagatctgtt

SEQ ID NO: 241737 - DNA, 120 bp, Artificial Sequence
  ENSG00000121406_28 (sequence is synthesized)
gtgccagttaggaattatctttattacttcccgtttattgccactgctgagaaggctgtccttcctaacttgtgaggagatgaatccttaataataagtaaatcttgtgttatcctatag

SEQ ID NO: 241738 - DNA, 120 bp, Artificial Sequence
  ENSG00000121406_29 (sequence is synthesized)
tctggttttccaaaaggagaggtagatgcatatttttgtgtggaaccatttatcttaaaacattgaggtgcagttttcatacacaaaaccttctatctttttaagaactgtctgtatggt

SEQ ID NO: 241739 - DNA, 120 bp, Artificial Sequence
  ENSG00000121406_30 (sequence is synthesized)
ctttttaagaactgtctgtatggtttattgcccagttaatgggttttgatagtcatgttatctcagtaagtgtcttgtcttagaaatatgtgtgtataggctgggtgcggtggctcatgc

SEQ ID NO: 241740 - DNA, 79 bp, Artificial Sequence
  ENSG00000121406_31 (sequence is synthesized)
ttgaacctggggggcggaggttgcaatgagccaaggctcaaaaaacaaaaacaaaaacaaaaagaacagataagaaata

SEQ ID NO: 241741 - DNA, 120 bp, Artificial Sequence
  ENSG00000121406_32 (sequence is synthesized)
aaaaaacaaaaacaaaaacaaaaagaacagataagaaatacgtgtgtatatattctattttgtgtgttttcattcaccttatttcattcagtcttccaaatgaaatgttcttaattttga

SEQ ID NO: 241742 - DNA, 120 bp, Artificial Sequence
  ENSG00000121406_33 (sequence is synthesized)
gagcaaccataaagattcctgttcacagcaaaaggtacctgtgtctctgaataattgtgtggctcagtgctcacctgatgatggacactatgacccaaagtgagtcagaaacaaccaggc

SEQ ID NO: 241743 - DNA, 120 bp, Artificial Sequence
  ENSG00000121406_34 (sequence is synthesized)
ccccggaaagccacaatgagcagtttcacacagaaattcagaggcagtggtgccctcacattatctgaagactgccatgactccacatgaccagctggtggctgcttacctgcacaggta

SEQ ID NO: 241744 - DNA, 120 bp, Artificial Sequence
  ENSG00000121406_35 (sequence is synthesized)
gcatgtgagaggcctctcttcactatccacagctcctgcccatgctctagcaggtggaccaactctggtttgggaacccgatgccctgttgatagcaaaagaaatagaataggggtaatt

SEQ ID NO: 241745 - DNA, 120 bp, Artificial Sequence
  ENSG00000121406_36 (sequence is synthesized)
taatgagaaaatgaaagtctctccatcttgcctaggacttcatgacagggtccagacatgaatgcagctgctcccaaagtaagcaaaatgctgatgtgagccctgaaaatcaagggcatt

SEQ ID NO: 241746 - DNA, 120 bp, Artificial Sequence
  ENSG00000121406_37 (sequence is synthesized)
gctctgagtgagctgtgttccccataaaaatcatatgttgatgccctaacacccaacgtgactgtatatggagacaggatctttagaaggtaattaaaattaaatgaggccacaagggtg

SEQ ID NO: 241747 - DNA, 120 bp, Artificial Sequence
  ENSG00000121406_38 (sequence is synthesized)
gagccttaatctgataaaattatggcctcataaaaacagagagagatctctcctctgtccctccaccttgtaagaacacagcaagtcagccatctgcaagccaggaagagaggtctcaat

SEQ ID NO: 241748 - DNA, 120 bp, Artificial Sequence
  ENSG00000121406_39 (sequence is synthesized)
gatcttggacttctcagcctccagaagcataagaaaataaactctcgttgtttaaaccacccaatccatgacattttattatggcagccaaggagataaaagacaggcacaaatcccact

SEQ ID NO: 241749 - DNA, 120 bp, Artificial Sequence
  ENSG00000121406_40 (sequence is synthesized)
taaaagacaggcacaaatcccactgttgggctacaactgccatggagggtagtgctatctgtctacacaacacccactgcccatgacctccgtctatggaagccaacgttgttcaggcac

SEQ ID NO: 241750 - DNA, 120 bp, Artificial Sequence
  ENSG00000121406_41 (sequence is synthesized)
aacgttgttcaggcacacaacactttgacagccatgggacacggcaaaggtgtgctgcttcctccagaaggcattttctttctttctttctttctttttttgaaacagagtctcactctg

SEQ ID NO: 241751 - DNA, 120 bp, Artificial Sequence
  ENSG00000121406_42 (sequence is synthesized)
ctgcctcccaggttcaagggattctcgtgcctcagccacccgagtagcagggattacaggcatgcaaaaccatgcctggctagtttttgtatttttaatagagactgggattcacaatat

SEQ ID NO: 241752 - DNA, 120 bp, Artificial Sequence
  ENSG00000121406_43 (sequence is synthesized)
caggcatgcaaaaccatgcctggctagtttttgtatttttaatagagactgggattcacaatattggtcaggctggtctcgagtgcctggcctcaagtgatcctcctgcctcagtctccc

SEQ ID NO: 241753 - DNA, 120 bp, Artificial Sequence
  ENSG00000121406_44 (sequence is synthesized)
aaatctaaatcattgcttctcaaacacctcgtgctttcagaaccacttggggatgcgtgattccaacctcaaaccaaatgaaacaaaatttcttcgtgtgagacctgggcatcagtactt

SEQ ID NO: 241754 - DNA, 120 bp, Artificial Sequence
  ENSG00000121406_45 (sequence is synthesized)
ccaaaatgtgccccccaaaattctggtgcccagatggggctgcaaaccactggctgaggctggacatggtggctcatgctgtaatcccagcactataggaggccgaggcaggaggatcac

SEQ ID NO: 241755 - DNA, 64 bp, Artificial Sequence
  ENSG00000121406_46 (sequence is synthesized)
atggtcctagctactcaaggggatgaggttgggaggattgcttgagcctaggaagcagaggctg

SEQ ID NO: 241756 - DNA, 120 bp, Artificial Sequence
  ENSG00000121406_47 (sequence is synthesized)
agctactcaaggggatgaggttgggaggattgcttgagcctaggaagcagaggctgcagtgagctgagatcatggcactgcacttcagcctgaatgacagagcaagactccatctcaaaa

SEQ ID NO: 241757 - DNA, 120 bp, Artificial Sequence
  ENSG00000121406_48 (sequence is synthesized)
accagtggttgaaataaattggtaatgcaagagtcttcattaggcaggtgaccaaagctggattctcattgtgaaaagaaagcatttattccaaggtgggaggatggattgaacatgggg

SEQ ID NO: 241758 - DNA, 120 bp, Artificial Sequence
  ENSG00000121406_49 (sequence is synthesized)
gcctgctgccccagtcaaggctgcagcacccagcatccctatgaggagccagcctgaggacaatcagaagcctgaaccaagaagaaggaacagagaaccaagacatccttgatggcgtca

SEQ ID NO: 241759 - DNA, 120 bp, Artificial Sequence
  ENSG00000121406_50 (sequence is synthesized)
ctgggctgcggcaccgaacaagcctggagccaaccacacctcaggcttctcatcaggcgagttagtgaatttccttccaggtgaagccagtttgatctggttttctgttatatgcagcca

SEQ ID NO: 241760 - DNA, 120 bp, Artificial Sequence
  ENSG00000121406_51 (sequence is synthesized)
aatgctttccactagatgtggtgagtaaaagacaggaggattctgtatagaagaccaatgactgaggtacaaggatccacagaaacatcgactggcagattctgaaccatagcccaggat

SEQ ID NO: 241761 - DNA, 120 bp, Artificial Sequence
  ENSG00000121406_52 (sequence is synthesized)
tcccaagagctgagctccctgtcacttttcacacgctggttcctccacctggaacactgttaccctcttccacctccttctatccagctaactcctactcagctttcaggtctcagctcc

SEQ ID NO: 241762 - DNA, 120 bp, Artificial Sequence
  ENSG00000121406_53 (sequence is synthesized)
actgtcacttcctgagatgccctctttggaactcccacaataggttatgacatcctgcttatttattcctaaattcccctcatttttctttctagaacttatttcagttgtcatctatgg

SEQ ID NO: 241763 - DNA, 120 bp, Artificial Sequence
  ENSG00000121406_54 (sequence is synthesized)
attgatgtccaccttcccaactgaactcagagtgtgccatcaattctaataacttctttatcctgacccacttttgttaaatattgtattctaaaagggaaccttgttttgctctggtaa

SEQ ID NO: 241764 - DNA, 120 bp, Artificial Sequence
  ENSG00000121406_55 (sequence is synthesized)
gtgagaaagtcaatttcccttcctacaaatagaagtctgcaatcacaacacaacaaaatcaaaacaatgccactaagtcccaggaaacccttgtatgtttcttagggctaagttggaggt

SEQ ID NO: 241765 - DNA, 120 bp, Artificial Sequence
  ENSG00000121406_56 (sequence is synthesized)
tgtcccctctgttaaaaaaaagaaatgaactgcactgggggagtgaaaggaaaatgaaagactcagcgctgatctgagacttttctttttttttgagccggagtcttgctcagtcaccca

SEQ ID NO: 241766 - DNA, 65 bp, Artificial Sequence
  ENSG00000121406_57 (sequence is synthesized)
ttttctttttttttgagccggagtcttgctcagtcacccaggctagaatgcactggcgcaactcc

SEQ ID NO: 241767 - DNA, 120 bp, Artificial Sequence
  ENSG00000121406_58 (sequence is synthesized)
caccacacccagctgatgagacttttatgacaagaattagcgtgctggacagagaaagtaaaaggaatggctttatcagggtatcaaaccatgccatttgaggacattcctgtgtaccct

SEQ ID NO: 241768 - DNA, 120 bp, Artificial Sequence
  ENSG00000121406_59 (sequence is synthesized)
ctaaaaacacctcctggatcaacagagcatggatatcaagcatcagaaaacaactaatgaccatgcaggcacccagatgcctttttacagagattgtattgcttaggaagatatccgagg

SEQ ID NO: 241769 - DNA, 120 bp, Artificial Sequence
  ENSG00000121406_60 (sequence is synthesized)
ggcactgaggacaaatgtcttctggggggctgcctgactcacccctttctctaagaacagcccatcacccatggcccctgcttaatagggctgtggccacagctgaccccaccaggatgg

SEQ ID NO: 241770 - DNA, 120 bp, Artificial Sequence
  ENSG00000121406_61 (sequence is synthesized)
ccaatcagcttccttcttatgcaatcttgattaaggacctcagaatgggctgagcactggagtgagggtttgtgttaaaaggacattttctaccccgacaatctctgatgcagacaaagg

SEQ ID NO: 241771 - DNA, 120 bp, Artificial Sequence
  ENSG00000121406_62 (sequence is synthesized)
gagaccagtcaggaagaggtgggaacagaaaggtctgtcaagagaaaggtgggcagttccagtgacctttttgcctggccaagaatcagggttagggtcctcctcagggatgagaggtga

SEQ ID NO: 241772 - DNA, 120 bp, Artificial Sequence
  ENSG00000121406_63 (sequence is synthesized)
gtcattacctagtgaaaccagaagcccacaggtctccagcatcacctctcggtacagggtcctctgggccaggtccagctgtctccactcctcccgggtaaaggtcacagccacatcctt

SEQ ID NO: 241773 - DNA, 120 bp, Artificial Sequence
  ENSG00000121406_64 (sequence is synthesized)
gaaggtcaccaacatctggaaagtcaaacagaagtaatgctattggccttgtgttgtcgcataggatcagaacctgtcactcagtctctagtcaatgtgcagagagatccaggtctgaat

SEQ ID NO: 241774 - DNA, 120 bp, Artificial Sequence
  ENSG00000121406_65 (sequence is synthesized)
caactaggtctcctttgggctgacttccgtgcagggctcaaaggggaggcagatactgccttttgacaatgcaattgtgcctgagagaaaagccttctatggggaagctgttgaagatga

SEQ ID NO: 241775 - DNA, 120 bp, Artificial Sequence
  ENSG00000121406_66 (sequence is synthesized)
cacaaacaatggcaatcccacgaggactatgggaagcagagagtaagtactctggcatattaaaagaatggaggaaaatgactgatactaatccaaccacaataacagcaacagcagcag

SEQ ID NO: 241776 - DNA, 72 bp, Artificial Sequence
  ENSG00000121406_67 (sequence is synthesized)
actgatactaatccaaccacaataacagcaacagcagcagctaagtgtgggggaaagaaaaatagatcagac

SEQ ID NO: 241777 - DNA, 74 bp, Artificial Sequence
  ENSG00000121406_68 (sequence is synthesized)
gctcacagaaacatgtgctgtattgactcaaggtttaatggagttagggctgtgcaggatgtgccttggtaaac

SEQ ID NO: 241778 - DNA, 84 bp, Artificial Sequence
  ENSG00000121406_69 (sequence is synthesized)
tgcttggtaaaagtcatcgccattctcccgtctcgggtacccagggacacaatgcactgcggaaggccacagggacctctgccc

SEQ ID NO: 241779 - DNA, 89 bp, Artificial Sequence
  ENSG00000121406_70 (sequence is synthesized)
gtttccccccactgagacagcctgagatgtggcctcgtgggaagggaaagaccttaccttccctcgaggattcatgaaagaggaaggcc

SEQ ID NO: 241780 - DNA, 120 bp, Artificial Sequence
  ENSG00000121406_71 (sequence is synthesized)
ggcatctgtctcctgcttgtccctgggaatggaatgtcttggtgtaaaacccgagcgtacattctatttactgagataggagaaagccgccttatggctggaggtaagacatgctggcgg

SEQ ID NO: 241781 - DNA, 120 bp, Artificial Sequence
  ENSG00000121406_72 (sequence is synthesized)
gctggaggtaagacatgctggcggcaatactgctctttactgcactgagatgtttgggtaaagtcaaacataaatctggcctacgtgcacatcgaggcacagcacctttccttaaactta

SEQ ID NO: 241782 - DNA, 120 bp, Artificial Sequence
  ENSG00000121410_0 (sequence is synthesized)
attgctgcagacgctcaccccagacactcactgcaccggagtgagcgcgaccatcatgtccatgctcgtggtctttctcttgctgtggggtgtcacctggggcccagtgacagaagcagc

SEQ ID NO: 241783 - DNA, 120 bp, Artificial Sequence
  ENSG00000121410_1 (sequence is synthesized)
catattttatgagacgcagcccagcctgtgggcagagtccgaatcactgctgaaacccttggccaatgtgacgctgacgtgccaggcccacctggagactccagacttccagctgttcaa

SEQ ID NO: 241784 - DNA, 120 bp, Artificial Sequence
  ENSG00000121410_2 (sequence is synthesized)
gaatggggtggcccaggagcctgtgcaccttgactcacctgccatcaagcaccagttcctgctgacgggtgacacccagggccgctaccgctgccgctcgggcttgtccacaggatggac

SEQ ID NO: 241785 - DNA, 120 bp, Artificial Sequence
  ENSG00000121410_3 (sequence is synthesized)
ccagctgagcaagctcctggagctgacagggccaaagtccttgcctgctccctggctctcgatggcgccagtgtcctggatcacccccggcctgaaaacaacagcagtgtgccgaggtgt

SEQ ID NO: 241786 - DNA, 120 bp, Artificial Sequence
  ENSG00000121410_4 (sequence is synthesized)
gctgcggggtgtgacttttctgctgaggcgggagggcgaccatgagtttctggaggtgcctgaggcccaggaggatgtggaggccacctttccagtccatcagcctggcaactacagctg

SEQ ID NO: 241787 - DNA, 120 bp, Artificial Sequence
  ENSG00000121410_5 (sequence is synthesized)
cagctaccggaccgatggggaaggcgccctctctgagcccagcgctactgtgaccattgaggagctcgctgcaccaccaccgcctgtgctgatgcaccatggagagtcctcccaggtcct

SEQ ID NO: 241788 - DNA, 120 bp, Artificial Sequence
  ENSG00000121410_6 (sequence is synthesized)
gcaccctggcaacaaggtgaccctcacctgcgtggctcccctgagtggagtggacttccagctacggcgcggggagaaagagctgctggtacccaggagcagcaccagcccagatcgcat

SEQ ID NO: 241789 - DNA, 120 bp, Artificial Sequence
  ENSG00000121410_7 (sequence is synthesized)
cttctttcacctgaacgcggtggccctgggggatggaggtcactacacctgccgctaccggctgcatgacaaccaaaacggctggtccggggacagcgcgccggtcgagctgattctgag

SEQ ID NO: 241790 - DNA, 120 bp, Artificial Sequence
  ENSG00000121410_8 (sequence is synthesized)
cgatgagacgctgcccgcgccggagttctccccggagccggagtccggcagggccttgcggctgcggtgcctggcgcccctggagggcgcgcgcttcgccctggtgcgcgaggacagggg

SEQ ID NO: 241791 - DNA, 120 bp, Artificial Sequence
  ENSG00000121410_9 (sequence is synthesized)
cgggcgccgcgtgcaccgtttccagagccccgctgggaccgaggcgctcttcgagctgcacaacatttccgtggctgactccgccaactacagctgcgtctacgtggacctgaagccgcc

SEQ ID NO: 241792 - DNA, 120 bp, Artificial Sequence
  ENSG00000121410_10 (sequence is synthesized)
tttcgggggctccgcgcccagcgagcgcttggagctgcacgtggacggaccccctcccaggcctcagctccgggcgacgtggagtggggcggtcctggcgggccgagatgccgtcctgcg

SEQ ID NO: 241793 - DNA, 120 bp, Artificial Sequence
  ENSG00000121410_11 (sequence is synthesized)
ctgcgagggacccatccccgacgtcaccttcgagctgctgcgcgagggcgagacgaaggccgtgaagacggtccgcacccccggggccgcggcgaacctcgagctgatcttcgtggggcc

SEQ ID NO: 241794 - DNA, 120 bp, Artificial Sequence
  ENSG00000121410_12 (sequence is synthesized)
ccagcacgccggcaactacaggtgccgctaccgctcctgggtgccccacaccttcgaatcggagctcagcgaccctgtggagctcctggtggcagaaagctgatgcagccgcgggcccag

SEQ ID NO: 241795 - DNA, 120 bp, Artificial Sequence
  ENSG00000121410_13 (sequence is synthesized)
ggtgctgttggtgtcctcagaagtgccggggattctggactggctccctcccctcctgttgcagcacaaggccggggtctctggggggctggagaagcctccctcattcctcccaggaat

SEQ ID NO: 241796 - DNA, 120 bp, Artificial Sequence
  ENSG00000121410_14 (sequence is synthesized)
tgtttaaaatgtctttggactcccagggctgagtgggctgggatctcgtgtcctcaaagtggatgggttctggggtggctcctgaggtagaggagtggagaactggctcttaagagcaca

SEQ ID NO: 241797 - DNA, 72 bp, Artificial Sequence
  ENSG00000121410_15 (sequence is synthesized)
cctgaggtagaggagtggagaactggctcttaagagcacagttttcttttcttttttctgcagtccggctca

SEQ ID NO: 241798 - DNA, 120 bp, Artificial Sequence
  ENSG00000121410_16 (sequence is synthesized)
tcagcctcccaagtagctgggagcctgggcatgcatcgccacgtctggctaattattattttttgtagacagggtctcactgtgttgcccaagcttgtcttgaactcctggccttaagtg

SEQ ID NO: 241799 - DNA, 65 bp, Artificial Sequence
  ENSG00000121410_17 (sequence is synthesized)
caggcatgagccaccatgcctggccaactcacatttttctttctattatttattttttgtagaga

SEQ ID NO: 241800 - DNA, 69 bp, Artificial Sequence
  ENSG00000121410_18 (sequence is synthesized)
caaccaacacttctcagggcctctttcatctgtgctcttccaggatgctgcctcttactccctgggcac

SEQ ID NO: 241801 - DNA, 120 bp, Artificial Sequence
  ENSG00000121410_19 (sequence is synthesized)
ctgtgctcttccaggatgctgcctcttactccctgggcacctcggcctggtcccagcaggtatgggcagttgcttgaggctccagacatactcacctctacctcgaccacatcaacccca

SEQ ID NO: 241802 - DNA, 120 bp, Artificial Sequence
  ENSG00000121410_20 (sequence is synthesized)
tcaccaagaggaggttcagggaagctgcattttgtggtcttgtcctcccagtccagggtggtagtgctgggctgttcccagcctcccacagcagagctggacgctgtggaaatggctgga

SEQ ID NO: 241803 - DNA, 120 bp, Artificial Sequence
  ENSG00000121410_21 (sequence is synthesized)
ttcctctgtgttctttcccattatccctcagctctgagtcctcttgtgccatctgacatctgatgccttcccaaccactgccgagtttctgcctggagcagggcctcaaggccctggcac

SEQ ID NO: 241804 - DNA, 120 bp, Artificial Sequence
  ENSG00000121410_22 (sequence is synthesized)
acagaagatgcgtatcagtattatcaaccaatagttgatgaattgtgtttttcaacgaatttgctagtgatctggtttactgccttagtaatatctagttcctaatatgcctatgccttt

SEQ ID NO: 241805 - DNA, 120 bp, Artificial Sequence
  ENSG00000121410_23 (sequence is synthesized)
taatgtctgcacagtctatgatgatgtcacttctctcaagcctgatgtgtcctctctctctttcttgctagtggtttatcaatttttaaaaccttttcttgtttatttgtttttgagaca

SEQ ID NO: 241806 - DNA, 120 bp, Artificial Sequence
  ENSG00000121410_24 (sequence is synthesized)
attacaggggtgagccaccacgcccagccccagcttagttttttaaaaagtttattttagccattctaataggtatgtagacatatctaatagtggttttccttgcgtttccttaatgtc

SEQ ID NO: 241807 - DNA, 120 bp, Artificial Sequence
  ENSG00000121410_25 (sequence is synthesized)
ttccttaatgtctgatgatgttaagcattttttccccaagtgcttagttgccatctatatagcatctttgatgaaatgtctgtttatatattttgcacactttaaaatattgggttgttt

SEQ ID NO: 241808 - DNA, 120 bp, Artificial Sequence
  ENSG00000121410_26 (sequence is synthesized)
ctctgagcccagcgctactgtgaccattgaggagctcggaccaggtccaggaagctggccacacggttgcctgggtctgatggttgcaaaggagtttgggcagaggatgcccaaagaatg

SEQ ID NO: 241809 - DNA, 120 bp, Artificial Sequence
  ENSG00000121410_27 (sequence is synthesized)
atgaccacattcatcctgacctccatgctgaatgtccttgcccaggaccaggtccaggaagctggccacacggttgcctgggtctgatggttgcaaaggagtttgggcagaggatgccca

SEQ ID NO: 241810 - DNA, 120 bp, Artificial Sequence
  ENSG00000121410_28 (sequence is synthesized)
aactccgtttcaaaaaaaaaaaaaaaaaagaatggaagggtgttcctgggattgccacccggagggcagaggtctggggactgggcagagggcagctccagggatggggcagcctagtaa

SEQ ID NO: 241811 - DNA, 120 bp, Artificial Sequence
  ENSG00000121413_0 (sequence is synthesized)
gggcggctgggaccggcctggggtagctgcgcagcaggtgggtcggtcccggggatgcagcgcgggggtcagagagcgaccccaacagggtagacggtgaggacgcctcagtgggcagcg

SEQ ID NO: 241812 - DNA, 120 bp, Artificial Sequence
  ENSG00000121413_1 (sequence is synthesized)
ttagggaaaggggccagggtgttcccggggttggggtgcgagcccccgctgtgcgtccaggaggccgagggtctggcatcccttcgcgtggagtgcggggcaggggccgggtccccccgg

SEQ ID NO: 241813 - DNA, 120 bp, Artificial Sequence
  ENSG00000121413_2 (sequence is synthesized)
aggtggctgagatccagatcggtgaggggccctgcaggcaggtctgtgggttctggcaccacctgagcccactgggcatctggtcatccctggcacctctcctttggagccaccttgtcc

SEQ ID NO: 241814 - DNA, 120 bp, Artificial Sequence
  ENSG00000121413_3 (sequence is synthesized)
ctggctagacagtcacattttccagtgccgttttggaaagatgttgcctttggagaaggcgtttgcctcccccaggagctccccagccccgccggatctgcccacgccggggtcagcagc

SEQ ID NO: 241815 - DNA, 120 bp, Artificial Sequence
  ENSG00000121413_4 (sequence is synthesized)
cggagtccagcaggaagaacccgagaccatccctgagaggacccctgctgacctggagttctcccgcctgcgtttccgggaatttgtctaccaggaggctgccgggccccaccagaccct

SEQ ID NO: 241816 - DNA, 120 bp, Artificial Sequence
  ENSG00000121413_5 (sequence is synthesized)
ggcccggctgcatgagctgtgccgccagtggctgatgcctgaggcgcgctccaaggagcagatgctggagctgctggtgctggagcagttcctgggcatcctgcctgataaggtccggcc

SEQ ID NO: 241817 - DNA, 120 bp, Artificial Sequence
  ENSG00000121413_6 (sequence is synthesized)
ctgggtggtggcacagtaccctgagagctgcaagaaggcagcctccctggtggagggcctcgctgatgtcctggaagagccagggatgctgctgggctcccctgcgggctcatcctcaat

SEQ ID NO: 241818 - DNA, 120 bp, Artificial Sequence
  ENSG00000121413_7 (sequence is synthesized)
tcttagcgatggagtgtacgagaggcacatggaccctctgctgctaccaggcgagctcgcgagccccagccaggcccttggagctggggagatcccggcaccttctgagacaccctggct

SEQ ID NO: 241819 - DNA, 120 bp, Artificial Sequence
  ENSG00000121413_8 (sequence is synthesized)
ttctccggaccccctgtttctggaacagaggagggtcagagaagcaaagaccgaagaggacggccctgccaacaccgagcagaagctgaagtcctttccagaggaccctcagcacctggg

SEQ ID NO: 241820 - DNA, 120 bp, Artificial Sequence
  ENSG00000121413_9 (sequence is synthesized)
ggagtggggccacctggaccctgccgaggagaacctgaagagctaccggaagctgctcctgtgggggtatcagctttcccagcctgacgctgcctccaggctggacactgaggaactccg

SEQ ID NO: 241821 - DNA, 120 bp, Artificial Sequence
  ENSG00000121413_10 (sequence is synthesized)
gttggtggaaagagatccacaaggaagcagcctcccagaaggcgggaggcggcaggagagcgctgggtgcgcctgcgaggaggccgcccccgcgggggtgctgcctgagctgcctacgga

SEQ ID NO: 241822 - DNA, 120 bp, Artificial Sequence
  ENSG00000121413_11 (sequence is synthesized)
cttgccgatcccccgtcgggcaccactgaggaggaggaagagcagcctgggaaggccccggacccgcaggacccccaggacgcggagtccgactctgccaccggatcgcagaggcagtcc

SEQ ID NO: 241823 - DNA, 120 bp, Artificial Sequence
  ENSG00000121413_12 (sequence is synthesized)
gtcatccagcagcctgccccggacaggggcacggcgaaactgggaaccaagaggccgcaccccgaggatggggacgggcagagcctcgagggcgtctctagctccggcgacagcgcaggg

SEQ ID NO: 241824 - DNA, 120 bp, Artificial Sequence
  ENSG00000121413_13 (sequence is synthesized)
ctggaggccgggcagggccctggggctgacgagccgggcttgtcccgcgggaagccctatgcctgcggcgagtgcggggaggccttcgcgtggctctcgcacctgatggagcaccacagc

SEQ ID NO: 241825 - DNA, 120 bp, Artificial Sequence
  ENSG00000121413_14 (sequence is synthesized)
agccatggcggccggaagcgctacgcctgtcagggctgctggaagaccttccacttcagcctggccctagccgagcaccagaagacccacgagaaggagaaaagctacgcgctggggggc

SEQ ID NO: 241826 - DNA, 120 bp, Artificial Sequence
  ENSG00000121413_15 (sequence is synthesized)
cccccaaccgtccacccgcgaagcccaggcgggggctagggcgggcggtcccccagagagcgtggagggcgaggctccccccgcacccccagaggcgcagaggtgagccgctgtgctgtc

SEQ ID NO: 241827 - DNA, 120 bp, Artificial Sequence
  ENSG00000121413_16 (sequence is synthesized)
gtgctgtcccgttccggaggggccgctttgccggccgtgaatcccagacgaggcattgggcctttccacgcccctgggtggcggcttcctgtggtgtttgtggacgtcctctgcctgtgc

SEQ ID NO: 241828 - DNA, 120 bp, Artificial Sequence
  ENSG00000121413_17 (sequence is synthesized)
cctgaatccgctcctgaggctaagcgctcccaacgagaagggtccacgggaagccctcacctctgtaaacacaccctgggccagcgctcgcatccgaggggagccgccggatgtggaaga

SEQ ID NO: 241829 - DNA, 120 bp, Artificial Sequence
  ENSG00000121413_18 (sequence is synthesized)
agactcggctttcctgcagccatttagtgccgccccatgctaggttatttgacattgtgcagtgtagagttgccttaaagtgcgtgatctgccagtgctttcttcaagtcacccttgccc

SEQ ID NO: 241830 - DNA, 120 bp, Artificial Sequence
  ENSG00000121413_19 (sequence is synthesized)
cgattcctcctgtttgcgctccccagggttgctcaagtggaaattttgtcagctgtttagccttttcgtacttggcgtgatgtcaacttcacttctaatctgcaaaagcagaagctgttt

SEQ ID NO: 241831 - DNA, 120 bp, Artificial Sequence
  ENSG00000121413_20 (sequence is synthesized)
cctagtttacctcgcgtgtgtttacctatatggagtagctcgcagagatcacagaaatgcttgcagcctaaggcagggttttcagaccgtgggtcccagcccatttagtaaaatgggaaa

SEQ ID NO: 241832 - DNA, 120 bp, Artificial Sequence
  ENSG00000121413_21 (sequence is synthesized)
tcaattagcaagtggtcaccagcattacacagcaatgaagcagaataaagtaggccagaatgcatcatgtagtaaaggcaaatactgttttgtgaaacttttcacccatacatctaaatg

SEQ ID NO: 241833 - DNA, 120 bp, Artificial Sequence
  ENSG00000121413_22 (sequence is synthesized)
tgagaactggttgcaatgtaagacatttcttgctgggaagttgtgagcaaaataagttgaaaacactaataaagatctgtctgtctgagcaaaggagactaaactccttgggctacataa

SEQ ID NO: 241834 - DNA, 120 bp, Artificial Sequence
  ENSG00000121413_23 (sequence is synthesized)
gcgtctgattggccatgcgcactgtcacctgtcacggctcccttgctcgccccggtgcgcggcacagcctcgcggcattgtgggagtcgtagtccgcggtgaggcccagtgcgcaggcgc

SEQ ID NO: 241835 - DNA, 120 bp, Artificial Sequence
  ENSG00000121413_24 (sequence is synthesized)
gaatatcgcatccgggaactctgcgcgcccatgcggagagtcggagggcgagctgacgaggacgctacggcggcgggaagtctgtgggttctggcaccacctgagcccactgggcatctg

SEQ ID NO: 241836 - DNA, 120 bp, Artificial Sequence
  ENSG00000121413_25 (sequence is synthesized)
tgggaccggcctggggtagctgcgcagcaggtgggtcggtcccggggatgcagcgcgggggtcagagagcgaccccaacagggtagacggtctgtgggttctggcaccacctgagcccac

SEQ ID NO: 241837 - DNA, 120 bp, Artificial Sequence
  ENSG00000121413_26 (sequence is synthesized)
ctccgggcggctgggaccggcctggggtagctgcgcagcaggtgggtcggtcccggggatgcagcgcgggggtcagagagcgaccccaacagggtagacgatcagaaaggaccccacaga

SEQ ID NO: 241838 - DNA, 120 bp, Artificial Sequence
  ENSG00000121413_27 (sequence is synthesized)
gatggacatgagggtccacaactgccaaaaacaaatgaggcacagccagcatacccctcagcagaactgcactgtttgcacagtccacacacactgagccagctctgcccaggccaaggg

SEQ ID NO: 241839 - DNA, 120 bp, Artificial Sequence
  ENSG00000121413_28 (sequence is synthesized)
ggaatatcgcatccgggaactctgcgcgcccatgcggagagtcggagggcgagctgacgaggacgctacggcggcgggaacctgggaaacaaaagtcaaatggaagcatcaacttgggat

SEQ ID NO: 241840 - DNA, 120 bp, Artificial Sequence
  ENSG00000121413_29 (sequence is synthesized)
ggtgttgggaaggaactatccaatttggtgaaaataaaaaggttcatcagggatgattcctgttttatctgcattaggagaggtctgggaatgtgaggaccaggtagaaatgctccatag

SEQ ID NO: 241841 - DNA, 120 bp, Artificial Sequence
  ENSG00000121413_30 (sequence is synthesized)
aaatccagaggtgcatttgaggcaaacagcatccacacacaaggacccagagcatctatgaggggctgtggtcaccatgaccattgtggtcatctgctcagtcctagcttcatgtcaaag

SEQ ID NO: 241842 - DNA, 120 bp, Artificial Sequence
  ENSG00000121413_31 (sequence is synthesized)
aggtcctcaaacaacaggtttctgtgaacatgactcaaaggttaaacattttagttacatacataattgtcagaaaggctctaacggtcaaattcttgaggaaaatgatgactgtagagc

SEQ ID NO: 241843 - DNA, 120 bp, Artificial Sequence
  ENSG00000121413_32 (sequence is synthesized)
agccatcagccagggtggacaacctagccaccttgatgaagatctaacaaggagatgagccttcaaaatgtaacgaaggtggtaactccttcagcctttctacacaccttagtgaacaac

SEQ ID NO: 241844 - DNA, 120 bp, Artificial Sequence
  ENSG00000121413_33 (sequence is synthesized)
atgtaattgccagagaaaggaacaacacaaaggagaaggacacgaggaggtgtttgatagggacacatgtccttatgaacacaatggaagtatctctggaaatgaatacaatgacagtga

SEQ ID NO: 241845 - DNA, 120 bp, Artificial Sequence
  ENSG00000121413_34 (sequence is synthesized)
atgtggactgtccgttagaccgaaatctcatttcatcagtcaccagaggactcatactggagagagcccttatacctgtaatgactgtggaaaatccctctctaagaattacaacctgat

SEQ ID NO: 241846 - DNA, 120 bp, Artificial Sequence
  ENSG00000121413_35 (sequence is synthesized)
tgagaaaacccacataggaaagaagccctgtgaaaggaattggtatgggaagaccttcagctgccactcttcccttgttttgcatttcagaagtcatactgtggaaaaactattcgaatg

SEQ ID NO: 241847 - DNA, 120 bp, Artificial Sequence
  ENSG00000121413_36 (sequence is synthesized)
taatgaatgtgaaaaatccttttctgatgtctccaaccttattgtccatctgagaattcacatgtgaggggagccctatgtatgtactgggtgtagaaaggccttcattgatcacacata

SEQ ID NO: 241848 - DNA, 120 bp, Artificial Sequence
  ENSG00000121413_37 (sequence is synthesized)
acttattaaacatgggagaattcacattggaaagagaccctatatgtgtatggagtgtgaaaaattctccaaccacaacagtcagctcttttgcatcaaaaaaatcattctggaaagaaa

SEQ ID NO: 241849 - DNA, 120 bp, Artificial Sequence
  ENSG00000121413_38 (sequence is synthesized)
tctcatgagttaaacaatgtgaaaaaatctttcactgagattatgtacctcatcaggcacaagaggattcatactggtgagaaggtctgtggctgtaaccagtgtcaaacttttcaggaa

SEQ ID NO: 241850 - DNA, 120 bp, Artificial Sequence
  ENSG00000121413_39 (sequence is synthesized)
catcgcgggcctcatctggcaccagaggactcatactggtgagaagccctacgagtgtaatcggtgtggcaaagccttcagggacagctcctgtctgaccaagcacaagaaggtacatgc

SEQ ID NO: 241851 - DNA, 120 bp, Artificial Sequence
  ENSG00000121413_40 (sequence is synthesized)
tcaggcgaccttgtgccagtgtgtctagtgtgggaaagttttcccaagtatctgtgctctcgctagaaaccagagttgacacattggactgagacctatggggattcagtgagcatctgt

SEQ ID NO: 241852 - DNA, 120 bp, Artificial Sequence
  ENSG00000121413_41 (sequence is synthesized)
ggcagtgactgatctgattttctttgcctcctctttgtcagagacttcatgttgaagagtttatgttgtttgaaagtaacaaatatgtttttccatctataaatggaagaaaaaatcctg

SEQ ID NO: 241853 - DNA, 120 bp, Artificial Sequence
  ENSG00000121413_42 (sequence is synthesized)
tggctgggacactgtgatgtcttacaggatttgaacttgcacgtgttggagcttgaatttattcgctgaagcccccaccctttctgatctaaacatctgagttctgcccaggccctgcct

SEQ ID NO: 241854 - DNA, 120 bp, Artificial Sequence
  ENSG00000121413_43 (sequence is synthesized)
gtaggactgaagcctcggaatttggaaaggcctcctggccccaaggcgcccacattgccaccctccttgccagatacagggcctcacctgcatggcctgatcaagggtctcctcttttgt

SEQ ID NO: 241855 - DNA, 120 bp, Artificial Sequence
  ENSG00000121413_44 (sequence is synthesized)
aaaattctggtaatgcacagaatgagttaccctccatttacatgctactttttatctacatgagtacaacactgaggttctactgatgcctaacaagcgggtttcttggaaatctgtgtg

SEQ ID NO: 241856 - DNA, 120 bp, Artificial Sequence
  ENSG00000121413_45 (sequence is synthesized)
aactctgggtgtggtgtctttgttctctggcagctggggtggctgcgccctggccttatgcaaggccattgccttgtccgtgtcctctgcaggtctgtgggttctggcaccacctgagcc

SEQ ID NO: 241857 - DNA, 120 bp, Artificial Sequence
  ENSG00000121413_46 (sequence is synthesized)
ggcagaagggcagccagggagtcaggggctccatggtccatgctatcattgggacttcctcctgtagtttctctgaatgttagacattgtttattaaattagtcttcagagattatgcag

SEQ ID NO: 241858 - DNA, 120 bp, Artificial Sequence
  ENSG00000121413_47 (sequence is synthesized)
atcatccatacttaccacaaatagtgaagaaacatcaatacataaagaaaagaatctcccaacccccgaccatgaaccctctgaaaataaagggtctcaagtgtcctgatgcacgtcccc

SEQ ID NO: 241859 - DNA, 120 bp, Artificial Sequence
  ENSG00000121413_48 (sequence is synthesized)
tcatgtctccctgcacatcacacatgcataatcagggcctggggtcgggctctgtgtgtgtggtgtgctgtgtctgagtgcttgctgttcgaggggtgggtcccccaggctgtggttggg

SEQ ID NO: 241860 - DNA, 120 bp, Artificial Sequence
  ENSG00000121413_49 (sequence is synthesized)
tctggttctttagttgcccagcatcgcgtgctcagcccatccccatcctagaggtgggctctctgccccttggagtgaagctgccctgacacctcctgacttgtgtgcccatatgtgagg

SEQ ID NO: 241861 - DNA, 120 bp, Artificial Sequence
  ENSG00000121413_50 (sequence is synthesized)
ctctgggcactgtgggtggactcctcaggaccactgggcaagtggtgtgtgagttcgacatttcacataaaatagaaacttccatgtggttttccagaagttttgtggctgttcattacc

SEQ ID NO: 241862 - DNA, 120 bp, Artificial Sequence
  ENSG00000121413_51 (sequence is synthesized)
agcacggaaggtgcccactggcctggatacagcccagcactatgtggtgttgctttttaggatttccacgaaggccaggcacagtgcctcatgcctgtaatcgcagcactttgggaagcc

SEQ ID NO: 241863 - DNA, 120 bp, Artificial Sequence
  ENSG00000121413_52 (sequence is synthesized)
accaaaaaaaaaaaagatttccatgaatccagtggacttgaatgggcatctctggggccacccaagccctgtggccaccgcgctgctttgtaaatcagggaaaggtgtagtgtccgttga

SEQ ID NO: 241864 - DNA, 120 bp, Artificial Sequence
  ENSG00000121413_53 (sequence is synthesized)
gccttgggtgctgctgtcacagaagcacactggggcctgtgtgggaggcagcgggggctccttgacccttgagggcacctggccacagggagctcattgcctcagctctgcctctccttc

SEQ ID NO: 241865 - DNA, 120 bp, Artificial Sequence
  ENSG00000121413_54 (sequence is synthesized)
gaggggccttggcctcagcttagaggcatccccctccccatcaccagtgctcagcagagggctgtggccccaaacgtccacagcgctgaggcccagaacccaccctggtgggagcgtgag

SEQ ID NO: 241866 - DNA, 120 bp, Artificial Sequence
  ENSG00000121413_55 (sequence is synthesized)
ggcggaatctttgtggtgcgaagggggctgcctcctgcagtgcacctgggttagagtccctggccagggctggctcctagcctgctcctgtggctgtggggctgcggcgggtcctccctt

SEQ ID NO: 241867 - DNA, 120 bp, Artificial Sequence
  ENSG00000121413_56 (sequence is synthesized)
tgagtcctgcctccgcctgccccgttgcccttccagcctcgccttcttctttgctccactgtccaggggcctaacagggaggtggccttggtgggggtcccagtacagagaagaggaggt

SEQ ID NO: 241868 - DNA, 120 bp, Artificial Sequence
  ENSG00000121413_57 (sequence is synthesized)
gggctgcagcctgccctggctggcccacgacacacaacacccatcagccactctgtgttgatgccttttatttctttggtttttaaccccactcagggtatcagctttcccagcctgacg

SEQ ID NO: 241869 - DNA, 120 bp, Artificial Sequence
  ENSG00000121413_58 (sequence is synthesized)
ctgcctccaggctggacactgaggaactccggttggtggaaagagatccacaaggaagcagcctcccaggtgaggttgggttgaattggtgttagggccgggtggggtttgctttttctt

SEQ ID NO: 241870 - DNA, 120 bp, Artificial Sequence
  ENSG00000121413_59 (sequence is synthesized)
cagaggctgagggggcccctcccagcgccatcagccccagcaaagacctcagcattgactgcttcaccattctcccaccaccgtgtctgagtgaggcaggaatccagttacgtccatggt

SEQ ID NO: 241871 - DNA, 120 bp, Artificial Sequence
  ENSG00000121413_60 (sequence is synthesized)
ctcttgctgcatgacagaccaccccaagacttggtcggtggaaacggcagtggtgttagttgccaggatctgtgtatgactggtcccgggggtggccgttctgccccattggaggctctg

SEQ ID NO: 241872 - DNA, 120 bp, Artificial Sequence
  ENSG00000121413_61 (sequence is synthesized)
tgccagcacaccaacaagaacacctagaggcggacttgggctggagggccctgggtgcctgtcgccagggggcttgtcgctggggggtttggccttagctattgaccccactctcttcgc

SEQ ID NO: 241873 - DNA, 120 bp, Artificial Sequence
  ENSG00000121413_62 (sequence is synthesized)
tggcagccgggcccctccctccaggagggtgcgctctgagcaggctctccttgcatcgtgcatcttgtggccaagctagtggccaggtggagacctccaaaggcgcggtttccagaaccc

SEQ ID NO: 241874 - DNA, 120 bp, Artificial Sequence
  ENSG00000121413_63 (sequence is synthesized)
gggctcagtggggctgtccttcctgtcctgtcggtggcctccgttgttggaggcctccaggtcccacatctgcagcagcaggcgcggggcatgcgctgcagggctgcctgggagggacag

SEQ ID NO: 241875 - DNA, 120 bp, Artificial Sequence
  ENSG00000121413_64 (sequence is synthesized)
cgctgcttccaaacagccgtgagccccgcggggatccagagcccggagccctgtgcgctgttccggcagctgaggctcggctgggtcctcctctccctggccctgggcggggcgctcacg

SEQ ID NO: 241876 - DNA, 120 bp, Artificial Sequence
  ENSG00000121413_65 (sequence is synthesized)
gaggacggccctgccaacaccgagcagggtatcagctttcccagcctgacgctgcctccaggctggacactgaggaactccggttggtggaaagagatccacaaggaagcagcctcccag

SEQ ID NO: 241877 - DNA, 120 bp, Artificial Sequence
  ENSG00000121413_66 (sequence is synthesized)
atcgcgcactggggctccgggcggctgggaccggcctggggtagctgcgcagcaggtgggtcggtcccggggatgcagcgcgggggtcagagagcgaccccaacagggtagacgggatgc

SEQ ID NO: 241878 - DNA, 120 bp, Artificial Sequence
  ENSG00000121413_67 (sequence is synthesized)
cccaggttcaagcgatcctcctgcctcaggcctcctgagtagctggaattacaggtctgtgggttctggcaccacctgagcccactgggcatctggtcatccctggcacctctcctttgg

SEQ ID NO: 241879 - DNA, 120 bp, Artificial Sequence
  ENSG00000121413_68 (sequence is synthesized)
catgcggagagtcggagggcgagctgacgaggacgctacggcggcgggaagtgagttccgtcctctcgcggcctctcgggtctgtttcctccgttcccgcccaccggtcgcggagccaag

SEQ ID NO: 241880 - DNA, 120 bp, Artificial Sequence
  ENSG00000121417_0 (sequence is synthesized)
agggcgggacttgtggcgtcttcgcagcggtcattttggctgccctcccggaggtccgttctgtctgtcagccgctttggtacgctgcatcgggatcgaagtgacggaccgtgaaggcgc

SEQ ID NO: 241881 - DNA, 120 bp, Artificial Sequence
  ENSG00000121417_1 (sequence is synthesized)
gagagtcaggtctgagggtcgggggcagagccgcccgcgaggccggcctggggatagcgatgctcgggttccccccgggtcgcccgcagctcccggtccagctccgcccacagactcgga

SEQ ID NO: 241882 - DNA, 120 bp, Artificial Sequence
  ENSG00000121417_2 (sequence is synthesized)
tggcgaccgcactgagggacccggcttcggttcccatagctacagaggtgcttttcaaacttacacagggaagtgtgacctttgaagatgtggccgtgtacttctcctgggaggaatggg

SEQ ID NO: 241883 - DNA, 120 bp, Artificial Sequence
  ENSG00000121417_3 (sequence is synthesized)
atctccttgatgaggctcagaaacacctgtacttcgatgtgatgctggagaactttgcacttacgtcctccctgggttgttggtgtggagtggaacatgaggaaacaccttctgaacaga

SEQ ID NO: 241884 - DNA, 120 bp, Artificial Sequence
  ENSG00000121417_4 (sequence is synthesized)
gaatttctggagaaagagtgccacagttcaggacttccaaagaaggttcatcttcccagaatgccgactcctgtgaaatatgttgcctggtcttgagagatattttgcacttggctgaac

SEQ ID NO: 241885 - DNA, 120 bp, Artificial Sequence
  ENSG00000121417_5 (sequence is synthesized)
accaaggaacaaactgcgggcagaaactacacacatgtggaaaacaattctacatcagtgcaaatcttcaacagcaccagaggcagcacattacagaggcacctttcagaagttatgtgg

SEQ ID NO: 241886 - DNA, 120 bp, Artificial Sequence
  ENSG00000121417_6 (sequence is synthesized)
acactgcctcgtttacacagagttgcatagtccatgtgtcggagaaaccctttacctgcagggagatcaggaaagacttcctggccaacatgaggtttctccatcaagacgccactcaaa

SEQ ID NO: 241887 - DNA, 120 bp, Artificial Sequence
  ENSG00000121417_7 (sequence is synthesized)
caggggagaagccaaataacagtaacaagtgtgcggtggccttttacagtggaaaaagtcatcacaactggggaaaatgcagtaaagcctttagccacatagacacacttgttcaggacc

SEQ ID NO: 241888 - DNA, 120 bp, Artificial Sequence
  ENSG00000121417_8 (sequence is synthesized)
agagaatcctcactagagaaggactttttgagtgcagtaaatgtgggaaagcatgtacgcgaagatgtaacctcattcagcaccagaaagtccacagtgaagaaaggccttatgaatgca

SEQ ID NO: 241889 - DNA, 120 bp, Artificial Sequence
  ENSG00000121417_9 (sequence is synthesized)
atgaatgtggaaaattctttacctactactccagtttcattatacatcagagagttcatactggagaaaggccttatgcgtgccctgaatgtgggaaatcgtttagtcagatatacagcc

SEQ ID NO: 241890 - DNA, 120 bp, Artificial Sequence
  ENSG00000121417_10 (sequence is synthesized)
tcaatagccataggaaagttcacactggagaaaggccttatgaatgtggggaatgtgggaaatcttttagccaaaggtccaacctcatgcagcatcgcagagttcacactggagaaaggc

SEQ ID NO: 241891 - DNA, 120 bp, Artificial Sequence
  ENSG00000121417_11 (sequence is synthesized)
cttatgaatgcagcgaatgtgggaaatcttttagccaaaactttagcctgatctaccaccagagagttcacactggagaaagacctcatgagtgcaatgaatgtggaaaatcctttagcc

SEQ ID NO: 241892 - DNA, 120 bp, Artificial Sequence
  ENSG00000121417_12 (sequence is synthesized)
gaagctccagcctcattcaccaccggagacttcacactggagaaagaccctatgagtgcagtaaatgtgggaagtcatttaagcaaagctccagcttcagttcacatcggaaagtccaca

SEQ ID NO: 241893 - DNA, 120 bp, Artificial Sequence
  ENSG00000121417_13 (sequence is synthesized)
caggggaaaggccttatgtgtgtggggaatgtgggaaatcctttagccatagctccaaccttaagaaccaccagagagttcacactggagaaagacctgttgagtgcagtgaatgtagca

SEQ ID NO: 241894 - DNA, 120 bp, Artificial Sequence
  ENSG00000121417_14 (sequence is synthesized)
aatcctttagctgtaaatctaacctcattaaacacctgagagttcacactggagaaaggccttatgagtgcagtgaatgtgggaaatcctttagccaaagttctagcctcattcaacacc

SEQ ID NO: 241895 - DNA, 120 bp, Artificial Sequence
  ENSG00000121417_15 (sequence is synthesized)
tttggctgcaaatctgtcctcattcaacaccagagagttcacattggagaaaagccttagctgtactgagaatatgcaatttccttttagtgtaattatactgaaggagtacacctgtga

SEQ ID NO: 241896 - DNA, 120 bp, Artificial Sequence
  ENSG00000121417_16 (sequence is synthesized)
gagagacaagtacctgatttggaagccccaacatctaaggatatacagtgggcggattccccttaagttccaggtatgtgttacactttctaacatgccatttagaaagtgttagacttt

SEQ ID NO: 241897 - DNA, 120 bp, Artificial Sequence
  ENSG00000121417_17 (sequence is synthesized)
ctcacctgccatttatggctcttgccgtttatgtcactgacagtttctgaggcagaagccgtatcatgtctaccacctgtgaggtccacacagtgtgtatcatttacctcctgaacctgc

SEQ ID NO: 241898 - DNA, 120 bp, Artificial Sequence
  ENSG00000121417_18 (sequence is synthesized)
tcaaggaagcagacctctgcttctccccatttgctagaagaaatcatgaatagtctgagtcttcctctctgacaagttagggcatggacttgacccagctttgtgccagagaacccaata

SEQ ID NO: 241899 - DNA, 120 bp, Artificial Sequence
  ENSG00000121417_19 (sequence is synthesized)
tgagtgttgttggcagcttgccaagaaggactgtctttttcaagacatactggtttcatgtgacacctccatggatttttttccagcctctaagtcaccaacttgggaactgcttgtctc

SEQ ID NO: 241900 - DNA, 120 bp, Artificial Sequence
  ENSG00000121417_20 (sequence is synthesized)
acgttgctttgttttttacaataataaaagcattattatttaagctacctttatcttggcatttgattcactctttgaggtggttcaaaaacagaatcgggccctgccagctttacagag

SEQ ID NO: 241901 - DNA, 120 bp, Artificial Sequence
  ENSG00000121417_21 (sequence is synthesized)
taaacacctttggagggagagggaggtgtcatatgcctcagtgacaacagtataatggaaaaatacaactgtctttccagctttggcctaatctgaatttgaattattgcccaaggcctt

SEQ ID NO: 241902 - DNA, 120 bp, Artificial Sequence
  ENSG00000121417_22 (sequence is synthesized)
ctaggaaatactgcaggatattatggtcttaattcgtggactggatgcaaggattttttgtgggctcaaaggacaccctgaggaagtgggaaattgtgacaaattccattgcttctggga

SEQ ID NO: 241903 - DNA, 120 bp, Artificial Sequence
  ENSG00000121417_23 (sequence is synthesized)
acaagatgaattttgttgttattcacaagggttattacatactgcccagcactgttgaggcagtctacccccagtgctgccaaggagccaagtgccccaatacaatttagtaggctactg

SEQ ID NO: 241904 - DNA, 120 bp, Artificial Sequence
  ENSG00000121417_24 (sequence is synthesized)
tcactgtaaaatgatgggggaaccataattggtgtggaaacactgggttactagggagtgaaggagactgcagcaaactagatggaatgtgctccttgtaatatgttctagtaattgtgc

SEQ ID NO: 241905 - DNA, 120 bp, Artificial Sequence
  ENSG00000121417_25 (sequence is synthesized)
aggatcagtgtgtacagacattcttagaatttccaggcatgtgtattttttgtagctgaggtgactgtcaaaaaataataaacaacctaaaggttttgtgtattccaatagcctttctgg

SEQ ID NO: 241906 - DNA, 120 bp, Artificial Sequence
  ENSG00000121417_26 (sequence is synthesized)
gatgtgcacctcaagaacattgctgcataggccaggaaaacaagcatagaaagaaggggcgggggatgtccttccaggaatgtgactttgtaacctaccatcatcctgtgtttaaatgaa

SEQ ID NO: 241907 - DNA, 120 bp, Artificial Sequence
  ENSG00000121417_27 (sequence is synthesized)
ttcaaatcagtttcattgattaccagtatttgctgcccactgaggcaaggtgtccctccaaggtcatcaggaaagagagttaatgtagggttaccaaacctagtcaaaaacacattatac

SEQ ID NO: 241908 - DNA, 120 bp, Artificial Sequence
  ENSG00000121417_28 (sequence is synthesized)
catcattataattattacaatgaacatatcagtcacctcggatttacctcaggcctttttctaagctctccctcccctctctggccctcaaggcaaccattgatttataccttcatttat

SEQ ID NO: 241909 - DNA, 120 bp, Artificial Sequence
  ENSG00000121417_29 (sequence is synthesized)
aataggtttgtttgtattttctataatatatgattttattaataaaatgtctttttttccagtttcattcatgatgcataattattttgagattcttcaatggagcttatatgtggtggt

SEQ ID NO: 241910 - DNA, 120 bp, Artificial Sequence
  ENSG00000121417_30 (sequence is synthesized)
cattctttttattgctgagtggtatattttttatggatatactatttgttatccatttgtttataagcatttaggttttatctagttttggctattacaaataaagctgctagaaatgta

SEQ ID NO: 241911 - DNA, 120 bp, Artificial Sequence
  ENSG00000121417_31 (sequence is synthesized)
agaactttgcacttacgtcctccctgggacttatatcatcctggtctcatgtagttgctcaactagggctaggggaagtgccctctgttcttcacaggatgttcatgactccagcctcag

SEQ ID NO: 241912 - DNA, 120 bp, Artificial Sequence
  ENSG00000121417_32 (sequence is synthesized)
agcttgcgcaaacgagagacaccatctgagttaaatttgaaaaatcctctgcaggctgttcagtggaagaaaagactttagagatggatgaggacgttgaggcagagggaggttgaatat

SEQ ID NO: 241913 - DNA, 60 bp, Artificial Sequence
  ENSG00000121417_33 (sequence is synthesized)
ggaagtgtgacctttgaagatgtggccgtgtacttctcctgggaggaatgggatctcctt

SEQ ID NO: 241914 - DNA, 120 bp, Artificial Sequence
  ENSG00000121417_34 (sequence is synthesized)
tcgacccaaagttacgtggctctgggccggggcaagggtacagggaaggcctgtgcccatggagcactgccatgatcacattcctctgaggcctgcgtctttccacaggttcccatagct

SEQ ID NO: 241915 - DNA, 120 bp, Artificial Sequence
  ENSG00000121417_35 (sequence is synthesized)
cttttcaaacttacacaggtaagtggaggtatctcagcccctcactggtctggaatgtccctccaccctccccagacagatattttctttagatttgtggtgtcatgggactcacctacc

SEQ ID NO: 241916 - DNA, 120 bp, Artificial Sequence
  ENSG00000121417_36 (sequence is synthesized)
attctctcagcgtttggtttgggaaccctggagaatccctgagctaagggccctgagtccaggccaatgtttccatttggagcagccaatggaaagatgggtgaaaatttatgatagaaa

SEQ ID NO: 241917 - DNA, 80 bp, Artificial Sequence
  ENSG00000121440_0 (sequence is synthesized)
agtccggggagagccagcgagcgcgcgggcggcgtagccggcctgtctgggccgcctcgtggggagggagggggcgcccg

SEQ ID NO: 241918 - DNA, 120 bp, Artificial Sequence
  ENSG00000121440_1 (sequence is synthesized)
gcttcgagctggaccgcttcgacggcgacgtggacccggacctgaagtgcgcgctgtgccacaaggtcctggaggacccgctgaccacgccgtgcggccacgtcttctgcgccggctgcg

SEQ ID NO: 241919 - DNA, 120 bp, Artificial Sequence
  ENSG00000121440_2 (sequence is synthesized)
tgctgccctgggtggtgcaggagggcagctgcccggcgcgctgccgcggtcgcctgtcggccaaagagctcaaccacgtcctgccgctcaagcgccttatcctcaagctggacatcaagt

SEQ ID NO: 241920 - DNA, 120 bp, Artificial Sequence
  ENSG00000121440_3 (sequence is synthesized)
gcgcgtacgcgacgcgcggctgcggccgggtggtcaagctgcagcagctgccggagcacctcgagcgctgcgacttcgcgcccgcgcgctgtcgccacgcgggttgcggccaggtgctgc

SEQ ID NO: 241921 - DNA, 120 bp, Artificial Sequence
  ENSG00000121440_4 (sequence is synthesized)
gacgtggaggcgcacatgcgcgacgcctgcgacgcgcggccagtgggccgctgccaggagggctgcgggctacccttgacgcacggcgagcagcgcgcgggcggccactgctgcgcgcga

SEQ ID NO: 241922 - DNA, 120 bp, Artificial Sequence
  ENSG00000121440_5 (sequence is synthesized)
gcgcgcgagcgctgcgggcgcacaacggcgcgctccaggcccgcctgggcgcgctgcacaaggcgctcaagaaggaggcgctgcgcgctgggaagcgcgagaagtcgctggtggcccagc

SEQ ID NO: 241923 - DNA, 120 bp, Artificial Sequence
  ENSG00000121440_6 (sequence is synthesized)
tggccgcggcgcagcttgagctgcagatgaccgcgctgcgctaccagaagaaattcaccgaatacagcgcgcgcctcgactcgctcagccgctgcgtggccgcgccgcccggcggcaagg

SEQ ID NO: 241924 - DNA, 120 bp, Artificial Sequence
  ENSG00000121440_7 (sequence is synthesized)
gcgaagaaaccaaaagtctgactcttgtcctgcatcgggactccggctccctgggattcaatattattggtggccggccgagtgtggataaccacgatggatcatccagtgaaggaatct

SEQ ID NO: 241925 - DNA, 120 bp, Artificial Sequence
  ENSG00000121440_8 (sequence is synthesized)
ttgtatccaagatagttgacagtgggcctgcagccaaggaaggaggcctgcaaattcatgacaggattattgaggtcaacggcagagacttatccagagcaactcatgaccaggctgtgg

SEQ ID NO: 241926 - DNA, 120 bp, Artificial Sequence
  ENSG00000121440_9 (sequence is synthesized)
aagctttcaagacagccaaggagcccatagtggtgcaggtgttgagaagaacaccaaggaccaaaatgttcacgcctccatcagagtctcagctggtggacacgggaacccaaaccgaca

SEQ ID NO: 241927 - DNA, 120 bp, Artificial Sequence
  ENSG00000121440_10 (sequence is synthesized)
tcacctttgaacatatcatggccctcactaagatgtcctctcccagcccacccgtgctggatccctatctcttgccagaggagcatccctcagcccatgaatactacgatccaaatgact

SEQ ID NO: 241928 - DNA, 120 bp, Artificial Sequence
  ENSG00000121440_11 (sequence is synthesized)
acattggagacatccatcaggagatggacagggaggagctggagctggaggaagtggacctctacagaatgaacagccaggacaagctgggcctcactgtgtgctaccggacggacgatg

SEQ ID NO: 241929 - DNA, 120 bp, Artificial Sequence
  ENSG00000121440_12 (sequence is synthesized)
aagacgacattgggatttatatcagtgagattgaccctaacagcattgcagccaaggatgggcgcatccgagaaggagaccgcattatccagattaatgggatagaggtgcagaaccgtg

SEQ ID NO: 241930 - DNA, 120 bp, Artificial Sequence
  ENSG00000121440_13 (sequence is synthesized)
aagaggctgtggctcttctaaccagtgaagaaaataaaaacttttcattgctgattgcaaggcctgaactccagctggatgagggctggatggatgatgacaggaacgactttctggatg

SEQ ID NO: 241931 - DNA, 120 bp, Artificial Sequence
  ENSG00000121440_14 (sequence is synthesized)
acctgcacatggacatgctggaggagcagcaccaccaggccatgcaattcacagctagcgtgctgcagcagaagaagcacgacgaagacggtgggaccacagatacagccaccatcttgt

SEQ ID NO: 241932 - DNA, 120 bp, Artificial Sequence
  ENSG00000121440_15 (sequence is synthesized)
ccaaccagcacgagaaggacagcggtgtggggcggaccgacgagagcacccgtaatgacgagagctcggagcaagagaacaatggcgacgacgccaccgcatcctccaacccgctggcgg

SEQ ID NO: 241933 - DNA, 120 bp, Artificial Sequence
  ENSG00000121440_16 (sequence is synthesized)
ggcagaggaagctcacctgcagccaggacaccttgggcagcggcgacctgcccttcagcaacgagtctttcatttcggccgactgcacggacgccgactacctggggatcccggtggacg

SEQ ID NO: 241934 - DNA, 120 bp, Artificial Sequence
  ENSG00000121440_17 (sequence is synthesized)
ccaccccttacggcctgtactaccctagcggccccctggacgccggcaagagtgaccctgagagcgtggacaaggagctggagctgctgaacgaagagctgcgcagcatcgagctggagt

SEQ ID NO: 241935 - DNA, 120 bp, Artificial Sequence
  ENSG00000121440_18 (sequence is synthesized)
gcctgagcatcgtgcgcgcccacaagatgcagcagctcaaggagcagtaccgcgagtcctggatgctgcacaacagcggcttccgcaactacaacaccagcatcgacgtgcgcagacacg

SEQ ID NO: 241936 - DNA, 120 bp, Artificial Sequence
  ENSG00000121440_19 (sequence is synthesized)
agctctcagatatcaccgagctcccggagaaatccgacaaggacagctcgagcgcctacaacacaggcgagagctgccgcagcaccccgctcaccctggagatctcccccgacaactcct

SEQ ID NO: 241937 - DNA, 120 bp, Artificial Sequence
  ENSG00000121440_20 (sequence is synthesized)
tgaggagagcggcggagggcatcagctgcccgagcagcgaaggggctgtggggaccacggaagcctacgggccagcctccaagaatctgctctccatcacggaagatcccgaagtgggca

SEQ ID NO: 241938 - DNA, 120 bp, Artificial Sequence
  ENSG00000121440_21 (sequence is synthesized)
cccctacctatagcccgtccctgaaggagctggaccccaaccagcccctggaaagcaaagagcggagagccagcgacgggagccggagccccacgcccagccagaagctgggcagcgcct

SEQ ID NO: 241939 - DNA, 120 bp, Artificial Sequence
  ENSG00000121440_22 (sequence is synthesized)
acctgccctcctatcaccactccccatacaagcacgcgcacatcccggcgcacgcccagcactaccagagctacatgcagctgatccagcagaagtcggccgtggagtacgcgcaaagcc

SEQ ID NO: 241940 - DNA, 120 bp, Artificial Sequence
  ENSG00000121440_23 (sequence is synthesized)
agatgagcctggtgagcatgtgcaaggacctgagctctcccaccccgtcggagccgcgcatggagtggaaggtgaagatccgcagcgacgggacgcgctacatcaccaagaggcccgtgc

SEQ ID NO: 241941 - DNA, 120 bp, Artificial Sequence
  ENSG00000121440_24 (sequence is synthesized)
gggaccgcctgctgcgggagcgcgccctgaagatccgggaagagcgcagcggcatgaccaccgacgacgacgcggtgagcgagatgaagatggggcgctactggagcaaggaggagagga

SEQ ID NO: 241942 - DNA, 120 bp, Artificial Sequence
  ENSG00000121440_25 (sequence is synthesized)
agcagcacctggtgaaggccaaggagcagcggcggcggcgcgagttcatgatgcagagcaggttggattgtctcaaggagcagcaagcagccgatgacaggaaggagatgaacattctcg

SEQ ID NO: 241943 - DNA, 120 bp, Artificial Sequence
  ENSG00000121440_26 (sequence is synthesized)
aactgagccacaaaaagatgatgaagaagaggaataagaaaatcttcgataactggatgacgatccaagaactcttaacccacggcacaaaatccccggacggcactagagtatacaatt

SEQ ID NO: 241944 - DNA, 120 bp, Artificial Sequence
  ENSG00000121440_27 (sequence is synthesized)
ccttcctatcggtgactactgtataattttcacttctgcattatgtacataaaggagaccactaccactggggtagaaattcctgcctcgttcaatgcggcaagtttttgtatataagat

SEQ ID NO: 241945 - DNA, 120 bp, Artificial Sequence
  ENSG00000121440_28 (sequence is synthesized)
aagtacggtcttcatgtttatagtccaaatttgcaaaccctacaactctgggtgtcataggtctattttaagggaagagagagaaaaacacccttactatcttggaaggcaatattaaca

SEQ ID NO: 241946 - DNA, 120 bp, Artificial Sequence
  ENSG00000121440_29 (sequence is synthesized)
aacagagcttttttcaaatagcaattgtacttttctacctgtacccttttacataaagtgtttaaatttcagaaagatcttttattaagcatactttcacagaataacttgtttaaacta

SEQ ID NO: 241947 - DNA, 120 bp, Artificial Sequence
  ENSG00000121440_30 (sequence is synthesized)
tattcatataaaaaagttaaacacgctttttttcctgcctaaaacacaaatacaactgccagtatgtatttttaatggaaccctattttataatggtacgttactgaatgtgtttcatat

SEQ ID NO: 241948 - DNA, 120 bp, Artificial Sequence
  ENSG00000121440_31 (sequence is synthesized)
gcgtgaccgttaagatattatcatttaggtgaaggtttcaactcaaaaccacccaacccggtggttaacgatttaatacatataaccaaaccggcagcgtttagagttgggatatacatt

SEQ ID NO: 241949 - DNA, 120 bp, Artificial Sequence
  ENSG00000121440_32 (sequence is synthesized)
taaacattttcctggttaaggttcccaagagagtgtaaaggttttagcagaaagcaaaatatcttgcatctttatggaagtttaaagcatgtttgcaaatattgcagcccattgaaagaa

SEQ ID NO: 241950 - DNA, 120 bp, Artificial Sequence
  ENSG00000121440_33 (sequence is synthesized)
tttgcatgtacaggaaagttgtggatggagacggtttgtggaattttaagtgctcattgtagtaaacttttgctttgtagatttgaaggtacagacttatacaggcaagttcacaaaatc

SEQ ID NO: 241951 - DNA, 120 bp, Artificial Sequence
  ENSG00000121440_34 (sequence is synthesized)
atgattagttacaaacagtaaaatgaagttaaaataaattattattttctatttgatatgttttgatgtgattcctcattttgcagtggtgcctataaaataaaagccttttgcagtgtt

SEQ ID NO: 241952 - DNA, 120 bp, Artificial Sequence
  ENSG00000121440_35 (sequence is synthesized)
gtagacgcctcggggcttaagagaacgtgacatggaagagacaggaaatatgtactcttgtacaggtatgcggcacacatgtggccccctccctcccagcctcctcactaaagattatta

SEQ ID NO: 241953 - DNA, 120 bp, Artificial Sequence
  ENSG00000121440_36 (sequence is synthesized)
acctgcttattctcctggttcacctgaggctgttttgagagaatctcagtatctcagtcttcatttcatacgacattcttcgggctcctcttgttcatctttgcagactgaagtatttat

SEQ ID NO: 241954 - DNA, 120 bp, Artificial Sequence
  ENSG00000121440_37 (sequence is synthesized)
agcatttgctcagtactctcaacataaaccaagcttagatcgcaatgaaactgcggacctgcaggctgccttgcttcactgagtcaatttttaaatgaagatggaacacaagaggatgat

SEQ ID NO: 241955 - DNA, 120 bp, Artificial Sequence
  ENSG00000121440_38 (sequence is synthesized)
gcgaggggaggaagggaagcgtggaaggggggagagagttgttgtctagcctctgagagcagcgccaatgtgaagcgttgcagtcgcttgactcacctgaggctctccaaggataccttc

SEQ ID NO: 241956 - DNA, 120 bp, Artificial Sequence
  ENSG00000121440_39 (sequence is synthesized)
aatgcctgcactgtaagggagctgcttttcccgggtgctggcgagaacggaagccttcctttgacgtttttctaaacatgggatgcagtctgtgcagcctgcagaagcaagaggagcagt

SEQ ID NO: 241957 - DNA, 120 bp, Artificial Sequence
  ENSG00000121440_40 (sequence is synthesized)
ggaaggaggcctgcaaattcatgacaggattattgagatgagaaaactggaactgagaacagttaaattgcccaaagcccacagccaggattccaacgctggcttcatcccacaattgct

SEQ ID NO: 241958 - DNA, 120 bp, Artificial Sequence
  ENSG00000121440_41 (sequence is synthesized)
gtccctgcacactccacctctgagctgtgaaaaaggaggaggtcatctggcttgtggaggggcttatttgaactgtatttgattgaaaactgcatgggctactaaaattgttttcttggg

SEQ ID NO: 241959 - DNA, 120 bp, Artificial Sequence
  ENSG00000121440_42 (sequence is synthesized)
tatataatagccttgcaagtgaacggataagcaaagtcagttgctgagaaataacacttccgagctgacgcatccaaatgtttaggatacacctgagatgtctctcttactgaatagaaa

SEQ ID NO: 241960 - DNA, 120 bp, Artificial Sequence
  ENSG00000121440_43 (sequence is synthesized)
caccaggcattcttcgggaaacctaaacacagagaactgaagttctctgacaccaccacctgcttctttcttttagctgcttacacatgaaagcaggcaattcatgtatttgtccttccg

SEQ ID NO: 241961 - DNA, 120 bp, Artificial Sequence
  ENSG00000121440_44 (sequence is synthesized)
gaaaacaggcagattccaaggggcagatgccaggagggaaggctgctcctcagtcaggttcagggtcccagcgtggaattccaggaggagtacttgaatctcagcctccagcattcttga

SEQ ID NO: 241962 - DNA, 120 bp, Artificial Sequence
  ENSG00000121440_45 (sequence is synthesized)
aagagactggtggggaagaccctcaggctggaacgtactggagttcctggcttgctgcagttgacttgctgcctgatctctggtgttcttcaaagagctgctcagatgtcattcttcagg

SEQ ID NO: 241963 - DNA, 120 bp, Artificial Sequence
  ENSG00000121440_46 (sequence is synthesized)
cctttatacagatgaggaactgcagactcaccaggttccactgagctgatggaaaggcagtgcctgggagggaagactagagcccattgattgctgtgctgacctttgaggacgtgaagg

SEQ ID NO: 241964 - DNA, 120 bp, Artificial Sequence
  ENSG00000121440_47 (sequence is synthesized)
tttgggtccccagccaacaatcagaggctgaagctttgcatctggcaccgtggactgttaagctcctttcaaagctgctgatggagcatccctcagcccatgaatactacgatccaaatg

SEQ ID NO: 241965 - DNA, 120 bp, Artificial Sequence
  ENSG00000121446_0 (sequence is synthesized)
gtcaggaagagcatggcaacatgagcagtgctgagataattggttctacaaatcttataattctgctagaggatgaagtctttgccgattttttcaacacatttctttccctcccggttt

SEQ ID NO: 241966 - DNA, 120 bp, Artificial Sequence
  ENSG00000121446_1 (sequence is synthesized)
ttggtcagacaccattttatactgttgaaaattcacagtggagcttgtggccagaaataccttgtaacttgattgccaaatacaaagggttattgacctggttggaaaaatgccgattac

SEQ ID NO: 241967 - DNA, 120 bp, Artificial Sequence
  ENSG00000121446_2 (sequence is synthesized)
ctttcttctgtaaaacaaacttgtgtttccattacattctctgtcaggagttcatcagtttcattaagtccccagaaggaggtgaagaattggtggatttctggatccttgctgagaaca

SEQ ID NO: 241968 - DNA, 120 bp, Artificial Sequence
  ENSG00000121446_3 (sequence is synthesized)
tcctgagcatagatgagatggacctggaagtgagagactactacctgtccctcctcctcatgctgagggccactcatctgcaggagggctccagggtggtaaccctctgtaacatgaaca

SEQ ID NO: 241969 - DNA, 120 bp, Artificial Sequence
  ENSG00000121446_4 (sequence is synthesized)
tcaagtccctcctgaacctctccatctggcatcccaaccaatcaaccactaggagggagatcctgagccacatgcagaaagtggctctgttcaaactccagagctattggcttcccaact

SEQ ID NO: 241970 - DNA, 120 bp, Artificial Sequence
  ENSG00000121446_5 (sequence is synthesized)
tttacacccacaccaagatgaccatggccaaggaggaagcatgccatggtctgatgcaagagtacgagactcgcttatacagcgtttgctacacccacataggagggctccctctgaaca

SEQ ID NO: 241971 - DNA, 120 bp, Artificial Sequence
  ENSG00000121446_6 (sequence is synthesized)
tgagcatcaagaagtgccaccactttcagaaacggtactcaagcaggaaagccaagaggaagatgtggcaattggtagatcctgactcttggtctctggaaatggatctcaagccagatg

SEQ ID NO: 241972 - DNA, 120 bp, Artificial Sequence
  ENSG00000121446_7 (sequence is synthesized)
ctattggtatgcccctacaggagacatgtcctcaagagaaggtggttatacaaatgccttccctgaaaatggcttcttcaaaggaaacaagaatcagttccctggaaaaggatatgcatt

SEQ ID NO: 241973 - DNA, 120 bp, Artificial Sequence
  ENSG00000121446_8 (sequence is synthesized)
atgcaaaaatatccagcatggagaataaagccaagagccacctccacatggaagccccctttgagacaaaggtctctacccacctgaggactgtcatccccattgtcaatcactcctcca

SEQ ID NO: 241974 - DNA, 120 bp, Artificial Sequence
  ENSG00000121446_9 (sequence is synthesized)
agatgacaattcagaaggccatcaagcaaagcttctccttaggatacatccacttggccttgtgtgctgatgcctgtgcagggaaccctttccgggaccacctgaagaagctgaatttga

SEQ ID NO: 241975 - DNA, 120 bp, Artificial Sequence
  ENSG00000121446_10 (sequence is synthesized)
aagtggagatccaacttcttgacctctggcaggacttgcagcatttcctcagtgtccttctgaataacaaaaagaatgggaatgcaatctttcgtcacttgctgggtgacagaatctgcg

SEQ ID NO: 241976 - DNA, 120 bp, Artificial Sequence
  ENSG00000121446_11 (sequence is synthesized)
agctctacctgaatgagcagattggtccgtgcttaccactcaaatcccaaaccattcagggcctgaaggaactattgccctctggggatgtgatcccctggattcccaaagcccagaagg

SEQ ID NO: 241977 - DNA, 120 bp, Artificial Sequence
  ENSG00000121446_12 (sequence is synthesized)
agatttgcaagatgctcagtccctggtatgatgagtttctagatgaagaggactactggtttctcctttttacgacacagaacaggttcatcagctccagacagcataaaagagaattta

SEQ ID NO: 241978 - DNA, 120 bp, Artificial Sequence
  ENSG00000121446_13 (sequence is synthesized)
taggcaaagaagagaacattcttctttataagaggattcagcagtctctagagttaagccaggctttggctgacatgaaggaaatggactataggcagtggcgaaagatagctactgagg

SEQ ID NO: 241979 - DNA, 120 bp, Artificial Sequence
  ENSG00000121446_14 (sequence is synthesized)
acctgaagcaaggaggctctctccaggtagagctgacatctccagtgtttctaacagacataactaaaatgtcctttgaggagctttgctacaagaacccaaagatggccatacagaaga

SEQ ID NO: 241980 - DNA, 120 bp, Artificial Sequence
  ENSG00000121446_15 (sequence is synthesized)
aaatatactgtgagaaagcacctaaaatagattttaaaatggaaattatcaaggaaacaaagacagtttcacgctcaaataggaaaatgtccttgctcaaaagaactcttgtaaggaagc

SEQ ID NO: 241981 - DNA, 120 bp, Artificial Sequence
  ENSG00000121446_16 (sequence is synthesized)
catcaatgagacccagaaacttgacagaagtcctcttaaatacacagcacttggagttcttcagggagttcctcaaggaacggaaggctaaaatcccattgcaatttctcacagctgtac

SEQ ID NO: 241982 - DNA, 120 bp, Artificial Sequence
  ENSG00000121446_17 (sequence is synthesized)
agaagatcagtatagagaccaatgaaaagatttgcaagtctctcatagaaaatgtaatcaagactttcttccaaggccaactctctcctgaagaaatgctgcagtgtgatgcccctatta

SEQ ID NO: 241983 - DNA, 120 bp, Artificial Sequence
  ENSG00000121446_18 (sequence is synthesized)
tcaaagaaatcgcttccatgcgtcatgtcaccacaagcacactgttaacgctccagggacatgttatgaaatctatagaagaaaagtggtttaaagattatcaagacctgttcccacctc

SEQ ID NO: 241984 - DNA, 120 bp, Artificial Sequence
  ENSG00000121446_19 (sequence is synthesized)
accatcaggaggtggaagtgcaaagtgaagtacaaatttcgtctaggaagccctcaaagatagtgtcaacttacctacaggaatcccagaagaaaggctggatgagaatgatcagcttta

SEQ ID NO: 241985 - DNA, 120 bp, Artificial Sequence
  ENSG00000121446_20 (sequence is synthesized)
tcaggagtttttgcaagtaccgcagatttatgttgaatcctagtaagcgccaggaatttgaagactatcttcaccaggaaatgcaaaatagcaaggaaaatttcaccacagcacacaaca

SEQ ID NO: 241986 - DNA, 120 bp, Artificial Sequence
  ENSG00000121446_21 (sequence is synthesized)
catcgggacgttcagctccaccctccacaaatgtccggagtgcagaccaagagaatggagaaataacccttgtaaagcgtcgtatatttggccacaggattatcactgtcaactttgcga

SEQ ID NO: 241987 - DNA, 120 bp, Artificial Sequence
  ENSG00000121446_22 (sequence is synthesized)
tcaatgatctatatttcttttctgaaatggagaaatttaatgatctggtcagttcagcccacatgctgcaggtcaaccgggcatataatgagaatgatgtgatcctaatgcggtccaaaa

SEQ ID NO: 241988 - DNA, 120 bp, Artificial Sequence
  ENSG00000121446_23 (sequence is synthesized)
tgaacattatccaaaaactcttcctgaattctgacatccctccaaagctgagggtgaatgtccctgagttccagaaggatgccatccttgctgccatcacagagggctacctagatcgga

SEQ ID NO: 241989 - DNA, 120 bp, Artificial Sequence
  ENSG00000121446_24 (sequence is synthesized)
gcgtcttccatggggctatcatgtctgtcttccccgttgttatgtacttctggaaaaggttttgtttctggaaggcaacccgctcttacttacagtatagggggaagaagttcaaggaca

SEQ ID NO: 241990 - DNA, 120 bp, Artificial Sequence
  ENSG00000121446_25 (sequence is synthesized)
gaaaaagccctcctaaatctacggacaagtatcctttctcgagtggaggagacaatgccatcttaaggttcaccttgctcagaggtattgagtggttgcagcctcaacgggaagcaataa

SEQ ID NO: 241991 - DNA, 120 bp, Artificial Sequence
  ENSG00000121446_26 (sequence is synthesized)
gttcagttcaaaattcttcatcaagcaaacttactcagccaagactcgtggtatctgccatgcagctgcatcccgtccagggacaaaaattatcctacatcaaaaaagagaagtaatcaa

SEQ ID NO: 241992 - DNA, 120 bp, Artificial Sequence
  ENSG00000121446_27 (sequence is synthesized)
gcgagacccccagcagagataaatcatctcttagaggcctcctaacactgacagaaacttttctggtcaaaaatgaaaggtcctggtaccatcttccccagaaacgatcaagaagggcaa

SEQ ID NO: 241993 - DNA, 120 bp, Artificial Sequence
  ENSG00000121446_28 (sequence is synthesized)
tgggttgacagcccagatatggcaggaccagactgcaatgggaatctcatacagcccattcagactaaagggtgatggaaagaagcagaggaaagcagaaacagcaagagtgactgagac

SEQ ID NO: 241994 - DNA, 120 bp, Artificial Sequence
  ENSG00000121446_29 (sequence is synthesized)
ctgctgtcatctatatagaagcctttctgatacatgtcagagagtgacatgaagtctcccctctttatacacacgtatgaaaatacatctatccctcattttgagagcctccaactgatc

SEQ ID NO: 241995 - DNA, 120 bp, Artificial Sequence
  ENSG00000121446_30 (sequence is synthesized)
caagtgtcatccggaggaggaggtggcccgtatgtgcaggacctcagggtgccagccctcacccatacacctccagggctgcaggtcattagccagaataaaggatgtccacattcacaa

SEQ ID NO: 241996 - DNA, 120 bp, Artificial Sequence
  ENSG00000121446_31 (sequence is synthesized)
actaacatcagatgcaacctaggcaagggttctcttatgttctgctctgggaagcatttgaagtatttcagttgtgagtaccactccagccaatgagagaaccagatggagagaaggcca

SEQ ID NO: 241997 - DNA, 120 bp, Artificial Sequence
  ENSG00000121446_32 (sequence is synthesized)
ataggaagcactaggaatctgtttcctcatctagacaacaattccaagatgatgagatggaaaaaggcagaccagtggctactccagaaatgcattggcggggtcagagggatgtggcgc

SEQ ID NO: 241998 - DNA, 120 bp, Artificial Sequence
  ENSG00000121446_33 (sequence is synthesized)
gaaaacacacttagtttggagagagttttctgccttcctctagcactctgtttcgtagtttccagtttctagggggaactaagatggtgttttcaaaatcctattcacctcactccatcc

SEQ ID NO: 241999 - DNA, 120 bp, Artificial Sequence
  ENSG00000121446_34 (sequence is synthesized)
ctcacacagaacaccaaacactgaatccacagatggaaggcagagtaagactgagagccaaacgcctggtttcccacccctcctctttctatgcttgcttggagcaagaatgtgaggttt

SEQ ID NO: 242000 - DNA, 120 bp, Artificial Sequence
  ENSG00000121446_35 (sequence is synthesized)
tcttaggcctgggtttctcacaagaaggtaagagtgaaccacagccccttggggagaaattctgtcaagactaacacaactgcttgtgcttaagaagctacatgaagaaagtaagccaga

SEQ ID NO: 242001 - DNA, 120 bp, Artificial Sequence
  ENSG00000121446_36 (sequence is synthesized)
agtgttttgctctgttatgcccaaatccccagaattaccactgagggagcacagttgctagatactccaattatcaagaggagctagacattgaaatgtgtatttcatctctcccaaggt

SEQ ID NO: 242002 - DNA, 120 bp, Artificial Sequence
  ENSG00000121446_37 (sequence is synthesized)
taaagtggcaaatatggcaactaacaaaactaaaacatggtgaagaaactgtgaaggccaaaaaccaaaaatgaaacaagcaaaatatatgcagatattttgtggccaaatgcaatctgt

SEQ ID NO: 242003 - DNA, 120 bp, Artificial Sequence
  ENSG00000121446_38 (sequence is synthesized)
ggcccacttgtttctaacctgtcctgtggagatttggcctgagccttcccagctggttatttattcctgtggtctgccagagttccagctcatatcttccacatggtgaatggcagtgcc

SEQ ID NO: 242004 - DNA, 120 bp, Artificial Sequence
  ENSG00000121446_39 (sequence is synthesized)
ttgggtggtagtgaccagaggacacctggctgaaatgttcccagacaaagctaatcaggacacttagattatcatgtgacttggactcttagaagttcccatcttccaccaaaaaaaaaa

SEQ ID NO: 242005 - DNA, 120 bp, Artificial Sequence
  ENSG00000121446_40 (sequence is synthesized)
gttactttattaaaatagaagtgtgaaattgcttaccaatctctcacctttattttaaaatccttgagataataaactatttaatacagaaccaagagaagtacaaaaatctaagttcaa

SEQ ID NO: 242006 - DNA, 120 bp, Artificial Sequence
  ENSG00000121446_41 (sequence is synthesized)
gacaagcaatttaaccttttgaacatcaaatgttgtctagaacttaactctagttctcctagcaaggactaagtagatattcacccagagacttttggagggattgggaacctctgggaa

SEQ ID NO: 242007 - DNA, 120 bp, Artificial Sequence
  ENSG00000121446_42 (sequence is synthesized)
atatatgcttctcttgaatgagccagtgtttagctgtctcccatgtgcttagaaaaatgagacatgctttagggattctttggattcctgttcctcctgcagtttctttacttactttcc

SEQ ID NO: 242008 - DNA, 120 bp, Artificial Sequence
  ENSG00000121446_43 (sequence is synthesized)
tacatacttacaaagaaatttatgttatgcaaactgtgtttacatatattatcttaaacgaacctctccacaaccctacacagtgggtggggaggagtattattatccctgttttacaga

SEQ ID NO: 242009 - DNA, 120 bp, Artificial Sequence
  ENSG00000121446_44 (sequence is synthesized)
tgaggagactgaggttcagagtggttgagggacttgcctagaatcacttggtaagtggtaaaaccagcattagaaaccaggtctcttggtctctcatcaccataaataatgcatgtgcgg

SEQ ID NO: 242010 - DNA, 120 bp, Artificial Sequence
  ENSG00000121446_45 (sequence is synthesized)
agacccagttcagcaagtgaaatgggaaaagcctattgagatagaacagactgtccctcaaggagaggggaggagggcagcaggcaaaaccaccagatccaaagtgccatagaaaataaa

SEQ ID NO: 242011 - DNA, 120 bp, Artificial Sequence
  ENSG00000121446_46 (sequence is synthesized)
ttcagtcttagccaagattgacctccaagggatccaatccaaggactggttgaaggtagggataacaaggggcttggggccaggaaggaagagatgatggggaatattgcacaggcttct

SEQ ID NO: 242012 - DNA, 120 bp, Artificial Sequence
  ENSG00000121446_47 (sequence is synthesized)
agagaacataaaggtcataaagagtacataaatctgagttcacaagagaaaccaggtctattccagggaagggcccgctgggaatagagtgaggtggtcaaggctgtcagtaagtggcag

SEQ ID NO: 242013 - DNA, 120 bp, Artificial Sequence
  ENSG00000121446_48 (sequence is synthesized)
ggtggaaactaggattaggacctgagcaaaagcccttcagacactctggccataccaggtggggttagatagggatgtcagagtctgatgctggggtgcaccccaggggttaacctcacc

SEQ ID NO: 242014 - DNA, 120 bp, Artificial Sequence
  ENSG00000121446_49 (sequence is synthesized)
ccaggcctcaggatagtaggccctttacaggctccattcactgatggttccagaaagaagccccaacaaactgcccatgccaggcccgcgctggagccaggtctggacaaagaggaggcc

SEQ ID NO: 242015 - DNA, 120 bp, Artificial Sequence
  ENSG00000121446_50 (sequence is synthesized)
tcagaacaaaggccactggcaggtagaaccccaaggccaggatgctttcctcttctctgttggacacccacattctctgaggactggcccggccctgtttcccctgtgctcggtgctcca

SEQ ID NO: 242016 - DNA, 120 bp, Artificial Sequence
  ENSG00000121446_51 (sequence is synthesized)
tgtccaagcatgcaataggagatggtataaactttccagagactagcctcataccctgcctctccttggcatgcagaacctagaaactgagcttgctgcctctggtgggaagttaaagag

SEQ ID NO: 242017 - DNA, 120 bp, Artificial Sequence
  ENSG00000121446_52 (sequence is synthesized)
gtgtttctctgtgggggtcctttctcacctccaactaggacaggcacttttaagaagttggagtctctgacccacttttcagtagaacaatactgctgtggaagtgtcccagatgatctt

SEQ ID NO: 242018 - DNA, 120 bp, Artificial Sequence
  ENSG00000121446_53 (sequence is synthesized)
tgatttttatttttcatttttatagatttaaggagtacaagtgcagttttgttacatggatatattgggaggtagtgaagtctagggttttagtgtagtcatgatccaaatagtatacat

SEQ ID NO: 242019 - DNA, 120 bp, Artificial Sequence
  ENSG00000121446_54 (sequence is synthesized)
tgtgcccattaggtaatttctcacccttacccacctcccactctcgcactcttccaagtctccagtgtctattatttcgcggtcaatgtccaggtgtacatattatttagctctcacgtg

SEQ ID NO: 242020 - DNA, 120 bp, Artificial Sequence
  ENSG00000121446_55 (sequence is synthesized)
taactgagaacatgcaatacttcactttccatttctgagttatttcacttaagataatggtctccagttccatccatgttgctgcaaaagacatgattttatctttttatgactgtttag

SEQ ID NO: 242021 - DNA, 120 bp, Artificial Sequence
  ENSG00000121446_56 (sequence is synthesized)
tattacattgtgtatatgtatcctacattctctttattcagatgatcttttattgccagcttcctaaatattccaggctgctcagggcagggtgcataaggtgggaaagaaagaagatct

SEQ ID NO: 242022 - DNA, 120 bp, Artificial Sequence
  ENSG00000121446_57 (sequence is synthesized)
gttcttctgcttggcaggatattggcaataagaacagaagggacttgagtctgttaaaatctgcttcagcctaactcacttctgcacaagcttccaagtgaaactgatgctaagttaggg

SEQ ID NO: 242023 - DNA, 120 bp, Artificial Sequence
  ENSG00000121446_58 (sequence is synthesized)
ctctgggagaatccccaggggtcatgaaaaccatagctgaggagtgccaaagagttatttgaaggccaaggtggtagacagcagcctctgaatgacaggcttggtgtccttgccagccaa

SEQ ID NO: 242024 - DNA, 120 bp, Artificial Sequence
  ENSG00000121446_59 (sequence is synthesized)
gtcacttctcaggcctgtttccagacttgtccttccaacagggacttgaagctgcccaggaattatttgcccgtcccagtgcccagaagacaaaccagatactttgaagctctttacact

SEQ ID NO: 242025 - DNA, 120 bp, Artificial Sequence
  ENSG00000121446_60 (sequence is synthesized)
ggaaaagcaatgcatggcttcagagtttataaggccttggggaagaaggtgagactaagaatgtgagaagccctattctgaagcctgaaggtttcagttttggctattgccattcctaaa

SEQ ID NO: 242026 - DNA, 120 bp, Artificial Sequence
  ENSG00000121446_61 (sequence is synthesized)
ggaaatgacagtgacaaaccaacagagaatgcaacctcaattactgcatcataattgtgataactggctgttttctctcccttcagacaaaaattatcctacatcaaaaaagagaagtaa

SEQ ID NO: 242027 - DNA, 120 bp, Artificial Sequence
  ENSG00000121446_62 (sequence is synthesized)
gcccagaaggagatttgcaagatgctcagtccctggtatgatgagtttctagatgaagaggactactggtttctcctttttacgacataactaaaatgtcctttgaggagctttgctaca

SEQ ID NO: 242028 - DNA, 120 bp, Artificial Sequence
  ENSG00000121446_63 (sequence is synthesized)
aaaatgagccatcatggtagaaaatcaggtccctcatccaattttcagccctgagtcagacctagaagctctgaaatttaaaaaaaaaaaaaaaagcattttaccagttaggaagaatct

SEQ ID NO: 242029 - DNA, 120 bp, Artificial Sequence
  ENSG00000121446_64 (sequence is synthesized)
ggaagaagaaagagtaattactgttttaaaagggttatgtgttaaagtaaatgaaattgttatttttcctagagtcaaccaaagatcagcatggtccctgttgttctaaagctaaacctc

SEQ ID NO: 242030 - DNA, 72 bp, Artificial Sequence
  ENSG00000121446_65 (sequence is synthesized)
aaagatcagcatggtccctgttgttctaaagctaaacctctcaaggaaaaggactcagtgcataagatgact

SEQ ID NO: 242031 - DNA, 120 bp, Artificial Sequence
  ENSG00000121446_66 (sequence is synthesized)
aacaaattactgtgtcaggaagagcatggcaacatgagcagtgctgatctttgaggatagtacagggccttattcataagacaactaaggcaagagggaggaagtaaaatgtggattggg

SEQ ID NO: 242032 - DNA, 120 bp, Artificial Sequence
  ENSG00000121446_67 (sequence is synthesized)
ccacctctcctccagagagaagactggtatggggtttgagattatgcagtgatttcatttgttgccaagtcaatattattatggcgtggaatgggtgctaaaagccttctcaaattatta

SEQ ID NO: 242033 - DNA, 120 bp, Artificial Sequence
  ENSG00000121446_68 (sequence is synthesized)
ggactaggttgctctcacacttgagaaattcatggataacctccttgccagggaaaaggagacatttcatttccaagttatggtggcatcgcaattacaccattattgcatggactgaag

SEQ ID NO: 242034 - DNA, 120 bp, Artificial Sequence
  ENSG00000121446_69 (sequence is synthesized)
tctgtatgatccaagatgatgagatggaaaaaggcagaccagtggctactccagaaatgcattggcggggtcagagggatgtggcgcttctattcctacctcacaggcagtgcaggtgaa

SEQ ID NO: 242035 - DNA, 120 bp, Artificial Sequence
  ENSG00000121446_70 (sequence is synthesized)
atggcaacatgagcagtgctgagataattggttctacaaatcttataattctgctagaggatgaagtctttgccgattttttcaacacatttctttccctcccgctttgttttgcaggtt

SEQ ID NO: 242036 - DNA, 120 bp, Artificial Sequence
  ENSG00000121446_71 (sequence is synthesized)
actcccaggaagatgatgaaataggaagcactaggaatctgtttcctcatctagacaacaattgtactggcagaatctgtatgatatgctcagtccctggtatgatgagtttctagatga

SEQ ID NO: 242037 - DNA, 120 bp, Artificial Sequence
  ENSG00000121446_72 (sequence is synthesized)
agaggactactggtttctcctttttacgagtcaaccaaagatcagcatggtccctgttgttctaaagctaaacctctcaaggaaaaggactcagtgcataagatgactttgacacagaac

SEQ ID NO: 242038 - DNA, 120 bp, Artificial Sequence
  ENSG00000121446_73 (sequence is synthesized)
tgtaatattttgcaagtatttacgagtctcattctgttgcccgggctggggtggaatggcacgatctcagctcactgcaaaatctgcctcccagattcaagcaattcttgtgcctcagac

SEQ ID NO: 242039 - DNA, 120 bp, Artificial Sequence
  ENSG00000121446_74 (sequence is synthesized)
gaaaggtcctggtaccatcttccccagaaacgatcaagaagggcaatgggttgacagcccagatatggcaggaccagactgcaatggaactctttgttttttaggaatctcatacagccc

SEQ ID NO: 242040 - DNA, 120 bp, Artificial Sequence
  ENSG00000121454_0 (sequence is synthesized)
agagctgcagcaacagcgtctcaacctgggatgtgcaccaaccccggagagcgagatcaaagggactggaaacagactggggactggcggggggagggggccggccagcctgtggagtcc

SEQ ID NO: 242041 - DNA, 120 bp, Artificial Sequence
  ENSG00000121454_1 (sequence is synthesized)
tccctgagaagcggagggcccggcttccaccgtgactccagcggcctgcttggggttttaattattattttgaaatttctgaatcgagctagagcgagagagcgagagatctccgtagac

SEQ ID NO: 242042 - DNA, 120 bp, Artificial Sequence
  ENSG00000121454_2 (sequence is synthesized)
tgcgactcgctggctttcgctccgagatgatgcagagtgcgactgtccccgcggaaggggctgtcaaggggctcccggagatgctaggtgtgccgatgcaacagattccccagtgcgctg

SEQ ID NO: 242043 - DNA, 120 bp, Artificial Sequence
  ENSG00000121454_3 (sequence is synthesized)
gctgcaaccagcacatcctggacaagttcatcctgaaggtcctggacagacactggcacagctcctgcctcaagtgtgcagactgccagatgcagctggcggacaggtgcttctccaggg

SEQ ID NO: 242044 - DNA, 120 bp, Artificial Sequence
  ENSG00000121454_4 (sequence is synthesized)
ctgggagcgtctactgcaaggaggacttcttcaagcgcttcggcacaaaatgcacggcctgccagcagggtatccccccaacccaggtggtccgcaaggcccaggactttgtctaccacc

SEQ ID NO: 242045 - DNA, 120 bp, Artificial Sequence
  ENSG00000121454_5 (sequence is synthesized)
tgcactgctttgcttgcatcatctgcaaccggcagctggccacgggggacgaattctacctcatggaggacgggcggctggtgtgcaaggaagactacgagacagccaagcagaacgatg

SEQ ID NO: 242046 - DNA, 120 bp, Artificial Sequence
  ENSG00000121454_6 (sequence is synthesized)
actcagaggctggagctaagcggccccggaccaccatcacagccaagcagctggagacattaaagaatgcatacaagaactcccccaagcctgcccggcacgtgagggagcagctgtcct

SEQ ID NO: 242047 - DNA, 120 bp, Artificial Sequence
  ENSG00000121454_7 (sequence is synthesized)
cagagacaggcctggacatgagggtcgtacaggtttggtttcagaacagaagggccaaagagaaacgcctgaagaaggatgcagggcggcaccgctgggggcagttctataagagcgtca

SEQ ID NO: 242048 - DNA, 120 bp, Artificial Sequence
  ENSG00000121454_8 (sequence is synthesized)
agaggagccggggcagcagcaagcaggagaaggagagctctgcagaggactgtggggttagtgacagtgagctgagcttccgagaggatcaaattctctcagaacttggccacaccaata

SEQ ID NO: 242049 - DNA, 120 bp, Artificial Sequence
  ENSG00000121454_9 (sequence is synthesized)
ggatttatggcaacgtgggggacgttacaggcggacagttaatgaatgggagcttctccatggacgggacaggacaatcctatcaggacttgagggatgggagcccctatggaatccccc

SEQ ID NO: 242050 - DNA, 120 bp, Artificial Sequence
  ENSG00000121454_10 (sequence is synthesized)
agtctccatcctccatatcgtccctgccatcccacgctcctttgctcaatgggctggattacacggtggacagtaatttgggcatcattgcgcatgcagggcagggagtaagccagacgc

SEQ ID NO: 242051 - DNA, 120 bp, Artificial Sequence
  ENSG00000121454_11 (sequence is synthesized)
tgagagccatggctgggggacccacctctgacatctccacaggaagcagtgtaggctatcccgactttccaactagcccaggctcttggctcgatgaaatggatcatcctcctttttaaa

SEQ ID NO: 242052 - DNA, 120 bp, Artificial Sequence
  ENSG00000121454_12 (sequence is synthesized)
cttctctcctccccaccctacctgcccccctggcttgagagaatatcttcaaggatcaaaagagacttgccttttaaggatcgaaagtacgccaatgtgaatttccattattttcaatgg

SEQ ID NO: 242053 - DNA, 120 bp, Artificial Sequence
  ENSG00000121454_13 (sequence is synthesized)
aagtcctccgctgattcctagaaggctgtgagaccacactagggcattgtttccctggggaagcagtgggagagcagactcatctcagaacacagcacagggggtaatggcctagagctc

SEQ ID NO: 242054 - DNA, 120 bp, Artificial Sequence
  ENSG00000121454_14 (sequence is synthesized)
tagggacactggcttgttgggtctctcccctgctgttctgcttaggggcttggctgctcagtgctttggtagcacaaggtgactgtgataggcccccttggcctttgggaactttgctcc

SEQ ID NO: 242055 - DNA, 120 bp, Artificial Sequence
  ENSG00000121454_15 (sequence is synthesized)
aactggtgtgtctcacacaatgcctcccaaaacactgctctcaccagaactgagactcctaaggtagaggcctcacagcccttgagtaaaataaaagtgatttctggaccatccttattg

SEQ ID NO: 242056 - DNA, 120 bp, Artificial Sequence
  ENSG00000121454_16 (sequence is synthesized)
aaccctatatttcaaaatgaaaagatcagttattaaaggtcagtgaacactttgatggccagtttgatattaaaaacatgccccctccttttttatttttgctgtgaagatatgaattct

SEQ ID NO: 242057 - DNA, 120 bp, Artificial Sequence
  ENSG00000121454_17 (sequence is synthesized)
ttcctacaaaccagagaatatgaacctgttttggtttttaagtgtcccatctatatcattgactctgatggcaagaggtggttttcattgcaggtgactgaggctgagctgagtagccct

SEQ ID NO: 242058 - DNA, 120 bp, Artificial Sequence
  ENSG00000121454_18 (sequence is synthesized)
ggaccaccgctgcagattgcctgagtcgtccccttggtgcacagtgtgccttcttcaattgcttgtatcatttattccacaagacaggctgtgggctgtaaaatgagcaaaactaaaatg

SEQ ID NO: 242059 - DNA, 120 bp, Artificial Sequence
  ENSG00000121454_19 (sequence is synthesized)
tggggagaacaaaatgacaatcaatcagtgaacatttgtagacacatttggattccaaacctgcagtctgttcagccatatcggctgatgccagtcttccagagttccccatcccttgta

SEQ ID NO: 242060 - DNA, 120 bp, Artificial Sequence
  ENSG00000121454_20 (sequence is synthesized)
gggtgaaatatttggagtctgttttgaaggagttggtttagatgagcttgcaagtctacccctctgaaagctttctctgctgtcctagctgactcaattggaggacagttttggtcattt

SEQ ID NO: 242061 - DNA, 120 bp, Artificial Sequence
  ENSG00000121454_21 (sequence is synthesized)
ccaggaaccagcaatttttttttggcctaccttggttgggaagagtaatttagggagcagccctaaaattgtccaaagggttctaagtggttcttgggctgcatctctctggattgctgg

SEQ ID NO: 242062 - DNA, 120 bp, Artificial Sequence
  ENSG00000121454_22 (sequence is synthesized)
ctggacacctgccatgccttgggctgcagtcccatggtcagaaagccagaactctctggccagtggtggtgcagggactccccgttgtgcaggtttgcagtagcaaatcactaagcctga

SEQ ID NO: 242063 - DNA, 120 bp, Artificial Sequence
  ENSG00000121454_23 (sequence is synthesized)
ggccagagcaaggccaacccccgctttacgagttgccactcctgcgacagactgcactgctgtgggaaacgctgtcctgaatggtgctgcagctcccacccaccttgtgcacccatctac

SEQ ID NO: 242064 - DNA, 120 bp, Artificial Sequence
  ENSG00000121454_24 (sequence is synthesized)
ctggcctcccattctcttaaatgagatcagcagagtaggaaagggtgagaaggcattgcctatcacatgaagtgatggggccagagaccctaaggacccttccttctacgaatggttggt

SEQ ID NO: 242065 - DNA, 120 bp, Artificial Sequence
  ENSG00000121454_25 (sequence is synthesized)
caccttttgaggactgcaaagacttaggcatgtcataggcagactaaaggaagaatacacagttcctcttggactgctacatcttttgtaagcccttttccaggactaaactaagttcaa

SEQ ID NO: 242066 - DNA, 120 bp, Artificial Sequence
  ENSG00000121454_26 (sequence is synthesized)
ttaagtaagttctttaaaacagtaaattccgggatcagccttcgggccctcttctctgaccaattttatagcgtaccctcgttttttggtgtgctgcagtggtcatgatttttgcttgag

SEQ ID NO: 242067 - DNA, 120 bp, Artificial Sequence
  ENSG00000121454_27 (sequence is synthesized)
aagtctgcaaacatagacacttctcttgaggttccatgtttatggatgatgttgtgttaatcctagccaattctgtgctattgggaattctccaatcatgaacactggggtggggaggaa

SEQ ID NO: 242068 - DNA, 120 bp, Artificial Sequence
  ENSG00000121454_28 (sequence is synthesized)
gacacaaatgccatgtgaggaaaggaaaatgcagtcgtctttttggaggatggctttttaaatacacccttcttagcaggctgcttaaaatacacaggagaaaaggctctgctgggcaat

SEQ ID NO: 242069 - DNA, 120 bp, Artificial Sequence
  ENSG00000121454_29 (sequence is synthesized)
gaaccagatgaaaagctgcccacccagatcactgttgcaggttgactatttggcttagcaactcatgggatttcagaggcccttgaagtttttggtgagtatagtgtgggggagagcagg

SEQ ID NO: 242070 - DNA, 120 bp, Artificial Sequence
  ENSG00000121454_30 (sequence is synthesized)
ctttttaaaaggggggggggcatcctcctctgtgtagcactgtttaagatcactgtaagtaagttgaccagtttttgtaagttaatcatactaattcccagttcaatagtggaaggagag

SEQ ID NO: 242071 - DNA, 120 bp, Artificial Sequence
  ENSG00000121454_31 (sequence is synthesized)
gccttcctcatttatactaataatataataaatctcttgaggaactcagtgagcagttgacgaggtcaatagttctttggcatcagtagggctggttagctggaaaaacccttgagagca

SEQ ID NO: 242072 - DNA, 120 bp, Artificial Sequence
  ENSG00000121454_32 (sequence is synthesized)
ctggcctgaaaaccaggagagctttgttttccagagccacctccccagaaagcagcaaacactgctgcctgtttagaagcacagccacagtaggtctaagattttaaatggatctcccta

SEQ ID NO: 242073 - DNA, 120 bp, Artificial Sequence
  ENSG00000121454_33 (sequence is synthesized)
caggttgggttagcattatgggtgggctggtgccactaatgagccattgcatgacaggactcttctggggtttggaaatggagaaaagccgggcattcattacttttagcttctcttaga

SEQ ID NO: 242074 - DNA, 120 bp, Artificial Sequence
  ENSG00000121454_34 (sequence is synthesized)
ggcactcctctgttgcttggaagtctattatggggtataaggtgctacatggtagctgtttccccccttgctaaaatgacatggatgaattttaaaaatgaaatgagaccttctagaggc

SEQ ID NO: 242075 - DNA, 120 bp, Artificial Sequence
  ENSG00000121454_35 (sequence is synthesized)
aaccattatctgcagtgcctggctggtcgactttagagtaggaagctcttgaatccaggagcaaattagttaaaaccccaagttccagtggtaactggtataagcaaaatggaaactgag

SEQ ID NO: 242076 - DNA, 120 bp, Artificial Sequence
  ENSG00000121454_36 (sequence is synthesized)
gggctatggaggaatctctgtttgttggaacgtaatgaaaccatggaggaaataccagatttaagggctaagaagctggcccgatgggtaaatcagtgttgggagtcaggttcttggccc

SEQ ID NO: 242077 - DNA, 120 bp, Artificial Sequence
  ENSG00000121454_37 (sequence is synthesized)
ttcaaggacttgctatgcaacctcaggcaaattcctctcagtctttgtgctttctctttcttgtctcatctgacagttatgaatataacgtaaaataaagatcaactatcattgataaca

SEQ ID NO: 242078 - DNA, 120 bp, Artificial Sequence
  ENSG00000121454_38 (sequence is synthesized)
ctgttcctgcaaatgaatactgtgaaacatcagggaaagaggaaaaaattaagccacaagaaaaccatttggcagtgtccttaaactttttttgggggggggcagtgtaaaacatgaaac

SEQ ID NO: 242079 - DNA, 120 bp, Artificial Sequence
  ENSG00000121454_39 (sequence is synthesized)
ctagtaagataattgggccattagatcttcatcattaaactcactttgcaaggaagtgtaagaaatctgtaaaacaaaagacattcctatctcagaagctcaaactggtgatttccaact

SEQ ID NO: 242080 - DNA, 120 bp, Artificial Sequence
  ENSG00000121454_40 (sequence is synthesized)
gcctctttacaggagggggctcaaggcttctgatgagcaaaggctgtgtgttgtatgacagtccactctctgcacctacacttccacgtgccacgactgacaacttggttataaccatga

SEQ ID NO: 242081 - DNA, 120 bp, Artificial Sequence
  ENSG00000121454_41 (sequence is synthesized)
aaataatgaccatacctccccagccagcagggtctggaaggcctgaggaggctcatttttaaacactgcactttaaaaattggaaaccgtgagatgaagaaaaattcaattaagcggaaa

SEQ ID NO: 242082 - DNA, 120 bp, Artificial Sequence
  ENSG00000121454_42 (sequence is synthesized)
tgagttttgttttattgcctgctgctgaagggctctgggcatgctgaaagctaaatgaaaagcacatcactggctctcttctttcttggattggtcaattggccctttttgcagtagttg

SEQ ID NO: 242083 - DNA, 120 bp, Artificial Sequence
  ENSG00000121454_43 (sequence is synthesized)
ctccaactgttctaaacagtgagtgactggagccaaaaagagagagctcagcaaagccatcccatccacactctgcttggtaggaccacactaaaagcacagtttcatgctgctagctct

SEQ ID NO: 242084 - DNA, 120 bp, Artificial Sequence
  ENSG00000121454_44 (sequence is synthesized)
ggtaaggagacagctgcaggtttgggaggtgcaccaagcattcctttgcttagggaggcagagcacaggtgaacagaggaaggacacccccactctcatctattgcccaccgagaggcaa

SEQ ID NO: 242085 - DNA, 120 bp, Artificial Sequence
  ENSG00000121454_45 (sequence is synthesized)
gaatcacaccaactttcccacttgaggactgtgttcggccaaacaagcaggttcagggctgcgggattccagaagttgctctgagcttgcaatcagacctcaaagccccagatcccctca

SEQ ID NO: 242086 - DNA, 120 bp, Artificial Sequence
  ENSG00000121454_46 (sequence is synthesized)
caaagccccagatcccctcagctctggatcgttgccctcatccttcacaatgtaaattttgtacagttaaagagaaatgaagtctcgtttcctggggaaaaaaaagaaaaaaagaaaaaa

SEQ ID NO: 242087 - DNA, 120 bp, Artificial Sequence
  ENSG00000121454_47 (sequence is synthesized)
tttattgccatatgactttggaaaacagaagctggtgcgtttgtttgtatatgcctcctgtgtgttggcatgagatgtgtacggtaaaattatgtaaaataaatatggaaattctttaga

SEQ ID NO: 242088 - DNA, 120 bp, Artificial Sequence
  ENSG00000121454_48 (sequence is synthesized)
taagtcagaacggtccgtctcgtggccctggcctgtctctgcctctccccaagcagtgagggggaagtttgcagcagggtaggccagggagggtggagagtccactctgggaggggcagg

SEQ ID NO: 242089 - DNA, 120 bp, Artificial Sequence
  ENSG00000121454_49 (sequence is synthesized)
taaatcctggagctgagaggatgccccttgttgaggtcccccttctgatcactggcccatcactgccagaggttcagcctctagacctcatttgatctctgcatggggcaggggtgagga

SEQ ID NO: 242090 - DNA, 120 bp, Artificial Sequence
  ENSG00000121481_0 (sequence is synthesized)
atattgtgcggcggcgccggcgtccgcggcagctgataccagagtcttgctccggccgcggccagcggagccctgggctggggcaggagccgcaatgtctcaggctgtgcagacaaacgg

SEQ ID NO: 242091 - DNA, 120 bp, Artificial Sequence
  ENSG00000121481_1 (sequence is synthesized)
aactcaaccattaagcaaaacatgggaactcagtttatatgagttacaacgaacacctcaggaggcaataacagatggcttagaaattgtggtttcacctcgaagtctacacagtgaatt

SEQ ID NO: 242092 - DNA, 120 bp, Artificial Sequence
  ENSG00000121481_2 (sequence is synthesized)
aatgtgcccaatttgtttggatatgttgaagaacaccatgactacaaaggagtgtttacatcgtttttgtgcagactgcatcatcacagcccttagaagtggcaacaaagaatgtcctac

SEQ ID NO: 242093 - DNA, 120 bp, Artificial Sequence
  ENSG00000121481_3 (sequence is synthesized)
ctgtcggaaaaaactagtttccaaaagatcactaaggccagacccaaactttgatgcactcatcagcaaaatttatccaagtcgtgatgagtatgaagctcatcaagagagagtattagc

SEQ ID NO: 242094 - DNA, 120 bp, Artificial Sequence
  ENSG00000121481_4 (sequence is synthesized)
caggatcaacaagcacaataatcagcaagcactcagtcacagcattgaggaaggactgaagatacaggccatgaacagactgcagcgaggcaagaaacaacagattgaaaatggtagtgg

SEQ ID NO: 242095 - DNA, 120 bp, Artificial Sequence
  ENSG00000121481_5 (sequence is synthesized)
agcagaagataatggtgacagttcacactgcagtaatgcatccacacatagcaatcaggaagcaggccctagtaacaaacggaccaaaacatctgatgattctgggctagagcttgataa

SEQ ID NO: 242096 - DNA, 120 bp, Artificial Sequence
  ENSG00000121481_6 (sequence is synthesized)
taacaatgcagcaatggcaattgatccagtaatggatggtgctagtgaaattgaattagtattcaggcctcatcccacacttatggaaaaagatgacagtgcacagacgagatacataaa

SEQ ID NO: 242097 - DNA, 120 bp, Artificial Sequence
  ENSG00000121481_7 (sequence is synthesized)
gacttctggtaacgccactgttgatcacttatccaagtatctggctgtgaggttagctttagaagaacttcgaagcaaaggtgaatcaaaccagatgaaccttgatacagccagtgagaa

SEQ ID NO: 242098 - DNA, 120 bp, Artificial Sequence
  ENSG00000121481_8 (sequence is synthesized)
gcagtataccatttatatagcaacagccagtggccagttcactgtattaaatggctctttttctttggaattggtcagtgagaaatactggaaagtgaacaaacccatggaactttatta

SEQ ID NO: 242099 - DNA, 120 bp, Artificial Sequence
  ENSG00000121481_9 (sequence is synthesized)
cgcacctacaaaggagcacaaatgagcctttaaaaaccaattctgagactgaacttttttatagcctatttctttaatattaaagatgtactggcattacttttatggacagatcttgga

SEQ ID NO: 242100 - DNA, 120 bp, Artificial Sequence
  ENSG00000121481_10 (sequence is synthesized)
tatgttgttcaattttctttctgagccagactagtttacgctattcaaatcttttcccctttatttaagatttcctttttggaagggactgcaattattcagtatttttttctttccttt

SEQ ID NO: 242101 - DNA, 120 bp, Artificial Sequence
  ENSG00000121481_11 (sequence is synthesized)
aaaaaaatatatctgaagtttcttgtgtttttttttttccccacaaagtgtgtttccacttggagcaccattttgacccaggaatttttcatagtttctgtattcttataagattcagtt

SEQ ID NO: 242102 - DNA, 120 bp, Artificial Sequence
  ENSG00000121481_12 (sequence is synthesized)
ggctgtccttttcctgctcccctcaaaagatttttagtcatacagaatgttaaatattatgtattctgactttttttttcccccggagtcttgtatatttatagttttctatataaactg

SEQ ID NO: 242103 - DNA, 120 bp, Artificial Sequence
  ENSG00000121481_13 (sequence is synthesized)
tagtatcttcatgaagacccaaggctcaaatttactgtccttaaaaacaattctcataggattattcttttcatggtattttcttccataatatctcattttaaaaagaagttctttatg

SEQ ID NO: 242104 - DNA, 120 bp, Artificial Sequence
  ENSG00000121481_14 (sequence is synthesized)
tccctgtaattttggaatttctggtcctgggaagaatcaaacaaaatcttaagttctatgagaacttggttcattgacatattctgctgaagaaagaaaaattaaattggtagtaaaata

SEQ ID NO: 242105 - DNA, 120 bp, Artificial Sequence
  ENSG00000121481_15 (sequence is synthesized)
tagtcttcaagtatacgtttgagagtgcttttttttgtattagttctgctgtcacttcatttcctgtattatatgtgatgtttttccccattaaaataccagagataatggagatatttt

SEQ ID NO: 242106 - DNA, 120 bp, Artificial Sequence
  ENSG00000121481_16 (sequence is synthesized)
gcactttagccttgatgaaaagtacaagatatgttcaaagcttccctaatttttttcttatttgtagccacataagtttcaagaataacatggcacacagaacaatggaaaaaagtttgt

SEQ ID NO: 242107 - DNA, 120 bp, Artificial Sequence
  ENSG00000121481_17 (sequence is synthesized)
ttccattggaaaattatatcattttgggttgccacatcagtttataaatttggcgctcttttaattacactctgtagaaggttaatagagcttgagccctgctttaatatgtagtgaaag

SEQ ID NO: 242108 - DNA, 120 bp, Artificial Sequence
  ENSG00000121481_18 (sequence is synthesized)
ataattctgtagaaaaacgtcagccagtagggtaaagtcattctactgttcttaatttttatattgaggaacaatattgggtgtttgggagccagaaagctttgttgacagatcagaaat

SEQ ID NO: 242109 - DNA, 120 bp, Artificial Sequence
  ENSG00000121481_19 (sequence is synthesized)
aagattgacttgggtgttatatttcatctctctccagactctaggtatatttccaactttatatatcacagtatttaaaaagacatgtttgcattgagaaattaaccctaaagggttttc

SEQ ID NO: 242110 - DNA, 120 bp, Artificial Sequence
  ENSG00000121481_20 (sequence is synthesized)
aatagggtgtagacctccagtacctttgtaactaaagtctgtctagtcattgtaaatatttatctgtcagttttgacagattggggccagcttgatgttttaaatcttcagcccggtatg

SEQ ID NO: 242111 - DNA, 120 bp, Artificial Sequence
  ENSG00000121481_21 (sequence is synthesized)
gttttaaatcttcagcccggtatgaaaacttaaaggtatatattcaattttttaccattttatggaaaatatttaaaatctgtttttacagggttttttttttttttttttttttgtaat

SEQ ID NO: 242112 - DNA, 120 bp, Artificial Sequence
  ENSG00000121481_22 (sequence is synthesized)
ccaaaaatcaagggaacttttatatattcaattccttttctggtgtaatgttaaagttgtatagattattaatgcatgcccactgaatataaccctggttttgtgataaaactgcttaga

SEQ ID NO: 242113 - DNA, 120 bp, Artificial Sequence
  ENSG00000121481_23 (sequence is synthesized)
ttttgttgatgacattagattagtagttgcattaaataactaaattcccattgtgattaattgaaattttgtctttaagcagagagttatttgtgactataagctttgtgcttagagaat

SEQ ID NO: 242114 - DNA, 120 bp, Artificial Sequence
  ENSG00000121481_24 (sequence is synthesized)
gtatgtgtttttatctgtcagtatgggaggatataaactgcatcattagtgaaattattggttgtgtaatcctttgtgaaatataattctaggtatttgatagggtattgagtgtatttt

SEQ ID NO: 242115 - DNA, 120 bp, Artificial Sequence
  ENSG00000121481_25 (sequence is synthesized)
gtgtgtgtgtggatgtgtgttttggggtacggggagaggcgatgctattggccatcactaccaaccagggtttcaaaaagtattacctaagtaatttcttttatcactatctcaactgag

SEQ ID NO: 242116 - DNA, 120 bp, Artificial Sequence
  ENSG00000121481_26 (sequence is synthesized)
gaagaaaaggctcaccacaagtggtgtgaaggctttgggtacttagttctaaatttttttatggtaacatatacatagccacatttacagttttaaccattttaaggcatgtaattcagt

SEQ ID NO: 242117 - DNA, 120 bp, Artificial Sequence
  ENSG00000121481_27 (sequence is synthesized)
ggggttaggtacattcacaatgttgtgtaatgatcaccgctgtctacttgtaaaactttttcatcaccccaaacagaaactctgtgtgcaattaaagtaatgcatttctcttcttcttaa

SEQ ID NO: 242118 - DNA, 87 bp, Artificial Sequence
  ENSG00000121481_28 (sequence is synthesized)
cccttagaagtgggtatgttgaaaagagttgttatactaggtacttaattgtaccacgaaagtgctttccagggtttgagaaataca

SEQ ID NO: 242119 - DNA, 120 bp, Artificial Sequence
  ENSG00000121481_29 (sequence is synthesized)
ggatgtgtgtctgcatcgtgggggtggggtagggggcactttgtgcagatatcgctccttccttctggggggtcggagtcggggttccagtgtagaggagctcctcgacctcggggttcc

SEQ ID NO: 242120 - DNA, 120 bp, Artificial Sequence
  ENSG00000121486_0 (sequence is synthesized)
gtaacgcctcggggaaagggaagcggacgggcatctggaatcgctgcctctggctttctgttttctactaacaggatttggtcactggttcttcatcttttgtctgttgcacgcatcccg

SEQ ID NO: 242121 - DNA, 120 bp, Artificial Sequence
  ENSG00000121486_1 (sequence is synthesized)
ccctccccacttgcttccccactccttggatccagccctgtgggcattcacgtcagttctctgaccccgccgtgagccccgctccgggtccccgggcgggcttggcacggaggcggtaac

SEQ ID NO: 242122 - DNA, 120 bp, Artificial Sequence
  ENSG00000121486_2 (sequence is synthesized)
tatggagaatatggcggaggaggagctgctgcccctggagaaggaggaggtggaggtggcccaggtccaggtcccgaccccggcccgggactcggctggggtcccagctccggccccgga

SEQ ID NO: 242123 - DNA, 120 bp, Artificial Sequence
  ENSG00000121486_3 (sequence is synthesized)
ttcggctctggactcggctccgactccggcctcggctccagccccagcccctgccctggcccaggctccggccctgtccccgtccctagcctctgcccctgaggaggctaaaagcaagag

SEQ ID NO: 242124 - DNA, 120 bp, Artificial Sequence
  ENSG00000121486_4 (sequence is synthesized)
acacatctcaattcaaaggcagcttgctgatctagagaatttagcttttgtaactgatggaaattttgactctgccagctcattgaactcagataatcttgatgcaggcaacagacaggc

SEQ ID NO: 242125 - DNA, 120 bp, Artificial Sequence
  ENSG00000121486_5 (sequence is synthesized)
ttgtccattgtgccctaaggaaaaattcagagcttgtaatagccataagcttcgtcgtcacctccagaatttacactggaaagtctcagttgaatttgaaggttacaggatgtgcatctg

SEQ ID NO: 242126 - DNA, 120 bp, Artificial Sequence
  ENSG00000121486_6 (sequence is synthesized)
tcacttaccttgtcgaccagtgaaaccaaacattattggagaacagataaccagtaaaatgggagcccattatcattgtatcatttgttcagcaacaatcaccagaagaactgatatgct

SEQ ID NO: 242127 - DNA, 120 bp, Artificial Sequence
  ENSG00000121486_7 (sequence is synthesized)
aggacatgttaggcgccacatgaataaaggagagactaaatctagttatattgcagcttccactgctaaaccacctaaggaaattttgaaagaggcagacacggatgtacaagtttgtcc

SEQ ID NO: 242128 - DNA, 120 bp, Artificial Sequence
  ENSG00000121486_8 (sequence is synthesized)
caactattctatacctcagaaaacagattcctattttaaccccaaaatgaaactaaatcggcagctaatattctgtacattggctgctttggctgaggaacgaaaacctttggaatgtct

SEQ ID NO: 242129 - DNA, 120 bp, Artificial Sequence
  ENSG00000121486_9 (sequence is synthesized)
agatgcttttggagccactgggataatgggattacagtgggcaaaacatcttggaaatgcagtcaaagttacaatcaatgacttgaatgaaaattctgtgacactgattcaggaaaactg

SEQ ID NO: 242130 - DNA, 120 bp, Artificial Sequence
  ENSG00000121486_10 (sequence is synthesized)
ccatttaaacaaattgaaagtggtggtggacagtaaggaaaaggaaaagagtgatgatattcttgaagaaggagagaaaaatcttggtaatattaaggtgaccaaaatggatgccaatgt

SEQ ID NO: 242131 - DNA, 120 bp, Artificial Sequence
  ENSG00000121486_11 (sequence is synthesized)
actgatgcatttgagatcttttgatttcatacatctagacccttttggaacatcagtgaattatctagattctgcattcagaaatataagaaaccttggcatagtgtcagtgacttctac

SEQ ID NO: 242132 - DNA, 120 bp, Artificial Sequence
  ENSG00000121486_12 (sequence is synthesized)
agatatcagttctttatatgccaaggcacagcatgttgcccggcgtcactacggatgtaacattgtccgaactgaatattacaaggaactagcagccagaattgttgtagctgcagtggc

SEQ ID NO: 242133 - DNA, 120 bp, Artificial Sequence
  ENSG00000121486_13 (sequence is synthesized)
aagagctgcagcccgatgcaacaaaggcatagaagtactgtttgcagtggctctggaacattttgtgttggtagttgtgagagttttgaggggacctacttcagcagatgaaacagccaa

SEQ ID NO: 242134 - DNA, 120 bp, Artificial Sequence
  ENSG00000121486_14 (sequence is synthesized)
gaagattcaatacctgatccattgtcagtggtgtgaagagagaatttttcagaaggatggtaatatggtagaagaaaacccatatagacagctgccttgtaactgtcatggaagcatgcc

SEQ ID NO: 242135 - DNA, 120 bp, Artificial Sequence
  ENSG00000121486_15 (sequence is synthesized)
tggaaagacagcaatagaacttggacctctgtggtcaagttcccttttcaatactggattcctcaaaagaatgctatttgaatctcttcaccatggtttggatgacattcagaccctaat

SEQ ID NO: 242136 - DNA, 120 bp, Artificial Sequence
  ENSG00000121486_16 (sequence is synthesized)
aaagacattaatctttgaatcagagtgtacgcctcaaagtcagttttcaattcatgcatcttcaaatgtcaacaagcaagaagaaaatggtgtatttattaaaactacagatgacaccac

SEQ ID NO: 242137 - DNA, 120 bp, Artificial Sequence
  ENSG00000121486_17 (sequence is synthesized)
aacagataattacattgcacaaggaaagagaaaaagtaatgaaatgatcacaaatttaggcaagaagcaaaagactgatgtcagtactgaacatcctcccttttattacaacattcacag

SEQ ID NO: 242138 - DNA, 120 bp, Artificial Sequence
  ENSG00000121486_18 (sequence is synthesized)
ttttgtgctatttatctcaagcaggctttcgagtaagccgaactcattttgacccaatgggtgtacgcacagatgcacctctgatgcagtttaaatctatccttttaaagtacagcaccc

SEQ ID NO: 242139 - DNA, 120 bp, Artificial Sequence
  ENSG00000121486_19 (sequence is synthesized)
ccacctacactggaggacagtcagaaagccatgtccagtcagcatctgaagatacagtaactgaaagagttgaaatgtcagtgaatgacaaagcagaagcaagtggctgcagaagatggt

SEQ ID NO: 242140 - DNA, 120 bp, Artificial Sequence
  ENSG00000121486_20 (sequence is synthesized)
aaacgtagagaagaattggttctcaggtgtctgtatagatggcctaatagttctctataccaactgtagttctttttctgttctttcaattcagtagagtaaaaataaaaaacagtgtca

SEQ ID NO: 242141 - DNA, 120 bp, Artificial Sequence
  ENSG00000121486_21 (sequence is synthesized)
ttttcattcagaaactgagcagtttctaacttagctggtttgggagctttgctttccaagtttttttttgttttaaggcaaacttaaaattttaatggaaacatttcatatgaagccaag

SEQ ID NO: 242142 - DNA, 120 bp, Artificial Sequence
  ENSG00000121486_22 (sequence is synthesized)
tctcactgagatcaccctactgcttaataattcagaaaattttcacatgcaaagtgtttggaattttatgtatgttatgaaagccatcttttacaattcttaatcacatctctgcctaaa

SEQ ID NO: 242143 - DNA, 120 bp, Artificial Sequence
  ENSG00000121486_23 (sequence is synthesized)
ctgattcatgatgtttatgttttcctgtttgtagtgtacaaaatgaagctgaaggctcacatgttaaaatgaccctgaatagaataggaagaacaatgttcttacaggtcataatgtatt

SEQ ID NO: 242144 - DNA, 120 bp, Artificial Sequence
  ENSG00000121486_24 (sequence is synthesized)
tcacaattaaaaaactaaaatatgtacccatttttaagaaatcatacttctctccacattgatcttttcatttcttactagcttttaagaaattaaatacttgcctgagatagaaatact

SEQ ID NO: 242145 - DNA, 120 bp, Artificial Sequence
  ENSG00000121486_25 (sequence is synthesized)
ttatttttgtaactttaaggtctaaatgactaaacttcaaagtaagattttgtcagaataaattgagaccattaatctaatataatacttgttcatgagcactgaaatcctgaagaggag

SEQ ID NO: 242146 - DNA, 120 bp, Artificial Sequence
  ENSG00000121486_26 (sequence is synthesized)
agatttggttataaattaaaaaggttgggtgatcttaagtgcctcagttaatgcacgtacagtattcatttggttggttgtactacctctcagaagtaaaatttgtcaccttatggaatg

SEQ ID NO: 242147 - DNA, 120 bp, Artificial Sequence
  ENSG00000121486_27 (sequence is synthesized)
agagtttttgggtttgggggttgtttttttgttgttgcttggtttggtatttttggttttgtgtgtatttgtataaattttctgtataattagcccaggctgatgtaactataaaaatta

SEQ ID NO: 242148 - DNA, 120 bp, Artificial Sequence
  ENSG00000121486_28 (sequence is synthesized)
gttgaaaaaaaaaatattgtttccttaatggaattctcacttcatttgaatataagattttggatgaaaggatttggtataaagtttgggtttttgtctcaaggatttgatccatattta

SEQ ID NO: 242149 - DNA, 120 bp, Artificial Sequence
  ENSG00000121486_29 (sequence is synthesized)
tccctaaatatttcttaagggatgtaactttttataaccattaagtggggggaagggggtggagggggtggtaataattataactgaaaggtttaaatatactacctaagaaaaaagtac

SEQ ID NO: 242150 - DNA, 120 bp, Artificial Sequence
  ENSG00000121486_30 (sequence is synthesized)
ttctgtgacatatacaaaaaaatctagtggataggcattagatgaatagagaatattaattttgcagaaatgaaggaaaatctcttcgtgctagtacagcgtattcccaagagagtttat

SEQ ID NO: 242151 - DNA, 120 bp, Artificial Sequence
  ENSG00000121486_31 (sequence is synthesized)
tttcctttctccaattaatgtggtcataaatttcggtaaaatcaagaaataggtgaagtgcaagctagtttctataatgaccattaaaaaaattctgctgtgtaattcttgccagttaaa

SEQ ID NO: 242152 - DNA, 120 bp, Artificial Sequence
  ENSG00000121486_32 (sequence is synthesized)
attataacttgcaaatgagcagaataaatgaggtttttttcaattaaaaattactataaatccaggaggcaaactattttagcactcagattatctgatttaatacatattattgaatat

SEQ ID NO: 242153 - DNA, 120 bp, Artificial Sequence
  ENSG00000121486_33 (sequence is synthesized)
cagtctcaaattttgctaaatgcttatcagcatgaaatatgttgatcagtgatgagttgggcttaatgcaaagatcctaatttaataaagaaacctgtaaattactgttacctaaaatat

SEQ ID NO: 242154 - DNA, 120 bp, Artificial Sequence
  ENSG00000121486_34 (sequence is synthesized)
atgtgtatattaatttcacatataaaggtagatttttcaaagaaaaatttggtaggcggtagtttagaactctgatcaggtactacatcaaccaaaagaggaaatactttaaaaattcct

SEQ ID NO: 242155 - DNA, 120 bp, Artificial Sequence
  ENSG00000121486_35 (sequence is synthesized)
tttagcaacctgagcaatcttattctcgtaacaatagtagtaatttgggacattgcaaatgtttatcatgttgtaaagtagcatcagttgtatcctttcattaaaacttgataaacaaaa

SEQ ID NO: 242156 - DNA, 120 bp, Artificial Sequence
  ENSG00000121486_36 (sequence is synthesized)
aatgtcaacaagcaaggtgactaactgaacgctagcttactagctttaaactgcttaccaaaaatactgtatctttttcaattgtatttgatgttataataaaaccaatataattataaa

SEQ ID NO: 242157 - DNA, 120 bp, Artificial Sequence
  ENSG00000121486_37 (sequence is synthesized)
actataagaaaagaaaaaaaaatgacaacttaatcaaactctgagtagtgtagtgtagtattaacaacaatgaaatgtatgaagtgactagccccagattgacagatggcttcctacagg

SEQ ID NO: 242158 - DNA, 120 bp, Artificial Sequence
  ENSG00000121486_38 (sequence is synthesized)
agacgaaatagagtgtggcttgaagttgaagaaggtagaaaggaagttctgattcagcagtttaatatgaaaattacataagtgaaggaccgtgaaaatagaataaattataagaattaa

SEQ ID NO: 242159 - DNA, 120 bp, Artificial Sequence
  ENSG00000121542_0 (sequence is synthesized)
ctttctgtttaaaattttgcctggatttctgattatttttctcaagacaggtatatatttaaatttattgaggttaaaaggtatgccttcagactcttgttgaaattgccaaatcatttt

SEQ ID NO: 242160 - DNA, 120 bp, Artificial Sequence
  ENSG00000121542_1 (sequence is synthesized)
attgccaaatcattttgagaactgtttgtaccagtttttacttccatctgtacttatgagaatgccagacagaagtattattttttaaaaagctaatgtggctgggtgtggtggctcatg

SEQ ID NO: 242161 - DNA, 87 bp, Artificial Sequence
  ENSG00000121542_2 (sequence is synthesized)
ggctcatgcctgtaatcccagcactgtggcaggcgcctatagtcccagccacatcctatgctgtggcatgggaaccctgggggatgt

SEQ ID NO: 242162 - DNA, 86 bp, Artificial Sequence
  ENSG00000121542_3 (sequence is synthesized)
tatatgttaagtgaagcatagtatgttgttttaattagttttttgttttttttttcctcctgagacggagtctcactctgtcgccc

SEQ ID NO: 242163 - DNA, 83 bp, Artificial Sequence
  ENSG00000121542_4 (sequence is synthesized)
gtgaagcatagtatgttgttttaattagttttttgttttttttttcctctcagtgacgcgatttcggctcactgcaacctctg

SEQ ID NO: 242164 - DNA, 120 bp, Artificial Sequence
  ENSG00000121542_5 (sequence is synthesized)
ggtgtgagccaccacacctggccattttaattactattcttatattactagtaagttgaacatttttacatatgcttatcaagtttggctttaatttttatgtaacccaaattgttcatt

SEQ ID NO: 242165 - DNA, 120 bp, Artificial Sequence
  ENSG00000121542_6 (sequence is synthesized)
aatttttatgtaacccaaattgttcattttgttttaggtcttctctgttggttgaaatgtctatgattttatctgcctcagtcattcgtgtcagagatggactgccactttctgcttcta

SEQ ID NO: 242166 - DNA, 120 bp, Artificial Sequence
  ENSG00000121542_7 (sequence is synthesized)
ctgattatgaacaaagcacaggaatgcaggagtgcagaaagtattttaaaatgctttcgaggaaacttgctcaacttcctgatagatgtacactgaaaactggacattataacattaatt

SEQ ID NO: 242167 - DNA, 120 bp, Artificial Sequence
  ENSG00000121542_8 (sequence is synthesized)
ttattagctctctgggagtgagctacatgatgttgtgcactgaaaattacccaaatgttctcgccttctctttcctggatgagcttcagaaggagttcattactacttataacatgatga

SEQ ID NO: 242168 - DNA, 120 bp, Artificial Sequence
  ENSG00000121542_9 (sequence is synthesized)
agacaaatactgctgtcagaccatactgtttcattgaatttgataacttcattcagaggaccaagcagcgatataataatcccaggtctctttcaacaaagataaatctttctgacatgc

SEQ ID NO: 242169 - DNA, 120 bp, Artificial Sequence
  ENSG00000121542_10 (sequence is synthesized)
agacggaaatcaagctgaggcctccttatcaaatttccatgtgcgaactggggtcagccaatggagtcacatcagcattttctgttgactgtaaaggtgctggtaagatttcttctgctc

SEQ ID NO: 242170 - DNA, 120 bp, Artificial Sequence
  ENSG00000121542_11 (sequence is synthesized)
accagcgactggaaccagcaactctgtcagggattgtaggatttatccttagtcttttatgtggagctctgaatttaattcgaggctttcatgctatagaaagtctcctgcagagtgatg

SEQ ID NO: 242171 - DNA, 120 bp, Artificial Sequence
  ENSG00000121542_12 (sequence is synthesized)
gtgatgattttaattacatcattgcatttttccttggaacagcagcctgcctttaccagtgttatttacttgtctactacaccggctggcggaatgtcaaatcttttttgacttttggct

SEQ ID NO: 242172 - DNA, 120 bp, Artificial Sequence
  ENSG00000121542_13 (sequence is synthesized)
taatctgtctatgcaacatgtatctctatgaactgcgcaacctctggcagcttttctttcatgtgactgtgggagcatttgttacactacagatctggctaaggcaagcccagggcaagg

SEQ ID NO: 242173 - DNA, 120 bp, Artificial Sequence
  ENSG00000121542_14 (sequence is synthesized)
ctcccgattatgatgtctgacaccatccttcagatctattgccttggcttcagggggataaggagggaacatatcataactgcactgtgatgaagaagctgttccccacagaggagaagc

SEQ ID NO: 242174 - DNA, 120 bp, Artificial Sequence
  ENSG00000121542_15 (sequence is synthesized)
tctgctttctttctctccaactttccttttttaaaatcagcatgatgtgcctgtgagcatggaagagtcctctcagaagaatgttggccatgagactatcattcagaggaggaggggatt

SEQ ID NO: 242175 - DNA, 120 bp, Artificial Sequence
  ENSG00000121542_16 (sequence is synthesized)
aacagtcatatgccattggaagtcttggccagcagtcctgaatccttcctgaagagttcagaaaatagatgtggtattgctctgaggaccaggcaggaggaactctacaacctgagtttg

SEQ ID NO: 242176 - DNA, 120 bp, Artificial Sequence
  ENSG00000121542_17 (sequence is synthesized)
cctttgtgaggcattagtatagaccaaataaaaagctgcagaaattggaaagtttatgttttaaataaatgactgtgataaatatcagattatttgcacacttatggtactacgagttta

SEQ ID NO: 242177 - DNA, 120 bp, Artificial Sequence
  ENSG00000121542_18 (sequence is synthesized)
taaagtccaagatggtgtgaaattggttctttttacttttatatttttgcttgaatcttaactctggaaatcacctgatgtagaagaagactgtgatgagctcgtctgtggaacatcaca

SEQ ID NO: 242178 - DNA, 120 bp, Artificial Sequence
  ENSG00000121542_19 (sequence is synthesized)
agtatcgaaaatacagtaatggatgtttcctttctaatccacatttattgtttcttttgaaatcacgtctaaaaaatatgactcacactatagccgttgtttcccaaacttcagtctctt

SEQ ID NO: 242179 - DNA, 120 bp, Artificial Sequence
  ENSG00000121542_20 (sequence is synthesized)
tagtactacttgtattattttcttaatatttatcttttaaattttaaagtttttttaaaaaaatgaatcctgctccaagtggaaaaccagtatcagtttgccataaataaaaggtaacca

SEQ ID NO: 242180 - DNA, 120 bp, Artificial Sequence
  ENSG00000121542_21 (sequence is synthesized)
caaaataagtaagatgaacacaaaaaatgttgttcagttctagctagaaactaatgcctagaaaggctccgaatcttaggctctttctttgtggcagtgagggagatgttaccagcacca

SEQ ID NO: 242181 - DNA, 120 bp, Artificial Sequence
  ENSG00000121542_22 (sequence is synthesized)
gcatgaggcactgtctctggaatagtcagaggataaaaggaaactgtaaagggaatgacattctcactgtgattcagcattattctatgttgtgcatcacttaaagacatgttgtgtgcc

SEQ ID NO: 242182 - DNA, 120 bp, Artificial Sequence
  ENSG00000121542_23 (sequence is synthesized)
accagtggcatgggtccgcactatggaaatgcttgactgtagtaagaatcagaaggtggctttcctagcaactcattattttatggctttgaggaattaagcccctagtatctgagagaa

SEQ ID NO: 242183 - DNA, 120 bp, Artificial Sequence
  ENSG00000121542_24 (sequence is synthesized)
cttacttgttttttgataacgttttaaagattgtttaagcagttatgaattaataatataggaagcacagttggattccactagcaaaatctataactctcatggttttggaagtcatct

SEQ ID NO: 242184 - DNA, 120 bp, Artificial Sequence
  ENSG00000121542_25 (sequence is synthesized)
tcatgggtgattttcctttgttttttaaagaaaatatttcaaacaaggaattcataggatactgaaatttgatatcatccagaaaaacagatcccattacattgtaattgttgttactag

SEQ ID NO: 242185 - DNA, 120 bp, Artificial Sequence
  ENSG00000121542_26 (sequence is synthesized)
gcatatttattaagtagagaaatagagggtaaaaagttagtgaactgtcttgtttgcgtgaaccagtatttgtggatatgtctagaactgtaaaatcttgcttaactagaaccttagtct

SEQ ID NO: 242186 - DNA, 120 bp, Artificial Sequence
  ENSG00000121542_27 (sequence is synthesized)
gcaccctccttttaggagaatgaggtaaaaggaagacaataagcttatgatatcagggattcatgtaaaacaggaaatagtagttggctccagtcttctcctctaacaaaagtatgcata

SEQ ID NO: 242187 - DNA, 120 bp, Artificial Sequence
  ENSG00000121542_28 (sequence is synthesized)
ttctgagagataccccaaggcatcacaagatcctgaatcatcaaaacaccattgaattgtgttgggcattttgtagccaggaaagtgaagtggttcaatttagaaagggtttcaggccag

SEQ ID NO: 242188 - DNA, 120 bp, Artificial Sequence
  ENSG00000121542_29 (sequence is synthesized)
agagcgagactctgtctcaaaaaagaaaggttttctaaactaatggttaaaacagaattttcttgtaaatagggaagttggagcattctggttgagattttgctctgtattgacacagct

SEQ ID NO: 242189 - DNA, 120 bp, Artificial Sequence
  ENSG00000121542_30 (sequence is synthesized)
tgctctgtattgacacagctcgcaccagtttggttcaggagctacctccttgtcattgaattgacgagttacaatgtttggtattcggatacattcagcaagaacacttgaaaactcctc

SEQ ID NO: 242190 - DNA, 120 bp, Artificial Sequence
  ENSG00000121542_31 (sequence is synthesized)
accaactatttttaaaggcttactttgtttttgtttttattttttcactggctattttggataagaggatgtttacatcttaatgtaaaaaaatgaaaacaggtataaatgttttatgta

SEQ ID NO: 242191 - DNA, 120 bp, Artificial Sequence
  ENSG00000121542_32 (sequence is synthesized)
ctctcccctcccgctccctgcctctcgccacagcctcggccttcgccctcgggattgaagacctaccccacgggcaggagccaagtccgtgcctttgggatgggagtcggggccgcggag

SEQ ID NO: 242192 - DNA, 120 bp, Artificial Sequence
  ENSG00000121542_33 (sequence is synthesized)
ctttcttaggggtcgttcgaatccctgccggcctctcccctcccgctccctgcctctcgccacagcctcggccttcgccctcgggattgaagacctaccccacgggcaggagccaagtct

SEQ ID NO: 242193 - DNA, 120 bp, Artificial Sequence
  ENSG00000121542_34 (sequence is synthesized)
agtcctcttcttcctttcttaggggtcgttcgaatccctgccggcctctcccctcccgctccctgcctctcgccacagcctcggccttcgccctcgggattgaagacctaccccacgggc

SEQ ID NO: 242194 - DNA, 120 bp, Artificial Sequence
  ENSG00000121542_35 (sequence is synthesized)
aggagccaattgctgatggggagaggaaaaaatagccactattcaggttccctgtgagttaactgctgctgtacaaaggcaggtgtaatattttctctgtattaaaggtcttctctgttg

SEQ ID NO: 242195 - DNA, 120 bp, Artificial Sequence
  ENSG00000121542_36 (sequence is synthesized)
ataaaccattggtacattttcagaaacatttaattttgttatcaacatgccatccttgggttcaagaagactaaagaaaagactttataggagaaggcaataataacaaaagcaaaacaa

SEQ ID NO: 242196 - DNA, 120 bp, Artificial Sequence
  ENSG00000121552_0 (sequence is synthesized)
actttggttccagcatcctgtccagcaaagaagcaatcagccaaaatgatacctggaggcttatctgaggccaaacccgccactccagaaatccaggagattgttgataaggttaaacca

SEQ ID NO: 242197 - DNA, 120 bp, Artificial Sequence
  ENSG00000121552_1 (sequence is synthesized)
cagcttgaagaaaaaacaaatgagacttacggaaaattggaagctgtgcagtataaaactcaagttgttgctggaacaaattactacattaaggtacgagcaggtgataataaatatatg

SEQ ID NO: 242198 - DNA, 120 bp, Artificial Sequence
  ENSG00000121552_2 (sequence is synthesized)
cacttgaaagtattcaaaagtcttcccggacaaaatgaggacttggtacttactggataccaggttgacaaaaacaaggatgacgagctgacgggcttttagcagcatgtacccaaagtg

SEQ ID NO: 242199 - DNA, 120 bp, Artificial Sequence
  ENSG00000121552_3 (sequence is synthesized)
gagtcatgatccttgctgataaatataaccatcaataaagaagcattcttttccaaagaaattatttcttcaattatttctcatttattgtattaagcagaaattaccttttctttctca

SEQ ID NO: 242200 - DNA, 120 bp, Artificial Sequence
  ENSG00000121552_4 (sequence is synthesized)
aaatcagtgttattgctttagagtataaactccatataaattgatggcaattggaaatcttataaaaactagtcaagcctaatgcaactggctaaaggatagtaccaccctcacccccac

SEQ ID NO: 242201 - DNA, 120 bp, Artificial Sequence
  ENSG00000121552_5 (sequence is synthesized)
cataggcaggctggatcgtggactatcaattcaccagcctccttgttccctgtggctgctgataacccaacattccatctctaccctcatacttcaaaattaaatcaagtattttacaaa

SEQ ID NO: 242202 - DNA, 120 bp, Artificial Sequence
  ENSG00000121552_6 (sequence is synthesized)
ctcattttatgtaaaatattccctgatttccctaccacataattccttccttacggttgtcctaaattaagatgcccagcatgattccttccaagtggtggactctcaaatttggtagat

SEQ ID NO: 242203 - DNA, 120 bp, Artificial Sequence
  ENSG00000121552_7 (sequence is synthesized)
catgctggatttgtggctgtgctgctgcttaggtaaggagggaggatcacgtctcatctgcctgaaggtgtggggctggaccacatggtatcttgaagctgattctacctcaaagctgta

SEQ ID NO: 242204 - DNA, 120 bp, Artificial Sequence
  ENSG00000121552_8 (sequence is synthesized)
tgattctctatgtctaaattaaataaattaaagtaacgactcaaatcattagctgggaaaataatttaaaccttttttgcccttcaattaatataatgtaaatactattttgtaactcaa

SEQ ID NO: 242205 - DNA, 120 bp, Artificial Sequence
  ENSG00000121552_9 (sequence is synthesized)
attagatttaacttgtggcactctaggcatagtttaaaagagtggagtatttaaaatagtttaaaagttaattttatagctctgtcaaaaaattacacaatgcattgatcgagttctaat

SEQ ID NO: 242206 - DNA, 120 bp, Artificial Sequence
  ENSG00000121570_0 (sequence is synthesized)
aagtgggaggagactttgcaaatagcaatcttggggcaggggccattttggaagcatgttgcgaggctccgcttcttctacaagtatggagaaggcaaaaggcaaggagtggacctccac

SEQ ID NO: 242207 - DNA, 120 bp, Artificial Sequence
  ENSG00000121570_1 (sequence is synthesized)
agagaagtcgagggaagaggatcagcaggcttctaatcaaccaaattcaattgctttgccaggaacatcagcaaagagaaccaaagaaaaaatgtctatcaaaggcagtaaagtgctctg

SEQ ID NO: 242208 - DNA, 120 bp, Artificial Sequence
  ENSG00000121570_2 (sequence is synthesized)
ccctaagaaaaaggcagagcacactgacaaccccagacctcagaagaagataccaatccctccattaccttctaaactgccacctgttaatctgattcaccgggacattctgcgggcctg

SEQ ID NO: 242209 - DNA, 120 bp, Artificial Sequence
  ENSG00000121570_3 (sequence is synthesized)
gtgccaacaattgaagctgagctccaaaggccagaaattggatgcatataagcgcctgtgtgcctttgcctacccaaatcaaaaggattttcctagcacagcaaaagaggccaaaatccg

SEQ ID NO: 242210 - DNA, 120 bp, Artificial Sequence
  ENSG00000121570_4 (sequence is synthesized)
gaaatcattgcaaaaaaaattaaaggtggaaaagggggaaacgtccctgcaaagttctgagacacatcctcctgaagtggctcttcctcctgtgggggagccgcctgccctggaaaattc

SEQ ID NO: 242211 - DNA, 120 bp, Artificial Sequence
  ENSG00000121570_5 (sequence is synthesized)
cactgctctccttgagggagttaatacagttgtggtgacaacttctgccccagaggctttgctggcctcctgggcgagaatttcagccagggcgaggacaccagaggcagtggaatctcc

SEQ ID NO: 242212 - DNA, 120 bp, Artificial Sequence
  ENSG00000121570_6 (sequence is synthesized)
acaagaggcctctggtgtcaggtggtgtgtggtccatgggaaaagtctccctgcagacacagatggttgggttcacctgcagtttcatgctggtcaagcctgggttccagaaaagcaaga

SEQ ID NO: 242213 - DNA, 120 bp, Artificial Sequence
  ENSG00000121570_7 (sequence is synthesized)
agggagagtgagtgcactcttcttgcttcctgcctccaattttccacccccgcaccttgaagacaatatgttgtgccccaaatgtgttcacaggaacaaggtcttaataaaaagcctcca

SEQ ID NO: 242214 - DNA, 120 bp, Artificial Sequence
  ENSG00000121570_8 (sequence is synthesized)
atgggaatagaatatcaggaaaaaggccacatctatggtaattaatggcagaaaagctggagagttggattctgcggtgctgctgacaggtgaactctggtcctctgcacctgtttatgg

SEQ ID NO: 242215 - DNA, 120 bp, Artificial Sequence
  ENSG00000121570_9 (sequence is synthesized)
gccatgcagactggtggggtggcagatgttagcctaagacccctagcagtgcctgttgctttgtgagtggagatagagactcttacatttaaaaatggaaaaacatttcacaaattacca

SEQ ID NO: 242216 - DNA, 120 bp, Artificial Sequence
  ENSG00000121570_10 (sequence is synthesized)
taaattgtagttaatatgtagaaaaactcattcatactacttttctaaaatagacatgacttcagcagcagcttttttttgttgtattttgagacagtgtctcactgttgcccaggctgg

SEQ ID NO: 242217 - DNA, 120 bp, Artificial Sequence
  ENSG00000121570_11 (sequence is synthesized)
cctcctcagcctcccaaaatgctgggactatgggcatgagcccctgcgcctgaccttcaacagctcttttaagtgagttcttcagctaagcattgtgatggacttgagtaaaatggtagt

SEQ ID NO: 242218 - DNA, 120 bp, Artificial Sequence
  ENSG00000121570_12 (sequence is synthesized)
tgagtaaaatggtagttggctcttgtgctcaattttctcttcctctgaacactgactactttaggagctgcttcattccaattgcaatttcataaaacgtaaagtattttaaggcaaaga

SEQ ID NO: 242219 - DNA, 120 bp, Artificial Sequence
  ENSG00000121570_13 (sequence is synthesized)
aaggctgttaattccctccctcccccaaacacatgatttttaatattctaaacaatatttttcaaagttctcttaataacctgagatttctatggtttgactccaggatcaaaacacaag

SEQ ID NO: 242220 - DNA, 120 bp, Artificial Sequence
  ENSG00000121570_14 (sequence is synthesized)
ggactttgtattatttcacttataattgttttgtatatttctggagtttaaaatgtttaaggttgcttcccgctcataaatacataatatattgaatttaaaatgtgtttattaaccgat

SEQ ID NO: 242221 - DNA, 120 bp, Artificial Sequence
  ENSG00000121570_15 (sequence is synthesized)
tctccataaataaaaataagatgtgtatgtaaaataattcatctgttgtatttagagaaccatattcattgcatgcaaattttattgttagtgttcttaactcaagtaggagtaaaccaa

SEQ ID NO: 242222 - DNA, 120 bp, Artificial Sequence
  ENSG00000121570_16 (sequence is synthesized)
aaagtgtgatttttcttttgtatgactcgtttgttctttattagttggtggtatgggttggatcatttgtttttaaaactacttaggtatgattcacatacaaaaagctgcacatattta

SEQ ID NO: 242223 - DNA, 120 bp, Artificial Sequence
  ENSG00000121570_17 (sequence is synthesized)
atgtatcctattgtgtaattaatttttaatttttttgtgtacttcctaaacttatagtcctgcgagtctgggaacagatctgtttttcacttatcctgatttaatgacagtttccaacat

SEQ ID NO: 242224 - DNA, 120 bp, Artificial Sequence
  ENSG00000121570_18 (sequence is synthesized)
tgttttgttattacaagtaggggatctttttttttgcccgtttaatgaagatactaaaaataatgcactggaaggagtggaagagttggaaaatttgtaaccatcataatacaggtgtaa

SEQ ID NO: 242225 - DNA, 120 bp, Artificial Sequence
  ENSG00000121570_19 (sequence is synthesized)
taggtttgggaaagaatcctcaaaaatgttaaagcaagggaggaaagtttgttgagaagcaagatgttcttctctcctgcccgcccccgccgttggttgttggtggtcagaattattgtg

SEQ ID NO: 242226 - DNA, 120 bp, Artificial Sequence
  ENSG00000121570_20 (sequence is synthesized)
taataaataatagacattttttcttatactatgtgtattgttccttttgtttcctttttaaacttctcccctgctttatttggatgggtcaagtttctgttctgtttccttcctttctat

SEQ ID NO: 242227 - DNA, 120 bp, Artificial Sequence
  ENSG00000121570_21 (sequence is synthesized)
taatttggaaatgtccttggctttacgattctgcttgtagatacttcccctgcttctaacacatttcaataaacttaaatttctctatatacaaaataaattaataattggagtctacca

SEQ ID NO: 242228 - DNA, 120 bp, Artificial Sequence
  ENSG00000121570_22 (sequence is synthesized)
taagacgttgcacaggcactgaacggccatatccgagcgctctcaggtcctcttgacttgaactgggtcatttttaactgtctcggttttaagtcttttgtgaggtccaaatggacctcc

SEQ ID NO: 242229 - DNA, 120 bp, Artificial Sequence
  ENSG00000121570_23 (sequence is synthesized)
agcgcaacatgaagagcttattctggtccaatggggaaataagcttagtagatattaatcactggtacattttagggtatatcaaaatccctttgagggccggtgattcctggaccctgc

SEQ ID NO: 242230 - DNA, 89 bp, Artificial Sequence
  ENSG00000121570_24 (sequence is synthesized)
atcaaaatccctttgagggccggtgattcctggaccctgcccacagagtttctggtgcaggtctagggcaggacctgagcatttatttg

SEQ ID NO: 242231 - DNA, 120 bp, Artificial Sequence
  ENSG00000121570_25 (sequence is synthesized)
cgtgagccaccgtacctggcaagagtttgcatctctaacagtttcccaggcagtactaaggatgctggtctggggaccacagtttgagaaccactgctctaaattattgatggcatcaga

SEQ ID NO: 242232 - DNA, 120 bp, Artificial Sequence
  ENSG00000121570_26 (sequence is synthesized)
aggggatagcagtctggttttctttctttaccctttaagcaatttaaattaaaggcaaggtctaaaattaattgcctgcaactgagccccagaatggcattaataagttatttaaaatat

SEQ ID NO: 242233 - DNA, 120 bp, Artificial Sequence
  ENSG00000121570_27 (sequence is synthesized)
ttcccagcgttttcattgtaaaatgggtaatacctaccttatatgttggaagaattacagaaagtacaacaaaagaagacaaactgcttagcataatccaatgtgtgttaagagctgaga

SEQ ID NO: 242234 - DNA, 120 bp, Artificial Sequence
  ENSG00000121570_28 (sequence is synthesized)
cccctgagcttatttcatgaagccctttccagacactctgggttagtctttctaccatctgcccacctacaactatactacttccaactagatttttaagttttaacaggaactgtcttg

SEQ ID NO: 242235 - DNA, 61 bp, Artificial Sequence
  ENSG00000121570_29 (sequence is synthesized)
cttccaactagatttttaagttttaacaggaactgtcttgtatgctttttgttttgttttg

SEQ ID NO: 242236 - DNA, 120 bp, Artificial Sequence
  ENSG00000121570_30 (sequence is synthesized)
aagcgtgagccactgcgcccagcttgtatgcttttctaaaggagaacagaatagagaagaggttaagttaggatttcagggttcacatcttggagctggtcaatcaagggtgatgggcca

SEQ ID NO: 242237 - DNA, 120 bp, Artificial Sequence
  ENSG00000121570_31 (sequence is synthesized)
gcacttcatggaagccaagcttaaactgttaccttcctgaagcatcttttggtcaccactgctctaactgatcccttcctatcttcagacttccacagcatatttggttctgctgatcat

SEQ ID NO: 242238 - DNA, 120 bp, Artificial Sequence
  ENSG00000121570_32 (sequence is synthesized)
tttttccttcacttgctacttggagttaaggatttcagtgtgcaatgatttgggaacagacagctgtaaatttgaagatccattcttgaaaccggacttcctattctaaaaataagttag

SEQ ID NO: 242239 - DNA, 120 bp, Artificial Sequence
  ENSG00000121570_33 (sequence is synthesized)
gacaatatctacctttattaagcggtgggaatggagtgttaaaatttacatagagtagttaagtgaagcacttagactatgcctgagaagtaatatgtacagagtaaaccctactattag

SEQ ID NO: 242240 - DNA, 89 bp, Artificial Sequence
  ENSG00000121570_34 (sequence is synthesized)
cagccgaaaaaaaaagtgattttacttttgaaattcagaaaagctacacaaagataattactactcatttgattccattctgcttcagt

SEQ ID NO: 242241 - DNA, 120 bp, Artificial Sequence
  ENSG00000121577_0 (sequence is synthesized)
catcattccttcccaaagccaccggaagcattccttctaggaaaggtggagtcggtagtgagaagccggaggtgagaagacccctgagcggatggattcattcattttctgaatttccta

SEQ ID NO: 242242 - DNA, 120 bp, Artificial Sequence
  ENSG00000121577_1 (sequence is synthesized)
tgtgaggacagtattagagcccagtgaggctttgagaggccccaaagatgagcgccaacagcagcagagtgggccagcttctcttgcagggttcagcgtgcattaggtggaagcaggatg

SEQ ID NO: 242243 - DNA, 120 bp, Artificial Sequence
  ENSG00000121577_2 (sequence is synthesized)
tggaaggggctgtctaccacctagccaactgcctcttactcctgggcttcatggggggcagtggggtgtatggatgcttctatctttttggcttcctgagtgcaggttacctgtgctgcg

SEQ ID NO: 242244 - DNA, 120 bp, Artificial Sequence
  ENSG00000121577_3 (sequence is synthesized)
tgctgtggggctggttcagtgcctgtggcctggacattgttctttggagcttcctgctggctgtggtctgcctgctccagctggcacacctggtataccgcctgcgtgaggacaccctcc

SEQ ID NO: 242245 - DNA, 120 bp, Artificial Sequence
  ENSG00000121577_4 (sequence is synthesized)
ctgaggagtttgacctcctctacaagacgctgtgcctgcccttgcaggtgcccctacagacatacaaggagattgttcactgctgcgaggagcaggtcttaactctggccactgaacaga

SEQ ID NO: 242246 - DNA, 120 bp, Artificial Sequence
  ENSG00000121577_5 (sequence is synthesized)
cctatgctgtggagggtgagacacccatcaaccgcctgtccctgctgctctctggccgggttcgtgtgagccaggatgggcagtttctgcactacatctttccataccagttcatggact

SEQ ID NO: 242247 - DNA, 120 bp, Artificial Sequence
  ENSG00000121577_6 (sequence is synthesized)
aaagagcgatacatctcctgcctcttctcggctctgctgggatatgacatctcagagaagctctacactctcaatgacaagctctttgctaagtttgggctgcgctttgacatccgcctt

SEQ ID NO: 242248 - DNA, 120 bp, Artificial Sequence
  ENSG00000121577_7 (sequence is synthesized)
cccagcctctaccatgtcctgggtcccactgctgcagatgctggaccagagtccgagaagggtgatgaggaagtctgtgagccagctgtgtcccctcctcaggccacacccacctctctc

SEQ ID NO: 242249 - DNA, 120 bp, Artificial Sequence
  ENSG00000121577_8 (sequence is synthesized)
cagcaaacacccccttgttctacccctccagctaccaccaactttcctgcacctcctacccgggccaggttgtccaggccagacagtggcatactggcttctagaattcctctccagagc

SEQ ID NO: 242250 - DNA, 120 bp, Artificial Sequence
  ENSG00000121577_9 (sequence is synthesized)
tactctcaagttatatccaggggacaggcccctttggctccaacccacacgcctgaactttaaggatcattggactatcttctctgtggccagcgcagctctcttctgtgttcacagaat

SEQ ID NO: 242251 - DNA, 120 bp, Artificial Sequence
  ENSG00000121577_10 (sequence is synthesized)
ggccactgataggcatgcctcttttcccacccactggaaggctcacaggcaaggtgagagaggacacagaaggtgccaacactgtcgctacagtaaggacctgaagtgactttgagaaat

SEQ ID NO: 242252 - DNA, 120 bp, Artificial Sequence
  ENSG00000121577_11 (sequence is synthesized)
tcaccctcacaaaccttccttcaggagcaggcattggtagtgcagaggcacagattccgtcctttaccagctgcagaatcttgggcaagttacatagcctctgtgagcctcatcggtaaa

SEQ ID NO: 242253 - DNA, 120 bp, Artificial Sequence
  ENSG00000121577_12 (sequence is synthesized)
cagtgggggttatgaaacccacctcacagggttgttgtgaggatccaatgagttgatttaggtaagcacctagcacatgccgtggcaccaagtaagcactcaataaatcactcaactcct

SEQ ID NO: 242254 - DNA, 120 bp, Artificial Sequence
  ENSG00000121577_13 (sequence is synthesized)
attctgcttgggaaaaacagagagcaggatgtggccgcatcatcccacgctgctggacttttcagtcctgtagtgctactttcccttgggactatttaggtttttctgctaagaaccaaa

SEQ ID NO: 242255 - DNA, 120 bp, Artificial Sequence
  ENSG00000121577_14 (sequence is synthesized)
tttgaagactcccaagaaacatggaaccaaggaagcttgccagagctctgcagggagagccagagccttgctgagacagcgggggtggtggggaggagagagggggggagagggggagag

SEQ ID NO: 242256 - DNA, 120 bp, Artificial Sequence
  ENSG00000121577_15 (sequence is synthesized)
tccaccagtctggtgctggaggattttgaggaggtgtcaggatcagaatcgtttatggattataggagtgatggggagtacatgaggtgaagggagaactaacatgggcacagccaccgg

SEQ ID NO: 242257 - DNA, 120 bp, Artificial Sequence
  ENSG00000121577_16 (sequence is synthesized)
ggcaaagtatttctacaggaagattcatgttaatcagcgacacctaacttcagcataggtggcttggagagccattttccttttcccacatgatctcttctcttcccttgccagggttcg

SEQ ID NO: 242258 - DNA, 120 bp, Artificial Sequence
  ENSG00000121577_17 (sequence is synthesized)
cagtggcatactggagatagatgattttccctcttatttccaccagtttggcttttcagggaaggtggcagctggcagaatcccctgacaacaaaagcttctagaattcctctccagagc

SEQ ID NO: 242259 - DNA, 120 bp, Artificial Sequence
  ENSG00000121578_0 (sequence is synthesized)
aagagccgcctcccgggcggctggggcggtccccgagctgctttccgcgttctcccctctccgcgggcagtgctagctcgccgcggccgcctccggggaccacctggcttcatgtgtgga

SEQ ID NO: 242260 - DNA, 120 bp, Artificial Sequence
  ENSG00000121578_1 (sequence is synthesized)
tttccacggctcttgcccagaggcgggtacactgtgttccaatgtgccacggaactcacgcagtggcactttgtggcttcatgaaggaagaggcaggccacgcaacacttcctccccaag

SEQ ID NO: 242261 - DNA, 120 bp, Artificial Sequence
  ENSG00000121578_2 (sequence is synthesized)
ccaaggagaagtatcacttttagaggcagaggagcggaaggcagtgggtgtgaccaaaagtgccatttgttaaagcttatcttccttgccagattttaaaaactattatggaaaatctca

SEQ ID NO: 242262 - DNA, 120 bp, Artificial Sequence
  ENSG00000121578_3 (sequence is synthesized)
agcattcacaaaagtagagagaaagaaaggactctcagactgttggagcagaactactgagaaaaaccaggcattgtatcttcagttgtcatcaagttcgcaatcagattggaaaagctc

SEQ ID NO: 242263 - DNA, 120 bp, Artificial Sequence
  ENSG00000121578_4 (sequence is synthesized)
aacttgaagctttcttgcctgcagtgaagcagagagatagatattattcacgtaataaaaaacatgggcttcaacctgactttccacctttcctacaaattccgattactgttgctgttg

SEQ ID NO: 242264 - DNA, 120 bp, Artificial Sequence
  ENSG00000121578_5 (sequence is synthesized)
actttgtgcctgacagtggttgggtgggccaccagtaactacttcgtgggtgccattcaagagattcctaaagcaaaggagttcatggctaatttccataagaccctcattttggggaag

SEQ ID NO: 242265 - DNA, 120 bp, Artificial Sequence
  ENSG00000121578_6 (sequence is synthesized)
ggaaaaactctgactaatgaagcatccacgaagaaggtagaacttgacaactgcccttctgtgtctccttacctcagaggccagagcaagctcattttcaaaccagatctcactttggaa

SEQ ID NO: 242266 - DNA, 120 bp, Artificial Sequence
  ENSG00000121578_7 (sequence is synthesized)
gaggtacaggcagaaaatcccaaagtgtccagaggccggtatcgccctcaggaatgtaaagctttacagagggtcgccatcctcgttccccaccggaacagagagaaacacctgatgtac

SEQ ID NO: 242267 - DNA, 120 bp, Artificial Sequence
  ENSG00000121578_8 (sequence is synthesized)
ctgctggaacatctgcatcccttcctgcagaggcagcagctggattatggcatctacgtcatccaccaggctgaaggtaaaaagtttaatcgagccaaactcttgaatgtgggctatcta

SEQ ID NO: 242268 - DNA, 120 bp, Artificial Sequence
  ENSG00000121578_9 (sequence is synthesized)
ctggtggttggcaggaacagcactgggtacaggttacgttacagtggatattttgggggtgttactgccctaagcagagagcagtttttcaaggtgaatggattctctaacaactactgg

SEQ ID NO: 242269 - DNA, 120 bp, Artificial Sequence
  ENSG00000121578_10 (sequence is synthesized)
ggatggggaggcgaagacgatgacctcagactcagggttgagctccaaagaatgaaaatttcccggcccctgcctgaagtgggtaaatatacaatggtcttccacactagagacaaaggc

SEQ ID NO: 242270 - DNA, 120 bp, Artificial Sequence
  ENSG00000121578_11 (sequence is synthesized)
aatgaggtgaacgcagaacggatgaagctcttacaccaagtgtcacgagtctggagaacagatgggttgagtagttgttcttataaattagtatctgtggaacacaatcctttatatatc

SEQ ID NO: 242271 - DNA, 120 bp, Artificial Sequence
  ENSG00000121578_12 (sequence is synthesized)
aacatcacagtggatttctggtttggtgcatgaccctgggtcttttggtgatgtttggaagaactgattctttgtttgcaataattttggcctagagacttcaaatagtagcacacatta

SEQ ID NO: 242272 - DNA, 120 bp, Artificial Sequence
  ENSG00000121578_13 (sequence is synthesized)
agaacctgttacagctcattgttgagctgaatttttcctttttgtattttcttagcagagctcctggtgatgtagagtataaaacagttgtaacaagacagctttcttagtcattttgat

SEQ ID NO: 242273 - DNA, 120 bp, Artificial Sequence
  ENSG00000121578_14 (sequence is synthesized)
catgagggttaaatattgtaatatggatacttgaaggactttatataaaaggatgactcaaaggataaaatgaacgctatttgaggactctggttgaaggagatttatttaaatttgaag

SEQ ID NO: 242274 - DNA, 120 bp, Artificial Sequence
  ENSG00000121578_15 (sequence is synthesized)
taatatattatgggataaaaggccacaggaaataagactgctgaatgtctgagagaaccagagttgttctcgtccaaggtagaaaggtacgaagatacaatactgttattcatttatcct

SEQ ID NO: 242275 - DNA, 120 bp, Artificial Sequence
  ENSG00000121578_16 (sequence is synthesized)
gtacaatcatctgtgaagtggtggtgtcaggtgagaaggcgtccacaaaagaggggagaaaaggcgacgaatcaggacacagtgaacttgggaatgaagaggtagcaggagggtggagtg

SEQ ID NO: 242276 - DNA, 120 bp, Artificial Sequence
  ENSG00000121578_17 (sequence is synthesized)
tcggctgcaaaggcagcagtagctgagctggttgcagctgctgatagccttcaggggaggacctgcccaggtatgccttccagtgatgcccaccagagaatacattctctattagttttt

SEQ ID NO: 242277 - DNA, 120 bp, Artificial Sequence
  ENSG00000121578_18 (sequence is synthesized)
aaagagtttttgtaaaatgattttgtacaagtaggatatgaattagcagtttacaagtttacatattaactaataataaatatgtctatcaaatacctctgtagtaaaatgtgaaaaagc

SEQ ID NO: 242278 - DNA, 120 bp, Artificial Sequence
  ENSG00000121578_19 (sequence is synthesized)
accggctcaggtgctggcgttccgcgcggcgccgcctctgctgcgggccgggggagccagacgaggtgctgccgggtaggaaaaaatccagggctcattcataccccaggtcacgattcc

SEQ ID NO: 242279 - DNA, 120 bp, Artificial Sequence
  ENSG00000121578_20 (sequence is synthesized)
ggggtcgcccccagcacttctccgccgggtgcatcaacctgaaaaagccccttcttcctggaaaccctccttctccagcgtttcaacggggaaactgatcagctgacaccagccccagtc

SEQ ID NO: 242280 - DNA, 120 bp, Artificial Sequence
  ENSG00000121578_21 (sequence is synthesized)
acggaggccgagcctggcgggaggcaccggctcaggtgctggcgttccgcgcggcgccgcctctgctgcgggccgggggagccagacgaggtgctgccgggaccacctggcttcatgtgt

SEQ ID NO: 242281 - DNA, 120 bp, Artificial Sequence
  ENSG00000121578_22 (sequence is synthesized)
agtgctagctcgccgcggccgcctccggggtgagtacgctggctccgccggcgcccgggaaatgcagttccctggacacgggcgccgtgcgagggtagccgggcgacggccggggaccac

SEQ ID NO: 242282 - DNA, 120 bp, Artificial Sequence
  ENSG00000121578_23 (sequence is synthesized)
agtgctagctcgccgcggccgcctccggggtgagtacgctggctccgccggcgcccgggaaatgcagttccctggacacgggcgccgtgcgagggtagccgggcgacggccgggactgtt

SEQ ID NO: 242283 - DNA, 120 bp, Artificial Sequence
  ENSG00000121578_24 (sequence is synthesized)
gaggggccggcgacctttgacctttctccaaaggggttggtcacctggattataaaagacttcggagacagccatccagtgtttgttgatctgtatcccttgatgttctgtcttccatta

SEQ ID NO: 242284 - DNA, 120 bp, Artificial Sequence
  ENSG00000121578_25 (sequence is synthesized)
gtgcacactgttgcaaagtgttccagagtgggtgagggatggggacgtggcggtggtgagggtactggtagacctcctcagccgtttggtgatgaaaaggaggaaaaagaaaatggtaat

SEQ ID NO: 242285 - DNA, 120 bp, Artificial Sequence
  ENSG00000121578_26 (sequence is synthesized)
aggctacctccctagtctgttctgtcaataaggactatgttgaattcgatcagatttgagccagttcattgtgttaaaagatttttattaagcaaattttcaaacagacacaaaaggaga

SEQ ID NO: 242286 - DNA, 120 bp, Artificial Sequence
  ENSG00000121578_27 (sequence is synthesized)
gaaagtggtgcactgaaccctcacgtctacagttctcaactcatggcctctcttctttccctcagtttttttcttaccccactggatttagaaatgtgtcacagatgtcatagcatttca

SEQ ID NO: 242287 - DNA, 120 bp, Artificial Sequence
  ENSG00000121578_28 (sequence is synthesized)
tgtgtaactgcttcagtatgtattcttaaaatataagcaattttaaaaaaggaatcagaataccattatcatacctagaataaaattaacaatatctccttaatgtcatcaaatgtctag

SEQ ID NO: 242288 - DNA, 120 bp, Artificial Sequence
  ENSG00000121578_29 (sequence is synthesized)
tcagtgttaagtacttttttatttttaaaaccagttgatcagatcagtgtctaaacaaggtccacattgcatttgaatgatctcttttaatatgtaggttccctctccctttctttatgt

SEQ ID NO: 242289 - DNA, 120 bp, Artificial Sequence
  ENSG00000121578_30 (sequence is synthesized)
gttccttgatatttatttgtggaacaagccagattatttgtccaatagaattccttgcattatggatttttccaattgcatcctggtagtataacttaatatgtcctcctgacctctatt

SEQ ID NO: 242290 - DNA, 87 bp, Artificial Sequence
  ENSG00000121578_31 (sequence is synthesized)
tcctggtagtataacttaatatgtcctcctgacctctattttctcataaactggtgaacaggatagatgtatatatgaaggggagtt

SEQ ID NO: 242291 - DNA, 87 bp, Artificial Sequence
  ENSG00000121578_32 (sequence is synthesized)
tattaaggagtattgactcacactatcccaagatgaagtccacaataggccgcctgcaagctgaggaacgaggaagccagcccgggg

SEQ ID NO: 242292 - DNA, 85 bp, Artificial Sequence
  ENSG00000121578_33 (sequence is synthesized)
aaggcccgagagtgaagctgaagaacttggagtctgatgttcagggtcaggaagcccaggagaaagatgaaggccagaagactca

SEQ ID NO: 242293 - DNA, 120 bp, Artificial Sequence
  ENSG00000121578_34 (sequence is synthesized)
gcaagttggcttctcccttcttctgcctgctttattttagcctcgctagcagttgattagatggtgcccacccacatggagggtagatctgcccctcccagtccactgactcaaatgtta

SEQ ID NO: 242294 - DNA, 85 bp, Artificial Sequence
  ENSG00000121578_35 (sequence is synthesized)
gggatttctctgcatttctggagacttgaacagaatcttatttttgggcaagaattttcatttatggtgttgtgtacttcctcca

SEQ ID NO: 242295 - DNA, 120 bp, Artificial Sequence
  ENSG00000121578_36 (sequence is synthesized)
gggcaagaattttcatttatggtgttgtgtacttcctccagtgtcacaacaggaggatgtaatgtctggttgtgtcattttgtgatgttaggattgatctgtgagtttcgatattgccag

SEQ ID NO: 242296 - DNA, 120 bp, Artificial Sequence
  ENSG00000121578_37 (sequence is synthesized)
tctaatctatgcattgtgagattcctcatcagttttttacctaatgacttcagcagtcattgatgcttgatttctaaatttattatttaattaggagttgcaaaattgtaatattctaat

SEQ ID NO: 242297 - DNA, 120 bp, Artificial Sequence
  ENSG00000121578_38 (sequence is synthesized)
tctattgttccttctgcatttattagatttttctacaaagtactttcccttttcatgtatttgggtactctggggtatagtttttataggaaaggcagaataaagagaaaagagtcaagc

SEQ ID NO: 242298 - DNA, 120 bp, Artificial Sequence
  ENSG00000121578_39 (sequence is synthesized)
gtttcctagcatccttcaggatgtagttcttgtactttttggtactcatattgtctcatctttggccaatgggatcttcttcaagctgggtcctgaatcccagtagtcctcgagagcttc

SEQ ID NO: 242299 - DNA, 120 bp, Artificial Sequence
  ENSG00000121578_40 (sequence is synthesized)
cctccctgtgctctgctgtgatgaaatgttctaggctcttcttgtacttttcctgccttgggaattggcctattcacaaggaatcctggcagataagccagttcttatgaggctttgatt

SEQ ID NO: 242300 - DNA, 120 bp, Artificial Sequence
  ENSG00000121578_41 (sequence is synthesized)
gaagaatctgtatttctttgttctgatttttccccttaaattttcaaacagtcttaaggggtttttagtgcttttgttatagtctacattttaaaacaatattaaagtgcttttagcctg

SEQ ID NO: 242301 - DNA, 120 bp, Artificial Sequence
  ENSG00000121578_42 (sequence is synthesized)
atattaaacagtcctgttaaagttcatttatttttttctgaggcagggtctcgctcccaagctggagtgcagtggcgtgaccatggctcactacagcctcgatctctcaggctcaagcaa

SEQ ID NO: 242302 - DNA, 120 bp, Artificial Sequence
  ENSG00000121578_43 (sequence is synthesized)
agctgggaccacaggcatgtgtcaccatgcttggctaatttttttttattttttgtaaagacagggtcttcctgtgttgccaaaggctggtcttaaactcctgggctcaagcagtcctcc

SEQ ID NO: 242303 - DNA, 120 bp, Artificial Sequence
  ENSG00000121578_44 (sequence is synthesized)
agtcctcctgcctcagcctcccaaagttctaggattacagcatgagctaccatgcctggcctaaagtttatattttaaagcattattaaatggcttttcacccttttggtagagtcaacc

SEQ ID NO: 242304 - DNA, 120 bp, Artificial Sequence
  ENSG00000121578_45 (sequence is synthesized)
tttggtagagtcaaccactccaacaaaatagctatttctattttctatgtttttctagtcattgtccataggtatgcatttttctctttatgttaaaaaaattaattattgagtagatac

SEQ ID NO: 242305 - DNA, 120 bp, Artificial Sequence
  ENSG00000121578_46 (sequence is synthesized)
aaaagagtattcctaaattgtatgaaaagtatgaagattcttgatgccatgaacactgctgatatctcctacccccactttgagtgcatgacctgtgtggtcctccctaattctgtagtc

SEQ ID NO: 242306 - DNA, 120 bp, Artificial Sequence
  ENSG00000121578_47 (sequence is synthesized)
tcctccttcacatctcccctatccacctacccaagtaacacttctctgaatttttgtgataagtatttgtgataatgatagttatttctgctgtttcttggttttcttgttttcccatat

SEQ ID NO: 242307 - DNA, 120 bp, Artificial Sequence
  ENSG00000121578_48 (sequence is synthesized)
gtttgtatccctaaacaaaagattgcttagttctgcatgtttttcaactttatgtaaatgaaatcacactgcatttattcttctctgactttatttagctgaacattatgcatctgatcc

SEQ ID NO: 242308 - DNA, 120 bp, Artificial Sequence
  ENSG00000121578_49 (sequence is synthesized)
ccatccatattgtcatgggtaactagcatttattgtcttcactgctgaacaagtagaacctattcagttcactgcccacttgtcttcccagattccatggttctggccacactagtgact

SEQ ID NO: 242309 - DNA, 120 bp, Artificial Sequence
  ENSG00000121578_50 (sequence is synthesized)
tctttaaatgcatcctgctcttttgcgtctgtgcatcttgcccagggtggtctctctgcctggagtgctttttccttcaccttcttcacttggtggatttctctctttcagcgttactga

SEQ ID NO: 242310 - DNA, 120 bp, Artificial Sequence
  ENSG00000121578_51 (sequence is synthesized)
aattttccttctccctgacacctcacccgacttcctcatgaagttaggtctcccttcattcatcctcatctacatacattctaatttttttggaggctcgtgaaagctatgtacccacct

SEQ ID NO: 242311 - DNA, 120 bp, Artificial Sequence
  ENSG00000121578_52 (sequence is synthesized)
acagacaaactttccttataacataggaagattcagagatcccctgaagctcagccaaggatcagttagcaatggttggtacatatcctgtagtatctgtattccttgcacatccttctg

SEQ ID NO: 242312 - DNA, 120 bp, Artificial Sequence
  ENSG00000121578_53 (sequence is synthesized)
tcctgtagactgggggctcactgagtgcagtgacacttttcatcatgggtccccgggttctcacgtggagtctgacacatgaatacatggctatcatgtctgtcaccttcaatggggcaa

SEQ ID NO: 242313 - DNA, 120 bp, Artificial Sequence
  ENSG00000121578_54 (sequence is synthesized)
acaaactttgtaatggtaggaaacacaacaggtacaataatttacaaaaatatgtttgccacatttcagggcaaggcaaaatgcagtggagacatatgttaaattcttatcattcacatt

SEQ ID NO: 242314 - DNA, 71 bp, Artificial Sequence
  ENSG00000121578_55 (sequence is synthesized)
aaagtagagagaaagaaaggactctcaggggactctccctctaaaaatagctcttagaaaagccatgttcc

SEQ ID NO: 242315 - DNA, 120 bp, Artificial Sequence
  ENSG00000121578_56 (sequence is synthesized)
agcctggacaacatggcaccaaggggagaaaagaggaaatatccatgtgaaggatgtggagctgagcacctgggcggagaccccacgctaccacttactagtcgtgtgggctttggcaag

SEQ ID NO: 242316 - DNA, 120 bp, Artificial Sequence
  ENSG00000121579_0 (sequence is synthesized)
gaaaggtcacagcgcggcagcgggtctggctggcggcagcggcgggagggagccgagagacccgagtgcacgtgtggagaagcggcggcacaagcgcggcggcgggagacactcccgccc

SEQ ID NO: 242317 - DNA, 120 bp, Artificial Sequence
  ENSG00000121579_1 (sequence is synthesized)
ccaccagactcaagccctcactcgactctcgcggccttcgttgctcgcacagctccctgcccaggctaggaggccggcttgcggggttgagtggcccgagctaagggtgcggagacctaa

SEQ ID NO: 242318 - DNA, 120 bp, Artificial Sequence
  ENSG00000121579_2 (sequence is synthesized)
gggcggcgactacgacggcgttgatatcggtggtaacgacggcctcagcaggcggggaagatgaaaggtagccggatcgagctgggagatgtgacaccacacaatattaaacagttgaaa

SEQ ID NO: 242319 - DNA, 120 bp, Artificial Sequence
  ENSG00000121579_3 (sequence is synthesized)
agattgaatcaggtcatctttccagtcagctacaatgacaagttctacaaggatgtgctggaggttggcgagctagcaaaacttgcctatttcaatgatattgctgtaggtgcagtatgc

SEQ ID NO: 242320 - DNA, 120 bp, Artificial Sequence
  ENSG00000121579_4 (sequence is synthesized)
tgtagggtggatcattcacagaatcagaagagactttacatcatgacactaggatgtctggcaccttaccgaaggctaggaataggaactaaaatgttaaatcatgtcttaaacatctgt

SEQ ID NO: 242321 - DNA, 120 bp, Artificial Sequence
  ENSG00000121579_5 (sequence is synthesized)
gaaaaagatggtacttttgacaacatttatctgcatgtccagatcagcaatgagtcggcaattgacttctacaggaagtttggctttgagattattgagacaaagaagaactactataag

SEQ ID NO: 242322 - DNA, 120 bp, Artificial Sequence
  ENSG00000121579_6 (sequence is synthesized)
aggatagagcccgcagatgctcatgtgctgcagaaaaacctcaaagttccttctggtcagaatgcagatgtgcaaaagacagacaactgaacaaattacaaatgaactttcttgcacttg

SEQ ID NO: 242323 - DNA, 120 bp, Artificial Sequence
  ENSG00000121579_7 (sequence is synthesized)
cttgtcgccaaataaaagagaggcccattgattcctcccccaccccaacacttttcttttaaagcttttctccctccttgttcttgtttttctttcttcctttccttttctctgagagtt

SEQ ID NO: 242324 - DNA, 120 bp, Artificial Sequence
  ENSG00000121579_8 (sequence is synthesized)
ttaatactttcaaggactttaaaaaaataatcatgtttgaattgttttctcttatttttgtgaggtggtttgaaggaaggacaaggtagatctgtttagttttgcagttgaagttagatg

SEQ ID NO: 242325 - DNA, 120 bp, Artificial Sequence
  ENSG00000121579_9 (sequence is synthesized)
gtcctaaacatttaattgtcaaataatttcaaatttaatgtcctgctttcacattgaagggcagagcctacaaaacattgtatatttcaaaagacaaaaagaagcagcagcagtatcttg

SEQ ID NO: 242326 - DNA, 120 bp, Artificial Sequence
  ENSG00000121579_10 (sequence is synthesized)
ttctctaattcatagacaagttgagtgtgtttgtggtactttgggtttttaaacactttgggatactaatccctagacattgccttcactccacctttagtccttctgagcactctctcg

SEQ ID NO: 242327 - DNA, 120 bp, Artificial Sequence
  ENSG00000121579_11 (sequence is synthesized)
ggagttggaacattgttatccttgtaagaaatactaagcttatgttgatttttaagtaattatatcttctcttcttgctggtgggtggggcagtttggtttagtgttatactttggtcta

SEQ ID NO: 242328 - DNA, 120 bp, Artificial Sequence
  ENSG00000121579_12 (sequence is synthesized)
agtatttgagttaaactgcttttttgctaatgagtgggctggttgttagcaggtttgtttttcctgctgttgattgttactagtggcattaacttttagaatttgggctggtgagattaa

SEQ ID NO: 242329 - DNA, 120 bp, Artificial Sequence
  ENSG00000121579_13 (sequence is synthesized)
ttttttttaatatcccagctagagatatggcctttaactgacctaaagaggtgtgttgtgatttaattttttcccgttcctttttcttcagtaaacccaacaatagtctaaccttaaaaa

SEQ ID NO: 242330 - DNA, 120 bp, Artificial Sequence
  ENSG00000121579_14 (sequence is synthesized)
ttgagttgatgtccttataggtcactacccctaaataaacctgaagcaggtgttttctcttggacatactaaaaaatacctaaaaggaagcttagatgggctgtgacacaaaaaattcaa

SEQ ID NO: 242331 - DNA, 120 bp, Artificial Sequence
  ENSG00000121579_15 (sequence is synthesized)
ttactgtcatctaatgccagctgttaaaagtgtggccactgagcatttgattttataggaaaaaatagtatttttgagaataacatagctgtgctattgcacatctgttggaggacatcc

SEQ ID NO: 242332 - DNA, 120 bp, Artificial Sequence
  ENSG00000121579_16 (sequence is synthesized)
cagatttgcttatactcagtgcctgtgatattgagtttaaggatttgaggcaggggtaattattaaacatattgcttctattcttggaaaaatagaagtgtaaaatgttaataatacaaa

SEQ ID NO: 242333 - DNA, 120 bp, Artificial Sequence
  ENSG00000121579_17 (sequence is synthesized)
tgtcactgtgacctcctccactgagaggactggtttatgccagatcattttccggcacacacggagtggctttgacagattgataactttgtaagatgggagacatctgaaatattcatg

SEQ ID NO: 242334 - DNA, 120 bp, Artificial Sequence
  ENSG00000121579_18 (sequence is synthesized)
ttttccttttgtagtcccatctccactatttagaaatgttctcagactttaaaataatgcacagggcttgagctttctgtcatttgactttaaaaggaagtttcattcatatttatcctc

SEQ ID NO: 242335 - DNA, 120 bp, Artificial Sequence
  ENSG00000121579_19 (sequence is synthesized)
ttatgtaaaattgcggtataaagtctcatttccaaatatgttaaatgacaaaattattttataaaatgtttatgcacactttataaccttaagtttttatttgagaatgtgaaagtacaa

SEQ ID NO: 242336 - DNA, 120 bp, Artificial Sequence
  ENSG00000121579_20 (sequence is synthesized)
agtgcagtagacttcaacaatcttgagtgccaagaataatacagaaaaagaagacagttgatgaatgagtttatagggttctaatcttaagatggtaaaaatgtagaaagaccttgctgg

SEQ ID NO: 242337 - DNA, 120 bp, Artificial Sequence
  ENSG00000121579_21 (sequence is synthesized)
ttttttgggggtattcgtttcttaaacaatccaaatctaagcttagaagaaaagtttagcgttaagcacctttatcttcatgaataagcttcagcttgctcttggcaagagaagagtgct

SEQ ID NO: 242338 - DNA, 120 bp, Artificial Sequence
  ENSG00000121579_22 (sequence is synthesized)
tgagttacagaaggcataagtagtttgaagaatgcagcagcctttttgtaaacttcccagatatcaaaatagactttgatatataaatggttttctgagatgacactgcctctatttcta

SEQ ID NO: 242339 - DNA, 120 bp, Artificial Sequence
  ENSG00000121579_23 (sequence is synthesized)
taaccatttcacctggactatctaatcagtcctatgaatgtatccctaaatgtggttattgaaaacctaatagctgcctcatgacaagtacatgttatttaaggaggaaaaaatattaaa

SEQ ID NO: 242340 - DNA, 120 bp, Artificial Sequence
  ENSG00000121579_24 (sequence is synthesized)
ttttgaattgagtgtgtaggctccctatcattatatatagagtttctttttccacggtagtcagtgacttaacctgaattgtaaatgtttgtaaagggttaattgtcctacatcaaactt

SEQ ID NO: 242341 - DNA, 120 bp, Artificial Sequence
  ENSG00000121579_25 (sequence is synthesized)
ttgagctggttattttgatatatgataataattatctttgaagtagaacaattctgttaactggaaaatcacaggatatatccatcatatttttcaggacagatagtttttactgtgggg

SEQ ID NO: 242342 - DNA, 120 bp, Artificial Sequence
  ENSG00000121579_26 (sequence is synthesized)
caaataggttaaaattacactatgttagttgcatttaggttttaaagcaaagaatctgtagagaaatctatgcaatatatagtttgtccagattagctttcatttggggaatgaagttct

SEQ ID NO: 242343 - DNA, 120 bp, Artificial Sequence
  ENSG00000121579_27 (sequence is synthesized)
gaaatatctaaagcagtttactcatcaattgaaaagtcctccaaaaagagaactattgggaaaccatggtgtggtggtggaaaagaaaagctccctcagttttttggagggaataactta

SEQ ID NO: 242344 - DNA, 120 bp, Artificial Sequence
  ENSG00000121579_28 (sequence is synthesized)
aaaaaatacttaaatggctaagtttacttggtgcagttaagaattaaacttgtcaattttaacattgctgttacatctgaaataaacttatgtgatgttctggtagtgatctgtgatatc

SEQ ID NO: 242345 - DNA, 120 bp, Artificial Sequence
  ENSG00000121579_29 (sequence is synthesized)
tgtaaatgtcaaaactgtattgttgaattctgcagccagcaaccgtacatactcattgtgtagtgtttcccttactgcttttatttactttcacatttaagatctaattttaaaatcatt

SEQ ID NO: 242346 - DNA, 120 bp, Artificial Sequence
  ENSG00000121579_30 (sequence is synthesized)
aaaataggccaagtgtaattaaggcatcctaattcagatcttctgtgacttgctaggtacagtgcccaatatctacaattcagttccaatgagagggaaaaagtaagatccaaggaactg

SEQ ID NO: 242347 - DNA, 120 bp, Artificial Sequence
  ENSG00000121579_31 (sequence is synthesized)
tcttgctgctgtatttttaatgtaattattagaaatacttgacactttaggctgcaatctagttagtaatgtttattggctacagacaacatattcaggtgttttgtttttcttccttgt

SEQ ID NO: 242348 - DNA, 120 bp, Artificial Sequence
  ENSG00000121579_32 (sequence is synthesized)
aaggaaggagtacggtagttcaatgagttgggaattggcttttaagctttttatcaaacatgaatttaagattttttctttaacagaattcagtatttaatatttctagtcaaaattgtt

SEQ ID NO: 242349 - DNA, 120 bp, Artificial Sequence
  ENSG00000121579_33 (sequence is synthesized)
ataattagatttttgcttttttcatttaagaagcaatgagtgatccttgtctagtgtgtctcagttattactgtagtttaaaacaacaaacaagtattaccttccacagttctggatcag

SEQ ID NO: 242350 - DNA, 120 bp, Artificial Sequence
  ENSG00000121579_34 (sequence is synthesized)
gaatctaggagctgcttaactgggtggttctgtcttgagatctcagaaggttgcagtcaagctgttagccaggactgtaccatcttgaagcttgacaaggctagaggagccatttccaag

SEQ ID NO: 242351 - DNA, 120 bp, Artificial Sequence
  ENSG00000121579_35 (sequence is synthesized)
atgtcttgcttacgtggctcttgggcttctgttcctcactgtgtgggtatcacacacagtgcctgatgctcacgtggctcttgggcttcagttccttgggcaccagttgcctggtggaca

SEQ ID NO: 242352 - DNA, 120 bp, Artificial Sequence
  ENSG00000121579_36 (sequence is synthesized)
actggtatgtggcttcccctagagcaggtgatataagaaagtgagcagaaaccatacttttttatgacgtagcctcaggtgacattatttctgccatattccatgagtcacacagaccaa

SEQ ID NO: 242353 - DNA, 120 bp, Artificial Sequence
  ENSG00000121579_37 (sequence is synthesized)
ccattgaatcagcttggtatagtgtgggaggggactgcacaaggatgtgaatactgggaggtggatatcattgggccctctaggagactggctatcactgctcagagaagatgctgggct

SEQ ID NO: 242354 - DNA, 120 bp, Artificial Sequence
  ENSG00000121579_38 (sequence is synthesized)
tcgttgactcccaaggtcagggtagttttggttaggttgtgttttattagtctctaaaaggagtagttttctaaatgagggttataaagcactgcactttacagttattcgggatataaa

SEQ ID NO: 242355 - DNA, 120 bp, Artificial Sequence
  ENSG00000121579_39 (sequence is synthesized)
agaaatagtgggtctaaaggctgtgctcttgtggttgggttttcagtggggaggggagactagtctgtctcagactgatgctgttctcactgatttgaatatttctgggaaattggatac

SEQ ID NO: 242356 - DNA, 120 bp, Artificial Sequence
  ENSG00000121579_40 (sequence is synthesized)
tacagtcacaaataggaacagtaagcctatagaagtttttcagggagtaaatattttctatggcagtgtcctgaattggttctcccttgcaagactgaactgtaggaacttagtcctagt

SEQ ID NO: 242357 - DNA, 120 bp, Artificial Sequence
  ENSG00000121579_41 (sequence is synthesized)
ttatgatacagccaagtaacatagtcacatgggaaaaagagcttgagtcagatttcttaatgtgtgttgttaacttggtagaacattgagaattatttaagtcagagaacgatctgttac

SEQ ID NO: 242358 - DNA, 120 bp, Artificial Sequence
  ENSG00000121579_42 (sequence is synthesized)
gagaacgatctgttactggggcagaaattctcaaccttttcagttctccaaaatttaagatacttgatttcttaggtaaaatgtttttgtttttgttttggagacagagtctcgctctgt

SEQ ID NO: 242359 - DNA, 75 bp, Artificial Sequence
  ENSG00000121579_43 (sequence is synthesized)
attcaagcaattctgcctgagcctcccaagtagctgcgactagaaagcgcatgccaccacgcctggctaattttt

SEQ ID NO: 242360 - DNA, 90 bp, Artificial Sequence
  ENSG00000121579_44 (sequence is synthesized)
gtctcaaactcctgagcttaggcaatcctcctggggagccatggcgcctggccagtaaaatgttttctatctagaatgaatcaaggtatt

SEQ ID NO: 242361 - DNA, 120 bp, Artificial Sequence
  ENSG00000121579_45 (sequence is synthesized)
gccagtaaaatgttttctatctagaatgaatcaaggtattttccttgctcagtagcttctagaataagaaaaaaatagcagcaagatctgattcagaaatagttgggagcagaaagttaa

SEQ ID NO: 242362 - DNA, 120 bp, Artificial Sequence
  ENSG00000121579_46 (sequence is synthesized)
tatgaaggagttgctacttgttaacagcctagagttgagatctagaagaattattacctttttaaatttgtgatgaaagcttaaatccagcatttgggaagttactctattggctgaact

SEQ ID NO: 242363 - DNA, 120 bp, Artificial Sequence
  ENSG00000121579_47 (sequence is synthesized)
attttggagtttgtaagctttgtattagatattcctgatttaactgaaactaatttgccacatagctttaatttcatcccagttttacttgttttactgtcctcaaaaactcaagacatc

SEQ ID NO: 242364 - DNA, 120 bp, Artificial Sequence
  ENSG00000121579_48 (sequence is synthesized)
tgaactcaaaggatctaagcagtataaattaaagcacatgttgaatcactgtagctttcgtaggacatctgattataatgcttttctttgtttctttgtccatactgaacttgtctagtt

SEQ ID NO: 242365 - DNA, 120 bp, Artificial Sequence
  ENSG00000121579_49 (sequence is synthesized)
tatctttgagaaacatttgctagtatcaaaaatcttctgtaaagatttgaacaatcttgaattctccttgtcactagccatctcttcccctaaagtataataaaactgtcaggtactata

SEQ ID NO: 242366 - DNA, 120 bp, Artificial Sequence
  ENSG00000121579_50 (sequence is synthesized)
tatattctgcctctgtcagaaacttgttctccaactccagaggcttcttacctcagtcccctatagtgctgtagtgaatgcttgttcataaaactacctgacacacatccttaattactt

SEQ ID NO: 242367 - DNA, 120 bp, Artificial Sequence
  ENSG00000121594_0 (sequence is synthesized)
aaaccctctgtaaagtaacagaagttagaaggggaaatgtcgcctctctgaagattacccaaagaaaaagtgatttgtcattgctttatagactgtaagaagagaacatctcagaagtgg

SEQ ID NO: 242368 - DNA, 120 bp, Artificial Sequence
  ENSG00000121594_1 (sequence is synthesized)
agtcttaccctgaaatcaaaggatttaaagaaaaagtggaatttttcttcagcaagctgtgaaactaaatccacaacctttggagacccaggaacaccctccaatctctgtgtgttttgt

SEQ ID NO: 242369 - DNA, 120 bp, Artificial Sequence
  ENSG00000121594_2 (sequence is synthesized)
aaacatcactggagggtcttctacgtgagcaattggattgtcatcagccctgcctgttttgcacctgggaagtgccctggtcttacttgggtccaaattgttggctttcacttttgaccc

SEQ ID NO: 242370 - DNA, 120 bp, Artificial Sequence
  ENSG00000121594_3 (sequence is synthesized)
taagcatctgaagccatgggccacacacggaggcagggaacatcaccatccaagtgtccatacctcaatttctttcagctcttggtgctggctggtctttctcacttctgttcaggtgtt

SEQ ID NO: 242371 - DNA, 120 bp, Artificial Sequence
  ENSG00000121594_4 (sequence is synthesized)
atccacgtgaccaaggaagtgaaagaagtggcaacgctgtcctgtggtcacaatgtttctgttgaagagctggcacaaactcgcatctactggcaaaaggagaagaaaatggtgctgact

SEQ ID NO: 242372 - DNA, 120 bp, Artificial Sequence
  ENSG00000121594_5 (sequence is synthesized)
atgatgtctggggacatgaatatatggcccgagtacaagaaccggaccatctttgatatcactaataacctctccattgtgatcctggctctgcgcccatctgacgagggcacatacgag

SEQ ID NO: 242373 - DNA, 120 bp, Artificial Sequence
  ENSG00000121594_6 (sequence is synthesized)
tgtgttgttctgaagtatgaaaaagacgctttcaagcgggaacacctggctgaagtgacgttatcagtcaaagctgacttccctacacctagtatatctgactttgaaattccaacttct

SEQ ID NO: 242374 - DNA, 120 bp, Artificial Sequence
  ENSG00000121594_7 (sequence is synthesized)
aatattagaaggataatttgctcaacctctggaggttttccagagcctcacctctcctggttggaaaatggagaagaattaaatgccatcaacacaacagtttcccaagatcctgaaact

SEQ ID NO: 242375 - DNA, 120 bp, Artificial Sequence
  ENSG00000121594_8 (sequence is synthesized)
gagctctatgctgttagcagcaaactggatttcaatatgacaaccaaccacagcttcatgtgtctcatcaagtatggacatttaagagtgaatcagaccttcaactggaatacaaccaag

SEQ ID NO: 242376 - DNA, 120 bp, Artificial Sequence
  ENSG00000121594_9 (sequence is synthesized)
caagagcattttcctgataacctgctcccatcctgggccattaccttaatctcagtaaatggaatttttgtgatatgctgcctgacctactgctttgccccaagatgcagagagagaagg

SEQ ID NO: 242377 - DNA, 120 bp, Artificial Sequence
  ENSG00000121594_10 (sequence is synthesized)
aggaatgagagattgagaagggaaagtgtacgccctgtataacagtgtccgcagaagcaaggggctgaaaagatctgaaggtcccacctccatttgcaattgacctcttctgggaacttc

SEQ ID NO: 242378 - DNA, 120 bp, Artificial Sequence
  ENSG00000121594_11 (sequence is synthesized)
ggtgggcacagaagtagctctggtgaccttgatcaaggtgttttgaaatgcagaattcttgagttctggaagggactttagagaataccagtgttattaatgacaaaggcactgaggccc

SEQ ID NO: 242379 - DNA, 120 bp, Artificial Sequence
  ENSG00000121594_12 (sequence is synthesized)
agggaggtgacccgaattataaaggccagcgccagaacccagatttcctaactctggtgctctttccctttatcagtttgactgtggcctgttaactggtatatacatatatatgtcagg

SEQ ID NO: 242380 - DNA, 120 bp, Artificial Sequence
  ENSG00000121594_13 (sequence is synthesized)
caaagtgctgctggaagtagaatttgtccaataacaggtcaacttcagagactatctgatttcctaatgtcagagtagaagattttatgctgctgtttacaaaagcccaatgtaatgcat

SEQ ID NO: 242381 - DNA, 120 bp, Artificial Sequence
  ENSG00000121594_14 (sequence is synthesized)
aggaagtatggcatgaacatctttaggagactaatggaaatattattggtgtttacccagtattccatttttttcattgtgttctctattgctgctctctcactcccccatgaggtacag

SEQ ID NO: 242382 - DNA, 120 bp, Artificial Sequence
  ENSG00000121594_15 (sequence is synthesized)
cagaaaggagaactatccaaaactaatttcctctgacatgtaagacgaatgatttaggtacgtcaaagcagtagtcaaggaggaaagggatagtccaaagacttaactggttcatattgg

SEQ ID NO: 242383 - DNA, 120 bp, Artificial Sequence
  ENSG00000121594_16 (sequence is synthesized)
actgataatctctttaaatggctttatgctagtttgacctcatttgtaaaatatttatgagaaagttctcatttaaaatgagatcgttgtttacagtgtatgtactaagcagtaagctat

SEQ ID NO: 242384 - DNA, 120 bp, Artificial Sequence
  ENSG00000121594_17 (sequence is synthesized)
cttcaaatgtctaaggtagtaactttccatagggcctccttagatccctaagatggctttttctccttggtatttctgggtctttctgacatcagcagagaactggaaagacatagccaa

SEQ ID NO: 242385 - DNA, 120 bp, Artificial Sequence
  ENSG00000121594_18 (sequence is synthesized)
ctgctgttcatgttactcatgactcctttctctaaaactgccttccacaattcactagaccagaagtggacgcaacttaagctgggataatcacattatcatctgaaaatctggagttga

SEQ ID NO: 242386 - DNA, 120 bp, Artificial Sequence
  ENSG00000121594_19 (sequence is synthesized)
acagcaaaagaagacaacatttctcaaatgcacatctcatggcagctaagccacatggctgggatttaaagcctttagagccagcccatggctttagctacctcactatgctgcttcaca

SEQ ID NO: 242387 - DNA, 120 bp, Artificial Sequence
  ENSG00000121594_20 (sequence is synthesized)
aaccttgctcctgtgtaaaactatattctcagtgtagggcagagaggtctaacaccaacataaggtactagcagtgtttcccgtattgacaggaatacttaactcaataattcttttctt

SEQ ID NO: 242388 - DNA, 120 bp, Artificial Sequence
  ENSG00000121594_21 (sequence is synthesized)
ttccatttagtaacagttgtgatgactatgtttctattctaagtaattcctgtattctacagcagatactttgtcagcaatactaagggaagaaacaaagttgaaccgtttctttaataa

SEQ ID NO: 242389 - DNA, 120 bp, Artificial Sequence
  ENSG00000121594_22 (sequence is synthesized)
tggatcgtggggatcatgaggcattcttcccttaacaaatttaagctgttttacccactacctcaccttcttaaaaacctctttcagattaagctgaacagttacaagatggctggcatc

SEQ ID NO: 242390 - DNA, 120 bp, Artificial Sequence
  ENSG00000121594_23 (sequence is synthesized)
cctctcctttctccccatatgcaatttgcttaatgtaacctcttcttttgccatgtttccattctgccatcttgaattgtcttgtcagccaattcattatctattaaacactaatttgag

SEQ ID NO: 242391 - DNA, 120 bp, Artificial Sequence
  ENSG00000121594_24 (sequence is synthesized)
aacacctggctgaagtgacgttatcagtcaaaggttggtgggattttctgattttactctaggccggcagattcttaatgcccttaaagacacatggctattgatttaggtgaaaatttt

SEQ ID NO: 242392 - DNA, 120 bp, Artificial Sequence
  ENSG00000121594_25 (sequence is synthesized)
accaaagagggatgtatctcacttcatttcttggagttaagtctctagttgtacaataaactctaactggtttctaaagatgtcctggaaatatctgttaatgtgcatttcttgttcttt

SEQ ID NO: 242393 - DNA, 120 bp, Artificial Sequence
  ENSG00000121621_0 (sequence is synthesized)
gtggttgagtctgaagcgctgggaggcggacattaaagtgaagtggttgcggtaacctggcctgggcctgaagtgagtgagaggcacatgaagagaagtattcaagtatttatacagata

SEQ ID NO: 242394 - DNA, 120 bp, Artificial Sequence
  ENSG00000121621_1 (sequence is synthesized)
ggaatcaagataatcaacaatgtctgtcactgaggaagacctgtgccaccatatgaaagtagtagttcgtgtacgtccggaaaacactaaagaaaaagcagctggatttcataaagtggt

SEQ ID NO: 242395 - DNA, 120 bp, Artificial Sequence
  ENSG00000121621_2 (sequence is synthesized)
tcatgttgtggataaacatatcctagtttttgatcccaaacaagaagaagtcagttttttccatggaaagaaaactacaaatcaaaatgttataaagaaacaaaataaggatcttaaatt

SEQ ID NO: 242396 - DNA, 120 bp, Artificial Sequence
  ENSG00000121621_3 (sequence is synthesized)
tgtatttgatgctgtttttgatgaaacgtcaactcagtcagaagtttttgaacacactactaagccaattcttcgtagttttttgaatggatataattgcacagtacttgcctatggtgc

SEQ ID NO: 242397 - DNA, 120 bp, Artificial Sequence
  ENSG00000121621_4 (sequence is synthesized)
cactggtgctgggaagacccacactatgctaggatcagctgatgaacctggagtgatgtatctaacaatgttacacctttacaaatgcatggatgagattaaagaagagaaaatatgtag

SEQ ID NO: 242398 - DNA, 120 bp, Artificial Sequence
  ENSG00000121621_5 (sequence is synthesized)
tactgcagtttcatatctggaggtatataatgaacagattcgtgatctcttagtaaattcagggccacttgctgtccgggaagatacccaaaaaggggtggtcgttcatggacttacttt

SEQ ID NO: 242399 - DNA, 120 bp, Artificial Sequence
  ENSG00000121621_6 (sequence is synthesized)
acaccagcccaaatcctcagaagaaattttacatttattggataatggaaacaaaaacaggacacaacatcccactgatatgaatgccacatcttctcgttctcatgctgttttccaaat

SEQ ID NO: 242400 - DNA, 120 bp, Artificial Sequence
  ENSG00000121621_7 (sequence is synthesized)
ttacttgcgacaacaagacaaaacagcaagtatcaatcaaaatgtccgtattgccaagatgtcactcattgacctggcaggatctgagcgagcaagtacttccggtgctaaggggacccg

SEQ ID NO: 242401 - DNA, 120 bp, Artificial Sequence
  ENSG00000121621_8 (sequence is synthesized)
atttgtagaaggcacaaatattaatagatcacttttagctcttgggaatgtcatcaatgccttagcagattcaaagagaaagaatcagcatatcccttacagaaatagtaagcttactcg

SEQ ID NO: 242402 - DNA, 120 bp, Artificial Sequence
  ENSG00000121621_9 (sequence is synthesized)
cttgttaaaggattctcttggaggaaactgtcaaactataatgatagctgctgttagtccttcctctgtattctacgatgacacatataacactcttaagtatgctaaccgggcaaagga

SEQ ID NO: 242403 - DNA, 120 bp, Artificial Sequence
  ENSG00000121621_10 (sequence is synthesized)
cattaaatcttctttgaagagcaatgttcttaatgtcaataatcatataactcaatatgtaaagatctgtaatgagcagaaggcagagattttattgttaaaagaaaaactaaaagccta

SEQ ID NO: 242404 - DNA, 120 bp, Artificial Sequence
  ENSG00000121621_11 (sequence is synthesized)
tgaagaacagaaagccttcactaatgaaaatgaccaagcaaagttaatgatttcaaaccctcaggaaaaagaaatcgaaaggtttcaagaaatcctgaactgcttgttccagaatcgaga

SEQ ID NO: 242405 - DNA, 120 bp, Artificial Sequence
  ENSG00000121621_12 (sequence is synthesized)
agaaattagacaagaatatctgaagttggaaatgttacttaaagaaaatgaacttaaatcattctaccaacaacagtgccataaacaaatagaaatgatgtgttctgaagacaaagtaga

SEQ ID NO: 242406 - DNA, 120 bp, Artificial Sequence
  ENSG00000121621_13 (sequence is synthesized)
aaaggccactggaaaacgagatcatagacttgcaatgttgaaaactcgtcgctcctacctggagaaaaggagggaggaggaattgaagcaatttgatgagaatactaattggctccatcg

SEQ ID NO: 242407 - DNA, 120 bp, Artificial Sequence
  ENSG00000121621_14 (sequence is synthesized)
gaaagatcttcattgtcaccatttgcacctccagaacaaagatttgaaagcacaaattagacatatgatggatctagcttgtcttcaggaacagcaacacaggcagactgaagcagtatt

SEQ ID NO: 242408 - DNA, 120 bp, Artificial Sequence
  ENSG00000121621_15 (sequence is synthesized)
gaatgctttacttccaaccctaagaaaacaatattgcacattaaaagaagccggcctgtcaaatgctgcttttgaatctgacttcaaagagatcgaacatttggtagagaggaaaaaagt

SEQ ID NO: 242409 - DNA, 120 bp, Artificial Sequence
  ENSG00000121621_16 (sequence is synthesized)
ggtagtttgggctgaccaaactgccgaacaaccaaagcaaaacgatctaccagggatttctgttcttatgacctttccacaacttggaccagttcagcctattccttgttgctcatcttc

SEQ ID NO: 242410 - DNA, 120 bp, Artificial Sequence
  ENSG00000121621_17 (sequence is synthesized)
aggtggaactaatctggttaagattcctacagaaaaaagaactcggagaaaactaatgccatctcccttgaaaggacagcatactctaaagtctccaccatctcaaagtgtgcagctcaa

SEQ ID NO: 242411 - DNA, 120 bp, Artificial Sequence
  ENSG00000121621_18 (sequence is synthesized)
tgattctcttagcaaagaacttcagcctattgtatatacaccagaagactgtagaaaagcttttcaaaatccgtctacagtaaccttaatgaaaccatcatcatttactacaagttttca

SEQ ID NO: 242412 - DNA, 120 bp, Artificial Sequence
  ENSG00000121621_19 (sequence is synthesized)
ggctatcagctcaaacataaacagtgataattgtctgaaaatgttgtgtgaagtagctatccctcataatagaagaaaagaatgtggacaggaggacttggactctacatttactatatg

SEQ ID NO: 242413 - DNA, 120 bp, Artificial Sequence
  ENSG00000121621_20 (sequence is synthesized)
tgaagacatcaagagctcgaagtgtaaattacccgaacaagaatcactaccaaatgataacaaagacattttacaacggcttgatccttcttcattctcaactaagcattctatgcctgt

SEQ ID NO: 242414 - DNA, 120 bp, Artificial Sequence
  ENSG00000121621_21 (sequence is synthesized)
accaagcatggtgccatcctacatggcaatgactactgctgccaaaaggaaacggaaattaacaagttctacatcaaacagttcgttaactgcagacgtaaattctggatttgccaaacg

SEQ ID NO: 242415 - DNA, 120 bp, Artificial Sequence
  ENSG00000121621_22 (sequence is synthesized)
tgttcgacaagataattcaagtgagaagcacttacaagaaaacaaaccaacaatggaacataaaagaaacatctgtaaaataaatccaagcatggttagaaaatttggaagaaatatttc

SEQ ID NO: 242416 - DNA, 120 bp, Artificial Sequence
  ENSG00000121621_23 (sequence is synthesized)
aaaaggaaatctaagataaatcacttcaaaaccaagcaaaatgaagttgatcaaatctgcttttcaaagtttatcaataccctttcaaaaatatatttaaaatctttgaaagaagaccca

SEQ ID NO: 242417 - DNA, 120 bp, Artificial Sequence
  ENSG00000121621_24 (sequence is synthesized)
tcttaaagctaagtttacccaagtactttcagcaagcagaaaaatgaaactctttgttttcttcttttgtgttctaaaaaaataaaatttcaaaagaaaaggttgtcttttaagtttttt

SEQ ID NO: 242418 - DNA, 120 bp, Artificial Sequence
  ENSG00000121621_25 (sequence is synthesized)
aaatatttgttgccttttaaaatccctgagtgtaagttaccatggtggcagcttagttttactatgccacaacaagttgactaggacattttagtaaatggtagtgagttaaattatctt

SEQ ID NO: 242419 - DNA, 120 bp, Artificial Sequence
  ENSG00000121621_26 (sequence is synthesized)
tctttattattttttaaaaataagaatttagaagtggtaaaattatggcccaagatgtatttggttctctattatgttttgatacattattttaatcatatatatgactttccttttcaa

SEQ ID NO: 242420 - DNA, 120 bp, Artificial Sequence
  ENSG00000121621_27 (sequence is synthesized)
actttaatgtacaagtgtaaatatatgtgcccataaaatcattgtaaatattatttagtcatcacaaataaaatattgtcccttgctacttgatatattaaagatgtagattttaaagtg

SEQ ID NO: 242421 - DNA, 65 bp, Artificial Sequence
  ENSG00000121621_28 (sequence is synthesized)
tacaagaatgttggccatgctagtcttgaactcctgacttcaggtgatccatccgcctcagcctc

SEQ ID NO: 242422 - DNA, 120 bp, Artificial Sequence
  ENSG00000121621_29 (sequence is synthesized)
ctgggattacaggctgagccactgtgcccggcctggtggcggtggttctaactctggaaattttatagtcaaggctacttactcacccattctttacagacatctggaaatgttggagaa

SEQ ID NO: 242423 - DNA, 120 bp, Artificial Sequence
  ENSG00000121621_30 (sequence is synthesized)
acccattctttacagacatctggaaatgttggagaaaatgtagcaaacattttttaaaatacatagttaagtgcacaagaaagaaattttaattcctggatgtcagtaacaaaaaggaaa

SEQ ID NO: 242424 - DNA, 120 bp, Artificial Sequence
  ENSG00000121621_31 (sequence is synthesized)
ttaggacggacatctacttgacccttctaaatataatcaaatttaaggagcttgtatgctaaaaattcttaagaaattcaatagacttgaactgtaaatatagactttgaaattttagtt

SEQ ID NO: 242425 - DNA, 120 bp, Artificial Sequence
  ENSG00000121621_32 (sequence is synthesized)
atcatatataacttatacatcatttgtaaacctttctcttccagggccttactgtggcccctatagacatctgtcctttcagttgcctatgttattaaaccacatgcttattgcaattaa

SEQ ID NO: 242426 - DNA, 120 bp, Artificial Sequence
  ENSG00000121621_33 (sequence is synthesized)
tagaagggtctttgctaacctgcttagtcgaacattaatttagacggttaaaccataaagcatcttgattatatatatatatatataatagatactattattcgatcttttgggtactat

SEQ ID NO: 242427 - DNA, 120 bp, Artificial Sequence
  ENSG00000121621_34 (sequence is synthesized)
ggtacttgagtggctttctccctaacctctttgatgtcatggcgtattgtatttggatggcatcttggagtaatcactcaaaacttgaacacatttgttgcagcccaggatgatgctctg

SEQ ID NO: 242428 - DNA, 120 bp, Artificial Sequence
  ENSG00000121634_0 (sequence is synthesized)
atgggcgactggagtttcctggggaacatcttggaggaggtgaatgagcactccaccgtcatcggcagagtctggctcaccgtgcttttcatcttccggatcctcatccttggcacggcc

SEQ ID NO: 242429 - DNA, 120 bp, Artificial Sequence
  ENSG00000121634_1 (sequence is synthesized)
gcagagttcgtgtggggggatgagcaatccgacttcgtgtgcaacacccagcagcctggctgcgagaacgtctgctacgacgaggcctttcccatctcccacattcgcctctgggtgctg

SEQ ID NO: 242430 - DNA, 120 bp, Artificial Sequence
  ENSG00000121634_2 (sequence is synthesized)
cagatcatcttcgtctccaccccgtccctgatgtacgtggggcacgcggtgcactacgtccgcatggaggagaagcgcaaaagccgcgaggcggaggagctgggccagcaggcggggact

SEQ ID NO: 242431 - DNA, 120 bp, Artificial Sequence
  ENSG00000121634_3 (sequence is synthesized)
aacggcggcccggaccagggcagcgtcaagaagagcagcggcagcaaaggcactaagaagttccggctggaggggaccctgctgaggacctacatctgccacatcatcttcaagaccctc

SEQ ID NO: 242432 - DNA, 120 bp, Artificial Sequence
  ENSG00000121634_4 (sequence is synthesized)
tttgaagtgggcttcatcgtgggccactacttcctgtacgggttccggatcctgcctctgtaccgctgcagccggtggccctgccccaatgtggtggactgcttcgtgtcccggcccacg

SEQ ID NO: 242433 - DNA, 120 bp, Artificial Sequence
  ENSG00000121634_5 (sequence is synthesized)
gccttgaagaggcctgtagagcagcccctgggggagattcctgagaaatccctccactccattgctgtctcctccatccagaaagccaagggctatcagctcctagaagaagagaaaatc

SEQ ID NO: 242434 - DNA, 120 bp, Artificial Sequence
  ENSG00000121634_6 (sequence is synthesized)
gtttcccactatttccccttgaccgaggttgggatggtggagaccagcccactgcctgccaagcctttcaatcagttcgaggagaagatcagcacaggacccctgggggacttgtcccgg

SEQ ID NO: 242435 - DNA, 120 bp, Artificial Sequence
  ENSG00000121634_7 (sequence is synthesized)
ggctaccaagagacactgccttcctacgctcaggtgggggcacaagaagtggagggcgaggggccgcctgcagaggagggagccgaacccgaggtgggagagaagaaggaggaagcagag

SEQ ID NO: 242436 - DNA, 120 bp, Artificial Sequence
  ENSG00000121634_8 (sequence is synthesized)
aggctgaccacggaggagcaggagaaggtggccgtgccagagggggagaaagtagagacccccggagtggataaggagggtgaaaaagaagagccgcagtcggagaaggtgtcaaagcaa

SEQ ID NO: 242437 - DNA, 120 bp, Artificial Sequence
  ENSG00000121634_9 (sequence is synthesized)
gggctgccagctgagaagacaccttcactctgtccagagctgacaacagatgatgccagacccctgagcaggctaagcaaagccagcagccgagccaggtcagacgatctaaccgtatga

SEQ ID NO: 242438 - DNA, 120 bp, Artificial Sequence
  ENSG00000121644_0 (sequence is synthesized)
ccgatgcttccgccccggctgccgcgggccgggctgtacgcttagtgcccggctcaggccccctgaagcgcccgcgggggtgagagcggcctccggccccgcggagacggagcggcttga

SEQ ID NO: 242439 - DNA, 120 bp, Artificial Sequence
  ENSG00000121644_1 (sequence is synthesized)
tgagagcggcctccggccccgcggagacggagcggcttgaggacgaggcggcggccgcggggaggaggatgggggctaaccagttagtggtgctcaacgtgtacgacatgtattggatga

SEQ ID NO: 242440 - DNA, 120 bp, Artificial Sequence
  ENSG00000121644_2 (sequence is synthesized)
acgaatatacctcatccattggaattggagtttttcattcaggaattgaagtctatggcagagaatttgcttatggtggccatccttaccccttttctggaatatttgaaatttccccag

SEQ ID NO: 242441 - DNA, 120 bp, Artificial Sequence
  ENSG00000121644_3 (sequence is synthesized)
gaaatgcttctgaactaggagaaacatttaaatttaaagaagctgttgttttagggagcacggacttcctagaagatgatatagaaaaaattgtagaagaactgggaaaagaatacaaag

SEQ ID NO: 242442 - DNA, 120 bp, Artificial Sequence
  ENSG00000121644_4 (sequence is synthesized)
gcaatgcttatcatttaatgcataaaaactgcaatcatttttcttcagctttatcagagattctttgtgggaaagagattcctcgctggatcaatcgacttgcctacttcagctcctgta

SEQ ID NO: 242443 - DNA, 120 bp, Artificial Sequence
  ENSG00000121644_5 (sequence is synthesized)
taccctttctacagagttgcctcccgaaggagtggctcacgcccgcagccctgcagtctagtgtcagccaagaactccaggatgaactggaggaagcagaggatgctgccgcatccgctt

SEQ ID NO: 242444 - DNA, 120 bp, Artificial Sequence
  ENSG00000121644_6 (sequence is synthesized)
ccgtggcaagcactgcagcaggctccagacccgggcgccacactaaactataaatgtctccaaagtcacacattcagaactgtctctggcagtcgaatatcactagagaaaagtaaacag

SEQ ID NO: 242445 - DNA, 120 bp, Artificial Sequence
  ENSG00000121644_7 (sequence is synthesized)
agaagcatcctttagatattttgtatgcaaagatggctctcccccaaatcccagtttttcagctcaggattatatttgtaatcaaaaaaaaaaaatcacttggcgcaggagggagaactt

SEQ ID NO: 242446 - DNA, 120 bp, Artificial Sequence
  ENSG00000121644_8 (sequence is synthesized)
tgtaagaagctgccctctgttttttttatccactcgtaaatctggatttatttcttctgttttatacaagctctgttaagttatgtttacagtatcttgtatcgctgtttacaaatcttg

SEQ ID NO: 242447 - DNA, 120 bp, Artificial Sequence
  ENSG00000121644_9 (sequence is synthesized)
catggactcctgccacagtgaaagaagaaaatcttcatgtcttcaaaaattaggcaggtaatctttgtatacttctgacaattgccagatctatggcataaataggcacacaaaaaggta

SEQ ID NO: 242448 - DNA, 120 bp, Artificial Sequence
  ENSG00000121644_10 (sequence is synthesized)
cttaaacagttatagtcaccatcacctgcttcagaatggtcttttagatttgtgtttgttttgttaaagttgttggcaccaggatgcagagaatcagactggcctgaggtgaaggagcac

SEQ ID NO: 242449 - DNA, 120 bp, Artificial Sequence
  ENSG00000121644_11 (sequence is synthesized)
acagccctgagggcttggaaccctgggtccagttcctcttcacacccccttccactctgagtagcacatctccccaggtgcccatggaacacctgctttcatcccaaatatccgtccacc

SEQ ID NO: 242450 - DNA, 120 bp, Artificial Sequence
  ENSG00000121644_12 (sequence is synthesized)
taggcggggtggtatgttcttacgtctctctgactttgatgccactcattctatagtttagctggttttcgttcaagatattcttggtagtaactgacaagtatgttgcacatgtattgg

SEQ ID NO: 242451 - DNA, 120 bp, Artificial Sequence
  ENSG00000121644_13 (sequence is synthesized)
gggaggcgcttcatttttattttaatacacatgtatttcctccttgcacaggattttgatggtgtgggaatatcctaagtggtagccttccaagtagcagtgagttgacattcagctgct

SEQ ID NO: 242452 - DNA, 120 bp, Artificial Sequence
  ENSG00000121644_14 (sequence is synthesized)
tttaactattcaggctaccttttatactaaaccttgaaaactagaatctaatgtctaccccaaaaaagtagttctttgatattttatactttttatgtaccatgtcagaaagagtatgtt

SEQ ID NO: 242453 - DNA, 120 bp, Artificial Sequence
  ENSG00000121644_15 (sequence is synthesized)
ggcgtttgtcatgggactcatttcacataatagaatgcctagtctcattgaccaatcgttaaaaaatcatatttgtgtgtcttaagattcatatttatatgttctctcaaatgtatgtct

SEQ ID NO: 242454 - DNA, 120 bp, Artificial Sequence
  ENSG00000121644_16 (sequence is synthesized)
ggaatctgtctgctccagtctactcctagtttgatccttggatgtaagaaccaagtcattacatgtcaaattcaatttttctgccttaagaatgaatgtccttcataaaatattggatgc

SEQ ID NO: 242455 - DNA, 120 bp, Artificial Sequence
  ENSG00000121644_17 (sequence is synthesized)
agtgtaacactatccaaggcagtgacttcagctttatatacatataaaatatagttagttttaaaattattgacatttatttaaacttttagattggattgtttgctattgctctgtgtg

SEQ ID NO: 242456 - DNA, 120 bp, Artificial Sequence
  ENSG00000121644_18 (sequence is synthesized)
aggatacataatctttcagtaaactgtatttttaacttttccataagctgattttggttcattttatcaacgtaagcacaccctgttcatagggaaaataaaccttgggttataagcatt

SEQ ID NO: 242457 - DNA, 120 bp, Artificial Sequence
  ENSG00000121644_19 (sequence is synthesized)
agcctgaggacaatgaagccacttaacctaatttatgctttcgactgttctgtttccagagaggaaagcctttacaaattactctcagttctttaggggcagaaggcttgtttcaagagg

SEQ ID NO: 242458 - DNA, 120 bp, Artificial Sequence
  ENSG00000121644_20 (sequence is synthesized)
tttgacagaagaaaggaatatatgaacttaatgagatgtcgacttggttcaggtctaaaaatgagggcaaaacactaaggctctagcagtgacttgttcactaaaaagagagagtcctgt

SEQ ID NO: 242459 - DNA, 120 bp, Artificial Sequence
  ENSG00000121644_21 (sequence is synthesized)
ccccagacggttagtacaaagccttggatacagtttgcttgtaatatttttaataatgtgaggagtacagtgttttctaattcattcaagtatatatgatttaaacctgggctactgaca

SEQ ID NO: 242460 - DNA, 120 bp, Artificial Sequence
  ENSG00000121644_22 (sequence is synthesized)
cacacacagtagccattagttagactcttcttagtgaatatcaggaacatcccatctgtgcttaaccagaatccagcaagtcagcacacaagtgattttattgttattttgttgtattta

SEQ ID NO: 242461 - DNA, 120 bp, Artificial Sequence
  ENSG00000121644_23 (sequence is synthesized)
cttgcatttgttgtatttactttcatctgcagcatttggagtttaaaaataatgtaaagggttctagtagaaatagtgtcctaaggccaattacctaccatactaacaatcagcagataa

SEQ ID NO: 242462 - DNA, 120 bp, Artificial Sequence
  ENSG00000121644_24 (sequence is synthesized)
aattctggacgtgagattccttataatctaattatacctgaggttgagcaagaaatgtcttcctttagaaaatctcattcaagtcaggttcttctctacagttcaaaattgagaatggat

SEQ ID NO: 242463 - DNA, 120 bp, Artificial Sequence
  ENSG00000121644_25 (sequence is synthesized)
ttaattaactagcatttagccagctttttcttgcccttggagaaaaagaatcattctcaacctgataatctgttaagaaaaatcccatatgaacaatctggtcattaacatacatatgat

SEQ ID NO: 242464 - DNA, 120 bp, Artificial Sequence
  ENSG00000121644_26 (sequence is synthesized)
acggagtctctttgttgtcaccaagtgaacatacttctcatggtgggttggacagtaatacatgttagagggtcagaagcttctggtttctgctgtttgctttaaatacccttggggttt

SEQ ID NO: 242465 - DNA, 120 bp, Artificial Sequence
  ENSG00000121644_27 (sequence is synthesized)
ttttttaaacccttacaaggggagcatcagctttggaaagtgtgactctgtaggagtgtagaaggcagtggtgtatgatcttagcctcgtcctgatgcctgaatccagccagctgttgct

SEQ ID NO: 242466 - DNA, 120 bp, Artificial Sequence
  ENSG00000121644_28 (sequence is synthesized)
ctgacccacagcaatagagcaagttacccatcaccagcatttgtacagagcagggaattctggttttagtccattggtagcattgtgtgtatgaggagattcaacaccacagacagctgc

SEQ ID NO: 242467 - DNA, 120 bp, Artificial Sequence
  ENSG00000121644_29 (sequence is synthesized)
aggactcgatatccatggcttctttccatcacaaaacgggtagaaacacattcactgcttcagggttctaatctgtgtgtctccttatgactccatttctgtaagctactctgtaacttt

SEQ ID NO: 242468 - DNA, 120 bp, Artificial Sequence
  ENSG00000121644_30 (sequence is synthesized)
gatatatgctgtattttctttctttaaaagatttagatgttttttcagcaagctagccatacaaccattgtatctctttctcttcagtatggtttagagcccagatcagttagtaggctt

SEQ ID NO: 242469 - DNA, 120 bp, Artificial Sequence
  ENSG00000121644_31 (sequence is synthesized)
tcgttgtcttctctttcaatacatgtacatctttactgtttgaaaagtgttacagctgtcaaagaatcttcatggacctgaagataatttcttgtgaagttgaatgcaagtgtactgtca

SEQ ID NO: 242470 - DNA, 120 bp, Artificial Sequence
  ENSG00000121644_32 (sequence is synthesized)
ttcatagtgtttatatcaaaataccaggaatcttcacttttgctaccttgatatagcattgggctatcatgttacaacattgaaatacattgatttattaaaaaatacttttataagaaa

SEQ ID NO: 242471 - DNA, 120 bp, Artificial Sequence
  ENSG00000121644_33 (sequence is synthesized)
cccctggcggccccgagccctggcccaggccggcttcctctcgcccgtggggctcggaccccggccccaggcgcttcctgcctggcgtctccgcctccagcctagttctcgggggaagcc

SEQ ID NO: 242472 - DNA, 120 bp, Artificial Sequence
  ENSG00000121644_34 (sequence is synthesized)
gggggtgaaggagggagtattgttattttttaatcctcgcactcgtcgacgctccggtgaacccagtcagcccgagggttttggccaaagctcgggtgggcttgaacctctcccatccgc

SEQ ID NO: 242473 - DNA, 120 bp, Artificial Sequence
  ENSG00000121644_35 (sequence is synthesized)
gtgcagtgtcctttcggcaaagcttccgttgcgtttccaaccccacttgccggcccccggggctgccccgggacccccgtcccgaccgcctgcgctcccagctcctctgcttctgccgaa

SEQ ID NO: 242474 - DNA, 120 bp, Artificial Sequence
  ENSG00000121644_36 (sequence is synthesized)
ctgtccgtctctctccatggctacgtcttcagaaactcccaagcccctctaagtccagaaggtcacagctttcgggtgcctgtgctagaatctcttcaaaggtgaacaggagccaacaca

SEQ ID NO: 242475 - DNA, 120 bp, Artificial Sequence
  ENSG00000121644_37 (sequence is synthesized)
ccctttccttgtgtgttaaaggcaacctcgttaaaatatgaatgaggctaacatttctcaagaaaatagcccagctgaattatttagagatcctggtggtgctcctttcctacactctga

SEQ ID NO: 242476 - DNA, 120 bp, Artificial Sequence
  ENSG00000121644_38 (sequence is synthesized)
agaccactttccagattgggctgctgcggatcatttcttttcttccataactctgccgtatgcatgaaaataattctattgggggtcaccagtattaacttccttctcatggaagaagag

SEQ ID NO: 242477 - DNA, 120 bp, Artificial Sequence
  ENSG00000121644_39 (sequence is synthesized)
tgtgatcctcagaaggttacttaattatgcatagtgttcctattgcttgctgccttatcagtgattatgttcctctgtgtactttggagtaatctaccaccaataaaaacgtcctggagc

SEQ ID NO: 242478 - DNA, 80 bp, Artificial Sequence
  ENSG00000121653_0 (sequence is synthesized)
agtcccgcgggccgtgcgcggtgctgtgccgcgccctgccagacacaggtgcgcccgcctagcccgaactccgcggcggc

SEQ ID NO: 242479 - DNA, 120 bp, Artificial Sequence
  ENSG00000121653_1 (sequence is synthesized)
cgctccgcccggatggccagggctgtgcccgagaatggcggagcgagaaagcggcggcctgggagggggggccgcgtccccgcccgccgcctccccgttcctggggctgcacatcgcttc

SEQ ID NO: 242480 - DNA, 120 bp, Artificial Sequence
  ENSG00000121653_2 (sequence is synthesized)
ggctgcacatcgcttcgcctcccaatttcaggctcacccatgacatcagcctggaggagtttgaggatgaagacctctcggagatcactgatgagtgtggcatcagcttacagtgcaaag

SEQ ID NO: 242481 - DNA, 120 bp, Artificial Sequence
  ENSG00000121653_3 (sequence is synthesized)
acaccctgtccttacggcccccgcgcgccgggctgctctctgcgggcggcggcggcgcggggagccggttgcaggccgagatgctgcagatggacctgatcgacgcgacgggggacactc

SEQ ID NO: 242482 - DNA, 120 bp, Artificial Sequence
  ENSG00000121653_4 (sequence is synthesized)
gacctgatcgacgcgacgggggacactcccggggccgaggacgacgaggaggacgacgacgaggagcgcgcggcccggcggccgggagcggggccgcccaaggccgagtccggccaggag

SEQ ID NO: 242483 - DNA, 120 bp, Artificial Sequence
  ENSG00000121653_5 (sequence is synthesized)
aaggccagagccagggcccgggcagcggggacacgtaccggcccaagcggcccaccacgctcaacctctttccgcaggtgccgcggtctcaggacacactgaataataattctctgggca

SEQ ID NO: 242484 - DNA, 120 bp, Artificial Sequence
  ENSG00000121653_6 (sequence is synthesized)
aaaagcacagttggcaggatcgggtgtctcgatcatcctcacccctgaagacaggggagcagacaccaccgcatgaacacatctgcctgagcgatgagctgcccccccagagcggccccg

SEQ ID NO: 242485 - DNA, 120 bp, Artificial Sequence
  ENSG00000121653_7 (sequence is synthesized)
cccccaccacagatcgaggcacctccaccgacagcccttgccgccgcagcacagccacccagatggcacctccgggtggtccccctgctgccccgcctgggggtcggggccactcgcatc

SEQ ID NO: 242486 - DNA, 120 bp, Artificial Sequence
  ENSG00000121653_8 (sequence is synthesized)
gagaccgaatccactaccaggccgatgtgcgactagaggccactgaggagatctacctgaccccagtgcagaggcccccagacgctgcagagcccacctccgccttcctgccgcccactg

SEQ ID NO: 242487 - DNA, 120 bp, Artificial Sequence
  ENSG00000121653_9 (sequence is synthesized)
agagccggatgtcagtcagctccgatccagaccctgccgcctacccctccacggcagggcggccgcacccctccatcagtgaagaggaagagggcttcgactgcctgtcgtccccagagc

SEQ ID NO: 242488 - DNA, 120 bp, Artificial Sequence
  ENSG00000121653_10 (sequence is synthesized)
gggctgagcccccaggcggagggtggcgggggagcctgggggagccgccgccacctccacgggcctctctgagctcggacaccagcgccctgtcctatgactctgtcaagtacacgctgg

SEQ ID NO: 242489 - DNA, 120 bp, Artificial Sequence
  ENSG00000121653_11 (sequence is synthesized)
tggtagatgagcatgcacagctggagctggtgagcctgcggccgtgcttcggagactacagtgacgagagtgactctgccaccgtctatgacaactgtgcctccgtctcctcgccctatg

SEQ ID NO: 242490 - DNA, 120 bp, Artificial Sequence
  ENSG00000121653_12 (sequence is synthesized)
gcctgcctctccgaggactccacgcctgatgaacccgacgtccatttctccaagaaattcctgaacgtcttcatgagtggccgctcccgctcctccagtgctgagtccttcgggctgttc

SEQ ID NO: 242491 - DNA, 120 bp, Artificial Sequence
  ENSG00000121653_13 (sequence is synthesized)
tcctgcatcatcaacggggaggagcaggagcagacccaccgggccatattcaggtttgtgcctcgacacgaagacgaacttgagctggaagtggatgaccctctgctagtggagctccag

SEQ ID NO: 242492 - DNA, 120 bp, Artificial Sequence
  ENSG00000121653_14 (sequence is synthesized)
gctgaagactactggtacgaggcctacaacatgcgcactggtgcccggggtgtctttcctgcctattacgccatcgaggtcaccaaggagcccgagcacatggcagccctggccaaaaac

SEQ ID NO: 242493 - DNA, 120 bp, Artificial Sequence
  ENSG00000121653_15 (sequence is synthesized)
agtgactgggtggaccagttccgggtgaagttcctgggctcagtccaggttccctatcacaagggcaatgacgtcctctgtgctgctatgcaaaagattgccaccacccgccggctcacc

SEQ ID NO: 242494 - DNA, 120 bp, Artificial Sequence
  ENSG00000121653_16 (sequence is synthesized)
gtgcactttaacccgccctccagctgtgtcctggagatcagcgtgcggggtgtgaagataggcgtcaaggccgatgactcccaggaggccaaggggaataaatgtagccactttttccag

SEQ ID NO: 242495 - DNA, 120 bp, Artificial Sequence
  ENSG00000121653_17 (sequence is synthesized)
ttaaaaaacatctctttctgcggatatcatccaaagaacaacaagtactttgggttcatcaccaagcaccccgccgaccaccggtttgcctgccacgtctttgtgtctgaagactccacc

SEQ ID NO: 242496 - DNA, 120 bp, Artificial Sequence
  ENSG00000121653_18 (sequence is synthesized)
aaagccctggcagagtccgtggggagagcattccagcagttctacaagcagtttgtggagtacacctgccccacagaagatatctacctggagtagctgtgcagccccgccctctgcgtc

SEQ ID NO: 242497 - DNA, 120 bp, Artificial Sequence
  ENSG00000121653_19 (sequence is synthesized)
ccccagccctcaggccagtgccaggacagctggctgctgacaggatgtggcactgcttgaggaggggcacctgccaccgccagaggacaaggaagtgggggccgctggcccagggtaggg

SEQ ID NO: 242498 - DNA, 120 bp, Artificial Sequence
  ENSG00000121653_20 (sequence is synthesized)
gagggtggggcaatggggagaggcaaatgcagtttattgtaatatatgggattagattcatctatggagggcagagtgggctgcctggggattgggagggacagggcttggggagcaggt

SEQ ID NO: 242499 - DNA, 120 bp, Artificial Sequence
  ENSG00000121653_21 (sequence is synthesized)
ctctggcagagaaggatgtccgttccaggagcacacggccctgccccatcctgggccttacctcccctgccagggctcgggcgctgtggctcctgccttgatgaagcccgtgtcctgcct

SEQ ID NO: 242500 - DNA, 120 bp, Artificial Sequence
  ENSG00000121653_22 (sequence is synthesized)
tgatgaagcctgtgccacctgcaagtgcccgccctgcccctgccccaacccccaccgaagagccctgagctcaggctgagcccagccacctcccaaggactttccagtgaggaaatggca

SEQ ID NO: 242501 - DNA, 120 bp, Artificial Sequence
  ENSG00000121653_23 (sequence is synthesized)
acacgtggaggtgaagtccctgttctcagctccgtcatctgcggggcttctgggtggctcctgccactgacctcaccggcatgctggcctgtggcaggcctaggacctcaggcggggagg

SEQ ID NO: 242502 - DNA, 120 bp, Artificial Sequence
  ENSG00000121653_24 (sequence is synthesized)
aggagctgccgcaaggccctgtcccagcagaagagggaggcttcctgactgacacaggccagccccatcttggtcctgtcaccctggccccaactattaaagtgccatttcctgtctgga

SEQ ID NO: 242503 - DNA, 120 bp, Artificial Sequence
  ENSG00000121653_25 (sequence is synthesized)
gattgcagtaacctgatcccgtgagggaggcggccacagcggcagcagcgcaagggccaggccagccgggaggaaggtgcctgcagctgagggctgcgctgggaagagctggggctggga

SEQ ID NO: 242504 - DNA, 120 bp, Artificial Sequence
  ENSG00000121653_26 (sequence is synthesized)
cccgggtcggcagctgcagcctcctctcctggcctgtctatttttaatgagctccccaggcttctgcagcaggcaggacgcagaaagacaggcccaagcggtggaggccagaggccccca

SEQ ID NO: 242505 - DNA, 120 bp, Artificial Sequence
  ENSG00000121653_27 (sequence is synthesized)
gccctgccttgagccctggcccccccacccttccgggcatgagagggcagccctggggccccgcagccccccggccgggcagggctctccatgcagctggtgctgaagatggattcgagc

SEQ ID NO: 242506 - DNA, 120 bp, Artificial Sequence
  ENSG00000121671_0 (sequence is synthesized)
gtcataggtcactgggcgggctatgggcggggtccacgtcgcctaccggggcggagcgggggtggctggagcagtctggacagtcatggcggcgactgtggcgacggcggcagctgtggc

SEQ ID NO: 242507 - DNA, 120 bp, Artificial Sequence
  ENSG00000121671_1 (sequence is synthesized)
cccggcgccagcgcccggcacggacagcgcctcttcggtgcactggttccgcaaagggctgcgactccacgacaacccggcgttgctggcggccgtgcgcggggcgcgctgcgtgcgctg

SEQ ID NO: 242508 - DNA, 120 bp, Artificial Sequence
  ENSG00000121671_2 (sequence is synthesized)
cgtttacattctcgacccgtggttcgcggcctcctcctcagtcgggatcaaccgatggaggttcctacttcagtctctggaagatttggacacaagtttaaggaaactgaactcccgcct

SEQ ID NO: 242509 - DNA, 120 bp, Artificial Sequence
  ENSG00000121671_3 (sequence is synthesized)
gtttgtagtccggggacagccagccgacgtgttcccaaggctgttcaaggaatggggagtgacccgcttgacctttgaatatgactctgaaccctttgggaaagaacgggatgcagccat

SEQ ID NO: 242510 - DNA, 120 bp, Artificial Sequence
  ENSG00000121671_4 (sequence is synthesized)
catgaagatggccaaggaggctggtgtggaagtagtgacggagaattctcataccctctatgacctggacaggatcattgagctgaatgggcagaagccaccccttacatacaagcgctt

SEQ ID NO: 242511 - DNA, 120 bp, Artificial Sequence
  ENSG00000121671_5 (sequence is synthesized)
tcaggccatcatcagccgcatggagctgcccaagaagccagtgggcttggtgaccagccagcagatggagagctgcagggccgagatccaggagaaccacgacgagacctacggcgtgcc

SEQ ID NO: 242512 - DNA, 120 bp, Artificial Sequence
  ENSG00000121671_6 (sequence is synthesized)
ctccctggaggagctggggttccccactgaaggacttggtccagctgtctggcagggaggagagacagaagctctggcccgcctggataagcacttggaacggaaggcctgggttgccaa

SEQ ID NO: 242513 - DNA, 120 bp, Artificial Sequence
  ENSG00000121671_7 (sequence is synthesized)
ctatgagagaccccgaatgaacgccaactccctcctggccagccccacaggcctcagcccctacctgcgctttggttgtctctcctgccgcctcttctactaccgcctgtgggacctgta

SEQ ID NO: 242514 - DNA, 120 bp, Artificial Sequence
  ENSG00000121671_8 (sequence is synthesized)
taaaaaggtgaagcggaacagcacacctcccctctccctatttgggcaactcctatggcgagagttcttctacacggcagctaccaacaaccccaggtttgaccgcatggaggggaaccc

SEQ ID NO: 242515 - DNA, 120 bp, Artificial Sequence
  ENSG00000121671_9 (sequence is synthesized)
catctgcatccagatcccctgggaccgcaatcctgaggccctggccaagtgggctgagggcaagacaggcttcccttggattgatgccatcatgacccaactgaggcaggagggctggat

SEQ ID NO: 242516 - DNA, 120 bp, Artificial Sequence
  ENSG00000121671_10 (sequence is synthesized)
ccaccacctggcccggcatgccgtggcctgcttcctgacccgcggggacctctgggtcagctgggagagcggggtccgggtatttgatgagctgctcctggatgcagatttcagcgtgaa

SEQ ID NO: 242517 - DNA, 120 bp, Artificial Sequence
  ENSG00000121671_11 (sequence is synthesized)
cgcaggcagctggatgtggctgtcctgcagtgctttcttccagcagttcttccactgctactgccctgtgggctttggccgtcgcacggaccccagtggggactacatcaggcgatacct

SEQ ID NO: 242518 - DNA, 120 bp, Artificial Sequence
  ENSG00000121671_12 (sequence is synthesized)
gcccaaattgaaagcgttcccctctcgatacatctatgagccctggaatgccccagagtcaattcagaaggcagccaagtgcatcattggtgtggactacccacggcccatcgtcaacca

SEQ ID NO: 242519 - DNA, 120 bp, Artificial Sequence
  ENSG00000121671_13 (sequence is synthesized)
tgccgagaccagccggcttaacattgaacgaatgaagcagatttaccagcagctttcgcgctaccggggactctgtctactggcatctgtcccttcctgtgtggaagacctcagtcaccc

SEQ ID NO: 242520 - DNA, 120 bp, Artificial Sequence
  ENSG00000121671_14 (sequence is synthesized)
tgtggcagagcccagctcgagccaggctggcagcatgagcagtgcaggcccaagaccactacccagtggcccagcatcccccaaacgcaagctggaagcagccgaggaaccacctggtga

SEQ ID NO: 242521 - DNA, 120 bp, Artificial Sequence
  ENSG00000121671_15 (sequence is synthesized)
agaactcagcaaacgggcccgggtggcagagttgccaaccccagagctgccgagcaaggatgcctgagactgcagagcccttgctccgtgagcaaagcctgggtgcccaagcagccaccg

SEQ ID NO: 242522 - DNA, 120 bp, Artificial Sequence
  ENSG00000121671_16 (sequence is synthesized)
cagcagcagagtacaacctgcagagaagctgatcaccgggcagagatagagcgagcatgtgtgtgtgtgtgcgcgtgtgcagaggagggagtggtgtgcctgtttgtgtgtgcatgcatc

SEQ ID NO: 242523 - DNA, 120 bp, Artificial Sequence
  ENSG00000121671_17 (sequence is synthesized)
tgacactcatgattctgaatgttgcctgggctgggggagtacctgtagcacgccagtgctgtttcccggcctccagacacaaggctcgaggttatggcagtgactttcagctgagacctg

SEQ ID NO: 242524 - DNA, 120 bp, Artificial Sequence
  ENSG00000121671_18 (sequence is synthesized)
ttcctgcaagccagctgccttgtctgaacagaacgtagtggtaggaccctagctgggattctggcatctgcctccctagacctccttccctccctcctcacgtcaggctgtggagcagga

SEQ ID NO: 242525 - DNA, 120 bp, Artificial Sequence
  ENSG00000121671_19 (sequence is synthesized)
gcacagcagttctggctgttgtccaaagcatgggattctggaggcagccagagccctgctgagttcctgctttctgacctggaggctgagcaggccggagtggatggatgctgtccagac

SEQ ID NO: 242526 - DNA, 120 bp, Artificial Sequence
  ENSG00000121671_20 (sequence is synthesized)
gtagccacctggcctctgtttcttattttaaaattctctgctactgggctcagtcccaggcccttccttgggcttctgggactgagcatgaggccatagacagatctaaaaagtttccac

SEQ ID NO: 242527 - DNA, 120 bp, Artificial Sequence
  ENSG00000121671_21 (sequence is synthesized)
caccctacagaagtacacacagatacctgactggtgtggggtatgcctggtactgtaataggagcctaagacagcacacctaccttttcaggatttagaacctaaaattagaaagagaat

SEQ ID NO: 242528 - DNA, 120 bp, Artificial Sequence
  ENSG00000121671_22 (sequence is synthesized)
cccagctgtcattgttccttccccagaagctaagagccagcctcagagcctacccaggagctgtgaaggggcaagggtcaaactgactcactctaccaggaggagaccaggttgcagtgg

SEQ ID NO: 242529 - DNA, 120 bp, Artificial Sequence
  ENSG00000121671_23 (sequence is synthesized)
cgtaaggccccctggtttctctggccacactccaaggcaccacagtgctgccagtgaggacagctgacacccagccagggaaaccattctagtctttattctgttggcttccagggcctg

SEQ ID NO: 242530 - DNA, 120 bp, Artificial Sequence
  ENSG00000121671_24 (sequence is synthesized)
tcctggacttgtcagcatccagactgccatgtcagctatcccagtagctgagctccaaggactcaggcagagggactcagggatggggactgccaggggcagttggcaaaagtccaagta

SEQ ID NO: 242531 - DNA, 120 bp, Artificial Sequence
  ENSG00000121671_25 (sequence is synthesized)
gagattacacccagaacaccattccttccaggagcagtaggtgggaggtttgacccagagaagccaatccttgcattccaggagtggcctgtgcctcccacctcttccttcccactgcca

SEQ ID NO: 242532 - DNA, 120 bp, Artificial Sequence
  ENSG00000121671_26 (sequence is synthesized)
aaggcctgtgttgagaaagatgtcatgcaaaaggacgacggtggccaactaaagcaagtcttccttccaccctgtggcctgcacttgagccacaaagtgtgtgtgtgtgtgtgcgtgtgt

SEQ ID NO: 242533 - DNA, 120 bp, Artificial Sequence
  ENSG00000121671_27 (sequence is synthesized)
ggtacgtgtgtgtgtgtgtggctatgaggctgattcctgtttggatttttgtcctcacgtgtatcattaagctggcctttgggccttttcctttctacctcccctgtgacctttcctagc

SEQ ID NO: 242534 - DNA, 120 bp, Artificial Sequence
  ENSG00000121671_28 (sequence is synthesized)
ctcagatctgttaattcttttggccccagccctgtccctcactgtcctctgtccttggaccagaaccctggggtcagacccatctcctgtagctgtccatcacactgacaggcttcttcc

SEQ ID NO: 242535 - DNA, 120 bp, Artificial Sequence
  ENSG00000121671_29 (sequence is synthesized)
tgagatatcctcaggttttctcagccagagagctgcctttagagtccaactgttgtacgtatgtcaccttcactagaaatgtcccatcatcgtgggaggggagcagggcacaggggatgg

SEQ ID NO: 242536 - DNA, 120 bp, Artificial Sequence
  ENSG00000121671_30 (sequence is synthesized)
tgtgcattcagagcattgggttgggggcttccctgttccctcagccccagtcgagaggaaagagaatcgggccactgccagaaagagagtcaagcaaacctggaagggcaaatctgagag

SEQ ID NO: 242537 - DNA, 120 bp, Artificial Sequence
  ENSG00000121671_31 (sequence is synthesized)
tgggaaggccaaaggccgaggcccagatttagtattcactagcagcgccttcgggtagcaggatgattccttttcctgcctgtctgctgctggctctcttccctaaggtacaggttggca

SEQ ID NO: 242538 - DNA, 120 bp, Artificial Sequence
  ENSG00000121671_32 (sequence is synthesized)
ggaccacctccgcctacttctccaccatccctagcatgtcagcccgttcccagatcaacctgccagtggagtcaggcagtgcactcctggagccaagagggaagggcagggtagagaggg

SEQ ID NO: 242539 - DNA, 120 bp, Artificial Sequence
  ENSG00000121671_33 (sequence is synthesized)
tatgtccagtagcctggagctccatggtggcttcatgcctcccttctcccagctcaggtggccctgagggctccctcggaacagtgcctcaaatcctgacccaagggccagcatggggaa

SEQ ID NO: 242540 - DNA, 120 bp, Artificial Sequence
  ENSG00000121671_34 (sequence is synthesized)
gagatggttgcaggcaaaatgcactttatagagattttctattgctgggaaggtgtgtttctcccacaatttgtttgtgaatattcacttgttttataaatgtctgacctgtcttgagta

SEQ ID NO: 242541 - DNA, 120 bp, Artificial Sequence
  ENSG00000121671_35 (sequence is synthesized)
agcttcttctagaagcaggccctgaacaggacgtgggtaagagatccgctgtcccttgagacttggcctactcccggcactccgcggacagccccagcctgcggacagccccagcctgcg

SEQ ID NO: 242542 - DNA, 120 bp, Artificial Sequence
  ENSG00000121671_36 (sequence is synthesized)
atagactcgttgtttggtctgatggtggttccgtctcaaaatcggctggacaagcacagtgttccatggctccatggctggctgttctgtgaccgtaggcagattccttaaccacccaat

SEQ ID NO: 242543 - DNA, 120 bp, Artificial Sequence
  ENSG00000121671_37 (sequence is synthesized)
caaggctgttcaaggtaagcgtgcagagccccagagaagacagtgagattctgtccctgacggtttccccacagcctgagtgatatgatattccgactgagggaatggaaacatcagggc

SEQ ID NO: 242544 - DNA, 120 bp, Artificial Sequence
  ENSG00000121671_38 (sequence is synthesized)
tggtctggctgttgctgctagagaagttgggagcaaaggcagccagttagcttgctcttggaatggaaactgtgttaaggaaaaaaattctgggaaaccagtgtcttgttggaaagctct

SEQ ID NO: 242545 - DNA, 120 bp, Artificial Sequence
  ENSG00000121671_39 (sequence is synthesized)
acatagcacaactctgccaagaaaactaggccacaagtctgcagggctgtgaggagctctgggaaaagcttgctgagcaggcagaaggctgtggtcctgtcccacctgaatggggagtga

SEQ ID NO: 242546 - DNA, 120 bp, Artificial Sequence
  ENSG00000121671_40 (sequence is synthesized)
ccctaaaaaaggcactggtgggtgggggttgggctatggcccctggaagggcctaagtgtgtgcagatagtccggaggaggagagaagactcaatatccaagagggcagagccaagcaca

SEQ ID NO: 242547 - DNA, 120 bp, Artificial Sequence
  ENSG00000121671_41 (sequence is synthesized)
cactattactccaccacccagaggtaaccacaattaattttaaactgtgtccttctagtatttgttctgttcatactcatacatgtaatcttctgtttctggttctagatcatgcctcta

SEQ ID NO: 242548 - DNA, 120 bp, Artificial Sequence
  ENSG00000121671_42 (sequence is synthesized)
tttttgtactaacctctcgcagacaatacaggcactgcctggtgctggtgtccatgggcttctcagtaacaagatagctagtattgcttctgttgaaagcagggaatctgtcagcctctc

SEQ ID NO: 242549 - DNA, 120 bp, Artificial Sequence
  ENSG00000121671_43 (sequence is synthesized)
agggaatctgtcagcctctcagattactaactacactctttcacccctccctctttcttaccttttttttttcttttttagacggagtctggctctgttgcccagtctggagtgcagtgg

SEQ ID NO: 242550 - DNA, 70 bp, Artificial Sequence
  ENSG00000121671_44 (sequence is synthesized)
cctccagtcttttgatctgaacaaagctattagcctttttcacctgaaaaccacagttgttgccagctaa

SEQ ID NO: 242551 - DNA, 120 bp, Artificial Sequence
  ENSG00000121671_45 (sequence is synthesized)
gcaggggaaagcagagaaaatagtgactgtgggaagagaaccaagttgacctagaaaacgctaaaactttaaggattatctaacccccagtagcaccgagacactgtggttcaattctca

SEQ ID NO: 242552 - DNA, 120 bp, Artificial Sequence
  ENSG00000121671_46 (sequence is synthesized)
cttgcaaagggagactgagtgctgtctttcaggttgacaccttcgctgggtatgggacactgcaggctgggatgaactgggccttcctgagtagttgtggggctgtgggaggaaatggaa

SEQ ID NO: 242553 - DNA, 120 bp, Artificial Sequence
  ENSG00000121671_47 (sequence is synthesized)
cctcagtgtcttgctcctaccctccccacccccacttgcttcatcctgccctgtagccctctgcaatcctgcgagacggcactctgattactcctcgcctctctcccaggtctactggca

SEQ ID NO: 242554 - DNA, 120 bp, Artificial Sequence
  ENSG00000121680_0 (sequence is synthesized)
gcaggaagcagggcgccgcagcctgtcgtacggtccttctgtgggtctgtcggtgccgagggcaggatggagaagctgcggctcctgggcctccgctaccaggagtacgtgactcgtcac

SEQ ID NO: 242555 - DNA, 120 bp, Artificial Sequence
  ENSG00000121680_1 (sequence is synthesized)
ccggccgccacggcccagctggagacagcagtgcggggcttcagttacctgctggcaggtcgattcgccgattcgcacgagctgtcagagctggtgtactctgcctctaacctgcttgtg

SEQ ID NO: 242556 - DNA, 120 bp, Artificial Sequence
  ENSG00000121680_2 (sequence is synthesized)
ctgctcaatgacgggatcctacggaaggagcttcggaaaaagttgcctgtgtcgctgtcccagcagaagctgctgacatggctgagcgtgctggagtgcgtggaggtgttcatggagatg

SEQ ID NO: 242557 - DNA, 120 bp, Artificial Sequence
  ENSG00000121680_3 (sequence is synthesized)
ggagctgccaaggtgtggggtgaagtgggccgctggcttgtcatcgccctcgtccagctggccaaggctgtactgcggatgctcctgctgctctggttcaaggctggcctccagacttca

SEQ ID NO: 242558 - DNA, 120 bp, Artificial Sequence
  ENSG00000121680_4 (sequence is synthesized)
ccccctatcgttccactggacagagagacccaggcacagcccccggatggtgaccacagccctggcaaccatgagcagtcctacgtggggaagcggtcaaaccgggtggtgcgaaccctc

SEQ ID NO: 242559 - DNA, 120 bp, Artificial Sequence
  ENSG00000121680_5 (sequence is synthesized)
cagaacacgccgtccctgcactccaggcactggggagctccccagcagcgggagggacggcagcagcagcatcacgaggagctgagtgcgacccccacccccctggggctgcaggagacc

SEQ ID NO: 242560 - DNA, 120 bp, Artificial Sequence
  ENSG00000121680_6 (sequence is synthesized)
accagcctgagcctcctgagtgacagaaagggcctgacccggagggagcggcgggagctgcggcgccggaccatcctgctgctctactacctgctgcgctctcctttctatgaccgcttc

SEQ ID NO: 242561 - DNA, 120 bp, Artificial Sequence
  ENSG00000121680_7 (sequence is synthesized)
tccgaggccaggatcctcttcctgctccagttgctggccgaccacgtccctggcgttggcctggtcacaaggccgctcatggattacttgcccacctggcagaaaatctacttctacagt

SEQ ID NO: 242562 - DNA, 120 bp, Artificial Sequence
  ENSG00000121680_8 (sequence is synthesized)
tggggctgacagacctcccggaaggagggtgtggggaggggtggggcagggagcccctcttccctaataaaactgactccggcagcgtcccagcgtgcggcctctccgtgcctaccggcc

SEQ ID NO: 242563 - DNA, 120 bp, Artificial Sequence
  ENSG00000121680_9 (sequence is synthesized)
aggccccacacacagccctggtcgccaccagcgttcctcccaggacacccttgactgcgctctcctgtgacgatgccactgcagcccgcaccttgtcactgctgggccaagaagccttca

SEQ ID NO: 242564 - DNA, 120 bp, Artificial Sequence
  ENSG00000121680_10 (sequence is synthesized)
ctaggagtgggatccaggctcctctcccacagaaagcggtgacttcacctcatggagcccgggaagctgctcgcctcggcagccataggagcgaacactgctgctctctcgctggcccct

SEQ ID NO: 242565 - DNA, 120 bp, Artificial Sequence
  ENSG00000121680_11 (sequence is synthesized)
ggtgaggacaggaagcctgaacccgggtgatggctgaacgctgcccagcgtgtcttctggctggggccctccgtctgccccttctccgcagggccctgtggctctggcagccccaggcca

SEQ ID NO: 242566 - DNA, 120 bp, Artificial Sequence
  ENSG00000121680_12 (sequence is synthesized)
tggcgttgccagcctccctgtgacagagcctggtgaacagtgagcctggctcccacgcaagtggcactttaagccctgcatcctcggttgagagtaaaaggcttttctcccttagaaaaa

SEQ ID NO: 242567 - DNA, 120 bp, Artificial Sequence
  ENSG00000121680_13 (sequence is synthesized)
tgctggcaggtgccaccctgacctttgatcagttccttctgggccctgacctatgaccccagtggcccccttccctgcggagtcagggtagtgatcgctgtgcttgagaagacccgtcca

SEQ ID NO: 242568 - DNA, 120 bp, Artificial Sequence
  ENSG00000121680_14 (sequence is synthesized)
gatctcccggtgccacccgttccagggaggctgcttggtttgggaagatactccccaggggtctccccttcccttgggggcgcagctgaggactgcgaggtgcgtccgagggccagaaag

SEQ ID NO: 242569 - DNA, 120 bp, Artificial Sequence
  ENSG00000121680_15 (sequence is synthesized)
ctgagatcgattctgagttcaaggatcaagtctgccctcaaaccattttacagatcgggaaatccgagacccagagaagggatactcccgcccaagggccaccgagccgagagaagcccg

SEQ ID NO: 242570 - DNA, 120 bp, Artificial Sequence
  ENSG00000121680_16 (sequence is synthesized)
ggccagggctttcttcgcgtatgtgggaatgcaggcgcgagccctttggggggcacagtccatacgggagctgaggccgaagccggagcactaactgtgctgtctaggggatcgagacgg

SEQ ID NO: 242571 - DNA, 120 bp, Artificial Sequence
  ENSG00000121680_17 (sequence is synthesized)
cactagagggctggactccttactgcctcagtttccccagcactacctttgttgaggaaacggagatggggatactggccgaacgcgcgcctgctgagacacagtgcaactgtatttaga

SEQ ID NO: 242572 - DNA, 120 bp, Artificial Sequence
  ENSG00000121680_18 (sequence is synthesized)
cgccccgcacctccccaaatctgatcgaggctccttttttcaagcacccgctatctctcagccctttaaaatccggccctgccgttcgagtctctcggcgttccattggaaagactcggg

SEQ ID NO: 242573 - DNA, 120 bp, Artificial Sequence
  ENSG00000121680_19 (sequence is synthesized)
gctccagctcccttctctagaatgaactgctctgactgccgcccggctttaccggagctttaactgcgcaggcgcaagggcagccaacccggtcgattcgccgattcgcacgagctgtca

SEQ ID NO: 242574 - DNA, 120 bp, Artificial Sequence
  ENSG00000121680_20 (sequence is synthesized)
agttgctaagggctacccgagtgggaagcggttcaagagatggggtgaagggtggttcaccggttcttcaagtcctcagccttctggcccgcggaagttaagcaaccaagaggcgggcct

SEQ ID NO: 242575 - DNA, 120 bp, Artificial Sequence
  ENSG00000121680_21 (sequence is synthesized)
agagaacagtcactgatggtcccagaaccaagattcaagtctagatctcccagattccaggattcccagattgtaactacctcaagagtgtttgcccagtgactgctgtcacagtcctga

SEQ ID NO: 242576 - DNA, 120 bp, Artificial Sequence
  ENSG00000121680_22 (sequence is synthesized)
tcgcagagtttttgtacattgcccggccgctgctgcacttgctcagcctgggcctgtggggtcagaggtcgtggaaaccctggctcttggctggtgttgtggacgtgaccaggtgagcct

SEQ ID NO: 242577 - DNA, 120 bp, Artificial Sequence
  ENSG00000121690_0 (sequence is synthesized)
acagttaacagacgggcgctcagggagctagggagctgtgaagctgctggaggagttggcgtccggggagcaagggccatggccaccgtgcaggagaaggctgctgcgctgaacctctcg

SEQ ID NO: 242578 - DNA, 120 bp, Artificial Sequence
  ENSG00000121690_1 (sequence is synthesized)
gctctccacagccccgcgcacaggcctccgggtttcagtgtagctcagaagccatttggagccacgtatgtatggagcagcatcataaacactcttcaaacacaagtggaagtgaaaaaa

SEQ ID NO: 242579 - DNA, 120 bp, Artificial Sequence
  ENSG00000121690_2 (sequence is synthesized)
cgaaggcaccgtttaaaacgacataatgactgctttgttggttcagaagctgtggatgtcattttttctcacctaattcagaataagtattttggtgatgtagatattcctcgagccaaa

SEQ ID NO: 242580 - DNA, 120 bp, Artificial Sequence
  ENSG00000121690_3 (sequence is synthesized)
gtggtgagagtgtgtcaagcgcttatggactacaaagtatttgaagcagttccaaccaaagtctttggaaaagacaaaaaacctacatttgaagatagtagttgcagcctttatagattc

SEQ ID NO: 242581 - DNA, 120 bp, Artificial Sequence
  ENSG00000121690_4 (sequence is synthesized)
accacaatacctaaccaagacagtcagttaggcaaagagaacaaactatattcacctgccaggtatgcagatgcattatttaagtcatccgatatcagatcagccagtttagaggacctg

SEQ ID NO: 242582 - DNA, 120 bp, Artificial Sequence
  ENSG00000121690_5 (sequence is synthesized)
tgggaaaatctgagtttaaagcctgccaactcccctcatgtaaatatctctgcaaccttgtctccacaagttattaatgaagtgtggcaagaagaaacaattgggcgtctactacaactt

SEQ ID NO: 242583 - DNA, 120 bp, Artificial Sequence
  ENSG00000121690_6 (sequence is synthesized)
gtagaccttccacttcttgactccttactgaaacagcaagaggctgtacctaaaattcctcaacctaagaggcagtccaccatggtcaacagcagtaactatctggatcgagggattctc

SEQ ID NO: 242584 - DNA, 120 bp, Artificial Sequence
  ENSG00000121690_7 (sequence is synthesized)
accttccagaccaaatggtggtggaaataagcagaagctttcctgagcaaccagaccgaacagacttagtgaaagaacttctgtttgatgccattggcagatattacagtagtagggaac

SEQ ID NO: 242585 - DNA, 120 bp, Artificial Sequence
  ENSG00000121690_8 (sequence is synthesized)
ctctgttaaatcacttatctgacgttcataatggaattgcagaactcttagtgaatgggaagacggaaatagctttagaagctacccagctccttctaaagcttttagatttccaaaata

SEQ ID NO: 242586 - DNA, 120 bp, Artificial Sequence
  ENSG00000121690_9 (sequence is synthesized)
gagaagaatttagaagactactgtatttcatggctgttgcagcaaatccttctgagtttaaattacagaaagaaagtgacaaccgaatggttgtgaaaaggatattctcaaaagctattg

SEQ ID NO: 242587 - DNA, 120 bp, Artificial Sequence
  ENSG00000121690_10 (sequence is synthesized)
ttgacaataaaaatttatccaaaggcaaaacagatcttctggtactctttttaatggatcatcagaaagatgtttttaagattcctggaactctacataaaattgtaagtgttaagctta

SEQ ID NO: 242588 - DNA, 120 bp, Artificial Sequence
  ENSG00000121690_11 (sequence is synthesized)
tggccatacagaacggaagagatccaaatagagatgcaggatatatttattgccagagaattgatcaacgtgactattccaacaatacagagaagacaaccaaagatgagctgttgaatt

SEQ ID NO: 242589 - DNA, 120 bp, Artificial Sequence
  ENSG00000121690_12 (sequence is synthesized)
tactaaaaactcttgatgaggattcaaaactttctgccaaagagaagaaaaaattgctaggtcaattctataagtgtcacccagacatctttattgagcattttggagactgagttttta

SEQ ID NO: 242590 - DNA, 120 bp, Artificial Sequence
  ENSG00000121690_13 (sequence is synthesized)
atatctgtatataagttgtgtattttaagaataaattatgtatcctaaatatccaatcacatttgtaagcgtggaagctctaaatttgaaactgtacttaataaaaatttttttgtataa

SEQ ID NO: 242591 - DNA, 120 bp, Artificial Sequence
  ENSG00000121690_14 (sequence is synthesized)
taagctaaggatgaagcaaagtaagaagtagaagacaaacttcaaagttatttaaaattttttaatcttaatctttattagattttaaatattcaaagtacagagaaagagtgcactatg

SEQ ID NO: 242592 - DNA, 120 bp, Artificial Sequence
  ENSG00000121690_15 (sequence is synthesized)
tattaaagctgtttatgttcaattttaacagaagtctattatctttaacaaatagatcagtgttagaactcttgaacactgacttttgtccgatcagctggcaaaggttcagatctgaga

SEQ ID NO: 242593 - DNA, 120 bp, Artificial Sequence
  ENSG00000121690_16 (sequence is synthesized)
tgttttgcatgcagatttgtattgaaaatatgctctccgatgtttcttttcctaagattttattaggtcaagtaaaatttgaaaattacattaaaacattaacagaattcttcggttctt

SEQ ID NO: 242594 - DNA, 120 bp, Artificial Sequence
  ENSG00000121690_17 (sequence is synthesized)
ccttgtctgtagcaatggaatatagtttaatgactttaatttccaccctttcccccattccagttgtggaaaccctgagtggaataatctgcaaccaatagtttcaaacaagtttttagc

SEQ ID NO: 242595 - DNA, 120 bp, Artificial Sequence
  ENSG00000121690_18 (sequence is synthesized)
tactggctttatattacatttttagcagtaaatgtggctaaaatatgggtctgtgggtaaatttgataaagtgcgatgaaattttgttagctttattgggtgtctcctagtcatatttta

SEQ ID NO: 242596 - DNA, 120 bp, Artificial Sequence
  ENSG00000121690_19 (sequence is synthesized)
tatttagcagaagcagtcaacacactttgattttcctgcttcaggttatagttgcagtgtaaaaagtgttctcataccacttggtatgagaacatagcgaaggcaggcagagagaaaccc

SEQ ID NO: 242597 - DNA, 120 bp, Artificial Sequence
  ENSG00000121690_20 (sequence is synthesized)
agattgcggtgggagagaagaaggaattatttaaagggaaactggggagacagaattgtggaatccagtgattgaaatggatgtgggtgataatgcataatgaacttacagctatttgtc

SEQ ID NO: 242598 - DNA, 120 bp, Artificial Sequence
  ENSG00000121690_21 (sequence is synthesized)
atgaagtaaaccaactttaccctttcccctttgttaccctcagctaaactgtgcagtggtgacacagaggtataattgaagctcttatatcagatctgacctaaagtcagagttttagtg

SEQ ID NO: 242599 - DNA, 87 bp, Artificial Sequence
  ENSG00000121690_22 (sequence is synthesized)
gctcttatatcagatctgacctaaagtcagagttttagtgtattcattttcgtgtgtgtgtacttttttgaggcagggtcttaccct

SEQ ID NO: 242600 - DNA, 120 bp, Artificial Sequence
  ENSG00000121690_23 (sequence is synthesized)
agctgcgaccacttggccaacgcccccgccgagcgggcggatcgagttcctctctggctggtgggctgcaagcggcagagcccgcccgcacagcccagcttttttctttctacccagact

SEQ ID NO: 242601 - DNA, 120 bp, Artificial Sequence
  ENSG00000121690_24 (sequence is synthesized)
ctcaacttgaccgcgcgttggtctgtgcgcccgctaacgtgccaggcacgcgccggggagctccgggatatgctccgcggtgctaccggtgacaagtgtggtatctggaatttgtgtagt

SEQ ID NO: 242602 - DNA, 120 bp, Artificial Sequence
  ENSG00000121690_25 (sequence is synthesized)
tctttgccccctgtctcaaccacaaaccttgacgacacagtatggccaggggccgagctcctcccttgcccactttgttctccagactgctaggagtcaagagtcagcttgtctccccag

SEQ ID NO: 242603 - DNA, 120 bp, Artificial Sequence
  ENSG00000121691_0 (sequence is synthesized)
aacaggcagatttgcctgctgagggtggagacccacgagccgaggcctcctgcagtgttctgcacagcaaaccgcacgctatggctgacagccgggatcccgccagcgaccagatgcagc

SEQ ID NO: 242604 - DNA, 120 bp, Artificial Sequence
  ENSG00000121691_1 (sequence is synthesized)
actggaaggagcagcgggccgcgcagaaagctgatgtcctgaccactggagctggtaacccagtaggagacaaacttaatgttattacagtagggccccgtgggccccttcttgttcagg

SEQ ID NO: 242605 - DNA, 120 bp, Artificial Sequence
  ENSG00000121691_2 (sequence is synthesized)
atgtggttttcactgatgaaatggctcattttgaccgagagagaattcctgagagagttgtgcatgctaaaggagcaggggcctttggctactttgaggtcacacatgacattaccaaat

SEQ ID NO: 242606 - DNA, 120 bp, Artificial Sequence
  ENSG00000121691_3 (sequence is synthesized)
actccaaggcaaaggtatttgagcatattggaaagaagactcccatcgcagttcggttctccactgttgctggagaatcgggttcagctgacacagttcgggaccctcgtgggtttgcag

SEQ ID NO: 242607 - DNA, 120 bp, Artificial Sequence
  ENSG00000121691_4 (sequence is synthesized)
tgaaattttacacagaagatggtaactgggatctcgttggaaataacacccccattttcttcatcagggatcccatattgtttccatcttttatccacagccaaaagagaaatcctcaga

SEQ ID NO: 242608 - DNA, 120 bp, Artificial Sequence
  ENSG00000121691_5 (sequence is synthesized)
cacatctgaaggatccggacatggtctgggacttctggagcctacgtcctgagtctctgcatcaggtttctttcttgttcagtgatcgggggattccagatggacatcgccacatgaatg

SEQ ID NO: 242609 - DNA, 120 bp, Artificial Sequence
  ENSG00000121691_6 (sequence is synthesized)
gatatggatcacatactttcaagctggttaatgcaaatggggaggcagtttattgcaaattccattataagactgaccagggcatcaaaaacctttctgttgaagatgcggcgagacttt

SEQ ID NO: 242610 - DNA, 120 bp, Artificial Sequence
  ENSG00000121691_7 (sequence is synthesized)
cccaggaagatcctgactatggcatccgggatctttttaacgccattgccacaggaaagtacccctcctggactttttacatccaggtcatgacatttaatcaggcagaaacttttccat

SEQ ID NO: 242611 - DNA, 120 bp, Artificial Sequence
  ENSG00000121691_8 (sequence is synthesized)
ttaatccattcgatctcaccaaggtttggcctcacaaggactaccctctcatcccagttggtaaactggtcttaaaccggaatccagttaattactttgctgaggttgaacagatagcct

SEQ ID NO: 242612 - DNA, 120 bp, Artificial Sequence
  ENSG00000121691_9 (sequence is synthesized)
aacatgccacctggcattgaggccagtcctgacaaaatgcttcagggccgcctttttgcctatcctgacactcaccgccatcgcctgggacccaattatcttcatatacctgtgaactgt

SEQ ID NO: 242613 - DNA, 120 bp, Artificial Sequence
  ENSG00000121691_10 (sequence is synthesized)
ccctaccgtgctcgagtggccaactaccagcgtgacggcccgatgtgcatgcaggacaatcagggtggtgctccaaattactaccccaacagctttggtgctccggaacaacagccttct

SEQ ID NO: 242614 - DNA, 120 bp, Artificial Sequence
  ENSG00000121691_11 (sequence is synthesized)
gccctggagcacagcatccaatattctggagaagtgcggagattcaacactgccaatgatgataacgttactcaggtgcgggcattctatgtgaacgtgctgaatgaggaacagaggaaa

SEQ ID NO: 242615 - DNA, 120 bp, Artificial Sequence
  ENSG00000121691_12 (sequence is synthesized)
cgtctgtgtgagaacattgccggccacctgaaggatgcacaaattttcatccagaagaaagcggtcaagaacttcactgaggtccaccctgactacgggagccacatccaggctcttctg

SEQ ID NO: 242616 - DNA, 120 bp, Artificial Sequence
  ENSG00000121691_13 (sequence is synthesized)
gacaagtacaatgctgagaagcctaagaatgcgattcacacctttgtgcagtccggatctcacttggcggcaagggagaaggcaaatctgtgaggccggggccctgcacctgtgcagcga

SEQ ID NO: 242617 - DNA, 120 bp, Artificial Sequence
  ENSG00000121691_14 (sequence is synthesized)
agcttagcgttcatccgtgtaacccgctcatcactggatgaagattctcctgtgctagatgtgcaaatgcaagctagtggcttcaaaatagagaatcccactttctatagcagattgtgt

SEQ ID NO: 242618 - DNA, 120 bp, Artificial Sequence
  ENSG00000121691_15 (sequence is synthesized)
aacaattttaatgctatttccccaggggaaaatgaaggttaggatttaacagtcatttaaaaaaaaaatttgttttgacggatgattggattattcatttaaaatgattagaaggcaagt

SEQ ID NO: 242619 - DNA, 120 bp, Artificial Sequence
  ENSG00000121691_16 (sequence is synthesized)
aagtttctagctagaaatatgattttatttgacaaaatttgttgaaattatgtatgtttacatatcacctcatggcctattatattaaaatatggctataaatatataaaaagaaaagat

SEQ ID NO: 242620 - DNA, 120 bp, Artificial Sequence
  ENSG00000121691_17 (sequence is synthesized)
atgatctactcagaaatttttatttttctaaggttctcataggaaaagtacatttaatacagcagtgtcatcagaagataacttgagcaccgtcatggcttaatgtttattcctgataat

SEQ ID NO: 242621 - DNA, 120 bp, Artificial Sequence
  ENSG00000121691_18 (sequence is synthesized)
aattgatcaaattcatttttttcactggagttacattaatgttaattcagcactgatttcacaacagatcaatttgtaattgcttacatttttacaataaataatctgtacgtaagaaca

SEQ ID NO: 242622 - DNA, 120 bp, Artificial Sequence
  ENSG00000121691_19 (sequence is synthesized)
caggtgtccatgtgagcatgcacacacaaaatatgcagcttggcatgatctttatgtgaggaattaacaagaacattacttaaactttaatctgggtgcttggttaccttgtgggattca

SEQ ID NO: 242623 - DNA, 120 bp, Artificial Sequence
  ENSG00000121691_20 (sequence is synthesized)
ctgaggtgaactattcttcaatgagcattccttgagtaaaccaagtataaacaaaagtccatggtaagatccctacatatgtgaagacaagaatacttactctcttaattaaaaaaaaaa

SEQ ID NO: 242624 - DNA, 120 bp, Artificial Sequence
  ENSG00000121691_21 (sequence is synthesized)
aagcggtgagtctttgtaagctgaagggtgtcctctgctggctaaggaagacagtgcagctgtgtgggagaaccctaaaaagaaagtgccatttctgttttacttgacttaagagaactt

SEQ ID NO: 242625 - DNA, 120 bp, Artificial Sequence
  ENSG00000121691_22 (sequence is synthesized)
ggcatgggccactgtgcccagttggaagtgcttatttgaagaatttcccatgctgttggttttgtagaaatgtgttgctttttgtaaagagcaaatgattggttccttccctggagtggg

SEQ ID NO: 242626 - DNA, 120 bp, Artificial Sequence
  ENSG00000121691_23 (sequence is synthesized)
ggaatgaggaggaatagaattaattcaatatttcagttagttaacgttctagcacatttattttataatgcaatacttccttgggaataggaagtaatactgtataagacaagacactaa

SEQ ID NO: 242627 - DNA, 120 bp, Artificial Sequence
  ENSG00000121691_24 (sequence is synthesized)
cttgttatgcagaaggaaaaaaaaaagatattattaccaaaaacagatgtgaagatttatggttggccagagggcctgggaaattcagaactgttcagttagggagaactcgtttcataa

SEQ ID NO: 242628 - DNA, 120 bp, Artificial Sequence
  ENSG00000121691_25 (sequence is synthesized)
ggcagaattttgtggtaaccatgtacagagtgctttgtacttcaaatttcagaatgaagtttacagcccattcctatgttatatgttactgcccctagtcagtgtctattgtatttatta

SEQ ID NO: 242629 - DNA, 120 bp, Artificial Sequence
  ENSG00000121691_26 (sequence is synthesized)
tcaggatgtggttttcactgatgaaatggctcattttgaccgagagagaattcctgagagagttgtgcatgctaaaggagcaggtgcctgttgaggacctgaatgtctgagtaatggtct

SEQ ID NO: 242630 - DNA, 120 bp, Artificial Sequence
  ENSG00000121691_27 (sequence is synthesized)
ttgaggccagtcctgacaaaatgcttcagactgtgaccttgaaacaaaggttaaagattgtaccctaaatcagaccacagcgactgaaggttacttcttatggccgcctttttgcctatc

SEQ ID NO: 242631 - DNA, 120 bp, Artificial Sequence
  ENSG00000121691_28 (sequence is synthesized)
gcagagggacataagctcagtaagttaagtgacctatccgaggttgctcagccagtatatgtcagagtgttcactggacctgcatcttaactctgaggctggcattgttaaacacctgta

SEQ ID NO: 242632 - DNA, 120 bp, Artificial Sequence
  ENSG00000121691_29 (sequence is synthesized)
gtactgcctcctgctgaaacgtctttcctcccctatggaataaacactgggaaaccacagtccctggggagtgatatagtagggagttagagtaatgcttgcatttattttcctttggcc

SEQ ID NO: 242633 - DNA, 120 bp, Artificial Sequence
  ENSG00000121716_0 (sequence is synthesized)
tgagttctcacccacctgtgccgccctgccttgttacctggaagcacagccttggggactgagcaggccctcactgtcactttaagaagggaatcagccactttgtgctcaccacctctg

SEQ ID NO: 242634 - DNA, 120 bp, Artificial Sequence
  ENSG00000121716_1 (sequence is synthesized)
gggaaggtgtgagaggagagaaggaagtggctgtttggctgctgacaacatgaagacttcctgcgatgagaacagaggcacaggtgccggccctgcagcccccagaacccggactggagg

SEQ ID NO: 242635 - DNA, 120 bp, Artificial Sequence
  ENSG00000121716_2 (sequence is synthesized)
gggccatggggcgccggaccctggccctgccctgggtgctgctgaccctgcgtgtcactgcagggaccccggaggtgtgagtacaagttcggatggaggccaccgagctctcgtccttca

SEQ ID NO: 242636 - DNA, 120 bp, Artificial Sequence
  ENSG00000121716_3 (sequence is synthesized)
ccatccgttgtgggttcctggagtctggctccatctccctggtgactgtgagcagggggggccccgatggtgctggggggaccacgctggctgtgttgcacccggaacttggcatccagc

SEQ ID NO: 242637 - DNA, 120 bp, Artificial Sequence
  ENSG00000121716_4 (sequence is synthesized)
aatgggcccctgctcgccaggcccgctgggaaacccagagcagcatctctctcatcctggaaggctctggggccagcagcccctgcgccaacaccaccttctgctgcaagtttgcgtcct

SEQ ID NO: 242638 - DNA, 120 bp, Artificial Sequence
  ENSG00000121716_5 (sequence is synthesized)
tccctgagggctcctgggaggcctgtgggagcctcccgcccagctcagacccagggctctctgtcccgccgactcctgcccccattctgcgggcagacctggccgggatcttgggggtct

SEQ ID NO: 242639 - DNA, 120 bp, Artificial Sequence
  ENSG00000121716_6 (sequence is synthesized)
caggagtccttctctttgactgtggctacctccttcatctgctgtgccgacagaagcaccgccctgcccctaggctccagccatcccacaccagctcctaggcactgagagcacgagcat

SEQ ID NO: 242640 - DNA, 120 bp, Artificial Sequence
  ENSG00000121716_7 (sequence is synthesized)
ggggaggcttcctcaggatctcgaacctgcggaaggaggaccagtctgtgtacttctgccaagtccagctggacatacagatcagggaggctgtcgtggcagtccatcaaggggacccac

SEQ ID NO: 242641 - DNA, 120 bp, Artificial Sequence
  ENSG00000121716_8 (sequence is synthesized)
gctctgctggtctccccgtcccctggagaagaacaaggccatgggtcggcccctgctgctgcccctgctgctcctgctgcagccgccagcatttctgcagcctggtggctccacaggatc

SEQ ID NO: 242642 - DNA, 120 bp, Artificial Sequence
  ENSG00000121716_9 (sequence is synthesized)
tggtccaagctacctttatggggtcactcaaccaaaacacctctcagcctccatgggtggctctgtggaaatccccttctccttctattacccctgggagttagccatagttcccaacgt

SEQ ID NO: 242643 - DNA, 120 bp, Artificial Sequence
  ENSG00000121716_10 (sequence is synthesized)
gagaatatcctggagacggggccacttccacgggcagtccttctacagcacaaggccgccttccattcacaaggattatgtgaaccggctctttctgaactggacagagggtcaggagag

SEQ ID NO: 242644 - DNA, 120 bp, Artificial Sequence
  ENSG00000121716_11 (sequence is synthesized)
cggcttcctcaggatctcaaacctgcggaaggaggaccagtctgtgtatttctgccgagtcgagctggacacccggagatcagggaggcagcagttgcagtccatcaaggggaccaaact

SEQ ID NO: 242645 - DNA, 120 bp, Artificial Sequence
  ENSG00000121716_12 (sequence is synthesized)
caccatcacccaggctgtcacaaccaccaccacctggaggcccagcagcacaaccaccatagccggcctcagggtcacagaaagcaaagggcactcagaatcatggcacctaagtctgga

SEQ ID NO: 242646 - DNA, 120 bp, Artificial Sequence
  ENSG00000121716_13 (sequence is synthesized)
cactgccatcagggttgcattggctgtcgctgtgctcaaaactgtcattttgggactgctgtgcctcctcctcctgtggtggaggagaaggaaaggtagcagggcgccaagcagtgactt

SEQ ID NO: 242647 - DNA, 120 bp, Artificial Sequence
  ENSG00000121716_14 (sequence is synthesized)
ctgaccaacagagtgtggggagaagggatgtgtattagccccggaggacgtgatgtgagacccgcttgtgagtcctccacactcgttccccattggcaagatacatggagagcaccctga

SEQ ID NO: 242648 - DNA, 120 bp, Artificial Sequence
  ENSG00000121716_15 (sequence is synthesized)
ggacctttaaaaggcaaagccgcaaggcagaaggaggctgggtccctgaatcaccgactggaggagagttacctacaagagccttcatccaggagcatccacactgcaatgatataggaa

SEQ ID NO: 242649 - DNA, 120 bp, Artificial Sequence
  ENSG00000121716_16 (sequence is synthesized)
tgaggtctgaactccactgaattaaaccactggcatttgggggctgtttattatagcagtgcaaagagttcctttatcctccccaaggatggaaaaatacaatttattttgcttaccata

SEQ ID NO: 242650 - DNA, 120 bp, Artificial Sequence
  ENSG00000121716_17 (sequence is synthesized)
taaaaaaaaaaaaaaaaaaaggatttgaagtcctggccggagcaattaggcaagggataaaaaggcacctaaggcccttttgcaataagaagccagatggataaaggaagtgctggtcac

SEQ ID NO: 242651 - DNA, 120 bp, Artificial Sequence
  ENSG00000121716_18 (sequence is synthesized)
cctggaggtgtactggtttggggaaggtccccggcccccacagccctctggggagcctcaccctggctctccccactcacctcagccctcaggcagcccctccacagggcccctctcctg

SEQ ID NO: 242652 - DNA, 120 bp, Artificial Sequence
  ENSG00000121716_19 (sequence is synthesized)
ccgtgaagggaggcagtgagagcagacatctgtgcctcattcctgatctcaaggggaaagcaagaacaagacctgtgaagggaaggagggtggatcggcctgactggccctgggaagcac

SEQ ID NO: 242653 - DNA, 120 bp, Artificial Sequence
  ENSG00000121716_20 (sequence is synthesized)
agaggagcctactgggaccagggaagagactgacaagagaagggaggcctgtccctgcctgcttctgtctcaagaagattgttatcacttcctctggtgaaatcctgccttcctgtcccc

SEQ ID NO: 242654 - DNA, 120 bp, Artificial Sequence
  ENSG00000121716_21 (sequence is synthesized)
aggatgggcagagcctcctatggagggagccctgtgggtcaccaaagctccagtgaccacccccgggcaaagacctgcagatcccctgttagagacgggcccaggactttgtgcggggtg

SEQ ID NO: 242655 - DNA, 120 bp, Artificial Sequence
  ENSG00000121716_22 (sequence is synthesized)
ccaggcctcccaggctgctctccacgtcccttatgccactatcaacaccagctgctgcccagctactttggacacagctcacccccgacagggggccgtcctggtgggcatcactcccca

SEQ ID NO: 242656 - DNA, 120 bp, Artificial Sequence
  ENSG00000121716_23 (sequence is synthesized)
cccacaccgcacactggccccagggccctgctgcctgggcctccacatccatccctgcacatggcagctttgtctctgttgagaatggactctacgcttaggctgggcagaggcctccct

SEQ ID NO: 242657 - DNA, 120 bp, Artificial Sequence
  ENSG00000121716_24 (sequence is synthesized)
gcactggtcctggcctcactcttttccctgacccttggggcccagggccatggagggacccttaggagttcaatgagagagaccatgaggccactgggctttccccttcccaggcctcct

SEQ ID NO: 242658 - DNA, 120 bp, Artificial Sequence
  ENSG00000121716_25 (sequence is synthesized)
gggtgccacccccttacgttattcttgggcctctaataagtgtcccacaggtgcctggccaggcccacctgctgcagatgtggtctgtgtgtgtgcatgtgtgggtgtgtgtgggcacag

SEQ ID NO: 242659 - DNA, 120 bp, Artificial Sequence
  ENSG00000121716_26 (sequence is synthesized)
gtgtgagtgtgtgagcaacagtaccccattccagtcgtttcctgctgtgactaagtcagcaacacagttcctctgacatgggccttggctgtgcttctttgggggtgaagagattgggga

SEQ ID NO: 242660 - DNA, 120 bp, Artificial Sequence
  ENSG00000121716_27 (sequence is synthesized)
caagaacaaggtgggtgccaaggaggggcaaggggctggggcaggcatagacgtggctggtgaggaaaggaggatagttgttgggggaaggtggggacatacaagcagcagttctcaaaa

SEQ ID NO: 242661 - DNA, 120 bp, Artificial Sequence
  ENSG00000121716_28 (sequence is synthesized)
tgggcagggtcctggccccctccctgcctctgctgaacactgcatcccatgcctctcccatggccacctgctgggctaacgggctggatttagactctgcccatgttggaatcatgccct

SEQ ID NO: 242662 - DNA, 120 bp, Artificial Sequence
  ENSG00000121716_29 (sequence is synthesized)
cctccagggccggtgcctcccaaaacccccctctgagagagagccacagccccaggcttagccccaggccctgtcactgctgttgggggagggaggatgaaccatccgggaggcctcaca

SEQ ID NO: 242663 - DNA, 120 bp, Artificial Sequence
  ENSG00000121716_30 (sequence is synthesized)
ccattccagagcagaaatcctgacacaaaaggaatctcccatgggggttcagctgggtccagagcccggaaagtgacataaacacgcaccttgcatctaaggagaatgcacgtggcggta

SEQ ID NO: 242664 - DNA, 120 bp, Artificial Sequence
  ENSG00000121716_31 (sequence is synthesized)
ccgggcctgaggcccctggggagtatgtaccctccagagctacccagaggctgttggctaaaagttctatgtggccccctccttgggcagcctggtaagcaggtgaccttctagctgggt

SEQ ID NO: 242665 - DNA, 80 bp, Artificial Sequence
  ENSG00000121716_32 (sequence is synthesized)
accttctagctgggtcccatgggccacgggcaaggcaggaatggaacgaagagtcagtcctcagtggctgggtgttgtat

SEQ ID NO: 242666 - DNA, 120 bp, Artificial Sequence
  ENSG00000121716_33 (sequence is synthesized)
cactccagcctgggcaacacagcgagaatccatctcaaaaaaaaaaaacaaaaagtcctcaggcagggtgggccaccctcttgaggccttgcccaaacagccagggggtcccttgtcctc

SEQ ID NO: 242667 - DNA, 120 bp, Artificial Sequence
  ENSG00000121716_34 (sequence is synthesized)
ttgcccaaacagccagggggtcccttgtcctcttttcggcccacctttgcaggtgggaccagttcagtccaaagccccggtgcctcagtttccctgtgggttgaacaaggagaatgaggt

SEQ ID NO: 242668 - DNA, 120 bp, Artificial Sequence
  ENSG00000121716_35 (sequence is synthesized)
caggtgtgtggagggaatgacctgaggggctgtatgagggaacaacctcctggggctcccctatgcctgagttcctgcaactcagaagttgaggcccagagatccaggtagagggggctc

SEQ ID NO: 242669 - DNA, 120 bp, Artificial Sequence
  ENSG00000121716_36 (sequence is synthesized)
cagtcctgggactgccctgcaagtcatgtggcctgggacagggcttctccaagctctgtcccctcctgtgtagggcagggaggtcagaggggaccctgcagatccagtctcatgtctggg

SEQ ID NO: 242670 - DNA, 120 bp, Artificial Sequence
  ENSG00000121716_37 (sequence is synthesized)
ggtcaaggggtggcctcgagagggaccagtctctgtgtaggggaccgtcagccccctcaccccttgagcaagactgtggtccctgcaccaagggagcaggcctggggtgggaagaggcca

SEQ ID NO: 242671 - DNA, 120 bp, Artificial Sequence
  ENSG00000121716_38 (sequence is synthesized)
gctgggctgtggtggtgcctggggactgcatgggagcccctgccagggagggagagggacagaggacaagctgggggctctggtgcttgggctgggggctgagcgcctgtgacctccact

SEQ ID NO: 242672 - DNA, 120 bp, Artificial Sequence
  ENSG00000121716_39 (sequence is synthesized)
ggcttcctccttctcctctctgaggactgaatctggggtgcagcagagcacagactcaggcccgcctttcctctccctgaaagagcctgcgctggccttggacagagaaagggatgagaa

SEQ ID NO: 242673 - DNA, 120 bp, Artificial Sequence
  ENSG00000121716_40 (sequence is synthesized)
gtgaggctgagtgcggtggggtctgcagggatccaggtgggaggggcccagccagccaaggtgaggcccagcccctcagcaggaagatgggcactggggcccttgggcagggctgacttg

SEQ ID NO: 242674 - DNA, 120 bp, Artificial Sequence
  ENSG00000121716_41 (sequence is synthesized)
acacttttgtgtgacttgagccactgtgcccagcctgaacaccctttcctggtaaaacactccacaaaccaggaagagaaggaatgtactgcaacaaaataaaggccagtcatgcaaggc

SEQ ID NO: 242675 - DNA, 120 bp, Artificial Sequence
  ENSG00000121716_42 (sequence is synthesized)
ccatggctgaaagtctttcagtcattttagatgaaagactgaaatctttgcctccaagatcaggaacaagagaaggatgcccgctctcactacttctattcaacacaggatttgaagtca

SEQ ID NO: 242676 - DNA, 120 bp, Artificial Sequence
  ENSG00000121741_0 (sequence is synthesized)
cgaaggggggtgggccgggggaggggaggttcgttccgcggagccccagccagaaccgggaccaagaatcgccttcagccctgtctggtgcatccttggcagaaagtgaggaggaaaaca

SEQ ID NO: 242677 - DNA, 120 bp, Artificial Sequence
  ENSG00000121741_1 (sequence is synthesized)
cccccattgttagatgaggtcttaatcatggaacatttgaagtcacgtaaagaaggttctttggcatggacacaagttcagtgggaggattagaattgactgatcagactcctgttttat

SEQ ID NO: 242678 - DNA, 120 bp, Artificial Sequence
  ENSG00000121741_2 (sequence is synthesized)
tagggagtacggccatggcaactagtctcacgaatgtaggaaactcatttagtggtccagctaatcctttagtgtctagatctaataagtttcagaactcgtcagtggaagatgatgatg

SEQ ID NO: 242679 - DNA, 120 bp, Artificial Sequence
  ENSG00000121741_3 (sequence is synthesized)
atgttgtttttatcgaacctgtacaacctcccccaccttctgtaccagtggtagctgatcaaagaaccataacatttacatcatcaaaaaatgaagaactacaaggaaatgattccaaaa

SEQ ID NO: 242680 - DNA, 120 bp, Artificial Sequence
  ENSG00000121741_4 (sequence is synthesized)
ttactccttcctcaaaagagttggcatctcagaagggaagtgtaagtgagacaattgtcattgatgatgaagaggacatggaaacaaatcaagggcaagagaaaaattcctccaatttta

SEQ ID NO: 242681 - DNA, 120 bp, Artificial Sequence
  ENSG00000121741_5 (sequence is synthesized)
ttgaacgaagacctcctgagactaaaaacagaaccaatgatgtggatttctccacttccagtttttcaagaagtaaggtaaatgcaggaatgggtaatagtggtatcaccacagaaccag

SEQ ID NO: 242682 - DNA, 120 bp, Artificial Sequence
  ENSG00000121741_6 (sequence is synthesized)
actctgaaattcagattgctaatgttacaactttagaaacaggtgtaagctctgtgaatgatggccaattagaaaatactgacgggcgagatatgaacttaatgattacacatgtaacat

SEQ ID NO: 242683 - DNA, 120 bp, Artificial Sequence
  ENSG00000121741_7 (sequence is synthesized)
cactgcagaataccaacttgggagatgtctctaacggactgcagtcaagtaattttggtgttaatatacaaacatacaccccatctttaacttcacagaccaagactggagtaggacctt

SEQ ID NO: 242684 - DNA, 120 bp, Artificial Sequence
  ENSG00000121741_8 (sequence is synthesized)
ttaatcctggtagaatgaatgtggcaggagacgtttttcagaatggagaatctgcaactcatcataatcctgattcttggatctcccagtcagcttcatttccccgtaatcagaaacaac

SEQ ID NO: 242685 - DNA, 120 bp, Artificial Sequence
  ENSG00000121741_9 (sequence is synthesized)
caggggtggactctttatcaccagtggcctcacttcctaaacagattttccagccgtctgtccaacagcagcctactaaaccagttaaagtcacttgtgcaaactgcaaaaaacctttac

SEQ ID NO: 242686 - DNA, 120 bp, Artificial Sequence
  ENSG00000121741_10 (sequence is synthesized)
agaagggccagacagcttatcaacgaaaaggatcagctcacctcttttgttctaccacctgcctttcttccttctcccacaagcctgctccaaagaaactctgtgttatgtgtaaaaaag

SEQ ID NO: 242687 - DNA, 120 bp, Artificial Sequence
  ENSG00000121741_11 (sequence is synthesized)
atataactacaatgaaaggaaccattgttgctcaagtggattcaagtgagtccttccaggaattctgtagtacatcttgtttatctctctatgaagacaaacagaatcctactaaaggag

SEQ ID NO: 242688 - DNA, 120 bp, Artificial Sequence
  ENSG00000121741_12 (sequence is synthesized)
ctctaaataaatcaagatgtacaatctgtggtaaactaactgagattcgccatgaagtcagctttaaaaatatgactcataagctgtgcagtgaccactgctttaatagatatagaatgg

SEQ ID NO: 242689 - DNA, 120 bp, Artificial Sequence
  ENSG00000121741_13 (sequence is synthesized)
ccaatggtttaataatgaattgctgtgaacagtgtggagagtacttgcccagtaaaggtgctggaaataatgttctggtgattgatggtcaacagaaaagattttgctgtcaaagttgtg

SEQ ID NO: 242690 - DNA, 120 bp, Artificial Sequence
  ENSG00000121741_14 (sequence is synthesized)
tcagtgaatacaaacaggtaggtagccatccaagcttcctgaaggaggttcgagatcacatgcaggactctttcttaatgcagcctgagaaatatggaaaactgacaacttgtactggtt

SEQ ID NO: 242691 - DNA, 120 bp, Artificial Sequence
  ENSG00000121741_15 (sequence is synthesized)
gccgaacacagtgcaggttttttgatatgactcagtgtataggtcctaatggatatatggagccatattgttcaactgcttgtatgaacagtcacaagacaaaatatgcaaaatcacaaa

SEQ ID NO: 242692 - DNA, 120 bp, Artificial Sequence
  ENSG00000121741_16 (sequence is synthesized)
gtttgggaattatttgccatttttgtaagcgaaactctttacctcaataccaagccacaatgcctgatggaaaactgtacaacttttgcaattccagttgtgtggctaaatttcaggctc

SEQ ID NO: 242693 - DNA, 120 bp, Artificial Sequence
  ENSG00000121741_17 (sequence is synthesized)
taagtatgcagtcatctccaaatggccagtttgtagcgccaagtgatattcagttgaaatgcaactactgcaaaaattccttttgttcaaaaccagaaatcctggaatgggagaacaaag

SEQ ID NO: 242694 - DNA, 120 bp, Artificial Sequence
  ENSG00000121741_18 (sequence is synthesized)
tgcatcagttctgcagcaaaacttgttcagatgactataagaagttgcattgcatagttacatattgcgaatactgtcaagaggagaagactcttcatgaaacagtaaatttctctggcg

SEQ ID NO: 242695 - DNA, 120 bp, Artificial Sequence
  ENSG00000121741_19 (sequence is synthesized)
ttaagagacctttctgtagtgaaggctgcaaattattatacaaacaggattttgccagacgtttaggattgagatgtgttacttgcaactattgttctcagctatgtaagaagggagcaa

SEQ ID NO: 242696 - DNA, 120 bp, Artificial Sequence
  ENSG00000121741_20 (sequence is synthesized)
ctaaagaactcgatggtgttgtgagagatttctgcagtgaagattgctgtaaaaaatttcaggattggtactacaaggctgcaaggtgtgactgttgtaaatctcaaggaactcttaaag

SEQ ID NO: 242697 - DNA, 120 bp, Artificial Sequence
  ENSG00000121741_21 (sequence is synthesized)
tggcgtggggaaatgaaacatttctgtgatcaacattgcttactgcgtttctactgtcaacaaaatgagcccaacatgacaactcagaaaggacctgaaaacttacattatgatcagggt

SEQ ID NO: 242698 - DNA, 120 bp, Artificial Sequence
  ENSG00000121741_22 (sequence is synthesized)
tgtcagacatctcgaaccaaaatgacaggttcagcaccacccccttctccaacacctaacaaagagatgaagaacaaagcagttctttgcaaacctttaacaatgacaaaagctacttac

SEQ ID NO: 242699 - DNA, 120 bp, Artificial Sequence
  ENSG00000121741_23 (sequence is synthesized)
tgtaaacctcacatgcagaccaaatcttgtcagacagatgatacttggaggacagaatatgttccagtgcctatccctgtgcctgtgtatatcccagttcctatgcacatgtacagtcag

SEQ ID NO: 242700 - DNA, 120 bp, Artificial Sequence
  ENSG00000121741_24 (sequence is synthesized)
aatattcctgttcctactacagttcctgttcctgtgccagttcctgtttttctgcctgctccattggacagcagtgagaagattcctgcagcaattgaggagctaaaaagcaaggtttct

SEQ ID NO: 242701 - DNA, 120 bp, Artificial Sequence
  ENSG00000121741_25 (sequence is synthesized)
tcagatgctcttgatacagagttgcttacaatgacggatatgatgagtgaagacgaggggaaaacagagacaaccaacatcaacagtgtaattattgaaacagatataattggttcagac

SEQ ID NO: 242702 - DNA, 120 bp, Artificial Sequence
  ENSG00000121741_26 (sequence is synthesized)
cttttgaagaactctgacccagagacacagtccagcatgcctgatgtaccatatgaaccagatttggatatcgaaatagattttcccagagctgctgaggagcttgatatggaaaatgaa

SEQ ID NO: 242703 - DNA, 120 bp, Artificial Sequence
  ENSG00000121741_27 (sequence is synthesized)
tttttattaccacctgtttttggcgaagaatatgaggaacagcccagacctcgatctaaaaaaaagggagccaagagaaaggctgtatcaggataccagtctcatgatgatagttctgac

SEQ ID NO: 242704 - DNA, 120 bp, Artificial Sequence
  ENSG00000121741_28 (sequence is synthesized)
aattcagaatgcagctttcctttcaaatatacgtatggcgtaaatgcatggaaacactgggtcaaaactaggcaacttgatgaagatcttctggtattagatgagttaaaatcttctaaa

SEQ ID NO: 242705 - DNA, 120 bp, Artificial Sequence
  ENSG00000121741_29 (sequence is synthesized)
tcagtaaagttaaaagaggatctactctctcacaccacagctgagcttaactatgggttagctcattttgtcaatgagatccgacggccaaatggagagaattatgcacctgacagcatc

SEQ ID NO: 242706 - DNA, 120 bp, Artificial Sequence
  ENSG00000121741_30 (sequence is synthesized)
tattacctttgccttggaatacaggagtatttgtgtggaagtaatcgaaaagacaacatatttattgatcctggataccaaacatttgagcaagaattgaataaaatactgcgaagctgg

SEQ ID NO: 242707 - DNA, 120 bp, Artificial Sequence
  ENSG00000121741_31 (sequence is synthesized)
caaccaagcatacttccagatgggtcaatattctctcgagttgaagaagactatctctggaggataaaacaactaggatcacactctccagtagctcttctgaatacactgttctacttt

SEQ ID NO: 242708 - DNA, 120 bp, Artificial Sequence
  ENSG00000121741_32 (sequence is synthesized)
aacactaagtattttggcctgaaaacagtggaacaacacttaagactttcctttggcactgtgtttaggcattggaaaaaaaatcctttaacgatggaaaacaaagcgtgtcttcgatac

SEQ ID NO: 242709 - DNA, 120 bp, Artificial Sequence
  ENSG00000121741_33 (sequence is synthesized)
caagtgtcttccttgtgtggaacagataatgaagataaaattactactggaaaaagaaaacatgaagatgatgagccagtatttgaacaaattgaaaacacagccaatccttccagatgt

SEQ ID NO: 242710 - DNA, 120 bp, Artificial Sequence
  ENSG00000121741_34 (sequence is synthesized)
cctgtgaaaatgtttgaatgctacttgtctaaaagtccacagaatcttaatcagaggatggatgttttttatttgcaaccagaatgctctagttctacagatagccctgtctggtatacg

SEQ ID NO: 242711 - DNA, 120 bp, Artificial Sequence
  ENSG00000121741_35 (sequence is synthesized)
tctacttcactggaccgaaacaccttggaaaatatgcttgtacgggttcttctagtaaaagatatttatgataaagacaattatgaactggatgaagacacagactaaaaaggaacgttg

SEQ ID NO: 242712 - DNA, 120 bp, Artificial Sequence
  ENSG00000121741_36 (sequence is synthesized)
cagaagcaatcgggataaaacagcattagatagtcatgctgctagatctttattatggaaaacatttcaagtttactccttctgttttgagttttgtagcagtgtacccacgctgggtat

SEQ ID NO: 242713 - DNA, 120 bp, Artificial Sequence
  ENSG00000121741_37 (sequence is synthesized)
taccatgtaaataatctgtgagtgaaagttgccattattctatgtagtggttttaggatacttaacaaatacattcaaattctttttttattattatttatttgattaggtatgtttgta

SEQ ID NO: 242714 - DNA, 120 bp, Artificial Sequence
  ENSG00000121741_38 (sequence is synthesized)
actttttacattacagaatatgaatgagaatgtgccatgtataatttttttcttgtagtaagaaacatccatattgcacaactctactgttgcaaagcttccttggaagggggctctttt

SEQ ID NO: 242715 - DNA, 120 bp, Artificial Sequence
  ENSG00000121741_39 (sequence is synthesized)
actgggttcttaaccagatggttgtgtatgggtagcactactaaaagtttagaacttgcagtgtctttcggaatttttaaaataaactgtaaactaataggctggggtttttgttttgtt

SEQ ID NO: 242716 - DNA, 120 bp, Artificial Sequence
  ENSG00000121741_40 (sequence is synthesized)
ttggggttttgttttgtttggttttacattttagttactgaagccttacaaggttatgtagagagataccatcttctgtaccaaaaatagacaagagaatgctgtcaatattggtgtact

SEQ ID NO: 242717 - DNA, 120 bp, Artificial Sequence
  ENSG00000121741_41 (sequence is synthesized)
gtaatgtgaatctatgctggtgaaaacaattttttgttccccttattaaaaccttagtgtccttttctcatttgtggctttctgcatcacccaatcaataaaaaacaaatatatatatgt

SEQ ID NO: 242718 - DNA, 120 bp, Artificial Sequence
  ENSG00000121741_42 (sequence is synthesized)
ccgccgcctcctccgcctcctcctcctcaccagcgctaaagccgggactggaccgagcggagttgaccaagaatcgccttcagccctgtctggtgcatccttggcagaaagtgaggagga

SEQ ID NO: 242719 - DNA, 120 bp, Artificial Sequence
  ENSG00000121741_43 (sequence is synthesized)
tatatatataaatgattgtaagttgaaaacaagatcatcaagacatttcctttgtaaaaatgtctggtgaaagtataaaattctgttttcttctatgccagccataagtatctgaaatcc

SEQ ID NO: 242720 - DNA, 120 bp, Artificial Sequence
  ENSG00000121741_44 (sequence is synthesized)
tcttcatttatagaggtttgatttttatttctttttttccctcttaaggatacagatcatgctgcaatgttagctgtgtagtactctaaaacttagcaattttatcagaattcttgtgcc

SEQ ID NO: 242721 - DNA, 120 bp, Artificial Sequence
  ENSG00000121741_45 (sequence is synthesized)
tgtttacattggataaaattgtttttagaaattccactcctgaaatagttacagaaagtcaagctatgttaaataagataggatcacattttataatgaagattaccagtgtagtaattc

SEQ ID NO: 242722 - DNA, 120 bp, Artificial Sequence
  ENSG00000121741_46 (sequence is synthesized)
tgatattgcaaatgattgaggaacaaacaaagaaactaatagagaaagtcagtctcagaggaaatcccatttaatgttagattgtttggcttttgaaattacttcttatagaagattgca

SEQ ID NO: 242723 - DNA, 120 bp, Artificial Sequence
  ENSG00000121741_47 (sequence is synthesized)
ttaaaaaaaaaaacaactttgtgcttctgcatagcaatttatccattcagaccttttcttttagaataaggaaacttaaaatctactttctaaagactgaacaaagtgctagctgcaaat

SEQ ID NO: 242724 - DNA, 120 bp, Artificial Sequence
  ENSG00000121741_48 (sequence is synthesized)
tatcttgaaatcatttggctcttttctagcatgtgtgtaatcatgttttcttctgattcctgaatgaccatggtagcattagtgtttagaaattgttcaggggaaaattgagctattttc

SEQ ID NO: 242725 - DNA, 120 bp, Artificial Sequence
  ENSG00000121741_49 (sequence is synthesized)
catagtggctagcaattgctacacatccttagatactcctctctcccataggataaatgttacagcacacaaaagaaattttctcaattctgatttggaaaatttcacaggtgtcattat

SEQ ID NO: 242726 - DNA, 120 bp, Artificial Sequence
  ENSG00000121741_50 (sequence is synthesized)
tgtatatctaagcaataattatctgaatgttttggcataaaaaattataatgttctaacttgttttataagttgaatgacttttcagtcccttgattttatattgttgagtgataatcag

SEQ ID NO: 242727 - DNA, 120 bp, Artificial Sequence
  ENSG00000121741_51 (sequence is synthesized)
actgatagtagcaaatctgatcatacattactaaaatagattgctgattgtctatttaacgaagacaagtgggtaacatttaaaatatataatacaaaaattttctctaacttacctttt

SEQ ID NO: 242728 - DNA, 120 bp, Artificial Sequence
  ENSG00000121741_52 (sequence is synthesized)
tccagaactacttctttaagcacttttcctattaatgcctattgttgattaaaaggtggttaattctaaccatcttttagtcttcaaagtggtgctatattccatcaagagcaataaagt

SEQ ID NO: 242729 - DNA, 120 bp, Artificial Sequence
  ENSG00000121741_53 (sequence is synthesized)
ttttcccaggtgtcacttattgtatatgttaccaaataccatgaatttctgccatagtactactatcaagcaccttgtcttgctatttacagtttcttcatttgtatatttttagctttt

SEQ ID NO: 242730 - DNA, 120 bp, Artificial Sequence
  ENSG00000121741_54 (sequence is synthesized)
ctaagtggaaatgtctacataattttgatcttgacatgattgaggatttagagctcttgtctttgtcttgattgcaatccaacgatagattaacttgattctcagggggaaaagaaaaac

SEQ ID NO: 242731 - DNA, 120 bp, Artificial Sequence
  ENSG00000121741_55 (sequence is synthesized)
ttattttatgagaattgtttgttctgtgaaactcacttcacctagaacacatttcattgattcttggatcttagtttatgtggtcatagttgactgctgagaaaaggacaatgaaatgat

SEQ ID NO: 242732 - DNA, 120 bp, Artificial Sequence
  ENSG00000121741_56 (sequence is synthesized)
agcaatttccttttgcttctaggtgatctctgattatagatagcatcctgtaaatataactttattgtcttgaaatgtttattgaagatgctatatttttctgttctgttttctgaagat

SEQ ID NO: 242733 - DNA, 120 bp, Artificial Sequence
  ENSG00000121741_57 (sequence is synthesized)
tttgccatttaaaatgatccagtgaaaaatatttatccacattgaagaaagtggatttcccatgcaaattgaatcttcattaacacattttaaaaggctttactgtattaggtaacatag

SEQ ID NO: 242734 - DNA, 120 bp, Artificial Sequence
  ENSG00000121741_58 (sequence is synthesized)
atattaaaggatttttctaggcaagaagctcaactttttttttccataaaaataatttttgcttaaatagtaactcatggttttcttttattaaatggggttgttgtcagtatgttaaac

SEQ ID NO: 242735 - DNA, 120 bp, Artificial Sequence
  ENSG00000121741_59 (sequence is synthesized)
attgaagtaggaggaggatgcatattgtactatgcattcaaatttatcactgttttttctgacagactttccctttgtcctttctagttatgacttgggaatggggtaacttctttatgc

SEQ ID NO: 242736 - DNA, 120 bp, Artificial Sequence
  ENSG00000121741_60 (sequence is synthesized)
atagtattaagggttatagtatgaagaaatcataaaattgcaagttttggtttgcattactctaatgtgggttcatttaatctgagatcttaaatatcttgcagccttaaatcactacaa

SEQ ID NO: 242737 - DNA, 120 bp, Artificial Sequence
  ENSG00000121741_61 (sequence is synthesized)
acatttgcatttttattatgccagttatttccaaaatgtattgttatacatgtcacttatgtttttaagctaatattgactgtaggataatctccttgttcccctcaaaatagtcatgaa

SEQ ID NO: 242738 - DNA, 120 bp, Artificial Sequence
  ENSG00000121741_62 (sequence is synthesized)
agtgtacatgaaaatatttttaaagaataaatttctttaaattacatacttttggatttcccccttaataagccccttactcatgtttagagaagattttgaatttcatttattccattc

SEQ ID NO: 242739 - DNA, 120 bp, Artificial Sequence
  ENSG00000121741_63 (sequence is synthesized)
tactgtgttctgaggattatatcaatttagaagttgatgtccagaacaggttatctgtatcagttctgagaatagaaacaacctacagtgctgtcccaatttgtacttttttttctttac

SEQ ID NO: 242740 - DNA, 120 bp, Artificial Sequence
  ENSG00000121741_64 (sequence is synthesized)
tcggaagttagatgtcagagggacacctcaaataagtgactgtgatcccctgccttgtaatgaagtggaaaagagagggtccctaaaaatctgggcaagtggtgtcctaattagttactg

SEQ ID NO: 242741 - DNA, 120 bp, Artificial Sequence
  ENSG00000121741_65 (sequence is synthesized)
agttaaaacaagttcatgaatttaggccttttgggaaagaaagagaatgtaagatttaacctgtaaatgttaagaatagaaccaaagagagggccacagaccattagttgttaagaggta

SEQ ID NO: 242742 - DNA, 120 bp, Artificial Sequence
  ENSG00000121741_66 (sequence is synthesized)
tcaatcttaacagcatattttctcttgtgcaatgaaaagaacaatcgtagctcttttgggcatcttaggtcttttattctttctggatggcttacatcgaatccttgtgatttatttaaa

SEQ ID NO: 242743 - DNA, 120 bp, Artificial Sequence
  ENSG00000121741_67 (sequence is synthesized)
gacacatttttcctggagaggagaaagatcttctctaaaatagccttaacactgagaacatattaggcctaattttaaaagtccaattcagataactcctcagaagtaaatgcagcacac

SEQ ID NO: 242744 - DNA, 120 bp, Artificial Sequence
  ENSG00000121741_68 (sequence is synthesized)
taaaattcattatcacaaaacttaatatttgttaatatgtttcctctgtgctaaaaggctgctgctaaccatggtagttagggaggaagagaaagtaaaagacattagtgttcaaaaact

SEQ ID NO: 242745 - DNA, 120 bp, Artificial Sequence
  ENSG00000121741_69 (sequence is synthesized)
tacatctttgggggtaaacaagacatatagtacatttaactcctagggaacttagaatatttatggtaggatagaaagagatgattgtggacacacacaagtaccccaaaaggccattat

SEQ ID NO: 242746 - DNA, 120 bp, Artificial Sequence
  ENSG00000121741_70 (sequence is synthesized)
ggtctagaataggtttcatagagaggattactaccacctgtgattatatggtatatgaaacatgagattttgtaacctggacattgcttttagctctgttggaaatggtcagtagagcaa

SEQ ID NO: 242747 - DNA, 120 bp, Artificial Sequence
  ENSG00000121741_71 (sequence is synthesized)
tttctgaatattttgatggtacggtgttgatggcatcagtccttttctgtggctttcagcccaacttaatacaagaggagttaaaaatagcacccaaaaggggtagctagagcaccctca

SEQ ID NO: 242748 - DNA, 120 bp, Artificial Sequence
  ENSG00000121741_72 (sequence is synthesized)
ccatgcactaaagataaatctaaaaggtgttcaagtacattgaatcaagatgagtaatccaacttctatgttatgtaggatggatggagcacacaaattcttgcaaacattgtagaggtt

SEQ ID NO: 242749 - DNA, 120 bp, Artificial Sequence
  ENSG00000121741_73 (sequence is synthesized)
tttttaaacttcatccactaaggatttttttataataattacttttgaaaataaaatctcaactattttccaagttatgagtgtgctgctcttaaccctgtgagatgaaatcttcccatt

SEQ ID NO: 242750 - DNA, 120 bp, Artificial Sequence
  ENSG00000121741_74 (sequence is synthesized)
tggattacatatttgtagttctatatcgacatcagcagatggcaatagtatacaaatagtatacagcatgagccttccattgcttttatttctttgtttataagtatactataatccttc

SEQ ID NO: 242751 - DNA, 120 bp, Artificial Sequence
  ENSG00000121741_75 (sequence is synthesized)
atctgaaacccttagggttttagaattcagaattttccccttttcagagagaatatatataatgtagattacataacaccctcaatggggcctggggcaacaccccataatcaaacatta

SEQ ID NO: 242752 - DNA, 120 bp, Artificial Sequence
  ENSG00000121741_76 (sequence is synthesized)
gtacattcatagtaactgggattaactatgtaaggcagtaagctacctgccttacatagtttaggtcaatttttgtcacaaacttatggaaaaactaggtttttagaaattttttggatc

SEQ ID NO: 242753 - DNA, 120 bp, Artificial Sequence
  ENSG00000121741_77 (sequence is synthesized)
tcagaattcgtgattagggattgctgacctctgtaaggaaactggtgtcaggtctagaattttccttctaatgaaatacgtagtcattttccccctttttaaattgcttagctttggtag

SEQ ID NO: 242754 - DNA, 120 bp, Artificial Sequence
  ENSG00000121741_78 (sequence is synthesized)
aggtaactgaaggctttctttagaattcgtgtgttagattttaagaaaaatgcatgaaattgttaggacaggcataaatacaaatggcaattctagagccattacggaattttgaaacac

SEQ ID NO: 242755 - DNA, 120 bp, Artificial Sequence
  ENSG00000121741_79 (sequence is synthesized)
ttaacaattgctttcttttacttttcatcttgcctcaatacttgtagcattacaagtattccacgtaaataaacgtttatgaagagctgcagtcatgtcatggagccaggcatttattca

SEQ ID NO: 242756 - DNA, 120 bp, Artificial Sequence
  ENSG00000121741_80 (sequence is synthesized)
ttcaacaaataggttagtcttccacacacaatttcaggtgctgggaacacagaattaagacccagcccttcctctcaaggacttcgcgtagtttgggagaaacgggaatgggctggaatg

SEQ ID NO: 242757 - DNA, 120 bp, Artificial Sequence
  ENSG00000121741_81 (sequence is synthesized)
tcagaataagatgggcacttaggccttattgagcatgatcacacttgtattttgaagtaaaataccctgatcaagtaatttaccaagaagctactttttgtgacacagctccgtctcctg

SEQ ID NO: 242758 - DNA, 120 bp, Artificial Sequence
  ENSG00000121741_82 (sequence is synthesized)
accgcggttccagacttcaccattacaccagtctattcccattctggaaagggagaggtatcagctcttagggggcagagattagcaaattgaaaaatagcagtgaaccagatggaaggc

SEQ ID NO: 242759 - DNA, 120 bp, Artificial Sequence
  ENSG00000121741_83 (sequence is synthesized)
tctcgatctttagaggttattaatcagtgtttgttcgttcaatttttaaccagtcaccttgctgttaagagcagaacataattggctggaatgtaatgtagggaatttttccctgttgga

SEQ ID NO: 242760 - DNA, 120 bp, Artificial Sequence
  ENSG00000121741_84 (sequence is synthesized)
tccctagcacctagaaaagttcctagcacctattaggtgttaataaatgattgttgaatgaatcagtgattacaagtacttttaagaattttgaaaataaaggaaccattggaaatacga

SEQ ID NO: 242761 - DNA, 120 bp, Artificial Sequence
  ENSG00000121741_85 (sequence is synthesized)
agtggtggtgcagatatatagtgcatggctataaatcactgtattcaaggaccatcatatatcttgcagtagcaacctaaaagatacgtgaataggtttacttttttcttattctcgttt

SEQ ID NO: 242762 - DNA, 120 bp, Artificial Sequence
  ENSG00000121741_86 (sequence is synthesized)
tataggtttacatgtactttgagcctcatgcttagatgataatataggtccaccattccacaaacctctgaaaagcagaatttttttcatgaaaacacagtaaacagtaaaacctaactt

SEQ ID NO: 242763 - DNA, 120 bp, Artificial Sequence
  ENSG00000121741_87 (sequence is synthesized)
gatcatcctcattgtcttcaagttgagtaggctgaggaggaagaggagagaggttgatcttgctgtctcaggtggcacgattggaagaggtagaaggaggttggagaggcaggcacacag

SEQ ID NO: 242764 - DNA, 120 bp, Artificial Sequence
  ENSG00000121741_88 (sequence is synthesized)
aaaaacatacgtgtccaagtggacccctgcagttcaaacccatgttgctcaagggtcaattgtaatttgcctttgttgagagatggcttgtataaagtaatgaaataatgtaggctttaa

SEQ ID NO: 242765 - DNA, 120 bp, Artificial Sequence
  ENSG00000121741_89 (sequence is synthesized)
ctcttattcccttctctgcctccttctggcagaaagggttgggttctcccaccaggttgtgtgtttttgatacatttttcttttttcctcctatcccaggaccaagaatcgccttcagcc

SEQ ID NO: 242766 - DNA, 120 bp, Artificial Sequence
  ENSG00000121741_90 (sequence is synthesized)
ctgtctggtgcatccttggcagaaagtgaggaggaaaacacccccattccatacatgtgtatattactctctgccgtagtcacctggataccatctctggacttactagtgttctttggc

SEQ ID NO: 242767 - DNA, 120 bp, Artificial Sequence
  ENSG00000121741_91 (sequence is synthesized)
tttgcagaggcaaaaagtgtaatgaaaaattggtaattcttttctagttaagttgtagtcttaaaaattatctttttatgtttcaaattttagaaatatggaaaactgacaacttgtact

SEQ ID NO: 242768 - DNA, 120 bp, Artificial Sequence
  ENSG00000121741_92 (sequence is synthesized)
ttaatgcagcctgaggtaagcaggaatgtaaatggagttcaaggccttaacatttttgagcactgctactactgtcattaatatgtatctgaaaaatcttgtccaatttgaaatatatta

SEQ ID NO: 242769 - DNA, 120 bp, Artificial Sequence
  ENSG00000121741_93 (sequence is synthesized)
aaatttccaaacttaaattgtatcaaatgatgaatgttttatctctgagacatagatttctaatttcactaattttacatgtattttcttgtgatatgctcatttgtctttagttattta

SEQ ID NO: 242770 - DNA, 120 bp, Artificial Sequence
  ENSG00000121741_94 (sequence is synthesized)
tgttcttaggaaattattttcagatttttttagtgcacaataccttgtacacagtaggcatttaataaagggatataaaaatcctctcttttgtgcctacctgaaaagttaaaaaaaaaa

SEQ ID NO: 242771 - DNA, 120 bp, Artificial Sequence
  ENSG00000121741_95 (sequence is synthesized)
gaatgtttcaaatagaaatcaaatccatgatttgattagatggtggaacttaatttatatgagtaaaagaattctttgtaggtgctgatacatggaggccttctacagacacctagtggg

SEQ ID NO: 242772 - DNA, 120 bp, Artificial Sequence
  ENSG00000121741_96 (sequence is synthesized)
agctgatttttctgtcttgcaaacttgcaacatagtggcagttgtcccgaatattttatagcattactaatttgtactgtagtttcaagttttaaacattttatattctgtttcattgat

SEQ ID NO: 242773 - DNA, 120 bp, Artificial Sequence
  ENSG00000121741_97 (sequence is synthesized)
ttgctttgtttttgtcccttttccagtatagaaatttaagtcatcaaatagacctcaggaaacaaacaaaaaaaaaagcagagcattctcttctattatatttacacatcatagtgagat

SEQ ID NO: 242774 - DNA, 120 bp, Artificial Sequence
  ENSG00000121741_98 (sequence is synthesized)
atagtatgtttgcagccatttttattttttccttgtcaccattcttttgcagttgacaaatatttttgaaggaggacctatcattaaagaatgagttcatttccactttgaaaagcaaag

SEQ ID NO: 242775 - DNA, 120 bp, Artificial Sequence
  ENSG00000121741_99 (sequence is synthesized)
ttgagggcttcctttagttgatatttcagtaaatgaggaagtaggcagcgtaagtggttttaataagatgataatgaacatgcattcctggcacataaacagctatgttttcttatactt

SEQ ID NO: 242776 - DNA, 120 bp, Artificial Sequence
  ENSG00000121741_100 (sequence is synthesized)
tttctattcgtttcaagctgaaagacctttttcttgatgttgattgtatttttttatttttaccttccatttattaccttcattttctgaaaccctgtggtatttgtgacatttttccat

SEQ ID NO: 242777 - DNA, 120 bp, Artificial Sequence
  ENSG00000121741_101 (sequence is synthesized)
gcagtgtattcatttcagttgttatttttggcctgattgttatctataacacctattatttatgctatccatggaacatttcgaagccttcttatattttcatattgtatagatgctcgt

SEQ ID NO: 242778 - DNA, 120 bp, Artificial Sequence
  ENSG00000121741_102 (sequence is synthesized)
gggtatgaagacggatttaattgcaacatgaggtggaaaatggatacaattattttgcaacgtgatttgtgatatttgatttaacttgactatgacagagttctgcaaccactcagagga

SEQ ID NO: 242779 - DNA, 120 bp, Artificial Sequence
  ENSG00000121741_103 (sequence is synthesized)
agagttctgcaaccactcagaggatcaaaacaacttgcacttgaaggctagcctttcgtttttatttctaccttttttttctttttgtggaagatggggtcttgctgtgttgcccaggct

SEQ ID NO: 242780 - DNA, 120 bp, Artificial Sequence
  ENSG00000121741_104 (sequence is synthesized)
gttgcccaggctgttcttgaactcctgggctcaagcagttctctacaaaaaaaatacacccccaccaaaaaaaatagccaggcaattgcttgaacccaggctggtctcaaactcctgggc

SEQ ID NO: 242781 - DNA, 120 bp, Artificial Sequence
  ENSG00000121741_105 (sequence is synthesized)
gggtttacaggtgtgagccacaccctgccctcatattctttatctccttttgttgttgttgttgttgttggcacatatagtcattcattgcttaatgacaagaatacgttctgaaaaatg

SEQ ID NO: 242782 - DNA, 120 bp, Artificial Sequence
  ENSG00000121741_106 (sequence is synthesized)
catcgttagacaagtttgttttgtgaacatcacagagtgtactcaaacaaacctaaatggtatagcttattgctgctaggctataagcctgtacagcatgttactgtaatgaatactgca

SEQ ID NO: 242783 - DNA, 120 bp, Artificial Sequence
  ENSG00000121741_107 (sequence is synthesized)
taacacaatggtaagtatttgtgtatctacatatatctaaacatagaaaaggtacagtagaaatatggcattacaatcactgagtgaaacatcgttatttggcacattactgtattcact

SEQ ID NO: 242784 - DNA, 120 bp, Artificial Sequence
  ENSG00000121741_108 (sequence is synthesized)
tattcacttttggcaggaggattaactttattattatctattgatgaattatttacttcattttatagccagaagtcattttgaatgtggtttaaatttttttaattcaaaaaaattttt

SEQ ID NO: 242785 - DNA, 120 bp, Artificial Sequence
  ENSG00000121741_109 (sequence is synthesized)
ttattttattgtggtttaatgagatttcaaatgtagtagataggtgataaatcatttttaagagaagttccaagagtgcttggaacaatagcagctcagtgggaaaaggatttaaaatct

SEQ ID NO: 242786 - DNA, 120 bp, Artificial Sequence
  ENSG00000121741_110 (sequence is synthesized)
tcaaattcattcttcaccatactttttattattaaggcttatatttcatagctccatttaattgattttgtcaaatgacaaagaagtatgtcctcattataaacaaaaagcactgtgcct

SEQ ID NO: 242787 - DNA, 120 bp, Artificial Sequence
  ENSG00000121741_111 (sequence is synthesized)
ttcctaaatttttcaggttttacttaactctatgtagggattctgttaaactaaatataatagagagaaaaacattctgtttttgaaggcgacttagctgatgatcattgctttgtttgg

SEQ ID NO: 242788 - DNA, 120 bp, Artificial Sequence
  ENSG00000121742_0 (sequence is synthesized)
cttttccctcaagtagactttatgccatacagctattttcttgccccagttctagcagaatctaaccagtgttctagaagaaaatgtcctgcccccatgcagtctccttagaattgcagg

SEQ ID NO: 242789 - DNA, 120 bp, Artificial Sequence
  ENSG00000121742_1 (sequence is synthesized)
gtgctgctcagaactgctcctgtggagagctttgtctgttgtttggatccagcagcgtctttgggggtgttgcttgaagcttgccaaggaggagaggggggttctgaagagagaacacca

SEQ ID NO: 242790 - DNA, 120 bp, Artificial Sequence
  ENSG00000121742_2 (sequence is synthesized)
gggctctagcctgtcacataactgggggtgtggagagcgcctcattgccactgcagtgactaaagctgggaagacgctggtcagttcacctgccccactggttgttttttaaacaaattc

SEQ ID NO: 242791 - DNA, 120 bp, Artificial Sequence
  ENSG00000121742_3 (sequence is synthesized)
tgatacaggcgacatcctcactgaccgagcaaagattgacattcgtatcatcactgtgcaccattggcttctaggcactccagtggggtaggagaaggaggtctgaaaccctcgcagagg

SEQ ID NO: 242792 - DNA, 120 bp, Artificial Sequence
  ENSG00000121742_4 (sequence is synthesized)
gatcttgccctcattctttgggtctgaaacactggcagtcgttggaaacaggactcagggataaaccagcgcaatggattgggggacgctgcacactttcatcgggggtgtcaacaaaca

SEQ ID NO: 242793 - DNA, 120 bp, Artificial Sequence
  ENSG00000121742_5 (sequence is synthesized)
ctccaccagcatcgggaaggtgtggatcacagtcatctttattttccgagtcatgatcctcgtggtggctgcccaggaagtgtggggtgacgagcaagaggacttcgtctgcaacacact

SEQ ID NO: 242794 - DNA, 120 bp, Artificial Sequence
  ENSG00000121742_6 (sequence is synthesized)
gcaaccgggatgcaaaaatgtgtgctatgaccactttttcccggtgtcccacatccggctgtgggccctccagctgatcttcgtctccaccccagcgctgctggtggccatgcatgtggc

SEQ ID NO: 242795 - DNA, 120 bp, Artificial Sequence
  ENSG00000121742_7 (sequence is synthesized)
ctactacaggcacgaaaccactcgcaagttcaggcgaggagagaagaggaatgatttcaaagacatagaggacattaaaaagcagaaggttcggatagaggggtcgctgtggtggacgta

SEQ ID NO: 242796 - DNA, 120 bp, Artificial Sequence
  ENSG00000121742_8 (sequence is synthesized)
aagcagcctttatgtatgtgttttacttcctttacaatgggtaccacctgccctgggtgttgaaatgtgggattgacccctgccccaaccttgttgactgctttatttctaggccaacag

SEQ ID NO: 242797 - DNA, 120 bp, Artificial Sequence
  ENSG00000121742_9 (sequence is synthesized)
agaagaccgtgtttaccatttttatgatttctgcgtctgtgatttgcatgctgcttaacgtggcagagttgtgctacctgctgctgaaagtgtgttttaggagatcaaagagagcacaga

SEQ ID NO: 242798 - DNA, 120 bp, Artificial Sequence
  ENSG00000121742_10 (sequence is synthesized)
cgcaaaaaaatcaccccaatcatgccctaaaggagagtaagcagaatgaaatgaatgagctgatttcagatagtggtcaaaatgcaatcacaggtttcccaagctaaacatttcaaggta

SEQ ID NO: 242799 - DNA, 120 bp, Artificial Sequence
  ENSG00000121742_11 (sequence is synthesized)
aaatgtagctgcgtcataaggagacttctgtcttctccagaaggcaataccaacctgaaagttccttctgtagcctgaagagtttgtaaatgactttcataataaatagacacttgagtt

SEQ ID NO: 242800 - DNA, 120 bp, Artificial Sequence
  ENSG00000121742_12 (sequence is synthesized)
aactttttgtaggatacttgctccattcatacacaacgtaatcaaatatgtggtccatctctgaaaacaagagactgcttgacaaaggagcattgcagtcactttgacaggttcctttta

SEQ ID NO: 242801 - DNA, 120 bp, Artificial Sequence
  ENSG00000121742_13 (sequence is synthesized)
agtggactctctgacaaagtgggtactttctgaaaatttatataactgttgttgataaggaacatttatccaggaattgatacgtttattaggaaaagatatttttataggcttggatgt

SEQ ID NO: 242802 - DNA, 120 bp, Artificial Sequence
  ENSG00000121742_14 (sequence is synthesized)
ttttagttctgactttgaatttatataaagtatttttataatgactggtcttccttacctggaaaaacatgcgatgttagttttagaattacaccacaagtatctaaatttggaacttac

SEQ ID NO: 242803 - DNA, 120 bp, Artificial Sequence
  ENSG00000121742_15 (sequence is synthesized)
aaagggtctatcttgtaaatattgttttgcattgtctgttggcaaatttgtgaactgtcatgatacgcttaaggtggaaagtgttcattgcacaatatatttttactgctttctgaatgt

SEQ ID NO: 242804 - DNA, 120 bp, Artificial Sequence
  ENSG00000121742_16 (sequence is synthesized)
agacggaacagtgtggaagcagaaggcttttttaactcatccgtttgccaatcattgcaaacaactgaaatgtggatgtgattgcctcaataaagctcgtccccattgcttaagccttca

SEQ ID NO: 242805 - DNA, 80 bp, Artificial Sequence
  ENSG00000121742_17 (sequence is synthesized)
gcgcagcaggtgggagccggggccttcacccgaaacccgacgagagcccgacagccggcggcgcccgagcccgacctgcc

SEQ ID NO: 242806 - DNA, 120 bp, Artificial Sequence
  ENSG00000121742_18 (sequence is synthesized)
gcgccagggccgccggccgcagagcaggcaccagaaggcacttcctgtcggtgaagaagacctgtctccggtgtcacgggcatcctgtgttttgcaaacggggctgacctcccttcctgg

SEQ ID NO: 242807 - DNA, 120 bp, Artificial Sequence
  ENSG00000121742_19 (sequence is synthesized)
ttttctcttattttaaaaatcaagatatttgcccttctccaggaattgggcccctcttttcattctgaataataatattctgctctcctgtggaaatgcttaaagaattgaacatagaat

SEQ ID NO: 242808 - DNA, 120 bp, Artificial Sequence
  ENSG00000121742_20 (sequence is synthesized)
aaccatgagatccagcaatcccacatctagatacctaagagacttgaaagcagggtcttgaaaaaatagtagtataccctcactcacagtagtgttacaacagccaaaagctggaagcaa

SEQ ID NO: 242809 - DNA, 120 bp, Artificial Sequence
  ENSG00000121742_21 (sequence is synthesized)
cccagtgtccattgatagatgaatgggtaaacaaaatggggagcatccatacggtggaatagtattcagcctccaaaataaggaaatcctgtcacacgcagcaacatggatgaacctcga

SEQ ID NO: 242810 - DNA, 120 bp, Artificial Sequence
  ENSG00000121742_22 (sequence is synthesized)
aagggtcaggtgttaggaaggaaaagaagtacagaagatctggctaaacaatttctgtatggcgaaagaaaaattctaacttgtacgccctcttcatgcatctttaattcaatttgaata

SEQ ID NO: 242811 - DNA, 120 bp, Artificial Sequence
  ENSG00000121742_23 (sequence is synthesized)
aagcgggcgcggaccggctgggtcttgcggggggcgagcgggcggtgccacctcggccccccagcggaggaatttcctccaagaaaacaaaacagttaaaacgtgcaggcaccagaaggc

SEQ ID NO: 242812 - DNA, 120 bp, Artificial Sequence
  ENSG00000121742_24 (sequence is synthesized)
ttttttaaaccactgatttggggatcagggtgtagccagtgtctcaaactctcccctgtccctttttgttttgctcaaggagtgggcttgaggcctcagattgggtgttactgttatttt

SEQ ID NO: 242813 - DNA, 120 bp, Artificial Sequence
  ENSG00000121742_25 (sequence is synthesized)
gatagggaaaggatcctactaaagagcacctttgattattttgtgtgttcaaagcatagagcatcaggaagctggcaatttctgaacttacctcataacagttctgggaatgaagaaaaa

SEQ ID NO: 242814 - DNA, 120 bp, Artificial Sequence
  ENSG00000121742_26 (sequence is synthesized)
acataactgggggtgtggagagcgcctcattgccactgcagtgactaaagctgggaagacgctggtcagttcacctgccccactggttgttttttaaacaaattctgatacagctactat

SEQ ID NO: 242815 - DNA, 120 bp, Artificial Sequence
  ENSG00000121743_0 (sequence is synthesized)
gcacactggggctgcagggatggcgatcagggcggggaggtcgggccctggcgcggggcgcacgcgtgaagcagcaccgcacgtgtgaaaggaattcttttcagagcggccgggagccct

SEQ ID NO: 242816 - DNA, 120 bp, Artificial Sequence
  ENSG00000121743_1 (sequence is synthesized)
gctccggaggaacgcacccgggtcgccgccgcggcagagcggggttaggaatctgaagcaatgggcgactggagctttctgggaagactcttagaaaatgcacaggagcactccacggtc

SEQ ID NO: 242817 - DNA, 120 bp, Artificial Sequence
  ENSG00000121743_2 (sequence is synthesized)
atcggcaaggtttggctgaccgtgctgttcatcttccgcatcttggtgctgggggccgcggcggaggacgtgtggggcgatgagcagtcagacttcacctgcaacacccagcagccgggc

SEQ ID NO: 242818 - DNA, 120 bp, Artificial Sequence
  ENSG00000121743_3 (sequence is synthesized)
tgcgagaacgtctgctacgacagggccttccccatctcccacatccgcttctgggcgctgcagatcatcttcgtgtccacgcccaccctcatctacctgggccacgtgctgcacatcgtg

SEQ ID NO: 242819 - DNA, 120 bp, Artificial Sequence
  ENSG00000121743_4 (sequence is synthesized)
cgcatggaagagaagaagaaagagagggaggaggaggagcagctgaagagagagagccccagccccaaggagccaccgcaggacaatccctcgtcgcgggacgaccgcggcagggtgcgc

SEQ ID NO: 242820 - DNA, 120 bp, Artificial Sequence
  ENSG00000121743_5 (sequence is synthesized)
atggccggggcgctgctgcggacctacgtcttcaacatcatcttcaagacgctgttcgaggtgggcttcatcgccggccagtactttctgtacggcttcgagctgaagccgctctaccgc

SEQ ID NO: 242821 - DNA, 120 bp, Artificial Sequence
  ENSG00000121743_6 (sequence is synthesized)
tgcgaccgctggccctgccccaacacggtggactgcttcatctccaggcccacggagaagaccatcttcatcatcttcatgctggcggtggcctgcgcgtccctgctgctcaacatgctg

SEQ ID NO: 242822 - DNA, 120 bp, Artificial Sequence
  ENSG00000121743_7 (sequence is synthesized)
gagatctaccacctgggctggaagaagctcaagcagggcgtgaccagccgcctcggcccggacgcctccgaggccccgctggggacagccgatcccccgcccctgccccccagctcccgg

SEQ ID NO: 242823 - DNA, 120 bp, Artificial Sequence
  ENSG00000121743_8 (sequence is synthesized)
ccgcccgccgttgccatcgggttcccaccctactatgcgcacaccgctgcgcccctgggacaggcccgcgccgtgggctaccccggggccccgccaccagccgcggacttcaaactgcta

SEQ ID NO: 242824 - DNA, 120 bp, Artificial Sequence
  ENSG00000121743_9 (sequence is synthesized)
gccctgaccgaggcgcgcggaaagggccagtccgccaagctctacaacggccaccaccacctgctgatgactgagcagaactgggccaaccaggcggccgagcggcagcccccggcgctc

SEQ ID NO: 242825 - DNA, 120 bp, Artificial Sequence
  ENSG00000121743_10 (sequence is synthesized)
aaggcttacccggcagcgtccacgcctgcagcccccagccccgtcggcagcagctccccgccactcgcgcacgaggctgaggcgggcgcggcgcccctgctgctggatgggagcggcagc

SEQ ID NO: 242826 - DNA, 120 bp, Artificial Sequence
  ENSG00000121743_11 (sequence is synthesized)
agtctggaggggagcgccctggcagggacccccgaggaggaggagcaggccgtgaccaccgcggcccagatgcaccagccgcccttgcccctcggagacccaggtcgggccagcaaggcc

SEQ ID NO: 242827 - DNA, 120 bp, Artificial Sequence
  ENSG00000121743_12 (sequence is synthesized)
agcagggccagcagcgggcgggccagaccggaggacttggccatctagtgcccgggtgcctgcctccagacagctgtgtagtgatctttttcttagaaaccaaaaccaaagtgcacttcc

SEQ ID NO: 242828 - DNA, 120 bp, Artificial Sequence
  ENSG00000121743_13 (sequence is synthesized)
caccagcagatagaacctgaaagtcccaggaggtgggagcgactggagtcccaggaggtggacgatggaggagagatcaggtttccgtgttcaatgcttgctgttcttagcactgtgagt

SEQ ID NO: 242829 - DNA, 120 bp, Artificial Sequence
  ENSG00000121743_14 (sequence is synthesized)
tacagtggggataactcccactttctgagtttgggggtggcggggacaagggttgtgggcctttaagatcttcacagcagcccagaaatctggtcgctgagggctgtctctgggggtaac

SEQ ID NO: 242830 - DNA, 120 bp, Artificial Sequence
  ENSG00000121743_15 (sequence is synthesized)
tgttctgtagtggtaaagcaacaggtatcctgcagtccctttagctcctgggcaattgggtttgctattcctaagctctccagagcctctgggcggcccagagggtcttagctctgggcc

SEQ ID NO: 242831 - DNA, 120 bp, Artificial Sequence
  ENSG00000121743_16 (sequence is synthesized)
agagcacttagctctatctctttgatacttttaacttagagttgaatttcatttgggatatttgccaaactgcactaaaaaaagatttacagcaagtctatgtagtgtcatttgagtttc

SEQ ID NO: 242832 - DNA, 120 bp, Artificial Sequence
  ENSG00000121743_17 (sequence is synthesized)
cgaaattgcatgtgaagcccaggatatcaagcttcaggcctcatgacaagtgacaaagagcagttgccctccagaggcaggctcagtgggcaagggccccagaggttgctggcagaaggc

SEQ ID NO: 242833 - DNA, 120 bp, Artificial Sequence
  ENSG00000121743_18 (sequence is synthesized)
aggtggaaacgcagccacgcctgaggccatttttaaacagttgaggaaattgacataaaagtgtgtcgggtatgccgtaggtatttattttctaaatgattattttgtgctttgaatggt

SEQ ID NO: 242834 - DNA, 120 bp, Artificial Sequence
  ENSG00000121743_19 (sequence is synthesized)
gcagctatgcctattttctcccactttctttcaggaaaaatgaaagaaaaatagtgtttttctttctttaaatactgttagaatgattgctgaccaagacagtgctaatttgccctaatg

SEQ ID NO: 242835 - DNA, 120 bp, Artificial Sequence
  ENSG00000121743_20 (sequence is synthesized)
catgctactagcatctttactaaagattttgaactttcttgtaaaagaaattctttaatttcatgagtcacctaattataatgagaatgtattatataaaacaaaagcaggggaaagttt

SEQ ID NO: 242836 - DNA, 120 bp, Artificial Sequence
  ENSG00000121743_21 (sequence is synthesized)
ctactgttgccaggaaaattatttatacagatgaatctatgacaatctacacttttaaaaagtacagaataaaacacttcaagcttcctaatcattctttgtgggcagcctgtttgcttt

SEQ ID NO: 242837 - DNA, 120 bp, Artificial Sequence
  ENSG00000121743_22 (sequence is synthesized)
ctccagtgtaaataatataagtgtctggggatccctgcctgggggagggcgcgtgctcatgcaggctgtatgccccattctgcctccacaccagagctgtcctgacagggaaggctattt

SEQ ID NO: 242838 - DNA, 120 bp, Artificial Sequence
  ENSG00000121743_23 (sequence is synthesized)
atgtgtgtgggcatggctggaagacggcagaattttctgtcctgcacacacagctgtagtatcttggtcaccatttgtttataaaatgaacgatggtcatgttgagcctgtttctactca

SEQ ID NO: 242839 - DNA, 120 bp, Artificial Sequence
  ENSG00000121743_24 (sequence is synthesized)
cacttttcacctccaacttctactgagtatcattagcccttgttcagcgagaccaatgtaatacatttctttttataaattaacttctcgatgatgcatttgggaccacactccaaacat

SEQ ID NO: 242840 - DNA, 120 bp, Artificial Sequence
  ENSG00000121743_25 (sequence is synthesized)
actttctgttttctatcataaagggtgctccactaacaatctgatgaaaggaatgcaatttccaagtctcagattcttgcatgcaactagtttttcatgtcagtcaaacacaaagaattt

SEQ ID NO: 242841 - DNA, 120 bp, Artificial Sequence
  ENSG00000121743_26 (sequence is synthesized)
gttagtacattctgcttgctgtaggatgcactggacaggctcctaggcttgaaaaatgctaacttttccatacgtctcctcagagactttctcaaccagattgacaagagagaaattagc

SEQ ID NO: 242842 - DNA, 120 bp, Artificial Sequence
  ENSG00000121743_27 (sequence is synthesized)
cctttggaaaactgtgagtgactttctcactcctctccaggctggtgcataactacagccattctagatgcataacttctctccgaagttcactcattacatgcagtgtatgccataggc

SEQ ID NO: 242843 - DNA, 120 bp, Artificial Sequence
  ENSG00000121743_28 (sequence is synthesized)
ctagggcagcaggacttagttcttgtgagtgataagggctgctagaagatcctagtgtgagaagcattccgataaaaagctttggccattttagaaaatgcaatagcaatcatccaagag

SEQ ID NO: 242844 - DNA, 120 bp, Artificial Sequence
  ENSG00000121743_29 (sequence is synthesized)
cacaagtacagctcaagtacaagtggatgtcaatacttggttctttaagttctaccataataaatgttcataacagtaacaagcttcttatttacccacaatttgattttgagtggggtt

SEQ ID NO: 242845 - DNA, 120 bp, Artificial Sequence
  ENSG00000121743_30 (sequence is synthesized)
ggagatgagcatgagaactcaaattgtatctagtttttacattttaaaattgaatttagtcacaatatgtttatggaaatgccagtattgtaccattgaccatagtctagtgggtccatt

SEQ ID NO: 242846 - DNA, 120 bp, Artificial Sequence
  ENSG00000121743_31 (sequence is synthesized)
tagagtggataggagtgtagaattagattcacctacttgaaaatcactaatctataaagaagtgaggttttgcaatagaacagtgcctgtggtgttttttcaggttagcatactgatttc

SEQ ID NO: 242847 - DNA, 120 bp, Artificial Sequence
  ENSG00000121743_32 (sequence is synthesized)
agttcatgtaagaaatgaacgcatgtttcacatccttttgctctttgaggtatccatgattctaaaggctgggtccttctctctcaggcagtgtggaattgttctctactcaactagtcc

SEQ ID NO: 242848 - DNA, 120 bp, Artificial Sequence
  ENSG00000121743_33 (sequence is synthesized)
tttaagacattgaaacatgcaataaaaatagaaattgcctctctctgtgggcaagattccagacctatttttttctagcctggaaatttcactgaaactattttgttcttgattcattag

SEQ ID NO: 242849 - DNA, 120 bp, Artificial Sequence
  ENSG00000121743_34 (sequence is synthesized)
aaagttttaaaaaatctctaagcctattttaaaactcaaatgctatacctatagcatttgagtattatatttacatacatggtttttaagctgctgtatacaattacttcttatatccct

SEQ ID NO: 242850 - DNA, 120 bp, Artificial Sequence
  ENSG00000121743_35 (sequence is synthesized)
ccctgtttttataaaatgttaaacatcactatagttacagtaccaaaaatcattttttaaattctaaaactattacttatattatcactcactttctcctttttaaacttttaatggtta

SEQ ID NO: 242851 - DNA, 120 bp, Artificial Sequence
  ENSG00000121743_36 (sequence is synthesized)
tgtattttttaataaaattgacacgaataaatccttaaatttacaaaagaaaaatagcaagccagcatctttctcatttatcctggatttcttcggctctggacaagtaagtggataggt

SEQ ID NO: 242852 - DNA, 120 bp, Artificial Sequence
  ENSG00000121743_37 (sequence is synthesized)
catagaattcctacacaagaatacctggactaataactatgaatataatttaaacatcactttacaaaaaattaatccaatagggtttaggtctcctttcacgttaggctttttaaaaag

SEQ ID NO: 242853 - DNA, 120 bp, Artificial Sequence
  ENSG00000121743_38 (sequence is synthesized)
tattattaacactttctttattttgtattactgaataaactccttttttctgaattttttgaacttctgatatttgtaacactaattcatgaatctccaccaaaataaatacttatagag

SEQ ID NO: 242854 - DNA, 120 bp, Artificial Sequence
  ENSG00000121743_39 (sequence is synthesized)
agtattgcatgatttaagagagtaaatgtgttttccaaagatgaatagagtcctgccaccatcaccacccgccacccctacaaattgaggatatcctaaataacctttaatatagcatat

SEQ ID NO: 242855 - DNA, 120 bp, Artificial Sequence
  ENSG00000121743_40 (sequence is synthesized)
ggacattgtacatttaaggtcagggaaggcacttttcttcctaattttatattacagtgcaaatcttgggttgactcactttaaggtttctgactgcccaaaatattttttcccctttac

SEQ ID NO: 242856 - DNA, 120 bp, Artificial Sequence
  ENSG00000121743_41 (sequence is synthesized)
gttacagaacattataataaggcaaacaagttagggatttgaataacactcaaagcaacaaactgtttccagaaagtaccatatttgaagctgtttggtgtgtaaatgttcatttagctc

SEQ ID NO: 242857 - DNA, 120 bp, Artificial Sequence
  ENSG00000121743_42 (sequence is synthesized)
atgtatttacaaaactcttactaaaacttaatttttgtgccataacagtgtctttcctggattacattgtaactggaagtaagcattttctaaaataataaaagtgcccttaagtttaaa

SEQ ID NO: 242858 - DNA, 120 bp, Artificial Sequence
  ENSG00000121749_0 (sequence is synthesized)
gttgttgtatgtccgagagacacgtgaggttctgctacgtcattaccaggcacgcgcaggaaacatggcggcggcgggtgttgtgagcgggaagattatatatgaacaagaaggagtata

SEQ ID NO: 242859 - DNA, 120 bp, Artificial Sequence
  ENSG00000121749_1 (sequence is synthesized)
tattcactcatcttgtggaaagaccaatgaccaagacggcttgatttcaggaatattacgtgttttagaaaaggatgccgaagtaatagtggactggagaccattggatgatgcattaga

SEQ ID NO: 242860 - DNA, 120 bp, Artificial Sequence
  ENSG00000121749_2 (sequence is synthesized)
ttcctctagtattctctatgctagaaaggactccagttcagttgtagaatggactcaggccccaaaagaaagaggtcatcgaggatcagaacatctgaacagttacgaagcagaatggga

SEQ ID NO: 242861 - DNA, 120 bp, Artificial Sequence
  ENSG00000121749_3 (sequence is synthesized)
catggttaatacagtttcatttaaaaggaaaccacataccaatggagatgctccaagtcatagaaatgggaaaagcaaatggtcattcctgttcagtttgacagacctgaaatcaatcaa

SEQ ID NO: 242862 - DNA, 120 bp, Artificial Sequence
  ENSG00000121749_4 (sequence is synthesized)
gcaaaacaaagagggtatgggctggtcctatttggtattctgtctaaaggatgacgtcgttctccctgctctacactttcatcaaggagatagcaaactactgattgaatctcttgaaaa

SEQ ID NO: 242863 - DNA, 120 bp, Artificial Sequence
  ENSG00000121749_5 (sequence is synthesized)
atatgtggtattgtgtgaatctccacaggataaaagaacacttcttgtgaattgtcagaataagagtctttcacagtcttttgaaaatcttcttgatgagccagcatatggtttaataca

SEQ ID NO: 242864 - DNA, 120 bp, Artificial Sequence
  ENSG00000121749_6 (sequence is synthesized)
agcaggactgctagacagaagaaagctgttgtgggccattcaccactggaaaaaaattaaaaaggacccttatacggcaactatgataggattttccaaagtcacaaactacatttttga

SEQ ID NO: 242865 - DNA, 120 bp, Artificial Sequence
  ENSG00000121749_7 (sequence is synthesized)
cagtttgagaggcagcgatccctctacacatcaacgaccaccttcagaaatggcagattttcttagtgatgctattccaggtctaaagataaatcaacaagaagaaccaggatttgaagt

SEQ ID NO: 242866 - DNA, 120 bp, Artificial Sequence
  ENSG00000121749_8 (sequence is synthesized)
catcacaagaattgatttgggggaacgccctgttgttcaaaggagagaaccggtatcactggaagaatggactaagaacattgattctgaaggaagaattttaaatgtagataatatgaa

SEQ ID NO: 242867 - DNA, 120 bp, Artificial Sequence
  ENSG00000121749_9 (sequence is synthesized)
gcagatgatatttagagggggacttagtcatgcattgagaaagcaagcatggaaatttcttctgggttattttccctgggacagtaccaaggaggaaagaacccaattacaaaagcaaaa

SEQ ID NO: 242868 - DNA, 120 bp, Artificial Sequence
  ENSG00000121749_10 (sequence is synthesized)
aactgatgaatacttcagaatgaaactgcagtggaaatccatcagccaggaacaagagaaaagaaattcgaggttaagagattatagaagtcttatcgaaaaagatgttaacagaacaga

SEQ ID NO: 242869 - DNA, 120 bp, Artificial Sequence
  ENSG00000121749_11 (sequence is synthesized)
tcgaacaaacaagttttatgaaggccaagataatccagggttgattttacttcatgacattttgatgacctactgtatgtatgattttgatttaggatatgttcaaggaatgagtgattt

SEQ ID NO: 242870 - DNA, 120 bp, Artificial Sequence
  ENSG00000121749_12 (sequence is synthesized)
actttcccctcttttatatgtgatggaaaatgaagtggatgccttttggtgctttgcctcttacatggaccaaatgcatcagaattttgaagaacaaatgcaaggcatgaagacccagct

SEQ ID NO: 242871 - DNA, 120 bp, Artificial Sequence
  ENSG00000121749_13 (sequence is synthesized)
aattcagctgagtaccttacttcgattgttagacagtggattttgcagttacttagaatctcaggactctggatacctttatttttgcttcaggtggcttttaatcagattcaaaaggga

SEQ ID NO: 242872 - DNA, 120 bp, Artificial Sequence
  ENSG00000121749_14 (sequence is synthesized)
atttagttttctagatattcttcgattatgggaggtaatgtggaccgaactaccatgtacaaatttccatcttcttctctgttgtgctattctggaatcagaaaagcagcaaataatgga

SEQ ID NO: 242873 - DNA, 120 bp, Artificial Sequence
  ENSG00000121749_15 (sequence is synthesized)
aaagcattatggcttcaatgaaatacttaagcatatcaatgaattgtccatgaaaattgatgtggaagatatactctgcaaggcagaagcaatttctctacagatggtaaaatgcaagga

SEQ ID NO: 242874 - DNA, 120 bp, Artificial Sequence
  ENSG00000121749_16 (sequence is synthesized)
attgccacaagcagtctgtgagatccttgggcttcaaggcagtgaagttacaacaccagattcagacgttggtgaagacgaaaatgttgtcatgactccttgtcctacatctgcatttca

SEQ ID NO: 242875 - DNA, 120 bp, Artificial Sequence
  ENSG00000121749_17 (sequence is synthesized)
aagtaatgccttgcctacactctctgccagtggagccagaaatgacagcccaacacagataccagtgtcctcagatgtctgcagattaacacctgcatgatcactgttcttgcttttttg

SEQ ID NO: 242876 - DNA, 120 bp, Artificial Sequence
  ENSG00000121749_18 (sequence is synthesized)
ggaagagacactttgttgcaaccctttttcaagtacttgaaagttgaaaatttgaaatcttggtattgatcatgctttaaggtttatgtaaagaaagtgtactgatgttcttacattaaa

SEQ ID NO: 242877 - DNA, 120 bp, Artificial Sequence
  ENSG00000121749_19 (sequence is synthesized)
gctttacaaagatttaaactaattatttttgtagttacttctaccaaatagcctttccttttcgataacattcctcagtatttttatagccaagtacattttattttcttgctgatgaac

SEQ ID NO: 242878 - DNA, 120 bp, Artificial Sequence
  ENSG00000121749_20 (sequence is synthesized)
tggaattggataaatattgcaagtggatgagttggaaattatgcactttgaaaaacattcactttgtttaagcttattgggtttcagatttgattaaattaaatgtggaggctttctata

SEQ ID NO: 242879 - DNA, 120 bp, Artificial Sequence
  ENSG00000121749_21 (sequence is synthesized)
gcattctaagctgagaagtagattgttacccagtaatgaaataaaaaataaaaataaaaggatttttttctctattgtttacgacagtactcagcttaaatatttatgctggtcaaatgt

SEQ ID NO: 242880 - DNA, 120 bp, Artificial Sequence
  ENSG00000121749_22 (sequence is synthesized)
gatttaaattggacattttcatcaatgcagtctaatgtgtagataaatatttcaaccataataagtggattggcagtatattttttacattgaacttttcttcacttgtatataaagatt

SEQ ID NO: 242881 - DNA, 120 bp, Artificial Sequence
  ENSG00000121749_23 (sequence is synthesized)
atatataagtacttatttatgagtataagaaaggttaggcatattttcattaactgaataaacgacttgatttatataacctggtttatcaaaatttaacatggcttcagtatgagatct

SEQ ID NO: 242882 - DNA, 120 bp, Artificial Sequence
  ENSG00000121749_24 (sequence is synthesized)
ttttcaaaactattttcttaaacatttatttcatgagattatgttcaaccctgtacctggtgtaattttaaaattaattgcttgtaacctcactttactaataatgtttattatctttcc

SEQ ID NO: 242883 - DNA, 120 bp, Artificial Sequence
  ENSG00000121749_25 (sequence is synthesized)
atttgaaaaatttctagatggtctcatgagtttcaaaataataatttttgtgtatgaacaaagctgttgtttttaccatgcagtattgcatgattttaagttatgtggaattaacataac

SEQ ID NO: 242884 - DNA, 120 bp, Artificial Sequence
  ENSG00000121749_26 (sequence is synthesized)
aacataactgattttgttttaattgtaagttgttaactcctgtatatatcattaaaataaatctgaagttgaagtagtgtttttagttaaattatacttagaaatagtctgcttttttaa

SEQ ID NO: 242885 - DNA, 68 bp, Artificial Sequence
  ENSG00000121749_27 (sequence is synthesized)
aaattatacttagaaatagtctgcttttttaaaattttttttctggctcactgcagcctccgccttct

SEQ ID NO: 242886 - DNA, 120 bp, Artificial Sequence
  ENSG00000121749_28 (sequence is synthesized)
tacaggtgtgagccactgtgcccggctaattctttaatagaagaaaaaacatccaagatggacctcaattcatctcttatttttatatgattaaaatgataatctggccgggcgcggtgg

SEQ ID NO: 242887 - DNA, 120 bp, Artificial Sequence
  ENSG00000121749_29 (sequence is synthesized)
cgtctcaaaaaaaaaaaaaaaaaaatgataatctgaataagttatggaaatgaaaaccatcctttttataactgaaaaaaaattttcattagcatggaaatgggcacagtgttgccttga

SEQ ID NO: 242888 - DNA, 120 bp, Artificial Sequence
  ENSG00000121749_30 (sequence is synthesized)
aattttcattagcatggaaatgggcacagtgttgccttgaaagatacagttatttgactcagtaaagcagcttattacaactgatgctaatagtatagagaaaaaagttgtgcagttcta

SEQ ID NO: 242889 - DNA, 120 bp, Artificial Sequence
  ENSG00000121749_31 (sequence is synthesized)
aaatggtcctagagattgacttttttcccccaagaaagttagggaacaaaacgaacttttttcctggttgagcattaactgacaatcacgacagtagaaccgttagagtttagtttttaa

SEQ ID NO: 242890 - DNA, 120 bp, Artificial Sequence
  ENSG00000121749_32 (sequence is synthesized)
tattatgtgtgttatctttcatcagttaataatgagtaagcctattcagaaaaagaacataaactgatcaaaaactcagcatctccagcctttcatttcctgctattcaggaaattgctt

SEQ ID NO: 242891 - DNA, 120 bp, Artificial Sequence
  ENSG00000121749_33 (sequence is synthesized)
agaacatcttgatgtcctccttgttcttcctggacagtgactttttgggagtttgttcctgctgcgtaatgtgatacccacttcagattttttttttatcaatacatttagtaagttgaa

SEQ ID NO: 242892 - DNA, 120 bp, Artificial Sequence
  ENSG00000121749_34 (sequence is synthesized)
cttctgtcaagttttattacaaaattacttgttaaaacaatttttactaaactgcatttctatctagcatatttttgatatggaagtgatagtatagtatagttccaggagaagtcttaa

SEQ ID NO: 242893 - DNA, 120 bp, Artificial Sequence
  ENSG00000121749_35 (sequence is synthesized)
atcagtccacagagtccagttagcaaatactctgtgccattaagattgctaaaatacacagttcaggtaaatttactagtgttttttaaaggtttatttgttttcacaagatgctctgtc

SEQ ID NO: 242894 - DNA, 120 bp, Artificial Sequence
  ENSG00000121749_36 (sequence is synthesized)
cacacccttataacatgtaaaatattgtgtgctgtattatgtggtaaagttgttaaaattcagtttctaacattaacttaaaagtacagacaatctaacatgatgatttgacttacaaac

SEQ ID NO: 242895 - DNA, 120 bp, Artificial Sequence
  ENSG00000121749_37 (sequence is synthesized)
tttcaactaaatttatgatggctttaaagcagtgcactgaatagaaaccatactttgagtacccatacagccatttttcacttttactacaatattctataaatcacatgagatatttaa

SEQ ID NO: 242896 - DNA, 120 bp, Artificial Sequence
  ENSG00000121749_38 (sequence is synthesized)
aggctttgtgttagatgattttgcccaaatgtaaactaatgtagtgttctgagcatgtttaagttagggtaggctaaactatgtttggtaggttagatgtattaaaagcatttttgatta

SEQ ID NO: 242897 - DNA, 120 bp, Artificial Sequence
  ENSG00000121749_39 (sequence is synthesized)
aaagcatttttgattaatgatgtcttcaatttatgatgtgtttattggaacataacctcaatataagttgaaaagcatatgtattttcaattctggcatgaacctatgggaatcttttgc

SEQ ID NO: 242898 - DNA, 120 bp, Artificial Sequence
  ENSG00000121749_40 (sequence is synthesized)
atttaagaacctccccattttaataatttcatgggtctaagattcttcatctgtttataaggaactttagtcttagtgattagagactaaatttttttttgagcagtaagaaaacagcct

SEQ ID NO: 242899 - DNA, 120 bp, Artificial Sequence
  ENSG00000121749_41 (sequence is synthesized)
tttgggacagatagtgagtgattcttaggaacttgacattgccaagaaattttatagatgccgaagaattcttatgtgaaattcacataagcatgcccattactaaagacagtttgtata

SEQ ID NO: 242900 - DNA, 120 bp, Artificial Sequence
  ENSG00000121749_42 (sequence is synthesized)
aagtaaccctaaatgtttattgaggaacctacagcttcaactgacttacgtgcagatatgtaccaggagaacatcattttagcttgggcgtctttacttggggttttcagaggatccagg

SEQ ID NO: 242901 - DNA, 120 bp, Artificial Sequence
  ENSG00000121749_43 (sequence is synthesized)
aacctcactgtatgcaaagtcttgtggatgtacctgaatgtttttggaggcaggtcacatagtttctgaaagtgttctcttattttcctcaaatgtaggtaaccattgttacaagttatt

SEQ ID NO: 242902 - DNA, 120 bp, Artificial Sequence
  ENSG00000121749_44 (sequence is synthesized)
taacaggagaatagtaacaatgtctaacttatgctaatgattttgtgtgctgagctcccattaattaaaatgtcttcagaatgcttgtttccagatccttggtctgtattattaagatac

SEQ ID NO: 242903 - DNA, 120 bp, Artificial Sequence
  ENSG00000121749_45 (sequence is synthesized)
atgtctaggtgctacttcaggcttacagaatcagtctttggaagtcagatcaggaatctgcattttaacaagcatccaggtgatttcttgagcccctctgaagttagagcactaccatta

SEQ ID NO: 242904 - DNA, 120 bp, Artificial Sequence
  ENSG00000121749_46 (sequence is synthesized)
tatattgtatttcatatgttaatcttttgatttatggccaagtggacaattcccttaatttttaaaagcttgtcccttgattttctaagatatttgctctagttccggtcgccattttta

SEQ ID NO: 242905 - DNA, 120 bp, Artificial Sequence
  ENSG00000121749_47 (sequence is synthesized)
gtaaaaagtgatgacagctcagcctgttatatgtagatttctcatttcttactttctgaagaaaattaagctttctgtgtcacttctgagcacgaaacaagattaaattattggaatctg

SEQ ID NO: 242906 - DNA, 120 bp, Artificial Sequence
  ENSG00000121749_48 (sequence is synthesized)
attaccaggcacgcgcaggaaacatggcggcggcgggtgttgtgagcgggaaggcgacattatcagcaagatattcaagaattttaacagatgattcgcttggtgacaggtggtgctact

SEQ ID NO: 242907 - DNA, 120 bp, Artificial Sequence
  ENSG00000121749_49 (sequence is synthesized)
ttttgccggatgttgttgtatgtccgagagacacgtgaggttctgctacgtcattaccaggcacgcgcaggaaacatggcggcggcgggtgttgtgagcgggaagggtggatgctgatat

SEQ ID NO: 242908 - DNA, 120 bp, Artificial Sequence
  ENSG00000121749_50 (sequence is synthesized)
actgcttgacttactgcgtatttgaagattatcctgtttgattttccatctaaactgatccaggctgggacttttcaagaggggatcccttccgtttaaacatctccctctttcagatta

SEQ ID NO: 242909 - DNA, 120 bp, Artificial Sequence
  ENSG00000121749_51 (sequence is synthesized)
taatacagtttcatttaaaaggaaaccacataccaatggagtttgacagacctgaaatcaatcaagcaaaacaaagagggtatgggctggtcctatttggtattctgtctaaaggatgac

SEQ ID NO: 242910 - DNA, 120 bp, Artificial Sequence
  ENSG00000121749_52 (sequence is synthesized)
aatgatagcaagcttttcttgccaaatgagtgtctctttttccactatgagagttaggaagttcccgactattctactagctgagtcttacgtgaaaatatgctgaagtgttatttctga

SEQ ID NO: 242911 - DNA, 120 bp, Artificial Sequence
  ENSG00000121749_53 (sequence is synthesized)
taaccactctgggcttgcaactttcttgttaatttttgcaacattattctcgcttgatttttttctttacttctctgactggtctttcttaaacctgtctttgagtgtatactcttacat

SEQ ID NO: 242912 - DNA, 120 bp, Artificial Sequence
  ENSG00000121749_54 (sequence is synthesized)
ttgatgttcctctggattatctcttcacccctcttctttctcatgatgctcttgcacattatttttaaaaatattacccactcttgatagtgtatctgcactgagacacgtactggaagc

SEQ ID NO: 242913 - DNA, 120 bp, Artificial Sequence
  ENSG00000121749_55 (sequence is synthesized)
tatatattgtttgacatctcaatctaaaacaactcatctttcttacttatgactagagttcctcctcttcatttatattcttttcttggtgaacatcagtgtctaccaatttctaaatgc

SEQ ID NO: 242914 - DNA, 120 bp, Artificial Sequence
  ENSG00000121749_56 (sequence is synthesized)
aaaggagaaagatacaattttaagcgaaatggtggtgatatgcacaacttgcagaaggttacataaaacttgggttttcagagatgattttttcttttctttttaggatatgttcaagga

SEQ ID NO: 242915 - DNA, 84 bp, Artificial Sequence
  ENSG00000121749_57 (sequence is synthesized)
tactgtatgtatgattttgatttagaaatttgttgtaagaactgatgccggggctgggtagtcaaggcaggtggatcacctgag

SEQ ID NO: 242916 - DNA, 120 bp, Artificial Sequence
  ENSG00000121749_58 (sequence is synthesized)
gccttattctgtaagattgggcttagactcaccagtcacactgtctgtctgctgtagtctactgtattctgtagtctactgtattctgtgcactgtttaaactttctggcagctgcttac

SEQ ID NO: 242917 - DNA, 120 bp, Artificial Sequence
  ENSG00000121749_59 (sequence is synthesized)
atcttttggatctagaagtaaaaaacaagatgatattcactgaattgaactatttacatatatgaaactacctcttaaagattagttttcctttttatatgcaagttttgtgaacttaca

SEQ ID NO: 242918 - DNA, 120 bp, Artificial Sequence
  ENSG00000121749_60 (sequence is synthesized)
attaccaggcacgcgcaggaaacatggcggcggcgggtgttgtgagcgggaagattcgcttggtgacaggtggtgctacttcctcaaatctttgatctgttcttccctttctttttctca

SEQ ID NO: 242919 - DNA, 120 bp, Artificial Sequence
  ENSG00000121749_61 (sequence is synthesized)
agatgtaaatatatttactttagagtttacatttttaatccagttagacatgggtaatagctttgtaggcctagttttaagagaatttgttctccaggggactggaaacttacaaggcta

SEQ ID NO: 242920 - DNA, 120 bp, Artificial Sequence
  ENSG00000121749_62 (sequence is synthesized)
gctgaaatagctaaaggttttaacattagatcattacattctttttgatgaagttatatctttgcaaagctgggtttttggccttgctgtgataagtactgtgtaaaaataaatgatgaa

SEQ ID NO: 242921 - DNA, 120 bp, Artificial Sequence
  ENSG00000121749_63 (sequence is synthesized)
aataaatgaggatggtgatagccagttgaattttaaggtttgagaagtattgtagtgctcagtaggtgataagcacataggatatgaatacttattcagttgttttgacctaactgctta

SEQ ID NO: 242922 - DNA, 120 bp, Artificial Sequence
  ENSG00000121749_64 (sequence is synthesized)
ataaatggagttgttatttctttgagacttaggagtgccttgggaaaaattgctgggatactaaggatgataaccatgaactgagaaagtttgcaaaccgttgtttgatatgcttttccc

SEQ ID NO: 242923 - DNA, 120 bp, Artificial Sequence
  ENSG00000121749_65 (sequence is synthesized)
attaccaggcacgcgcaggaaacatggcggcggcgggtgttgtgagcgggaaggtttttggtttcttcttgattcaatcttgataagtagtatgtgtccaggactttatccatactccag

SEQ ID NO: 242924 - DNA, 120 bp, Artificial Sequence
  ENSG00000121753_0 (sequence is synthesized)
ggccctccgcgcggctgcagctacctaccctgcgcccggcccggtccccgacttagggatggcaaacttgcgccccgtggccgcccccgccagcgccggcccccgctcctgctgctgacg

SEQ ID NO: 242925 - DNA, 120 bp, Artificial Sequence
  ENSG00000121753_1 (sequence is synthesized)
cggcccccgctcctgctgctgacggcgcccaggaaatccacagcagtgatacatgtgacgtccacactgacagtgccctcctgtgggcatggctcaggttgtgcgcagttcctggcacac

SEQ ID NO: 242926 - DNA, 120 bp, Artificial Sequence
  ENSG00000121753_2 (sequence is synthesized)
tggctgtaactccgcccctttctctccctctcagtaaagcaagattacgcggtgacatgcctcacagctgatcacgacacacggggatggagagcaagagttatggagaatacaggttgg

SEQ ID NO: 242927 - DNA, 120 bp, Artificial Sequence
  ENSG00000121753_3 (sequence is synthesized)
atgggcaagggacataggatgaccccagcctgtcccctcttactgtctgtgattctgtccctgcgcctggccaccgccttcgaccccgcccccagtgcctgctctgccctggcctcgggt

SEQ ID NO: 242928 - DNA, 120 bp, Artificial Sequence
  ENSG00000121753_4 (sequence is synthesized)
gtgctctacggggccttctcgctgcaggacctctttcctaccatcgcctcgggctgctcctggaccctggagaaccctgaccccaccaagtactccctctacctgcgcttcaaccgccag

SEQ ID NO: 242929 - DNA, 120 bp, Artificial Sequence
  ENSG00000121753_5 (sequence is synthesized)
gagcaggtgtgcgcacactttgccccccgcctgctgcccctggaccactacctggtcaactttacctgcctgcggcctagccccgaggaggcggtggcccaggcggagtcagaggtgggg

SEQ ID NO: 242930 - DNA, 120 bp, Artificial Sequence
  ENSG00000121753_6 (sequence is synthesized)
cggccagaagaggaggaggcagaggcggcagcggggttggagctgtgcagcggctcaggcccctttaccttcctgcacttcgacaagaacttcgtgcagctgtgcctgtcggctgagccc

SEQ ID NO: 242931 - DNA, 120 bp, Artificial Sequence
  ENSG00000121753_7 (sequence is synthesized)
tccgaggccccgcgcctgctggcgcccgctgccctagccttccgctttgtcgaggtcttgctcatcaacaacaacaactctagccaattcacctgtggtgtgctctgccgctggagtgag

SEQ ID NO: 242932 - DNA, 120 bp, Artificial Sequence
  ENSG00000121753_8 (sequence is synthesized)
gagtgtggccgcgctgccggcagggcctgcggctttgctcagccaggctgcagctgccctggagaggcgggggccggctccaccaccaccacatctccaggccctcctgctgcccacacc

SEQ ID NO: 242933 - DNA, 120 bp, Artificial Sequence
  ENSG00000121753_9 (sequence is synthesized)
ctgtccaatgccctggtgcccgggggcccagccccacctgctgaggccgatttgcactcggggagcagcaatgatctgttcacaaccgagatgagatatggtgaggagccggaagaggaa

SEQ ID NO: 242934 - DNA, 120 bp, Artificial Sequence
  ENSG00000121753_10 (sequence is synthesized)
ccgaaagtgaaaacccagtggccgaggtctgcagatgagcctgggctatacatggcgcagacaggcgacccggcggctgaggagtggtccccgtggagcgtgtgttccctgacgtgtggg

SEQ ID NO: 242935 - DNA, 120 bp, Artificial Sequence
  ENSG00000121753_11 (sequence is synthesized)
cagggtctgcaggtgcggacccgctcctgtgtgtcctccccctatgggaccctgtgcagcgggcccctgcgggagaccaggccctgcaacaattcagccacctgcccagtgcacggcgtg

SEQ ID NO: 242936 - DNA, 120 bp, Artificial Sequence
  ENSG00000121753_12 (sequence is synthesized)
tgggaggagtgggggtcctggagcctgtgctcccgcagctgcgggcgggggtcccggagccggatgcggacctgcgtgcccccccagcacggcggcaaggcctgcgagggtcctgagctg

SEQ ID NO: 242937 - DNA, 120 bp, Artificial Sequence
  ENSG00000121753_13 (sequence is synthesized)
cagactaagctctgcagtatggctgcctgcccggtggaaggccagtggttagaatggggtccctggggcccatgctccacgtcctgtgccaatgggacccaacagcgcagccggaagtgc

SEQ ID NO: 242938 - DNA, 120 bp, Artificial Sequence
  ENSG00000121753_14 (sequence is synthesized)
agcgtggcgggcccagcctgggccacatgcacgggtgccctcactgacacccgggagtgcagcaacctcgagtgcccggccactgatagcaagtgggggccatggaatgcgtggagcctg

SEQ ID NO: 242939 - DNA, 120 bp, Artificial Sequence
  ENSG00000121753_15 (sequence is synthesized)
tgctctaagacgtgtgacacaggctggcagcgccgcttccgcatgtgccaggccacgggcacgcagggctacccctgcgagggcaccggagaggaggtgaagccttgtagtgagaagagg

SEQ ID NO: 242940 - DNA, 120 bp, Artificial Sequence
  ENSG00000121753_16 (sequence is synthesized)
tgtccagccttccatgagatgtgcagggatgagtacgtgatgctgatgacgtggaagaaggcagctgctggcgagatcatctacaacaagtgccccccgaatgcctcagggtctgccagc

SEQ ID NO: 242941 - DNA, 120 bp, Artificial Sequence
  ENSG00000121753_17 (sequence is synthesized)
cgccgctgtctcctcagtgcccaaggcgtggcgtactgggggctgcccagctttgctcgctgcatctcccatgagtaccgctacctgtatctgtcacttagggagcacctggccaagggg

SEQ ID NO: 242942 - DNA, 120 bp, Artificial Sequence
  ENSG00000121753_18 (sequence is synthesized)
cagcgcatgctggcaggcgagggcatgtcgcaggtggtgcgcagcctgcaggagctactggcccggcgcacctactatagtggggacctgctcttctctgtggacattctgaggaatgtc

SEQ ID NO: 242943 - DNA, 120 bp, Artificial Sequence
  ENSG00000121753_19 (sequence is synthesized)
actgacacctttaagagggccacctacgtgccctcggctgatgatgtgcagcgcttcttccaggtggtgagcttcatggtggatgcggaaaacaaggagaagtgggacgatgctcagcag

SEQ ID NO: 242944 - DNA, 120 bp, Artificial Sequence
  ENSG00000121753_20 (sequence is synthesized)
gtgtcccctggctctgtgcacctgctccgtgtcgtggaggacttcattcacctggtgggcgatgctctcaaggccttccagagctctctgattgtcacagataatctagtgatcagcatt

SEQ ID NO: 242945 - DNA, 120 bp, Artificial Sequence
  ENSG00000121753_21 (sequence is synthesized)
cagcgagagcccgtctcagctgtgtccagtgacatcacgttccccatgcggggccgccggggcatgaaggactgggtgcggcactcagaggaccgcctcttcctgcccaaggaggtgctc

SEQ ID NO: 242946 - DNA, 120 bp, Artificial Sequence
  ENSG00000121753_22 (sequence is synthesized)
agcctctcctccccagggaagccagccacatctggggcagcaggcagccctggcagggggaggggcccaggaacggtgcctcctggcccaggccactcccaccagcgcctcctcccagca

SEQ ID NO: 242947 - DNA, 120 bp, Artificial Sequence
  ENSG00000121753_23 (sequence is synthesized)
gaccctgatgagtcctcctactttgtgatcggtgctgtactctaccgcacccttggcctcatcctgccgcctcccaggcccccgctggccgtcacatcccgggtgatgacagtgactgtg

SEQ ID NO: 242948 - DNA, 120 bp, Artificial Sequence
  ENSG00000121753_24 (sequence is synthesized)
cgcccccctacccagcctccagctgagcccctcatcactgtggagctctcctacatcatcaatgggaccacggatccccattgcgccagctgggactactccagagcagatgccagctca

SEQ ID NO: 242949 - DNA, 120 bp, Artificial Sequence
  ENSG00000121753_25 (sequence is synthesized)
ggagactgggacactgaaaattgccagaccctggagacccaggcagctcacacccgctgccagtgccagcacctgtccacctttgctgtactagcccagccgcccaaggacctgaccctg

SEQ ID NO: 242950 - DNA, 120 bp, Artificial Sequence
  ENSG00000121753_26 (sequence is synthesized)
gagctggcgggctccccctcggtccccctggtgatcggctgtgcagtgtcgtgcatggcgctgctcaccctgctcgccatctatgccgccttttggaggttcataaaatctgaacgctcc

SEQ ID NO: 242951 - DNA, 120 bp, Artificial Sequence
  ENSG00000121753_27 (sequence is synthesized)
atcatcttgctgaacttctgcctgtccatcttggcatccaacatcctgatcctcgtgggccagtcccgggtgctgagcaagggcgtgtgcaccatgacggctgccttcctgcacttcttc

SEQ ID NO: 242952 - DNA, 120 bp, Artificial Sequence
  ENSG00000121753_28 (sequence is synthesized)
tttctctcctccttttgctgggtgcttaccgaggcctggcagtcctacctggctgtcattgggcggatgcgcacccgcctcgttcgcaagcgcttcctctgcctgggctggggtctgcct

SEQ ID NO: 242953 - DNA, 120 bp, Artificial Sequence
  ENSG00000121753_29 (sequence is synthesized)
gccctggtggtggccgtgtctgttggctttacccgaacgaaaggatacggtacatccagctactgctggctctccctggagggcggcctgctctacgcctttgtgggccctgcagccgtc

SEQ ID NO: 242954 - DNA, 120 bp, Artificial Sequence
  ENSG00000121753_30 (sequence is synthesized)
attgtcctggtgaacatgctcatcggaatcatcgtcttcaacaagctcatggcacgtgatggcatctccgacaaatccaagaagcagagggccgggtcggagcggtgcccctgggccagc

SEQ ID NO: 242955 - DNA, 120 bp, Artificial Sequence
  ENSG00000121753_31 (sequence is synthesized)
ctgctcctcccctgctcagcgtgtggagcggtccccagccccctgctcagctcagcctcggccaggaacgccatggcctcactctggagctcctgcgtggtgctgcccctgctggcgctc

SEQ ID NO: 242956 - DNA, 120 bp, Artificial Sequence
  ENSG00000121753_32 (sequence is synthesized)
acctggatgtctgccgtcctggctatgacagaccgccgttccgtcctcttccaggccctctttgctgtcttcaactccgcgcagggctttgtcatcactgctgtgcactgcttcctgcgc

SEQ ID NO: 242957 - DNA, 120 bp, Artificial Sequence
  ENSG00000121753_33 (sequence is synthesized)
cgagaggtccaggatgtggtgaagtgccagatgggggtgtgccgggctgatgagagcgaagactcccctgactcgtgtaagaacgggcagctgcagatcctgtcagactttgaaaaggat

SEQ ID NO: 242958 - DNA, 120 bp, Artificial Sequence
  ENSG00000121753_34 (sequence is synthesized)
gtggatctggcttgtcaaacagtgctgttcaaggaggtcaacacttgcaacccgtccaccatcacgggcacactatcccgcctgtccctggatgaggatgaggagcccaagtcctgcctc

SEQ ID NO: 242959 - DNA, 120 bp, Artificial Sequence
  ENSG00000121753_35 (sequence is synthesized)
gtgggccctgagggcagcctcagcttctcaccactgcctgggaatatcctggtgcccatggcagcctcaccagggctgggggagcctccgcccccacaggaggccaaccctgtttacatg

SEQ ID NO: 242960 - DNA, 120 bp, Artificial Sequence
  ENSG00000121753_36 (sequence is synthesized)
tgtggggagggtggcctgcggcagctggacctcacatggctgcggcccactgagccaggctctgagggagactacatggtgctgccccggcggactttgagcctgcagcctggcggtggg

SEQ ID NO: 242961 - DNA, 120 bp, Artificial Sequence
  ENSG00000121753_37 (sequence is synthesized)
ggtggaggtggtgaggatgcccccagggcccggccggaggggaccccccggcgagctgccaagacagtggcccacactgaaggctaccccagcttcctgtccgtggaccactcgggcctg

SEQ ID NO: 242962 - DNA, 120 bp, Artificial Sequence
  ENSG00000121753_38 (sequence is synthesized)
gggctgggccctgcctatggatctctccagaatccctatggaatgaccttccaaccgccaccgccgacacccagcgcccgccaagtgcccgagccaggggagcgcagccggaccatgcct

SEQ ID NO: 242963 - DNA, 120 bp, Artificial Sequence
  ENSG00000121753_39 (sequence is synthesized)
cgcaccgtgcccggctctaccatgaagatgggctccctggagcgaaagaaattacggtattcagacctggactttgaggtgatgcacacccggaaacggcattcagaactctaccacgag

SEQ ID NO: 242964 - DNA, 120 bp, Artificial Sequence
  ENSG00000121753_40 (sequence is synthesized)
ctcaaccagaagttccacactttcgaccgctaccgcagccagtccacggccaagagggagaagcggtggagtgtgtcctcgggtggggcagccgagcggagcgtgtgcaccgataagccc

SEQ ID NO: 242965 - DNA, 120 bp, Artificial Sequence
  ENSG00000121753_41 (sequence is synthesized)
agccctggggagcgccccagcttgtcccaacatcggcgccatcagagctggagcaccttcaaatctatgacactgggctcgctgccccccaagccccgagaacggctgactctgcaccgg

SEQ ID NO: 242966 - DNA, 120 bp, Artificial Sequence
  ENSG00000121753_42 (sequence is synthesized)
gcagcagcctgggagcccacagaaccaccggatggtgacttccagacagaggtgtgagtgccacgctggactgcccactgcatataaatatatatatctctctattttcacactccactt

SEQ ID NO: 242967 - DNA, 120 bp, Artificial Sequence
  ENSG00000121753_43 (sequence is synthesized)
tggaactacccaggagccagcgccctctcccctctcccgagggctgggcagggaggcgccgtggactcagccaggctgggggagccggacatggcttggcctggggtcccagggcccttc

SEQ ID NO: 242968 - DNA, 120 bp, Artificial Sequence
  ENSG00000121753_44 (sequence is synthesized)
cttgtttctcagaggcccctcagccactggaaccccatcttcagcccagcctgtccgtccctgtcccgggctggggaggggggaggggaactttgttgggaataaacttcactctgtgga

SEQ ID NO: 242969 - DNA, 120 bp, Artificial Sequence
  ENSG00000121753_45 (sequence is synthesized)
atacatataacatccctgcgcacaggaacaagcaacatgcattcaggacttgggcacatgttaatacaccgtgcatgtgtgtggcacttgcatgcacctacccaggcaacatggcagtgc

SEQ ID NO: 242970 - DNA, 120 bp, Artificial Sequence
  ENSG00000121753_46 (sequence is synthesized)
gagacggcaagggcagggtagcctcagccagtcctgctccttgctccctgagtgggtgaagtgaggcctaggccatgccagtggtgctgtggatttagagcagggcctacctgggaaggg

SEQ ID NO: 242971 - DNA, 120 bp, Artificial Sequence
  ENSG00000121753_47 (sequence is synthesized)
ctcctccttttgctgggtgcttaccgaggcctggcagtcctacctggctgtcattgggcggatgcgcacccgcctcgttcgcaagcgcttcctctgcctgggctggggtgagcagggcca

SEQ ID NO: 242972 - DNA, 120 bp, Artificial Sequence
  ENSG00000121753_48 (sequence is synthesized)
gtgctggactctgctgctgggccttggtgggcaggggcagcaagagaggttcagctttggccctggcccagctctctgggcacaggggtcagctgggatgggagtctgggagaacaaggg

SEQ ID NO: 242973 - DNA, 120 bp, Artificial Sequence
  ENSG00000121753_49 (sequence is synthesized)
gatgcgaccggggctccccaaccttggtgcatcaaggttgcaggcaaggtgggcacccggagtgctcagccgcagcccctcacccaccctaacccagctctctctctctcgtctgccctc

SEQ ID NO: 242974 - DNA, 120 bp, Artificial Sequence
  ENSG00000121753_50 (sequence is synthesized)
ccctcccaggcaaccccagcctgtctcaccaagggcctcccccacggcatgggcaacagtctggggccgcctgggggtggggaaggtgctgcagatggcgaacaggggtggaggtcctcc

SEQ ID NO: 242975 - DNA, 120 bp, Artificial Sequence
  ENSG00000121753_51 (sequence is synthesized)
aggattgggagggagagtggtcagcaggagacatgtcctgggggccactgagaacaggggtcaggagccccaccctggaaccaggcaggtctgtatttgaattctgcttgacacctgatt

SEQ ID NO: 242976 - DNA, 120 bp, Artificial Sequence
  ENSG00000121753_52 (sequence is synthesized)
gctccataactttgggcattaccagccctctctgggactcctcagtttgatcgtctgtacaatgggtaaggatattggcccatctccacggcccctcccgctccctccacaggataagcc

SEQ ID NO: 242977 - DNA, 120 bp, Artificial Sequence
  ENSG00000121753_53 (sequence is synthesized)
accgcccccaggggccgagggctgccccttgtcccccttccagttctgcccgcgttttcctccttaaggaggaaccccctcccctaagagagcgaccctctctggcagtcggagcgggag

SEQ ID NO: 242978 - DNA, 120 bp, Artificial Sequence
  ENSG00000121753_54 (sequence is synthesized)
gactgcacagagggggtcgctccctcccctcggcccagtccccagctccggaggcaggatggagggtgtgcgtcccccagggcgacagagctctaggagagcggctcctgaggaccctgt

SEQ ID NO: 242979 - DNA, 120 bp, Artificial Sequence
  ENSG00000121753_55 (sequence is synthesized)
tggcagcctcctccaccttcaggaaccccttgcctggctctggacacatgcttctcaaatttatccatactgctctcagaggctgggctgccacccagcgggtgagggacagagctctag

SEQ ID NO: 242980 - DNA, 120 bp, Artificial Sequence
  ENSG00000121753_56 (sequence is synthesized)
acctcacctgaagtcctggaccccactgagttaggccttcccctgggccttggctccttggaagcctctgcacacccatccaaagcggcttcagggtttctgactggggctggcacccgc

SEQ ID NO: 242981 - DNA, 120 bp, Artificial Sequence
  ENSG00000121753_57 (sequence is synthesized)
cagcggccggagcggccggaggaaccgggttcggcggcagcggcggcggcgctcagagaccgaagaggatgcggcaccggctctcagagcccggggctgcggccgccgcccgcaaatagg

SEQ ID NO: 242982 - DNA, 80 bp, Artificial Sequence
  ENSG00000121753_58 (sequence is synthesized)
atgcggcaccggctctcagagcccggggctgcggccgccgcccgcaaataggaggcggcgcgcggcgcgggcggtgctcg

SEQ ID NO: 242983 - DNA, 120 bp, Artificial Sequence
  ENSG00000121764_0 (sequence is synthesized)
cctcccttcaggaagtttgaggctgagacccgaaaagacctgggtgcaagcctccaggcaccctgaagggagtgggctgagggctggcccaagctccctcctctccctctgtagagccta

SEQ ID NO: 242984 - DNA, 120 bp, Artificial Sequence
  ENSG00000121764_1 (sequence is synthesized)
ggatgcccctctgctgcagcggctcctgagctcatggagccctcagccaccccaggggcccagatgggggtcccccctggcagcagagagccgtcccctgtgcctccagactatgaagat

SEQ ID NO: 242985 - DNA, 120 bp, Artificial Sequence
  ENSG00000121764_2 (sequence is synthesized)
gagtttctccgctatctgtggcgcgattatctgtacccaaaacagtatgagtgggtcctcatcgcagcctatgtggctgtgttcgtcgtggccctggtgggcaacacgctggtctgcctg

SEQ ID NO: 242986 - DNA, 120 bp, Artificial Sequence
  ENSG00000121764_3 (sequence is synthesized)
gccgtgtggcggaaccaccacatgaggacagtcaccaactacttcattgtcaacctgtccctggctgacgttctggtgactgctatctgcctgccggccagcctgctggtggacatcact

SEQ ID NO: 242987 - DNA, 120 bp, Artificial Sequence
  ENSG00000121764_4 (sequence is synthesized)
gagtcctggctgttcggccatgccctctgcaaggtcatcccctatctacaggctgtgtccgtgtcagtggcagtgctaactctcagcttcatcgccctggaccgctggtatgccatctgc

SEQ ID NO: 242988 - DNA, 120 bp, Artificial Sequence
  ENSG00000121764_5 (sequence is synthesized)
cacccactattgttcaagagcacagcccggcgggcccgtggctccatcctgggcatctgggctgtgtcgctggccatcatggtgccccaggctgcagtcatggaatgcagcagtgtgctg

SEQ ID NO: 242989 - DNA, 120 bp, Artificial Sequence
  ENSG00000121764_6 (sequence is synthesized)
gttgcttctttattgtcacctacctggccccactgggcctcatggccatggcctatttccagatattccgcaagctctggggccgccagatccccggcaccacctcagcactggtgcgga

SEQ ID NO: 242990 - DNA, 120 bp, Artificial Sequence
  ENSG00000121764_7 (sequence is synthesized)
actggaagcgcccctcagaccagctgggggacctggagcagggcctgagtggagagccccagccccgggcccgcgccttcctggctgaagtgaagcagatgcgtgcacggaggaagacag

SEQ ID NO: 242991 - DNA, 120 bp, Artificial Sequence
  ENSG00000121764_8 (sequence is synthesized)
ccaagatgctgatggtggtgctgctggtcttcgccctctgctacctgcccatcagcgtcctcaatgtccttaagagggtgttcgggatgttccgccaagccagtgaccgcgaagctgtct

SEQ ID NO: 242992 - DNA, 120 bp, Artificial Sequence
  ENSG00000121764_9 (sequence is synthesized)
acgcctgcttcaccttctcccactggctggtgtacgccaacagcgctgccaaccccatcatctacaacttcctcagtggcaaattccgggagcagtttaaggctgccttctcctgctgcc

SEQ ID NO: 242993 - DNA, 120 bp, Artificial Sequence
  ENSG00000121764_10 (sequence is synthesized)
tgcctggcctgggtccctgcggctctctgaaggcccctagtccccgctcctctgccagccacaagtccttgtccttgcagagccgatgctccatctccaaaatctctgagcatgtggtgc

SEQ ID NO: 242994 - DNA, 120 bp, Artificial Sequence
  ENSG00000121764_11 (sequence is synthesized)
tcaccagcgtcaccacagtgctgccctgagcgagggctgccctggaggctccggctcgggggatctgcccctacccctcatggaaagacagctggatgtggtgaaaggctgtggcttcag

SEQ ID NO: 242995 - DNA, 120 bp, Artificial Sequence
  ENSG00000121764_12 (sequence is synthesized)
tcctgggtttctgcctgtgtgactctggataagtcacttcctctgtctgagcttgtgtcccctaagcagggttgatgtgaggattaagcatgctgaagcaagtggaaagctccttgtaaa

SEQ ID NO: 242996 - DNA, 120 bp, Artificial Sequence
  ENSG00000121764_13 (sequence is synthesized)
agttgccgcggatcgtgctgagccccgcgagccgaggcagcgcagcctagggagggggctgccccggccccctcctgcagtcccggcccctagaggctcggccttcctcgcaggaaggcg

SEQ ID NO: 242997 - DNA, 120 bp, Artificial Sequence
  ENSG00000121764_14 (sequence is synthesized)
gtgttgtggacatgattattgttgtacttctctcatttggccataccccacagtataatctgtccccatcctccttccagagcttggtcatcctcctaaagacccctttcctacccaatt

SEQ ID NO: 242998 - DNA, 120 bp, Artificial Sequence
  ENSG00000121764_15 (sequence is synthesized)
agcgctgccaaccccatcatctacaacttcctcagtgggtgtaaagagaagagtctagctctgtcctgcccatcgtgccccggccatgacccgcaccttgctgcagctctgtgtagctaa

SEQ ID NO: 242999 - DNA, 120 bp, Artificial Sequence
  ENSG00000121764_16 (sequence is synthesized)
agcccccgaggtgcaggaaggtcccgcggacggagcgggcctgccggcgttcagtggggttcttggtgaagcacttggcacgcatcggagctcattactcctcatcgtggtcctgtaagg

SEQ ID NO: 243000 - DNA, 120 bp, Artificial Sequence
  ENSG00000121764_17 (sequence is synthesized)
ccatggctccctgaagcccagggctgcacttggccagctgttctgatgcctgtgtgaactaatctgggcccagcctttctccagcgggccacgagcacagccccaccctaaccaggtgcc

SEQ ID NO: 243001 - DNA, 120 bp, Artificial Sequence
  ENSG00000121764_18 (sequence is synthesized)
aagggcacacaccacagacccgaccttgttggctttgtggtgtgataaaacactctccatggccacttggcagagaggccagcagcccgaagcaactgtaattaaaagcctggcactgaa

SEQ ID NO: 243002 - DNA, 120 bp, Artificial Sequence
  ENSG00000121766_0 (sequence is synthesized)
cttgtgggtggaaacgcgctggctgactggggtcggcgtttagttcagcgcagcgactcggggacctggagctgacgcctagacacttgtattagctttaatagaagagaaatggaggag

SEQ ID NO: 243003 - DNA, 120 bp, Artificial Sequence
  ENSG00000121766_1 (sequence is synthesized)
ccatagaatattaaggatgaattcaggaaggcctgagaccatggaaaacttgcctgctctctacactattttccaaggagaggttgctatggtgacagactatggggcctttatcaaaat

SEQ ID NO: 243004 - DNA, 120 bp, Artificial Sequence
  ENSG00000121766_2 (sequence is synthesized)
cccaggctgtcggaagcaaggtctggtccatcgaactcatatgtcatcctgtcgggtggataagccctctgagatagtagatgttggagataaagtgtgggtgaagcttattggccgaga

SEQ ID NO: 243005 - DNA, 120 bp, Artificial Sequence
  ENSG00000121766_3 (sequence is synthesized)
gatgaaaaatgatagaataaaagtatccctctccatgaaggttgtcaatcaagggactgggaaagaccttgatcccaacaatgttatcattgagcaagaagagaggcggaggcgatcctt

SEQ ID NO: 243006 - DNA, 120 bp, Artificial Sequence
  ENSG00000121766_4 (sequence is synthesized)
ccaggattacactgggcagaagatcacccttgaggctgtcttgaacactacctgcaagaagtgtggctgtaaaggccactttgcaaaagattgtttcatgcaaccaggtgggactaaata

SEQ ID NO: 243007 - DNA, 120 bp, Artificial Sequence
  ENSG00000121766_5 (sequence is synthesized)
ctctctgatacctgatgaggaagaggaaaaggaagaggcaaagtcagcagagtttgagaagcctgaccctacaaggaatccttctagaaaaagaaagaaggagaagaagaaaaagaaaca

SEQ ID NO: 243008 - DNA, 120 bp, Artificial Sequence
  ENSG00000121766_6 (sequence is synthesized)
tgatacaggcaagagggcaaggcacacatcaaaagacagcaaggcagcaaagaagaagaaaaagaagaagaagcacaagaagaagcacaaggagtgagagtataaagagtgtagggggtg

SEQ ID NO: 243009 - DNA, 120 bp, Artificial Sequence
  ENSG00000121766_7 (sequence is synthesized)
gttgagagtaagaaaccaggagccttgtgccttgagactcctggaaagactcaatagtgagaatatagcctcccaccccattaacttcgctcccatgggagatggcttcccctcatgcaa

SEQ ID NO: 243010 - DNA, 120 bp, Artificial Sequence
  ENSG00000121766_8 (sequence is synthesized)
caggcaggtttgggagttagaggtcaaaagcagctgcctgaatgagttgttgtttccttatcactcctggtccctttgcaagtgaaccctgcagctcacccattcattcacccaacttcc

SEQ ID NO: 243011 - DNA, 120 bp, Artificial Sequence
  ENSG00000121766_9 (sequence is synthesized)
ttcattcagcaggaggtcctattaccctctccagctgccactgccagagctggattcctgtaaaggagtccaggctagagccacagagactgttgtggaggtgagttcggctgtagttag

SEQ ID NO: 243012 - DNA, 120 bp, Artificial Sequence
  ENSG00000121766_10 (sequence is synthesized)
agtgattggacccttcctattggtctgtcctgggccaactggtgggtgatctctgctgcatccaacatgggagcagagactggcagcaggaggggggaacatggtgagaagtggtgctca

SEQ ID NO: 243013 - DNA, 120 bp, Artificial Sequence
  ENSG00000121766_11 (sequence is synthesized)
cttttcccattcctcctaacatagttctactatgctagaagtggcatccagcggccacagctagaaaacagtctgcagtgtgacttaacttgtgtattgcattccagcagaccactgaac

SEQ ID NO: 243014 - DNA, 120 bp, Artificial Sequence
  ENSG00000121766_12 (sequence is synthesized)
cagacagcgaagccaagatcattgttctactttgtatttactactgtgtgaatcagttgattctacttcaggtccttgcttaaattcctgtcactaaatggaaatgtgtttggttttaaa

SEQ ID NO: 243015 - DNA, 120 bp, Artificial Sequence
  ENSG00000121766_13 (sequence is synthesized)
acgcgctggctgactggggtcggcgtttagttcagcgcagcgactcggggacctggagctgacgcctagtacgtatgaggaagaacggggtgggtggctgcctgagtctggaggcgacgc

SEQ ID NO: 243016 - DNA, 120 bp, Artificial Sequence
  ENSG00000121766_14 (sequence is synthesized)
ctcggttgtgcagtctgaacctgcccttctcagctgagggtgctgacagcaaggggtgggaggcgggccccgagtccccagctgtggacacttgtattagctttaatagaagagaaatgg

SEQ ID NO: 243017 - DNA, 120 bp, Artificial Sequence
  ENSG00000121769_0 (sequence is synthesized)
gccgtcggagcccttgcacgcctgctctcttgtagcttctctcagcctagcccagcatcactatggtggacgctttcctgggcacctggaagctagtggacagcaagaatttcgatgact

SEQ ID NO: 243018 - DNA, 120 bp, Artificial Sequence
  ENSG00000121769_1 (sequence is synthesized)
acatgaagtcactcggtgtgggttttgctaccaggcaggtggccagcatgaccaagcctaccacaatcatcgaaaagaatggggacattctcaccctaaaaacacacagcaccttcaaga

SEQ ID NO: 243019 - DNA, 120 bp, Artificial Sequence
  ENSG00000121769_2 (sequence is synthesized)
acacagagatcagctttaagttgggggtggagttcgatgagacaacagcagatgacaggaaggtcaagtccattgtgacactggatggagggaaacttgttcacctgcagaaatgggacg

SEQ ID NO: 243020 - DNA, 120 bp, Artificial Sequence
  ENSG00000121769_3 (sequence is synthesized)
ggcaagagaccacacttgtgcgggagctaattgatggaaaactcatcctgacactcacccacggcactgcagtttgcactcgcacttatgagaaagaggcatgacctgactgcactgttg

SEQ ID NO: 243021 - DNA, 120 bp, Artificial Sequence
  ENSG00000121769_4 (sequence is synthesized)
aatcggctacccctcgactcagcaccacattgcctcatttcttcctctgcattttgtacaaatccacgaattcttctggggtcaggtgccactgaccgggatccagttccagttcccatg

SEQ ID NO: 243022 - DNA, 120 bp, Artificial Sequence
  ENSG00000121769_5 (sequence is synthesized)
gtgtatgtggttttttttttttttttttaactgcactcatagggtgctctgaggtcaataaagcagagccaaggccacccagttgcctttttgcctttggtaacataactctgggagtct

SEQ ID NO: 243023 - DNA, 120 bp, Artificial Sequence
  ENSG00000121769_6 (sequence is synthesized)
tggtttatcctgtgtgtcagagagtgggcagaaataacggcctgaaggttactgaggaagaagcactggatgggagactgaaatggacagtctcggagcctgttaatcagctgatcacct

SEQ ID NO: 243024 - DNA, 120 bp, Artificial Sequence
  ENSG00000121769_7 (sequence is synthesized)
tacacatttaataataaaagagctgtacctacacgttgcctttacactgccccccctccatggtcaaatgacctagttcagtcagtgatggggcttccccaggtttggctattgaactgt

SEQ ID NO: 243025 - DNA, 120 bp, Artificial Sequence
  ENSG00000121769_8 (sequence is synthesized)
cacttcaggcccatcctacactgaaagctcttgggtctggctgttctctgtgaaatgctgtagtctctccctttccagaattcaggttcagggcacagaacccaggcttgtaccatggtg

SEQ ID NO: 243026 - DNA, 120 bp, Artificial Sequence
  ENSG00000121769_9 (sequence is synthesized)
ggtcttgctgcctgccagatgttatatccacatctggatctgccaagggcaagacagaggagtacaaaaagggacagggctcacattcttccccaaatgtagtcagcataacagaggaag

SEQ ID NO: 243027 - DNA, 120 bp, Artificial Sequence
  ENSG00000121774_0 (sequence is synthesized)
ctctcgctgggtcgctcgggtcggcttcggtcgctaccgctcccgctctgccacccccgccaaccgccgctcgggcctccgtcgctgccgcgtcgctttctcgctccttggatcgcacat

SEQ ID NO: 243028 - DNA, 120 bp, Artificial Sequence
  ENSG00000121774_1 (sequence is synthesized)
cctcccagatgcagcgccgggacgaccccgccgcgcgcatgagccggtcttcgggccgtagcggctccatggacccctccggtgcccacccctcggtgcgtcagacgccgtctcggcagc

SEQ ID NO: 243029 - DNA, 80 bp, Artificial Sequence
  ENSG00000121774_2 (sequence is synthesized)
tgcgtcagacgccgtctcggcagccgccgctgcctcaccggtcccggggaggcggagggggatcccgcgggggcgcccgg

SEQ ID NO: 243030 - DNA, 120 bp, Artificial Sequence
  ENSG00000121774_3 (sequence is synthesized)
tgggcgggccagcgccgaccccgctgctgcccccctcggccacagcctcggtcaagatggagccagagaacaagtacctgcccgaactcatggccgagaaggactcgctcgacccgtcct

SEQ ID NO: 243031 - DNA, 120 bp, Artificial Sequence
  ENSG00000121774_4 (sequence is synthesized)
tcactcacgccatgcagctgctgacggcagaaattgagaagattcagaaaggagactcaaaaaaggatgatgaggagaattacttggatttattttctcataagaacatgaaactgaaag

SEQ ID NO: 243032 - DNA, 120 bp, Artificial Sequence
  ENSG00000121774_5 (sequence is synthesized)
agcgagtgctgatacctgtcaagcagtatcccaagttcaattttgtggggaagattcttggaccacaagggaatacaatcaaaagactgcaggaagagactggtgcaaagatctctgtat

SEQ ID NO: 243033 - DNA, 120 bp, Artificial Sequence
  ENSG00000121774_6 (sequence is synthesized)
tgggaaagggctcaatgagagacaaagccaaggaggaagagctgcgcaaaggtggagaccccaaatatgcccacttgaatatggatctgcatgtcttcattgaagtctttggacccccat

SEQ ID NO: 243034 - DNA, 120 bp, Artificial Sequence
  ENSG00000121774_7 (sequence is synthesized)
gtgaggcttatgctcttatggcccatgccatggaggaagtcaagaaatttctagtaccggatatgatggatgatatctgtcaggagcaatttctagagctgtcctacttgaatggagtac

SEQ ID NO: 243035 - DNA, 120 bp, Artificial Sequence
  ENSG00000121774_8 (sequence is synthesized)
ctgaaccctctcgtggacgtggggtgccagtgagaggccggggagctgcacctcctccaccacctgttcccaggggccgtggtgttggaccacctcggggggctttggtacgtggtacac

SEQ ID NO: 243036 - DNA, 120 bp, Artificial Sequence
  ENSG00000121774_9 (sequence is synthesized)
cagtaaggggagccatcaccagaggtgccactgtgactcgaggcgtgccacccccacctactgtgaggggtgctccagcaccaagagcacggacagcgggcatccagaggatacctttgc

SEQ ID NO: 243037 - DNA, 120 bp, Artificial Sequence
  ENSG00000121774_10 (sequence is synthesized)
ctccacctcctgcaccagaaacatatgaagaatatggatatgatgatacatacgcagaacaaagttacgaaggctacgaaggctattacagccagagtcaaggggactcagaatattatg

SEQ ID NO: 243038 - DNA, 120 bp, Artificial Sequence
  ENSG00000121774_11 (sequence is synthesized)
gctgaaggcccctcctgctaggccagtgaagggagcatacagagagcacccatatggacgttattaaaaacaaacatgaggggaaaatatcagttatgagcaaagttgttactgatttct

SEQ ID NO: 243039 - DNA, 120 bp, Artificial Sequence
  ENSG00000121774_12 (sequence is synthesized)
tgtatctcccaggattcctgttgctttacccacaacagacaagtaattgtctaagtgtttttcttcgtggtccccttcttctccccaccttattccattcttaactctgcattctggctt

SEQ ID NO: 243040 - DNA, 120 bp, Artificial Sequence
  ENSG00000121774_13 (sequence is synthesized)
gcttctgtatgtagtattttaaaatgagttaaaatagatttaggaatattgaattaattttttaagtgtgtagatgcttttttctttgttgtttaaatataaacagaagtgtacctttta

SEQ ID NO: 243041 - DNA, 120 bp, Artificial Sequence
  ENSG00000121774_14 (sequence is synthesized)
aaaaaaaagaagttgagtaaaaaaaaaaaacacacaaacctgttagtttcaaaaatgacattgcttgcttaaaggttctgaagtaaaggcttgttaagtttctcttagttttgatttgag

SEQ ID NO: 243042 - DNA, 120 bp, Artificial Sequence
  ENSG00000121774_15 (sequence is synthesized)
gcatcccgtaaagttgtagttgcagaatcccaaactaggctacatttcaaaattcagggctgtttaagatttaaaatcacaaacattaacggcagtaggcaccaccatgtaaaagtgagc

SEQ ID NO: 243043 - DNA, 120 bp, Artificial Sequence
  ENSG00000121774_16 (sequence is synthesized)
tcagacgtctctaaaaaatgtttcctttataaaagcacatggcggttgaatcttaaggttaaattttaatatgaaagatcctcatgaattaaatagttgatgcaatttttaacgttaatt

SEQ ID NO: 243044 - DNA, 120 bp, Artificial Sequence
  ENSG00000121774_17 (sequence is synthesized)
gatataaaaaaaaaaacaacaaaattaggcttgtaaaactgactttttcattacgtgggttttgaaatctagccccagacatactgtgttgagagatacttagagggagggagtaggttt

SEQ ID NO: 243045 - DNA, 120 bp, Artificial Sequence
  ENSG00000121774_18 (sequence is synthesized)
tgaagaggttgatggtggtggggagggaaggcctcctgaattgagtttgatgcagagctttttagccatgaagaatctttcagtcatagtactaataattaaattttcagtatttaaaaa

SEQ ID NO: 243046 - DNA, 120 bp, Artificial Sequence
  ENSG00000121774_19 (sequence is synthesized)
gacaaagtattttgtccatttgagattctgcactccatgaaaagttcacttggacgctggggccaaaagctgttgattttcttaagttgacggttgtcaatatatcgaactgttcccaag

SEQ ID NO: 243047 - DNA, 120 bp, Artificial Sequence
  ENSG00000121774_20 (sequence is synthesized)
ttagtcaagtatgtctcaacactagcatgatataaaaagggacactgcagctgaatgaaaaaggaatcaaaatccactttgtacataagttaaagtcctaattggatttgtaccgtcctc

SEQ ID NO: 243048 - DNA, 120 bp, Artificial Sequence
  ENSG00000121774_21 (sequence is synthesized)
ccattttgttctcggaagattaaatgctacatgtgtaagtctgcctaaataggtagcttaaacttatgtcaaaatgtctgcagcagtttgtcaataaagtttagtccttttttaatcaaa

SEQ ID NO: 243049 - DNA, 120 bp, Artificial Sequence
  ENSG00000121774_22 (sequence is synthesized)
ggactagaatgggtagtgaagacccatgtcagctatcagaggactcctgaaacctggagagctacctgctgtataaaggctggcctgagggcatttgctgaacacagagaaacccaggag

SEQ ID NO: 243050 - DNA, 120 bp, Artificial Sequence
  ENSG00000121774_23 (sequence is synthesized)
aggagatcagcagttttctttcactctacttgatctgtcagatttacccacagaaagccagtcaggatcccttaagagtctttaggcccagaatggagtcctcagggctgcaggggactg

SEQ ID NO: 243051 - DNA, 120 bp, Artificial Sequence
  ENSG00000121774_24 (sequence is synthesized)
tggtgctaacaattaaactgttcaagactttaaagagttgaaggggactaatgggtatccctagcatggcctcctagatgggaattaactggcaactcctactgtgccattcccagtatg

SEQ ID NO: 243052 - DNA, 120 bp, Artificial Sequence
  ENSG00000121774_25 (sequence is synthesized)
tgtgcttccctttagcctcccatagaattggctgaaacaccctaccaccgttttctgtttccccactaccacacctgtgttatgggtgtcagcctgtgagtccttgaacccttccagagg

SEQ ID NO: 243053 - DNA, 120 bp, Artificial Sequence
  ENSG00000121774_26 (sequence is synthesized)
gctcccaagggagggtgatcactgcccttccataaaaggctgaggaaagccaagtgagaagattcaattaatttgggcaagttatttaacatctgaacctgtttttctcttcattgttta

SEQ ID NO: 243054 - DNA, 120 bp, Artificial Sequence
  ENSG00000121774_27 (sequence is synthesized)
ttacttaccttgtccaaaaaggtcataaagggtagggctttttctgttccacctctgtactatatttctccccaacaaatatctgcccctgaggacctcaataaaggtttggtcaagtga

SEQ ID NO: 243055 - DNA, 120 bp, Artificial Sequence
  ENSG00000121775_0 (sequence is synthesized)
gatacccgggactgggctgcggcggttagtcctctcccggccgccgtcgcctccgacatattgcccgcaggagctgcggcggcgaagcggagagcaccggggggaggagatgggaggacg

SEQ ID NO: 243056 - DNA, 120 bp, Artificial Sequence
  ENSG00000121775_1 (sequence is synthesized)
aagaggtcccaacaggacatcttactgtcgaaatccgctctgtgagccgggatcctcggggggctctagtggaagccacacttccagtgcatcggtgaccagtgttcgttcccgcaccag

SEQ ID NO: 243057 - DNA, 120 bp, Artificial Sequence
  ENSG00000121775_2 (sequence is synthesized)
gagcagttctggaacaggcctctccagccctcctctggccacccaaactgttgtgcctctacagcactgcaagatccccgagctgccagtccaggccagcattctgtttgagttgcagct

SEQ ID NO: 243058 - DNA, 120 bp, Artificial Sequence
  ENSG00000121775_3 (sequence is synthesized)
cttcttctgccagctcatagcactcttcgtccactacatcaacatctacaagacagtgtggtggtatccaccttcccacccaccctcccacacctccctgaacttccatctgatcgactt

SEQ ID NO: 243059 - DNA, 120 bp, Artificial Sequence
  ENSG00000121775_4 (sequence is synthesized)
caacttgctgatggtgaccaccatcgttctgggccgccgcttcattgggtccatcgtgaaggaggcctctcagagggggaaggtctccctctttcgctccatcctgctgttcctcactcg

SEQ ID NO: 243060 - DNA, 120 bp, Artificial Sequence
  ENSG00000121775_5 (sequence is synthesized)
cttcaccgttctcacggcaacaggctggagtctgtgccgatccctcatccacctcttcaggacctactccttcctgaacctcctgttcctctgctatccgtttgggatgtacattccgtt

SEQ ID NO: 243061 - DNA, 120 bp, Artificial Sequence
  ENSG00000121775_6 (sequence is synthesized)
cctgcagctgaattgcgacctccgcaagacaagcctcttcaaccacatggcctccatggggccccgggaggcggtcagtggcctggcaaagagccgggactacctcctgacactgcggga

SEQ ID NO: 243062 - DNA, 120 bp, Artificial Sequence
  ENSG00000121775_7 (sequence is synthesized)
tcctcaagatggacttcaactggcgcatgaaggaagtgctcgtcagctccatgctgagcgcctactatgtggcctttgtgcctgtctggttcgtgaagaacacacattactatgacaagc

SEQ ID NO: 243063 - DNA, 120 bp, Artificial Sequence
  ENSG00000121775_8 (sequence is synthesized)
gctggtcctgtgaactcttcctgctggtgtccatcagcacctccgtgatcctcatgcagcacctgctgcctgccagctactgtgacctgctgcacaaggccgccgcccatctgggctgtt

SEQ ID NO: 243064 - DNA, 120 bp, Artificial Sequence
  ENSG00000121775_9 (sequence is synthesized)
ggcagaaggtggacccagcgctgtgctccaacgtgctgcagcacccgtggactgaagaatgcatgtggccgcagggcgtgctggtgaagcacagcaagaacgtctacaaagccgtaggcc

SEQ ID NO: 243065 - DNA, 120 bp, Artificial Sequence
  ENSG00000121775_10 (sequence is synthesized)
actacaacgtggctatcccctctgacgtctcccacttccgcttccatttctttttcagcaaacccctgcggatcctcaacatcctcctgctgctggagggcgctgtcattgtctatcagc

SEQ ID NO: 243066 - DNA, 120 bp, Artificial Sequence
  ENSG00000121775_11 (sequence is synthesized)
tgtactccctaatgtcctctgaaaagtggcaccagaccatctcgctggccctcatcctcttcagcaactactatgccttcttcaagctgctccgggaccgcttggtattgggcaaggcct

SEQ ID NO: 243067 - DNA, 120 bp, Artificial Sequence
  ENSG00000121775_12 (sequence is synthesized)
actcatactctgctagcccccagagagacctggaccaccgtttctcctgagccctggggtcacctcagggacagcgtccaggcttcagccaagggctccctggcaaggggctgttgggta

SEQ ID NO: 243068 - DNA, 120 bp, Artificial Sequence
  ENSG00000121775_13 (sequence is synthesized)
gaagtggtggtgggggggacaaaagacaaaaaaatccaccagagctttgtatttttgttacgtactgtttctttgataattgatgtgataaggaaaaaagtcctatttttatactcccaa

SEQ ID NO: 243069 - DNA, 120 bp, Artificial Sequence
  ENSG00000121775_14 (sequence is synthesized)
tcgcctccgacatattgcccgcaggagctgcggcggcgaagcggagagcaccggggggaggagatgggtgagcagagcggctcaggctcggcctggcaacgagcgggcgcacgggaggac

SEQ ID NO: 243070 - DNA, 120 bp, Artificial Sequence
  ENSG00000121775_15 (sequence is synthesized)
attcccatctaacatactacagaatttaccaattttgttcatgtctatctcctcccacttgactgtaagctctatgactattaatgaaatatctactaattcattcaattaattgaatac

SEQ ID NO: 243071 - DNA, 120 bp, Artificial Sequence
  ENSG00000121775_16 (sequence is synthesized)
tgctattaagtgccaagcactgtgctaagcaatggagctacaagatgactaaaactgcttgtaggtcttgtgagggaagaatcctaatgacaataaatgtagctcatttagtcaatgctt

SEQ ID NO: 243072 - DNA, 120 bp, Artificial Sequence
  ENSG00000121775_17 (sequence is synthesized)
ctccaaacatcgtgatggctaatactaaaacagactcagttctgcatgctctatttcatttaaccctcaccgaaacctacacggtgaccatcagcagcctcatcgtaaagcataaaaaaa

SEQ ID NO: 243073 - DNA, 120 bp, Artificial Sequence
  ENSG00000121775_18 (sequence is synthesized)
gatgcgagcgcagacgggatcccgccccctcctgtcgttttgcggggtggggcctctgttgtgggggcgggacattggacggtgggcggggcttctaagacgaagccctgtgggggcttg

SEQ ID NO: 243074 - DNA, 120 bp, Artificial Sequence
  ENSG00000121797_0 (sequence is synthesized)
agacgcttcagagatcctctggaggcctgggggagcttttgagtactttatttcagttggtccctgagctcggtgagtggggcgggtagagccaccaggggaatcaacagtggtttctcg

SEQ ID NO: 243075 - DNA, 120 bp, Artificial Sequence
  ENSG00000121797_1 (sequence is synthesized)
tgcccctcagggtcaggagcagtctgatcaaaaggagggcatccactgtccggggccattcccacagctcccggatgctgggtctggaggctgcgcccttcccctgcaggagctcagccc

SEQ ID NO: 243076 - DNA, 120 bp, Artificial Sequence
  ENSG00000121797_2 (sequence is synthesized)
agtgggcagtctgaagatggccaattacacgctggcaccagaggatgaatatgatgtcctcatagaaggtgaactggagagcgatgaggcagagcaatgtgacaagtatgacgcccaggc

SEQ ID NO: 243077 - DNA, 120 bp, Artificial Sequence
  ENSG00000121797_3 (sequence is synthesized)
actctcagcccagctggtgccatcactctgctctgctgtgtttgtgatcggtgtcctggacaatctcctggttgtgcttatcctggtaaaatataaaggactcaaacgcgtggaaaatat

SEQ ID NO: 243078 - DNA, 120 bp, Artificial Sequence
  ENSG00000121797_4 (sequence is synthesized)
ctatcttctaaacttggcagtttctaacttgtgtttcttgcttaccctgcccttctgggctcatgctgggggcgatcccatgtgtaaaattctcattggactgtacttcgtgggcctgta

SEQ ID NO: 243079 - DNA, 120 bp, Artificial Sequence
  ENSG00000121797_5 (sequence is synthesized)
cagtgagacatttttcaattgccttctgactgtgcaaaggtacctagtgtttttgcacaagggaaactttttctcagccaggaggagggtgccctgtggcatcattacaagtgtcctggc

SEQ ID NO: 243080 - DNA, 120 bp, Artificial Sequence
  ENSG00000121797_6 (sequence is synthesized)
atgggtaacagccattctggccactttgcctgaattcgtggtttataaacctcagatggaagaccagaaatacaagtgtgcatttagcagaactcccttcctgccagctgatgagacatt

SEQ ID NO: 243081 - DNA, 120 bp, Artificial Sequence
  ENSG00000121797_7 (sequence is synthesized)
taaaaatgaacatttcggttcttgtcctccccctatttatttttacatttctctatgtgcaaatgagaaaaacactaaggttcagggagcagaggtatagccttttcaagcttgtttttg

SEQ ID NO: 243082 - DNA, 120 bp, Artificial Sequence
  ENSG00000121797_8 (sequence is synthesized)
ccataatggtagtcttccttctgatgtgggcgccctacaatattgcatttttcctgtccactttcaaagaacacttctccctgagtgactgcaagagcagctacaatctggacaaaagtg

SEQ ID NO: 243083 - DNA, 120 bp, Artificial Sequence
  ENSG00000121797_9 (sequence is synthesized)
ttcacatcactaaactcatcgccaccacccactgctgcatcaaccctctcctgtatgcgtttcttgatgggacatttagcaaatacctctgccgctgtttccatctgcgtagtaacaccc

SEQ ID NO: 243084 - DNA, 120 bp, Artificial Sequence
  ENSG00000121797_10 (sequence is synthesized)
cacttcaacccagggggcagtctgcacaaggcacatcgagggaagaacctgaccattccaccgaagtgtaaactagcatccaccaaatgcaagaagaataaacatggattttcatctttc

SEQ ID NO: 243085 - DNA, 120 bp, Artificial Sequence
  ENSG00000121797_11 (sequence is synthesized)
tgcattatttcatgtaaattttctacacatttgtatacaaaatcggatacaggaagaaaagggagaggtgagctaacatttgctaagcactgaatttgtctcaggcaccgtgcaaggctc

SEQ ID NO: 243086 - DNA, 120 bp, Artificial Sequence
  ENSG00000121797_12 (sequence is synthesized)
tttacaaacgtgagctccttcgcctcctaccacttgtccatagtgtggataggactagtctcatttctctgagaagaaaactaaggcgcggaaatttgtctaagatcacataactaggaa

SEQ ID NO: 243087 - DNA, 120 bp, Artificial Sequence
  ENSG00000121797_13 (sequence is synthesized)
gtggcagaactgattctccagccctggtagcatttgctcagagcctacgcttggtccagaacatcaaactccaaaccctggggacaaacgacatgaaataaatgtattttaaaacatcta

SEQ ID NO: 243088 - DNA, 120 bp, Artificial Sequence
  ENSG00000121797_14 (sequence is synthesized)
ctgctctggggaagtgggcacacgttaaagaaatgtttatttcagtcttctgaaatagggaattactctggctaaaatgtagctccagaaagggaaagtggggctgtatgaatccaggtc

SEQ ID NO: 243089 - DNA, 120 bp, Artificial Sequence
  ENSG00000121797_15 (sequence is synthesized)
gagcatggtttcacttttgcaaacatttatttatacccttcgagagaaaaacgtctcagctgtcacaggaagctgcttcggggggtgagcaaactttttaaaatgcagaaattatgatct

SEQ ID NO: 243090 - DNA, 120 bp, Artificial Sequence
  ENSG00000121797_16 (sequence is synthesized)
aaaacatctatttaatgtattttaaaataatttgtaagttgattttaaaaccaatttaactacattccaaattatagacagcccatttatatgggagtaacttttcaggctcattgcctc

SEQ ID NO: 243091 - DNA, 120 bp, Artificial Sequence
  ENSG00000121797_17 (sequence is synthesized)
gccggtgatgagaagaactagctagctggaagctgtgggaaaaagaggctccaggcactccattacgttggtgtgacttgtcttggaaatatactttgagcatttgccggaggagatcca

SEQ ID NO: 243092 - DNA, 120 bp, Artificial Sequence
  ENSG00000121797_18 (sequence is synthesized)
gggggtgcccccacagggagcacagtctcatcgggaatgacctgccatggcaaataaaatcaccagggcaagtcaagggagagaccagggaagagagtgatccagtctatattaaaaaag

SEQ ID NO: 243093 - DNA, 120 bp, Artificial Sequence
  ENSG00000121797_19 (sequence is synthesized)
gatgagaaaggttgaagaaaaagagaagaagggacagaaattctcttcacacatttgcagaagtaggtccggactctccatccacttctcctcctccgataggtaggacaggaatctcag

SEQ ID NO: 243094 - DNA, 120 bp, Artificial Sequence
  ENSG00000121797_20 (sequence is synthesized)
aggaaatggcatcatcttcccatgtttacagacacagcaatgaactcaaagaacaatcttatcaggattttccaaatgaaaacatggagcatatagagaataaagatccataaactcgta

SEQ ID NO: 243095 - DNA, 120 bp, Artificial Sequence
  ENSG00000121797_21 (sequence is synthesized)
agaaggccagaagacggctgtcaaagggtcaggagcagtctgatcaaaaggagggcatccactgtccggggccattcccacagctcccggatgctgggtctggaggctgcgcccttcccc

SEQ ID NO: 243096 - DNA, 120 bp, Artificial Sequence
  ENSG00000121797_22 (sequence is synthesized)
ttatatattttcttacatattgtgttcatgtaggcaagtcctgtttctgctaaaagaaggtaagttctaccaaggcggtgtcatgccagctttatttcccgtggcacctggcacactgct

SEQ ID NO: 243097 - DNA, 120 bp, Artificial Sequence
  ENSG00000121797_23 (sequence is synthesized)
aagcacttacatgcttaacaactagattgggaatggtgctgctctggggaagtgggcacacgttaaagaaatgtttatttcagtcttctgaaatagggaattactctggctaaaatgtag

SEQ ID NO: 243098 - DNA, 120 bp, Artificial Sequence
  ENSG00000121807_0 (sequence is synthesized)
accaataccctttattctctggaacatgaaacattctgttgtgctcatatcatgcaaattatcactagtaggagagcagagagtggaaatgttccaggtataaagacccacaagataaag

SEQ ID NO: 243099 - DNA, 120 bp, Artificial Sequence
  ENSG00000121807_1 (sequence is synthesized)
aagctcagagtcgttagaaacaggagcagatgtacagggtttgcctgactcacactcaaggttgcataagcaagatttcaaaattaatcctattctggagacctcaacccaatgtacaat

SEQ ID NO: 243100 - DNA, 120 bp, Artificial Sequence
  ENSG00000121807_2 (sequence is synthesized)
gttcctgactggaaaagaagaactatatttttctgattttttttttcaaatctttaccattagttgccctgtatctccgccttcactttctgcaggaaactttatttcctacttctgcat

SEQ ID NO: 243101 - DNA, 120 bp, Artificial Sequence
  ENSG00000121807_3 (sequence is synthesized)
gccaagtttctacctctagatctgtttggttcagttgctgagaagcctgacataccaggactgcctgagacaagccacaagctgaacagagaaagtggattgaacaaggacgcatttccc

SEQ ID NO: 243102 - DNA, 120 bp, Artificial Sequence
  ENSG00000121807_4 (sequence is synthesized)
cagtacatccacaacatgctgtccacatctcgttctcggtttatcagaaataccaacgagagcggtgaagaagtcaccaccttttttgattatgattacggtgctccctgtcataaattt

SEQ ID NO: 243103 - DNA, 120 bp, Artificial Sequence
  ENSG00000121807_5 (sequence is synthesized)
gacgtgaagcaaattggggcccaactcctgcctccgctctactcgctggtgttcatctttggttttgtgggcaacatgctggtcgtcctcatcttaataaactgcaaaaagctgaagtgc

SEQ ID NO: 243104 - DNA, 120 bp, Artificial Sequence
  ENSG00000121807_6 (sequence is synthesized)
ttgactgacatttacctgctcaacctggccatctctgatctgctttttcttattactctcccattgtgggctcactctgctgcaaatgagtgggtctttgggaatgcaatgtgcaaatta

SEQ ID NO: 243105 - DNA, 120 bp, Artificial Sequence
  ENSG00000121807_7 (sequence is synthesized)
ttcacagggctgtatcacatcggttattttggcggaatcttcttcatcatcctcctgacaatcgatagatacctggctattgtccatgctgtgtttgctttaaaagccaggacggtcacc

SEQ ID NO: 243106 - DNA, 120 bp, Artificial Sequence
  ENSG00000121807_8 (sequence is synthesized)
tttggggtggtgacaagtgtgatcacctggttggtggctgtgtttgcttctgtcccaggaatcatctttactaaatgccagaaagaagattctgtttatgtctgtggcccttattttcca

SEQ ID NO: 243107 - DNA, 120 bp, Artificial Sequence
  ENSG00000121807_9 (sequence is synthesized)
ggtgtcgaaacgagaagaagaggcatagggcagtgagagtcatcttcaccatcatgattgtttactttctcttctggactccctataatattgtcattctcctgaacaccttccaggaat

SEQ ID NO: 243108 - DNA, 120 bp, Artificial Sequence
  ENSG00000121807_10 (sequence is synthesized)
tcttcggcctgagtaactgtgaaagcaccagtcaactggaccaagccacgcaggtgacagagactcttgggatgactcactgctgcatcaatcccatcatctatgccttcgttggggaga

SEQ ID NO: 243109 - DNA, 120 bp, Artificial Sequence
  ENSG00000121807_11 (sequence is synthesized)
agttcagaaggtatctctcggtgttcttccgaaagcacatcaccaagcgcttctgcaaacaatgtccagttttctacagggagacagtggatggagtgacttcaacaaacacgccttcca

SEQ ID NO: 243110 - DNA, 120 bp, Artificial Sequence
  ENSG00000121807_12 (sequence is synthesized)
ctggggagcaggaagtctcggctggtttataaaacgaggagcagtttgattgttgtttataaagggagataacaatctgtatataacaacaaacttcaagggtttgttgaacaatagaaa

SEQ ID NO: 243111 - DNA, 120 bp, Artificial Sequence
  ENSG00000121807_13 (sequence is synthesized)
cctgtaaagcaggtgcccaggaacctcagggctgtgtgtactaatacagactatgtcacccaatgcatatccaacatgtgctcagggaataatccagaaaaactgtgggtagagactttg

SEQ ID NO: 243112 - DNA, 120 bp, Artificial Sequence
  ENSG00000121807_14 (sequence is synthesized)
actctccagaaagctcatctcagctcctgaaaaatgcctcattaccttgtgctaatcctctttttctagtcttcataatttcttcactcaatctctgattctgtcaatgtcttgaaatca

SEQ ID NO: 243113 - DNA, 120 bp, Artificial Sequence
  ENSG00000121807_15 (sequence is synthesized)
agggccagctggaggtgaagaagagaatgtgacaggcacagatgaatgggagtgagggatagtggggtcagggctgagaggagaaggagggagacatgagcatggctgagcctggacaaa

SEQ ID NO: 243114 - DNA, 120 bp, Artificial Sequence
  ENSG00000121807_16 (sequence is synthesized)
gacaaaggtgagcaaagggctcacgcattcagccaggagatgatactggtccttagccccatctgccacgtgtatttaaccttgaagggttcaccaggtcagggagagtttgggaactgc

SEQ ID NO: 243115 - DNA, 120 bp, Artificial Sequence
  ENSG00000121807_17 (sequence is synthesized)
aataacctgggagttttggtggagtccgatgattctcttttgcataagtgcatgacatatttttgctttattacagtttatctatggcacccatgcaccttacatttgaaatctatgaaa

SEQ ID NO: 243116 - DNA, 120 bp, Artificial Sequence
  ENSG00000121807_18 (sequence is synthesized)
tatcatgctccattgttcagatgcttcttaggccacatccccctgtctaaaaattcagaaaatttttgtttataaaagatgcattatctatgatatgctaatatatgtatatgcaatata

SEQ ID NO: 243117 - DNA, 120 bp, Artificial Sequence
  ENSG00000121807_19 (sequence is synthesized)
agttgctgagaagcctgacataccaggactgcctgagacaagccacaagctgcttctccagatttcaagaatctggctcagtgatatgaaatacaagacttgtgaaaagtgtcaattgca

SEQ ID NO: 243118 - DNA, 120 bp, Artificial Sequence
  ENSG00000121807_20 (sequence is synthesized)
accagtgtgtggaggtccaggagtgagaccaggaaagaatgtgaaagtgactacacaaggactcctcgatggtcgtggaaaaggaaagtcaattggcagagcccctgaagccagtcttca

SEQ ID NO: 243119 - DNA, 120 bp, Artificial Sequence
  ENSG00000121807_21 (sequence is synthesized)
ggacaaagaaggagcctagagacagaaatgacagatctctgctttggaaatcacacgtctggcttcacagatgtgtgattcacagtgtgaatcttggtgtctacgttaccaggcaggaag

SEQ ID NO: 243120 - DNA, 120 bp, Artificial Sequence
  ENSG00000121807_22 (sequence is synthesized)
gctgagaggagagagactccagctgggttggaaaacagtattttccaaactaccttccagttcctcatttttgaatacaggcatagagttcagactttttttaaatagtaaaaataaaat

SEQ ID NO: 243121 - DNA, 120 bp, Artificial Sequence
  ENSG00000121807_23 (sequence is synthesized)
taaagctgaaaactgcaacttgtaaatgtggtaaagagttagtttgagttactatcatgtcaaacgtgaaaatgctgtattagtcacagagataattctagctttgagcttaagaatttt

SEQ ID NO: 243122 - DNA, 120 bp, Artificial Sequence
  ENSG00000121807_24 (sequence is synthesized)
gagcaggtggtatgtttgggagactgctgagtcaacccaatagttgttgattggcaggagttggaagtgtgtgatctgtgggcacattagcctatgtgcatgcagcatctaagtaatgat

SEQ ID NO: 243123 - DNA, 120 bp, Artificial Sequence
  ENSG00000121807_25 (sequence is synthesized)
gtcgtttgaatcacagtatacgctccatcgctgtcatctcagctggatctccattctctcaggcttgctgccaaaagccttttgtgttttgttttgtatcattatgaagtcatgcgttta

SEQ ID NO: 243124 - DNA, 120 bp, Artificial Sequence
  ENSG00000121807_26 (sequence is synthesized)
atcacattcgagtgtttcagtgcttcgcagatgtccttgatgctcatattgttccctattttgccagtgggaactcctaaatcaagttggcttctaatcaaagcttttaaaccctattgg

SEQ ID NO: 243125 - DNA, 120 bp, Artificial Sequence
  ENSG00000121807_27 (sequence is synthesized)
taaagaatggaaggtggagaagctccctgaagtaagcaaagactttcctcttagtcgagccaagttaagaatgttcttatgttgcccagtgtgtttctgatctgatgcaagcaagaaaca

SEQ ID NO: 243126 - DNA, 120 bp, Artificial Sequence
  ENSG00000121807_28 (sequence is synthesized)
ctgggcttctagaaccaggcaacttgggaactagactcccaagctggactatggctctactttcaggccacatggctaaagaaggtttcagaaagaagtggggacagagcagaactttca

SEQ ID NO: 243127 - DNA, 120 bp, Artificial Sequence
  ENSG00000121807_29 (sequence is synthesized)
ccttcatatatttgtatgatcctaatgaatgcataaaatgttaagttgatggtgatgaaatgtaaatactgtttttaacaactatgatttggaaaataaatcaatgctataactatgttg

SEQ ID NO: 243128 - DNA, 120 bp, Artificial Sequence
  ENSG00000121851_0 (sequence is synthesized)
agaacgccaccgacttgaggaagcccagtacatttcaagttggtcgcggcttgggctccgctttggggaggggcagcaggtttattcactggatctctgaatacccaggccccctccacc

SEQ ID NO: 243129 - DNA, 120 bp, Artificial Sequence
  ENSG00000121851_1 (sequence is synthesized)
atggccagccggggtgggggccggggtcgtggccggggccagttgaccttcaacgtggaggccgtgggcattgggaaaggggatgctttgcccccacccaccctgcagccttctccactc

SEQ ID NO: 243130 - DNA, 120 bp, Artificial Sequence
  ENSG00000121851_2 (sequence is synthesized)
ttccctcccttggagttccgcccagtacctttgccctcaggcgaggaaggggaatatgtcctggcactgaagcaagagctacgaggagccatgaggcagctcccctacttcatccggcca

SEQ ID NO: 243131 - DNA, 120 bp, Artificial Sequence
  ENSG00000121851_3 (sequence is synthesized)
gctgtccccaagagagatgtggagcgttattcagacaaatatcagatgtcaggtccgattgacaatgccatcgattggaaccctgattggcggcgtctaccccgggagctaaagatccga

SEQ ID NO: 243132 - DNA, 120 bp, Artificial Sequence
  ENSG00000121851_4 (sequence is synthesized)
cctggagaagaaggaagaagaagtaacttcagaggaggatgaggagaaagaagaagaagaagagaaggaagaggaggaagaagaagagtatgatgaagaagaacatgaagaggaaactga

SEQ ID NO: 243133 - DNA, 120 bp, Artificial Sequence
  ENSG00000121851_5 (sequence is synthesized)
ttacatcatgtcatattttgacaatggagaggactttggtggtgacagtgatgacaatatggacgaggctatatactgaagaaggactctggaccctcgtgtctttctttaggatacaga

SEQ ID NO: 243134 - DNA, 120 bp, Artificial Sequence
  ENSG00000121851_6 (sequence is synthesized)
gagtaactgtacctattatttgtttcttcagacaagcaaatcatttggtcagagttcatataatctgtctgttccctggagatgggaatagaggatgatgacagtttattttctacactt

SEQ ID NO: 243135 - DNA, 120 bp, Artificial Sequence
  ENSG00000121851_7 (sequence is synthesized)
cccctccttccacatttgtatcacctttgctatcttggggaaagtgcaaaggacaaacatctcaattgtatgaagggagaaaggagaattgaaagaagaactggggttgttagagctgag

SEQ ID NO: 243136 - DNA, 120 bp, Artificial Sequence
  ENSG00000121851_8 (sequence is synthesized)
atgactgtacacatacccctgcccaatttatatagctctttgtggagataattaggggtgggagcagtttgaaggagtaagcctggttttatacttttaaataaagtgtttttatctgtc

SEQ ID NO: 243137 - DNA, 120 bp, Artificial Sequence
  ENSG00000121851_9 (sequence is synthesized)
ggcgtctaccccgggagctaaagatccgagtgcggaagctacagaaggaacgtgagtgtatctggaaaaaaggagggagaagagaggtttccttcatcagcctgagggccgaggctgctg

SEQ ID NO: 243138 - DNA, 120 bp, Artificial Sequence
  ENSG00000121851_10 (sequence is synthesized)
ctggtctcaccttccatcccagttcctatacccaatctaccaagtgttgttgctagatgtcatagtggccacatgagggcagcagagtgacatgttctttgcatgaggatgggctataaa

SEQ ID NO: 243139 - DNA, 120 bp, Artificial Sequence
  ENSG00000121851_11 (sequence is synthesized)
gctggcaaaatttgctctctgaaggtttaccttttgatccctccaccagggattacaattctgctccccaagaggccccctaagaccacagaagataaggaggaaacaatacagaaacta

SEQ ID NO: 243140 - DNA, 120 bp, Artificial Sequence
  ENSG00000121851_12 (sequence is synthesized)
gaggtgaggaggaagtgtgcatagagacctcctgagccctggatccattccctctctcttggcccatgtgtgcctcaatttttcccttctgtgaactgaacctgagtttctattcctatt

SEQ ID NO: 243141 - DNA, 120 bp, Artificial Sequence
  ENSG00000121851_13 (sequence is synthesized)
ccctttaccctctttatactagggttgctctcctcagagggttggcatgccaacagagatagtgccccccagggtaggggcttctctctacttcatctgccccccttctacaaactacag

SEQ ID NO: 243142 - DNA, 120 bp, Artificial Sequence
  ENSG00000121851_14 (sequence is synthesized)
ctggaagagatgtctcaggcctggaatggtgtgactgagaggaaaggggtctggtacacaggaaggaaggtgaatgccaaattgacttttactttttttttttccatttcaggaaactga

SEQ ID NO: 243143 - DNA, 120 bp, Artificial Sequence
  ENSG00000121853_0 (sequence is synthesized)
cagcgcagtcacgtcccagagcctgttcagctgagccggcagcatgtggaacgcgacgcccagcgaagagccggggttcaacctcacactggccgacctggactgggatgcttcccccgg

SEQ ID NO: 243144 - DNA, 120 bp, Artificial Sequence
  ENSG00000121853_1 (sequence is synthesized)
caacgactcgctgggcgacgagctgctgcagctcttccccgcgccgctgctggcgggcgtcacagccacctgcgtggcactcttcgtggtgggcatcgctggcaacctgctcaccatgct

SEQ ID NO: 243145 - DNA, 120 bp, Artificial Sequence
  ENSG00000121853_2 (sequence is synthesized)
ggtggtgtcgcgcttccgcgagctgcgcaccaccaccaacctctacctgtccagcatggccttctccgatctgctcatcttcctctgcatgcccctggacctcgttcgcctctggcagta

SEQ ID NO: 243146 - DNA, 120 bp, Artificial Sequence
  ENSG00000121853_3 (sequence is synthesized)
ccggccctggaacttcggcgacctcctctgcaaactcttccaattcgtcagtgagagctgcacctacgccacggtgctcaccatcacagcgctgagcgtcgagcgctacttcgccatctg

SEQ ID NO: 243147 - DNA, 120 bp, Artificial Sequence
  ENSG00000121853_4 (sequence is synthesized)
cttcccactccgggccaaggtggtggtcaccaaggggcgggtgaagctggtcatcttcgtcatctgggccgtggccttctgcagcgccgggcccatcttcgtgctagtcggggtggagca

SEQ ID NO: 243148 - DNA, 120 bp, Artificial Sequence
  ENSG00000121853_5 (sequence is synthesized)
cgagaacggcaccgacccttgggacaccaacgagtgccgccccaccgagtttgcggtgcgctctggactgctcacggtcatggtgtgggtgtccagcatcttcttcttccttcctgtctt

SEQ ID NO: 243149 - DNA, 120 bp, Artificial Sequence
  ENSG00000121853_6 (sequence is synthesized)
ctgtctcacggtcctctacagtctcatcggcaggaagctgtggcggaggaggcgcggcgatgctgtcgtgggtgcctcgctcagggaccagaaccacaagcaaaccgtgaaaatgctggc

SEQ ID NO: 243150 - DNA, 120 bp, Artificial Sequence
  ENSG00000121853_7 (sequence is synthesized)
tgtagtggtgtttgccttcatcctctgctggctccccttccacgtagggcgatatttattttccaaatcctttgagcctggctccttggagattgctcagatcagccagtactgcaacct

SEQ ID NO: 243151 - DNA, 120 bp, Artificial Sequence
  ENSG00000121853_8 (sequence is synthesized)
cgtgtcctttgtcctcttctacctcagtgctgccatcaaccccattctgtacaacatcatgtccaagaagtaccgggtggcagtgttcagacttctgggattcgaacccttctcccagag

SEQ ID NO: 243152 - DNA, 120 bp, Artificial Sequence
  ENSG00000121853_9 (sequence is synthesized)
aaagctctccactctgaaagatgaaagttctcgggcctggacagaatctagtattaatacatgacctagcacattgcgagtacagtcaccgcttattactctaaaccggaagacatagca

SEQ ID NO: 243153 - DNA, 120 bp, Artificial Sequence
  ENSG00000121853_10 (sequence is synthesized)
cagcagaacttgggaggaagctgaaggttaattttggaattaggaacacatagatccagaaacatctgggagggaaaaaagatatcatttgtagggtgtgagcagtttgatttgatcgca

SEQ ID NO: 243154 - DNA, 120 bp, Artificial Sequence
  ENSG00000121853_11 (sequence is synthesized)
caattatcagtgctctcatacactatttctgcatattcactgtctatgattttgcattctgctgcgggtgctggtgagggctttgcaattcagagaaaggaggaagagcagagtgagcaa

SEQ ID NO: 243155 - DNA, 120 bp, Artificial Sequence
  ENSG00000121853_12 (sequence is synthesized)
ggtaggtaaatacaaatttgctttgctttttcataatgatcaaaattatttggttaaaagaatgacattacaatacaaaatttaaaatgtaacttttaaaaactagctattttcataaag

SEQ ID NO: 243156 - DNA, 120 bp, Artificial Sequence
  ENSG00000121853_13 (sequence is synthesized)
ctctagagcagtgctatccaagagaaatataacatgaggcacgtgagcaatcagtacaaaaattattaaaaaggaatttacattcttttttttcacactaagtctttgaaatctggcatg

SEQ ID NO: 243157 - DNA, 120 bp, Artificial Sequence
  ENSG00000121853_14 (sequence is synthesized)
ctttttacacttacagaaaccctcaatttggacactaagttttcattggtaatatttgatgtatttagatttcataaaatttacagataaaaagtagattcaacaatctaagttgtctaa

SEQ ID NO: 243158 - DNA, 120 bp, Artificial Sequence
  ENSG00000121853_15 (sequence is synthesized)
gcacacttaaaagttttccagtaactgaaacaacggtaaacctttaaacttaaaattaattaaagttaaaaattcagttcttcagttgcactagtcacatttcaagtatccagtagctcg

SEQ ID NO: 243159 - DNA, 120 bp, Artificial Sequence
  ENSG00000121853_16 (sequence is synthesized)
aggttaccactcagaacagtacagctctagagtatatacaaaacttatcattcaccttatatgaaatgtttaaaaataaatactgtttccctaaaatgtttttatagtgatgttcacaca

SEQ ID NO: 243160 - DNA, 120 bp, Artificial Sequence
  ENSG00000121853_17 (sequence is synthesized)
gcagaattttagagtgatgaatactaaaaatcacacctaaatgtcctgttctgtatgctcagaagagaatgaatatgaaatgtgtaacatacatttttaaattaagttgagttgcatgtg

SEQ ID NO: 243161 - DNA, 120 bp, Artificial Sequence
  ENSG00000121853_18 (sequence is synthesized)
ttaatattcaggaaatgaaactttttaaaacaattatgggtaatcacaaactgcctcatatggcttaacaaaaattttgaagtcaattataaggcttcgatttgtgaataagggaacaat

SEQ ID NO: 243162 - DNA, 120 bp, Artificial Sequence
  ENSG00000121853_19 (sequence is synthesized)
ttgtaacgtgctctggcaagattacaagaaagttaatgaatatagaaatttttcaagtgatgaaggcaggcttatgtgaaaaactgagaatcccctaaatgctactgcttattgatatta

SEQ ID NO: 243163 - DNA, 120 bp, Artificial Sequence
  ENSG00000121853_20 (sequence is synthesized)
aaaactttcaaaaatcttatagccatttatttttaaatgtctatgctgtgtcctgtctccaaattagttttgctgcttatatcccattgcttatctgatagatatgattacttggacttc

SEQ ID NO: 243164 - DNA, 120 bp, Artificial Sequence
  ENSG00000121853_21 (sequence is synthesized)
cagaccctctcttaattctaattatgaatgaatagacatcttcaactaaatattatacatttggttataagtatataattttcatttatattgacattgcttcctatacagtcaactctt

SEQ ID NO: 243165 - DNA, 120 bp, Artificial Sequence
  ENSG00000121853_22 (sequence is synthesized)
tgcatactaaaggtattaacccaaaaataactttttcataatcctgtgcaatacttagtcatataagcagttccttcatgaagttattggttcacaactatggaatggatggaaccattt

SEQ ID NO: 243166 - DNA, 120 bp, Artificial Sequence
  ENSG00000121853_23 (sequence is synthesized)
agggaaattcctgccatgactgttttttccttcatcaaaaagaaagataatcatgatgaaataatcgattgattatttagtttggaaacatccaaacacaatcataattagaatcatttc

SEQ ID NO: 243167 - DNA, 120 bp, Artificial Sequence
  ENSG00000121853_24 (sequence is synthesized)
tctagaaaaatatttctgagattcgttctgacactaaaactgcaccaccaatgtggtctaaatacagaacactagcaagctgattatgtagttaattcctaagagtgcatcaatattaaa

SEQ ID NO: 243168 - DNA, 120 bp, Artificial Sequence
  ENSG00000121858_0 (sequence is synthesized)
gaccggctgcctggctgacttacagcagtcagactctgacaggatcatggctatgatggaggtccaggggggacccagcctgggacagacctgcgtgctgatcgtgatcttcacagtgct

SEQ ID NO: 243169 - DNA, 120 bp, Artificial Sequence
  ENSG00000121858_1 (sequence is synthesized)
cctgcagtctctctgtgtggctgtaacttacgtgtactttaccaacgagctgaagcagatgcaggacaagtactccaaaagtggcattgcttgtttcttaaaagaagatgacagttattg

SEQ ID NO: 243170 - DNA, 120 bp, Artificial Sequence
  ENSG00000121858_2 (sequence is synthesized)
ggaccccaatgacgaagagagtatgaacagcccctgctggcaagtcaagtggcaactccgtcagctcgttagaaagatgattttgagaacctctgaggaaaccatttctacagttcaaga

SEQ ID NO: 243171 - DNA, 120 bp, Artificial Sequence
  ENSG00000121858_3 (sequence is synthesized)
aaagcaacaaaatatttctcccctagtgagagaaagaggtcctcagagagtagcagctcacataactgggaccagaggaagaagcaacacattgtcttctccaaactccaagaatgaaaa

SEQ ID NO: 243172 - DNA, 120 bp, Artificial Sequence
  ENSG00000121858_4 (sequence is synthesized)
ggctctgggccgcaaaataaactcctgggaatcatcaaggagtgggcattcattcctgagcaacttgcacttgaggaatggtgaactggtcatccatgaaaaagggttttactacatcta

SEQ ID NO: 243173 - DNA, 120 bp, Artificial Sequence
  ENSG00000121858_5 (sequence is synthesized)
ttcccaaacatactttcgatttcaggaggaaataaaagaaaacacaaagaacgacaaacaaatggtccaatatatttacaaatacacaagttatcctgaccctatattgttgatgaaaag

SEQ ID NO: 243174 - DNA, 120 bp, Artificial Sequence
  ENSG00000121858_6 (sequence is synthesized)
tgctagaaatagttgttggtctaaagatgcagaatatggactctattccatctatcaagggggaatatttgagcttaaggaaaatgacagaatttttgtttctgtaacaaatgagcactt

SEQ ID NO: 243175 - DNA, 120 bp, Artificial Sequence
  ENSG00000121858_7 (sequence is synthesized)
acctcaaagtgactattcagttttcaggatgatacactatgaagatgtttcaaaaaatctgaccaaaacaaacaaacagaaaacagaaaacaaaaaaacctctatgcaatctgagtagag

SEQ ID NO: 243176 - DNA, 120 bp, Artificial Sequence
  ENSG00000121858_8 (sequence is synthesized)
cagccacaaccaaaaaattctacaacacacactgttctgaaagtgactcacttatcccaagagaatgaaattgctgaaagatctttcaggactctacctcatatcagtttgctagcagaa

SEQ ID NO: 243177 - DNA, 120 bp, Artificial Sequence
  ENSG00000121858_9 (sequence is synthesized)
atctagaagactgtcagcttccaaacattaatgcaatggttaacatcttctgtctttataatctactccttgtaaagactgtagaagaaagagcaacaatccatctctcaagtagtgtat

SEQ ID NO: 243178 - DNA, 120 bp, Artificial Sequence
  ENSG00000121858_10 (sequence is synthesized)
tagtgtatcacagtagtagcctccaggtttccttaagggacaacatccttaagtcaaaagagagaagaggcaccactaaaagatcgcagtttgcctggtgcagtggctcacacctgtaat

SEQ ID NO: 243179 - DNA, 86 bp, Artificial Sequence
  ENSG00000121858_11 (sequence is synthesized)
cacacctgtaatcccaacattttgggaacccaaggtgggtagatcacgagatcaagagatcaagaccataggtacaaaaattagct

SEQ ID NO: 243180 - DNA, 120 bp, Artificial Sequence
  ENSG00000121858_12 (sequence is synthesized)
ttgaacccgggaggcagaggttgcagtgtggtgagatcatgccactacactccagcctggcgacagagcgagacttggtttcaaaaaaaaaaaaaaaaaaaacttcagtaagtacgtgtt

SEQ ID NO: 243181 - DNA, 120 bp, Artificial Sequence
  ENSG00000121858_13 (sequence is synthesized)
tcaaaaaaaaaaaaaaaaaaaacttcagtaagtacgtgttatttttttcaataaaattctattacagtatgtcatgtttgctgtagtgctcatatttattgttgtttttgttttagtact

SEQ ID NO: 243182 - DNA, 120 bp, Artificial Sequence
  ENSG00000121858_14 (sequence is synthesized)
cacttgtttcataatatcaagattactaaaaatgggggaaaagacttctaatctttttttcataatatctttgacacatattacagaagaaataaatttcttacttttaatttaatatga

SEQ ID NO: 243183 - DNA, 120 bp, Artificial Sequence
  ENSG00000121858_15 (sequence is synthesized)
agaaagaggtcctcagagagtagcagctcacataactgggaccagaggaagaagcaacacattgtcttctccaaagacgccatctgcttggatgtgcctttgactctggagagctgagaa

SEQ ID NO: 243184 - DNA, 120 bp, Artificial Sequence
  ENSG00000121858_16 (sequence is synthesized)
agatcaaggggggacccaaagagtccaaaaggaatggcaagaacttctgagatttaggcctaaagaaatagatacgtttatttcggtttccttctggattgtccacttaagttcaccagc

SEQ ID NO: 243185 - DNA, 120 bp, Artificial Sequence
  ENSG00000121858_17 (sequence is synthesized)
gttgtgaatagttctccattctccttctctgtgttctcatccactcatccatcctctgatctgctgctccgtatctcaagccacttgttgattctacttccctctttacattggcagcta

SEQ ID NO: 243186 - DNA, 120 bp, Artificial Sequence
  ENSG00000121858_18 (sequence is synthesized)
taatgtctgggcagcagacagggtcattgctgccatcttgaagtctaccttgctgagtctaccctgctgacctcaagccccatcaaggactggttgaccctggcctagacaaccaccgtg

SEQ ID NO: 243187 - DNA, 120 bp, Artificial Sequence
  ENSG00000121858_19 (sequence is synthesized)
tttgtaacagcaccaagagcagtcaccatggaaatccacttttcagaaccaagggcttctggagctgaagaacaggcacccagtgcaagagctttcttttcagaggcacgcaaatgaaaa

SEQ ID NO: 243188 - DNA, 120 bp, Artificial Sequence
  ENSG00000121858_20 (sequence is synthesized)
taatccccacacgctaccttctgcccccaatgcccaagtgtggttagttagagaatatagcctcagcctatgatatgctgcaggaaactcatattttgaagtggaaaggatgggaggagg

SEQ ID NO: 243189 - DNA, 120 bp, Artificial Sequence
  ENSG00000121858_21 (sequence is synthesized)
agacgtatcgtattaattatcattcttggaataaccacagcacctcacgtcaacccgccatgtgtctagtcaccagcattggccaagttctataggagaaactaccaaaattcatgatgc

SEQ ID NO: 243190 - DNA, 120 bp, Artificial Sequence
  ENSG00000121858_22 (sequence is synthesized)
aagaaacatgtgagggtggagagagtgactggggcttcctctctggatttctattgttcagaaatcaatatttatgcataaaaaggtctagaaagagaaacaccaaaatgacaatgtgat

SEQ ID NO: 243191 - DNA, 120 bp, Artificial Sequence
  ENSG00000121858_23 (sequence is synthesized)
ctctagatggtatgattatgggtactttttttcctttttatttttctatattttacaaattttctacagggaatgttataaaaatatccatgctatccatgtataattttcatacagatt

SEQ ID NO: 243192 - DNA, 120 bp, Artificial Sequence
  ENSG00000121858_24 (sequence is synthesized)
taaagaacacagcatttttatatagtcttatgagaaaacaaccatactcaaaattatgcacacacacagtctgatctcacccctgtaaacaagagatatcatccaaaggttaagtaggag

SEQ ID NO: 243193 - DNA, 120 bp, Artificial Sequence
  ENSG00000121858_25 (sequence is synthesized)
gtgagaatatagctgctattagtggttgttttgttttgtttttgtgatttacttatttagtttttggagggttttttttttcttttagaaaagtgttctttacttttccatgcttccctg

SEQ ID NO: 243194 - DNA, 120 bp, Artificial Sequence
  ENSG00000121858_26 (sequence is synthesized)
cttgcctgtgtatcctgaatgtatccaggctttataaactcctgggtaataatgtagctacattaacttgttaacctcccatccacttatacccaggaccttactcaattttccaggttc

SEQ ID NO: 243195 - DNA, 120 bp, Artificial Sequence
  ENSG00000121864_0 (sequence is synthesized)
caacgagttgtagccgcggagagcaggcgtcgatgctggcgcccaaagcctccagcctgagagtcgcctcactcgtgtgacgacagagtttcactcctgttacccaggctggaggacaat

SEQ ID NO: 243196 - DNA, 65 bp, Artificial Sequence
  ENSG00000121864_1 (sequence is synthesized)
cgacagagtttcactcctgttacccaggctggaggacaatgatgtgatctcgggtcaccacagat

SEQ ID NO: 243197 - DNA, 66 bp, Artificial Sequence
  ENSG00000121864_2 (sequence is synthesized)
acggggtttccccatgttggtcaggctagtcttgaattcccgacctcaggtgatctgtgaggcatt

SEQ ID NO: 243198 - DNA, 120 bp, Artificial Sequence
  ENSG00000121864_3 (sequence is synthesized)
gaggcattttttactgtctacagaaacttattgtaattcatttttcctcactccagtagtaagaattataccaaattgaaaagatatgaatgagtatcctaaaaaaagaaaaaggaagac

SEQ ID NO: 243199 - DNA, 120 bp, Artificial Sequence
  ENSG00000121864_4 (sequence is synthesized)
tctacacccttctcgttattcagattcctctggaataagcagaattgcagatggattcaatggaattttctctgatcattgttacagtgtctgttctatgagacagccagatttaaaata

SEQ ID NO: 243200 - DNA, 120 bp, Artificial Sequence
  ENSG00000121864_5 (sequence is synthesized)
ttttgacaacaaagatgatgattctgataccgagacgtcaaatgacttgccaaaatttgcagatggaatcaaggccagaaacagaaatcagaactacctggttcccagtcctgtacttag

SEQ ID NO: 243201 - DNA, 120 bp, Artificial Sequence
  ENSG00000121864_6 (sequence is synthesized)
aattctagaccacactgccttttctacagaaaaatctgctgatattgtaatttgtgatgaagagtgtgactcacctgaatcagtcaaccagcaaacccaagaggagagtcctatagaagt

SEQ ID NO: 243202 - DNA, 120 bp, Artificial Sequence
  ENSG00000121864_7 (sequence is synthesized)
tcacactgctgaagatgttccaattgctgtagaagtgcatgcgatttctgaggattatgatatagagacagaaaacaattcctctgagagtctccaagaccaaactgatgaagaaccgcc

SEQ ID NO: 243203 - DNA, 120 bp, Artificial Sequence
  ENSG00000121864_8 (sequence is synthesized)
agctaaactttgtaaaattcttgacaagagccaagctttgaatgtgactgcccagcagaaatggcctttactgagagctaatagcagtggcctctataaatgtgaactttgtgagtttaa

SEQ ID NO: 243204 - DNA, 120 bp, Artificial Sequence
  ENSG00000121864_9 (sequence is synthesized)
cagcaaatatttttctgacttaaagcagcatatgatcctgaagcataaacgtactgattcaaatgtgtgtcgagtatgcaaggaaagtttctctaccaatatgcttctgatagaacatgc

SEQ ID NO: 243205 - DNA, 120 bp, Artificial Sequence
  ENSG00000121864_10 (sequence is synthesized)
caaactgcatgaagaggatccctacatttgtaaatactgtgattataagacagtaatttttgagaacctcagccagcacattgcagacacccattttagtgatcacctctattggtgtga

SEQ ID NO: 243206 - DNA, 120 bp, Artificial Sequence
  ENSG00000121864_11 (sequence is synthesized)
acagtgtgatgtacagttctcctcaagcagtgaactctacctacatttccaggagcacagctgtgatgaacagtacttgtgtcagttctgtgaacatgaaactaatgatccagaagactt

SEQ ID NO: 243207 - DNA, 120 bp, Artificial Sequence
  ENSG00000121864_12 (sequence is synthesized)
gcatagccatgtggtaaatgagcatgcatgtaaattaatagagttaagtgataagtataacaatggtgaacatggacagtatagcctcttaagcaaaattacctttgacaaatgtaaaaa

SEQ ID NO: 243208 - DNA, 120 bp, Artificial Sequence
  ENSG00000121864_13 (sequence is synthesized)
cttctttgtatgtcaagtatgtggttttcggagtagacttcacacaaatgttaacaggcatgttgctattgaacatacaaaaatttttcctcatgtttgtgatgactgtgggaaaggctt

SEQ ID NO: 243209 - DNA, 120 bp, Artificial Sequence
  ENSG00000121864_14 (sequence is synthesized)
ttcaagtatgctagaatattgcaagcatttaaattcacatttatctgaagggatttatttatgtcaatattgtgaatattcaacaggacaaattgaagatcttaaaattcatctagattt

SEQ ID NO: 243210 - DNA, 120 bp, Artificial Sequence
  ENSG00000121864_15 (sequence is synthesized)
caagcattcagctgacttgcctcataaatgtagtgactgcttgatgaggtttggaaatgaaagggaattaataagtcaccttccagtccatgagacaacttgattattctctttaactta

SEQ ID NO: 243211 - DNA, 120 bp, Artificial Sequence
  ENSG00000121864_16 (sequence is synthesized)
cagaatgttagtttaaaataataaattcatcctttttttggagatgattaaatggatgattgtaaacacaacttatgaaatctgcctttaacaagtaacttttttaaattataaaatttt

SEQ ID NO: 243212 - DNA, 120 bp, Artificial Sequence
  ENSG00000121864_17 (sequence is synthesized)
attggcattgctccattttctgtatataaatatatctttaatgtggtattttcaattgcgtgatagtttgtagtttcaaccactcttggtgactgtcatcctgtttcttccatattctct

SEQ ID NO: 243213 - DNA, 120 bp, Artificial Sequence
  ENSG00000121864_18 (sequence is synthesized)
gatttcatgaattgaaaagaaacaaatgtattgaagaagtgagctacagttttccttccttaaccatgggtgctagtaactttttaaaactcaagacaagattagttttttatgtgtgaa

SEQ ID NO: 243214 - DNA, 120 bp, Artificial Sequence
  ENSG00000121864_19 (sequence is synthesized)
gtcattaaattattacacgaccagaactaaaatgcaatatacagttaagtccacggatactcccattaatgagaaataacactaggaagccactattacaggaagaaaagatttggtttt

SEQ ID NO: 243215 - DNA, 120 bp, Artificial Sequence
  ENSG00000121864_20 (sequence is synthesized)
catggcagtctgtttttttaaaaaaaaatttttgagccactatctattgttgaatattttaagatgggatgagggaggaactaataagggcttacacaataaaaaataactatatcataa

SEQ ID NO: 243216 - DNA, 120 bp, Artificial Sequence
  ENSG00000121864_21 (sequence is synthesized)
ctcattcataacttgatgtttcattttctgttgaggaaccataaattcattcacagacttaatatttttttcttagagatggtctcgttctgttgtccaggatggagtgcagtggttgat

SEQ ID NO: 243217 - DNA, 120 bp, Artificial Sequence
  ENSG00000121864_22 (sequence is synthesized)
catagctcccgggctgtagtctcccaggctcgagcaatcctcccacttcaccctcctgcatagctaggactacaggcatgtggcaccatgcccgctaagtttttaaatttcttgtagaga

SEQ ID NO: 243218 - DNA, 89 bp, Artificial Sequence
  ENSG00000121864_23 (sequence is synthesized)
ggactcactgggattataggcatgagccattatgcctgactcttgcccaaatttctgatgtcaaattgttcattgacagaaaacccact

SEQ ID NO: 243219 - DNA, 120 bp, Artificial Sequence
  ENSG00000121864_24 (sequence is synthesized)
aatttctgatgtcaaattgttcattgacagaaaacccactgaagtatttaaagttaggaagatctgggagataggggttgctggcatgaaaatgtataacttacaacatttattaataaa

SEQ ID NO: 243220 - DNA, 120 bp, Artificial Sequence
  ENSG00000121864_25 (sequence is synthesized)
cctacctagcagaaatttatggtctcacagttgtgaaggccagacattcaaaatggagttattggcagttggttccttctgagggttgtgggggaaggatctgtttcaggtctgtccttg

SEQ ID NO: 243221 - DNA, 120 bp, Artificial Sequence
  ENSG00000121864_26 (sequence is synthesized)
ggaaggatctgtttcaggtctgtccttggcttgtagatggatagcctcatgttcacatggtgttctccctgtgtgcaagtctgtcccccaaatttcctctttttttttttttttttgctt

SEQ ID NO: 243222 - DNA, 120 bp, Artificial Sequence
  ENSG00000121864_27 (sequence is synthesized)
tacaggcatgaggcaccgccccaggccaaatttcttgtttttataaagactccagtcatattgattggattagggcccctcccaatgtcctccttttaacttaaagacctgatctccaaa

SEQ ID NO: 243223 - DNA, 120 bp, Artificial Sequence
  ENSG00000121864_28 (sequence is synthesized)
taaggtcatattctaaggtgctgaggtttaggacttcaacatatgaatttgggagggaacacaattgagtagcagagtctgaaacagcactataaagaagatagaattatatgtatcatt

SEQ ID NO: 243224 - DNA, 120 bp, Artificial Sequence
  ENSG00000121864_29 (sequence is synthesized)
gccctcaaatttaacaagcactgctaacattattttttaggtttattgatataagtggaagatcaatttatgaccaatgattttcccacttcaagaatttagtctgtttggacaatggtg

SEQ ID NO: 243225 - DNA, 120 bp, Artificial Sequence
  ENSG00000121864_30 (sequence is synthesized)
gctgcaagtattcttagaaggtattatttttatccccactattttgttgtatgtgcatacctgtgttcctagcaactcacattccatctaattataacattcctgttacggctgataaca

SEQ ID NO: 243226 - DNA, 120 bp, Artificial Sequence
  ENSG00000121864_31 (sequence is synthesized)
aatgtttctcagaagacttaaaattgtaacagtttaaattgtaagataaccttagaaagcatctggtctaaaccctccagttttctaagttccttgcagaaatagaaatgtagatagcta

SEQ ID NO: 243227 - DNA, 120 bp, Artificial Sequence
  ENSG00000121864_32 (sequence is synthesized)
tgaggccaagtacatataaccagttatgtctcatgggagtgggatccaggttatctggtttactgtctagtgatgtttccattacatcatgttacataaacctaacctttctccctggga

SEQ ID NO: 243228 - DNA, 120 bp, Artificial Sequence
  ENSG00000121864_33 (sequence is synthesized)
tgttttttgtgactacttcacctaacaattaacctagttgttgataattttgtttttatgctttttatacatctagctccaggaattggatttttggaaaaacaccttaagtaatgcctt

SEQ ID NO: 243229 - DNA, 120 bp, Artificial Sequence
  ENSG00000121864_34 (sequence is synthesized)
ggtttgtttgttttcttttaatctatttgctgctttacatttggatcaagtgttagtaattgaaaagattgcaggctgggcgtggtggcccacgcctctaatcccagcactttgtgggtg

SEQ ID NO: 243230 - DNA, 120 bp, Artificial Sequence
  ENSG00000121864_35 (sequence is synthesized)
aaaaaaagaaaagaagaaaagattgcaatgcagctactcaagagacatatatccaagtttcagaaccatataattttgtacttttttttttttcagacagtcttgctctgttgcccaggc

SEQ ID NO: 243231 - DNA, 66 bp, Artificial Sequence
  ENSG00000121864_36 (sequence is synthesized)
cttttttttttttcaggcaacctccacctctcaggtgtaagcaattctcctgccttagcctcccaa

SEQ ID NO: 243232 - DNA, 120 bp, Artificial Sequence
  ENSG00000121864_37 (sequence is synthesized)
actgcacccggcataattttggactttttgatgaatctgcagcttcaggacctatcccaatgacagtttgtcccacaaaaccttttcgccttggcccagttttcaaatcaatgattgacc

SEQ ID NO: 243233 - DNA, 120 bp, Artificial Sequence
  ENSG00000121864_38 (sequence is synthesized)
aaatcaatgattgaccataaattgcttgaagtagttggtctttatttatttattttttgagatggagccttgctctgtcgcccagactggaatgcagtggcgtgatcttggctcgctgca

SEQ ID NO: 243234 - DNA, 78 bp, Artificial Sequence
  ENSG00000121864_39 (sequence is synthesized)
gtctttatttttaacttaaagaacttcagaaaaacaaacctacctaaaaaaattaacactcctggttttgttttgttt

SEQ ID NO: 243235 - DNA, 120 bp, Artificial Sequence
  ENSG00000121864_40 (sequence is synthesized)
cctacctaaaaaaattaacactcctggttttgttttgttttttgttttgttttacttcagagacagacattttcactgtatacttgtgacttgcaccacaattcaagtctgagattacct

SEQ ID NO: 243236 - DNA, 120 bp, Artificial Sequence
  ENSG00000121864_41 (sequence is synthesized)
aactgatgatgtttattaacacttcagtagaattcttcgcagcagtgaacagtagtgacaggtcattatgtttttcttgctgttttaaatcttcatcttacaatgagttattttgaaatt

SEQ ID NO: 243237 - DNA, 120 bp, Artificial Sequence
  ENSG00000121864_42 (sequence is synthesized)
ccaaaacatttccctgtattccagaaattgaaaatggttgttcactaaaaagcctcttcttttcctgcttataaatttgccaattttgccattttaaatcacctttcttacgtttctctg

SEQ ID NO: 243238 - DNA, 120 bp, Artificial Sequence
  ENSG00000121864_43 (sequence is synthesized)
aattgtatattatttgtcaatttcacagtttctataatctattgtttgctgaattgttacagtcttttgtttttaatagactagcactattcctaattattaaatctgatttacaaagca

SEQ ID NO: 243239 - DNA, 80 bp, Artificial Sequence
  ENSG00000121864_44 (sequence is synthesized)
gaggtgcgcggcgcaggcgcggagcgtggcggccagggcagtgcggccgcggagcctaggccaggggcctggcgctcagg

SEQ ID NO: 243240 - DNA, 120 bp, Artificial Sequence
  ENSG00000121864_45 (sequence is synthesized)
cgccgccgtgcgtccgcgggaaggaccgcgcggcccctccgcctgcgctctcggccgccgccgcctctgcgtgggccggccgggagggcctcgggggactgactggcattttttactgtc

SEQ ID NO: 243241 - DNA, 120 bp, Artificial Sequence
  ENSG00000121864_46 (sequence is synthesized)
aaataggaaaatgatttttttcttgaaaattatttatattctgatctgtgtgatgagtacttttttctggaagccaggaggccgatacatatttgtgacaatatttttttaaaggaaatg

SEQ ID NO: 243242 - DNA, 120 bp, Artificial Sequence
  ENSG00000121864_47 (sequence is synthesized)
cagaattgcagatggattcaatggaattttctctgatcattgttacagtgtctgttctatgagacagccagatttaaaatattttgacaacaaagatggagtctcgctttgtcgcccagg

SEQ ID NO: 243243 - DNA, 120 bp, Artificial Sequence
  ENSG00000121864_48 (sequence is synthesized)
atctgaaatacaaacagaggcatcatttaacacttttcttataccatagattttcaggtggctcacatatttcatattgccaataaattcttcagttagaatttttataacgtcattaac

SEQ ID NO: 243244 - DNA, 120 bp, Artificial Sequence
  ENSG00000121871_0 (sequence is synthesized)
aagccgggattttgcctgcgatgcgcggcgagaggactgcggcggctgatttacacagttggcgcggaggaggggccgggggtgcgggggggacgcgctggcggagctccggcgatgggc

SEQ ID NO: 243245 - DNA, 120 bp, Artificial Sequence
  ENSG00000121871_1 (sequence is synthesized)
tgatctgggggctcccgagcgccgctcccttggtgcgcgatttgggggcggctgatggatttgcattcaggttccagccctgcgtttcctatattgactccttatacacgacctggcgct

SEQ ID NO: 243246 - DNA, 120 bp, Artificial Sequence
  ENSG00000121871_2 (sequence is synthesized)
ccagtttaggaggagacgttgttttgtaatcaaccacgaacgatgaaaccttccatagctgagatgcttcacagaggaaggatgttgtggataattcttctaagcacaattgctctagga

SEQ ID NO: 243247 - DNA, 120 bp, Artificial Sequence
  ENSG00000121871_3 (sequence is synthesized)
tggactaccccgattcccctaatagaggactcagaggaaatagatgagccctgttttgatccatgctactgtgaagttaaagaaagcctctttcatatacattgtgacagtaaaggattt

SEQ ID NO: 243248 - DNA, 120 bp, Artificial Sequence
  ENSG00000121871_4 (sequence is synthesized)
acaaatattagtcagattaccgagttctggtcaagaccttttaaactgtatctgcagaggaattctatgaggaaattatataccaacagttttcttcatttgaataatgctgtgtctatt

SEQ ID NO: 243249 - DNA, 120 bp, Artificial Sequence
  ENSG00000121871_5 (sequence is synthesized)
aatcttgggaacaatgcattgcaggacattcagactggagctttcaatggtcttaagattttaaagagactatatctacatgaaaacaaactagatgtcttcagaaatgacaccttcctt

SEQ ID NO: 243250 - DNA, 120 bp, Artificial Sequence
  ENSG00000121871_6 (sequence is synthesized)
ggcttggaaagtctagaatatctgcaggcagattacaatgtcattaaacgtattgagagtggggcatttcggaacctaagtaaattgagggttctgattttaaatgataatctcatcccc

SEQ ID NO: 243251 - DNA, 120 bp, Artificial Sequence
  ENSG00000121871_7 (sequence is synthesized)
atgcttccaaccaatttatttaaggctgtctctttaacccatttggacctacgtggaaataggttaaaggttcttttttaccgaggaatgctagatcacattggcagaagcctgatggag

SEQ ID NO: 243252 - DNA, 120 bp, Artificial Sequence
  ENSG00000121871_8 (sequence is synthesized)
ctccagctggaagaaaacccttggaactgtacatgtgaaattgtacaactgaagagttggctggaacgcattccttatactgccctggtgggagacattacctgtgagacccctttccac

SEQ ID NO: 243253 - DNA, 120 bp, Artificial Sequence
  ENSG00000121871_9 (sequence is synthesized)
ttccatggaaaggacctacgagaaatcaggaagacagaactctgtcccttgttgtctgactctgaggtagaggctagtttgggaattccacattcgtcatcaagtaaggagaatgcatgg

SEQ ID NO: 243254 - DNA, 120 bp, Artificial Sequence
  ENSG00000121871_10 (sequence is synthesized)
ccaactaagccttcctcaatgctatcctctgttcattttactgcttcttctgtcgaatacaagtcctcaaataaacagcctaagcccaccaaacagcctcgaacaccaaggccaccctcc

SEQ ID NO: 243255 - DNA, 120 bp, Artificial Sequence
  ENSG00000121871_11 (sequence is synthesized)
acctcccaagctttatatcctggtccaaaccagcctcccattgctccttatcagaccagaccaccaatccccattatatgccccactgggtgtacctgtaatttgcacatcaatgacctt

SEQ ID NO: 243256 - DNA, 120 bp, Artificial Sequence
  ENSG00000121871_12 (sequence is synthesized)
ggcttgactgtcaactgcaaagagcgaggatttaataacatttctgaacttcttccaaggcccttgaatgccaagaaactgtatctgagtagcaatctgattcagaaaatataccgttct

SEQ ID NO: 243257 - DNA, 120 bp, Artificial Sequence
  ENSG00000121871_13 (sequence is synthesized)
gatttttggaatttttcttccttggatctcttgcatctggggaacaatcgtatttcctatgtccaagatggggcctttatcaacttgcccaacttaaagagcctcttccttaatggcaac

SEQ ID NO: 243258 - DNA, 120 bp, Artificial Sequence
  ENSG00000121871_14 (sequence is synthesized)
gatatagagaagctgacaccaggcatgttccgaggcctacagagtttgcactacttgtactttgagttcaatgtcatccgggaaatccagcctgcagccttcagcctcatgcccaacttg

SEQ ID NO: 243259 - DNA, 120 bp, Artificial Sequence
  ENSG00000121871_15 (sequence is synthesized)
aagctgctattcctcaataataacttactgaggactctgccaacagacgcctttgctggcacatccctggcccggctcaacctgaggaagaactacttcctctatcttcccgtggctggt

SEQ ID NO: 243260 - DNA, 120 bp, Artificial Sequence
  ENSG00000121871_16 (sequence is synthesized)
gtcctggaacacttgaatgccattgtccagatagacctcaatgagaatccttgggactgcacctgtgacctggtcccctttaaacagtggatcgaaaccatcagctcagtcagtgtggtt

SEQ ID NO: 243261 - DNA, 120 bp, Artificial Sequence
  ENSG00000121871_17 (sequence is synthesized)
ggtgatgtgctttgcaggagccctgagaacctcacgcaccgtgatgtgcgcactattgagctggaagttctttgcccagagatgctgcacgttgcaccagctggagaatccccagcccag

SEQ ID NO: 243262 - DNA, 120 bp, Artificial Sequence
  ENSG00000121871_18 (sequence is synthesized)
tgtgccactttctgtgttaattctcagcctgctggttctgtttttctcagcagtctttgttgctgcaggcctctttgcctacgtgctccgaaggcgtcgaaagaagctgcccttcagaag

SEQ ID NO: 243263 - DNA, 120 bp, Artificial Sequence
  ENSG00000121871_19 (sequence is synthesized)
caagcggcaggaaggtgtggaccttactggcatccaaatgcaatgccacaggctgtttgaggatggtggaggtggtggtggcggaagtgggggtggtggtcgaccaactctttcctctcc

SEQ ID NO: 243264 - DNA, 120 bp, Artificial Sequence
  ENSG00000121871_20 (sequence is synthesized)
agagaaggcccctcccgtgggtcatgtgtatgagtacatcccccacccggttacccaaatgtgcaacaaccccatctacaagcctcgtgaggaggaggaggtggctgtttcatcagccca

SEQ ID NO: 243265 - DNA, 120 bp, Artificial Sequence
  ENSG00000121871_21 (sequence is synthesized)
agaagcagggagtgcagaacgtgggggtccagggacacaaccaccgggaatgggtgaggctctcctaggaagtgagcagtttgctgagacacccaaggagaaccatagtaactaccggac

SEQ ID NO: 243266 - DNA, 120 bp, Artificial Sequence
  ENSG00000121871_22 (sequence is synthesized)
cttgctggaaaaagagaaggagtgggccctagcagtgtccagctcccagcttaacaccatagtgacggtgaatcaccatcaccctcaccacccagcagttggtggggtttcaggagtagt

SEQ ID NO: 243267 - DNA, 120 bp, Artificial Sequence
  ENSG00000121871_23 (sequence is synthesized)
tgggggaactgggggagacttggcagggttccgccaccatgagaaaaatggtggggtggtgctgtttcctcctgggggaggctgtggtagtggcagtatgctactagatcgagagaggcc

SEQ ID NO: 243268 - DNA, 120 bp, Artificial Sequence
  ENSG00000121871_24 (sequence is synthesized)
acagcctgccccctgcacagtgggatttgtggactgtctctatggaacagtgcccaaattaaaggaactgcacgtgcaccctcctggcatgcaatacccagacttacagcaggatgccag

SEQ ID NO: 243269 - DNA, 120 bp, Artificial Sequence
  ENSG00000121871_25 (sequence is synthesized)
gctcaaagaaacccttctcttctcggctggaaagggcttcacagaccaccaaacccaaaaaagtgattacctcgagttaagggccaaacttcaaaccaagccggattacctcgaagtcct

SEQ ID NO: 243270 - DNA, 120 bp, Artificial Sequence
  ENSG00000121871_26 (sequence is synthesized)
ggagaagacaacatacaggttctaacagagagaagaaaatatattagtgctttttttttttcaaaagaaaaggaaaataaaagaaatatatcccttgctccctttacacttgtcccagta

SEQ ID NO: 243271 - DNA, 120 bp, Artificial Sequence
  ENSG00000121871_27 (sequence is synthesized)
actccatcctcacgatctttcctaccctgaacaaaactaaaaccgcatgataactagagaatacagatgtatgctctcccctctcagatgcgatttggaggaagggccatactcagatca

SEQ ID NO: 243272 - DNA, 120 bp, Artificial Sequence
  ENSG00000121871_28 (sequence is synthesized)
ttaatcaatgaaagtgccttcgcagacttttgccagcaaatgttatcattatttttttatactgaaacttgagactttgactgtgccatgtataagatatactggggatcattgtatgga

SEQ ID NO: 243273 - DNA, 120 bp, Artificial Sequence
  ENSG00000121871_29 (sequence is synthesized)
tcctaattaagtaaaattcaatgtgtctttttattttcagtaactattttttttatagttgtagttttgatttaaagggggggaaacaagttgacatttgtcatttgtggctttctttct

SEQ ID NO: 243274 - DNA, 120 bp, Artificial Sequence
  ENSG00000121871_30 (sequence is synthesized)
tatcatcatggcacagattctgtacatgtattaacaatgcagtttgctgcatgcctggaaactgcaagatggggagggagggggcgggtcttgctcgaatgttctcactcactatcttgt

SEQ ID NO: 243275 - DNA, 120 bp, Artificial Sequence
  ENSG00000121871_31 (sequence is synthesized)
tcttgctcgaatgttctcactcactatcttgtctctcatacacatatccatctgcagaccatggtccctaaacctgcagtttcttcctgctggtgcaggtacacacacacacacacacac

SEQ ID NO: 243276 - DNA, 120 bp, Artificial Sequence
  ENSG00000121871_32 (sequence is synthesized)
ttccattcaactcaatctgcttagttcgggtttgatccatttttctcctctccatagttctaccacccttcactgctagtgtacagctcacagcatctctcctaccaccctgggaaaagt

SEQ ID NO: 243277 - DNA, 120 bp, Artificial Sequence
  ENSG00000121871_33 (sequence is synthesized)
cacattctaggctggattctactgaagtagaggcctggtggtttaacagccgaagacacacgcctagggatgagcaccctctttgtgacacttcatcctgatgccaagattttttggaga

SEQ ID NO: 243278 - DNA, 120 bp, Artificial Sequence
  ENSG00000121871_34 (sequence is synthesized)
acatctgcactttcttatatatatatataatattaaaaaaagcaactgggtatatatcactaacagctttgtaggaagcacttttaatgttttctctctcacacacaaagattcaaaaga

SEQ ID NO: 243279 - DNA, 120 bp, Artificial Sequence
  ENSG00000121871_35 (sequence is synthesized)
aatgtgcatatatttattctgtaatttcagtgattataaattgtaaaggtaatgtttaatcattgtatagtgattatgcctctggtatagctttcctaataaaaagtttttgaaaaacat

SEQ ID NO: 243280 - DNA, 120 bp, Artificial Sequence
  ENSG00000121871_36 (sequence is synthesized)
agaggactcactctctgccaacggtatcgcttcaccttcgtgctttgcctgagatctcccaaatccaagtggaatttggtgtgcacagccatactgtgtatttgtatcttctctccccct

SEQ ID NO: 243281 - DNA, 120 bp, Artificial Sequence
  ENSG00000121871_37 (sequence is synthesized)
ctccttctttccccccaccttcgccgtctgaccaatgctgggatctgagatctagtcgcccccttcctgcctcctttccgcctctccccacccttttcttctctcatctacacgccacca

SEQ ID NO: 243282 - DNA, 120 bp, Artificial Sequence
  ENSG00000121871_38 (sequence is synthesized)
acccccactcccacccacctaaagggcaaagagcaaagacaccctggaaaagcaagggctaattccatcttctcggatggaaggaggcctcgggcagggattgcgctgtgagtgacaacc

SEQ ID NO: 243283 - DNA, 120 bp, Artificial Sequence
  ENSG00000121871_39 (sequence is synthesized)
tttgaggaagagagaaagagagaaatccagagactgagctcaggctctcgggaacaacgaagctctccactgatccagagcaccgagattttaaatcaaaggaacctagtcctgggacac

SEQ ID NO: 243284 - DNA, 120 bp, Artificial Sequence
  ENSG00000121871_40 (sequence is synthesized)
tcactctgcctgcctgcctaccaaccatcgagggcatagggagctgtggtcgtgagctccctgtcgctggcatcgccgcgctaggtgcgcgccccgctctcccattggtatgcagcgacc

SEQ ID NO: 243285 - DNA, 120 bp, Artificial Sequence
  ENSG00000121871_41 (sequence is synthesized)
atttccctgcaagtctcaaaggtggaaacatttaaacggattacaagcgtgattcggtagcctttcggaaagttggtggccagaagaggagaagctacaaggctacagtatgatggatac

SEQ ID NO: 243286 - DNA, 80 bp, Artificial Sequence
  ENSG00000121879_0 (sequence is synthesized)
agttccggtgccgccgctgcggccgctgaggtgtcgggctgctgctgccgcggccgctgggactggggctggggccgccg

SEQ ID NO: 243287 - DNA, 120 bp, Artificial Sequence
  ENSG00000121879_1 (sequence is synthesized)
ggcgggggccgtgccgcccgctctcctctccctcggcgccgccgccgccgcccgcggggctgggacccgatgcggttagagccgcggagcctggaagagccccgagcgtttctgctttgg

SEQ ID NO: 243288 - DNA, 120 bp, Artificial Sequence
  ENSG00000121879_2 (sequence is synthesized)
cccgagcgtttctgctttgggacaaccatacatctaattccttaaagtagttttatatgtaaaacttgcaaagaatcagaacaatgcctccacgaccatcatcaggtgaactgtggggca

SEQ ID NO: 243289 - DNA, 120 bp, Artificial Sequence
  ENSG00000121879_3 (sequence is synthesized)
tccacttgatgcccccaagaatcctagtagaatgtttactaccaaatggaatgatagtgactttagaatgcctccgtgaggctacattaataaccataaagcatgaactatttaaagaag

SEQ ID NO: 243290 - DNA, 120 bp, Artificial Sequence
  ENSG00000121879_4 (sequence is synthesized)
caagaaaataccccctccatcaacttcttcaagatgaatcttcttacattttcgtaagtgttactcaagaagcagaaagggaagaattttttgatgaaacaagacgactttgtgaccttc

SEQ ID NO: 243291 - DNA, 120 bp, Artificial Sequence
  ENSG00000121879_5 (sequence is synthesized)
ggctttttcaaccctttttaaaagtaattgaaccagtaggcaaccgtgaagaaaagatcctcaatcgagaaattggttttgctatcggcatgccagtgtgtgaatttgatatggttaaag

SEQ ID NO: 243292 - DNA, 120 bp, Artificial Sequence
  ENSG00000121879_6 (sequence is synthesized)
atccagaagtacaggacttccgaagaaatattctgaacgtttgtaaagaagctgtggatcttagggacctcaattcacctcatagtagagcaatgtatgtctatcctccaaatgtagaat

SEQ ID NO: 243293 - DNA, 120 bp, Artificial Sequence
  ENSG00000121879_7 (sequence is synthesized)
cttcaccagaattgccaaagcacatatataataaattagataaagggcaaataatagtggtgatctgggtaatagtttctccaaataatgacaagcagaagtatactctgaaaatcaacc

SEQ ID NO: 243294 - DNA, 120 bp, Artificial Sequence
  ENSG00000121879_8 (sequence is synthesized)
atgactgtgtaccagaacaagtaattgctgaagcaatcaggaaaaaaactcgaagtatgttgctatcctctgaacaactaaaactctgtgttttagaatatcagggcaagtatattttaa

SEQ ID NO: 243295 - DNA, 120 bp, Artificial Sequence
  ENSG00000121879_9 (sequence is synthesized)
aagtgtgtggatgtgatgaatacttcctagaaaaatatcctctgagtcagtataagtatataagaagctgtataatgcttgggaggatgcccaatttgatgttgatggctaaagaaagcc

SEQ ID NO: 243296 - DNA, 120 bp, Artificial Sequence
  ENSG00000121879_10 (sequence is synthesized)
tttattctcaactgccaatggactgttttacaatgccatcttattccagacgcatttccacagctacaccatatatgaatggagaaacatctacaaaatccctttgggttataaatagtg

SEQ ID NO: 243297 - DNA, 120 bp, Artificial Sequence
  ENSG00000121879_11 (sequence is synthesized)
cactcagaataaaaattctttgtgcaacctacgtgaatgtaaatattcgagacattgataagatctatgttcgaacaggtatctaccatggaggagaacccttatgtgacaatgtgaaca

SEQ ID NO: 243298 - DNA, 120 bp, Artificial Sequence
  ENSG00000121879_12 (sequence is synthesized)
ctcaaagagtaccttgttccaatcccaggtggaatgaatggctgaattatgatatatacattcctgatcttcctcgtgctgctcgactttgcctttccatttgctctgttaaaggccgaa

SEQ ID NO: 243299 - DNA, 120 bp, Artificial Sequence
  ENSG00000121879_13 (sequence is synthesized)
agggtgctaaagaggaacactgtccattggcatggggaaatataaacttgtttgattacacagacactctagtatctggaaaaatggctttgaatctttggccagtacctcatggattag

SEQ ID NO: 243300 - DNA, 120 bp, Artificial Sequence
  ENSG00000121879_14 (sequence is synthesized)
aagatttgctgaaccctattggtgttactggatcaaatccaaataaagaaactccatgcttagagttggagtttgactggttcagcagtgtggtaaagttcccagatatgtcagtgattg

SEQ ID NO: 243301 - DNA, 120 bp, Artificial Sequence
  ENSG00000121879_15 (sequence is synthesized)
aagagcatgccaattggtctgtatcccgagaagcaggatttagctattcccacgcaggactgagtaacagactagctagagacaatgaattaagggaaaatgacaaagaacagctcaaag

SEQ ID NO: 243302 - DNA, 120 bp, Artificial Sequence
  ENSG00000121879_16 (sequence is synthesized)
caatttctacacgagatcctctctctgaaatcactgagcaggagaaagattttctatggagtcacagacactattgtgtaactatccccgaaattctacccaaattgcttctgtctgtta

SEQ ID NO: 243303 - DNA, 120 bp, Artificial Sequence
  ENSG00000121879_17 (sequence is synthesized)
aatggaattctagagatgaagtagcccagatgtattgcttggtaaaagattggcctccaatcaaacctgaacaggctatggaacttctggactgtaattacccagatcctatggttcgag

SEQ ID NO: 243304 - DNA, 120 bp, Artificial Sequence
  ENSG00000121879_18 (sequence is synthesized)
gttttgctgttcggtgcttggaaaaatatttaacagatgacaaactttctcagtatttaattcagctagtacaggtcctaaaatatgaacaatatttggataacttgcttgtgagatttt

SEQ ID NO: 243305 - DNA, 120 bp, Artificial Sequence
  ENSG00000121879_19 (sequence is synthesized)
tactgaagaaagcattgactaatcaaaggattgggcactttttcttttggcatttaaaatctgagatgcacaataaaacagttagccagaggtttggcctgcttttggagtcctattgtc

SEQ ID NO: 243306 - DNA, 120 bp, Artificial Sequence
  ENSG00000121879_20 (sequence is synthesized)
gtgcatgtgggatgtatttgaagcacctgaataggcaagtcgaggcaatggaaaagctcattaacttaactgacattctcaaacaggagaagaaggatgaaacacaaaaggtacagatga

SEQ ID NO: 243307 - DNA, 120 bp, Artificial Sequence
  ENSG00000121879_21 (sequence is synthesized)
agtttttagttgagcaaatgaggcgaccagatttcatggatgctctacagggctttctgtctcctctaaaccctgctcatcaactaggaaacctcaggcttgaagagtgtcgaattatgt

SEQ ID NO: 243308 - DNA, 120 bp, Artificial Sequence
  ENSG00000121879_22 (sequence is synthesized)
cctctgcaaaaaggccactgtggttgaattgggagaacccagacatcatgtcagagttactgtttcagaacaatgagatcatctttaaaaatggggatgatttacggcaagatatgctaa

SEQ ID NO: 243309 - DNA, 120 bp, Artificial Sequence
  ENSG00000121879_23 (sequence is synthesized)
cacttcaaattattcgtattatggaaaatatctggcaaaatcaaggtcttgatcttcgaatgttaccttatggttgtctgtcaatcggtgactgtgtgggacttattgaggtggtgcgaa

SEQ ID NO: 243310 - DNA, 120 bp, Artificial Sequence
  ENSG00000121879_24 (sequence is synthesized)
attctcacactattatgcaaattcagtgcaaaggcggcttgaaaggtgcactgcagttcaacagccacacactacatcagtggctcaaagacaagaacaaaggagaaatatatgatgcag

SEQ ID NO: 243311 - DNA, 120 bp, Artificial Sequence
  ENSG00000121879_25 (sequence is synthesized)
ccattgacctgtttacacgttcatgtgctggatactgtgtagctaccttcattttgggaattggagatcgtcacaatagtaacatcatggtgaaagacgatggacaactgtttcatatag

SEQ ID NO: 243312 - DNA, 120 bp, Artificial Sequence
  ENSG00000121879_26 (sequence is synthesized)
attttggacactttttggatcacaagaagaaaaaatttggttataaacgagaacgtgtgccatttgttttgacacaggatttcttaatagtgattagtaaaggagcccaagaatgcacaa

SEQ ID NO: 243313 - DNA, 120 bp, Artificial Sequence
  ENSG00000121879_27 (sequence is synthesized)
agacaagagaatttgagaggtttcaggagatgtgttacaaggcttatctagctattcgacagcatgccaatctcttcataaatcttttctcaatgatgcttggctctggaatgccagaac

SEQ ID NO: 243314 - DNA, 120 bp, Artificial Sequence
  ENSG00000121879_28 (sequence is synthesized)
tacaatcttttgatgacattgcatacattcgaaagaccctagccttagataaaactgagcaagaggctttggagtatttcatgaaacaaatgaatgatgcacatcatggtggctggacaa

SEQ ID NO: 243315 - DNA, 120 bp, Artificial Sequence
  ENSG00000121879_29 (sequence is synthesized)
caaaaatggattggatcttccacacaattaaacagcatgcattgaactgaaaagataactgagaaaatgaaagctcactctggattccacactgcactgttaataactctcagcaggcaa

SEQ ID NO: 243316 - DNA, 120 bp, Artificial Sequence
  ENSG00000121879_30 (sequence is synthesized)
agaccgattgcataggaattgcacaatccatgaacagcattagaatttacagcaagaacagaaataaaatactatataatttaaataatgtaaacgcaaacagggtttgatagcacttaa

SEQ ID NO: 243317 - DNA, 120 bp, Artificial Sequence
  ENSG00000121879_31 (sequence is synthesized)
actagttcatttcaaaattaagctttagaataatgcgcaatttcatgttatgccttaagtccaaaaaggtaaactttgaagattgtttgtatctttttttaaaaaacaaaacaaaacaaa

SEQ ID NO: 243318 - DNA, 120 bp, Artificial Sequence
  ENSG00000121879_32 (sequence is synthesized)
aatccccaaaatatatagaaatgatggagaaggaaaaagtgatggttttttttgtcttgcaaatgttctatgttttgaaatgtggacacaacaaaggctgttattgcattaggtgtaagt

SEQ ID NO: 243319 - DNA, 120 bp, Artificial Sequence
  ENSG00000121879_33 (sequence is synthesized)
aaactggagtttatgttaaattacattgattggaaaagaatgaaaatttcttatttttccattgctgttcaatttatagtttgaagtgggtttttgactgcttgtttaatgaagaaaaat

SEQ ID NO: 243320 - DNA, 120 bp, Artificial Sequence
  ENSG00000121879_34 (sequence is synthesized)
gcttggggtggaagggactcttgagatttcaccagagactttttctttttaataaatcaaaccttttgatgatttgaggttttatctgcagttttggaagcagtcacaaatgagacctgt

SEQ ID NO: 243321 - DNA, 120 bp, Artificial Sequence
  ENSG00000121879_35 (sequence is synthesized)
tataaggtggtatttttttttttcttctggacagtatttaaaggatcttattcttatttcccagggaaattctgggctcccacaaagtaaaaaaaaaaaaaaatcatagaaaaagaatga

SEQ ID NO: 243322 - DNA, 120 bp, Artificial Sequence
  ENSG00000121879_36 (sequence is synthesized)
gcaggaatagttcttattccagaattgtacagtattcaccttaagttgattttttttctccttctgcaattgaactgaatacatttttcatgcatgttttccagaaaatagaagtattaa

SEQ ID NO: 243323 - DNA, 120 bp, Artificial Sequence
  ENSG00000121879_37 (sequence is synthesized)
tgttattaaaaagattattttttttattaaaggctatttatattatagaaactatcattaatatatattctttatttacatgatctgtcccatagtcatgcattgttttgcaccccaaat

SEQ ID NO: 243324 - DNA, 120 bp, Artificial Sequence
  ENSG00000121879_38 (sequence is synthesized)
catggtcagctttcttcttgatctatagatgaggctcaggcactatcccatttataccaataaccagtgtataactacttaaggaaaacataaaaacttcatcttctttccttttatttc

SEQ ID NO: 243325 - DNA, 120 bp, Artificial Sequence
  ENSG00000121879_39 (sequence is synthesized)
ttatgtgaatctcccgtcttccattctcttttataattgagaatgtctcaatcatatgaaattagttaccagaattaacacaatttagactatcttcctgattccttaaacccctttact

SEQ ID NO: 243326 - DNA, 120 bp, Artificial Sequence
  ENSG00000121879_40 (sequence is synthesized)
gaagtatactcatgaataatactttaaaatatgggggaatagaaaccatgaactttttacctttttaaactatttatccatatctccaaagtagaacattaaaccattttaagatatgtc

SEQ ID NO: 243327 - DNA, 120 bp, Artificial Sequence
  ENSG00000121879_41 (sequence is synthesized)
tcattcccaagtagtcagagctcactctccaactttattaaatactatttgagcacaggacacattcttaaacattttgaaaaacattaacccaagatgtagaggctactgctagtcgtc

SEQ ID NO: 243328 - DNA, 120 bp, Artificial Sequence
  ENSG00000121879_42 (sequence is synthesized)
attctagaatctgatattttactctgtatttgaaatgaatgattaatgtcctaggaaattagctttagcagatgtccaggtgccacatcaaaaaagtgcaataattattgacagtttttt

SEQ ID NO: 243329 - DNA, 120 bp, Artificial Sequence
  ENSG00000121879_43 (sequence is synthesized)
agattaggcatattattggaaaacaactttataaagagtgaacattgtatactctagtaaaacagcatcactttaaaaatattcatttatgaaatctgttacctatagttgaagtcttga

SEQ ID NO: 243330 - DNA, 120 bp, Artificial Sequence
  ENSG00000121879_44 (sequence is synthesized)
gtagtgaacaagggactctaataccaatactcttaatatctggctattttagatcccttaaagggcataattattggaaatttaggtatttcactaaagcatgtatataatattgccaac

SEQ ID NO: 243331 - DNA, 120 bp, Artificial Sequence
  ENSG00000121879_45 (sequence is synthesized)
aagaaaagtaaatttgaagattaagggaacttacttctgcaaactgtcttgcgatagttaagcagaatttaaactctgttttaagcaggaaaccagaaagattattttgcagttgtagaa

SEQ ID NO: 243332 - DNA, 120 bp, Artificial Sequence
  ENSG00000121879_46 (sequence is synthesized)
gatttcataacttattaaaacttattaacattttgtgttgtttagatataggcagttgatacatactaacatcccagccttttcaatatcagggttaaattataggaaaactcagtaaaa

SEQ ID NO: 243333 - DNA, 120 bp, Artificial Sequence
  ENSG00000121879_47 (sequence is synthesized)
tggtacaaatctgaaagtttgatggtagaaactgaagatttaacagagaactgtgttttacccgagtgccaaaaatgctgtgagcctccttgcacaaaatttataccacttttgcatttt

SEQ ID NO: 243334 - DNA, 120 bp, Artificial Sequence
  ENSG00000121879_48 (sequence is synthesized)
tatctatcagtccagatagttgtctcccctccttctcccaggacctctccaccattaaaatgcacaaaccacatggccgatttcaccatttacatttattttcaaaagttactacaacca

SEQ ID NO: 243335 - DNA, 120 bp, Artificial Sequence
  ENSG00000121879_49 (sequence is synthesized)
aattaattctattagaagaaatgtagacaaattctataaagactatagattgtgacctaagaaagaaatgaggcaaagaaccaaacattgaattaaatgctacatgggtgactaagatct

SEQ ID NO: 243336 - DNA, 120 bp, Artificial Sequence
  ENSG00000121879_50 (sequence is synthesized)
gtttcaagtcagtgataatatagccacttctgggtacttcagtatcagagatcagttctcgtggtttagacagttcctatctatagctgactatccttgtccttgaatatggtgtaactg

SEQ ID NO: 243337 - DNA, 120 bp, Artificial Sequence
  ENSG00000121879_51 (sequence is synthesized)
actattggctctacagttttattgggccacttaagaaatatttccttgaataattattttgagaaaaagtctaaaagtaataaaaataattttaaacacactgtagtaagaaatgactgt

SEQ ID NO: 243338 - DNA, 120 bp, Artificial Sequence
  ENSG00000121879_52 (sequence is synthesized)
tggaaaattatgctttcactttctaccatattctcagctatacaaaaccatttattttgaagatttttagactactgttaatttgaaatctgttactcttattgtggaatttgttttttt

SEQ ID NO: 243339 - DNA, 120 bp, Artificial Sequence
  ENSG00000121879_53 (sequence is synthesized)
aaaaaagatgtttctaattggatttttaaaagaagaatggaatttggttgctattttacaatagaacctaagctttttgtggttcttagtgtcctatgtaaaacttagtgtcaaagtaat

SEQ ID NO: 243340 - DNA, 120 bp, Artificial Sequence
  ENSG00000121879_54 (sequence is synthesized)
caactttgagattttcccttctattctgctttatattaaaagcccattagaaaatgggaacctggtgaatatataatgaattgtaaaatattttaatgtgtaactttttcaactgtgaaa

SEQ ID NO: 243341 - DNA, 120 bp, Artificial Sequence
  ENSG00000121879_55 (sequence is synthesized)
ctgacttgattttttgatgaaaacagctgctgataaagtattttgtgtaaagtgtagttcttattaatcaggaaaatgatgacttgattagactgtatatgccctcttggattttatttt

SEQ ID NO: 243342 - DNA, 120 bp, Artificial Sequence
  ENSG00000121879_56 (sequence is synthesized)
aaatggattggtgactttcacataggtaaaacacagtccatctgtattcttttttccatcaaaaatcgagtgatttggaattataaaaaaattgtgagcagcctatttgaaaggcatcat

SEQ ID NO: 243343 - DNA, 120 bp, Artificial Sequence
  ENSG00000121879_57 (sequence is synthesized)
ggaaatttcacagcacaataacacggatttgttttttcttaatgatgtaaatccgtttaattcatactttgatcaatagcccatgcttgccaactctgaagaaatttaatttccagcagt

SEQ ID NO: 243344 - DNA, 120 bp, Artificial Sequence
  ENSG00000121879_58 (sequence is synthesized)
attttaaagctagcctgttaactttttctgaatatttaaagttcctcttttttctatgtctgcacaaactgcagacctgggctggacccacatactcaagagtccaccttaagaaattat

SEQ ID NO: 243345 - DNA, 120 bp, Artificial Sequence
  ENSG00000121879_59 (sequence is synthesized)
tttgatgtccaagacatcactaaaatatttaagtttaaagataatatgtggtgttaatagattgtggtgcttttactatttaaagacaactttcatacttcagatgtttttgagaagagg

SEQ ID NO: 243346 - DNA, 120 bp, Artificial Sequence
  ENSG00000121879_60 (sequence is synthesized)
ggaatgtgaggggagggggcagaacagggaggagttgtttgaatgaattacattctttatatccatcctgctcatttggggcatgtctttaagagaaggctgaaagttgtgagagtatat

SEQ ID NO: 243347 - DNA, 120 bp, Artificial Sequence
  ENSG00000121879_61 (sequence is synthesized)
tgtataccgtaagagaatcaactcttcatcatggatgggattgtgaaggctgaactataaaattcagcattgacagcatcctcaattaataattcttggtgacagaataatacagctggg

SEQ ID NO: 243348 - DNA, 120 bp, Artificial Sequence
  ENSG00000121879_62 (sequence is synthesized)
ctgttttttaaaatataaacaataccatttttaattattacattaaaaattgtaaatatatctatgtgccatggcctgggaagcctgctttcttttttcataaaaattatttttactgta

SEQ ID NO: 243349 - DNA, 120 bp, Artificial Sequence
  ENSG00000121879_63 (sequence is synthesized)
tgaaaagatcatggggtttagctcaaaatatctgtggtcctgataaaattggattggtaactctacctcagaaggaaaatgggaaaaaaaaatagatgagtcacaattcaatacttcaag

SEQ ID NO: 243350 - DNA, 120 bp, Artificial Sequence
  ENSG00000121879_64 (sequence is synthesized)
ctcagaaactgtgcagatcactgaattttagatttataaagtcagagttggcatgccttgtttttaatgatatggaagaccttaagaaaaaaacttggctgaagtttaatcgttggtcca

SEQ ID NO: 243351 - DNA, 120 bp, Artificial Sequence
  ENSG00000121879_65 (sequence is synthesized)
gccatttgaaaaaggcaatagtttgaggaggttcccgaattcggcatttgaaattcattttgttctctcttcttcattattagtgcatttggtgtgtgtatacttgcacacaattctgtt

SEQ ID NO: 243352 - DNA, 120 bp, Artificial Sequence
  ENSG00000121879_66 (sequence is synthesized)
tgtgtacacactgcttgcttagccctagtcaagaggcatcttttataaaaggtgtaaagaaatatcaaggttctaaaattcggaagagtttagaatttattaggagtttcccaagttggg

SEQ ID NO: 243353 - DNA, 120 bp, Artificial Sequence
  ENSG00000121879_67 (sequence is synthesized)
atgttagtctttaaataaacttcatgcacctattccacttaaggttttgcacctcctttttattagtgcagtgccatttcttctgcttgattttaggtatgttaatattccagccttgct

SEQ ID NO: 243354 - DNA, 120 bp, Artificial Sequence
  ENSG00000121879_68 (sequence is synthesized)
agttagcataaagtgacaggtgtgagccatgaggaaattttctgacttaatttgtacacaactacatataagagttttagtggaggaaaaaaattagtcccttgtgcgtatacagtagtt

SEQ ID NO: 243355 - DNA, 120 bp, Artificial Sequence
  ENSG00000121879_69 (sequence is synthesized)
aggtaaatgatttttctaccaacagtatactccattcctcatgtaggtaagtacagaaaaggtttttaaatgtatttttttagccagttaaagtctatgaatctatctgcaaccttattt

SEQ ID NO: 243356 - DNA, 120 bp, Artificial Sequence
  ENSG00000121879_70 (sequence is synthesized)
aatctgtcactataataattttgtggttatgctaagaaccatgtatacttttaggtattcttatttttgtcaatttttctaggttggcaaggaggcagaaaaccttcattgtttcatatt

SEQ ID NO: 243357 - DNA, 120 bp, Artificial Sequence
  ENSG00000121879_71 (sequence is synthesized)
ttctagtatgaatttccaaaatcattatctatttatttcatttttatttaattttgtttttatttcatttttaaaagtcccttgttcaatttaacttatgttcctaagagaggttggaga

SEQ ID NO: 243358 - DNA, 120 bp, Artificial Sequence
  ENSG00000121879_72 (sequence is synthesized)
tatgttcctaagagaggttggagaacttggccttcatctgatttcaaaaatgttttgagtttcaaatgaagttaatggtttcagtgtgattcagtcctcagacctaattgggttgaataa

SEQ ID NO: 243359 - DNA, 120 bp, Artificial Sequence
  ENSG00000121879_73 (sequence is synthesized)
aatctaaaagaatatacccttttggagcataacattttaataccttggggaatgtggcactaccaaaagaagactactaacacgtcagatgttcacctggaagctttatcaagaaattcg

SEQ ID NO: 243360 - DNA, 120 bp, Artificial Sequence
  ENSG00000121879_74 (sequence is synthesized)
aaccacccttttggccccattaattgtagcaagtttatttctctatattttgtcattcagtgaattgaagtcctgtggtatactgcattcattagaagaaaaacgtttttaatgtccttt

SEQ ID NO: 243361 - DNA, 120 bp, Artificial Sequence
  ENSG00000121879_75 (sequence is synthesized)
taatgatggcccagaaagcatttgacacagcaagatgcatgtgttactatattgagaatatagaataataacagtatcactaaatttaagacctcttcccagtcttgctgttcctagcaa

SEQ ID NO: 243362 - DNA, 120 bp, Artificial Sequence
  ENSG00000121879_76 (sequence is synthesized)
gaagtttggcctgtgactgcacttactgtttatgctcatcagaaactgtcaatgtctgcttttctttaactctgcagtctgtaacatcacgctgtttattaaaaaaaaaaagaaaaatta

SEQ ID NO: 243363 - DNA, 120 bp, Artificial Sequence
  ENSG00000121879_77 (sequence is synthesized)
ggagcgcaacaagagggtctttctagaaaacagtctgcatattctttaatgaattagagttgtgatttcatcttggtgaagcttcctcattccagcactgcgcctttgtgcacatgcagg

SEQ ID NO: 243364 - DNA, 80 bp, Artificial Sequence
  ENSG00000121892_0 (sequence is synthesized)
gtgtgtgcgcgaggccccggctcccggggcacggacggccgggcgcgcgcctctgcgaggggcgtccgggtccgagtcgg

SEQ ID NO: 243365 - DNA, 120 bp, Artificial Sequence
  ENSG00000121892_1 (sequence is synthesized)
gccggcgcgaggtgcgtgcgggcgggccgcgggggtcccggacggacacaagcgcacacactcccggaggagccttcgaggctgctcttcctcggccagacggagagcggcactgtctcc

SEQ ID NO: 243366 - DNA, 120 bp, Artificial Sequence
  ENSG00000121892_2 (sequence is synthesized)
ctcttcctcggccagacggagagcggcactgtctccccgcccagcgctcactcgccccgcgtctccccccgcggcggctgctcctcctcggcaccgccagccccagcgccgctcccgggc

SEQ ID NO: 243367 - DNA, 120 bp, Artificial Sequence
  ENSG00000121892_3 (sequence is synthesized)
gagccgctttgtgtgcagcccgactaggggcggcggcgcaaccacctgacagaggcccgggcgctcgatgcaccttccgcccgcatgaggaggagaggccggtagaggactgtgaaccaa

SEQ ID NO: 243368 - DNA, 120 bp, Artificial Sequence
  ENSG00000121892_4 (sequence is synthesized)
aagttgtcccccaggatggacttcaccgcgcagcccaagcctgccactgccctctgtggcgtcgtgagtgccgacgggaagatcgcttaccctccgggggtaaaagagatcaccgacaag

SEQ ID NO: 243369 - DNA, 120 bp, Artificial Sequence
  ENSG00000121892_5 (sequence is synthesized)
atcaccacggacgagatgatcaaacgcctgaagatggtagtgaaaacctttatggatatggatcaggactcagaagatgaaaaacagcagtatctcccactagccttgcatcttgcatct

SEQ ID NO: 243370 - DNA, 120 bp, Artificial Sequence
  ENSG00000121892_6 (sequence is synthesized)
gaattcttcctcaggaaccccaataaagatgtgcgtctccttgtagcatgttgtttggctgatatctttcgtatctatgccccagaagctccatatacttcccatgataaacttaaggac

SEQ ID NO: 243371 - DNA, 120 bp, Artificial Sequence
  ENSG00000121892_7 (sequence is synthesized)
atatttttgtttattaccagacaattaaaaggtttggaggatacaaagagtccacagtttaatagatacttttatttattagagaatttagcttgggttaaatcatataacatctgcttt

SEQ ID NO: 243372 - DNA, 120 bp, Artificial Sequence
  ENSG00000121892_8 (sequence is synthesized)
gaattggaagattgcaatgaaatttttattcagctttttagaactctcttctcagtgatcaacaatagccacaataagaaggtacaaatgcacatgctagatttgatgagttctatcatc

SEQ ID NO: 243373 - DNA, 120 bp, Artificial Sequence
  ENSG00000121892_9 (sequence is synthesized)
atggaaggtgatggagttactcaagaattattggactccattcttattaacctcattcctgcacataagaacttaaataaacagtcctttgaccttgcaaaagtgctattgaaaagaaca

SEQ ID NO: 243374 - DNA, 120 bp, Artificial Sequence
  ENSG00000121892_10 (sequence is synthesized)
gtccagactattgaggcatgcattgctaattttttcaatcaagtcctggtgctgggaagatcatcagtaagtgatttgtcagaacatgtatttgatctgattcaggaactttttgctata

SEQ ID NO: 243375 - DNA, 120 bp, Artificial Sequence
  ENSG00000121892_11 (sequence is synthesized)
gatcctcatttattattatccgtcatgccacagcttgaattcaaactaaagagcaatgatggagaagagcgattagctgttgttcgacttctagctaaattgtttggctccaaagattct

SEQ ID NO: 243376 - DNA, 120 bp, Artificial Sequence
  ENSG00000121892_12 (sequence is synthesized)
gatttggcaacacagaatcgtcctctttggcaatgttttcttggacgatttaatgatattcatgttcctgtgagattagaaagtgtgaaatttgccagtcattgtttaatgaatcaccca

SEQ ID NO: 243377 - DNA, 120 bp, Artificial Sequence
  ENSG00000121892_13 (sequence is synthesized)
gatttagcgaaggatctcacagaatatttaaaggttagatcacatgatccagaagaagctattcgtcatgatgtcattgttactataataacagctgccaagagggacctggccttagta

SEQ ID NO: 243378 - DNA, 120 bp, Artificial Sequence
  ENSG00000121892_14 (sequence is synthesized)
aatgatcagctgcttggctttgtaagggaaagaacactggataaacggtggcgagtaagaaaagaagctatgatgggtctggctcagctttataagaaatactgtcttcatggtgaagca

SEQ ID NO: 243379 - DNA, 120 bp, Artificial Sequence
  ENSG00000121892_15 (sequence is synthesized)
ggaaaggaagctgcagagaaagtcagctggataaaggacaaacttctgcatatttattatcagaacagcattgacgacaaactgttggtagagaaaatctttgctcagtatcttgtcccc

SEQ ID NO: 243380 - DNA, 120 bp, Artificial Sequence
  ENSG00000121892_16 (sequence is synthesized)
cacaacctggaaacagaagagagaatgaaatgcttatattacttatatgctagtttggatccaaatgctgtaaaagctctcaacgaaatgtggaagtgtcagaacatgcttcggagccat

SEQ ID NO: 243381 - DNA, 120 bp, Artificial Sequence
  ENSG00000121892_17 (sequence is synthesized)
gtacgcgaactattggatttgcacaagcagcctacatcagaggctaactgttctgccatgtttggaaaactgatgaccatagcaaagaatttgcctgaccccgggaaagcacaagatttt

SEQ ID NO: 243382 - DNA, 120 bp, Artificial Sequence
  ENSG00000121892_18 (sequence is synthesized)
gtgaagaaatttaaccaggttctcggcgatgatgagaaacttcggtctcagttggagttattaattagcccaacctgttcttgcaaacaagcagatatttgtgtgagagaaatagcccgg

SEQ ID NO: 243383 - DNA, 120 bp, Artificial Sequence
  ENSG00000121892_19 (sequence is synthesized)
aaacttgcaaatcctaagcaaccaacaaatccttttctagagatggtcaaatttctgttggaaagaatcgcacctgtgcacattgattcagaagccataagtgcactagtgaaattgatg

SEQ ID NO: 243384 - DNA, 120 bp, Artificial Sequence
  ENSG00000121892_20 (sequence is synthesized)
aataagtcaatagaggggacagcagatgatgaagaggagggtgtaagtccagatacagctatccgttcaggacttgaacttcttaaggttctgtcttttacacatcctacctcgttccac

SEQ ID NO: 243385 - DNA, 120 bp, Artificial Sequence
  ENSG00000121892_21 (sequence is synthesized)
tctgcagagacatatgagtccttgttacagtgcctaagaatggaggatgacaaggtagcagaagctgctattcaaatttttagaaatacaggtcacaaaatagaaacagaccttccccag

SEQ ID NO: 243386 - DNA, 120 bp, Artificial Sequence
  ENSG00000121892_22 (sequence is synthesized)
atacgatcgaccttaattcccattttacatcaaaaagcaaagaggggtactccacaccaagcaaaacaggctgtgcactgtatacacgccatattcacaaataaagaagtccagcttgca

SEQ ID NO: 243387 - DNA, 120 bp, Artificial Sequence
  ENSG00000121892_23 (sequence is synthesized)
cagatttttgagccactcagtaggagtctgaatgctgatgtgccagaacaacttataactccattagtttcattgggccacatttctatgttagcaccagatcagtttgcttccccaatg

SEQ ID NO: 243388 - DNA, 120 bp, Artificial Sequence
  ENSG00000121892_24 (sequence is synthesized)
aaatctgtagtagcaaattttattgtgaaagatctgctaatgaatgacaggtcaacaggtgaaaagaatggaaaactgtggtctccagatgaagaggtttcccctgaagtactagcaaag

SEQ ID NO: 243389 - DNA, 120 bp, Artificial Sequence
  ENSG00000121892_25 (sequence is synthesized)
gtacaggcaattaaacttctggtaaggtggctgttgggtatgaaaaacaaccagtctaaatctgccaattcaacccttcggttattatcagcgatgttggttagtgagggtgacctgaca

SEQ ID NO: 243390 - DNA, 120 bp, Artificial Sequence
  ENSG00000121892_26 (sequence is synthesized)
gagcaaaagaggatcagtaaatctgatatgtctcgcttgcgattagctgctggtagtgccataatgaagcttgctcaggaaccttgttaccatgaaattattaccccagaacagtttcag

SEQ ID NO: 243391 - DNA, 120 bp, Artificial Sequence
  ENSG00000121892_27 (sequence is synthesized)
ctctgtgcacttgttattaatgatgagtgttaccaagtaaggcagatatttgctcagaagctgcataaggcacttgtgaagttactgctcccattggagtatatggcgatctttgccttg

SEQ ID NO: 243392 - DNA, 120 bp, Artificial Sequence
  ENSG00000121892_28 (sequence is synthesized)
tgtgccaaagatcctgtgaaggagagaagagcacacgcacgacaatgtttactgaaaaatatcagtatacgcagggaatacattaagcagaatcctatggctactgagaaattattatca

SEQ ID NO: 243393 - DNA, 120 bp, Artificial Sequence
  ENSG00000121892_29 (sequence is synthesized)
ccagattttacaagatcacaagatgttgatcagcttcgtgatatcaaagagtgcctatggttcatgcttgaagttttaatgacaaagaatgaaaacaatagccatgcctttatgaagaag

SEQ ID NO: 243394 - DNA, 120 bp, Artificial Sequence
  ENSG00000121892_30 (sequence is synthesized)
atggcagagaacatcaagttaaccagagatgcccagtctccagatgaatccaagacaaatgaaaaactgtatacagtatgtgatgtggctctctgtgttataaatagtaaaagtgctttg

SEQ ID NO: 243395 - DNA, 120 bp, Artificial Sequence
  ENSG00000121892_31 (sequence is synthesized)
tgcaatgcagattcaccaaaggacccagtcctcccaatgaaattttttacacaacctgaaaaggacttctgtaacgataagagttatatttcagaagagacaagagtacttctgttaaca

SEQ ID NO: 243396 - DNA, 120 bp, Artificial Sequence
  ENSG00000121892_32 (sequence is synthesized)
ggaaagccaaagcctgctggagtactaggtgcagtaaataagcctttatcagcaacgggaaggaaaccctatgttagaagcactggcactgagactggaagcaatattaatgtaaattca

SEQ ID NO: 243397 - DNA, 120 bp, Artificial Sequence
  ENSG00000121892_33 (sequence is synthesized)
gagctgaacccttcaaccggaaatcgatcaagggaacagagttcagaggcagcagaaactggagttagtgaaaatgaagagaaccctgtgaggattatttcagtcacacctgtaaagaat

SEQ ID NO: 243398 - DNA, 120 bp, Artificial Sequence
  ENSG00000121892_34 (sequence is synthesized)
attgacccagtaaagaataaggaaattaattctgatcaggctacccagggcaacatcagcagtgaccgaggaaagaaaagaacagtaacagcagctggtgcagagaatatccaacaaaaa

SEQ ID NO: 243399 - DNA, 120 bp, Artificial Sequence
  ENSG00000121892_35 (sequence is synthesized)
acagatgagaaagtagatgaatcgggacctcccgccccttccaaacccaggagaggacgtcgacccaagtctgaatctcagggcaatgctaccaaaaatgatgatctaaataaacctatt

SEQ ID NO: 243400 - DNA, 120 bp, Artificial Sequence
  ENSG00000121892_36 (sequence is synthesized)
aacaagggaaggaagagagctgcagtgggtcaggagagccctgggggtttggaagcaggtaatgccaaagcacccaaactgcaagatttagccaaaaaggcagcaccagcagaaagacaa

SEQ ID NO: 243401 - DNA, 120 bp, Artificial Sequence
  ENSG00000121892_37 (sequence is synthesized)
attgacttacaaaggtaaaaatgcatttgcaaagggagaaaatgaaggccaaacagaagcaggctccagcttctgcaaaaacttggattcacaaatgtccctgaacagaaaatgaagctc

SEQ ID NO: 243402 - DNA, 120 bp, Artificial Sequence
  ENSG00000121892_38 (sequence is synthesized)
acttcagaacacacactctctgccttgaaaactaaagagactattacttccttttcacatgaccacaagtcctctgatggaaatgtacagcagaaactcttgagagagaggctaaaagca

SEQ ID NO: 243403 - DNA, 120 bp, Artificial Sequence
  ENSG00000121892_39 (sequence is synthesized)
actctgttctcccccttcccctagacttttcttacgaaaagtcaataattaagcaaattgcttaacacttggttccagttcctgcctatctggagtttaaatgcgtaatacaccattaat

SEQ ID NO: 243404 - DNA, 120 bp, Artificial Sequence
  ENSG00000121892_40 (sequence is synthesized)
ttccacgctgcagtttttattttaaagaaagtaacaagatgtctttacactgacactgaaaattcatccattttagagccaggaattcccatgttacacaggaaaaaatagaagtctact

SEQ ID NO: 243405 - DNA, 120 bp, Artificial Sequence
  ENSG00000121892_41 (sequence is synthesized)
gaattaattttttaaaagaaaagagatcagattaaatatttctttgtttttccttttggaaacttttatgtataattctttctgcctgcctacttttctgcaaaaatgagatgtacagat

SEQ ID NO: 243406 - DNA, 120 bp, Artificial Sequence
  ENSG00000121892_42 (sequence is synthesized)
ttcggttccctgctatgaaaagtgatgtggtagcaattttataaatgttgctttctgatttttatcagagtgagaaaattaaaattattgatttgcaagtagtaaacagttcatattttg

SEQ ID NO: 243407 - DNA, 120 bp, Artificial Sequence
  ENSG00000121892_43 (sequence is synthesized)
atttcccctcattttagtttaatataatttgcaataaatgtacatattgttgtttgtttcataaagcatatcactttaaaatggtttttactcctgtgattatgttggaatatttggaat

SEQ ID NO: 243408 - DNA, 120 bp, Artificial Sequence
  ENSG00000121892_44 (sequence is synthesized)
tttaaaggagtaaagactgtccagcatttggttttataatgtttgtcaccagatttttattaatgtaaaaaaaatcaatttttaaaaaatagttggactttggcagcttttaaggaaagt

SEQ ID NO: 243409 - DNA, 120 bp, Artificial Sequence
  ENSG00000121892_45 (sequence is synthesized)
tggaggtgttttaggattgctatcaattttcagcattgtgctatttggaaataagtgttttgcttttgtctgatggtctgggctcatttttatgtttattttagaaaactgttgcatcaa

SEQ ID NO: 243410 - DNA, 120 bp, Artificial Sequence
  ENSG00000121892_46 (sequence is synthesized)
tatattatgtttcttggcattgttcagcataggtaatgtgtgcactttatgtgtacacataatcatatttaagttttttgcataaaataaatgcttctagatgtcatggcagtcttttta

SEQ ID NO: 243411 - DNA, 120 bp, Artificial Sequence
  ENSG00000121892_47 (sequence is synthesized)
atctttttatcatatgctttcttgtgaattttttcatgttaaagagctaaagtcataacatgattacagtcaactctccattatctatataaaatagtgactaagcctcaggtttttaat

SEQ ID NO: 243412 - DNA, 120 bp, Artificial Sequence
  ENSG00000121892_48 (sequence is synthesized)
tttgtgataacaaaataacgaaggcatgtaagacctgattctggaggaacatgaaatttgtcttttctcatgtccagagttctatcctgcccccactgtccactgtagggtcatccgcaa

SEQ ID NO: 243413 - DNA, 120 bp, Artificial Sequence
  ENSG00000121892_49 (sequence is synthesized)
agccctagcagaatgtgctcactccatttccttacacgtttctagcatgggtcagaggaaacaacatttgtgttataacttcgtcttgataggctgtagtgtacatgggatgtaaaacaa

SEQ ID NO: 243414 - DNA, 120 bp, Artificial Sequence
  ENSG00000121892_50 (sequence is synthesized)
acaagtgtatcaaaggtggatgattctgttagagtgaagtttgagagtaaatgtcacttacgtttctcatagataatcaagagttggctgtgtattgactgaaagatgggtaattatttt

SEQ ID NO: 243415 - DNA, 120 bp, Artificial Sequence
  ENSG00000121892_51 (sequence is synthesized)
aaatatgcatttacacacatttaggtatcagaagatgcttagggaacaatggataccaatgatagaaaatgatacctttacaggggcagaaaaatccccactcttccttattgcctcttc

SEQ ID NO: 243416 - DNA, 120 bp, Artificial Sequence
  ENSG00000121892_52 (sequence is synthesized)
agaaccctttagaaagtataaaatattgcctccaacatgctgaaaaagagtatctatgcataagtatcagagaagtccctcaagcaatcagtaggtgtgttctatttagagagagtttaa

SEQ ID NO: 243417 - DNA, 120 bp, Artificial Sequence
  ENSG00000121892_53 (sequence is synthesized)
agttctcttagcatcagacaacttgattcctaaggtttccagtgtgtcaccaacaaaaagtgcattgatagggacctttgtctcttcctccctttgattaattgcccggcatcacagttt

SEQ ID NO: 243418 - DNA, 120 bp, Artificial Sequence
  ENSG00000121892_54 (sequence is synthesized)
actagattaccaagtgttacatcatattaaataaaatgtagcagaaccatctgcatcaatatattcctgtttagatttttgcaggagagaagttaaaaggatttgctccttgtatgatgt

SEQ ID NO: 243419 - DNA, 120 bp, Artificial Sequence
  ENSG00000121892_55 (sequence is synthesized)
aagtggcccaccccaattttgtaacatgatgcaagtgtctggcactaagggaagcaagagtagggttgtggaaagaccaagctgatggggagggacttgtttacgggaatttttttagtt

SEQ ID NO: 243420 - DNA, 120 bp, Artificial Sequence
  ENSG00000121892_56 (sequence is synthesized)
ttccttttcaaaggaaaacattaaaatcccttaggaatttggtattcacatctcagagaactacaacacaaaagtgcagacttatatttgagaattaatgttaaccctttgtgtctagtt

SEQ ID NO: 243421 - DNA, 120 bp, Artificial Sequence
  ENSG00000121892_57 (sequence is synthesized)
tgaagcttcttgtatttgtctaaaacaacaagccagaattttgtatctcctttgataaaaagtgtgtataatgtaaagtagttttgcatattcttgtgctgcacatgggctgaattttta

SEQ ID NO: 243422 - DNA, 120 bp, Artificial Sequence
  ENSG00000121892_58 (sequence is synthesized)
aattttttttaaaaacttgaagcagaaccttgtaatttgtgtaaatgacaagtgtaaaatcctaccataaaatgctaaaaatatgcactgtttcaaataaaaccaagaaatgcagcatta

SEQ ID NO: 243423 - DNA, 120 bp, Artificial Sequence
  ENSG00000121892_59 (sequence is synthesized)
ttcacactttttctctagctttacttacagaaatatgtattttattaaagcctgttttacatacagtgatttgtgtaaatgtaacaatattgtgagctctgaattactttggagtatatc

SEQ ID NO: 243424 - DNA, 120 bp, Artificial Sequence
  ENSG00000121892_60 (sequence is synthesized)
tattgtcaagttaattctctatttaccattcactctcagccacattccaggaaaataactaaagaactaagccagggagattggtcttaggaattttacaagataaagtactttgaactt

SEQ ID NO: 243425 - DNA, 120 bp, Artificial Sequence
  ENSG00000121892_61 (sequence is synthesized)
agtagacattcattgagtaatgataagtattttctgaatgcttgtgtacatgtgcattttcttctttcatgtattagaatggaaataatcgtcaataaattagtagtagtaacattgcca

SEQ ID NO: 243426 - DNA, 120 bp, Artificial Sequence
  ENSG00000121892_62 (sequence is synthesized)
tgtagtagcaaattttattgtgaaagatctgctaatgaatgacagggtaagtttctcatttaattaaattgagaatcatgagattaaggctgtttacatcttcatcacagaaacacttct

SEQ ID NO: 243427 - DNA, 120 bp, Artificial Sequence
  ENSG00000121892_63 (sequence is synthesized)
gtttctgtgtaattctctttttcttttaaattattctatattggttctacttattttttatttatttaaattcgaaactacttccttatttcatggtagctattactactagaatttcac

SEQ ID NO: 243428 - DNA, 120 bp, Artificial Sequence
  ENSG00000121892_64 (sequence is synthesized)
agcaatgatggagaagagcgattagctgttgttcgacttctagctaaattgtttggctccaaagattctgatttggcaacacagaatcgtcctctttggcaatgttttcttggacgaata

SEQ ID NO: 243429 - DNA, 83 bp, Artificial Sequence
  ENSG00000121892_65 (sequence is synthesized)
tttttttatttggtaattttcgtagagacggggttttgccatgttgcctaagctggtatgaactcttgagcttgtgcgacctg

SEQ ID NO: 243430 - DNA, 120 bp, Artificial Sequence
  ENSG00000121892_66 (sequence is synthesized)
gttgtgggccatcacacctggccaacttgggagtttaaagtgcagttttgtgattacagtagagtactgctgctgtaaaaataacatgatttaatttcatgccatattttacaaacattg

SEQ ID NO: 243431 - DNA, 120 bp, Artificial Sequence
  ENSG00000121892_67 (sequence is synthesized)
gcagataagaaaaattttaaatctttggcacagtgtaaggagggacaggttctctcctctaagcctccatttcttcatctttataatgcagatgttaataatacatatggacaattgcta

SEQ ID NO: 243432 - DNA, 120 bp, Artificial Sequence
  ENSG00000121892_68 (sequence is synthesized)
atatctaggtttatatgaagagtttatcacataaaaccattcaataaatggtgttattaattaatatacagtgcatctattctgctttcagcaaactgtttcccatgtaagtaaattttt

SEQ ID NO: 243433 - DNA, 120 bp, Artificial Sequence
  ENSG00000121892_69 (sequence is synthesized)
caggtaacgcaggctctgtaagtttttccagctaatttggatttttaaaagcttttgtttatttcctgctgttaggtggtattttaaacttgtttcactttctcctataaatgtatatat

SEQ ID NO: 243434 - DNA, 120 bp, Artificial Sequence
  ENSG00000121892_70 (sequence is synthesized)
attttaaacttgtttcactttctcctataaatgtatatatatgcctcagtaatgatccccttagagcagtggttcccaacctttttgacacctgggaccagtttcgtggaagacaatttt

SEQ ID NO: 243435 - DNA, 120 bp, Artificial Sequence
  ENSG00000121892_71 (sequence is synthesized)
gcattagttagattctcataaggagcacacagcctagatccctcgcaggcatagttcgccatagggtttgtgcttctgtgagaatctcatgctgccgctgatccgacaggaggcagagct

SEQ ID NO: 243436 - DNA, 120 bp, Artificial Sequence
  ENSG00000121892_72 (sequence is synthesized)
gctgatccgacaggaggcagagctcaggtggtaatgcttgctcgccagccactcactgcctgctgtgtatcccagttcctaacaggccgcagacccatgacccataacccataccagtct

SEQ ID NO: 243437 - DNA, 120 bp, Artificial Sequence
  ENSG00000121892_73 (sequence is synthesized)
gcagttcgtgggttggagacccctagcttagagaattctccaaatgcacattccaagaaataaatggagcttcctactttgaatgccgtactttactaaaagtttgctaaaatgtaatct

SEQ ID NO: 243438 - DNA, 120 bp, Artificial Sequence
  ENSG00000121892_74 (sequence is synthesized)
gatttttattactgatttagtattgaacacataactgtgccttgcttttgatagaaataatgagaatttgcaaaagtatgctctctaattgaatccactgatctgtataaaaaaaatttt

SEQ ID NO: 243439 - DNA, 120 bp, Artificial Sequence
  ENSG00000121892_75 (sequence is synthesized)
gtggcttgatcttggctcactgcagcctccaactccctggctcaatcagttctcctacctcagcctctcaagtagctgtgactacaggcatgtgtcaccatgcctggctaattttttaac

SEQ ID NO: 243440 - DNA, 120 bp, Artificial Sequence
  ENSG00000121892_76 (sequence is synthesized)
caggcatgtgtcaccatgcctggctaattttttaacttttttgtagacaggtggtttcatcatgttggccaggcctcaaactcctgggctcaagtgatcaacccacctccagcatcccaa

SEQ ID NO: 243441 - DNA, 120 bp, Artificial Sequence
  ENSG00000121892_77 (sequence is synthesized)
agtgctgggattgcatgagccaccatgcccagcctataagatattcttaagtgagctgttgaattaaaattaatcctgttgctgacccaggaccatcatgaatagaatagtaccaaatag

SEQ ID NO: 243442 - DNA, 120 bp, Artificial Sequence
  ENSG00000121892_78 (sequence is synthesized)
aatctatgtaacagtggtgataccatcatcaagaattaaattcctacttgtcactacaccttatctggactcatagataacaattttttttttcttttgttaccttcagtgttacagagt

SEQ ID NO: 243443 - DNA, 120 bp, Artificial Sequence
  ENSG00000121892_79 (sequence is synthesized)
tttagtcttcttaataataacaacttaggtttttctgttttcagtatgcaacgttccttatttatgtaacatgttgcttttaatgtgttataaattcataaaccctagaacactaggttt

SEQ ID NO: 243444 - DNA, 120 bp, Artificial Sequence
  ENSG00000121892_80 (sequence is synthesized)
gtgaagttagtcaacctagtgaagctatactatatctttatgaatgaagtgaatgaactttggtacacaggtttcttaatgtttattttagctgcatagaagactttgtgcaaaagaaat

SEQ ID NO: 243445 - DNA, 120 bp, Artificial Sequence
  ENSG00000121892_81 (sequence is synthesized)
gatacagctttgcctagcacacatgacaaaactgtgatttcctcacaggcacactttgttctttcctacttctgtgaaggtaaatttaatacaataaaaaatattttttaataggattat

SEQ ID NO: 243446 - DNA, 120 bp, Artificial Sequence
  ENSG00000121892_82 (sequence is synthesized)
ttaaaacttaattatatttcctgagtttagtagctagttttgcttcactgacacaacattgtggtttgtttgccattttcagatattaagcaggaaaaggcatcaagagatcaagtttga

SEQ ID NO: 243447 - DNA, 120 bp, Artificial Sequence
  ENSG00000121892_83 (sequence is synthesized)
actcctaatttttatatagatataactctcaaagtgctatcattttccacatttggtttaaatcgtgtattgttaatatcacagctgtcaaagaacataattcacttaattgtattttga

SEQ ID NO: 243448 - DNA, 86 bp, Artificial Sequence
  ENSG00000121892_84 (sequence is synthesized)
accgcagataacctcctgagtagctggcattacaggcgcatgccacccggcctagctaattttgtatttttgtagagacagggttt

SEQ ID NO: 243449 - DNA, 120 bp, Artificial Sequence
  ENSG00000121892_85 (sequence is synthesized)
ccactttggcctcccaaagtgctgggatgaggctcacaggcatgagtcaccacacccggcccgaatttatgatgtggtggaattcagtgaataaatttaatgaataaactgcattgaacc

SEQ ID NO: 243450 - DNA, 120 bp, Artificial Sequence
  ENSG00000121892_86 (sequence is synthesized)
ctgcattgaaccgtatgaaaacatgtgtgtgctttatttatggtgtgatttaggaaatttatctttgacatttgcctaagtctgcgtgccatcagtttaatttaaagctagacttatggt

SEQ ID NO: 243451 - DNA, 120 bp, Artificial Sequence
  ENSG00000121892_87 (sequence is synthesized)
atggctttgattgttttgattgtttgataaattggtatatgtgttagcacaagtgtatttattattgcaaggcacaatacctaaaaagccttattgagataattaaaatactcatgttcc

SEQ ID NO: 243452 - DNA, 120 bp, Artificial Sequence
  ENSG00000121892_88 (sequence is synthesized)
tgtacgccattcttcctcaagtgggaatttagacattttgttttattcgtagtatattcttagtgccagtcaccccaaacacctaagcatttgagagagaaacctgcatctggttttcct

SEQ ID NO: 243453 - DNA, 120 bp, Artificial Sequence
  ENSG00000121892_89 (sequence is synthesized)
gggtccgtttataatagcatctgttattatctcataacttccagttttaaggcacaaatttgaagaaaaatcttttttctttgtgtaatttttatttaggatatggtattttgatatttc

SEQ ID NO: 243454 - DNA, 120 bp, Artificial Sequence
  ENSG00000121892_90 (sequence is synthesized)
tatttttattaacaagacaaatatttcttttgcttagtgcctttcaagtggttgcagaggtttacataaaataagggctaccttttggatacaaggtcccagaaatggagaaaacagtca

SEQ ID NO: 243455 - DNA, 120 bp, Artificial Sequence
  ENSG00000121892_91 (sequence is synthesized)
cgaaatgtcaataggtaataggtcccactctttaattcttcgtgttatagttaattctaacacaggtcaacaacttacatcttccccaccctgcccagaaaaacaacttaccaaactgtt

SEQ ID NO: 243456 - DNA, 120 bp, Artificial Sequence
  ENSG00000121892_92 (sequence is synthesized)
catctttgatcattcttgtgctgagatttcagacttttcctgttggaaatctagaaggtggctcctttcaccttggccttagaacttaactcatcctccttttttccttacatacctaac

SEQ ID NO: 243457 - DNA, 120 bp, Artificial Sequence
  ENSG00000121892_93 (sequence is synthesized)
tcatttacccctgaattagactgtaggcatttgagtttcttctagggaagagtcccagatttgatcagctcaggatacccccactatcctgcttcagtatttttataaaactcaatgtca

SEQ ID NO: 243458 - DNA, 120 bp, Artificial Sequence
  ENSG00000121892_94 (sequence is synthesized)
tccaagttttttagatctcttaccccctctgaaaggtactgttgtatctcagataacatctttgagtgagttttgtagggatataaccattgtgggaaatttaaaaggagtgtgattttt

SEQ ID NO: 243459 - DNA, 120 bp, Artificial Sequence
  ENSG00000121892_95 (sequence is synthesized)
caaaaacttactggttttcaagcataagaatttgtgtttttagagttttttctggaggtatttaatgagaatactgttcagagtggcttgcaaacttaggtgtaggcagtaatttgccta

SEQ ID NO: 243460 - DNA, 120 bp, Artificial Sequence
  ENSG00000121892_96 (sequence is synthesized)
acttgtgacctaacttcactttccaagtaggttttaactctggtatggtctcgtgttttcatttgttgtgcactaagaaatgatttcatgttcatgtaataaaattacatttaaaatctc

SEQ ID NO: 243461 - DNA, 120 bp, Artificial Sequence
  ENSG00000121895_0 (sequence is synthesized)
gcattaacctaaagtgctgcagagataaacttaaagcaggaagcaacataccatgaatgtactgcaagggaacacatttgtgtcatgtgaagagacatgacaaaaacagccctccttaaa

SEQ ID NO: 243462 - DNA, 120 bp, Artificial Sequence
  ENSG00000121895_1 (sequence is synthesized)
ttatttgtggcaatagtgatcacattcattttaattttgccggaatatttcaagacaccgaaagaaagaacattggagctatcatgtctggaagtgtgtttgcaatctaattttacctat

SEQ ID NO: 243463 - DNA, 120 bp, Artificial Sequence
  ENSG00000121895_2 (sequence is synthesized)
tcactctcctccttaaatttttcttttgtgacttttctgcaaccagtaagggaaactcagattatcatgagaatctttctaaatccctccaattttcgtaacttcaccaggacttgccaa

SEQ ID NO: 243464 - DNA, 120 bp, Artificial Sequence
  ENSG00000121895_3 (sequence is synthesized)
gacatcacaggtgaatttaaaatgtgctcctcgtgtttggtttgtgagtctaaaggaaacatggattttatttctcaggaacaaacatcaaaagttcttatcaggagaggatcaatggaa

SEQ ID NO: 243465 - DNA, 120 bp, Artificial Sequence
  ENSG00000121895_4 (sequence is synthesized)
gtgaaagcaaatgattttcattcaccttgtcagcactttaacttcagtgtagctcctctggttgaccacttggaggaatataacactacctgtcatctaaaaaaccacactggaagatca

SEQ ID NO: 243466 - DNA, 120 bp, Artificial Sequence
  ENSG00000121895_5 (sequence is synthesized)
acaatcatggaggatgagccaagcaaggagaaatcgataaactacacttgtagaatcatggaatacccgaatgattgtatacacatttctttgcacctagagatggatataaaaaatatc

SEQ ID NO: 243467 - DNA, 120 bp, Artificial Sequence
  ENSG00000121895_6 (sequence is synthesized)
acttgttccatgaagatcacttggtatattttagttctattagtttttatatttttgatcatcctcactatccgcaaaatacttgaaggccagagaagagtgcaaaagtggcagagtcat

SEQ ID NO: 243468 - DNA, 120 bp, Artificial Sequence
  ENSG00000121895_7 (sequence is synthesized)
agagacaaacctacatctgttctcttaagaggaagtgattcggagaaactgagagcattgaatgtgcaggttctttcagcagagaccacgcagaggctgcctttggatcaagtccaggaa

SEQ ID NO: 243469 - DNA, 120 bp, Artificial Sequence
  ENSG00000121895_8 (sequence is synthesized)
cttcccccaattccagaactataagttacttccacagtgcatcagtgagatcaatatacacgaatatccccgggcaagttggaccgagccctttgaagaatactcagaagtttattttgt

SEQ ID NO: 243470 - DNA, 120 bp, Artificial Sequence
  ENSG00000121895_9 (sequence is synthesized)
gaatgagtagactggaaaatgtttgtgtccagctgaggatgcacagttggaaagcaggaggaatgctgactggttgatgaaaactagcttaagagcattcattcgctccatgagatcaag

SEQ ID NO: 243471 - DNA, 120 bp, Artificial Sequence
  ENSG00000121895_10 (sequence is synthesized)
ggaacaagagtgtttgcaagaagccattatgagtcatggaaaaaaagatgatgaaacccatggaaacagcaagagaattcccactctctctcttcttaaaaaaaatctatcattatacag

SEQ ID NO: 243472 - DNA, 120 bp, Artificial Sequence
  ENSG00000121895_11 (sequence is synthesized)
cacagagtggagccaagtttttaattttgaggaaccaaaaacaggatcaaatatgaaaaccctttcttttattgggccacattgtagatgctgatttgataattgtttcctatgcagata

SEQ ID NO: 243473 - DNA, 120 bp, Artificial Sequence
  ENSG00000121895_12 (sequence is synthesized)
gattatttttatttcacagattatttaaaagggaagagggcctggttgtttatttatatgtttgtttgcatttatgaatcttgctgccttttagcaccaggatgtttttaaaaaaattca

SEQ ID NO: 243474 - DNA, 70 bp, Artificial Sequence
  ENSG00000121895_13 (sequence is synthesized)
ccaggatgtttttaaaaaaattctctgaggtgggaggatcatgaggtcaagggatcgagaccatcctggc

SEQ ID NO: 243475 - DNA, 60 bp, Artificial Sequence
  ENSG00000121895_14 (sequence is synthesized)
tttgcagtgaaccaagatcacgccactgcattacagcctggtgcagagcaagactctgtc

SEQ ID NO: 243476 - DNA, 68 bp, Artificial Sequence
  ENSG00000121895_15 (sequence is synthesized)
cttgaacctggcaggcagagtttgcagtgaaccaagatcacgccactgcattacagcctggcaataaa

SEQ ID NO: 243477 - DNA, 120 bp, Artificial Sequence
  ENSG00000121895_16 (sequence is synthesized)
tttcaagacaccgaaagaaacctggggctacaaaaaggaaagacaactctttgatcaaggagttttcagtcgggaggacaactgactggcaaacaactaaataaaatacaggaattaact

SEQ ID NO: 243478 - DNA, 120 bp, Artificial Sequence
  ENSG00000121895_17 (sequence is synthesized)
gaaacagggatgtaaacaagatgcaatggaaacataagtattgcttccacgtcagtctttgggaggacgttccttgtatttccatttgcaaagagaaataaataattgtcagagttcaaa

SEQ ID NO: 243479 - DNA, 77 bp, Artificial Sequence
  ENSG00000121895_18 (sequence is synthesized)
tgtcacccaggctggagtgcagtggcctgtcatggctcactgcagtctcaaatttctgggttcaagtgatcacctag

SEQ ID NO: 243480 - DNA, 120 bp, Artificial Sequence
  ENSG00000121895_19 (sequence is synthesized)
acaggagtgcaccaccacacctagctatattaaaattatttttgtagagaggagggcttgctctattgaccagtctggactcaaactcctgaactcaagtgatccttctgccttggcctc

SEQ ID NO: 243481 - DNA, 76 bp, Artificial Sequence
  ENSG00000121895_20 (sequence is synthesized)
gtgtttggtttgtgagtctaaaggaaacatggattttatttctcaggaacaaacatcaaaaggtaaacacaaagtg

SEQ ID NO: 243482 - DNA, 120 bp, Artificial Sequence
  ENSG00000121897_0 (sequence is synthesized)
ctgtcctttcccgggagttagcgatccctcaacccctgcactgcgctagtcctaaagaggaaatgtctctacgctgcggggatgcagcccgcaccctggggccccgggtatttgggagat

SEQ ID NO: 243483 - DNA, 120 bp, Artificial Sequence
  ENSG00000121897_1 (sequence is synthesized)
atttttgcagcccagtcagaccgttaagctccttgccagataaaaaaaaggaactcctacagaatggaccagaccttcaagattttgtatctggtgatcttgcagacaggagcacctggg

SEQ ID NO: 243484 - DNA, 120 bp, Artificial Sequence
  ENSG00000121897_2 (sequence is synthesized)
atgaatataaaggaaacctaaaacgccagaaaggagaaaggttaagactacctccatggctaaagacagagattcccatggggaaaaattacaataaactgaaaaatactttgcggaatt

SEQ ID NO: 243485 - DNA, 120 bp, Artificial Sequence
  ENSG00000121897_3 (sequence is synthesized)
taaatctccatacagtatgtgaggaagctcgatgtcccaatattggagagtgttggggaggtggagaatatgccaccgccacagccacgatcatgttgatgggtgacacatgtacaagag

SEQ ID NO: 243486 - DNA, 120 bp, Artificial Sequence
  ENSG00000121897_4 (sequence is synthesized)
gttgcagattttgttctgttaagactgcaagaaatcctcctccactggatgccagtgagccctacaatactgcaaaggcaattgcagaatggggtctggattatgttgtcctgacatctg

SEQ ID NO: 243487 - DNA, 120 bp, Artificial Sequence
  ENSG00000121897_5 (sequence is synthesized)
tggatcgagatgatatgcctgatgggggagctgaacacattgcaaagaccgtatcatatttaaaggaaaggaatccaaaaatccttgtggagtgtcttactcctgattttcgaggtgatc

SEQ ID NO: 243488 - DNA, 120 bp, Artificial Sequence
  ENSG00000121897_6 (sequence is synthesized)
tcaaagcaatagaaaaagttgctctgtcaggattagatgtgtatgcacataatgtagaaacagtcccggaattacagagtaaggttcgtgatcctcgggccaattttgatcagtccctac

SEQ ID NO: 243489 - DNA, 120 bp, Artificial Sequence
  ENSG00000121897_7 (sequence is synthesized)
gtgtactgaaacatgccaagaaggttcagcctgatgttatttctaaaacatctataatgttgggtttaggcgagaatgatgagcaagtatatgcaacaatgaaagcacttcgtgaggcag

SEQ ID NO: 243490 - DNA, 120 bp, Artificial Sequence
  ENSG00000121897_8 (sequence is synthesized)
atgtagactgcttgactttaggacaatatatgcagccaacaaggcgtcaccttaaggttgaagaatatattactcctgaaaaattcaaatactgggaaaaagtaggaaatgaacttggat

SEQ ID NO: 243491 - DNA, 120 bp, Artificial Sequence
  ENSG00000121897_9 (sequence is synthesized)
ttcattatactgcaagtggccctttggtgcgttcttcatataaagcaggtgaatttttcctgaaaaatctagtggctaaaagaaaaacaaaagacctctaaaacttcaacaagaccttca

SEQ ID NO: 243492 - DNA, 120 bp, Artificial Sequence
  ENSG00000121897_10 (sequence is synthesized)
agatcacagaaatttttaaaatttgattccagttaataacagaggtggtgccagaatgcctggactgcagtggatgtgccccacctctttgcttaaaaaaaaaaatgtcaatagccaggc

SEQ ID NO: 243493 - DNA, 120 bp, Artificial Sequence
  ENSG00000121897_11 (sequence is synthesized)
tgacaagagcaaaactccatctcaaataaataaaaaggaaaaaaaagtcaataaactgtacaaatttaattacagtaattcatttggcttttagtgtatcttctttgtcccaattaaaca

SEQ ID NO: 243494 - DNA, 90 bp, Artificial Sequence
  ENSG00000121897_12 (sequence is synthesized)
attttcttttaacataattttaaaatgcattaaaaacatggcatggtggctcacacctataatcccaacattttgggaggccagggcggg

SEQ ID NO: 243495 - DNA, 120 bp, Artificial Sequence
  ENSG00000121897_13 (sequence is synthesized)
tagccagacgtggtggcacgcacccgtagtcccagctactcaggctgaggtgagaggatcacttgaacctggaaagcagaggttgcaatgagctgaggtggtgccactgctctccagcct

SEQ ID NO: 243496 - DNA, 120 bp, Artificial Sequence
  ENSG00000121897_14 (sequence is synthesized)
gggcgctacaactgctctccagactctgtcttgaaaaaaaaacccaaaaacttccagaagattttccaatccactgttaacatcattacatttcatttatgaaaaataaaaacttcattt

SEQ ID NO: 243497 - DNA, 120 bp, Artificial Sequence
  ENSG00000121897_15 (sequence is synthesized)
atgttactgtgatgaaacagtcaacatagattgaaactcatcagtttagcatttcattcaactttagcattcattcaacgtagattgaaactcatcagattagcatttgtccttgtaata

SEQ ID NO: 243498 - DNA, 89 bp, Artificial Sequence
  ENSG00000121897_16 (sequence is synthesized)
tagattgaaactcatcagattagcatttgtccttgtaatattggaataatttagaaaggcttaagagtgaatgttggccagactgagag

SEQ ID NO: 243499 - DNA, 86 bp, Artificial Sequence
  ENSG00000121897_17 (sequence is synthesized)
agatcacctgaggtcgggagtttgagaacagcctggccaacctggtgaaactccattgctactaaaaataaaaaaattagctaggt

SEQ ID NO: 243500 - DNA, 76 bp, Artificial Sequence
  ENSG00000121897_18 (sequence is synthesized)
gtaaatgttgattttttacattggtgtgactacttcagaacctgcaaaatagttttatgctgattacatttagtcc

SEQ ID NO: 243501 - DNA, 120 bp, Artificial Sequence
  ENSG00000121897_19 (sequence is synthesized)
agaacctgcaaaatagttttatgctgattacatttagtccctctgaaaacaccaaggccataatgctgcctaagacatggaaatagaacctagaaatattaacccttatttgtatagtag

SEQ ID NO: 243502 - DNA, 120 bp, Artificial Sequence
  ENSG00000121897_20 (sequence is synthesized)
cttgctaaatccacatgccctattcctttcatttctcacattggttgtattatatgatggtaaaggcctgagaaaggaatttccttccaaaatactaataactcagattcatcttttgac

SEQ ID NO: 243503 - DNA, 120 bp, Artificial Sequence
  ENSG00000121897_21 (sequence is synthesized)
tgaatcctgcctttctactttttctgcatatctaaaaggacacttttaggtggccatgttgtaaaatatgtaaagtggatagccaattctgttttgaattcttataacgagccagtatta

SEQ ID NO: 243504 - DNA, 84 bp, Artificial Sequence
  ENSG00000121897_22 (sequence is synthesized)
agccaattctgttttgaattcttataacgagccagtattataaaagtaatgcacatccttcttgggaggctgaggcgggtgaat

SEQ ID NO: 243505 - DNA, 120 bp, Artificial Sequence
  ENSG00000121897_23 (sequence is synthesized)
gagatcacatcactgtactccagcctgggtgacagagaccgtgtctcaaaaaaaatttttttaagtaatgcatgggccgggcatggtggcttaatgcctgtaattccaacgttttgggag

SEQ ID NO: 243506 - DNA, 120 bp, Artificial Sequence
  ENSG00000121897_24 (sequence is synthesized)
aattacagaggtgaatacgtgtacaaagtaatgttgggaagttaggcgggtcaaaatatgccatatattcttgccttttccagggctgaactttgccattgacttttacaaagtaaactc

SEQ ID NO: 243507 - DNA, 120 bp, Artificial Sequence
  ENSG00000121897_25 (sequence is synthesized)
tattcttttttgttttttaggcaaactcaatctatgtctcttacataaaaatcagaaaatatcaccaacaaaatcagcataaatatcacccataatagtatttccacccagcaatatcag

SEQ ID NO: 243508 - DNA, 120 bp, Artificial Sequence
  ENSG00000121897_26 (sequence is synthesized)
tttttatattacaaacattaagatgttagtaactcatattactaagttactgtgtgtgttttaatacccacaaataattaacatcttttttcttttgttttaaaataatatcatactgca

SEQ ID NO: 243509 - DNA, 120 bp, Artificial Sequence
  ENSG00000121897_27 (sequence is synthesized)
acatcttttttcttttgttttaaaataatatcatactgcaaatttcaataagttgtttgtttccccctccccacaaataaagttttcaaaggagggaaaaaattacactagagcaattgc

SEQ ID NO: 243510 - DNA, 88 bp, Artificial Sequence
  ENSG00000121897_28 (sequence is synthesized)
agttttcaaaggagggaaaaaattacactagagcaattgctttggttgtaattctaaagaaaagacttcaaaaatatatttggctgga

SEQ ID NO: 243511 - DNA, 120 bp, Artificial Sequence
  ENSG00000121897_29 (sequence is synthesized)
cattatgaatctctggtcagatttttcattacatttgcatttatgaaaaatattaagaaaaaacctgatggaataatccaacctgttgtaatctcacccttctctgaataaatctattat

SEQ ID NO: 243512 - DNA, 120 bp, Artificial Sequence
  ENSG00000121897_30 (sequence is synthesized)
tggttctttcatttatgtgatagttaatcacgtgctgccttgagatacctctcctatcaatgtttggaaacattattcatgattgcttagctttttatgtgttttctgtttaacatattc

SEQ ID NO: 243513 - DNA, 120 bp, Artificial Sequence
  ENSG00000121897_31 (sequence is synthesized)
aacaagaaggagctgtgctttctgtttttacatccatagagacctgtacattgatctgtcatatattttatgtcttttaaaatcatctttttttattattgaatagatataaaagtatct

SEQ ID NO: 243514 - DNA, 84 bp, Artificial Sequence
  ENSG00000121897_32 (sequence is synthesized)
taccacgcttggctaatgtttttacatttttttttagagacggaatcttgctatgttccccaggctggtctcaaactcctgacc

SEQ ID NO: 243515 - DNA, 120 bp, Artificial Sequence
  ENSG00000121897_33 (sequence is synthesized)
caggctggtctcaaactcctgacctcaaccaatactcctgcctcgccctcccaaagtgctgagattattctaattttctacagctcagtactagtttggcacctaagcgcacttagtaaa

SEQ ID NO: 243516 - DNA, 120 bp, Artificial Sequence
  ENSG00000121897_34 (sequence is synthesized)
aagcgcacttagtaaattttttaaatgattccctagtattttctattttctatttactatagttcatttttgaaaaatctgtttgcaatccactaggtttattttacaagcttcagtggg

SEQ ID NO: 243517 - DNA, 120 bp, Artificial Sequence
  ENSG00000121897_35 (sequence is synthesized)
aagaccagcctgggcaacatagggagatgctgtctctacaaaaaataaattaaaaaaaaaaaatagctggatgtggtagcatgtgcccatagtcctacctgcttgggaggctgaggcaga

SEQ ID NO: 243518 - DNA, 120 bp, Artificial Sequence
  ENSG00000121897_36 (sequence is synthesized)
atagtcctacctgcttgggaggctgaggcagaaggattgcgtgagcccaggagtttaaagttacagtgagctatgatgcactgggcaacagagcaagaccctgtttttatttaaaaaaaa

SEQ ID NO: 243519 - DNA, 120 bp, Artificial Sequence
  ENSG00000121897_37 (sequence is synthesized)
aaaattataggatatgttctttgaatatctcttatattcatgataagggtgtacatgtggtcttttctacatctgttctttcagggaacaactccagacactttgccagtgggtttgtga

SEQ ID NO: 243520 - DNA, 120 bp, Artificial Sequence
  ENSG00000121897_38 (sequence is synthesized)
aaaaatgtgtcagctgtttcagtcgtttttgctggtgtcaaagggaacagctctgtgacccagttcacattataatacttggatgaatagatatagccacaatataaataggaagattaa

SEQ ID NO: 243521 - DNA, 120 bp, Artificial Sequence
  ENSG00000121897_39 (sequence is synthesized)
tgtttagctcgtacttcgtttaacaaagctcatgactcagcaacccagaaaatagtttttaaaacccgtagcacttgtgaaatatttgcctagaggaagggaggagagcatgatttgatg

SEQ ID NO: 243522 - DNA, 120 bp, Artificial Sequence
  ENSG00000121897_40 (sequence is synthesized)
agagcatgatttgatgactttttaaagaaatcaaaattaaagcaatcaaataatactcacatttatataagaaatacttcaatttactttccaatgagtaaagttttatatttaatgttt

SEQ ID NO: 243523 - DNA, 120 bp, Artificial Sequence
  ENSG00000121897_41 (sequence is synthesized)
agtttcttgcaattatttactttttctaaaacctacttaaattaggtttaaaagtctactatatataatttgaaattttattcagtttgcctacaggtgtgttttaaccactgtgtacat

SEQ ID NO: 243524 - DNA, 90 bp, Artificial Sequence
  ENSG00000121897_42 (sequence is synthesized)
ttggatttcattatactgcaagtggccctttggtgcgttcttcatataaagcaggatcttgctgatcggctcattgcaaccttgacctcc

SEQ ID NO: 243525 - DNA, 66 bp, Artificial Sequence
  ENSG00000121897_43 (sequence is synthesized)
tgagtagctgggactacagacacatgctaccactcctcactaattttttttctattatttgtagag

SEQ ID NO: 243526 - DNA, 120 bp, Artificial Sequence
  ENSG00000121897_44 (sequence is synthesized)
cctcccatagtgaggcagaaattagagaaagaagaaataaaaactaaaagagaaagacacgttttcctgtattaggttgtctcatcccaaaaagcagtaacagacagagcccaggtgcag

SEQ ID NO: 243527 - DNA, 120 bp, Artificial Sequence
  ENSG00000121897_45 (sequence is synthesized)
gcaaggtcctgataacactatctaagaagtcagaacccaaaaggaatgtgctctggaggctctcccagcactccccaacataaggataagaaaaacaaaattcctcttttagccctttac

SEQ ID NO: 243528 - DNA, 120 bp, Artificial Sequence
  ENSG00000121897_46 (sequence is synthesized)
cacctccccataaatattttgcaagttttagaagttcctgtttctccttcaatgcaactgcaaggtcacaagctatgctagagattacgagacctgtcactgtttcattaactgtcttta

SEQ ID NO: 243529 - DNA, 120 bp, Artificial Sequence
  ENSG00000121897_47 (sequence is synthesized)
ttctgcttctgtaagctttcttataaaaattgagccctgtctttgttctggcctcaattttttggatatgaatccactgagccagcatacaccttaataaaaatcctcctgtaacaccca

SEQ ID NO: 243530 - DNA, 120 bp, Artificial Sequence
  ENSG00000121897_48 (sequence is synthesized)
ggagaaattctgttaaaaagtgatttctataatgtcagtttcagttacttttaagttcataaatttgtttcttctctttcctgttaactagtctccaatgaaaaacaattacagaaaata

SEQ ID NO: 243531 - DNA, 120 bp, Artificial Sequence
  ENSG00000121897_49 (sequence is synthesized)
aagctgcattagaattgaaatgaaatccagtttaacatcagaagctttctggccttttggcttaaaggataagtcatttaagccatggtggtttggccattgttgaagtctaggacacag

SEQ ID NO: 243532 - DNA, 120 bp, Artificial Sequence
  ENSG00000121897_50 (sequence is synthesized)
cctgttccaacctcatcatgataccaccaccagtgggtgccagtttccctggtttcacttaaaaacatgatcctttccagtgaaaattccagaatcatgcatttctttacctaatatgtg

SEQ ID NO: 243533 - DNA, 120 bp, Artificial Sequence
  ENSG00000121897_51 (sequence is synthesized)
gcagtgttgtatacttaccagcagagggcagcttagtcttcagaaaagaaatgaacttgaaagtttcaaccctctgacatgtgggttcagcttatttttttctttgttcagtatggagac

SEQ ID NO: 243534 - DNA, 120 bp, Artificial Sequence
  ENSG00000121897_52 (sequence is synthesized)
tctcttacttctgctttttttcctttctcttctaatttttcgcttcagaattctggtttctcaatgcataaactgaagtaatttcttccattctacttttctctgccccaggcttgagat

SEQ ID NO: 243535 - DNA, 120 bp, Artificial Sequence
  ENSG00000121897_53 (sequence is synthesized)
agaactagggagcccagtgaggccttttctttcctaaattaacaggcatctgtgcataaatgctacctttgaactatgtgatttaagataatgtgcagaatgtacttctctggtctttca

SEQ ID NO: 243536 - DNA, 120 bp, Artificial Sequence
  ENSG00000121897_54 (sequence is synthesized)
tgcaagtggccctttggtgcgttcttcatataaagcaggtaagttagattgtggggcatggtttcatttaggccgttaactttccacattaagttctaccaccagtcactaaaactcttg

SEQ ID NO: 243537 - DNA, 120 bp, Artificial Sequence
  ENSG00000121897_55 (sequence is synthesized)
acaaattctaatacctttggtggtcttggtagagggcgtagtttttcttctggaacatccttaggagctttgctccatggggatcatattaagaaaagtttctcttaatcttttgtttct

SEQ ID NO: 243538 - DNA, 120 bp, Artificial Sequence
  ENSG00000121897_56 (sequence is synthesized)
taaacaaattcagccccctgctttgtaactcagctactatagtaaaagcagaaacaattagtttattaattttttctatgtgtagatttcagtagtaggttattcagaaatgacagagca

SEQ ID NO: 243539 - DNA, 120 bp, Artificial Sequence
  ENSG00000121897_57 (sequence is synthesized)
tgtcaagcatctaatagggttttctgagaaatacatatttatttggaaatgatgccagctgcatctccagactcagtttcaatcagtttaagcactgaaaagtatcttatttgatagcat

SEQ ID NO: 243540 - DNA, 120 bp, Artificial Sequence
  ENSG00000121897_58 (sequence is synthesized)
ccaggagttcaagaccagctgggcaacatggtaaaaccttgtccatacaaaaaaaaagtttttaaaaattagctgggcatggtggcacttgcctgtatacccaacttctgaggaggctga

SEQ ID NO: 243541 - DNA, 120 bp, Artificial Sequence
  ENSG00000121897_59 (sequence is synthesized)
aaaaaaaaaaaaagaaaaaaactcatatcattcagatgtactttttaaaaaaagtagacactatgctttcttattcctaataatttcagtaattaagactaatcattggcaagtaacact

SEQ ID NO: 243542 - DNA, 120 bp, Artificial Sequence
  ENSG00000121897_60 (sequence is synthesized)
gatgtaagaaaaaaagtaaggattgttatccacatccattcaaattttagaaaaatgaacattttaagcttcgggcaagagtaatatcatttttttctttaattttagcatttagcagtg

SEQ ID NO: 243543 - DNA, 120 bp, Artificial Sequence
  ENSG00000121897_61 (sequence is synthesized)
cttgcatcattaaatttctttgtatttttcccccagaggcaacagaaaaatatccataagattatttttctccgtaggaacgtttagttgttttactagctacaatgcaaatttttttta

SEQ ID NO: 243544 - DNA, 120 bp, Artificial Sequence
  ENSG00000121897_62 (sequence is synthesized)
cttttggaatttcagctcttattttaatcaatagcttgaattgatttatgaaaagaaaatcattttccaagggataaaaagtcatgtgataatgattgtcggaggatccaaaagaacata

SEQ ID NO: 243545 - DNA, 120 bp, Artificial Sequence
  ENSG00000121897_63 (sequence is synthesized)
tctgaagaccgaatttaatctagaaagtgtttatgatgtccctgtcagttggacttaacaattataatgattaagaataaattggctggccaggtgggccaccgcacccggctgaccttg

SEQ ID NO: 243546 - DNA, 90 bp, Artificial Sequence
  ENSG00000121897_64 (sequence is synthesized)
attggctggccaggtgggccaccgcacccggctgaccttgtctctttaaaaataaactaggtattggccaggcgtggtggctaatgcctg

SEQ ID NO: 243547 - DNA, 80 bp, Artificial Sequence
  ENSG00000121897_65 (sequence is synthesized)
ggttgcagtgagccaagatcctgccactccactccagcctggcgaaagagcaacactctgtctccaaaagaaaaaatata

SEQ ID NO: 243548 - DNA, 120 bp, Artificial Sequence
  ENSG00000121897_66 (sequence is synthesized)
ggtattttttttttttatctaaagtggtgatgttttaaatgattgctttatatattggggtctaaatcttaaatatgtttaaattagacaaattctatttgaaaaaattaatgctccagt

SEQ ID NO: 243549 - DNA, 89 bp, Artificial Sequence
  ENSG00000121897_67 (sequence is synthesized)
aaattagacaaattctatttgaaaaaattaatgctccagtattagtaatattctgtatgttcctagttcctataaagacatctcctagc

SEQ ID NO: 243550 - DNA, 74 bp, Artificial Sequence
  ENSG00000121897_68 (sequence is synthesized)
ctacaaaaatacaaaaattagctgggtggctgagttgctgggtggtggtgggcacctctagttctagctaccca

SEQ ID NO: 243551 - DNA, 120 bp, Artificial Sequence
  ENSG00000121897_69 (sequence is synthesized)
agtaatttaaaacattttaatgaactagtagctcatcatagtttgaaaacccaagaatttgattcagcactgagtgacagaatgtggggactttgaaaaccagtaattgtaagtgattta

SEQ ID NO: 243552 - DNA, 120 bp, Artificial Sequence
  ENSG00000121897_70 (sequence is synthesized)
gtcttcaagcagcactgctggcaagctaaaaatacatgtgaaggatagaaccactatcagcttctagaatggttagagtaatgtcctttgaaaggagtttttcttttgctaaagaaaaat

SEQ ID NO: 243553 - DNA, 120 bp, Artificial Sequence
  ENSG00000121897_71 (sequence is synthesized)
ttctaacataaaaggaagtaaattatgaactttctgatgctttctaaattaccaggaaaagatcagattctggtatatgatgagcattagactaaaatgatggattagggtctgataaag

SEQ ID NO: 243554 - DNA, 120 bp, Artificial Sequence
  ENSG00000121897_72 (sequence is synthesized)
ttggtgctactcccacgacatttggaggaggtatggagcagcatggattacttggctgggttatgagccttgggatttgcagagattatatgtagatagactcatcacagttctactcat

SEQ ID NO: 243555 - DNA, 120 bp, Artificial Sequence
  ENSG00000121897_73 (sequence is synthesized)
atgtaagatgacaaagagaagttaatcagactcctcataaaatcaggcctctagtgctgcactctaccaataagcattgagtcatgctgtaagagcaatagactaaatggaacactaatg

SEQ ID NO: 243556 - DNA, 120 bp, Artificial Sequence
  ENSG00000121897_74 (sequence is synthesized)
gcctaaaaagagaatgtgccctctaagctgctaacttattgcgtaggcacaactcaggcggtggggagaaagcccattacaaatgaagagctcttgcttccctagaggggaataagctaa

SEQ ID NO: 243557 - DNA, 120 bp, Artificial Sequence
  ENSG00000121897_75 (sequence is synthesized)
agagattccatcagatgcgtctgctcagctgcaacgagatctgttttataaacatcagatccagcctaataatgtagcaaaattgctcttggaaatgaattttgccaagagcaatacttt

SEQ ID NO: 243558 - DNA, 120 bp, Artificial Sequence
  ENSG00000121897_76 (sequence is synthesized)
gacagtgatgagggatagatagtgcacataaagtagaattaatgtgcagacccatatatacagtagggtcaccctttgtaatattggcttactagaaagaataatagtaggagactctag

SEQ ID NO: 243559 - DNA, 120 bp, Artificial Sequence
  ENSG00000121897_77 (sequence is synthesized)
tcattattgctggggagaaaggccaaagataataggggatatttaggttagaaaaatattgccattgaggtttgagaagagagaagtgccaataaatacaaaagtcttctttaaaggggg

SEQ ID NO: 243560 - DNA, 120 bp, Artificial Sequence
  ENSG00000121897_78 (sequence is synthesized)
aacaccaaaaatataattctgaaatagttgtctcactgttatttactttaaattgatattaatgtgttttcctttttcctaaataggtgaatttttcctgaaaaatctagtggctaaaag

SEQ ID NO: 243561 - DNA, 80 bp, Artificial Sequence
  ENSG00000121898_0 (sequence is synthesized)
ccgctctgctgtgccctgcgcccttgccccgcgccagcttctgcgcccgcagcccgcccggcgcccccggtgaccgtgac

SEQ ID NO: 243562 - DNA, 120 bp, Artificial Sequence
  ENSG00000121898_1 (sequence is synthesized)
ggtgaccgtgaccctgccctgggcgcggggcggagcaggcatgtcccgcccggggaccgctaccccagcgctggccctggtgctcctggcagtgaccctggccggggtcggagcccaggg

SEQ ID NO: 243563 - DNA, 120 bp, Artificial Sequence
  ENSG00000121898_2 (sequence is synthesized)
ggaccctgattattacgggcaggagatctggagccgggagccctactacgcgcgcccggagcccgagctcgagaccttctctccgccgctgcctgcggggcccggggaggagtgggagcg

SEQ ID NO: 243564 - DNA, 120 bp, Artificial Sequence
  ENSG00000121898_3 (sequence is synthesized)
gcgcccgcaggagcccaggccgcccaagagggccaccaagcccaagaaagctcccaagagggagaagtcggctccggagccgcctccaccaggtaaacacagcaacaaaaaagttatgag

SEQ ID NO: 243565 - DNA, 120 bp, Artificial Sequence
  ENSG00000121898_4 (sequence is synthesized)
aaccaagagctctgagaaggctgccaacgatgatcacagtgtccgtgtggcccgtgaagatgtcagagagagttgcccacctcttggtctggaaaccttaaaaatcacagacttccagct

SEQ ID NO: 243566 - DNA, 120 bp, Artificial Sequence
  ENSG00000121898_5 (sequence is synthesized)
ccatgcctccacggtgaagcgctatggcctgggggcacatcgagggagactcaacatccaggcgggcattaatgaaaatgatttttatgacggagcgtggtgcgcgggaagaaatgacct

SEQ ID NO: 243567 - DNA, 120 bp, Artificial Sequence
  ENSG00000121898_6 (sequence is synthesized)
ccagcagtggattgaagtggatgctcggcgcctgaccagattcactggtgtcatcactcaagggaggaactccctctggctgagtgactgggtgacatcctataaggtcatggtgagcaa

SEQ ID NO: 243568 - DNA, 120 bp, Artificial Sequence
  ENSG00000121898_7 (sequence is synthesized)
tgacagccacacgtgggtcactgttaagaatggatctggagacatgatatttgagggaaacagtgagaaggagatccctgttctcaatgagctacccgtccccatggtggcccgctacat

SEQ ID NO: 243569 - DNA, 120 bp, Artificial Sequence
  ENSG00000121898_8 (sequence is synthesized)
ccgcataaaccctcagtcctggtttgataatgggagcatctgcatgagaatggagatcctgggctgcccactgccagatcctaataattattatcaccgccggaacgagatgaccaccac

SEQ ID NO: 243570 - DNA, 120 bp, Artificial Sequence
  ENSG00000121898_9 (sequence is synthesized)
tgatgacctggattttaagcaccacaattataaggaaatgcgccagttgatgaaagttgtgaatgaaatgtgtcccaatatcaccagaatttacaacattggaaaaagccaccagggcct

SEQ ID NO: 243571 - DNA, 120 bp, Artificial Sequence
  ENSG00000121898_10 (sequence is synthesized)
gaagctgtatgctgtggagatctcagatcaccctggggagcatgaagtcggtgagcccgagttccactacatcgcgggggcccacggcaatgaggtgctgggccgggagctgctgctgct

SEQ ID NO: 243572 - DNA, 120 bp, Artificial Sequence
  ENSG00000121898_11 (sequence is synthesized)
gctggtgcagttcgtgtgtcaggagtacttggcccggaatgcgcgcatcgtccacctggtggaggagacgcggattcacgtcctcccctccctcaaccccgatggctacgagaaggccta

SEQ ID NO: 243573 - DNA, 120 bp, Artificial Sequence
  ENSG00000121898_12 (sequence is synthesized)
cgaagggggctcggagctgggaggctggtccctgggacgctggacccacgatggaattgacatcaacaacaactttcctgatttaaacacgctgctctgggaggcagaggatcgacagaa

SEQ ID NO: 243574 - DNA, 120 bp, Artificial Sequence
  ENSG00000121898_13 (sequence is synthesized)
tgtccccaggaaagttcccaatcactatattgcaatccctgagtggtttctgtcggaaaatgccacggtggctgccgagaccagagcagtcatagcctggatggaaaaaatcccttttgt

SEQ ID NO: 243575 - DNA, 120 bp, Artificial Sequence
  ENSG00000121898_14 (sequence is synthesized)
ccctggaagacgcaggaacacacccccacccccgacgaccacgtgttccgctggctggcctactcctatgcctccacacaccgcctcatgacagacgcccggaggagggtgtgccacacg

SEQ ID NO: 243576 - DNA, 120 bp, Artificial Sequence
  ENSG00000121898_15 (sequence is synthesized)
gaggacttccagaaggaggagggcactgtcaatggggcctcctggcacaccgtcgctggaagtctgaacgatttcagctaccttcatacaaactgcttcgaactgtccatctacgtgggc

SEQ ID NO: 243577 - DNA, 120 bp, Artificial Sequence
  ENSG00000121898_16 (sequence is synthesized)
tgtgataaatacccacatgagagccagctgcccgaggagtgggagaataaccgggaatctctgatcgtgttcatggagcaggttcatcgtggcattaaaggcttggtgagagattcacat

SEQ ID NO: 243578 - DNA, 120 bp, Artificial Sequence
  ENSG00000121898_17 (sequence is synthesized)
ggaaaaggaatcccaaacgccattatctccgtagaaggcattaaccatgacatccgaacagccaacgatggggattactggcgcctcctgaaccctggagagtatgtggtcacagcaaag

SEQ ID NO: 243579 - DNA, 120 bp, Artificial Sequence
  ENSG00000121898_18 (sequence is synthesized)
gccgaaggtttcactgcatccaccaagaactgtatggttggctatgacatgggggccacaaggtgtgacttcacacttagcaaaaccaacatggccaggatccgagagatcatggagaag

SEQ ID NO: 243580 - DNA, 120 bp, Artificial Sequence
  ENSG00000121898_19 (sequence is synthesized)
tttgggaagcagcccgtcagcctgccagccaggcggctgaagctgcgggggcagaagagacgacagcgtgggtgaccctcctgggcccttgagactcgtctgggacccatgcaaattaaa

SEQ ID NO: 243581 - DNA, 120 bp, Artificial Sequence
  ENSG00000121898_20 (sequence is synthesized)
ccaacctggtagtagctccatagtggactcactcactgttgtttcctctgtaattcaagaagtgcctggaagagagggtgcattgtgaggcaggtcccaaaagggaaggctggaggctga

SEQ ID NO: 243582 - DNA, 120 bp, Artificial Sequence
  ENSG00000121898_21 (sequence is synthesized)
ggctgttttcttttctttgttcccatttatccaaataacttggacagagcagcagagaaaagctgatgggagtgagagaactcagcaagccaacctgggaatcagagagagaaggagaag

SEQ ID NO: 243583 - DNA, 120 bp, Artificial Sequence
  ENSG00000121898_22 (sequence is synthesized)
gaggggagcctgtccgttcagagcctctggctgcatagaaaaggattctggtgcttcccctgtttgcgtggcagcaagggttccacgtgcatttgcaatttgcacagctaaaattgcagc

SEQ ID NO: 243584 - DNA, 120 bp, Artificial Sequence
  ENSG00000121898_23 (sequence is synthesized)
atttccccagctgggctgtcccaaatgttaccatttgagatgctcccaggcgtcctaagagaatccaccctctctggccctgggacattgcaagctgctacaaataaattctgtgttctt

SEQ ID NO: 243585 - DNA, 120 bp, Artificial Sequence
  ENSG00000121898_24 (sequence is synthesized)
ttgacaatagcgtcattgccaagtgcacatcagtgagcctcttgaatctgtttagtctcctttttcaacaaaggagtgtgttcagaaaaggagagagaggctgagatcattcaggagttt

SEQ ID NO: 243586 - DNA, 120 bp, Artificial Sequence
  ENSG00000121898_25 (sequence is synthesized)
gttgggcagcaagcatggagcttcttgcacaaattctgggtccataaacaacccccaaagtccctgctgatccagtagccctggaggttccccaggtagggagagccagaggtgccagcc

SEQ ID NO: 243587 - DNA, 120 bp, Artificial Sequence
  ENSG00000121898_26 (sequence is synthesized)
ttcctgaagggccagaaaatttagcctggatctcctcttttacctgctaggactggaaagagccagaagtggggtggcctgaagccctctctctgcttgaggtattgcccctgtgtggaa

SEQ ID NO: 243588 - DNA, 120 bp, Artificial Sequence
  ENSG00000121898_27 (sequence is synthesized)
ttgagtgctcatgggttggcctcatatcagcctgggagttatttttgatatgtagaatgccagatcttccagattaggctaaatgtaatgaaaacctcttaggattatctgtggagcatc

SEQ ID NO: 243589 - DNA, 120 bp, Artificial Sequence
  ENSG00000121898_28 (sequence is synthesized)
agtttgggaagaattattgaattatcttgcaagaaaaaagtatgtctcactttttgttaatgttgctgcctcattgacctgggaaaaatgaaaaaaaaaaataaagcaaatggtaagacc

SEQ ID NO: 243590 - DNA, 120 bp, Artificial Sequence
  ENSG00000121898_29 (sequence is synthesized)
gggggctttcttgggcttggctgcttggaacacctgcctccaaggaccggcctcggaggggtcgccgggaaagggagggaagaaggaagggcggggccggcccccctgcgcccgccccgc

SEQ ID NO: 243591 - DNA, 69 bp, Artificial Sequence
  ENSG00000121898_30 (sequence is synthesized)
gcttttgctcttcctcactctagtcctgaccctgttaccaccaaaatatccccactgaggaacttctag

SEQ ID NO: 243592 - DNA, 120 bp, Artificial Sequence
  ENSG00000121898_31 (sequence is synthesized)
attcagtggatgaagagtacttattgctagaatgttcttcctcatatgaacttgacaacgttctgctctctaattccatttatttagctgtttcgaattgaatttgacagtttctagatc

SEQ ID NO: 243593 - DNA, 120 bp, Artificial Sequence
  ENSG00000121898_32 (sequence is synthesized)
tcccagggttatgaataaggtaaacacagcaacaaaaaagttatgagaaccaagagctctgagaaggctgccaacgatgatcacagtgtccgtgtggcccgtgaagatgtcagagagagt

SEQ ID NO: 243594 - DNA, 120 bp, Artificial Sequence
  ENSG00000121898_33 (sequence is synthesized)
gggtaggtaaagaagaggcatggaggtgaatgcaggcagcagctttcagggaagaagaagcatcaggctgcagaccttgcctcctccctgccctgatggcaggactgaggcctcccaggg

SEQ ID NO: 243595 - DNA, 85 bp, Artificial Sequence
  ENSG00000121898_34 (sequence is synthesized)
ctgaagctgtatgctgtggagatctcagatcaccctggggagcatgaagtcgggtctcattccgtctttacaacctccacctttt

SEQ ID NO: 243596 - DNA, 120 bp, Artificial Sequence
  ENSG00000121898_35 (sequence is synthesized)
atgaggataaactgagactcttcgctattgaaattctattgccaggcgcatcccccagcccacagtgaatggaattggattattctgaagcacaatcagtattccaagtacatggtttct

SEQ ID NO: 243597 - DNA, 120 bp, Artificial Sequence
  ENSG00000121898_36 (sequence is synthesized)
gtaatgggataattggctgcccctggtcctagacaacacctgaagtttaatttctctgaaaggctctgccttgagcttgctttaaaacctgcaattataaggagacacctaatgagacca

SEQ ID NO: 243598 - DNA, 120 bp, Artificial Sequence
  ENSG00000121898_37 (sequence is synthesized)
ggaggaaacttctacaccgcacagctatttttaaaaaatgggattaacaggagaaaatgtcaaacagggggatctccatgtttctgcaatgcatgacaggttacccagcgttccaaataa

SEQ ID NO: 243599 - DNA, 80 bp, Artificial Sequence
  ENSG00000121900_0 (sequence is synthesized)
gatgggagcagggtcccccggcggcccgcagcctcgggagccgcgctgaagccgggggcgggaccagcgcggagccgaca

SEQ ID NO: 243600 - DNA, 120 bp, Artificial Sequence
  ENSG00000121900_1 (sequence is synthesized)
aagccgggggcgggaccagcgcggagccgacatgtgtctgcgcctcggaggcctgagtgtgggcgacttccggaaggtgctgatgaagacaggcctggtgctggtggtgctgggccatgt

SEQ ID NO: 243601 - DNA, 120 bp, Artificial Sequence
  ENSG00000121900_2 (sequence is synthesized)
gagcttcatcacagctgccctgttccatggcacagtgctgcgctacgtgggcacccctcaagatgcggtggctctgcagtactgcgtggtcaacatcctctctgtcacttccgccatcgt

SEQ ID NO: 243602 - DNA, 120 bp, Artificial Sequence
  ENSG00000121900_3 (sequence is synthesized)
ggtcatcacttcaggcatcgcagccatcgtgttgtcacgctacctccctagcacccccctgcgctggacagtgtttagctcgagcgtggcctgtgctctcctttctctgacctgtgccct

SEQ ID NO: 243603 - DNA, 120 bp, Artificial Sequence
  ENSG00000121900_4 (sequence is synthesized)
gggagctctgaactactggccctcgcacctgactgtcccttcgaccccacacgcatttatagctccagcctgtgcctctggggcatcgccctagtgctctgcgtggcggagaacgtgttt

SEQ ID NO: 243604 - DNA, 120 bp, Artificial Sequence
  ENSG00000121900_5 (sequence is synthesized)
gctgtacgctgtgctcagctcacccaccagctgctggagctgaggccctggtgggggaaaagcagccaccacatgatgcgggagaacccagagctggtggagggccgtgacctgctgagc

SEQ ID NO: 243605 - DNA, 120 bp, Artificial Sequence
  ENSG00000121900_6 (sequence is synthesized)
tgcaccagctctgagcctctgaccctctgagagatgatgtcctgcccaggcccgatggccactaggaccctgcaagcaactctgctctgtgaccaggccaggattcctggagctggcctg

SEQ ID NO: 243606 - DNA, 120 bp, Artificial Sequence
  ENSG00000121900_7 (sequence is synthesized)
agagggctcaatggaccctcggggacccaagtggggctttcaaccctctcccccaccacccagcccactgcactgaaatgagactttattctgaaattattaaaaagaacagagatgctc

SEQ ID NO: 243607 - DNA, 120 bp, Artificial Sequence
  ENSG00000121900_8 (sequence is synthesized)
cctgactgtcccttcgaccccacacgcatttatgtgagtacctaggcctggagtaggggcaccaggccctcgcacgggtgggaagggctcttggaatccaccctccacccccaactccag

SEQ ID NO: 243608 - DNA, 120 bp, Artificial Sequence
  ENSG00000121900_9 (sequence is synthesized)
ggagggtttcacagagtgcaggcctctgacctggaaaggggtgtcccatgcataccctggcatgccccggtggccccaggatacatgaacctgcttgagacacaggcttaggagtgggga

SEQ ID NO: 243609 - DNA, 120 bp, Artificial Sequence
  ENSG00000121903_0 (sequence is synthesized)
gagcccgggagcacttccgccctgttgtgaagtgggtgtctcgagccttggggagcagtcccttttctaggagcctcttgaaggactcaccgtagatgcaggaagacattggatgaggtc

SEQ ID NO: 243610 - DNA, 120 bp, Artificial Sequence
  ENSG00000121903_1 (sequence is synthesized)
agcatagctgaagtgaggtgtctgggttagacaatggctatggccctggaattgcaagcccaggcatctccgcagccagagcctgaagaactcctgattgtgaaactggaagaggactct

SEQ ID NO: 243611 - DNA, 120 bp, Artificial Sequence
  ENSG00000121903_2 (sequence is synthesized)
tggggatcagaatccaaactctgggagaaggaccgtggctctgtctctggcccagaggcctcccgccagcgcttcaggcaattccaatacagggatgcagctggaccccacgaggccttc

SEQ ID NO: 243612 - DNA, 120 bp, Artificial Sequence
  ENSG00000121903_3 (sequence is synthesized)
agccagctctgggctctctgctgtcgttggctgaggccggagatccgtctcaaagagcagatcctggagctgctcgtgctggagcagttcctgactatcttgcctagggaggtccagacc

SEQ ID NO: 243613 - DNA, 120 bp, Artificial Sequence
  ENSG00000121903_4 (sequence is synthesized)
tgggtgcaggcacgccaccctgagagtggtgaggaggctgtggccttggtggaggattggcaccgagagaccaggactgcaggacagtcgggactggaattgcatacagaagagaccagg

SEQ ID NO: 243614 - DNA, 120 bp, Artificial Sequence
  ENSG00000121903_5 (sequence is synthesized)
cccttaaagacaggggaagaagctcagagcttccagctgcagccagtggatccctggcctgagggacagtcccagaagaagggggtgaagaatacatgccctgaccttcccaatcaccta

SEQ ID NO: 243615 - DNA, 120 bp, Artificial Sequence
  ENSG00000121903_6 (sequence is synthesized)
aatgccgaggtggcaccacagcctttgaaagagagtgctgtcctcactccccgagtccctactctcccaaagatggggagcgttggagattgggaggtgacagctgagtcccaggaagcc

SEQ ID NO: 243616 - DNA, 120 bp, Artificial Sequence
  ENSG00000121903_7 (sequence is synthesized)
ctgggccctggcaaacatgctgagaaggagctctgtaaagaccccccaggagacgactgtgggaacagcgtgtgcctgggagttccagtttcaaaaccaagtaatacctccgagaaagag

SEQ ID NO: 243617 - DNA, 120 bp, Artificial Sequence
  ENSG00000121903_8 (sequence is synthesized)
caaggaccagagttttggggtctaagtcttataaattctgggaaaaggagcactgcagattacagcctggataatgagccagctcaggcattgacctggagggattcaagagcctgggag

SEQ ID NO: 243618 - DNA, 120 bp, Artificial Sequence
  ENSG00000121903_9 (sequence is synthesized)
gaacaataccagtgggatgtggaggacatgaaggtgtcaggtgttcactggggctatgaggagaccaagactttcctggcaattttgagtgaatctcctttctctgaaaagctccggact

SEQ ID NO: 243619 - DNA, 120 bp, Artificial Sequence
  ENSG00000121903_10 (sequence is synthesized)
tgtcaccagaaccgccaggtatatcgggccattgcagagcagctaagggcaaggggcttcctgcggacactggagcaatgtcgctatagggtcaaaaacctcctacggaattaccggaaa

SEQ ID NO: 243620 - DNA, 120 bp, Artificial Sequence
  ENSG00000121903_11 (sequence is synthesized)
gccaagagcagccacccaccaggtacctgccccttctatgaggagctggaggccctggtcagggctcggacagccatcagagccacagatggcccaggagaggccgtggcacttcccagg

SEQ ID NO: 243621 - DNA, 120 bp, Artificial Sequence
  ENSG00000121903_12 (sequence is synthesized)
ctcgggtatagtgacgcagagatggatgagcaggaggaagggggctgggatcctgaagaaatggcagaagactgtaacggtgctggcctggtcaatgttgagtctacccaggggcccagg

SEQ ID NO: 243622 - DNA, 120 bp, Artificial Sequence
  ENSG00000121903_13 (sequence is synthesized)
attgcaggggccccagctctgttccagagtcgtattgcaggtgtgcactggggctatgaggagaccaaggccttcctggcaattctcagtgagtccccattctcggaaaagcttcgtacc

SEQ ID NO: 243623 - DNA, 120 bp, Artificial Sequence
  ENSG00000121903_14 (sequence is synthesized)
tgtcaccagaacagccaggtgtaccgggccattgcagagcggctgtgtgctctgggcttcctgcggacactggagcagtgtcgctacagattcaaaaacctccttcgaagctaccggaaa

SEQ ID NO: 243624 - DNA, 120 bp, Artificial Sequence
  ENSG00000121903_15 (sequence is synthesized)
gccaagagcagccacccaccagggacatgccctttctatgaggaactggactcgctgatgagggctcgggctgcagtcagggccatggggactgtccgagaggctgcaggtctccctagg

SEQ ID NO: 243625 - DNA, 120 bp, Artificial Sequence
  ENSG00000121903_16 (sequence is synthesized)
tgtgggcagagtagtgctgagactgatgcccaggaggcctggggtgaagtggccaatgaagatgctgtcaaaccttcaaccttgtgtcctaaagccccagacatgggttttgaaatgagg

SEQ ID NO: 243626 - DNA, 120 bp, Artificial Sequence
  ENSG00000121903_17 (sequence is synthesized)
aaatgaaaatgaagatgaagggcagtggggaaatccctcacaggaacagtggcaagaaagttcttctgaagaggacttagaaaaacttattgaccatcaaggcctgtaccttgcagagaa

SEQ ID NO: 243627 - DNA, 120 bp, Artificial Sequence
  ENSG00000121903_18 (sequence is synthesized)
accctacaagtgtgacacatgcatgaagagcttcagtcggagctcccacttcattgcccatcagcgaatccacacaggtgagaagccctacaaatgccttgaatgtggaaaaaactttag

SEQ ID NO: 243628 - DNA, 120 bp, Artificial Sequence
  ENSG00000121903_19 (sequence is synthesized)
tgaccgctctaacctcaatacccatcagagaatccacactggagagaagccctataaatgccttgaatgtgggaaaagctttagtgaccattctaatctcatcactcaccagagaattca

SEQ ID NO: 243629 - DNA, 120 bp, Artificial Sequence
  ENSG00000121903_20 (sequence is synthesized)
cacgggggaaaagccctataaatgtggagaatgttggaaaagcttcaaccagagctcaaaccttctgaaacatcagagaatccacttgggaggaaatcctgaccagtgtagtgagcctgg

SEQ ID NO: 243630 - DNA, 120 bp, Artificial Sequence
  ENSG00000121903_21 (sequence is synthesized)
gggaaactttgcccaaagcccatcttttagtgctcactggaggaattctacagaagagacagctcctgaacaacctcaaagtatcagtaaggacttgaattctcctggaccacacagcac

SEQ ID NO: 243631 - DNA, 120 bp, Artificial Sequence
  ENSG00000121903_22 (sequence is synthesized)
aaactcaggggagaaactttatgagtgttctgaatgtggaagaagcttctctaagagctctgccctcattagtcaccaaagaatccatacgggagagaaaccatatgaatgtgccgaatg

SEQ ID NO: 243632 - DNA, 120 bp, Artificial Sequence
  ENSG00000121903_23 (sequence is synthesized)
tgggaaaagcttcagtaagagctccaccctggccaaccaccagcgcacccacactggagagaagccgtataaatgtgtggactgtgggaagtgcttcagtgagcgctccaagctcatcac

SEQ ID NO: 243633 - DNA, 120 bp, Artificial Sequence
  ENSG00000121903_24 (sequence is synthesized)
acaccagagagtgcacacaggagagaagccctacaaatgccttgagtgtggaaaattcttccgtgaccgttctaacctcattactcaccagaggattcatacgggagagaagccgtataa

SEQ ID NO: 243634 - DNA, 120 bp, Artificial Sequence
  ENSG00000121903_25 (sequence is synthesized)
gtgcagagagtgtgggaaatgctttaaccagagctccagtcttattattcaccagagaatccacacaggggagaaaccctacaagtgcacagagtgtggcaaagacttcaacaacagttc

SEQ ID NO: 243635 - DNA, 120 bp, Artificial Sequence
  ENSG00000121903_26 (sequence is synthesized)
ccacttcagtgctcaccggagaacccatgcaggagggaaggcgtcgtaggggacagtttcctcaacaacaaaggaggactcaatgtatatatcttatatcataagatgtatgctagagat

SEQ ID NO: 243636 - DNA, 120 bp, Artificial Sequence
  ENSG00000121903_27 (sequence is synthesized)
aaactttccaatttttaagcttggtgtgtacccagggaagttatcttggtataaaccaggtaatttggaagtgaattacaaatactaaggatccagatttgaaggcacttttaagtgtaa

SEQ ID NO: 243637 - DNA, 120 bp, Artificial Sequence
  ENSG00000121903_28 (sequence is synthesized)
tttgtttttcttctgtaaagacccacacagaatcctgactgtccttgtatttgctatcatgtaagagctgtgtcagtatttgagccaaactggcaacttacgagattagagttaaatcag

SEQ ID NO: 243638 - DNA, 120 bp, Artificial Sequence
  ENSG00000121903_29 (sequence is synthesized)
tggtcctgagcagtgattccaaactctcactgtgccttcacaccatccatgtgtaatccaccccatcagcagtggttctcctactttctcagtgggggcatatcctcaagggagaatgtt

SEQ ID NO: 243639 - DNA, 120 bp, Artificial Sequence
  ENSG00000121903_30 (sequence is synthesized)
gtgactctggtgagagaggagttggcctagagcaggccactgtgagctcagcacagagtaggaagaacagtgacatcattacaaaatcatcaatagcagcaatagctggtgtttattgag

SEQ ID NO: 243640 - DNA, 120 bp, Artificial Sequence
  ENSG00000121903_31 (sequence is synthesized)
ctgttgctctttggcaagctctgtgctaagaactttgtatacatcatctcatttaatcttcacaacggccccaggagataagtactaactttctccccatttcctagaggcttgggaaat

SEQ ID NO: 243641 - DNA, 120 bp, Artificial Sequence
  ENSG00000121903_32 (sequence is synthesized)
taagtaactcgcactggtcacacatctgtaagtgggagaggcaggattcaacagatctgtctgtcttgagtctatcgtgctcttattgctatactgaattcccattcatgttaggtaact

SEQ ID NO: 243642 - DNA, 120 bp, Artificial Sequence
  ENSG00000121903_33 (sequence is synthesized)
taggggccagaatctccatgcactttgtagaccacatttcctgttatgaaatttccacattttgaattttttaaacaaatatggaaactgagaatccctaaggattaaaggacttgggat

SEQ ID NO: 243643 - DNA, 120 bp, Artificial Sequence
  ENSG00000121903_34 (sequence is synthesized)
atccagaattggtgaagtgatttgagcaaggatgagctattatcaaaatacttgatgtgagtttccatcttcgcaataatatgggtgagagatataggtgggttgagattgggaaaaata

SEQ ID NO: 243644 - DNA, 120 bp, Artificial Sequence
  ENSG00000121903_35 (sequence is synthesized)
cccagctctgttccagagtcgtattggtaagaacatgggggtttagtcagattcagatttccaaccctcctaccagctagactgctattccctgaggtcagggcacaggctgcaagtctg

SEQ ID NO: 243645 - DNA, 120 bp, Artificial Sequence
  ENSG00000121903_36 (sequence is synthesized)
gattgaagccactagagtgaagagctacattccttaggtcatcctcaaactccaactttcttttcccatgaccaagtctctttgcaaaagtcttcttagttatagaagcaaacattttta

SEQ ID NO: 243646 - DNA, 120 bp, Artificial Sequence
  ENSG00000121903_37 (sequence is synthesized)
aagccttaaggggcctcaaagagtgaatccagtatttccaaaagtgtgtcactggtagtatgggatgatcatcgacgttacatgaatgaactttaaattcttgtatttatatatttctct

SEQ ID NO: 243647 - DNA, 120 bp, Artificial Sequence
  ENSG00000121903_38 (sequence is synthesized)
taatttgtatgagtgcatcaacctgtgatttcacagataacaaagttaggtaaagagtgatggcgagtgaaatattgaacagataatggcagaaatcccgacagtgtagacttgaataat

SEQ ID NO: 243648 - DNA, 120 bp, Artificial Sequence
  ENSG00000121903_39 (sequence is synthesized)
caatgtctgggaaacatccaatcattgtaaaggtgcaaacatggaagtccatgagatgaggcgtcttatagacgcacaggtaggagcagagcccggatcagagcctgtggctcctgcctg

SEQ ID NO: 243649 - DNA, 120 bp, Artificial Sequence
  ENSG00000121903_40 (sequence is synthesized)
ctggtttcacatggttttccctccaccatgttgccttcctgggctacatcactttcctgcagaggagctgagactagaccacctccttttcattcccctgcaaaggaggaaagtgtgtcc

SEQ ID NO: 243650 - DNA, 120 bp, Artificial Sequence
  ENSG00000121903_41 (sequence is synthesized)
tcatttggcctttcttgcaggactatttgaaactcatttatgcctctaatctttaggaattctcagctttcatgttttgttaaaaggagaatttatggccaggtgcggtggctcacgcct

SEQ ID NO: 243651 - DNA, 120 bp, Artificial Sequence
  ENSG00000121904_0 (sequence is synthesized)
tcctgggatggggtaggaggctattgtgaatgaggctcataagcatcgcccccggccctagatggcaagttcaaagccaccacccaagatcagctggccagaactgcacgttccaactgc

SEQ ID NO: 243652 - DNA, 120 bp, Artificial Sequence
  ENSG00000121904_1 (sequence is synthesized)
acggtcccaatgggacagttgagagcccagggttcccatatggctaccccaattacgccaactgcacgtggaccatcaccgcggaagagcagcacagaatccagcttgtgttccagtcct

SEQ ID NO: 243653 - DNA, 120 bp, Artificial Sequence
  ENSG00000121904_2 (sequence is synthesized)
ttgccctggaagaggactttgatgtcctgtcggtgtttgatggtccaccccagccagagaatctgcgtacgaggctcacaggctttcagctgccagccaccattgttagtgcagccacca

SEQ ID NO: 243654 - DNA, 120 bp, Artificial Sequence
  ENSG00000121904_3 (sequence is synthesized)
ccctctctctgcgcctcatcagcgactatgcagtcagtgcccaaggcttccacgccacctatgaagttctccccagccacacatgtgggaacccagggaggctgcccaatggcatccagc

SEQ ID NO: 243655 - DNA, 120 bp, Artificial Sequence
  ENSG00000121904_4 (sequence is synthesized)
agggttcaaccttcaacctcggtgacaaggtccgctacagctgcaaccttggcttcttcctggagggccacgccgtgctcacctgccacgctggctctgagaacagcgccacgtgggact

SEQ ID NO: 243656 - DNA, 120 bp, Artificial Sequence
  ENSG00000121904_5 (sequence is synthesized)
tccccctgccttcctgcagagctgatgatgcctgtggtgggaccctgcggggccagagtggcatcatctccagcccccacttcccctcggagtaccataacaatgccgactgcacatgga

SEQ ID NO: 243657 - DNA, 120 bp, Artificial Sequence
  ENSG00000121904_6 (sequence is synthesized)
ccatcctggctgagctgggggacaccatcgccctggtgtttattgacttccagctggaggatggttacgactttctggaagtcactgggacagaaggctcctccctctggttcaccggag

SEQ ID NO: 243658 - DNA, 120 bp, Artificial Sequence
  ENSG00000121904_7 (sequence is synthesized)
ccagcctcccagcccccgttatcagcagcaagaactggctgcgactgcacttcacatcggatggcaaccaccggcagcgcggattcagtgcccaataccaagtcaagaagcaaattgagt

SEQ ID NO: 243659 - DNA, 120 bp, Artificial Sequence
  ENSG00000121904_8 (sequence is synthesized)
tgaagtctcgaggtgtgaagctgatgcccagcaaagacaacagccagaagacgtctgtgttaactcaggttggtgtgtcccaaggacataatatgtgtccagaccctggcatacccgaaa

SEQ ID NO: 243660 - DNA, 120 bp, Artificial Sequence
  ENSG00000121904_9 (sequence is synthesized)
ggggcaaaagactaggctcggatttcaggttaggatccagcgtccagttcacctgcaacgagggctatgacctgcaagggtccaagcggatcacctgtatgaaagtgagcgacatgtttg

SEQ ID NO: 243661 - DNA, 120 bp, Artificial Sequence
  ENSG00000121904_10 (sequence is synthesized)
cggcctggagcgaccacaggccagtctgccgagcccgcatgtgtgatgcccaccttcgaggcccctcgggcatcatcacctcccccaatttccccattcagtatgacaacaatgcacact

SEQ ID NO: 243662 - DNA, 120 bp, Artificial Sequence
  ENSG00000121904_11 (sequence is synthesized)
gtgtgtggatcatcacagcactcaacccctccaaggtgatcaagctcgcctttgaggagtttgatttggagaggggctatgacaccctgacggtcggtgatggtggtcaggatggggacc

SEQ ID NO: 243663 - DNA, 120 bp, Artificial Sequence
  ENSG00000121904_12 (sequence is synthesized)
agaagacagttctctacatcctgacaggtacatcggtcccggatctcattgtcagcaccaatcatcaaatgtggctcctcttccagactgatggcagtggcagttccctgggattcaagg

SEQ ID NO: 243664 - DNA, 120 bp, Artificial Sequence
  ENSG00000121904_13 (sequence is synthesized)
cttcttatgaagagatcgagcagggcagttgcggtgaccctggcatacctgcatatggccggagggaaggctcccggtttcaccacggtgacacactcaagtttgagtgccagcccgcct

SEQ ID NO: 243665 - DNA, 120 bp, Artificial Sequence
  ENSG00000121904_14 (sequence is synthesized)
ttgagctggtgggacagaaggcaatcacatgccaaaagaataaccaatggtcggctaagaagccaggctgcgtgttctcctgcttcttcaacttcaccagcccgtctggggttgtcctgt

SEQ ID NO: 243666 - DNA, 120 bp, Artificial Sequence
  ENSG00000121904_15 (sequence is synthesized)
ctcccaactacccagaggactatggcaaccacctccactgtgtctggctcatcctggccaggcctgagagccgcatccacctggccttcaacgacattgacgtggagcctcagtttgatt

SEQ ID NO: 243667 - DNA, 120 bp, Artificial Sequence
  ENSG00000121904_16 (sequence is synthesized)
tcctggtcatcaaggatggggccaccgccgaggcgcccgtcctgggcaccttctcaggaaaccagcttccctcctccatcacaagcagtggccacgtggcccgtctcgagttccagactg

SEQ ID NO: 243668 - DNA, 120 bp, Artificial Sequence
  ENSG00000121904_17 (sequence is synthesized)
accactccacagggaagaggggcttcaacatcacttttaccaccttccgacacaacgagtgcccggatcctggcgttccagtaaatggcaaacggtttggggacagcctccagctgggca

SEQ ID NO: 243669 - DNA, 120 bp, Artificial Sequence
  ENSG00000121904_18 (sequence is synthesized)
gctccatctccttcctctgtgatgaaggcttccttgggactcagggctcagagaccatcacctgcgtcctgaaggagggcagcgtggtctggaacagcgctgtgctgcggtgtgaagctc

SEQ ID NO: 243670 - DNA, 120 bp, Artificial Sequence
  ENSG00000121904_19 (sequence is synthesized)
cctgtggtggtcacctgacttcgcccagcggcaccatcctctctccgggctggcctggcttctacaaggatgccttgagctgtgcctgggtgattgaggcccagccaggctaccccatca

SEQ ID NO: 243671 - DNA, 120 bp, Artificial Sequence
  ENSG00000121904_20 (sequence is synthesized)
aaatcaccttcgacagattcaaaaccgaggtcaactatgacaccctggaagtacgcgatgggcggacttactcagcgcccttgatcggggtttaccacgggacccaggttccccagttcc

SEQ ID NO: 243672 - DNA, 120 bp, Artificial Sequence
  ENSG00000121904_21 (sequence is synthesized)
tcatcagcaccagcaactacctctacctcctcttctctaccgacaagagtcactcggacatcggcttccagctccgctatgagactataacactgcagtcagaccactgtctggatccag

SEQ ID NO: 243673 - DNA, 120 bp, Artificial Sequence
  ENSG00000121904_22 (sequence is synthesized)
gaatcccagtaaatggacagcgtcatgggaatgacttctacgtgggcgcgctggtgaccttcagctgtgactcgggctacacattaagtgacggggagcctctggagtgtgagcccaact

SEQ ID NO: 243674 - DNA, 120 bp, Artificial Sequence
  ENSG00000121904_23 (sequence is synthesized)
tccagtggagccgggccctgcccagttgtgaagctctctgtggtggcttcattcaaggctccagtgggaccatcttgtcgccagggttccctgacttctaccccaacaacttgaactgca

SEQ ID NO: 243675 - DNA, 120 bp, Artificial Sequence
  ENSG00000121904_24 (sequence is synthesized)
cctggattatcgaaacatctcatggcaagggtgtgttcttcactttccacaccttccacctggaaagtggccatgactacctcctcatcactgagaacggcagcttcacccagcccctga

SEQ ID NO: 243676 - DNA, 120 bp, Artificial Sequence
  ENSG00000121904_25 (sequence is synthesized)
ggcagctaactggatctcggctgccagctcccatcagcgctgggctctatggcaacttcactgcccaggtccgcttcatctctgatttctccatgtcatatgaaggattcaacatcacct

SEQ ID NO: 243677 - DNA, 120 bp, Artificial Sequence
  ENSG00000121904_26 (sequence is synthesized)
tctcagagtacgacttggagccctgtgaggagcccgaggtcccagcctacagcatccggaagggcttgcagtttggcgtgggcgacaccttgaccttctcctgcttccccgggtaccgtc

SEQ ID NO: 243678 - DNA, 120 bp, Artificial Sequence
  ENSG00000121904_27 (sequence is synthesized)
tggagggcaccgcccgcatcacgtgcctggggggcagacggcgcctgtggagctcgcctctgccaaggtgtgttgctgagtgtgggaattcagtcacaggcactcagggtactttgctgt

SEQ ID NO: 243679 - DNA, 120 bp, Artificial Sequence
  ENSG00000121904_28 (sequence is synthesized)
cccccaactttcctgtgaactacaataacaatcatgaatgcatctactccatccagacccagccagggaagggaattcagctgaaagccagggcattcgaactctccgaaggagatgtcc

SEQ ID NO: 243680 - DNA, 120 bp, Artificial Sequence
  ENSG00000121904_29 (sequence is synthesized)
tcaaggtttatgatggcaacaacaactccgcccgtttgctgggagtttttagccattctgagatgatgggggtgactttgaacagcacatccagcagtctgtggcttgatttcatcactg

SEQ ID NO: 243681 - DNA, 120 bp, Artificial Sequence
  ENSG00000121904_30 (sequence is synthesized)
atgctgaaaacaccagcaagggctttgaactgcacttttccagctttgaactcatcaaatgtgaggacccaggaacccccaagtttggctacaaggttcatgatgaaggtcattttgcag

SEQ ID NO: 243682 - DNA, 120 bp, Artificial Sequence
  ENSG00000121904_31 (sequence is synthesized)
ggagctccgtgtccttcagctgtgaccctggatacagcctgcggggtagtgaggagctgctgtgtctgagtggagagcgccggacctgggaccggcctctgcccacctgtgtcgccgagt

SEQ ID NO: 243683 - DNA, 120 bp, Artificial Sequence
  ENSG00000121904_32 (sequence is synthesized)
gtggagggacagtgagaggagaggtgtcggggcaggtgctgtcacccgggtatccagctccctatgaacacaatctcaactgcatctggaccatcgaagcagaggccggctgcaccattg

SEQ ID NO: 243684 - DNA, 120 bp, Artificial Sequence
  ENSG00000121904_33 (sequence is synthesized)
ggctacacttcctggtgtttgacacagaggaggttcacgacgtgctgcgcatctgggatgggcctgtggagagcggggttctgctgaaggagctgagtggcccggccctgcccaaggacc

SEQ ID NO: 243685 - DNA, 120 bp, Artificial Sequence
  ENSG00000121904_34 (sequence is synthesized)
tgcatagcaccttcaactcggtcgtcctgcagttcagcactgacttcttcaccagcaagcagggctttgccattcaattttcagtgtccacagcaacgtcctgcaatgaccctgggatcc

SEQ ID NO: 243686 - DNA, 120 bp, Artificial Sequence
  ENSG00000121904_35 (sequence is synthesized)
cgcagaatgggagtcggagtggtgacagttgggaagccggcgactccacagtgttccagtgtgaccctggctacgcgctgcagggaagtgcagagatcagctgtgtgaagatcgagaaca

SEQ ID NO: 243687 - DNA, 120 bp, Artificial Sequence
  ENSG00000121904_36 (sequence is synthesized)
ggttcttctggcagcccagcccgccaacatgcatcgctccctgcgggggagacctgacaggaccatctggagtcatcctctcaccaaattacccagaaccctacccgccaggcaaggagt

SEQ ID NO: 243688 - DNA, 120 bp, Artificial Sequence
  ENSG00000121904_37 (sequence is synthesized)
gtgactggaaagtgaccgtctcaccagactacgtcatcgccctggtatttaacatctttaacctggagcctggctatgacttcctccatatctacgacggacgggactctctcagccctc

SEQ ID NO: 243689 - DNA, 120 bp, Artificial Sequence
  ENSG00000121904_38 (sequence is synthesized)
tcataggaagcttctatggctcccagctcccaggccgcattgaaagcagcagcaacagcctcttcctcgccttccgcagcgatgcatctgtgagcaatgctggcttcgtcattgactata

SEQ ID NO: 243690 - DNA, 120 bp, Artificial Sequence
  ENSG00000121904_39 (sequence is synthesized)
cagaaaacccgcgggagtcatgttttgatcctggttccatcaagaacggcacacgggtggggtccgacctgaagctgggctcctccgtcacctactactgccacgggggctacgaagttg

SEQ ID NO: 243691 - DNA, 120 bp, Artificial Sequence
  ENSG00000121904_40 (sequence is synthesized)
agggcacctcgaccctgagctgcatcctggggcctgatgggaagcccgtgtggaacaatccccggccagtctgcacagccccctgtgggggacagtatgtgggttcggacggagtggtct

SEQ ID NO: 243692 - DNA, 120 bp, Artificial Sequence
  ENSG00000121904_41 (sequence is synthesized)
tgtcccccaactacccccagaactacaccagtggacagatctgcttgtattttgttactgtgcccaaggactatgtggtgtttggccagttcgccttctttcacacggccctcaacgacg

SEQ ID NO: 243693 - DNA, 120 bp, Artificial Sequence
  ENSG00000121904_42 (sequence is synthesized)
tggtggaggttcacgacggccacagccagcactcgcggctcctcagctccctctcgggctcccatacaggagaatcactgcccttggccacctccaatcaagttctcattaagttcagcg

SEQ ID NO: 243694 - DNA, 120 bp, Artificial Sequence
  ENSG00000121904_43 (sequence is synthesized)
ccaaaggcctcgcaccagccagaggcttccactttgtctaccaagcggttcctcgaaccagcgccacgcagtgcagctctgtgccggaaccccgctatggcaagaggctgggcagtgact

SEQ ID NO: 243695 - DNA, 120 bp, Artificial Sequence
  ENSG00000121904_44 (sequence is synthesized)
tctcggtgggggccatcgtccgcttcgaatgcaactccggctatgccctgcaggggtcgccagagatcgagtgcctccctgtgcctggggccttggcccaatggaatgtctcagcgccca

SEQ ID NO: 243696 - DNA, 120 bp, Artificial Sequence
  ENSG00000121904_45 (sequence is synthesized)
cgtgtgtggtgccgtgtggaggcaacctcacagagcgcaggggcaccatcctgtcccctggcttcccagagccgtacctcaacagcctcaactgtgtgtggaagatcgtggtccccgaag

SEQ ID NO: 243697 - DNA, 120 bp, Artificial Sequence
  ENSG00000121904_46 (sequence is synthesized)
gcgctggcatccagatccaagttgtcagttttgtgacagagcagaactgggactcgctggaagtatttgatggtgcagataacactgtaaccatgctggggagtttctcaggaacaaccg

SEQ ID NO: 243698 - DNA, 120 bp, Artificial Sequence
  ENSG00000121904_47 (sequence is synthesized)
tgcctgcccttctgaacagcacctccaaccagctctaccttcatttctactcagatatcagcgtatctgcagctggcttccacttggagtacaaaacggtgggcctgagcagttgtccgg

SEQ ID NO: 243699 - DNA, 120 bp, Artificial Sequence
  ENSG00000121904_48 (sequence is synthesized)
aacctgctgtgcccagtaacggggtgaagactggcgagcgctacttggtgaatgatgtggtgtctttccagtgtgagccgggatatgccctccagggccacgcccacatctcctgcatgc

SEQ ID NO: 243700 - DNA, 120 bp, Artificial Sequence
  ENSG00000121904_49 (sequence is synthesized)
ccggaacagtgcggcgatggaactaccctcctccactctgtattgcacagtgtgggggaacagtggaggagatggagggggtgatcctgagccccggcttcccaggcaactaccccagta

SEQ ID NO: 243701 - DNA, 120 bp, Artificial Sequence
  ENSG00000121904_50 (sequence is synthesized)
acatggactgctcctggaaaatagcactgcccgtgggctttggagctcacatccagttcctgaacttctccaccgagcccaaccacgactacatagaaatccggaatggcccctatgaga

SEQ ID NO: 243702 - DNA, 120 bp, Artificial Sequence
  ENSG00000121904_51 (sequence is synthesized)
ccagccgcatgatgggaagattcagtggaagcgagcttccaagctccctcctctccacgtcccacgagaccaccgtgtatttccacagcgaccactcccagaatcggccaggattcaagc

SEQ ID NO: 243703 - DNA, 120 bp, Artificial Sequence
  ENSG00000121904_52 (sequence is synthesized)
tggagtatcaggatttgacttactcccaccagatttcttccttcctgagaggttttgatctctcggagttggaaagaaccaactcaactcctcccgtcgccgcttcctatgtctgggatc

SEQ ID NO: 243704 - DNA, 120 bp, Artificial Sequence
  ENSG00000121904_53 (sequence is synthesized)
ttgatcctggttgtgaagcctatgaacttcaagagtgcccagacccagagccctttgccaatggcattgtgaggggagctggctacaacgtgggacaatcagtgaccttcgagtgcctcc

SEQ ID NO: 243705 - DNA, 120 bp, Artificial Sequence
  ENSG00000121904_54 (sequence is synthesized)
caacatggcaccaaccggaactgggaccaccccctgcccaagtgtgaagtcccttgtggcgggaacatcacttcttccaacggcactgtgtactccccggggttccctagcccgtactcc

SEQ ID NO: 243706 - DNA, 120 bp, Artificial Sequence
  ENSG00000121904_55 (sequence is synthesized)
agctcccaggactgtgtctggctgatcaccgtgcccattggccatggcgtccgcctcaacctcagcctgctgcagacagagccctctggagatttcatcaccatctgggatgggccacag

SEQ ID NO: 243707 - DNA, 120 bp, Artificial Sequence
  ENSG00000121904_56 (sequence is synthesized)
caaacagcaccacggctcggcgtcttcacccggagcatggccaagaaaacagtgcagagttcatccaaccaggtcctgctcaagttccaccgtgatgcagccacaggggggatcttcgcc

SEQ ID NO: 243708 - DNA, 120 bp, Artificial Sequence
  ENSG00000121904_57 (sequence is synthesized)
atagctttctccgcttatccactcaccaaatgccctcctcccaccatcctccccaacgccgaagtcgtcacagagaatgaagaattcaatataggtgacatcgtacgctacagatgcctc

SEQ ID NO: 243709 - DNA, 120 bp, Artificial Sequence
  ENSG00000121904_58 (sequence is synthesized)
cctggctttaccttagtggggaatgaaattctgacctgcaaacttggaacctacctgcagtttgaaggaccacccccgatatgtgaagtgcactgtccaacaaatgagcttctgacagac

SEQ ID NO: 243710 - DNA, 120 bp, Artificial Sequence
  ENSG00000121904_59 (sequence is synthesized)
tccacaggcgtgatcctgagccagagctaccctggaagctatccccagttccagacctgctcttggctggtgagagtggagcccgactataacatctccctcacagtggagtacttcctc

SEQ ID NO: 243711 - DNA, 120 bp, Artificial Sequence
  ENSG00000121904_60 (sequence is synthesized)
agcgagaagcaatatgatgagtttgagatttttgatggtccatcaggacagagtcctctgctgaaagccctcagtgggaattactcagctcccctgattgtcaccagctcaagcaactct

SEQ ID NO: 243712 - DNA, 120 bp, Artificial Sequence
  ENSG00000121904_61 (sequence is synthesized)
gtgtacctgcgttggtcatctgatcacgcctacaatcggaagggcttcaagatccgctattcagccccttactgcagcctgcccagggctccactccatggcttcatcctaggccagacc

SEQ ID NO: 243713 - DNA, 120 bp, Artificial Sequence
  ENSG00000121904_62 (sequence is synthesized)
agcacccagcccgggggctccatccactttggctgcaacgccggctaccgcctggtgggacacagcatggccatctgtacccggcacccccagggctaccacctgtggagcgaagccatc

SEQ ID NO: 243714 - DNA, 120 bp, Artificial Sequence
  ENSG00000121904_63 (sequence is synthesized)
cctctctgtcaagctctttcctgtgggcttcctgaggcccccaagaatggaatggtgtttggcaaggagtacacagtgggaaccaaggccatgtacagctgcagtgaaggctaccacctc

SEQ ID NO: 243715 - DNA, 120 bp, Artificial Sequence
  ENSG00000121904_64 (sequence is synthesized)
caggcaggcgctgaggccactgcagagtgtctggacacaggcctatggagcaaccgcaatgtcccaccacagtgtgtccctgtgacttgtcctgatgtcagtagcatcagcgtggagcat

SEQ ID NO: 243716 - DNA, 120 bp, Artificial Sequence
  ENSG00000121904_65 (sequence is synthesized)
ggccgatggaggcttatctttgagacacagtatcagttccaggcccagctgatgctcatctgtgaccctggctactactatactggccaaagggtcatccgctgtcaggccaatggcaaa

SEQ ID NO: 243717 - DNA, 120 bp, Artificial Sequence
  ENSG00000121904_66 (sequence is synthesized)
tggagcctcggggactctacgcccacctgccgaatcatctcctgtggagagctcccgattccccccaatggccaccgcatcggaacactgtctgtctacggggcaacagccatcttctcc

SEQ ID NO: 243718 - DNA, 120 bp, Artificial Sequence
  ENSG00000121904_67 (sequence is synthesized)
tgcaattccggatacacactggtgggctccagggtgcgtgagtgcatggccaatgggctctggagtggctctgaagtccgctgccttgctggacactgtgggactcctgagcccattgtc

SEQ ID NO: 243719 - DNA, 120 bp, Artificial Sequence
  ENSG00000121904_68 (sequence is synthesized)
aacggacacatcaatggggagaactacagctaccggggcagtgtggtgtaccaatgcaatgctggcttccgcctgatcggcatgtctgtgcgcatctgccagcaggatcatcactggtcg

SEQ ID NO: 243720 - DNA, 120 bp, Artificial Sequence
  ENSG00000121904_69 (sequence is synthesized)
ggcaagacccctttctgtgtgctggtgtcctgtggccatccgggctccccgcctcactcccagatgtctggagacagttatactgtgggagcagtggtgcggtacagctgcatcggcaag

SEQ ID NO: 243721 - DNA, 120 bp, Artificial Sequence
  ENSG00000121904_70 (sequence is synthesized)
cgtactctggtgggaaacagcacccgcatgtgtgggctggatggacactggactggctccctccctcactgctcaggaaccagcgtgggagtttgcggtgaccctgggatcccggctcat

SEQ ID NO: 243722 - DNA, 120 bp, Artificial Sequence
  ENSG00000121904_71 (sequence is synthesized)
ggcatccgtttgggggacagctttgatccaggcactgtgatgcgcttcagctgtgaagctggccacgtgctccggggatcgtcagagcgcacctgtcaagccaatggctcgtggagcggc

SEQ ID NO: 243723 - DNA, 120 bp, Artificial Sequence
  ENSG00000121904_72 (sequence is synthesized)
tcgcagcctgagtgtggagtgatctcttgtgggaaccctgggactccaagtaatgcccgagttgtgttcagtgatggcctggttttctccagctctatcgtctatgagtgccgggaagga

SEQ ID NO: 243724 - DNA, 120 bp, Artificial Sequence
  ENSG00000121904_73 (sequence is synthesized)
tactacgccacaggcctgctcagccgtcactgctcggtcaatggtacctggacaggcagtgaccctgagtgcctcgtcataaactgtggtgaccctgggattccagccaatggccttcgg

SEQ ID NO: 243725 - DNA, 120 bp, Artificial Sequence
  ENSG00000121904_74 (sequence is synthesized)
ctgggcaatgacttcaggtacaacaaaactgtgacatatcagtgtgtccctggctatatgatggagtcacatagagtatctgtgctgagctgcaccaaggaccggacatggaatggaacc

SEQ ID NO: 243726 - DNA, 120 bp, Artificial Sequence
  ENSG00000121904_75 (sequence is synthesized)
aagcccgtctgcaaagctctcatgtgcaagccacctccgctcatccccaatgggaaggtggtggggtctgacttcatgtggggctcaagtgtgacttatgcctgcctggaggggtaccag

SEQ ID NO: 243727 - DNA, 120 bp, Artificial Sequence
  ENSG00000121904_76 (sequence is synthesized)
ctctccctgcccgcggtgttcacctgtgagggaaatgggtcctggaccggagagctgcctcagtgtttccctgtgttctgcggggatcctggtgtcccgtcccgtgggaggagagaggac

SEQ ID NO: 243728 - DNA, 120 bp, Artificial Sequence
  ENSG00000121904_77 (sequence is synthesized)
cgaggcttctcctacaggtcatctgtctccttctcctgccatccccctctggtgctggtgggctctccacgcaggttttgccagtcagatgggacatggagtggcacccagcccagctgc

SEQ ID NO: 243729 - DNA, 120 bp, Artificial Sequence
  ENSG00000121904_78 (sequence is synthesized)
atagatccgaccctgaccacgtgtgcggaccctggtgtgccacagtttgggatacagaacaattctcagggctaccaggttggaagcacagtcctcttccgttgtcaaaaaggctacctg

SEQ ID NO: 243730 - DNA, 120 bp, Artificial Sequence
  ENSG00000121904_79 (sequence is synthesized)
cttcagggctccaccaccaggacctgcctcccaaacctgacctggagtggaaccccacctgactgtgtcccccaccactgcaggcagccagagacgccaacgcatgccaacgtcggggcc

SEQ ID NO: 243731 - DNA, 120 bp, Artificial Sequence
  ENSG00000121904_80 (sequence is synthesized)
ctggatttgccctccatgggctacacgctcatctactcctgccaggagggcttctccctcaagggtggctccgagcaccgcacctgcaaggcggatggcagctggacaggcaagccgccc

SEQ ID NO: 243732 - DNA, 120 bp, Artificial Sequence
  ENSG00000121904_81 (sequence is synthesized)
atctgcctggaggtccggcccagtgggagacccatcaacactgcccgggagccaccgctcacccaagccttgattcctggggatgtttttgccaagaattccctgtggaaaggggcctat

SEQ ID NO: 243733 - DNA, 120 bp, Artificial Sequence
  ENSG00000121904_82 (sequence is synthesized)
gaataccaggggaagaagcagccagccatgctcagagtgactggcttccaagttgccaacagcaaggtcaatgccaccatgatcgaccacagtggcgtggagctgcacttggctggaact

SEQ ID NO: 243734 - DNA, 120 bp, Artificial Sequence
  ENSG00000121904_83 (sequence is synthesized)
tacaagaaagaagattttcatctcctactccaggtgtaccagattacagggcctgtggagatctttatgaataagttcaaagatgatcactgggctttagatggccatgtctcgtcagag

SEQ ID NO: 243735 - DNA, 120 bp, Artificial Sequence
  ENSG00000121904_84 (sequence is synthesized)
tcctccggagccaccttcatctaccaaggctctgtcaagggccaaggctttgggcagttcggctttcaaagactggacctcaggctgctggagtcagaccccgagtccattggccgccac

SEQ ID NO: 243736 - DNA, 120 bp, Artificial Sequence
  ENSG00000121904_85 (sequence is synthesized)
tttgcttccaacagcagctcagtggcagccgcgatcctggtgcctttcatcgccctcattattgcgggcttcgtgctctatctctacaagcacaggagaagacccaaagttcctttcaat

SEQ ID NO: 243737 - DNA, 120 bp, Artificial Sequence
  ENSG00000121904_86 (sequence is synthesized)
ggctatgctggccacgagaacaccaatgttcgggccacatttgagaacccaatgtacgaccgcaacatccagcccacagacatcatggccagcgaggcggagttcacagtcagcacagtg

SEQ ID NO: 243738 - DNA, 120 bp, Artificial Sequence
  ENSG00000121904_87 (sequence is synthesized)
tgcacagcagtatagccacccggcctggccgccaccaccgccaccgagagccccgcctccagcagccgttccccagggggcaggaagtaggctcccctgagcacagtgcccagtgcccat

SEQ ID NO: 243739 - DNA, 120 bp, Artificial Sequence
  ENSG00000121904_88 (sequence is synthesized)
cttcgttcgtctccttgcctgtgtctgctactgctgggactcaggccctcgccctgccgccatctatgccagttaccctggagaggactcctgccgtgtcctgaaaaggcagaaaaggaa

SEQ ID NO: 243740 - DNA, 120 bp, Artificial Sequence
  ENSG00000121904_89 (sequence is synthesized)
gaggggctgcagacagaggaagaaagtttatggatttaaaatagcaaagcaacttgtggatctgtgtgtgtgtgtgtgtgtatgggcctgatcacacacaaacacacacacctctccttc

SEQ ID NO: 243741 - DNA, 120 bp, Artificial Sequence
  ENSG00000121904_90 (sequence is synthesized)
attcacgtcctatggaagagaccataaaggcttcaaaactagaagtgcgcatgaaggatgcttcatgccctgttccccacacagagaagagatgaagagggggaggtacggtcagctttc

SEQ ID NO: 243742 - DNA, 120 bp, Artificial Sequence
  ENSG00000121904_91 (sequence is synthesized)
aaaacaatatgccccccgcccatcccatgtgtgaggacatggtgactcggtgactgtaacagtaggacacatcccatcatgcggtcagagtgcagaaacccggtcagcgtgcagaaacca

SEQ ID NO: 243743 - DNA, 120 bp, Artificial Sequence
  ENSG00000121904_92 (sequence is synthesized)
gctgtctgctgatgaacggcccatctgcacagcggcagcaaggattaccccaagggcaggaaaaaagtctttggaaatagattgaaaatcagtttctttatttttttcaaacactgtttt

SEQ ID NO: 243744 - DNA, 120 bp, Artificial Sequence
  ENSG00000121904_93 (sequence is synthesized)
attgagttctaaacccagtggattaaaaagtcatttgggtcctgggaagcactgggaaagaagggagagccggggaggatagggcaggagtctggccaggagcccaaggtcaagtctggc

SEQ ID NO: 243745 - DNA, 120 bp, Artificial Sequence
  ENSG00000121904_94 (sequence is synthesized)
tgtcaactgacaaagagaagagaagacaagtctgtggcccagacaggatgccaagtctgggggcagcagcagggtccttgagagaacaggggagcaagcctgccccagtacccaaaaaac

SEQ ID NO: 243746 - DNA, 120 bp, Artificial Sequence
  ENSG00000121904_95 (sequence is synthesized)
aatggctatcatgtactggggttattctctgtgcctgacactttacctgtagtatttctagtctgcacaataacaccaaaatgtaggatttgttattcccctttgacagatgagaaaaca

SEQ ID NO: 243747 - DNA, 120 bp, Artificial Sequence
  ENSG00000121904_96 (sequence is synthesized)
gaagcctgcaaaggtaaagacagagttaggaagtgtggagtcagaatgcaaacccagatcagtctgccccaaagtccactacaccagctgccagaaaccctgttctagaaggggcagcta

SEQ ID NO: 243748 - DNA, 120 bp, Artificial Sequence
  ENSG00000121904_97 (sequence is synthesized)
agaagggaggagccgatgaatctctacagtagcactgtggccaggtctggaaagccaggcaagacacctgtgtgtcctatctgggttctgctgtctccgcgtaggcagcttcggggcaag

SEQ ID NO: 243749 - DNA, 120 bp, Artificial Sequence
  ENSG00000121904_98 (sequence is synthesized)
gattcaactccccaggcctcccacggttggtgctggctccttggctcccagcagccgctgaccatagccagcaaaagacctggcaggtcctgaatcaaaacaacagagtggctgaaagtc

SEQ ID NO: 243750 - DNA, 120 bp, Artificial Sequence
  ENSG00000121904_99 (sequence is synthesized)
acacctctccagctccttgcgagtgggtttgattgattttgacagctatatcatgcttgggtcgttcatgaattccatgagaattgttgggaagttcatgagtttaggaatcaaagtata

SEQ ID NO: 243751 - DNA, 120 bp, Artificial Sequence
  ENSG00000121904_100 (sequence is synthesized)
gcatttagggccactttctctgtcctcgggaaggcccccacaagcttaagcccctgtatacgtgtgacatgctggcctcagagattcatgtcacatattgaaatagcaaatagaaatgtg

SEQ ID NO: 243752 - DNA, 120 bp, Artificial Sequence
  ENSG00000121904_101 (sequence is synthesized)
caggagcggagggacagcgacacctggttcttaagcaaattctagattggaacaattagaagatctgactgatgttaagagtggccagaggaaagtgagaggcgtccatttccagcagac

SEQ ID NO: 243753 - DNA, 120 bp, Artificial Sequence
  ENSG00000121904_102 (sequence is synthesized)
acaatggaggctgacagaggcaggagcctacccctggccacaccacctctgggacacggcacccccctgggcctggagggagagggccaatccagacacactcacactctcatctctttc

SEQ ID NO: 243754 - DNA, 120 bp, Artificial Sequence
  ENSG00000121904_103 (sequence is synthesized)
cttggctggaaacaagtgcaggaagctcccctcccaatttcttatgctcccttcccccttacactcctctccttcgactgctcccttcccccttcttatgcccctctcagaccacccagc

SEQ ID NO: 243755 - DNA, 120 bp, Artificial Sequence
  ENSG00000121904_104 (sequence is synthesized)
ggatgcctattcccgccccccacccctcccctgcgtctccttgtaaagttccatgagatgctcgaggagcacctgctggtggggcacccagcactctgctgggcatcaccctccgcaccc

SEQ ID NO: 243756 - DNA, 120 bp, Artificial Sequence
  ENSG00000121904_105 (sequence is synthesized)
ctgacatttctctccacctccagaggcttggaagggaacagggcagatgaggcccttcacccaccatctacgccatatacccatcaccatcccatgaggaaaaaaaaaaaagtaaaacaa

SEQ ID NO: 243757 - DNA, 120 bp, Artificial Sequence
  ENSG00000121904_106 (sequence is synthesized)
agacaaaaaaaatcttttgtacagagatatatttttattatacaaagtttgtacagtaccaaaaaagaaaaaaaaaaaggtgtaaatttttttttcattattgtaggtaaacggtagtgg

SEQ ID NO: 243758 - DNA, 120 bp, Artificial Sequence
  ENSG00000121904_107 (sequence is synthesized)
aagccttttttgtaaatgtaataaaatgtataaatatggttttcagaaaacatcaagtgctgtaaatatgtaatctacacaccttcttggcttgtctgcagtatatacatttaatttatc

SEQ ID NO: 243759 - DNA, 120 bp, Artificial Sequence
  ENSG00000121904_108 (sequence is synthesized)
tgtctctgtatatgaggcttccccctggggtcctgcattatggtactttcctgaatttgaaagcaattttaaattttttgaattcaaataaaatataaatttttgcattggttttcttac

SEQ ID NO: 243760 - DNA, 120 bp, Artificial Sequence
  ENSG00000121904_109 (sequence is synthesized)
gagagcgcagcgcgcctctccccggccgggcggacacttggttcattccagccgcagaagctcagggctcccgcgtaccgggattttttccgagcagaaaaaagctccagagctctcctg

SEQ ID NO: 243761 - DNA, 120 bp, Artificial Sequence
  ENSG00000121904_110 (sequence is synthesized)
ctccagagctctcctgacctcctttctcctcggcggcgagcggagcctctccctcggcgctgccggccgcgccatgccgcgctcgcggggacgggagctggggcgctgcggctgccccgc

SEQ ID NO: 243762 - DNA, 120 bp, Artificial Sequence
  ENSG00000121904_111 (sequence is synthesized)
gaaaccgggatttcggcgcttgtgccgggcgccgggagccgctggggccgcccgccgccgccaacgccgccgcctctgctgctgttgctgggctgtgggttgctcagcgtctcggccgcc

SEQ ID NO: 243763 - DNA, 120 bp, Artificial Sequence
  ENSG00000121904_112 (sequence is synthesized)
aagacccctttctgtgtgccaattacctgtggacacccaggcaaccctgtcaacggcctcactcagggtaaccagtttaacctcaacgatgtggtcaagtttgtttgcaaccctgggtat

SEQ ID NO: 243764 - DNA, 120 bp, Artificial Sequence
  ENSG00000121904_113 (sequence is synthesized)
atggctgagggggctgctaggtcccaatgcctggccagcgggcaatggagtgacatgctgcccacctgcagaatcatcaactgtacagatcctggacaccaagaaaatagtgttcgtcag

SEQ ID NO: 243765 - DNA, 120 bp, Artificial Sequence
  ENSG00000121904_114 (sequence is synthesized)
gtccacgccagcggcccgcacaggttcagcttcggcaccactgtgtcttaccggtgcaaccacggcttctacctcctgggcaccccagtgctcagctgccagggagatggcacatgggac

SEQ ID NO: 243766 - DNA, 120 bp, Artificial Sequence
  ENSG00000121904_115 (sequence is synthesized)
ttctccgatcactgcagatattttaaccagaaatcaggaaagctggattttactcccagctccaccttgggccagctgtgtaaaaccttgcacaggtcccttccccacttgagacttcag

SEQ ID NO: 243767 - DNA, 120 bp, Artificial Sequence
  ENSG00000121904_116 (sequence is synthesized)
tttcttcacctgtagaattaccggcttggagtttgtgacctgtaagaattctgtgaggtagtaaggcaaatattctaacccccactttacaaatgaagaaatagggcaaaggaaggctca

SEQ ID NO: 243768 - DNA, 120 bp, Artificial Sequence
  ENSG00000121904_117 (sequence is synthesized)
agtacttgcccaaaaccatgtggatagaactggaaacagaacccagcctccgcagtatctgctgcagtatctgctacagtatctgctctggtgtgactatacagtgttattacatcatgc

SEQ ID NO: 243769 - DNA, 120 bp, Artificial Sequence
  ENSG00000121904_118 (sequence is synthesized)
gtgcacttgcagaaacacactaagactgtgaaagaggtagtgaaagaaacaggaagcaacagagagaaacaaggatgtaaagaacctaagcagctgtgactgccattcccaggagctatc

SEQ ID NO: 243770 - DNA, 120 bp, Artificial Sequence
  ENSG00000121904_119 (sequence is synthesized)
gtccagggtgagtgcaatgtgggaatgagactccgccctctccatctgctcagttcccatgcccctctcattgggcacacctgtcgctccactaatgaaatccaggctttaaggctctgt

SEQ ID NO: 243771 - DNA, 120 bp, Artificial Sequence
  ENSG00000121904_120 (sequence is synthesized)
cattttgacttgtgactttcccatagagtgataagagtatggacttcagagtcacagacgggttcaaaccttggctctgacacatgcaagctatgtaactttgtctgtcatttcaccctt

SEQ ID NO: 243772 - DNA, 120 bp, Artificial Sequence
  ENSG00000121904_121 (sequence is synthesized)
ctgagcctcaatgttattatgcacaaaataggaatcatataagtacctaacctcctaaagttaaatgaaacaatgcttggaaatccttagctccaggcacagagtataaaaggtgatcaa

SEQ ID NO: 243773 - DNA, 120 bp, Artificial Sequence
  ENSG00000121904_122 (sequence is synthesized)
taaattatagttctaatagtcatcattgtcatgattatttttattatatctagatattgacaggcttggtgtaaagttaccttggtggtaggccaggtctcttgttcctgttcctgagcc

SEQ ID NO: 243774 - DNA, 120 bp, Artificial Sequence
  ENSG00000121904_123 (sequence is synthesized)
ttcacctgtaccagaaccaggcaaaggaggctcagcacagccccaggccatccttatttccaagttcttctcagcaaggtctttcattgagagtgcttgcctaagggcacaatgctcctt

SEQ ID NO: 243775 - DNA, 120 bp, Artificial Sequence
  ENSG00000121904_124 (sequence is synthesized)
ctgcctctcagatgagacacaaggcccttgctatggtgtaaatgcttaggcccccctagaattcatatgctgacatcctaacccccaaggtgatggtattaggaggtggggccttgggag

SEQ ID NO: 243776 - DNA, 120 bp, Artificial Sequence
  ENSG00000121904_125 (sequence is synthesized)
gcaattaggtcagacaacagagccctcatgaatgggattagtgcctttataaaagagacccacagaatcaccacactgaagccttctcagtggaaagagctaagaagcacaggaaacaca

SEQ ID NO: 243777 - DNA, 60 bp, Artificial Sequence
  ENSG00000121904_126 (sequence is synthesized)
gccttctcagtggaaagagctaagaagcacaggaaacacagaggccgaggtgggcggatc

SEQ ID NO: 243778 - DNA, 120 bp, Artificial Sequence
  ENSG00000121904_127 (sequence is synthesized)
caactgatgaaaggaggaagaagaaagggacttggaacaagcaagaaaatgagcctaatggtggcccatgtgatcaaatttgcataaggacagaagacaagaccgaaggagctgatgggt

SEQ ID NO: 243779 - DNA, 120 bp, Artificial Sequence
  ENSG00000121904_128 (sequence is synthesized)
agagaggagatattgctgtcaacagagtggaggtctcagtggggaaagatgaactctactggaggttcagaaaacaactgtgaaagaaatacttgaggcatgtttcaacagactgcaaat

SEQ ID NO: 243780 - DNA, 120 bp, Artificial Sequence
  ENSG00000121904_129 (sequence is synthesized)
ataccatctaattcttggaaacaagtacaagataaattgattctgaagctgagggctttgggcagcaaaatctgactttccggaagaggtgtaagatggtgctggtggagctttgtaagg

SEQ ID NO: 243781 - DNA, 120 bp, Artificial Sequence
  ENSG00000121904_130 (sequence is synthesized)
aagaagccaggctgcgtgtgtaagtgagcagggaggaggccacgccagggtcttcactgagaggcaggggcccgtttcctagctaatccaggggccccgtccctgggaaccttgcaggtt

SEQ ID NO: 243782 - DNA, 120 bp, Artificial Sequence
  ENSG00000121904_131 (sequence is synthesized)
gtaacaacagctgcactctggttggtttattctactcctcggaacgttgctggtggggtccttatttctggcaggaatgtcgactgtagcactgagaacaagtgctcctgacatttgggg

SEQ ID NO: 243783 - DNA, 120 bp, Artificial Sequence
  ENSG00000121904_132 (sequence is synthesized)
atgctcttcaacaccgtcttacccttcttggtgatccttaagagcaaggagacaccactgggacaaagcccaccaggctcagacccagacatttcctgctcaccgtcattgccacccctg

SEQ ID NO: 243784 - DNA, 120 bp, Artificial Sequence
  ENSG00000121904_133 (sequence is synthesized)
acaccatctaatccagcagggtggaagggactgtcaagtttgtaaggctgtagacaccaccagcctccagtaactgtgggaaactggccttgccaggatataaacagtttcctaaaattg

SEQ ID NO: 243785 - DNA, 120 bp, Artificial Sequence
  ENSG00000121904_134 (sequence is synthesized)
gagagacagacaaacagcacaagagacagaaacaaagcaggcagcaccataggtagggaagtattttttttttaagtttgagaggcatttctgtagacagtccaacaactggacagacac

SEQ ID NO: 243786 - DNA, 120 bp, Artificial Sequence
  ENSG00000121904_135 (sequence is synthesized)
gcaggcaccttggcaggtagacaggcaaacgacttgtcatctttgtcaggttcttcagagctgtgagttgctttctggatgcagctgatgggggttaatctatggttattgtgattctct

SEQ ID NO: 243787 - DNA, 120 bp, Artificial Sequence
  ENSG00000121904_136 (sequence is synthesized)
gacacctgagctgactgcagcaggggcaatcagatgttctctcttgggaagttgaaataggacccaagagattctacttttgcctggacccatctcctgaaaagataaaaatccaagtgc

SEQ ID NO: 243788 - DNA, 120 bp, Artificial Sequence
  ENSG00000121904_137 (sequence is synthesized)
aatggattgctgctcttctactttccatgtggaccaaaaagtagaacaatcctatgtgcagaaagagaatgattgagaagtggaaaaatttccttggtttctgatggcccttcagttcct

SEQ ID NO: 243789 - DNA, 120 bp, Artificial Sequence
  ENSG00000121904_138 (sequence is synthesized)
cgtcctctacctttgtgaagtctggctgcaaacccacccttgggttctctcttctctgagaggcttttttgcttattctagcctgaattgatttatttacatccaaaggttcccaaggaa

SEQ ID NO: 243790 - DNA, 120 bp, Artificial Sequence
  ENSG00000121904_139 (sequence is synthesized)
tacaacaacctaggacccagcaatcctacttctgggaattatgcaaagatatgtgcatgaagatattgcttgatatgttataacagggaaattagaaataatctaaatgtaaaaatagta

SEQ ID NO: 243791 - DNA, 120 bp, Artificial Sequence
  ENSG00000121904_140 (sequence is synthesized)
agagattaggtattataaatttaaagtgtatactcagagagagagagatagggaaagatacagtcattacaaatcattcatgtatgaacctgggcaacatagtgagactctgcctctacc

SEQ ID NO: 243792 - DNA, 120 bp, Artificial Sequence
  ENSG00000121904_141 (sequence is synthesized)
acgagggctatgacctgcaagggtccaagcggatcacctgtatgaaagtgagcgacatgtttgcggcctggagcgaccacaggccagtctgccgagatttaaacaactgcttttaaaaag

SEQ ID NO: 243793 - DNA, 120 bp, Artificial Sequence
  ENSG00000121904_142 (sequence is synthesized)
gtataacctcttggagcctcagtgtcttcagagttatgagaattaaatgtattagcctatgtgagagctctcagtgcagggttctgtaaatgcaagttttcctcctattccacactgcca

SEQ ID NO: 243794 - DNA, 120 bp, Artificial Sequence
  ENSG00000121904_143 (sequence is synthesized)
gggcagagaggcacagaagcccaaaccttggtgccaagtccactcattcacatcaactcactggctggatcatccctatacctgtgccccagcttatcccttagcactttctagcgggtt

SEQ ID NO: 243795 - DNA, 120 bp, Artificial Sequence
  ENSG00000121904_144 (sequence is synthesized)
ctccttctccaaagggatctagggcttctgctgacctctcaaggagcactgtgtttttgtgcacaaatgaagatattgtgattttgagtaggaagagtatgaacaattcagagtaggtat

SEQ ID NO: 243796 - DNA, 120 bp, Artificial Sequence
  ENSG00000121904_145 (sequence is synthesized)
gcctttattggcagcctgttttcttctacaagtcccaagttagggatctggatatttcctcatttttattatagtggaattgcctagagaaacttatagaatgttctctgtggacttgtg

SEQ ID NO: 243797 - DNA, 120 bp, Artificial Sequence
  ENSG00000121905_0 (sequence is synthesized)
gcagtcggtgtctccgcgtcgctgggtgggacttggctcggcggccatgggcaagcagaacagcaagctgcggcccgagatgttgcaggacctgcgagagaacacagagttctcagagct

SEQ ID NO: 243798 - DNA, 120 bp, Artificial Sequence
  ENSG00000121905_1 (sequence is synthesized)
ggagctgcaggagtggtacaagggcttcctcaaggactgccccacaggaatcctcaatgtggatgagttcaagaagatctacgccaacttctttccctatggtgacgcctccaagtttgc

SEQ ID NO: 243799 - DNA, 120 bp, Artificial Sequence
  ENSG00000121905_2 (sequence is synthesized)
cgagcacgtcttccgcacctttgacaccaacagcgatggcaccatagactttcgggagttcatcattgcgctgagcgtgacctcgcgcggccgcctggagcagaagctcatgtgggcctt

SEQ ID NO: 243800 - DNA, 120 bp, Artificial Sequence
  ENSG00000121905_3 (sequence is synthesized)
cagcatgtatgacctggacggcaacggctacatcagccgggaggagatgctggagatcgtgcaggccatttacaagatggtttcgtccgtgatgaagatgccggaggacgagtcgacccc

SEQ ID NO: 243801 - DNA, 120 bp, Artificial Sequence
  ENSG00000121905_4 (sequence is synthesized)
ggaaaagaggactgagaaaatcttccgccaaatggacacaaacaacgacggcaagctgtccttggaggagttcatccgcggggccaaaagcgacccgtccatcgtgcgtctgctgcagtg

SEQ ID NO: 243802 - DNA, 120 bp, Artificial Sequence
  ENSG00000121905_5 (sequence is synthesized)
ccttgtgtgtattctggctgggggccagattggggaagcccttctccccgggtctgccctgtggggggcttccggaaaagggaaccctgcggtacccccaggccaaagcaagtaagcggt

SEQ ID NO: 243803 - DNA, 120 bp, Artificial Sequence
  ENSG00000121905_6 (sequence is synthesized)
tagcaccccccaatcccagaggcaacaatagagacacaggctgggttggtctgcccctcagtcaggcccccttacccacccaccagccccaaggcccgacccctcccccaaaggggcagt

SEQ ID NO: 243804 - DNA, 120 bp, Artificial Sequence
  ENSG00000121905_7 (sequence is synthesized)
ccccttcttgcaggtctcagcttgcggggtggggggagtcatgcccaggggaggagactttttatctggaggggagagaaggattctaggggtgtggagttggagaaagaggcttccttg

SEQ ID NO: 243805 - DNA, 120 bp, Artificial Sequence
  ENSG00000121905_8 (sequence is synthesized)
agccacccttcccaccccagcccttgctggtccctaggccaagccaccaagtgaaaccttccaggatactagcccgccagctgtgggccccagaaagccagcctgccttttagcacttgg

SEQ ID NO: 243806 - DNA, 120 bp, Artificial Sequence
  ENSG00000121905_9 (sequence is synthesized)
atacacacagacccacggagctctctgtgtttggcctctcacacacacacaggcccatagacagatgggcagatgcacccagagccccatgcacagtgtcctgcgtgggaaagagacacg

SEQ ID NO: 243807 - DNA, 120 bp, Artificial Sequence
  ENSG00000121905_10 (sequence is synthesized)
gtccccctggctgagcccctgtcctcccctctgtccccccaaccgccccccctgcatgcagccaaatggagcatctctgttctttttaataatttcagaataaagtctcatttcagtgca

SEQ ID NO: 243808 - DNA, 120 bp, Artificial Sequence
  ENSG00000121905_11 (sequence is synthesized)
gccatttacaagatggtttcgtccgtgatgaagatgccggaggacgagtcgaccccggaaaagaggactgagaaaatcttccgccaaatggacacaaacaacgacggctctgggtgggga

SEQ ID NO: 243809 - DNA, 120 bp, Artificial Sequence
  ENSG00000121905_12 (sequence is synthesized)
cctgttgaagacccttcaagccccctccagcctcctcccaccaaccaccctcccagcctggccataccacgatggcggaagtgacagagaggatgttgaccacgcagtactgcagagcca

SEQ ID NO: 243810 - DNA, 120 bp, Artificial Sequence
  ENSG00000121905_13 (sequence is synthesized)
tagcgcagcactgtgccatggaacagggcagctgtgatgaagctcacatggcccagcaccaccagcaccaggcctgtcttcatcagcaccttccggaagtcgcccacactcaggcctcct

SEQ ID NO: 243811 - DNA, 120 bp, Artificial Sequence
  ENSG00000121905_14 (sequence is synthesized)
gtgggggacagctatgtcagggctgtgcgtggggcttatcctgctgggcagaaggggaagctgaggccctggccctagtgatggacattgggttctaaatgtatttctgaatgacttgga

SEQ ID NO: 243812 - DNA, 120 bp, Artificial Sequence
  ENSG00000121905_15 (sequence is synthesized)
tcagtagctggaggaatgggcgctccacgctcccagctccgttagttgggagttgaggcgcaggagcagggagggtgcccagggtgccaattcggccctcgaagcgacgtgcggctcaga

SEQ ID NO: 243813 - DNA, 120 bp, Artificial Sequence
  ENSG00000121931_0 (sequence is synthesized)
gcagtccaccgccaggagccttccggtttctgcgcggtgcgcgacctcgtcccgaagcctggggatacaccctctcgagagcccgctgtcgccctccgttaaggtcgaacccctcacagt

SEQ ID NO: 243814 - DNA, 120 bp, Artificial Sequence
  ENSG00000121931_1 (sequence is synthesized)
tgctgtgggcaactccagcccaacattccctcgctctggttctcgccccattgggaaactcggccccacgcttcccacttttctggatgaggtgtcccctttctccccactaaaatgtca

SEQ ID NO: 243815 - DNA, 120 bp, Artificial Sequence
  ENSG00000121931_2 (sequence is synthesized)
aataacctacggagggtcttcctgaaacccgcagaggaaaattcaggcaacgcctcgcgttgtgtttcaggctgcatgtaccaagtagttcagacgattggctcggatggaaaaaatctt

SEQ ID NO: 243816 - DNA, 120 bp, Artificial Sequence
  ENSG00000121931_3 (sequence is synthesized)
ctgcaattacttccaattcctaagtcttctggaaatcttataccactagttcaatcttcagtcatgtctgatgctttgaaagggaatacaggaaaaccagttcaagttacttttcagact

SEQ ID NO: 243817 - DNA, 120 bp, Artificial Sequence
  ENSG00000121931_4 (sequence is synthesized)
cagatttccagctcttccacaagtgcatcagttcaattgcccatttttcagccagccagttcttcaaactattttcttacaagaacagtagatacatcagaaaaaggtagagttacttct

SEQ ID NO: 243818 - DNA, 120 bp, Artificial Sequence
  ENSG00000121931_5 (sequence is synthesized)
gtgggaactggaaatttttcttcatcagtttctaaagttcagagtcatggtgtgaaaattgatggactcaccatgcaaacatttgctgttcctccctcaacacaaaaagactcatctttt

SEQ ID NO: 243819 - DNA, 120 bp, Artificial Sequence
  ENSG00000121931_6 (sequence is synthesized)
attgtagttaatacccagagtcttccagtgactgtgaagtctccagttttgccttctgggcatcatttacagattccagcccatgctgaagtgaaatctgtaccagcgtcatcattgcct

SEQ ID NO: 243820 - DNA, 120 bp, Artificial Sequence
  ENSG00000121931_7 (sequence is synthesized)
ccttcagtgcagcaaaagatacttgcaactgccaccaccagtacctcaggaatggttgaggcctcccaaatgccaaccgttatttatgtatctcctgtaaatacagtgaaaaatgtagtt

SEQ ID NO: 243821 - DNA, 120 bp, Artificial Sequence
  ENSG00000121931_8 (sequence is synthesized)
accaagaactttcaaaacatttacccaaaacctgttacagaaatagcaaagccagtaatactaaataccacacaaattccaaagaatgttgctacagagacacaattgaaaggtggtcag

SEQ ID NO: 243822 - DNA, 120 bp, Artificial Sequence
  ENSG00000121931_9 (sequence is synthesized)
cattctcaagctgctccagtgaaatggattttccaagataatctacagccttttacgccatctcttgttcctgttaagtcttcaaataatgtggcttcaaagattttaaaaacttttgta

SEQ ID NO: 243823 - DNA, 120 bp, Artificial Sequence
  ENSG00000121931_10 (sequence is synthesized)
gataggaaaaatttgggagataatactataaatatgccaccattgagtaccatcgatcctagtgggacgcgatccaaaaatatgcctattaaagataatgctttggttatgtttaatggg

SEQ ID NO: 243824 - DNA, 120 bp, Artificial Sequence
  ENSG00000121931_11 (sequence is synthesized)
aaagtctatctgttggctaaaaaggggacagatgttctgccatcacaaattgaccaacagaattctgtttctcctgatactccagtaagaaaagacacgttacagacagtgagttcaagt

SEQ ID NO: 243825 - DNA, 120 bp, Artificial Sequence
  ENSG00000121931_12 (sequence is synthesized)
ccagtcacagaaatatccagagaggttgtaaatattgttttggctaaaagtaaatcttcccagatggagacaaaatcactttccaatacccagcttgcttccatggccaatctaagggca

SEQ ID NO: 243826 - DNA, 120 bp, Artificial Sequence
  ENSG00000121931_13 (sequence is synthesized)
aacagagtaagactttattcacaaatccaatctttccagttggatttagtacaggacacaatgcccccagaaaagtaacagccgtcatttatgctagaaaaggaagtgtcctccagagca

SEQ ID NO: 243827 - DNA, 120 bp, Artificial Sequence
  ENSG00000121931_14 (sequence is synthesized)
tagagaaaataagttcctctgttgatgcaacaactgttacttcacaacagtgtgttttcagagaccaagaaccaaagatccataatgagatggcatcaacatcagataaaggtgcccaag

SEQ ID NO: 243828 - DNA, 120 bp, Artificial Sequence
  ENSG00000121931_15 (sequence is synthesized)
gaagaaatgacaagaaagattctcaaggaagaagtaataaggcattacatctgaagagtgatgctgaatttaaaaagatatttggccttactaaggatttgagagtgtgccttactcgaa

SEQ ID NO: 243829 - DNA, 120 bp, Artificial Sequence
  ENSG00000121931_16 (sequence is synthesized)
ttcctgaccatttgacctctggagaaggtttcgattcctttagcagtttggtaaagagtggtacttacaaagagacagagtttatggtgaaggaaggagagagaaaacagcagaattttg

SEQ ID NO: 243830 - DNA, 120 bp, Artificial Sequence
  ENSG00000121931_17 (sequence is synthesized)
ataagaaaagaaaagcaaaaactaataagaagatggatcacataaagaagagaaaaacagagaatgcttataacgcaatcataaatggggaagctaatgtcaccggttcccaactcctaa

SEQ ID NO: 243831 - DNA, 120 bp, Artificial Sequence
  ENSG00000121931_18 (sequence is synthesized)
gcagtattttaccaacttcagatgtgtcacaacataacattctcacgagtcacagcaaaaccagacaagaaaagagaactgagatggaatactatacccatgagaagcaagagaaaggca

SEQ ID NO: 243832 - DNA, 120 bp, Artificial Sequence
  ENSG00000121931_19 (sequence is synthesized)
ctttgaattcaaatgcagcttatgaacaaagtcatttcttcaataaaaattataccgaagatattttcccagtgacaccaccggagttagaagaaaccattcgagatgaaaaaataagaa

SEQ ID NO: 243833 - DNA, 120 bp, Artificial Sequence
  ENSG00000121931_20 (sequence is synthesized)
gacttaagcaggtgctgagagagaaagaagcagctcttgaagaaatgcgtaagaagatgcaccaaaaataaaatctcctgtaaagacttcagtgaaatagctgttttttaaaatatactt

SEQ ID NO: 243834 - DNA, 120 bp, Artificial Sequence
  ENSG00000121931_21 (sequence is synthesized)
cagcattaataagttaattgtaggtgtgttctgaaagtgtctttgaatatgaagcttgttttttcatcagtcgattgtacaactttaaggaatacagaaaaggttgattcacatatgact

SEQ ID NO: 243835 - DNA, 120 bp, Artificial Sequence
  ENSG00000121931_22 (sequence is synthesized)
tgtgaataatttacatggggtatctatacctttgtcttagatacctttttttggaaggataaattttatatttttctattattttaactagaattctccaagtttgaatatttgggcagg

SEQ ID NO: 243836 - DNA, 120 bp, Artificial Sequence
  ENSG00000121931_23 (sequence is synthesized)
gtttttgttattgtttgtatctttacctaaattgctcaggcattattccagcagtagatagtgactgtgtattactgaaattttacaattcaagagaggaaatcagctccaaacttagct

SEQ ID NO: 243837 - DNA, 120 bp, Artificial Sequence
  ENSG00000121931_24 (sequence is synthesized)
tttccagtggatttgtatatgtacttgctttatctctttacccttaaaatgatgataccttgtattcaccattgttttttttaatgtcgtgaaataatatgtattatggcaacattattt

SEQ ID NO: 243838 - DNA, 120 bp, Artificial Sequence
  ENSG00000121931_25 (sequence is synthesized)
aaacattcaaacatttctcaagaatgagcaacatttgtaactttacaatgtaattttatataatccaaaggtattttagaattcaggccatttgatgttttgtttgcttatagtgatgtg

SEQ ID NO: 243839 - DNA, 120 bp, Artificial Sequence
  ENSG00000121931_26 (sequence is synthesized)
ttcccaggcaaatgctgctttttttttttttgggactatgtacatacgttactgagattgtgtaaaaagtagatcctgaacagttatcacatttaatatttcttaaactgtaaaagtgta

SEQ ID NO: 243840 - DNA, 120 bp, Artificial Sequence
  ENSG00000121933_0 (sequence is synthesized)
agtccatatagagctgtcctacagcattctggaaacttgaggatgtgcggtgcataaaggggctggaagtgacccacctgtgatgagccctttctaaggagaagggtttccaagagatca

SEQ ID NO: 243841 - DNA, 120 bp, Artificial Sequence
  ENSG00000121933_1 (sequence is synthesized)
ccccaccagaaaagggtaggaatgagcaagttgggaattttagactgtcactgcacatggacctctgggaagacgtctggcgagagctaggcccactggccctacagacggatcttgctg

SEQ ID NO: 243842 - DNA, 120 bp, Artificial Sequence
  ENSG00000121933_2 (sequence is synthesized)
gctcacctgtccctgtggaggttcccctgggaaggcaagatgcccaacaacagcactgctctgtcattggccaatgttacctacatcaccatggaaattttcattggactctgcgccata

SEQ ID NO: 243843 - DNA, 120 bp, Artificial Sequence
  ENSG00000121933_3 (sequence is synthesized)
gtgggcaacgtgctggtcatctgcgtggtcaagctgaaccccagcctgcagaccaccaccttctatttcattgtctctctagccctggctgacattgctgttggggtgctggtcatgcct

SEQ ID NO: 243844 - DNA, 120 bp, Artificial Sequence
  ENSG00000121933_4 (sequence is synthesized)
ttggccattgttgtcagcctgggcatcacaatccacttctacagctgcctttttatgacttgcctactgcttatctttacccacgcctccatcatgtccttgctggccatcgctgtggac

SEQ ID NO: 243845 - DNA, 120 bp, Artificial Sequence
  ENSG00000121933_5 (sequence is synthesized)
cgatacttgcgggtcaagcttaccgtcagattcagaattcctgggctccctgggtgcattctatcattccagttgaaagtttgcttccttccagtcatgtggctcttcattctactctcc

SEQ ID NO: 243846 - DNA, 120 bp, Artificial Sequence
  ENSG00000121933_6 (sequence is synthesized)
aatcaccccaaatactggtgccgaggctatttccgtgactactgcaacatcatcgccttctcccctaacagcaccaatcatgtggccctgagggacacagggaaccagctcattgtcact

SEQ ID NO: 243847 - DNA, 120 bp, Artificial Sequence
  ENSG00000121933_7 (sequence is synthesized)
atgtcctgcctgaccaaagaggacacgggctggtactggtgtggcatccagcgggactttgccagggatgacatggattttacagagctgattgtaactgacgacaaaggaaccctggcc

SEQ ID NO: 243848 - DNA, 120 bp, Artificial Sequence
  ENSG00000121933_8 (sequence is synthesized)
aatgacttttggtctgggaaagacctatcaggcaacaaaaccagaagctgcaaggctcccaaagttgtccgcaaggctgaccgctccaggacgtccattctcatcatttgcatactgatc

SEQ ID NO: 243849 - DNA, 120 bp, Artificial Sequence
  ENSG00000121933_9 (sequence is synthesized)
acgggtttgggaatcatctctgtaatcagtcatttgaccaaaaggaggagaagtcaaaggaatagaagggtaggcaacactttgaagcccttctcgcgtgtcctgactccaaaggaaatg

SEQ ID NO: 243850 - DNA, 120 bp, Artificial Sequence
  ENSG00000121933_10 (sequence is synthesized)
gctcctactgaacagatgtgactgaagatttttttaatttagttcataaagtgatgctacaacagaataatcaccatgacaactggcccacacctcagagactgattctgatctcccagg

SEQ ID NO: 243851 - DNA, 120 bp, Artificial Sequence
  ENSG00000121933_11 (sequence is synthesized)
aattctgaaggaccctctatccttgacaacaatcatttgcagccaggtagcaacggcggtagtcagaggagctatgatagaccacacccaagcaaggctgccctcaaataacatctcaag

SEQ ID NO: 243852 - DNA, 120 bp, Artificial Sequence
  ENSG00000121933_12 (sequence is synthesized)
atcttagttcttatgcattccatcagtcagaagtgaagaagaggtggagaatctggattggggaccaggaaatcacttgtattttgttagccaataaattcctagccagtgttgaatgaa

SEQ ID NO: 243853 - DNA, 120 bp, Artificial Sequence
  ENSG00000121933_13 (sequence is synthesized)
ggacccattgagcagaaggaggccaggtgggaaagctcctgggaagagcagccagactggacactgggctgcttgagtcctgagtcacacaccaatcatgtggccctgagggacacaggg

SEQ ID NO: 243854 - DNA, 120 bp, Artificial Sequence
  ENSG00000121933_14 (sequence is synthesized)
gctagggacagagggcctcctaacggtaagcctcaggctcttcaaggccctccgtcaagcaatggtaggaggcctccatatttcacccacccttaggccagggaaaaggacttctccaga

SEQ ID NO: 243855 - DNA, 120 bp, Artificial Sequence
  ENSG00000121933_15 (sequence is synthesized)
gttgctttattagtttgctagggctgtgataacaacaacagcaacaaaaccacagtctgggaggctaaaacaatggaaatttatttccttatgttatgaaggtgatgccatggtcatgga

SEQ ID NO: 243856 - DNA, 120 bp, Artificial Sequence
  ENSG00000121933_16 (sequence is synthesized)
agttggaccaatggaagggtctccagcaggacccattgagcagaaggaggccaggtgggaaagctcctgggaagagcagccagactggacactgggctgcttgagtcctgagtcacaatt

SEQ ID NO: 243857 - DNA, 120 bp, Artificial Sequence
  ENSG00000121933_17 (sequence is synthesized)
agatttcaaatgagtgaatgagagcctcttcatattgcctggtcacctggagaccaatgcagccagccatgggctggggtagatatctgcttgatggtgacaaggcatcacgagaagtga

SEQ ID NO: 243858 - DNA, 120 bp, Artificial Sequence
  ENSG00000121933_18 (sequence is synthesized)
cagagggagcactggagctttcttaagtggatacatgtgtaggtcaggaaggaaggaggtcctgagacaaccacaccaggttcccatctgcagagccacctacctccccagcacacaaac

SEQ ID NO: 243859 - DNA, 120 bp, Artificial Sequence
  ENSG00000121933_19 (sequence is synthesized)
ttcgggctcctgtcgaaggaatgagcttctgggaccgctgggtaagcaggtatagaagagtctcctttttcatatacacaggatgttgccctgttgcccaggcttgagtgccgaagtatg

SEQ ID NO: 243860 - DNA, 120 bp, Artificial Sequence
  ENSG00000121933_20 (sequence is synthesized)
agcctcaggctcttcaaggccctccgtcaagcaatgatgccatggtcatggatgaaaaggtcaagagaagctttgtgctggacacggcttctgccatctgcaactacaatgcccactaca

SEQ ID NO: 243861 - DNA, 120 bp, Artificial Sequence
  ENSG00000121940_0 (sequence is synthesized)
ccttatacaggatgctgtgttctttgctcctttgtgaatgtctgttgctggtagctggttatgctcatgatgatgactggattgaccccacagacatgcttaactatgatgctgcttcag

SEQ ID NO: 243862 - DNA, 120 bp, Artificial Sequence
  ENSG00000121940_1 (sequence is synthesized)
gaacaatgagaaaatctcaggcaaaatatggtatttcaggggaaaaggatgtcagtcctgacttgtcatgtgctgatgaaatatcagaatgttatcacaaacttgattctttaacttata

SEQ ID NO: 243863 - DNA, 120 bp, Artificial Sequence
  ENSG00000121940_2 (sequence is synthesized)
agattgatgagtgtgaaaagaaaaagagggaagactatgaaagtcaaagcaatcctgtttttaggagatacttaaataagattttaattgaagctggaaagcttggactttttcatgatt

SEQ ID NO: 243864 - DNA, 120 bp, Artificial Sequence
  ENSG00000121940_3 (sequence is synthesized)
ttgaaacatggaagtggcgattcgaagattcctttggagtggatccatataatgtgttaatggtacttctttgtctgctctgcatcgtggttttagtggctactgagctgtggacatatg

SEQ ID NO: 243865 - DNA, 120 bp, Artificial Sequence
  ENSG00000121940_4 (sequence is synthesized)
tacgttggtacactcagttgagacgtgttttaatcatcagctttctgttcagtttgggatggaattggatgtatttatataagctagcttttgcacagcatcaggctgaagtcgccaaga

SEQ ID NO: 243866 - DNA, 120 bp, Artificial Sequence
  ENSG00000121940_5 (sequence is synthesized)
tggagccattaaacaatgtgtgtgccaaaaagatggactggactggaagtatctgggaatggtttagaagttcatggacctataaggatgacccatgccaaaaatactatgagctcttac

SEQ ID NO: 243867 - DNA, 120 bp, Artificial Sequence
  ENSG00000121940_6 (sequence is synthesized)
tagtcaaccctatttggttggtcccaccaacaaaggcacttgcagttacattcaccacatttgtaacggagccattgaagcatattggaaaaggaactggggaatttattaaagcactca

SEQ ID NO: 243868 - DNA, 120 bp, Artificial Sequence
  ENSG00000121940_7 (sequence is synthesized)
tgaaggaaattccagcgctgcttcatcttccagtgctgataattatggcattagccatcctgagtttctgctatggtgctggaaaatcagttcatgtgctgagacatataggcggtcctg

SEQ ID NO: 243869 - DNA, 120 bp, Artificial Sequence
  ENSG00000121940_8 (sequence is synthesized)
agacggcaggaggaaattgattatagacctgatggtggagcaggtgatgccgatttccattataggggccaaatgggccccactgagcaaggcccttatgccaaaacgtatgagggtaga

SEQ ID NO: 243870 - DNA, 120 bp, Artificial Sequence
  ENSG00000121940_9 (sequence is synthesized)
agagagattttgagagagagagatgttgacttgagatttcagactggcaacaagagccctgaagtgctccgggcatttgatgtaccagacgcagaggcacgagagcatcccacggtggta

SEQ ID NO: 243871 - DNA, 120 bp, Artificial Sequence
  ENSG00000121940_10 (sequence is synthesized)
cccagtcataaatcacctgttttggatacaaagcccaaggagacaggtggaatcctgggggaaggcacaccgaaagaaagcagtactgaaagcagccagtcggccaagcctgtctctggc

SEQ ID NO: 243872 - DNA, 120 bp, Artificial Sequence
  ENSG00000121940_11 (sequence is synthesized)
caagacacatcagggaatacagaaggttcacccgcagcggaaaaggcccagctcaagtctgaagccgcaggcagcccagaccaaggcagcacatacagccccgcaagaggtgtggctgga

SEQ ID NO: 243873 - DNA, 120 bp, Artificial Sequence
  ENSG00000121940_12 (sequence is synthesized)
ccacgtggacaggatccggtcagcagcccctgtggctagaggaacaccagcacaaacgacagcctcaagtctccttcgagctttatatccatttggggatgaagtctactttgacagcta

SEQ ID NO: 243874 - DNA, 120 bp, Artificial Sequence
  ENSG00000121940_13 (sequence is synthesized)
gcaaggcgacatgcaactgttgttgaatgatgacagcaattcaggaaagacttaaatatgaaagcaaattgaacacatcgggtgtttgttatcagaaaagagatgagatgagataagact

SEQ ID NO: 243875 - DNA, 120 bp, Artificial Sequence
  ENSG00000121940_14 (sequence is synthesized)
gagatgagataagacttgtttattgactagccaatatgtcattaaaattaaggtttatattgtgaagcttttttgaaattttacttttttttgagagttttgctctgtcacccaggctgg

SEQ ID NO: 243876 - DNA, 120 bp, Artificial Sequence
  ENSG00000121940_15 (sequence is synthesized)
gctgagattatccttaaaagagaaactttgttagaaatacagaagtttctcaatggagaagactggaaaccaggtgccttggatgatgcactaagtgatattttaattaattttaagttt

SEQ ID NO: 243877 - DNA, 120 bp, Artificial Sequence
  ENSG00000121940_16 (sequence is synthesized)
aggcatgagccattgtgcccagcctatatagtgtgaagcttttaggaaaatcagaacagggtagacagctgttaaaaacaatgtttaaatggaataatgttgaatgtttacaggctgtaa

SEQ ID NO: 243878 - DNA, 120 bp, Artificial Sequence
  ENSG00000121940_17 (sequence is synthesized)
ttacaggctgtaagaactattgtatacacaaaataatacacaaagtttgtactttgtgtacaaatacaaatttgtactttgtgtacaaataatacaaaaagtttgtatacacaaactttt

SEQ ID NO: 243879 - DNA, 120 bp, Artificial Sequence
  ENSG00000121940_18 (sequence is synthesized)
tacgttgtggtttggtatattgtcttaactgaattttcttataagaaccccatgaaacttacctgagtttttaaaatgctatccaggacatcataccttatagtatacatgaaacataat

SEQ ID NO: 243880 - DNA, 120 bp, Artificial Sequence
  ENSG00000121940_19 (sequence is synthesized)
gtaatccaggttgtaatttagaactttttttttttttttagctgagcacttaatgtaattaattccaggttatgactcttaaaaaacattggccattagagaaatagttctatttgccca

SEQ ID NO: 243881 - DNA, 120 bp, Artificial Sequence
  ENSG00000121940_20 (sequence is synthesized)
tccaaatcacctgaatgactttttgaaagaataggggtccacatccccagatcccatcccagctgtgcacagtctgaagcaagcagagtgaaacaagttggcaacttgttccaagcgtgg

SEQ ID NO: 243882 - DNA, 120 bp, Artificial Sequence
  ENSG00000121940_21 (sequence is synthesized)
gcctttgcagtctgtgatccagtgttactccaggtcccagtctgtcccatacttgtcttttgctacagttagttagttactttgttatcatccccttgtaaactgccttcaatatctggg

SEQ ID NO: 243883 - DNA, 120 bp, Artificial Sequence
  ENSG00000121940_22 (sequence is synthesized)
ataaggaagacaaagcttaatgacaactaaggttctagctgacatctttctttcatatttaatttttgtgagttttcatctgttttctgtttgtttatgtgtcctaggttcttgacctaa

SEQ ID NO: 243884 - DNA, 120 bp, Artificial Sequence
  ENSG00000121940_23 (sequence is synthesized)
ccacatgggttttgttttttgtttttatattagaacttagaaaagtttgttttacagcagtattatggaacagaagagaccattttaaataatttttttaaacagcccaaaacacacaaa

SEQ ID NO: 243885 - DNA, 68 bp, Artificial Sequence
  ENSG00000121940_24 (sequence is synthesized)
ggctcaagtggtcctcctgcctcagcctcttaagcagttgggactacaggtgtgtgccagcatgcttg

SEQ ID NO: 243886 - DNA, 120 bp, Artificial Sequence
  ENSG00000121940_25 (sequence is synthesized)
agagtttcttttatactgactttggcctaaaaaaacagattttcatggaggaaaaaaaaacctagatttttagtaagactattttatatacttttttacattgatcaagtacattatttt

SEQ ID NO: 243887 - DNA, 120 bp, Artificial Sequence
  ENSG00000121940_26 (sequence is synthesized)
taccaaacaacattgtttcccactacatccatggttatgtataaaaaaacgccattgtcaattaagatgttaaaaaattatttccataagagtattaaattctaatctatgattcactta

SEQ ID NO: 243888 - DNA, 120 bp, Artificial Sequence
  ENSG00000121940_27 (sequence is synthesized)
acttcctactttataaacactaggtaaagtaatctcacaagctgccaaagaacacatcccaagcagtaatcacagacgatgaagcaccttacaggacccctccaccctcaaacgcgcatg

SEQ ID NO: 243889 - DNA, 120 bp, Artificial Sequence
  ENSG00000121940_28 (sequence is synthesized)
tccagagaagtattaatgccttaatagactactgaaggttaactatttacatcattctaaaaatattttaagctgtattacagtgctataaattctccttttaaggaaaaaagtaataga

SEQ ID NO: 243890 - DNA, 120 bp, Artificial Sequence
  ENSG00000121940_29 (sequence is synthesized)
ttgtttccttaccgtgtttgaaaggaaaaaaaataaatccatagtaactaatggtctgccgattttttccctgaatttttaaactccaacaaagcattattttgcaaaaagtcctttagc

SEQ ID NO: 243891 - DNA, 120 bp, Artificial Sequence
  ENSG00000121940_30 (sequence is synthesized)
ccaaagtcagtgtctctgttttgatctctttgtaaaagaactctctgttcatccattctctttccctgggaccgtaaaataaggctgaaaaagtcttcatctggtactgtcggacccttt

SEQ ID NO: 243892 - DNA, 120 bp, Artificial Sequence
  ENSG00000121940_31 (sequence is synthesized)
gtggtagcaggtggtggagcacatctttgatcatctaatctggatccctagaagtttatgagagagattaaaagacatactgtgggaaagaaagcaccaagctatgttaaatctctcagt

SEQ ID NO: 243893 - DNA, 120 bp, Artificial Sequence
  ENSG00000121940_32 (sequence is synthesized)
cacaacaagaaaacgcagttgtaaacttttatttggggcttctcagaaattaatctttgtttttatattgttctctttagttcccagcctgatttctgaaagaaataatctttaaacctg

SEQ ID NO: 243894 - DNA, 120 bp, Artificial Sequence
  ENSG00000121940_33 (sequence is synthesized)
gaaaccctgggcggcggcaagctgtgcgacctcttctgcggccggcctgggcaggtgtcttcctcgagaggcaggcaggggatcccggacactagctttatcgtcatctgggaaattgtt

SEQ ID NO: 243895 - DNA, 120 bp, Artificial Sequence
  ENSG00000121940_34 (sequence is synthesized)
aaaaatgcaaattcgcaagtttgagagccatggttccaagaaactgcataagcatacgaaataagttgcagcctcccgacttataccctggtacttctagtctaaaacaggatttgactc

SEQ ID NO: 243896 - DNA, 120 bp, Artificial Sequence
  ENSG00000121957_0 (sequence is synthesized)
gcagaggagggcggtgttgagaccggcggagcggcgggacccctaggtggcggagggacgctccgggaaagcgaggggcgctacgagctctggcccacgtgacctgccgggggcgggagc

SEQ ID NO: 243897 - DNA, 120 bp, Artificial Sequence
  ENSG00000121957_1 (sequence is synthesized)
ggcctcctgcggtgcccctgccttggggaggggccgtgaccacccgtctgtcgcccgaggcggccgccgctgcaccttcaccgcgtacccgggacccgcccgcccgcgggagaaatgttg

SEQ ID NO: 243898 - DNA, 120 bp, Artificial Sequence
  ENSG00000121957_2 (sequence is synthesized)
ggagaaatgttgctgaagtgctgctgaaagggccagagatgcaaggatttgggatacattttgaacctttaagctgtctgacattgacctcctttcattattaataaagaagaatcagga

SEQ ID NO: 243899 - DNA, 120 bp, Artificial Sequence
  ENSG00000121957_3 (sequence is synthesized)
gcttaggatgtattaacaccaactcattaatatactaaccggacaatgttctacaaacaattctacattgtaaaggactggattggcacaaaataaaataattttattttattcagctta

SEQ ID NO: 243900 - DNA, 120 bp, Artificial Sequence
  ENSG00000121957_4 (sequence is synthesized)
taatatgactcgatggaggaaaatttgataagcatgagagaagaccattcttttcatgttcgttacagaatggaagcttcttgcctagagctggccttggaaggggaacgtctatgtaaa

SEQ ID NO: 243901 - DNA, 120 bp, Artificial Sequence
  ENSG00000121957_5 (sequence is synthesized)
tcaggagactgccgcgctggcgtgtcattctttgaagctgcagttcaagttggaactgaagacctaaaaacacttagcgctatttacagccagttgggcaatgcttatttctatttgcat

SEQ ID NO: 243902 - DNA, 120 bp, Artificial Sequence
  ENSG00000121957_6 (sequence is synthesized)
gattatgccaaagcattagaatatcaccatcatgatttaacccttgcaaggactattggagaccagctgggggaagcgaaagctagtggtaatctgggaaacaccttaaaagttcttggg

SEQ ID NO: 243903 - DNA, 120 bp, Artificial Sequence
  ENSG00000121957_7 (sequence is synthesized)
aattttgacgaagccatagtttgttgtcagcgacacctagatatttccagagagcttaatgacaaggtgggagaagcaagagcactttacaatcttgggaatgtgtatcatgccaaaggg

SEQ ID NO: 243904 - DNA, 120 bp, Artificial Sequence
  ENSG00000121957_8 (sequence is synthesized)
aaaagttttggttgccctggtccccaggatgtaggagaatttccagaagaagtgagagatgctctgcaggcagccgtggatttttatgaggaaaacctatcattagtgactgctttgggt

SEQ ID NO: 243905 - DNA, 120 bp, Artificial Sequence
  ENSG00000121957_9 (sequence is synthesized)
gaccgagcggcacaaggacgtgcctttggaaatcttggaaacacacattacctccttggcaacttcagggatgcagttatagctcatgagcagcgtctccttattgcaaaagaatttgga

SEQ ID NO: 243906 - DNA, 120 bp, Artificial Sequence
  ENSG00000121957_10 (sequence is synthesized)
gataaagcagctgaaagaagagcatatagcaaccttggaaatgcatatatatttcttggtgaatttgaaactgcctcggaatactacaagaagacactactgttggcccgacagcttaaa

SEQ ID NO: 243907 - DNA, 120 bp, Artificial Sequence
  ENSG00000121957_11 (sequence is synthesized)
gaccgagctgtagaagcacagtcttgttacagtcttggaaatacatatactttacttcaagactatgaaaaggccattgattatcatctgaagcacttagcaattgctcaagagctgaat

SEQ ID NO: 243908 - DNA, 120 bp, Artificial Sequence
  ENSG00000121957_12 (sequence is synthesized)
gatagaattggtgaaggaagagcatgttggagcttaggaaatgcatacacagcactaggaaatcatgatcaagcaatgcattttgctgaaaagcacttggaaatttcaagagaggttggg

SEQ ID NO: 243909 - DNA, 120 bp, Artificial Sequence
  ENSG00000121957_13 (sequence is synthesized)
gataaaagtggtgaactaacagcacgacttaatctctcagaccttcaaatggttcttggtctgagctacagcacaaataactccataatgtctgaaaatactgaaattgatagcagtttg

SEQ ID NO: 243910 - DNA, 120 bp, Artificial Sequence
  ENSG00000121957_14 (sequence is synthesized)
aatggtgtacgccccaagttgggacgccggcatagtatggaaaatatggaacttatgaagttaacaccagaaaaggtacagaactggaacagtgaaattcttgctaagcaaaaacctctt

SEQ ID NO: 243911 - DNA, 120 bp, Artificial Sequence
  ENSG00000121957_15 (sequence is synthesized)
attgccaaaccttctgcaaagctactctttgtcaacagactgaaggggaaaaaatacaaaacgaattcctccactaaagttctccaagatgccagtaattctattgaccaccgaattcca

SEQ ID NO: 243912 - DNA, 120 bp, Artificial Sequence
  ENSG00000121957_16 (sequence is synthesized)
aattctcagaggaaaatcagtgcagatactattggagatgaagggttctttgacttattaagccgatttcaaagcaataggatggatgatcagagatgttgcttacaagaaaagaactgc

SEQ ID NO: 243913 - DNA, 120 bp, Artificial Sequence
  ENSG00000121957_17 (sequence is synthesized)
catacagcttcaacaacaacttcttccactccccctaaaatgatgctaaaaacatcatctgttcctgtggtatcccccaacacggatgagtttttagatcttcttgccagctcacagagt

SEQ ID NO: 243914 - DNA, 120 bp, Artificial Sequence
  ENSG00000121957_18 (sequence is synthesized)
cgccgtctggatgaccagagggctagtttcagtaatttgccagggcttcgtctaacacaaaacagccagtcggtacttagccacctgatgactaatgacaacaaagaggctgatgaagat

SEQ ID NO: 243915 - DNA, 120 bp, Artificial Sequence
  ENSG00000121957_19 (sequence is synthesized)
ttctttgacatccttgtaaaatgtcaaggatccagattagatgatcaaagatgtgctccaccacctgctaccacaaagggtccgacagtaccagatgaagactttttcagccttatttta

SEQ ID NO: 243916 - DNA, 120 bp, Artificial Sequence
  ENSG00000121957_20 (sequence is synthesized)
cggtcccagggaaagagaatggatgaacagagagttcttttacaaagagatcaaaacagagacactgactttgggctaaaggactttttgcaaaataatgctttgttggagtttaaaaat

SEQ ID NO: 243917 - DNA, 120 bp, Artificial Sequence
  ENSG00000121957_21 (sequence is synthesized)
tcagggaaaaaatcggcagaccattagttactatggatttattttttttcctttcaaacacggtaaggaaacaatctattacttttttccttaaaaggagaatttatagcactgtaatac

SEQ ID NO: 243918 - DNA, 120 bp, Artificial Sequence
  ENSG00000121957_22 (sequence is synthesized)
agcttaaaatatttttagaatgatgtaaatagttaaccttcagtagtctattaaggcattaatacttctctggacatgcgcgtttgagggtggaggggtcctgtaaggtgcttcatcgtc

SEQ ID NO: 243919 - DNA, 120 bp, Artificial Sequence
  ENSG00000121957_23 (sequence is synthesized)
tgtgattactgcttgggatgtgttctttggcagcttgtgagattactttacctagtgtttataaagtaggaagttaagtgaatcatagattagaatttaatactcttatggaaataattt

SEQ ID NO: 243920 - DNA, 120 bp, Artificial Sequence
  ENSG00000121957_24 (sequence is synthesized)
tttaacatcttaattgacaatggcgtttttttatacataaccatggatgtagtgggaaacaatgttgtttggtaaaaataatgtacttgatcaatgtaaaaaagtatataaaatagtctt

SEQ ID NO: 243921 - DNA, 120 bp, Artificial Sequence
  ENSG00000121957_25 (sequence is synthesized)
tcttactaaaaatctaggtttttttttcctccatgaaaatctgtttttttaggccaaagtcagtataaaagaaactctacttcttgggctgggcatggtggctcattcctgtaatcccag

SEQ ID NO: 243922 - DNA, 120 bp, Artificial Sequence
  ENSG00000121957_26 (sequence is synthesized)
cttttgtgtgttttgggctgtttaaaaaaattatttaaaatggtctcttctgttccataatactgctgtaaaacaaacttttctaagttctaatataaaaacaaaaaacaaaacccatgt

SEQ ID NO: 243923 - DNA, 120 bp, Artificial Sequence
  ENSG00000121957_27 (sequence is synthesized)
ggttaggtcaagaacctaggacacataaacaaacagaaaacagatgaaaactcacaaaaattaaatatgaaagaaagatgtcagctagaaccttagttgtcattaagctttgtcttcctt

SEQ ID NO: 243924 - DNA, 120 bp, Artificial Sequence
  ENSG00000121957_28 (sequence is synthesized)
atcccagatattgaaggcagtttacaaggggatgataacaaagtaactaactaactgtagcaaaagacaagtatgggacagactgggacctggagtaacactggatcacagactgcaaag

SEQ ID NO: 243925 - DNA, 120 bp, Artificial Sequence
  ENSG00000121957_29 (sequence is synthesized)
gcccacgcttggaacaagttgccaacttgtttcactctgcttgcttcagactgtgcacagctgggatgggatctggggatgtggacccctattctttcaaaaagtcattcaggtgatttg

SEQ ID NO: 243926 - DNA, 120 bp, Artificial Sequence
  ENSG00000121957_30 (sequence is synthesized)
gatgggcaaatagaactatttctctaatggccaatgttttttaagagtcataacctggaattaattacattaagtgctcagctaaaaaaaaaaaaaaagttctaaattacaacctggatt

SEQ ID NO: 243927 - DNA, 120 bp, Artificial Sequence
  ENSG00000121957_31 (sequence is synthesized)
acattatgtttcatgtatactataaggtatgatgtcctggatagcattttaaaaactcaggtaagtttcatggggttcttataagaaaattcagttaagacaatataccaaaccacaacg

SEQ ID NO: 243928 - DNA, 120 bp, Artificial Sequence
  ENSG00000121957_32 (sequence is synthesized)
taaaaagtttgtgtatacaaactttttgtattatttgtacacaaagtacaaatttgtatttgtacacaaagtacaaactttgtgtattattttgtgtatacaatagttcttacagcctgt

SEQ ID NO: 243929 - DNA, 120 bp, Artificial Sequence
  ENSG00000121957_33 (sequence is synthesized)
cagcctgtaaacattcaacattattccatttaaacattgtttttaacagctgtctaccctgttctgattttcctaaaagcttcacactatataggctgggcacaatggctcatgcctgta

SEQ ID NO: 243930 - DNA, 120 bp, Artificial Sequence
  ENSG00000121957_34 (sequence is synthesized)
tctcaaaaaaaagtaaaatttcaaaaaagcttcacaatataaaccttaattttaatgacatattggctagtcaataaacaagtcttatctcatctcatctcttttctgataacaaacacc

SEQ ID NO: 243931 - DNA, 120 bp, Artificial Sequence
  ENSG00000121957_35 (sequence is synthesized)
cgatgtgttcaatttgctttcatatttaagtctttcctgaattgctgtcatcattcaacaacagttgcatgtcgccttgctagctgtcaaagtagacttcatccccaaatggatatctgt

SEQ ID NO: 243932 - DNA, 120 bp, Artificial Sequence
  ENSG00000121957_36 (sequence is synthesized)
aatgaaagaatacaaaggtgaaattttatttaaaaattttttaaaagaatttggttttggattaaaaggcatgcaagcagcattaattccactcacagttacagtctatcacctggggca

SEQ ID NO: 243933 - DNA, 120 bp, Artificial Sequence
  ENSG00000121957_37 (sequence is synthesized)
ttcactacttttcagagtcagatcacagttcaaaagacagctctcaccttgggggcatattccccaagtcagtgtgaacatgtcttgtcccaagaggacactttatacgcatggatgttc

SEQ ID NO: 243934 - DNA, 120 bp, Artificial Sequence
  ENSG00000121957_38 (sequence is synthesized)
acaaatttattctaaactgcaggtgtctgtcaggattcatttgttaaacatgtcctctgtgttaaaaatcctaaaatccttttgcatttcttagaaaaaatcacgtttctgatgaaattc

SEQ ID NO: 243935 - DNA, 72 bp, Artificial Sequence
  ENSG00000121957_39 (sequence is synthesized)
tatatcgatcataactcactgccacctcacgatcctcttgcctcagccctccaagtagctgggactacaggc

SEQ ID NO: 243936 - DNA, 120 bp, Artificial Sequence
  ENSG00000121957_40 (sequence is synthesized)
ctacaggcgtgtaccaccatgcctggctagttttatttttagtacatagccttgaacaactgagcttaagcgatcatcctccctcaaccttccaaagtgctaggactgtaggcatgagcc

SEQ ID NO: 243937 - DNA, 120 bp, Artificial Sequence
  ENSG00000121957_41 (sequence is synthesized)
cttccaaagtgctaggactgtaggcatgagccactgcacctggcctaaaattacattgttacaggcacgtaagtaacacttcctggatccaaaaatgtgtattctgcatttcaacaactg

SEQ ID NO: 243938 - DNA, 120 bp, Artificial Sequence
  ENSG00000121957_42 (sequence is synthesized)
aacttaagcgatcatcctccctcaaccttccaaagtgctaggactgtaggcatgagccactgcacctggcctaaaattacattgttacaggcacgtaagtaacacttcctggatccaaaa

SEQ ID NO: 243939 - DNA, 120 bp, Artificial Sequence
  ENSG00000121957_43 (sequence is synthesized)
atgtgtattctgcatttcaacaactgaacttaagcgatcatcctccctcaaccttccaaagtgctaggactgtaggcatgagccactgcacctggcctaaaattacattgttacaggcac

SEQ ID NO: 243940 - DNA, 120 bp, Artificial Sequence
  ENSG00000121957_44 (sequence is synthesized)
gtaagtaacacttcctggatccaaaaatgtgtattctgcatttcatattaaaataaaaaagcaagtgcttgggatacaaatatctgcatgaaaatttaaagactttattcctgactggta

SEQ ID NO: 243941 - DNA, 120 bp, Artificial Sequence
  ENSG00000121957_45 (sequence is synthesized)
tcacttttagtaagcagttgaacataacttgtagtgtgaatatggttaaaacaaaggacacctgatgtctgtgaagtctgctaaggacaggtacaaaatttatgcattgctttttaaaaa

SEQ ID NO: 243942 - DNA, 120 bp, Artificial Sequence
  ENSG00000121957_46 (sequence is synthesized)
gtttaaaatgaggaatgcttttgataatcagaaagactaatgtaaagtgctgactgatgtcctgtctgcagttaaggaagacacccaactctcttcttcctcatcatggtattctctatg

SEQ ID NO: 243943 - DNA, 120 bp, Artificial Sequence
  ENSG00000121957_47 (sequence is synthesized)
tatagatctctaaaaatgcaaacttcctatggacaagacaatatgatttgctataatatgaattaagatatggtaatatctaatagtctccactgctaggattctgagtaacacaaaaaa

SEQ ID NO: 243944 - DNA, 120 bp, Artificial Sequence
  ENSG00000121957_48 (sequence is synthesized)
taggttttataaaaagcccatgcacttcaattggtgggggaaaagaataaagtcattttcagtcgactgactctgtaaaacagattaccaatataacaagctatgttatctaaattgccc

SEQ ID NO: 243945 - DNA, 120 bp, Artificial Sequence
  ENSG00000121957_49 (sequence is synthesized)
tggcagtcttcagttttctctaagtaaacaaagtaaaaggaacaataaggatgcaggcgtagtaatagctgtggaaaagatgaaactacagccacagtgacctgtgggcagcctgcgtag

SEQ ID NO: 243946 - DNA, 120 bp, Artificial Sequence
  ENSG00000121957_50 (sequence is synthesized)
agataagctgaggtgtcagtcagactgatcctggtaacgatactccatggctgcatgaagatgctggaggcatcaagtgggtggccttaactctagtggattcactaggcaatgtaaatt

SEQ ID NO: 243947 - DNA, 120 bp, Artificial Sequence
  ENSG00000121957_51 (sequence is synthesized)
ggttagtgggttcccgtaagtgcctgtaacaataaaatttctttttcaatgtccccaattcaaactggcctccttaactatccagaatcagtgatgcctgtcatctgttcatcttaaaat

SEQ ID NO: 243948 - DNA, 120 bp, Artificial Sequence
  ENSG00000121957_52 (sequence is synthesized)
aaacacttcttactttatgggatgtaaatatcaaagagaagatgaaatgaaaagcttttacatatataacgtgtttgttaattctaattgtcagtaaaaatgtgaatgttgaagttgaaa

SEQ ID NO: 243949 - DNA, 120 bp, Artificial Sequence
  ENSG00000121957_53 (sequence is synthesized)
aaagaagataactcattcaaggtcaatcagcaatgtctgaagaagaaagaagaggacaggaaagaaacttcagtctgagggttgaggacacgtcccggagcagaggaggaccaagctccc

SEQ ID NO: 243950 - DNA, 120 bp, Artificial Sequence
  ENSG00000121957_54 (sequence is synthesized)
aagccccctgtcaccttgacacgcagacggttccccaggactgcgaagaggggggcaaccagcgccccgccccgccccgctgcgccgcccgccattggccggtccgaaagacgcggggcg

SEQ ID NO: 243951 - DNA, 67 bp, Artificial Sequence
  ENSG00000121957_55 (sequence is synthesized)
gcaagcatgctggcacacacctgtagtcccaactgcttaagaggctgaggcaggaggaccacttgag

SEQ ID NO: 243952 - DNA, 120 bp, Artificial Sequence
  ENSG00000121957_56 (sequence is synthesized)
ggagagaatggtagttgaagacatgtgccaggaagtgattttaataatggacttaagaatctaggctgtaagaaggaaaataaagaaatgaacacttcataactcattctgtgaggccag

SEQ ID NO: 243953 - DNA, 120 bp, Artificial Sequence
  ENSG00000121957_57 (sequence is synthesized)
tattgccaataccaaagccagacagacactacaagaaaagtactgaccaatatccttcatgaatccagatgcaaaatcaacaaaagcctacaatccaaatttagcagcgcccctgctgta

SEQ ID NO: 243954 - DNA, 120 bp, Artificial Sequence
  ENSG00000121957_58 (sequence is synthesized)
aaggattttacaccatgaccaagtgggacttattcccaggacgcaaggactgattgttcaacatgtgaaaatcaatcagtgtaacacataatataaacagaataaagggaaaaaacacat

SEQ ID NO: 243955 - DNA, 120 bp, Artificial Sequence
  ENSG00000121957_59 (sequence is synthesized)
acaggaaaaaaatgacaattcaaaactctttcatgataaaaacttaaaaattagcaacagtaggaaactaccagaacataataaaagccatatatgaaacatgtaccgctgacatcatac

SEQ ID NO: 243956 - DNA, 120 bp, Artificial Sequence
  ENSG00000121957_60 (sequence is synthesized)
tcaatggtgacagactgaaagctctcctccaagatcaggaacgagatcagaatgcaggtttttgccacttctattcaatgtagtactagaaattctagctggagcaattaggcaaaaaaa

SEQ ID NO: 243957 - DNA, 120 bp, Artificial Sequence
  ENSG00000121957_61 (sequence is synthesized)
aggcgtttgaggggctctcggagggaggtgacagggaggggtgcgtgtgcgtgcgtgtggggcttctgtgtccagaggtctgggggtgacgtcctttgttttgggcaggaggcgggctgg

SEQ ID NO: 243958 - DNA, 120 bp, Artificial Sequence
  ENSG00000121957_62 (sequence is synthesized)
gggcttgcgggacctgtgggcgctgcggggacgcggcgtcgatgctcaagaaaccagaaactcggcttgaggagttgctgcttttttgtcggaaggtcttcaaatgagagtaaagcgtta

SEQ ID NO: 243959 - DNA, 120 bp, Artificial Sequence
  ENSG00000121957_63 (sequence is synthesized)
agagcctcactcctgagtctttttttttttttaagataaaaactatactagagtccagcgacttcttaccactctgaatgtgagtaacaaattgtgaatcaaagcccgaatccccgtgga

SEQ ID NO: 243960 - DNA, 120 bp, Artificial Sequence
  ENSG00000121957_64 (sequence is synthesized)
attcattccgaggctgattgcaatcacttggagtcgggcgcgtcctacctaaaccaggcagtttatggcaaatacctgccttgaccgtgcttaaattagtgaacttttgggcaccaactg

SEQ ID NO: 243961 - DNA, 120 bp, Artificial Sequence
  ENSG00000121957_65 (sequence is synthesized)
catacagctcagataccactgaaaacattggtagtgttataattctcattcaggaagggcttattttgtattagagagttattattgtccatcattcagtaaaaaattattgaacaccga

SEQ ID NO: 243962 - DNA, 120 bp, Artificial Sequence
  ENSG00000121964_0 (sequence is synthesized)
atatggttgtctgagagcatcagaaaagaacctgctctggtcaggtatctctgcattagccagattggacatatgtaaagggacatcagtatatctggatcatcagattgtgcttcaaga

SEQ ID NO: 243963 - DNA, 120 bp, Artificial Sequence
  ENSG00000121964_1 (sequence is synthesized)
agaccatagggaagaacgcattttcatcttgctgcaaaagttgcaatagaagatctgaaggtttgaatgggccaatgagtatcctcatcattgaagcattctatggaggctcccataaac

SEQ ID NO: 243964 - DNA, 120 bp, Artificial Sequence
  ENSG00000121964_2 (sequence is synthesized)
agctggtggatcttcttcaagaagagttaggagactgtgtcgtttatacccttcctgcaaagaaatggcattggagagcccggacatctgctttatatttctctcagaccattcccatca

SEQ ID NO: 243965 - DNA, 120 bp, Artificial Sequence
  ENSG00000121964_3 (sequence is synthesized)
gtgagcattacaggaccctctttgcaagttcagtgcttaacctgaccgaactggctgcccttcggcctgaccttgggaaactgaaaaagattctgtattttcacgagaaccagttgatat

SEQ ID NO: 243966 - DNA, 120 bp, Artificial Sequence
  ENSG00000121964_4 (sequence is synthesized)
atcctgtcaagaaatgtcaggagagggatttccaatatggatacaaccaaattctttcatgcctggtggctgatgtggttgtattcaactcagtttttaatatggaatcatttctcactt

SEQ ID NO: 243967 - DNA, 120 bp, Artificial Sequence
  ENSG00000121964_5 (sequence is synthesized)
ccatgggaaaatttatgaagctgattcctgatcacagacccaaggatctggaaagcatcatcagacccaagtgccaagttatttactttcccatcaggtttcctgatgtgagcagattca

SEQ ID NO: 243968 - DNA, 120 bp, Artificial Sequence
  ENSG00000121964_6 (sequence is synthesized)
tgcccaagcacaaaacaacccatttaaagaagatgctcggccttaaaggaaatggcggtgcggttctgtccatggcccttccttttcagccagagcagagagattcagaggatttattga

SEQ ID NO: 243969 - DNA, 120 bp, Artificial Sequence
  ENSG00000121964_7 (sequence is synthesized)
agaattttaattcagagtgtgatacacactgtggccttgatactgcacgacaagaatatttgggtaactcattaagacaggaatcagacttgaaaaaatccacctcgtcagataattcaa

SEQ ID NO: 243970 - DNA, 120 bp, Artificial Sequence
  ENSG00000121964_8 (sequence is synthesized)
gctctcatcatggtgaaaataaacaaaatctgactgttgatccctgtgacattttgggtggagttgataatcagcaaagactgctacacattgtctggcctcacaggtgggagcatgata

SEQ ID NO: 243971 - DNA, 120 bp, Artificial Sequence
  ENSG00000121964_9 (sequence is synthesized)
aagatccagaaagcttttttaaggtattaatgcatcttaaagacttaggactcaatttccacgtgtctgtacttggagaaaccttcacagatgtcccagatattttttcagaggccaaaa

SEQ ID NO: 243972 - DNA, 120 bp, Artificial Sequence
  ENSG00000121964_10 (sequence is synthesized)
tctcaacagctaagcatgaattctttggagtggcaatgttggaagctgtgtactgtgggtgttacccactttgtcctaaagatttggtttatcccgaaatatttccagctgaatatctgt

SEQ ID NO: 243973 - DNA, 120 bp, Artificial Sequence
  ENSG00000121964_11 (sequence is synthesized)
attctacacctgaacagctttcaaaaaggctccagaatttctgcaagagaccagatattataagaaaacatctctataagggtgaaatcgctccgttttcttgggcagccctacatggta

SEQ ID NO: 243974 - DNA, 120 bp, Artificial Sequence
  ENSG00000121964_12 (sequence is synthesized)
aattcaggtctctgcttacaacagaacctagggaagatttgtgacagatggggctaagtcacaaacttgcagcctaaggcagaatctgaagaactttccagagtgtgcccatatttacct

SEQ ID NO: 243975 - DNA, 120 bp, Artificial Sequence
  ENSG00000121964_13 (sequence is synthesized)
gatcagagagaaaagaaaatctgcagaggaagctgagcctggctgcttgtcatagctgacacagagccatctgccacaaacctgtggcggcttcagatctccaatccctgccaccacccc

SEQ ID NO: 243976 - DNA, 120 bp, Artificial Sequence
  ENSG00000121964_14 (sequence is synthesized)
aactcaaattaaatacagattcctagagacgttatgatggttacacatgtcctcggcatcacatgtaggagactgttcaaaaaaaatatgtggcctgttgtataaccgcactcatgtatc

SEQ ID NO: 243977 - DNA, 120 bp, Artificial Sequence
  ENSG00000121964_15 (sequence is synthesized)
ccatatgtggtgccacattgaatttccggttgaatccgtttttatcctttgtactggatgacatggtgcctgaattctttcttttcgccgacacgatggcagccaaactgcagcttcaaa

SEQ ID NO: 243978 - DNA, 120 bp, Artificial Sequence
  ENSG00000121964_16 (sequence is synthesized)
cgctcacacttggctgggtttctacctaggttgccaggttatcatcggagccttcttgtgtcctcaaagggccacgaggcctgaaaggaggatcagaatgctttgggattaattgggcag

SEQ ID NO: 243979 - DNA, 120 bp, Artificial Sequence
  ENSG00000121964_17 (sequence is synthesized)
ccatcgcagaattgtttgtgggcaaagggctgctttagcacttttcttttagcaaattaatgactctcaggcacagggggttttaagtgaaggtattaataagaggtctggcaggtattc

SEQ ID NO: 243980 - DNA, 120 bp, Artificial Sequence
  ENSG00000121964_18 (sequence is synthesized)
ccatgattcacagagttacatttgcatttaattaatcttaaagttgcaagataaacagctgtaattcggacaaacatgacaaacacagtgaagccaactatcccataaaatgaacactga

SEQ ID NO: 243981 - DNA, 120 bp, Artificial Sequence
  ENSG00000121964_19 (sequence is synthesized)
catacttgttttaatttttttcccagcgtaaaaatagaaaaatcaaaatactcctaacaaaaccagtgattttgatagaaatatttctccaatatacttgcatccacctacaaatataac

SEQ ID NO: 243982 - DNA, 120 bp, Artificial Sequence
  ENSG00000121964_20 (sequence is synthesized)
cttttcaagataaatcgcttatgatttcaatagtcaaactgctgtgtttgttgatgtaaagatgttttgaatggctagatggtaaaataaattcttaataaagtacccactgcaattttt

SEQ ID NO: 243983 - DNA, 120 bp, Artificial Sequence
  ENSG00000121964_21 (sequence is synthesized)
gagacaacaaatacaattgtttcttttccggatgaacaaggatctgttttgcaaatgtttgtaagatattatgacatttccaagattttctttgcattctggaaagcaggaggtaaacat

SEQ ID NO: 243984 - DNA, 120 bp, Artificial Sequence
  ENSG00000121964_22 (sequence is synthesized)
ttgtagtcattaaggtaaagtctgttgataaaccatcttctgtttactgacaggtaaattgtaactttccctagcttttgaaatgagtaacttctatacaccacaaagtgaggcacagcc

SEQ ID NO: 243985 - DNA, 120 bp, Artificial Sequence
  ENSG00000121964_23 (sequence is synthesized)
tgggaaaggtggctagacaaggggcaagccaggctttctagcttctggaaggatcgagtggcctagcaggcatctaagataaagaaagcaatgattcggaagtccagtagggcccatttg

SEQ ID NO: 243986 - DNA, 120 bp, Artificial Sequence
  ENSG00000121964_24 (sequence is synthesized)
accggtagcaaaatcgaaagcacgaaatagatcaaggttagggagccagacaaagcccttggaagagaggcagtattgcagatcgaagcaagcagttcagagtctatgaggcctgggaat

SEQ ID NO: 243987 - DNA, 120 bp, Artificial Sequence
  ENSG00000121964_25 (sequence is synthesized)
ttaaaagcaggaagagtaagaagcagaaacaagaagctccatctgaacagactcctctctccaaccttcatgagacccacagtgtgtgatgggccaccacagcactggcttctagacttt

SEQ ID NO: 243988 - DNA, 120 bp, Artificial Sequence
  ENSG00000121964_26 (sequence is synthesized)
tacagggaagccagtgaacaaattacctcgtcacccagaaaacaaagagctcaggaactattttggaagttccttccagtctaagactatggaactcagaatctagcaggtgtgttcctt

SEQ ID NO: 243989 - DNA, 120 bp, Artificial Sequence
  ENSG00000121964_27 (sequence is synthesized)
tggatagcaaaactaaagatataaatatgaataagaaattctttgccacttctcctgggcaaggttatactttatgccatctactgagataaaccagatgagtcagtttgcttctgtcag

SEQ ID NO: 243990 - DNA, 120 bp, Artificial Sequence
  ENSG00000121964_28 (sequence is synthesized)
ttgctgtgtcacagatgacatcttctcaaaataatattatctcacagccaagaaatagcgcttcgtttactgtgtttttctatcctgaaactaaatgggcttacgcttcatagtggctaa

SEQ ID NO: 243991 - DNA, 120 bp, Artificial Sequence
  ENSG00000121964_29 (sequence is synthesized)
gatactccacacacaactagtacccatagatcttttctcactgataggaaaaaaaaaaaaaaagcattaaacacctttcagagagtacatctgaaacatttacgtattttcctgatttag

SEQ ID NO: 243992 - DNA, 120 bp, Artificial Sequence
  ENSG00000121964_30 (sequence is synthesized)
gcaaatataatattgaaagttacctgtatgtgggcatttttttctacactcataaatgcaaatcaaattttgccattagctgtggccaacattccttccaggacaaaagcttacattagg

SEQ ID NO: 243993 - DNA, 80 bp, Artificial Sequence
  ENSG00000121964_31 (sequence is synthesized)
aattttaaaaaaattacattaaaggtgtcacttatttgcatgataccgagatttggagtttaaagaaaaaccttataaag

SEQ ID NO: 243994 - DNA, 120 bp, Artificial Sequence
  ENSG00000121964_32 (sequence is synthesized)
agatttggagtttaaagaaaaaccttataaagactgtaatgtcagagttgctactagttcacataagcaataaaaagttttgtaaatgtgtaattcttaacatttaaaaatatgtaggag

SEQ ID NO: 243995 - DNA, 120 bp, Artificial Sequence
  ENSG00000121964_33 (sequence is synthesized)
tgtgtgtgtgtgtgtgtgtgtgcacacgcacattcatgcttctcaacacccacgacctagtggaatggagtgttattaaataagttaatcagtattttgttgaaatctcagcagataatt

SEQ ID NO: 243996 - DNA, 120 bp, Artificial Sequence
  ENSG00000121964_34 (sequence is synthesized)
agtactacacgttgactcattaattcagtttcccttatcaaccacccccatcatttattgttttgagtatgtttgatggaaaacttagtcttcctctttttttttaacactcgattgttt

SEQ ID NO: 243997 - DNA, 120 bp, Artificial Sequence
  ENSG00000121964_35 (sequence is synthesized)
ttttcttttaaaataaagtcaattttaattttaaatgtctttaaaagtccatccattatcaagactttgacacagtgtcttgaaatacagcttgccctaaacttaatctatgcttctggc

SEQ ID NO: 243998 - DNA, 120 bp, Artificial Sequence
  ENSG00000121964_36 (sequence is synthesized)
taggtgtttctataacaaatatcagggcacctggttcttaaccttctcatttatactgtgttgacagaaatagatgcaaatacctttttaaaaatgctcctggtttaataagcatccttc

SEQ ID NO: 243999 - DNA, 120 bp, Artificial Sequence
  ENSG00000121964_37 (sequence is synthesized)
aaatacagttaagtttaaatgccctgctcctgttctcagtccttcagacatcaatatggcaggcagaatccataagtcaatggaaactcttagccatagagggctgcagagattaatttc

SEQ ID NO: 244000 - DNA, 120 bp, Artificial Sequence
  ENSG00000121964_38 (sequence is synthesized)
aacaccttgaaatgcatctggaagcaaagatttcattttatgttgaaggtgttaattatatttgatatttttaaaagtaaaatctgtttttgagaaagcatctgctacccagaaatatta

SEQ ID NO: 244001 - DNA, 120 bp, Artificial Sequence
  ENSG00000121964_39 (sequence is synthesized)
tgagccacaaaagaaattttactgaagtctcaagatactttctgtggatgatagaatcagttttcaaatgatagtccatgctgtcttttaatgctgacatacactgtgggtcttattctt

SEQ ID NO: 244002 - DNA, 120 bp, Artificial Sequence
  ENSG00000121964_40 (sequence is synthesized)
taacaatgaagagagtatattataaaccactgacttgaacatgtttcattttaaaatttgagttgtgatacagacaactaatgctcctatcctatgccctctcttcaaagctattcatta

SEQ ID NO: 244003 - DNA, 120 bp, Artificial Sequence
  ENSG00000121964_41 (sequence is synthesized)
aaatataactggggaagtttgaaaaacatgcgagcaattctacatgctgctcaaagatacagacatgtgtgattaaagtacagtattacagaaaacctgggaattaaccaaacttacaat

SEQ ID NO: 244004 - DNA, 120 bp, Artificial Sequence
  ENSG00000121964_42 (sequence is synthesized)
aatggttatgtcagaggggccatggtagagaaaaaaaaggacatagaagtagggaaaggtgcattcgttgcatgatgagaagtctgtttcttaagctgagtcgtgatacacaaaggcttc

SEQ ID NO: 244005 - DNA, 120 bp, Artificial Sequence
  ENSG00000121964_43 (sequence is synthesized)
ttgccactctttgtgacatttcatgtgtcttcagtgtatttattgcatatatcttttgataggagatataaatacttcaggaagcatgttactagttttgctatcaggctatccttaaca

SEQ ID NO: 244006 - DNA, 120 bp, Artificial Sequence
  ENSG00000121964_44 (sequence is synthesized)
tttcttggttttctcaattattgattgagtcagaaaactgcttgcctcagacagtgatacaaactactctactgccaatgttgcttgagaagactttcctctgcttaacaggagccaggg

SEQ ID NO: 244007 - DNA, 120 bp, Artificial Sequence
  ENSG00000121964_45 (sequence is synthesized)
gcttcacctcaaccctcatgctgtggagaaagtcagactcaactggccacaggttcctgtttcttggggctgctaatcaccatttctaacagatgcctgtggcattgcaaacacaagatg

SEQ ID NO: 244008 - DNA, 120 bp, Artificial Sequence
  ENSG00000121964_46 (sequence is synthesized)
gaaaactatagctctaaactcccttctgaagggtaaggaaaggaagaggaaggcagatgttaaatgagcccagtctttctcatctcaaaaaattcagagctgcctgttagagcacaagag

SEQ ID NO: 244009 - DNA, 120 bp, Artificial Sequence
  ENSG00000121964_47 (sequence is synthesized)
ctctcagagctcccaaccacactgcccactccccatagtgttgcctctcccctttcctctttaagacgcaggagcgaatcgtggtctttgtgctttcactgcaatctatcccaggggaag

SEQ ID NO: 244010 - DNA, 120 bp, Artificial Sequence
  ENSG00000121964_48 (sequence is synthesized)
agttctcccgggtatctgtgggatgcccttgctgcatgtgaggcacaaatggcttcagggaccaggatcctcactcactctgcagtccatttttctaaattggaatttgcgatcggtttc

SEQ ID NO: 244011 - DNA, 120 bp, Artificial Sequence
  ENSG00000121964_49 (sequence is synthesized)
ttcaggtgtcccaccatcatctatcattatctgagttattccttatcctctcccaaccccaaggagaggatcttaattgtttttataaactgacagaaggaattggtgattcttggaaga

SEQ ID NO: 244012 - DNA, 120 bp, Artificial Sequence
  ENSG00000121964_50 (sequence is synthesized)
taattttaaatggttatattactttcctattactgcatttactgcatttaaatagcaggtctaaggtggggtgcgagaagatgtgacccctaggaatattggtatgacctttctcaagca

SEQ ID NO: 244013 - DNA, 120 bp, Artificial Sequence
  ENSG00000121964_51 (sequence is synthesized)
atttgaagtcctttagatctgaaaatttaatgtcttcaatatcatttcacagatgagaaaattaaggcacatatagtgacatatttaggagctgaagtgtgttacagaaacaaagttttt

SEQ ID NO: 244014 - DNA, 120 bp, Artificial Sequence
  ENSG00000121964_52 (sequence is synthesized)
ttgtataagcctttccctacatgggatgttatcattgtcacctatgtgcctttcaggaagcaccaagtgcagtatgcgtgactcagttggacccctagttcccttctatttctccagctg

SEQ ID NO: 244015 - DNA, 120 bp, Artificial Sequence
  ENSG00000121964_53 (sequence is synthesized)
gcaggagacagcaaaggacagtggaggtggttattttgtggcccacatttctgccattaaaagggacataagagactatgtagtgtggccaatttttttttttttttttttgagagagag

SEQ ID NO: 244016 - DNA, 120 bp, Artificial Sequence
  ENSG00000121964_54 (sequence is synthesized)
ggattacaggtgtaagccaccatgcccggaatatggccattattttaagtgtttttattattgctctggttctccctttagggaggcattcagtgagtataccccatctgtcacaggccc

SEQ ID NO: 244017 - DNA, 120 bp, Artificial Sequence
  ENSG00000121964_55 (sequence is synthesized)
gcccccaccactccctgtggtcttacactctgctgaattcatacatttaggtaacttccctggccctcctgagaatcacttatttttgtaacctcctgtatttgagatgtaggaaactgg

SEQ ID NO: 244018 - DNA, 120 bp, Artificial Sequence
  ENSG00000121964_56 (sequence is synthesized)
ggcctgaggagaagttgacttgccttgggtcccacagtggtacaggcagatctagaactcagattttccagggctctttcagtaggctgtggttgagcagtagtcaagaccacctcttca

SEQ ID NO: 244019 - DNA, 120 bp, Artificial Sequence
  ENSG00000121964_57 (sequence is synthesized)
agaagggaaaaacatttgtcttctctttctcctctttcttccttctgcctctcactgtaagaagaaacgtgttaataagttgctaataccttactctaggtgtatttcatgttacaccag

SEQ ID NO: 244020 - DNA, 120 bp, Artificial Sequence
  ENSG00000121964_58 (sequence is synthesized)
ccagtgcttgtattctcaatgaccataaggagaggaatgcggaagaattgatttctgtactaaaagttcagactctgtggcacttgtgatatttctggacaactgactcttctctattgc

SEQ ID NO: 244021 - DNA, 120 bp, Artificial Sequence
  ENSG00000121964_59 (sequence is synthesized)
ctttcgaatcatacagtggcaaagctgctcacccatgtgtgtataaagctgacccttcatcagaaaggcagcccccagtgtctccccacacagggcagaagagcagagggagcaggtggc

SEQ ID NO: 244022 - DNA, 120 bp, Artificial Sequence
  ENSG00000121964_60 (sequence is synthesized)
aatgtggcagcaccttgaactgtgcatcactgggcctgctccccctcatcccaaagcaataacccagaaattacatcctgagacttacttcctcagaaagaaaaggaaggggagggataa

SEQ ID NO: 244023 - DNA, 120 bp, Artificial Sequence
  ENSG00000121964_61 (sequence is synthesized)
cttaaaaaggagaaacttctaatatggtattagactgtaattcatagggaaatttatgcctgagatatgaatttctgaaaataaggggcttttttggaagggaaacactgacacatcctt

SEQ ID NO: 244024 - DNA, 120 bp, Artificial Sequence
  ENSG00000121964_62 (sequence is synthesized)
aattatagagtaataaataccaatggtatattatctttcgatatttccttacacagatatcaaagcatgcagctgtttttgaaaactgataatcaagtacaatataagtatattacatct

SEQ ID NO: 244025 - DNA, 120 bp, Artificial Sequence
  ENSG00000121964_63 (sequence is synthesized)
tgcacttacaacacacccttcaactaagcagcatcatggagcacttaacggtgagaaacagagctgctcatagtagaaacctaactgaacaaattagctttgaattgtaacttaagaatc

SEQ ID NO: 244026 - DNA, 120 bp, Artificial Sequence
  ENSG00000121964_64 (sequence is synthesized)
gtagtcaaaccaaagcgtctgtccttgccaggaaaggcattccaaaggcagagagcatgccaagtaaaaaggctttgcttcaggattatggagacagttctgaaaagccagcataactta

SEQ ID NO: 244027 - DNA, 120 bp, Artificial Sequence
  ENSG00000121964_65 (sequence is synthesized)
atgatcaatcagaaaaatatagagcagtaactacacaactgaaggatgcataaaaattgtacaaaacgttaatagtggaatggggaggtaggatgggattttacgggcaagtattaagct

SEQ ID NO: 244028 - DNA, 120 bp, Artificial Sequence
  ENSG00000121964_66 (sequence is synthesized)
cttggaaagcttcatttgttgccctcaatccacacagcagaaagaaagagaaagagacaaacatggtcaaagaaaagtatgtggacaaatgtggggggtagaaaaggaaatgaaggttaa

SEQ ID NO: 244029 - DNA, 120 bp, Artificial Sequence
  ENSG00000121964_67 (sequence is synthesized)
gcaaggccaatataattcagaataaaagggagggagggaagtataaggagccagctgtaattactgaatgttacattaagaagagctgaaattgagagggggaggtcttgagtattttac

SEQ ID NO: 244030 - DNA, 120 bp, Artificial Sequence
  ENSG00000121964_68 (sequence is synthesized)
taagtggattaatgtcctcttcctcgggtgtctgaagttgcagattttaatttatttggtgcagggatttattacagaattcttaatgggtggggagataaacagggacaattataagct

SEQ ID NO: 244031 - DNA, 120 bp, Artificial Sequence
  ENSG00000121964_69 (sequence is synthesized)
cttaagaagaagaaaagaggaccatataatactttctataaatttaactgtaataaacagggtttcaagctatggacaaagatagtcaaaaaaagcatttattccatgatataggactaa

SEQ ID NO: 244032 - DNA, 120 bp, Artificial Sequence
  ENSG00000121964_70 (sequence is synthesized)
aagggaaataagaggtgtgtccaaaaaacttaaagaccaaaacaaagaaagaaaaacccacatagatgtgtgatgccaggattttgaatgacttgggagctagttattgccgctctcctt

SEQ ID NO: 244033 - DNA, 120 bp, Artificial Sequence
  ENSG00000121964_71 (sequence is synthesized)
tctccacccatttaaaaaaataaatcataactctggcatttaaaaacctactcatgaacatcatttattaatataaacttaatcctgtgctattctttggtgggtggtaagaacatgaat

SEQ ID NO: 244034 - DNA, 120 bp, Artificial Sequence
  ENSG00000121964_72 (sequence is synthesized)
taacaacaactggactaaaacgatggcaacaggatgatccactcaaacacaggaaagctgtaagaaaaagaaaaactcctaatctgctctttcaccttacttattttacagaaggagaaa

SEQ ID NO: 244035 - DNA, 120 bp, Artificial Sequence
  ENSG00000121964_73 (sequence is synthesized)
gccaaaaaggggagagcatgtggctaaaccacagaaagactagatgcctaaaggaaaaattttaaagtgttcctaaataggtattagaaggggaagggggatgtaaagcttatgtgattt

SEQ ID NO: 244036 - DNA, 120 bp, Artificial Sequence
  ENSG00000121964_74 (sequence is synthesized)
acatcattttgttaatctgctaatctacttccctggaaggtgagaaagagtgttgtctgccttctgcaattgaagagactagggcagaaacttaattatgttcttaccctgtgtatacct

SEQ ID NO: 244037 - DNA, 120 bp, Artificial Sequence
  ENSG00000121964_75 (sequence is synthesized)
ggctgtcatctggctggcaactagtccacaaactattggttcaggcatttgcctggcaataatgttagccatcatttaaattgttaaatatggatcagaagatctctaagaattactgat

SEQ ID NO: 244038 - DNA, 120 bp, Artificial Sequence
  ENSG00000121964_76 (sequence is synthesized)
atgcagctattaatactggatgtaaataatattatttggggtgtgggtaaatcatttgactggaaccacatttaaaaaaaggacttggaaattttatttttgaaatgctgttggggagat

SEQ ID NO: 244039 - DNA, 120 bp, Artificial Sequence
  ENSG00000121964_77 (sequence is synthesized)
ggcattgatgaaaaaaaaaattgaaaatggaaaaaaacatcatctacaaagagatgggtaaaaatgactaagcaaagaagccttgtcaccttcgacctgatgcttcattgtatcagaaga

SEQ ID NO: 244040 - DNA, 120 bp, Artificial Sequence
  ENSG00000121964_78 (sequence is synthesized)
aagtaaacagattgctaacaaagagaccaccccttctaatttccaaaaccggcccagcaacaagagggagaaaatagagaagagtgcactgcgtggtggctcagggtgatcctttaattt

SEQ ID NO: 244041 - DNA, 120 bp, Artificial Sequence
  ENSG00000121964_79 (sequence is synthesized)
gagtgttaaaaatgagggcacagacctagaggtttttaatggtccgcgggtggacttcagattctgaacactcctccaccttctgtggagaattcgggacacggtggagtttaaccagta

SEQ ID NO: 244042 - DNA, 120 bp, Artificial Sequence
  ENSG00000121964_80 (sequence is synthesized)
tcttaaatcccagggacagggtggagattgctttgtgatcctgattaattaaaaggaaagaaatcaaagcagacatctctcctttttccatttgagccgcagagccatggaggggaactt

SEQ ID NO: 244043 - DNA, 120 bp, Artificial Sequence
  ENSG00000121964_81 (sequence is synthesized)
gtgctctctggtgcttgcagctatgttccctggctttcatcgtcttggcttttccccttgtatttctaatgctgtgataccaggccaataaaatggaatctacaaaactgcaaaacaaaa

SEQ ID NO: 244044 - DNA, 120 bp, Artificial Sequence
  ENSG00000121964_82 (sequence is synthesized)
gcggcggccgcgggggaggggcacggcgtcagcgcgtcgccggctgggccgcgccggtggccaggagggagagacaaggaggaggaggaggaggaggtatctctgcattagccagattgg

SEQ ID NO: 244045 - DNA, 120 bp, Artificial Sequence
  ENSG00000121964_83 (sequence is synthesized)
gtggctgtagcaacactcctgttctgcctcttcctgtggctatcaggtgaatccttctttttatccctgagtcctgttgggatagctggctgacgtcatgaggcgtgggctgatgttctg

SEQ ID NO: 244046 - DNA, 120 bp, Artificial Sequence
  ENSG00000121964_84 (sequence is synthesized)
gctccagaatttctgcaagagaccagatattataagaaaacatctctataaggaaacagttaaacttcaagaaaaagagagagaaccaaaaatgcaatttaacacccaatttcaagctca

SEQ ID NO: 244047 - DNA, 120 bp, Artificial Sequence
  ENSG00000121964_85 (sequence is synthesized)
aggtgacactgatgataaaaatccatccaagaatttatatgtgacatctgcagcaggttcaaatctctcagctatgagacaaactggatacttcctaaggattgccatctattatgcaca

SEQ ID NO: 244048 - DNA, 120 bp, Artificial Sequence
  ENSG00000121964_86 (sequence is synthesized)
gagagccaaaatccgttactgaaattgtctggtgttttttacaaaggacccatttagtcgtgatatttataggatatgaggaaggcagtgatcctggcattcgtggactccagaaaacat

SEQ ID NO: 244049 - DNA, 120 bp, Artificial Sequence
  ENSG00000121964_87 (sequence is synthesized)
gaatctataggagcatctacatgtactgcctccatagtggctgataatttgcagataactcgtgaaccagacccataagaaacatcatgatatgtactttagattaatcatggaaaagga

SEQ ID NO: 244050 - DNA, 120 bp, Artificial Sequence
  ENSG00000121964_88 (sequence is synthesized)
caagatgatgaagaatcagaaagcagttttcttttccaatatttatattgctttctttgaggttagatgagtgagatattctttagagtggtttatatcacatttcatcacttggggaaa

SEQ ID NO: 244051 - DNA, 120 bp, Artificial Sequence
  ENSG00000121964_89 (sequence is synthesized)
taggtcatttttacaagagccttttagagaccttttaagtacatacagggcatatatttaatacaccttagcatttcctctgagtaagtcagaggaaataaagcaagatggtagatatct

SEQ ID NO: 244052 - DNA, 120 bp, Artificial Sequence
  ENSG00000121964_90 (sequence is synthesized)
aggtctggctagctgtccctaacgtcatttcctggtctcaactctttaagaccctgacatactctgagattggagtgaagatttctgtgacatgctgggtatctctgcattagccagatt

SEQ ID NO: 244053 - DNA, 120 bp, Artificial Sequence
  ENSG00000121964_91 (sequence is synthesized)
gagagatgagaatggaatgttaaccttttggtatgaagcaggtcaacattgaaaatgcaagaagcctggatccagcttcctgaaaagaagctccttggtgactctttttcttccggcatc

SEQ ID NO: 244054 - DNA, 120 bp, Artificial Sequence
  ENSG00000121964_92 (sequence is synthesized)
cctttttactttctctaaatctctctgaggaacatcctggagtttcttttctggctttcgttgtaactagttcctggcctacctgaggggatgaatagcattatggtatagggtaggtgc

SEQ ID NO: 244055 - DNA, 120 bp, Artificial Sequence
  ENSG00000121964_93 (sequence is synthesized)
tgcagaccatatggagaccagcaggatacaagagtgtgagatgcctagggaaagcctccctttgtcaagttaaaggagagaggtttccatttggaggcagctgaaatagagaaagaagta

SEQ ID NO: 244056 - DNA, 120 bp, Artificial Sequence
  ENSG00000121964_94 (sequence is synthesized)
ttgagcacaaatttacaaatcaaaataacagtcttccagggataggatagagcatggaccaacatgatacagtgtcaacctgcattttcatgggtgaaggatggatggactatagtaatc

SEQ ID NO: 244057 - DNA, 120 bp, Artificial Sequence
  ENSG00000121964_95 (sequence is synthesized)
aaaacagaaacatagcatcctctggaaatagtgaccacagagacagagatctttgtattagtaatgacaggtaacgtttataaagtgcctcactgattgcttatgtgtgtgtcatctcat

SEQ ID NO: 244058 - DNA, 120 bp, Artificial Sequence
  ENSG00000121964_96 (sequence is synthesized)
attctgttgattgacataataatttgttcttcttattgctttagaaaaagattattttaatgtggtggtattactaatgatctgccaaggtggtactactaaatatcttcacatgaatgg

SEQ ID NO: 244059 - DNA, 120 bp, Artificial Sequence
  ENSG00000121964_97 (sequence is synthesized)
ctaacagtagtgggtaggcacttctagcatatcaagtcttgttcagaaagtttcaaaatataagaatcagattccattttatgcacacacacacacagttatcacaaaactatttcatat

SEQ ID NO: 244060 - DNA, 120 bp, Artificial Sequence
  ENSG00000121964_98 (sequence is synthesized)
atacacactgatacagcaatattaccattaaagcaagaataatttccattatttactaccttgaccagtttcaacagggtggcttcattttacttgtcataagatgtatatcagtacatt

SEQ ID NO: 244061 - DNA, 120 bp, Artificial Sequence
  ENSG00000121964_99 (sequence is synthesized)
tgaaaccattcccttcactcagatgcctctgtattgtgctaagcaaaatactttctagccaagtcttttctaaacagaggaaaatcaactgcagtatgtgatctcaccaaataaaaactc

SEQ ID NO: 244062 - DNA, 120 bp, Artificial Sequence
  ENSG00000121964_100 (sequence is synthesized)
aaacttaaccctggctcctataaattaggatttaaagaagtaaaatgtcctgataatcttctggtattaggcatgaacattttaatctagtttttattcctcccagttagtttaatctgc

SEQ ID NO: 244063 - DNA, 120 bp, Artificial Sequence
  ENSG00000121964_101 (sequence is synthesized)
atgtggcctgattagagtacacttcccccacagattatggtctctttattgcagagatgctaggctgatcattaggtccgattttctgagagcaaccgtttgcaggtgaagtaataagag

SEQ ID NO: 244064 - DNA, 120 bp, Artificial Sequence
  ENSG00000121964_102 (sequence is synthesized)
caccacaccggccgggcaaagcgcctttgccgaggatttgccttccagcacattaaaactctagaagctctcccagttgatctgcagcatctggtacctaaagggattttcatctttaat

SEQ ID NO: 244065 - DNA, 120 bp, Artificial Sequence
  ENSG00000121964_103 (sequence is synthesized)
tctaaatgtatgaacgtaaaatgtagggattgaaagttgatgtggaatgtgtttttgaatttgtttgtgcaacttcatacttccagcatagcctttctaaggtagtgacaggtatattta

SEQ ID NO: 244066 - DNA, 120 bp, Artificial Sequence
  ENSG00000121964_104 (sequence is synthesized)
aatcatattttacttcgaatgtgacagagttcaatattatttaatgtgattttaaaatgcagtgggtctagatgagattaacctgtttcaaggtaaaatagatgtcatcatttactccct

SEQ ID NO: 244067 - DNA, 120 bp, Artificial Sequence
  ENSG00000121964_105 (sequence is synthesized)
tctgaaaagctttttcttttattccattaacctttggttgtctctgaagtactatttattgcaggaaaatcagttctaaaagttggttccagggtatcatgaaaatgttaaattaaataa

SEQ ID NO: 244068 - DNA, 120 bp, Artificial Sequence
  ENSG00000121964_106 (sequence is synthesized)
tttctagtctgcttttacaaaacagcaatatggaggaaagagtgaaaaccatgttattcaatactttgcacaaaataagacagagctatgttaataaaattaacaatactaaattgaata

SEQ ID NO: 244069 - DNA, 120 bp, Artificial Sequence
  ENSG00000121964_107 (sequence is synthesized)
gtatctctgcattagccagattggacatatgtaaagggacatcagtatatctggatcatcagtggtataatgtgttatagaggtggacaagcctgcagattgaagtggggatcgtccaga

SEQ ID NO: 244070 - DNA, 120 bp, Artificial Sequence
  ENSG00000121966_0 (sequence is synthesized)
ttttttttcttccctctagtgggcggggcagaggagttagccaagatgtgactttgaaaccctcagcgtctcagtgcccttttgttctaaacaaagaattttgtaattggttctaccaaa

SEQ ID NO: 244071 - DNA, 120 bp, Artificial Sequence
  ENSG00000121966_1 (sequence is synthesized)
gaaggatataatgaagtcactatgggaaaagatggggaggagagttgtaggattctacattaattctcttgtgcccttagcccactacttcagaatttcctgaagaaagcaagcctgaat

SEQ ID NO: 244072 - DNA, 120 bp, Artificial Sequence
  ENSG00000121966_2 (sequence is synthesized)
tggttttttaaattgctttaaaaattttttttaactgggttaatgcttgctgaattggaagtgaatgtccattcctttgcctcttttgcagatatacacttcagataactacaccgagga

SEQ ID NO: 244073 - DNA, 120 bp, Artificial Sequence
  ENSG00000121966_3 (sequence is synthesized)
aatgggctcaggggactatgactccatgaaggaaccctgtttccgtgaagaaaatgctaatttcaataaaatcttcctgcccaccatctactccatcatcttcttaactggcattgtggg

SEQ ID NO: 244074 - DNA, 120 bp, Artificial Sequence
  ENSG00000121966_4 (sequence is synthesized)
caatggattggtcatcctggtcatgggttaccagaagaaactgagaagcatgacggacaagtacaggctgcacctgtcagtggccgacctcctctttgtcatcacgcttcccttctgggc

SEQ ID NO: 244075 - DNA, 120 bp, Artificial Sequence
  ENSG00000121966_5 (sequence is synthesized)
agttgatgccgtggcaaactggtactttgggaacttcctatgcaaggcagtccatgtcatctacacagtcaacctctacagcagtgtcctcatcctggccttcatcagtctggaccgcta

SEQ ID NO: 244076 - DNA, 120 bp, Artificial Sequence
  ENSG00000121966_6 (sequence is synthesized)
cctggccatcgtccacgccaccaacagtcagaggccaaggaagctgttggctgaaaaggtggtctatgttggcgtctggatccctgccctcctgctgactattcccgacttcatctttgc

SEQ ID NO: 244077 - DNA, 120 bp, Artificial Sequence
  ENSG00000121966_7 (sequence is synthesized)
gccttatcctgcctggtattgtcatcctgtcctgctattgcattatcatctccaagctgtcacactccaagggccaccagaagcgcaaggccctcaagaccacagtcatcctcatcctgg

SEQ ID NO: 244078 - DNA, 120 bp, Artificial Sequence
  ENSG00000121966_8 (sequence is synthesized)
ctttcttcgcctgttggctgccttactacattgggatcagcatcgactccttcatcctcctggaaatcatcaagcaagggtgtgagtttgagaacactgtgcacaagtggatttccatca

SEQ ID NO: 244079 - DNA, 120 bp, Artificial Sequence
  ENSG00000121966_9 (sequence is synthesized)
ccgaggccctagctttcttccactgttgtctgaaccccatcctctatgctttccttggagccaaatttaaaacctctgcccagcacgcactcacctctgtgagcagagggtccagcctca

SEQ ID NO: 244080 - DNA, 120 bp, Artificial Sequence
  ENSG00000121966_10 (sequence is synthesized)
agatcctctccaaaggaaagcgaggtggacattcatctgtttccactgagtctgagtcttcaagttttcactccagctaacacagatgtaaaagacttttttttatacgataaataactt

SEQ ID NO: 244081 - DNA, 120 bp, Artificial Sequence
  ENSG00000121966_11 (sequence is synthesized)
ttttttaagttacacatttttcagatataaaagactgaccaatattgtacagtttttattgcttgttggatttttgtcttgtgtttctttagtttttgtgaagtttaattgacttattta

SEQ ID NO: 244082 - DNA, 120 bp, Artificial Sequence
  ENSG00000121966_12 (sequence is synthesized)
tataaattttttttgtttcatattgatgtgtgtctaggcaggacctgtggccaagttcttagttgctgtatgtctcgtggtaggactgtagaaaagggaactgaacattccagagcgtgt

SEQ ID NO: 244083 - DNA, 120 bp, Artificial Sequence
  ENSG00000121966_13 (sequence is synthesized)
agtgaatcacgtaaagctagaaatgatccccagctgtttatgcatagataatctctccattcccgtggaacgtttttcctgttcttaagacgtgattttgctgtagaagatggcacttat

SEQ ID NO: 244084 - DNA, 120 bp, Artificial Sequence
  ENSG00000121966_14 (sequence is synthesized)
aaccaaagcccaaagtggtatagaaatgctggtttttcagttttcaggagtgggttgatttcagcacctacagtgtacagtcttgtattaagttgttaataaaagtacatgttaaactta

SEQ ID NO: 244085 - DNA, 120 bp, Artificial Sequence
  ENSG00000121966_15 (sequence is synthesized)
cgcggccagaaacttcagtttgttggctgcggcagcaggtagcaaagtgacgccgagggcctgagtgctccagtagccaccgcatctggagaaccagcggttaccatggaggggatcagt

SEQ ID NO: 244086 - DNA, 120 bp, Artificial Sequence
  ENSG00000121966_16 (sequence is synthesized)
attctgtgcacaagtgcagagaaggcgtgcgcgctgcctcgggactcagaccaccggtctcttccttggggaagcggggatgtcttggagcgagttacattgtctgaatttagaggcgga

SEQ ID NO: 244087 - DNA, 120 bp, Artificial Sequence
  ENSG00000121988_0 (sequence is synthesized)
ggacagccattttgcccacttgtaaaagagctaccttttcccacgagttggagcctgaggtgcggagtttcgtgagtttttactgactcgaggatcatcatgcctagggttcataacata

SEQ ID NO: 244088 - DNA, 120 bp, Artificial Sequence
  ENSG00000121988_1 (sequence is synthesized)
aaaaagtctcttacacctcacatttcttgtgtgacaaatgaatctgataatctgctggattttttgcctgacagactaagagcaaagctacttccattccagaaagatggcatcattttt

SEQ ID NO: 244089 - DNA, 120 bp, Artificial Sequence
  ENSG00000121988_2 (sequence is synthesized)
gccctcaaaagaaatggcaggtgtatggtggctgatgaaatgggtctaggaaagacaatccaggcaattggaattacttacttctataaagaggaatggcctctgttaatagtggtccct

SEQ ID NO: 244090 - DNA, 120 bp, Artificial Sequence
  ENSG00000121988_3 (sequence is synthesized)
tcgtctctgaggtacccttggacagaagaaattgaaaaatggatcccagagctaagtccagaagaaatcaatgttattcagaataaaactgatgttaggagaatgtcgaccagtaaagtg

SEQ ID NO: 244091 - DNA, 120 bp, Artificial Sequence
  ENSG00000121988_4 (sequence is synthesized)
acagttctgggttatggtctcttaaccgcagatgcaaagactttgatagatgcactgaataatcagaacttcaaagtagttatagtggatgaatcacactacatgaaatccagaaatgca

SEQ ID NO: 244092 - DNA, 120 bp, Artificial Sequence
  ENSG00000121988_5 (sequence is synthesized)
actcgcagcaggattttattgccaatagtacagaaagccagacgagccattcttcttacaggaacaccagctttaggaaggcctgaagagctttttatgcagattgaagctctctttcca

SEQ ID NO: 244093 - DNA, 120 bp, Artificial Sequence
  ENSG00000121988_6 (sequence is synthesized)
caaaaatttggaagatggaccgactatgcaaaaagatactgtaatgcacacatcagatattttggtaaaagacctcagtgggattgtagaggggcatcaaatcttaatgaacttcaccag

SEQ ID NO: 244094 - DNA, 120 bp, Artificial Sequence
  ENSG00000121988_7 (sequence is synthesized)
ctattaagtgacataatgattagaagattaaagactgaagttttaacccagctaccccctaaagtcagacagcgtattccatttgatcttccatcagcagctgccaaggaattgaatacc

SEQ ID NO: 244095 - DNA, 120 bp, Artificial Sequence
  ENSG00000121988_8 (sequence is synthesized)
agctttgaagagtgggaaaaaataatgagaactccaaattcaggtgccatggagacagtcatggggttgataactcgcatgtttaaacaaactgctattgccaaggcaggtgctgtaaag

SEQ ID NO: 244096 - DNA, 120 bp, Artificial Sequence
  ENSG00000121988_9 (sequence is synthesized)
gattatattaagatgatgcttcagaatgattcgcttaaatttctggtttttgctcaccatttaagcatgctccaagcttgcacagaagcagtcatcgaaaataagactcgttacattagg

SEQ ID NO: 244097 - DNA, 120 bp, Artificial Sequence
  ENSG00000121988_10 (sequence is synthesized)
atagatggaagtgtttcatcttcagaaagaatacatctggttaatcagtttcaaaaggatcctgacactcgcgtggctatcctaagcattcaggctgctggccagggattaacatttact

SEQ ID NO: 244098 - DNA, 120 bp, Artificial Sequence
  ENSG00000121988_11 (sequence is synthesized)
gcagcaagtcatgttgtatttgctgagttgtactgggaccctggacatataaaacaagcagaagaccgagctcacagaattggccagtgcagttctgtgaatattcactaccttattgca

SEQ ID NO: 244099 - DNA, 120 bp, Artificial Sequence
  ENSG00000121988_12 (sequence is synthesized)
aatggaaccctagacacccttatgtggggaatgttgaatcgcaaggctcaagttacagggagcacactgaacggtaggaaagaaaaaattcaggctgaggaaggtgataaggaaaaatgg

SEQ ID NO: 244100 - DNA, 120 bp, Artificial Sequence
  ENSG00000121988_13 (sequence is synthesized)
gatttcctgcagtttgctgaagcttggactccaaatgacagttctgaagagttaaggaaggaagctttgttcactcacttcgaaaaagaaaaacagcatgatattcgatcattttttgta

SEQ ID NO: 244101 - DNA, 120 bp, Artificial Sequence
  ENSG00000121988_14 (sequence is synthesized)
ccacaacctaaaaaaagacagttgatgacctcctgtgacgaatcaaagagattccgggaggaaaatactgtagtgtcatcagaccctacaaaaacagctgcaagagatatcatcgattat

SEQ ID NO: 244102 - DNA, 120 bp, Artificial Sequence
  ENSG00000121988_15 (sequence is synthesized)
gaaagtgatgttgaacctgaaacgaaaagattgaaattggctgcctcggaagaccactgcagtccgtcggaagagacaccatcccagtccaagcaaatccgaactccactcgtggaaagt

SEQ ID NO: 244103 - DNA, 120 bp, Artificial Sequence
  ENSG00000121988_16 (sequence is synthesized)
gtacaggaggccaaggcccagttaaccaccccagcctttcctgtagagggctggcaatgtagtctctgcacctatatcaataattcagagttaccttattgtgaaatgtgtgagactcct

SEQ ID NO: 244104 - DNA, 120 bp, Artificial Sequence
  ENSG00000121988_17 (sequence is synthesized)
caaggcagtgctgttatgcaaatagatagcctcaaccatatccaggataaaaacgagaaggatgattctcagaaagacacctccaaaaaggttcaaactatctcagactgtgaaaaacaa

SEQ ID NO: 244105 - DNA, 120 bp, Artificial Sequence
  ENSG00000121988_18 (sequence is synthesized)
gcccttgcacagtcagaacctggccagttggctgacagcaaggaagaaacaccaaaaattgagaaagaagacggacttacatcccagccaggtaatgaacagtggaagagttcagacact

SEQ ID NO: 244106 - DNA, 120 bp, Artificial Sequence
  ENSG00000121988_19 (sequence is synthesized)
ttgccagtgtatgacaccttaatgttctgtgcaagtaggaatactgaccggattcacatctatactaaggatggaaaacagatgagctgtaatttcattcctctggatataaaattagac

SEQ ID NO: 244107 - DNA, 120 bp, Artificial Sequence
  ENSG00000121988_20 (sequence is synthesized)
ctttgggaagatttaccagcaagctttcagctgaaacaatatcgctcactgattttgagatttgttcgagaatggagtagtctaactgccatgaagcaaaggataatcaggaaaagtgga

SEQ ID NO: 244108 - DNA, 120 bp, Artificial Sequence
  ENSG00000121988_21 (sequence is synthesized)
cagctattctgtagcccaattcttgctttggaagagatcacaaagcaacaaaccaaacaaaattgcaccaaaagatacataaccaaagaagatgttgccgtagcctcaatggacaaagtg

SEQ ID NO: 244109 - DNA, 120 bp, Artificial Sequence
  ENSG00000121988_22 (sequence is synthesized)
aagaatgttgggggccatgtccgtctgatcacaaaggagtccaggccacgggatcctttcacaaaaaaacttcttgaagatggagcctgtgtcccatttctaaatccatacacagtccag

SEQ ID NO: 244110 - DNA, 120 bp, Artificial Sequence
  ENSG00000121988_23 (sequence is synthesized)
gcagatctcactgtgaagccctctacatccaaaggctatttgcaagctgtggataatgaaggaaatccactttgccttcgctgtcagcaacccacttgccagactaagcaagcatgtaaa

SEQ ID NO: 244111 - DNA, 120 bp, Artificial Sequence
  ENSG00000121988_24 (sequence is synthesized)
gcgaactcttgggattcacggttttgctctctgaaatgtcaggaagagttttggattcgatctaataacagttacctgagagccaaagtatttgaaactgaacatggtgtgtgtcagctc

SEQ ID NO: 244112 - DNA, 120 bp, Artificial Sequence
  ENSG00000121988_25 (sequence is synthesized)
tgtaatgtgaacgcacaagaactctttttacgtctgagagatgcccctaaaagtcagaggaagaatcttctgtatgctacctggacttcaaagctcccattagaacagctaaatgaaatg

SEQ ID NO: 244113 - DNA, 120 bp, Artificial Sequence
  ENSG00000121988_26 (sequence is synthesized)
ataagaaacccaggggaaggacatttctggcaggtggatcacatcaagccagtgtatgggggaggaggacagtgttccctggacaacctgcagactctctgcacagtctgtcacaaagag

SEQ ID NO: 244114 - DNA, 120 bp, Artificial Sequence
  ENSG00000121988_27 (sequence is synthesized)
atgaatgaatgacaaatggtttacatgtggaagactttaatacagaagttttccatgtttgtttaatatatcgagagtaaaaattttcagaacaaaaatcaagaattcaaattctcttct

SEQ ID NO: 244115 - DNA, 120 bp, Artificial Sequence
  ENSG00000121988_28 (sequence is synthesized)
actaattacttttagtattaaatacattttgaaagtacttaacagaaactaagatacaatactgaatatttctgtggtctttttgatttgattcagactcgcaattatgtttcagcaatg

SEQ ID NO: 244116 - DNA, 120 bp, Artificial Sequence
  ENSG00000121988_29 (sequence is synthesized)
ttttgtaaagctctttacccctaatatgcctaatcactgtattgtgcatagattgtgtttaaaaaatgtactctcaattacctaaaaatgcttctggattagtattgttctggactgtca

SEQ ID NO: 244117 - DNA, 120 bp, Artificial Sequence
  ENSG00000121988_30 (sequence is synthesized)
taggtatgagtggaacattgcaaaaccttatgggaaatttcagacgcaaatcattatttgggaattctgggccaagcatgaccagcctgcttaggattcaagagagactgtccactaaat

SEQ ID NO: 244118 - DNA, 120 bp, Artificial Sequence
  ENSG00000121988_31 (sequence is synthesized)
acctccagaatgagctaggggcacacattttgggtgttgcttttcttgctttatttcttagctagtcatctttatcaaaaatatccttttcaaaatgaggtacctatggtgtttgtggac

SEQ ID NO: 244119 - DNA, 120 bp, Artificial Sequence
  ENSG00000121988_32 (sequence is synthesized)
aatttgggggttctgtgtaaagtaattgttaaaactattaaataactgaaaacataaaatgtaaaatgccacttaagcttgattttttagatctttttttaaaaaatgaataaaactagg

SEQ ID NO: 244120 - DNA, 84 bp, Artificial Sequence
  ENSG00000121988_33 (sequence is synthesized)
aaaaactaagcgtactatcaaaatacactttgtcttctggttctcattttctgtttttaaaaccctgtgttattaaaggtatgt

SEQ ID NO: 244121 - DNA, 120 bp, Artificial Sequence
  ENSG00000121988_34 (sequence is synthesized)
cattttctgtttttaaaaccctgtgttattaaaggtatgtttctggtacttattttaaaaagagtgatgatgacaaaacactttataataaggcataatcagatggttatatgcatttaa

SEQ ID NO: 244122 - DNA, 120 bp, Artificial Sequence
  ENSG00000121988_35 (sequence is synthesized)
atatacaataataacattaaaatgtaattgacataaaataagagtgacgatgaaacaaacccagggcctagtcctgcaatatgtcagaatcatgagggcaaagagtcagaactatacaaa

SEQ ID NO: 244123 - DNA, 120 bp, Artificial Sequence
  ENSG00000121988_36 (sequence is synthesized)
atacaggaccgaggaagaattacattcccaaaagggagctgtttgtaaatactattaggacatatacctctttagtttgagcattttcccacgttaattaatagctagtgttttacaaca

SEQ ID NO: 244124 - DNA, 120 bp, Artificial Sequence
  ENSG00000121988_37 (sequence is synthesized)
taaaggacttgtttttagaaagattatacaatcaaagattatacaaccacagttgttcctcagtttctatttcattgtatgagatcaagtcatgttggttattttataaatgaagttggg

SEQ ID NO: 244125 - DNA, 120 bp, Artificial Sequence
  ENSG00000121988_38 (sequence is synthesized)
ctttctttggcctcctttctgcttagttggtcaggtgctctttgcagttttctgcctcatttccaaggtaacctaggatttgtcacggttgagagccaagaagcaggcacgctgcctttc

SEQ ID NO: 244126 - DNA, 120 bp, Artificial Sequence
  ENSG00000121988_39 (sequence is synthesized)
ctccagcatggggttttgcaagcgaggtctaagtaggtcaaatttgaggggaacttgctcttcagatcacactaaggtgataattctaaggagaaagttctcagatgtaagaactgtgtg

SEQ ID NO: 244127 - DNA, 120 bp, Artificial Sequence
  ENSG00000121988_40 (sequence is synthesized)
atggtttgaggtgaaacaatccatgaagataggctcagtctataccaggtttcagaattctgactaattaaaaatgccgtaaggagcattgagcatttgctgtacaggacactgactggc

SEQ ID NO: 244128 - DNA, 120 bp, Artificial Sequence
  ENSG00000121988_41 (sequence is synthesized)
ccgtccccatcccttcctgacatgtctcagagctttgtgtcctgccttcccctaatttggtctgcattacttgtggggcacattgagatgaagggttctgagacagaaaataaagataga

SEQ ID NO: 244129 - DNA, 120 bp, Artificial Sequence
  ENSG00000121988_42 (sequence is synthesized)
gattgatctaataaccgagaccgaaagggcatcttgaggactgttctttcctcctcacaatctgaaacagaagctccccactatgtattgcaaatgggaggttatgacagagggacacag

SEQ ID NO: 244130 - DNA, 120 bp, Artificial Sequence
  ENSG00000121988_43 (sequence is synthesized)
aaagtgtcagagcaagtggcagatcctgagtgcagaaggaagtgcagatgccccaggaagaagacagctgctgccactcaggagatggagatggagtgaaaacacaggtgggtacaatga

SEQ ID NO: 244131 - DNA, 120 bp, Artificial Sequence
  ENSG00000121988_44 (sequence is synthesized)
gtgtaaaaggataggcctggctctgaaaagactcagagaagctgcaagatacagtttaggctaagaaaacaacaacaaaaaagggctctggccaggtatgatggcacttgcttgtagtcc

SEQ ID NO: 244132 - DNA, 120 bp, Artificial Sequence
  ENSG00000121988_45 (sequence is synthesized)
tagctacacaggaggctgaggtaggagggtcacttaagcccaggggttcatgaccagcctgggtaacacagcaaggccccatctcaaaaaagaaaaaaggctctgggtccagggaacaga

SEQ ID NO: 244133 - DNA, 120 bp, Artificial Sequence
  ENSG00000121988_46 (sequence is synthesized)
gctgggaagtggtaggtgacgaaggaactcgcttacgatagggaaccatatgaaaatatgcctgtgggtaggggtagggtggggaggacttccggagcatggtgggctcacacactcaaa

SEQ ID NO: 244134 - DNA, 120 bp, Artificial Sequence
  ENSG00000121988_47 (sequence is synthesized)
ccttgcacagccagcatcaggctggcctgccttcctgttcccgtcactgggtgacattgatcccagacacattctgatgactagtaaagttgcttttagtagccccagagccaggaggaa

SEQ ID NO: 244135 - DNA, 120 bp, Artificial Sequence
  ENSG00000121988_48 (sequence is synthesized)
taattcatatggaatttttaaagacgcccactcttggcgttaattacagcccaacgtacatttcttggggagattttcctgtgacaagtgaataccctctacattttcttaactggatgg

SEQ ID NO: 244136 - DNA, 120 bp, Artificial Sequence
  ENSG00000121988_49 (sequence is synthesized)
gaaaaggattttatgcccatacatcttgctaataaaccaaatcccttcttcagattcttgagtgaaacatttaaaatgtagtttctttagaaataaaagtatgaggcattttaaattata

SEQ ID NO: 244137 - DNA, 120 bp, Artificial Sequence
  ENSG00000121988_50 (sequence is synthesized)
tgacagacaaaaaagtcaatgctcttgagctctttacagtaaataggttgtgtttactcataggatacagaatcatggatatcaaacatcaaaaataaattataaaaataatgtctcatt

SEQ ID NO: 244138 - DNA, 120 bp, Artificial Sequence
  ENSG00000121988_51 (sequence is synthesized)
ttctgttgcatattattagcctgtctctcattccaccatttgttcttttgaactggaaaattgtgggctcctagtcactgcactaatctatctgaatatccaactaccagaaagggttta

SEQ ID NO: 244139 - DNA, 120 bp, Artificial Sequence
  ENSG00000121988_52 (sequence is synthesized)
tcccatctcaagtttgtcagttgctttatatcgttaagggtgtttttgccaccctggttgtgttcataattaccattgagaaatgtcactgttattaaaatacattctgtgttccaacta

SEQ ID NO: 244140 - DNA, 120 bp, Artificial Sequence
  ENSG00000121988_53 (sequence is synthesized)
cccttttcgcaaccctaacgggagagaagtgatggaagaagggtagccggaagagtttcctcaaaataccataggggttttaaattattagtacgtatttaaactcatctactttcacgt

SEQ ID NO: 244141 - DNA, 120 bp, Artificial Sequence
  ENSG00000121988_54 (sequence is synthesized)
gtcccgttgaacgtcacttccgcttaggggcggacacgtcccaaacctgtggcgggagttggagattctgcggcgaatacgccaggtgtgactggctggaagtggcgtggctggatcatc

SEQ ID NO: 244142 - DNA, 120 bp, Artificial Sequence
  ENSG00000121988_55 (sequence is synthesized)
gaagacaatctctagcatcaaagcatggatcagacatcacacgatttttggaaacctcaaagctgcatgaatcacacaaggtaacaggtgccgagcaaggtctgcaggtttctggattgc

SEQ ID NO: 244143 - DNA, 120 bp, Artificial Sequence
  ENSG00000121988_56 (sequence is synthesized)
cagatagtgcagcacctgaaggaggtgcagcgcacacaaatgatcagcgcaggtgtcaaaggatgaagcagccacttacagaagtgcaaatcctcagccactcatcttaatccttaacaa

SEQ ID NO: 244144 - DNA, 120 bp, Artificial Sequence
  ENSG00000121988_57 (sequence is synthesized)
gacagcactccagataggcagccacgaccccaaaggcttctggaaccaaactgattaaagttttactcagtggatagttctatagaattaatgatgatgtatgccaaaaacctttcagtg

SEQ ID NO: 244145 - DNA, 120 bp, Artificial Sequence
  ENSG00000121988_58 (sequence is synthesized)
attctaacttcaagcttggaaaaaaagacgaggcttcccagtgtttgtggtggtggatctgcctggttctcaatttgacaccctaagcgatcatactcaagaatagtacagatgtgtgga

SEQ ID NO: 244146 - DNA, 120 bp, Artificial Sequence
  ENSG00000121988_59 (sequence is synthesized)
atacgccaatacctttaactacagacatcatgttctcaagataaaagcctttaaaacaaaaagccatcgtaggtatcaagtcaacatgaaattggaatgcaaaattaatactgctgagga

SEQ ID NO: 244147 - DNA, 120 bp, Artificial Sequence
  ENSG00000121988_60 (sequence is synthesized)
tttccttcatatcccatgctgtttaactatctcttccacagtcctagaatcaatcttttttaattaagagacagggtctgtctttgttacccaggctggagtacagtggtgtcatcaaag

SEQ ID NO: 244148 - DNA, 120 bp, Artificial Sequence
  ENSG00000121988_61 (sequence is synthesized)
ctcagtgcagcctccaactcctgggctcaatactcttgcctcagcctcctcttcctgagtagctgcaactacagacacatgccccaatactcagctaatttttaaatttttgtggagatg

SEQ ID NO: 244149 - DNA, 120 bp, Artificial Sequence
  ENSG00000121988_62 (sequence is synthesized)
caaaacttagttgtgttctctttatctgaaaatatactatttacctatttgttaattttattgtctttctctgccatttagaatggagtctagaatgcagggatttctctgtcctgttcc

SEQ ID NO: 244150 - DNA, 120 bp, Artificial Sequence
  ENSG00000121988_63 (sequence is synthesized)
tgctgtctcttcagcatctagaatagtactgggtatatagtatgctcctgataaatgttttgaacatatgaataaacattattcactttctttttataagacctaactgttacattcttt

SEQ ID NO: 244151 - DNA, 120 bp, Artificial Sequence
  ENSG00000121988_64 (sequence is synthesized)
actatgcaaaaagatactgtaatgcacacatcagagtctcactcccatcgcccaggctggactgcagtggcaccatcatggctcactacaatctctgcctcctgggttcaatcgattctt

SEQ ID NO: 244152 - DNA, 120 bp, Artificial Sequence
  ENSG00000121988_65 (sequence is synthesized)
gacctcaggttattaatcattctttattccagtgttttacaaatttgtggtagctatgaaataattggtggactattatacatataggtggatgacctatatgtaaaataaataaaagta

SEQ ID NO: 244153 - DNA, 120 bp, Artificial Sequence
  ENSG00000121988_66 (sequence is synthesized)
actgtttaatatttaaggagaaaagtcttccttgtgtgtacctggtatatattcatgttttagaatgcaatatcaccaatagataataatttagaagtggagtaagtagtatggagaatt

SEQ ID NO: 244154 - DNA, 120 bp, Artificial Sequence
  ENSG00000121988_67 (sequence is synthesized)
gtcacctgggagcttttctggggctgtcaactggaacaccgcaggatttctccatgtggcctgggtttcctcataccaatggtggctaggttcccaagttcgaaaaagaaaaacagcatg

SEQ ID NO: 244155 - DNA, 120 bp, Artificial Sequence
  ENSG00000121988_68 (sequence is synthesized)
ctgagaagtcaaatggaaaattgtgcacacagttgtggaagattatgtggatgaatttatctctggtctgagattcgaggcacattttactcctttcatcacccaacacttgcctttcct

SEQ ID NO: 244156 - DNA, 120 bp, Artificial Sequence
  ENSG00000121988_69 (sequence is synthesized)
ctcaaggcccgtgtcacagatgcaagagaagctgcttcccttttcattcattctaggaccaagacatttgcaccactaccaagaaagaaatgaatacagtttacatattgtcttgatgag

SEQ ID NO: 244157 - DNA, 120 bp, Artificial Sequence
  ENSG00000121988_70 (sequence is synthesized)
acccggatcctcaaactggaagtttggtgaattggggcagtgatacatgtttgcatataactaaggatatcctgaaatatctgaaaacattgataagttatctctaggaccaactcagtt

SEQ ID NO: 244158 - DNA, 120 bp, Artificial Sequence
  ENSG00000121989_0 (sequence is synthesized)
gtctgggcttccgaatatgttttatgacggttgattttacaccaggaggtttgtctccgaggaagacccagggaactggatatctagcgagaacttcctccggattccccggcgcctcgg

SEQ ID NO: 244159 - DNA, 120 bp, Artificial Sequence
  ENSG00000121989_1 (sequence is synthesized)
gaaaatgggagctgctgcaaagttggcgtttgccgtctttcttatctcctgttcttcaggtgctatacttggtagatcagaaactcaggagtgtcttttctttaatgctaattgggaaaa

SEQ ID NO: 244160 - DNA, 120 bp, Artificial Sequence
  ENSG00000121989_2 (sequence is synthesized)
agacagaaccaatcaaactggtgttgaaccgtgttatggtgacaaagataaacggcggcattgttttgctacctggaagaatatttctggttccattgaaatagtgaaacaaggttgttg

SEQ ID NO: 244161 - DNA, 120 bp, Artificial Sequence
  ENSG00000121989_3 (sequence is synthesized)
gctggatgatatcaactgctatgacaggactgattgtgtagaaaaaaaagacagccctgaagtatatttttgttgctgtgagggcaatatgtgtaatgaaaagttttcttattttccgga

SEQ ID NO: 244162 - DNA, 120 bp, Artificial Sequence
  ENSG00000121989_4 (sequence is synthesized)
gatggaagtcacacagcccacttcaaatccagttacacctaagccaccctattacaacatcctgctctattccttggtgccacttatgttaattgcggggattgtcatttgtgcattttg

SEQ ID NO: 244163 - DNA, 120 bp, Artificial Sequence
  ENSG00000121989_5 (sequence is synthesized)
ggtgtacaggcatcacaagatggcctaccctcctgtacttgttccaactcaagacccaggaccacccccaccttctccattactaggtttgaaaccactgcagttattagaagtgaaagc

SEQ ID NO: 244164 - DNA, 120 bp, Artificial Sequence
  ENSG00000121989_6 (sequence is synthesized)
aaggggaagatttggttgtgtctggaaagcccagttgcttaacgaatatgtggctgtcaaaatatttccaatacaggacaaacagtcatggcaaaatgaatacgaagtctacagtttgcc

SEQ ID NO: 244165 - DNA, 120 bp, Artificial Sequence
  ENSG00000121989_7 (sequence is synthesized)
tggaatgaagcatgagaacatattacagttcattggtgcagaaaaacgaggcaccagtgttgatgtggatctttggctgatcacagcatttcatgaaaagggttcactatcagactttct

SEQ ID NO: 244166 - DNA, 120 bp, Artificial Sequence
  ENSG00000121989_8 (sequence is synthesized)
taaggctaatgtggtctcttggaatgaactgtgtcatattgcagaaaccatggctagaggattggcatatttacatgaggatatacctggcctaaaagatggccacaaacctgccatatc

SEQ ID NO: 244167 - DNA, 120 bp, Artificial Sequence
  ENSG00000121989_9 (sequence is synthesized)
tcacagggacatcaaaagtaaaaatgtgctgttgaaaaacaacctgacagcttgcattgctgactttgggttggccttaaaatttgaggctggcaagtctgcaggcgatacccatggaca

SEQ ID NO: 244168 - DNA, 120 bp, Artificial Sequence
  ENSG00000121989_10 (sequence is synthesized)
ggttggtacccggaggtacatggctccagaggtattagagggtgctataaacttccaaagggatgcatttttgaggatagatatgtatgccatgggattagtcctatgggaactggcttc

SEQ ID NO: 244169 - DNA, 120 bp, Artificial Sequence
  ENSG00000121989_11 (sequence is synthesized)
tcgctgtactgctgcagatggacctgtagatgaatacatgttgccatttgaggaggaaattggccagcatccatctcttgaagacatgcaggaagttgttgtgcataaaaaaaagaggcc

SEQ ID NO: 244170 - DNA, 120 bp, Artificial Sequence
  ENSG00000121989_12 (sequence is synthesized)
tgttttaagagattattggcagaaacatgctggaatggcaatgctctgtgaaaccattgaagaatgttgggatcacgacgcagaagccaggttatcagctggatgtgtaggtgaaagaat

SEQ ID NO: 244171 - DNA, 120 bp, Artificial Sequence
  ENSG00000121989_13 (sequence is synthesized)
tacccagatgcagagactaacaaatattattaccacagaggacattgtaacagtggtcacaatggtgacaaatgttgactttcctcccaaagaatctagtctatgatggttgcgccatct

SEQ ID NO: 244172 - DNA, 120 bp, Artificial Sequence
  ENSG00000121989_14 (sequence is synthesized)
gtgcacactaagaaatgggactctgaactggagctgctaagctaaagaaactgcttacagtttattttctgtgtaaaatgagtaggatgtctcttggaaatgttaagaaagaagaccctt

SEQ ID NO: 244173 - DNA, 120 bp, Artificial Sequence
  ENSG00000121989_15 (sequence is synthesized)
tgttgaaaaatgttgctctgggagacttactgcattgccgacagcacagatgtgaaggacatgagactaagagaaaccttgcaaactctataaagaaacttttgaaaaagtgtacatgaa

SEQ ID NO: 244174 - DNA, 120 bp, Artificial Sequence
  ENSG00000121989_16 (sequence is synthesized)
gaatgtagccctctccaaatcaaggatcttttggacctggctaatggagtgtttgaaaactgacatcagatttcttaatgtctgtcagaagacactaattccttaaatgaactactgcta

SEQ ID NO: 244175 - DNA, 120 bp, Artificial Sequence
  ENSG00000121989_17 (sequence is synthesized)
ttttttttaaatcaaaaacttttcatttcagattttaaaaagggtaacttgtttttattgcatttgctgttgtttctataaatgactattgtaatgccaatatgacacagcttgtgaatg

SEQ ID NO: 244176 - DNA, 120 bp, Artificial Sequence
  ENSG00000121989_18 (sequence is synthesized)
tttagtgtgctgctgttctgtgtacataaagtcatcaaagtggggtacagtaaagaggcttccaagcattactttaacctccctcaacaaggtatacctcagttccacggttgctaaatt

SEQ ID NO: 244177 - DNA, 120 bp, Artificial Sequence
  ENSG00000121989_19 (sequence is synthesized)
ataaaattgaaaacactaacaaaatttgaataataaatcgatccatgttttgtaacaaattcactgtgttatttaaggaaaaaaaggtaagctatgcttagtgccaacaataagtggcca

SEQ ID NO: 244178 - DNA, 120 bp, Artificial Sequence
  ENSG00000121989_20 (sequence is synthesized)
ttcgtaaagcagtgttttagcatttcttgtgctggcttgtaatgtagggaaaaaaagtgctgttttttgaaaagatggtgtcatttcccccttcttcccatgttttaaagccccatctta

SEQ ID NO: 244179 - DNA, 120 bp, Artificial Sequence
  ENSG00000121989_21 (sequence is synthesized)
tgtttggggaatatttgaaaatttaaagcatgatttaaaattttttaaagtgagctgtgacactggaaagctcttcattttatcttttaaaatagagttttttctatttatatatgtaaa

SEQ ID NO: 244180 - DNA, 120 bp, Artificial Sequence
  ENSG00000121989_22 (sequence is synthesized)
attgtagtgtatttcttttcaccaaacagtgtgtgggacattctttatcactgttttaggatcacctcaggaagtgtcgttacccagaattccccactgtctgctatgagacttgtaact

SEQ ID NO: 244181 - DNA, 120 bp, Artificial Sequence
  ENSG00000121989_23 (sequence is synthesized)
ttatcactatacttctgcttggtgccatcttgtcagagtaatatttgatgtctgtgatatgtaaagaattatcctaggataaagatattaaactttaagcagatttcagatgttactgct

SEQ ID NO: 244182 - DNA, 120 bp, Artificial Sequence
  ENSG00000121989_24 (sequence is synthesized)
ttaaaacaaatcagggataacaaattaaacgtataacttaaaatatgcaatgacatttagaggtaaccaatgttgatataggtagcatagcctagcctcctccccaaaattgcttttaca

SEQ ID NO: 244183 - DNA, 120 bp, Artificial Sequence
  ENSG00000121989_25 (sequence is synthesized)
actaacactgatactaatttaggatagttcatgccttatccttgctaagaaaatggaattgatggtaggcaggtgctaaagtgcttttcaaaacaatattacgttagaatacaattggat

SEQ ID NO: 244184 - DNA, 120 bp, Artificial Sequence
  ENSG00000121989_26 (sequence is synthesized)
tcttcctcaaatttatacaggccaaaaagtaaaacattaattttctgaatttccagattaccaatcaattaatcaacaaatagccagtattatgctgtgtatttctgtcaggtcatttta

SEQ ID NO: 244185 - DNA, 120 bp, Artificial Sequence
  ENSG00000121989_27 (sequence is synthesized)
aaatccatgttaattttataaaagaattttttacatgtcactgtcaggagctcactgtgaatgtgttgtcttcaaatggttatttaaccacacagtacactacattttacatatatgtac

SEQ ID NO: 244186 - DNA, 120 bp, Artificial Sequence
  ENSG00000121989_28 (sequence is synthesized)
gtaatctctgggaatagtaaattaattatgttatttataaacaatacataggtcaacagactttaagcagggaggaaaagaagagtaatagcgtctgtgtgctgcagaccattcagaact

SEQ ID NO: 244187 - DNA, 120 bp, Artificial Sequence
  ENSG00000121989_29 (sequence is synthesized)
gtcacgtgtgtccccatggtctcattcattgtattcctagcaattcccttttcaatgttgagttcacctctttatttcacaaagtacttggtctctcaatttcttgatctggttttgctt

SEQ ID NO: 244188 - DNA, 120 bp, Artificial Sequence
  ENSG00000121989_30 (sequence is synthesized)
ccatttaaaaactaatcaagaagggaaaatattgagaatgtgcatacaagaaaatcattaatttcctgaagatgaatttctacctgttgtgaacatttaactttctttttaaaagttaaa

SEQ ID NO: 244189 - DNA, 120 bp, Artificial Sequence
  ENSG00000121989_31 (sequence is synthesized)
caaaaataaacaagggatattatgatgaatgtttggcttatgtgagtactagagataaaatttttaaacccagttattcacaatataaaatgttttcaagttagaaaaaatttttagaaa

SEQ ID NO: 244190 - DNA, 120 bp, Artificial Sequence
  ENSG00000121989_32 (sequence is synthesized)
tcctgggtattgtatttaactgtagctaaccaattttaaaacttgtattcttttgagaactattattaatagaaaaactttttataagcagtaaaataagaatgttccagtgactacctg

SEQ ID NO: 244191 - DNA, 120 bp, Artificial Sequence
  ENSG00000121989_33 (sequence is synthesized)
tccttatacctagtcttgttaaaactttcttttgcagggtatttagtgtttggtttacagtcagtgcagagtgggcaagttaacagaaagtttgagctagagatactggaaaaaaaaaag

SEQ ID NO: 244192 - DNA, 120 bp, Artificial Sequence
  ENSG00000121989_34 (sequence is synthesized)
atcaaagaatgagaaaaatggtgatccattttggggcaaactgagaccccccaaataactctttcctcatgtgtatggtgctcctcatgactcgtcttgtattttgcctttctgataccc

SEQ ID NO: 244193 - DNA, 120 bp, Artificial Sequence
  ENSG00000121989_35 (sequence is synthesized)
atcagaactgctgctgctctaacttatactctttaccttgcccagatctccgcgtaaggaatgctttatgatcaacttgccataggactgatggattaaccagtgttcggctttatttga

SEQ ID NO: 244194 - DNA, 120 bp, Artificial Sequence
  ENSG00000121989_36 (sequence is synthesized)
agtctatgccctgcacagctcttgtatgtattttagatgctagaagtttttttagcatgtgatgtgtgattcttgtttgaattctaggtaccttgtgaattccagaaaaagagactgtgc

SEQ ID NO: 244195 - DNA, 120 bp, Artificial Sequence
  ENSG00000121989_37 (sequence is synthesized)
ttcacgattgttagtcccatgaacttgcactatctatctttcatggtgatgttttgaaaatacaatcaggaaaaaacccaacacctttggaatttaaaatagaatcatatcatgaaattt

SEQ ID NO: 244196 - DNA, 120 bp, Artificial Sequence
  ENSG00000121989_38 (sequence is synthesized)
aaaaagaatctcttctgttgcatttcctcacccctaagtaacagctacatttaagtaaaatgcaggtggtaggggaaaaaaaaccatggcgagatggtggtttagtggaataaactgatt

SEQ ID NO: 244197 - DNA, 120 bp, Artificial Sequence
  ENSG00000121989_39 (sequence is synthesized)
gtttttttgtttttttttttttttttaaagaaagaagcttcatcacagatactttccagtttctcttttatacttttttgaaagattactttttaggaacatttggtatgatatgcataa

SEQ ID NO: 244198 - DNA, 120 bp, Artificial Sequence
  ENSG00000121989_40 (sequence is synthesized)
ataaaattatttatccatttatgggcaaaatgatacaagtagcatcttgattgaacatcatttacctcagatattcaaccagcagtacgttttttatgcagtctcaacccatatcccatt

SEQ ID NO: 244199 - DNA, 120 bp, Artificial Sequence
  ENSG00000121989_41 (sequence is synthesized)
tgttacctctcagaatattggtaagcagttattttcgctttactctgtatttcttgtgttttgggcacaggttattgtactactgtcaaatcgtacttgctattttttctgcaagtattt

SEQ ID NO: 244200 - DNA, 120 bp, Artificial Sequence
  ENSG00000121989_42 (sequence is synthesized)
aacagaaagcttaaaatccccataaaaccccaccttggataagtgattgttaaatattgtacaaataaaatgtatgctatccccattccatccccaagttaaataaaaaaatgaatacgg

SEQ ID NO: 244201 - DNA, 120 bp, Artificial Sequence
  ENSG00000121989_43 (sequence is synthesized)
gccgccccttccccgcgccgcagccgcctcgccgccaccgccgcgagctcggccgccagtggtcctcggactttaggtgtctgggttgaaggaggtttgtctccgaggaagacccaggga

SEQ ID NO: 244202 - DNA, 80 bp, Artificial Sequence
  ENSG00000121989_44 (sequence is synthesized)
cgaaaacgcggccgagcccggagcccggagctggagccagagcctggaccagaacttggccgccgcctgcaccgccgccg

SEQ ID NO: 244203 - DNA, 120 bp, Artificial Sequence
  ENSG00000121989_45 (sequence is synthesized)
gacaggatagtaagagaagtaagaggaaaagaagattcaagaattgtcaaagtgtggaagaaaagaaaatgataaaagaagaatgaaattgaatggactgattgtgtagaaaaaaaagac

SEQ ID NO: 244204 - DNA, 120 bp, Artificial Sequence
  ENSG00000121989_46 (sequence is synthesized)
gctggatgatatcaactgctatgacaggtaagaacacatttaagattttatggtagtattgagtaattttcacacttcccctctttttgaaaggggaaagatcagtgcataaattttcac

SEQ ID NO: 244205 - DNA, 120 bp, Artificial Sequence
  ENSG00000121989_47 (sequence is synthesized)
ataaagaacattataacatgctgtaatgacagtatattttaaagtaataaacatggcatatatatgttttatctttgatatattttgaataatctacccagtagtgagaactctgaaata

SEQ ID NO: 244206 - DNA, 120 bp, Artificial Sequence
  ENSG00000121989_48 (sequence is synthesized)
aaaaccattttccccaatattgttacgattataaacttttaaaatgccagttttaaggaaaacatttaaaaaattactttaaaagagtatatctgttgaaaatctgtcctcaagaagaat

SEQ ID NO: 244207 - DNA, 120 bp, Artificial Sequence
  ENSG00000121989_49 (sequence is synthesized)
aaaacttaatcatgtgtttaattttctttcagtttccttctttatgtatctggaagaaattgatcttactacattcccccctccccccgccccttttttttttcttgcaaagtaggcctt

SEQ ID NO: 244208 - DNA, 79 bp, Artificial Sequence
  ENSG00000121989_50 (sequence is synthesized)
ctccccccgccccttttttttttcttgcaaagtaggcctttcgctctttacccgaagagactttttatttttgagacag

SEQ ID NO: 244209 - DNA, 120 bp, Artificial Sequence
  ENSG00000121989_51 (sequence is synthesized)
atgggtaccttaaagggatattatataacgttaatttacaaatactgattgttccttatgtcctctgtgcagatggaaataggcatcctttatacctagataagaaagccccttatgcaa

SEQ ID NO: 244210 - DNA, 120 bp, Artificial Sequence
  ENSG00000121989_52 (sequence is synthesized)
tctttaagggaattacatgccaaattataggccttttcatttcccatacattagtttggtcacactgtggtataagtacagttgagagtctgtttctcttctgtcctcatagcatgtaaa

SEQ ID NO: 244211 - DNA, 120 bp, Artificial Sequence
  ENSG00000121989_53 (sequence is synthesized)
cagttgggaataggtgacagagtatattttagaaagtttgtaccagtttgaaagtcaggaggattttaatgaaaatgatttattttacttttcttacttttcaggacctgtagatgaata

SEQ ID NO: 244212 - DNA, 120 bp, Artificial Sequence
  ENSG00000122008_0 (sequence is synthesized)
tacctccggctctcccgggtgacgacgggtagaaaagcaggaggagcggagaaaggagagggcggggtagggatgcagctgtgctgcattctgggaagggcgttggtccgtcgctcgcgc

SEQ ID NO: 244213 - DNA, 120 bp, Artificial Sequence
  ENSG00000122008_1 (sequence is synthesized)
agcctcctgggagttgtagtcgcgatcctgaggtaacggataagtttataccatggatagcacaaaggagaagtgtgacagttacaaagatgatcttctgcttaggatgggacttaatga

SEQ ID NO: 244214 - DNA, 120 bp, Artificial Sequence
  ENSG00000122008_2 (sequence is synthesized)
taataaagcaggaatggaaggattagataaagagaaaattaacaaaattataatggaagccacgaaggggtccagattttatggaaatgagctcaagaaagaaaagcaagtcaaccaacg

SEQ ID NO: 244215 - DNA, 120 bp, Artificial Sequence
  ENSG00000122008_3 (sequence is synthesized)
aattgaaaatatgatgcaacaaaaagctcaaatcaccagccaacagctaagaaaagcacaattacaggttgacagatttgcaatggaattagaacaaagccgaaatttgagcaataccat

SEQ ID NO: 244216 - DNA, 120 bp, Artificial Sequence
  ENSG00000122008_4 (sequence is synthesized)
agtgcacattgacatggatgctttctatgcagctgtagaaatgagggacaatccagaattgaaggataaacccattgctgtaggatcaatgagtatgctgtctacttcaaattaccatgc

SEQ ID NO: 244217 - DNA, 120 bp, Artificial Sequence
  ENSG00000122008_5 (sequence is synthesized)
aaggagatttggtgttcgtgcagccatgccaggatttattgctaagaggctgtgcccacaacttataatagtgccccccaactttgacaaataccgagctgtgagtaaagaggttaagga

SEQ ID NO: 244218 - DNA, 120 bp, Artificial Sequence
  ENSG00000122008_6 (sequence is synthesized)
aatacttgctgattatgatcccaattttatggccatgagtcttgatgaagcctacttgaatataacaaagcacttagaagaaagacaaaattggcctgaggataaaagaaggtatttcat

SEQ ID NO: 244219 - DNA, 120 bp, Artificial Sequence
  ENSG00000122008_7 (sequence is synthesized)
caaaatgggaagctctgtagaaaatgataatccaggaaaggaagttaataaactgagtgagcatgaacgatccatctctccactactttttgaagagagtccttctgatgtgcagccccc

SEQ ID NO: 244220 - DNA, 120 bp, Artificial Sequence
  ENSG00000122008_8 (sequence is synthesized)
aggagatcctttccaagtgaactttgaagaacaaaacaatcctcaaatactccaaaactcagttgtttttggaacatcagcccaggaagtggtaaaggaaattcgtttcagaattgagca

SEQ ID NO: 244221 - DNA, 120 bp, Artificial Sequence
  ENSG00000122008_9 (sequence is synthesized)
gaaaacaacactgacagccagtgcaggcattgccccaaatacaatgttagcaaaagtatgcagtgataagaataaaccaaatggacaataccaaattcttcccaatagacaagctgtgat

SEQ ID NO: 244222 - DNA, 120 bp, Artificial Sequence
  ENSG00000122008_10 (sequence is synthesized)
ggacttcatcaaggatttacccattagaaaggtttctggaataggaaaagttacagagaaaatgttaaaggcccttggaattattacatgtacagaactttaccaacagagggcattgct

SEQ ID NO: 244223 - DNA, 120 bp, Artificial Sequence
  ENSG00000122008_11 (sequence is synthesized)
ttctctccttttctctgaaacatcttggcattatttccttcatatctccttgggtctaggttcaacacacctgacgagggatggagagaggaaaagtatgagcgttgagaggacattcag

SEQ ID NO: 244224 - DNA, 120 bp, Artificial Sequence
  ENSG00000122008_12 (sequence is synthesized)
tgagataaataaagcggaagagcaatacagcctatgtcaagaactttgcagtgagcttgctcaggatctacagaaagaaagacttaagggtagaactgttaccattaagttgaagaatgt

SEQ ID NO: 244225 - DNA, 120 bp, Artificial Sequence
  ENSG00000122008_13 (sequence is synthesized)
gaattttgaagtaaaaactcgtgcatctacagtttcatctgttgtttctactgcagaagaaatatttgccattgctaaggaattgctaaaaacagaaattgatgctgattttccacatcc

SEQ ID NO: 244226 - DNA, 120 bp, Artificial Sequence
  ENSG00000122008_14 (sequence is synthesized)
cttgagattaaggcttatgggtgttcggatatctagttttcccaatgaagaggacaggaaacaccaacaaaggagcattattggctttttacaggctggaaaccaagccctgtcagccac

SEQ ID NO: 244227 - DNA, 120 bp, Artificial Sequence
  ENSG00000122008_15 (sequence is synthesized)
tgagtgtacattagagaaaactgacaaagataagtttgtaaaacctctagaaatgtctcataagaagagtttctttgataaaaaacgatcagaaaggaaatggagtcaccaagatacatt

SEQ ID NO: 244228 - DNA, 120 bp, Artificial Sequence
  ENSG00000122008_16 (sequence is synthesized)
taaatgtgaagccgtgaataaacaaagtttccagacatcacaaccattccaagttttaaagaagaagatgaatgagaatttggaaatatcagagaattcagatgactgtcagatacttac

SEQ ID NO: 244229 - DNA, 120 bp, Artificial Sequence
  ENSG00000122008_17 (sequence is synthesized)
ctgtcctgtttgctttagggctcaagggtgcatcagtctggaagccttgaataaacatgtagatgaatgtcttgatggaccttcaatcagtgaaaactttaaaatgttctcgtgttcaca

SEQ ID NO: 244230 - DNA, 120 bp, Artificial Sequence
  ENSG00000122008_18 (sequence is synthesized)
tgtttctgctaccaaagttaacaagaaagaaaatgttcctgcttcttcactttgtgagaagcaagattatgaagcccatccaaaaattaaagaaatatcttcagtagattgtatagcttt

SEQ ID NO: 244231 - DNA, 120 bp, Artificial Sequence
  ENSG00000122008_19 (sequence is synthesized)
agtagatactatagataactcatctaaagcagaaagcatagatgctttaagtaataagcatagcaaggaagaatgttctagtctcccaagcaagtcttttaatattgaacactgtcatca

SEQ ID NO: 244232 - DNA, 120 bp, Artificial Sequence
  ENSG00000122008_20 (sequence is synthesized)
gaattcttcttctactgtttcattggaaaacgaagatgttggatcatttagacaagaataccgccagccttacttatgtgaagtgaaaacaggccaagctctagtttgtcctgtttgtaa

SEQ ID NO: 244233 - DNA, 120 bp, Artificial Sequence
  ENSG00000122008_21 (sequence is synthesized)
cgtagaacaaaagacttcagatctaaccctgttcaatgtgcatgtggatgtttgcttaaataaaagttttatccaagaattaagaaaggataaatttaacccagttaatcaacccaaaga

SEQ ID NO: 244234 - DNA, 120 bp, Artificial Sequence
  ENSG00000122008_22 (sequence is synthesized)
aagctccagaagtactggtagctcaagtggagtacagaaggctgtaacaagaacaaaaaggccaggattgatgacaaagtactcaacatcaaagaaaataaaaccaaacaatcccaaaca

SEQ ID NO: 244235 - DNA, 120 bp, Artificial Sequence
  ENSG00000122008_23 (sequence is synthesized)
cccaaacatacccttgatatattttttaagtaaacattgaacattttatcattaatttttaattgaaactagttattttataatcaatgaatttgttctttctgattttaagtttgcaga

SEQ ID NO: 244236 - DNA, 120 bp, Artificial Sequence
  ENSG00000122008_24 (sequence is synthesized)
tgatgtttgcttttctaagatacatatactgattctgtgtatcttttttataaccatgagaattttacttccattatacatcaattggaaatcaatcctgttaagagataattcttaaaa

SEQ ID NO: 244237 - DNA, 120 bp, Artificial Sequence
  ENSG00000122008_25 (sequence is synthesized)
gggaaattaggaatgggataagaaggtgatttttttattatttttatactgaatataaaaacatttgtaagggctctcaaagattcacacatgcctatattatcataagaatttttcagc

SEQ ID NO: 244238 - DNA, 120 bp, Artificial Sequence
  ENSG00000122008_26 (sequence is synthesized)
acttaactactttgttggcattgatcctagtgtctttaaatacttcatgagcattcataattaaaatttatcttaagttctatgaagagtattaatgtaactagcataagtggttttctt

SEQ ID NO: 244239 - DNA, 120 bp, Artificial Sequence
  ENSG00000122008_27 (sequence is synthesized)
caggaaaataaatatcacagtattatctgtgttaaaatggtttttgcctaaaatataatttttaatttggcttttcttatttaaaattccattatcttatgaataagcacttgaatcagt

SEQ ID NO: 244240 - DNA, 120 bp, Artificial Sequence
  ENSG00000122008_28 (sequence is synthesized)
ttttaaaatatttagtctaagatgattcaaagtagttttattttaatacaggacttttaaatggcagtatttcatttcttgtcaattatgttggtactttccacaaatctataaagaagg

SEQ ID NO: 244241 - DNA, 120 bp, Artificial Sequence
  ENSG00000122008_29 (sequence is synthesized)
aaggataaattgtaccatcattttattataatcctcaagagaaaatgtgtaattcaaaagattaatgtgtattaaaacacattatgtatcttagttacatttctatcagtacttttatta

SEQ ID NO: 244242 - DNA, 120 bp, Artificial Sequence
  ENSG00000122008_30 (sequence is synthesized)
ttgtgaaagaagacagcttaatagtagttagcttaagtagtttctccaagtacttttgtgctatcaatgagttcttctcaaaaaataattagttaggccaggcacaatggctcacacctg

SEQ ID NO: 244243 - DNA, 65 bp, Artificial Sequence
  ENSG00000122008_31 (sequence is synthesized)
aaaaataattagttaggccaggcacaatggctcacacctgtaatgccagccctttgggaggccgg

SEQ ID NO: 244244 - DNA, 120 bp, Artificial Sequence
  ENSG00000122008_32 (sequence is synthesized)
acacgcctgtaatcccagctactcagatggctgaggcaggagaactacttgaacctgggaggtcaaagctgcagtcagccaagatcttgccactgtactccagcctgaagagcgagactc

SEQ ID NO: 244245 - DNA, 120 bp, Artificial Sequence
  ENSG00000122008_33 (sequence is synthesized)
ctgaagagcgagactctgtctcaataatataataatagttattatttaattgcaacatgaagttggaagccattttctgttacttctttaaggagctaaatcttttatatttttgttttc

SEQ ID NO: 244246 - DNA, 120 bp, Artificial Sequence
  ENSG00000122008_34 (sequence is synthesized)
tctccccttgcgtttcatattttagcttatgatctaaatatatattttgtatattataatattttaggaatagcttaattaagaactcacagactttgacaaagtggtaactagactttt

SEQ ID NO: 244247 - DNA, 120 bp, Artificial Sequence
  ENSG00000122008_35 (sequence is synthesized)
aattactagattcttcaaattaggcttaatgcctgctagcatgccaatccaatcccatgactgatgttattatacactatggcaaatacaaagttgtagtattatggttcttgatggtgt

SEQ ID NO: 244248 - DNA, 120 bp, Artificial Sequence
  ENSG00000122008_36 (sequence is synthesized)
gatttacttatgtaaattatgtacaaatttaagttcaatgaaacactgatttaatgtactgaaaggtaaatagtaccatagtgaattattttctgtcttgccttaggtttatttttatta

SEQ ID NO: 244249 - DNA, 120 bp, Artificial Sequence
  ENSG00000122008_37 (sequence is synthesized)
tcatttaaggatttatgtagttgaatattatcatttagtaatatttaatcatttgaaataaaatttaaagctttaattgatctaatagagatggttttctacttttccactcttcctccc

SEQ ID NO: 244250 - DNA, 120 bp, Artificial Sequence
  ENSG00000122008_38 (sequence is synthesized)
agatggttttctacttttccactcttcctccctcttatgccttcacttttgttttctgtgcccagaattttcttcacattctttactacctgttttgtctattatatccaacccattttc

SEQ ID NO: 244251 - DNA, 120 bp, Artificial Sequence
  ENSG00000122008_39 (sequence is synthesized)
tttttattataattttgatttggggcatttgaagaaaatacagcaaaactacaagaactggtaataagcatgcataatctcacctacttagtgaacctaatataaacctaatataaagaa

SEQ ID NO: 244252 - DNA, 120 bp, Artificial Sequence
  ENSG00000122008_40 (sequence is synthesized)
ccaccgtatttgcaatatatataactggtgaaaaactagtgtccagaatatataaatgatccctatgaatcagtaagaaaaagacagtcaatagaaatttggacaaaagactttatatgg

SEQ ID NO: 244253 - DNA, 120 bp, Artificial Sequence
  ENSG00000122008_41 (sequence is synthesized)
catttcaagtgaaaggaaatccagatgaccaagaaacatgaaaatattcccagccatattaatatttgagaagtaaaaaataaaactacaaggaggtattacatctttaccttatttgca

SEQ ID NO: 244254 - DNA, 120 bp, Artificial Sequence
  ENSG00000122008_42 (sequence is synthesized)
aaaatgaaatgatctaatgatactaagttttggtgatgatgtcagctcttacattgaaaacaatcactgtggaaaaatttgtccctcagtaaatttaaagataaacatgctcaaaaccta

SEQ ID NO: 244255 - DNA, 120 bp, Artificial Sequence
  ENSG00000122008_43 (sequence is synthesized)
gcaattgcactctgaagtatacatctttgcaggttatctttcattacagttatttttttccctgtcaggaccctaactaatacaatgccttgggaaaactaatgaacatgtatcctagga

SEQ ID NO: 244256 - DNA, 120 bp, Artificial Sequence
  ENSG00000122008_44 (sequence is synthesized)
agcatgtacaagaaagttcttcccagtcaggaaggtggccaagaaaaaaattttttaatgttcatagcagcactgcaatatccaaaagttagaaatgaaccaaatattcagcaatggtag

SEQ ID NO: 244257 - DNA, 120 bp, Artificial Sequence
  ENSG00000122008_45 (sequence is synthesized)
aatggttaaattgtaccatggcatttatattgaaacagtagaattctacacagtggtgaaaatgaaggaaatagctaaccacaacatagatgaatatcacagacatagcatagagcaaaa

SEQ ID NO: 244258 - DNA, 120 bp, Artificial Sequence
  ENSG00000122008_46 (sequence is synthesized)
gaagcaaatcacagaaggatgccatcaacatgattccatttgtataaagtttaaaacagtataaactgaacaactatattgttttaagggtatatagttatatatatgagatacaactgt

SEQ ID NO: 244259 - DNA, 120 bp, Artificial Sequence
  ENSG00000122008_47 (sequence is synthesized)
aaagaaaagcaagtgttttgctgtccccagaaccagaataatgatttcctctgtggagaagtacagcagtgtgattggggagtggcacctggtgcttctgggatgctggcaatgttctat

SEQ ID NO: 244260 - DNA, 120 bp, Artificial Sequence
  ENSG00000122008_48 (sequence is synthesized)
ttcttgtcttgggtggtgattgcatggatgttcacttttaaaatactctttatacatatatattttatatattcttgttcatatataacctttataataaagagaaaaaaatggcaaaaa

SEQ ID NO: 244261 - DNA, 120 bp, Artificial Sequence
  ENSG00000122008_49 (sequence is synthesized)
aggagctgagtgatctaatcaaacaaattccttcagagaacatctgtgaaggcacagtggtaaattaactataactgcataactagaaagcctctttaacttattttttggtagtgctga

SEQ ID NO: 244262 - DNA, 120 bp, Artificial Sequence
  ENSG00000122008_50 (sequence is synthesized)
agtactaaggaagtttaatcaataagttttaactttttaaatttgtatacaactttttaattatttcatattattcattatggaatttcttgactttctttcctctaaaggtagctcaag

SEQ ID NO: 244263 - DNA, 120 bp, Artificial Sequence
  ENSG00000122008_51 (sequence is synthesized)
cttgactttctttcctctaaaggtagctcaagtggagtacagaaggctgtaacaagaacaaaaaggccaggattgatgacaaagtactcaacatcaaagaaaataaaaccaaacaatccc

SEQ ID NO: 244264 - DNA, 120 bp, Artificial Sequence
  ENSG00000122008_52 (sequence is synthesized)
ccaagaattaagaaaggataaatttaacccagttaatcaacccaaagaaagctccagaagtactggtagctcaagtggagtacagaaggctgtaacaagaacaaaaaggtatggctaatt

SEQ ID NO: 244265 - DNA, 120 bp, Artificial Sequence
  ENSG00000122008_53 (sequence is synthesized)
cttttcattctaggccaggattgatgacaaagtactcaacatcaaagaaaataaaaccaaacaatcccaaacatacccttgatatattttttaagtaaacattgaacattttatcattaa

SEQ ID NO: 244266 - DNA, 120 bp, Artificial Sequence
  ENSG00000122008_54 (sequence is synthesized)
gcaattctacagaggaacatttacattatgctacagtatcttcagttgtaccttcctgttcagcataaacatcatatgccaaagaggttgacagatttgcaatggaattagaacaaagcc

SEQ ID NO: 244267 - DNA, 120 bp, Artificial Sequence
  ENSG00000122008_55 (sequence is synthesized)
tctgggaagggcgttggtccgtcgctcgcgcagcctcctgggagttgtagtcgcgatcctgaggtaacgggggtccagattttatggaaatgagctcaagaaagaaaagcaagtcaacca

SEQ ID NO: 244268 - DNA, 120 bp, Artificial Sequence
  ENSG00000122008_56 (sequence is synthesized)
tattgatggccactgtagttataattttcagactggctaatttaagtgtaatattagtagtttctcattataaagtatatagtaacattttacttacttagtctttcattcaacttctaa

SEQ ID NO: 244269 - DNA, 120 bp, Artificial Sequence
  ENSG00000122008_57 (sequence is synthesized)
ctaacaactttacctattcagaatagctgtgaacctagtaagtaaattggaattaagcagactatgagcctgaaggaaaaaaaagattatacgtttctttctttttttttttttttgaga

SEQ ID NO: 244270 - DNA, 120 bp, Artificial Sequence
  ENSG00000122008_58 (sequence is synthesized)
tagcacaaaatatatttttattggttttgcatgtaataacttgagtattagtttttccttgggagacttcaatcctgtccaagattacattgcaggagagaacccagacggccacaaggt

SEQ ID NO: 244271 - DNA, 120 bp, Artificial Sequence
  ENSG00000122008_59 (sequence is synthesized)
aagagacaaaagaaatactaactagcaacatagcaatccagaacaatctggtaaaaggaaaaacaaatttacatatgttgataacccatgaggccatcactgtctcttaacataataact

SEQ ID NO: 244272 - DNA, 120 bp, Artificial Sequence
  ENSG00000122008_60 (sequence is synthesized)
gttattcatcatgaggaccctgaactatcttgtaaaagccatattgtgattaggtaaatcttttctttctacaccaaagcatgagaatgaataatgcattttaggaagatctatataaca

SEQ ID NO: 244273 - DNA, 120 bp, Artificial Sequence
  ENSG00000122008_61 (sequence is synthesized)
attaaaatgaactgtttaatgaatatatttgaatatagctatttcaaattatcttaattaggactcctagaaattgtgaaacatctttttgaaaaatagtaatttgttttgtgaataaca

SEQ ID NO: 244274 - DNA, 120 bp, Artificial Sequence
  ENSG00000122008_62 (sequence is synthesized)
taaaaaggatacaccatctaattatcattattttaaatatactgtaaccagaatctttgattttttgctttatgtggataatctacgcaaaagacattttcaaagagtaaacatccaccc

SEQ ID NO: 244275 - DNA, 120 bp, Artificial Sequence
  ENSG00000122008_63 (sequence is synthesized)
aaaagacattttcaaagagtaaacatccaccctaaattatattctgtatcttttcttagagatagatatagaaccactataaaaacaatctgggctgggcatgatggctcacgcctgtaa

SEQ ID NO: 244276 - DNA, 120 bp, Artificial Sequence
  ENSG00000122008_64 (sequence is synthesized)
gacgtgagagagctttccgctgaagatgacgggcctgctttccagggcggcttgtcgaaagcccgggagcatctggccgcttccgcctcaaccatgggctggggttttgtgagctactag

SEQ ID NO: 244277 - DNA, 120 bp, Artificial Sequence
  ENSG00000122008_65 (sequence is synthesized)
aagggttttctttccaccagaccaccgctgtaaatctcgagggtcttactcattagaagttagaattcacatttgacgtttaaaggaagaatttccttagtaccttctcacaagcacgca

SEQ ID NO: 244278 - DNA, 120 bp, Artificial Sequence
  ENSG00000122008_66 (sequence is synthesized)
cttcgcatttttagatttctagagtttgctttgtagaaagtaattttgaggttgtcagagaataaatgacgttagaaaggtttttaaagtaaaacaagaatgtgagatgatagcctggga

SEQ ID NO: 244279 - DNA, 120 bp, Artificial Sequence
  ENSG00000122008_67 (sequence is synthesized)
ttttctcttggttgtaaatgaatatcttactgagaaccacgttaaccatgcctgcccctcaaagataggaaaggttggatatatagaaactttctcgtattagaaataccgaagtgcagt

SEQ ID NO: 244280 - DNA, 120 bp, Artificial Sequence
  ENSG00000122008_68 (sequence is synthesized)
ggttttgtgtgtacaagggattaggcaataggaggctatttttgttttaagactagggttgaattagcagaaagaccaatagaagatctaacaactcttgtcagttgtcaaggataactt

SEQ ID NO: 244281 - DNA, 120 bp, Artificial Sequence
  ENSG00000122008_69 (sequence is synthesized)
tgattatgagactttgactttgtagcttcagtaatttcctctcgttagctattttaatatagtcgatttccttgtaattgccaagagtaaaatttgttattaaaccttagaaagagtact

SEQ ID NO: 244282 - DNA, 120 bp, Artificial Sequence
  ENSG00000122008_70 (sequence is synthesized)
aggccgaggtgggtggatcacctgaggccgggagtttgagaccagcctgggcaacaagatttttcttcatccctttactttgagtctgtggatgtcattgcatgtgatatgggtctcctg

SEQ ID NO: 244283 - DNA, 120 bp, Artificial Sequence
  ENSG00000122012_0 (sequence is synthesized)
accactccgcgcgctgcaggcgagagtggcagacggaggcagcccggggaagcgagccggagcggcgcccgcactgaggcggctgcagtgctgacaccactcagggcaagggtgtccgac

SEQ ID NO: 244284 - DNA, 120 bp, Artificial Sequence
  ENSG00000122012_1 (sequence is synthesized)
ggctggagcgttctgttttgaacccaaagtggatgatgctgtcagagctgaaccactgaaaggaggctgtgaaaatttcccatcttctcattggccatcagttgagataagatggaagac

SEQ ID NO: 244285 - DNA, 120 bp, Artificial Sequence
  ENSG00000122012_2 (sequence is synthesized)
tcttacaaggataggacttcactgatgaagggtgccaaggacattgccagagaggtgaagaaacaaacagtaaagaaggtgaatcaagctgtggaccgagcccaggatgaatacacccag

SEQ ID NO: 244286 - DNA, 120 bp, Artificial Sequence
  ENSG00000122012_3 (sequence is synthesized)
aggtcctacagtcggttccaagatgaagaagatgatgatgactactacccggctggagaaacctataatggtgaggccaacgatgacgaaggctcaagtgaagccactgaggggcatgat

SEQ ID NO: 244287 - DNA, 120 bp, Artificial Sequence
  ENSG00000122012_4 (sequence is synthesized)
gaagatgatgagatctatgagggggagtatcagggcatccccagtatgaaccaagcgaaggacagcatcgtgtcagtggggcagcccaagggcgatgagtacaaggaccggcgggagctg

SEQ ID NO: 244288 - DNA, 120 bp, Artificial Sequence
  ENSG00000122012_5 (sequence is synthesized)
gaatcagaaaggagagctgacgaggaagagttagcccagcagtatgagctgataatccaagaatgcggtcatggtcgttttcagtgggcccttttcttcgtcctgggcatggctcttatg

SEQ ID NO: 244289 - DNA, 120 bp, Artificial Sequence
  ENSG00000122012_6 (sequence is synthesized)
gcagacggtgtagaggtgtttgtcgttggcttcgtgttacccagtgctgagacagacctctgcatcccaaattcaggatctggatggctaggcagcatagtgtacctcgggatgatggtg

SEQ ID NO: 244290 - DNA, 120 bp, Artificial Sequence
  ENSG00000122012_7 (sequence is synthesized)
ggggcgttcttctggggaggactggcagacaaagtgggaaggaaacagtctcttctgatttgcatgtctgtcaacggattctttgccttcctttcttcatttgtccaaggttatggcttc

SEQ ID NO: 244291 - DNA, 120 bp, Artificial Sequence
  ENSG00000122012_8 (sequence is synthesized)
tttctcttctgtcgcttactttctggattcgggattggaggagccatacccactgtgttctcgtactttgctgaagtcctggcccgggaaaagcggggcgaacacttgagctggctctgc

SEQ ID NO: 244292 - DNA, 120 bp, Artificial Sequence
  ENSG00000122012_9 (sequence is synthesized)
atgttctggatgatcggtggcatctacgcctctgccatggcctgggccatcatcccgcactacgggtggagcttcagcatgggatcggcctaccagtttcacagttggcgtgtgtttgtc

SEQ ID NO: 244293 - DNA, 120 bp, Artificial Sequence
  ENSG00000122012_10 (sequence is synthesized)
atcgtctgtgcactcccctgtgtctcctccgtggtggccctcacattcatgcctgaaagcccacgattcttgttggaggttggaaaacatgatgaagcttggatgattctgaagttaatt

SEQ ID NO: 244294 - DNA, 120 bp, Artificial Sequence
  ENSG00000122012_11 (sequence is synthesized)
catgacaccaacatgagagcccggggtcagcctgagaaggtcttcacggtaaacaaaataaaaactcctaaacaaatagatgagctgattgaaattgagagtgacacaggaacatggtat

SEQ ID NO: 244295 - DNA, 120 bp, Artificial Sequence
  ENSG00000122012_12 (sequence is synthesized)
aggaggtgttttgttcggatccgcaccgagctgtacggaatttggttgacttttatgagatgtttcaactacccagtcagggataatacaataaagcttacaattgtttggttcaccctg

SEQ ID NO: 244296 - DNA, 120 bp, Artificial Sequence
  ENSG00000122012_13 (sequence is synthesized)
tcctttgggtactatggattatccgtttggttccctgatgtcattaaacctctgcagtccgatgaatatgcattgctaaccagaaatgtggagagagataaatatgcaaatttcactatt

SEQ ID NO: 244297 - DNA, 120 bp, Artificial Sequence
  ENSG00000122012_14 (sequence is synthesized)
aactttacaatggaaaatcagattcatactggaatggaatacgacaatggcagattcataggggtcaagttcaaatctgtaactttcaaagactctgtttttaagtcctgcacctttgag

SEQ ID NO: 244298 - DNA, 120 bp, Artificial Sequence
  ENSG00000122012_15 (sequence is synthesized)
gatgtaacttcagtgaacacctacttcaagaactgcacatttattgacactgtttttgacaacacagattttgagccatataaattcattgacagtgaatttaaaaactgctcgtttttt

SEQ ID NO: 244299 - DNA, 120 bp, Artificial Sequence
  ENSG00000122012_16 (sequence is synthesized)
cacaacaagacgggatgtcagattacctttgatgatgactatagtgcctactggatttattttgtcaactttctggggacattggcagtattgccagggaacattgtgtctgctctgctg

SEQ ID NO: 244300 - DNA, 120 bp, Artificial Sequence
  ENSG00000122012_17 (sequence is synthesized)
atggacagaattgggcgcttaacaatgctaggtggctctatggtgctttcggggatcagctgtttcttcctttggttcggcaccagtgaatccatgatgataggcatgctgtgtctgtac

SEQ ID NO: 244301 - DNA, 120 bp, Artificial Sequence
  ENSG00000122012_18 (sequence is synthesized)
aatggattgaccatctcagcctggaactctcttgacgtggtcactgtggaactgtaccccacagaccggagggcaacaggctttggcttcttaaatgcgctatgcaaggcagcagccgtc

SEQ ID NO: 244302 - DNA, 120 bp, Artificial Sequence
  ENSG00000122012_19 (sequence is synthesized)
ctgggaaacttaatatttggctctctggtcagcatcaccaaatcaatccccatcctgctggcttctactgtgctcgtgtgtggaggactcgttgggctgtgcctgcctgacacacgaacc

SEQ ID NO: 244303 - DNA, 120 bp, Artificial Sequence
  ENSG00000122012_20 (sequence is synthesized)
caggttctgatgtaatgggaaaaaaagccatccttcctgcgtttcttcctcctgccctgggtcaattctccttcctgactcaaggcttcagagttttcctatatagaaaggtgatcaagt

SEQ ID NO: 244304 - DNA, 120 bp, Artificial Sequence
  ENSG00000122012_21 (sequence is synthesized)
atcagaacataaacacgtgctgtgacttaaaatttagaagcatatcatcttgcccctttgtgattttgcacaggttgtttgtttgttttgttttgtttgaatgcattgttatctttccaa

SEQ ID NO: 244305 - DNA, 120 bp, Artificial Sequence
  ENSG00000122012_22 (sequence is synthesized)
actgtgatgctactgcctcccgcaaatcagtggaagcatttctaaaatgccctaggcagccaggcttccctggggttctgctcattgaaagtttagaagctaagaagactgggctggtgt

SEQ ID NO: 244306 - DNA, 120 bp, Artificial Sequence
  ENSG00000122012_23 (sequence is synthesized)
aagaaatagatcctgctcctaatttaacattaacaggaaatataagtcggcacattattgcatttgtgctgagaagagggattctttttttttttttttctaacagagtgatatttcctg

SEQ ID NO: 244307 - DNA, 120 bp, Artificial Sequence
  ENSG00000122012_24 (sequence is synthesized)
tttacttagaaaaggacacccagtaattctcactgttatagcagagcctttcaaagaaaaccatgtggcaccaaacagggctgggtggggctctttggggcaagacaattaaggtgaccg

SEQ ID NO: 244308 - DNA, 120 bp, Artificial Sequence
  ENSG00000122012_25 (sequence is synthesized)
ctgacaagaaaaataaaagctctgcaattagcagcaaaaatctgagtgtgctgcataagcaagatttctgtcagaaagcccaattaaacctctgaaaagtgtgaggaaaaagaactgtaa

SEQ ID NO: 244309 - DNA, 120 bp, Artificial Sequence
  ENSG00000122012_26 (sequence is synthesized)
cagtatctgtgactgtggcatgtggttcagaatgtttgaaaatcagagatccgagagagagcttctgcctccatttaccactcccactccttcagctgcccttggtcttgccagacagca

SEQ ID NO: 244310 - DNA, 120 bp, Artificial Sequence
  ENSG00000122012_27 (sequence is synthesized)
gattcagggaaagaaagctgcttcttaaaaactgtctgcctacctgattctgccacttacccacactgtctctagtctagagattgccagtggatagctaaattgtaaattgcaaattag

SEQ ID NO: 244311 - DNA, 120 bp, Artificial Sequence
  ENSG00000122012_28 (sequence is synthesized)
gaagaaattcacacccagagccatttggaaatacaaaatggtacctctttccagtacctctttgctgtgggactggcccgccaggacccccaccccacctggcccgcagttgacattcag

SEQ ID NO: 244312 - DNA, 120 bp, Artificial Sequence
  ENSG00000122012_29 (sequence is synthesized)
cttcccagctggcatcagcaaagagggtttgtccctctagcttccccagggctggcccactgctcaatgcgctcctggctccctgtaaaatcacagcccgcctgcactcctgagggcccc

SEQ ID NO: 244313 - DNA, 120 bp, Artificial Sequence
  ENSG00000122012_30 (sequence is synthesized)
tctcacagacagaccatctccctgtggttgtttgactgctcattttacctctggaatctgcctgggcttggaagaaagaggtcagccaggacattcccacgggcccgctgtcagctacat

SEQ ID NO: 244314 - DNA, 120 bp, Artificial Sequence
  ENSG00000122012_31 (sequence is synthesized)
gaccttctcgcctctcaggctccccttcccccaggctcgtcctttttacacctcttctttgaaatctgaaccttccttgtagacttgcagccaatgaccagaagccaggaataaatccca

SEQ ID NO: 244315 - DNA, 120 bp, Artificial Sequence
  ENSG00000122012_32 (sequence is synthesized)
tatttaaacaatattccttttttaactgcctcgatagaggtttattcttgttacttattataggcattttcaggcaagccatagcttggggcctccaggaagggaaagcttttgtttcca

SEQ ID NO: 244316 - DNA, 120 bp, Artificial Sequence
  ENSG00000122012_33 (sequence is synthesized)
ctgatcattattttcagagatgtcctaactcccctgaggcccccctgcctccccctccccttcctaatgatccctcgcagagctcagactaagtgaaaagcttctttcattaacataagc

SEQ ID NO: 244317 - DNA, 120 bp, Artificial Sequence
  ENSG00000122012_34 (sequence is synthesized)
cattaatcgacttccccttgaagtaattcaggtctgcagaggggggaagactggtgttgggggcagtgggaagagggtggttccctgggggtctgtgatcagggctagaacatcaggaaa

SEQ ID NO: 244318 - DNA, 120 bp, Artificial Sequence
  ENSG00000122012_35 (sequence is synthesized)
acccgaaccaaaaactgcaaaggtggcaggaagaagaaaaatcactgaaggctagacaagatgcatttgaaagataccaaccgcacagggaaagaaacaactttctctcacttctgcctc

SEQ ID NO: 244319 - DNA, 120 bp, Artificial Sequence
  ENSG00000122012_36 (sequence is synthesized)
ctatcattttattggagaacaaagacagcagtcaaacaacccaagaaagtaccctgtatgtttttcttcttccacatgtacccattttcccacctatctctccctgatttgtcttcttta

SEQ ID NO: 244320 - DNA, 120 bp, Artificial Sequence
  ENSG00000122012_37 (sequence is synthesized)
aaaagacatttggggacctgagcaggtcttttagttgaatgcagcatgtgcagaaataactgcaaaagccaggagtgcatctccatcaacccatcaaaagaaaaatagaaatgtacatgg

SEQ ID NO: 244321 - DNA, 120 bp, Artificial Sequence
  ENSG00000122012_38 (sequence is synthesized)
gcatcgctgtctctagtcctctgtgatagttcactttgctaactagactacctttacttttcaaaatatctctaatgtctgctctggggtctaaatgcataaaacatctcccaagctgca

SEQ ID NO: 244322 - DNA, 120 bp, Artificial Sequence
  ENSG00000122012_39 (sequence is synthesized)
gagcacagttattcagaattttatttgaacactgggttgggtcagcataggataaaccagcaaaaccttacttcatgagacctgccatccgtgtcccctgcagaaggaccgttcttggcc

SEQ ID NO: 244323 - DNA, 120 bp, Artificial Sequence
  ENSG00000122012_40 (sequence is synthesized)
tacttgttacctaatccaagcatccttggtggcctaagagggatcttttctcatctcctggacagtctgtggtcacaaaccttcttggtcaccacctctcccaccttttgtgcactcttc

SEQ ID NO: 244324 - DNA, 120 bp, Artificial Sequence
  ENSG00000122012_41 (sequence is synthesized)
cctgcctccttgagactgttcatcaccttgattttctaagagagctcaaatcatttccaaagcatgtggtgtggcctgtatagcttgctccagatttagctggagattaagaaacagcca

SEQ ID NO: 244325 - DNA, 120 bp, Artificial Sequence
  ENSG00000122012_42 (sequence is synthesized)
ggatattaaacagaaactctcagttgtatcagtgtagcaggccactggcacctaaacacgcaactggcatctcatttcgcctacagtagaaggaaaatgaaaatttgtacaaaaatgaaa

SEQ ID NO: 244326 - DNA, 120 bp, Artificial Sequence
  ENSG00000122012_43 (sequence is synthesized)
acctaggaaatagtccacttgctcctatatttttaccaccttttctaactaaaatttccctgttgctctttggaatcaatccagaatgctcccaagtcccattattatcacagaatcttc

SEQ ID NO: 244327 - DNA, 120 bp, Artificial Sequence
  ENSG00000122012_44 (sequence is synthesized)
tcagtagggaaaaacaaacaactgcttcaaactgtgaattctgtatgtaccacattctatcccaggtattgggttttaaggcacccaactcacattcagtcctgctgcctgaatcatctc

SEQ ID NO: 244328 - DNA, 120 bp, Artificial Sequence
  ENSG00000122012_45 (sequence is synthesized)
cgcgatagatgggtcctagcctgaccttcaccactaagcggtacagggacccagatcttgctgtggagactgtaagtcgttgaacatctctagttctcactttccccgtgcacaaaataa

SEQ ID NO: 244329 - DNA, 120 bp, Artificial Sequence
  ENSG00000122012_46 (sequence is synthesized)
aggattgggactagtctgctctccactctccagcattgtagaagacagtaatgaaaatagcttcatcttatctgccttcttatgctaaactcattttttttttttttaggtggagtttca

SEQ ID NO: 244330 - DNA, 120 bp, Artificial Sequence
  ENSG00000122012_47 (sequence is synthesized)
attacaggcgtgagccactggcggcctcaactcatttttacaagcactaaataggtttagtttataaactgaaaaattaggaaataggcacgcataaaaagagtgtaggaagttgtttgg

SEQ ID NO: 244331 - DNA, 120 bp, Artificial Sequence
  ENSG00000122012_48 (sequence is synthesized)
gaagcccgcatggaataggccagaaagcacagtccccatgctgtctgccctgccagcatctcagcatcctgactagtatctctgttcactgcaggtttgacagttaccatcacccagcca

SEQ ID NO: 244332 - DNA, 120 bp, Artificial Sequence
  ENSG00000122012_49 (sequence is synthesized)
gaaaagggccccgccttgccagataaacgcgcttaggttagaagactataattgcaatattaccctacagctctcctgactgtttattccattattttcttgaaacatggccttaagtat

SEQ ID NO: 244333 - DNA, 120 bp, Artificial Sequence
  ENSG00000122012_50 (sequence is synthesized)
tatacataggcttcagaaacagtttttcagtgattttacctatattggcaaatagacaaatctcaccaaatcagagttcaggttttcaccaaaaactgcttagttgtctttcaagatacc

SEQ ID NO: 244334 - DNA, 120 bp, Artificial Sequence
  ENSG00000122012_51 (sequence is synthesized)
ttaagagatcaaaggggaggtgggaaaagaaatgtagtgacagaagggagagtccaagataccactgataaggttccagcaaagagattaggacacagcagagactttctaaatgctggg

SEQ ID NO: 244335 - DNA, 120 bp, Artificial Sequence
  ENSG00000122012_52 (sequence is synthesized)
gtcatttccaaagcagtccaggggaatactttctgattccctctgccaatcaaaatagatagaatatgatattctccaattttttttctgtttgatgtcaaaatggcctttacctatttc

SEQ ID NO: 244336 - DNA, 120 bp, Artificial Sequence
  ENSG00000122012_53 (sequence is synthesized)
ttcagtaatatacctgatctgttcatgcactaaaggctctggagccaggaatgtctgaatttggccttcacctggtatcacagaaagacaactgggatattggtgttaaggggcatatcg

SEQ ID NO: 244337 - DNA, 120 bp, Artificial Sequence
  ENSG00000122012_54 (sequence is synthesized)
gctgtatgttaggttttctttaatcctcacatcgtgccaaacttagtctggttactaagcctaaaaacaccagtattgcaacaacttctgaaactctgaagtggactatatgtttctcac

SEQ ID NO: 244338 - DNA, 120 bp, Artificial Sequence
  ENSG00000122012_55 (sequence is synthesized)
agtttttgtttatgctcagcaaagtatgtattttaagtaaagcttctcttgttatctgtaatgtagacaaaaaaaaaaaaaaacctgttagtatattctggatgtattgtgtgtcccttc

SEQ ID NO: 244339 - DNA, 120 bp, Artificial Sequence
  ENSG00000122012_56 (sequence is synthesized)
attgtttcaggtatggcgtaacagttctccgtgtgatgttcttttgctctaaatgttgaccattcctcttgtcgcccgtctctcaccaaccagtcacagagccattgccagggctccctt

SEQ ID NO: 244340 - DNA, 120 bp, Artificial Sequence
  ENSG00000122012_57 (sequence is synthesized)
cagtctttcttaaacaatatctaaatgcagtttagtaatcccaggattttgagttacaagaatacagtttatgggtctgtttcagctcttacttaaggctagcatggttgggcaggggaa

SEQ ID NO: 244341 - DNA, 120 bp, Artificial Sequence
  ENSG00000122012_58 (sequence is synthesized)
gagctgagccgagccttcactgatctcttgtcatttcatatgattatccagtaaatacttattgagcacctcccatgtgatacgtattgagacactgctgtgtgcaataattaagcctat

SEQ ID NO: 244342 - DNA, 120 bp, Artificial Sequence
  ENSG00000122012_59 (sequence is synthesized)
ggaggacttaaatgagggcaaggaaaacagaatgagagaagacactctcacactgacccccattacatgtgaaccctccgcgcccccccccataaatacaaagtgttatttttccacatt

SEQ ID NO: 244343 - DNA, 120 bp, Artificial Sequence
  ENSG00000122012_60 (sequence is synthesized)
taaaacaaataatagccttcagcaggcagtgcaggaactattcagtcattgagataacctttgatgagaggagaaagctccttgattacctggtttttgttggagagactattaactagt

SEQ ID NO: 244344 - DNA, 120 bp, Artificial Sequence
  ENSG00000122012_61 (sequence is synthesized)
acttggaaaatgagaaaaatgaaaccacacataagttgttcccttaaataatctcagcaggatattgcactaagatattattcaaggaaaagaatcaggagcagagatagccccatctct

SEQ ID NO: 244345 - DNA, 120 bp, Artificial Sequence
  ENSG00000122012_62 (sequence is synthesized)
aatcaggagcagagatagccccatctctctagagcattttttttttttttttgggcgggggggcgggggacggagtctcgctctattacttaggccggagtgcagtggtgcaatctcggc

SEQ ID NO: 244346 - DNA, 77 bp, Artificial Sequence
  ENSG00000122012_63 (sequence is synthesized)
aagtcccgctttcttctgaggtgttcttttcatggtgtgaaaccagagacaggagctagggggtctgttccccagcg

SEQ ID NO: 244347 - DNA, 120 bp, Artificial Sequence
  ENSG00000122012_64 (sequence is synthesized)
tgaaaccagagacaggagctagggggtctgttccccagcgaatagtgttggggttttctcttcagagctaagtcagcaaagcctgcagctgctgccactcccctggtctgtgcctcccag

SEQ ID NO: 244348 - DNA, 120 bp, Artificial Sequence
  ENSG00000122012_65 (sequence is synthesized)
ggtgtttcctttctgattttgaagatttgtgggtgagtcaattatctttgcagacatcctaaagcagcttccctcctcgctaccctcagcagataagccatccagaaaacaggttctgac

SEQ ID NO: 244349 - DNA, 120 bp, Artificial Sequence
  ENSG00000122012_66 (sequence is synthesized)
agccagtagcaggggtattttgggtttcagtttaaaactggtgcgtgttgttgcaagtgtcttgaagttgcaaaggatgtttggggttctagggcctgcaggggggcagagcagaaagag

SEQ ID NO: 244350 - DNA, 120 bp, Artificial Sequence
  ENSG00000122012_67 (sequence is synthesized)
ggtagttgtcagtgaccctctaccctcctctgagagccccattgccatttttgcccaccagttctcttcttacctcctcagggcagtgcccactcatttcctttatttcccttttgtttt

SEQ ID NO: 244351 - DNA, 120 bp, Artificial Sequence
  ENSG00000122012_68 (sequence is synthesized)
ttttcttttcctcctctggtcgacaacctcttaattctagcagtgtacaaaagcaaggccaagctttcctggggcacttgggatgaaaggcccatccatgcctgttgtggaggcacagag

SEQ ID NO: 244352 - DNA, 120 bp, Artificial Sequence
  ENSG00000122012_69 (sequence is synthesized)
gaggagaaggtgaagaacaggaatgggtgcagggggagtgtgaacgcaaggctgctggctttggcacagctccctgtgcagggctggatttccaattgcttttcagtgcctgtgccctga

SEQ ID NO: 244353 - DNA, 120 bp, Artificial Sequence
  ENSG00000122012_70 (sequence is synthesized)
taggatgggcacagctggtatggaatcagagcagcccatctccagagcagaagtctgagagctcagcgtttgactcctgaaagaccaggatgttcctacctgggttcttgagattcattg

SEQ ID NO: 244354 - DNA, 120 bp, Artificial Sequence
  ENSG00000122012_71 (sequence is synthesized)
gctagtggaggtagatggtactctccatgtctgcagaagattccccacttggtgctgaaggctaggtgccttccagtcaggtctgaatgctgaaattgctgagattgtccactctctgcc

SEQ ID NO: 244355 - DNA, 120 bp, Artificial Sequence
  ENSG00000122012_72 (sequence is synthesized)
tactttattgcattcatgctccccttagatccaagagtgcccaggactaggagcagaaagcagttttcaaccctttgttcagactcagacgggtttcaactcaagcgggtaatctacccc

SEQ ID NO: 244356 - DNA, 120 bp, Artificial Sequence
  ENSG00000122012_73 (sequence is synthesized)
agcagcaggggtgcaaagtccaaaacagctttgtggtgcctggggagtgactaggcagcctgctcacaggggctggagtcatctaaagctagtgatgagctggaatagctttgaaccggt

SEQ ID NO: 244357 - DNA, 120 bp, Artificial Sequence
  ENSG00000122012_74 (sequence is synthesized)
tcatccgaactgattgttaaactttcagaacttttgagagtcagttgagaaacatagctattactaaaaaattaaataagattagataaattatagctaaaagcaaaggcaacatatagt

SEQ ID NO: 244358 - DNA, 120 bp, Artificial Sequence
  ENSG00000122012_75 (sequence is synthesized)
caaagctcatcactttctacttattttactacattttaccattatctgtgcccatgaggtaatgtatgcctattatgtctgtatggtagaaatactgtatacaggtatactactacacac

SEQ ID NO: 244359 - DNA, 120 bp, Artificial Sequence
  ENSG00000122012_76 (sequence is synthesized)
accttcccaagtgacagtatttttgtagtttgagatcagctatagtggtggtatttataccatggaaagcaacaaagccatggaaagcaacaaagccatgcaaatcagactcctcctaac

SEQ ID NO: 244360 - DNA, 120 bp, Artificial Sequence
  ENSG00000122012_77 (sequence is synthesized)
ccctaagacagttgttaaacatttgccagcataccaccatctaaagccctaaagaatgcttggcctcccactgcatagacacaggccacatcacattgagtatcatggatttatgggtca

SEQ ID NO: 244361 - DNA, 120 bp, Artificial Sequence
  ENSG00000122012_78 (sequence is synthesized)
gcattgcccctaagtccaaggaaggggaaagacttagcaagctcaacctcatgtgattcacaaagggtttctttctgcatttgtattgactcagaataggacccagtacagagaatccac

SEQ ID NO: 244362 - DNA, 120 bp, Artificial Sequence
  ENSG00000122012_79 (sequence is synthesized)
tgttatctatgggtgtcattccttcagaaagaatgtacagtaaaattggctatttcatgctatgcaaacaaaatgaaactagtttgaagttgcaaagtgtctcccctcttgcgcccacgt

SEQ ID NO: 244363 - DNA, 120 bp, Artificial Sequence
  ENSG00000122012_80 (sequence is synthesized)
agtcatccaagaaggaaactcctttcttgccttgatattcaccaggcctacctagatagaacttgacaaattggcctaacttcatctccgctgctattgttatatatttgctttactgaa

SEQ ID NO: 244364 - DNA, 120 bp, Artificial Sequence
  ENSG00000122012_81 (sequence is synthesized)
tctatgtcctatgtcagtcagaagaaaaaagaaatgtcttttttaatatacactttcttagcatccatgcagttatgtatcctcatcctgatccaggaacatattgaacagatcatatgt

SEQ ID NO: 244365 - DNA, 120 bp, Artificial Sequence
  ENSG00000122012_82 (sequence is synthesized)
cttttgttactatctagatacactaaataacatgatagaagagttttctctttcaggtgaacttccattttgaacatatgctaaacgtactatccactgtctattttaatgagatcttgg

SEQ ID NO: 244366 - DNA, 120 bp, Artificial Sequence
  ENSG00000122012_83 (sequence is synthesized)
caatggtcctgtcggttttggtgtttggattgtttggctttgttttccttttttattcttcctgtttttaatgctgtgtaagatctcctgctatgaatgttccagttacccctattgtac

SEQ ID NO: 244367 - DNA, 120 bp, Artificial Sequence
  ENSG00000122012_84 (sequence is synthesized)
tgtatatacgtgtgctgcatgtgtaaattctgtttcaggttttggagttttcatcttaagtacagctggtcctgttgtgaactcatctttcctgtatgctcctctgtgtctgatttccaa

SEQ ID NO: 244368 - DNA, 120 bp, Artificial Sequence
  ENSG00000122012_85 (sequence is synthesized)
ttgccaaaatgtttgaccaaatgtgttttgacaaatatcccgagacagccatgcgtatccttgtgaaagggcatgctccatgtgggatggctcgtgtacagcataaatctatcaaacttg

SEQ ID NO: 244369 - DNA, 120 bp, Artificial Sequence
  ENSG00000122012_86 (sequence is synthesized)
gaattgtgtatacatttatatgccagataactaacattcatgtaacagctgcaaagatatttagtgtatatcagattaataaaagagcattttttttttgctccattatattcaaataca

SEQ ID NO: 244370 - DNA, 120 bp, Artificial Sequence
  ENSG00000122012_87 (sequence is synthesized)
ctttccctgcactgaaacaggcatagttttttgtttgtttgttttagtttgtacatttagtcattttcatgatgaatttcaatacttcttaataggctttaaataaaaggtacaaatgta

SEQ ID NO: 244371 - DNA, 120 bp, Artificial Sequence
  ENSG00000122012_88 (sequence is synthesized)
attgaccatctcagcctggaactctcttgacgtggtcactgtggaactgtaccccacagaccggagacgcagagtcttgccatgttgccccggctgatcttgaactcctggcctcaagca

SEQ ID NO: 244372 - DNA, 120 bp, Artificial Sequence
  ENSG00000122012_89 (sequence is synthesized)
cagtctcgagccactgcacctggctttctttccatttttgaggattaaaattacttgaaattttccaaatatattatacaaggtcttgctaagaacttagtagatttctttattgttgtc

SEQ ID NO: 244373 - DNA, 120 bp, Artificial Sequence
  ENSG00000122012_90 (sequence is synthesized)
ttttttctctctcttttgccttgtagaaatatcccacaaagtgaagtaaccaagtcaacaagtgtgaacaattttatagctctccttaaatttactatacagctctcagaaacaacggag

SEQ ID NO: 244374 - DNA, 120 bp, Artificial Sequence
  ENSG00000122012_91 (sequence is synthesized)
ccagtttatagcaggagccattagtgggtgtggacctcttttctaagatctgcttctaaacttggctttatcacataaagagagaaaagcattacaaacaatttgaaggaattctttgtc

SEQ ID NO: 244375 - DNA, 120 bp, Artificial Sequence
  ENSG00000122012_92 (sequence is synthesized)
ttataaaaaaaattctgaaaacctccttgtattcccactaggaggtatagttaaccttgcaactccacaaacagaccactttacacacttgcccaggggcctttgtttttgcttgcccct

SEQ ID NO: 244376 - DNA, 120 bp, Artificial Sequence
  ENSG00000122012_93 (sequence is synthesized)
cctctgaaatgctctctacaggtgattaagtggcttttccctttacttaggtgtctactcaggtaaaatcttaaccaagacgcctttacttaaaatgtccctctgccccaccctgaggct

SEQ ID NO: 244377 - DNA, 120 bp, Artificial Sequence
  ENSG00000122012_94 (sequence is synthesized)
tttaacttgcatagccctcatcatcacctgacataatatgtacttctttgcttttatagatattatctgtgtccctccactaggatgtccatttcatgggaataaagactttgtctcttt

SEQ ID NO: 244378 - DNA, 120 bp, Artificial Sequence
  ENSG00000122025_0 (sequence is synthesized)
cgctccaggcggcatcgcagggctgggccggcgcggcctggggaccccgggctccggaggccatgccggcgttggcgcgcgacggcggccagctgccgctgctcgttgttttttctgcaa

SEQ ID NO: 244379 - DNA, 120 bp, Artificial Sequence
  ENSG00000122025_1 (sequence is synthesized)
gctcgttgttttttctgcaatgatatttgggactattacaaatcaagatctgcctgtgatcaagtgtgttttaatcaatcataagaacaatgattcatcagtggggaagtcatcatcata

SEQ ID NO: 244380 - DNA, 120 bp, Artificial Sequence
  ENSG00000122025_2 (sequence is synthesized)
tcccatggtatcagaatccccggaagacctcgggtgtgcgttgagaccccagagctcagggacagtgtacgaagctgccgctgtggaagtggatgtatctgcttccatcacactgcaagt

SEQ ID NO: 244381 - DNA, 120 bp, Artificial Sequence
  ENSG00000122025_3 (sequence is synthesized)
gctggtcgacgccccagggaacatttcctgtctctgggtctttaagcacagctccctgaattgccagccacattttgatttacaaaacagaggagttgtttccatggtcattttgaaaat

SEQ ID NO: 244382 - DNA, 120 bp, Artificial Sequence
  ENSG00000122025_4 (sequence is synthesized)
gacagaaacccaagctggagaatacctactttttattcagagtgaagctaccaattacacaatattgtttacagtgagtataagaaataccctgctttacacattaagaagaccttactt

SEQ ID NO: 244383 - DNA, 120 bp, Artificial Sequence
  ENSG00000122025_5 (sequence is synthesized)
tagaaaaatggaaaaccaggacgccctggtctgcatatctgagagcgttccagagccgatcgtggaatgggtgctttgcgattcacagggggaaagctgtaaagaagaaagtccagctgt

SEQ ID NO: 244384 - DNA, 120 bp, Artificial Sequence
  ENSG00000122025_6 (sequence is synthesized)
tgttaaaaaggaggaaaaagtgcttcatgaattatttgggacggacataaggtgctgtgccagaaatgaactgggcagggaatgcaccaggctgttcacaatagatctaaatcaaactcc

SEQ ID NO: 244385 - DNA, 120 bp, Artificial Sequence
  ENSG00000122025_7 (sequence is synthesized)
tcagaccacattgccacaattatttcttaaagtaggggaacccttatggataaggtgcaaagctgttcatgtgaaccatggattcgggctcacctgggaattagaaaacaaagcactcga

SEQ ID NO: 244386 - DNA, 120 bp, Artificial Sequence
  ENSG00000122025_8 (sequence is synthesized)
ggagggcaactactttgagatgagtacctattcaacaaacagaactatgatacggattctgtttgcttttgtatcatcagtggcaagaaacgacaccggatactacacttgttcctcttc

SEQ ID NO: 244387 - DNA, 120 bp, Artificial Sequence
  ENSG00000122025_9 (sequence is synthesized)
aaagcatcccagtcaatcagctttggttaccatcgtagaaaagggatttataaatgctaccaattcaagtgaagattatgaaattgaccaatatgaagagttttgtttttctgtcaggtt

SEQ ID NO: 244388 - DNA, 120 bp, Artificial Sequence
  ENSG00000122025_10 (sequence is synthesized)
taaagcctacccacaaatcagatgtacgtggaccttctctcgaaaatcatttccttgtgagcaaaagggtcttgataacggatacagcatatccaagttttgcaatcataagcaccagcc

SEQ ID NO: 244389 - DNA, 120 bp, Artificial Sequence
  ENSG00000122025_11 (sequence is synthesized)
aggagaatatatattccatgcagaaaatgatgatgcccaatttaccaaaatgttcacgctgaatataagaaggaaacctcaagtgctcgcagaagcatcggcaagtcaggcgtcctgttt

SEQ ID NO: 244390 - DNA, 120 bp, Artificial Sequence
  ENSG00000122025_12 (sequence is synthesized)
ctcggatggatacccattaccatcttggacctggaagaagtgttcagacaagtctcccaactgcacagaagagatcacagaaggagtctggaatagaaaggctaacagaaaagtgtttgg

SEQ ID NO: 244391 - DNA, 120 bp, Artificial Sequence
  ENSG00000122025_13 (sequence is synthesized)
acagtgggtgtcgagcagtactctaaacatgagtgaagccataaaagggttcctggtcaagtgctgtgcatacaattcccttggcacatcttgtgagacgatccttttaaactctccagg

SEQ ID NO: 244392 - DNA, 120 bp, Artificial Sequence
  ENSG00000122025_14 (sequence is synthesized)
ccccttccctttcatccaagacaacatctcattctatgcaacaattggtgtttgtctcctcttcattgtcgttttaaccctgctaatttgtcacaagtacaaaaagcaatttaggtatga

SEQ ID NO: 244393 - DNA, 120 bp, Artificial Sequence
  ENSG00000122025_15 (sequence is synthesized)
aagccagctacagatggtacaggtgaccggctcctcagataatgagtacttctacgttgatttcagagaatatgaatatgatctcaaatgggagtttccaagagaaaatttagagtttgg

SEQ ID NO: 244394 - DNA, 120 bp, Artificial Sequence
  ENSG00000122025_16 (sequence is synthesized)
aggtactaggatcaggtgcttttggaaaagtgatgaacgcaacagcttatggaattagcaaaacaggagtctcaatccaggttgccgtcaaaatgctgaaagaaaaagcagacagctctg

SEQ ID NO: 244395 - DNA, 120 bp, Artificial Sequence
  ENSG00000122025_17 (sequence is synthesized)
aaagagaggcactcatgtcagaactcaagatgatgacccagctgggaagccacgagaatattgtgaacctgctgggggcgtgcacactgtcaggaccaatttacttgatttttgaatact

SEQ ID NO: 244396 - DNA, 120 bp, Artificial Sequence
  ENSG00000122025_18 (sequence is synthesized)
gttgctatggtgatcttctcaactatctaagaagtaaaagagaaaaatttcacaggacttggacagagattttcaaggaacacaatttcagtttttaccccactttccaatcacatccaa

SEQ ID NO: 244397 - DNA, 120 bp, Artificial Sequence
  ENSG00000122025_19 (sequence is synthesized)
attccagcatgcctggttcaagagaagttcagatacacccggactcggatcaaatctcagggcttcatgggaattcatttcactctgaagatgaaattgaatatgaaaaccaaaaaaggc

SEQ ID NO: 244398 - DNA, 120 bp, Artificial Sequence
  ENSG00000122025_20 (sequence is synthesized)
tggaagaagaggaggacttgaatgtgcttacatttgaagatcttctttgctttgcatatcaagttgccaaaggaatggaatttctggaatttaagtcgtgtgttcacagagacctggccg

SEQ ID NO: 244399 - DNA, 120 bp, Artificial Sequence
  ENSG00000122025_21 (sequence is synthesized)
ccaggaacgtgcttgtcacccacgggaaagtggtgaagatatgtgactttggattggctcgagatatcatgagtgattccaactatgttgtcaggggcaatgcccgtctgcctgtaaaat

SEQ ID NO: 244400 - DNA, 120 bp, Artificial Sequence
  ENSG00000122025_22 (sequence is synthesized)
ggatggcccccgaaagcctgtttgaaggcatctacaccattaagagtgatgtctggtcatatggaatattactgtgggaaatcttctcacttggtgtgaatccttaccctggcattccgg

SEQ ID NO: 244401 - DNA, 120 bp, Artificial Sequence
  ENSG00000122025_23 (sequence is synthesized)
ttgatgctaacttctacaaactgattcaaaatggatttaaaatggatcagccattttatgctacagaagaaatatacattataatgcaatcctgctgggcttttgactcaaggaaacggc

SEQ ID NO: 244402 - DNA, 120 bp, Artificial Sequence
  ENSG00000122025_24 (sequence is synthesized)
catccttccctaatttgacttcgtttttaggatgtcagctggcagatgcagaagaagcgatgtatcagaatgtggatggccgtgtttcggaatgtcctcacacctaccaaaacaggcgac

SEQ ID NO: 244403 - DNA, 120 bp, Artificial Sequence
  ENSG00000122025_25 (sequence is synthesized)
ctttcagcagagagatggatttggggctactctctccgcaggctcaggtcgaagattcgtagaggaacaatttagttttaaggacttcatccctccacctatccctaacaggctgtagat

SEQ ID NO: 244404 - DNA, 120 bp, Artificial Sequence
  ENSG00000122025_26 (sequence is synthesized)
taccaaaacaagattaatttcatcactaaaagaaaatctattatcaactgctgcttcaccagacttttctctagaagctgtctgcgtttactcttgttttcaaagggacttttgtaaaat

SEQ ID NO: 244405 - DNA, 120 bp, Artificial Sequence
  ENSG00000122025_27 (sequence is synthesized)
caaatcatcctgtcacaaggcaggaggagctgataatgaactttattggagcattgatctgcatccaaggccttctcaggctggcttgagtgaattgtgtacctgaagtacagtatattc

SEQ ID NO: 244406 - DNA, 120 bp, Artificial Sequence
  ENSG00000122025_28 (sequence is synthesized)
ttgtaaatacataaaacaaaagcattttgctaaggagaagctaatatgattttttaagtctatgttttaaaataatatgtaaatttttcagctatttagtgatatattttatgggtggga

SEQ ID NO: 244407 - DNA, 120 bp, Artificial Sequence
  ENSG00000122025_29 (sequence is synthesized)
ataaaatttctactacagaattgcccattattgaattatttacatggtataattagggcaagtcttaactggagttcacgaaccccctgaaattgtgcacccatagccacctacacattc

SEQ ID NO: 244408 - DNA, 120 bp, Artificial Sequence
  ENSG00000122025_30 (sequence is synthesized)
cttccagagcacgtgtgcttttaccccaagatacaaggaatgtgtaggcagctatggttgtcacagcctaagatttctgcaacaacaggggttgtattgggggaagtttataatgaatag

SEQ ID NO: 244409 - DNA, 120 bp, Artificial Sequence
  ENSG00000122025_31 (sequence is synthesized)
gtgttctaccataaagagtaatacatcacctagacactttggcggccttcccagactcagggccagtcagaagtaacatggaggattagtattttcaataaagttactcttgtccccaca

SEQ ID NO: 244410 - DNA, 120 bp, Artificial Sequence
  ENSG00000122025_32 (sequence is synthesized)
gccatccttccctaatttgacttcgtttttaggatgtcagctggcagatgcagaagaagcgaaactgtggaaaatccctgagacaatgaaagcagttaaaattgcactgcagagggaaaa

SEQ ID NO: 244411 - DNA, 75 bp, Artificial Sequence
  ENSG00000122026_0 (sequence is synthesized)
cttccaggtagggcctacgcgtggctcccgggcgctaggtgttcgacagacttgaaccgcgaccttgtggcctca

SEQ ID NO: 244412 - DNA, 120 bp, Artificial Sequence
  ENSG00000122026_1 (sequence is synthesized)
gacgacggcgtcctcttgatcgcccttgaaggcccctttccgggctgtctgacacgatgcaagtgtcagcttgtgttggccggttgcctttctttcgcaagaggggaaaatatcctcaca

SEQ ID NO: 244413 - DNA, 120 bp, Artificial Sequence
  ENSG00000122026_2 (sequence is synthesized)
gactttctgtgttctcagagacgatcttcttccctagaaagaagtcgcttacggttggcgtttccctcaggcagcgccgtgggcagcccacaggcccttgtaaggcgcgcgccgcggccc

SEQ ID NO: 244414 - DNA, 120 bp, Artificial Sequence
  ENSG00000122026_3 (sequence is synthesized)
caggtagggcctacgcgtggctcccgggcgctaggtgttcgacagacttgaaccgcgaccttgtggcctcagaggtcgttcattgggaccgtggggagactctctaacctgtttgaggtc

SEQ ID NO: 244415 - DNA, 120 bp, Artificial Sequence
  ENSG00000122026_4 (sequence is synthesized)
cattggcatgggcgggttaaaccatgttctgccagacggggagcagcgtgcgccgggtcgggtctgggccgtgggctgagaaccggactgcgatgttgcggccctgcggggggacatttg

SEQ ID NO: 244416 - DNA, 120 bp, Artificial Sequence
  ENSG00000122026_5 (sequence is synthesized)
gcgtggctcccgggcgctaggtgttcgacagacttgaaccgcgaccttgtggcctcagaggtcgttcattgggaccgtggggagactctctaacctgtttgagtaattcgccaaaatgac

SEQ ID NO: 244417 - DNA, 70 bp, Artificial Sequence
  ENSG00000122026_6 (sequence is synthesized)
aaataaaggacctctgggctacaaaaatgtttctcttcattgagtagaagtgtggtgtcctctcccccaa

SEQ ID NO: 244418 - DNA, 120 bp, Artificial Sequence
  ENSG00000122026_7 (sequence is synthesized)
ttctcttcattgagtagaagtgtggtgtcctctcccccaaagaaatatttaaagcaaattttggttgtgtcctaattcattatgtaatgtccttgctattcaaatttaatgtatttcttg

SEQ ID NO: 244419 - DNA, 120 bp, Artificial Sequence
  ENSG00000122026_8 (sequence is synthesized)
aaggaacgccttagtgcaaagtttaattattgatgaagattactattactatgattaaaaaccctcctagtgaaagctgtgttcttctgtgacctggatttaaatgtatcttggcactcg

SEQ ID NO: 244420 - DNA, 120 bp, Artificial Sequence
  ENSG00000122026_9 (sequence is synthesized)
agcttaatgatgactgttttttttgattgcttgaagcaatgtgaaaaacacatttcaccggctctgaaagctcttgagttgccatttgaaagaaatcttagaatactttgcagttactta

SEQ ID NO: 244421 - DNA, 120 bp, Artificial Sequence
  ENSG00000122026_10 (sequence is synthesized)
agaaaggtgatattgtagacatcaaggtaaacataaaattgggaaaataacactacagaagatagaaaagttggatttaatctagtgtaggaattcaaatactagtgtatgttgcatctg

SEQ ID NO: 244422 - DNA, 84 bp, Artificial Sequence
  ENSG00000122026_11 (sequence is synthesized)
ctacagaagatagaaaagttggatttaatctagtgtaggaattcaaatactagtgtatgttgcatctgtaagagtatagaatgg

SEQ ID NO: 244423 - DNA, 120 bp, Artificial Sequence
  ENSG00000122026_12 (sequence is synthesized)
aacaaacaagttaagtaagtagtgttgtagttctttgtggctaaccagtattccctcatatacccccttttcactttgccagttggacttatgtctttattggtcattcaagtggggcaa

SEQ ID NO: 244424 - DNA, 120 bp, Artificial Sequence
  ENSG00000122026_13 (sequence is synthesized)
tttgtctgtatcctgtcagaggaaacaaattgaaatagatttactggaaagtcttacacagttagttactaagcggtttgtttgttttgtttcgagacggagtcttgctctgtcgccctg

SEQ ID NO: 244425 - DNA, 68 bp, Artificial Sequence
  ENSG00000122026_14 (sequence is synthesized)
tctgtcgccctggctggagtgcagtggtgggatctctgctcggtagctaggactacaggcgcccacca

SEQ ID NO: 244426 - DNA, 120 bp, Artificial Sequence
  ENSG00000122033_0 (sequence is synthesized)
gcagatccgctgtacttgcgtccgctacagtatgtcaatcgcttgccccagcacagtgggctccgtggcttaagacttgaaccaagtaaacgaagttctcttactgagaagtctcagttt

SEQ ID NO: 244427 - DNA, 120 bp, Artificial Sequence
  ENSG00000122033_1 (sequence is synthesized)
caaaagagcttctcctcatcaactggggatgattacagttcttcctaaaaaagcctacttgatgtgaagacaatgaggatgaagacctttatggtgatccacttccacttaatagatggc

SEQ ID NO: 244428 - DNA, 120 bp, Artificial Sequence
  ENSG00000122033_2 (sequence is synthesized)
tgctctttttctaaagaggttaacactacaaactgtaaagtctgaaaatagttgcattagatgttttggtaaacacatcctgcaaaagacagcaccagcacagttgtcccctattgcttc

SEQ ID NO: 244429 - DNA, 120 bp, Artificial Sequence
  ENSG00000122033_3 (sequence is synthesized)
tgccccaagactctccttcctaattcatgcaaaagcctttagtaccgctgaagacacccagaatgaaggaaaaaagacaaaaaagaataaaacagcttttagtaacgttggaagaaaaat

SEQ ID NO: 244430 - DNA, 120 bp, Artificial Sequence
  ENSG00000122033_4 (sequence is synthesized)
tgatgagaagggcaatgatttgggaaacatgcaccgagcaaatgtgattagacttatggatgagcgagacctgcgactggttcaaaggaacaccagcacagaacctgcagagtatcagct

SEQ ID NO: 244431 - DNA, 120 bp, Artificial Sequence
  ENSG00000122033_5 (sequence is synthesized)
catgacaggattgcagatcctccaggagcggcagaggctgagggagatggagaaggcgaaccccaaaactggaccaaccctgagaaaggaactgattttgtcttcaaatattggacaaca

SEQ ID NO: 244432 - DNA, 120 bp, Artificial Sequence
  ENSG00000122033_6 (sequence is synthesized)
tgatttggacacaaagactaaacagattcagcagtggattaagaaaaaacacctagtccagattaccataaagaaaggaaaaaatgtagacgtgtcagaaaatgaaatggaggagatatt

SEQ ID NO: 244433 - DNA, 120 bp, Artificial Sequence
  ENSG00000122033_7 (sequence is synthesized)
tcatcaaatactccagactatgcctggaatagctacattctcatctaggccacaagctgttcaaggaggaaaagctttaatgtgtgttcttcgtgctttcagcaaaaatgaggagaaggc

SEQ ID NO: 244434 - DNA, 120 bp, Artificial Sequence
  ENSG00000122033_8 (sequence is synthesized)
atataaagaaactcaagagacccaggaaagagacactttgaacaaagaccatggaaatgataaggaatcaaatgttctgcatcagtaattttaataaagaaaagcatgctctgagagaaa

SEQ ID NO: 244435 - DNA, 120 bp, Artificial Sequence
  ENSG00000122033_9 (sequence is synthesized)
gcagtacgtcgctacgtcccgtctctagccctggcgctccgccggtcccgttctgcagctgtcattcttctctacagaagagcttctcctcatcaactggggatgattacagttcttcct

SEQ ID NO: 244436 - DNA, 120 bp, Artificial Sequence
  ENSG00000122033_10 (sequence is synthesized)
aagatgacactcgcttttggagttggcactacaagatgcatgagaaatacagttgatcctagaacaacacaggtttgaactgcatggggtccacatatatgtggattttcctccaccttt

SEQ ID NO: 244437 - DNA, 120 bp, Artificial Sequence
  ENSG00000122033_11 (sequence is synthesized)
ccgccgacttaccaacaaccgggtcgggggctcccggaagtgctcttgcggcttactgcctggcacagaagagcttctcctcatcaactggggatgattacagttcttcctaaaaaagga

SEQ ID NO: 244438 - DNA, 120 bp, Artificial Sequence
  ENSG00000122033_12 (sequence is synthesized)
aggtgggcgtcgccgccgacttaccaacaaccgggtcgggggctcccggaagtgctcttgcggcttactgcctggcacagtgggctccgtggcttaagacttgaaccaagtaaacgaagt

SEQ ID NO: 244439 - DNA, 120 bp, Artificial Sequence
  ENSG00000122033_13 (sequence is synthesized)
gctccgccggtcccgttctgcaggtgggcgtcgccgccgacttaccaacaaccgggtcgggggctcccggaagtgctcttgcggcttactgcctggcacagctgtcattcttctctacag

SEQ ID NO: 244440 - DNA, 120 bp, Artificial Sequence
  ENSG00000122033_14 (sequence is synthesized)
acggagagcgaaggggactcgccgcagatccgctgtacttgcgtccgctacagtatgtcaatcgcttgccccagcacagaagagcttctcctcatcaactggggatgattacagttcttc

SEQ ID NO: 244441 - DNA, 120 bp, Artificial Sequence
  ENSG00000122033_15 (sequence is synthesized)
aagggcgcctgcgcaggacatgctggacaaatgcgttgttcttgctgcctgctgttgcgggaggaggccttatgggggaaggtcgcgaagtgactgggattttttttctcatttgtcatt

SEQ ID NO: 244442 - DNA, 80 bp, Artificial Sequence
  ENSG00000122034_0 (sequence is synthesized)
aagtgtgccggcgtcgcgcgaaggttcagcagggagccgtgggccgggcgcgccggttcccggcacgtgtctcggcacgt

SEQ ID NO: 244443 - DNA, 120 bp, Artificial Sequence
  ENSG00000122034_1 (sequence is synthesized)
tggatccgccggccgtggtcgccgagtcggtgtcgtccttgaccatcgccgacgcgttcattgcagccggcgagagctcagctccgaccccgccgcgccccgcgcttcccaggaggttca

SEQ ID NO: 244444 - DNA, 120 bp, Artificial Sequence
  ENSG00000122034_2 (sequence is synthesized)
tctgctccttccctgactgcagcgccaattacagcaaagcctggaagcttgacgcgcacctgtgcaagcacacgggggagagaccatttgtttgtgactatgaagggtgtggcaaggcct

SEQ ID NO: 244445 - DNA, 120 bp, Artificial Sequence
  ENSG00000122034_3 (sequence is synthesized)
tcatcagggactaccatctgagccgccacattctgactcacacaggagaaaagccgtttgtttgtgcagccaatggctgtgatcaaaaattcaacacaaaatcaaacttgaagaaacatt

SEQ ID NO: 244446 - DNA, 120 bp, Artificial Sequence
  ENSG00000122034_4 (sequence is synthesized)
ttgaacgcaaacatgaaaatcaacaaaaacaatatatatgcagttttgaagactgtaagaagacctttaagaaacatcagcagctgaaaatccatcagtgccagcataccaatgaacctc

SEQ ID NO: 244447 - DNA, 120 bp, Artificial Sequence
  ENSG00000122034_5 (sequence is synthesized)
tattcaagtgtacccaggaaggatgtgggaaacactttgcatcacccagcaagctgaaacgacatgccaaggcccacgagggctatgtatgtcaaaaaggatgttcctttgtggcaaaaa

SEQ ID NO: 244448 - DNA, 120 bp, Artificial Sequence
  ENSG00000122034_6 (sequence is synthesized)
ggacggaacttctgaaacatgtgagagaaacccataaagaggaaatactatgtgaagtatgccggaaaacatttaaacgcaaagattaccttaagcaacacatgaaaactcatgccccag

SEQ ID NO: 244449 - DNA, 120 bp, Artificial Sequence
  ENSG00000122034_7 (sequence is synthesized)
aaagggatgtatgtcgctgtccaagagaaggctgtggaagaacctatacaactgtgtttaatctccaaagccatatcctctccttccatgaggaaagccgcccttttgtgtgtgaacatg

SEQ ID NO: 244450 - DNA, 120 bp, Artificial Sequence
  ENSG00000122034_8 (sequence is synthesized)
ctggctgtggcaaaacatttgcaatgaaacaaagtctcactaggcatgctgttgtacatgatcctgacaagaagaaaatgaagctcaaagtcaaaaaatctcgtgaaaaacggagtttgg

SEQ ID NO: 244451 - DNA, 120 bp, Artificial Sequence
  ENSG00000122034_9 (sequence is synthesized)
cctctcatctcagtggatatatccctcccaaaaggaaacaagggcaaggcttatctttgtgtcaaaacggagagtcacccaactgtgtggaagacaagatgctctcgacagttgcagtac

SEQ ID NO: 244452 - DNA, 120 bp, Artificial Sequence
  ENSG00000122034_10 (sequence is synthesized)
ttacccttggctaagaactgcactgctttgtttaaaggactgcagaccaaggagcgagctttctctcagagcatgcttttctttattaaaattactgatgcagaacatttgattccttat

SEQ ID NO: 244453 - DNA, 120 bp, Artificial Sequence
  ENSG00000122034_11 (sequence is synthesized)
catttccatggtctttgttcaaagtgtctctttcctgggtctcttgagtttctttatatgccttctcctcatttttgctgaaagcacgaagaacacacattaaagcttttcctccttgaa

SEQ ID NO: 244454 - DNA, 120 bp, Artificial Sequence
  ENSG00000122034_12 (sequence is synthesized)
acctgtgcaagcacacgggggaggtgaggggggcgaggctgccaaccctgggcctagggatggcgcgtggccccggggtagccactgcagtcgtggccagggccgcaggccccgctgtgc

SEQ ID NO: 244455 - DNA, 120 bp, Artificial Sequence
  ENSG00000122034_13 (sequence is synthesized)
aaaactggggttgtttccttgggaatttctgatttgtatatagtgatcaggtttcaggcactgaatgttacttatatattaggtattaattttttctaaatggtaatatctggggaaatt

SEQ ID NO: 244456 - DNA, 120 bp, Artificial Sequence
  ENSG00000122034_14 (sequence is synthesized)
agccgaccacaggataggtgggaatgacatgcagtgttgtggtcaggaaaggcctctctgtgtgagccgtgtaagaaggaaggatctagccatgcagacatttgtgctaggtagagagaa

SEQ ID NO: 244457 - DNA, 120 bp, Artificial Sequence
  ENSG00000122034_15 (sequence is synthesized)
cacaaagggagcctgtgacccttggggtgggaggcaggtgggtgtgtttgggtgcggagatcaccatatgaggtctgagaagtaggcccattaggagtttggattttattttgagggcag

SEQ ID NO: 244458 - DNA, 120 bp, Artificial Sequence
  ENSG00000122034_16 (sequence is synthesized)
gagaatgtcagataccatgatatgacgtggcagcccatgtcacacacaagtgaggaaaacgagggtcatggaggtcaaggaatctgcccagcttcccagtttttggcagagctaggcttc

SEQ ID NO: 244459 - DNA, 120 bp, Artificial Sequence
  ENSG00000122034_17 (sequence is synthesized)
acactgcctcagcttaaagcccttaatttcttaaaccactgggctgcagtccatacctttgccccttgcacctcctctaatttatgggccaccttctccaggtgtcctccggggcctcat

SEQ ID NO: 244460 - DNA, 120 bp, Artificial Sequence
  ENSG00000122034_18 (sequence is synthesized)
tccttaacctctccagcactggaaggccgaccgcttcttccttgagaccttctctggttcttttcctcttcctcgtctgcccttttcgttggatcctcttctgccctctgcatgttccac

SEQ ID NO: 244461 - DNA, 120 bp, Artificial Sequence
  ENSG00000122034_19 (sequence is synthesized)
cccgcccagctccctcttgcggtcttacatagccaccggcatgactcataacatcctttatgctttgcccctctgcccttcctcttgcccgttctagcctctaaattctgggctctgtat

SEQ ID NO: 244462 - DNA, 120 bp, Artificial Sequence
  ENSG00000122034_20 (sequence is synthesized)
taccagtagatccacgtaagagcttgcctttccttttagaccggtgtgctgtattttggatactggcgctaccagtttccttaatacaggttgaaaaacttggagtcatctttgttgtcc

SEQ ID NO: 244463 - DNA, 120 bp, Artificial Sequence
  ENSG00000122034_21 (sequence is synthesized)
gctaagattgagcctgggaaaggaagtcctgcttcatccctcaagcttacgaaggctcatcacaagaggcacaaattttcttttgggaaaaaaaaaaaaaaaaaaggaaaaggctttgca

SEQ ID NO: 244464 - DNA, 120 bp, Artificial Sequence
  ENSG00000122034_22 (sequence is synthesized)
cggtgtcgtccttgaccatcgccgacgcgttcattgcagccggcgagagctcagctccgaccccgccgcgccccgcgcttcccaggagagaccatttgtttgtgactatgaagggtgtgg

SEQ ID NO: 244465 - DNA, 120 bp, Artificial Sequence
  ENSG00000122035_0 (sequence is synthesized)
caggcgtaagccaccgcgcccagccccttagcaccttttaaaaataaaaagggcagcgttttacagcaatctgtcccattgttgcagaaacatccaactgattgcactttttcttcttct

SEQ ID NO: 244466 - DNA, 120 bp, Artificial Sequence
  ENSG00000122035_1 (sequence is synthesized)
actgattgcactttttcttcttctctcgtcaactcgtaactcctatctcaagttcacccacaggtctagtgactccggctggctgctgcggggcgaggagactcgcagaatgcctgacta

SEQ ID NO: 244467 - DNA, 120 bp, Artificial Sequence
  ENSG00000122035_2 (sequence is synthesized)
gaggccactcgcgcgctctggacggtggccgtatctccagggtctgagccccggagccgcagtcctgccgcagagcgcctggagccgcgagcagctagcagcccggcgaagcgcacagcc

SEQ ID NO: 244468 - DNA, 120 bp, Artificial Sequence
  ENSG00000122035_3 (sequence is synthesized)
tcggcgatagtcagctccgcggcctctgctcccgcccctcccggccgctccgggaaggggcggagacgaggaggagctgggacggccgccgcgctcccgggcgcaccaagccctttaaaa

SEQ ID NO: 244469 - DNA, 120 bp, Artificial Sequence
  ENSG00000122035_4 (sequence is synthesized)
gccgcgggccttgacagttctgcaggcagccgccgcggtcccggacctctagtcccgcactcccagctggcgagccggctccgggtgcggcgaggcccagccctctcggattgcgcgccg

SEQ ID NO: 244470 - DNA, 120 bp, Artificial Sequence
  ENSG00000122035_5 (sequence is synthesized)
gaccccgggacgcgctccatgcggccgctcagcatgtccgggcactttctgctcgcacccatccccgagtcctcctcggactacctactgcccaaggacatcaaactggcggtgctgggc

SEQ ID NO: 244471 - DNA, 120 bp, Artificial Sequence
  ENSG00000122035_6 (sequence is synthesized)
atgtcgagggggaccagctctccctgcagatccaggatactcccgggggcgtccagatccaagacagcctcccccaggtcgtcgattccctgtccaaatgcgtgcagtgggccgagggtt

SEQ ID NO: 244472 - DNA, 120 bp, Artificial Sequence
  ENSG00000122035_7 (sequence is synthesized)
ttctgctggtctattccatcacagactatgacagctacttgtccatccgacccctttatcagcacatccggaaggtccaccctgactctaaagcccctgtcatcatcgtgggcaacaagg

SEQ ID NO: 244473 - DNA, 120 bp, Artificial Sequence
  ENSG00000122035_8 (sequence is synthesized)
gggaccttttgcatgcccggcaggtgcagacacaggacggtattcagctagccaatgagctgggcagcctgttccttgaaatttccactagcgaaaactacgaagatgtctgtgatgtgt

SEQ ID NO: 244474 - DNA, 120 bp, Artificial Sequence
  ENSG00000122035_9 (sequence is synthesized)
ttcagcatctctgcaaagaagtgagcaagatgcacggcctcagtggggaaagaagaagagcctccatcatccctcggccccgctctcccaacatgcaggacctgaagagacgcttcaagc

SEQ ID NO: 244475 - DNA, 120 bp, Artificial Sequence
  ENSG00000122035_10 (sequence is synthesized)
aggctctgtctcccaaagtcaaagccccctctgcactggggtgaactatctcagacagatgcctctcctttttaatacgcatttgtgcagctaaaagactgggcttctcgctttttaatc

SEQ ID NO: 244476 - DNA, 120 bp, Artificial Sequence
  ENSG00000122035_11 (sequence is synthesized)
acacattcagagtttatttttataaaaaaattgattttcaagtacatgtgtatttctgaaaattcaaacagtgattgcctagaagctggataaaattttgttttgttttattaaaagaac

SEQ ID NO: 244477 - DNA, 120 bp, Artificial Sequence
  ENSG00000122042_0 (sequence is synthesized)
agtcgcactcaggcagccgccgccgccgccgctgccgccatgttggtttgagaggcgatgacaggaggcggccgcggcgtgtgggactgaaaagtgaaggaggaggaggagaaacaaagc

SEQ ID NO: 244478 - DNA, 120 bp, Artificial Sequence
  ENSG00000122042_1 (sequence is synthesized)
tctgagaggaaaccattcccgggctgaggagaaggaggacccggcctcttccggggaccagccgaagtcggcgtcgcccggagctcgcgaggccggggaggggaggggaagggaaggcgg

SEQ ID NO: 244479 - DNA, 120 bp, Artificial Sequence
  ENSG00000122042_2 (sequence is synthesized)
agaccggggaggcggcggcggggaaggcggaggcagaagaggagtggcgaggagccggagacgatgcgccccgaccccagctgctgtccggaggcgcccgcggcctgagcccagaggggc

SEQ ID NO: 244480 - DNA, 120 bp, Artificial Sequence
  ENSG00000122042_3 (sequence is synthesized)
tgtggagtgtcccggccggccccgagcacccccgcgctgtcggtcccccgctccggtctttcgctttggcttccaactagttaaatgcccttgagcgcgggtttccgcggcccggctctt

SEQ ID NO: 244481 - DNA, 120 bp, Artificial Sequence
  ENSG00000122042_4 (sequence is synthesized)
cgcccccgcggcgcgagttgagccgtttccccgcgctgtccgcgcgggcgctccgacagcggctctgcagggtccgcggccagcgtccggccaccgctcggccgccactcaaggctcacg

SEQ ID NO: 244482 - DNA, 120 bp, Artificial Sequence
  ENSG00000122042_5 (sequence is synthesized)
cgtcgatgtgtagctacatagttatctgtgtacatccacgctggggcatttttctcctgcttaatgaggacttgactcgggagcaagtgtgaatcattgccggggctgggaaaggaggaa

SEQ ID NO: 244483 - DNA, 120 bp, Artificial Sequence
  ENSG00000122042_6 (sequence is synthesized)
ggcgcatttaaccccctcccacccctctccatgtccgtgtgtcactcggctcggtccacctggcgcggccggtcctggggctgctgctgctgttgacgacgacgacgacgacgggggctg

SEQ ID NO: 244484 - DNA, 120 bp, Artificial Sequence
  ENSG00000122042_7 (sequence is synthesized)
cctctgctgtcccgggagtttcctcctgctccggccacacagctcctggggattgttcctcttcgaaccagaacctcggcctgaccggcactttggctccaaaataactttatttttggg

SEQ ID NO: 244485 - DNA, 120 bp, Artificial Sequence
  ENSG00000122042_8 (sequence is synthesized)
ggagaaagcacatcacgaaccagtcaaaatcgtggtttatttctgtaacgtgaagacttctgctcttttttctttgtttgtttttttcgtaaacatctgggtgtatatcaaacggcaaga

SEQ ID NO: 244486 - DNA, 120 bp, Artificial Sequence
  ENSG00000122042_9 (sequence is synthesized)
tgtccagtaatgtcccggcggatatgataaatttgcgcctcattttggtaagcggaaaaacaaaagagttcctgttttctcctaacgattctgcttctgacattgcaaagcatgtatatg

SEQ ID NO: 244487 - DNA, 120 bp, Artificial Sequence
  ENSG00000122042_10 (sequence is synthesized)
acaattggccaatggactgggaagaagagcaggtcagcagtccaaatattctacgacttatttatcaaggacgatttctacatggaaatgtcacattaggagcattaaaacttccttttg

SEQ ID NO: 244488 - DNA, 120 bp, Artificial Sequence
  ENSG00000122042_11 (sequence is synthesized)
gcaaaacaacagtgatgcatttggtggccagagagacattaccagagccaaactctcaaggtcagaggaatcgtgagaagactggagagagtaattgttgtgtaatcctgtaaacactgt

SEQ ID NO: 244489 - DNA, 120 bp, Artificial Sequence
  ENSG00000122042_12 (sequence is synthesized)
ctgcctagtgtgatgtgatatagtctttgtctttcatgctgctgggacagaaaagacccgacattgcttcagaaaccgttcagaacagtctgcctgtaaacacatggaactgaattacca

SEQ ID NO: 244490 - DNA, 120 bp, Artificial Sequence
  ENSG00000122042_13 (sequence is synthesized)
catgaacactgtcatcttttctcatgaaagtaaaaagaaccaagaacatttttcactctgattttttatttcttgtattttttgttgagctgttttaacacatattggtttttgaatgca

SEQ ID NO: 244491 - DNA, 120 bp, Artificial Sequence
  ENSG00000122042_14 (sequence is synthesized)
gtcaatctccaggggaaaagttaacaagttatctttcgtagcagaaaccattttgctgccacaaaattttcatcatcagaactaataaatcaagtgttccaaatacaatttgcattaaaa

SEQ ID NO: 244492 - DNA, 120 bp, Artificial Sequence
  ENSG00000122042_15 (sequence is synthesized)
agattggcattattttcctcatcagcagaatttataacagtgtgtggtatctagaaatacttatatatacaattccacactggaagacactcagcaattaatgaagttaattactgggcc

SEQ ID NO: 244493 - DNA, 120 bp, Artificial Sequence
  ENSG00000122042_16 (sequence is synthesized)
aacttgagaggaaaaaatggaaaagaaactaaaatgttgggtgaattctaccaaagtcagccgtggtggctgcactggcacagaatactaaactgagtgtgactattttcactgcaacaa

SEQ ID NO: 244494 - DNA, 120 bp, Artificial Sequence
  ENSG00000122042_17 (sequence is synthesized)
gcacaagaaggggtgagagtgcgtctcctagccttaatgtgggagggtagtttcagtcactcatcggctttcattattgtgcagaaatattagaaaacctcattgatcaattttatgtat

SEQ ID NO: 244495 - DNA, 120 bp, Artificial Sequence
  ENSG00000122042_18 (sequence is synthesized)
ttgaatatcagcaaattgaaattttccataattatcattaatttgtaaccacatccagtgtcatgcttactccttagagttcagatgaattcttaaaattaaaaaaaaactccatagtac

SEQ ID NO: 244496 - DNA, 120 bp, Artificial Sequence
  ENSG00000122042_19 (sequence is synthesized)
taattttgtttctttatatagtttgcgtttgatattagtgcttgcaattgtattaaagtcaaaagctgatttttatggcatacacaagaatgccactttttcttttatttcataccaata

SEQ ID NO: 244497 - DNA, 120 bp, Artificial Sequence
  ENSG00000122042_20 (sequence is synthesized)
atttaaagattgatatgctaaaaacaatttgcacagcactaaagcatgagctactttcatctaaacctgtaaaaatatgaaagatttttatattttttcactgggaagaaattcttcctg

SEQ ID NO: 244498 - DNA, 120 bp, Artificial Sequence
  ENSG00000122042_21 (sequence is synthesized)
gatgaaattacaaatatgtgtagaatatatttaataaaagacttataaaatacctaactacaggacttaaaatatagattggcgcgtagtatacagaacaatattccatataaataagtt

SEQ ID NO: 244499 - DNA, 120 bp, Artificial Sequence
  ENSG00000122042_22 (sequence is synthesized)
tagcctttataaaaatgaagttgcaggctgacattacattctgtactaagtgtcaacagcccttacaaacattaaatgtaaatggtttcaaatggtcagcgttgtttaaatgtaatcatg

SEQ ID NO: 244500 - DNA, 120 bp, Artificial Sequence
  ENSG00000122042_23 (sequence is synthesized)
ttattttattcattgttaatgctttgatgaaaaggctttatatgcagtagatctacgaaaatattgttcatactgatcagaattaaatttgtatagagcagagttttaaaatgaatgtaa

SEQ ID NO: 244501 - DNA, 120 bp, Artificial Sequence
  ENSG00000122042_24 (sequence is synthesized)
atagcactaaacgttttctttctgcaacctgtacttacagattcttcctgtaaactaaataaaaaaaaaatgatagtgcattttggtggtaattttaaaggtcttgattaggtcaataat

SEQ ID NO: 244502 - DNA, 120 bp, Artificial Sequence
  ENSG00000122042_25 (sequence is synthesized)
tgtttaagcaccgtctcattcatgttttctactttcatttcttaagcttttaaaattcatttaattaatattctgttgttgttttggggagtattcccaatgtatctttgatatttaacc

SEQ ID NO: 244503 - DNA, 120 bp, Artificial Sequence
  ENSG00000122042_26 (sequence is synthesized)
tggttaatttgtggacagtcacaacaatggatagaattatgtagtctccgttatcactaaaatgttatcttcaagagatgttaaatatttatatgctttgttgactagctgaaatgtgaa

SEQ ID NO: 244504 - DNA, 120 bp, Artificial Sequence
  ENSG00000122042_27 (sequence is synthesized)
ttctgttagtgttgactaaagaatctggtagttgcttaattgggcaattaaacaatttatggctctattttgtaaaacaaactactggtaattatttttaatacctattttcattctgat

SEQ ID NO: 244505 - DNA, 120 bp, Artificial Sequence
  ENSG00000122042_28 (sequence is synthesized)
ctttttttaagttaaagactatcagttaattaagattgagtttttatgatggttaaaaataattctctattggtttttcaatatatttttctgtgtgttctcagattatatatttccctc

SEQ ID NO: 244506 - DNA, 120 bp, Artificial Sequence
  ENSG00000122042_29 (sequence is synthesized)
cctcaatttagagtttgctaagtgaaataaactggttcactagtagagaaagaattacgtcgcttaatacctaatatcatagttgtacaatatgaaaaaaaagaataaaaagtagcagta

SEQ ID NO: 244507 - DNA, 120 bp, Artificial Sequence
  ENSG00000122042_30 (sequence is synthesized)
aaattatatactgaaaacaccaaaaatttagatgccttaatagtatatacgtgaaatactcagctgtccctttaaaaataattccttggactgcctggtggttaaaatacgattcctcat

SEQ ID NO: 244508 - DNA, 120 bp, Artificial Sequence
  ENSG00000122042_31 (sequence is synthesized)
atccaaggctacttttgaagatccctctgccaaaaatatagctcacttatctaaaggtgagagctgcatagatccagtaatgtacataaagcctgaatgatgagcctatgtccctgccta

SEQ ID NO: 244509 - DNA, 120 bp, Artificial Sequence
  ENSG00000122042_32 (sequence is synthesized)
acgctggtgtctcactcatctcttttacctaaattgtcctgaactttgttaagtgttctggacaaggccaagcttttctttattaaaacctcagcatgtctccctgatctgaactatttg

SEQ ID NO: 244510 - DNA, 120 bp, Artificial Sequence
  ENSG00000122042_33 (sequence is synthesized)
ctttctcttcaagataagttgtattttaccatggaaaaatacagtatctaacattaccattcacgttaaatgaagtttcctcataacatttatctttagttttatgaagtcatcgtgacc

SEQ ID NO: 244511 - DNA, 120 bp, Artificial Sequence
  ENSG00000122042_34 (sequence is synthesized)
aatgttacagtaatttctgttagctgattgtggtaaacaatgtttaatgtgaaaagaaattaaaactttcttcatctgttgtagaatatttctcttctttaaaatggcttctattcataa

SEQ ID NO: 244512 - DNA, 120 bp, Artificial Sequence
  ENSG00000122068_0 (sequence is synthesized)
ggtgcggcgggctgcgtgcgcgagtgggaggtggcaggcctgcgactccggccttgtccgcgcccgctctcggcgcgacgtctccagccatgaaccggtttggtacccggttggtgggag

SEQ ID NO: 244513 - DNA, 120 bp, Artificial Sequence
  ENSG00000122068_1 (sequence is synthesized)
ccacggcgacttcttcgccgccgccgaaggcccgcagcaatgaaaacctcgacaaaatagatatgtctttggatgatatcatcaagttgaatcgaaaggaagggaagaagcagaattttc

SEQ ID NO: 244514 - DNA, 120 bp, Artificial Sequence
  ENSG00000122068_2 (sequence is synthesized)
caagactaaatagaagactcctccagcaaagtggtgcccagcaattcaggatgagagtgcgatggggaatccaacagaattctggttttggtaagactagtctgaatcgtagaggaagag

SEQ ID NO: 244515 - DNA, 120 bp, Artificial Sequence
  ENSG00000122068_3 (sequence is synthesized)
taatgcctggaaagagacgtcctaatggagttatcactggccttgcagctaggaaaacgactggaattcgaaaaggaattagtcctatgaatcgtccacctctaagtgacaagaatatag

SEQ ID NO: 244516 - DNA, 120 bp, Artificial Sequence
  ENSG00000122068_4 (sequence is synthesized)
aacaatattttccagtgttaaaaaggaaggcaaaccttctgagacaaaatgaagggcagaggaaaccagtagcagttctcaagagacctagccagctaagcagaaaaaataacattccag

SEQ ID NO: 244517 - DNA, 120 bp, Artificial Sequence
  ENSG00000122068_5 (sequence is synthesized)
ctaattttaccaggagtggaaataaattaaatcatcagaaagatactcgtcaggcaacttttcttttcagaagaggcctgaaggtgcaggcccagttgaatacagaacaactgctagacg

SEQ ID NO: 244518 - DNA, 120 bp, Artificial Sequence
  ENSG00000122068_6 (sequence is synthesized)
atgtagtagcaaagagaactcgtcaatggcggacttccaccacaaatggagggattttgactgtatctattgacaatcctggagcagtgcaatgcccagtaactcagaaaccacgattaa

SEQ ID NO: 244519 - DNA, 120 bp, Artificial Sequence
  ENSG00000122068_7 (sequence is synthesized)
ctcgtactgctgtaccttcatttttaacaaagcgggagcaaagtgacgtcaagaaagttcctaaaggtgttcccctgcagtttgacataaacagtgtcggaaaacagacagggatgacgt

SEQ ID NO: 244520 - DNA, 120 bp, Artificial Sequence
  ENSG00000122068_8 (sequence is synthesized)
tgaatgagcggtttgggatcctgaaggaacaaagagccactctcacatacaacaaagggggaagccgctttgtcaccgtgggataggtcccatgtcaaaggaacttttgagtgatgactc

SEQ ID NO: 244521 - DNA, 120 bp, Artificial Sequence
  ENSG00000122068_9 (sequence is synthesized)
tgagaagttgaattgcttgaagagttcatcacggaaattcaagaaactttacttcaaaatattcacaaggctaaataactcttatttttatttttgaaggtttttttttttaaaaaaaaa

SEQ ID NO: 244522 - DNA, 120 bp, Artificial Sequence
  ENSG00000122068_10 (sequence is synthesized)
aacgtataaaataatgccctgaaagaataatagggattatacctgtctgttcttaaagatttcatggttggctcagacagaacaatcatctgtttgacttctttggttcctcatgcagca

SEQ ID NO: 244523 - DNA, 120 bp, Artificial Sequence
  ENSG00000122068_11 (sequence is synthesized)
gaaggaagacagaaagatagaaattgattatttttatgatagcagtattcaggatctcatcacctttgcccgtgttttagactttgtcatggtaaatcctggtcttcataaacatgagta

SEQ ID NO: 244524 - DNA, 120 bp, Artificial Sequence
  ENSG00000122068_12 (sequence is synthesized)
ggtcccttggttgctgtcacttgccctttaatagtgttgatgtagtcagtgccgttgccttttcttcattagagacacagaacaatgtattagaatttccagctgtgggtttgaagactt

SEQ ID NO: 244525 - DNA, 120 bp, Artificial Sequence
  ENSG00000122068_13 (sequence is synthesized)
agggggacatccagaacgtgcttcctctttcagacggtgtaaagtcccctggaattacacagctttagtgctgagcttttaacaggaaatgtggccctaggtattagtcttagtttaaaa

SEQ ID NO: 244526 - DNA, 120 bp, Artificial Sequence
  ENSG00000122068_14 (sequence is synthesized)
tgttggtgtttagagactgtaaatgcatattcacaaagttatctgatagggccttggaggagaaggtccagttttaaaaaatgacagtttgtgtttaataaatgaaggcatgagaggaag

SEQ ID NO: 244527 - DNA, 120 bp, Artificial Sequence
  ENSG00000122068_15 (sequence is synthesized)
taagtagcaagttgaaggacaggtagttgagatgaaacacttcaaaaccctggttatagatgtactgtttggatgtagcatagtcttgagtctagcgtccacaaagaattattcaaatga

SEQ ID NO: 244528 - DNA, 120 bp, Artificial Sequence
  ENSG00000122068_16 (sequence is synthesized)
tatttagaagaattataactattacattgaatggagtcccttggatattttgatagtaaaattaatagccataaagtcctagacttcttatttgaagttaaaatttcttatttgaaaagt

SEQ ID NO: 244529 - DNA, 120 bp, Artificial Sequence
  ENSG00000122068_17 (sequence is synthesized)
tgaaatttatgagctttgaagattgctaaattaaataatttatagctccaaaaacaaaaatatacttgtatatgtcacagagaaaaaaaatgcaaaatttataatagagttacattaacc

SEQ ID NO: 244530 - DNA, 120 bp, Artificial Sequence
  ENSG00000122068_18 (sequence is synthesized)
ttgttgtttacctttcactgatttcttatatggtataaattaaagttcaggcatttatggggagaaaaggccctccccaccgacccgccacctgccacctctgacggagtgggagaagtt

SEQ ID NO: 244531 - DNA, 120 bp, Artificial Sequence
  ENSG00000122068_19 (sequence is synthesized)
agtctgtgctaagatagtactgagtccccagatgttgtatactgtaaattacagtataatgccaaatgcagcaaaatcttccagctgtacgttacaagtttggtcattttgaagcttgac

SEQ ID NO: 244532 - DNA, 120 bp, Artificial Sequence
  ENSG00000122068_20 (sequence is synthesized)
attttagtttgccattatgttaaaaacatctaaataggtgttagtttctcaggagtagattgttagtgttgacttttcctgtaaagcagacatcgttcttggcctgccctgcattgtata

SEQ ID NO: 244533 - DNA, 120 bp, Artificial Sequence
  ENSG00000122068_21 (sequence is synthesized)
ctagatttcattgttgtctctcatgcttcttgagttgcttcatggtttatgctcgccatggaaagctatcagtaacagtttcatgcttataccaaagaattaaatctgatctttaatatc

SEQ ID NO: 244534 - DNA, 120 bp, Artificial Sequence
  ENSG00000122068_22 (sequence is synthesized)
tgatattttcctggtactcgtactgataagggattattggaagtcagtcacagaatttggaaataaattctagtctctccttagctatttgatgcttttcatataggccaagaactcatt

SEQ ID NO: 244535 - DNA, 120 bp, Artificial Sequence
  ENSG00000122068_23 (sequence is synthesized)
gcaaaacatttttgcaaggatgaatgcctgtatttggtctaggaacagtacattttagtctgatttagaattactggtagcttattttaaagcaaggaaaagcagctgagctcaagtttg

SEQ ID NO: 244536 - DNA, 120 bp, Artificial Sequence
  ENSG00000122068_24 (sequence is synthesized)
ctgtctttagaatggtttgtgaaaatatggtataaaggtgttttcattttcctgttcttacctattattgtatagagctattcatgccattttttgggaaaactttaaaaattgccccaa

SEQ ID NO: 244537 - DNA, 120 bp, Artificial Sequence
  ENSG00000122068_25 (sequence is synthesized)
atactgacattgagtgcattaaataacaaattatctttgatacattaaacttttattcttcatgcatctgtaatttaattttaagtataatgttttgcctttggtacaactaaattaaaa

SEQ ID NO: 244538 - DNA, 120 bp, Artificial Sequence
  ENSG00000122068_26 (sequence is synthesized)
ctcttggtggtcacatattgtatataaacaaaacaatatgctttgttgaaggaaaattttctttattggaatgtggttgtaatccttgttcagttcttaagtttcggttttttttaaaaa

SEQ ID NO: 244539 - DNA, 120 bp, Artificial Sequence
  ENSG00000122068_27 (sequence is synthesized)
caggatgcaacttaaacttttctttgcatcaaggtatatgcaaaacattggtgccgtgcatcaccaaatgaaagtttgtatttaacgaggaggtgctttacactgtactttttggtgttt

SEQ ID NO: 244540 - DNA, 120 bp, Artificial Sequence
  ENSG00000122068_28 (sequence is synthesized)
catttagatctattctgaagctgttcatttttaacaaataaaatgttacaggtttcacatgatttattctcagctctaaagattgagttgtggtttttagattgttctatgttacgaaga

SEQ ID NO: 244541 - DNA, 120 bp, Artificial Sequence
  ENSG00000122068_29 (sequence is synthesized)
actttgtagtggttatctatatttgtagtttttagggtgtgaaaccttatctactagcaaaattggtaaatcactgtagactcttctattagcatccctctctcttttgatgatttcatt

SEQ ID NO: 244542 - DNA, 84 bp, Artificial Sequence
  ENSG00000122068_30 (sequence is synthesized)
ggggaggccaaggcgggcggatcatgaggccaggagcaagaccagcctggctaacatagggagactctatctttactaaaaata

SEQ ID NO: 244543 - DNA, 120 bp, Artificial Sequence
  ENSG00000122068_31 (sequence is synthesized)
gcgggcggatcatgaggccaggagcaagaccagcctggctaacatagggagactctatctttactaaaaatacagacattagctggtgtggtgacatgtgcctgtggtcccagctacttg

SEQ ID NO: 244544 - DNA, 87 bp, Artificial Sequence
  ENSG00000122068_32 (sequence is synthesized)
taaaaaaacaaaaaaaaagaatccagtatactttgcaatgcagaatattgggttagatgagcctttagagactaatccagtttaacc

SEQ ID NO: 244545 - DNA, 120 bp, Artificial Sequence
  ENSG00000122068_33 (sequence is synthesized)
ttgggttagatgagcctttagagactaatccagtttaacccctcctttttacaccttagtaaagtgagtcctagtgttttcaagacttgcatgtggcagagttattttttgagctcagat

SEQ ID NO: 244546 - DNA, 120 bp, Artificial Sequence
  ENSG00000122068_34 (sequence is synthesized)
cttctaattcttaattgataataaactgctttggtgaattaacacccacagaaaatagtggaatggtgtgtggttttcaaatacctaagaattggtaatagccatgctttagcattttta

SEQ ID NO: 244547 - DNA, 120 bp, Artificial Sequence
  ENSG00000122068_35 (sequence is synthesized)
gcatggtaagtaaatctattctaccagtgatggttatactttattactttgctatttgggttaggtagacctgttagaaaagtccagtgttcctaatcagatatgcattttttaaaaaca

SEQ ID NO: 244548 - DNA, 120 bp, Artificial Sequence
  ENSG00000122068_36 (sequence is synthesized)
ggcataaactcttcaccacaattttaattacagtcatccctcagtatacacggaggattggttccaggacccttgtatatacccaaccctgcgcaatactgaagtcccacatctgtgtaa

SEQ ID NO: 244549 - DNA, 120 bp, Artificial Sequence
  ENSG00000122068_37 (sequence is synthesized)
acgaaaagttggcccactgtgtacatggattttccattccaagatgtttttttggttcaaaacaatttgcttataagtagacccaggtaattcaaagccatgttgttgaagggccaactg

SEQ ID NO: 244550 - DNA, 120 bp, Artificial Sequence
  ENSG00000122068_38 (sequence is synthesized)
tttaagccaatcgtaaaatactgtgtctgaggaaacaggcctcattgctcagcagtgagtttttattagactaggtatgtatatcattattaatattttactgtaaatagctttgtaatt

SEQ ID NO: 244551 - DNA, 120 bp, Artificial Sequence
  ENSG00000122068_39 (sequence is synthesized)
cacacaaagtatacgggcccagcaggcctcattgctcagcagtgagtttttattagactaggtatgtatatcattattaatattttactgtaaatagctttgtaattcacacaaagtata

SEQ ID NO: 244552 - DNA, 120 bp, Artificial Sequence
  ENSG00000122068_40 (sequence is synthesized)
cgggcccagaataatttttgttgatttatttttactataaggagataagagaaaaaatagctcacttggcagcacagaaaatgaataccatattggcaatattaaagcagaaaataattc

SEQ ID NO: 244553 - DNA, 120 bp, Artificial Sequence
  ENSG00000122068_41 (sequence is synthesized)
atttctgatcagtagtgctttcagttttcatcagaattattattattattattattttgccactgtgaaaaagcagttaagcatgtaaaacttccctttagagagggttctttttggata

SEQ ID NO: 244554 - DNA, 120 bp, Artificial Sequence
  ENSG00000122068_42 (sequence is synthesized)
gatcaatttggaactagcttcttttttttttttttaaatgatacttcagtaaacacagcatttacaacaagaattgtggactatggtggaccattaatagggatttaaagatttacttag

SEQ ID NO: 244555 - DNA, 83 bp, Artificial Sequence
  ENSG00000122068_43 (sequence is synthesized)
ctatggtggaccattaatagggatttaaagatttacttagaaattgtagacttctaatatcttttatttcccttctcaccaca

SEQ ID NO: 244556 - DNA, 120 bp, Artificial Sequence
  ENSG00000122068_44 (sequence is synthesized)
gagccaccgcacccagcctacagcttattttctacctatgtttaacaggaagcttgataacacaagcaaatgtgatgccattctgggactgaaatgtcgtcttatgagtgtattcagatg

SEQ ID NO: 244557 - DNA, 120 bp, Artificial Sequence
  ENSG00000122068_45 (sequence is synthesized)
aggtataccagtgtttaaagattagttggaagttattctcctagtgtgcatatttaatttctacttactccatttccctttaatgagaaaagaatcatattgtctgaattttcctgtata

SEQ ID NO: 244558 - DNA, 120 bp, Artificial Sequence
  ENSG00000122068_46 (sequence is synthesized)
aagtttaaaaaagttaattattaggacttgtttttaaaggagtaagcaatggaaggatcaaacatttattaaatatattcagcaaatatttagaattaaatgtattcagcaaggaagaga

SEQ ID NO: 244559 - DNA, 120 bp, Artificial Sequence
  ENSG00000122068_47 (sequence is synthesized)
tttagaattaaatgtattcagcaaggaagagaatgggattcatactgcttggagtttataaaagcggagtttttttattttttgagacggaatactctgtcacccaggctgcagtgcagt

SEQ ID NO: 244560 - DNA, 120 bp, Artificial Sequence
  ENSG00000122068_48 (sequence is synthesized)
cccaggatcctttccgggttcaagcaattcttgtccctcagcctcgtaagtaggtgggattacaagcttgagccaccacagccaactaatttttgtgtttttagtagaaatgagttttca

SEQ ID NO: 244561 - DNA, 62 bp, Artificial Sequence
  ENSG00000122068_49 (sequence is synthesized)
ggctggagtgcagtaccttccaagtatctgggattacaggcacgtgccactacacccagcta

SEQ ID NO: 244562 - DNA, 120 bp, Artificial Sequence
  ENSG00000122068_50 (sequence is synthesized)
agtatctgggattacaggcacgtgccactacacccagctaatttttgtactaagacgaggtttcaccatattggccagtctagtctcaaactcctgacctcaggtgatatgcccgcctct

SEQ ID NO: 244563 - DNA, 120 bp, Artificial Sequence
  ENSG00000122068_51 (sequence is synthesized)
aagtgctgggattacaggcatgagctacggagcccggcctagaagtggagtcttagaaggagtgaccatgatatgtttctactgagtagaagggggaagggaggacataacctttgcatg

SEQ ID NO: 244564 - DNA, 120 bp, Artificial Sequence
  ENSG00000122068_52 (sequence is synthesized)
tttgcatgatatagtgaaatgcagagctggaaagaactattaagatttgagtgaaacttttgccccctgtgttgaatgagttaactttcagtctgtaaaataaacaggaagaactgggaa

SEQ ID NO: 244565 - DNA, 120 bp, Artificial Sequence
  ENSG00000122068_53 (sequence is synthesized)
gaaaggctcgtgtgtaccgaagtataggggacctgtctgcagcaggagggactcgaaggacacggaggattatatcactgaaggcataagattcagagtagagacgggatttcaccatgt

SEQ ID NO: 244566 - DNA, 69 bp, Artificial Sequence
  ENSG00000122068_54 (sequence is synthesized)
tggccggaagggggtcatctttaaaaaatggagccttctgtgattatgggaaatgatatcatcaagttg

SEQ ID NO: 244567 - DNA, 120 bp, Artificial Sequence
  ENSG00000122068_55 (sequence is synthesized)
acggctcgccgctcgccggctctttgtgaggaaagatctgccggtttccccggagcgcgttcgcggtgggcgttatcggggagcgaggggaatggtccgaccgagccgttctctctgaag

SEQ ID NO: 244568 - DNA, 120 bp, Artificial Sequence
  ENSG00000122068_56 (sequence is synthesized)
aaaggtcttggagagcccggccggggctgcggtcggttaaaccagcgcttccggagctttccctggtcgccgggcgttccaggccggcgccggccatggctgccgggcgcgactctcggg

SEQ ID NO: 244569 - DNA, 120 bp, Artificial Sequence
  ENSG00000122068_57 (sequence is synthesized)
gccacctccggccgcggccccggagcgtctgtcagaaaggaagcagcgctcggccgcctgtgggatgtggttgtgtattgagcgctgcctagaaaagcacagtctccctctccaggcctc

SEQ ID NO: 244570 - DNA, 120 bp, Artificial Sequence
  ENSG00000122068_58 (sequence is synthesized)
agagctagctaatgggggagaaagcaaacatctttgaaggagagatgattgctgtggctcgctgagaagccagatgatatcatcaagttgaatcgaaaggaagggaagaagcagaatttt

SEQ ID NO: 244571 - DNA, 120 bp, Artificial Sequence
  ENSG00000122068_59 (sequence is synthesized)
gtgcttgtaatcccagcactttgggaggtgagagcaagaggattgcttaagccaaggacttcaggaccagcgtgggcaacatagggagaccccgtctctacaaaaaaaaagaaagagtat

SEQ ID NO: 244572 - DNA, 120 bp, Artificial Sequence
  ENSG00000122068_60 (sequence is synthesized)
agttgccggcggagttttctcgctggtgggcggacccgagcggaggcccggaggacagccgggagcgcaggctcgacgccaggtgcccggctggaccgcgagggacccgggcgtcccctc

SEQ ID NO: 244573 - DNA, 120 bp, Artificial Sequence
  ENSG00000122068_61 (sequence is synthesized)
ggctgcgttgcggtgggcgcgaaaggctcgtgtgtaccgaagtataggggacctgtctgcagcaggagggactcgaaggacacggaggattatatcactgaaggcataagattcagagat

SEQ ID NO: 244574 - DNA, 120 bp, Artificial Sequence
  ENSG00000122068_62 (sequence is synthesized)
gcgtatccttattcacccccgtgacattacacgctggggaccgaactcagtccgagatgtagactaggcaataacgctaatctaatcccgatgatatcatcaagttgaatcgaaaggaag

SEQ ID NO: 244575 - DNA, 120 bp, Artificial Sequence
  ENSG00000122085_0 (sequence is synthesized)
atcttctccgcgctatggctgcgttcggccgtcaggtccttgattggcaccgcctgatccccctcacctgggcctgtatggctaggcagactcctcatcttggagaacagagaaggacga

SEQ ID NO: 244576 - DNA, 120 bp, Artificial Sequence
  ENSG00000122085_1 (sequence is synthesized)
cagcttctttgttgcgcaaactgactacagcctccaatggaggggtcattgaggagttatcttgtgttagatccaataactatgtgcaggaaccagagtgcaggaggaatcttgttcagt

SEQ ID NO: 244577 - DNA, 120 bp, Artificial Sequence
  ENSG00000122085_2 (sequence is synthesized)
gcctccttgagaagcaggggactcctgtggtacaagggtccttggagctagagagggtcatgagttccctcctggacatgggtttcagcaatgcccatattaatgaattgctcagtgtac

SEQ ID NO: 244578 - DNA, 120 bp, Artificial Sequence
  ENSG00000122085_3 (sequence is synthesized)
ggcgaggtgccagtcttcaacagttgctggacatcatttcagaatttattctcttgggtctgaatccagagcctgtgtgtgtggtcttgaagaaaagtccccagttattgaaactgccta

SEQ ID NO: 244579 - DNA, 120 bp, Artificial Sequence
  ENSG00000122085_4 (sequence is synthesized)
ttatgcaaatgaggaagcgctccagttacctgcaaaagcttgggcttggagaagggaaattaaagagggtgctttactgttgccctgaaattttcaccatgcgccagcaggacattaacg

SEQ ID NO: 244580 - DNA, 120 bp, Artificial Sequence
  ENSG00000122085_5 (sequence is synthesized)
acactgtcaggcttctcaaggagaagtgccttttcacggtacagcaagtcaccaagattttgcacagttgcccctctgttcttcgagaggacctgggtcaactggaatacaagtttcagt

SEQ ID NO: 244581 - DNA, 120 bp, Artificial Sequence
  ENSG00000122085_6 (sequence is synthesized)
atccagacattgtaaagagtgagtacttgcagtattcactaaccaagattaagcagagacacatttacctggagcgcctgggacggtaccaaacccctgataagaaggggcagacacaga

SEQ ID NO: 244582 - DNA, 120 bp, Artificial Sequence
  ENSG00000122085_7 (sequence is synthesized)
tccctaacccattgctcaaggacattctcagagtttcagaagctgagtttttggccaggacagcctgtacttctgttgaggagtttcaagtttttaagaagctcctggctcgggaggagg

SEQ ID NO: 244583 - DNA, 120 bp, Artificial Sequence
  ENSG00000122085_8 (sequence is synthesized)
aggagtctgagagcagcacatctgatgacaaaagggcaagtctggatgaggatgaggatgacgatgatgaggaggacaatgatgaggatgacaatgatgaggatgacgatgatgaggacg

SEQ ID NO: 244584 - DNA, 120 bp, Artificial Sequence
  ENSG00000122085_9 (sequence is synthesized)
acgacgaggcggaggacaatgatgaggatgaggacgacgacgaggaggaatagctgtgatggaaggactagagcgaaagggcccagagatatcaaggaagcttttcattctcttaaagct

SEQ ID NO: 244585 - DNA, 120 bp, Artificial Sequence
  ENSG00000122085_10 (sequence is synthesized)
tttgggtcctttacttgaatcttctcaagttattttttattctaaaactggtctcttgatgaaaaaaattataagtcacctgagaggcagacagatcaaaccaaacaggaaacaggaaat

SEQ ID NO: 244586 - DNA, 120 bp, Artificial Sequence
  ENSG00000122085_11 (sequence is synthesized)
gcatgtttgatctgttgtcacgtgtctgtggggagggccctgtcccatcctgaataagatacttatgttgagctattcacatcaaggggactcaatatatcaacaattggttttattttt

SEQ ID NO: 244587 - DNA, 120 bp, Artificial Sequence
  ENSG00000122085_12 (sequence is synthesized)
ttctcttttgaatatgttggtgataattccgtgacagttggaagatggggttcattcttccggttcaggaatcactatgtatttccttcttgtgataaaaataaaattacgagaaggcaa

SEQ ID NO: 244588 - DNA, 120 bp, Artificial Sequence
  ENSG00000122085_13 (sequence is synthesized)
gtatattgcttcataatggtattcagtgcacagcagagtaaaagaagttaattcatgatgtactggttaattttgcatggcttcttaaggccagcaaaatgctggcagttttctttatct

SEQ ID NO: 244589 - DNA, 120 bp, Artificial Sequence
  ENSG00000122085_14 (sequence is synthesized)
ttgtgaagaacaggcccttcctgtttggggaagttggcttttatgtcagctcttggccagtggtcacttccaagcctggtgtctccggccctgtagtctgtagtgccagactgtgctggc

SEQ ID NO: 244590 - DNA, 120 bp, Artificial Sequence
  ENSG00000122085_15 (sequence is synthesized)
ctggagagtgctggggcaggtggaggccagggaatggtcccatacagttatctcccctgccctggttacagacagcttcgagaaccagaggagaagagcatagggtcatggagcagcagc

SEQ ID NO: 244591 - DNA, 120 bp, Artificial Sequence
  ENSG00000122085_16 (sequence is synthesized)
ctcgtcttacagcgtgactgcaaagaaaaagacttttgttttgcaaaagaaaagcagctcggtgactccgtccacatcgccacagttgagtcagatggcagtggcagtcctttgccagtg

SEQ ID NO: 244592 - DNA, 120 bp, Artificial Sequence
  ENSG00000122085_17 (sequence is synthesized)
gcgccctgcccaggcacgtaacaaaacatagacctgttttgaagtggcttgttacccaagggtgcctcactcatctgcgccaccaggaagatgaactgtgagggctcctataaggggcag

SEQ ID NO: 244593 - DNA, 120 bp, Artificial Sequence
  ENSG00000122085_18 (sequence is synthesized)
gaagagcaaagctgtcctaggccaaccagagattcatctttcatgcagtgacatgttgataaaaaatgatggtcagtatgaaactggtaacaggttgtagatggctttctatggtatatc

SEQ ID NO: 244594 - DNA, 120 bp, Artificial Sequence
  ENSG00000122085_19 (sequence is synthesized)
ccagtctcttgcaaacgattgtgaagaatgccagtgttgtttaagattcggcagtttgtgtggggaggtgggggcaggatggggtttggttgccaaaagagtttgggaaatgctggctta

SEQ ID NO: 244595 - DNA, 120 bp, Artificial Sequence
  ENSG00000122085_20 (sequence is synthesized)
aacaaaggcgagaggaagttcctttcacgtcaggatttatgaatgcctatgagcccagtgtcagtgacgactttctagcggcggtcttcaacactttctaaatattaagcgatcaaggcc

SEQ ID NO: 244596 - DNA, 120 bp, Artificial Sequence
  ENSG00000122085_21 (sequence is synthesized)
cctgccccacttttagttccaacagaatgccgttcacaagatctgggaggcactctctcagccctctcctggagcccccggaatttctcagcagcccaggccctcccgctgcccgtggcc

SEQ ID NO: 244597 - DNA, 120 bp, Artificial Sequence
  ENSG00000122085_22 (sequence is synthesized)
cctcctcccaggtgccaggtggtcttccagcctctccaagggcccacccccctgcctcttcctcccactgcagctgatctaggggtttcttggccacatttcccttgagagagagtggga

SEQ ID NO: 244598 - DNA, 120 bp, Artificial Sequence
  ENSG00000122085_23 (sequence is synthesized)
tttgccctatccacagagagcctcatttccacctgaaggtgtatttgtcagtggctagaccaggttcatgtctgtttccccttggggacttctgaaccttcctgcccgggagtctgtaac

SEQ ID NO: 244599 - DNA, 120 bp, Artificial Sequence
  ENSG00000122085_24 (sequence is synthesized)
acagcagcacaggaccgcgcttcctttagcagtgctgagtaagcaggcagcggcactctgagatcccggggctgggcagtcgccccccacttcccagcagctctgtggtagtggggcggg

SEQ ID NO: 244600 - DNA, 120 bp, Artificial Sequence
  ENSG00000122085_25 (sequence is synthesized)
agcagcagggacgtaccttaagatttctccagtgtctgactcttactttgtttcctgaaataattagagaaaagtcgtttaatgaaaaagagactgtgtaccttgaattctacagctacc

SEQ ID NO: 244601 - DNA, 120 bp, Artificial Sequence
  ENSG00000122085_26 (sequence is synthesized)
tcagtccaggctgcctgctgagatcctgtctttagctcacatacattccacggtgggggacaccattagtccagacaccgctgtggagattagcattttagtttgtgtgcgcccgcctgg

SEQ ID NO: 244602 - DNA, 120 bp, Artificial Sequence
  ENSG00000122085_27 (sequence is synthesized)
cttgaggcagtagtttaggaatgacaaggctagaaacctggctggctgtgagtcagagagagagaggatggacgtgggagaaagcaagcaaaagctaccctagggaagagccggtgacgt

SEQ ID NO: 244603 - DNA, 120 bp, Artificial Sequence
  ENSG00000122085_28 (sequence is synthesized)
gcacaggccgagcagcacggctggtgagctgcaggctgcggccttgcccggacacttggtaatgccaaacaagtacgtgtggctactcattggtctatgaggacgatgacaggcttcgac

SEQ ID NO: 244604 - DNA, 120 bp, Artificial Sequence
  ENSG00000122085_29 (sequence is synthesized)
tctgtggtttctaaagcatataatattctcacgtacttctttcagcaaacgccaaacagtagtaattcttgtaactaccttgaaccctttgtggaaagaacctgggtgtgagtgaataaa

SEQ ID NO: 244605 - DNA, 120 bp, Artificial Sequence
  ENSG00000122085_30 (sequence is synthesized)
aagtaaagagcgacgcgctatatcggccattaaatactcggggctgtccgtaacaccctgtgcttcccaattgtagcaccatgttctgtgtgaatatgcataaccagagtgacccccccc

SEQ ID NO: 244606 - DNA, 120 bp, Artificial Sequence
  ENSG00000122085_31 (sequence is synthesized)
agcacccagcatgcccggctgtgcccctctgggtatgctcacatgcacatatatggacatacagtttcgtagcagaacgtggctgcccaggggctgcctatctgggcgagtagaccgcct

SEQ ID NO: 244607 - DNA, 120 bp, Artificial Sequence
  ENSG00000122085_32 (sequence is synthesized)
ggctcagcccacaggcctgcagcatcccatagcaccccgcccttgccccatcaccctgtgggctacatgcaggacacggcatgggcctgctccccagaggcacctgtttggggtcttctt

SEQ ID NO: 244608 - DNA, 120 bp, Artificial Sequence
  ENSG00000122085_33 (sequence is synthesized)
gaggcttgtgctttcacagctctctttgaagcagatgtcttggtgaactcggtagactcttttatacctgttgtcacaagaaagctttgtaaaaccagacagtgaagcaaaatgttgcca

SEQ ID NO: 244609 - DNA, 120 bp, Artificial Sequence
  ENSG00000122085_34 (sequence is synthesized)
actgcttaacctaggctatgtgaacccacagtaaacctgaaggtgtttgagggaaaaactgctattttctgaatgaaacgtgacctcctattgatgtattaaaatgtctaacataaaggt

SEQ ID NO: 244610 - DNA, 120 bp, Artificial Sequence
  ENSG00000122085_35 (sequence is synthesized)
catgtgatttgtaataaatttattgtggtacagtaatatgcataaaataaacccattttaatgtgcattctgatgagcactgacaaaggatatggtactaaaaataaaatgtgaaatgtc

SEQ ID NO: 244611 - DNA, 120 bp, Artificial Sequence
  ENSG00000122085_36 (sequence is synthesized)
gaaggacgggggaggaccgctgcttccggcgccgtaactgctgccatcttctccgcgctatggctgcgttcggccgtcagggaaattaaagagggtgctttactgttgccctgaaatttt

SEQ ID NO: 244612 - DNA, 83 bp, Artificial Sequence
  ENSG00000122085_37 (sequence is synthesized)
atgcaaatgaggaagcgctccagttacctgcaaaagcttgggcttggagaaggtacaagaagttgcagatttctttgggaggc

SEQ ID NO: 244613 - DNA, 68 bp, Artificial Sequence
  ENSG00000122085_38 (sequence is synthesized)
gcaggcagatcacaactaaaaatagaaaaattagctgggcttggtggcacgcacctgtaattccagct

SEQ ID NO: 244614 - DNA, 120 bp, Artificial Sequence
  ENSG00000122085_39 (sequence is synthesized)
acaccttcaggaactgcagcttggagtgtactccttctacttatgaaaaaaagttaactataaaatggcctcaggcaggtccttcaggaggtttccagaagaaggcatcattgtcacagg

SEQ ID NO: 244615 - DNA, 120 bp, Artificial Sequence
  ENSG00000122085_40 (sequence is synthesized)
aggtggcagctccatgtgtgttactgggacacgatgtggaagtggaagaaggtgacatggatgatcctgcccctgtgactaatttattattgtgcaactgccagtcctgcgcattccagc

SEQ ID NO: 244616 - DNA, 120 bp, Artificial Sequence
  ENSG00000122085_41 (sequence is synthesized)
aagtaccaccaagaacagggaaggacaagccagaggctggaggaagatacctgcagaacacagacctgacaaaggatcagtatcaaaacatataagaattttgacaaatgaataaaaaga

SEQ ID NO: 244617 - DNA, 120 bp, Artificial Sequence
  ENSG00000122085_42 (sequence is synthesized)
gtacaaataacccaacataaagtcaaaaggcgtgatcaggcatttcacagaagcaaacacctttggtggatgcccatgaggagaggcgcagtcacatcagtgcccaggagatgcaaaccc

SEQ ID NO: 244618 - DNA, 120 bp, Artificial Sequence
  ENSG00000122085_43 (sequence is synthesized)
agatcccaggggtgtgcatcccacccgttctgcctgtaggatctgcaaacccggcaaaacctagttctagagagactggattcactgcatgtcttcatcactgctggagggagcgcagac

SEQ ID NO: 244619 - DNA, 120 bp, Artificial Sequence
  ENSG00000122085_44 (sequence is synthesized)
tgctatcgcctcttagaaaatgacttagttctcatgtaatttgggcattcacacatcctcatcctagatccagcttttccactcccgcacacgtactggaaaacctgtacaggaacatcc

SEQ ID NO: 244620 - DNA, 120 bp, Artificial Sequence
  ENSG00000122085_45 (sequence is synthesized)
actgcagcactgctcataccaaacacaacctacatgttctctgcacagagaggggagaagagccggtcagttcactcagtggactctgtgctcaatagtaggtgtgaataagccgcagcc

SEQ ID NO: 244621 - DNA, 120 bp, Artificial Sequence
  ENSG00000122085_46 (sequence is synthesized)
gcccagaccgcatgggccaacctcagtccgagaatgcggagtgaaaacacaggtctaacgatcacacatggcaagataattatcttgcaaagaaaactcacttattgttctgccatacat

SEQ ID NO: 244622 - DNA, 120 bp, Artificial Sequence
  ENSG00000122085_47 (sequence is synthesized)
atatgtaccatagaatcactccccgcaccttccactctgaaaaaacaaaggaattctaggcacaaagttcaggatcatggttaactgaggggagagaacagggagtatgatggcaagata

SEQ ID NO: 244623 - DNA, 120 bp, Artificial Sequence
  ENSG00000122085_48 (sequence is synthesized)
gaaggtatcgttcacatccaagtttataggttgggttcttgatttagtcattattcaaaggctaataactaaataaaaggtagctagcgtgagagtgcaacatgaaccaaagatcatgac

SEQ ID NO: 244624 - DNA, 120 bp, Artificial Sequence
  ENSG00000122085_49 (sequence is synthesized)
tggctttgcgcatcgaggggccattaaagagtctacttttcatgttatcacttaaaatcattttgcacccaccagggcatgagcatctcgtgctggcaaacaccacatgaccgtggtgac

SEQ ID NO: 244625 - DNA, 120 bp, Artificial Sequence
  ENSG00000122085_50 (sequence is synthesized)
ctcagggccagcccgggggtcatcttgaatctctcctgctgaagagacccaggagggtaacacacgcccctccaatctctgagttctaggaaatgaacacctggtatttaaaggggctga

SEQ ID NO: 244626 - DNA, 120 bp, Artificial Sequence
  ENSG00000122085_51 (sequence is synthesized)
cataatgcaaatcatctgatgaaatgtttgttttagttcacttaaagatcaacacgagagtcttcactctgaatgggccacacctgaattaagagaatccttcactctctgcgtcggatg

SEQ ID NO: 244627 - DNA, 120 bp, Artificial Sequence
  ENSG00000122085_52 (sequence is synthesized)
cacaaaccagtcctcctggtgctcacaggggctagcagcaagtccagaccttgtatggtgagggcgggggggggatggtgaacttagggttcagcgaaaccgccacttgcaaacacaccc

SEQ ID NO: 244628 - DNA, 120 bp, Artificial Sequence
  ENSG00000122085_53 (sequence is synthesized)
ttgagaagctgggggcaaggccttgcgggtgagaccacgctcagcagctcacacctttaccaagtactaggacttctttggggttgggttgaggggtgatcccaatctgagtctatggta

SEQ ID NO: 244629 - DNA, 120 bp, Artificial Sequence
  ENSG00000122085_54 (sequence is synthesized)
tgactcaggggagaacaggtcaccgggtgctaggagagctgtccatagaggacacagccccaaaggattagaaccaggagaaaggtagagtctgactcagggtgaggaacacacatgtat

SEQ ID NO: 244630 - DNA, 120 bp, Artificial Sequence
  ENSG00000122085_55 (sequence is synthesized)
tggtgctgcccgaaggggaactgcctcgtgagcgtctgggaactcttactgcaggtgctcagcagatgcttggtgccctgcagggacgtgctggcctcgatcctcacgaggcagagcccc

SEQ ID NO: 244631 - DNA, 120 bp, Artificial Sequence
  ENSG00000122085_56 (sequence is synthesized)
ggactaggagacagttcaggtcctgcataacctgagtgtccacagggcccagctagtcctcaagctggggctcgcccagtggctgctccctctgcttctcccatcctgactccgcctgct

SEQ ID NO: 244632 - DNA, 120 bp, Artificial Sequence
  ENSG00000122085_57 (sequence is synthesized)
cctctttggagaagtgaggggtgaggggcccagaggcaggggctggggtgggctctgctgcatgtggaggcgaaggaggagaggggaggggaggcagcatcaaagccagtctctctagct

SEQ ID NO: 244633 - DNA, 120 bp, Artificial Sequence
  ENSG00000122085_58 (sequence is synthesized)
cagactctgggtggtttgggtgggtcctgccccctggcctgttcccgtctgtggggtcccactgcttgggtggtgtagcttcaccccatcttcccacaccggggtgcctggtgctcagcc

SEQ ID NO: 244634 - DNA, 120 bp, Artificial Sequence
  ENSG00000122085_59 (sequence is synthesized)
tcccctcaggtaggctctgtgcctcctgattcctcaccgtgggtggtccctcctgcctgcagcctctaaggcccctgagagcagtcagtcagtcccaaagtccccaccagcgctgctgac

SEQ ID NO: 244635 - DNA, 120 bp, Artificial Sequence
  ENSG00000122085_60 (sequence is synthesized)
tcacttccgatgtccttgctgccgtgttcagggagctggagggccaggctgacccgcttgggggcttcctccatgttctcgagctgcgccgaggctgtgggttctaggagaagccaggcg

SEQ ID NO: 244636 - DNA, 120 bp, Artificial Sequence
  ENSG00000122085_61 (sequence is synthesized)
gtgaccacacggcgcagctgctttgcacccgggatggtcctggggccacccttttgagtgcttctatatctcagggagcacggatgtccctggtggggaccaggctccctgcgtggcccc

SEQ ID NO: 244637 - DNA, 120 bp, Artificial Sequence
  ENSG00000122085_62 (sequence is synthesized)
agcacctgtcggccccagagctgcctcccctgaagggctggcctcaccctcctgctgaccctctggaggggctcggccttccccttgcagggccccctcagagctgcttcagggacagcc

SEQ ID NO: 244638 - DNA, 120 bp, Artificial Sequence
  ENSG00000122085_63 (sequence is synthesized)
accactgatcatgctgagaggccccatcctcacggctgatgcggttgctttcttcttagggtcaaattctgcattcctctccttccacccctgcttcttggaggctgtggcaccccctgc

SEQ ID NO: 244639 - DNA, 120 bp, Artificial Sequence
  ENSG00000122085_64 (sequence is synthesized)
tctttctgagctgccctcagtctgtactgaccttcctcatgccctcgcccccaactgcatcacttcttatgcagggatctcaaccgcaccctcgggcacttcatatccgcttccatagct

SEQ ID NO: 244640 - DNA, 120 bp, Artificial Sequence
  ENSG00000122085_65 (sequence is synthesized)
gcaagtacaacgggcccccctctgtactccagatctcacctgcccaccactgggcatcccgggcagctgcctgccctctcctcagacaccttgctgggggctctctcccctgctcaccgt

SEQ ID NO: 244641 - DNA, 120 bp, Artificial Sequence
  ENSG00000122085_66 (sequence is synthesized)
gcggcagggaccccagggctctggtccctgcttgccactctccttgctgcatttccctccctcctctgcctgaggagtttttgctcagagcgtgttcattaaactggtgactaggctctg

SEQ ID NO: 244642 - DNA, 120 bp, Artificial Sequence
  ENSG00000122085_67 (sequence is synthesized)
ttggggagttccatgaggatgaccacctggccttccaggtgagaggcaagggccagagaggtcccctctggggcagggtcgcgcctgcctcactcctgccaacatgtctcagggcttctg

SEQ ID NO: 244643 - DNA, 120 bp, Artificial Sequence
  ENSG00000122085_68 (sequence is synthesized)
tgtcagaatcacaggcagattcccagagcggcactcacccagtaaacccggtgggaagggcccaaggcacctgggcccatcagccttgctgccaccgggaagatcttgccaggacagtgg

SEQ ID NO: 244644 - DNA, 120 bp, Artificial Sequence
  ENSG00000122085_69 (sequence is synthesized)
cggaggatttgccggaccacactcggagtggcgggttagaccctcatggcctcctgcccatggtttactaaaacaaagctcagagccctactttggcaaataaagctgctgtaatgtctc

SEQ ID NO: 244645 - DNA, 120 bp, Artificial Sequence
  ENSG00000122085_70 (sequence is synthesized)
acagggagcaatccgtgaccccccaaggtgggtgtgggggggggggggggcgtgtcaccttagggaactcaatgagtccgaagaacaatttgaaatgttgggaaaagagaagaggaattt

SEQ ID NO: 244646 - DNA, 120 bp, Artificial Sequence
  ENSG00000122085_71 (sequence is synthesized)
gatgtcagccggggtgatccctgagatagaggcctgtctctgatggcatgagctctaagagggtcctggaggattggtacatcctagaacattccagttagccctcttttaggggaaact

SEQ ID NO: 244647 - DNA, 120 bp, Artificial Sequence
  ENSG00000122085_72 (sequence is synthesized)
ggcataggattgatgcagaaggcatttttgatgatgggaccaaaattcaagtctccttggtagcattctaggatcaactagatcctaggatctggtagattgtaggattctagtgggtag

SEQ ID NO: 244648 - DNA, 120 bp, Artificial Sequence
  ENSG00000122085_73 (sequence is synthesized)
aggccaggggtgctgtgaaacatcctgcagtgcacaggatggtcccacaagagaggatgatccggcccagaatgtcagtgctgagcctgagaaactcatctaaggcctggtccacaacag

SEQ ID NO: 244649 - DNA, 120 bp, Artificial Sequence
  ENSG00000122085_74 (sequence is synthesized)
gctgccatcttctccgcgctatggctgcgttcggccgtcagatggcacctcctggttgtaggaaaacaagctcagggctcccagtgattctacattatgggaaattaaagagggtgcttt

SEQ ID NO: 244650 - DNA, 120 bp, Artificial Sequence
  ENSG00000122085_75 (sequence is synthesized)
agaatgactggtaccgtgattagtgtagtaacagcaagtttctcaggtttttcaaatgtagtgaaggtcagttatatggataagaagcctcggacacctcatatttgagtggaggaagtg

SEQ ID NO: 244651 - DNA, 120 bp, Artificial Sequence
  ENSG00000122085_76 (sequence is synthesized)
aaagactagattctctgcatacatcagccaaagagaaatctttaatttctttactacagatcaaacctattcttcaacttttctgccattaataatgaatgatccagtcctattcttaga

SEQ ID NO: 244652 - DNA, 120 bp, Artificial Sequence
  ENSG00000122085_77 (sequence is synthesized)
agcagctcggtgactccgtccacatcgccacagttgagtcagatggcagtggcagtcctttgccagtggaaggagttcctgctaaggggaggtgcaggagagtgtactccttctacttat

SEQ ID NO: 244653 - DNA, 120 bp, Artificial Sequence
  ENSG00000122121_0 (sequence is synthesized)
acagtccgcctcgggcagcccaaagctcctctgcccaccctggctcccagagccctccaaaacaaaagaccagagaagcactctccacccagcagccagacgcctccttcttgacgccag

SEQ ID NO: 244654 - DNA, 120 bp, Artificial Sequence
  ENSG00000122121_1 (sequence is synthesized)
cccccaccctctgtctgctcgagcccaggaaaggcctgaaggaagaggccggggaaagagccctccctctctcccttgtccctccatccacccagcgccggcatctggagaccctatggc

SEQ ID NO: 244655 - DNA, 120 bp, Artificial Sequence
  ENSG00000122121_2 (sequence is synthesized)
ccgggctcactggggctgctgcccctggctggtcctcctctgtgcttgtgcctggggccacacaaagccagtggaccttggagggcaggatgtgagaaactgttccaccaacccccctta

SEQ ID NO: 244656 - DNA, 120 bp, Artificial Sequence
  ENSG00000122121_3 (sequence is synthesized)
ccttccagttactgtggtcaataccacaatgtcactcacagccctccgccagcagatgcagacccagaatctctcagcctacatcatcccaggcacagatgctcacatgaacgagtacat

SEQ ID NO: 244657 - DNA, 120 bp, Artificial Sequence
  ENSG00000122121_4 (sequence is synthesized)
cggccaacatgacgagaggcgtgcgtggattacaggctttacagggtctgcaggaactgcagtggtgactatgaagaaagcagctgtctggaccgacagtcgctactggactcaggctga

SEQ ID NO: 244658 - DNA, 120 bp, Artificial Sequence
  ENSG00000122121_5 (sequence is synthesized)
gcggcagatggactgcaactgggagctccataaggaagttggcaccactcctattgtcacctggctcctcaccgagattcctgctggagggcgtgtgggttttgaccccttcctcttgtc

SEQ ID NO: 244659 - DNA, 120 bp, Artificial Sequence
  ENSG00000122121_6 (sequence is synthesized)
cattgacacctgggagagttatgatctggccctccaaggctctaacagacagctggtgtccatcacaaccaatcttgtggacctggtatggggatcagagaggccaccggttccaaatca

SEQ ID NO: 244660 - DNA, 120 bp, Artificial Sequence
  ENSG00000122121_7 (sequence is synthesized)
acccatttatgccctgcaggaggcattcacagggagcacttggcaggagaaagtatctggcgtccgaagccagatgcagaagcatcaaaaggtcccgactgccgtccttctgtcggcgct

SEQ ID NO: 244661 - DNA, 120 bp, Artificial Sequence
  ENSG00000122121_8 (sequence is synthesized)
tgaggagacggcctggctcttcaaccttcgagccagtgacatcccctataaccccttcttctattcctacacgctgctcacagactcttctattaggttgtttgcaaacaagagtcgctt

SEQ ID NO: 244662 - DNA, 120 bp, Artificial Sequence
  ENSG00000122121_9 (sequence is synthesized)
tagctccgaaaccttgagctatctgaactccagttgcacaggccccatgtgtgtgcaaatcgaggattacagccaagttcgtgacagcatccaggcctactcattgggagatgtgaggat

SEQ ID NO: 244663 - DNA, 120 bp, Artificial Sequence
  ENSG00000122121_10 (sequence is synthesized)
ctggattgggaccagctataccatgtatgggatctatgaaatgatacccaaggagaaactcgtgacagacacctactccccagtgatgatgaccaaggcagtgaagaacagcaaggagca

SEQ ID NO: 244664 - DNA, 120 bp, Artificial Sequence
  ENSG00000122121_11 (sequence is synthesized)
ggccctcctcaaggccagccacgtgcgggacgctgtggctgtgatccggtacttggtctggctggagaagaacgtgcccaaaggcacagtggatgagttctcgggggcagagatcgtgga

SEQ ID NO: 244665 - DNA, 120 bp, Artificial Sequence
  ENSG00000122121_12 (sequence is synthesized)
caagttccgaggagaagaacagttctcctccggacccagttttgaaaccatctctgctagtggtctgaatgctgccctggcccactacagcccgaccaaggagctgaaccgcaagctgtc

SEQ ID NO: 244666 - DNA, 120 bp, Artificial Sequence
  ENSG00000122121_13 (sequence is synthesized)
tccactggggcaccccctctgccttccagaaggaggcatacacccgtgtgctgataggaaatattgacctgtccaggctcatctttcccgctgctacatcagggcgaatggtggaggcct

SEQ ID NO: 244667 - DNA, 120 bp, Artificial Sequence
  ENSG00000122121_14 (sequence is synthesized)
ttgcccgcagagccttgtgggatgctggtctcaattatggtcatgggacaggccacggcattggcaacttcctgtgtgtgcatgagtggccagtgggattccagtccaacaacatcgcta

SEQ ID NO: 244668 - DNA, 120 bp, Artificial Sequence
  ENSG00000122121_15 (sequence is synthesized)
tggccaagggcatgttcacttccattgaacctggttactataaggatggagaatttgggatccgtctcgaagatgtggctctcgtggtagaagcaaagaccaagtacccagggagctacc

SEQ ID NO: 244669 - DNA, 120 bp, Artificial Sequence
  ENSG00000122121_16 (sequence is synthesized)
tgacctttgaagtggtatcatttgtgccctatgaccggaacctcatcgatgtcagcctgctgtctcccgagcatctccagtacctgaatcgctactaccagaccatccgggagaaggtgg

SEQ ID NO: 244670 - DNA, 120 bp, Artificial Sequence
  ENSG00000122121_17 (sequence is synthesized)
gtccagagctgcagaggcgccagctactagaggagttcgagtggcttcaacagcacacagagcccctggccgccagggccccagacaccgcctcctgggcctctgtgttagtggtctcca

SEQ ID NO: 244671 - DNA, 120 bp, Artificial Sequence
  ENSG00000122121_18 (sequence is synthesized)
cccttgccatccttggctggagtgtctagaggctccagactctcctgttaaccctccatctagatggggggctcccttgcttagctcccctcaccctgcactgaacataccccaagagcc

SEQ ID NO: 244672 - DNA, 120 bp, Artificial Sequence
  ENSG00000122121_19 (sequence is synthesized)
cctgctggcccattgcctagaaacctttgcattcatcctccttctccaagacctatggagaaggtcccaggccccaggaacacagggcttcttggccccagatggcacctccctgcaccc

SEQ ID NO: 244673 - DNA, 120 bp, Artificial Sequence
  ENSG00000122121_20 (sequence is synthesized)
cggggttgtataccacaccctgggcccctaatcccaggccccgagataggaaagccagctagtctcttctcttctgtgatctcagtaggcctaacctataacctagcacagactgctaca

SEQ ID NO: 244674 - DNA, 120 bp, Artificial Sequence
  ENSG00000122121_21 (sequence is synthesized)
gctgctcccctcccgccaaacaaaaccccaagagagcaatgcccctaccacccaagggtgccatggtcccgggagagcccaaacctatcaccacctgttgggcatagccagagctgttcc

SEQ ID NO: 244675 - DNA, 120 bp, Artificial Sequence
  ENSG00000122121_22 (sequence is synthesized)
cacccagccagggcatgaaacatcaaccccccacatgtgaacccatcattcctaaaccctgggtaggctccatgccaagtaacagcagagggagttaagccataggaatttggctgtgga

SEQ ID NO: 244676 - DNA, 120 bp, Artificial Sequence
  ENSG00000122121_23 (sequence is synthesized)
gtaagagggaatgcggtgaggcactctggaatatgaccctaccagaggttggagaacaaacttgggcagccggaacccgtcactattctagacttccctggcattcgaggagccctttga

SEQ ID NO: 244677 - DNA, 120 bp, Artificial Sequence
  ENSG00000122121_24 (sequence is synthesized)
actttccaaagtgcagccacagctacaatgctgttaaatcctcccacattcttggatgccccttcaccttgtgtggacagtgtctggtttctccattttacagacaggaaaactgagctt

SEQ ID NO: 244678 - DNA, 120 bp, Artificial Sequence
  ENSG00000122121_25 (sequence is synthesized)
cagacagggggtgggctttgcctaaggacacacaaatttggttgggagttgatggggccagatgagccagcattccagctctttcacccttcagcaacatgcagagtccctgagcccacc

SEQ ID NO: 244679 - DNA, 120 bp, Artificial Sequence
  ENSG00000122121_26 (sequence is synthesized)
tcccagccctctcctcattctctgaacccactgtggtgagaagaatttgctccggccaaattggccgttagccacctgggtccacatcctgctaagacgtttaaaacagcctaacaaaga

SEQ ID NO: 244680 - DNA, 120 bp, Artificial Sequence
  ENSG00000122121_27 (sequence is synthesized)
gatataaagaaatggaccttggtagaaggaggggcggtgggactataaagatagagcatttgaaattgtagttgcagaatgttttgcaatgaggatgtattcatggattgtgtaattaaa

SEQ ID NO: 244681 - DNA, 120 bp, Artificial Sequence
  ENSG00000122122_0 (sequence is synthesized)
acccccaagctgccactgcagcagtcagagtggcagctgaaggctcggttcatgccgtgcccccgggcagttctggtgaggctaagcaagaggcctctgcatcttgacacctaggagagc

SEQ ID NO: 244682 - DNA, 120 bp, Artificial Sequence
  ENSG00000122122_1 (sequence is synthesized)
agggacggagtctcccagggtggaggaccatgctgcgccgcaagccctccaatgccagtgagaaggagcccactcagaagaaaaagctctcccttcagcgctccagcagcttcaaggatt

SEQ ID NO: 244683 - DNA, 120 bp, Artificial Sequence
  ENSG00000122122_2 (sequence is synthesized)
ttgccaaatccaaacccagctcccccgtggtgagcgagaaggagtttaatctggatgataacattccagaagatgactcaggtgtccccaccccagaagatgctgggaagagtggcaaaa

SEQ ID NO: 244684 - DNA, 120 bp, Artificial Sequence
  ENSG00000122122_3 (sequence is synthesized)
agctggggaagaagtggagggcagtgatttcccgaaccatgaacaggaagatgggcaagatgatggtgaaggccctgtcagaagagatggcagacactctggaggagggctctgcctccc

SEQ ID NO: 244685 - DNA, 120 bp, Artificial Sequence
  ENSG00000122122_4 (sequence is synthesized)
cgacatctccagactacagcctggacagccctggccctgagaagatggcgctggccttttctgagcaagaggagcatgaacttccggtgctcagccgccaggcatcaacaggcagtgagc

SEQ ID NO: 244686 - DNA, 120 bp, Artificial Sequence
  ENSG00000122122_5 (sequence is synthesized)
tctgcagccccagcccaggttctggcagcttcggggaggaaccacctgccccccagtacacagggcctttctgtggccgggcacgagtccacaccgacttcactcccagcccctatgacc

SEQ ID NO: 244687 - DNA, 120 bp, Artificial Sequence
  ENSG00000122122_6 (sequence is synthesized)
acgactcgctgaaactgcagaaaggagatgtgatccagatcattgaaaagccacctgtgggcacgtggctgggcctactcaatggcaaggtgggctctttcaaattcatctatgtggatg

SEQ ID NO: 244688 - DNA, 120 bp, Artificial Sequence
  ENSG00000122122_7 (sequence is synthesized)
tgctgcccgaggaggccgtggggcatgcccgccccagccgccgacagagcaagggcaagaggcccaagcctaagaccctgcatgagctgctggagcgcatcggcctggaggagcacacat

SEQ ID NO: 244689 - DNA, 120 bp, Artificial Sequence
  ENSG00000122122_8 (sequence is synthesized)
ccaccctcctgctcaatggctaccagacactggaagacttcaaagagctgcgagaaacacacctcaatgagctgaacatcatggatccacagcaccgggccaagctgctcacggccgccg

SEQ ID NO: 244690 - DNA, 120 bp, Artificial Sequence
  ENSG00000122122_9 (sequence is synthesized)
agctgctgctggactatgacactggcagtgaggaggctgaagagggcgccgagagcagccaggagccagtggcacacacagtgtcggaacccaaggtggacatcccgcgcgactcaggct

SEQ ID NO: 244691 - DNA, 120 bp, Artificial Sequence
  ENSG00000122122_10 (sequence is synthesized)
gctttgagggctcggagagcgggcgcgatgacgcagagctggcaggcactgaggagcagctgcaaggcctctccctggccggggcaccttgaggtggcggtggcaataggccaaggctgg

SEQ ID NO: 244692 - DNA, 120 bp, Artificial Sequence
  ENSG00000122122_11 (sequence is synthesized)
ggagtgggcccagcctcccgtggtggcccaggtcctgaggactggcactgagcctggccctgcttccccagggacacttagggccacagaggccaggccagggccctacaggttccaggc

SEQ ID NO: 244693 - DNA, 120 bp, Artificial Sequence
  ENSG00000122122_12 (sequence is synthesized)
tcagctggagtggttggggagtcgcccaagggcacatcccacctgcctgagccccgccctccaccagcgactgacagcgcagcccctcctggcaccaactgctcccctgccatggccacg

SEQ ID NO: 244694 - DNA, 120 bp, Artificial Sequence
  ENSG00000122122_13 (sequence is synthesized)
gccacagcaagtggggcactgggaaaccctgcccatgtccctcaccaacaaggcctccaaatcctcctcacccccacaccacctacccctgtcgcactgctcctgaaaagggggccaagt

SEQ ID NO: 244695 - DNA, 120 bp, Artificial Sequence
  ENSG00000122122_14 (sequence is synthesized)
caatgtttcaggtcagtctaaaaaccctagggaagctggccatttaaaagaacccaaactgaccatgggtaaatccagttcccctaaataaggcctgaagaaatccacaggtaccattcc

SEQ ID NO: 244696 - DNA, 120 bp, Artificial Sequence
  ENSG00000122122_15 (sequence is synthesized)
cactttccttctccctagctttcttagaggtttggccactaaatcttatgagacttgaaccaagtggcttcctctttctaggcttaggacgggttggggttagaaagggtgatcactgaa

SEQ ID NO: 244697 - DNA, 120 bp, Artificial Sequence
  ENSG00000122122_16 (sequence is synthesized)
ggccttgcctgctctgacattctgtgacattaaatgtctattctcctgttacctgtggcctgggacaccagtggggtttatcgaggggaccagaggggcctcaggctttcagatgaaatg

SEQ ID NO: 244698 - DNA, 120 bp, Artificial Sequence
  ENSG00000122122_17 (sequence is synthesized)
gctcctcctactcacccactttattcctctccatgtaattcaggacaagctgcaacttcccccagcttaacacaatgcccatacctcatacgatatgcgccctcccgttccatccctggc

SEQ ID NO: 244699 - DNA, 120 bp, Artificial Sequence
  ENSG00000122122_18 (sequence is synthesized)
cccctcaaacgagacttctcacaaggctgattacagatggtcaaacctggcttccaaggacagaattgcctctcggaagccagctgtggatctgagtccagagttggccacttgtgtggg

SEQ ID NO: 244700 - DNA, 120 bp, Artificial Sequence
  ENSG00000122122_19 (sequence is synthesized)
tcctcacaagcaaagagagcactaaacttgacattgggggtccaccactccaactttgctttctgaaggttttggtgtacattgagccccagaaggaaaggagagtatctgtgagtgggg

SEQ ID NO: 244701 - DNA, 120 bp, Artificial Sequence
  ENSG00000122122_20 (sequence is synthesized)
gcctcccttgaccccagtacgaagtctatgccctgaatccccagagtagcccttcctggtgcccaactggcctggggacaaacagcgtccactacatctaggactgccggctaagtggac

SEQ ID NO: 244702 - DNA, 120 bp, Artificial Sequence
  ENSG00000122122_21 (sequence is synthesized)
acacttcttgacctcctaccaggaactttggtaaaagctagctttggggaaggggttgggtgtaaatatgagagggtggagggagaccagctggtagcaataaacatgggtagaactaaa

SEQ ID NO: 244703 - DNA, 120 bp, Artificial Sequence
  ENSG00000122122_22 (sequence is synthesized)
ccccgtggtgagcgagaaggagtttaatctggatgataacgtgagtttcagggcatccttgtgggatctggctgcaggccctgggcaggggggtgggggtgggagggaagagggtgaaga

SEQ ID NO: 244704 - DNA, 120 bp, Artificial Sequence
  ENSG00000122126_0 (sequence is synthesized)
ctctcttgggtcagattctcagctcccagctccccgctcccggctcccggcgcccggcgcccggcgcggagctgttcctcaaacgacacgcagccgaggtgggtgggtgtggggacgcgg

SEQ ID NO: 244705 - DNA, 120 bp, Artificial Sequence
  ENSG00000122126_1 (sequence is synthesized)
gagccagtgtcgtcggatcggcccgcagtccgctgtcctgctgagcccggaggccgcctggatggagccgccgctcccggtcggagcccagccgcttgccactgtcgagggtatggagat

SEQ ID NO: 244706 - DNA, 120 bp, Artificial Sequence
  ENSG00000122126_2 (sequence is synthesized)
gaagggtcctctccgggagccctgcgccctgaccctagcccagaggaacgggcaatatgagttaataatccagttgcatgagaaggaacagcatgttcaagatatcattcctataaatag

SEQ ID NO: 244707 - DNA, 120 bp, Artificial Sequence
  ENSG00000122126_3 (sequence is synthesized)
ccacttcagatgtgttcaagaagcagaagaaactcttttgattgacatagcttctaacagtggctgcaaaattcgggttcagggggactggatcagagagcgccgctttgaaatccctga

SEQ ID NO: 244708 - DNA, 120 bp, Artificial Sequence
  ENSG00000122126_4 (sequence is synthesized)
tgaggaacactgtttgaagttcctctcagctgtccttgctgctcagaaagctcagtcacagcttcttgttccagagcaaaaggactcatctagctggtaccagaaattagacactaagga

SEQ ID NO: 244709 - DNA, 120 bp, Artificial Sequence
  ENSG00000122126_5 (sequence is synthesized)
caaaccttctgttttttcagggcttcttggatttgaagacaatttttcttctatgaatttggacaagaaaataaattcacaaaatcagcctactgggattcatcgggaacccccacctcc

SEQ ID NO: 244710 - DNA, 120 bp, Artificial Sequence
  ENSG00000122126_6 (sequence is synthesized)
acccttttcagtgaataaaatgcttccacgtgaaaaagaagcttctaacaaggagcagcccaaagtgaccaacaccatgcggaagctctttgtaccaaatacccaatctgggcagcggga

SEQ ID NO: 244711 - DNA, 120 bp, Artificial Sequence
  ENSG00000122126_7 (sequence is synthesized)
gggtctcatcaaacatatcctggcaaagcgagagaaagaatatgtcaacattcagactttcagattttttgttggaacttggaatgtgaatggccagtctccagatagcgggttagaacc

SEQ ID NO: 244712 - DNA, 120 bp, Artificial Sequence
  ENSG00000122126_8 (sequence is synthesized)
ttggctgaactgtgatcccaatcctcctgatatctactgcattggattccaagaactggacttgagcacagaagccttcttctactttgaatctgtgaaggaacaagaatggtccatggc

SEQ ID NO: 244713 - DNA, 120 bp, Artificial Sequence
  ENSG00000122126_9 (sequence is synthesized)
tgtagagagaggtttgcattccaaagccaagtataagaaagttcaactggtgcgccttgttgggatgatgcttcttatatttgccagaaaggatcagtgtcgatacattcgtgatattgc

SEQ ID NO: 244714 - DNA, 120 bp, Artificial Sequence
  ENSG00000122126_10 (sequence is synthesized)
tacagaaacagttggaactggaatcatggggaaaatgggaaacaaaggtggggtagctgtgagatttgtatttcacaacaccaccttttgcattgtcaattcccatctggctgcacacgt

SEQ ID NO: 244715 - DNA, 120 bp, Artificial Sequence
  ENSG00000122126_11 (sequence is synthesized)
ggaggactttgagagaaggaatcaagattataaggacatttgtgcgagaatgagttttgtggtcccaaatcagaccctcccgcagttgaacatcatgaaacatgaggttgtcatttggtt

SEQ ID NO: 244716 - DNA, 120 bp, Artificial Sequence
  ENSG00000122126_12 (sequence is synthesized)
gggagatttgaattatagactttgcatgcctgatgccaatgaggtgaaaagtcttattaataagaaagaccttcagagactcttgaaattcgaccagctaaatattcagcgcacacagaa

SEQ ID NO: 244717 - DNA, 120 bp, Artificial Sequence
  ENSG00000122126_13 (sequence is synthesized)
aaaagcttttgttgacttcaatgaaggggaaatcaagttcatccccacttataagtatgactctaaaacagaccggtgggattccagtgggaaatgccgggttccagcctggtgtgaccg

SEQ ID NO: 244718 - DNA, 120 bp, Artificial Sequence
  ENSG00000122126_14 (sequence is synthesized)
aattctttggagaggaacaaatgttaatcagcttaattatcggagtcacatggaactgaaaaccagcgaccacaagcctgttagcgccctcttccatattggggtgaaggttgtggatga

SEQ ID NO: 244719 - DNA, 120 bp, Artificial Sequence
  ENSG00000122126_15 (sequence is synthesized)
acgaaggtaccggaaagtctttgaagatagtgtacgcatcatggacagaatggaaaatgacttccttccttccttagaactcagcaggagggagtttgtgtttgaaaatgtgaagtttcg

SEQ ID NO: 244720 - DNA, 120 bp, Artificial Sequence
  ENSG00000122126_16 (sequence is synthesized)
gcaactacaaaaggagaagttccagatcagcaacaatggacaggttccctgccatttttctttcatccctaaacttaatgacagccagtactgcaagccatggcttcgggctgaaccttt

SEQ ID NO: 244721 - DNA, 120 bp, Artificial Sequence
  ENSG00000122126_17 (sequence is synthesized)
tgagggctacttggagccaaatgagacagtggacatttctcttgatgtgtatgtcagcaaagactctgtaaccatcctgaactcgggagaagataagattgaagatattctcgtccttca

SEQ ID NO: 244722 - DNA, 120 bp, Artificial Sequence
  ENSG00000122126_18 (sequence is synthesized)
cctggatcgaggcaaagattacttcttgactatcagtggaaattacctcccaagttgttttggcacatccttagaggctctgtgccgtatgaaaagaccaatccgagaagttcctgttac

SEQ ID NO: 244723 - DNA, 120 bp, Artificial Sequence
  ENSG00000122126_19 (sequence is synthesized)
caaactcatagacttggaagaagacagcttcctagaaaaggagaaatcccttctgcaaatggttcctttggatgaaggtgccagtgagagaccccttcaggttcccaaggagatctggct

SEQ ID NO: 244724 - DNA, 120 bp, Artificial Sequence
  ENSG00000122126_20 (sequence is synthesized)
tctagtagatcacctattcaaatacgcctgtcaccaggaggacctgttccagacccctggaatgcaggaagagctccagcagatcattgattgtctggataccagcattcctgagacaat

SEQ ID NO: 244725 - DNA, 120 bp, Artificial Sequence
  ENSG00000122126_21 (sequence is synthesized)
cactctgtggctgaagcactgctcattttcttggaagccctgccagagccagtcatctgttacgagctgtatcagcgatgtcttgactctgcttatgatccccggatctgccgacaggtg

SEQ ID NO: 244726 - DNA, 120 bp, Artificial Sequence
  ENSG00000122126_22 (sequence is synthesized)
atctcccagcttccgagatgccatagaaatgttttccgttacttgatggcattccttcgagaactcttaaaattctctgaatacaatagcgtcaatgccaacatgatcgctactctcttc

SEQ ID NO: 244727 - DNA, 120 bp, Artificial Sequence
  ENSG00000122126_23 (sequence is synthesized)
actagtcttctcctgaggcctccacccaaccttatggcaagacagactccaagtgaccgccagcgtgctattcagttccttctgggctttctgcttgggagcgaagaagactaaggcttt

SEQ ID NO: 244728 - DNA, 120 bp, Artificial Sequence
  ENSG00000122126_24 (sequence is synthesized)
tactgttctctgatattctagaagcagacgatctcgggctccaagtatttcagaatgatttaaaaagtcatgccacaggaagggtctattgcagaatttcaagttctgtttatagtaaaa

SEQ ID NO: 244729 - DNA, 120 bp, Artificial Sequence
  ENSG00000122126_25 (sequence is synthesized)
aggaagagcgtttcctaatccctcctttaccatatcctacacagaaaaatacttttagacttatattgccaagccaaagttaccatattttggtgtttttgtgttttctctttataaggc

SEQ ID NO: 244730 - DNA, 120 bp, Artificial Sequence
  ENSG00000122126_26 (sequence is synthesized)
aaaaagatctgtatttacactccttcacctagggatgtgtttgttgccctcctacccaattgtcatgattgtccttagtaccctaggcctagattctgagatcttcccattctaggccta

SEQ ID NO: 244731 - DNA, 120 bp, Artificial Sequence
  ENSG00000122126_27 (sequence is synthesized)
caagcactacttgctgtagctgagacttgtctagagtcctttgttttgcacttttgacccaccccttcctggatcactcctttgcactccactcccctcgttctgtcactttgaacgaag

SEQ ID NO: 244732 - DNA, 120 bp, Artificial Sequence
  ENSG00000122126_28 (sequence is synthesized)
tctgagtgaggctagtgactccttgggtgtcctcaacagtgaattcactgtctgcgtgcagttattacatgcatttgtgcatttctactacaatggcatctttatgtctctgtaacattg

SEQ ID NO: 244733 - DNA, 120 bp, Artificial Sequence
  ENSG00000122126_29 (sequence is synthesized)
gccttttcatggctccacactgggtggaaccatattctcttagatcacatttagtagcataactgtagggactattagagatggcatctcatcgatgagagagaatcacaatcagaatgg

SEQ ID NO: 244734 - DNA, 120 bp, Artificial Sequence
  ENSG00000122126_30 (sequence is synthesized)
aagcactttgagtatctgaagagtgagagcattcatgtttgacaggtcctgcttcccactatccttttcctgttattattcaaattttacacaaggactaatcctgggtgtctctgagac

SEQ ID NO: 244735 - DNA, 120 bp, Artificial Sequence
  ENSG00000122126_31 (sequence is synthesized)
ccatctcctgcctagacatccacctccagagcaacactggccccacagtaaaagaggaagtcttgtacctcaggcaggcccatctagagctattgctccttcccacagcaaaggtattgt

SEQ ID NO: 244736 - DNA, 120 bp, Artificial Sequence
  ENSG00000122126_32 (sequence is synthesized)
ggatgacccttagaatccattctctggtcttctgaaataccaagggcagatgtcacctccttcctcagcaggactgactctgggctctacaaccagctccttcacataaagggtttagag

SEQ ID NO: 244737 - DNA, 120 bp, Artificial Sequence
  ENSG00000122126_33 (sequence is synthesized)
actccccttggctcccagtcaccatatccagtgttgtgtaaagagactggccaacaggaccaaccaagcaccttacctctcccatacaagatgaccctctgagcttttcatttattcaag

SEQ ID NO: 244738 - DNA, 120 bp, Artificial Sequence
  ENSG00000122126_34 (sequence is synthesized)
ctctgtggtacagcctttttttaaaataaattaatctatattggttgacaaacaagccaccaaccactgactgcaaaactgcctgatgcagttgggttcctcctggttttcttttgttac

SEQ ID NO: 244739 - DNA, 120 bp, Artificial Sequence
  ENSG00000122126_35 (sequence is synthesized)
aaccacccttgcctgtttacattaattgcaaggagcataacgtacaggctgtatgtacaatcctgggcattgactctgtgacatttctagcatatccaaggcaccaccagtgatttctcc

SEQ ID NO: 244740 - DNA, 120 bp, Artificial Sequence
  ENSG00000122126_36 (sequence is synthesized)
tgtttcttggtgggggtgggggggaaggtacgtattctgcaatatggctaaaccctttcctgattgagagttaaagcaataggagtcaagttactggtgccacagatctggaggtatgat

SEQ ID NO: 244741 - DNA, 120 bp, Artificial Sequence
  ENSG00000122126_37 (sequence is synthesized)
aggtcaggggctaggtgttgaacttagttaatggaagactgagagcagaacaggtttgtcatctccgcaaggccagaaagtgatcacaaaaagaggcagatgatagacactggggtaggg

SEQ ID NO: 244742 - DNA, 120 bp, Artificial Sequence
  ENSG00000122126_38 (sequence is synthesized)
tcataccacagggaaatacctttcctgggcttgttttctagcatatcactgacctgggatctttgggtgatcaagggtgtggttagtggaggctctgtgctgcacgtatgcagtatccta

SEQ ID NO: 244743 - DNA, 120 bp, Artificial Sequence
  ENSG00000122126_39 (sequence is synthesized)
tctctttctacatcagatcaaaacactaagttggtgtactgcctcgaccttttttcagctcatcctggaacatatacagagttgagagttttagacaatctctaggtagaggagacaaga

SEQ ID NO: 244744 - DNA, 120 bp, Artificial Sequence
  ENSG00000122126_40 (sequence is synthesized)
tgtagacccagacagaagaaatctgcttccctaccatggctattccagcaccccaacctgtaattgccaagtcctctaaggtactaatttgtagctgctctgaagtaaggatttcggatt

SEQ ID NO: 244745 - DNA, 120 bp, Artificial Sequence
  ENSG00000122126_41 (sequence is synthesized)
cagctggtagggaaagactctgcacctgctgtcttagggaagaaatggttcaaatccatgtggtgacattgcattagtctccctttcactgttttcttattctgtaattgtttgttatat

SEQ ID NO: 244746 - DNA, 120 bp, Artificial Sequence
  ENSG00000122126_42 (sequence is synthesized)
ttcccaaaaacgtcttgatcactaagcaaagctgctagtgggattctatatttcgtgtcatcttttttattataatttattgcaaatttttttctgaataaatatatgttgtgtgaaaaa

SEQ ID NO: 244747 - DNA, 120 bp, Artificial Sequence
  ENSG00000122126_43 (sequence is synthesized)
gggtgtgcgtatgaatgtgtgatgaccacgtggcctggtcattgagtggacagggaccaaacagcacggccactcttactttgaagttataatttggaaggtattgtgttggccatgagg

SEQ ID NO: 244748 - DNA, 120 bp, Artificial Sequence
  ENSG00000122126_44 (sequence is synthesized)
agataatagaagttagacagatgaaatgggtcctgcaagggttggattatagactactattacagcagctgtaagttcctcttactttcatcttccacctgtttttctcactgcctgccc

SEQ ID NO: 244749 - DNA, 120 bp, Artificial Sequence
  ENSG00000122126_45 (sequence is synthesized)
gaactggaggggacgcagaggaggagcaaaggtctgggctttggggaattctccgatttagggcgtggaagaaagaagaggaaaggaaatggttaataatccagttgcatgagaaggaac

SEQ ID NO: 244750 - DNA, 120 bp, Artificial Sequence
  ENSG00000122126_46 (sequence is synthesized)
agcatgttcaagatatcattcctataaatagccacttcagatgtgttcaagaagcagaagaaactcttttgattgacatagcttctaacaaaaggagaaggcaaaaacaacacttaaaaa

SEQ ID NO: 244751 - DNA, 120 bp, Artificial Sequence
  ENSG00000122126_47 (sequence is synthesized)
agcaaaactagaacaaaagcaattccataacaactgacactgctgctgaaataagagatggaaatgtcctgtatttgatgtggagaagtatttgattcaaagctgaaaagttaaactgag

SEQ ID NO: 244752 - DNA, 120 bp, Artificial Sequence
  ENSG00000122133_0 (sequence is synthesized)
ctcagagccacccacagccgcagccatgctgtgcctcctgctcaccctgggcgtggccctggtctgtggtgtcccggccatggacatcccccagaccaagcaggacctggagctcccaaa

SEQ ID NO: 244753 - DNA, 120 bp, Artificial Sequence
  ENSG00000122133_1 (sequence is synthesized)
gttggcagggacctggcactccatggccatggcgaccaacaacatctccctcatggcgacactgaaggcccctctgagggtccacatcacctcactgttgcccacccccgaggacaacct

SEQ ID NO: 244754 - DNA, 120 bp, Artificial Sequence
  ENSG00000122133_2 (sequence is synthesized)
ggagatcgttctgcacagatgggagaacaacagctgtgttgagaagaaggtccttggagagaagactgagaatccaaagaagttcaagatcaactatacggtggcgaacgaggccacgct

SEQ ID NO: 244755 - DNA, 120 bp, Artificial Sequence
  ENSG00000122133_3 (sequence is synthesized)
aggacgatgagatcatgcagggattcatcagggctttcaggcccctgcccaggcacctatggtacttgctggacttgaaacagatggaagagccgtgccgtttctaggtgagctcctgcc

SEQ ID NO: 244756 - DNA, 120 bp, Artificial Sequence
  ENSG00000122133_4 (sequence is synthesized)
tggtcctgcctcctggctcacctccgcctccaggaagaccagactcccacccttccacacctccagagcagtgggacttcctcctgccctttcaaagaataaccacagctcagaagacga

SEQ ID NO: 244757 - DNA, 120 bp, Artificial Sequence
  ENSG00000122133_5 (sequence is synthesized)
tgacgtggtcatctgtgtcgccatccccttcctgctgcacacctgcaccacggccatggggaggctgctccctgggggcagagtctctggcagaggttattaataaacccttggagcatg

SEQ ID NO: 244758 - DNA, 120 bp, Artificial Sequence
  ENSG00000122133_6 (sequence is synthesized)
ggggcaggcccaggccaccgcctggcagaaccggagctcctacagacccatgggcagcttctggtggagaaaatacctcaagtttcttatctacaaaacaaaagggtccactttcacaaa

SEQ ID NO: 244759 - DNA, 120 bp, Artificial Sequence
  ENSG00000122133_7 (sequence is synthesized)
tgagatcatgcagggattcatcagggctttcaggcccctgcccaggcacctatggtacttgctggacttgaaacagatggaagagccgtgccgtttctagatggagtctcgctctgtcac

SEQ ID NO: 244760 - DNA, 120 bp, Artificial Sequence
  ENSG00000122133_8 (sequence is synthesized)
caaagtgctgggatttcagtgccacattcttaagggggtgtcctcaagcccaccacatccttccagggctcccccgaaacaccctgctcttcctccctctacttaagtgacctgtaaacc

SEQ ID NO: 244761 - DNA, 120 bp, Artificial Sequence
  ENSG00000122136_0 (sequence is synthesized)
cgcccagtgacctgccgaggtcggcagcacagagctctggagatgaagaccctgttcctgggtgtcacgctcggcctggccgctgccctgtccttcaccctggaggaggaggatatcaca

SEQ ID NO: 244762 - DNA, 120 bp, Artificial Sequence
  ENSG00000122136_1 (sequence is synthesized)
gggacctggtacgtgaaggccatggtggtcgataaggactttccggaggacaggaggcccaggaaggtgtccccagtgaaggtgacagccctgggcggtgggaacttggaagccacgttc

SEQ ID NO: 244763 - DNA, 120 bp, Artificial Sequence
  ENSG00000122136_2 (sequence is synthesized)
gaagctcatatacctgcaggagctgcccgggacggacgactacgtcttttactgcaaagaccagcgccgtgggggcctgcgctacatgggaaagcttgtgggtaggaatcctaataccaa

SEQ ID NO: 244764 - DNA, 120 bp, Artificial Sequence
  ENSG00000122136_3 (sequence is synthesized)
cctggaggccctggaagaatttaagaaattggtgcagcacaagggactctcggaggaggacattttcatgcccctgcagacgggaagctgcgttctcgaacactaggcagcccccgggtc

SEQ ID NO: 244765 - DNA, 120 bp, Artificial Sequence
  ENSG00000122136_4 (sequence is synthesized)
tgcacctccagagcccaccctaccaccagacacagagcccggaccacctggacctaccctccagccatgacccttccctgctcccacccacctgactccaaataaagagcttctccccca

SEQ ID NO: 244766 - DNA, 120 bp, Artificial Sequence
  ENSG00000122136_5 (sequence is synthesized)
ggctccctcaggtgtcagctcggcccatcgccccctgcacctgtccccactcggtctactcccccccacccactcaccaaggatgctcagaggcctgcccagtcattggaggagctgagg

SEQ ID NO: 244767 - DNA, 120 bp, Artificial Sequence
  ENSG00000122136_6 (sequence is synthesized)
ctgctctggagccccgaggctgcccagcagtggccgatgtggaagctgcagagcctggggagggagctctgggcctggcctctgccctaccctgcagcctccctgacctctgctcctctt

SEQ ID NO: 244768 - DNA, 120 bp, Artificial Sequence
  ENSG00000122136_7 (sequence is synthesized)
cccagcacagcagcccccgggtctgcacctccagagcccaccctaccaccagacacagagcccggaccacctggacctaccctccagccatgacccttccctgctcccacccacctgact

SEQ ID NO: 244769 - DNA, 120 bp, Artificial Sequence
  ENSG00000122136_8 (sequence is synthesized)
cgcccagtgacctgccgaggtcggcagcacagagctctggagatgaagaccctgttcctgggtgtcacgctcggcctggccgctgccctgtccttcaccctggaggaggaggatgaggga

SEQ ID NO: 244770 - DNA, 120 bp, Artificial Sequence
  ENSG00000122140_0 (sequence is synthesized)
gagacctcgctctgccccgcgtcccagccatggcgacatcctcggccgcgctgccccgaatactcggcgcgggtgcccgggccccgtcgcgctggttgggctttctcgggaaggcgaccc

SEQ ID NO: 244771 - DNA, 120 bp, Artificial Sequence
  ENSG00000122140_1 (sequence is synthesized)
cccggcctgctcggccgagccgcaggacgcttggaagcgcgacggcccttatgatccgcgagtcggaggacagcaccgatttcaacgacaagattttgaatgagcccctcaagcactctg

SEQ ID NO: 244772 - DNA, 120 bp, Artificial Sequence
  ENSG00000122140_2 (sequence is synthesized)
acttcttcaatgtcaaggaactgttttccgtgagaagcctcttcgatgcccgagtccatctgggacacaaagctggctgtcggcacaggtttatggagccgtacatctttgggagccgcc

SEQ ID NO: 244773 - DNA, 120 bp, Artificial Sequence
  ENSG00000122140_3 (sequence is synthesized)
tggaccacgacatcatcgacctggaacagacagccacgcacctccagctggccttgaacttcaccgcccacatggcctaccgcaagggcatcatcttgtttataagccgcaaccggcagt

SEQ ID NO: 244774 - DNA, 120 bp, Artificial Sequence
  ENSG00000122140_4 (sequence is synthesized)
tctcgtacctgattgagaacatggcccgtgactgtggcgagtacgcccacactcgctacttcaggggcggcatgctgaccaacgcgcgcctcctctttggccccacggtccgcctgccgg

SEQ ID NO: 244775 - DNA, 120 bp, Artificial Sequence
  ENSG00000122140_5 (sequence is synthesized)
acctcatcatcttcctgcacacgctcaacaacatctttgagccacacgtggccgtgagagacgcagccaagatgaacatccccacagtgggcatcgtggacaccaactgcaacccctgcc

SEQ ID NO: 244776 - DNA, 120 bp, Artificial Sequence
  ENSG00000122140_6 (sequence is synthesized)
ccggcaatgacgactctccgctggctgtgcacctctactgcaggctcttccagacggccatcacccgggccaaggagaagcggcagcaggttgaggctctctatcgcctgcagggccaga

SEQ ID NO: 244777 - DNA, 120 bp, Artificial Sequence
  ENSG00000122140_7 (sequence is synthesized)
aggagcccggggaccaggggccagcccaccctcctggggctgacatgagccattccctgtgatgttcactctcctcccaaagcaaaccacagccaagcctgtctgagctgggagtcccct

SEQ ID NO: 244778 - DNA, 120 bp, Artificial Sequence
  ENSG00000122140_8 (sequence is synthesized)
tccccagccctgggtcagcggcatcctcagtcgttgttacttactcagctgatgtcacagtgcagacatccaccgttccaccacagaaccagtggctgagcggaccaacgttgccatgtg

SEQ ID NO: 244779 - DNA, 120 bp, Artificial Sequence
  ENSG00000122140_9 (sequence is synthesized)
cgtttgctctgtggggaacagagcacagagggtgagcgacatgtgcagaacggccccttggctgcagttaggacctcagtggctggtatggccaagctgctagaagatgctgctgtccct

SEQ ID NO: 244780 - DNA, 120 bp, Artificial Sequence
  ENSG00000122140_10 (sequence is synthesized)
gtgatcccagcagccctcccttcaccgtgacccctgacctttgtcaggaaggtgcagtttttcttctcaatctaaatgcctttcaggtgggccgcttccttggctacctggttccagggg

SEQ ID NO: 244781 - DNA, 120 bp, Artificial Sequence
  ENSG00000122140_11 (sequence is synthesized)
gctgttttgtaatgagatgctgctggcaggccactcagaggctcccagctgggttggtgggacagccaggccagatgacctgattccagcaaaaataaaactcagatttgggcaaaatga

SEQ ID NO: 244782 - DNA, 120 bp, Artificial Sequence
  ENSG00000122140_12 (sequence is synthesized)
aacctgccgggcgactccccaagggccgggaaggtcgggacggcgagagattccctgctgggaccgtcggaggtcccagccgcctggggacagcgctgtggctcctccgggcctgtaggc

SEQ ID NO: 244783 - DNA, 120 bp, Artificial Sequence
  ENSG00000122140_13 (sequence is synthesized)
cggaggggcccgttggggatgcggtggggagcgggcgtggtgcattcgggactcggcgccaggacctctatctacttccccccaggtgcccgggccccgtcgcgctggttgggctttctc

SEQ ID NO: 244784 - DNA, 120 bp, Artificial Sequence
  ENSG00000122145_0 (sequence is synthesized)
gcaaagaatcccttcaccccctccagggatggctctgagctctcgggcgcgtgccttctccgtggaagccttggtggggagacccagcaaaagaaaactccaagacccaatacaggcgga

SEQ ID NO: 244785 - DNA, 120 bp, Artificial Sequence
  ENSG00000122145_1 (sequence is synthesized)
gcagcctgagctgcgggagaaaaagggcggagaggaagaggaggagagaaggagcagcgctgcagggaagagcgagccgcttgaaaaacaacctaagacagagccctcaacatctgcttc

SEQ ID NO: 244786 - DNA, 120 bp, Artificial Sequence
  ENSG00000122145_2 (sequence is synthesized)
ctctggctgcggcagcgacagcggctacggcaacagctctgaaagtctggaagagaaagatattcaaatggagcttcaaggatctgaactgtggaaaagattccatgacatcgggactga

SEQ ID NO: 244787 - DNA, 120 bp, Artificial Sequence
  ENSG00000122145_3 (sequence is synthesized)
gatgatcattactaaagcgggcaggcggatgttcccctctgttcgggtcaaggtgaaagggttggatccagggaagcagtaccatgtggccatcgatgtggtgccggtggattccaaacg

SEQ ID NO: 244788 - DNA, 120 bp, Artificial Sequence
  ENSG00000122145_4 (sequence is synthesized)
ctataggtacgtctatcacagctcacagtggatggtagctgggaatacagaccatttgtgcatcattcctagattctatgttcacccggactcaccctgctcgggagagacctggatgcg

SEQ ID NO: 244789 - DNA, 120 bp, Artificial Sequence
  ENSG00000122145_5 (sequence is synthesized)
gcagatcatcagctttgatcgcatgaaactcaccaacaatgagatggatgacaaaggccacatcattctgcaatccatgcataagtacaaaccccgagtgcacgtgatagagcaaggcag

SEQ ID NO: 244790 - DNA, 120 bp, Artificial Sequence
  ENSG00000122145_6 (sequence is synthesized)
cagtgttgacctgtcccagattcagtccttgcccactgaaggtgttaaaacattctcctttaaagaaactgagttcaccacagtaacggcttaccaaaaccaacagattacgaaactaaa

SEQ ID NO: 244791 - DNA, 120 bp, Artificial Sequence
  ENSG00000122145_7 (sequence is synthesized)
aatagaaagaaatccttttgctaaaggatttagagatactggaagaaacaggggtgtattggatgggcttttagagacctacccatggaggccttctttcactctcgattttaaaacctt

SEQ ID NO: 244792 - DNA, 120 bp, Artificial Sequence
  ENSG00000122145_8 (sequence is synthesized)
tggcgcagacacacaaagtggaagcagtggctcatctccagtgacctctagtggaggggccccctctcctttgaactccttactttctccactttgcttttcacctatgtttcatttacc

SEQ ID NO: 244793 - DNA, 120 bp, Artificial Sequence
  ENSG00000122145_9 (sequence is synthesized)
ggcaacagcaacctcttgttttaccggctcctgaaagactagcaagcagcaacagttctcagtctttagccccactcatgatggaagtgcctatgttatcttccctgggggtcaccaatt

SEQ ID NO: 244794 - DNA, 120 bp, Artificial Sequence
  ENSG00000122145_10 (sequence is synthesized)
caaaaagcggttcatctgaagactccagtgatcagtatctacaagcacctaattctaccaatcaaatgttatatggattacagtcacctggaaatatttttctgccaaactccatcaccc

SEQ ID NO: 244795 - DNA, 120 bp, Artificial Sequence
  ENSG00000122145_11 (sequence is synthesized)
cagaagcacttagttgctcctttcatccttcctatgacttttatagatacaatttctctatgccatctagactgataagtggttccaaccatcttaaagtgaatgacgacagtcaagttt

SEQ ID NO: 244796 - DNA, 120 bp, Artificial Sequence
  ENSG00000122145_12 (sequence is synthesized)
cttttggagaaggcaaatgtaatcatgttcattggtatccagcaattaaccattacctttagtaagacaatagcatttctagaacaattacatgtaaacaaatattttctttatttgtag

SEQ ID NO: 244797 - DNA, 120 bp, Artificial Sequence
  ENSG00000122145_13 (sequence is synthesized)
ccaaagaaatttcaacagttattgggcttaaaaagcatcattacaatacagtatttctttgttatacatttaaagatttaaagtgccttatcaaataatattcatgaagagttgtttata

SEQ ID NO: 244798 - DNA, 120 bp, Artificial Sequence
  ENSG00000122145_14 (sequence is synthesized)
atgtcaaatgaaacctacaggaatctctgattacagtggccttgagcttcaaaatgagatatgcaataaatattatttgatgatactccaccagtgaaaattgatgctaagtgatgggat

SEQ ID NO: 244799 - DNA, 120 bp, Artificial Sequence
  ENSG00000122145_15 (sequence is synthesized)
tttcaattatactgaagctagttcaccacgttaactgcattttacacattgacaatgacaaaaagaagatggatgtaattctcatgaaagcagtgaagcaatttcagttttaaaaatgaa

SEQ ID NO: 244800 - DNA, 120 bp, Artificial Sequence
  ENSG00000122145_16 (sequence is synthesized)
gatcggctttcatgtaattatctagtagttgtagaagaaaatttaattatttgtttgcctcatgcctttatactttgctgttgaagaaactactaatctcaatttaagatacaaataagg

SEQ ID NO: 244801 - DNA, 120 bp, Artificial Sequence
  ENSG00000122145_17 (sequence is synthesized)
acacaaactttcaagtattatattttatttatctttgtagcctaaagaccatttaatcttgaaggaacacaaagatcaaatgaaaagtaaaacactctaaataaatttgcttttattttc

SEQ ID NO: 244802 - DNA, 120 bp, Artificial Sequence
  ENSG00000122145_18 (sequence is synthesized)
actcttctctgggctcttgagaagagctgctgcaggcatttgcagagtgaatgagctctgactgagacttgacttcagaaccactgggctggcctggcctcttgacacagcaacacactg

SEQ ID NO: 244803 - DNA, 120 bp, Artificial Sequence
  ENSG00000122145_19 (sequence is synthesized)
gcagcgctgcagggaagagcgagccgcttggtaagtactgccattgccctgagcccgttgcctgagcttactggttccgcatctctccgcctggctcgcgtcccgacgcagccagacagc

SEQ ID NO: 244804 - DNA, 120 bp, Artificial Sequence
  ENSG00000122145_20 (sequence is synthesized)
cacattaggagccgcgagacacctcgaccacctggtgaaggggaagtttcagcgcctccgaatccatcccggagtacagcagtttctttgcggtaaaggggagggtccctacataattgt

SEQ ID NO: 244805 - DNA, 120 bp, Artificial Sequence
  ENSG00000122176_0 (sequence is synthesized)
actcctctctctcttcctctctcacacgttctccaacccaaggaggccagacagagggacgtggtcactctctgaaaagttcaacttgagagacaaaatgcagtggacctccctcctgct

SEQ ID NO: 244806 - DNA, 120 bp, Artificial Sequence
  ENSG00000122176_1 (sequence is synthesized)
gctggcagggctcttctccctctcccaggcccagtatgaagatgaccctcattggtggttccactacctccgcagccagcagtccacctactacgatccctatgacccttacccgtatga

SEQ ID NO: 244807 - DNA, 120 bp, Artificial Sequence
  ENSG00000122176_2 (sequence is synthesized)
gacctacgagccttacccctatggggtggatgaagggccagcctacacctacggctctccatcccctccagatccccgcgactgcccccaggagtgcgactgcccacccaacttccccac

SEQ ID NO: 244808 - DNA, 120 bp, Artificial Sequence
  ENSG00000122176_3 (sequence is synthesized)
ggccatgtactgtgacaatcgcaacctcaagtacctgcccttcgttccctcccgcatgaagtatgtgtacttccagaacaaccagatcacctccatccaggaaggcgtctttgacaatgc

SEQ ID NO: 244809 - DNA, 120 bp, Artificial Sequence
  ENSG00000122176_4 (sequence is synthesized)
cacagggctgctctggattgctctccacggcaaccagatcaccagtgataaggtgggcaggaaggtcttctccaagctgaggcacctggagaggctgtacctggaccacaacaacctgac

SEQ ID NO: 244810 - DNA, 120 bp, Artificial Sequence
  ENSG00000122176_5 (sequence is synthesized)
ccggatgcccggtcccctgcctcgatccctgagagagctccatctcgaccacaaccagatctcacgggtccccaacaatgctctggaggggctggagaacctcacggccttgtacctcca

SEQ ID NO: 244811 - DNA, 120 bp, Artificial Sequence
  ENSG00000122176_6 (sequence is synthesized)
acacaatgagatccaggaagtgggcagttccatgaggggcctccggtcactgatcttgctggacctgagttataaccaccttcggaaggtgcctgatgggctgccctcagctcttgagca

SEQ ID NO: 244812 - DNA, 120 bp, Artificial Sequence
  ENSG00000122176_7 (sequence is synthesized)
gctgtacatggagcacaacaatgtctacaccgtccccgatagctacttccggggggcgcccaagctgctgtatgtgcggctgtcccacaacagtctaaccaacaatggcctggcctccaa

SEQ ID NO: 244813 - DNA, 120 bp, Artificial Sequence
  ENSG00000122176_8 (sequence is synthesized)
caccttcaattccagcagcctccttgagctagacctctcctacaaccagctgcagaagatccccccagtcaacaccaacctggagaacctctacctccaaggcaataggatcaatgagtt

SEQ ID NO: 244814 - DNA, 120 bp, Artificial Sequence
  ENSG00000122176_9 (sequence is synthesized)
ctccatcagcagcttctgcaccgtggtggacgtcgtgaacttctccaagctgcaggtgctgcgcctggacgggaacgagatcaagcgcagcgccatgcctgccgacgcgcccctctgcct

SEQ ID NO: 244815 - DNA, 120 bp, Artificial Sequence
  ENSG00000122176_10 (sequence is synthesized)
gcgccttgccagcctcatcgagatctgagcagccctggcaccgggtactgggcggagagcccccgtggcatttggcttgatggtttggtttggcttttgctggaaggtccaggatggacc

SEQ ID NO: 244816 - DNA, 120 bp, Artificial Sequence
  ENSG00000122176_11 (sequence is synthesized)
atgtgacagaagtccacgggcaccctctgtagtcttctttcctgtaggtggggttagggggggcgatcagggacaggcagccttctgctgaggacataggcagaagctcactcttttcca

SEQ ID NO: 244817 - DNA, 120 bp, Artificial Sequence
  ENSG00000122176_12 (sequence is synthesized)
cttaagttcttcccaatgatctgaggtcatggaacttcaaaagtggcatgggcaatagtatataaccatacttttctaacaatccctggctgtctgtgagcagcacttgacagctctccc

SEQ ID NO: 244818 - DNA, 120 bp, Artificial Sequence
  ENSG00000122176_13 (sequence is synthesized)
tctgtgctgggctggtcgtgcagttactctgggctcccatttgttgcttctcaaaatatacctcttgcccagctgcctcttctgaaatccacttcacccactccactttcctccacagat

SEQ ID NO: 244819 - DNA, 120 bp, Artificial Sequence
  ENSG00000122176_14 (sequence is synthesized)
gcctcttctgtgccttaagcagagtcaggagaccccaaggcatgtgagcatctgcccagcaacctgtggagacaacccacactgtgtctgagggtgaaaggacaccaggagtcacttcta

SEQ ID NO: 244820 - DNA, 120 bp, Artificial Sequence
  ENSG00000122176_15 (sequence is synthesized)
tacctccctaacctcacccctggaaagccaccagattggaggtcaccagcatgatgataatattcatgacctgatgtgggaggagacagccaacctcaggcttagatcaatgtatagggc

SEQ ID NO: 244821 - DNA, 120 bp, Artificial Sequence
  ENSG00000122176_16 (sequence is synthesized)
tatattttggcagctgggtagctctttgaaggtggataagacttcagaagaggaaaggccagactttgcttaccatcagcatctgcaatgggccaaacacacctcaaattggctgagttg

SEQ ID NO: 244822 - DNA, 120 bp, Artificial Sequence
  ENSG00000122176_17 (sequence is synthesized)
agaaagcagccccagtagttccattcttgcccagcactttctgcattccaaacagcatcctacctgggtttttatccacaaaggtagcggccacatggtttttaaagtatgagaaacaca

SEQ ID NO: 244823 - DNA, 120 bp, Artificial Sequence
  ENSG00000122176_18 (sequence is synthesized)
gtttgtcctctccttttatccaagcaggaagattctatatcctgatggtagagacagactccaggcagccctggacttgctagcccaaagaaggaggatgtggttaatctgtttcacctg

SEQ ID NO: 244824 - DNA, 120 bp, Artificial Sequence
  ENSG00000122176_19 (sequence is synthesized)
gtttgtcctaaggccatagttaaaaagtaccagctctggctggggtccgtgaagcccaggccaggcagccaaatcttgcctgtgctgggcatacaaccctctgctttcacatctctgagc

SEQ ID NO: 244825 - DNA, 120 bp, Artificial Sequence
  ENSG00000122176_20 (sequence is synthesized)
tatatcctcattagtgaaggtggcttttgctttatagtttggctggggagcacttaattcttcccatttcaaaaggtaatgttgcctggggcttaacccacctgccctttgggcaaggtt

SEQ ID NO: 244826 - DNA, 120 bp, Artificial Sequence
  ENSG00000122176_21 (sequence is synthesized)
gggacaaagccatctgggcagtcaggggcaaggactgttggaggagagttagcccaagtataggctctgcccagatgccatcacatccctgatactgtgtatgctttgaagcaccttccc

SEQ ID NO: 244827 - DNA, 120 bp, Artificial Sequence
  ENSG00000122176_22 (sequence is synthesized)
tgagaagggaagaggggatctttggactacgttcttggctccagacctggaatccacaaaagccaaaccagctcatttcaacaaaggagctccgatgtgaggggcaaggctgccccctgc

SEQ ID NO: 244828 - DNA, 120 bp, Artificial Sequence
  ENSG00000122176_23 (sequence is synthesized)
cccagggctcttcagaaagcatctgcatgtgaacaccatcatgcctttataaaggatccttattacaggaaaagcatgagtggtggctaacctgaccaataaagttattttatgattgca

SEQ ID NO: 244829 - DNA, 120 bp, Artificial Sequence
  ENSG00000122176_24 (sequence is synthesized)
gagcattaagtggaagtggatgatgctagtgcataagcagtgatcagcaaatgctggagtccctgcctttccttttgttccagtggtggagatccccgcgactgcccccaggagtgcgac

SEQ ID NO: 244830 - DNA, 120 bp, Artificial Sequence
  ENSG00000122180_0 (sequence is synthesized)
gggctgctggagcttgggggctggtggcaggaacaagccttttccgaccccatggagctgtatgagacatccccctacttctaccaggaaccccgcttctatgatggggaaaactacctg

SEQ ID NO: 244831 - DNA, 120 bp, Artificial Sequence
  ENSG00000122180_1 (sequence is synthesized)
cctgtccacctccagggcttcgaaccaccaggctacgagcggacggagctcaccctgagccccgaggccccagggccccttgaggacaaggggctggggacccccgagcactgtccaggc

SEQ ID NO: 244832 - DNA, 120 bp, Artificial Sequence
  ENSG00000122180_2 (sequence is synthesized)
cagtgcctgccgtgggcgtgtaaggtgtgtaagaggaagtcggtgtccgtggaccggcggcgggcggccacactgagggagaagcgcaggctcaagaaggtgaatgaggccttcgaggcc

SEQ ID NO: 244833 - DNA, 120 bp, Artificial Sequence
  ENSG00000122180_3 (sequence is synthesized)
ctgaagagaagcaccctgctcaaccccaaccagcggctgcccaaggtggagatcctgcgcagtgccatccagtacatcgagcgcctccaggccctgctcagctccctcaaccaggaggag

SEQ ID NO: 244834 - DNA, 120 bp, Artificial Sequence
  ENSG00000122180_4 (sequence is synthesized)
cgtgacctccgctaccggggcgggggcgggccccagccaggggtgcccagcgaatgcagctctcacagcgcctcctgcagtccagagtggggcagtgcactggagttcagcgccaaccca

SEQ ID NO: 244835 - DNA, 120 bp, Artificial Sequence
  ENSG00000122180_5 (sequence is synthesized)
ggggatcatctgctcacggctgaccctacagatgcccacaacctgcactccctcacctccatcgtggacagcatcacagtggaagatgtgtctgtggccttcccagatgaaaccatgccc

SEQ ID NO: 244836 - DNA, 120 bp, Artificial Sequence
  ENSG00000122180_6 (sequence is synthesized)
tctgtagcaggggcctcctaagccaggctgccctgatgctaggaagccagctctggggtgccataggccagactatccccttcctcatccatgtaaggttaacccaccccccagcaaggg

SEQ ID NO: 244837 - DNA, 120 bp, Artificial Sequence
  ENSG00000122180_7 (sequence is synthesized)
actggacgccctcattcagctgcctccttagaggagagggcatcccctttccagggaggtaaagcaggggaccagagcgccccctcgtgtatgccccagctcagggggcaaactcaggag

SEQ ID NO: 244838 - DNA, 120 bp, Artificial Sequence
  ENSG00000122180_8 (sequence is synthesized)
cttcctttttatcataacgcggcctctaattccaccccccaagtgaaacggtttgagagacgcagtgccctgacctggacaagctgtgcacgtctcctgttctggtctcttcccgatgcc

SEQ ID NO: 244839 - DNA, 120 bp, Artificial Sequence
  ENSG00000122180_9 (sequence is synthesized)
agtggctgggctgggcctgccctgaattgagagagaagaaggggagaggaacagccctctgttcccaagtccctggggggccaaacttttgcagtgaatattgggaaccttccagtggtt

SEQ ID NO: 244840 - DNA, 120 bp, Artificial Sequence
  ENSG00000122180_10 (sequence is synthesized)
ttatgttttgttttgtttcgtgtgttgtttgtaaagctgccatccgaccaaggtctcctgtgctgaagttgccggggacaggcagggaaaaggggttggggcctcttgggggtgatttct

SEQ ID NO: 244841 - DNA, 76 bp, Artificial Sequence
  ENSG00000122180_11 (sequence is synthesized)
ggcagggaaaaggggttggggcctcttgggggtgatttcttttgttaacaaagcattgtgtggttttgcatttgga

SEQ ID NO: 244842 - DNA, 120 bp, Artificial Sequence
  ENSG00000122188_0 (sequence is synthesized)
actctgctttgggtgttgaaggaagacgagcttctcacggagcctctcttgagcctcttggcagtttccccctctgtgcccctcacgtttccaccagaaacgtgaaggcagaggccacag

SEQ ID NO: 244843 - DNA, 120 bp, Artificial Sequence
  ENSG00000122188_1 (sequence is synthesized)
attctccctgagccacctcacttggaagcaccatgtccggatgagatcgcacttcctgcagtgggcattagccacgtccaggtagaaccaaacctgttgcttttgtatgttgggtcaact

SEQ ID NO: 244844 - DNA, 120 bp, Artificial Sequence
  ENSG00000122188_2 (sequence is synthesized)
tggcctgacgtttcagaggtagacacgagatagggagtttgttgcgggggtggggagaagtggtagacatgctggctaactgattatgattaagagaaacttagaagctgaagccagaga

SEQ ID NO: 244845 - DNA, 120 bp, Artificial Sequence
  ENSG00000122188_3 (sequence is synthesized)
gcatctcaaaggttcctgatacaatggatggtgtcactccaaccctttcgacaatcagagggaggaccttggagtccagcactctgcatgtgactccccgcagcctggacagaaataaag

SEQ ID NO: 244846 - DNA, 120 bp, Artificial Sequence
  ENSG00000122188_4 (sequence is synthesized)
accagatcaccaacatcttttccgggtttgcgggactcctcgccatcctcctggtcgttgcggttttctgcatcttgtggaattggaataaacggaagaagcgacaagttccttacctcc

SEQ ID NO: 244847 - DNA, 120 bp, Artificial Sequence
  ENSG00000122188_5 (sequence is synthesized)
gagttaccgtcatgcccttgctgactttgccacaaaccagacaaagagccaaaaatatttatgacatcttgccttggcgacaggaagacctggggagacatgagtcgaggagtatgcgca

SEQ ID NO: 244848 - DNA, 120 bp, Artificial Sequence
  ENSG00000122188_6 (sequence is synthesized)
ttttcagtactgagagcctcctctccagaaattctgagagcccggagcatgtgccctcccaagcaggcaatgccttccaggagcatacagcccacatccatgccacagagtacgcggtgg

SEQ ID NO: 244849 - DNA, 120 bp, Artificial Sequence
  ENSG00000122188_7 (sequence is synthesized)
gtatctatgacaacgccatggtcccccagatgtgtgggaacctcactccctcggcacactgcatcaatgtcagagcttccagagactgcgcaagcatttcttcagaggattcgcatgatt

SEQ ID NO: 244850 - DNA, 120 bp, Artificial Sequence
  ENSG00000122188_8 (sequence is synthesized)
atgtcaatgtccccacagcagaagagattgctgagactctagcttctaccaaaagcccttccagaaatctctttgttcttcccagtacccagaagctggagtttactgaggaaagagatg

SEQ ID NO: 244851 - DNA, 120 bp, Artificial Sequence
  ENSG00000122188_9 (sequence is synthesized)
agggctgtggagatgctggtgactgcaccagtttgtattctccaggagctgaggacagtgattcactcagcaatggagaaggttcttctcagatctcaaatgactatgtcaacatgacag

SEQ ID NO: 244852 - DNA, 120 bp, Artificial Sequence
  ENSG00000122188_10 (sequence is synthesized)
ggttggatctcagtgccatccaggaaaggcagctctgggtggcttttcagtgctgcagagactatgaaaatgttccagcagcagatcccagtggaagccagcagcaggctgagaaagatg

SEQ ID NO: 244853 - DNA, 120 bp, Artificial Sequence
  ENSG00000122188_11 (sequence is synthesized)
tgccatcctcaaacataggtcatgtcgaggacaagacagatgatcccgggacccatgtccaatgtgtcaaaaggacattccttgcttcaggggattatgcagactttcagccattcacac

SEQ ID NO: 244854 - DNA, 120 bp, Artificial Sequence
  ENSG00000122188_12 (sequence is synthesized)
agagtgaggacagtcagatgaaacatagagaagagatgtcaaatgaggactccagtgactatgaaaatgtgctaactgccaagttaggaggcagggactctgagcaggggcctggcactc

SEQ ID NO: 244855 - DNA, 120 bp, Artificial Sequence
  ENSG00000122188_13 (sequence is synthesized)
cccagccataaagccacattgagtagtctatcccataggattgactactgcagagtctagtgcagacccgtgatcaccttagtgcttcagtggattcactggttagattaaaaagaggct

SEQ ID NO: 244856 - DNA, 120 bp, Artificial Sequence
  ENSG00000122188_14 (sequence is synthesized)
gagatgagcagtgaactaagaggccacacaaaagcagaggtttgggaattccagaagggaattcttctcaagcagagtgtggttatctcctgtaccagcctaagaatgtttgctgaaact

SEQ ID NO: 244857 - DNA, 120 bp, Artificial Sequence
  ENSG00000122188_15 (sequence is synthesized)
gcttcctagaactgtgaagaaagcaggaaagtagtgcacagtagtctaagattattaccttcattaataccaacaggctgcaaagcaagagtatagattattgtataatccagtcagagg

SEQ ID NO: 244858 - DNA, 120 bp, Artificial Sequence
  ENSG00000122188_16 (sequence is synthesized)
gagtatagattattgtataatccagtcagaggtcaaaaggaaggaagaagttggagtggagtggggtgggcaatttccattttaaagagtgtaggcaggccaggtgcagtggctcatgcc

SEQ ID NO: 244859 - DNA, 120 bp, Artificial Sequence
  ENSG00000122188_17 (sequence is synthesized)
aagaagtgtgggcaaccaaatgtaggtaaggatgaagaagaacaggaactctcactggtggctgatgggattgcaaagcgtcagggcagctttgaaaaacttttcagcagtttcttataa

SEQ ID NO: 244860 - DNA, 120 bp, Artificial Sequence
  ENSG00000122188_18 (sequence is synthesized)
gcataacttatcatatggcccagccatttcactactagaaattgacgcaagtgaactgaaaacttatgttcacacaaaaactcgcacatgactgtttatagcagcttcattcataattac

SEQ ID NO: 244861 - DNA, 120 bp, Artificial Sequence
  ENSG00000122188_19 (sequence is synthesized)
caaaaactagaaataacccagatatccttcaacaggtgattggataagctgttgatatccattccttgagtttatccatactcaacagtaaaaaatgaactcttggttcacacaataata

SEQ ID NO: 244862 - DNA, 120 bp, Artificial Sequence
  ENSG00000122188_20 (sequence is synthesized)
tcttggttcacacaataatatagacatatcttaaatccattttgctaagtgaaagaagctaggcctaaaagtctacatgttgggcgattctatttatatgacattctggaaaaggcaaaa

SEQ ID NO: 244863 - DNA, 120 bp, Artificial Sequence
  ENSG00000122188_21 (sequence is synthesized)
tcagttgttgtcaggtttgagaaaaggagggaagtttgctacaaaggggctgcaaagggaataggctgatggagctgttctgtatggtactgtgtggtggatacatgacaatatccattt

SEQ ID NO: 244864 - DNA, 87 bp, Artificial Sequence
  ENSG00000122188_22 (sequence is synthesized)
tacacatggccaggccggggccgaggcaggggaacacaaggtcaggagatcaagactgtcctggacaacatggtgaaaccctgtctc

SEQ ID NO: 244865 - DNA, 120 bp, Artificial Sequence
  ENSG00000122188_23 (sequence is synthesized)
ggtgaaaccctgtctctactgtctctaacatttgtaaacctgtctctaatttgtaatttgtaaaccctgtctctcatatttgtaaaactacaaaaattagcttggcatggtggtgtgcgc

SEQ ID NO: 244866 - DNA, 120 bp, Artificial Sequence
  ENSG00000122194_0 (sequence is synthesized)
atgtaagtcaacaacatcctgggattgggacccactttctgggcactgctggccagtcccaaaatggaacataaggaagtggttcttctacttcttttatttctgaaatcaggtcaagga

SEQ ID NO: 244867 - DNA, 120 bp, Artificial Sequence
  ENSG00000122194_1 (sequence is synthesized)
gagcctctggatgactatgtgaatacccagggggcttcactgttcagtgtcactaagaagcagctgggagcaggaagtatagaagaatgtgcagcaaaatgtgaggaggacgaagaattc

SEQ ID NO: 244868 - DNA, 120 bp, Artificial Sequence
  ENSG00000122194_2 (sequence is synthesized)
acctgcagggcattccaatatcacagtaaagagcaacaatgtgtgataatggctgaaaacaggaagtcctccataatcattaggatgagagatgtagttttatttgaaaagaaagtgtat

SEQ ID NO: 244869 - DNA, 120 bp, Artificial Sequence
  ENSG00000122194_3 (sequence is synthesized)
ctctcagagtgcaagactgggaatggaaagaactacagagggacgatgtccaaaacaaaaaatggcatcacctgtcaaaaatggagttccacttctccccacagacctagattctcacct

SEQ ID NO: 244870 - DNA, 120 bp, Artificial Sequence
  ENSG00000122194_4 (sequence is synthesized)
gctacacacccctcagagggactggaggagaactactgcaggaatccagacaacgatccgcaggggccctggtgctatactactgatccagaaaagagatatgactactgcgacattctt

SEQ ID NO: 244871 - DNA, 120 bp, Artificial Sequence
  ENSG00000122194_5 (sequence is synthesized)
gagtgtgaagaggaatgtatgcattgcagtggagaaaactatgacggcaaaatttccaagaccatgtctggactggaatgccaggcctgggactctcagagcccacacgctcatggatac

SEQ ID NO: 244872 - DNA, 120 bp, Artificial Sequence
  ENSG00000122194_6 (sequence is synthesized)
attccttccaaatttccaaacaagaacctgaagaagaattactgtcgtaaccccgatagggagctgcggccttggtgtttcaccaccgaccccaacaagcgctgggaactttgtgacatc

SEQ ID NO: 244873 - DNA, 120 bp, Artificial Sequence
  ENSG00000122194_7 (sequence is synthesized)
ccccgctgcacaacacctccaccatcttctggtcccacctaccagtgtctgaagggaacaggtgaaaactatcgcgggaatgtggctgttaccgtgtccgggcacacctgtcagcactgg

SEQ ID NO: 244874 - DNA, 120 bp, Artificial Sequence
  ENSG00000122194_8 (sequence is synthesized)
agtgcacagacccctcacacacataacaggacaccagaaaacttcccctgcaaaaatttggatgaaaactactgccgcaatcctgacggaaaaagggccccatggtgccatacaaccaac

SEQ ID NO: 244875 - DNA, 120 bp, Artificial Sequence
  ENSG00000122194_9 (sequence is synthesized)
agccaagtgcggtgggagtactgtaagataccgtcctgtgactcctccccagtatccacggaacaattggctcccacagcaccacctgagctaacccctgtggtccaggactgctaccat

SEQ ID NO: 244876 - DNA, 120 bp, Artificial Sequence
  ENSG00000122194_10 (sequence is synthesized)
ggtgatggacagagctaccgaggcacatcctccaccaccaccacaggaaagaagtgtcagtcttggtcatctatgacaccacaccggcaccagaagaccccagaaaactacccaaatgct

SEQ ID NO: 244877 - DNA, 120 bp, Artificial Sequence
  ENSG00000122194_11 (sequence is synthesized)
atgctcaggaacagaagcgagtgttgtagcacctccgcctgttgtcctgcttccagatgtagagactccttccgaagaagactgtatgtttgggaatgggaaaggataccgaggcaagag

SEQ ID NO: 244878 - DNA, 120 bp, Artificial Sequence
  ENSG00000122194_12 (sequence is synthesized)
ggcgaccactgttactgggacgccatgccaggactgggctgcccaggagccccatagacacagcattttcactccagagacaaatccacgggcgggtctggaaaaaaattactgccgtaa

SEQ ID NO: 244879 - DNA, 120 bp, Artificial Sequence
  ENSG00000122194_13 (sequence is synthesized)
ccctgatggtgatgtaggtggtccctggtgctacacgacaaatccaagaaaactttacgactactgtgatgtccctcagtgtgcggccccttcatttgattgtgggaagcctcaagtgga

SEQ ID NO: 244880 - DNA, 120 bp, Artificial Sequence
  ENSG00000122194_14 (sequence is synthesized)
gccgaagaaatgtcctggaagggttgtaggggggtgtgtggcccacccacattcctggccctggcaagtcagtcttagaacaaggtttggaatgcacttctgtggaggcaccttgatatc

SEQ ID NO: 244881 - DNA, 120 bp, Artificial Sequence
  ENSG00000122194_15 (sequence is synthesized)
cccagagtgggtgttgactgctgcccactgcttggagaagtccccaaggccttcatcctacaaggtcatcctgggtgcacaccaagaagtgaatctcgaaccgcatgttcaggaaataga

SEQ ID NO: 244882 - DNA, 120 bp, Artificial Sequence
  ENSG00000122194_16 (sequence is synthesized)
agtgtctaggctgttcttggagcccacacgaaaagatattgccttgctaaagctaagcagtcctgccgtcatcactgacaaagtaatcccagcttgtctgccatccccaaattatgtggt

SEQ ID NO: 244883 - DNA, 120 bp, Artificial Sequence
  ENSG00000122194_17 (sequence is synthesized)
cgctgaccggaccgaatgtttcatcactggctggggagaaacccaaggtacttttggagctggccttctcaaggaagcccagctccctgtgattgagaataaagtgtgcaatcgctatga

SEQ ID NO: 244884 - DNA, 120 bp, Artificial Sequence
  ENSG00000122194_18 (sequence is synthesized)
gtttctgaatggaagagtccaatccaccgaactctgtgctgggcatttggccggaggcactgacagttgccagggtgacagtggaggtcctctggtttgcttcgagaaggacaaatacat

SEQ ID NO: 244885 - DNA, 120 bp, Artificial Sequence
  ENSG00000122194_19 (sequence is synthesized)
tttacaaggagtcacttcttggggtcttggctgtgcacgccccaataagcctggtgtctatgttcgtgtttcaaggtttgttacttggattgagggagtgatgagaaataattaattgga

SEQ ID NO: 244886 - DNA, 120 bp, Artificial Sequence
  ENSG00000122194_20 (sequence is synthesized)
cgggagacagagtgacgcactgactcacctagaggctggaacgtgggtagggatttagcatgctggaaataactggcagtaatcaaacgaagacactgtccccagctaccagctacgcca

SEQ ID NO: 244887 - DNA, 120 bp, Artificial Sequence
  ENSG00000122194_21 (sequence is synthesized)
aacctcggcattttttgtgttattttctgactgctggattctgtagtaaggtgacatagctatgacatttgttaaaaataaactctgtacttaactttgatttgagtaaattttggtttt

SEQ ID NO: 244888 - DNA, 120 bp, Artificial Sequence
  ENSG00000122194_22 (sequence is synthesized)
aaaatccatgcttctcaagtcccttatataaaatggtgcagtatttgcatataacctacataccttctcttgtataatccctaatataatgtaaatgctatttaatcgttgttatactgt

SEQ ID NO: 244889 - DNA, 120 bp, Artificial Sequence
  ENSG00000122194_23 (sequence is synthesized)
attgtttttatttgtattatgttttattgtcatattgttattttctgtcatctttttcaagtcttttccatccacagttggttgaatttgtggatctggaacccatggatacagagggcc

SEQ ID NO: 244890 - DNA, 120 bp, Artificial Sequence
  ENSG00000122194_24 (sequence is synthesized)
aactgtatttaggataatttcatcacttttaattcaaaccacaatatgtgaataagcagatagaaagaatctttttgatgtcgatgttcaactatttttggcaccatagtagaacatggt

SEQ ID NO: 244891 - DNA, 120 bp, Artificial Sequence
  ENSG00000122194_25 (sequence is synthesized)
tgctttctattttttcttggatatggaggtttcttgaagacctagaacatagaagaatgcctagtttaaaaaaaatcaatgaaactatgagttttaggccaaatctgagaaaagatcaaa

SEQ ID NO: 244892 - DNA, 120 bp, Artificial Sequence
  ENSG00000122194_26 (sequence is synthesized)
gatgactatgtttgggactgaagtaagcatatcaggttagaactctcatcacatgttcgactcaaattgtggagcaaaagagtaaataagatataaaaatgaaaatgaagatacgtgaaa

SEQ ID NO: 244893 - DNA, 120 bp, Artificial Sequence
  ENSG00000122194_27 (sequence is synthesized)
gacacaaatcttatttttactcttaaatttttcacattttgggggacatggtctatatttttctcagatttctgaaatgttgtcttttaaaaatgtgtaaaagttacagttccttttcta

SEQ ID NO: 244894 - DNA, 120 bp, Artificial Sequence
  ENSG00000122194_28 (sequence is synthesized)
tagtttattttaaaatgtgggtcaatagtcccactgcttagaataagaggcagacaggatttcaatagaaattgcatgcctttttagatgtgcaaatgtttcattaagcatttcccatca

SEQ ID NO: 244895 - DNA, 120 bp, Artificial Sequence
  ENSG00000122194_29 (sequence is synthesized)
agtatatcccatcaagtatgctcccattaagcatatcccatcaagtataaatatttgaagggatgcatgacactttaaaaactgtttcctctactgtgttggtagccaggtattaagact

SEQ ID NO: 244896 - DNA, 120 bp, Artificial Sequence
  ENSG00000122194_30 (sequence is synthesized)
ttctagaaaatgttttcatttctgcccttcacctgtaaaataatttgttgtaaagccccttcccacagggatgttattaataattgagtaacgtattcacctctcggaaagaagcaaaac

SEQ ID NO: 244897 - DNA, 120 bp, Artificial Sequence
  ENSG00000122194_31 (sequence is synthesized)
ctctcggaaagaagcaaaaccccagaattaacctgaattttttttttttctgagacagagttttgctctcgttgcccaggctagagtgcaaccgtgcaatctcggctcaccacaacctcc

SEQ ID NO: 244898 - DNA, 120 bp, Artificial Sequence
  ENSG00000122194_32 (sequence is synthesized)
taactaaccatgtcagcttgagtgtattacttcacctcttagatttaattttttttgttcaaaagatgaaaggattagatttacaaaatcacttctacctctatgaccctgaaaataaga

SEQ ID NO: 244899 - DNA, 120 bp, Artificial Sequence
  ENSG00000122194_33 (sequence is synthesized)
tttttaaaatattattttatatttaacaaggagatgggaagtctaagcattccttttggtcttggcttcttattctgcagggtgaccatggtccttgggccctaacatctggatgaagcc

SEQ ID NO: 244900 - DNA, 120 bp, Artificial Sequence
  ENSG00000122194_34 (sequence is synthesized)
ctgggattgggacccactttctgggcactgctggccagtcccaaaatggaacataaggaagtggttcttctacttcttttatttctgaaatcagcaccacctgagctaacccctgtggtc

SEQ ID NO: 244901 - DNA, 120 bp, Artificial Sequence
  ENSG00000122194_35 (sequence is synthesized)
aatgtatttggcagaaggtgggagggggatattctgatccttttatttacatgtttatgtatgatctgagtttttatatggagcatatactacttttgattttttaaagaaaaattaaaa

SEQ ID NO: 244902 - DNA, 120 bp, Artificial Sequence
  ENSG00000122194_36 (sequence is synthesized)
tctgtctttgaaatgtacacagttgtttagaagttgaggaccatttttgtttgttacaacattattgtacctataatgggaatatttcaaagccacttgttaacactttgttagaacaaa

SEQ ID NO: 244903 - DNA, 120 bp, Artificial Sequence
  ENSG00000122194_37 (sequence is synthesized)
cagatttgatctcaaagaaaaaccaagaccagtatttgtcccaggtcctgcttttttacaatttcctccgaaatccagatacctgtcaacaccttggaaaaactgacttctccccaatta

SEQ ID NO: 244904 - DNA, 120 bp, Artificial Sequence
  ENSG00000122194_38 (sequence is synthesized)
gtagtgttgtgtgactgtcataagcccagtacaaaaatggccttctttgttggggagcttcttaccctccagtgttttgcccaatttttgtccaaggtggcaacataatttagttcagtt

SEQ ID NO: 244905 - DNA, 120 bp, Artificial Sequence
  ENSG00000122194_39 (sequence is synthesized)
cttgtttatttccaccatcatctatgcaccaaaatttatgtttctcaaggagggaccattcagaggatgcttcccaccggttcaagtgacagtgccagaaccaaagcgcatattgtagga

SEQ ID NO: 244906 - DNA, 120 bp, Artificial Sequence
  ENSG00000122194_40 (sequence is synthesized)
aatcaaacaatggcctccaagttccatttctacccagggatgaacaaatcaacatcaatcttggtaacacaactgccactgatggtgccttactcttctctcatgacatggcacaatcaa

SEQ ID NO: 244907 - DNA, 120 bp, Artificial Sequence
  ENSG00000122194_41 (sequence is synthesized)
tagcaaacataaaatttgttcttgtttaaggatttatatccactaatatggtaacatagtagtggttccatagttctaacctgtttgtcaatccagttaatcttttactatcttgcaatc

SEQ ID NO: 244908 - DNA, 120 bp, Artificial Sequence
  ENSG00000122194_42 (sequence is synthesized)
tgctaatgaaactgtttttctttgttttataatttcaacttttagagtcaggggtacatgtgcaggtgtgttacataactaaattgcgtgacactgagctttggggtacaaatgatccca

SEQ ID NO: 244909 - DNA, 120 bp, Artificial Sequence
  ENSG00000122194_43 (sequence is synthesized)
tcacccaggtagtgagctaaatacctactaaataggtagtttttcagcccttgccttgctccctctctcccttctctggtagtccccagtgtctttagttgccatctttatttatgtcca

SEQ ID NO: 244910 - DNA, 120 bp, Artificial Sequence
  ENSG00000122194_44 (sequence is synthesized)
aatgcccgactgtgtgttcttaactaaacattttgattcatagctacccattctacttccagtaaacagaaagttttatttggttaatgctaaccaaatagattaaaaggaagtcatgac

SEQ ID NO: 244911 - DNA, 120 bp, Artificial Sequence
  ENSG00000122194_45 (sequence is synthesized)
gcatttttttgtacttttcccagtttggtgttaggtggcattaagttctcagtaatgacgcttatcaaataggaacttagtgcttgttactcacctttatccattcccccaacactcaac

SEQ ID NO: 244912 - DNA, 120 bp, Artificial Sequence
  ENSG00000122194_46 (sequence is synthesized)
aaattgcctttgctatatccctatgagatgagcagatcaaatattccccgtgagttaatgaaaactgattcaaccaaatggcaaagtcagagactatcgggggccatggagacactctgg

SEQ ID NO: 244913 - DNA, 120 bp, Artificial Sequence
  ENSG00000122194_47 (sequence is synthesized)
gccatttttatgaggtagtctaggctcatctttatgagggaactgaggtctcggggggtgggggttatcccaaataggttcacagaagaaccagaaataaaacctgcctttctagactgt

SEQ ID NO: 244914 - DNA, 120 bp, Artificial Sequence
  ENSG00000122194_48 (sequence is synthesized)
gagcccacacgaaaagatattgccttgctaaagctaagcagtcctgccgtcatcactgacaaagtaatcccagcttgtctgccatccccaaattatgtggtacttttggagctggccttc

SEQ ID NO: 244915 - DNA, 120 bp, Artificial Sequence
  ENSG00000122194_49 (sequence is synthesized)
gaacatggtcaaaattaagtgaacgtgtctttctggctttctgtacaatggagcagaacaaagtatcaatttaactaaaatttgaactaaatcctctttccaggtttggaatgcacttct

SEQ ID NO: 244916 - DNA, 120 bp, Artificial Sequence
  ENSG00000122203_0 (sequence is synthesized)
ggtactgctacctagtgggtcttggggaccttcgaaatcgccgccgctctcacaatggcttgggtccagactgcgccacagcctctcgggagacgtgggccctcggaacctttttagtgc

SEQ ID NO: 244917 - DNA, 120 bp, Artificial Sequence
  ENSG00000122203_1 (sequence is synthesized)
cggactccgggccgcaggcagtcccgcggcagcaggatcacagaacctctggatggactcttcctgggaagctttgctactttgcagcagctggaccatgttcctcattaacatctgtct

SEQ ID NO: 244918 - DNA, 120 bp, Artificial Sequence
  ENSG00000122203_2 (sequence is synthesized)
gtccgcttagtcatcacatcatttcactgtggtggcagggactcagctcggaattctgtatagaaaaagcacctggatcccagtctttcaatggcttcaagacaaccagaagtgcctgct

SEQ ID NO: 244919 - DNA, 120 bp, Artificial Sequence
  ENSG00000122203_3 (sequence is synthesized)
cttgaggctagtgcgcctctaggcaagatgtccctgcccatcgggatataccgccgggcagtcagctatgatgataccctcgaggaccctgcgcccatgactcctcctccatcggacatg

SEQ ID NO: 244920 - DNA, 120 bp, Artificial Sequence
  ENSG00000122203_4 (sequence is synthesized)
ggcagcgtcccttggaagccagtgattccagagcgcaagtatcagcacctcgccaaggtggaggaaggagaggccagtctaccctcccctgccatgaccctgtcatcagccattgacagt

SEQ ID NO: 244921 - DNA, 120 bp, Artificial Sequence
  ENSG00000122203_5 (sequence is synthesized)
gtggacaaggtcccagtggtgaaggctaaagctacccatgtcatcatgaattctctgatcacaaaacagacccaggaaagcattcagcattttgagcgacaggcagggctgagagatgct

SEQ ID NO: 244922 - DNA, 120 bp, Artificial Sequence
  ENSG00000122203_6 (sequence is synthesized)
ggctacacaccccacaagggcctcaccaccgaggagaccaagtaccttcgagtggccgaagcactccacaaactaaagttacagagtggagaggtaacaaaagaagagaggcagcctgca

SEQ ID NO: 244923 - DNA, 120 bp, Artificial Sequence
  ENSG00000122203_7 (sequence is synthesized)
tcagcccagtccaccccaagcaccactccgcactcttcacctaagcagaggcccaggggctggttcacttctggttcttccacagccttacctggcccaaatcctagcaccatggactct

SEQ ID NO: 244924 - DNA, 120 bp, Artificial Sequence
  ENSG00000122203_8 (sequence is synthesized)
ggaagtggggataaggacagaaacttgtcagataagtggagcctctttggaccgagatcccttcagaagtacgattctggaagttttgccacccaggcctaccgaggagcccagaagccc

SEQ ID NO: 244925 - DNA, 120 bp, Artificial Sequence
  ENSG00000122203_9 (sequence is synthesized)
tctccattggaactgatacgtgcccaggccaaccgaatggctgaagatccagcagccttgaagccccccaagatggacatcccagtgatggaaggaaagaaacagccaccacgggcccat

SEQ ID NO: 244926 - DNA, 120 bp, Artificial Sequence
  ENSG00000122203_10 (sequence is synthesized)
aacctcaaaccccgtgacctgaatgtgctcacacccactggcttctagagccctctttccagggattctggtaaaggtggtttcttgcatcccactccccttttaccttggctttgacat

SEQ ID NO: 244927 - DNA, 120 bp, Artificial Sequence
  ENSG00000122203_11 (sequence is synthesized)
ccattacactccagcctgggcgacagaacgagacgccatcaataaataaataaataaagtaaagtaaaaaacctattaaattgaggctagagctggagatgtaattggtttttgagaaac

SEQ ID NO: 244928 - DNA, 120 bp, Artificial Sequence
  ENSG00000122203_12 (sequence is synthesized)
attagtataaagcttgcccttgttgtgtggaagaagccattttgtactgctttaaagttagactaatattctcagcacgggtgtatggggacctcattacctatttttttcatcatttac

SEQ ID NO: 244929 - DNA, 120 bp, Artificial Sequence
  ENSG00000122203_13 (sequence is synthesized)
cctaggtaagaactttgatcactgcttactaggtaaagaatgtttgtactgttccaaaacccaggcttctttattcctttaccactatccatgtgagcattgacaaatcatggcttagag

SEQ ID NO: 244930 - DNA, 120 bp, Artificial Sequence
  ENSG00000122203_14 (sequence is synthesized)
gtgctcactgactcgctaagacgactttggccctgttgatgactggtgctgtgctccagccttatcagttaggggacccaaggtttgtttgggacctgggtacaggtaaaagccagactt

SEQ ID NO: 244931 - DNA, 120 bp, Artificial Sequence
  ENSG00000122203_15 (sequence is synthesized)
ggcagggacccctctttctaggctgaaccttgagtccccctgctttttggcagacctaatggatcactgtcttgcagctagttcttcatgtggggcctcttaggccagtgccggaggagg

SEQ ID NO: 244932 - DNA, 120 bp, Artificial Sequence
  ENSG00000122203_16 (sequence is synthesized)
catgctcctctttctatgccacagaacaaacactactctagcagagcctttcttgcactttaaagtgagattaatttagctgtaatttggttaaaaacttcctaagagagaaaattaagt

SEQ ID NO: 244933 - DNA, 120 bp, Artificial Sequence
  ENSG00000122203_17 (sequence is synthesized)
ctactgatttggtataggtaaatggacattaaacttttttaaagtaaaggagatggtagataccgttagattatagtcttgaggttcatgtgaagccagtggtgttaacttactttgatt

SEQ ID NO: 244934 - DNA, 120 bp, Artificial Sequence
  ENSG00000122203_18 (sequence is synthesized)
tccttgttcaggtcagggcctggaacgcctgtgcggggaggtcactcaattcaaaattttctgtatgaaagcatttttcaccaaaatgagcctcatccctttatgcaacacataacctta

SEQ ID NO: 244935 - DNA, 120 bp, Artificial Sequence
  ENSG00000122203_19 (sequence is synthesized)
ctgagggagggaaatacagaagccacctttttatttctcttcactgtgtacaagttcacttgttgtcttgaacactgtctcaaatacctgctttttgttttggatagtaccttgtctgta

SEQ ID NO: 244936 - DNA, 120 bp, Artificial Sequence
  ENSG00000122203_20 (sequence is synthesized)
taagaagctggcctttccatagagaggccctggagtctaaaattatgagaacaattaatttatttgtgtcttctattatgatctcgttttgacaataaaaatccttactactttctcaaa

SEQ ID NO: 244937 - DNA, 120 bp, Artificial Sequence
  ENSG00000122203_21 (sequence is synthesized)
cgccaaggcctgagcaaggtatcaggtgtttcgattgcagaaggtggaggctgccagctcttgcaggttgaaaatgaggagctaagtagattttttttgtttgtttcaaaagaccattac

SEQ ID NO: 244938 - DNA, 120 bp, Artificial Sequence
  ENSG00000122203_22 (sequence is synthesized)
ttgaaccttgggagcagtggtcctcaaggtgtggtcttgggaccggcagcatcagtaacacctgggaatttattagaaagaaattcttgaactccaccccagactaacagggacctactg

SEQ ID NO: 244939 - DNA, 120 bp, Artificial Sequence
  ENSG00000122203_23 (sequence is synthesized)
ggagacgtgggccctcggaacctttttagtgccggactccgggccgcaggcagtcccgcggcagcaggatcacaggttggaatgcagtggcacgatcttggctctctgcaacctccgcct

SEQ ID NO: 244940 - DNA, 120 bp, Artificial Sequence
  ENSG00000122203_24 (sequence is synthesized)
gttctctggcgatcaggaggggcgcttccggcgaggcccgatctcggggcccctccaagccactcccctctccccgcacctcttaacccttcatcccggcttcgagctcggctgggtcgc

SEQ ID NO: 244941 - DNA, 120 bp, Artificial Sequence
  ENSG00000122203_25 (sequence is synthesized)
ctcttgcctccctggctccgctctctggggtctccgtaatggggcttctctccgggaatgccctgcagctcccgtacgggcttcccctccgcttcgtgggaccagcccagcccgagcccc

SEQ ID NO: 244942 - DNA, 120 bp, Artificial Sequence
  ENSG00000122203_26 (sequence is synthesized)
atcttagcctggaggggtgggtgaagcagccggcctttcgtatcctggcggcaccgtcttgtatattgtgaaggagaggcagagggacgaacctctggatggactcttcctgggaagctt

SEQ ID NO: 244943 - DNA, 120 bp, Artificial Sequence
  ENSG00000122203_27 (sequence is synthesized)
gtgttaagatcagccacaggtgtggtgagacgtttgactttatccttcttttttcattggcatgtttgtcacccactggctcttgcatgtgtgtttcaaccttgtaaacaagccgttcaa

SEQ ID NO: 244944 - DNA, 120 bp, Artificial Sequence
  ENSG00000122203_28 (sequence is synthesized)
ttctgtgtgcctgccagaagaacagcattggtgctgctcaccataagaaaatgccctttgttattttattaggtggcagggactcagctcggaattctgtatagaaaaagcacctggatc

SEQ ID NO: 244945 - DNA, 120 bp, Artificial Sequence
  ENSG00000122218_0 (sequence is synthesized)
gtcgctgacgtggaggcgtccgaagggcagcagggtgtgtcggggctcggattaagacatcggagtcggagacctgagagatgttaaccaaattcgagaccaagagcgcgcgggtcaaag

SEQ ID NO: 244946 - DNA, 120 bp, Artificial Sequence
  ENSG00000122218_1 (sequence is synthesized)
ggctcagctttcaccccaaaagaccttggatcctgactagtttacataatggggtcatccagttatgggactatcggatgtgcactctcattgacaagtttgatgaacatgatggtccag

SEQ ID NO: 244947 - DNA, 120 bp, Artificial Sequence
  ENSG00000122218_2 (sequence is synthesized)
tgcgaggcattgacttccataagcagcagccactgttcgtctctggaggagatgactataagattaaggtttggaattacaagcttcggcgctgtcttttcacattgcttgggcacttag

SEQ ID NO: 244948 - DNA, 120 bp, Artificial Sequence
  ENSG00000122218_3 (sequence is synthesized)
attatattcgcaccacgttttttcatcatgaatatccctggattctgagtgcctccgatgatcagaccatccgagtgtggaactggcaatctagaacctgtgtttgtgtgttaacagggc

SEQ ID NO: 244949 - DNA, 120 bp, Artificial Sequence
  ENSG00000122218_4 (sequence is synthesized)
acaaccattatgtgatgtgtgctcagttccaccccacagaagacttggtagtatcagccagcctggaccagactgtgcgcgtttgggatatttctggtctgaggaaaaaaaacctgtccc

SEQ ID NO: 244950 - DNA, 120 bp, Artificial Sequence
  ENSG00000122218_5 (sequence is synthesized)
ctggtgcggtggaatcggatgtgagaggaataactggggttgatctatttggaactacagatgcagtggtgaagcatgtactagagggtcacgatcgtggagtaaactgggctgccttcc

SEQ ID NO: 244951 - DNA, 120 bp, Artificial Sequence
  ENSG00000122218_6 (sequence is synthesized)
accccactatgccccttattgtatctggggcagatgatcgtcaagtgaagatctggcgcatgaatgaatcaaaggcatgggaggttgatacctgccggggccattacaacaatgtatctt

SEQ ID NO: 244952 - DNA, 120 bp, Artificial Sequence
  ENSG00000122218_7 (sequence is synthesized)
gtgccgtcttccaccctcgccaagagttgatcctcagcaattctgaggacaagagtattcgagtctgggatatgtctaagcggactggggttcagactttccgcagagaccatgatcgtt

SEQ ID NO: 244953 - DNA, 120 bp, Artificial Sequence
  ENSG00000122218_8 (sequence is synthesized)
tctgggtcctagctgctcaccctaaccttaacctctttgcagcaggccatgatggtggtatgattgtgtttaagctggaacgggaacggccagcctatgctgttcatggcaatatgctac

SEQ ID NO: 244954 - DNA, 120 bp, Artificial Sequence
  ENSG00000122218_9 (sequence is synthesized)
actatgtcaaggaccgattcttacgacagctggatttcaacagctccaaagatgtagctgtgatgcagttgcggagtggttccaagtttccagtattcaatatgtcatacaatccagcag

SEQ ID NO: 244955 - DNA, 120 bp, Artificial Sequence
  ENSG00000122218_10 (sequence is synthesized)
aaaatgcagtcctgctttgtacaagagctagcaatctagagaatagtacctatgacctgtacaccatccctaaagatgctgactcccagaatcctgatgcgcctgaagggaaacgatcct

SEQ ID NO: 244956 - DNA, 120 bp, Artificial Sequence
  ENSG00000122218_11 (sequence is synthesized)
caggcctgacagccgtttgggtcgctcgaaatcggtttgctgtcctagatcggatgcattcgcttctgatcaagaatctgaagaatgagatcaccaaaaaggtacaggtgcccaactgtg

SEQ ID NO: 244957 - DNA, 120 bp, Artificial Sequence
  ENSG00000122218_12 (sequence is synthesized)
atgagatcttctatgctggcacaggcaatctcctgcttcgagatgcggactctatcacactctttgacgtacagcagaagcggactctggcatctgtgaagatttctaaagtgaaatacg

SEQ ID NO: 244958 - DNA, 120 bp, Artificial Sequence
  ENSG00000122218_13 (sequence is synthesized)
ttatctggtcagcagacatgtcacatgtagcactactagccaaacacgccattgtgatctgtaaccgcaaactggatgctttatgtaacattcatgagaacattcgtgtcaagagtgggg

SEQ ID NO: 244959 - DNA, 120 bp, Artificial Sequence
  ENSG00000122218_14 (sequence is synthesized)
cctgggatgagagtggggtatttatctataccacaagcaaccacatcaaatatgctgtcaccactggggaccacgggatcattcgaactctggatttacccatctatgtcacacgggtga

SEQ ID NO: 244960 - DNA, 120 bp, Artificial Sequence
  ENSG00000122218_15 (sequence is synthesized)
agggcaacaatgtatactgcctagacagggagtgtcgtccccgggtactcaccattgatcccactgagttcaaattcaagctggccctgatcaacagaaaatatgatgaggtactgcaca

SEQ ID NO: 244961 - DNA, 120 bp, Artificial Sequence
  ENSG00000122218_16 (sequence is synthesized)
tggtgaggaatgccaaactagttggccagtctattattgcttatctccagaagaagggctatcctgaagtggcactgcattttgtcaaggatgagaaaactcgctttagtctggcactgg

SEQ ID NO: 244962 - DNA, 120 bp, Artificial Sequence
  ENSG00000122218_17 (sequence is synthesized)
agtgtggaaacattgagattgctctggaagcagccaaagcactggatgacaagaactgctgggaaaagctgggagaagtggccctgctgcaggggaaccaccagattgtggaaatgtgct

SEQ ID NO: 244963 - DNA, 120 bp, Artificial Sequence
  ENSG00000122218_18 (sequence is synthesized)
atcagcgtaccaaaaactttgacaaactttccttcctgtatcttatcactggcaacttagaaaaacttcgcaagatgatgaagattgctgagatcagaaaggacatgagtggccactatc

SEQ ID NO: 244964 - DNA, 120 bp, Artificial Sequence
  ENSG00000122218_19 (sequence is synthesized)
agaatgccctatacctgggtgatgtgtcagagcgtgtgcggatcctgaagaactgtggacagaagtccctggcctatctcacagctgctacccatggcttagatgaagaagctgagagcc

SEQ ID NO: 244965 - DNA, 120 bp, Artificial Sequence
  ENSG00000122218_20 (sequence is synthesized)
taaaggagacatttgacccagagaaggagacaatcccagacattgaccctaatgccaagctgctccagccacctgcacctatcatgccattggataccaattggcctttattgactgtat

SEQ ID NO: 244966 - DNA, 120 bp, Artificial Sequence
  ENSG00000122218_21 (sequence is synthesized)
ccaaaggattttttgaaggcaccattgccagcaaagggaagggaggagcactggctgctgacattgacattgacactgttggtacagagggctggggagaggatgcagagctgcagttgg

SEQ ID NO: 244967 - DNA, 120 bp, Artificial Sequence
  ENSG00000122218_22 (sequence is synthesized)
gatgatgctcttggcaagggacaggaagaaggaggtggctgggatgtagaagaagatctggagctccctcctgagctggatatatcccctggggcagctggtggggctgaagatggtttc

SEQ ID NO: 244968 - DNA, 120 bp, Artificial Sequence
  ENSG00000122218_23 (sequence is synthesized)
tttgtgcccccaaccaagggaacaagtccaactcagatctggtgtaataactctcagcttccagttgatcacatcctggcaggctctttcgaaacagccatgcggctccttcatgaccaa

SEQ ID NO: 244969 - DNA, 120 bp, Artificial Sequence
  ENSG00000122218_24 (sequence is synthesized)
gtaggggtaatccagtttggcccctacaagcaactgttcctacagacatacgcccgaggccgcacaacctatcaggctctgccctgcctaccctccatgtatggctatcctaatcgcaac

SEQ ID NO: 244970 - DNA, 120 bp, Artificial Sequence
  ENSG00000122218_25 (sequence is synthesized)
tggaaggatgcagggctgaagaatggtgtaccagctgtgggcctgaagcttaatgacctcatccaacggttgcagctgtgctaccagctcaccacagttggcaaatttgaggaggctgtg

SEQ ID NO: 244971 - DNA, 120 bp, Artificial Sequence
  ENSG00000122218_26 (sequence is synthesized)
gaaaaattccgttccatccttctcagtgtgccacttcttgttgtggacaataaacaagagattgcagaggcccagcagctcatcaccatttgccgtgagtacattgtgggtttgtccgtg

SEQ ID NO: 244972 - DNA, 120 bp, Artificial Sequence
  ENSG00000122218_27 (sequence is synthesized)
gagacagaaaggaagaagctgcccaaagagactctagaacagcagaagcgcatctgtgagatggcagcctatttcacccactcaaacctgcagcctgtgcacatgatcctggtgctgcgt

SEQ ID NO: 244973 - DNA, 120 bp, Artificial Sequence
  ENSG00000122218_28 (sequence is synthesized)
acagccctcaatctgttcttcaagctcaagaacttcaagacagctgccacctttgctcggcgcctactagaactcgggcccaagcctgaggtggcccaacagacccgaaaaatcctgtct

SEQ ID NO: 244974 - DNA, 120 bp, Artificial Sequence
  ENSG00000122218_29 (sequence is synthesized)
gcctgtgagaagaatcccacagatgcctaccagctcaattatgacatgcacaacccctttgacatttgtgctgcatcatatcggcccatctaccgtggaaagccagtagaaaagtgtcca

SEQ ID NO: 244975 - DNA, 120 bp, Artificial Sequence
  ENSG00000122218_30 (sequence is synthesized)
ctcagtggggcctgctattcccctgagttcaaaggtcaaatctgcagggtcaccacagtgacagagattggcaaagatgtgattggtttaaggatcagtcctctgcagtttcgctaaggc

SEQ ID NO: 244976 - DNA, 120 bp, Artificial Sequence
  ENSG00000122218_31 (sequence is synthesized)
cccctttgtgtgcatgggtcagtcaccatatgttccccccagagaatgtgtctatatcctccttctaacagcaccttccccctgcagctactcttcagatctggctctctgtaccctaaa

SEQ ID NO: 244977 - DNA, 120 bp, Artificial Sequence
  ENSG00000122218_32 (sequence is synthesized)
acctagtatctttttctcttctatggaaaatccgaaggtctaaacttgacttttttgaggtcttctcaacttgactacagttgtgctcataattgtccttgcctttccagcttaattatt

SEQ ID NO: 244978 - DNA, 82 bp, Artificial Sequence
  ENSG00000122218_33 (sequence is synthesized)
ttgtgctcataattgtccttgcctttccagcttaattattttaaggaacaaatgaaaactctgggctgggtggacggtgggc

SEQ ID NO: 244979 - DNA, 88 bp, Artificial Sequence
  ENSG00000122218_34 (sequence is synthesized)
catctgaggcaacaccccgtctctaataaaaatataaaaattagcctggcatggtagcatgcgcctatagtcccagctgctcaggagg

SEQ ID NO: 244980 - DNA, 78 bp, Artificial Sequence
  ENSG00000122218_35 (sequence is synthesized)
aaactctgtgatggacatttgtttagtaaatcccttcagtatttatccctcctttccccacagcagctttctttcctg

SEQ ID NO: 244981 - DNA, 120 bp, Artificial Sequence
  ENSG00000122218_36 (sequence is synthesized)
gtatttatccctcctttccccacagcagctttctttcctgtcaactagaaaggagcaggatgtaataaatacattttggtgtgactaggccacaccaactcttaatcatctcccattttc

SEQ ID NO: 244982 - DNA, 120 bp, Artificial Sequence
  ENSG00000122218_37 (sequence is synthesized)
cttagacatttaaatttcaaggcaggtaccctctgtgtactcagaaatttgaagaagttatttggttttccaaaatgcacactgcgggttattgatttgttctttacaactattgttctc

SEQ ID NO: 244983 - DNA, 120 bp, Artificial Sequence
  ENSG00000122218_38 (sequence is synthesized)
atatttctcacactaaataaatctctatgagagcttcttgacttggccatttatttcttggacactctcatgttcttgttcacccatgcaggcaccccaccaaagtacatatcttccttc

SEQ ID NO: 244984 - DNA, 120 bp, Artificial Sequence
  ENSG00000122218_39 (sequence is synthesized)
catgcaggcaccccaccaaagtacatatcttccttccagtaataatttttaattacaaaataaacatccactattggaaaaaaaaaaaaaaagctagccgggcatggtggtgggtgcctg

SEQ ID NO: 244985 - DNA, 62 bp, Artificial Sequence
  ENSG00000122218_40 (sequence is synthesized)
gaaaaaaagaagcacatgtttttcatagggtatatatgaggacctaaactgctgtgaaaatg

SEQ ID NO: 244986 - DNA, 120 bp, Artificial Sequence
  ENSG00000122218_41 (sequence is synthesized)
tcatagggtatatatgaggacctaaactgctgtgaaaatgatagaaagcaagtagctcccttattctgtttttgattgcagccttttatcttttgctaattatagcaatatttattgagc

SEQ ID NO: 244987 - DNA, 120 bp, Artificial Sequence
  ENSG00000122218_42 (sequence is synthesized)
acctgccatgtgactgtcactgttctagatattttacatgtaatatacagataaaagaatagtactttatatatattacaatgatacaatgattacattaacaatacaatattttgcttg

SEQ ID NO: 244988 - DNA, 120 bp, Artificial Sequence
  ENSG00000122218_43 (sequence is synthesized)
tcatatgctaagaataattgggtagagtgacattactgtgccttcgattaaaataagtacttttttgcgtgttaaattcatgttttcaataaataataaatgcatatagttgaaaaatca

SEQ ID NO: 244989 - DNA, 120 bp, Artificial Sequence
  ENSG00000122218_44 (sequence is synthesized)
ctcattgacaagtttgatgaacatgatggtccagtgcgaggcattgacttccataagcagcagccactgttcgtctctggaggagatgactataagattaaggtacagagggtctgtcat

SEQ ID NO: 244990 - DNA, 120 bp, Artificial Sequence
  ENSG00000122218_45 (sequence is synthesized)
aactgagaataaaggaaagaggatgtgggaaggtttgggaatcatgaaaggaactgaaagacaggaaatttcattcatacagagctcaggcctttgacaacattatccggagaacttact

SEQ ID NO: 244991 - DNA, 120 bp, Artificial Sequence
  ENSG00000122218_46 (sequence is synthesized)
agcttttattctaatacagaagataaacatatatccaagtaatagcatgtacagtttggtaagcaatataatagagagatattcacagtgaaataggaaagagcagtataggtgcaaaga

SEQ ID NO: 244992 - DNA, 120 bp, Artificial Sequence
  ENSG00000122218_47 (sequence is synthesized)
caaaaagcatgacacagctagatacagggcagctgttattggttttgtatggagaaaacctggagaaatggtgagagaaggggcagaagatgagaggggccagatcatggagtacctgtt

SEQ ID NO: 244993 - DNA, 120 bp, Artificial Sequence
  ENSG00000122218_48 (sequence is synthesized)
ggcacaaccattatgtgatgtgtgctcagttccaccccacagaagacttggtagtatcagccagcctggaccagactgtgcgcgtttgggatatttctgatgcagtggtgaagcatgtac

SEQ ID NO: 244994 - DNA, 120 bp, Artificial Sequence
  ENSG00000122218_49 (sequence is synthesized)
gtgttaaccctacctaccttctgttgaataatttgacttctactatggcttactttttaaaactgtttgttcaaagctgagctagggaagttgccaagccttaaaggaagagaatacaat

SEQ ID NO: 244995 - DNA, 120 bp, Artificial Sequence
  ENSG00000122218_50 (sequence is synthesized)
atttattcattttattcctgattataaaagtgatgagtatatagtgtaaagattggataagtaggaggtgtgggggtgattcctttcttccttctattcttatgcctcttccctgttttc

SEQ ID NO: 244996 - DNA, 120 bp, Artificial Sequence
  ENSG00000122218_51 (sequence is synthesized)
atcataactcctcttcaagtttttcacattccatccccaagccatggccacatcactcatgtctgttggcaggtgctgctgacaattgcatcagaggcgaccatggtgtgaaatattcat

SEQ ID NO: 244997 - DNA, 120 bp, Artificial Sequence
  ENSG00000122218_52 (sequence is synthesized)
aatgagcttctcttagaacaatcttctcccttctcaaatggactatgtcggctgattaattactgattgtatttgtaggatgcttttaagtgcaaaataataaatgtagaggcaatccca

SEQ ID NO: 244998 - DNA, 120 bp, Artificial Sequence
  ENSG00000122218_53 (sequence is synthesized)
tatatgaatctggacttccaataatttcttaccaggaagagaagtcatatagccttttagaacaagaacttttagctggttttcaattattttcccataaaacctgagtcaaggtctaga

SEQ ID NO: 244999 - DNA, 120 bp, Artificial Sequence
  ENSG00000122218_54 (sequence is synthesized)
tagacctttgtcttattttgtgtttggagctggagctttacatagaactttccatgaagagttagggaccatttaaagtgatggccttggcccggcgccatggctcatgcctgtaatccc

SEQ ID NO: 245000 - DNA, 120 bp, Artificial Sequence
  ENSG00000122218_55 (sequence is synthesized)
atctcaaaaaaataataacaataaaaaataaagtgatggcctttaaaagggataccctactaaaatctcacagataatttacagtatggattactgagattacatttattttgatatttt

SEQ ID NO: 245001 - DNA, 120 bp, Artificial Sequence
  ENSG00000122218_56 (sequence is synthesized)
aaaatatttttgagagaagagctatgtaatcttagtcctcctgaaattagtaatatttaaatactaaagcattagaggcaagaagagaactattgttaaaatagctgactgggcttatta

SEQ ID NO: 245002 - DNA, 120 bp, Artificial Sequence
  ENSG00000122218_57 (sequence is synthesized)
ttattagttcagaattggtaggatgacctgcctttgtctccataaaagtaaaactggataagcatttattgaatatggagaaaggtatttagtttaggagtctgttgacttccacctcta

SEQ ID NO: 245003 - DNA, 120 bp, Artificial Sequence
  ENSG00000122218_58 (sequence is synthesized)
ctatgtaggaattacattaagtattttatgtaattagaattacattaagaaattggggtttacattaattagagggtgcaattgatgtagatcaaagcctgagacaagggaaatagatcc

SEQ ID NO: 245004 - DNA, 120 bp, Artificial Sequence
  ENSG00000122218_59 (sequence is synthesized)
accacaagcaaccacatcaaatatgctgtcaccactgggtaagttaattatctgggatacagaatgggagaagacagcttcctgaaatcactgtcttgtcttgagatgtaactgaagtcc

SEQ ID NO: 245005 - DNA, 120 bp, Artificial Sequence
  ENSG00000122218_60 (sequence is synthesized)
tccatgaattttcttcatggaaaagccttacctggcatatatgtgcaaggggcatcagaacattcttttttcaacttttttaaaattgagaaatctaaaacaaatatagacaattacatt

SEQ ID NO: 245006 - DNA, 120 bp, Artificial Sequence
  ENSG00000122223_0 (sequence is synthesized)
agaccagctccaggcgctggggctttctcagtggccttgtcagctcacagcaggcgttaacagcctctaattgaggaaactgtggctggacaggttgcaaggcagttctgctccccatcg

SEQ ID NO: 245007 - DNA, 120 bp, Artificial Sequence
  ENSG00000122223_1 (sequence is synthesized)
tcctcttgctgactggggactgctgagcccgtgcacggcagagagtctggtggggtggaggggctggcctggcccctctgtcctgtggaaatgctggggcaagtggtcaccctcatactc

SEQ ID NO: 245008 - DNA, 120 bp, Artificial Sequence
  ENSG00000122223_2 (sequence is synthesized)
ctcctgctcctcaaggtgtatcagggcaaaggatgccagggatcagctgaccatgtggttagcatctcgggagtgcctcttcagttacaaccaaacagcatacagacgaaggttgacagc

SEQ ID NO: 245009 - DNA, 120 bp, Artificial Sequence
  ENSG00000122223_3 (sequence is synthesized)
attgcatggaagaagttgctgccctcacaaaatggatttcatcacatattgaagtgggagaatggctctttgccttccaatacttccaatgatagattcagttttatagtcaagaacttg

SEQ ID NO: 245010 - DNA, 120 bp, Artificial Sequence
  ENSG00000122223_4 (sequence is synthesized)
agtcttctcatcaaggcagctcagcagcaggacagtggcctctactgcctggaggtcaccagtatatctggaaaagttcagacagccacgttccaggtttttgtatttgataaagttgag

SEQ ID NO: 245011 - DNA, 120 bp, Artificial Sequence
  ENSG00000122223_5 (sequence is synthesized)
aaaccccgcctacaggggcaggggaagatcctggacagagggagatgccaagtggctctgtcttgcttggtctccagggatggcaatgtgtcctatgcttggtacagagggagcaagctg

SEQ ID NO: 245012 - DNA, 120 bp, Artificial Sequence
  ENSG00000122223_6 (sequence is synthesized)
atccagacagcagggaacctcacctacctggacgaggaggttgacattaatggcactcacacatatacctgcaatgtcagcaatcctgttagctgggaaagccacaccctgaatctcact

SEQ ID NO: 245013 - DNA, 120 bp, Artificial Sequence
  ENSG00000122223_7 (sequence is synthesized)
caggactgtcagaatgcccatcaggaattcagattttggccgtttttggtgatcatcgtgattctaagcgcactgttccttggcacccttgcctgcttctgtgtgtggaggagaaagagg

SEQ ID NO: 245014 - DNA, 120 bp, Artificial Sequence
  ENSG00000122223_8 (sequence is synthesized)
aaggagaagcagtcagagaccagtcccaaggaatttttgacaatttacgaagatgtcaaggatctgaaaaccaggagaaatcacgagcaggagcagacttttcctggaggggggagcacc

SEQ ID NO: 245015 - DNA, 120 bp, Artificial Sequence
  ENSG00000122223_9 (sequence is synthesized)
atctactctatgatccagtcccagtcttctgctcccacgtcacaagaacctgcatatacattatattcattaattcagccttccaggaagtctggatccaggaagaggaaccacagccct

SEQ ID NO: 245016 - DNA, 120 bp, Artificial Sequence
  ENSG00000122223_10 (sequence is synthesized)
tgtttattcctagttgctgcagcaattctcacctttcttgcacatcagcatctgctttgggaattggcacagtggatgacggcacaggagtctctatagaacagttcctagtctggagag

SEQ ID NO: 245017 - DNA, 120 bp, Artificial Sequence
  ENSG00000122223_11 (sequence is synthesized)
gatatggaaatttgttcttgttctatattttgttttgaaaatgatgtctaacaaccatgataagagcaaggctgttaaataatatcttccaatttacagatcagacatgaatgggtggag

SEQ ID NO: 245018 - DNA, 120 bp, Artificial Sequence
  ENSG00000122223_12 (sequence is synthesized)
gggttaggttgttcacaaaaggccacattccaagtatttgtaatctagaaagtgttatgtaagtgatgttattagcatcgagattccctccacctgattttcaagctgtcacttgtttcc

SEQ ID NO: 245019 - DNA, 120 bp, Artificial Sequence
  ENSG00000122223_13 (sequence is synthesized)
ttttctcccctctctgggttgactgcatttctagactctcgccggcccaggcccatcttccaaagcaagaggaaggaatgataatggtgactcaggggaagaagaaacagccctcctctg

SEQ ID NO: 245020 - DNA, 120 bp, Artificial Sequence
  ENSG00000122223_14 (sequence is synthesized)
aaagcctggactgtccggctgtgaactggctggcaggttctgcacgtgggtgggggccagggcctgggctttactcaattgcagagaaaaaactttctccctgcatctcatacctttacc

SEQ ID NO: 245021 - DNA, 120 bp, Artificial Sequence
  ENSG00000122223_15 (sequence is synthesized)
tctggccagttggccaccagggggagtgggctgaagggagagtagatggtgcaaagcaagcccatctctaagtagaaaaatcacccagagcacatgctgacctgataactggggtgttga

SEQ ID NO: 245022 - DNA, 120 bp, Artificial Sequence
  ENSG00000122223_16 (sequence is synthesized)
gaccagctttgtccatggtatgatgtttgatttatgaagacgcattgttagaaatccatttggcttcttcatagaagtggcttcccagaggaagaggcctctcagaaaccatgttctatt

SEQ ID NO: 245023 - DNA, 120 bp, Artificial Sequence
  ENSG00000122223_17 (sequence is synthesized)
taagttctgagtcctgatgagtgttccccaggatgcacattgaagggagggctcaggcagctgagggctgagaatgaggcagttggaatctagacactatgctgggttccctgagtcgtc

SEQ ID NO: 245024 - DNA, 120 bp, Artificial Sequence
  ENSG00000122223_18 (sequence is synthesized)
aggccagacatttcaacaaggctgtggggagcagggctgtgactctggctgagcccaggaaagcgacaagggtgaactgggagaggacttactcagagaccccaacaggtgatactgcac

SEQ ID NO: 245025 - DNA, 120 bp, Artificial Sequence
  ENSG00000122223_19 (sequence is synthesized)
aaagcctggttcttcaattttcctaccctgtatctaacataggagtttcatataaaacggtgatatcatgcagatgcagtctgaattccttgcctgaattaaatttatgtatcctctcca

SEQ ID NO: 245026 - DNA, 120 bp, Artificial Sequence
  ENSG00000122223_20 (sequence is synthesized)
caatcagccacaacacagagaaaagtgggttttgaggcagcccctgcagcaggcaggtgggaaggaagaagagagcgagctgacagctcagttctcacgccttctgtattcctcagaatt

SEQ ID NO: 245027 - DNA, 120 bp, Artificial Sequence
  ENSG00000122223_21 (sequence is synthesized)
cagattttggccgtttttggtgatcatcgtgattctaagcgcactgttccttggcacccttgcctgcttctgtgtgtggaggagaaagaggaaggagaagcagtcaggtgagtggaaggt

SEQ ID NO: 245028 - DNA, 120 bp, Artificial Sequence
  ENSG00000122223_22 (sequence is synthesized)
gtgggatgtgtctgggagcacagcatctccttttcctcaacgagctttgagaccagtcccaaggaatttttgacaatttacgaagatgtcaaggatctgaaaaccaggagaaatcactct

SEQ ID NO: 245029 - DNA, 120 bp, Artificial Sequence
  ENSG00000122223_23 (sequence is synthesized)
agggtgacagattctattcattttctggctgagagtgcctcagaatttttctgggccctgagtctcttttgggacctctcacatcacttaggagtgggagagcacttatctcgaagttaa

SEQ ID NO: 245030 - DNA, 120 bp, Artificial Sequence
  ENSG00000122224_0 (sequence is synthesized)
gaaaatagatcatcatggtggcaccaaagagtcacacagatgactgggctcctgggcctttctccagtaagccacagaggagtcagctgcaaatattctcttctgttctacagacctctc

SEQ ID NO: 245031 - DNA, 120 bp, Artificial Sequence
  ENSG00000122224_1 (sequence is synthesized)
tcctcttcctgctcatgggactaagagcctctggaaaggactcagccccaacagtggtgtcagggatcctagggggttccgtgactctccccctaaacatctcagtagacacagagattg

SEQ ID NO: 245032 - DNA, 120 bp, Artificial Sequence
  ENSG00000122224_2 (sequence is synthesized)
agaacgtcatctggattggtcccaaaaatgctcttgctttcgcacgtcccaaagaaaatgtaaccattatggtcaaaagctacctgggccgactagacatcaccaagtggagttactccc

SEQ ID NO: 245033 - DNA, 120 bp, Artificial Sequence
  ENSG00000122224_3 (sequence is synthesized)
tgtgcatcagcaatctgactctgaatgatgcaggatcctacaaagcccagataaaccaaaggaattttgaagtcaccactgaggaggaattcaccctgttcgtctatgagcagctgcagg

SEQ ID NO: 245034 - DNA, 120 bp, Artificial Sequence
  ENSG00000122224_4 (sequence is synthesized)
agccccaagtcaccatgaagtctgtgaaggtgtctgagaacttctcctgtaacatcactctaatgtgctccgtgaagggggcagagaaaagtgttctgtacagctggaccccaagggaac

SEQ ID NO: 245035 - DNA, 120 bp, Artificial Sequence
  ENSG00000122224_5 (sequence is synthesized)
cccatgcttctgagtccaatggaggctccattcttaccgtctcccgaacaccatgtgacccagacctgccatacatctgcacagcccagaaccccgtcagccagagaagctccctccctg

SEQ ID NO: 245036 - DNA, 120 bp, Artificial Sequence
  ENSG00000122224_6 (sequence is synthesized)
tccatgttgggcagttctgtacagatccaggagcctccagaggaggaacaacgggggagactgtggtaggggtcctgggagagccagtcaccctgccacttgcactcccagcctgccggg

SEQ ID NO: 245037 - DNA, 120 bp, Artificial Sequence
  ENSG00000122224_7 (sequence is synthesized)
acacagagaaggttgtctggttgtttaacacatccatcattagcaaagagagggaagaagcagcaacggcagatccactcattaaatccagggatccttacaagaacagggtgtgggtct

SEQ ID NO: 245038 - DNA, 120 bp, Artificial Sequence
  ENSG00000122224_8 (sequence is synthesized)
ccagccaggactgctccctgaagatcagccagctgaagatagaggacgccggcccctaccatgcctacgtgtgctcagaggcctccagcgtcaccagcatgacacatgtcaccctgctca

SEQ ID NO: 245039 - DNA, 120 bp, Artificial Sequence
  ENSG00000122224_9 (sequence is synthesized)
tctaccgcaggctgaggaagcccaaaatcacgtggagcctcaggcacagtgaggatggcatctgcaggatcagcctgacctgctccgtggaggacgggggaaacactgtcatgtacacat

SEQ ID NO: 245040 - DNA, 120 bp, Artificial Sequence
  ENSG00000122224_10 (sequence is synthesized)
ctgttgtgtcccaaggggaatcacacctcaatgtctcatggagaagcagtgaaaatcaccccaacctcacatgcacagccagcaaccctgtcagcaggagttcccaccagtttctttctg

SEQ ID NO: 245041 - DNA, 120 bp, Artificial Sequence
  ENSG00000122224_11 (sequence is synthesized)
agaacatctgttcaggacctgagagaaacacaaagctttggattgggttgttcctgatggtttgccttctgtgcgttgggatcttcagctggtgcatttggaagcgaaaaggacggtgtt

SEQ ID NO: 245042 - DNA, 120 bp, Artificial Sequence
  ENSG00000122224_12 (sequence is synthesized)
cagtcccagccttctgttccagccaagctgaggccccagcggatacaccagaacccacagctggccacacgctatactctgtgctctcccaaggatatgagaagctggacactcccctca

SEQ ID NO: 245043 - DNA, 120 bp, Artificial Sequence
  ENSG00000122224_13 (sequence is synthesized)
ggcctgccaggcaacagcctacacccacctcagacagcagctctgacagcaacctcacaactgaggaggatgaggacaggcctgaggtgcacaagcccatcagtggaagatatgaggtat

SEQ ID NO: 245044 - DNA, 120 bp, Artificial Sequence
  ENSG00000122224_14 (sequence is synthesized)
ttgaccaggtcactcaggagggcgctggacatgacccagcccctgagggccaagcagactatgatcccgtcactccatatgtcacggaagttgagtctgtggttggagagaacaccatgt

SEQ ID NO: 245045 - DNA, 120 bp, Artificial Sequence
  ENSG00000122224_15 (sequence is synthesized)
atgcacaagtgttcaacttacagggaaagaccccagtttctcagaaggaagagagctcagccacaatctactgctccatacggaaacctcaggtggtgccaccaccacaacagaatgatc

SEQ ID NO: 245046 - DNA, 120 bp, Artificial Sequence
  ENSG00000122224_16 (sequence is synthesized)
ttgagattcctgaaagtcctacctatgaaaatttcacctgaaaggaaaagcagctgctgcctctctcctgggaccgtggggttggaaagtcagctggacctcatggggcctggggctcac

SEQ ID NO: 245047 - DNA, 120 bp, Artificial Sequence
  ENSG00000122224_17 (sequence is synthesized)
agacagaagcacctcagaatttccttcagtgcctcagagatgcctggatgtggcccctccccctccttctcacccttaaggactcccaaacccattaatagttcagacacaggctccttc

SEQ ID NO: 245048 - DNA, 120 bp, Artificial Sequence
  ENSG00000122224_18 (sequence is synthesized)
ttggagcctatgggcttcagatgtctttgccccatttgtcacctcgcacacttatagcgtttcctcctcgaaattctaccaagactggtcaaatgttgctgaggggcctggaccagctgt

SEQ ID NO: 245049 - DNA, 120 bp, Artificial Sequence
  ENSG00000122224_19 (sequence is synthesized)
cctttacaccaccttctcaacactgctgaaaagaacccaagagaattgtcacacatgacacaagatgtacataatatcatgctcactgcagtgttatttaaaataaaaggcaggaaataa

SEQ ID NO: 245050 - DNA, 120 bp, Artificial Sequence
  ENSG00000122224_20 (sequence is synthesized)
gcccggaaccccactgtccagcagatagagccaatccagtaccccagagaggatctcagccacctgggactgtggcagctactgtccttctgtgctcccgctttctccagggcttcaggg

SEQ ID NO: 245051 - DNA, 120 bp, Artificial Sequence
  ENSG00000122224_21 (sequence is synthesized)
ttgatcttttcttttttttatttgtgcaaatttatggggtatgtgtgaaattttgttatatgtatatagtgcatactgatcaagtcagagttttcagtgtgtctgctgcctgagtacaat

SEQ ID NO: 245052 - DNA, 120 bp, Artificial Sequence
  ENSG00000122224_22 (sequence is synthesized)
agatgactgggctcctgggcctttctccagtaagccacagaggagtcagctgcaaatattctcttctgttctacagacctctctcctcttcctgctcatggaattcctggtggagtctgg

SEQ ID NO: 245053 - DNA, 120 bp, Artificial Sequence
  ENSG00000122224_23 (sequence is synthesized)
gtcccaaacccatctgttttggtctagaatttcaaaagtgctctccagagcctcggaagccctggaatctgggaatccaagctagggtcacccagaagacacccacagggtccctacaag

SEQ ID NO: 245054 - DNA, 120 bp, Artificial Sequence
  ENSG00000122224_24 (sequence is synthesized)
aaaattaactgccttggccaaataccagcttcctagatgccttggtaacaatgtttatcaggaatatgatcttgcctaagatgaggaaatcaggaactgtattagtaccaccagctattc

SEQ ID NO: 245055 - DNA, 120 bp, Artificial Sequence
  ENSG00000122224_25 (sequence is synthesized)
tgagagttctcaaacattcagaaaagttggagcatttaccctgaacattcataggcctactacctagattctaacacaaacgttttactttgcttgctttatcactcgcctgcccatcta

SEQ ID NO: 245056 - DNA, 120 bp, Artificial Sequence
  ENSG00000122224_26 (sequence is synthesized)
accatccctctacccacccatatttttaaaaatatgctcctttttacttcattggctcttcacaatttgcagcaacctgctttcatttcatttttaccatatcccttgaagaaaatggtg

SEQ ID NO: 245057 - DNA, 120 bp, Artificial Sequence
  ENSG00000122224_27 (sequence is synthesized)
caggtatgagcatttcaatcttttagataagattcactgaaaaattcagaaatgtacccaaagtcacaaggctaattcctctactggaacagaaacccagaagatctgtttcacagattg

SEQ ID NO: 245058 - DNA, 120 bp, Artificial Sequence
  ENSG00000122224_28 (sequence is synthesized)
ttgtggctgcttttaagggagacagtgtttggggaatggaggaattaatgactgtgctaggcaattgacctagaagaaggaggacaagaatctcatttcatttctcagcatctgacattt

SEQ ID NO: 245059 - DNA, 120 bp, Artificial Sequence
  ENSG00000122224_29 (sequence is synthesized)
atttccttatattctcaataacaaagtattgtcaaacatttctttgttgataaattgagtagttacaatagtatttcatggcttaaatttatatttttcttatgaatgagatgagcatct

SEQ ID NO: 245060 - DNA, 84 bp, Artificial Sequence
  ENSG00000122224_30 (sequence is synthesized)
agctcactgcaacctccaccttctgagtccaaacaattcacccgtcttggcccccgaggaagttgggattacaggcatgcacca

SEQ ID NO: 245061 - DNA, 120 bp, Artificial Sequence
  ENSG00000122224_31 (sequence is synthesized)
ctaggattataggcgtgagccactgtgtctagccatcttttcatgtattgaatagccatttgtattctcttttctgtaactctctattaatattctttactcatctgtattagtgtgata

SEQ ID NO: 245062 - DNA, 120 bp, Artificial Sequence
  ENSG00000122224_32 (sequence is synthesized)
tattaatattctttactcatctgtattagtgtgatagggatgccataacagaatatcccagaatagatggcttacacaacagaaatttatttctcacaattctggagactagaaatccaa

SEQ ID NO: 245063 - DNA, 120 bp, Artificial Sequence
  ENSG00000122224_33 (sequence is synthesized)
gttcaaggtgttggcaggttcggtttttcctgggacctctctcttcggcttgtagttggccaccttttcactgtgcccccacagtcattcctttgtctgtgttgtctatgtcctaatctc

SEQ ID NO: 245064 - DNA, 120 bp, Artificial Sequence
  ENSG00000122224_34 (sequence is synthesized)
ttcttataagcacatcggtcatactgtattagggttcaccctaacaattccattttaacttaattacctctttagatgccctgtctccaaatacagtcacattcagaggtactcgggatt

SEQ ID NO: 245065 - DNA, 120 bp, Artificial Sequence
  ENSG00000122224_35 (sequence is synthesized)
agaacttctacatatgaatgttgtgggaggacagaattcagccctaacattctaccctctggcctctcaaaattcatgtccttctcacatgcaaaatacattcaccacattccaacaata

SEQ ID NO: 245066 - DNA, 120 bp, Artificial Sequence
  ENSG00000122224_36 (sequence is synthesized)
ccagaagttttaacccattccagcatcaactgtaagtccaaaatccatctaaatattatttaaatcaggtatgggtgagacttgagatatgattcaccctgaggcaaaattcttcttcag

SEQ ID NO: 245067 - DNA, 120 bp, Artificial Sequence
  ENSG00000122224_37 (sequence is synthesized)
ttgtgaacctgcaaaaccagagaagttatctgcctccaaaattcaatggtggaacaggtatggaatagacattgccattccaaaagagagacattgggaagaagaaaaaagtcacaggtc

SEQ ID NO: 245068 - DNA, 120 bp, Artificial Sequence
  ENSG00000122224_38 (sequence is synthesized)
ccaaacaagtccaaaacctaacagggtaaattccattagattttaaggctcaagcataatactctttggctcagtgctctatcctctgggcccactggagtagcagccccacctccttgg

SEQ ID NO: 245069 - DNA, 120 bp, Artificial Sequence
  ENSG00000122224_39 (sequence is synthesized)
ccctgagcggcagttctgccccctggaaccaaggaggaaaccacctcaccctacccaaggcttgtgccctctaggcctatggtggcagtggcagctctgcctacttctgaactgcctgtg

SEQ ID NO: 245070 - DNA, 120 bp, Artificial Sequence
  ENSG00000122224_40 (sequence is synthesized)
gggtcactcttcccttttcttgaaggataatacatatttgcagctgtacagctgtattgacttatttcataaaatcccagaagcctgacacactccttcatttgtcctgtctctgtccct

SEQ ID NO: 245071 - DNA, 120 bp, Artificial Sequence
  ENSG00000122224_41 (sequence is synthesized)
tacagtccagactggcagcatttctgctgaggtggtcaaatctcataacctctttagcaaacattgccaagccacaatctttgtgttctctccagacacactttctcgtttttcgcaata

SEQ ID NO: 245072 - DNA, 120 bp, Artificial Sequence
  ENSG00000122224_42 (sequence is synthesized)
tgaataggtgacattttttcaaagctttaagttctggctccatcttgcttgacaattccttatttaacctctctctctcttctcacattttatataagtagcaaggagaaactaggcagt

SEQ ID NO: 245073 - DNA, 120 bp, Artificial Sequence
  ENSG00000122224_43 (sequence is synthesized)
gccttcagctctttgattagaaatctccacagctaagtacccaaatttatcacttaaacattctgctttccacaaaacactagaatacaacgtggccgagttctttgccactttacaaca

SEQ ID NO: 245074 - DNA, 120 bp, Artificial Sequence
  ENSG00000122224_44 (sequence is synthesized)
agtatgccctttcctccagtttccagtaacatatttctaatttctgtctgagacctcaccagcaacacatttaatatttatatttttaccaacattctgctcatgatcacatatgtatat

SEQ ID NO: 245075 - DNA, 120 bp, Artificial Sequence
  ENSG00000122224_45 (sequence is synthesized)
ctctaaggtaatagcagcattccctgcagtgttcctattttctttctgagtgctcacccaaattttcgttaacattcatgtttctacccagagtctcttgaagacaatctaggatttttc

SEQ ID NO: 245076 - DNA, 120 bp, Artificial Sequence
  ENSG00000122224_46 (sequence is synthesized)
tagcacacacctcaaaattcttccaatctccacccatcagcccattccaaagccacttcacatttttagatttttagagcttcatcccacttctggtatcaaaatctgtgttagttttct

SEQ ID NO: 245077 - DNA, 120 bp, Artificial Sequence
  ENSG00000122224_47 (sequence is synthesized)
agggctgccataacaaaatactgcagactgactagcttaaacaacagaaacgtattccacatttctccagaacacaattctggaggccaatgaaggtatcagcggcttggtttcttctgc

SEQ ID NO: 245078 - DNA, 120 bp, Artificial Sequence
  ENSG00000122224_48 (sequence is synthesized)
ggcctctctccttggctcccacatggccactttctctccatgtcttcacatgggtgtccctctgtctatattgtctgtgctctaatctcatcttcttataaggataccactcatatcaga

SEQ ID NO: 245079 - DNA, 120 bp, Artificial Sequence
  ENSG00000122224_49 (sequence is synthesized)
atctccaaatatagttctatcttcaaatacggtcacattctgaggtgctagaggttaagacttcaacatctaaactttgcagagacacagtttagctcataacaccatctttctatcaga

SEQ ID NO: 245080 - DNA, 120 bp, Artificial Sequence
  ENSG00000122224_50 (sequence is synthesized)
taatttgaccgttttcattgatttgtagggtattctgtatctattaaggaaacggaattctgtgcagttaatagaattagaatgaatcaactccacatgtgttgacaaatgacgtacaat

SEQ ID NO: 245081 - DNA, 120 bp, Artificial Sequence
  ENSG00000122224_51 (sequence is synthesized)
aatttccaagatatattgttaattttttaaggttcaaaacagtgtgtaaagtatgcatatatctgtctatatctagaatacctctggaaagatcaacaagaaacccataacagtaattgc

SEQ ID NO: 245082 - DNA, 120 bp, Artificial Sequence
  ENSG00000122224_52 (sequence is synthesized)
ctccaggaatagtaattcttggggagatgaaataaatggctggaggctagaaagcttacttttttcattatgtagctttggtattttctcaattttttttaatgtattacctattcaaaa

SEQ ID NO: 245083 - DNA, 120 bp, Artificial Sequence
  ENSG00000122224_53 (sequence is synthesized)
gagtgagactctgtctcaaaaaagaaatataacttaatgaaacattcacacatgtgcacatacatggtgagcagtggagatggaacaaaaggaaaggagaagacaaggaagaagatctag

SEQ ID NO: 245084 - DNA, 120 bp, Artificial Sequence
  ENSG00000122224_54 (sequence is synthesized)
acaaaaggaaaggagaagacaaggaagaagatctagaagcacaatgcatcctaaattcagaccaaagacacgggcaactcaaattctagaagcagaggtccccactccatagcgtttggg

SEQ ID NO: 245085 - DNA, 120 bp, Artificial Sequence
  ENSG00000122224_55 (sequence is synthesized)
gctgggccattcacctatttattcattgaacattcatgagtgtttttcataaggcaggctgggtgttagatgttcagacacaggaatcagccctgtcatcaaggagttcttacactggtc

SEQ ID NO: 245086 - DNA, 120 bp, Artificial Sequence
  ENSG00000122224_56 (sequence is synthesized)
ggggagagagagaagtaatcagactattagtcatgctgagtcatggtgataacacctgtagcggatgttatgggagtacagaggagaggctgtcaacccagcctgcagagaagatgtccc

SEQ ID NO: 245087 - DNA, 120 bp, Artificial Sequence
  ENSG00000122224_57 (sequence is synthesized)
tgcgacaggtaacgctggcctctctctgctgcccccaactcccctattgtcactcccttcttctctcagcgctttcctgctggcaaaaggatctgagcatcttcccatgctgttgtccct

SEQ ID NO: 245088 - DNA, 120 bp, Artificial Sequence
  ENSG00000122224_58 (sequence is synthesized)
catactgaaatgcctcagaccactaggacagctgttcagttcacaccagttgattcataggaggcaaactcatgactagctgctggacaagtctacccgccaaagtgcccctggctctag

SEQ ID NO: 245089 - DNA, 120 bp, Artificial Sequence
  ENSG00000122224_59 (sequence is synthesized)
gtgcccctggctctaggctgccagttaggcctccaccacccaactttaggtgcttgccccggtccttctgcactgagtgtcagaagggactaggaggccaggtgcggtggctcacaccta

SEQ ID NO: 245090 - DNA, 80 bp, Artificial Sequence
  ENSG00000122224_60 (sequence is synthesized)
agaccaggctggccaacatggtcggtggtgggcgcctgtaatccaagctactctagaggctgaggcaggaaaatcgctcg

SEQ ID NO: 245091 - DNA, 120 bp, Artificial Sequence
  ENSG00000122224_61 (sequence is synthesized)
aaacacaaaaattagctgggttcggtggtgggcgcctgtaatccaagctactctagaggctgaggcaggaaaatcgctcgaaccccaaggggcggaggtttcagtgagccgagatcatgc

SEQ ID NO: 245092 - DNA, 120 bp, Artificial Sequence
  ENSG00000122224_62 (sequence is synthesized)
cacagatgactgggctcctgggcctttctccagtaagccacagaggagtcagctgcaaatattctcttctgttctacagacctctctcctcttcctgctcatggagtgaaagaaagaagg

SEQ ID NO: 245093 - DNA, 120 bp, Artificial Sequence
  ENSG00000122224_63 (sequence is synthesized)
ccacgtcatcgagggtgaccaccgcacactcctggagggcagcggcctggagtccatcatcagcaccctggctgagccacgtgtgagcgtgcgggagggctaggccctcgcccccacctg

SEQ ID NO: 245094 - DNA, 120 bp, Artificial Sequence
  ENSG00000122224_64 (sequence is synthesized)
agagctggaagggtcctgccgatgggaccctgccaggcccagtgccactgccccccgaggctgctagacgtgggcgttaggcgtgtcccacccacccgccgcctcccatggcacgtcggg

SEQ ID NO: 245095 - DNA, 120 bp, Artificial Sequence
  ENSG00000122224_65 (sequence is synthesized)
aacaccggagccgccaacttggagactcctggtctgtgaagagccgctgacgcccgcaggaaccgggctgggccttgtgtgccagtggggtttgtgcttggtctttctccgcttggattt

SEQ ID NO: 245096 - DNA, 120 bp, Artificial Sequence
  ENSG00000122224_66 (sequence is synthesized)
gcttatttattgcattgctggtagagactcccaagcctgtccaccctgcaaagactcctcgggcagcatgcgggtcccgcacactgcacccatttcctggatgtcccctgcaggcgcggg

SEQ ID NO: 245097 - DNA, 120 bp, Artificial Sequence
  ENSG00000122224_67 (sequence is synthesized)
aggccatccgggcctgctggctgcggccccctctcagccaggcctggctcagcccactgcgtgggaggtcaccggccactccccgaggagctgggatccccgggatgcaggcccacagtg

SEQ ID NO: 245098 - DNA, 120 bp, Artificial Sequence
  ENSG00000122224_68 (sequence is synthesized)
cggggctgcacccatgatgcggagctggcctccaaccctgcgggccgcgccaggcaccaactcagtgtttgtcagtgtttgtttttccaagaaatggttcaaattgctgctcagattttt

SEQ ID NO: 245099 - DNA, 120 bp, Artificial Sequence
  ENSG00000122224_69 (sequence is synthesized)
aaatttactgtagctgccagtgtacacgtgtggaccccattttatttttacaccaatttggtgaaaatgctgctttcctcagcctccccacaattaaactgcacatggtctctaaaaaaa

SEQ ID NO: 245100 - DNA, 120 bp, Artificial Sequence
  ENSG00000122254_0 (sequence is synthesized)
ggcatttcccgaagagccagatcgcggccggcgccagcgccaccgtccggtccacccgccagcccgcacagccgcgccgccgccgagcgtttcgtgagcggcgctccgaggatcaggaat

SEQ ID NO: 245101 - DNA, 120 bp, Artificial Sequence
  ENSG00000122254_1 (sequence is synthesized)
ggggcttcgggcgctgggcgcgctccgaacccggcgcacgtaagagcctgggagcgcccgagccgcccggctgcccggagccccatcgcctaggaccgggagatgctggaaatgcaaccg

SEQ ID NO: 245102 - DNA, 120 bp, Artificial Sequence
  ENSG00000122254_2 (sequence is synthesized)
cctgttccccgaggagccgctgcccccgggaccccctggcactgtgcgcaccctggtcagcagcccccggagaagacggcgcccccaacgcccgacccgcgtggccgtggcagcgccacg

SEQ ID NO: 245103 - DNA, 120 bp, Artificial Sequence
  ENSG00000122254_3 (sequence is synthesized)
cgagccctctaggcgaccgcagggccacagcagctcagccgccggtgccccctcggaaaccatgacccccggcgcgggcccatggagccatggcctatagggtcctgggccgcgcggggc

SEQ ID NO: 245104 - DNA, 120 bp, Artificial Sequence
  ENSG00000122254_4 (sequence is synthesized)
cacctcagccgcggagggcgcgcaggctgctcttcgccttcacgctctcgctctcctgcacttacctgtgttacagcttcctgtgctgctgcgacgacctgggtcggagccgcctcctcg

SEQ ID NO: 245105 - DNA, 120 bp, Artificial Sequence
  ENSG00000122254_5 (sequence is synthesized)
ctcggcgcgcctcgctgcctccgcggccccagcgcgggcggccagaaacttctccagaagtcccgcccctgtgatccctccgggccgacgcccagcgagcccagcgctcccagcgcgccc

SEQ ID NO: 245106 - DNA, 120 bp, Artificial Sequence
  ENSG00000122254_6 (sequence is synthesized)
ccgccgtgcccgcccctcgcctctccggttccaaccactccggctcacccaagctgggtaccaagcggttgccccaagccctcattgtgggcgtgaagaaggggggcacccgggccgtgc

SEQ ID NO: 245107 - DNA, 120 bp, Artificial Sequence
  ENSG00000122254_7 (sequence is synthesized)
tggagtttatccgagtacacccggacgtgcgggccttgggcacggaaccccacttctttgacaggaactacggccgcgggctggattggtacaggagcctgatgcccaggaccctcgaga

SEQ ID NO: 245108 - DNA, 120 bp, Artificial Sequence
  ENSG00000122254_8 (sequence is synthesized)
gccagatcacgctggagaagacgcccagctactttgtcactcaagaggctcctcgacgcatcttcaacatgtcccgagacaccaagctgatcgtggttgtgcggaaccctgtgacccgtg

SEQ ID NO: 245109 - DNA, 120 bp, Artificial Sequence
  ENSG00000122254_9 (sequence is synthesized)
ctttgagggcctctccttccgcaaccgcaccctgggcctggtggacgtgtcatggaacgccatccgcatcggcatgtacgtgctgcacctggagagctggctgcagtacttcccgctagc

SEQ ID NO: 245110 - DNA, 120 bp, Artificial Sequence
  ENSG00000122254_10 (sequence is synthesized)
tcagattcacttcgtcagtggcgagcgactcatcactgacccggccggcgagatggggcgagtccaggacttcctgggcattaagagattcatcacggacaagcacttctatttcaacaa

SEQ ID NO: 245111 - DNA, 120 bp, Artificial Sequence
  ENSG00000122254_11 (sequence is synthesized)
gaccaaaggattcccttgcttgaaaaaaacagaatcgagcctcctgcctcgatgcttgggcaaatcaaaagggagaactcatgtacagattgatcctgaagtgatagaccagctccgaga

SEQ ID NO: 245112 - DNA, 120 bp, Artificial Sequence
  ENSG00000122254_12 (sequence is synthesized)
attttatagaccgtataatatcaaattttatgaaaccgttgggcaggacttcaggtgggaataagcccacgaaaggaaagggctctcaagggctcttctgctcatctcttccgtgagatt

SEQ ID NO: 245113 - DNA, 120 bp, Artificial Sequence
  ENSG00000122254_13 (sequence is synthesized)
tgctcccagaccctctgatctccctccaacaaaccctggctccagccccctttcccaacttgagttgcatcatcttggaaccaggaagcccagctaaagccaagagaccagagagtccct

SEQ ID NO: 245114 - DNA, 120 bp, Artificial Sequence
  ENSG00000122254_14 (sequence is synthesized)
gccactagttttcatcagtctgttcaagcaaagttgatctgctcctggcacgtccagtaaattccagaatcattctcctttctgcccataaagggccttggagaattgctttaagaagag

SEQ ID NO: 245115 - DNA, 120 bp, Artificial Sequence
  ENSG00000122254_15 (sequence is synthesized)
tgaatgttccaatgatgatagatattataagcgatgatggttctgttgctatgaacacagcagtcggtccctgtcattgtccacccaggagtggccttgttaattccaagtggcatgtat

SEQ ID NO: 245116 - DNA, 120 bp, Artificial Sequence
  ENSG00000122254_16 (sequence is synthesized)
cttccctctgagcttcatttcttcaagatgctctgggtggtgggatgggagaccatcctcagccctcctcagaccttatcaattcattgagagattgcaaagctgaaagcacctccggcc

SEQ ID NO: 245117 - DNA, 120 bp, Artificial Sequence
  ENSG00000122254_17 (sequence is synthesized)
actcctgggagacagaccctttggtgatgaaataaaccagtgacttcagagcctatggtctcaactgtgcttgaaaaacactgtctctgaaaacaactttgtgattctccctgctccctg

SEQ ID NO: 245118 - DNA, 120 bp, Artificial Sequence
  ENSG00000122254_18 (sequence is synthesized)
tggacaaaagcacataattctgctgttacgggtactttgctcatacgagctttcatgttcagcatgcaatggaatcatgcttgtccatgtgaaataaatatggctctctcgtgtccttaa

SEQ ID NO: 245119 - DNA, 120 bp, Artificial Sequence
  ENSG00000122254_19 (sequence is synthesized)
tgactcagacactacctgtgtggttgtcggtgcacacacttgggtgattgtgctgaagctacctggactggagacaagaatgtgtgtcttgctaaactgtggatgataattaaattcatg

SEQ ID NO: 245120 - DNA, 120 bp, Artificial Sequence
  ENSG00000122254_20 (sequence is synthesized)
gaagcagcagcaatgacccaggagcacgtatagctggagaagaaggtcagagggtctcactctgtcattcaagcttgggtgcagtggaatgatcatagctcacttcaacctcaaactcct

SEQ ID NO: 245121 - DNA, 120 bp, Artificial Sequence
  ENSG00000122257_0 (sequence is synthesized)
gcagtggggcgctcgtccgaagccaggccgcgtccgccatagtacctggcttggaggtgtcgccgccgctcggtgagagcccccgagcggcagggggccaacacaaaaagggagccggag

SEQ ID NO: 245122 - DNA, 120 bp, Artificial Sequence
  ENSG00000122257_1 (sequence is synthesized)
aagccctagccgctgcccagcagcttgcgggcgtgttctcgcggttccgggcctcaaggcgacggaaacgaaaggcgagcgaagcgcggaggatccggcgagaagaagcgtcagggagcc

SEQ ID NO: 245123 - DNA, 120 bp, Artificial Sequence
  ENSG00000122257_2 (sequence is synthesized)
agcctcggcggtgtccccggggtccgccgaagccacccggccgccggctggggcccggggtggtgaggaagtgctccgaggcctcgccgaggcctagcgccggctttgtgtccgaggcgg

SEQ ID NO: 245124 - DNA, 120 bp, Artificial Sequence
  ENSG00000122257_3 (sequence is synthesized)
ggggaggcggagccgggggcggcctgcgggaaggcctctcctccgccgaccgcgcgttttcggcctaggccgtggggccgctcgtggcctccggggagcaggcgccaggggtttgtgtgc

SEQ ID NO: 245125 - DNA, 120 bp, Artificial Sequence
  ENSG00000122257_4 (sequence is synthesized)
ttgtgtgcggtgggggcctgggcctgggcctggggaagctgacgccggtcgtccggaagccaggaggaggcgtgaggccgctcgtggactccgggcctaggccctctcccctcaaccttc

SEQ ID NO: 245126 - DNA, 120 bp, Artificial Sequence
  ENSG00000122257_5 (sequence is synthesized)
tcccggggcctgggtcaccccaatccacggagagagagacccgccgggaggtgcggccgcgctatggacccctgaccccgtggggtcgctcggactcttaacgtgtggactgaccgctac

SEQ ID NO: 245127 - DNA, 120 bp, Artificial Sequence
  ENSG00000122257_6 (sequence is synthesized)
tgactgcaccgccaatccccccgtctctgccggccccttagcatgagcgagggggacccagccgggtgacattgtgcccgttggcggattctcgatttcccctcttccccgtcctcgtcc

SEQ ID NO: 245128 - DNA, 120 bp, Artificial Sequence
  ENSG00000122257_7 (sequence is synthesized)
tcctcctcccccatgaagtgattctgagtatcggggggtctctggattattgttctgacgaacccctgcttgtggttggggggtatttaatctgaggccttagggtccttcggtgtcttt

SEQ ID NO: 245129 - DNA, 120 bp, Artificial Sequence
  ENSG00000122257_8 (sequence is synthesized)
gagtgttttgtgtgtacatattttgctcttaaagtttataaatatacgtatattgagagtgtccacgtctcctcgctgaaccttaggaatcccttggcaccatgtcctgtgtgcattata

SEQ ID NO: 245130 - DNA, 120 bp, Artificial Sequence
  ENSG00000122257_9 (sequence is synthesized)
aattttcctctaaactcaactatgataccgtcacctttgatgggctccacatctccctctgcgacttaaagaagcagattatggggagagagaagctgaaagctgccgactgcgacctgc

SEQ ID NO: 245131 - DNA, 120 bp, Artificial Sequence
  ENSG00000122257_10 (sequence is synthesized)
agatcaccaatgcgcagacgaaagaagaatatactgatgataatgctctgattcctaagaattcttctgtaattgttagaagaattcctattggaggtgttaaatctacaagcaagacat

SEQ ID NO: 245132 - DNA, 120 bp, Artificial Sequence
  ENSG00000122257_11 (sequence is synthesized)
atgttataagtcgaactgaaccagcgatggcaactacaaaagcaattgatgactcttccgcgtctatttctctggcccagcttacaaagactgccaatctggctgaagccaatgcttctg

SEQ ID NO: 245133 - DNA, 120 bp, Artificial Sequence
  ENSG00000122257_12 (sequence is synthesized)
aagaagataaaattaaagcaatgatgtcgcaatctggccatgaatacgacccaatcaattacatgaagaaacctctaggtccaccacctccatcttacacgtgtttccgttgtggtaaac

SEQ ID NO: 245134 - DNA, 120 bp, Artificial Sequence
  ENSG00000122257_13 (sequence is synthesized)
ctggacattatattaagaattgcccaacaaatggggataaaaactttgaatctggtcctaggattaaaaagagcactggaattcccagaagtttcatgatggaagtgaaagatcctaata

SEQ ID NO: 245135 - DNA, 120 bp, Artificial Sequence
  ENSG00000122257_14 (sequence is synthesized)
tgaaaggtgcaatgcttaccaacactggaaaatatgcaataccaactatagatgcagaagcatatgcaattgggaagaaagagaaacctcccttcttaccagaggagccatcttcttcct

SEQ ID NO: 245136 - DNA, 120 bp, Artificial Sequence
  ENSG00000122257_15 (sequence is synthesized)
cagaagaagatgatcctatcccagatgaattgttgtgtctcatctgcaaggatattatgactgatgctgttgtgattccctgctgtggaaacagttactgtgatgaatgtataagaacag

SEQ ID NO: 245137 - DNA, 120 bp, Artificial Sequence
  ENSG00000122257_16 (sequence is synthesized)
cactcctggaatcagatgagcacacatgtccgacgtgtcatcaaaatgatgtttctcctgatgctttaattgccaataaatttttacgacaggctgtaaataacttcaaaaatgaaactg

SEQ ID NO: 245138 - DNA, 120 bp, Artificial Sequence
  ENSG00000122257_17 (sequence is synthesized)
gctatacaaaaagactacgaaaacagttacctcctccaccacccccaataccacctccgagaccactgattcagaggaacctacaacctctgatgagatctccgatatcaagacaacaag

SEQ ID NO: 245139 - DNA, 120 bp, Artificial Sequence
  ENSG00000122257_18 (sequence is synthesized)
atcctcttatgattccagtgacatcttcatcaactcacccagctccgtctatatcttcattaacttctaatcagtcttccttggcccctcctgtgtctggaaatccgtcttctgctccag

SEQ ID NO: 245140 - DNA, 120 bp, Artificial Sequence
  ENSG00000122257_19 (sequence is synthesized)
ctcctgtacctgatataactgcaacagtatccatatcagttcattcagaaaaatcagatggaccttttcgggattctgataataaaatattgccagctgcagctcttgcatcagagcact

SEQ ID NO: 245141 - DNA, 120 bp, Artificial Sequence
  ENSG00000122257_20 (sequence is synthesized)
caaagggaacctcctcaattgcaattaccgctcttatggaagagaagggttaccaggtgcctgttcttggaaccccatctttgcttggacagtcattattgcatggacagttgatcccca

SEQ ID NO: 245142 - DNA, 120 bp, Artificial Sequence
  ENSG00000122257_21 (sequence is synthesized)
caactggtccagtaagaataaatactgctcgtccaggtggtggtcgaccaggctgggaacattccaacaaacttggctatctggtttctccaccacaacaaattagaagaggggagagga

SEQ ID NO: 245143 - DNA, 120 bp, Artificial Sequence
  ENSG00000122257_22 (sequence is synthesized)
gctgctacagaagtataaaccgtgggcgacaccacagcgaaagatcacagaggactcaaggcccgtcactaccagcaactccagtctttgtacctgttccaccacctcctttgtatccgc

SEQ ID NO: 245144 - DNA, 120 bp, Artificial Sequence
  ENSG00000122257_23 (sequence is synthesized)
ctcctccccatacacttcctctccctccgggtgttcctcctccacagttttctcctcagtttcctcctggccagccaccacccgctgggtatagtgtccctcctccagggtttcctccag

SEQ ID NO: 245145 - DNA, 120 bp, Artificial Sequence
  ENSG00000122257_24 (sequence is synthesized)
ctcctgccaatttatcaacaccttgggtatcatcaggagtgcagacagctcattcaaataccatcccaacaacacaagcaccacctttgtccagggaagaattctatagagagcagcgac

SEQ ID NO: 245146 - DNA, 120 bp, Artificial Sequence
  ENSG00000122257_25 (sequence is synthesized)
gactaaaagaagaggaaaagaaaaagtccaagctagatgagtttacaaatgattttgctaaggaattgatggaatacaaaaagattcaaaaggagcgtaggcgctcattttccaggtcta

SEQ ID NO: 245147 - DNA, 120 bp, Artificial Sequence
  ENSG00000122257_26 (sequence is synthesized)
aatctccctatagtggttcttcgtattcaagaagttcatatacttattctaaatcaagatctggttcaacacgttcacgctcttattctcgatcattcagccgctcacattctcgttcct

SEQ ID NO: 245148 - DNA, 120 bp, Artificial Sequence
  ENSG00000122257_27 (sequence is synthesized)
attcacggtcacctccataccccagaagaggcagaggcaagagccgcaattaccgttcacggtctagatctcatggatatcatcgatctaggtcaaggtcacccccttacagacgctatc

SEQ ID NO: 245149 - DNA, 120 bp, Artificial Sequence
  ENSG00000122257_28 (sequence is synthesized)
ctcaagcgtttaggggacagtctcctaataaacgtaatgtacctcaaggggaaacagaacgtgaatattttaatagatacagagaagttccaccaccatatgacatgaaagcatattatg

SEQ ID NO: 245150 - DNA, 120 bp, Artificial Sequence
  ENSG00000122257_29 (sequence is synthesized)
ggagaagtgttgactttagagacccatttgaaaaagaacgctaccgagaatgggagagaaaatatagagagtggtatgaaaaatattataaaggttatgctgctggagcacagcctagac

SEQ ID NO: 245151 - DNA, 120 bp, Artificial Sequence
  ENSG00000122257_30 (sequence is synthesized)
cctcagcaaatagagagaacttttctccagagagatttttgccacttaacatcaggaattctcccttcacaagaggccgcagagaagactatgttggtgggcaaagtcatagaagtcgaa

SEQ ID NO: 245152 - DNA, 120 bp, Artificial Sequence
  ENSG00000122257_31 (sequence is synthesized)
acataggtagcaactatccagaaaagctttcagcaagagatggtcacaatcagaaggataatacaaagtcaaaagagaaggagagtgaaaacgctccaggagatggtaaaggaaataagc

SEQ ID NO: 245153 - DNA, 120 bp, Artificial Sequence
  ENSG00000122257_32 (sequence is synthesized)
ataagaaacacagaaaaagaagaaaaggggaggaaagtgagggttttctgaacccagagttattagagacttctaggaaatcaagagaacctacaggtgttgaagaaaataaaacagact

SEQ ID NO: 245154 - DNA, 120 bp, Artificial Sequence
  ENSG00000122257_33 (sequence is synthesized)
cattgtttgttctcccaagtagagatgatgccacacctgttagagatgaaccaatggatgcagaatcaatcacttttaaatcagtgtctgaaaaagacaagagagaaagggataaaccaa

SEQ ID NO: 245155 - DNA, 120 bp, Artificial Sequence
  ENSG00000122257_34 (sequence is synthesized)
aagcaaagggtgataaaaccaaacggaagaatgatggatctgctgtgtccaaaaaagaaaatattgtaaaacctgctaaaggaccccaagaaaaagtagatggagaacgtgagagatctc

SEQ ID NO: 245156 - DNA, 120 bp, Artificial Sequence
  ENSG00000122257_35 (sequence is synthesized)
ctcgatctgaacctccaattaaaaaagccaaagaggagactccgaagactgacaatactaaatcatcatcttcctctcagaaggatgaaaaaatcactggaacccccagaaaagctcact

SEQ ID NO: 245157 - DNA, 120 bp, Artificial Sequence
  ENSG00000122257_36 (sequence is synthesized)
ctaaatcagcaaaagaacaccaagaaacaaaaccagtcaaagaggaaaaagtgaagaaggactattccaaagatgtcaaatcagaaaagctaacaactaaggaagaaaaggccaagaagc

SEQ ID NO: 245158 - DNA, 120 bp, Artificial Sequence
  ENSG00000122257_37 (sequence is synthesized)
ctaatgagaaaaacaaaccacttgataataagggagaaaaaagaaaaagaaaaactgaagaaaaaggcgtagataaagattttgagtcttcttcaatgaaaatctcgaaactagaagtga

SEQ ID NO: 245159 - DNA, 120 bp, Artificial Sequence
  ENSG00000122257_38 (sequence is synthesized)
ctgaaatagtgaaaccatcaccaaagcgcaaaatggaacctgatactgaaaaaatggataggacccctgaaaaggacaaaatttctttaagtgcgccagccaaaaaaatcaaactcaaca

SEQ ID NO: 245160 - DNA, 120 bp, Artificial Sequence
  ENSG00000122257_39 (sequence is synthesized)
gagaaactgggaagaaaattggaagtacagaaaatatatcaaacacaaaagaaccctctgaaaaattggagtcaacatctagcaaagttaaacaagaaaaagtcaaaggaaaggtcagac

SEQ ID NO: 245161 - DNA, 120 bp, Artificial Sequence
  ENSG00000122257_40 (sequence is synthesized)
gaaaagtgactggaactgaaggatccagctcaactctggtggattacaccagtacgagctcaactggaggcagtcctgtgcggaaatctgaagaaaaaacagatacaaagcgaactgtga

SEQ ID NO: 245162 - DNA, 120 bp, Artificial Sequence
  ENSG00000122257_41 (sequence is synthesized)
ttaaaacgatggaagaatataataatgacaataccgcgccagctgaagatgttatcattatgattcaggttcctcaatccaaatgggataaagatgactttgaatctgaagaagaagatg

SEQ ID NO: 245163 - DNA, 120 bp, Artificial Sequence
  ENSG00000122257_42 (sequence is synthesized)
ttaaatccacacagcctatatcaagtgtaggaaaacctgctagtgttataaaaaatgttagtacaaagccatcaaatatagtcaagtatcctgagaaagaaagtgagccatccgagaaaa

SEQ ID NO: 245164 - DNA, 120 bp, Artificial Sequence
  ENSG00000122257_43 (sequence is synthesized)
ttcagaaattcaccaaggacgtgagccatgaaatcatacaacatgaggttaaaagttcaaaaaactctgcatctagtgaaaaagggaaaaccaaagatcgagattattcagtgttggaaa

SEQ ID NO: 245165 - DNA, 120 bp, Artificial Sequence
  ENSG00000122257_44 (sequence is synthesized)
aggagaaccctgaaaagaggaagaacagcactcagccagagaaagagagtaatttggaccgtctgaatgaacaaggaaattttaaaagtctgtctcaatcttccaaagaggctagaacgt

SEQ ID NO: 245166 - DNA, 120 bp, Artificial Sequence
  ENSG00000122257_45 (sequence is synthesized)
cagataaacatgattccactcgtgcttcctcaaataaagacttcactcccaatagagacaaaaaaactgactatgacaccagagagtattcaagttccaaacgtagagatgaaaagaatg

SEQ ID NO: 245167 - DNA, 120 bp, Artificial Sequence
  ENSG00000122257_46 (sequence is synthesized)
aattaacaagacgaaaagactctccttctcggaataaagattctgcatctggacagaaaaataaaccaagggaagagagagatttgcctaaaaaaggaacaggagattccaaaaaaagta

SEQ ID NO: 245168 - DNA, 120 bp, Artificial Sequence
  ENSG00000122257_47 (sequence is synthesized)
attctagtccctcaagagacagaaaacctcatgatcacaaagccacttatgatactaaacggccaaatgaagagacaaaatctgtagataaaaatccttgtaaggatcgtgagaagcatg

SEQ ID NO: 245169 - DNA, 120 bp, Artificial Sequence
  ENSG00000122257_48 (sequence is synthesized)
tattagaagcaaggaacaataaagagtcaagtggcaataaactactttatatacttaacccaccagagacacaggttgaaaaagagcaaattactgggcaaattgacaagagtactgtca

SEQ ID NO: 245170 - DNA, 120 bp, Artificial Sequence
  ENSG00000122257_49 (sequence is synthesized)
agcctaaaccccagttaagtcattcctctagactttcctctgacttaactagagaaactgatgaagctgcttttgaaccagactataatgaaagtgacagtgaaagtaatgtttctgtaa

SEQ ID NO: 245171 - DNA, 120 bp, Artificial Sequence
  ENSG00000122257_50 (sequence is synthesized)
aagaagaggaatcttcaggaaacatttctaaggacctgaaagataaaatagtggagaaagcaaaagagagcctggacacagcagcagttgtccaggtgggcataagcaggaatcagagcc

SEQ ID NO: 245172 - DNA, 120 bp, Artificial Sequence
  ENSG00000122257_51 (sequence is synthesized)
acagcagccccagcgtcagccccagcagaagccacagtccttctggaagccagacccgaagccacagtagcagtgccagctcagcagaaagtcaggacagcaagaagaagaagaaaaaga

SEQ ID NO: 245173 - DNA, 120 bp, Artificial Sequence
  ENSG00000122257_52 (sequence is synthesized)
aggaaaagaaaaaacacaagaaacataaaaagcataagaagcataagaaacatgcaggcactgaagtggaattggaaaaaagccaaaaacacaaacacaagaaaaagaagtcaaagaaga

SEQ ID NO: 245174 - DNA, 120 bp, Artificial Sequence
  ENSG00000122257_53 (sequence is synthesized)
acaaagataaagagaaggagaaggagaaagatgaccaaaaagtgaaatctgtcactgtgtaaaaagacagattttttaaattgacttaattactaagtcatctgtattaaattttgttat

SEQ ID NO: 245175 - DNA, 120 bp, Artificial Sequence
  ENSG00000122257_54 (sequence is synthesized)
aatgtaaagagattcaagccttgtaaataatgacatggaagaccctgtgctgcacttaaaatattgctgcttgattatttgatttttacatcagagctttataacacgaacttttgtaca

SEQ ID NO: 245176 - DNA, 120 bp, Artificial Sequence
  ENSG00000122257_55 (sequence is synthesized)
gaattgtgagttgtgaccatgtaacatgagaggttttgctagggcctattatttttaaccaccattaattagttggggtggagtttactgtaatgtgaaattttcacatttgaatttttt

SEQ ID NO: 245177 - DNA, 120 bp, Artificial Sequence
  ENSG00000122257_56 (sequence is synthesized)
aattgcctggcaaaagctgatataagttctaaaatatcagcagaatgatttgctgaattcattacaaccctgttatgtcactttttgattacaataaaagttttcagtaaacttttcaaa

SEQ ID NO: 245178 - DNA, 120 bp, Artificial Sequence
  ENSG00000122257_57 (sequence is synthesized)
tttcccctagactgtatcccgacaaaatgtcctagtaacaaattgctttttaagctcctgttctgggaaaactaagcattaaaattgattattctaaaacataaagtggactaaagccat

SEQ ID NO: 245179 - DNA, 120 bp, Artificial Sequence
  ENSG00000122257_58 (sequence is synthesized)
cctattttataattttctaatgcaaagtggtttagtatagagttaacacttagaagtttatagtttactgtttttattcttatgtactgtaaggaccatatttgagtttttggtctattc

SEQ ID NO: 245180 - DNA, 120 bp, Artificial Sequence
  ENSG00000122257_59 (sequence is synthesized)
ctaccattgtttctttgtggggaggagttggggcggtttgggggattggttttttttttttgtttttttaaactacaggtatttgtaaaacaatgtttgggttcaaacaaattagttgtt

SEQ ID NO: 245181 - DNA, 120 bp, Artificial Sequence
  ENSG00000122257_60 (sequence is synthesized)
aaacatctgtaatccagttttctgtaaatgttgctgttgttctaagctctgttaatgttaagcattctttgtatataaaattacaataaaatgttaaaactggttgcttgttttgtggat

SEQ ID NO: 245182 - DNA, 120 bp, Artificial Sequence
  ENSG00000122257_61 (sequence is synthesized)
gaatgtaaagacaaaccccaatgaatggctgatatgagtgctaaatgcctgaagattcaacttaactagaaatcactcccttagaccctgcttacatctagaccttgtatatcatacctc

SEQ ID NO: 245183 - DNA, 120 bp, Artificial Sequence
  ENSG00000122257_62 (sequence is synthesized)
aaagatgaaattcataaaacttatctgaagagtttaatttaaaattataatgctcaatgcacatcttttgcacttgagttgaaactaacatcactacctaaagagccttctacttctaat

SEQ ID NO: 245184 - DNA, 120 bp, Artificial Sequence
  ENSG00000122257_63 (sequence is synthesized)
atctgctgcataatacgttcagtcattctacccccatccctacctccacattgtaagtataaattagtcttaatgctctgacacttgaattatttttaaaacatcaagtgtttctattct

SEQ ID NO: 245185 - DNA, 120 bp, Artificial Sequence
  ENSG00000122257_64 (sequence is synthesized)
aacttaatatcagtctttaacttgtagaaaagtagtatgcaagtcttaatgtaaggtacaaacagggtctaaggtttgagtgcccccagaatgactttcttcagccttgcagacacctaa

SEQ ID NO: 245186 - DNA, 120 bp, Artificial Sequence
  ENSG00000122257_65 (sequence is synthesized)
acatcatgtaattacctaaggaattcccaagtgcctcttccaggttatacgtgtaaatagctgtttttatgcaagattagttagatactgctctttacaggatgagtggtgttgtctttg

SEQ ID NO: 245187 - DNA, 120 bp, Artificial Sequence
  ENSG00000122257_66 (sequence is synthesized)
agtgaagtaaatcattttagaacttaatatccaactgatcatagtacatattgtaaataaaatgtattttgatgacagctcagttgaatatggataatatgtggcatcacttgcacactt

SEQ ID NO: 245188 - DNA, 120 bp, Artificial Sequence
  ENSG00000122257_67 (sequence is synthesized)
attttgtagaaatgggtaatttgtgcccgtaacactgtttcatattaaatatgatagcattatccctgtatgacactgtgttgtacagttaatgtatgatcctttttagatcgtttaggt

SEQ ID NO: 245189 - DNA, 120 bp, Artificial Sequence
  ENSG00000122257_68 (sequence is synthesized)
tttacactaaggaacatgatgacatgttctacatttgtctgtctatagttagtattttgtatgtatgtacaggctgttgtgtgctttttgtttcttgcaataaaaaatgtttggagtgta

SEQ ID NO: 245190 - DNA, 120 bp, Artificial Sequence
  ENSG00000122257_69 (sequence is synthesized)
cagattttctgtgtgatacattttttcattttaattgagtcccctcttcctcccctccaactgatagctttttataactgtgtgaaatatctagagaagaatgaagtaggctgagctaca

SEQ ID NO: 245191 - DNA, 120 bp, Artificial Sequence
  ENSG00000122257_70 (sequence is synthesized)
ttttcaagcttaacattctttagaaaactaagaaaatgcccaatatttcaacattaaggtgtcaataggggctaaatgatcactttaagatgttttcagtttggaacttgaatgtgtgtt

SEQ ID NO: 245192 - DNA, 120 bp, Artificial Sequence
  ENSG00000122257_71 (sequence is synthesized)
tcttatggaagagaaggtaaattttactggtgctttaatttgggattttttttacagcagggttttgtttttctggctttgttcttacctcttttttttttttttttttaactatttctg

SEQ ID NO: 245193 - DNA, 120 bp, Artificial Sequence
  ENSG00000122257_72 (sequence is synthesized)
tgtatgagagaataaacaaacttactcagactgaagagtatgttttcaaaaattaaagaagtagcaattatatgggagctgttatttattaaagcaattatctgagcccttaaagggctg

SEQ ID NO: 245194 - DNA, 120 bp, Artificial Sequence
  ENSG00000122257_73 (sequence is synthesized)
tttgtttttacaatgttgtataatggccttgcaggaaaattagatttcttattctctcttccagtgtacattgtcttgagtattgtcacatttagagaccatagggagatatgggactcc

SEQ ID NO: 245195 - DNA, 120 bp, Artificial Sequence
  ENSG00000122257_74 (sequence is synthesized)
tttttctaacatcatatttttttatgtggaacggttttttaagaggggttgggggaggacatattttgcaaaagcattgtacatattattactatcctgtaaagagtagttgctgttttg

SEQ ID NO: 245196 - DNA, 120 bp, Artificial Sequence
  ENSG00000122257_75 (sequence is synthesized)
agaagataggggaatactttgtcagcctcagcgtattggagtattgttcatcttcaagacagaagaaacacttgaagctacacttaattattttttttccctcatacattttgtttaatt

SEQ ID NO: 245197 - DNA, 120 bp, Artificial Sequence
  ENSG00000122257_76 (sequence is synthesized)
atacattggaaactaacaaggttctggaggaatttcctggttttggctataaattatgtggaccttttttaagcagccaaaacagaagatttcctttacacggacgattgcatggttatt

SEQ ID NO: 245198 - DNA, 120 bp, Artificial Sequence
  ENSG00000122257_77 (sequence is synthesized)
aaggtcaatattttaaatgtgatgcagttgtttctttatgctatagacttgtagtctgtctgcattaggaaaagttttgaacaacctaatttgtttgaacacagactacatgaattgtgt

SEQ ID NO: 245199 - DNA, 120 bp, Artificial Sequence
  ENSG00000122257_78 (sequence is synthesized)
aagtgtgtaaagctgtttgcaggaatataccaatgtgtatgtttggcagaggggcaaattgttacctcctgaatcactgtatatgccatgttttgcgataagattgcttgcattttctgc

SEQ ID NO: 245200 - DNA, 120 bp, Artificial Sequence
  ENSG00000122257_79 (sequence is synthesized)
tcaacaatgtgtatcttctgtttgggaaagcactagtgatggattactttttaaagcaatacatttagcttgcaaattgtgcctttaaaaaaaaaaataggcagacttttgagggccaag

SEQ ID NO: 245201 - DNA, 120 bp, Artificial Sequence
  ENSG00000122257_80 (sequence is synthesized)
aaggaagctgtccagttttccaaaaatcctttttccctgctatcagaaatgtgaaaccaaatttagcaaccaagattaatgaaaagatgggttttccattagtgctgtccctatcttgtt

SEQ ID NO: 245202 - DNA, 120 bp, Artificial Sequence
  ENSG00000122257_81 (sequence is synthesized)
atgatgcaccacgctgattaaattaggcattcagtatataaaggggtcggccacagacgggcaaaaggaacagattcaccgcttcggagtgaattccatgacggcttgcaattttctcgt

SEQ ID NO: 245203 - DNA, 120 bp, Artificial Sequence
  ENSG00000122257_82 (sequence is synthesized)
cgagtttttctttcactagagatagccctcgccctttcattcacacagaggcttttaagaaaaaagcaaccaacctgaagaggacctggcagcaataagtttttggtgaaataacaaaga

SEQ ID NO: 245204 - DNA, 120 bp, Artificial Sequence
  ENSG00000122257_83 (sequence is synthesized)
tagatgctgggagactcctctttcacaaattgggaacaatggggcataagcaaattgatacttatttctggaatcgtggtgatgtctatggagcaactgcaacacaaataacacacctaa

SEQ ID NO: 245205 - DNA, 120 bp, Artificial Sequence
  ENSG00000122257_84 (sequence is synthesized)
tgctgaatcttggaagatgtatattttagaatatttgtatttacttggaatggctcttcccaacctcatatgttttaataataaaataaataatgttgatgacaagtgttgatcaatgag

SEQ ID NO: 245206 - DNA, 120 bp, Artificial Sequence
  ENSG00000122299_0 (sequence is synthesized)
gagcgagcacccaggccccgccgccgccgccgccaccgctgcccgcctgccgccgcccgcctccgcctgccttctgccgccggccggcgcgtcgtccccacagattgctcatttagaaag

SEQ ID NO: 245207 - DNA, 120 bp, Artificial Sequence
  ENSG00000122299_1 (sequence is synthesized)
gcgtcgtccccacagattgctcatttagaaagtggatgtgtgggataacatgtccaatgtgtccgaggagagaagaaaaaggcagcagaacattaaggaaggactgcagtttatacagtc

SEQ ID NO: 245208 - DNA, 120 bp, Artificial Sequence
  ENSG00000122299_2 (sequence is synthesized)
accgctgtcatatccaggaacacaggagcaatatgcggtatatttgcgtgctctcgtgagaaatctttttaatgaaggaaatgacgtttatcgggaacatgattggaacaactcgataag

SEQ ID NO: 245209 - DNA, 120 bp, Artificial Sequence
  ENSG00000122299_3 (sequence is synthesized)
ccagtacacggaagccttgaatatagctgattatgcaaaatctgaagaaattttaatccccaaagaaataattgaaaaactatatataaatcgtattgcctgctattctaatatgggttt

SEQ ID NO: 245210 - DNA, 120 bp, Artificial Sequence
  ENSG00000122299_4 (sequence is synthesized)
ccatgataaagttttggaggactgcaatatagtcctcagtttaaatgccagtaactgcaaagctctgtatcggaaatctaaggctttaagtgatttaggaagatacaaaaaggcttacga

SEQ ID NO: 245211 - DNA, 120 bp, Artificial Sequence
  ENSG00000122299_5 (sequence is synthesized)
tgctgtagcaaagtgctccttagcagtgcctcaggatgagcatgtaataaaactaactcaagaactagctcagaaattgggatttaaaataagaaaagcgtatgtcagagctgagctctc

SEQ ID NO: 245212 - DNA, 120 bp, Artificial Sequence
  ENSG00000122299_6 (sequence is synthesized)
attaaaatcagttcctggggatggggctaccaaggctttgaaccattctgtggaagatattgagccagatttattaactccaaggcaagaagcagttcctgttgtctctttaccggcacc

SEQ ID NO: 245213 - DNA, 120 bp, Artificial Sequence
  ENSG00000122299_7 (sequence is synthesized)
cagtttttctcatgaagttggaagtgagctggcctcagttcctgttatgcccttaacttctattttgccactacaagtggaagagagcgctctgccatctgcagtgctggcaaatggagg

SEQ ID NO: 245214 - DNA, 120 bp, Artificial Sequence
  ENSG00000122299_8 (sequence is synthesized)
aaagatgcccttcactatgccagaagcttttctagatgatggagatatggtccttggagatgaactagatgacctgcttgattctgcacctgaaactaatgaaactgttatgccgtcagc

SEQ ID NO: 245215 - DNA, 120 bp, Artificial Sequence
  ENSG00000122299_9 (sequence is synthesized)
tttagtcagaggaccccttcagacagccagtgtctctcctagcatgcccttttcggcatcgctgttaggaaccttacccattggtgcgaggtatgctcctccaccctccttctcagaatt

SEQ ID NO: 245216 - DNA, 120 bp, Artificial Sequence
  ENSG00000122299_10 (sequence is synthesized)
ttatccacctttgacttcatccttagaagatttttgttcttctttaaattcattttcaatgagtgaatccaaacgagatctgtccacctcaacttctagagagggaacaccgcttaacaa

SEQ ID NO: 245217 - DNA, 120 bp, Artificial Sequence
  ENSG00000122299_11 (sequence is synthesized)
cagtaattcttcccttttacttatgaatggaccaggtagtttgtttgcttcagagaatttcctgggaatttcaagtcagcctagaaatgactttggaaacttttttggaagtgcagttac

SEQ ID NO: 245218 - DNA, 120 bp, Artificial Sequence
  ENSG00000122299_12 (sequence is synthesized)
caaaccatcttcatcagtgactccaagacatcccctcgaaggaacccatgaattgagacaagcttgccagatctgttttgtaaaatcaggccctaagttaatggatttcacttaccatgc

SEQ ID NO: 245219 - DNA, 120 bp, Artificial Sequence
  ENSG00000122299_13 (sequence is synthesized)
taacatagatcataagtgtaagaaagatattttaatcggtaggataaagaatgttgaagataaatcatggaaaaaaatacgtccaagaccaacaaaaacaaattatgaaggaccatatta

SEQ ID NO: 245220 - DNA, 120 bp, Artificial Sequence
  ENSG00000122299_14 (sequence is synthesized)
tatatgtaaagatgttgctgctgaggaggaatgtagatattcaggccactgcacgtttgcttattgccaagaggagatagatgtgtggacactggagcggaaaggagcattcagccggga

SEQ ID NO: 245221 - DNA, 120 bp, Artificial Sequence
  ENSG00000122299_15 (sequence is synthesized)
gagaaatgttttgatcataagcctagaatgataagtaaaagaaataaagataattctactgcttgttctcacccggttacaaagcatgagtttgaagacaataagtgccttgtccacatt

SEQ ID NO: 245222 - DNA, 120 bp, Artificial Sequence
  ENSG00000122299_16 (sequence is synthesized)
ttgcgagagacaacagtaaaatactccaaaatacgttcttttcatggtcagtgtcagcttgatttatgtcgacatgaagttcggtatggctgtttaagggaagatgagtgcttttatgcc

SEQ ID NO: 245223 - DNA, 120 bp, Artificial Sequence
  ENSG00000122299_17 (sequence is synthesized)
catagtcttgtggaactgaaagtctggataatgcaaaatgaaacaggtatctcacatgatgctattgctcaagagtctaaacgatattggcagaatttggaagcaaatgtacctggagcg

SEQ ID NO: 245224 - DNA, 120 bp, Artificial Sequence
  ENSG00000122299_18 (sequence is synthesized)
caggtacttggtaatcaaataatgcctggatttcttaatatgaagataaagtttgtgtgcgcccagtgtctgagaaacggtcaagtcattgaaccagacaaaaacagaaaatattgtagt

SEQ ID NO: 245225 - DNA, 120 bp, Artificial Sequence
  ENSG00000122299_19 (sequence is synthesized)
gcaaaagcaaggcattcgtggaccaaagaccggcgtgcgatgagagtgatgtctattgaacgtaagaagtggatgaacatccgtcctctccccacaaagaaacaaatgcctttacagttt

SEQ ID NO: 245226 - DNA, 120 bp, Artificial Sequence
  ENSG00000122299_20 (sequence is synthesized)
gatctgtgcaaccatattgcttctgggaaaaaatgtcaatatgttggaaactgttcctttgctcatagtcctgaggaaagagaagtttggacttacatgaaggagaatgggatacaagat

SEQ ID NO: 245227 - DNA, 120 bp, Artificial Sequence
  ENSG00000122299_21 (sequence is synthesized)
atggagcaattttacgaactatggctcaagagtcaaaaaaatgaaaaaagtgaagacatagccagtcagtcaaacaaggaaaatggaaaacaaattcacatgccaacagattatgctgaa

SEQ ID NO: 245228 - DNA, 120 bp, Artificial Sequence
  ENSG00000122299_22 (sequence is synthesized)
gttacagtggactttcactgctggatgtgtgggaaaaactgcaacagtgagaagcagtggcagggccacatctcctccgagaagcacaaagagaaggttttccacaccgaggacgaccag

SEQ ID NO: 245229 - DNA, 120 bp, Artificial Sequence
  ENSG00000122299_23 (sequence is synthesized)
tactgctggcagcaccgcttcccaacaggctatttcagtatttgtgataggtatatgaatggcacctgcccagaaggaaacagctgtaaatttgcacatggaaatgccgaacttcatgaa

SEQ ID NO: 245230 - DNA, 120 bp, Artificial Sequence
  ENSG00000122299_24 (sequence is synthesized)
tgggaagaaagaagagatgccctaaagatgaagctcaacaaagcacgaaaagatcacttaattggcccaaatgataatgactttggaaaatatagttttttgtttaaagatttaaactaa

SEQ ID NO: 245231 - DNA, 120 bp, Artificial Sequence
  ENSG00000122299_25 (sequence is synthesized)
tatgctggcttttatgtatgatacctaatcagagcattgaccagaaaaattgaaagtgttctgaggcacatagcagaggagctgcagatttcctgcttgtattggcgtatatcgttcctc

SEQ ID NO: 245232 - DNA, 120 bp, Artificial Sequence
  ENSG00000122299_26 (sequence is synthesized)
ctgagcagcaacccacagtaggtaggaaaatgggctgtttcacaggcctggccacgctctcacggaaccactggcatcagatggtgaagtgactgctacccggttgccatctgttgaaca

SEQ ID NO: 245233 - DNA, 120 bp, Artificial Sequence
  ENSG00000122299_27 (sequence is synthesized)
gacttttggatgaagtgtgttggggaagaggataaggttatatctaggacaactctttgagttggtccttcatataagaatcgtgacggtaagagaataaacacttgtactgggatcaga

SEQ ID NO: 245234 - DNA, 120 bp, Artificial Sequence
  ENSG00000122299_28 (sequence is synthesized)
atacatgatggatgaaattctttacatgttttagcagaatgaatttgtttaatataataaagtttgctacttatctgtatgtaggttgctaaaaaggattttcttaactcagattttaag

SEQ ID NO: 245235 - DNA, 120 bp, Artificial Sequence
  ENSG00000122299_29 (sequence is synthesized)
ccaaataaccatttaacactagtatttgttaaatggggtatttttctgtatttgtatgtttcactataataagggaattaaggataatgtgcattgagaatattttgaaaaataattgac

SEQ ID NO: 245236 - DNA, 120 bp, Artificial Sequence
  ENSG00000122299_30 (sequence is synthesized)
tcaaattttatttcttggtcttttgctgtttaaatgatgattttgaaagattaaacctgtactgttggtattgtgttagtgtatggaccaatactgcctgtaataaagattttatatata

SEQ ID NO: 245237 - DNA, 120 bp, Artificial Sequence
  ENSG00000122299_31 (sequence is synthesized)
aaagatgactcctgtacggtccctgccgtccaggaccctggagtcaagtcagaaatggatgtgtccacagctgattgtgtgacaaggtctggatttgtgggtgttttcattggagtccag

SEQ ID NO: 245238 - DNA, 120 bp, Artificial Sequence
  ENSG00000122299_32 (sequence is synthesized)
gtgagccaccgtgcccggcccgggaccttttttcttaaagaagaaattatactgtatgtgtgtatgtgtgtagagagtgtggtgaggcttaaagacaatgggcttcaaagtctgccagaa

SEQ ID NO: 245239 - DNA, 120 bp, Artificial Sequence
  ENSG00000122299_33 (sequence is synthesized)
gggccccagtcaagttattcagcctcagtttgctcacctgtaattgggaataattatgtgtgatggtgttatgtaaacacctggcacagtgcctggccttctcctttacctgcttttctt

SEQ ID NO: 245240 - DNA, 120 bp, Artificial Sequence
  ENSG00000122299_34 (sequence is synthesized)
cctgctccttatcattgagctttgaaagactatggtaaatgtttccctagtaatatgactaagtacttactggggtttgacgggggaaagaatatgactattttatccagtactgacttt

SEQ ID NO: 245241 - DNA, 120 bp, Artificial Sequence
  ENSG00000122299_35 (sequence is synthesized)
atgcagaagattttaagggtggggtcactgacattggtccaagggaggaaatgtacagtgttaagggggctgagcgagttttagccaaaactctgaaaaacgtgacagatgctaagcatt

SEQ ID NO: 245242 - DNA, 120 bp, Artificial Sequence
  ENSG00000122299_36 (sequence is synthesized)
taatgccacgtaagctaaataatgtagggccagctgccgttgaagcacaaactaagataagctaataattagttgtactaggatttatacctcatacagacaagtaggttgatggtattc

SEQ ID NO: 245243 - DNA, 120 bp, Artificial Sequence
  ENSG00000122299_37 (sequence is synthesized)
aagaatgcattctccgtgatggaggttttcttggttcctggctcataattcttagggaagtctgcgttctgctgatcacgatcactttattttcctaccagtatcactgtatttactttg

SEQ ID NO: 245244 - DNA, 120 bp, Artificial Sequence
  ENSG00000122299_38 (sequence is synthesized)
ttaaataaaaatacaaataacctgaagaggtattatttgaaagctgtgtaactccatggtatggctagtgtgataattgtcttctgataatgcatatgtagtgaattatggccgaggtta

SEQ ID NO: 245245 - DNA, 120 bp, Artificial Sequence
  ENSG00000122299_39 (sequence is synthesized)
gtttccagtactggttataagtaagttaaatttctgaaatgttttgggcactgttcagtaccctttggagtagcctgcagtttctttactgctttcaagtgctgatgtggaggaatcatt

SEQ ID NO: 245246 - DNA, 120 bp, Artificial Sequence
  ENSG00000122299_40 (sequence is synthesized)
agtgttgggcagggaaacaggagctgtcagactgagagggccagggatgttcattgtggagattaaatgttctgagtaagtgagtttgtagacattttcttgtaagaaaatgttccatgc

SEQ ID NO: 245247 - DNA, 120 bp, Artificial Sequence
  ENSG00000122299_41 (sequence is synthesized)
tttactctgttttggacattttcttttgaaaaattttgagatagaaaccttaatatcatttcatatatttagagcatatagttaatttgagtagagtcaaattaatcttactttagaatt

SEQ ID NO: 245248 - DNA, 120 bp, Artificial Sequence
  ENSG00000122299_42 (sequence is synthesized)
atggggctaccaaggatgctaatggctattgtgagttgggcaatgattggtggccaaattcatccctgttattctgctgaatagcctttgagaaatgctggtccacgagaaataagtggc

SEQ ID NO: 245249 - DNA, 120 bp, Artificial Sequence
  ENSG00000122299_43 (sequence is synthesized)
atcctttctgcttttcctcatggtgttagttcttccctgaatccttgtttgtacctgcctcttgttctcccagcaaacatccttgtttgcataccagctcctattgcctctttaccggag

SEQ ID NO: 245250 - DNA, 120 bp, Artificial Sequence
  ENSG00000122299_44 (sequence is synthesized)
atttcctggacagctggcagcatttgtcacccttcttctctgtgtcctgagtgctggcttgcttccccatgctgtggtcctttccttgtccctatttctaacctgagttttatgtcttgc

SEQ ID NO: 245251 - DNA, 120 bp, Artificial Sequence
  ENSG00000122299_45 (sequence is synthesized)
tgggaggcagaggttgcagtgggccaggatcacaacactacgctccagtctgggtgataacatgagactgtctcaaaaaaaaaaaaaacaaaaaggaatttggagacctccccttctcca

SEQ ID NO: 245252 - DNA, 120 bp, Artificial Sequence
  ENSG00000122299_46 (sequence is synthesized)
aaggaatttggagacctccccttctccatcaaccagatgtggtgacgctattgattttgtcctgagcttcaaacttttgatttttagagttgcctattttgagtgtgttctcatgtcatt

SEQ ID NO: 245253 - DNA, 120 bp, Artificial Sequence
  ENSG00000122299_47 (sequence is synthesized)
gcacaaagagctgtatttgtgtatattccatttcaaaaaagagaaacgtggtattcatccttgctgatggattaggaggtatgagaatagattggaagctgaaggttctccacgtctgac

SEQ ID NO: 245254 - DNA, 120 bp, Artificial Sequence
  ENSG00000122299_48 (sequence is synthesized)
aaaacctgaagccaaaggagggaagaggaaaggaaggggagacatgactttttcctggagactgctcaggaggggtatacaaagtctgcatagccattcagccttaaagaatgtgaaaac

SEQ ID NO: 245255 - DNA, 120 bp, Artificial Sequence
  ENSG00000122299_49 (sequence is synthesized)
cagggatgaaaaggagttgcccgtgttcggtattgaaccacgaaggaccttgccatgcccagtacggtggccactgaccccccgccgtttgggacgatggagcccacgaaatggggccag

SEQ ID NO: 245256 - DNA, 120 bp, Artificial Sequence
  ENSG00000122299_50 (sequence is synthesized)
gagccgggccggggcctgtgcgcgcggagggacgggtgggcgcgccgtccccttcccccaccgagaataacgtgacccacttctgcctgccattccctcggcaaaatgtctcctttttgg

SEQ ID NO: 245257 - DNA, 120 bp, Artificial Sequence
  ENSG00000122299_51 (sequence is synthesized)
gaagtgaaaatacagaatcataaggtatttcttttagaagcattgagaaaaaaattctctggttcctcaggtacaaactttgtgcctctccctttgtgttatgtcttttgctcgtgtgtc

SEQ ID NO: 245258 - DNA, 120 bp, Artificial Sequence
  ENSG00000122304_0 (sequence is synthesized)
agaccagaccaacagtaacaccaagggcaggtgggcaggcctccgccctcctcccctactccagggcccactgcagcctcagcccaggagccaccagatctcccaacaccatggtccgat

SEQ ID NO: 245259 - DNA, 120 bp, Artificial Sequence
  ENSG00000122304_1 (sequence is synthesized)
accgcgtgaggagcctgagcgaacgctcgcacgaggtgtacaggcagcagttgcatgggcaagagcaaggacaccacggccaagaggagcaagggctgagcccggagcacgtcgaggtct

SEQ ID NO: 245260 - DNA, 120 bp, Artificial Sequence
  ENSG00000122304_2 (sequence is synthesized)
catcgctcctgcagaaggcgcaaaagacgctcctgcaggcaccggaggaggcatcgcagaggctgcagaaccaggaagagaacatgcagaaggcactaagcttcctgggcccctcacccc

SEQ ID NO: 245261 - DNA, 120 bp, Artificial Sequence
  ENSG00000122304_3 (sequence is synthesized)
cagctggaaattaagaaaaagtcgcccgaaacaccaagtgaggccatagcaattcccctacatcaaatgctcaagcccccagctggaagttaagagaaagtcacctgcccaagaaacacc

SEQ ID NO: 245262 - DNA, 120 bp, Artificial Sequence
  ENSG00000122304_4 (sequence is synthesized)
gagtgaggccatagcaactcccctacatcaaatgctcaagccctgagttgccgccgagaagcccacaagatctgagtgaaacgagcaaaagtcacctgcccaataaagcttgacaagaca

SEQ ID NO: 245263 - DNA, 120 bp, Artificial Sequence
  ENSG00000122335_0 (sequence is synthesized)
ggggtcacgagccgccagccgccgggtggagggtcccggccgggagccgcggaaagagtagggctccccagacaacggggtccgacgagcagttgggcacgggctgagtccgcctgccgg

SEQ ID NO: 245264 - DNA, 120 bp, Artificial Sequence
  ENSG00000122335_1 (sequence is synthesized)
cagaatgtccctggctgcttattgcgtcatctgttgcagaagaataggaacctctacttccccaccaaaaagtggcacacactggagagatatcagaaatataataaagtttactggatc

SEQ ID NO: 245265 - DNA, 120 bp, Artificial Sequence
  ENSG00000122335_2 (sequence is synthesized)
acttattttaggaggttctttatttcttacatatgaagttctggccctgaagaaggctgtgacattagatactcaagtggtagaacgagaaaaaatgaagtcatatatatatgtgcacac

SEQ ID NO: 245266 - DNA, 120 bp, Artificial Sequence
  ENSG00000122335_3 (sequence is synthesized)
agtttctttagacaaaggagaaaatcatggtattgcctggcaggcaagaaaagaacttcacaaagcagtaagaaaagtattggcaacatcagccaagatactgcggaatccatttgctga

SEQ ID NO: 245267 - DNA, 120 bp, Artificial Sequence
  ENSG00000122335_4 (sequence is synthesized)
tccttttagtacagttgatatagaagatcatgagtgtgctgtgtggctgctcctacggaagagcaagtcagatgacaaaaccacgcgactcgaggctgtgcgggaaatgtcggagaccca

SEQ ID NO: 245268 - DNA, 120 bp, Artificial Sequence
  ENSG00000122335_5 (sequence is synthesized)
tcactggcatgattaccagtataggataattgctcaagcctgtgatccgaaaactcttattggtttggcacgaagcgaagagagtgatcttcgcttttttctcctaccacctcctttgcc

SEQ ID NO: 245269 - DNA, 120 bp, Artificial Sequence
  ENSG00000122335_6 (sequence is synthesized)
atctttaaaagaagattcttccactgaagaagagctcagacagttgctggcttccttacctcaaacagagctagatgagtgtatccagtattttacatctttggctcttagtgaaagcag

SEQ ID NO: 245270 - DNA, 120 bp, Artificial Sequence
  ENSG00000122335_7 (sequence is synthesized)
tcagagtctagctgctcagaagggtggtttatggtgttttggaggaaatggacttccttatgctgaaagttttggagaagttccttcagcaacagtggaaatgttctgtttagaagctat

SEQ ID NO: 245271 - DNA, 120 bp, Artificial Sequence
  ENSG00000122335_8 (sequence is synthesized)
agtaaaacattctgagatatccacacattgtgataaaatcgaagcaaatggaggcctgcagctacttcagaggctgtaccgacttcacaaggactgccctaaagtacagagaaatataat

SEQ ID NO: 245272 - DNA, 120 bp, Artificial Sequence
  ENSG00000122335_9 (sequence is synthesized)
gcgtgtcattggaaatatggctttgaatgaacatcttcattcttctatagttcgctcaggctgggtttccatcatggcagaagcaatgaaatctccccacattatggagtcctcacacgc

SEQ ID NO: 245273 - DNA, 120 bp, Artificial Sequence
  ENSG00000122335_10 (sequence is synthesized)
tgccagaatcctggcaaatctagaccgagaaactgtgcaagaaaaatatcaggatggcgtatatgtgctgcatccccaatatcgaacaagtcagcccattaaagcagatgtcctttttat

SEQ ID NO: 245274 - DNA, 120 bp, Artificial Sequence
  ENSG00000122335_11 (sequence is synthesized)
tcatggccttatgggagcagcattcaaaacatggcgccagcaggacagtgagcaggctgtaattgaaaaacctatggaggatgaagacagatatacgacgtgctggcccaagacatggtt

SEQ ID NO: 245275 - DNA, 120 bp, Artificial Sequence
  ENSG00000122335_12 (sequence is synthesized)
agcaaaagactgtcctgctctccgaattatatctgtggagtatgacaccagcctcagcgactggagagcaaggtgccctatggaaagaaagtccattgcattcagaagcaacgaacttct

SEQ ID NO: 245276 - DNA, 120 bp, Artificial Sequence
  ENSG00000122335_13 (sequence is synthesized)
taggaagctcagagctgctggtgttggggataggccagtggtttggatatcacatagcatgggaggtcttcttgtcaaaaagatgctgttggaagcctctacgaagccagaaatgagtac

SEQ ID NO: 245277 - DNA, 120 bp, Artificial Sequence
  ENSG00000122335_14 (sequence is synthesized)
tgttatcaacaataccagaggaataattttttatagtgtccctcatcatggatcacgtttggctgaatactctgttaatattcgctatcttctcttcccctcgttggaagtcaaagaact

SEQ ID NO: 245278 - DNA, 120 bp, Artificial Sequence
  ENSG00000122335_15 (sequence is synthesized)
cagcaaggattctcctgcacttaaaacactacaagatgactttctggagtttgctaaagacaaaaacttccaggtgctgaattttgtggaaacactaccaacctacattggcagcatgat

SEQ ID NO: 245279 - DNA, 120 bp, Artificial Sequence
  ENSG00000122335_16 (sequence is synthesized)
aaaggatgcttttttgtaccagcgtactttacaattcattcgtgaagctttagccaaagaccttgaaaactaacagttgtgctcttccagttttcatatgtgaattcagtgcaagaaact

SEQ ID NO: 245280 - DNA, 120 bp, Artificial Sequence
  ENSG00000122335_17 (sequence is synthesized)
tggtgttctgtttcttcttttaagctctatgcaatcatgcaaacatagtgatcatagcgtcaacatggtctggagtgtgttgcagactacagaacattgttctcccttcaagcgctgtaa

SEQ ID NO: 245281 - DNA, 120 bp, Artificial Sequence
  ENSG00000122335_18 (sequence is synthesized)
agcaccaacccggaagtggcaggcacagaaggaagggctggattgggcccctttggtgtaaagaagtccctgtgtgctgctttatggttcgcagtgttgggcttggtgactggagcaaag

SEQ ID NO: 245282 - DNA, 120 bp, Artificial Sequence
  ENSG00000122335_19 (sequence is synthesized)
ctgctgtgagagagtgtcctttcccatctgtgactttcctggtgcatccaggaggggcacggcaggttctgaggtaactcaacttaccataaaaatgccattaagagagtacctaaaatg

SEQ ID NO: 245283 - DNA, 120 bp, Artificial Sequence
  ENSG00000122335_20 (sequence is synthesized)
gagagaagaatgaactagaacattcaagactcttttacttctgggtattgatttgctgtacatttttaaagtttgagtttttagctcagttctaccttttatctgacacattattactag

SEQ ID NO: 245284 - DNA, 120 bp, Artificial Sequence
  ENSG00000122335_21 (sequence is synthesized)
tgttaactttgttagacttattgtcatgtctgggtcagttccttgtatctattttcgtattcctgagaacaaatctttttcttagaaaaattctagcttataataattcttttcagactg

SEQ ID NO: 245285 - DNA, 120 bp, Artificial Sequence
  ENSG00000122335_22 (sequence is synthesized)
tagctgcctatgcttggaatttgtcctagataaggataaagtagctaatccattattgatcacagtatgaagtaaaactattctaagccattatatgaattagcaattcttagtatcaag

SEQ ID NO: 245286 - DNA, 120 bp, Artificial Sequence
  ENSG00000122335_23 (sequence is synthesized)
attctcagattctctttggctaaataaacctttcttcttccttgctcatttgcaagtggtattaattgacctctatagcatgtgagtagtagataatcatgtcgatgacctttttttctt

SEQ ID NO: 245287 - DNA, 120 bp, Artificial Sequence
  ENSG00000122335_24 (sequence is synthesized)
tagagtaacagcattattgagatataatttacataccataagattcacccttttaaattatacaattcatttttgttttgttttgtttgtttagagacagggtctgactctgttgcccaa

SEQ ID NO: 245288 - DNA, 89 bp, Artificial Sequence
  ENSG00000122335_25 (sequence is synthesized)
gagtgcagtggcatgatcatagctcattgtaacctcaaactcctgggctcaagagatccttttgctcatgccaccacacttgggtaatt

SEQ ID NO: 245289 - DNA, 120 bp, Artificial Sequence
  ENSG00000122335_26 (sequence is synthesized)
gacagggtctcactgtgttgcccaggtctcaaactcccgatctcaagccaccctcccaaaatgctgtgattataggccagagccattgttcccaggctcaattcattggtttttagtata

SEQ ID NO: 245290 - DNA, 120 bp, Artificial Sequence
  ENSG00000122335_27 (sequence is synthesized)
ttcccaggctcaattcattggtttttagtatagttcactgagttgtgcaacatcattgctatttaatttcaggctatttcatcatccccaaaagaaccccatacccatgagcagtcagtt

SEQ ID NO: 245291 - DNA, 120 bp, Artificial Sequence
  ENSG00000122335_28 (sequence is synthesized)
cccacctctgctttcccaagcctgcggtaaacactaatctgttttctgtctctatggatttgggaattttatgtaaatggaatcatacaatatgtggccctctctgccttcttccttcta

SEQ ID NO: 245292 - DNA, 120 bp, Artificial Sequence
  ENSG00000122335_29 (sequence is synthesized)
ttagcatgttttcaaggttcattcatgatatagcatgtatcagtactacttcatttctttttatggccgaaattactccattgtatgatatgccatgtttctttatccattcatcagctg

SEQ ID NO: 245293 - DNA, 120 bp, Artificial Sequence
  ENSG00000122335_30 (sequence is synthesized)
atggacatctaggttctgttcatttttgtctatgataaataatgctaccatgatcatttgtgtacaaatttatgtgtggatagatgtttttgattctcttgggtggaattgctggtcaaa

SEQ ID NO: 245294 - DNA, 120 bp, Artificial Sequence
  ENSG00000122335_31 (sequence is synthesized)
tggtaagtctatgtttaaattttgaagatggtgaacttttgtagaatgagatagtcgaagctaaaactggagtatggcatctgaaggtaaatggctcatcaataaactcgatatcaacaa

SEQ ID NO: 245295 - DNA, 120 bp, Artificial Sequence
  ENSG00000122335_32 (sequence is synthesized)
cataaaggaaattggggttatattaacatcagttacacagagaagaagaaaaagtttcttccttgaatgtattatctcattttataatttgtatataattgtgtttagactattcatgga

SEQ ID NO: 245296 - DNA, 120 bp, Artificial Sequence
  ENSG00000122335_33 (sequence is synthesized)
aattttgggttgggcttgatttttctttgataatttctcattttgttcttaagccattatttactcaagcattgtaataattttaatattatcttaaatacttaaaattagaaaaataat

SEQ ID NO: 245297 - DNA, 120 bp, Artificial Sequence
  ENSG00000122335_34 (sequence is synthesized)
ggttctcagttttaagagatagtttatgaaggtctagatttgatttcttttattcttttcagcaatagattaaaatttctctgtaaacatataacccgggtattacctctccctgccctt

SEQ ID NO: 245298 - DNA, 120 bp, Artificial Sequence
  ENSG00000122335_35 (sequence is synthesized)
ctagatcaaaaggggcatttatttaatagacttagacttatatttacatgcagaacccttaagaaaatcatctaaaagtgtggaagctttcgtaaatagaagatccatggggaatagtaa

SEQ ID NO: 245299 - DNA, 120 bp, Artificial Sequence
  ENSG00000122335_36 (sequence is synthesized)
agctccagaaatattccagtgggaaaaactagtgttgaactacaatctcttcatgatcctggggttgagggaaatggccagtgcttgctctctagtgtcatataatgtattatagattct

SEQ ID NO: 245300 - DNA, 120 bp, Artificial Sequence
  ENSG00000122335_37 (sequence is synthesized)
ttgagggaggagcccagatcttaattaactctcttcatagactcctctgttactctgtacatactagataccctgtacatttcaccacctgaactgcttttgcctcacctggccatgtct

SEQ ID NO: 245301 - DNA, 120 bp, Artificial Sequence
  ENSG00000122335_38 (sequence is synthesized)
tcagcttgcctgttatctctgggaacccctttcttactgcctctgaggctggcttaggtgctgttctggtggtagccagccacattgtgggtccttcaggctagggacagcatgcatctg

SEQ ID NO: 245302 - DNA, 120 bp, Artificial Sequence
  ENSG00000122335_39 (sequence is synthesized)
gagtgcttgccagatggttcttttgtctacataatgagttttgtcctaatttcattatatgctatctacataaaatgaaaaatgtcatactgtgtagtagaactgaaaaattttacctta

SEQ ID NO: 245303 - DNA, 120 bp, Artificial Sequence
  ENSG00000122335_40 (sequence is synthesized)
aagtaatatgctgtaggttgaggagttactatttagtagttgaagaacttgaagagttccaaagaacagctgccagatgtttttaaaaaggactttggaagcttgaagcaacagcatagt

SEQ ID NO: 245304 - DNA, 90 bp, Artificial Sequence
  ENSG00000122335_41 (sequence is synthesized)
tttttaagagactcagtggtataatcatagctcattgcagcctcgaactcctgggctcaagcgttcctcccacttcagcctcctgagtag

SEQ ID NO: 245305 - DNA, 67 bp, Artificial Sequence
  ENSG00000122335_42 (sequence is synthesized)
gctcaagcgacctgtctaaatttttaaattttttgtataaatggggtcttgctgtgttgcccaggct

SEQ ID NO: 245306 - DNA, 120 bp, Artificial Sequence
  ENSG00000122335_43 (sequence is synthesized)
gattactggtgtgagccactgtgcctcgcccaaaagcaaagttaatatcatggaccagctgcttggagtggcatagccttgccctaattctgtcaccaagaggcttttcttccttcataa

SEQ ID NO: 245307 - DNA, 120 bp, Artificial Sequence
  ENSG00000122335_44 (sequence is synthesized)
tctgtcaccaagaggcttttcttccttcataaccaccacctgcattcctcacctaggtggcctcactagtacctcttatcacttccgtgcgaggggactttgttagaccgaaatatctca

SEQ ID NO: 245308 - DNA, 120 bp, Artificial Sequence
  ENSG00000122335_45 (sequence is synthesized)
agcactaaatcatttttaccctgaaagtgattattgggatttaggtatagaatggatcccatgtgagacattcccattcatttcaccaggagaaaggaagtttataatagaaactctgaa

SEQ ID NO: 245309 - DNA, 120 bp, Artificial Sequence
  ENSG00000122335_46 (sequence is synthesized)
gtaacttagcaataacctgcaggtgtaagaaggttttgaatatgttagtgctcaatctctgcttgctctgaaataaggaagtaggccagaacacatacgaaaagttcatggaaagcataa

SEQ ID NO: 245310 - DNA, 120 bp, Artificial Sequence
  ENSG00000122335_47 (sequence is synthesized)
aactatggttctactgactgagaatcccttcctgcatgtttcatcaaatgtagtttagctgcaatcaaacttcaggttcctttatcttttaagagtcccttgtcacaaccaaagcaatgt

SEQ ID NO: 245311 - DNA, 120 bp, Artificial Sequence
  ENSG00000122335_48 (sequence is synthesized)
ctagaactacccattcggcctctttcagtattgtcaaggggaaagcttatatttttacttaggtttattgacttttttattttcttcagatttaggcattggagatctaattcctgtgga

SEQ ID NO: 245312 - DNA, 120 bp, Artificial Sequence
  ENSG00000122335_49 (sequence is synthesized)
aacagtttccagataaagacctaaatgtgaatggcacagctgcaaggaatggtaagaagacagacacagagacaactgccttgaaagaagagcttattatgtacagttcccaaggaagag

SEQ ID NO: 245313 - DNA, 120 bp, Artificial Sequence
  ENSG00000122335_50 (sequence is synthesized)
tgggcgtgccacaccatgcaaggccacatggggaagtaccagggtcattcaggaggcataaggagcaatgtgaaagcatgggccagagctttcttttattgtgtttttttgtgggaagga

SEQ ID NO: 245314 - DNA, 120 bp, Artificial Sequence
  ENSG00000122335_51 (sequence is synthesized)
atgaacgttttttttgtgggaaggaatgagcgagacagggtagacgagctgaacaaacttaggattggatagttcgaataatttggcagaccagagaggtggtctctagctgcctagtac

SEQ ID NO: 245315 - DNA, 120 bp, Artificial Sequence
  ENSG00000122335_52 (sequence is synthesized)
ctggctctgaggagatttagagtaagggaagcattggctgtgtgtggtggttgggggtatgcacctgggattggttggtttgcatatgagaagcatgctcacaggcaggttgtttgctac

SEQ ID NO: 245316 - DNA, 120 bp, Artificial Sequence
  ENSG00000122335_53 (sequence is synthesized)
ctctagcagttagctatcccagagaggggcagtcactccctgggtccttaaggtcctaagatgtcaaagcattcttaaaaaaaaaaaaaaaattactaatacaagttgtttgtggaattg

SEQ ID NO: 245317 - DNA, 120 bp, Artificial Sequence
  ENSG00000122335_54 (sequence is synthesized)
gatttgaaaccaggcagtgtggtcctacagagcacattcttaaacttctttgctattattttgcctacaaagaaacaacagttagacttagatttctcctgagcaacaagaaatatcagt

SEQ ID NO: 245318 - DNA, 120 bp, Artificial Sequence
  ENSG00000122335_55 (sequence is synthesized)
agaaatatcagtgaaaataccattaatgtaccaaaggaaacctactgttattctaaattctaaacccagaattccaaacccagctattactatttttttttttttttctgagacagagtc

SEQ ID NO: 245319 - DNA, 89 bp, Artificial Sequence
  ENSG00000122335_56 (sequence is synthesized)
tttttttttttcaaagtgtagtgcgtgatcatggctcactgaaacctctgtctcccaggctcaagcaattcctctgcctcagcctcccg

SEQ ID NO: 245320 - DNA, 120 bp, Artificial Sequence
  ENSG00000122335_57 (sequence is synthesized)
gctaattttttaaatttttttggagagatgaagtctcactggtcttgaactcctgggctggcctagagctcctgggctcaagcagtctgcccaccttggcctccaagtgctgggattgca

SEQ ID NO: 245321 - DNA, 120 bp, Artificial Sequence
  ENSG00000122335_58 (sequence is synthesized)
ggcatgagtcaccacgcctggcccaaacacaactattttttagtatatctaaaatagagcatttttagacatgctgagagtgagagtgctaactacatatatgccttcatgaaggaacta

SEQ ID NO: 245322 - DNA, 120 bp, Artificial Sequence
  ENSG00000122335_59 (sequence is synthesized)
tcaaaggatataccttcatcaagaatgatttgaacctaggaggaagttgtggatgcaagaaacaaaaaatgtccctggctgcttattgcgtcatctgttgcagaagaataggaacctcta

SEQ ID NO: 245323 - DNA, 120 bp, Artificial Sequence
  ENSG00000122335_60 (sequence is synthesized)
acctcagcctcccaatgtgctgggattataataatttctagtgttaaatgcatttgtgaaagaacaagaaatgctcatcttaggcattattgaagaagttaggaaaaggacaggatgcac

SEQ ID NO: 245324 - DNA, 120 bp, Artificial Sequence
  ENSG00000122335_61 (sequence is synthesized)
agttaggaaaaggacaggatgcacccaaagaaagaaagaagaaaataataaaaagcagaaatagaaaacaaaacaaaagagagaggtaccttcaaggtaccttccttcctttcccttata

SEQ ID NO: 245325 - DNA, 120 bp, Artificial Sequence
  ENSG00000122335_62 (sequence is synthesized)
gcaaaaggaaaaagaaaaaaaaacctcactatccaaagacaacctgatatgggtctagaatactgagttgtgttctgggaatgattgcagcatatgatcatctttactcagttgatgaat

SEQ ID NO: 245326 - DNA, 120 bp, Artificial Sequence
  ENSG00000122335_63 (sequence is synthesized)
taggtggatgacagctctcctttgatagaatgccaacaatgaacaaatttcaaaaattttaaacaacgtgggtactatcctgaaagaactagagaaaagctaaatgcttctatggattct

SEQ ID NO: 245327 - DNA, 120 bp, Artificial Sequence
  ENSG00000122335_64 (sequence is synthesized)
aagtgtaccgtccacatagagcttctcatttctgtggggacttcagtcatcagagataaatacatatatacatatattttcaaagacattaaatttttttcatgcctatattggtattct

SEQ ID NO: 245328 - DNA, 120 bp, Artificial Sequence
  ENSG00000122335_65 (sequence is synthesized)
gattaatagtctgtctattcttgttaccgtttaattcttgtgttctgggaatgattgtatcatatttagatcatctttccaattgtgaaaactatgcacaattggacacagtgtgaggaa

SEQ ID NO: 245329 - DNA, 120 bp, Artificial Sequence
  ENSG00000122335_66 (sequence is synthesized)
gaataatgaaaattctaacaaaatattattctaataagtcccttttaagtttttaatggagaattttttttttaattggaaagttttcttcgtagtcttgaaaaagctaactctgtgggt

SEQ ID NO: 245330 - DNA, 86 bp, Artificial Sequence
  ENSG00000122335_67 (sequence is synthesized)
agacccatcactggcatggtaatgagactacctgaacaggtggcatgccttcagctggctcttgattgctgacataaaagacaagg

SEQ ID NO: 245331 - DNA, 120 bp, Artificial Sequence
  ENSG00000122335_68 (sequence is synthesized)
agacaagggagtgggagtgagattcaggaaggaaaataattcaggcagtgttagtatatatagaaagtatttgaaaaattttaagaagcttcagtgatacggaaagtagaaagcctgctg

SEQ ID NO: 245332 - DNA, 120 bp, Artificial Sequence
  ENSG00000122335_69 (sequence is synthesized)
aactggtagtcaaatgtgtttggtaagaataagctcaaaaatgaggtatatatatttgtgtaactttctaccagaacaaagttttatttggttacatacttctttgagagcaactcttga

SEQ ID NO: 245333 - DNA, 120 bp, Artificial Sequence
  ENSG00000122335_70 (sequence is synthesized)
ttctgatagttacctaatgtacttgagttttcttttggtttctatttaatgaagtacatttaattgcttgctacaccatacaattatgtttgcttttacttttacaatctacttggctct

SEQ ID NO: 245334 - DNA, 120 bp, Artificial Sequence
  ENSG00000122335_71 (sequence is synthesized)
ttggctctaatactaatagtcgaatgtacccaatttgtatttgtgtatatcatttttaatggactatttgaaatatgtaattgtgtttaaaaatcacaaattttacaataaaaatatttt

SEQ ID NO: 245335 - DNA, 120 bp, Artificial Sequence
  ENSG00000122335_72 (sequence is synthesized)
agagcctactccacacctaggctgtatgggacagcctgttgctcctaggctccaaacctgtgcagccatgtgactgtgctgaacacggggcagtgacatgcatggagctgtcatctcctg

SEQ ID NO: 245336 - DNA, 120 bp, Artificial Sequence
  ENSG00000122335_73 (sequence is synthesized)
ttttgatgccacagacaggattttcttatgaagaacaaacctaatcttttttgtcttccttctagaaggagtttgctgtcaataagcagtggaatagtagaaggcttaggtatatcacca

SEQ ID NO: 245337 - DNA, 120 bp, Artificial Sequence
  ENSG00000122335_74 (sequence is synthesized)
atggtgggctcctaacatggtttatttacaactgttctaatagtgaaggatcgtggattgtctagcagtctccttttctatcagaagtaaaagtgatgtttttttgttcttgtgtccaca

SEQ ID NO: 245338 - DNA, 120 bp, Artificial Sequence
  ENSG00000122335_75 (sequence is synthesized)
atcatactggctaaaggaagcaaagagaaagatgctgagaaatatcagctgctatttcccttgtatgtcatctgtgccagttgtatacatgggaaggagtgctggatttcagagttactg

SEQ ID NO: 245339 - DNA, 120 bp, Artificial Sequence
  ENSG00000122335_76 (sequence is synthesized)
gactgagagtagccggatcctacctttgatttgctgtgcagtcttagaccagtcagttaacttttccgggaagctttgtctacagattgacagagttggtctaaatcagtgttatcaaac

SEQ ID NO: 245340 - DNA, 120 bp, Artificial Sequence
  ENSG00000122335_77 (sequence is synthesized)
tgctttctgaatgaacctcccgtaggtgcccaagaagggtgtcaaggtgagcaggcaagaccccaggtctccctccccatttcacccagaggagctctggagaacctttattttgaagaa

SEQ ID NO: 245341 - DNA, 120 bp, Artificial Sequence
  ENSG00000122335_78 (sequence is synthesized)
atgtgtctacaaataaacagtttgaaactaccagactagatagttttgaagttcctctttagtttaaaaattacttatttcgaattctgattctattagcatcctgtttatgctagttat

SEQ ID NO: 245342 - DNA, 120 bp, Artificial Sequence
  ENSG00000122335_79 (sequence is synthesized)
aaaagcatgcattggaaggaataagtgctaataaacttgactcattctagtttttctaaatagcaccctagtatttctaaagaataaaccaaaattatgaaagcttaatatttttgcagc

SEQ ID NO: 245343 - DNA, 120 bp, Artificial Sequence
  ENSG00000122335_80 (sequence is synthesized)
ctaactaccagtagagagaccacagtctttggtgatactttcattgtcaggccttggatgaaaaaggacatccatatcctaagtgttggagggcagttgcagggagacccacatttgacc

SEQ ID NO: 245344 - DNA, 120 bp, Artificial Sequence
  ENSG00000122335_81 (sequence is synthesized)
taacgatttcaggaattgagcagagagatcccaggcgtggtggctcatgcctataatcctagtgctttgggaggccgaggtgggaggattccttggggccaggagttcaataagagagaa

SEQ ID NO: 245345 - DNA, 120 bp, Artificial Sequence
  ENSG00000122335_82 (sequence is synthesized)
taggggtattttatattaagcagagagaatgggggtatttcttactctaaatgtagtatgtagcattggtcctgtagactaaagttcttaactctaaaaattagacagcaaattgagggg

SEQ ID NO: 245346 - DNA, 80 bp, Artificial Sequence
  ENSG00000122359_0 (sequence is synthesized)
gcactgcctctggcacctggggcagccgcgcccgcggagttttccgcccggcgctgacggctgctgcgcccgcggctccc

SEQ ID NO: 245347 - DNA, 120 bp, Artificial Sequence
  ENSG00000122359_1 (sequence is synthesized)
ggacccagcccctaggcagaacccaggcgccgcgcccgggacgcccgcggagagagccactcccgcccacgtcccatttcgcccctcgcgtccggagtccccgtggccagatctaaccat

SEQ ID NO: 245348 - DNA, 120 bp, Artificial Sequence
  ENSG00000122359_2 (sequence is synthesized)
gagctaccctggctatcccccgcccccaggtggctacccaccagctgcaccaggtggtggtccctggggaggtgctgcctaccctcctccgcccagcatgccccccatcgggctggataa

SEQ ID NO: 245349 - DNA, 120 bp, Artificial Sequence
  ENSG00000122359_3 (sequence is synthesized)
cgtggccacctatgcggggcagttcaaccaggactatctctcgggaatggcggccaacatgtctgggacatttggaggagccaacatgcccaacctgtaccctggggcccctggggctgg

SEQ ID NO: 245350 - DNA, 120 bp, Artificial Sequence
  ENSG00000122359_4 (sequence is synthesized)
ctacccaccagtgccccctggcggctttgggcagcccccctctgcccagcagcctgttcctccctatgggatgtatccacccccaggaggaaacccaccctccaggatgccctcatatcc

SEQ ID NO: 245351 - DNA, 120 bp, Artificial Sequence
  ENSG00000122359_5 (sequence is synthesized)
gccatacccaggggcccctgtgccgggccagcccatgccaccccccggacagcagcccccaggggcctaccctgggcagccaccagtgacctaccctggtcagcctccagtgccactccc

SEQ ID NO: 245352 - DNA, 120 bp, Artificial Sequence
  ENSG00000122359_6 (sequence is synthesized)
tgggcagcagcagccagtgccgagctacccaggatacccggggtctgggactgtcacccccgctgtgcccccaacccagtttggaagccgaggcaccatcactgatgctcccggctttga

SEQ ID NO: 245353 - DNA, 120 bp, Artificial Sequence
  ENSG00000122359_7 (sequence is synthesized)
ccccctgcgagatgccgaggtcctgcggaaggccatgaaaggcttcgggacggatgagcaggccatcattgactgcctggggagtcgctccaacaagcagcggcagcagatcctactttc

SEQ ID NO: 245354 - DNA, 120 bp, Artificial Sequence
  ENSG00000122359_8 (sequence is synthesized)
cttcaagacggcttacggcaaggatttgatcaaagatctgaaatctgaactgtcaggaaactttgagaagacaatcttggctctgatgaagaccccagtcctctttgacatttatgagat

SEQ ID NO: 245355 - DNA, 120 bp, Artificial Sequence
  ENSG00000122359_9 (sequence is synthesized)
aaaggaagccatcaagggggttggcactgatgaagcctgcctgattgagatcctcgcttcccgcagcaatgagcacatccgagaattaaacagagcctacaaagcagaattcaaaaagac

SEQ ID NO: 245356 - DNA, 120 bp, Artificial Sequence
  ENSG00000122359_10 (sequence is synthesized)
cctggaagaggccattcgaagcgacacatcagggcacttccagcggctcctcatctctctctctcagggaaaccgtgatgaaagcacaaacgtggacatgtcactcgcccagagagatgc

SEQ ID NO: 245357 - DNA, 120 bp, Artificial Sequence
  ENSG00000122359_11 (sequence is synthesized)
ccaggagctgtatgcggccggggagaaccgcctgggaacagacgagtccaagttcaatgcggttctgtgctcccggagccgggcccacctggtagcagttttcaatgagtaccagagaat

SEQ ID NO: 245358 - DNA, 120 bp, Artificial Sequence
  ENSG00000122359_12 (sequence is synthesized)
gacaggccgggacattgagaagagcatctgccgggagatgtccggggacctggaggagggcatgctggccgtggtgaaatgtctcaagaataccccagccttctttgcggagaggctcaa

SEQ ID NO: 245359 - DNA, 120 bp, Artificial Sequence
  ENSG00000122359_13 (sequence is synthesized)
caaggccatgaggggggcaggaacaaaggaccggaccctgattcgcatcatggtgtctcgcagcgagaccgacctcctggacatcagatcagagtataagcggatgtacggcaagtcgct

SEQ ID NO: 245360 - DNA, 120 bp, Artificial Sequence
  ENSG00000122359_14 (sequence is synthesized)
gtaccacgacatctcgggagatacttcaggggattaccggaagattctgctgaagatctgtggtggcaatgactgaacagtgactggtggctcacttctgcccacctgccggcaacacca

SEQ ID NO: 245361 - DNA, 120 bp, Artificial Sequence
  ENSG00000122359_15 (sequence is synthesized)
gtgccaggaaaaggccaaaagaatgtctgtttctaacaaatccacaaatagccccgagattcaccgtcctagagcttaggcctgtcttccacccctcctgacccgtatagtgtgccacag

SEQ ID NO: 245362 - DNA, 120 bp, Artificial Sequence
  ENSG00000122359_16 (sequence is synthesized)
gacctgggtcggtctagaactctctcaggatgccttttctaccccatccctcacagcctcttgctgctaaaatagatgtttcatttttctgactcatgcaatcattcccctttgcctgtg

SEQ ID NO: 245363 - DNA, 120 bp, Artificial Sequence
  ENSG00000122359_17 (sequence is synthesized)
gctaagacttggcttcatttcgtcatgtaattgtatatttttatttggaggcatattttcttttcttacagtcattgccagacagaggcatacaagtctgtttgctgcatacacatttct

SEQ ID NO: 245364 - DNA, 120 bp, Artificial Sequence
  ENSG00000122359_18 (sequence is synthesized)
ggtgagggcgactgggtgggtgaagcaccgtgtcctcgctgaggagagaaagggaggcgtgcctgagaaggtagcctgtgcatctggtgagtgtgtcacgagctttgttactgccaaact

SEQ ID NO: 245365 - DNA, 120 bp, Artificial Sequence
  ENSG00000122359_19 (sequence is synthesized)
cactcctttttagaaaaaacaaaaaaaaagggccagaaagtcattccttccatcttccttgcagaaaccacgagaacaaagccagttccctgtcagtgacagggcttcttgtaatttgtg

SEQ ID NO: 245366 - DNA, 120 bp, Artificial Sequence
  ENSG00000122359_20 (sequence is synthesized)
gtatgtgccttaaacctgaatgtctgtagccaaaacttgtttccacattaagagtcagccagctctggaatggtctggaaatgtcttcctggtaccaacttgttttcttctgcttgattc

SEQ ID NO: 245367 - DNA, 120 bp, Artificial Sequence
  ENSG00000122359_21 (sequence is synthesized)
tgccctgtggctcagaggtctggccttatcagccagtgaaagttcatgtaaccttacgtagagatttgtgtgcaggaaaccctgagcatacactagtttgcagggactcgtaaggacatg

SEQ ID NO: 245368 - DNA, 120 bp, Artificial Sequence
  ENSG00000122359_22 (sequence is synthesized)
ggaagggaggttcccgaaatccaggcaggaggcccagacacctgaaaggcaaagggatcttggttggttgcaggtgcagtgaagtccactgaaggtgtggtgcgaagaatgcagtccttc

SEQ ID NO: 245369 - DNA, 120 bp, Artificial Sequence
  ENSG00000122359_23 (sequence is synthesized)
acccaggtcccaggagggaagaagggtgtgtgctaattcctggtgcccctcggcgggggccagagagaaggatggggacaacccagagagtcacaagaccagtgcctcccctcagggtgc

SEQ ID NO: 245370 - DNA, 120 bp, Artificial Sequence
  ENSG00000122359_24 (sequence is synthesized)
ctccaggctgaaaggggctcctggctctggtctctggggaccctgtgcccgttggttggtggtgtgagggaagagaatccataagagagtttctgagaattatggtgtcatgtccagaag

SEQ ID NO: 245371 - DNA, 120 bp, Artificial Sequence
  ENSG00000122359_25 (sequence is synthesized)
ctagagcttaccttgcatcaggggtctccacccactccttttccaacctcctgcgttgaggtttagaaaagagagaatcgactaggcactatggctcacgcctgtaatccaaggactttg

SEQ ID NO: 245372 - DNA, 90 bp, Artificial Sequence
  ENSG00000122359_26 (sequence is synthesized)
ggaagctgaggtgatagcctagccaacagcgagacccctgtctctactaaaaaatttggccaggcgtggtggctcacggctgtaatccca

SEQ ID NO: 245373 - DNA, 120 bp, Artificial Sequence
  ENSG00000122359_27 (sequence is synthesized)
actctgtctcaaaaaaaaaaaaaaatttacctggcattgtagtgcattccctatagtcggctactctggaggctgaggcaggaagatccttagagcccaagaaattgaggccgtagtaag

SEQ ID NO: 245374 - DNA, 120 bp, Artificial Sequence
  ENSG00000122359_28 (sequence is synthesized)
tccagcctggacaacagagcgagaccttgtctcaaatgagaaaaaaacaaaaagaaatgggagaatccagagagactaggctagatcaagcctgctgggtcctggcaggagccccaggga

SEQ ID NO: 245375 - DNA, 120 bp, Artificial Sequence
  ENSG00000122359_29 (sequence is synthesized)
cctggcaggagccccagggagtagctcatctgcagacatttgcttgaggactaccccctaaacataaaggaagaatgacatccgaagggtgtggagcagccatgagctgagaactagcct

SEQ ID NO: 245376 - DNA, 120 bp, Artificial Sequence
  ENSG00000122359_30 (sequence is synthesized)
ggtctacctgagattgatggcaggtcctggtcaacacgtcagctctgcgtcagagtccatgcctcaagcccaagctgaagccccatccctgctgctctcccaagaactcctctgctaggg

SEQ ID NO: 245377 - DNA, 120 bp, Artificial Sequence
  ENSG00000122359_31 (sequence is synthesized)
caggccccttgcccttgggtgccaggtgggacctgcctgatgggatggggtgcttggcatatacaacttgccatgaactcaaggtgaccctgggggcctcctgaattgtgatggggccta

SEQ ID NO: 245378 - DNA, 120 bp, Artificial Sequence
  ENSG00000122359_32 (sequence is synthesized)
gaaccaatgtgctctgatgtgaccatattctgtgacattaccttgccctgtttactccaaagttcccagcctggtgcccagcaggcaatattgcacctacagacacatttactttggttt

SEQ ID NO: 245379 - DNA, 120 bp, Artificial Sequence
  ENSG00000122359_33 (sequence is synthesized)
ccaaagtgtttttagacatttgaatttgttgccaacatttaaacattgagagatttcatatttttaaaaatctggaattctggcttctcttgaaaactcagaaattctggcactatgggg

SEQ ID NO: 245380 - DNA, 120 bp, Artificial Sequence
  ENSG00000122359_34 (sequence is synthesized)
cttgcattcctgcatggctggagctgagttgcagctgcccctttaggcctgtactccttatttgctataggctccgtcttgtattacactaagcccatgtcacccatttggctcctgcag

SEQ ID NO: 245381 - DNA, 120 bp, Artificial Sequence
  ENSG00000122359_35 (sequence is synthesized)
gcctttgggtttgagaccctggtctacacacttggagaccacctgttgtaaagtacatggatgtgctttggtcaaggaatagaccaaggtggatatccaggccagagtgactcagcgagt

SEQ ID NO: 245382 - DNA, 120 bp, Artificial Sequence
  ENSG00000122359_36 (sequence is synthesized)
ttaggtcacaggcgtatactccacttgttatataacctgcttgtgtaagttcatacttggctcaaagccactattgtttggaaaaggtataactgccctgctgacgctgtacagatgttc

SEQ ID NO: 245383 - DNA, 120 bp, Artificial Sequence
  ENSG00000122359_37 (sequence is synthesized)
ttgggctcggatgggcatggctccacgtggtgtgcactagcacccagagagagtgaagctattgacccctgtaagggagagtgaccatctggcagatagatagaggggagccaggacatg

SEQ ID NO: 245384 - DNA, 120 bp, Artificial Sequence
  ENSG00000122359_38 (sequence is synthesized)
gctcagcttgtgcccagagggagagttaagccgctgaccctgtagccagggagtgcacctgcaagcatgggggtggcaggagccacagagctggctgctgagaggagctgcagatctgga

SEQ ID NO: 245385 - DNA, 120 bp, Artificial Sequence
  ENSG00000122359_39 (sequence is synthesized)
gaagacagcctaggtaaaggtggacagtgtgagagctgctgatgagatagctgctgaataaaactacattttacctgcctatggcccgccaggttttctttcagctatcgcccatccacc

SEQ ID NO: 245386 - DNA, 120 bp, Artificial Sequence
  ENSG00000122359_40 (sequence is synthesized)
cagtcccctcgaacctcagcatgggctggaacctgaccctgggcatgacatttggcatagttgtggacctgacacctgtgtttgtcctagtcctgtttctccctgccttcctgttcctct

SEQ ID NO: 245387 - DNA, 120 bp, Artificial Sequence
  ENSG00000122359_41 (sequence is synthesized)
cgctgccctcatggtcactcccaagagatccaacccatgttaagtatgggctggaggactgcatgaatgcctcatgatcttcccagaggcaaaggcacctactgccttccaaggtcagtg

SEQ ID NO: 245388 - DNA, 120 bp, Artificial Sequence
  ENSG00000122359_42 (sequence is synthesized)
ggaggttgggatcaacactgtttattatgcttaggacaaaaaagatagggagaaagatgtgcaaccttacaggtcatctttctgggatagaacacaatgggtcttctcctgcctcctgga

SEQ ID NO: 245389 - DNA, 120 bp, Artificial Sequence
  ENSG00000122359_43 (sequence is synthesized)
tatgttagtcaaggccagtccatgctacacatctagtctgacttctaaaatagaagcaccagatgaattcagccctgagagaattttcagcagctgtgggggcgctggaggaaacactat

SEQ ID NO: 245390 - DNA, 120 bp, Artificial Sequence
  ENSG00000122359_44 (sequence is synthesized)
taaatagttttgcacctgagacagatagcctcactcgcctcaccctagtcctggtggcatttgtctcaggtgcaaaatttaagaaagaaaccttggagtgctcaccctgtggctgggtag

SEQ ID NO: 245391 - DNA, 120 bp, Artificial Sequence
  ENSG00000122359_45 (sequence is synthesized)
atggtcctaaagtggtggttttcaagcctgagtgtgtatcaggatcatcaggggagcttgctaaagagcagttcctgcggtcagaccctcatgcattttgagcaggtgtggggactggga

SEQ ID NO: 245392 - DNA, 120 bp, Artificial Sequence
  ENSG00000122359_46 (sequence is synthesized)
aactgcatctgtaacctgctgtaatctaacgcttatctaaatactactgtgctcacacagagaacaccgcaaaagtagaggtgttcctccagagggcaggtgagcagatggcacagtctg

SEQ ID NO: 245393 - DNA, 120 bp, Artificial Sequence
  ENSG00000122359_47 (sequence is synthesized)
cttggaattcagtcaggtgatgagagatgagatgaggcactcctagctttgggaagagggagctgaaagatgaacctttgcaggtgcccacggtcaaagtggtggtttaatgccatgcca

SEQ ID NO: 245394 - DNA, 120 bp, Artificial Sequence
  ENSG00000122359_48 (sequence is synthesized)
tgcccattttctgttggccttggcagggagttacagccctaccttaggacctggctccttatttctgctgtaggctctttcctgccctggccgagatggagtggaatgagacctagaaac

SEQ ID NO: 245395 - DNA, 120 bp, Artificial Sequence
  ENSG00000122359_49 (sequence is synthesized)
atcaagctaaatacatgtcctcagaaagataaaggtttacattttcacccccatcaaatctgaaagctctctgcctgtgtttttctaagggatagggacatcattactcagtccacaacc

SEQ ID NO: 245396 - DNA, 120 bp, Artificial Sequence
  ENSG00000122359_50 (sequence is synthesized)
tggactcatgtagggtcccctgtcagtaaaggagtcagtcaagcccaccaggtataccaaggactcttaccctcagcccctactccttggaaagctgccccttggcctaatattggtgtt

SEQ ID NO: 245397 - DNA, 120 bp, Artificial Sequence
  ENSG00000122359_51 (sequence is synthesized)
tagcttgagcctgactccttctcaacactaagagctgatgaagtcctgaagcagaaagagctctgacctgagagtcaaacatccttattctgatctcagctcagcccctgatttgttgtg

SEQ ID NO: 245398 - DNA, 120 bp, Artificial Sequence
  ENSG00000122359_52 (sequence is synthesized)
tgaccctggatatgtcacttcctgtctttttgactttttaaaatgaagggtagactagaggagagcttctaaaactttaatgtggtcaacgaaatggaataggaaattccacaagtctgt

SEQ ID NO: 245399 - DNA, 120 bp, Artificial Sequence
  ENSG00000122359_53 (sequence is synthesized)
ccttccacaaaagcagcaaataaggtggcaaaaactcaaatttatgggaactctggaaacgaattgaaagtttacagcaatcaggtgaatacctaagaataaaagctggatttagtaaga

SEQ ID NO: 245400 - DNA, 120 bp, Artificial Sequence
  ENSG00000122359_54 (sequence is synthesized)
acctgcctggtttaaactattgtcttagttaattttgtgctgctctaacaaaatatcacagactgagtaatttataagcaatagtagcttatttggctcacagttctggaggctgagaag

SEQ ID NO: 245401 - DNA, 120 bp, Artificial Sequence
  ENSG00000122359_55 (sequence is synthesized)
atcgtgaggctgcatctggcaagggccttcttgctgcttcataacatggcagaagacatcatgcgggtgtgtgtctggggaagagacttacagaagtggagttgctgagtcaaagatcta

SEQ ID NO: 245402 - DNA, 120 bp, Artificial Sequence
  ENSG00000122359_56 (sequence is synthesized)
agatctaaccatgagctaccctggctatcccccgcccccaggtggctacccaccagctgcaccaggttggctggcactggcctgggttctctctctatagtagaaatcctgccatccaga

SEQ ID NO: 245403 - DNA, 120 bp, Artificial Sequence
  ENSG00000122359_57 (sequence is synthesized)
tcctgccactgccacctttgctagcacagctgagcagcctctgagcagcaagagaggaggaggcaggaaatttagggaaggttcttcctggagggtctggagccctggagatgaagagcc

SEQ ID NO: 245404 - DNA, 120 bp, Artificial Sequence
  ENSG00000122359_58 (sequence is synthesized)
gatccgaagctgccatgtagaggaaagcatctaacaggccagaggccccatgatgatgtcgaatgcccatcgggcacccagctgagccctgcaggtggtggtccctggggaggtgctgcc

SEQ ID NO: 245405 - DNA, 120 bp, Artificial Sequence
  ENSG00000122359_59 (sequence is synthesized)
tctgcccatccagctggtggcatcgttgggaggtgaaggatgccaccgggtgctgaggtttgctgagaggctccagacatctatccctgggttctagcccttgctctgccacatctcact

SEQ ID NO: 245406 - DNA, 120 bp, Artificial Sequence
  ENSG00000122359_60 (sequence is synthesized)
gaggttgtggccacatcattttccttcccctgccctcttcatgaccaccctggggggtttagctgatgtaagagctttgcagggaaaggctgtgagtgctgcccaagtacgaggggcgtg

SEQ ID NO: 245407 - DNA, 120 bp, Artificial Sequence
  ENSG00000122359_61 (sequence is synthesized)
tatgagcatattttgaacttctggggttttgaatcttagaaagataaaaattcggtaaatattgattagattcgtgttctagcccagtgcttctcaaacttcattgtgtcaccgatcccc

SEQ ID NO: 245408 - DNA, 120 bp, Artificial Sequence
  ENSG00000122359_62 (sequence is synthesized)
ggggagattaagcagagaaggctatcttcaggaactttcctccgaaactgggagcacgcacattcctgggagctgctaccattgcagtttatttggaaatttccctgcacaaactctctt

SEQ ID NO: 245409 - DNA, 90 bp, Artificial Sequence
  ENSG00000122359_63 (sequence is synthesized)
ctcagcctcctgagtagagtagctgggaccacagtcgcatgccatggtgctcggctaatttttttgtattttatttttgtaacggtcaaa

SEQ ID NO: 245410 - DNA, 120 bp, Artificial Sequence
  ENSG00000122359_64 (sequence is synthesized)
agtgaactggtctgcgacaagcagggcagatgcagcagtttcttctgcagggtcccagttgtggtggtggctgccctttcaagaagctgggtcccacgggccagcaggggctctcaggca

SEQ ID NO: 245411 - DNA, 120 bp, Artificial Sequence
  ENSG00000122367_0 (sequence is synthesized)
atgtcttacagtgtgaccctgactgggcccgggccctggggcttccgtctgcaggggggcaaggacttcaacatgcccctcactatctcccggatcacaccaggcagcaaggcagcccag

SEQ ID NO: 245412 - DNA, 120 bp, Artificial Sequence
  ENSG00000122367_1 (sequence is synthesized)
tcccagctcagccagggtgacctcgtggtggccattgacggcgtcaacacagacaccatgacccacctggaagcccagaacaagatcaagtctgccagctacaacttgagcctcaccctg

SEQ ID NO: 245413 - DNA, 120 bp, Artificial Sequence
  ENSG00000122367_2 (sequence is synthesized)
cagaaatcaaagcgtcccattcccatctccacgacagcacctccagtccagacccctctgccggtgatccctcaccagaaggtggtagtcaactctccagccaacgccgactaccaggaa

SEQ ID NO: 245414 - DNA, 120 bp, Artificial Sequence
  ENSG00000122367_3 (sequence is synthesized)
cgcttcaaccccagtgccctgaaggactcggccctgtccacccacaagcccatcgaggtgaaggggctgggcggcaaggccaccatcatccatgcgcagtacaacacgcccatcagcatg

SEQ ID NO: 245415 - DNA, 120 bp, Artificial Sequence
  ENSG00000122367_4 (sequence is synthesized)
tattcccaggatgccatcatggatgccatcgctgggcaggcccaagcccaaggcagtgacttcagtgggagcctccctattaaggaccttgccgtagacagcgcctctcccgtctaccag

SEQ ID NO: 245416 - DNA, 120 bp, Artificial Sequence
  ENSG00000122367_5 (sequence is synthesized)
gctgtgattaagagccagaacaagccagaagatgaggctgacgagtgggcacgccgttcctccaacctgcagtctcgctccttccgcatcctggcccagatgacggggacagaattcatg

SEQ ID NO: 245417 - DNA, 120 bp, Artificial Sequence
  ENSG00000122367_6 (sequence is synthesized)
caagaccctgatgaagaagctctgcgaaggtcaaggccccaggcctcttcctacagccccgcagtggccgcctcttcagcacctgccacccacaccagctacagtgagggccccgccgcc

SEQ ID NO: 245418 - DNA, 120 bp, Artificial Sequence
  ENSG00000122367_7 (sequence is synthesized)
cctgcacccaagccccgggttgtcaccactgccagcatccggccttctgtctaccagccagtgcctgcatctacctacagcccgtccccaggggccaattacagtcccactccctacacc

SEQ ID NO: 245419 - DNA, 120 bp, Artificial Sequence
  ENSG00000122367_8 (sequence is synthesized)
ccctcccctgcccctgcctacaccccctcccctgcccctgcctacaccccctcacctgtccccacctacactccatccccagcaccagcctataccccctcacctgcccccaactataac

SEQ ID NO: 245420 - DNA, 120 bp, Artificial Sequence
  ENSG00000122367_9 (sequence is synthesized)
cctgcaccctcggtggcctacagcgggggccctgcggagcctgccagccgtccaccctgggtgacagatgatagcttctcccagaagtttgccccgggcaagagcaccacctccatcagc

SEQ ID NO: 245421 - DNA, 120 bp, Artificial Sequence
  ENSG00000122367_10 (sequence is synthesized)
aagcagaccctgccccggggaggcccagcctacaccccagcgggtcctcaggtgccaccacttgccagggggaccgtccagagggctgagcgattcccagccagcagccggactccactc

SEQ ID NO: 245422 - DNA, 120 bp, Artificial Sequence
  ENSG00000122367_11 (sequence is synthesized)
tgcggtcactgcaacaatgtcatccggggcccatttctggtagccatgggccgttcttggcaccctgaagagttcacctgtgcctactgcaagacttccctggcagatgtgtgctttgtg

SEQ ID NO: 245423 - DNA, 120 bp, Artificial Sequence
  ENSG00000122367_12 (sequence is synthesized)
gaagagcagaacaacgtttactgtgagcgatgttatgagcaattctttgccccgctgtgtgccaagtgcaacaccaaaattatgggggaagtaatgcatgccttgagacagacatggcac

SEQ ID NO: 245424 - DNA, 120 bp, Artificial Sequence
  ENSG00000122367_13 (sequence is synthesized)
accacctgcttcgtctgtgcggcctgcaagaagccttttgggaacagcctcttccacatggaagacggggagccctactgcgagaaagactacatcaatctgttcagcaccaagtgccat

SEQ ID NO: 245425 - DNA, 120 bp, Artificial Sequence
  ENSG00000122367_14 (sequence is synthesized)
ggctgcgatttccccgtggaggctggcgacaagtttatcgaagccctgggccacacttggcacgacacctgcttcatttgcgcagtctgccatgtgaatctggaggggcagccgttctac

SEQ ID NO: 245426 - DNA, 120 bp, Artificial Sequence
  ENSG00000122367_15 (sequence is synthesized)
tccaagaaggacagacccctgtgcaagaagcacgcacacaccatcaacttgtaggcggccaaggccgcctgtgctgacgaggcccggagctgctcctgctgctggcaacaaaggattcgg

SEQ ID NO: 245427 - DNA, 120 bp, Artificial Sequence
  ENSG00000122367_16 (sequence is synthesized)
agagaggaagcgactgagccctttggaagtataattttaggttttttcttctgtacacagatcgtgcatttgcatagttcagactaggagccaaatgaagactcaaaaccaagctagtta

SEQ ID NO: 245428 - DNA, 120 bp, Artificial Sequence
  ENSG00000122367_17 (sequence is synthesized)
ttaatccaagactggaattgtacttcagacatttagagcagaattccaagaactcaaaagtgaaaagcaacaagcagctttcccaaagcgatacacttgctttggtcaccagaggaggac

SEQ ID NO: 245429 - DNA, 120 bp, Artificial Sequence
  ENSG00000122367_18 (sequence is synthesized)
agagcttagagcagctgtggagaatctgaagcattctgcggagttcttaagcgctcccctggcaaacaaattgaagtgccaaacagcactcgctgcagggtatttttagagtcatagctg

SEQ ID NO: 245430 - DNA, 120 bp, Artificial Sequence
  ENSG00000122367_19 (sequence is synthesized)
agagcttgttagctaagacccattgggctttcctcaccaaaaaaggaagtgttattccattactagcgtcatggagctacctctgcgcatcagacttcagaccttgaacaaacttaaaac

SEQ ID NO: 245431 - DNA, 120 bp, Artificial Sequence
  ENSG00000122367_20 (sequence is synthesized)
cttcttgggagcccggacgtccaaagagatgtcttctgggagccactgggcaattgccagggctccaggaagggctctggctcaggttgcagacagctgagaaaagatggccctgtcagc

SEQ ID NO: 245432 - DNA, 120 bp, Artificial Sequence
  ENSG00000122367_21 (sequence is synthesized)
caccctctctcagtctgaaacatccaacatccccagaaggcttagctcctttttgaattgtgatgggaaagtagagttgggtttttccagttttgctctgtggtgtgtgagagatttttt

SEQ ID NO: 245433 - DNA, 120 bp, Artificial Sequence
  ENSG00000122367_22 (sequence is synthesized)
taaaggctttgggttgtctttggcctttgtttagctttaagggttcgttagcatgagtgtccagtcgtgtgcatgaatttcaccccaacttgtgactgctcacttatgacgtctccccca

SEQ ID NO: 245434 - DNA, 120 bp, Artificial Sequence
  ENSG00000122367_23 (sequence is synthesized)
gtaccctccatctcaaataggcttggtggcctgtggaaaagaagagagacagagagacagtgtctgaaacaggatggcagaataggctcacatgcccaaactctgggtggggaagaggaa

SEQ ID NO: 245435 - DNA, 120 bp, Artificial Sequence
  ENSG00000122367_24 (sequence is synthesized)
acttactttctgccaccctcagtaagaacacacgaggaggcaggacctcccaccttcaggtctgcatcatccttttcaaatgttcctttaaatgcagcacactgagtttgtacaattgtg

SEQ ID NO: 245436 - DNA, 120 bp, Artificial Sequence
  ENSG00000122367_25 (sequence is synthesized)
ttaactgctggaagggacagatgcactgatatatatgcatttgctgttttggccaatattttgaaaatgtatgagctgagttgatctagctattatttaagtatttattgaagtagaggg

SEQ ID NO: 245437 - DNA, 120 bp, Artificial Sequence
  ENSG00000122367_26 (sequence is synthesized)
gccttcaaactactttatactagtgatagtttgagttaggtaagcatcttaaagctgtttggtgataaagaaggcagcttagattctgtggttggaaacagtgtagtcgcttcccttttt

SEQ ID NO: 245438 - DNA, 120 bp, Artificial Sequence
  ENSG00000122367_27 (sequence is synthesized)
aggaagccctgttaatatgctcattgaaaacatggcattgaagcaggcacttgcgtggatgtttctcacttgagcacgatatttaggctctcttccaactcactctattctgtcctcact

SEQ ID NO: 245439 - DNA, 120 bp, Artificial Sequence
  ENSG00000122367_28 (sequence is synthesized)
cctgttttggatttttctctttgcatgtttgaaatgttttatgggaatgtattagaactcttttcttctaaggactgagacttccaggggattgccatcttacctgtctcttctccatga

SEQ ID NO: 245440 - DNA, 120 bp, Artificial Sequence
  ENSG00000122367_29 (sequence is synthesized)
gggagaaggaagcagctagctatgtccctagctgcaggaagcccctattttttccaagcacgaagccaccagtctcccccagggagcatcaggaagggacatggatgtgctcctgccaca

SEQ ID NO: 245441 - DNA, 120 bp, Artificial Sequence
  ENSG00000122367_30 (sequence is synthesized)
gggcccttcctacctttggatctgtgagaaggtgaatacaaagcagcaggcagagtaaaatctgctgggactgcctggagatttgtcaggagctgcagacaagtaccttggagcattctg

SEQ ID NO: 245442 - DNA, 120 bp, Artificial Sequence
  ENSG00000122367_31 (sequence is synthesized)
ttatttttggaaagttcaaatatgcagggacaaggaggttgctgactgtactgacaggctctaagtcattttctccaaaaactatctattcaattatcaggggctggtcttgaggaagga

SEQ ID NO: 245443 - DNA, 120 bp, Artificial Sequence
  ENSG00000122367_32 (sequence is synthesized)
acagtccatttatgggcgcagccgaaggcagatatcagtgtcgatggcattcgctcccagctattcttaggagcctctcaagagctccacgcagcccggctgggcagcaagggacagaac

SEQ ID NO: 245444 - DNA, 120 bp, Artificial Sequence
  ENSG00000122367_33 (sequence is synthesized)
cacgaacggcagcctggtggcacccagccccagccctgaggcgagggccagcccaggcaccccaggcaccccggagctcaggcccacctttagccctgccttctcccggccctccgcctt

SEQ ID NO: 245445 - DNA, 120 bp, Artificial Sequence
  ENSG00000122367_34 (sequence is synthesized)
ctcctcactcgccgaggcctctgaccctggccctccgcgggccagcctgagggccaagaccagcccagagggggcccgggacctactcggcccaaaagccctgccgggctcgagccagcc

SEQ ID NO: 245446 - DNA, 120 bp, Artificial Sequence
  ENSG00000122367_35 (sequence is synthesized)
gaggcaatataacaaccccattggcctgtactcggcagagaccctgagggagatggctcagatgtaccagatgagcctccgagggaaggcctcgggtgtcggactcccaggaggcgccga

SEQ ID NO: 245447 - DNA, 120 bp, Artificial Sequence
  ENSG00000122367_36 (sequence is synthesized)
aaaagtgtatgctctttaagaagaaaagtaaaatatctcaaaggacggtttcaccaccgtcctttattgaatcaatttttctacatttcagagcaagtgtagattctgagggactcctat

SEQ ID NO: 245448 - DNA, 120 bp, Artificial Sequence
  ENSG00000122367_37 (sequence is synthesized)
aaaacaaaaaaacaaaaaaaaaaccacttaaaaggtagcaggaaaagaaggtagttttgagtgtggttcactcagtgtctgtgagtctggtgtagtgtcaggagtaaggccgtgtctagc

SEQ ID NO: 245449 - DNA, 120 bp, Artificial Sequence
  ENSG00000122367_38 (sequence is synthesized)
tagtgtcaggagtaaggccgtgtctagctcaagtttacatttggatgtcctacaacactaaacaaaatttttcataatccatggtggggagcacactttggagctacatttcttgtctcc

SEQ ID NO: 245450 - DNA, 69 bp, Artificial Sequence
  ENSG00000122367_39 (sequence is synthesized)
atggtggggagcacactttggagctacatttcttgtctcctcattgttgacattaattaaacatttata

SEQ ID NO: 245451 - DNA, 87 bp, Artificial Sequence
  ENSG00000122367_40 (sequence is synthesized)
agcctgggcaacaggagcgaaactccgttcaactttttgcaatggagtgacttatatctgcagcttatatctgcagtgtttgtgtta

SEQ ID NO: 245452 - DNA, 120 bp, Artificial Sequence
  ENSG00000122367_41 (sequence is synthesized)
tgacttatatctgcagcttatatctgcagtgtttgtgttaggaacctagcttttataatgtgttaactttttaactcagtattctggctttgggattttttgttttgtttttggaaacat

SEQ ID NO: 245453 - DNA, 120 bp, Artificial Sequence
  ENSG00000122367_42 (sequence is synthesized)
ttcagaagtggaatgtagcctgttaaaggtgtgcacaaaaatattttgcatgtgtttttttttttgcctgtgtgaattctactttttagcaaaaataaagccccccaaaggatgtgcaaa

SEQ ID NO: 245454 - DNA, 120 bp, Artificial Sequence
  ENSG00000122367_43 (sequence is synthesized)
caactggcaccatggcctttcagcccaaatccttaatgttaaaagctaaaaggctgcctggaatccccccaccccaacaggctggactccctccatccttacccccacacagatctggca

SEQ ID NO: 245455 - DNA, 120 bp, Artificial Sequence
  ENSG00000122367_44 (sequence is synthesized)
tgtgagccccacggtgatgcttgacaatgtataactctgctgggggcacctctgatggccaaccgcagcatttctgtcctctgcccaccccagagctgatgctggggcccagccccctgc

SEQ ID NO: 245456 - DNA, 120 bp, Artificial Sequence
  ENSG00000122367_45 (sequence is synthesized)
agctctgtacccaccaaacctccccagggcaaccctcgccaccccccaaatagcccgtagcccaatcccctgccctctgcacagggccttagctgtagaccagagagggcaggaggggtt

SEQ ID NO: 245457 - DNA, 120 bp, Artificial Sequence
  ENSG00000122367_46 (sequence is synthesized)
tgctggcataacaccccagaaccaagggaaatggatgggccgctgctcagtttcccaccatcctcagctcctggcctcatcccctcctagaatgagtcacccgtagatcagggtctgggg

SEQ ID NO: 245458 - DNA, 120 bp, Artificial Sequence
  ENSG00000122367_47 (sequence is synthesized)
aagaggctgatccctggcgctgcccggctccctcgctgccctctggagctcagggcagcccggaatagggctctttgaagaggaagtagaagccccagggtaatgaggcagagacccctc

SEQ ID NO: 245459 - DNA, 120 bp, Artificial Sequence
  ENSG00000122367_48 (sequence is synthesized)
ctggcagtggtgaggtgggggcatgcaccctcctttctgtaccgtgtgtgctggctccatagttctctcttctgtacatataagcatgcttgttctgaaataaagaagatttgaagtgaa

SEQ ID NO: 245460 - DNA, 120 bp, Artificial Sequence
  ENSG00000122367_49 (sequence is synthesized)
ataccttgccacgctagctttctgacatcctgatcatttttaaaagctggcaaacaccatgatgcctcgatacatcacagtcgaacaaagtttcattcctaataattatttataaaccaa

SEQ ID NO: 245461 - DNA, 120 bp, Artificial Sequence
  ENSG00000122367_50 (sequence is synthesized)
accccgctgctgcccgcttctgcccagccacctgctgctgcctctcccagtgcggcttcgccacccctggccacagctgctgcccacactgccatcgcctccgcctccaccacagcccct

SEQ ID NO: 245462 - DNA, 120 bp, Artificial Sequence
  ENSG00000122375_0 (sequence is synthesized)
gtgagtcaccataactgcgacactcactcatttgcgcttcaccagacacagagcaaccgccagccccaagagcagctccaggctggatctgcgccggacacaggagaaagcagcgggtag

SEQ ID NO: 245463 - DNA, 120 bp, Artificial Sequence
  ENSG00000122375_1 (sequence is synthesized)
gctaagcaggggtgctgaggatggaggaaagttgggaggctgagcacagctgaagtcctgagctccctgtgcccttgacttctctgtgggctcgagcaaggaccatcccaactcaggatg

SEQ ID NO: 245464 - DNA, 120 bp, Artificial Sequence
  ENSG00000122375_2 (sequence is synthesized)
aaccctccttcggggccaagagtcccgcccagcccaacccaagagcccagctgcatggccaccccagcaccacccagctggtgggacagctcccagagcagcatctccagcctgggccgg

SEQ ID NO: 245465 - DNA, 120 bp, Artificial Sequence
  ENSG00000122375_3 (sequence is synthesized)
cttccatccatcagtcccacagcacctgggacttgggctgctgcctgggtccccctccccacggttgatgttccagaccatgcccactataccctgggcacagtgatcttgctggtggga

SEQ ID NO: 245466 - DNA, 120 bp, Artificial Sequence
  ENSG00000122375_4 (sequence is synthesized)
ctcacggggatgctgggcaacctgacggtcatctataccttctgcaggagcagaagcctccggacacctgccaacatgttcattatcaacctcgcggtcagcgacttcctcatgtccttc

SEQ ID NO: 245467 - DNA, 120 bp, Artificial Sequence
  ENSG00000122375_5 (sequence is synthesized)
acccaggcccctgtcttcttcaccagtagcctctataagcagtggctctttggggagacaggctgcgagttctatgccttctgtggagctctctttggcatttcctccatgatcaccctg

SEQ ID NO: 245468 - DNA, 120 bp, Artificial Sequence
  ENSG00000122375_6 (sequence is synthesized)
acggccatcgccctggaccgctacctggtaatcacacgcccgctggccacctttggtgtggcgtccaagaggcgtgcggcatttgtcctgctgggcgtttggctctatgccctggcctgg

SEQ ID NO: 245469 - DNA, 120 bp, Artificial Sequence
  ENSG00000122375_7 (sequence is synthesized)
agtctgccacccttcttcggctggagcgcctacgtgcccgaggggttgctgacatcctgctcctgggactacatgagcttcacgccggccgtgcgtgcctacaccatgcttctctgctgc

SEQ ID NO: 245470 - DNA, 120 bp, Artificial Sequence
  ENSG00000122375_8 (sequence is synthesized)
ttcgtgttcttcctccctctgcttatcatcatctactgctacatcttcatcttcagggccatccgggagacaggacgggctctccagaccttcggggcctgcaagggcaatggcgagtcc

SEQ ID NO: 245471 - DNA, 120 bp, Artificial Sequence
  ENSG00000122375_9 (sequence is synthesized)
ccctggtggcctttgctgggtacgcacacgtcctgacaccctacatgagctcggtgccagccgtcatcgccaaggcctctgcaatccacaaccccatcatttacgccatcacccacccca

SEQ ID NO: 245472 - DNA, 120 bp, Artificial Sequence
  ENSG00000122375_10 (sequence is synthesized)
agtacagggtggccattgcccagcacctgccctgcctgggggtgctgctgggtgtatcacgccggcacagtcgcccctaccccagctaccgctccacccaccgctccacgctgaccagcc

SEQ ID NO: 245473 - DNA, 120 bp, Artificial Sequence
  ENSG00000122375_11 (sequence is synthesized)
acacctccaacctcagctggatctccatacggaggcgccaggagtccctgggctcggagagtgaggtgggctggacacacatggaggcagcagctgtgtggggagctgcccagcaagcaa

SEQ ID NO: 245474 - DNA, 120 bp, Artificial Sequence
  ENSG00000122375_12 (sequence is synthesized)
atgggcggtccctctacggtcagggtctggaggacttggaagccaaggcaccccccagaccccagggacacgaagcagagactccagggaagaccaaggggctgatccccagccaggacc

SEQ ID NO: 245475 - DNA, 120 bp, Artificial Sequence
  ENSG00000122375_13 (sequence is synthesized)
ccaggatgtaggacgcccactggctctccctttcttctgagacacatccagcccccccacgtctccctcatatacacagacccaggattatgctgtgagcctgcaggctttggaagtggc

SEQ ID NO: 245476 - DNA, 120 bp, Artificial Sequence
  ENSG00000122375_14 (sequence is synthesized)
cctgtcacccgtgctgcacgggattcacagccccagccccatggcccctctccacacctcaaaactcctgccccataacgtcctccgcatccactttccagctcagcagccgcacccgag

SEQ ID NO: 245477 - DNA, 120 bp, Artificial Sequence
  ENSG00000122375_15 (sequence is synthesized)
gctcagcctgaggggtatgtgcccaggccctcccacttcccgagttgtctgcctctcctcaaatgctgtgtgctgcaattgtccaggcgatgacaatggtgatggctccagagaacacac

SEQ ID NO: 245478 - DNA, 120 bp, Artificial Sequence
  ENSG00000122375_16 (sequence is synthesized)
cagctatttatgagcctctgcccccaggctgggcctgtcactggcataggaaggccagccccgcatctcccactgccaacagctgaagccgagcacagacctccctttgcacgctggaac

SEQ ID NO: 245479 - DNA, 120 bp, Artificial Sequence
  ENSG00000122375_17 (sequence is synthesized)
agttactcacctgtggcttcttcccccagtgtaccgttccactgtggcccacattcttgtgcacgcgggcatttgcaggcacgctctcgcgtagttacctatctgaatgcacaccaagca

SEQ ID NO: 245480 - DNA, 120 bp, Artificial Sequence
  ENSG00000122375_18 (sequence is synthesized)
catgcgtgcacactctgcgtctgtgattcatttcatgtagtggtctaagctcctcccagggctgtgtggatctgacagggtataggaaaataaaaagcggagaaggtgtcttcagacaaa

SEQ ID NO: 245481 - DNA, 120 bp, Artificial Sequence
  ENSG00000122376_0 (sequence is synthesized)
acgggcggccggatttgcccggaggccgcacccgcctccggcggggctctcagtgaaaaatgtactctgacctgaatcctgaattttccttgatggtcaaaagattaagaaatcatgagt

SEQ ID NO: 245482 - DNA, 120 bp, Artificial Sequence
  ENSG00000122376_1 (sequence is synthesized)
ggaggatctcaagtccacattttttggggtgctccaattgctccactgaaaatcacagtatcagaagacacagcttctttaatgtctgttgctgacccctggaaaaaaattcagctttta

SEQ ID NO: 245483 - DNA, 120 bp, Artificial Sequence
  ENSG00000122376_2 (sequence is synthesized)
tacagtcaacattctttatatctgaaggatgaaaaacagcacaaaaatcttgaaaactataaagtcccagaatctattggttctccagatcttagtggtcatttcttagcaaactgtatg

SEQ ID NO: 245484 - DNA, 120 bp, Artificial Sequence
  ENSG00000122376_3 (sequence is synthesized)
aatagacatgttcatgtgaaagatgactttgtacgttctgtttctgaaacacagaatatagaatcccagaagattcactcctctagactgagtgatataactagctctaatatgcaaata

SEQ ID NO: 245485 - DNA, 120 bp, Artificial Sequence
  ENSG00000122376_4 (sequence is synthesized)
tgtggatttaaaagcacagttccgcatttcaccgaagaagaaaagtatcaaaagcttctcagtgaaaataaaattagagatgaacagcctaaacatcagccagatatatgtggtaagaac

SEQ ID NO: 245486 - DNA, 120 bp, Artificial Sequence
  ENSG00000122376_5 (sequence is synthesized)
tttaacacaaatttgtttcagttgggccataaatgtgcagctgtgttggatttggtttgtagtactgaaaaaattaatatagggcctgaagtggtacaaagagagtgtgtgccaacagaa

SEQ ID NO: 245487 - DNA, 120 bp, Artificial Sequence
  ENSG00000122376_6 (sequence is synthesized)
tatcatgaaatacaaaaccagtgtttgggattattttcctcgaacgcagtagataagtcaaggtctgaagcagcagttaggaaggtctcagaccttaaaatatcaactgatacagaattt

SEQ ID NO: 245488 - DNA, 120 bp, Artificial Sequence
  ENSG00000122376_7 (sequence is synthesized)
ctcagtataattacctccagccaggttgcttttttagctcaaaagaaagataaaaggcggagtcctgtaaataaagggaatgtaaacatggagactgaaccaaaggcaagttacggggag

SEQ ID NO: 245489 - DNA, 120 bp, Artificial Sequence
  ENSG00000122376_8 (sequence is synthesized)
ataagaatacctgaagagaattcgattcagcttgatggttttacagaagcatatgaaagtggacaaaaccaagcatattcccttgaactttttagtcctgtttgtcctaaaacagaaaat

SEQ ID NO: 245490 - DNA, 120 bp, Artificial Sequence
  ENSG00000122376_9 (sequence is synthesized)
agccgcattcacataaactctgataaaggtcttgaagaacatacaggatctcaagaacttttcagttctgaagatgaactgccaccaaatgagatacgtattgagttgtgtagctcagga

SEQ ID NO: 245491 - DNA, 120 bp, Artificial Sequence
  ENSG00000122376_10 (sequence is synthesized)
atactgtgttcccaactaaataccttccacaaaagtgctattaaaagaagctgtacctctgaagataaagtgggccagtctgaagctctatctagagtccttcaagtagctaagaaaatg

SEQ ID NO: 245492 - DNA, 120 bp, Artificial Sequence
  ENSG00000122376_11 (sequence is synthesized)
aagttgatttctaatggaggagattctgctgtagaaatggatcggagaaatgtgtctgaatttaagagtattaaaaaaacatcattaataaaaaactgtgattctaaaagccagaagtat

SEQ ID NO: 245493 - DNA, 120 bp, Artificial Sequence
  ENSG00000122376_12 (sequence is synthesized)
aattgtttagtcatggtgctatctccatgccatgtgaaggaaataaacataaaattcggaccaaattctggctctaaagtgcctttagcaacagttacagtaattgatcaatcagaaact

SEQ ID NO: 245494 - DNA, 120 bp, Artificial Sequence
  ENSG00000122376_13 (sequence is synthesized)
aagaagaaggtttttctgtggaggactgcagcattttgggcatttacagtgtttcttggagatataattttactcacagatgttgttattcatgaggaccaatggattggcgagacagta

SEQ ID NO: 245495 - DNA, 120 bp, Artificial Sequence
  ENSG00000122376_14 (sequence is synthesized)
tattcatctattcagcctgaagaatattccagtgtagttagtgaagttgtacttcaagacttactggcatatgtgtcctcaaaacattcctacctcagagatcttcctccgaggcagcct

SEQ ID NO: 245496 - DNA, 120 bp, Artificial Sequence
  ENSG00000122376_15 (sequence is synthesized)
cagagggtgaacagtatagactttgtagaattggagcaccttcaacctgatgtattagtccacgcagtactaagagttgttgatttcactatactgacagaggcagtatacagttataga

SEQ ID NO: 245497 - DNA, 120 bp, Artificial Sequence
  ENSG00000122376_16 (sequence is synthesized)
ggacagaagcagaaaaaagttatgttaacagtggaacaggcccaagatcaacattatgcgcttgtattatggggtcctggagcagcctggtaccctcaacttcaaaggaaaaaaggagtg

SEQ ID NO: 245498 - DNA, 120 bp, Artificial Sequence
  ENSG00000122376_17 (sequence is synthesized)
gttctgattaaagcccagatttcagagctggcatttcctattacagcatctcagaagatagcgctaaatgctcacagttctctgaagagtattttttcttctcttcccaacatcgtatat

SEQ ID NO: 245499 - DNA, 120 bp, Artificial Sequence
  ENSG00000122376_18 (sequence is synthesized)
actggttgtgcaaaatgtggattggaactagaaacagatgagaacaggatctacaaacaatgttttagctgcttgccatttactatgaagaaaatatattataggccagcgttaatgact

SEQ ID NO: 245500 - DNA, 120 bp, Artificial Sequence
  ENSG00000122376_19 (sequence is synthesized)
gccattgatggaagacatgatgtttgtatccgtgtagaatcaaagctgatagagaagattcttctcaacatttctgcagactgcctcaacagagtgatagttccttcctcagagatcacc

SEQ ID NO: 245501 - DNA, 120 bp, Artificial Sequence
  ENSG00000122376_20 (sequence is synthesized)
tatgggatggtcgtggcagacctgttccactccttgttggcagtcagcgcagaaccttgtgtattaaagattcagagcctttttgtgttagatgaaaacagctatccattacaacaagat

SEQ ID NO: 245502 - DNA, 120 bp, Artificial Sequence
  ENSG00000122376_21 (sequence is synthesized)
ttctccctcctggatttttatcctgacattgtaaagcatggagccaatgcccgtctctgaggccagaggaagaaattgcaggcatttcaaggaagaagtactgaaatgatttgtcttttg

SEQ ID NO: 245503 - DNA, 120 bp, Artificial Sequence
  ENSG00000122376_22 (sequence is synthesized)
aaataaatgaatgacagggcttttgctttggattttttatgaaatatattttacaaagagaattgcactagatatataaattaaaacttttttctaagaaaatcctgtgaggtttaaaaa

SEQ ID NO: 245504 - DNA, 120 bp, Artificial Sequence
  ENSG00000122376_23 (sequence is synthesized)
gattgtttttgtcttttggtttcttactttctcctggagaaatgatctaccagtcaaggcaatatgtagcagatccctgggaattaaaggtttgcccatttgttcactgtatttagtccc

SEQ ID NO: 245505 - DNA, 120 bp, Artificial Sequence
  ENSG00000122376_24 (sequence is synthesized)
tgctacattccaggcattgtactaagtatggggaaccacagagaagacattccctcagaaactgctgcagtgctttcgcttatccctacctaaaaaaccgtcaatgtgaaatcatttcct

SEQ ID NO: 245506 - DNA, 120 bp, Artificial Sequence
  ENSG00000122376_25 (sequence is synthesized)
tgattataactataatgataatggattagtttatataaacctatgtttagacaagttcaagacaagcgtgtctttctataaaaagtattgaaaatgaaggaaatgagatcatgtttcaat

SEQ ID NO: 245507 - DNA, 120 bp, Artificial Sequence
  ENSG00000122376_26 (sequence is synthesized)
ttattaaagcagggaagagcgttctgtgcttagttcgtgtctaggatttgagtgccttactgaatgcatttaccagcaaacatgtagcaatctgttctctcattgtgattgtggaagaag

SEQ ID NO: 245508 - DNA, 120 bp, Artificial Sequence
  ENSG00000122376_27 (sequence is synthesized)
ctcatgtaaaatgatagtcattaatgaggaagtatggcgtggtacttattctgtaagttcagagtatgctgagtgttaatagattatcatattgcctgaaaataaattcatgatgacatg

SEQ ID NO: 245509 - DNA, 80 bp, Artificial Sequence
  ENSG00000122376_28 (sequence is synthesized)
tccacagagccggccacatccgaggcggggtgacccgggcggggacccggcccgctccagctgggctgggctgggctgag

SEQ ID NO: 245510 - DNA, 120 bp, Artificial Sequence
  ENSG00000122376_29 (sequence is synthesized)
caggggaggcagggagggcgggacggggcccggccgacgctcacctcccttgcagggcgtgcggtgctggctgtgctgggcccggtagccttcgatgacctcccaggagccgtcgtcgcg

SEQ ID NO: 245511 - DNA, 120 bp, Artificial Sequence
  ENSG00000122376_30 (sequence is synthesized)
ccggatggggaaggagagactcagcacatggttgcagggcttgatgatccgcaggatgccgcgcacccggttccgcttctgctcctcgctctcccgggtcctcaggtcctccaccagctt

SEQ ID NO: 245512 - DNA, 120 bp, Artificial Sequence
  ENSG00000122376_31 (sequence is synthesized)
gtcctccacgatgctggcgccgcgatcgaagaagccctccaccatcttgaagaagttggggtcgtcctcgcggtcggccaccgcctcgctgtagtggcgccgggcggccaatgccagccc

SEQ ID NO: 245513 - DNA, 120 bp, Artificial Sequence
  ENSG00000122376_32 (sequence is synthesized)
cgggctgtccccgggcccagcccagcaacgcggccgagtcggcggacgccgagcccagggcagcgggcccggcccgggacagcaacagcgcttcgcccaggtagcggtacatggccacaa

SEQ ID NO: 245514 - DNA, 120 bp, Artificial Sequence
  ENSG00000122378_0 (sequence is synthesized)
agtatcctctgatcacagaagagaaagctgcccctacccagggacatgatcctgagccacctggattgtgagggagaatcaggcattgatgaggaggggaatgaggaagtagtctgccta

SEQ ID NO: 245515 - DNA, 120 bp, Artificial Sequence
  ENSG00000122378_1 (sequence is synthesized)
caggggacatagctcggcacagctccacagagctaggggctgcaacttggggcatgagaagagagagcagcaagagaaccatttgagaaggctgtcctttctctgtcatcactcctgatg

SEQ ID NO: 245516 - DNA, 120 bp, Artificial Sequence
  ENSG00000122378_2 (sequence is synthesized)
ccctggtgagctccacggtgcaggaacctccatgtgtgtgctgcatccccaagttctggtggcagcaggtgcttagcagcccttgtccagtctcgcctgtgacactgctgctcccttccc

SEQ ID NO: 245517 - DNA, 120 bp, Artificial Sequence
  ENSG00000122378_3 (sequence is synthesized)
ctgtcctgacctcctggttggctgtcctgccagagccttgcctggaagatgaaattccagctaccctgtgggagcagtaacgccttcttccttcttctcaatctccagaaatgtctttcc

SEQ ID NO: 245518 - DNA, 120 bp, Artificial Sequence
  ENSG00000122378_4 (sequence is synthesized)
tccaggacccaagtttcttcaccatggggatgtggtccattggtgcaggagccctgggggctgctgccttggcattgctgcttgccaacacagacgtgtttctgtccaagccccagaaag

SEQ ID NO: 245519 - DNA, 120 bp, Artificial Sequence
  ENSG00000122378_5 (sequence is synthesized)
cggccctggagtacctggaggatatagacctgaaaacactggagaaggaaccaaggactttcaaagcaaaggagctatgggaaaaaaatggagctgtgattatggccgtgcggaggccag

SEQ ID NO: 245520 - DNA, 120 bp, Artificial Sequence
  ENSG00000122378_6 (sequence is synthesized)
gctgtttcctctgtcgagaggaagctgcggatctgtcctccctgaaaagcatgttggaccagctgggcgtccccctctatgcagtggtaaaggagcacatcaggactgaagtgaaggatt

SEQ ID NO: 245521 - DNA, 120 bp, Artificial Sequence
  ENSG00000122378_7 (sequence is synthesized)
tccagccttatttcaaaggagaaatcttcctggatgaaaagaaaaagttctatggtccacaaaggcggaagatgatgtttatgggatttatccgtctgggagtgtggtacaacttcttcc

SEQ ID NO: 245522 - DNA, 120 bp, Artificial Sequence
  ENSG00000122378_8 (sequence is synthesized)
tctctggaaacctggaaggagaaggcttcatccttgggggagttttcgtggtgggatcaggaaagcagggcattcttcttgagcaccgagaaaaagaatttggagacaaagtaaacctac

SEQ ID NO: 245523 - DNA, 120 bp, Artificial Sequence
  ENSG00000122378_9 (sequence is synthesized)
tttctgttctggaagctgctaagatgatcaaaccacagactttggcctcagagaaaaaatgattgtgtgaaactgcccagctcagggataaccagggacattcacctgtgttcatgggat

SEQ ID NO: 245524 - DNA, 120 bp, Artificial Sequence
  ENSG00000122378_10 (sequence is synthesized)
gtattgtttccactcgtgtccctaaggagtgagaaacccatttatactctactctcagtatggattattaatgtattttaatattctgtttaggcccactaaggcaaaatagccccaaaa

SEQ ID NO: 245525 - DNA, 120 bp, Artificial Sequence
  ENSG00000122378_11 (sequence is synthesized)
caaaatagccccaaaacaagactgacaaaaatctgaaaaactaatgaggattattaagctaaaacctgggaaataggaggcttaaaattgactgccaggctgggtgcagtggctcacacc

SEQ ID NO: 245526 - DNA, 76 bp, Artificial Sequence
  ENSG00000122378_12 (sequence is synthesized)
ctgtattccagcctgggtgactgagactctaactaaaaaaaaaaaaaaaaaaaaattgattgctgtgcctcattac

SEQ ID NO: 245527 - DNA, 120 bp, Artificial Sequence
  ENSG00000122378_13 (sequence is synthesized)
aaaaaaaaaaaaaaaaaaattgattgctgtgcctcattacaaatgcatatgatgtttgagtgctgttgtttgaaattatttttcttttcgggtcttcaaaaattcaagaaaagttgatga

SEQ ID NO: 245528 - DNA, 120 bp, Artificial Sequence
  ENSG00000122378_14 (sequence is synthesized)
ttgacttgaagattacaaaatttaaggttttttggcatgtgtgttttctattaataattggttatatgatgtcaaagtaatactttcataatagaattgacatgctctgggatagtttga

SEQ ID NO: 245529 - DNA, 120 bp, Artificial Sequence
  ENSG00000122378_15 (sequence is synthesized)
caaaggtaaattataaagtgaaatctcttgtttcattatcttccattctaacctcagagatctgtttctctagaaaaaatgtccatctctggctttaataaaattatgcatcagaaatca

SEQ ID NO: 245530 - DNA, 120 bp, Artificial Sequence
  ENSG00000122378_16 (sequence is synthesized)
gaactcctgggctcaagcgatcctcccaaagccctgagattacaggcgtgagccagcgcgccggacacaacctcctactttcatgaaagagtgggcacttccaacaggaggaaaatgtct

SEQ ID NO: 245531 - DNA, 120 bp, Artificial Sequence
  ENSG00000122378_17 (sequence is synthesized)
tctggttctagctatctaagtggtttgaaaatgaccaggaaaaattcatcctgtcattcacgttagtaattttgctgtctttcctagaggaatgactttggtgtttaaaattggtagctg

SEQ ID NO: 245532 - DNA, 120 bp, Artificial Sequence
  ENSG00000122378_18 (sequence is synthesized)
tttttctattggtcttttagcctaatttggcaaatcagaagaaaggacatagagatgatgaaatataactttatcttttttgtttgaattttgtcgtgtaagtttgagtgacatcatcaa

SEQ ID NO: 245533 - DNA, 120 bp, Artificial Sequence
  ENSG00000122378_19 (sequence is synthesized)
gacctaccagggagctcggccacagggagtctactcaaggcatcaaactggcccaggagtagaaaggtgggggtggaaataggaaatagtgtttacccaggggactggcccagccaggag

SEQ ID NO: 245534 - DNA, 120 bp, Artificial Sequence
  ENSG00000122378_20 (sequence is synthesized)
gagaaaggaatcagtgtttacccaggaaagcaagaatggatactgatgttggaggtaaagctgggaaagtaggagagcatcgggattgagtatgcagagtgagttagggttgagtggttc

SEQ ID NO: 245535 - DNA, 120 bp, Artificial Sequence
  ENSG00000122378_21 (sequence is synthesized)
gggactaagacccactaagaccatgcctgcacctgacttcatgtagcagtggttgcatggggtatgcatgggcccttaaagggctgggcttctgcagcatttgaggccatagcctttggt

SEQ ID NO: 245536 - DNA, 120 bp, Artificial Sequence
  ENSG00000122378_22 (sequence is synthesized)
acttgcacagggttggtacctgtcatccttgggactccagctactgataggataactcagtacctaaacttagaactttaatacctaagacacttgatggtgaaacagttctcttgcaac

SEQ ID NO: 245537 - DNA, 76 bp, Artificial Sequence
  ENSG00000122378_23 (sequence is synthesized)
atacctaagacacttgatggtgaaacagttctcttgcaactaaagaagaacctgaggtcgaggtagaaggatcact

SEQ ID NO: 245538 - DNA, 120 bp, Artificial Sequence
  ENSG00000122378_24 (sequence is synthesized)
agcttgggcaacaagagcgaaactccatatcaaaaaaaaaaacctgagaggacattgcaccaatggagatgcatcaagagaaacatgtttggttttttgtgagctctcaccaactttttt

SEQ ID NO: 245539 - DNA, 120 bp, Artificial Sequence
  ENSG00000122378_25 (sequence is synthesized)
acgtgcagtgtggtcttctctttctgattagcatgtcattttggaaagagcactggattgagtcatgaggcataatcaatttctagtttaccagtgtgatcttaagcaaagatctaactc

SEQ ID NO: 245540 - DNA, 120 bp, Artificial Sequence
  ENSG00000122378_26 (sequence is synthesized)
attggcaaaatgggcgtgattccttcccattcagggctgtttatgataagtcactgagggaatgataaatattatgacactgcttctcagactgtaatgtacatgcacatcacataagga

SEQ ID NO: 245541 - DNA, 120 bp, Artificial Sequence
  ENSG00000122378_27 (sequence is synthesized)
ccttattaaaatggagacttaaaaagctggacgctaaaggcaataatgacagattttactcaataactactgcagaaggagagagtcctcagtatagaactgagcttagctccaatctgt

SEQ ID NO: 245542 - DNA, 120 bp, Artificial Sequence
  ENSG00000122378_28 (sequence is synthesized)
gcagaggtgatggaattttaaagaggggagggaggaggttcaaatagaactagggaagtgcaaaattacaaaaagctggtaaggagattggtcaatgtgattcggctatctgtgtctact

SEQ ID NO: 245543 - DNA, 120 bp, Artificial Sequence
  ENSG00000122378_29 (sequence is synthesized)
aactctcaaatttatttatcaaagttaggatcctagcctcccacagagaccaggagtcggccttatcattcctgataattatatgacaaagggatggctcccagaaaaagtgagaaacac

SEQ ID NO: 245544 - DNA, 120 bp, Artificial Sequence
  ENSG00000122378_30 (sequence is synthesized)
attcctgtgcagcagaagatacatatatcccccaaagggacagaaaggatttacaattgtaaattttataaagtatgtcctctaagaagagggagggactgggtgccatggctcatgcct

SEQ ID NO: 245545 - DNA, 120 bp, Artificial Sequence
  ENSG00000122378_31 (sequence is synthesized)
agagtgtgactccatctcaagaaaaacgagggagattagaaacctatgatcaggcattggctgaaacaaatggtaaattcttttggcagccttgagcttccccaggcagggacccaaagg

SEQ ID NO: 245546 - DNA, 120 bp, Artificial Sequence
  ENSG00000122378_32 (sequence is synthesized)
ggcctgggttatccctgagacagggccttgagctgctagaaactatgctagtgtttgttcaagtctctccgtgtccggggtgagcaaaattgtttgtgctgaaaatcaatgatttgcagc

SEQ ID NO: 245547 - DNA, 120 bp, Artificial Sequence
  ENSG00000122378_33 (sequence is synthesized)
tctcaagattccagtgggcagtctgggtgggcctgagtttctgctttttttttttctttatgtacagggtcttgctctgtcacctaggctagagtgtaattagtggccccagtcatggct

SEQ ID NO: 245548 - DNA, 120 bp, Artificial Sequence
  ENSG00000122378_34 (sequence is synthesized)
cactgcagctgcaaactggctgcaagctgttctggctcagcctaccaagttactgggcttacaggtggatgccaccgtacccaacagattttatttttgtagggatgggggtctccctgt

SEQ ID NO: 245549 - DNA, 120 bp, Artificial Sequence
  ENSG00000122378_35 (sequence is synthesized)
cccaggctggtctcaaactcctggcctcccaaagtgtttagattacaggtgtaagccaccacacgtggccagcctctgcatttctaacaggttccaggtgatcttgatgttctgctggtc

SEQ ID NO: 245550 - DNA, 120 bp, Artificial Sequence
  ENSG00000122378_36 (sequence is synthesized)
ggtccatgggtcacactttgagaagcatggttctaaaggactatacagattaaagtcattaatctctgtgggctttggacttgaagtttcagcagcctttgacaagcatttgcaggtttc

SEQ ID NO: 245551 - DNA, 120 bp, Artificial Sequence
  ENSG00000122378_37 (sequence is synthesized)
ctttttatttatttgataaactgagaatccacatgcaaagaaatgcaagaaaattcaaagaacgtaagaaaatgtccttgctgtaaagctggtggttctcaatctcggatacacagtaga

SEQ ID NO: 245552 - DNA, 120 bp, Artificial Sequence
  ENSG00000122378_38 (sequence is synthesized)
atcacctggtgcgggggttgggggcggggtgcagtgtaaaaattattaaatcagaatctctggggtaggccccaagcaacttttttttttttttttttagatagaatcttgcttgtcacc

SEQ ID NO: 245553 - DNA, 120 bp, Artificial Sequence
  ENSG00000122378_39 (sequence is synthesized)
ttttttttttagatagaatcttgcttgtcacctaggctagagtgcagtaatgcaatcatggctcactgctgccttaacttctgggctcaagtgatatcctcccacctcagcctccctagt

SEQ ID NO: 245554 - DNA, 89 bp, Artificial Sequence
  ENSG00000122378_40 (sequence is synthesized)
tccctagtagctgggactacaggcgtggactaccacacccaacaaatttttaaattttttgtagaggcaagctcttatactatcttgca

SEQ ID NO: 245555 - DNA, 120 bp, Artificial Sequence
  ENSG00000122378_41 (sequence is synthesized)
catgagccacagcaccaggccaacaatatttcttaaagctcctggagtgattccaatatgcagccaaggttgaaaaccaccctttaaaaggctcggcatccagtgtggaagaccagcaca

SEQ ID NO: 245556 - DNA, 120 bp, Artificial Sequence
  ENSG00000122378_42 (sequence is synthesized)
ctcacgtcaggagaccttacctggagccaggatgcccctgatcatctctgataactttaaaaggaaggcctcagaagcagccccagaagcaaaagtttctctctgaccttctcctgccct

SEQ ID NO: 245557 - DNA, 120 bp, Artificial Sequence
  ENSG00000122378_43 (sequence is synthesized)
cttgtttctggcttttcattctcccccaaggctacccatagaaactagaatccctcttccccaaggcaggtcatcagaaaccagaaccggttttacccaaagccagccataaaacctaaa

SEQ ID NO: 245558 - DNA, 120 bp, Artificial Sequence
  ENSG00000122378_44 (sequence is synthesized)
aatagtcctctcactccccattcccctttctgtgtaaaaactggttggaaagaaatgatctgacctaccgtgtttgactgtcgtaagatacccattccagagagggtcccaccccgtgcc

SEQ ID NO: 245559 - DNA, 120 bp, Artificial Sequence
  ENSG00000122378_45 (sequence is synthesized)
cagaaggaaggaatcctgcacagagaggccaagaagaatctagacagccttgctgggtttcccctctcagtctattactattagatcatacccttcttgtccaatcatatttctacacag

SEQ ID NO: 245560 - DNA, 120 bp, Artificial Sequence
  ENSG00000122378_46 (sequence is synthesized)
tccataatctgttgaacctaaacataaaaatggacaattcccctgtatcttggggtcttcattctgagggctcacatacaattatgatcaaataaatttgtttgctttttctcctgttaa

SEQ ID NO: 245561 - DNA, 120 bp, Artificial Sequence
  ENSG00000122378_47 (sequence is synthesized)
cacatggcggtggcgcggtagcgcgcgatgcagcacaggctagaggctgcgcaagcgcggggcccgcccctgggaccctccgggccgggcggtttggccccttagcgcccgggcgtcggg

SEQ ID NO: 245562 - DNA, 120 bp, Artificial Sequence
  ENSG00000122386_0 (sequence is synthesized)
actcccagtctccacccaactcccccgcccgccccgtgcaggctgtggagactcccttcccgggggagggggcccccactgccgcaggtgccccctctgcctccaccccgctctgaaata

SEQ ID NO: 245563 - DNA, 120 bp, Artificial Sequence
  ENSG00000122386_1 (sequence is synthesized)
gaaaatgtctgcagacggcggaggcatccaggacacccaggacaaggagacacccccggaggttccagatcgtggacatcctcatcaggaaatgccttctaagctgggggaggcggtacc

SEQ ID NO: 245564 - DNA, 120 bp, Artificial Sequence
  ENSG00000122386_2 (sequence is synthesized)
ttcaggggacactcaggagtcactgcacattaagatggagcccgaagagccacactccgagggggcatcgcaggaggatggggctcaaggtgcctggggctgggcacccctaagtcacgg

SEQ ID NO: 245565 - DNA, 120 bp, Artificial Sequence
  ENSG00000122386_3 (sequence is synthesized)
ctctaaggagaaagctctcttcctgcctggcggagccctcccctccccccggatccccgtgctttcccgagaggggaggaccagagaccggcagatggctgcagcgctcctcactgcctg

SEQ ID NO: 245566 - DNA, 120 bp, Artificial Sequence
  ENSG00000122386_4 (sequence is synthesized)
gtcccagatgccagtgactttcgaggatgtggccttgtacctctcccgggaggagtggggacggctggaccacacgcagcagaacttctacagggatgtcctgcagaagaaaaatgggct

SEQ ID NO: 245567 - DNA, 120 bp, Artificial Sequence
  ENSG00000122386_5 (sequence is synthesized)
gtcactgggctttcccttcagcaggcctttctgggcccctcaagcgcacggcaagggtgaggcctcgggctccagccggcaggcaggagatgagaaggagtggagaggcgcgtgcacagg

SEQ ID NO: 245568 - DNA, 120 bp, Artificial Sequence
  ENSG00000122386_6 (sequence is synthesized)
agccgtcgaggtggggcagagggtgcagacctcatccgtggcagcccttgggaatgtgaagcccttcagaaccagggcagggagagtccagtggggcgtcccgcagtgcgcgcaggaagc

SEQ ID NO: 245569 - DNA, 120 bp, Artificial Sequence
  ENSG00000122386_7 (sequence is synthesized)
agcctgcggccggagctcagggccggccaaagactccgggcagccggctgagccagatcgcaccccggatgcagctccgccagaccccagtcccacggagccccaggagtaccgcgtccc

SEQ ID NO: 245570 - DNA, 120 bp, Artificial Sequence
  ENSG00000122386_8 (sequence is synthesized)
cgccccggagagtggcgaggagggcctggcccctgacagtgaggtgggcaggaagagctaccggtgcgagcagtgcggcaagggcttcagctggcactcgcacctggtgacgcaccggcg

SEQ ID NO: 245571 - DNA, 120 bp, Artificial Sequence
  ENSG00000122386_9 (sequence is synthesized)
cacgcacacgggcgagaagccctacgcctgcactgactgcgggaagcgcttcggccgcagctcgcacctcatccagcaccagatcatccacacgggcgagaagccctacacctgccccgc

SEQ ID NO: 245572 - DNA, 120 bp, Artificial Sequence
  ENSG00000122386_10 (sequence is synthesized)
ctgccggaagagcttcagccaccactccacgctgattcagcaccagcgcatccacaccggagagaagccctacgtgtgcgaccgctgcgccaagcgcttcacccgccgctcggacttggt

SEQ ID NO: 245573 - DNA, 120 bp, Artificial Sequence
  ENSG00000122386_11 (sequence is synthesized)
cacccaccagggcacccacacgggcgccaagccgcacaagtgccccatctgcgccaagtgcttcacgcagagctcggcgctagtcacccaccagcgcacccacactggggtcaagcccta

SEQ ID NO: 245574 - DNA, 120 bp, Artificial Sequence
  ENSG00000122386_12 (sequence is synthesized)
tccgtgccccgagtgcggcaagtgcttcagccagcgttccaacctcatcgcgcacaaccgcacacacacaggcgagaagccctaccactgcctcgactgcggcaagagcttcagccacag

SEQ ID NO: 245575 - DNA, 120 bp, Artificial Sequence
  ENSG00000122386_13 (sequence is synthesized)
ctcgcacctcaccgcgcaccagcgcacccaccgtggcgtgcggccctacgcctgcccgttgtgcggcaagagcttcagccggcgctccaacctgcaccggcacgagaagatccacaccac

SEQ ID NO: 245576 - DNA, 120 bp, Artificial Sequence
  ENSG00000122386_14 (sequence is synthesized)
gatccacaccaccgggcccaaggccctggccatgctgatgctgggggcggcggcggcgggggctctggccacacccccacccgctcccacctaggaggccaggaaagggggagcggggcg

SEQ ID NO: 245577 - DNA, 120 bp, Artificial Sequence
  ENSG00000122386_15 (sequence is synthesized)
ggaacagccccactggagtcaaggctccgagggaggagagaggggctcgggaagggagctggggcggtgagggcatggggtgaggcatggcgatgggggagggcgagggcgagaaagggc

SEQ ID NO: 245578 - DNA, 120 bp, Artificial Sequence
  ENSG00000122386_16 (sequence is synthesized)
tcctgtcttccctactcccagtctccacccaactcccccgcccgccccgtgcaggctgtggagactcccttcccgggggagggggcccccactgccgcaggtgccccctctgcctccacc

SEQ ID NO: 245579 - DNA, 120 bp, Artificial Sequence
  ENSG00000122386_17 (sequence is synthesized)
agtctccacccaactcccccgcccgccccgtgcaggctgtggagactcccttcccgggggagggggcccccactgccgcaggtgccccctctgcctccaccccggtgagaagggggtgct

SEQ ID NO: 245580 - DNA, 120 bp, Artificial Sequence
  ENSG00000122386_18 (sequence is synthesized)
ggggagggcatctggatcccgagaccggcgcagatgatcagcttgcaggaggggatggggtcaaaggtggaaggcttcaagctggcaggagagaagggggccaggaccgggtttgggaag

SEQ ID NO: 245581 - DNA, 120 bp, Artificial Sequence
  ENSG00000122386_19 (sequence is synthesized)
gagaaggacattgtctgccaggaccgagagcaggatgggcatcccaggcctggggcaggtggttgcagctgcaggggggctgctgagagcgggcaggttgatttctgaattcctggtggg

SEQ ID NO: 245582 - DNA, 120 bp, Artificial Sequence
  ENSG00000122390_0 (sequence is synthesized)
ccgcttccgctggcggggtctcctccgtgagctccgggcctgtttgcctgctgaagtagagtcttagggtgaccccagggggacgtaatgtttccgagaagaaggacagaaagaagactg

SEQ ID NO: 245583 - DNA, 120 bp, Artificial Sequence
  ENSG00000122390_1 (sequence is synthesized)
ggagacaccggaactcgaaagaaaatcggtaacaaaatcatacagaaaggctgtacctggaggaaggaagtgcggagccagcctgagttgggagaagagctccagagagtgtgaatgaca

SEQ ID NO: 245584 - DNA, 120 bp, Artificial Sequence
  ENSG00000122390_2 (sequence is synthesized)
gaggtggtgccatccagcgcgctcagcgaggtcagcctgcgcctcctctgccacgatgacatagacactgtgaagcacctgtgtggcgactggttccccatcgagtacccagactcatgg

SEQ ID NO: 245585 - DNA, 120 bp, Artificial Sequence
  ENSG00000122390_3 (sequence is synthesized)
tatcgtgatatcacatccaacaagaagttcttttcccttgctgcaacctacagaggtgccattgtgggaatgatagtagctgaaattaagaacaggaccaaaatacataaagaggatgga

SEQ ID NO: 245586 - DNA, 120 bp, Artificial Sequence
  ENSG00000122390_4 (sequence is synthesized)
gatattctagcatccaacttctctgttgacacacaagtcgcgtacatcctaagtctgggcgtcgtgaaagagttcaggaagcacggcataggttccctcttacttgaaagtttaaaggat

SEQ ID NO: 245587 - DNA, 120 bp, Artificial Sequence
  ENSG00000122390_5 (sequence is synthesized)
cacatatcaaccaccgcccaggaccactgcaaagccatttacctgcatgtcctcaccaccaacaacacagcaataaacttctatgaaaacagagacttcaagcagcaccactatctcccc

SEQ ID NO: 245588 - DNA, 120 bp, Artificial Sequence
  ENSG00000122390_6 (sequence is synthesized)
tattactactccattcgaggggtcctcaaagatggcttcacctatgtcctctacatcaacggcggccaccctccctggacgattttggactacatccagcacctgggctctgcactagcc

SEQ ID NO: 245589 - DNA, 120 bp, Artificial Sequence
  ENSG00000122390_7 (sequence is synthesized)
agcctgagcccctgctccattccgcacagagtctaccgccaggcccacagcctgctctgcagcttcctgccatggtcgggcatctcttccaagagtggcatcgagtacagccggaccatg

SEQ ID NO: 245590 - DNA, 120 bp, Artificial Sequence
  ENSG00000122390_8 (sequence is synthesized)
tgatgtcggctgggcagccgccaccaggccccacccttcggccgcccgcagagcccgccttcctgtccatctgaccccttctgttttctgcaaggagctgccagccatctaactgggctc

SEQ ID NO: 245591 - DNA, 120 bp, Artificial Sequence
  ENSG00000122390_9 (sequence is synthesized)
gtcggcctgccccagctgcaggcccggtgctacacgggctcgggaacagaacatcgtgggcatgcgcagagcatgcccatccgtggcaggctcttcagctcccctccctgcttctggaaa

SEQ ID NO: 245592 - DNA, 120 bp, Artificial Sequence
  ENSG00000122390_10 (sequence is synthesized)
cctctgcctgctgccctggccctgcccccctgcgcatgcaccgtccccagggctgacccagtgtggctgcattcactgggaggggcctgccctcactgggcctctcccactccgctgcct

SEQ ID NO: 245593 - DNA, 120 bp, Artificial Sequence
  ENSG00000122390_11 (sequence is synthesized)
cctggaaagctggaggggactttctcctgcaagggaggaacgcaagtattatggacacacttgaccgtaaaggcacaggagcctcggaacaagggggcgcaataaagggaatggcccgtc

SEQ ID NO: 245594 - DNA, 120 bp, Artificial Sequence
  ENSG00000122390_12 (sequence is synthesized)
cccttccagaaccagcccaaagaagcctggggggtgaggagtggcccccactcctccatgaggggctgatgaggggtgggcagcctgggggaggctttcctcgcaagcacagagctctga

SEQ ID NO: 245595 - DNA, 120 bp, Artificial Sequence
  ENSG00000122390_13 (sequence is synthesized)
ggctcagccccctggcacaggcggtcacgcatcaggacggttcctactcctcagcaccttccgtgcagttaccagtgccctgggaggtcacactgcccgtcggaccttggcatgctccat

SEQ ID NO: 245596 - DNA, 120 bp, Artificial Sequence
  ENSG00000122390_14 (sequence is synthesized)
tcagctgacctgctgaggacaggcatcgccgagactccttgggtcctccccgccctccctcatgctgccacaagctgctgctccaaggcctggccacatgcagacaggaggaagctgagc

SEQ ID NO: 245597 - DNA, 120 bp, Artificial Sequence
  ENSG00000122390_15 (sequence is synthesized)
tcgacattaggcctcaaggctgccatctgtcttgtagggcctggccttgtgggcagggggcagtcctgtgccttgtgggccctcagcctctgagggcagagatgctgtcagtgccgcagg

SEQ ID NO: 245598 - DNA, 120 bp, Artificial Sequence
  ENSG00000122390_16 (sequence is synthesized)
tgcatcacatacttctagcatcctctccaccctgcattccaaatgctgcttgctgcctgccctgccctccgatgcaggggtggggtggggggcggagtcccgcccagcatagctgcagtg

SEQ ID NO: 245599 - DNA, 120 bp, Artificial Sequence
  ENSG00000122390_17 (sequence is synthesized)
tcacaaagccatggcagagggtcctagcggcgccaccctgccccagcctgaggaggagggagagggaggaacaaccctgggcagacggggcctcagggacctgtgtccttccgcctccag

SEQ ID NO: 245600 - DNA, 120 bp, Artificial Sequence
  ENSG00000122390_18 (sequence is synthesized)
agctgcccagccacgggctctcagggtgctggggcagccccaggtcccctcttgaactcagctggggccaggggccctcagaatgaaggcaggcaccaggcaggagcagcatccccctcc

SEQ ID NO: 245601 - DNA, 120 bp, Artificial Sequence
  ENSG00000122390_19 (sequence is synthesized)
ttgacggtgctggcaggagggccgcgccatgctgactgcttgaacctctgctgacctgacagtgctggcgggagggccgcaccatgctgactgcctgaatctctgctgaggctgcctgcc

SEQ ID NO: 245602 - DNA, 120 bp, Artificial Sequence
  ENSG00000122390_20 (sequence is synthesized)
tgccgggcccagctcagcgccctctccactgcgaatcagtggcgatcatgtgatttctatttctgccccacagggtaagggacgagtcttctggaaggctctgccatggacatttgtcct

SEQ ID NO: 245603 - DNA, 120 bp, Artificial Sequence
  ENSG00000122390_21 (sequence is synthesized)
cgggctcagaggccccaccctgccccacacctgcccctgatcactgcagtgtccagcccagtgttgaacagattgtagcgttctgtctcattacgagcaaataaatagactttcattgga

SEQ ID NO: 245604 - DNA, 120 bp, Artificial Sequence
  ENSG00000122390_22 (sequence is synthesized)
agggagcgggaggcggaagtgccgcgggctgccgcctccgtcccggctgcggcccctgccggttacataactcgttgcgggctccgcgcggtcccacttcccggctcccttcgcctccag

SEQ ID NO: 245605 - DNA, 120 bp, Artificial Sequence
  ENSG00000122390_23 (sequence is synthesized)
cagagcatgcccatccgtggcaggtacgccacagcagacacaaaggtatgggagcttggtgcctccagccacaaaagtggaaggccctggatgggcacagagaacggcagagccggaagg

SEQ ID NO: 245606 - DNA, 120 bp, Artificial Sequence
  ENSG00000122390_24 (sequence is synthesized)
ggccgtggggactgcagagtccaccaccttatgcaccagcacagcccagaggtttggtgacttgtgccaagctaacacagcaggctccatggcaactgggctgtgcacccgactttggat

SEQ ID NO: 245607 - DNA, 120 bp, Artificial Sequence
  ENSG00000122390_25 (sequence is synthesized)
ccatcagtgcctttatttgtgtggggaccgagaggcgcctagtggctgcaggcagacaccatggcctggagaagggctcatgctcctggagcacccaggcccagctgtgtggcccatagg

SEQ ID NO: 245608 - DNA, 120 bp, Artificial Sequence
  ENSG00000122390_26 (sequence is synthesized)
tcgaaagaaaatcggtaacaaaatatggtactgccttttaaggtctattacttaaacataagtatggctctggttcttaccgcctttaccgtatccttcatgggaagttgatactgatcg

SEQ ID NO: 245609 - DNA, 120 bp, Artificial Sequence
  ENSG00000122390_27 (sequence is synthesized)
gcgctctgtgtcctgctattaatgatgccctcatagtcagaggaagcctacttaagtgaaatccatttttgacctgtcaagtattaaatattctcttaatttttagtactgaatgataga

SEQ ID NO: 245610 - DNA, 120 bp, Artificial Sequence
  ENSG00000122390_28 (sequence is synthesized)
tcttacgttaggtacacagggatacagtacaagtatgccagcctctttaaactataaagaagtaaacaagatttggtttaagcatcagtctcttgtgagtctgatgggtaagcccagtct

SEQ ID NO: 245611 - DNA, 120 bp, Artificial Sequence
  ENSG00000122390_29 (sequence is synthesized)
cagggcacactgacaatgttagtggagaacgagactctcccagtgtgctgccctgaccctctgagattggtctgtgtagccacgtggtggtcatcctgtgccacctctggtttggttcta

SEQ ID NO: 245612 - DNA, 120 bp, Artificial Sequence
  ENSG00000122390_30 (sequence is synthesized)
aagaagaaggaactaaagaagaatttctttggaagcaaaatatttggaagcaaaatatttggctcctgactgaaagggttttgatccatgcatacattaataaacccttcagaaccatga

SEQ ID NO: 245613 - DNA, 120 bp, Artificial Sequence
  ENSG00000122390_31 (sequence is synthesized)
aaaaggagaagatggcagagtaggacaatggatactaggggacagtttgacacgcagactcaaatctttttttttttagatggagttttgcttttgtcgcgcaggctggagtgcagtggc

SEQ ID NO: 245614 - DNA, 120 bp, Artificial Sequence
  ENSG00000122390_32 (sequence is synthesized)
acataactcgttgcgggctccgcgcggtcccacttcccggctcccttcgcctccaggatgcgctgagccctacaacacccccagcggccgccggctcccccacgagattctgagttttca

SEQ ID NO: 245615 - DNA, 120 bp, Artificial Sequence
  ENSG00000122390_33 (sequence is synthesized)
gcacctgacagtggcgggggatggcagacacacctgtgggtgctggagacatcttggcggcccttcctccagtttggcatcatagtcccctgtgggctgagcacatggggctcctggaca

SEQ ID NO: 245616 - DNA, 120 bp, Artificial Sequence
  ENSG00000122390_34 (sequence is synthesized)
gttgttaccgatggagggtatccaggttcttgacatcttgaacaaagaattggacaaaacggcacaaacaaagcaagaaaaagatgaagcaacaaaagcagatttattgaaaacgaaagt

SEQ ID NO: 245617 - DNA, 120 bp, Artificial Sequence
  ENSG00000122390_35 (sequence is synthesized)
taccctctagaggtttcccattggttatttggtgcatgccctatgtaaatgaaagtgacctgcgatcagtctgattggttgaggaaagcagccaaccagaggctgaagtgaagttacaaa

SEQ ID NO: 245618 - DNA, 120 bp, Artificial Sequence
  ENSG00000122390_36 (sequence is synthesized)
ggctgaagtgaagttacaaagttacatcctatgcaaatatctgattcattgtggaaagcaaccaatcagaggctgaagtgaaattacaaagttgcactcctatataaatgaagacttggc

SEQ ID NO: 245619 - DNA, 120 bp, Artificial Sequence
  ENSG00000122390_37 (sequence is synthesized)
cggagaccagcttgattggttgcaggaggggaccaatcagaggtgtgaatgacagaggtggtgccatccagcgcgctcagcgaggtcagcctgcgcctcctctgccacgatgacatagac

SEQ ID NO: 245620 - DNA, 120 bp, Artificial Sequence
  ENSG00000122390_38 (sequence is synthesized)
ccccctcagatgatgttcaggtggccaagcttatggatgcttctctcccttacctgatcgtgttgtgggtaaacctgacacacatttgggtaaatcgagttgcacatattaccatgttgc

SEQ ID NO: 245621 - DNA, 69 bp, Artificial Sequence
  ENSG00000122390_39 (sequence is synthesized)
atctactcataaagaaggagccgaggcgggtagatctctggaggtcaggagttcgagaccagcctgccc

SEQ ID NO: 245622 - DNA, 90 bp, Artificial Sequence
  ENSG00000122390_40 (sequence is synthesized)
agcaagactctgtctcagaaaaaaaaagaaaaatttagccaggcatggtggcgcccaaaagaagaattgcttgaactcaggaaatggagg

SEQ ID NO: 245623 - DNA, 76 bp, Artificial Sequence
  ENSG00000122390_41 (sequence is synthesized)
ggctgtgtccccacccaaatctcatctgcaattcccatatattatgggagggacccagtaggaggtaattgaatcg

SEQ ID NO: 245624 - DNA, 120 bp, Artificial Sequence
  ENSG00000122390_42 (sequence is synthesized)
cgagatctaatggtttttaaaaaggggagtttccctgcacaagccctcttttgtctgccaccatgtgagacatgccttttaccttccaccgtaattgtgaggcctccccagccacgtgga

SEQ ID NO: 245625 - DNA, 120 bp, Artificial Sequence
  ENSG00000122390_43 (sequence is synthesized)
tgctccacttgcactggggatcagcagtgcacaaaacggacaggatcccctgtcctcccagagcctgtgctagcagaggggaaacaagtgcggagagaagagatttttactttttttgaa

SEQ ID NO: 245626 - DNA, 120 bp, Artificial Sequence
  ENSG00000122390_44 (sequence is synthesized)
tacttgggttcaaaccttccttataggatgcatgacccaaaggtatgcccttccctgcttcttcctccttaactttcactggcccctgacaggtcagagggaagccaggaaactttataa

SEQ ID NO: 245627 - DNA, 120 bp, Artificial Sequence
  ENSG00000122390_45 (sequence is synthesized)
tagtcagaatgtggcccaaaaaaatgctgtgcgtgtgtgtgtgtgttttcaaattcatgagtctaggatttattcattacatagaataataagcaggaaagagaggggtgaccccacact

SEQ ID NO: 245628 - DNA, 120 bp, Artificial Sequence
  ENSG00000122390_46 (sequence is synthesized)
ccacaggccgtctagcttatgtgaagacaggcatccagggggtcagcactgttgaccccctccttgtcatatggacagggctctgtccctcttgctgccacaaaggttgagaatctaggg

SEQ ID NO: 245629 - DNA, 120 bp, Artificial Sequence
  ENSG00000122390_47 (sequence is synthesized)
agaaccagaagcacctgcccttctgccaggccccttccccaccccccgtgcatccctgggtgtggtgtccacatgcctgctgcctcactcagaaggcccttctgtccccagaccccaccc

SEQ ID NO: 245630 - DNA, 120 bp, Artificial Sequence
  ENSG00000122390_48 (sequence is synthesized)
tctgttgttttgcacagcagaggccacttcgtctcatgagcctttccagctctgcagaggcttagcgggctctcagcctccgaagcctggcttgccatctgcacacagtcccacaggcca

SEQ ID NO: 245631 - DNA, 120 bp, Artificial Sequence
  ENSG00000122390_49 (sequence is synthesized)
taactcgttgcgggctccgcgcggtcccacttcccggctcccttcgcctccaggatgcgctgagccctacaacacccccagcggccgccggctcccccacgagaaaagtgcactgcttga

SEQ ID NO: 245632 - DNA, 120 bp, Artificial Sequence
  ENSG00000122390_50 (sequence is synthesized)
acataactcgttgcgggctccgcgcggtcccacttcccggctcccttcgcctccaggatgcgctgagccctacaacacccccagcggccgccggctcccccacgagtgaaccagatgctg

SEQ ID NO: 245633 - DNA, 120 bp, Artificial Sequence
  ENSG00000122390_51 (sequence is synthesized)
cccccctgcggttccagtgtatgtcagtgccagccacgtgcccaggacccaccgttcccagggatacaagatcccgtggcccatggtggcagctgcggcacacagcgctgctttccagag

SEQ ID NO: 245634 - DNA, 120 bp, Artificial Sequence
  ENSG00000122406_0 (sequence is synthesized)
ccttttcccaccccctagcgccgctgggcctgcaggtctctgtcgagcagcggacgccggtctctgttccgcaggatggggtttgttaaagttgttaagaataaggcctactttaagaga

SEQ ID NO: 245635 - DNA, 120 bp, Artificial Sequence
  ENSG00000122406_1 (sequence is synthesized)
taccaagtgaaatttagaagacgacgagagggtaaaactgattattatgctcggaaacgcttggtgatacaagataaaaataaatacaacacacccaaatacaggatgatagttcgtgtg

SEQ ID NO: 245636 - DNA, 120 bp, Artificial Sequence
  ENSG00000122406_2 (sequence is synthesized)
acaaacagagatatcatttgtcagattgcttatgcccgtatagagggggatatgatagtctgcgcagcgtatgcacacgaactgccaaaatatggtgtgaaggttggcctgacaaattat

SEQ ID NO: 245637 - DNA, 120 bp, Artificial Sequence
  ENSG00000122406_3 (sequence is synthesized)
gctgcagcatattgtactggcctgctgctggcccgcaggcttctcaataggtttggcatggacaagatctatgaaggccaagtggaggtgactggtgatgaatacaatgtggaaagcatt

SEQ ID NO: 245638 - DNA, 120 bp, Artificial Sequence
  ENSG00000122406_4 (sequence is synthesized)
agtttttggtgccctgaagggagctgtggatggaggcttgtctatccctcacagtaccaaacgattccctggttatgattctgaaagcaaggaatttaatgcagaagtacatcggaagca

SEQ ID NO: 245639 - DNA, 120 bp, Artificial Sequence
  ENSG00000122406_5 (sequence is synthesized)
catcatgggccagaatgttgcagattacatgcgctacttaatggaagaagatgaagatgcttacaagaaacagttctctcaatacataaagaacagcgtaactccagacatgatggagga

SEQ ID NO: 245640 - DNA, 120 bp, Artificial Sequence
  ENSG00000122406_6 (sequence is synthesized)
gatgtataagaaagctcatgctgctatacgagagaatccagtctatgaaaagaagcccaagaaagaagttaaaaagaagaggtggaaccgtcccaaaatgtcccttgctcagaagaagga

SEQ ID NO: 245641 - DNA, 120 bp, Artificial Sequence
  ENSG00000122406_7 (sequence is synthesized)
tcgggtagctcaaaagaaggcaagcttcctcagagctcaggagcgggctgctgagagctaaacccagcaattttctatgattttttcagatatagataataaacttatgaacagcaacta

SEQ ID NO: 245642 - DNA, 120 bp, Artificial Sequence
  ENSG00000122406_8 (sequence is synthesized)
cgggccagttattgaaagagatgggattgaaaccactaccttttgcatatgacttaattcttattagaaatgagcaactccatcctctttccccatgcactttcttttttcaatcagaat

SEQ ID NO: 245643 - DNA, 120 bp, Artificial Sequence
  ENSG00000122406_9 (sequence is synthesized)
aaaaatgatttactgaattatgcaaaaaggtggatcctagaattttataagaagtttgaggaaaaggcttatgaaagatttctaaacctgcaactaggaataagattgtaggccattttg

SEQ ID NO: 245644 - DNA, 120 bp, Artificial Sequence
  ENSG00000122406_10 (sequence is synthesized)
ggaagttaagtaggttaatttgtagttccattggtttaatgatattttttgttgttgagtctgtgcatcttgatttattaacttcttaggaatattttagcatttggtgatttaaccaag

SEQ ID NO: 245645 - DNA, 120 bp, Artificial Sequence
  ENSG00000122406_11 (sequence is synthesized)
aaatagtaatttttggtaagcctaaaatacaacccaactgaaattttgcttttatgatgtggaggtgggtggggggagttagttgcaagtacaccaagagcattctcacttgacaatttc

SEQ ID NO: 245646 - DNA, 120 bp, Artificial Sequence
  ENSG00000122406_12 (sequence is synthesized)
attaactgtgatcttggacaaatcacttattcccatgtacccactgaaaattaaaggatttagagtataagttttgaaactccttcctgtgctgatgtgctggatgactaattttgtagt

SEQ ID NO: 245647 - DNA, 120 bp, Artificial Sequence
  ENSG00000122406_13 (sequence is synthesized)
cttggtaatggcttttaaaggtttttgtagcatgaatttcttttctgtcctggaattcagagatgagctgctgaatgatgatatcccactaactgagcagtcagtagttggtcctttggt

SEQ ID NO: 245648 - DNA, 120 bp, Artificial Sequence
  ENSG00000122406_14 (sequence is synthesized)
tgcatatgatgcgataattgtttcaagacgggactgatggcagctactaaagtaaattcttactagtaaactaagttaagtgagtctatactaaaatatgaataactttattttagtacc

SEQ ID NO: 245649 - DNA, 120 bp, Artificial Sequence
  ENSG00000122406_15 (sequence is synthesized)
gtgcttgagattacaggcatgaaccaccacacctggcctgatttttttcttgagtaagatggagttctgtagtgataattcacattgcataaggtgaaaattgggaatttgttaggaaaa

SEQ ID NO: 245650 - DNA, 120 bp, Artificial Sequence
  ENSG00000122406_16 (sequence is synthesized)
ttgatttagtttagttccttttgagaatctggcttagaaggacaagataagttatggttgcattaatatagagatgtataagaaagctcatgctgctatacgagagaatccagtctatga

SEQ ID NO: 245651 - DNA, 120 bp, Artificial Sequence
  ENSG00000122406_17 (sequence is synthesized)
atactgcgcctgcgcaagggctgtggcccttttcccaccccctagcgccgctgggcctgcaggtctctgtcgagcagcggacgccggtctctgttccgcaggatgagggtaaaactgatt

SEQ ID NO: 245652 - DNA, 120 bp, Artificial Sequence
  ENSG00000122406_18 (sequence is synthesized)
attgatgtagtttgtggctgattgcttggagagttttctgcaagatgtttgtacatggataagatagcttaagttgtgcttcaggagagtgcttgcttccagttttctgctttgttaatg

SEQ ID NO: 245653 - DNA, 120 bp, Artificial Sequence
  ENSG00000122406_19 (sequence is synthesized)
gatctatctaggtcagctctttccaataaaattttctgcaatgacacaaatctgtaatttgctgtccagtggttttgccactagcgacctgcagctgttgagttccagcagtatgtaaac

SEQ ID NO: 245654 - DNA, 120 bp, Artificial Sequence
  ENSG00000122406_20 (sequence is synthesized)
ttgaatttgaaaatccacttgtagctagtgtctacttaattggacaatgaagacccttgctacttaggtatacattctgaatgttggcaaacattaaaaatgcagactcgtgggaactcc

SEQ ID NO: 245655 - DNA, 120 bp, Artificial Sequence
  ENSG00000122406_21 (sequence is synthesized)
tgggatgaaatgttgctttagctgatggggaacagtgctgttttagtgggggaattactgctgaatgtgctcttgcccagttaagctttgtggcaggtaatttaggcttttgaaaaacat

SEQ ID NO: 245656 - DNA, 120 bp, Artificial Sequence
  ENSG00000122406_22 (sequence is synthesized)
aacatgggaagcgagagaggtacgtagttgttatttgaggctaggttttcgaagtgggacatagcgtgttccgaacaaaccgacgtttggcatcactgattgctgtctggagcagtgctt

SEQ ID NO: 245657 - DNA, 120 bp, Artificial Sequence
  ENSG00000122406_23 (sequence is synthesized)
cgcaaaagtttggcacaattaccggtgctggtccttgaagaaacaaatatggaaattgaaagcgtttaaaaccttttgaaagcaatataacaataattttatacctgttaaatgtaataa

SEQ ID NO: 245658 - DNA, 120 bp, Artificial Sequence
  ENSG00000122406_24 (sequence is synthesized)
attggggcctgcattttgtatgtttcttttattccatatttctctaaggattcatttttattgttttatgaaactactagtctgtgacatggaaggtagaggaaaaagattcttgaccct

SEQ ID NO: 245659 - DNA, 120 bp, Artificial Sequence
  ENSG00000122406_25 (sequence is synthesized)
ttgtctgtttactcttgaagttcaagtgttactttgttacatggttaatttatgtcaaaagtatcataggctaagacatcaaagttttaataacattcttttttctttaaggggtttgtt

SEQ ID NO: 245660 - DNA, 120 bp, Artificial Sequence
  ENSG00000122406_26 (sequence is synthesized)
aaagttgttaagaataaggcctactttaagagataccaagtgaaatttagaagacgacgaggtactgtcacctttttgtgtttacaatattaatctgctttgcagatgcagtggagtatc

SEQ ID NO: 245661 - DNA, 120 bp, Artificial Sequence
  ENSG00000122406_27 (sequence is synthesized)
ttaatttatggaaataggtttattacttgttttgggggcaggtaacattcttatataggtgtgtttcttgacaacatgagctagacttgtcaacattcttttagtaatcttttagatgct

SEQ ID NO: 245662 - DNA, 120 bp, Artificial Sequence
  ENSG00000122406_28 (sequence is synthesized)
cgcaggatggtgagtggatgcctcggtctcggggctttagatgcatggaggttcccttttcttgcccgtatgccagcctagggcccgtctcgcgcgtcgcaggggccggatggcgttaga

SEQ ID NO: 245663 - DNA, 120 bp, Artificial Sequence
  ENSG00000122417_0 (sequence is synthesized)
tgagcgggcactcttctgcggcaagcaggtctaggaattcgcctggttcccacctcgcgtcccttgccttccttcctagtctacccactgtagtgccccctgcgtcccgctccctcctag

SEQ ID NO: 245664 - DNA, 120 bp, Artificial Sequence
  ENSG00000122417_1 (sequence is synthesized)
ccgactcagagcacaagaaggattgccacggtttccattgcagcagccgtggcgcctctgaccctttttttatatcgcggcgacggcgggctgtcgtcacgacgacgtgcggacgcagcg

SEQ ID NO: 245665 - DNA, 120 bp, Artificial Sequence
  ENSG00000122417_2 (sequence is synthesized)
gcgggggcctttcagcttatgtggagaagtcgctgtgaagccacctataaatccatttactgaatttatggagaaggctgtaaatgatggaagtcattcagaagaactcttttgccatct

SEQ ID NO: 245666 - DNA, 120 bp, Artificial Sequence
  ENSG00000122417_3 (sequence is synthesized)
taaaactatatcagagaaagaagatttaccacggtgtaccagtgaaagtcatctcagctgcctgaagcaggacattctaaatgaaaagactgaattggaagcaacacttaaggaagcgga

SEQ ID NO: 245667 - DNA, 120 bp, Artificial Sequence
  ENSG00000122417_4 (sequence is synthesized)
gttggtaactcattctgtagaattgcttttgccactatttaaggacaccattgaaaagattaattttgaaaatgcgaatctttctgcattgaatttgaagatttctgaacagaaggaaat

SEQ ID NO: 245668 - DNA, 120 bp, Artificial Sequence
  ENSG00000122417_5 (sequence is synthesized)
attaataaaagaattagacaccttcaaaagtgtaaaactagctttagaacatcttcttagaaagagagactacaaacaaacaggagacaatttatccagcatgttgctagaaaatctaac

SEQ ID NO: 245669 - DNA, 120 bp, Artificial Sequence
  ENSG00000122417_6 (sequence is synthesized)
tgataatgaaagtgaaaatactaatcttaagaagaaggtatttgaaaaggaggcccatatccaagaactttcttgtttgtttcagagtgaaaaggcaaatactttgaaagcaaaccgttt

SEQ ID NO: 245670 - DNA, 120 bp, Artificial Sequence
  ENSG00000122417_7 (sequence is synthesized)
ttcccaatcagtaaaagtagtacatgaacgactacagatccaaattcataaaagggaagccgagaacgataagttgaaagaatatgtaaagagcttagaaaccaagatagccaagtggaa

SEQ ID NO: 245671 - DNA, 120 bp, Artificial Sequence
  ENSG00000122417_8 (sequence is synthesized)
cctgcaatcaagaatgaataagaatgaggctatagtgatgaaagaagcaagtaggcaaaaaactgtagctttaaaaaaggcatctaaagtttacaaacaaaggcttgaccattttacagg

SEQ ID NO: 245672 - DNA, 120 bp, Artificial Sequence
  ENSG00000122417_9 (sequence is synthesized)
agctattgaaaagcttacttcccaaattagagatcaggaagccaagttgtctgaaacaatttcagcttccaatgcctggaaaagtcattatgagaaaattgtgatagaaaaaaccgaatt

SEQ ID NO: 245673 - DNA, 120 bp, Artificial Sequence
  ENSG00000122417_10 (sequence is synthesized)
ggaagtacagattgaaacaatgaaaaagcaaatcattaatcttttggaagatctgaagaaaatggaagaccatggaaaaaattcatgtgaagaaattcttagaaaagttcactcaattga

SEQ ID NO: 245674 - DNA, 120 bp, Artificial Sequence
  ENSG00000122417_11 (sequence is synthesized)
atatgaaaatgaaactctgaatcttgagaatacaaaattaaagactacacttgctgctttgaaggatgaagttgtatctgttgaaaatgaactctcagaattgcaagaagtagaaaaaaa

SEQ ID NO: 245675 - DNA, 120 bp, Artificial Sequence
  ENSG00000122417_12 (sequence is synthesized)
acagaaaacccttattgaaatgtataaaactcaggtacaaaagttgcaagaagcagctgaaatagtaaaaagcagatgtgaaaatttgctacataaaaataaccaaataacaaaaaccaa

SEQ ID NO: 245676 - DNA, 120 bp, Artificial Sequence
  ENSG00000122417_13 (sequence is synthesized)
aaataaaaatgtagagaagatgagaggccagatggagtctcatctgaaggagttagagcgtgtctgcgattccttgacggcggcggaacggaggcttcacgagtgtcaggagagtctgca

SEQ ID NO: 245677 - DNA, 120 bp, Artificial Sequence
  ENSG00000122417_14 (sequence is synthesized)
gtgctgcaaggggaagtgtgcagaccaggaacacaccattagggagcttcagggccagattttgaagcagtgggaagaatattctgtcttggcatgggttgatggaaatcacaatcttct

SEQ ID NO: 245678 - DNA, 120 bp, Artificial Sequence
  ENSG00000122417_15 (sequence is synthesized)
gacaaagctttctctggaagaggaaaactgtcttattcagctgaagtgtgaaaaccttcaacaaaaattagaacagatggacgcagaaaataaagagcttgagaagaagctggcaaacca

SEQ ID NO: 245679 - DNA, 120 bp, Artificial Sequence
  ENSG00000122417_16 (sequence is synthesized)
agaagaatgtcttaagcacagcaatcttaagtttaaagagaaatctgcagagtatacagcattggccagacaactggaagctgctttagaagaaggaagacaaaaggttgctgaagaaat

SEQ ID NO: 245680 - DNA, 120 bp, Artificial Sequence
  ENSG00000122417_17 (sequence is synthesized)
aagaaaaatgaagaacaaaatcaacttgtttgcaaaatgaacagtgatccagagactccatgaaatctatttttttaattcccaagtgtctaaaaagttgaaaacctaaaagattcaaga

SEQ ID NO: 245681 - DNA, 120 bp, Artificial Sequence
  ENSG00000122417_18 (sequence is synthesized)
gttaaatgatttttggcatgcacaatttgattttattgccatcaaaagtttcatgacaacttagtcagaacaaaacgtcgatcacctttaatttagcacaggccttccatttatttctaa

SEQ ID NO: 245682 - DNA, 120 bp, Artificial Sequence
  ENSG00000122417_19 (sequence is synthesized)
acttttttttaactcaccatttgactttctgatattgtaaaatgtgtgtgctgtttttttgtgtaattgaagcctctgaaaaaataaatgaggtgggttttgctgtaatgtccctagtac

SEQ ID NO: 245683 - DNA, 72 bp, Artificial Sequence
  ENSG00000122417_20 (sequence is synthesized)
aaaataaatgaggtgggttttgctgtaatgtccctagtacttggctaaagctagtaaaataaatagattaca

SEQ ID NO: 245684 - DNA, 70 bp, Artificial Sequence
  ENSG00000122417_21 (sequence is synthesized)
gacacaaacaaatggaaaacattccatgcttatgaataagatgaaacaagatcatgaaaatggctatact

SEQ ID NO: 245685 - DNA, 61 bp, Artificial Sequence
  ENSG00000122417_22 (sequence is synthesized)
ggaacagaacagaggcctcagaaataactccacacatctacaaccatctgctgtttgacat

SEQ ID NO: 245686 - DNA, 63 bp, Artificial Sequence
  ENSG00000122417_23 (sequence is synthesized)
ataccattcaggacataggcatggacgaatacttcatgactaaaacaccaaaagtaatggcaa

SEQ ID NO: 245687 - DNA, 120 bp, Artificial Sequence
  ENSG00000122417_24 (sequence is synthesized)
aagtgtgcaaagaatatgaacagacacttctcaagagaagacatttagtcagccaaaaaacatatgaaaaaaagctcatcactggtcattcagagaaatgcaaatcaaaactacagtgag

SEQ ID NO: 245688 - DNA, 68 bp, Artificial Sequence
  ENSG00000122417_25 (sequence is synthesized)
caaatcaaaactacagtgagataccatgtcacaccaattagaatggtgatcgcttttacactgttggt

SEQ ID NO: 245689 - DNA, 82 bp, Artificial Sequence
  ENSG00000122417_26 (sequence is synthesized)
aacaatgagaatacatggatcgtggggggctaggggagggataacattagaaattcctaatgtagatgacgggttgatgagt

SEQ ID NO: 245690 - DNA, 120 bp, Artificial Sequence
  ENSG00000122417_27 (sequence is synthesized)
gagaatacaaaattaaagcttagattcccatgtagaattactgagtcaaagaatatgaacattttgattgttcttgatatgctttgctacatttcttctgaaaagactacacttgctgct

SEQ ID NO: 245691 - DNA, 76 bp, Artificial Sequence
  ENSG00000122417_28 (sequence is synthesized)
aaccaacctgtaaaaaaaataaagatctgatgttttgttaaacctgataagttttgtactagtaaaattctagaat

SEQ ID NO: 245692 - DNA, 120 bp, Artificial Sequence
  ENSG00000122417_29 (sequence is synthesized)
agtaaaattctagaattctaagcatagatttaaacattgctgaaaaatgagtttgtgtgttttatgccttccaggggacagttaagtgggcagtatttatttaatatacctgcttcagcc

SEQ ID NO: 245693 - DNA, 120 bp, Artificial Sequence
  ENSG00000122417_30 (sequence is synthesized)
ccatttgaattgtaagcactctgaaagcatgtctcatagtcgtctgtatccctggtgtctcccacagtgccctgcttacctgcaggcctttttgtattttctgtccaagtaccctaatag

SEQ ID NO: 245694 - DNA, 120 bp, Artificial Sequence
  ENSG00000122417_31 (sequence is synthesized)
ggtggtgcagaatggatgtacagatctgtggatgacctcagcagcttaatccaaggcacccctcgggaagcctgaaatgtctttgaagtcttatgtattatcctaaaatccattgacatt

SEQ ID NO: 245695 - DNA, 120 bp, Artificial Sequence
  ENSG00000122417_32 (sequence is synthesized)
ttatattctaccctacaaaataagtatgtgttactatttttctttccaaattgttgagtaaaactcattgtattcatcctgtgactttgtactgcccagcctagctcattgttttttacc

SEQ ID NO: 245696 - DNA, 120 bp, Artificial Sequence
  ENSG00000122417_33 (sequence is synthesized)
tgcctcatttcctgagctgggcattgctcagtttcagaaggtatcaggtgtcattgaacacctgatatgaaggatgtaaaagttctctcttttctatctaggtgtctatattttaattgg

SEQ ID NO: 245697 - DNA, 120 bp, Artificial Sequence
  ENSG00000122417_34 (sequence is synthesized)
aggctagatgatatttgcaacctgtctttatctaaagcattgtcagtgaactcacctacttaggaattcatatgcaccttagttaaaaaaaatgtattgtggttttaaattttttcctca

SEQ ID NO: 245698 - DNA, 120 bp, Artificial Sequence
  ENSG00000122417_35 (sequence is synthesized)
accagtgtaatatgaagaattctttttattttttaagagattctaagaaaatgttcacattatcaaaactagaattctatcaacttttaagacatttaattattttggaataaaatgtga

SEQ ID NO: 245699 - DNA, 120 bp, Artificial Sequence
  ENSG00000122417_36 (sequence is synthesized)
atttttagacagaaaatggcaaaaactagtatgaaaatatatcatgttacatgtgaaattatgacagttgttaacctattaagttaatcatgttaaatatgtaataatttggggctaaat

SEQ ID NO: 245700 - DNA, 120 bp, Artificial Sequence
  ENSG00000122417_37 (sequence is synthesized)
gaatgtatattataaattatatcagtgaagatcaaccatgtgtgtgctttaattattaattttaaagagtgagctctaagaatgaacacatcagatgtgagtattattttaaaaaatcaa

SEQ ID NO: 245701 - DNA, 120 bp, Artificial Sequence
  ENSG00000122417_38 (sequence is synthesized)
aaagaattatctagttattgtatatatgtttttaatattatgactctggtcctttggaatgaatgctattattgcttatctgtatttttttccttttttctttagaaagcacaacatcag

SEQ ID NO: 245702 - DNA, 120 bp, Artificial Sequence
  ENSG00000122417_39 (sequence is synthesized)
gaagtgtgtttgaaagaagtacaaaatagtcttgagaagtcggaaaatcaaaatgagagtattaagaattatttacagtttcttaaaacttcttatgtaacaatgtttgaataaattgtc

SEQ ID NO: 245703 - DNA, 120 bp, Artificial Sequence
  ENSG00000122417_40 (sequence is synthesized)
aaatttattttctctaagtagtagatttttattatgagtctaaaatgtgattgggtaaaaaaataaatatactaccagttacattttatgatttatgagtggtagtattagaggttttta

SEQ ID NO: 245704 - DNA, 120 bp, Artificial Sequence
  ENSG00000122417_41 (sequence is synthesized)
tgtaaagatttttgaaacataatttatctaactgaaactttaaaataggatagttgttactattcctgtttgctggataattcttatttatctttggtttaatttcttttaaaattaaat

SEQ ID NO: 245705 - DNA, 120 bp, Artificial Sequence
  ENSG00000122417_42 (sequence is synthesized)
tggttgttagaatatttttctcacacatagacatggaagtcagattcattctttgtgatgtttgtagccaccattcaagtgaatttgtagtaagtcttggtcaatatgattttaaataat

SEQ ID NO: 245706 - DNA, 120 bp, Artificial Sequence
  ENSG00000122417_43 (sequence is synthesized)
taaatgtaaaatattctgaattttaatttttaataatggtgtaattacatactttctaaagctactaaatgtctcaatatactacacttaatattgtttcaagtatatgctgagttgcca

SEQ ID NO: 245707 - DNA, 120 bp, Artificial Sequence
  ENSG00000122417_44 (sequence is synthesized)
attgtttcaagtatatgctgagttgccattataatttctgttaggttttaagtatacaattttaaatcatcgctattaagtaccaactgctaatgacagatgaaaacgtggtcatgcatt

SEQ ID NO: 245708 - DNA, 120 bp, Artificial Sequence
  ENSG00000122417_45 (sequence is synthesized)
atttctttataaagaatagatattcaggctgtcttcaatttgtactctcttttattcgttttatactaatgattatctgatattattattattttagacattctagagccccttagttaa

SEQ ID NO: 245709 - DNA, 120 bp, Artificial Sequence
  ENSG00000122417_46 (sequence is synthesized)
ataaaagattaaaggggaacagcttatcccaccctttccatggccaactcatggggatgatcaaaataagcactcttaacatcaagaagctttaaaataaggtctttagtattgggataa

SEQ ID NO: 245710 - DNA, 120 bp, Artificial Sequence
  ENSG00000122417_47 (sequence is synthesized)
agttgtccaagttgaaaaagaacttgtttgctataatctcccactgtgtgtgccaaggcaggatactctaaaaggggatgacgtggtttacaaaggatcaagtaatagtgactcctcttg

SEQ ID NO: 245711 - DNA, 120 bp, Artificial Sequence
  ENSG00000122417_48 (sequence is synthesized)
gacaatgacttgagagctgttaattcagaggaacactcaggtcttaaaagatcactaaaaaaggcaggttgtgaactacacagttccagcctatgaacagaaatatctctttaagatgtt

SEQ ID NO: 245712 - DNA, 120 bp, Artificial Sequence
  ENSG00000122417_49 (sequence is synthesized)
ttatgctttttttctgatcagagatgggggcctggtcccctctgatcccctcacttttaagactgtcatatcattcacagatgcttactttctagtgatccagttggttcgtagtatttt

SEQ ID NO: 245713 - DNA, 120 bp, Artificial Sequence
  ENSG00000122417_50 (sequence is synthesized)
tcttaaaatagcaaaatacagagtgtcagaactggccacattttttacccaacaattgctaacaagattagtgtcattttaaaaaaaatcttagtactcatcatactaaaaacatgcttg

SEQ ID NO: 245714 - DNA, 120 bp, Artificial Sequence
  ENSG00000122417_51 (sequence is synthesized)
acccttgcagccctttctttacctcctaatgcaaagggagccttaaatgcccacatgaaaggaaagcaaagctcttgagttttactcactaaactgtaagctccttaagggccgaaatgt

SEQ ID NO: 245715 - DNA, 120 bp, Artificial Sequence
  ENSG00000122417_52 (sequence is synthesized)
atcttagtcatataaatatctgggcactcagttgatgtttgtggatagatggacagatgttgaaagaggcaggtattcgtactcctgttttagatatgaaaaatgtaagcaaaaaggatt

SEQ ID NO: 245716 - DNA, 120 bp, Artificial Sequence
  ENSG00000122417_53 (sequence is synthesized)
aattaccatggctgtggtatgaaacttgtttaaagttggcatttaaattcaagtctgcaacattaaagttctgtgtacagagccgttttcccactgtagcagcagcgcagcagcagcgct

SEQ ID NO: 245717 - DNA, 120 bp, Artificial Sequence
  ENSG00000122417_54 (sequence is synthesized)
gctatgattgattaagcacttgctatgtgccagagttaataattgtgataatatattaactcatttaattttcaggaaactaagacatggaaaggttaggtaacttgcccaaggtcgcac

SEQ ID NO: 245718 - DNA, 120 bp, Artificial Sequence
  ENSG00000122417_55 (sequence is synthesized)
agctagtaagtggcagacatccagagtctctgctctgctcttaactctcaccatactacctctgtatccatttcataaataaagatagtagtttcttataacagtaatgcatttgtctta

SEQ ID NO: 245719 - DNA, 120 bp, Artificial Sequence
  ENSG00000122417_56 (sequence is synthesized)
aggggaaatctaaatttccgattctaggatttcctgttttgtctataatataaattatttgaatcaaatacagcattcttttaagagtatcttttccaaatctagtatttatttattaaa

SEQ ID NO: 245720 - DNA, 120 bp, Artificial Sequence
  ENSG00000122417_57 (sequence is synthesized)
atatatttaatctgattacaagtgtactcatctagcagaattcaactagtttttttgaatcttaatgaaagcaattaaaaatgaaaacctggccgggcgcaatggatcatgcctgtaatc

SEQ ID NO: 245721 - DNA, 120 bp, Artificial Sequence
  ENSG00000122417_58 (sequence is synthesized)
gaaaaaatgcaaaaattagccagatgtggtagcgtgtgcctgttgtcccagctacttggaaggctgtggtagaagaatcacttgaacctgggaggcgaaggtcacagtgagccgagataa

SEQ ID NO: 245722 - DNA, 120 bp, Artificial Sequence
  ENSG00000122417_59 (sequence is synthesized)
cgagactccatctcaaaaaagaaaaagacaaaaaaaatgaaaacctcatctgttaagaatttgtaaaataaagctatttaagataaatgaaaatataatatgtgatatcagaaatgtagt

SEQ ID NO: 245723 - DNA, 120 bp, Artificial Sequence
  ENSG00000122417_60 (sequence is synthesized)
agataaatgaaaatataatatgtgatatcagaaatgtagttaatgaatgtgaaatcactgtcatttggtatattactatatagcaaatacttgtcatacttctttagagtggggaataca

SEQ ID NO: 245724 - DNA, 120 bp, Artificial Sequence
  ENSG00000122417_61 (sequence is synthesized)
cttgttatttacatgaaatattgccccccgtcaaatggcaatcttagtatataccattactgtcagtatggatagcttagtccagcttctggttgaatttgttatgaatgaaaataatat

SEQ ID NO: 245725 - DNA, 120 bp, Artificial Sequence
  ENSG00000122417_62 (sequence is synthesized)
tttatcatctataatcacacttgactttctgcccatggtttttaataagggacaggtgtcgtttatagatagaatgttcttaggctcattactttaagccagttgtgcttaagaacacac

SEQ ID NO: 245726 - DNA, 120 bp, Artificial Sequence
  ENSG00000122417_63 (sequence is synthesized)
agatttttgacatagcctctaagatgccatcagttgttaatgagccgttatgttttacaaagaaagagaaaagctgccaattaaagagtttccatatcacttggaattttatttataaat

SEQ ID NO: 245727 - DNA, 120 bp, Artificial Sequence
  ENSG00000122417_64 (sequence is synthesized)
attgaaaatgctccttcaaacttaactatacgtacatctttaatccaaataacttttgtgattacgtacaagtaaaatataagtaaaataaagtattcttaaaatttgcttacactcaaa

SEQ ID NO: 245728 - DNA, 120 bp, Artificial Sequence
  ENSG00000122417_65 (sequence is synthesized)
cggcggcggaacggaggcttcacgagtgtcaggagagtctgcagtgctgcaaggggaagtgtgcagaccaggaacacaccattagggagcttcagggccagaatatggatcatgtagcag

SEQ ID NO: 245729 - DNA, 120 bp, Artificial Sequence
  ENSG00000122417_66 (sequence is synthesized)
tgatttttcatatctaggcacatttccaagtttttttgtcagtaaatttagaaagttttaaaaataatatgtcctgtgtaaatcttaataaggatgttcataattattagtcactagctt

SEQ ID NO: 245730 - DNA, 120 bp, Artificial Sequence
  ENSG00000122417_67 (sequence is synthesized)
tgtgaaattcctaaattttagatggtattgcatgaaataaaaaataattattttatcaactttgttaatacatgagttatgtttttataataattctgtagcactggagtataaatgtat

SEQ ID NO: 245731 - DNA, 120 bp, Artificial Sequence
  ENSG00000122417_68 (sequence is synthesized)
aaagccttccttagttctagaatttggtggttttaaaatacacagttgttgacatgggaaatacatatttaaggtaaatcttaatatttgtggcctaactaaaggtttgggtacaaattt

SEQ ID NO: 245732 - DNA, 120 bp, Artificial Sequence
  ENSG00000122417_69 (sequence is synthesized)
caacataaaaatgctgtctctgtttaataccaatctaggaaggatttatggaattgaattactttaaaaatcatttccactttatagttaatttatatttactgtggaaaatttatagaa

SEQ ID NO: 245733 - DNA, 120 bp, Artificial Sequence
  ENSG00000122417_70 (sequence is synthesized)
actttgcttctcaaaaaaatatgtattttatttacagtttcgacttcacagatactcaattattaatcagtatttttaggtgaaacagaaaaccataagagaaaccctaggtatccaaaa

SEQ ID NO: 245734 - DNA, 120 bp, Artificial Sequence
  ENSG00000122417_71 (sequence is synthesized)
ataggagattaatactgcttaaaattttcctatttcaacttaacaaaataaatatctttcttcaataaggtgttgttcaaagtgttttaatagccatcatcctgaattttttttagttgg

SEQ ID NO: 245735 - DNA, 120 bp, Artificial Sequence
  ENSG00000122417_72 (sequence is synthesized)
ttattttccaatacaggcaacataacttctttaaatttaaccaggaatttaaaacttccattttaacaatataacattttcttggtgtctttctgtgtaagagtagtaacatttatacct

SEQ ID NO: 245736 - DNA, 120 bp, Artificial Sequence
  ENSG00000122417_73 (sequence is synthesized)
ttctctagttcatacttaggaaagggctagtcttagcctctgtaagagtttgttttccaaggaaataatgtttcttccaggctggaaatgttgtttgtttatgtgaatgttttttcactt

SEQ ID NO: 245737 - DNA, 120 bp, Artificial Sequence
  ENSG00000122417_74 (sequence is synthesized)
ttttgttaatatttggaaaatagcataaatgtttaatttttctgatgcaagagcagactttaaatagctcaaaaaatggttatcaatcataagtatacaaacctaagtatctctcatttt

SEQ ID NO: 245738 - DNA, 120 bp, Artificial Sequence
  ENSG00000122417_75 (sequence is synthesized)
taatctcaccctttttttctggttataaatgttttacgtctacaaaagcaaagccaatatctgctaaatgcatttttgaagaaaaataatatcttttaaaaaacgatcatttccttttat

SEQ ID NO: 245739 - DNA, 120 bp, Artificial Sequence
  ENSG00000122417_76 (sequence is synthesized)
agagcaagcgtcctccagttatacagacataaagatagctcactgaatgcacaacttactgctttcatggaattacttttcacctatttttagcaggccagcgaataaaccatttcatgt

SEQ ID NO: 245740 - DNA, 120 bp, Artificial Sequence
  ENSG00000122417_77 (sequence is synthesized)
attcttcctgtcattgttatttgcatgctgcttggttttataaagttagccaatattatccaagttgtgaaattcctaattcttattttatatttgctcaagaatcttaagaagaaggta

SEQ ID NO: 245741 - DNA, 120 bp, Artificial Sequence
  ENSG00000122420_0 (sequence is synthesized)
actcgcgcgccccatccctcccaggctgccagcgcagctaggtgcagagggatcccaggagccgcgcgcgccccgcagtttccgcgctaagggaacgagtgcgcggaggggacgagcggc

SEQ ID NO: 245742 - DNA, 120 bp, Artificial Sequence
  ENSG00000122420_1 (sequence is synthesized)
tggaccacagccggcgcccgatcaggatctccgcgctgggatcggtggaacttgaggcagcggcggcgcggggcgccatggcacaccgagcggctccgtcttctgctcctcagagagccc

SEQ ID NO: 245743 - DNA, 120 bp, Artificial Sequence
  ENSG00000122420_2 (sequence is synthesized)
ggctggcggcctgggatgacaagatgtctggactgcaatcctgcacagttttgagagggagatgacttgagtggttggcttttatctccacaacaatgtccatgaacaattccaaacagc

SEQ ID NO: 245744 - DNA, 120 bp, Artificial Sequence
  ENSG00000122420_3 (sequence is synthesized)
tagtgtctcctgcagctgcgcttctttcaaacacaacctgccagacggaaaaccggctttccgtatttttttcagtaatcttcatgacagtgggaatcttgtcaaacagccttgccatcg

SEQ ID NO: 245745 - DNA, 120 bp, Artificial Sequence
  ENSG00000122420_4 (sequence is synthesized)
ccattctcatgaaggcatatcagagatttagacagaagtccaaggcatcgtttctgcttttggccagtggcctggtaatcactgatttctttggccatctcatcaatggagccatagcag

SEQ ID NO: 245746 - DNA, 120 bp, Artificial Sequence
  ENSG00000122420_5 (sequence is synthesized)
tatttgtatatgcttctgataaagaatggatccgctttgaccaatcaaatgtcctttgcagtatttttggtatctgcatggtgttttctggtctgtgcccacttcttctaggcagtgtga

SEQ ID NO: 245747 - DNA, 120 bp, Artificial Sequence
  ENSG00000122420_6 (sequence is synthesized)
tggccattgagcggtgtattggagtcacaaaaccaatatttcattctacgaaaattacatccaaacatgtgaaaatgatgttaagtggtgtgtgcttgtttgctgttttcatagctttgc

SEQ ID NO: 245748 - DNA, 120 bp, Artificial Sequence
  ENSG00000122420_7 (sequence is synthesized)
tgcccatccttggacatcgagactataaaattcaggcgtcgaggacctggtgtttctacaacacagaagacatcaaagactgggaagatagattttatcttctacttttttcttttctgg

SEQ ID NO: 245749 - DNA, 120 bp, Artificial Sequence
  ENSG00000122420_8 (sequence is synthesized)
ggctcttagcccttggtgtttcattgttgtgcaatgcaatcacaggaattacacttttaagagttaaatttaaaagtcagcagcacagacaaggcagatctcatcatttggaaatggtaa

SEQ ID NO: 245750 - DNA, 120 bp, Artificial Sequence
  ENSG00000122420_9 (sequence is synthesized)
tccagctcctggcgataatgtgtgtctcctgtatttgttggagcccatttctggttacaatggccaacattggaataaatggaaatcattctctggaaacctgtgaaacaacactttttg

SEQ ID NO: 245751 - DNA, 120 bp, Artificial Sequence
  ENSG00000122420_10 (sequence is synthesized)
ctctccgaatggcaacatggaatcaaatcttagatccttgggtatatattcttctacgaaaggctgtccttaagaatctctataagcttgccagtcaatgctgtggagtgcatgtcatca

SEQ ID NO: 245752 - DNA, 120 bp, Artificial Sequence
  ENSG00000122420_11 (sequence is synthesized)
gcttacatatttgggagcttagttccattaaaaattccttaaaggttgctgctatttctgagtcaccagttgcagagaaatcagcaagcacctagcttaataggacagtaaatctgtgtg

SEQ ID NO: 245753 - DNA, 120 bp, Artificial Sequence
  ENSG00000122420_12 (sequence is synthesized)
gggctagaacaaaattaagacatgtttggcaatatttcagttagttaaatacctgtagcctaactggaaaattcaggcttcatcatgtagtttgaagatactattgtcagattcaggttt

SEQ ID NO: 245754 - DNA, 120 bp, Artificial Sequence
  ENSG00000122420_13 (sequence is synthesized)
tgaaatttgtcaaataaacaggataactgtacatttttcacttgtttttgccaatgggaggtagacacaataaaataatgccatgggagtcacactgaaagcaattttgagcttatctgt

SEQ ID NO: 245755 - DNA, 120 bp, Artificial Sequence
  ENSG00000122420_14 (sequence is synthesized)
cttatttatgctttgagtgaatcatctgttgaggtctaatgcctttacttggcctatttgccagagaacatcttaatgcagcctgcatagtgaaatggttattttgagatcaccgctctg

SEQ ID NO: 245756 - DNA, 120 bp, Artificial Sequence
  ENSG00000122420_15 (sequence is synthesized)
tagctaacccttataaactaggctcagtaaaataaagcactcttattttttgatctggcctattttgcccctcattgtgtagcctcaattaacacatgcatggtcatgacacccagaatt

SEQ ID NO: 245757 - DNA, 120 bp, Artificial Sequence
  ENSG00000122420_16 (sequence is synthesized)
catgatggtttgttataacaacctctgcatattccaggtctggcagacaggttgcctgaccctgcaatcctatctagaatgggcccattcttgtcatatttgacaaataggactgcctac

SEQ ID NO: 245758 - DNA, 120 bp, Artificial Sequence
  ENSG00000122420_17 (sequence is synthesized)
atttattattatgaaggtcgattgttgttggaagtgttttttcatgtcatagattagcaattttcaaataattattttttctctgaaaattttgtgtgtgattgcacaataaataatttt

SEQ ID NO: 245759 - DNA, 120 bp, Artificial Sequence
  ENSG00000122420_18 (sequence is synthesized)
tagagaaacaaaggctctttctcagcacattgatgggcaactagaattacagcagtttcaaaactctaccatggataatgcaaacaaaccgaagctacatgccaatgataggtgcaaaga

SEQ ID NO: 245760 - DNA, 120 bp, Artificial Sequence
  ENSG00000122420_19 (sequence is synthesized)
atattggcaaaaggtgctttaccttgagccattatttgtgtcagagaacaaaagaaacagaatcaatatataaaattcaaagactatctgcagctagtgtgtttcttctttacacacata

SEQ ID NO: 245761 - DNA, 120 bp, Artificial Sequence
  ENSG00000122420_20 (sequence is synthesized)
tacacacagacatcagaaaattctgttgagagcaggttcattaaatttgtaagatggcatattctaaagcctgtgctaccagtactaagaggggaagactggcaatttgccaagcacttg

SEQ ID NO: 245762 - DNA, 120 bp, Artificial Sequence
  ENSG00000122420_21 (sequence is synthesized)
gggattattataacaattaactaggagatcaagagataataatctctccccaaattttccaataataattgagactttttctttgcttgtttgtgtaattcaaccaaaagaatttcaata

SEQ ID NO: 245763 - DNA, 120 bp, Artificial Sequence
  ENSG00000122420_22 (sequence is synthesized)
aattagggaaggtagtcctgctttataataggaaaatgtatttctgtataagagttctttgctttcattaacttggattcatttaaaaattaatcttccctgttaggctgatttcagatt

SEQ ID NO: 245764 - DNA, 120 bp, Artificial Sequence
  ENSG00000122420_23 (sequence is synthesized)
ctctaggaaatctgtgtaagtaaccagaagacctttcagatggtttatttgctttcagcagagaatttatttcatacagttacttaagagtgttgatgtcttgtgaacagagatataagg

SEQ ID NO: 245765 - DNA, 120 bp, Artificial Sequence
  ENSG00000122420_24 (sequence is synthesized)
aaccattctccatccttccttatcatgctgggtacaatgcttctatgaatatttccatgtattttgactggggagaggcatggagaagaaactctcattcaggggctccaggatccttct

SEQ ID NO: 245766 - DNA, 120 bp, Artificial Sequence
  ENSG00000122420_25 (sequence is synthesized)
ccttgaggcttctaaataaatggcagaattcttgctgtattgccatgatgtcaccctggccatgtgtactgacttgaggagatcttgcaacatggccatgtgcaaggctttaaggagtga

SEQ ID NO: 245767 - DNA, 120 bp, Artificial Sequence
  ENSG00000122420_26 (sequence is synthesized)
gagagatgtgtacatatcttaggagggttatctatgttatctgagtatatgtttgggtaaccaaattggtcttaaaaatgatgttaacccaagaagtagacatcaaaaattaaaaaaaaa

SEQ ID NO: 245768 - DNA, 120 bp, Artificial Sequence
  ENSG00000122420_27 (sequence is synthesized)
aaaaggaatgtgttttcattgttttaagtttttcttctgagtaaaacaaaattatagaaaacaaatgcaacaatgtgcacatctgacttaagagtttcatttctgttattatatgtgttg

SEQ ID NO: 245769 - DNA, 120 bp, Artificial Sequence
  ENSG00000122420_28 (sequence is synthesized)
catgtagcttggcgatttactgtgtaatgaataatagactggaacatctaccaataactttcacataaatgttcaaaatagaagtgtattttttcaggtttctggaaataaatagtaaaa

SEQ ID NO: 245770 - DNA, 120 bp, Artificial Sequence
  ENSG00000122420_29 (sequence is synthesized)
taaatggcacaaatagtttcaataaatttaccaatttgagtgttttcagctctatttcaaaactcataactaatcttcagaattactgaatttccttttgaactgggtaaggcattatcc

SEQ ID NO: 245771 - DNA, 120 bp, Artificial Sequence
  ENSG00000122420_30 (sequence is synthesized)
aagcaacttcacatactatttaaacatgatttctcggtaattatatattctgggcaaataacataaacatgtcaggatttttacaggtgttagtgaatttttctaaaaagatgagacaaa

SEQ ID NO: 245772 - DNA, 120 bp, Artificial Sequence
  ENSG00000122420_31 (sequence is synthesized)
agcaaaaatatcacacataggtttttatgactatgaatacaaagataatgctgattcacaattagctatgggtaagtccaaaacatcagaccttttactgatgggttaactaggtgaaag

SEQ ID NO: 245773 - DNA, 120 bp, Artificial Sequence
  ENSG00000122420_32 (sequence is synthesized)
aaatgggcccttatttttttttttccctagaggcagaaagttacttctaatgatctatatagctaaaacgaaaaatacctgaaagttaatacatacatatgtagatatattttgttatgt

SEQ ID NO: 245774 - DNA, 120 bp, Artificial Sequence
  ENSG00000122420_33 (sequence is synthesized)
gataaatgtttcttgtttgcacacttttggacttgagaaatctgcttttgttttgtgcctactctgagtttagaacccaaataagaggacttgttaaatatagagtgtactttttgttaa

SEQ ID NO: 245775 - DNA, 120 bp, Artificial Sequence
  ENSG00000122420_34 (sequence is synthesized)
aactattgctagcttcacctgtataccatcattgttccaaattaaataactgttttgggtcagaatataaatgctgggaatatacattttattacttcttaatctgggtgtcaaagattt

SEQ ID NO: 245776 - DNA, 120 bp, Artificial Sequence
  ENSG00000122420_35 (sequence is synthesized)
taccacctggtaaataatgttggacttcaacttgttactggcacattttaatagtagatgaaacatgtttttcttggttatgtgaataaatgtatgttgtgctcttcatacttgttggat

SEQ ID NO: 245777 - DNA, 120 bp, Artificial Sequence
  ENSG00000122420_36 (sequence is synthesized)
tgtatagagattaaatagtgatatgtatattttgttgtttgctttggtatgcaactcatgtaattttagtgctttgactagcttaaaacttcaaacaagtaattttataataaagttgga

SEQ ID NO: 245778 - DNA, 120 bp, Artificial Sequence
  ENSG00000122420_37 (sequence is synthesized)
ctaatgtttttcaagagtgattatttttagaaggaccatataaaacttgaaacgcttgaacctaaactcccgttttatctgctactggatgagaagaatttcaacttaatttccattatt

SEQ ID NO: 245779 - DNA, 120 bp, Artificial Sequence
  ENSG00000122420_38 (sequence is synthesized)
accttttgctctcccaccctgcccaatcttctgtgatatcttctctcttttacctgtgtctcaacttacctaggcaagtcataatttagatagaaatctgatttcccaaacctccaggtt

SEQ ID NO: 245780 - DNA, 120 bp, Artificial Sequence
  ENSG00000122420_39 (sequence is synthesized)
tagatatatcattcagaaaagcctcaatgtgtctgtaataagaaacaatctccaaattacagcgccataaacttcacaaaagtttgtatctcccacatggttcctgtccactctgaaggg

SEQ ID NO: 245781 - DNA, 120 bp, Artificial Sequence
  ENSG00000122420_40 (sequence is synthesized)
gagctctgctgttgtaatcactcagagaactcaggtgaaaaaacagccaccattatatgtggctgtttctcaaactacagagcatggtgaatcacacacaggctgttagaatatccatct

SEQ ID NO: 245782 - DNA, 120 bp, Artificial Sequence
  ENSG00000122420_41 (sequence is synthesized)
ggaggcaacacacatttgcatacacttctccagctaacataaataatgtggctttactaacttcccagggggcagctaagtgcaatactatatgttaggaaaacggaaactaatttgtag

SEQ ID NO: 245783 - DNA, 120 bp, Artificial Sequence
  ENSG00000122420_42 (sequence is synthesized)
acagcactaatgatttccacattaggtaaaaaaaattttcattcttgtcttcctaatagcatttaaacagaaacgatttttaaaagttgttttaaacatttagaaacatcatggcataga

SEQ ID NO: 245784 - DNA, 120 bp, Artificial Sequence
  ENSG00000122420_43 (sequence is synthesized)
aacatttaggactcactctttgtaagtactgacaagcatggtcttgtaatctgtaaagataaggtagaataaatgaactaaaagaaattttagatgactaaaaggactatataatagaaa

SEQ ID NO: 245785 - DNA, 120 bp, Artificial Sequence
  ENSG00000122420_44 (sequence is synthesized)
gagggaaatcttggttcttaaaaattcaggcaattgaaacatttctgtataataccaagcattgttgcagtattgtctgaaatggttgcttttctaataaatgaaaatgactaaaatgta

SEQ ID NO: 245786 - DNA, 120 bp, Artificial Sequence
  ENSG00000122420_45 (sequence is synthesized)
catgaggaaatgtagctgtatgcctggagggatctacagccagaccagccaactcagcctggttaagaacacctgttgaagaactagtgcaggcgtttggaggacataggacactctggc

SEQ ID NO: 245787 - DNA, 120 bp, Artificial Sequence
  ENSG00000122420_46 (sequence is synthesized)
gtatttgttggagcccatttctgggatacagaataattttgaatgggaaagagaaatataaagtatatgaagagcaaagtgatttcttacatagcgataagacactcaacgagaaatgac

SEQ ID NO: 245788 - DNA, 120 bp, Artificial Sequence
  ENSG00000122420_47 (sequence is synthesized)
agaaaaacaaggtgtggatggagaggcaacatgaaagtggatcaaacaacttatacatgggtgctggctcagacgtgacacctgaggctccagaactggaagtttatgccgtcaagttac

SEQ ID NO: 245789 - DNA, 120 bp, Artificial Sequence
  ENSG00000122432_0 (sequence is synthesized)
cagaggggccgattagggagagagaccagaaatgagtggaatgctatcttaagccaaaaaaaactattataatttttatttagtactacttaaatgaagaaagataaaaaaagaaacaaa

SEQ ID NO: 245790 - DNA, 120 bp, Artificial Sequence
  ENSG00000122432_1 (sequence is synthesized)
attccaattgataattatcccattcagacattagtgaatatgtcactcaatccaagtcgaccttcctcatcagagttggtggaacttcatgttttttatgtccctgaaggatcatggaac

SEQ ID NO: 245791 - DNA, 120 bp, Artificial Sequence
  ENSG00000122432_2 (sequence is synthesized)
tataagctaaataccatttcaacagaagttgttaacaaattcatttcagctggatttctaagagtatctcctcaacttactttacgagccctgagggagcgtcttggtgagttcctgggt

SEQ ID NO: 245792 - DNA, 120 bp, Artificial Sequence
  ENSG00000122432_3 (sequence is synthesized)
gaagatgctattgcagaaaaatttttatttctgaaatgcattggaaataatttagctgtggtgaaggaaaagcaagaatcagaactgaaactcaaatcatttgctcctccatatgctctt

SEQ ID NO: 245793 - DNA, 120 bp, Artificial Sequence
  ENSG00000122432_4 (sequence is synthesized)
caaccagaattatatttgcttcctgtaatggaccatttaggaaatgtttattcaccatcaacagttattttagatgagcggcagactaataatggtgttaatgaggctgatggaacaatc

SEQ ID NO: 245794 - DNA, 120 bp, Artificial Sequence
  ENSG00000122432_5 (sequence is synthesized)
cacagaccaattagtgtaactttgttcaaggaggaacttggaagagatcccagtttgttagaaaacactttgaaagagcttcctaacaagaatcaggaagaagctgggggaaaagccact

SEQ ID NO: 245795 - DNA, 120 bp, Artificial Sequence
  ENSG00000122432_6 (sequence is synthesized)
gcagaaaaaagccaaattgcaaaaaatcaaattggaaattctgagttgccaggatcattggaagattcaaataatgattgctttggcactaaaaaaagtcagtgtctttgggaaaatgaa

SEQ ID NO: 245796 - DNA, 120 bp, Artificial Sequence
  ENSG00000122432_7 (sequence is synthesized)
gatgatacagctatcagtagaagacaggacaatcagacagctgaaaaagagtacatcaccctaccagatcacccttcacttccttgtcaacctgttctttcttcaggaataactgatata

SEQ ID NO: 245797 - DNA, 120 bp, Artificial Sequence
  ENSG00000122432_8 (sequence is synthesized)
tctttattacaaactgaaagagagaagattatcaaacaaatgaaacaagtaaaggaagaaagaaggtatctggaaagaaatagagaagaactagtaaaaacggttgaaaagctatttgaa

SEQ ID NO: 245798 - DNA, 120 bp, Artificial Sequence
  ENSG00000122432_9 (sequence is synthesized)
caaagcaaattaaaacgatatcatgcctacaatggttggaagaaaaaatacttggaaacaaagaaagtcacagcatcaatggaggaggttttaacaaaacttcgagaagatttggaactc

SEQ ID NO: 245799 - DNA, 120 bp, Artificial Sequence
  ENSG00000122432_10 (sequence is synthesized)
tactataaaaaactgctcatgcaacttgaagccagggagatcaagatgagaccaaagaatctggcaaacatcacagactccaagaattacctaataatccagatcactgaggtacagcat

SEQ ID NO: 245800 - DNA, 120 bp, Artificial Sequence
  ENSG00000122432_11 (sequence is synthesized)
gcaattgaccagcttaagagaaaactagatactgacaaaatgaaactcatagtagaagttaagatgagaaaacaagcagtttcagatttacgaacattgaaaactgaactggcacagaaa

SEQ ID NO: 245801 - DNA, 120 bp, Artificial Sequence
  ENSG00000122432_12 (sequence is synthesized)
aatacatctctacaatctcaattaggtatgttaatttaaaacttttatttgtaaaaaaatttaaatatgtatttgaacagatttgtttaaccattattctccttggcaatgttttataaa

SEQ ID NO: 245802 - DNA, 120 bp, Artificial Sequence
  ENSG00000122432_13 (sequence is synthesized)
aagcacaaggtttctctttctccactttccatgtgggtattacaaaatgtttcaggaaatattagatgtaatataaagcaaaatgatgaatggttatttttaacattccaagtcctttac

SEQ ID NO: 245803 - DNA, 120 bp, Artificial Sequence
  ENSG00000122432_14 (sequence is synthesized)
atattaatgaatactaatatatttgcatgaaaatacagacttcatttaacttaatttgttcattatatcttaattaaaagaaatctggaaatataaaagaatgggggtattgaagttgca

SEQ ID NO: 245804 - DNA, 120 bp, Artificial Sequence
  ENSG00000122432_15 (sequence is synthesized)
tgcattctgagctatgatagagataagcatctaagaatttaaattttttaattcatttattttagaaatatgaagacaacagtgatccaacatatactatgaaaatggtttttactctgt

SEQ ID NO: 245805 - DNA, 120 bp, Artificial Sequence
  ENSG00000122432_16 (sequence is synthesized)
cacaaacaattgtgtaaataggaaatgtaatattctcataacagatggttcaatcatcatgtattccaatttacaggggcaaaatgtgcagggaagccaggatttatgtaaatctagagt

SEQ ID NO: 245806 - DNA, 120 bp, Artificial Sequence
  ENSG00000122432_17 (sequence is synthesized)
tcaaagatacagatttttaatctgtaattaggaactaataagggcagcacaatgttgttcttaattccctggagaaagaaaacagactttattacatttagaaaacttatttgtataaaa

SEQ ID NO: 245807 - DNA, 120 bp, Artificial Sequence
  ENSG00000122432_18 (sequence is synthesized)
ttgatcttttagaaagagaactagttgagaagctaatcagtgtctttagatcattaaaagcacaatgcagctcatgcctgtaatcccagctctttaggaagccaaggcaggaggagtgct

SEQ ID NO: 245808 - DNA, 90 bp, Artificial Sequence
  ENSG00000122432_19 (sequence is synthesized)
aaagatacattgcagatgtagaaagaaaaatttaaccatgtaagcaagctagccaagaaataaattatatatgtccataaatgaagaaat

SEQ ID NO: 245809 - DNA, 120 bp, Artificial Sequence
  ENSG00000122432_20 (sequence is synthesized)
agccaagaaataaattatatatgtccataaatgaagaaatgaataattagaagtgtgacagtgaacagaatcaagttcaactgcaagttattcctattattaaaaattttacaaatgagc

SEQ ID NO: 245810 - DNA, 120 bp, Artificial Sequence
  ENSG00000122432_21 (sequence is synthesized)
ctcataaaaataatgtagttggaaaatattaggtagttctaacttaccaattcaaaatattactgttacattcttctattttgtgaatacatttaatcttctggattctttttaattctc

SEQ ID NO: 245811 - DNA, 120 bp, Artificial Sequence
  ENSG00000122432_22 (sequence is synthesized)
actcactgtccaaagatttagttcaagtacctcagagaacataaatactatatggagtcaggaagcagaaaaattattttcatcagtttgatgaacctaaaggggagacactacattgta

SEQ ID NO: 245812 - DNA, 120 bp, Artificial Sequence
  ENSG00000122432_23 (sequence is synthesized)
acagctgaaaaagagtacatcaccctaccagatcacccttcacttccttgtcaacctgttctttcttcaggaataactgatatatctttattacaaactgaaacctacaatggttggaag

SEQ ID NO: 245813 - DNA, 120 bp, Artificial Sequence
  ENSG00000122432_24 (sequence is synthesized)
ttatgatgaatcagccaagtcaaaagggagcattggctgctgcaatacattctgaccagatctgactttgttcatcataagacatcacaaagaggaagtcacaagcatctgcgattccag

SEQ ID NO: 245814 - DNA, 120 bp, Artificial Sequence
  ENSG00000122432_25 (sequence is synthesized)
tataattatagcatcttctgtctatgttctttggagaccaagctacatcaaaggttacctgtggaaaaaaatcttactattttatgtaatatgatcacgtgtgcatattacgtcagattt

SEQ ID NO: 245815 - DNA, 120 bp, Artificial Sequence
  ENSG00000122432_26 (sequence is synthesized)
ttaaaattatatatattttttaccttatactacacaaggaaaaggaactgcttacagtatatgaatgtagggtttgacacacatagaacttgaaccattctaagaaatattttttgctta

SEQ ID NO: 245816 - DNA, 120 bp, Artificial Sequence
  ENSG00000122432_27 (sequence is synthesized)
gcctggaggagggggaggagaaggggcggagcagtcggtgggcgcggcggctgctggaggctagcgcgacccgactcttaagttttcttttcctctccagaggggccgattagggagagg

SEQ ID NO: 245817 - DNA, 120 bp, Artificial Sequence
  ENSG00000122432_28 (sequence is synthesized)
agattgtgaagaagccaaggtgctggctgaagattacacctgtctgctcggttacccatttactctggagaattaatgcttattgtactttttaaaataaaacttatttttgtgtttccg

SEQ ID NO: 245818 - DNA, 120 bp, Artificial Sequence
  ENSG00000122432_29 (sequence is synthesized)
gtagggtctaaccaaacaaaataggctcagccagtaggtctttctttcatccacggaaatatgtgtgttatgtcacagcactaagggcagatgtttcctatttcttttcgggtagtcaat

SEQ ID NO: 245819 - DNA, 120 bp, Artificial Sequence
  ENSG00000122432_30 (sequence is synthesized)
ctccgaatgcgctgatgttttccattaatgttaataattttatcattaatggatttcaaattttttattagggaagcatgtgtaattgcactggtcaacaaaatctaatttatttactca

SEQ ID NO: 245820 - DNA, 120 bp, Artificial Sequence
  ENSG00000122432_31 (sequence is synthesized)
ttttcttttcctctccagaggggccgattagggagaggcgtgtctctctgtgacccgagtttggccaacaggcattttcagttccacccccaacccccagccccgctgacccgaggcgga

SEQ ID NO: 245821 - DNA, 120 bp, Artificial Sequence
  ENSG00000122432_32 (sequence is synthesized)
attccccaaaccacagtattaaactttttgcaggtgctgagggctagcaatcatcagaactgtaatagggagaaaatatacaaaggataaagattccacaggggatcaccccaatggaac

SEQ ID NO: 245822 - DNA, 120 bp, Artificial Sequence
  ENSG00000122435_0 (sequence is synthesized)
agaattatggcgacctccgcgacgtcgccgcacgcgcctggttttccagctgagggtagatgcggttactatgtggaaaagaagaaacggttctgcaggatggtggtggccgcagggaaa

SEQ ID NO: 245823 - DNA, 120 bp, Artificial Sequence
  ENSG00000122435_1 (sequence is synthesized)
agattttgtggtgaacacgctggagccgcggaggaagaagatgctcggaaaagaatcctgtgtcctttagatccaaaacacacagtatatgaagatcaactagcaaagcatttgaaaaaa

SEQ ID NO: 245824 - DNA, 120 bp, Artificial Sequence
  ENSG00000122435_2 (sequence is synthesized)
tgtaactcaagagagaaaccaaaacctgatttctatattcaagatattaatgcaggcttaagagatgaaacagaaatacctgaacaattagttccaatttcttctctatctgaagagcag

SEQ ID NO: 245825 - DNA, 120 bp, Artificial Sequence
  ENSG00000122435_3 (sequence is synthesized)
ttggaaaagttaattaagaaattgagaaaagcaagtgaaggcttgaattctacacttaaagatcatattatgtcccatccagcattacacgatgcacttaatgaccctaaaaatggcgat

SEQ ID NO: 245826 - DNA, 120 bp, Artificial Sequence
  ENSG00000122435_4 (sequence is synthesized)
tctgcaaccaagcacctgaaacagcaggcttctattttaggtaacattgaaaatttaaagttacttggtccaagaagatgctttgttgagtttggagcgggaaagggaaaattatctcat

SEQ ID NO: 245827 - DNA, 120 bp, Artificial Sequence
  ENSG00000122435_5 (sequence is synthesized)
tgggttgatattgccttaaaagatgctgaaaaagttcacttcatcctagtggaaaaggtgaccacaagattcaaggtggatggaaaacacagaaagaaaaattcagtgtttgaaagactt

SEQ ID NO: 245828 - DNA, 120 bp, Artificial Sequence
  ENSG00000122435_6 (sequence is synthesized)
caaattgatattcaacacttgtgtttgaacaagattcctgtgctaagagaagaaaaactacctgtggtaggaattggaaagcatctgtgtggtatggcaacagatcttgcattacgatgt

SEQ ID NO: 245829 - DNA, 120 bp, Artificial Sequence
  ENSG00000122435_7 (sequence is synthesized)
ttggttgaaacctatgctgccagttttgaggaaaggaatgaagaacctttagccaaacgcataaagaatgataaaacagaaaaagaaatttacactttggccaaggaaggaaatgaaaaa

SEQ ID NO: 245830 - DNA, 120 bp, Artificial Sequence
  ENSG00000122435_8 (sequence is synthesized)
aatgtcccagagaagtggaaccctgtggctggcattgttattgcactctgttgtcaccacaggtgtgattggagacattatgtgggcaaagaatatttcagggctctaggccttggagca

SEQ ID NO: 245831 - DNA, 120 bp, Artificial Sequence
  ENSG00000122435_9 (sequence is synthesized)
gtggaattccattatttccagcgaatgagtagttgggcaacttgtgggatgcggaaaacatctttggaaacctcaaatagtaccacaaagaggcaagataatcagaatgatgatagtgaa

SEQ ID NO: 245832 - DNA, 120 bp, Artificial Sequence
  ENSG00000122435_10 (sequence is synthesized)
gagcatgatgatggaggatacagaatcacagatgatggcgctgattgtttgcctgggcttcttagtgttgaagaaaagaagaaaatagggcatctttgtaaattgctgattgaccaaggt

SEQ ID NO: 245833 - DNA, 120 bp, Artificial Sequence
  ENSG00000122435_11 (sequence is synthesized)
cgaatccagtatttgcagcagaagggattcagtcctgctttgcagtactatacagaccctctggtgtctttggaaaatgttttgttaactgctttaccaaatcattcttcatcaccagaa

SEQ ID NO: 245834 - DNA, 120 bp, Artificial Sequence
  ENSG00000122435_12 (sequence is synthesized)
acaactgcttaatggaaaagaaatttgagcatcatctgtcttccaccaaaaaaaattttttaattatatttttatatcaaaaaaatatatactttaaatagcaaataatatgaactttaa

SEQ ID NO: 245835 - DNA, 120 bp, Artificial Sequence
  ENSG00000122435_13 (sequence is synthesized)
ggcctcattaaactttggtaatagcttttctttttacttcagaaatccaaacattagagaattcaccaaagtaatcctctttagaagggcatcttgaattatattatccatccgtattta

SEQ ID NO: 245836 - DNA, 120 bp, Artificial Sequence
  ENSG00000122435_14 (sequence is synthesized)
tggagattggtaaagtagttgaaccgttgacttggtgatctgaaacatacataacatgtcaacacataattagcgtatttctgtttgtattaattttggaaatttatcttcctttgattt

SEQ ID NO: 245837 - DNA, 120 bp, Artificial Sequence
  ENSG00000122435_15 (sequence is synthesized)
tatttaatattttttatttcttaagttcaagaggtagtgattgattgtaacaagggccaatctgagaatttgacttatatgtggacatttttccctacagatctggaaagcacaattgtg

SEQ ID NO: 245838 - DNA, 120 bp, Artificial Sequence
  ENSG00000122435_16 (sequence is synthesized)
attttctcaaatgcagacaattcagagatattcacaattaataaacacaattaattaatgaagtcaccttcaaatttccagagccatacatgtatatattgtcagaatctgtccatgaca

SEQ ID NO: 245839 - DNA, 120 bp, Artificial Sequence
  ENSG00000122435_17 (sequence is synthesized)
aacacaaaactgaagagctgttttcaaagaaaaaagattatttcacttaattattttgttggataattgtctagttagaacttccaaaaagatacttacaaacataattcacaaatttga

SEQ ID NO: 245840 - DNA, 120 bp, Artificial Sequence
  ENSG00000122435_18 (sequence is synthesized)
aataatttctgaagttgattagctatctcatatcttttatcaggtcattttttatatatgtaggcacaaacaataagtatgttctcttctgtttgggaaaataatttggaataaaataga

SEQ ID NO: 245841 - DNA, 120 bp, Artificial Sequence
  ENSG00000122435_19 (sequence is synthesized)
aattagataatgaaaccaaaaaccttctcaaatttaggccttatttaactcatgactggtttctatgcacaagaaaatactaaaccaaatatatggtaggactgttattctcttctgcat

SEQ ID NO: 245842 - DNA, 120 bp, Artificial Sequence
  ENSG00000122435_20 (sequence is synthesized)
cttatccctattttgtttctgcctttatttgtaaaaattgtcttaattgatggtacatttgccaagacaaaggttcagaattactaattttagatattatgatattctgaaataactatt

SEQ ID NO: 245843 - DNA, 120 bp, Artificial Sequence
  ENSG00000122435_21 (sequence is synthesized)
tttatcctgtagttctatgattatatgatttgtaaataagaagcctaaccaatttaaaattcctgactttagtctcatatatcttgtcagactgtctcggttcaaattccaaacctacca

SEQ ID NO: 245844 - DNA, 120 bp, Artificial Sequence
  ENSG00000122435_22 (sequence is synthesized)
tcttcagttgtgcgaccttgggcatgctacctaatctctttgtgcctcaatttcctccttttaaaatggggatgatgatgataacaataatacctacctcacaaggttgttgtgagcatc

SEQ ID NO: 245845 - DNA, 120 bp, Artificial Sequence
  ENSG00000122435_23 (sequence is synthesized)
aaatgagataacacaagtaaaatgcatagaacagttccaagcacagagtaattcaataaatattaactagtaatagtagtggtagtaactcgtgaatctttttaataacataataggctt

SEQ ID NO: 245846 - DNA, 120 bp, Artificial Sequence
  ENSG00000122435_24 (sequence is synthesized)
tgattttattatctctttaagttgttaacttttttcccttgttataagttttatgtcaagtaaggtagtttgtttaagttagttacccatgtccccaatcaagggaacctaaatgaagat

SEQ ID NO: 245847 - DNA, 120 bp, Artificial Sequence
  ENSG00000122435_25 (sequence is synthesized)
atatcattaaataattaacctttttttattgtgtcaagcaatactaatttgtgtcataaaatttgttttgcatcattcaacaatttatgcccagaaataaacaatattctacaacaggca

SEQ ID NO: 245848 - DNA, 120 bp, Artificial Sequence
  ENSG00000122435_26 (sequence is synthesized)
ttaaatgtaattattaataagattttattttgtttacctttgagggtaccaaatatttccatttcaaaaatatatagaaacatatacaaaaaattgagggcatggatgtgattctgagta

SEQ ID NO: 245849 - DNA, 120 bp, Artificial Sequence
  ENSG00000122435_27 (sequence is synthesized)
ccgtatattaaatatttaaaggcaagagagaaaaattttaagtcaaatacaaattatcaatgtaagcatactgccttatgcagaaattaccttgctgttttcccatttgaaccaaatgtg

SEQ ID NO: 245850 - DNA, 120 bp, Artificial Sequence
  ENSG00000122435_28 (sequence is synthesized)
gggaatttttagggttaaaggaaataatgtctatgtaataattgataaacattttcaaatcttttttaaaaagtgtgatattttgaagttctcatcaaagaatgtacaatcttaattttt

SEQ ID NO: 245851 - DNA, 120 bp, Artificial Sequence
  ENSG00000122435_29 (sequence is synthesized)
aaatatgttctgttgctctgaattttgaaaaccaataaaaatctttttattttcataaagcttttttaaatgtaagaagtgattattacaataatgttctgtttgtgcaggtggatggaa

SEQ ID NO: 245852 - DNA, 120 bp, Artificial Sequence
  ENSG00000122435_30 (sequence is synthesized)
gatatcttatgtttacaactcaataatctttatagagcactggccctgtgctttattagatgcatagctttcctatttatctgctcatattggccattttgcaggatgaattaagagttt

SEQ ID NO: 245853 - DNA, 120 bp, Artificial Sequence
  ENSG00000122435_31 (sequence is synthesized)
tccacctagaagctactgattttttagagtagttgcttagaaagaactcagaaacctcttctactaaaagactattgtgtttcaggattctggggaaaaagaaaaaaataaatgttagac

SEQ ID NO: 245854 - DNA, 120 bp, Artificial Sequence
  ENSG00000122477_0 (sequence is synthesized)
aaaattagaactaggctgacattacatttcacttggttacagctgactggggattttaatcatttggagccacactgaaaaaaaaatttccccctgcaatctactcttaactgatagtcg

SEQ ID NO: 245855 - DNA, 120 bp, Artificial Sequence
  ENSG00000122477_1 (sequence is synthesized)
ctaactttggttatgtgtggtaagtatttgacaatgtcaatgaacagtctgaaacattgctttttttctctggtacatttaggtcctttctgaaatggtatctatgattcagctattcaa

SEQ ID NO: 245856 - DNA, 120 bp, Artificial Sequence
  ENSG00000122477_2 (sequence is synthesized)
aacctaatgaagttggtgactatgacaatgtggagaaatcatgacagaaaatgtggtttgtactggggctgtcaatgctgtaaaggaagtttgggaaaaaagaataaagaaactcaatga

SEQ ID NO: 245857 - DNA, 120 bp, Artificial Sequence
  ENSG00000122477_3 (sequence is synthesized)
agacctgaagcgagagaaggaatttcaacacaagctagtgcggatctgggaagaacgagtaagcttaaccaagctaagagaaaaggtcaccagggaagatggaagagtcattttgaagat

SEQ ID NO: 245858 - DNA, 120 bp, Artificial Sequence
  ENSG00000122477_4 (sequence is synthesized)
agaaaaagaggaatggaagaccctcccttcttctctgctgaaactgaatcaactacaggaatggcaacttcatagaactggtttgctgaaaattcctgaattcattggaagattccagaa

SEQ ID NO: 245859 - DNA, 120 bp, Artificial Sequence
  ENSG00000122477_5 (sequence is synthesized)
cctcattgtgttagatttatctcgaaacacaatttcagagataccaccagggattggactgcttactagacttcaggaactgattctcagctacaacaaaatcaagactgtccccaagga

SEQ ID NO: 245860 - DNA, 120 bp, Artificial Sequence
  ENSG00000122477_6 (sequence is synthesized)
actaagtaattgtgccagcttggagaaactagaactggctgttaacagagatatatgtgatcttccacaagagctcagcaatctgctaaaacttactcaccttgatctgagtatgaacga

SEQ ID NO: 245861 - DNA, 120 bp, Artificial Sequence
  ENSG00000122477_7 (sequence is synthesized)
tcctgatactatagaaagaatgcaaaatctacatacgttatggctgcaacgaaatgaaataacatgcttgcctcaaacaatcagcaatatgaaaaatctgggtactcttgttctcagcaa

SEQ ID NO: 245862 - DNA, 120 bp, Artificial Sequence
  ENSG00000122477_8 (sequence is synthesized)
caataaactgcaagatattccagtatgcatggaagaaatggcaaatctgaggtttgtcaacttcagagacaacccactgaaattgaaagtatcacttcctcccagtgaaggcacagatga

SEQ ID NO: 245863 - DNA, 120 bp, Artificial Sequence
  ENSG00000122477_9 (sequence is synthesized)
agaagaggaacgggaattatttggccttcagtttatgcacacatacatacaagagtcacggagaagagcagatcaccaagtcaacggttcaactactttaccaatctccataaatacgga

SEQ ID NO: 245864 - DNA, 120 bp, Artificial Sequence
  ENSG00000122477_10 (sequence is synthesized)
tggataatataattcaagatgcccttctaaagaggattactttggtgaattctctaatgtttggatttctgaagtaaaaagaaaagctattaccaaagtttaatgaggccacagcatttt

SEQ ID NO: 245865 - DNA, 120 bp, Artificial Sequence
  ENSG00000122477_11 (sequence is synthesized)
ttaaagttcatattatttgctatttaaagtatatatttttttgatataaaaatataattaaaaaattttttttggtggaagacagatgatgctcaaatttcttttccattaagcagttgt

SEQ ID NO: 245866 - DNA, 120 bp, Artificial Sequence
  ENSG00000122477_12 (sequence is synthesized)
ttctggtgatgaagaatgatttggtaaagcagttaacaaaacattttccaaagacaccagagggtctgtatagtactgcaaagcaggactgaatcccttctgctgcaaatactggattcg

SEQ ID NO: 245867 - DNA, 120 bp, Artificial Sequence
  ENSG00000122477_13 (sequence is synthesized)
accttggtcaatcagcaatttacaaagatgccctattttcttcttttcttcaacactaagaagcctaaattgaataaacacacacaaaacattgttaaaattttgcaaaagtttataaaa

SEQ ID NO: 245868 - DNA, 120 bp, Artificial Sequence
  ENSG00000122477_14 (sequence is synthesized)
aattatttttgtcactatttattgagagactgttaactaacccataatgtactaagtactttgtcccatgcttccaagacacattatatttatgaccacaataaaagatgtgtatatttt

SEQ ID NO: 245869 - DNA, 120 bp, Artificial Sequence
  ENSG00000122477_15 (sequence is synthesized)
atcatttggagccacactgaaaaaaaaatttccccctgcaatctactcttaactgatagtcgctaactttggttatgtgtgtctattcagaatattacattaattgatttctcaaacaaa

SEQ ID NO: 245870 - DNA, 120 bp, Artificial Sequence
  ENSG00000122477_16 (sequence is synthesized)
ttcagtttatgcacacatacatacaagagtcacggagaagagcagctcttcagttttgtgtttgtcatggacagattctgacaatatatacatgtatggctctggaaatttgaagatcac

SEQ ID NO: 245871 - DNA, 120 bp, Artificial Sequence
  ENSG00000122481_0 (sequence is synthesized)
gaggcggtggggcccacagccatggcggagcctgtgcaggaggagctctcggtcctggccgcgattttctgcaggccccacgagtgggaggtgctgagccgctcagagacagatgggacc

SEQ ID NO: 245872 - DNA, 120 bp, Artificial Sequence
  ENSG00000122481_1 (sequence is synthesized)
gtgttcagaattcacacaaaagctgaaggatttatggatgtggatatacctctggaattggtgttccatttgccagtcaattatccttcatgtctacctggtatctcgattaactctgaa

SEQ ID NO: 245873 - DNA, 120 bp, Artificial Sequence
  ENSG00000122481_2 (sequence is synthesized)
cagttgaccagggcccagtgtgtgactgtgaaagagaatttacttgagcaagcagagagccttttgtcggagcctatggttcatgagctggttctctggattcagcagaatctcaggcat

SEQ ID NO: 245874 - DNA, 120 bp, Artificial Sequence
  ENSG00000122481_3 (sequence is synthesized)
atcctcagccaaccagaaactggcagtggcagtgaaaagtgtactttttcaacaagcacgaccatggatgatggattgtggataactcttttgcatttagatcacatgagagcaaagact

SEQ ID NO: 245875 - DNA, 120 bp, Artificial Sequence
  ENSG00000122481_4 (sequence is synthesized)
gaaacaacctcaaggagtacttgattcttcagaaaacctccaaagtagatgtggactcaagtggaaagaaatgcaaagagaaaatgattagtgtactgtttgaaacaaaagtacagacag

SEQ ID NO: 245876 - DNA, 120 bp, Artificial Sequence
  ENSG00000122481_5 (sequence is synthesized)
aacacaaaaggtttctggcatttgaagtcaaagagtattcagcgttggatgaattacaaaaggaatttgaaactgcaggacttaagaagcttttctccgaatttgtacttgctctggtaa

SEQ ID NO: 245877 - DNA, 120 bp, Artificial Sequence
  ENSG00000122481_6 (sequence is synthesized)
aatgaaatggaagacaggaatcttttagtaaaatagcagtgttttttgttgtttttgcattggatttggggagtggttaattgaaatagtcaattttaaagtttctctgaagcaaaatga

SEQ ID NO: 245878 - DNA, 120 bp, Artificial Sequence
  ENSG00000122481_7 (sequence is synthesized)
taggcatcattctaacttcaggaacaaaagccagttctgttttatgaaatattaaacatgaagaaaacttgtatattctaatgtttgccaggaaaggctaggttcagtagatgagacatt

SEQ ID NO: 245879 - DNA, 120 bp, Artificial Sequence
  ENSG00000122481_8 (sequence is synthesized)
agatgagacattatttaaaagataaatttaaaaagatggtaaatgaacacttgtttttatagacaatatttgtttgaaactatgtaattttctggctaattttcttgtaattaaatgatt

SEQ ID NO: 245880 - DNA, 120 bp, Artificial Sequence
  ENSG00000122481_9 (sequence is synthesized)
atggtaagtgctgtgtgcctggtaatgtcatttagctgctgaacttgtaatagtaagaacagtggcttgtgctctcaagtgtgccatggcgctatatctagatactcctctagtgctttg

SEQ ID NO: 245881 - DNA, 120 bp, Artificial Sequence
  ENSG00000122481_10 (sequence is synthesized)
catgtattatctcatttaattagtacaacttccccatgaggtagatcctgctattaattccattttatggagaaggcaactgagccacagaggatttaagtaaccagcccagagtaagaa

SEQ ID NO: 245882 - DNA, 120 bp, Artificial Sequence
  ENSG00000122481_11 (sequence is synthesized)
ctagtaggcagttcaatccagatttaaacttgaggagttggattatattgttctttactcctgtatccaccactacattattctgccaagtatgttaaaacaagtatataaaaattctta

SEQ ID NO: 245883 - DNA, 120 bp, Artificial Sequence
  ENSG00000122481_12 (sequence is synthesized)
ctgcttgatttaaaaagggggtatttaagcatgaaaataagcctacaggtttatagctcctttaaaactgggactttgagactcagagtaagatatgtatttaatgtactgatttattat

SEQ ID NO: 245884 - DNA, 120 bp, Artificial Sequence
  ENSG00000122481_13 (sequence is synthesized)
gcccacagccatggcggagcctgtgcaggaggagctctcggtcctggccgcgattttctgcaggccccacgagtgggaggtgctgagccgctcaggaccagaaaataacacagagaaaaa

SEQ ID NO: 245885 - DNA, 120 bp, Artificial Sequence
  ENSG00000122481_14 (sequence is synthesized)
tgaaaattggtaaggactgacatggctggctcagtagcttttcaagactttccccctggactaccaacatgtttctttcctgtggttccctgcaccagagaggacccgagacagatggga

SEQ ID NO: 245886 - DNA, 120 bp, Artificial Sequence
  ENSG00000122481_15 (sequence is synthesized)
cggtggggcccacagccatggcggagcctgtgcaggaggagctctcggtcctggccgcgattttctgcaggccccacgagtgggaggtgctgagccgctcaggttctcccttttgccact

SEQ ID NO: 245887 - DNA, 120 bp, Artificial Sequence
  ENSG00000122481_16 (sequence is synthesized)
ggaatcaggagaatgttgcagaggaattgcattcctggtaacaagataacccagcaagactcagactgctaacccaaggatcaactattaaggccgaccagaaaataacacagagaaaaa

SEQ ID NO: 245888 - DNA, 120 bp, Artificial Sequence
  ENSG00000122482_0 (sequence is synthesized)
gcgtgctcccaacgtcgccccggtttgacgcacacggcaccaaactgtttgatttaattttggatgagatcgttcttgcagcaagatgttaataagacaaaatctagactaaatgtgtta

SEQ ID NO: 245889 - DNA, 120 bp, Artificial Sequence
  ENSG00000122482_1 (sequence is synthesized)
aatgggcttgccaacaatatggatgatttgaagataaacaccgatattactggtgctaaagaagaactcctagatgacaacaattttatctcagacaaagagagcggagttcataagcca

SEQ ID NO: 245890 - DNA, 120 bp, Artificial Sequence
  ENSG00000122482_2 (sequence is synthesized)
aaagattgtcaaacatcatttcagaaaaataatacgttgactctgcctgaagaactgtcaaaggacaaatctgaaaacgccttaagtggaggccagtctagtctatttatacatgctggt

SEQ ID NO: 245891 - DNA, 120 bp, Artificial Sequence
  ENSG00000122482_3 (sequence is synthesized)
gctcctactgtttctagtgaaaactttatcttgcctaaaggagctgctgttaatggaccagtttcacactcctccttaactaagacttccaatatgaataaaggcagtgtttcattaacc

SEQ ID NO: 245892 - DNA, 120 bp, Artificial Sequence
  ENSG00000122482_4 (sequence is synthesized)
actggacagcctgtggatcagccaacaacagaatcttgttcaactttgaaggtagcagctgatcttcagctgtctacaccacagaaagcaagtcaacaccaagttttatttttgttatca

SEQ ID NO: 245893 - DNA, 120 bp, Artificial Sequence
  ENSG00000122482_5 (sequence is synthesized)
gatgtagcacatgctaagaatcccacccattccaataaaaaactacctacctctgcttcagttggttgtgacattcagaattcagtagggagtaatataaagtcagatggcactttaata

SEQ ID NO: 245894 - DNA, 120 bp, Artificial Sequence
  ENSG00000122482_6 (sequence is synthesized)
aatcaagtagaggtgggtgaggatggtgaagatttattggtgaaagatgattgtgtcaatacagtaacgggaatttcctcaggtacagatggatttaggtcagaaaatgatacaaactgg

SEQ ID NO: 245895 - DNA, 120 bp, Artificial Sequence
  ENSG00000122482_7 (sequence is synthesized)
gatccccaaaaagagttcattcaatttcttatgactaatgaggaaacagtagataaagctccacctcattctaaaataggtctagaaaaaaaaagaaagcgaaaaatggatgtaagcaag

SEQ ID NO: 245896 - DNA, 120 bp, Artificial Sequence
  ENSG00000122482_8 (sequence is synthesized)
ataactcgttataccgaggattgctttagtgattctaattgtgtacccaataaatcaaaaatgcaagaagtagactttctagaacaaaatgaagagctacaagcagtagactcacagaaa

SEQ ID NO: 245897 - DNA, 120 bp, Artificial Sequence
  ENSG00000122482_9 (sequence is synthesized)
tatgcattatcaaaagtgaagcctgaatcaactgatgaagacttagaatctgtggatgccttccaacatctaatttataacccagataagtgtggagaagagagttcacctgttcatact

SEQ ID NO: 245898 - DNA, 120 bp, Artificial Sequence
  ENSG00000122482_10 (sequence is synthesized)
agcacttttctttcaaataccttaaaaaagaaatgtgaagagagtgattctgagtcacctgctactttcagtaccgaagagccatcattctacccctgtacaaagtgcaatgtgaatttt

SEQ ID NO: 245899 - DNA, 120 bp, Artificial Sequence
  ENSG00000122482_11 (sequence is synthesized)
agggagaagaagcacctccacaggcatatgatgtatcatttagatgggaatagtcactttcgccatcttaatgtcccaaggccatatgcttgtagagaatgtggacggacatttcgagat

SEQ ID NO: 245900 - DNA, 120 bp, Artificial Sequence
  ENSG00000122482_12 (sequence is synthesized)
cgcaattcacttctaaaacatatgattattcaccaggagagaagacagaagttgatggaggaaattcgtgaattgaaagaacttcaggatgaaggaagaagtgcacgattacagtgtcct

SEQ ID NO: 245901 - DNA, 120 bp, Artificial Sequence
  ENSG00000122482_13 (sequence is synthesized)
cagtgtgtgtttggtaccaattgccctaaaacatttgtgcaacatgctaaaacccatgaaaaagataaaaggtactactgctgtgaagagtgtaacttcatggcagtgacagaaaatgaa

SEQ ID NO: 245902 - DNA, 120 bp, Artificial Sequence
  ENSG00000122482_14 (sequence is synthesized)
ttggaatgccatcgaggcattgcacatggggcagtggtaaaatgccctatggtcacttctgatattgcccagagaaaaacacaaaaaaagactttcatgaaagactctgtagtaggatca

SEQ ID NO: 245903 - DNA, 120 bp, Artificial Sequence
  ENSG00000122482_15 (sequence is synthesized)
tccaaaaaatcagctacctacatatgtaagatgtgtccttttactacttcagccaaaagtgttttaaaaaagcacacggagtacttgcattcatcatcatgtgttgattcatttggtagt

SEQ ID NO: 245904 - DNA, 120 bp, Artificial Sequence
  ENSG00000122482_16 (sequence is synthesized)
cctcttggacttgataaaagaaaaaatgacatccttgaagaacctgtagatagtgatagcactaaaacattaactaaacaacagtcaaccacatttccaaagaactctgctttaaaacaa

SEQ ID NO: 245905 - DNA, 120 bp, Artificial Sequence
  ENSG00000122482_17 (sequence is synthesized)
gatgtgaagcgaacatttggatcaacctcacaatcaagtagtttttcaaaaattcataagcggccacacagaatacagaaagctcggaaaagcattgcccaatcaggtgtaaacatgtgc

SEQ ID NO: 245906 - DNA, 120 bp, Artificial Sequence
  ENSG00000122482_18 (sequence is synthesized)
aatcaaaacagctctcctcataagaatgttacaattaaaagcagcgttgaccaaaaacctaagtatttccatcaagcagcaaaagaaaagtctaatgccaaggcaaatagccactatttg

SEQ ID NO: 245907 - DNA, 120 bp, Artificial Sequence
  ENSG00000122482_19 (sequence is synthesized)
tatagacacaaatatgaaaactataggatgatcaaaaaatcaggtgaatcatatcctgtgcatttcaaaaaagaagaagctagttcattaaattctttacacctgttttcatcatcaagt

SEQ ID NO: 245908 - DNA, 120 bp, Artificial Sequence
  ENSG00000122482_20 (sequence is synthesized)
aattctcacaacaattttatttcagaccctcataagcctgacgccaaaaggcctgaaagcttcaaagatcacagacgtgtagctgtaaagagagtaattaaggaatctaagaaggaaagt

SEQ ID NO: 245909 - DNA, 120 bp, Artificial Sequence
  ENSG00000122482_21 (sequence is synthesized)
tctgttggaggggaagacttggatagctatccagattttttgcataaaatgactgttgtcgttttgcaaaaacttaattctgctgaaaagaaagatagttatgaaacagaagatgaaagt

SEQ ID NO: 245910 - DNA, 120 bp, Artificial Sequence
  ENSG00000122482_22 (sequence is synthesized)
tcctgggataatgttgagttaggagactacactacacaggccatagaagatgaaacctatagtgatattaatcaagagcatgtaaatttattccctttatttaagagcaaagtggaaggt

SEQ ID NO: 245911 - DNA, 120 bp, Artificial Sequence
  ENSG00000122482_23 (sequence is synthesized)
actcttagttatgaccaaaacgatggcttttattttgaatactatgaagatactggaagtaacaactttttgcatgagatacatgatcctcagcatttagaaactgcagatgcttcattg

SEQ ID NO: 245912 - DNA, 120 bp, Artificial Sequence
  ENSG00000122482_24 (sequence is synthesized)
tcaaagcatagttctgtttttcattggactgatttgtctcttgagaagaaatcgtgtccttactgcccagcaacatttgaaacaggtgttgggttatcaaatcatgtcagggggcatctt

SEQ ID NO: 245913 - DNA, 120 bp, Artificial Sequence
  ENSG00000122482_25 (sequence is synthesized)
cacagagcaggattaagctatgaagcccgtcatgttgtatcaccagaacaaatagccacaagtgacaaaatgcagcatttcaaaagaactggcacaggaacacctgttaaacgagttaga

SEQ ID NO: 245914 - DNA, 120 bp, Artificial Sequence
  ENSG00000122482_26 (sequence is synthesized)
aaagctatagagaagtctgaaaccacttctgaacacacttgtcagctctgtggtggttggtttgatactaaaattggattatcaaatcatgttagaggccacttgaaaagacttggaaag

SEQ ID NO: 245915 - DNA, 120 bp, Artificial Sequence
  ENSG00000122482_27 (sequence is synthesized)
acgaaatgggatgctcacaaatctccaatctgtgttctgaatgagatgatgcaaaatgaagaaaaatatgaaaaaatcttaaaggcattgaacagtcgtcgtattattcccagaccattt

SEQ ID NO: 245916 - DNA, 120 bp, Artificial Sequence
  ENSG00000122482_28 (sequence is synthesized)
gtagctcaaaaacttgcatcaagtgatgactttatatctcaaaatgttatacctcttgaagcataccgtaatggcctaaagactgaagctctgtcagtgtctgcatcagaagaagaaggg

SEQ ID NO: 245917 - DNA, 120 bp, Artificial Sequence
  ENSG00000122482_29 (sequence is synthesized)
ctgaatttcttaaatgaatatgatgaaacaaaaccagaactgcccagtgggaaaaagaatcagtctcttacactcatagaacttcttaaaaataaaaggatgggagaagaaaggaattct

SEQ ID NO: 245918 - DNA, 120 bp, Artificial Sequence
  ENSG00000122482_30 (sequence is synthesized)
gctatttctcctcaaaagatccataatcagacagcaagaaagagattcgttcagaaatgcgttcttccattaaatgaggatagtccgttgatgtatcagccacaaaaaatggacttgact

SEQ ID NO: 245919 - DNA, 120 bp, Artificial Sequence
  ENSG00000122482_31 (sequence is synthesized)
atgcactcagccttagattgtaagcaaaagaaatcaaggtcaagatctggaagcaagaagaaaatgctaacattacctcatggtgctgacgaggtttacattctccgatgcaggttttgt

SEQ ID NO: 245920 - DNA, 120 bp, Artificial Sequence
  ENSG00000122482_32 (sequence is synthesized)
ggcctagtctttcgaggacccttgtctgttcaggaagactggattaagcacttacaacgacatattgtaaacgctaatcttccacggactggagctggcatggtggaagtcacgtcacta

SEQ ID NO: 245921 - DNA, 120 bp, Artificial Sequence
  ENSG00000122482_33 (sequence is synthesized)
cttaaaaagcctgcctccattacagaaacttcattttctctactaatggccgaagcagcttcatagaaccaggaaaccttttaaatagccagtttgaattggatgtaaatttgaaattct

SEQ ID NO: 245922 - DNA, 120 bp, Artificial Sequence
  ENSG00000122482_34 (sequence is synthesized)
ttttttttaagccacattaaattatctgtttataaatactaaagcaggaaaatggggggaaagtgaattacagtgacatcagagcaaattgaatacttaaaacagtaagtagtctatata

SEQ ID NO: 245923 - DNA, 120 bp, Artificial Sequence
  ENSG00000122482_35 (sequence is synthesized)
ttttatatagggtggaagatgtgtttttaaggtttatgaagttttgttggttaactgtgttcactcagtaaaagagcagtacatgtaagcagccattaataaactgttgcacatggatac

SEQ ID NO: 245924 - DNA, 120 bp, Artificial Sequence
  ENSG00000122482_36 (sequence is synthesized)
ttatagacagacttattggacaattatgttttttgcagtgttaccagaatcaaggctctgtttattccccacaagacttgcatagaaaaataagatattatattttgtttgtatgtattt

SEQ ID NO: 245925 - DNA, 120 bp, Artificial Sequence
  ENSG00000122482_37 (sequence is synthesized)
agtgttttgtataataccaagaaccgctgactaaatttactcaaattagggcattaaatatcatgtacttcatagtttgagactgttcactcaaatagggcagagtactattctatctag

SEQ ID NO: 245926 - DNA, 120 bp, Artificial Sequence
  ENSG00000122482_38 (sequence is synthesized)
atgtgtaagtgttttttttaaaatcacatggaacggttttttttatactaaaaagtggagggagatttgtttaaacaagtatttctaaaagaaatatgtacatagttctggaaattattt

SEQ ID NO: 245927 - DNA, 120 bp, Artificial Sequence
  ENSG00000122482_39 (sequence is synthesized)
gtggtaaggaaatattctttactccagttgcatttctcagacaataaagtggtgcatccatgctacctcctactttgtcaacaaagatgctatttaccctttacatttttgtatcataat

SEQ ID NO: 245928 - DNA, 120 bp, Artificial Sequence
  ENSG00000122482_40 (sequence is synthesized)
agattttaaaaatctaatgttctttattgcaagacattcttttgttaacaggtttgtttctttttaatgttttacctaaaatttgacatgcttacaggacaggtttgcctcttactttat

SEQ ID NO: 245929 - DNA, 120 bp, Artificial Sequence
  ENSG00000122482_41 (sequence is synthesized)
ttaacattgtagaaatgtaattaataaacaatgctcactacacagtttagaatagacgttctcatttatattatcttccaaatttgatcagttagcaaaacttaatacaccaattaaaat

SEQ ID NO: 245930 - DNA, 120 bp, Artificial Sequence
  ENSG00000122482_42 (sequence is synthesized)
atttctacatatgagaatgtttacaatttaaattttagaacttgttttggatgtgattatatgtacgaaaatcgtgtaacactatgctcatgctaagaaccgacataacagaattactga

SEQ ID NO: 245931 - DNA, 120 bp, Artificial Sequence
  ENSG00000122482_43 (sequence is synthesized)
aataaatgtgctgtgaggaatggaaaatatggtgcaggtgtcttggtcatgataaattgtgattctttttaaaaattttttccaaaaacaattaggtattttaatctgaaatcagattcc

SEQ ID NO: 245932 - DNA, 120 bp, Artificial Sequence
  ENSG00000122482_44 (sequence is synthesized)
tttacaaacaacaagtttttgtatgcaagcaccattttatttcatgtagtatggctaatactatagttgaaccaaggatatgcattgattctttgcttcgtatgtaaataaagttaaaaa

SEQ ID NO: 245933 - DNA, 120 bp, Artificial Sequence
  ENSG00000122482_45 (sequence is synthesized)
cagttaaaataaggagtattttggtagagtatatacatacctcactgccagtgaaattgctttcctatggtatatctccttaccagaaaaatctctaaataaaaaaaggtttaaagaaaa

SEQ ID NO: 245934 - DNA, 120 bp, Artificial Sequence
  ENSG00000122482_46 (sequence is synthesized)
gcaatgcactgagtaacggggcgggccgagagcagtcaccaacccctctcgttgaggctgctcggttgtggccagaaacgctggctctggcattaactgtctacacccctccccttactt

SEQ ID NO: 245935 - DNA, 120 bp, Artificial Sequence
  ENSG00000122482_47 (sequence is synthesized)
gggacaggaccgcatagccctcccctccccccgtcctgcaagatcttatgcggctaggtgcctgggaagtaacagcaagaggtttgatttaattttggatgagatcgttcttgcagcaag

SEQ ID NO: 245936 - DNA, 120 bp, Artificial Sequence
  ENSG00000122482_48 (sequence is synthesized)
ggtttgacgcacacggcaccaaactgtttgatttaattttggatgagatcgttcttgcagcaagatgttaataagacaaaatctaggttattctggagcaaacccagacatatttgttat

SEQ ID NO: 245937 - DNA, 120 bp, Artificial Sequence
  ENSG00000122482_49 (sequence is synthesized)
gcgtgtgacgcggggacgccgcgtgctcccaacgtcgccccggtttgacgcacacggcaccaaactgtctgattctctggcctttgtgtccctgggaagttactctgccagaggaaagca

SEQ ID NO: 245938 - DNA, 120 bp, Artificial Sequence
  ENSG00000122482_50 (sequence is synthesized)
ggtgtgctccacttctcccgtgaacctgaagatgagttgtcccagactcttctcagtgattggaaacttaggtggtggagctaaaggttacttgttacgagacttctacagacaactctt

SEQ ID NO: 245939 - DNA, 120 bp, Artificial Sequence
  ENSG00000122482_51 (sequence is synthesized)
gttgggatccatctatggtttagcaacattagtggaaaagttttcttgaatattgactttgaatataaaaacgtttatatttagacttcagattttgtgtgatcatcaaactcaacgagg

SEQ ID NO: 245940 - DNA, 120 bp, Artificial Sequence
  ENSG00000122482_52 (sequence is synthesized)
gcttgttgcatctggatggtagatttgttttaattgtgtattccctccctgcagtagtttgctttagttgtaaacattttttggtcccatgagaaggaaaacatttcaaaaaatagacaa

SEQ ID NO: 245941 - DNA, 120 bp, Artificial Sequence
  ENSG00000122482_53 (sequence is synthesized)
ctaaagtttctcaaagaaaggaaacctggctgtttgccttcagttgcatgtgtaagtatctagggaacttgatggcagtaatattgcattttggtaggcttgctaagaaaaacctcgttt

SEQ ID NO: 245942 - DNA, 120 bp, Artificial Sequence
  ENSG00000122482_54 (sequence is synthesized)
ttataataaggctataatctagcttagacattttaattggtgaagcataaagcttgattagtattaatgcagtggtatgtattgcttttaaaagtcttacaatttctaacaaattaaagt

SEQ ID NO: 245943 - DNA, 120 bp, Artificial Sequence
  ENSG00000122482_55 (sequence is synthesized)
gtataggaagaatacagatagtattcttcagtacagataataccgctgtacagtacagataatattactgctattacagaatcagcaagttgaatgcatgcttcagggaatagggaaatg

SEQ ID NO: 245944 - DNA, 120 bp, Artificial Sequence
  ENSG00000122482_56 (sequence is synthesized)
aatgcggactttttctaactgatttagatggtctgtctgacctctctagaaaaatatgtgtgtatgtatattttgaaatatataaggaatgttaagtctttctcttcccctttttagcct

SEQ ID NO: 245945 - DNA, 120 bp, Artificial Sequence
  ENSG00000122482_57 (sequence is synthesized)
atgcctgtgaagcttagaacatgtgtgcattgcaatacgacgtttacaagtgctgttagcctgtccaaccacttacgcgcttatgcacgaaagaagagtgctggacttttgactggtaca

SEQ ID NO: 245946 - DNA, 120 bp, Artificial Sequence
  ENSG00000122482_58 (sequence is synthesized)
tggtaatttttttctagtttttttttttattatggtaaactatatgtaacatgaaatttgccattttaaccatttttaagtgtacagttgagtgttcctatatacatttataatgtgcac

SEQ ID NO: 245947 - DNA, 120 bp, Artificial Sequence
  ENSG00000122482_59 (sequence is synthesized)
tgtacccattaaacaacaattcctccgtttctcctgctcctgaggtcctggaaatcaccatttttctctctttgaatttgactaagtgtctcataagcagaatcatatagtgtttgtctt

SEQ ID NO: 245948 - DNA, 120 bp, Artificial Sequence
  ENSG00000122482_60 (sequence is synthesized)
tttgtgactggcttatttcacaagtgtgatgttttcacggttcattcatgttacagcattttgcagaatttcctcccattttaagtctgcataatactgtattgtatgtatgtaacacat

SEQ ID NO: 245949 - DNA, 120 bp, Artificial Sequence
  ENSG00000122482_61 (sequence is synthesized)
gagaacagtggtgcactgtttccgctgccctcgtttgtctaattggcccagacgctccaccagcgcgaagcttcccgggagctcctcgctggccacccccgcggcccgcagcccggcaga

SEQ ID NO: 245950 - DNA, 120 bp, Artificial Sequence
  ENSG00000122483_0 (sequence is synthesized)
gcggccgcggcggcggcgaacactccctccgaaagagaagcgcagttctccaaagggtagggactctgggcggggctagcagtcctattccgcaaccgcctcagtctcggccccctcagg

SEQ ID NO: 245951 - DNA, 120 bp, Artificial Sequence
  ENSG00000122483_1 (sequence is synthesized)
ccaggcgtgagcgccgcccgcctctccccctgacggcctccggttcccatggcttcccccaccaatgggcatcatggcggtaattgtgggaaatgtagtcccgggcgggctccgctagtg

SEQ ID NO: 245952 - DNA, 120 bp, Artificial Sequence
  ENSG00000122483_2 (sequence is synthesized)
cgctagtgggctcgggcgcgctcgccgaccacgatccccggcaagccccgcgccttcggcggcgcctcacgcagtctgcgccggggcggggcagtgaccgggtaggcgcgtcccaacggc

SEQ ID NO: 245953 - DNA, 120 bp, Artificial Sequence
  ENSG00000122483_3 (sequence is synthesized)
cggttcgaattctgtgctgccggggttcgctggttctccgagttgtgtccgaggcttccacgcgcaggggcccgggaaagggtcagaggcttcctaacgcagactcgagtgcgaagcgcg

SEQ ID NO: 245954 - DNA, 120 bp, Artificial Sequence
  ENSG00000122483_4 (sequence is synthesized)
cagtcgccgggtgggtctctccccagcgacgatttgggtgaaatggaatctagttcatcagactactataataaagacaatgaagaggaaagtttgcttgcaaatgttgcttccttaaga

SEQ ID NO: 245955 - DNA, 120 bp, Artificial Sequence
  ENSG00000122483_5 (sequence is synthesized)
catgaactgaagataacagaatggagtttgcagagtttaggggaagagttatccagtgttagtccaagtgaaaattctgattatgcccctaatccttcaaggtctgaaaagctaattttg

SEQ ID NO: 245956 - DNA, 120 bp, Artificial Sequence
  ENSG00000122483_6 (sequence is synthesized)
gatgttcagcctagccaccctggacttttgaattattcaccttatgaaaacgtctgtaaaatatctggtagcagcactgattttcaaaaaaagccaagagataagatgttttcatcttct

SEQ ID NO: 245957 - DNA, 120 bp, Artificial Sequence
  ENSG00000122483_7 (sequence is synthesized)
gcccctgtggatcaggagattaaaagccttcgagagaaactaaataaacttaggcaacagaatgcttgtttggtcacacagaatcattccttaatgactaaatttgaatctattcacttt

SEQ ID NO: 245958 - DNA, 120 bp, Artificial Sequence
  ENSG00000122483_8 (sequence is synthesized)
gaattaacacagtcaagagcaaaagtttctatgcttgagtctgctcaacagcaggcagccagtgtcccaatcttagaagaacagattataaatttggaagcagaggtttcagctcaagat

SEQ ID NO: 245959 - DNA, 120 bp, Artificial Sequence
  ENSG00000122483_9 (sequence is synthesized)
aaagttttgagagaggcagaaaataagctggaacagagccagaaaatggtaattgaaaaggaacagagtttgcaggagtccaaagaggaatgtataaaattaaaggtggacttacttgaa

SEQ ID NO: 245960 - DNA, 120 bp, Artificial Sequence
  ENSG00000122483_10 (sequence is synthesized)
caaaccaaacaaggaaaaagagctgaacgacaaaggaatgaagcactatataatgccgaagagctgagtaaagctttccaacaatataaaaaaaaagtggctgaaaaactggaaaaggtt

SEQ ID NO: 245961 - DNA, 120 bp, Artificial Sequence
  ENSG00000122483_11 (sequence is synthesized)
caagctgaagaagaaatattagagagaaatctaactaactgtgaaaaagaaaataaaaggctacaagaaaggtgtggtctatataaaagtgaacttgaaattctgaaagagaaattaagg

SEQ ID NO: 245962 - DNA, 120 bp, Artificial Sequence
  ENSG00000122483_12 (sequence is synthesized)
cagttaaaagaagaaaataacaacggaaaagaaaaattaaggatcatggcagtgaaaaattcagaagtcatggcacaactaactgaatctagacaaagtattttgaagctagagagtgag

SEQ ID NO: 245963 - DNA, 120 bp, Artificial Sequence
  ENSG00000122483_13 (sequence is synthesized)
ttagagaacaaagacgaaatacttagagacaaattttctttaatgaatgaaaaccgagaattaaaggtccgtgttgcagcacagaatgagcgactagatttatgtcaacaagaaattgaa

SEQ ID NO: 245964 - DNA, 120 bp, Artificial Sequence
  ENSG00000122483_14 (sequence is synthesized)
agttcaagggtagaactaagaagtttggaaaagattatatcccagttgccattaaaaagagaattatttggctttaaatcatatctttctaaataccagatgagtagcttctcaaacaag

SEQ ID NO: 245965 - DNA, 120 bp, Artificial Sequence
  ENSG00000122483_15 (sequence is synthesized)
gaagaccgttgcattggctgctgtgaggcaaataaattggtgatttcggaattgagaattaagcttgcaataaaagaggcagaaattcaaaagcttcatgcaaacctgactgcaaatcag

SEQ ID NO: 245966 - DNA, 120 bp, Artificial Sequence
  ENSG00000122483_16 (sequence is synthesized)
ttatctcagagtcttattacttgtaatgacagccaagaaagtagcaaattaagtagtttagaaacagaacctgtaaagctaggtggtcatcaagtagcagaaagcgtaaaagatcaaaat

SEQ ID NO: 245967 - DNA, 120 bp, Artificial Sequence
  ENSG00000122483_17 (sequence is synthesized)
caacatactatgaacaagcaatatgaaaaagagaggcaaagacttgttactggaatagaagaactacgtactaagctgatacaaatagaagctgaaaattctgatttgaaggttaacatg

SEQ ID NO: 245968 - DNA, 120 bp, Artificial Sequence
  ENSG00000122483_18 (sequence is synthesized)
ttgagaaacagctggaagaaaagatagttgcttattcctctattgctgcaaaaaatgcagaactagaacaggagcttatggaaaagaatgaaaagataaggagtctagaaaccaatatta

SEQ ID NO: 245969 - DNA, 120 bp, Artificial Sequence
  ENSG00000122483_19 (sequence is synthesized)
atacagagcatgagaaaatttgtttagcctttgaaaaagcaaagaaaattcacttggaacagcataaagaaatggaaaagcagattgaaagacttgaagctcaactagagaaaaaggacc

SEQ ID NO: 245970 - DNA, 120 bp, Artificial Sequence
  ENSG00000122483_20 (sequence is synthesized)
aacaatttaaagaacaagaaaagactatgtccatgttgcaacaagatataatatgcaaacaacatcatcttgaatcactagatagactcttgacggaaagcaaaggggaaatgaaaaagg

SEQ ID NO: 245971 - DNA, 120 bp, Artificial Sequence
  ENSG00000122483_21 (sequence is synthesized)
aaaatatgaagaaagatgaagctttaaaagcattacagaaccaagtatctgaagaaacaatcaaggttaggcaactagattcagcattggaaatttgtaaggaagaacttgtcttgcatt

SEQ ID NO: 245972 - DNA, 120 bp, Artificial Sequence
  ENSG00000122483_22 (sequence is synthesized)
tgaatcaattggaaggaaataaggaaaagtttgaaaaacagttaaagaagaaatctgaagaggtatattgtttacagaaagagctaaagataaaaaatcacagtcttcaagagacttctg

SEQ ID NO: 245973 - DNA, 120 bp, Artificial Sequence
  ENSG00000122483_23 (sequence is synthesized)
agcaaaacgttattctacagcatactcttcagcaacagcagcaaatgttacaacaagagacaattagaaatggagagctagaagatactcaaactaaacttgaaaaacaggtgtcaaaac

SEQ ID NO: 245974 - DNA, 120 bp, Artificial Sequence
  ENSG00000122483_24 (sequence is synthesized)
tggaacaagaacttcaaaaacaaagggaaagttcagctgaaaagttgagaaaaatggaggagaaatgtgaatcagctgcacatgaagcagatttgaaaaggcaaaaagtgattgagctta

SEQ ID NO: 245975 - DNA, 120 bp, Artificial Sequence
  ENSG00000122483_25 (sequence is synthesized)
ctggcactgccaggcaagtaaagattgagatggatcagtacaaagaagagctgtctaaaatggaaaaggaaataatgcacctaaaacgagatggagaaaataaagcaatgcacctctctc

SEQ ID NO: 245976 - DNA, 120 bp, Artificial Sequence
  ENSG00000122483_26 (sequence is synthesized)
aattagatatgatcttagatcagacaaagacagagctagaaaagaaaacaaatgctgtaaaggagttagaaaagttacagcacagtactgaaactgaactaacagaagccttgcaaaaac

SEQ ID NO: 245977 - DNA, 120 bp, Artificial Sequence
  ENSG00000122483_27 (sequence is synthesized)
gggaagtacttgagactgaactacaaaatgctcatggagaattaaaaagtactttaagacaactccaggaattgagagatgtactacagaaggctcaattatcattagaggaaaaataca

SEQ ID NO: 245978 - DNA, 120 bp, Artificial Sequence
  ENSG00000122483_28 (sequence is synthesized)
ctactataaaggatctcacagctgaacttagagaatgcaagatggagattgaagacaaaaagcaggagctccttgaaatggatcaggcacttaaagagagaaattgggaactaaagcaaa

SEQ ID NO: 245979 - DNA, 120 bp, Artificial Sequence
  ENSG00000122483_29 (sequence is synthesized)
gagcagctcaggttacacatttggatatgactattcgtgagcacagaggagaaatggaacaaaaaataattaaattagaaggtactctggagaaatcagaattggaacttaaagaatgta

SEQ ID NO: 245980 - DNA, 120 bp, Artificial Sequence
  ENSG00000122483_30 (sequence is synthesized)
acaaacagatagaaagtctgaatgacaaattacaaaatgctaaagaacagcttcgagaaaaagagtttataatgctacaaaatgaacaggagataagtcaactgaaaaaagaaattgaaa

SEQ ID NO: 245981 - DNA, 120 bp, Artificial Sequence
  ENSG00000122483_31 (sequence is synthesized)
gaacacaacaaaggatgaaagaaatggagagtgttatgaaagagcaagaacagtacattgccactcagtacaaggaggccatagatttggggcaagaattgaggctgacccgggagcagg

SEQ ID NO: 245982 - DNA, 120 bp, Artificial Sequence
  ENSG00000122483_32 (sequence is synthesized)
tgcagaactctcatacagaattggcagaggctcgtcatcagcaagtccaagcacagagagaaatagaaaggctctctagtgaactggaggatatgaagcaactctctaaagagaaagatg

SEQ ID NO: 245983 - DNA, 120 bp, Artificial Sequence
  ENSG00000122483_33 (sequence is synthesized)
ctcatggaaaccatttagctgaagaactgggggcttctaaagtacgtgaagctcatttagaagcaagaatgcaagcagaaatcaagaaattgtcagcagaagtagaatctctcaaagaag

SEQ ID NO: 245984 - DNA, 120 bp, Artificial Sequence
  ENSG00000122483_34 (sequence is synthesized)
cttatcatatggagatgatttcacatcaagagaaccatgcaaagtggaagatttctgctgactctcaaaagtcttctgttcagcaactaaacgaacagttagagaaggcaaaattggaat

SEQ ID NO: 245985 - DNA, 120 bp, Artificial Sequence
  ENSG00000122483_35 (sequence is synthesized)
tagaagaagctcaggatactgtaagcaatttgcatcaacaagtccaagataggaatgaagtaattgaagctgcaaatgaagcattacttactaaaggagaaaatgtgtaattcaaagaag

SEQ ID NO: 245986 - DNA, 120 bp, Artificial Sequence
  ENSG00000122483_36 (sequence is synthesized)
atactgatgtgttgaaaaaatggaatttttggtactgtgctgtttacttattatatgtagctcatacttcatagaagctgttattttgcttttgaataaattttatatttcaatatttta

SEQ ID NO: 245987 - DNA, 120 bp, Artificial Sequence
  ENSG00000122483_37 (sequence is synthesized)
agcgggctggcttcctgaacggccctcgcctcttcaccaccagggccgtccaccagaagtttctaaacgggtgagaggcgacaacgcagtgcagctgggttaaaggaaggaggctggttt

SEQ ID NO: 245988 - DNA, 120 bp, Artificial Sequence
  ENSG00000122483_38 (sequence is synthesized)
atcctccgcacttacttggtactcgatctccagcgaggccttcaggggcatgggctggtagaagcactccttctggccggcgggaagggtaaaggtgaagtcgctatcgagggaaggtgt

SEQ ID NO: 245989 - DNA, 120 bp, Artificial Sequence
  ENSG00000122483_39 (sequence is synthesized)
gaagccggccgccccaggcagcagcaccggaggcagagcggccagaaggagcacggggaagggcagccagatcttgtcgcccatccctgctggggcgatcccgggctgaaagaggcgtca

SEQ ID NO: 245990 - DNA, 120 bp, Artificial Sequence
  ENSG00000122483_40 (sequence is synthesized)
ggtactgttgtctccgctccgcgtttcctctctggactcctcgtggttgacagggaaatctggagtctgaagaaactccaggtggcggccgcggcggcggcgaacactccctccgaaaga

SEQ ID NO: 245991 - DNA, 120 bp, Artificial Sequence
  ENSG00000122483_41 (sequence is synthesized)
tcagaattaaccagattacaggccaaaatttctggacatgaaaaggcagaagacatcaagtttctgccagccccatttacatctccaacagaaattatgcctgatgttcaagatccaaaa

SEQ ID NO: 245992 - DNA, 120 bp, Artificial Sequence
  ENSG00000122483_42 (sequence is synthesized)
tttgctaaatgttttcacacatctttttccaagtgtacaaaattacgtcgctctattagtgccagtgatcttactttcaaaattcatggtgatgaagatctttctgaagaattactacag

SEQ ID NO: 245993 - DNA, 120 bp, Artificial Sequence
  ENSG00000122483_43 (sequence is synthesized)
gacttaaagaaaatgcaattagaacagccttcaacattagaagaaagccataagaatctgacttacacccagccagactcatttaaacctctcacatataacctagaagctgatagttct

SEQ ID NO: 245994 - DNA, 120 bp, Artificial Sequence
  ENSG00000122483_44 (sequence is synthesized)
gagaataatgactttaacacgcttagtgggatgctaagatacataaacaaagaagtaagactattaaaaaagtcttctatgcaaacaggtgctggtttaaatcagggagaaaatgtgtaa

SEQ ID NO: 245995 - DNA, 120 bp, Artificial Sequence
  ENSG00000122483_45 (sequence is synthesized)
gaaagcccttctaaaacttaattatatttttaaagaaaatttattattttatttattgttttttggcttaaacttgctgctttcttttgctttttatataaaaatcattgttaaaatgca

SEQ ID NO: 245996 - DNA, 120 bp, Artificial Sequence
  ENSG00000122484_0 (sequence is synthesized)
agactactctcccccatggcggacttcgctgggccgtcttctgccggccgcaaggccggggctccccgctgctctcgaaaagccgcaggtactaaacagacaagtactttgaaacaagaa

SEQ ID NO: 245997 - DNA, 120 bp, Artificial Sequence
  ENSG00000122484_1 (sequence is synthesized)
gatgcttctaaaaggaaagctgaactagaagcagctgtgagaaagaagattgaatttgagagaaaagctctacatattgttgaacagcttttagaggagaatattacagaagagttccta

SEQ ID NO: 245998 - DNA, 120 bp, Artificial Sequence
  ENSG00000122484_2 (sequence is synthesized)
atggagtgtgggaggttcattacacctgctcactacagtgatgtcgtggatgaacgttctattgtcaaactctgtggttatcctttatgtcagaagaagctgggaattgtaccaaaacag

SEQ ID NO: 245999 - DNA, 120 bp, Artificial Sequence
  ENSG00000122484_3 (sequence is synthesized)
aaatataaaatttctaccaaaaccaataaagtctatgatattactgaaagaaagtctttttgcagcaatttttgttatcaagcatctaagttttttgaagcacaaattcccaaaactcca

SEQ ID NO: 246000 - DNA, 120 bp, Artificial Sequence
  ENSG00000122484_4 (sequence is synthesized)
gtatgggttcgagaagaagagaggcatcctgattttcaactgctaaaggaagaacaaagtggccattctggagaagaagtacagttatgcagtaaagccattaaaacatcagatatcgac

SEQ ID NO: 246001 - DNA, 120 bp, Artificial Sequence
  ENSG00000122484_5 (sequence is synthesized)
aatcctagccactttgaaaagcaatatgaatctagttcttctagcactcacagtgatagtagcagtgacaatgagcaagactttgtttcctccattctaccaggaaacagaccaaattca

SEQ ID NO: 246002 - DNA, 120 bp, Artificial Sequence
  ENSG00000122484_6 (sequence is synthesized)
acaaatattagaccacagctgcaccaaaaaagcataatgaaaaagaaagctggtcacaaagctaactccaaacacaaagacaaagaacagacagtagtagatgtcactgagcagttaggc

SEQ ID NO: 246003 - DNA, 120 bp, Artificial Sequence
  ENSG00000122484_7 (sequence is synthesized)
gattgcaaattagatagtcaggagaaagatgctacatgtgaacttcctttacagaaagtaaatactcagagttcttcaaatagcactttgcctgaaagattaaaagcgtcagaaaattct

SEQ ID NO: 246004 - DNA, 120 bp, Artificial Sequence
  ENSG00000122484_8 (sequence is synthesized)
gaaagtgaatacagtaggtcagaaataactctagtaggcataagtaagaaaagtgcagagcattttaagagaaaatttgccaaatcaaaccaagtgtctaggtcagtgtctagttcagtg

SEQ ID NO: 246005 - DNA, 120 bp, Artificial Sequence
  ENSG00000122484_9 (sequence is synthesized)
caggtgtgtcctgaagttggaaagagaaacttacttaaagttttgaaggagactttgattgagtggaagacagaagaaacattgaggtttttgtatggccagaattatgcttctgtgtgt

SEQ ID NO: 246006 - DNA, 120 bp, Artificial Sequence
  ENSG00000122484_10 (sequence is synthesized)
ctgaaacccgaagcctctctggttaaagaagaacttgatgaagatgacataatctcagatccagatagtcatttccctgcctggagggaatctcagaacagcttggatgagtctttacct

SEQ ID NO: 246007 - DNA, 120 bp, Artificial Sequence
  ENSG00000122484_11 (sequence is synthesized)
tttaggggctcaggtacagccattaaaccactgccaagttacgagaatttgaaaaaagaaactgaaaagttaaatctgaggatcagggagttttacagaggacggtatgttttgggtgaa

SEQ ID NO: 246008 - DNA, 120 bp, Artificial Sequence
  ENSG00000122484_12 (sequence is synthesized)
gaaaccaccaaatcacaagactcagaagagcatgattccacctttccactgatagactcaagttcccagaaccagattagaaaacgcatcgtacttgaaaagttgagtaaagtgttgcct

SEQ ID NO: 246009 - DNA, 120 bp, Artificial Sequence
  ENSG00000122484_13 (sequence is synthesized)
gggcttctggttcctcttcagattacattgggagatatttacacacaacttaaaaatcttgttcgaactttcaggttaacaaatagaaatattatacacaaacctgcggaatggacttta

SEQ ID NO: 246010 - DNA, 120 bp, Artificial Sequence
  ENSG00000122484_14 (sequence is synthesized)
attgctatggtgttgctgtcattactgaccccaattcttggcattcagaaacattctcaggaaggtatggtgtttacacggtttctagacaccctccttgaagaattacatctaaaaaat

SEQ ID NO: 246011 - DNA, 120 bp, Artificial Sequence
  ENSG00000122484_15 (sequence is synthesized)
gaagaccttgaaagtctaaccatcatatttagaaccagctgtttaccagagtgatatattccatgaagacaaaatagaagatgaacttctattcaccgtttctggaattctagccgccat

SEQ ID NO: 246012 - DNA, 120 bp, Artificial Sequence
  ENSG00000122484_16 (sequence is synthesized)
gatggtctggtggtgactgataactagttttattccaagacatacctttacctctttaagtttcaatctcccatctcccagtccttcagtccccaactgcagaggatgacctccccagat

SEQ ID NO: 246013 - DNA, 120 bp, Artificial Sequence
  ENSG00000122484_17 (sequence is synthesized)
agaggagaatcattactccaacaagaataaccaagtctttgtatccctagtacaagacatagtatttttattcgaaaatgaatgtttaagtattaaattgaaacttgaatgaatattcaa

SEQ ID NO: 246014 - DNA, 120 bp, Artificial Sequence
  ENSG00000122484_18 (sequence is synthesized)
gaaaatataatgatctctactttttctggatgatttccagccatcatatcagtttgccaaaaaaattgagaaagttatgattttgacctcccaacctaaactctaaattctaaagatcag

SEQ ID NO: 246015 - DNA, 120 bp, Artificial Sequence
  ENSG00000122484_19 (sequence is synthesized)
taaacaattaggtcaataaatacatacaatttaagatgaagccctttggaagtctagtccaaaacaggaaaatctcagaactttctggactcaaggaaatgctttaaatggaatctgtag

SEQ ID NO: 246016 - DNA, 120 bp, Artificial Sequence
  ENSG00000122484_20 (sequence is synthesized)
tttgtttgcaggagagacaatttctagaatttagattgcttttcaaaatgtttatcaggtaggcaagttagcagttgaggcggaacacagacaacttggggagctttactggaaggccaa

SEQ ID NO: 246017 - DNA, 120 bp, Artificial Sequence
  ENSG00000122484_21 (sequence is synthesized)
gaaaatactcttggacactggaggaaatgacagctactaaagcccaatcatggaaaaggaccagaaagcagcccactggaatggggagcttagtgggcaaggaggtagggatataatttc

SEQ ID NO: 246018 - DNA, 120 bp, Artificial Sequence
  ENSG00000122484_22 (sequence is synthesized)
tcttcttggctccaccagtaattagctctgtggcccagtcacctaaactttctggacttcagttcaggttgtatggcagtaggccatagaattggctactgccatacaatctctatggga

SEQ ID NO: 246019 - DNA, 120 bp, Artificial Sequence
  ENSG00000122484_23 (sequence is synthesized)
aaggactgcaaaaactaaattttatctctgtatgggcaaaggctactgtcatcctgttgttggtctggggccactctgacaattttttttaacctcatttgattgtgtaagggtctaacc

SEQ ID NO: 246020 - DNA, 120 bp, Artificial Sequence
  ENSG00000122484_24 (sequence is synthesized)
acaacaaaaaatcatagtgtaatagaattaatcaagttcagcaaggtcacaggctagatcaatatacagaaaatcaattgtatttttctgttcagaaaactccaaaaatgaaataaagaa

SEQ ID NO: 246021 - DNA, 120 bp, Artificial Sequence
  ENSG00000122484_25 (sequence is synthesized)
aattgtgttcacaatatcaccaaagagaattaaatacttaggaataaatttaacaaaataagtataagacttgtataacgaaaactataaaacattcaagagggctgggcatggtggctc

SEQ ID NO: 246022 - DNA, 68 bp, Artificial Sequence
  ENSG00000122484_26 (sequence is synthesized)
aaaactataaaacattcaagagggctgggcatggtggctcatgcctttagttctagcactttggaggc

SEQ ID NO: 246023 - DNA, 120 bp, Artificial Sequence
  ENSG00000122484_27 (sequence is synthesized)
gaacagctccagtctacagctcccagcaggatggacacagaagatgggtgatttctgcattttcaactaaagtacctggttcgtctcactgggactggctggacagtgggtgtagcccac

SEQ ID NO: 246024 - DNA, 120 bp, Artificial Sequence
  ENSG00000122484_28 (sequence is synthesized)
tggttcgtctcactgggactggctggacagtgggtgtagcccacagagggttagccgaagcaaggtggggcatcgcctcacctgggaagcgccaaggggtcgggggatttccctttccta

SEQ ID NO: 246025 - DNA, 120 bp, Artificial Sequence
  ENSG00000122484_29 (sequence is synthesized)
tacctggaggaggggtacactcctgcccaaatactgctcttttcccacagtcttcgcaactggcagaccacgaaatcccctcccatgcctggttcagtgggtcccacgcccacagagcct

SEQ ID NO: 246026 - DNA, 120 bp, Artificial Sequence
  ENSG00000122484_30 (sequence is synthesized)
ctggttcagtgggtcccacgcccacagagccttgctcactgctagcgccagcagtctgaaatcgacctgggacgtgggagcttggcggggtagaggtgtccgccattgctgaggcttgag

SEQ ID NO: 246027 - DNA, 80 bp, Artificial Sequence
  ENSG00000122484_31 (sequence is synthesized)
tgctcacagtgtaaacaaagcagcagggaagctctctctgtagattccacctccaggggcagggcatatctgaacaaaag

SEQ ID NO: 246028 - DNA, 62 bp, Artificial Sequence
  ENSG00000122484_32 (sequence is synthesized)
tctgaagagagcagtggttctcccagcaccgcgttcaagctccgataatctcccagtaggcg

SEQ ID NO: 246029 - DNA, 120 bp, Artificial Sequence
  ENSG00000122484_33 (sequence is synthesized)
cccccgtgtagcctgactgggagacatctcccagtaggcgccgaaagacacctcagagaggtagatgccccactggaacgaagcttccacagtaaggatcaggcagcaatatttgctgtt

SEQ ID NO: 246030 - DNA, 77 bp, Artificial Sequence
  ENSG00000122484_34 (sequence is synthesized)
aactccaacagacctgcagctaaggggcctgtctaaaaggacatctacaccaaaaccccatccataggacaccaaca

SEQ ID NO: 246031 - DNA, 120 bp, Artificial Sequence
  ENSG00000122484_35 (sequence is synthesized)
aaaaaggacatctacaccaaaaccccatccataggacaccaacatcagagaccaaaggtaggtaaaaccacaaagatggggagaaaccagaccagaaaggctgaaaattccaaaaaccag

SEQ ID NO: 246032 - DNA, 63 bp, Artificial Sequence
  ENSG00000122484_36 (sequence is synthesized)
cttctccaagctaaaggagcatgttctaatgcgtcgcaaggaagctaaaaatcttgaaaaaag

SEQ ID NO: 246033 - DNA, 71 bp, Artificial Sequence
  ENSG00000122484_37 (sequence is synthesized)
cgtgaagcataactgaagatcaaattaatgaaataaagcgagaggacaagattagagaaaaaagagtgaaa

SEQ ID NO: 246034 - DNA, 72 bp, Artificial Sequence
  ENSG00000122484_38 (sequence is synthesized)
agacacagactggcaaattgaataaacagtcaagacccatcagtgagaataaaaggatgtaggaagatttac

SEQ ID NO: 246035 - DNA, 63 bp, Artificial Sequence
  ENSG00000122484_39 (sequence is synthesized)
tatacattcttgttcagcaaatgcaaaagaacagaaatcacaacaaaccgtctcagaccacaa

SEQ ID NO: 246036 - DNA, 120 bp, Artificial Sequence
  ENSG00000122484_40 (sequence is synthesized)
aatgcaaaagaacagaaatcacaacaaaccgtctcagaccacaatgcaatcaaattagaactcaggatcaagaatctcactcaactgcacaactgcatggaaactgaacaacctgttcct

SEQ ID NO: 246037 - DNA, 75 bp, Artificial Sequence
  ENSG00000122484_41 (sequence is synthesized)
gaaccaacgagaacaaagacacaatgtaccagaatctctaggacatgtttaaagcagtatgtagagggaaattta

SEQ ID NO: 246038 - DNA, 61 bp, Artificial Sequence
  ENSG00000122484_42 (sequence is synthesized)
gaaatttatagcactaaatgcccacaagtgaaagcaggagtaattcaaaagctagcagaag

SEQ ID NO: 246039 - DNA, 84 bp, Artificial Sequence
  ENSG00000122484_43 (sequence is synthesized)
ttcaatgctatccccatcaagctaccacgattcatatggaaccaaaaaagagcccacctagccaagacaatcctgggcaagaag

SEQ ID NO: 246040 - DNA, 78 bp, Artificial Sequence
  ENSG00000122484_44 (sequence is synthesized)
caagtatgcagacgaatggaacagaatggaggcctcagaaataacaccacacgtctaccaccatctgatctttgacaa

SEQ ID NO: 246041 - DNA, 72 bp, Artificial Sequence
  ENSG00000122484_45 (sequence is synthesized)
ccctatttaataaatggtgttgggaaaacgggctagccatatgcagaaaactgtacaaagacttaaacgtaa

SEQ ID NO: 246042 - DNA, 120 bp, Artificial Sequence
  ENSG00000122484_46 (sequence is synthesized)
gccagttagaatggcgatcattaaaaatcaggaaacaatagatgctggagaggttgtggaaaaattggaacgcttttacactgttggtgggagtgcaaattagtccgaccattgtggaag

SEQ ID NO: 246043 - DNA, 69 bp, Artificial Sequence
  ENSG00000122484_47 (sequence is synthesized)
aacgcttttacactgttggtgggagtgcaaattagtccgaccattgtggaagtcagtgtgacgattggg

SEQ ID NO: 246044 - DNA, 73 bp, Artificial Sequence
  ENSG00000122484_48 (sequence is synthesized)
acacagggagggtaacatcacacaccagggcctgtggggggtggggggctagtgggtgcagcaaaccaccatg

SEQ ID NO: 246045 - DNA, 74 bp, Artificial Sequence
  ENSG00000122484_49 (sequence is synthesized)
atacctatgtaacaaaactataattattaaattttaaaaaactagccaggcatggtgctgcacacctgtagtcc

SEQ ID NO: 246046 - DNA, 87 bp, Artificial Sequence
  ENSG00000122484_50 (sequence is synthesized)
catggtgctcattgggaggattgcctgagcttgggaggttgaggctgcagttagctgtgactgtgccagtgcactccagcctgggca

SEQ ID NO: 246047 - DNA, 120 bp, Artificial Sequence
  ENSG00000122484_51 (sequence is synthesized)
agaccctgtctcaaaaaaagaaaaagaaaaattcagagagattaaagaaggtatcaagaaatgtagacacaatccatgttcatgaattggaagatcaaatgttgttaagatagcagttct

SEQ ID NO: 246048 - DNA, 120 bp, Artificial Sequence
  ENSG00000122484_52 (sequence is synthesized)
aaatgttgttaagatagcagttctccccaaattaatctacaatgcaatccctatcaaaatcacagcaggcttttttgaaaaattgacaagccaatcttaaaatctgtatgaaaacataaa

SEQ ID NO: 246049 - DNA, 120 bp, Artificial Sequence
  ENSG00000122484_53 (sequence is synthesized)
ggattcagaatagccaaaataattctgaaaatgaagaaataattctgatccagaacttactacaaagctacattaatcaagacagtgtggtactgatataaagataggcatacagatcag

SEQ ID NO: 246050 - DNA, 120 bp, Artificial Sequence
  ENSG00000122484_54 (sequence is synthesized)
tggaacagagtccaggaataaaccttcacatttatgatcaattaagttttgacaaaaatcccaatgaaattatggagaaaagatggtcttttcaacaaatagtgctaggatatttggata

SEQ ID NO: 246051 - DNA, 120 bp, Artificial Sequence
  ENSG00000122484_55 (sequence is synthesized)
tcaaatgcagaagaaattaatttagattcttacctcctaccatatgcaaaaataaactcaaaattgatcacacacctacatgtaagagctaaaactataaaacatgtagaagaaaacatg

SEQ ID NO: 246052 - DNA, 120 bp, Artificial Sequence
  ENSG00000122484_56 (sequence is synthesized)
ggagaaaacctagatgaccttggtttaggaagaattcttaagacactaatagcacaattcataaaagaaaatattaataaattggacttcattaaaatataaaattttgtttcaaaaaac

SEQ ID NO: 246053 - DNA, 120 bp, Artificial Sequence
  ENSG00000122484_57 (sequence is synthesized)
tattaagaaaattaattggcccggggaggtggttcacatctgaaatccctgcactttcggaagccaaggagggtggaccacttgagctcaggaatttgagaccagactggacaacagagc

SEQ ID NO: 246054 - DNA, 85 bp, Artificial Sequence
  ENSG00000122484_58 (sequence is synthesized)
aaaatgccatctcctgctcctgtagtcctggctactcagaaggctgaggtgggaggatctcttgaccctgggaggcagaggttgc

SEQ ID NO: 246055 - DNA, 66 bp, Artificial Sequence
  ENSG00000122484_59 (sequence is synthesized)
tcacagactgggagaaaatattttcaaaccataataagtatctgatagaggacttgtatctagact

SEQ ID NO: 246056 - DNA, 120 bp, Artificial Sequence
  ENSG00000122484_60 (sequence is synthesized)
aaccataataagtatctgatagaggacttgtatctagactatgtaaagaattcttaaaactcaaaaataaggcagacaacttaaaaatggacaaaatgtttgaatagatatttcagcaaa

SEQ ID NO: 246057 - DNA, 120 bp, Artificial Sequence
  ENSG00000122484_61 (sequence is synthesized)
gatatacaaattgcttagcatatgaagagatgtgtactatcactagtcattaggaaaatacaagttaaaagcaaaattagataccattttggacccactaaaatgactataataaaaaag

SEQ ID NO: 246058 - DNA, 120 bp, Artificial Sequence
  ENSG00000122484_62 (sequence is synthesized)
acagacaaagatatgtgttggtgatgatgtggagaaactggagccctaatgcattgctggtgggaatgtaaaatggtgcagccactttggaaaacagtttggcagtttcttaaaaagata

SEQ ID NO: 246059 - DNA, 120 bp, Artificial Sequence
  ENSG00000122484_63 (sequence is synthesized)
aacataagtttaccatatgatcctgctattccatgagaagagaagtggaaatgtgttcacatcaagactcgtaggcaaatgttcatagcattatcattcatattagtcaaaaagtggaaa

SEQ ID NO: 246060 - DNA, 120 bp, Artificial Sequence
  ENSG00000122484_64 (sequence is synthesized)
tattagtcaaaaagtggaaaccaaatgaccatcaactactggattttttttttttttttaagagatgaggcctcactatgttgcatactctgaagtcaaactcctgggctcaaacaatcc

SEQ ID NO: 246061 - DNA, 120 bp, Artificial Sequence
  ENSG00000122484_65 (sequence is synthesized)
taactgggactgcaggcaggcaccaacatacccagattatttctttttctttttttttttaactggtggatttctttaaatgatatatgtatacaatggagtagtgatataggctacaat

SEQ ID NO: 246062 - DNA, 120 bp, Artificial Sequence
  ENSG00000122484_66 (sequence is synthesized)
atggatgcatctcaaaacattatgcttagtgaaagaagtctgatgcaatatcccacatatggtatgtttccatttacagtccagaaaaggcatatactaaattagcagttgcatgggtct

SEQ ID NO: 246063 - DNA, 120 bp, Artificial Sequence
  ENSG00000122484_67 (sequence is synthesized)
gatgtgaaaacatggattgcctgcagatgggcacaagggatcttttgggggtgacaaaaatgttccaaaactaagttgtaatttttgcacaacttttatgtgtgtgtgtgtgtgtgtgtg

SEQ ID NO: 246064 - DNA, 120 bp, Artificial Sequence
  ENSG00000122484_68 (sequence is synthesized)
tacaggcgtgagccaccacacccagccatttttgcacaactttataaactttaaaaataattgatttatgcacttaaaacaggtaaagtttatgtgtataaattataccttaataaagct

SEQ ID NO: 246065 - DNA, 120 bp, Artificial Sequence
  ENSG00000122484_69 (sequence is synthesized)
aattataccttaataaagctattaaaagtcaaagattataacagggcctctctctctctgacctagtgacctagggtaaagagaaaaagaagctagccaggcacaggggctcacacctgt

SEQ ID NO: 246066 - DNA, 120 bp, Artificial Sequence
  ENSG00000122484_70 (sequence is synthesized)
ccagcactttgggaagccaagatgggctgattgcttgagtccaggagtttgagaccaacttgggcaacatagcaaaaccctgtctccaccaaaaataaaaaaaattagccaggcatggcg

SEQ ID NO: 246067 - DNA, 79 bp, Artificial Sequence
  ENSG00000122484_71 (sequence is synthesized)
tgtctccaccaaaaataaaaaaaattagccaggcatggcggtgtatgcctggagtcccagctactcaggagttagggag

SEQ ID NO: 246068 - DNA, 120 bp, Artificial Sequence
  ENSG00000122484_72 (sequence is synthesized)
aagacactgtctcaaaaattaaaaattaaaaaatgagggaagctgctgtatctccacttcttccctctctgtgcccagagatatctcttcagttatctcacatgccctacaagtctagag

SEQ ID NO: 246069 - DNA, 120 bp, Artificial Sequence
  ENSG00000122484_73 (sequence is synthesized)
acctcaggtgaggagccagtagctcagtatagaaactaaggatccaagtggacaactgccaccaagtcaccacagggccagctgctttgggagggtgctgcatctgcctcccatacactt

SEQ ID NO: 246070 - DNA, 120 bp, Artificial Sequence
  ENSG00000122484_74 (sequence is synthesized)
ctgccaagtttatgttagtttgggaggactgaagcagaattcagttcaaagtactgtgctggattttggtttctaaatattttccaatagaaaagaacccaggcttcttgagaaaatagc

SEQ ID NO: 246071 - DNA, 120 bp, Artificial Sequence
  ENSG00000122484_75 (sequence is synthesized)
taggttctaaggctagagccaaaaaaatgcaagataagcctggagcatcttgtagtaccagaaactaagcaagtgctcaaaaacaaaaggatagaagcatgtcagacagacacaggagcc

SEQ ID NO: 246072 - DNA, 81 bp, Artificial Sequence
  ENSG00000122484_76 (sequence is synthesized)
gtgaagatcacctgagaccaggcggtcaaggcttcagtgagccatgattgtggcactgcactccagcctaggcaatagagt

SEQ ID NO: 246073 - DNA, 120 bp, Artificial Sequence
  ENSG00000122484_77 (sequence is synthesized)
tcagtgagccatgattgtggcactgcactccagcctaggcaatagagtgagactgtctcaaaaaataaaattttaaaataactgaagagtataactggattgtttgtaacacaaaggata

SEQ ID NO: 246074 - DNA, 120 bp, Artificial Sequence
  ENSG00000122484_78 (sequence is synthesized)
acacaaaggataagtgcttaagatgatggaaaccctatttatcctgatgtgattattacacattgcatgcctgtaccaaaatatttcatgtaacccataaatatatacatctactatgta

SEQ ID NO: 246075 - DNA, 120 bp, Artificial Sequence
  ENSG00000122484_79 (sequence is synthesized)
tttacaggagtgaaccaccgcacctggccagtggagtctttttaaggtattatttagcatcttctgcttatagtcatgtccaaaaaccagttgatcttcctactcattaggggacaagat

SEQ ID NO: 246076 - DNA, 120 bp, Artificial Sequence
  ENSG00000122484_80 (sequence is synthesized)
caattctctaaaaaattaacctagcccaaggtaagtggtactattctgaaatctgaaaatctttagtagcctcacattataagcccttcgtagaaaaagaaaagtaagcatttctagaag

SEQ ID NO: 246077 - DNA, 120 bp, Artificial Sequence
  ENSG00000122484_81 (sequence is synthesized)
cacatttttgttggactgagggtggggcaaggagcaggggtgactttcatctgaaatgtacctaggcaggccagagtctgagttaggactggctcctgggactttgccatccaggccaag

SEQ ID NO: 246078 - DNA, 120 bp, Artificial Sequence
  ENSG00000122484_82 (sequence is synthesized)
aagcatgctccagtgtgcatgcactctcatcaaagccctagtcaggaatcccagccactcctctcctgtgcagcacaagctgaaggataaggtgtggggcagtgactgcgtggggctgcc

SEQ ID NO: 246079 - DNA, 120 bp, Artificial Sequence
  ENSG00000122484_83 (sequence is synthesized)
tgtgtgattcctgataaagaaatgccttcatgaaatgtattgttccccaataaagctcattttctgtgagaattcatgtgtccttttccaaattaaactagcaaaatatgaacttttgta

SEQ ID NO: 246080 - DNA, 120 bp, Artificial Sequence
  ENSG00000122484_84 (sequence is synthesized)
aaaggtccacacccagccagttttctactctctaaatgttcaggcctttgcctgtccttccctcagcaaaaatactgtgttttggaaaacattaccaataaaggagctgggaggtggaat

SEQ ID NO: 246081 - DNA, 120 bp, Artificial Sequence
  ENSG00000122484_85 (sequence is synthesized)
tggatcaaaatacctttagatgaaagcagcagcacaagccattccctttaaatgagctggcctcacctctggggcctatgaagaaaagcctgcttcaaggtgatagttttcattttgctt

SEQ ID NO: 246082 - DNA, 120 bp, Artificial Sequence
  ENSG00000122484_86 (sequence is synthesized)
cccagcacctctgcagtcataaccaaagtgaaggacaatattgcatgacttcagaagaaagccatccagccaccttgcaacatgttcaggaaattctggactcccttggggcttgcaaaa

SEQ ID NO: 246083 - DNA, 120 bp, Artificial Sequence
  ENSG00000122484_87 (sequence is synthesized)
ctccctatgtcttgcagaccaaaagcaagttctcagtcacctagctctagtttgcataattaaagaaagtggaagctggttcttttctgggtgacccttcacccaaccaagctcataagg

SEQ ID NO: 246084 - DNA, 120 bp, Artificial Sequence
  ENSG00000122484_88 (sequence is synthesized)
acttgtgacaaaaataagagcaataaaatgaagttttaacagtgaaaacttctatcacttagataagcaggaaaagccagtcccctagatgcccatctgaccctaccttactggggtcat

SEQ ID NO: 246085 - DNA, 120 bp, Artificial Sequence
  ENSG00000122484_89 (sequence is synthesized)
acagccaaagcagtgtccacttcaggtactgtaatgttttgaagttgacacatataatttaatgtagtttcatgtcataagttataagacttttcagagaaacaatttagtaatatcttc

SEQ ID NO: 246086 - DNA, 120 bp, Artificial Sequence
  ENSG00000122484_90 (sequence is synthesized)
tgtaatacccatcttcattttttatatgaaaaagcatagcctatgatctgtcaccttgctcactcccacatccttacctcttatccttctcacatcgtcccattaacacattatccatct

SEQ ID NO: 246087 - DNA, 120 bp, Artificial Sequence
  ENSG00000122484_91 (sequence is synthesized)
ttggggggaaaaaatacactaaattttagacagagtcactttcactatggccacaatgggagaaaagacagtccaccttcaaagtcaaccagaatgactcttaacctctcttgtctgggt

SEQ ID NO: 246088 - DNA, 120 bp, Artificial Sequence
  ENSG00000122484_92 (sequence is synthesized)
tgggcatccagataagattttcttcgtacaaagagtcttgctactaggaaaaagagtttgaaaatcactagtctaactaaatatctcactttaaaaaaagcacaaactaagactcaatga

SEQ ID NO: 246089 - DNA, 120 bp, Artificial Sequence
  ENSG00000122484_93 (sequence is synthesized)
ggtttatcttccacaagatcagccagttttagcagagcagttgctaaaacccaggtctcaaactccttgtctatggctcatctaactaagcaacaaaaagcccaatgagctctggagaga

SEQ ID NO: 246090 - DNA, 120 bp, Artificial Sequence
  ENSG00000122484_94 (sequence is synthesized)
gagagggagctaaaacaggactcaatcaaaacccacttgggattagggaagccaccctctgtgagtgagttaaactgagattccctccccttcaccctggcttcctttgcagaacaaggg

SEQ ID NO: 246091 - DNA, 120 bp, Artificial Sequence
  ENSG00000122484_95 (sequence is synthesized)
gcagaacaagggtcaccgccagagggaaagctgagtttacggaggggatcctggttggagtcagagtataccttggtttggttttgtggggttttttgagacagggtctcactgtcaccc

SEQ ID NO: 246092 - DNA, 120 bp, Artificial Sequence
  ENSG00000122484_96 (sequence is synthesized)
tcctggcctcaagcgatcctcccacctcaacctccagagtatctgggactataggcacgtaccaccatacccagctaatattttttttaattttatattttttagagacagggtgtcact

SEQ ID NO: 246093 - DNA, 120 bp, Artificial Sequence
  ENSG00000122484_97 (sequence is synthesized)
ccatacccagctaatattttttttaattttatattttttagagacagggtgtcactatgttacccaggtctcaatcactatgttactccttgcctcaagcaatcctctcaccttggcctc

SEQ ID NO: 246094 - DNA, 120 bp, Artificial Sequence
  ENSG00000122484_98 (sequence is synthesized)
caaccactgtggccagccacgcattggttttaaggtccagaatttttctgtttggagccttcacaattagttttaggttgggagaccgtgaacccaccaagcagccctttagaggctgga

SEQ ID NO: 246095 - DNA, 120 bp, Artificial Sequence
  ENSG00000122484_99 (sequence is synthesized)
aaaagagtttggaaaaagaactctgtggctttaggaatttctctcggaaatcctctagggcagagaaggaaaatttaccaaatgggagagtgtattagtctattcttacattgctataag

SEQ ID NO: 246096 - DNA, 66 bp, Artificial Sequence
  ENSG00000122484_100 (sequence is synthesized)
agcagaaggcaaaggggaagaaaggcaccttcttcacagggcggcaggaaggagaagtgcagagca

SEQ ID NO: 246097 - DNA, 120 bp, Artificial Sequence
  ENSG00000122484_101 (sequence is synthesized)
atagcagaaggcaaaggggaagaaaggcaccttcttcacagggcggcaggaaggagaagtgcagagcaaagtggggcaaagcctctataaagccatcagatctcatgagaactcactatc

SEQ ID NO: 246098 - DNA, 120 bp, Artificial Sequence
  ENSG00000122484_102 (sequence is synthesized)
gaactcactatcatgagaacagcaggggagaaccacccccatgatccaatcaccttccacgaggtccctcccccaacacgtggggatcacaatttggattacaattcaagatgagatttg

SEQ ID NO: 246099 - DNA, 120 bp, Artificial Sequence
  ENSG00000122484_103 (sequence is synthesized)
ttactgaagacctttctaactcacttctgtaaagatcaattcaataaaagcagcaaacacacatactttgctttccttgtgattaatgccttgacttttttgtggaaagtaacaccccaa

SEQ ID NO: 246100 - DNA, 120 bp, Artificial Sequence
  ENSG00000122484_104 (sequence is synthesized)
gaaagccagctactcatgttggcaataaaggtaaaagtatctatggaataaggaccatttttaggacaatactttccctactacttagttctagtcccttttttgtagaattctgaggac

SEQ ID NO: 246101 - DNA, 120 bp, Artificial Sequence
  ENSG00000122484_105 (sequence is synthesized)
tttctacatacacaatcatgtcatcagcaaataaagattattgtacttgttctttgccaacccatatgtcttgccttactgccctggttaggaccttcagaacaatactggatataagtg

SEQ ID NO: 246102 - DNA, 120 bp, Artificial Sequence
  ENSG00000122484_106 (sequence is synthesized)
gtgaaagcacatatcctccccttgttcctaattttagagggaaagtactcagtctttcgccattaagtacaatgtcagctgtaagttttcctagagaccctttctcagcttgaagatgtt

SEQ ID NO: 246103 - DNA, 120 bp, Artificial Sequence
  ENSG00000122484_107 (sequence is synthesized)
ccctggtattcatagtttgctaaaaggtttttgtcattttaaatcataaatgggtgttgaattttgtcaaaggcttttaatgcatctatggagatgatccaagtttttttcctccttatt

SEQ ID NO: 246104 - DNA, 120 bp, Artificial Sequence
  ENSG00000122484_108 (sequence is synthesized)
tctgctaaggttgtataattatgctcattggtattttaaatgttaaattaaccttgcgttcctgggataagacccactgatcatgatgcattttcctctttgtaaattgctgtattcatt

SEQ ID NO: 246105 - DNA, 120 bp, Artificial Sequence
  ENSG00000122484_109 (sequence is synthesized)
ttagtttcttcaggattttgcctatgtttgaaggatattggtttgtaatttttcttgtaacatctttgtctggttttgaaatcaaagtaatactggcctaataaaatgagttggaatgtg

SEQ ID NO: 246106 - DNA, 120 bp, Artificial Sequence
  ENSG00000122484_110 (sequence is synthesized)
ctcaaatttaaatctaattctcaagtctagttattttcctactgtgccacagatacaaacttttgtgttttaatgtttattgttctgcttatcaaagaaagaatgtaaacttatgattct

SEQ ID NO: 246107 - DNA, 80 bp, Artificial Sequence
  ENSG00000122490_0 (sequence is synthesized)
ccgaggccgcaggagcgcgcggagcggcgatgagcaggcggccggtggcccgcggggcgcggagcccgtgacagcctcgg

SEQ ID NO: 246108 - DNA, 120 bp, Artificial Sequence
  ENSG00000122490_1 (sequence is synthesized)
cggggcgcggagcccgtgacagcctcggccaggcgggcgctgcgatggaggccgagggcctggactggctcctggtgccactgcaccagctggtgtcctggggcgcggccgcggccatgg

SEQ ID NO: 246109 - DNA, 120 bp, Artificial Sequence
  ENSG00000122490_2 (sequence is synthesized)
ggccatggtcttcggaggggtggtgccctacgtcccgcagtatcgggacattcgcaggacgcagaacgccgacggcttctccacctacgtgtgcctggtgctgctggtggccaacatttt

SEQ ID NO: 246110 - DNA, 120 bp, Artificial Sequence
  ENSG00000122490_3 (sequence is synthesized)
gcggatactcttctggtttggaaggcgctttgagtccccgctgctgtggcagagcgccatcatgatcctgaccatgctgctgatgctgaagctgtgcaccgaggtccgtgtggccaacga

SEQ ID NO: 246111 - DNA, 120 bp, Artificial Sequence
  ENSG00000122490_4 (sequence is synthesized)
gctcaacgccaggcgccgctcctttacagctgcagatagcaaggatgaagaagtcaaggttgcccccaggcggtccttcctggacttcgacccccaccacttctggcagtggagcagctt

SEQ ID NO: 246112 - DNA, 120 bp, Artificial Sequence
  ENSG00000122490_5 (sequence is synthesized)
ctcggactacgtgcagtgcgtcctggccttcacgggcgtggcgggctacatcacctacctgtccattgactccgccctgtttgtggagaccctgggcttcctggctgtgctgaccgaagc

SEQ ID NO: 246113 - DNA, 120 bp, Artificial Sequence
  ENSG00000122490_6 (sequence is synthesized)
catgctgggtgtgccccagctttaccgcaaccaccgccaccagtccacggagggcatgagcatcaagatggtgctcatgtggaccagtggtgacgccttcaagacggcctacttcctgct

SEQ ID NO: 246114 - DNA, 120 bp, Artificial Sequence
  ENSG00000122490_7 (sequence is synthesized)
gaagggtgcccctctgcagttctccgtgtgcggcctgctgcaggtgctggtggacctggccatcctggggcaggcctacgccttcgcccgccacccccagaagccggcgccccacgccgt

SEQ ID NO: 246115 - DNA, 120 bp, Artificial Sequence
  ENSG00000122490_8 (sequence is synthesized)
gcaccccactggcaccaaggccctctgacagtggggaggacgaggatgtgggaccgccagccgcgggcactggtgggccctgacctccccgcggggagggtgggtgctgtggcccctgca

SEQ ID NO: 246116 - DNA, 120 bp, Artificial Sequence
  ENSG00000122490_9 (sequence is synthesized)
ggtgtggcagagatggggcatgggcattggggtctccatcagcctctgtggggtgtctcagggtgggcagtgggggtggggctgggacgctgtttgtgctcagcggggacagccagggtt

SEQ ID NO: 246117 - DNA, 120 bp, Artificial Sequence
  ENSG00000122490_10 (sequence is synthesized)
gtttttaggatgacataaaaagcaagtgttttccccatttcctcttatgaaacaccgtctgagcccaaggtacacattgggcggcctgcaggaacctgctccaggtggacacacgggcca

SEQ ID NO: 246118 - DNA, 120 bp, Artificial Sequence
  ENSG00000122490_11 (sequence is synthesized)
gcagccgcgaaccttgaagctggggtgaccgcaggagaccctgtaaggcctgtgagcggagccctcgaccccgtgacaccctggccagacaccctgcttggactggggtggcctctgcta

SEQ ID NO: 246119 - DNA, 120 bp, Artificial Sequence
  ENSG00000122490_12 (sequence is synthesized)
cccaggggtctggcacgggggagggctggggctttctctgcctggtacacacggaaaggcggctgtgcggacgcagggtcaccgtgctccgggttttctgacagtcggtgtttcctgggc

SEQ ID NO: 246120 - DNA, 120 bp, Artificial Sequence
  ENSG00000122490_13 (sequence is synthesized)
ctttggagtggctgcgaggcctgaacgccttgtggatccgctgtgtccagcccggctgagcatcgccagggctagctcatgctgctcttgtcagcctctggttctcctcgagtccttggg

SEQ ID NO: 246121 - DNA, 120 bp, Artificial Sequence
  ENSG00000122490_14 (sequence is synthesized)
gacgtggcagatgccagcgaccatcagacaacgtggaggccctcatgggcaatggctgagggggccgggctgaggctgtgcacatgcagtctgcacgccactcttgggctctgctggcgg

SEQ ID NO: 246122 - DNA, 120 bp, Artificial Sequence
  ENSG00000122490_15 (sequence is synthesized)
agatccccttccttctgggtgcagactgcacctccggatgcagttttgatgtccatcttccaggagagacggtctcgggtccagggagtggagggggctgcccctgccgtgcaggtcctg

SEQ ID NO: 246123 - DNA, 120 bp, Artificial Sequence
  ENSG00000122490_16 (sequence is synthesized)
gccgatggcgccttaccctgctgccctgggcttttggcctgaagcaaattcctgagtggggggtactggggcctgccgcatcctgtcctgtccactgcccacccccgtgtgctggctccc

SEQ ID NO: 246124 - DNA, 120 bp, Artificial Sequence
  ENSG00000122490_17 (sequence is synthesized)
tcacttctggctgcagtgggagccgccagtctgacccttgtcaccgcacgctctgcccccaccccgttgcaagaggtcacaccatgtcagcagccttgcactgaccgcagccggccccca

SEQ ID NO: 246125 - DNA, 120 bp, Artificial Sequence
  ENSG00000122490_18 (sequence is synthesized)
ggcctcagagttctggatgcttccgtgcggctccaacaggcatcgtcttcccttccgcaggtggaggggccgcttcccgcaggcatctgagctctgtgccggggccgtggccatgggaag

SEQ ID NO: 246126 - DNA, 120 bp, Artificial Sequence
  ENSG00000122490_19 (sequence is synthesized)
atgttccacgctgcctcctcctcgagttttcctcggaaacactcttgaatgtctgagtgagggtcctgcttagctctttggcctgtgagatgctttgaaaatttttatttttttaagatg

SEQ ID NO: 246127 - DNA, 120 bp, Artificial Sequence
  ENSG00000122490_20 (sequence is synthesized)
aagcaagatgtctgtagcggtaattgcctcacattaaactgtcgccgactgcaggcgcagtgactgctgaatgtaccctgtgtggcgacttggaatcaataaaccatttgtggatcctga

SEQ ID NO: 246128 - DNA, 120 bp, Artificial Sequence
  ENSG00000122490_21 (sequence is synthesized)
gatcctgagtgcctggtctggaggacgtgttcagcacagatctgtggaagtgtgtgactgttgaaaatgttcctggcagctctctcagcatcagaactctgcattccatcctacacaaac

SEQ ID NO: 246129 - DNA, 120 bp, Artificial Sequence
  ENSG00000122490_22 (sequence is synthesized)
gtggatctgatcacactgctttccaggcaaggagcctcagctgcagatagcaaggatgaagaagtcaaggttgcccccaggcggtccttcctggtgctttgaatatgttattccactgcc

SEQ ID NO: 246130 - DNA, 120 bp, Artificial Sequence
  ENSG00000122490_23 (sequence is synthesized)
gtgagtgtccaggcagagcagccagcgtggggtttaatgtgagtgtgtgttggaacactgggatacccctagaagcggcatcgtaagctccccacctgcattcattttaccagcaggtgc

SEQ ID NO: 246131 - DNA, 120 bp, Artificial Sequence
  ENSG00000122490_24 (sequence is synthesized)
aggttcaggcttgtctcagaggaccgttggataagaagggagtgggatggtggatgcctggcgttctgtgtcacttcttccaaaggagtacttctcttctggttacccaggatgagttaa

SEQ ID NO: 246132 - DNA, 120 bp, Artificial Sequence
  ENSG00000122490_25 (sequence is synthesized)
ctggaaccgtggatgaaaacccgtgtgtgtgggatgcggatacacttacacacatgtaaaatagtattgggggtgctgtgtgggcgagatgggagccggggtcatggtcctttgcctgca

SEQ ID NO: 246133 - DNA, 120 bp, Artificial Sequence
  ENSG00000122490_26 (sequence is synthesized)
tacttctccttggctgcggaacttggaacgtgtctcagggatcccaggaggtgcaggtgttctacctctgagtttgccctgctccctgggtgagtgccaagcccctgtgagatcacctgg

SEQ ID NO: 246134 - DNA, 120 bp, Artificial Sequence
  ENSG00000122490_27 (sequence is synthesized)
gctaacttctgcttttataaacctcaggtgtggctggggacgggatgtcacaggcaccccatctccccatcgggccacaggaggcttggcctctgtccctgccgggagggccgggcagaa

SEQ ID NO: 246135 - DNA, 120 bp, Artificial Sequence
  ENSG00000122490_28 (sequence is synthesized)
gttgtgagggcttggatggagtcctgaggctgagggagatggagcagtctctgcggaggaagtaggcagcgaggtcagccagcttcaagtgcgggaccgctgagaccctgtgcatcctcg

SEQ ID NO: 246136 - DNA, 120 bp, Artificial Sequence
  ENSG00000122490_29 (sequence is synthesized)
tcaggaacggggaccaggagcagcagcgtcgggtcggctcggagtgatggagtgtgtggttgtagttacgcatcaagatggtgctcatgtggaccagtggtgacgccttcaagacggcct

SEQ ID NO: 246137 - DNA, 120 bp, Artificial Sequence
  ENSG00000122490_30 (sequence is synthesized)
cacagagggaatcagcatggccaccctctgaggactgcatcctggctccctgtcctcccaggagaacgtctgtggctttttcctggttgctgtgggagcctcacctgccaaactgcaggc

SEQ ID NO: 246138 - DNA, 120 bp, Artificial Sequence
  ENSG00000122490_31 (sequence is synthesized)
tgattgagattcccgcgctggaacagtcaggggttggggctttctatgagtgcgtgccacacacagcccagccttggaggtggtggctctgcaggttcgggattgggagaggcggcatgg

SEQ ID NO: 246139 - DNA, 120 bp, Artificial Sequence
  ENSG00000122490_32 (sequence is synthesized)
ctcctgactgaacttagagatctcatttcccgctgtctgagccaccccaggtcagcctcagccagcgttttccttacccagctcctccccgccacctgctccaattccccagcacatgtg

SEQ ID NO: 246140 - DNA, 120 bp, Artificial Sequence
  ENSG00000122490_33 (sequence is synthesized)
atgtggaaatttcgcatctggcccacctgctgctctgcacactatccccgccttccccaggcaggaagcagggctgctgtgagctagaaactgggctttttgcctggtggcaacccggag

SEQ ID NO: 246141 - DNA, 120 bp, Artificial Sequence
  ENSG00000122490_34 (sequence is synthesized)
gctgcagggagggcctggggcacctgggctgagctgtgggaggggactcagggccactagacccgggtaccagtgcctgggccactggttctggggagcgccaaatgtgccgaagggttc

SEQ ID NO: 246142 - DNA, 120 bp, Artificial Sequence
  ENSG00000122490_35 (sequence is synthesized)
tgagtcaggctgtatgggggtcttacggcccctccccggagccctaccccacctggagtctgggagatgggcaacaggtgcctggtcactgtggtgtttgccaactcctgggctccttcc

SEQ ID NO: 246143 - DNA, 120 bp, Artificial Sequence
  ENSG00000122490_36 (sequence is synthesized)
ccgggatgccgcttggggcctgggagagggggagtgggtgggcagtctttcctgctgcaggttcaggactgggtgaggcggcgtgggtgggcctcccttctgacccgggtctctcccgct

SEQ ID NO: 246144 - DNA, 120 bp, Artificial Sequence
  ENSG00000122490_37 (sequence is synthesized)
gcaggttcgggattgggagaggcggcatgggcgggcctccctcccgacacaggatctttcctgctgcaagttcgggaccaggagaggcggcatgggtgggcctccctcctgacacaggat

SEQ ID NO: 246145 - DNA, 120 bp, Artificial Sequence
  ENSG00000122490_38 (sequence is synthesized)
ctttcctgctgcaggtttgggaccaggagaggcggcatgggtgggcctccctcctgacccaggtgtctcccgctgcaggttcgggactgggagaggcgatgtgggtgggcctgacacagg

SEQ ID NO: 246146 - DNA, 120 bp, Artificial Sequence
  ENSG00000122490_39 (sequence is synthesized)
gtctctccggctgcaggttcaggactgggaggggcggcgtgggtgggcctccctcctgacccgggtctctcccgctgcaggttcgggactgggagaagtggcatgggtggacctccctcc

SEQ ID NO: 246147 - DNA, 120 bp, Artificial Sequence
  ENSG00000122490_40 (sequence is synthesized)
atcgggacattcgcaggacgcagaacgccgacggcttctccacctacgtgtgcctggtgctgctggtggccaacattttgcggatactcttctgcctctctgtccgggcagattggaagg

SEQ ID NO: 246148 - DNA, 120 bp, Artificial Sequence
  ENSG00000122490_41 (sequence is synthesized)
tgtctgctgctcttcctatgaagagggcctggtggaggggtggagagaaggagtccaggcagctggtgtcaagaactctgcttctgactctggtcactgagtaatcacgtacctgcttct

SEQ ID NO: 246149 - DNA, 120 bp, Artificial Sequence
  ENSG00000122507_0 (sequence is synthesized)
agtggcgtccgttgtaagtgctatgacaacagggcgaagatggctcagagttaggctggagaggggaggtgtcccttccgctgcggccgtcgggtttctgctacatcccattcaccgcct

SEQ ID NO: 246150 - DNA, 120 bp, Artificial Sequence
  ENSG00000122507_1 (sequence is synthesized)
cctccatcctttcctcctcggtgtgagcagcaggacttgcatttgttctcgcctgcctagtgtcttccaagggatagatgccgtttcctctgctggtctctgggggtgacggggggcgca

SEQ ID NO: 246151 - DNA, 120 bp, Artificial Sequence
  ENSG00000122507_2 (sequence is synthesized)
ggggagcttcttgggggaatcactccaactctgtggagctggtggtgctgcctggtggggctctctctttgcccgggacgtggaacaactttcagctggaggacgagagggaatagtgaa

SEQ ID NO: 246152 - DNA, 120 bp, Artificial Sequence
  ENSG00000122507_3 (sequence is synthesized)
gctaaaggttgcttttctctgcaccgtccgttcttgctccctctgctccatcactgggaccttgtcaggcgttcataaagcaaaatttgccgaacgagggttcgcagaaaggtggggcag

SEQ ID NO: 246153 - DNA, 120 bp, Artificial Sequence
  ENSG00000122507_4 (sequence is synthesized)
agctcatctgacgtggcatcagtgtgaaagaaaatgtctttatttaaagcccgtgattggtggtctactattctgggagataaagaagaatttgatcaaggctgtttgtgtctggctaat

SEQ ID NO: 246154 - DNA, 120 bp, Artificial Sequence
  ENSG00000122507_5 (sequence is synthesized)
gttgacaatagtggaaatggacaagataaaataattgtgggtagctttatgggatacctaaggatctttagcccccatcctgcaaaaacaggagatggagctcaagccgaagatttgctt

SEQ ID NO: 246155 - DNA, 120 bp, Artificial Sequence
  ENSG00000122507_6 (sequence is synthesized)
ctagaagtggatctacgagatccagtacttcaagtggaagtaggaaagtttgtttcaggtaccgaaatgctacatttggctgtgttacattctagaaaactttgtgtctactctgtctca

SEQ ID NO: 246156 - DNA, 120 bp, Artificial Sequence
  ENSG00000122507_7 (sequence is synthesized)
ggaaccttgggtaatgtggaacatgggaaccaatgtcagatgaaattgatgtatgaacataatcttcagagaacagcctgcaatatgacctatggatcatttggtggtgtaaaaggtcga

SEQ ID NO: 246157 - DNA, 120 bp, Artificial Sequence
  ENSG00000122507_8 (sequence is synthesized)
gatttaatttgcatccagtctatggatgggatgctgatggtatttgagcaggagagctatgcttttggaagatttctccctggctttcttctgcctggtcctcttgcctacagttcccgt

SEQ ID NO: 246158 - DNA, 120 bp, Artificial Sequence
  ENSG00000122507_9 (sequence is synthesized)
acagattccttccttactgtctcttcctgccaacaagtggaaagttataagtaccaggtacttgcttttgcaacagatgcagataaaaggcaggagactgaacagcaaaaacttggttct

SEQ ID NO: 246159 - DNA, 120 bp, Artificial Sequence
  ENSG00000122507_10 (sequence is synthesized)
ggaaaaagactagttgtggattggactctaaatattggagagcaagcccttgacatatgtattgtctctttcaatcagtcggcatcctctgtttttgttcttggtgagagaaactttttt

SEQ ID NO: 246160 - DNA, 120 bp, Artificial Sequence
  ENSG00000122507_11 (sequence is synthesized)
tgccttaaggataatggacaaattcgattcatgaagaagcttgattggagcccaagttgttttctgccatattgctcagtttctgaaggaacaataaatactttgattggaaatcataat

SEQ ID NO: 246161 - DNA, 120 bp, Artificial Sequence
  ENSG00000122507_12 (sequence is synthesized)
aacatgctgcatatttatcaagatgtgacactgaagtgggccacccaacttccccacattcctgtagcagtaagagtgggctgtttgcatgatttaaagggagtgatagtcactctgagt

SEQ ID NO: 246162 - DNA, 120 bp, Artificial Sequence
  ENSG00000122507_13 (sequence is synthesized)
gatgatggtcacttgcagtgttcatacctggggacagatccttctctgttccaagctccaaacgttcaatctcgagaactaaactatgatgaacttgatgtagaaatgaaagaacttcag

SEQ ID NO: 246163 - DNA, 120 bp, Artificial Sequence
  ENSG00000122507_14 (sequence is synthesized)
aaaatcatcaaagatgttaacaaatcacaaggtgtttggcccatgactgagagagaagatgacttgaacgtttctgtcgtggtttctcctaactttgattcagtttctcaagcgaccgat

SEQ ID NO: 246164 - DNA, 120 bp, Artificial Sequence
  ENSG00000122507_15 (sequence is synthesized)
gttgaggtgggaactgaccttgtcccttctgtcacggtgaaggtcacactgcagaacagagtgatattgcaaaaagccaaattatcagtctacgtgcaaccaccattagaattgacttgt

SEQ ID NO: 246165 - DNA, 120 bp, Artificial Sequence
  ENSG00000122507_16 (sequence is synthesized)
agtaagcttttctgtttatctgaaaagaagttatacaccatcagaattggaaggaaatgctgttgtttcttattccagaccaacaggcattccgcgagttatccaatgtaaatttagact

SEQ ID NO: 246166 - DNA, 120 bp, Artificial Sequence
  ENSG00000122507_17 (sequence is synthesized)
tcccctaaagttaatttgcctaccaggtcagccttcaaaaactgcaagccacaaaattactattgataccaacaaatctccagtcagtcttcttagtctcttcccaggttttgccagtca

SEQ ID NO: 246167 - DNA, 120 bp, Artificial Sequence
  ENSG00000122507_18 (sequence is synthesized)
gtcagatgatgatcaggtgaatgtaatgggttttcacttcttaggaggtgctcgaattactgttcttgcttccaaaacttctcaacgatatcgcattcagagtgaacaatttgaagatct

SEQ ID NO: 246168 - DNA, 120 bp, Artificial Sequence
  ENSG00000122507_19 (sequence is synthesized)
ttggctcataaccaatgagcttattcttcgccttcaagaatattttgaaaaacagggagtcaaagattttgcatgttctttttcgggatctataccccttcaagaatattttgagttgat

SEQ ID NO: 246169 - DNA, 120 bp, Artificial Sequence
  ENSG00000122507_20 (sequence is synthesized)
tgatcatcattttgagctacggataaatggtgaaaaattagaagaactcttatctgagagagctgtacaatttcgggccattcaacgccggctactagcaagattcaaagataaaactcc

SEQ ID NO: 246170 - DNA, 120 bp, Artificial Sequence
  ENSG00000122507_21 (sequence is synthesized)
tgcccctcttcaacacctggacaccttgttagatggaacctacaagcaggtaattgctctagcagatgcagtggaggaaaaccaaggcaatctgttccagtcattcaccaggctgaagag

SEQ ID NO: 246171 - DNA, 120 bp, Artificial Sequence
  ENSG00000122507_22 (sequence is synthesized)
tgccacccatttggtgattctgctgatcgcgctgtggcagaagcttagtgctgaccaggttgctattctggaagcggcatttctgccgctacaagaagacactcaagaattgggctggga

SEQ ID NO: 246172 - DNA, 120 bp, Artificial Sequence
  ENSG00000122507_23 (sequence is synthesized)
agaaacggtggatgccgccatttcccacctgttgaagacttgcctgtcgaagagttctaaggagcaggctttgaacctcaacagccagctgaacatacccaaagacacaagccaactgaa

SEQ ID NO: 246173 - DNA, 120 bp, Artificial Sequence
  ENSG00000122507_24 (sequence is synthesized)
gaaacatatcaccttgctctgcgatagattatccaaaggtggccgtctctgcctaagtaccgatgcagcagccccacagaccatggtcatgccaggtggttgtactacaatcccagagtc

SEQ ID NO: 246174 - DNA, 120 bp, Artificial Sequence
  ENSG00000122507_25 (sequence is synthesized)
agacctagaagaaagatcagtagaacaagactctacagaactgtttaccaaccacagacatctcactgcagagacacccaggcctgaagtttcacccctccaaggagtctcggaataatt

SEQ ID NO: 246175 - DNA, 120 bp, Artificial Sequence
  ENSG00000122507_26 (sequence is synthesized)
caagtagagttgtttggttgagaggaacatccccatctcaaggccgaacctgtgtgaacctcatgccaagcacagatatagggctggcgcaggtgcttcctaaagctcaccttcctggag

SEQ ID NO: 246176 - DNA, 120 bp, Artificial Sequence
  ENSG00000122507_27 (sequence is synthesized)
atgacatgcatagaaagaggggttgggactttttacttcactaggagaacttgtaacaccatggggaagtcagctgaaacttgtcttgttttgccaggaaaggaagtagttgcctttggt

SEQ ID NO: 246177 - DNA, 120 bp, Artificial Sequence
  ENSG00000122507_28 (sequence is synthesized)
catccatctgctaatagtcacagaatacagtgaaatgacatagttttgggttagattttataatgcaaagattcagatccaaaataatttcataccccattttttcacagaattcttata

SEQ ID NO: 246178 - DNA, 120 bp, Artificial Sequence
  ENSG00000122507_29 (sequence is synthesized)
tagtaaatgtatcaagtttaataaagcatctcattgtcaaataatatcttggattttatttataattagagggatttatgagtgattgctctacattatttcttcaaaggaaaggaaagg

SEQ ID NO: 246179 - DNA, 120 bp, Artificial Sequence
  ENSG00000122507_30 (sequence is synthesized)
aattgaagactttgctactctctggtaagacttgaatgtgattattttataaataaaagaaccactatgaaactttcatgtgatttgttctattaagctaaacgtggaagaagggaagtt

SEQ ID NO: 246180 - DNA, 120 bp, Artificial Sequence
  ENSG00000122507_31 (sequence is synthesized)
ttctagtattgtatgaaaatgtttaaatattttcaaggaagctagtacattaacatccccttttcattaccccattgggtggcaccttttaaaaatccaggttattaaaggattcacact

SEQ ID NO: 246181 - DNA, 120 bp, Artificial Sequence
  ENSG00000122507_32 (sequence is synthesized)
ttattacagttaaaatttaaggtttttatgtgtaagaagtgaaagaaactttgctaatttcaagttcgaattacagttgtgagattgatttatttaaataaaaatatgcctttgccagtt

SEQ ID NO: 246182 - DNA, 120 bp, Artificial Sequence
  ENSG00000122507_33 (sequence is synthesized)
ttattcagaaagaatcaattgggaaagggcaggcacacagggacagaagttcttctgggttctgggtttcatccaggaccagcagtacggtctttcagccctcaggctgttttaagcctg

SEQ ID NO: 246183 - DNA, 120 bp, Artificial Sequence
  ENSG00000122507_34 (sequence is synthesized)
tctggcttccttggcaaagaagtgaaggtctttgaggcaaggattcatggggtcctggggccagaaggaccctcgccatcagaagcagattcaaagattcaaagaccttacctctgaaag

SEQ ID NO: 246184 - DNA, 68 bp, Artificial Sequence
  ENSG00000122507_35 (sequence is synthesized)
accccagccacatggaactgttgacatggattttattcaacagacaagctgacatttatcaagatgct

SEQ ID NO: 246185 - DNA, 120 bp, Artificial Sequence
  ENSG00000122507_36 (sequence is synthesized)
gattttattcaacagacaagctgacatttatcaagatgctttcaattacaccaaaagaaatagaagtcttcgtcttattgctgtttatgtggcagtattgttctcctacaataagttgat

SEQ ID NO: 246186 - DNA, 120 bp, Artificial Sequence
  ENSG00000122507_37 (sequence is synthesized)
tgctttccagattttctatatagtaagacttcgtcttttatacatttaaagtgcagaggtttttatttttttctgcttagcctcaaggttgaggttttccatgatttgtaatattacaga

SEQ ID NO: 246187 - DNA, 120 bp, Artificial Sequence
  ENSG00000122507_38 (sequence is synthesized)
caagacgatcaaaaccatggcttttcacttgaatgtatattgttaagtcccattccttttagattaatgaaaagaatgaataaacatttgaaggaaaaatatgagtactataaggatttt

SEQ ID NO: 246188 - DNA, 120 bp, Artificial Sequence
  ENSG00000122507_39 (sequence is synthesized)
gacttaatttttatgtaccttgccattcaattttattatatgtatatatttgtaataaatgagggtgaggtgttgattgttcaataagtttcatgagcataataaagtctattttaattc

SEQ ID NO: 246189 - DNA, 120 bp, Artificial Sequence
  ENSG00000122507_40 (sequence is synthesized)
ccaggcctgaccccaggactggacagaggatcgaggcctggaccctaagaataccccactccctgagccagcatctccagctgatggagggacccaaaagctaagcggggtcaatcagac

SEQ ID NO: 246190 - DNA, 120 bp, Artificial Sequence
  ENSG00000122507_41 (sequence is synthesized)
accttccctgggatggttaaaactgggacaggccaatggagaaggtccttctgtctttggtctgtgatgcgaggaacacagggatctttcctgttgtgtggagaaagaggagcccagagc

SEQ ID NO: 246191 - DNA, 120 bp, Artificial Sequence
  ENSG00000122507_42 (sequence is synthesized)
cgtactgagccaagggggtgccagggagaggctgccaggcctgggccctggaaccagccccccaaggccctggaaccagcctgctccatgcagctgcggctcttccagtctgtgagctac

SEQ ID NO: 246192 - DNA, 120 bp, Artificial Sequence
  ENSG00000122507_43 (sequence is synthesized)
tcagtgccctttcaacaaaccccgccttgttttgctttaatcagtttgcattttctgttgcttctttctggaaaaatcctctgtgctttgactgactccagggtcttcctccttgaggtg

SEQ ID NO: 246193 - DNA, 120 bp, Artificial Sequence
  ENSG00000122507_44 (sequence is synthesized)
gatttcttagtcactgttaggtatccaaatataggcgagtgtaaggcatttttctttcaactgttcattttaatgaattacattcaggaaataagtaggaaattaaattcattgaaagac

SEQ ID NO: 246194 - DNA, 120 bp, Artificial Sequence
  ENSG00000122507_45 (sequence is synthesized)
aatctggtcagtttttgtcataccagagagcattccgcaaagctgcttgttttccaatttcttcattcttccccttagcactggtgcagctgaatttgatcctttgtgtattcctgtcac

SEQ ID NO: 246195 - DNA, 120 bp, Artificial Sequence
  ENSG00000122507_46 (sequence is synthesized)
cccacccacacgcaccgaggggagagggcggtcacgcggccgggggggcgtggcctgcccccggagcccaggcaggaggagggtcttccttaaggaactgctgccaggacagggcagagg

SEQ ID NO: 246196 - DNA, 120 bp, Artificial Sequence
  ENSG00000122507_47 (sequence is synthesized)
attgcagtaattatcactctctgctaatgaggaccaggccgtggttcactcgagccccgccccagtagcaatctaattccaaccgcggccctctcagaagtcggtccccgcctttgcgcc

SEQ ID NO: 246197 - DNA, 120 bp, Artificial Sequence
  ENSG00000122507_48 (sequence is synthesized)
ttggggtttaaatttcatattaaagtgatgatagccaagaaaattgatttcacgtttcccctctgacatcccagggtaaccccttgaataaatatccctgagatatttgcttgctagaca

SEQ ID NO: 246198 - DNA, 120 bp, Artificial Sequence
  ENSG00000122507_49 (sequence is synthesized)
agaggatatatctgaatacttgccttcttggcatttatacattcaaagctcagtgctagattagagctattatttgcatagtcttttggtattgcccacttttggcattaccatattatt

SEQ ID NO: 246199 - DNA, 120 bp, Artificial Sequence
  ENSG00000122507_50 (sequence is synthesized)
tgacaattagaaggaatagggaaggaatattacatgactgtaaaagagttggttatattttatgttgacttcaagggttccatttgaactattatgggcaattaaagagttttacatttc

SEQ ID NO: 246200 - DNA, 120 bp, Artificial Sequence
  ENSG00000122507_51 (sequence is synthesized)
gcgtcgggccccaagtcaggggctccgggtctcgggcccagccgccaggcgggctgctgcgggtgggtggggagcgccgcctagctggagccgaagcggggcgaggcgctagttgggagc

SEQ ID NO: 246201 - DNA, 120 bp, Artificial Sequence
  ENSG00000122507_52 (sequence is synthesized)
tctcatcataataaatgaggacaataatagtatcaacctcacaggtttgttgtgaagatttaaagagttacttcatgtaagtgcttatgacagtacctggcatgtggtgagtgcttatta

SEQ ID NO: 246202 - DNA, 120 bp, Artificial Sequence
  ENSG00000122507_53 (sequence is synthesized)
actgccagattcctgggctaaaaggaagccaagaggagggagtaaaaggaagcaaagaagatttgataaataagattaggtggttgtactacaatcccagagtcagacctagaagaaaga

SEQ ID NO: 246203 - DNA, 120 bp, Artificial Sequence
  ENSG00000122507_54 (sequence is synthesized)
agacctagaagaaagatcagtagaacaagactctacagaactgtttaccaaccacagacatctcactgcagagacacccaggcctgggtctccctctgttgcccgggctggagtgcagtg

SEQ ID NO: 246204 - DNA, 120 bp, Artificial Sequence
  ENSG00000122507_55 (sequence is synthesized)
ctgcaatctcgacctcctgggttcaagtgatcctcctgcttcagccccccaagtagctgagactacagattcctgggtatggcatctccataccaatctgaaaacataagagagctcgaa

SEQ ID NO: 246205 - DNA, 120 bp, Artificial Sequence
  ENSG00000122507_56 (sequence is synthesized)
gaaaagcatagactcagatgcaataatcacttgggttctctgagtgaacagccttgggtagccaccatccagagcagtggagacatcaccagtcccagaagtccctgatgtcccttccag

SEQ ID NO: 246206 - DNA, 120 bp, Artificial Sequence
  ENSG00000122507_57 (sequence is synthesized)
tcacgactctgtcccctcgcctaggacatacatgtagatcaacatggaaggagtagcccttgaccatcagtgtatgactccattgcatagtgcttgctgcagaattgccttgcctgtcag

SEQ ID NO: 246207 - DNA, 120 bp, Artificial Sequence
  ENSG00000122507_58 (sequence is synthesized)
ggctgtgtggagtgggcacagcgcttgctctcatgagccggtccctggatctacatcaagatggtgcctggatctgtggatggactctggtcctaccttggcccctgctgcactgaagct

SEQ ID NO: 246208 - DNA, 120 bp, Artificial Sequence
  ENSG00000122507_59 (sequence is synthesized)
cctggcatttccagggagccttgcccctgtgtgttattggcctgtttttctgatgtctgcagcctgacaaacatgtcacctggtctttctcagctgggtggctcctctttgttgattcaa

SEQ ID NO: 246209 - DNA, 120 bp, Artificial Sequence
  ENSG00000122507_60 (sequence is synthesized)
tgcctcctggtcttgcacccactccccgactcagatactctgcttgggctcttccaggagatcagtgtgctctgccaggtcccagggcagacctgctggctctcagcttggcactgagga

SEQ ID NO: 246210 - DNA, 120 bp, Artificial Sequence
  ENSG00000122507_61 (sequence is synthesized)
atgctctggagtaaacactagccctccccacctgctacatgctcagccctctcccctctgccgtgttgcctcatgtctcagtcatttctgattcctcgttacctagcagaatgtctggca

SEQ ID NO: 246211 - DNA, 120 bp, Artificial Sequence
  ENSG00000122507_62 (sequence is synthesized)
cttttgctcagtaagatgcttttgaaattgaactggattgtgaattcctttcagtgagtggtccatgctttatttggcaaatagatgccaatgactactattttctcgaaattttataaa

SEQ ID NO: 246212 - DNA, 120 bp, Artificial Sequence
  ENSG00000122507_63 (sequence is synthesized)
gttaattattgatacacccaaagcagagggatcttctgatccccaaagcctggctttcagtgttgttttaacccttctaaaatctcaagtttctctaataaaaaccacgatagtctgaaa

SEQ ID NO: 246213 - DNA, 120 bp, Artificial Sequence
  ENSG00000122507_64 (sequence is synthesized)
caagccgaagatttgcttctagaagtggatctacgagatccagtacttcaagtggaagtaggaaagtttgtttcgcggagtttcactctcgtcgcccagactggagtgcaatggcgtgat

SEQ ID NO: 246214 - DNA, 120 bp, Artificial Sequence
  ENSG00000122507_65 (sequence is synthesized)
ccaggttgctattctggaagcggcatttctgccgctacaagaagacactcaagaattggtaaggacctgaaagcctgtggtgggaacagccagcattattgaagtttcggctttaggaag

SEQ ID NO: 246215 - DNA, 120 bp, Artificial Sequence
  ENSG00000122507_66 (sequence is synthesized)
gatctccaacccttggagggacagactgttaacatcctcatttgtagatgaggatgaggctaagaggaattaagtaacttgctcaaggtcaaacaggtgacagagccagaattccaaacc

SEQ ID NO: 246216 - DNA, 120 bp, Artificial Sequence
  ENSG00000122507_67 (sequence is synthesized)
agcctagtctggaatattccagataccacactcttcacaggttcccaacacttgaacataaacactcaataatctgtataatacatcaagtgcccacttttcttattgtcatctttgtat

SEQ ID NO: 246217 - DNA, 120 bp, Artificial Sequence
  ENSG00000122512_0 (sequence is synthesized)
gtggtactgagtctaagcactgcggtaaaggagttagtagaaaacagtctggatgctggtgccactaatattgatctaaagcttaaggactatggagtggatcttattgaagtttcagac

SEQ ID NO: 246218 - DNA, 120 bp, Artificial Sequence
  ENSG00000122512_1 (sequence is synthesized)
aagaagaaaacttcgaaggcttaactctgaaacatcacacatctaagattcaagagtttgccgacctaactcaggttgaaacttttggctttcggggggaagctctgagctcactttgtg

SEQ ID NO: 246219 - DNA, 120 bp, Artificial Sequence
  ENSG00000122512_2 (sequence is synthesized)
ctgagctcactttgtgcactgagcgatgtcaccatttctacctgccacgcatcggcgaaggttggaactcgactgatgtttgatcacaatgggaaaattatccagaaaaccccctacccc

SEQ ID NO: 246220 - DNA, 84 bp, Artificial Sequence
  ENSG00000122512_3 (sequence is synthesized)
tgatcacaatgggaaaattatccagaaaaccccctacccccgccccagagggaccacagtcagcgtgcagcagttattttccac

SEQ ID NO: 246221 - DNA, 120 bp, Artificial Sequence
  ENSG00000122512_4 (sequence is synthesized)
tactgtatcatttcagcaggcatccgtgtaagttgcaccaatcagcttggacaaggaaaacgacagcctgtggtatgcacaggtggaagccccagcataaaggaaaatatcggctctgtg

SEQ ID NO: 246222 - DNA, 120 bp, Artificial Sequence
  ENSG00000122512_5 (sequence is synthesized)
tttgggcagaagcagttgcaaagcctcattccttttgttcagctgccccctagtgactccgtgtgtgaagagtacggtttgagctgttccgatgctctgcataatcttttttacatctca

SEQ ID NO: 246223 - DNA, 120 bp, Artificial Sequence
  ENSG00000122512_6 (sequence is synthesized)
ggtttcatttcacaatgcacgcatggagttggaaggagttcaacagacagacagtttttctttatcaaccggcggccttgtgacccagcaaaggtctgcagactcgtgaatgaggtctac

SEQ ID NO: 246224 - DNA, 120 bp, Artificial Sequence
  ENSG00000122512_7 (sequence is synthesized)
cacatgtataatcgacaccagtatccatttgttgttcttaacatttctgttgattcagaatgcgttgatatcaatgttactccagataaaaggcaaattttgctacaagaggaaaagctt

SEQ ID NO: 246225 - DNA, 120 bp, Artificial Sequence
  ENSG00000122512_8 (sequence is synthesized)
ttgttggcagttttaaagacctctttgataggaatgtttgatagtgatgtcaacaagctaaatgtcagtcagcagccactgctggatgttgaaggtaacttaataaaaatgcatgcagcg

SEQ ID NO: 246226 - DNA, 120 bp, Artificial Sequence
  ENSG00000122512_9 (sequence is synthesized)
gatttggaaaagcccatggtagaaaagcaggatcaatccccttcattaaggactggagaagaaaaaaaagacgtgtccatttccagactgcgagaggccttttctcttcgtcacacaaca

SEQ ID NO: 246227 - DNA, 120 bp, Artificial Sequence
  ENSG00000122512_10 (sequence is synthesized)
gagaacaagcctcacagcccaaagactccagaaccaagaaggagccctctaggacagaaaaggggtatgctgtcttctagcacttcaggtgccatctctgacaaaggcgtcctgagacct

SEQ ID NO: 246228 - DNA, 120 bp, Artificial Sequence
  ENSG00000122512_11 (sequence is synthesized)
cagaaagaggcagtgagttccagtcacggacccagtgaccctacggacagagcggaggtggagaaggactcggggcacggcagcacttccgtggattctgaggggttcagcatcccagac

SEQ ID NO: 246229 - DNA, 120 bp, Artificial Sequence
  ENSG00000122512_12 (sequence is synthesized)
acgggcagtcactgcagcagcgagtatgcggccagctccccaggggacaggggctcgcaggaacatgtggactctcaggagaaagcgcctaaaactgacgactctttttcagatgtggac

SEQ ID NO: 246230 - DNA, 120 bp, Artificial Sequence
  ENSG00000122512_13 (sequence is synthesized)
tgccattcaaaccaggaagataccggatgtaaatttcgagttttgcctcagccaactaatctcgcaaccccaaacacaaagcgttttaaaaaagaagaaattctttccagttctgacatt

SEQ ID NO: 246231 - DNA, 120 bp, Artificial Sequence
  ENSG00000122512_14 (sequence is synthesized)
tgtcaaaagttagtaaatactcaggacatgtcagcctctcaggttgatgtagctgtgaaaattaataagaaagttgtgcccctggacttttctatgagttctttagctaaacgaataaag

SEQ ID NO: 246232 - DNA, 120 bp, Artificial Sequence
  ENSG00000122512_15 (sequence is synthesized)
cagttacatcatgaagcacagcaaagtgaaggggaacagaattacaggaagtttagggcaaagatttgtcctggagaaaatcaagcagccgaagatgaactaagaaaagagataagtaaa

SEQ ID NO: 246233 - DNA, 120 bp, Artificial Sequence
  ENSG00000122512_16 (sequence is synthesized)
acgatgtttgcagaaatggaaatcattggtcagtttaacctgggatttataataaccaaactgaatgaggatatcttcatagtggaccagcatgccacggacgagaagtataacttcgag

SEQ ID NO: 246234 - DNA, 120 bp, Artificial Sequence
  ENSG00000122512_17 (sequence is synthesized)
atgctgcagcagcacaccgtgctccaggggcagaggctcatagcacctcagactctcaacttaactgctgttaatgaagctgttctgatagaaaatctggaaatatttagaaagaatggc

SEQ ID NO: 246235 - DNA, 120 bp, Artificial Sequence
  ENSG00000122512_18 (sequence is synthesized)
tttgattttgttatcgatgaaaatgctccagtcactgaaagggctaaactgatttccttgccaactagtaaaaactggaccttcggaccccaggacgtcgatgaactgatcttcatgctg

SEQ ID NO: 246236 - DNA, 120 bp, Artificial Sequence
  ENSG00000122512_19 (sequence is synthesized)
agcgacagccctggggtcatgtgccggccttcccgagtcaagcagatgtttgcctccagagcctgccggaagtcggtgatgattgggactgctcttaacacaagcgagatgaagaaactg

SEQ ID NO: 246237 - DNA, 120 bp, Artificial Sequence
  ENSG00000122512_20 (sequence is synthesized)
aaccatgagacacatcgccaacctgggtgtcatttctcagaactgaccgtagtcactgtatggaataattggttttatcgcagatttttatgttttgaaagacagagtcttcactaacct

SEQ ID NO: 246238 - DNA, 120 bp, Artificial Sequence
  ENSG00000122512_21 (sequence is synthesized)
tttttgttttaaaatgaacctgctacttaaaaaaaatacacatcacacccatttaaaagtgatcttgagaaccttttcaaaccagatggagcattgcttgcaaattttttttctctatgt

SEQ ID NO: 246239 - DNA, 120 bp, Artificial Sequence
  ENSG00000122512_22 (sequence is synthesized)
gagcattgcttgcaaattttttttctctatgtttgcatgcgctcgtgtgtgtgtgtccaggcaagaacacattttataaaaataagaacacttgggctgggcatggtggctcatgcctgt

SEQ ID NO: 246240 - DNA, 120 bp, Artificial Sequence
  ENSG00000122512_23 (sequence is synthesized)
acaaaacaaaaaaaaaaaaaccaaaccactttggaagttactcaggcctctgctctggctggacatagtttagtctataactttcaacccttaatgataattaaattcatctttgtttaa

SEQ ID NO: 246241 - DNA, 120 bp, Artificial Sequence
  ENSG00000122512_24 (sequence is synthesized)
tttcataaatttaaaagtagggtccttttcagttagtgattctcagccctgattcacattaaatttttaaacacgggggattctctgcccggctggaagaaaatgactggatgggacagg

SEQ ID NO: 246242 - DNA, 120 bp, Artificial Sequence
  ENSG00000122512_25 (sequence is synthesized)
ggtcactatttgaaacattcctctgtgcggccaaggtcgcaaaatgctgtcctcgcaggggaacaaaaagagtttgatttcccataatttgatgctgtgatttggtttcctcaggatgtg

SEQ ID NO: 246243 - DNA, 120 bp, Artificial Sequence
  ENSG00000122512_26 (sequence is synthesized)
aactgtagaacattccagttactggccttgaatggttctgggaatataagaatccctgtctgtcttttcaaatagttttcatggaaccttgtcctgtttgaacttggctgaaaatggaag

SEQ ID NO: 246244 - DNA, 120 bp, Artificial Sequence
  ENSG00000122512_27 (sequence is synthesized)
taaagatgccctcttgggggcccagagatgacagatgtggctccccctgctgcccccaccccttctccagactgtgggcggctccccttcctgctttagaatccctcagatggaggaggc

SEQ ID NO: 246245 - DNA, 120 bp, Artificial Sequence
  ENSG00000122512_28 (sequence is synthesized)
agtacagtagtcactgtgccatcgtgtctggcactgtgctggcgtggtctgcaggatcccacttatgaactctccagattgggagctgtggcaggataacagcccccaagacagctgtgt

SEQ ID NO: 246246 - DNA, 120 bp, Artificial Sequence
  ENSG00000122512_29 (sequence is synthesized)
gtgtcctaatccccagaacctgtgaccacgctgcctcacgtggcagaagggactcggcaggtgtgattgagtgaaggatcttttttttttttttctttgagatgaagtttcgctcttgtt

SEQ ID NO: 246247 - DNA, 120 bp, Artificial Sequence
  ENSG00000122512_30 (sequence is synthesized)
gccatcatgcctggctgagttaaggatcttgcaacagagagattatcctggattgtctgggtgggcccagtccattgggtgagtccttcaaaggtggagacctttccctgctggccagag

SEQ ID NO: 246248 - DNA, 120 bp, Artificial Sequence
  ENSG00000122512_31 (sequence is synthesized)
agaggctgtcttgctggttttggagatggaaggaggtaccactagtcaaggattgcaagcagtctctagaacagggattccaacactccggacacagaccagtagtggtccatggcctat

SEQ ID NO: 246249 - DNA, 120 bp, Artificial Sequence
  ENSG00000122512_32 (sequence is synthesized)
taggaagtggggtgcacagcaggttaggggccggcaagccagcgaagcttcatctgtatttatagccactccccgtcgctggcgttaccacccgagctccgcctcctgtcacatcagcgg

SEQ ID NO: 246250 - DNA, 120 bp, Artificial Sequence
  ENSG00000122512_33 (sequence is synthesized)
tgggcattagattctcatagcagcacgagccctattgtgaactgcacacacgagggatgtaggttgcacgctccttatgagaatctgatgcctgatgatctgtcactgtctcccgtcacc

SEQ ID NO: 246251 - DNA, 120 bp, Artificial Sequence
  ENSG00000122512_34 (sequence is synthesized)
ggaaaacaagctcagggctcccactgagtctctgtgatggtgagttgtagaattatttaattatatgttacaatgtaataatagtagaaataaagtgcacaataaatgcaatgcacttga

SEQ ID NO: 246252 - DNA, 120 bp, Artificial Sequence
  ENSG00000122512_35 (sequence is synthesized)
gcacaataaatgcaatgcacttgaatcgtcctgaaaccatccctccccgaccccaatccatggaaaaattgtgttccgcgaaaccggtctctggtgccaaaaaggttggggaccgcttct

SEQ ID NO: 246253 - DNA, 120 bp, Artificial Sequence
  ENSG00000122512_36 (sequence is synthesized)
ggaaaagctggaaaaggcaagaaaacgcattctctccctcagcctctggaaggaaccagcactgtgggactaatttacatactgtagggtaataaatttgtgttgcttcgaaccactaaa

SEQ ID NO: 246254 - DNA, 120 bp, Artificial Sequence
  ENSG00000122512_37 (sequence is synthesized)
aaaacttcgaaggcttaagtaagttgactttttctaatcctattataaaataattgggtcacatgtctcagaattttgagtaacactgtcttgggaaatgcaaaaacagttttttaaagc

SEQ ID NO: 246255 - DNA, 120 bp, Artificial Sequence
  ENSG00000122512_38 (sequence is synthesized)
tgaaacatcacacatctaagattcaagagtttgccgacctaactcaggttgaaacttttggctttcggggggaagctctgagctcactttgtgcactgaggtgatacaatatttttatcc

SEQ ID NO: 246256 - DNA, 120 bp, Artificial Sequence
  ENSG00000122512_39 (sequence is synthesized)
actcacttgaccccttagagaaacctctctgaaaattaattggaatcattattattttcagttttctatctcaacatctcaacttctagcttctgaattctgttttgtctcgctgccaat

SEQ ID NO: 246257 - DNA, 80 bp, Artificial Sequence
  ENSG00000122512_40 (sequence is synthesized)
aaaagatggttacccttattaaaacagtaattctcaattttaacctaacatgtagataataaatgatagttaccattggt

SEQ ID NO: 246258 - DNA, 76 bp, Artificial Sequence
  ENSG00000122512_41 (sequence is synthesized)
gtgggagccctggagggaactttcccagtccccgaggcggatcgggtgttgcatccatggagcgagctgagagctc

SEQ ID NO: 246259 - DNA, 120 bp, Artificial Sequence
  ENSG00000122512_42 (sequence is synthesized)
agccaatgggagttcaggaggcggagcgcctgtgggagccctggagggaactttcccagtccccgaggcggatcgggtgttgcatccatggagcgagctgagagctcgagtacagaacct

SEQ ID NO: 246260 - DNA, 120 bp, Artificial Sequence
  ENSG00000122512_43 (sequence is synthesized)
gagttcaggaggcggagcgcctgtgggagccctggagggaactttcccagtccccgaggcggatcgggtgttgcatccatggagcgagctgagagctcgagatctaaagcttaaggacta

SEQ ID NO: 246261 - DNA, 120 bp, Artificial Sequence
  ENSG00000122512_44 (sequence is synthesized)
tctcattaaagatttaacattaaagacttaactttaggatgatttacttttttcttttcatcacatagtgtttattaggactgggcaacacagtgagaccctgtctctatgaaaaatttt

SEQ ID NO: 246262 - DNA, 70 bp, Artificial Sequence
  ENSG00000122512_45 (sequence is synthesized)
ctgggcaacacagtgagaccctgtctctatgaaaaattttaaaaaaaaatttactgggcatggtgacatg

SEQ ID NO: 246263 - DNA, 82 bp, Artificial Sequence
  ENSG00000122512_46 (sequence is synthesized)
gtgagctatgattgcgccactgcacttaagactgggagacagaataagatcctgtctggaaaaatatatatacatatatata

SEQ ID NO: 246264 - DNA, 120 bp, Artificial Sequence
  ENSG00000122515_0 (sequence is synthesized)
aggggccgggccaggccgggcggagccagagcagctgagttccagataaaaactgtcagacccggcctgtaggctgctccattgccaatgaactccatgaaccccatgaaacctgccctg

SEQ ID NO: 246265 - DNA, 120 bp, Artificial Sequence
  ENSG00000122515_1 (sequence is synthesized)
ccccctgcgccacacggtgatggttcattcgcatatgagtctgtgccttggcaacaaagcgccactcagccggctggatcgctgtctgtggtcactactgtgtggggagttggcaacgcg

SEQ ID NO: 246266 - DNA, 120 bp, Artificial Sequence
  ENSG00000122515_2 (sequence is synthesized)
acacagagccaggttttggggaaccccatgggccctgcagggagtccctctggcagctccatgatgcctggtgtggcagggggcagctccgccttgacctccccacagtgcctgggacag

SEQ ID NO: 246267 - DNA, 120 bp, Artificial Sequence
  ENSG00000122515_3 (sequence is synthesized)
caggcgtttgctgaaggcggcgccaacaagggctacgtgcagcaaggcgtgtacagccgcgggggctaccctggggcccccggcttcaccaccgggtatgcaggcggcccggggggcctg

SEQ ID NO: 246268 - DNA, 120 bp, Artificial Sequence
  ENSG00000122515_4 (sequence is synthesized)
ggcctcccctcacatgctgcaagaccctccactgacttcacgcaagcggcagctgctgcagctgtggctgctgcggcagccactgccaccgccacagccacagccaccgtggctgctctc

SEQ ID NO: 246269 - DNA, 120 bp, Artificial Sequence
  ENSG00000122515_5 (sequence is synthesized)
caggagaagcagagccaggagctgagccagtatggagcgatgggggccggacagtcttttaacagccagtttctgcagcatggaggtccccgggggcctagtgtccccgctggcatgaac

SEQ ID NO: 246270 - DNA, 120 bp, Artificial Sequence
  ENSG00000122515_6 (sequence is synthesized)
cctactggcataggaggggtaatgggcccctctggcctctcccccttggctatgaaccccacccgggcagcaggaatgacacccttgtatgcagggcagcgtctgccccaacatgggtat

SEQ ID NO: 246271 - DNA, 120 bp, Artificial Sequence
  ENSG00000122515_7 (sequence is synthesized)
cctgggcctccccaggcccagccactgccccgacagggggtcaagagaacctactctgaggtgtatccagggcagcagtatctgcaaggaggccagtatgcacccagcaccgcccagttt

SEQ ID NO: 246272 - DNA, 120 bp, Artificial Sequence
  ENSG00000122515_8 (sequence is synthesized)
gcgcccagccctgggcagccccctgccccctccccttcctaccctgggcacaggctgcccctgcagcagggcatgacccagtccctgtccgtgcctggccccacgggactgcattataag

SEQ ID NO: 246273 - DNA, 120 bp, Artificial Sequence
  ENSG00000122515_9 (sequence is synthesized)
cccacagagcagttcaacgggcagggcgccagcttcaacgggggcagcgtcagctacagccaacctggcctgagtgggcctacccgttccatcccgggctatcccagttccccactgcca

SEQ ID NO: 246274 - DNA, 120 bp, Artificial Sequence
  ENSG00000122515_10 (sequence is synthesized)
gggaaccccacgccacccatgaccccaagcagcagcgtcccttacatgtcaccaaaccaagaggtcaagtctcccttcttgcctgatctcaagcccaacctcaactccttgcactcatcg

SEQ ID NO: 246275 - DNA, 120 bp, Artificial Sequence
  ENSG00000122515_11 (sequence is synthesized)
ccctctggaagcgggccttgtgacgagttgcggctgaccttccctgtgcgcgatggggtggtcctggagcccttccgcctgcagcacaacctggctgtaagcaaccatgtcttccagctg

SEQ ID NO: 246276 - DNA, 120 bp, Artificial Sequence
  ENSG00000122515_12 (sequence is synthesized)
cgagactcagtctacaagaccctgataatgaggcctgacctggagctgcaattcaagtgctaccaccacgaggaccggcagatgaacaccaactggccagcctcggtgcaggtcagcgtc

SEQ ID NO: 246277 - DNA, 120 bp, Artificial Sequence
  ENSG00000122515_13 (sequence is synthesized)
aatgccacgccgctcaccatcgagcgtggcgacaacaagacctcgcacaagccactctacctgaagcatgtgtgccagccaggccgcaacaccatccagatcaccgtcaccgcctgctgc

SEQ ID NO: 246278 - DNA, 120 bp, Artificial Sequence
  ENSG00000122515_14 (sequence is synthesized)
tgctcccacctcttcgtgctgcagctagtgcaccgcccatccgtccgctcggtgctgcagggcctcctcaaaaagcgcctcctgcctgctgagcactgcatcaccaagataaagcggaac

SEQ ID NO: 246279 - DNA, 120 bp, Artificial Sequence
  ENSG00000122515_15 (sequence is synthesized)
ttcagcagcggcaccatccctggcacccctgggcccaacggagaggacggggtggagcagacagctatcaaggtgtccctgaagtgccccatcaccttccgcaggatccagctccctgcc

SEQ ID NO: 246280 - DNA, 120 bp, Artificial Sequence
  ENSG00000122515_16 (sequence is synthesized)
cgaggtcatgactgtcgccacatacagtgctttgacctggagtcgtacctgcagctcaactgtgagcgggggacttggaggtgtcctgtgtgcaacaagacagctttgctggagggcctg

SEQ ID NO: 246281 - DNA, 120 bp, Artificial Sequence
  ENSG00000122515_17 (sequence is synthesized)
gaggtggaccagtacatgctgggcatcctgatttacattcagaactctgactatgaggagatcaccatcgaccccacgtgcagctggaagccagtgcccgtgaagcctgacatgcacatc

SEQ ID NO: 246282 - DNA, 120 bp, Artificial Sequence
  ENSG00000122515_18 (sequence is synthesized)
aaggaggagccggatgggccagcactgaagcgctgccgcaccgtgagccccgcccacgtgctcatgcccagcgtgatggagatgatcgccgccctgggccccggcgctgccccctttgcc

SEQ ID NO: 246283 - DNA, 120 bp, Artificial Sequence
  ENSG00000122515_19 (sequence is synthesized)
cccctgcagcccccctcagtccctgcccccagcgactaccctggccagggttccagcttcctggggcctggaactttccctgagtccttcccacccaccacgcccagcaccccaaccctt

SEQ ID NO: 246284 - DNA, 120 bp, Artificial Sequence
  ENSG00000122515_20 (sequence is synthesized)
agagaagtctaccgcctgcctcccaagccagatggcaccagcaggtcacctggaccccactcacaatcctgggacaccaggactacacacctccaaccttggggcccctccaggtcccca

SEQ ID NO: 246285 - DNA, 120 bp, Artificial Sequence
  ENSG00000122515_21 (sequence is synthesized)
gctgcaccattcaaaccctcccccagcgtcccggcagtccttgggccaagcgagcttaggacctacgggtgaactggccttcagtcctgccacaggcgtgatggggccccccagcatgtc

SEQ ID NO: 246286 - DNA, 120 bp, Artificial Sequence
  ENSG00000122515_22 (sequence is synthesized)
tggagccggggaggccccagaaccagctctggacctgctcccggaactgaccaaccctgatgagctactgtcctacttgggcccacccgacctccctacgaacaacaatgacgacctgct

SEQ ID NO: 246287 - DNA, 120 bp, Artificial Sequence
  ENSG00000122515_23 (sequence is synthesized)
ttctctgtttgagaacaactgatcctgtgtttaccccaagcccggcggggacacgctcacagatgtcaccacagccctgcccttcatgcccagccccatgggacacccggtggtctttcc

SEQ ID NO: 246288 - DNA, 120 bp, Artificial Sequence
  ENSG00000122515_24 (sequence is synthesized)
caaacctcccccaaaacacacctggagccagagccttctgccgccagccctgcccctgaattggaagcagccctgtgctcgatgggaggggctcccaggccggcagcccttgccacctcc

SEQ ID NO: 246289 - DNA, 120 bp, Artificial Sequence
  ENSG00000122515_25 (sequence is synthesized)
ctctgccaagcctgctgctgcagaacggtttttgctgaggtgcccctgcccagccctgtccagccttgtccacacacacatctcacgcccctggtctcacagcctcacaccttgtccttc

SEQ ID NO: 246290 - DNA, 120 bp, Artificial Sequence
  ENSG00000122515_26 (sequence is synthesized)
cacccctgcctgcccccacccagcctgcttcttgtccagcattgatccttctgtttcaacaactcctccactgggcagagctgggcatctggcagggctggctctgtcccctgggccttt

SEQ ID NO: 246291 - DNA, 120 bp, Artificial Sequence
  ENSG00000122515_27 (sequence is synthesized)
ggctccagtggcccctgtgcccagcagtccagctcttggaacctcgctgaatggcagcctcttgggggcctggagctctggcagcccagccgtgtgtggtgtcaggttcctctccccacc

SEQ ID NO: 246292 - DNA, 120 bp, Artificial Sequence
  ENSG00000122515_28 (sequence is synthesized)
ccagcttcaagcagaggcctcggggtgggggagctacaaagcacaacaatgtacatagtgtagaaacactaacagctgggagaggggagccagctgtccagccagcatgttcctgttgta

SEQ ID NO: 246293 - DNA, 120 bp, Artificial Sequence
  ENSG00000122515_29 (sequence is synthesized)
cagcccggtctccctgcgcgctctgctccttcccatgtgcagacagatcagggaggaacctccaatgggtgggggacagtgagcttcggcctggccgaggtgggtgggtgggctctcaga

SEQ ID NO: 246294 - DNA, 120 bp, Artificial Sequence
  ENSG00000122515_30 (sequence is synthesized)
ttcagctctgtgtaaagattctctagcgggctgcgctcccaagttccccttctctgtgaaagtgaagaattagtacagctgtgttttttaaagccacctctctgtctccaccccatgggc

SEQ ID NO: 246295 - DNA, 120 bp, Artificial Sequence
  ENSG00000122515_31 (sequence is synthesized)
ccacacccaggtgggggaggaggaagccactgcatctgttggctcagggccccagcctgtgcgagcagggcgcctgggctgttgtgtctcctgtctgtgccgatctctattaaaggactc

SEQ ID NO: 246296 - DNA, 120 bp, Artificial Sequence
  ENSG00000122515_32 (sequence is synthesized)
cctcttggtgggcctggccgagtccctcctttgtgctcccagggactattttctcctcgtaagccagcgacctgcctaaagcttgggctgtgcctgcaaagcttgtgcaggacctggggg

SEQ ID NO: 246297 - DNA, 120 bp, Artificial Sequence
  ENSG00000122515_33 (sequence is synthesized)
ccaggtcgaccttcaagtggcttttggggccccaggttgagctctggatgtttcaagccaaggctcggctattcccgccccatagtaaatttccttttccctggaattttccaagttggc

SEQ ID NO: 246298 - DNA, 120 bp, Artificial Sequence
  ENSG00000122515_34 (sequence is synthesized)
ttcagctgaagagctgttttgtgaagcatcccaggcttgcccaggagagacatttgccactatgtcaccttatctgggcttgccctggggcactgagacagttgtttggcagccccagcc

SEQ ID NO: 246299 - DNA, 120 bp, Artificial Sequence
  ENSG00000122515_35 (sequence is synthesized)
cagccaggggctcatccttctcagctcttgtccctgggaggcctctgcttgtcacttcccagagattgcagaggtgtgtcctgcctaccatctgcctgtccagcttggtgggggtccggg

SEQ ID NO: 246300 - DNA, 120 bp, Artificial Sequence
  ENSG00000122515_36 (sequence is synthesized)
tcaccatttcctccagtcctgggccccatccttgagggccttcccagccagccagcaggagaggcaagaactgggggaacacaggaacctaggggaggaggggagcgctgggcatcctca

SEQ ID NO: 246301 - DNA, 120 bp, Artificial Sequence
  ENSG00000122515_37 (sequence is synthesized)
ggctggcggccaaggcctgcccctggaggcactagaggagggcatctgtctgtgggagcccagaggctgcagggaggaggaggagggaggtatctggtgtgagcgttgcccctgcgacat

SEQ ID NO: 246302 - DNA, 120 bp, Artificial Sequence
  ENSG00000122515_38 (sequence is synthesized)
ttgggaccacacaggtgggcttccttattccctgacaaagcctctgtttccagctcttccgccctctctggatgagggaacagaagtggaggaaacaaaagaagcagcagcacgcacagt

SEQ ID NO: 246303 - DNA, 120 bp, Artificial Sequence
  ENSG00000122515_39 (sequence is synthesized)
cctgtcgctgggtgcggagacagcctggcaaagtcccactcagccatggcctgatgcaggccccaggccctcctttcttgggtgtcaaatgactgtgtcctggacatctgatgcaccacc

SEQ ID NO: 246304 - DNA, 120 bp, Artificial Sequence
  ENSG00000122515_40 (sequence is synthesized)
tgccctgcctgttgcaaacgtgatgctcccggatggagtggagaaactaggagactgggacaagcaaaaggctgcaaacaacccagaagcccatcctcagaagactggagaaatgattga

SEQ ID NO: 246305 - DNA, 120 bp, Artificial Sequence
  ENSG00000122515_41 (sequence is synthesized)
ggaatgcatgggcaccgtggccctgtgctccatcacaaacacctctcagaaacaacgtgggatgaaaaagcaagacagttcatacagtatgatgccatttttataaagctcaaaaccaaa

SEQ ID NO: 246306 - DNA, 120 bp, Artificial Sequence
  ENSG00000122515_42 (sequence is synthesized)
ccgggcggagatttcacagggacacacacggaacatgtgacttggtctgagaccgtggtgattacggataggatggacacagactcaccaccaagttctggcaagctagaaccagagggc

SEQ ID NO: 246307 - DNA, 120 bp, Artificial Sequence
  ENSG00000122515_43 (sequence is synthesized)
atcccttgatgcttagtgtggaaacaggagaagtgaaggaatcttaacttccagaggggcacagggtcaaggataccagacctggagactggaagtcttttcagagagactgtcctcaga

SEQ ID NO: 246308 - DNA, 120 bp, Artificial Sequence
  ENSG00000122515_44 (sequence is synthesized)
tgtcttttcagcccctccaacctgtttgatcattttcctctgtggctatgattgctttaagtagtgttacttgtagattatttggaaaatacaagagagtgtaaagaagaccgtgtatgg

SEQ ID NO: 246309 - DNA, 120 bp, Artificial Sequence
  ENSG00000122515_45 (sequence is synthesized)
tgggcttctagggtcaggtccagggggcccggcaggggtcaggttggagccccaggtgcatgcagttttctctcccgcagcccacagagcagttcaacgggcagggcgccagcttcaacg

SEQ ID NO: 246310 - DNA, 120 bp, Artificial Sequence
  ENSG00000122515_46 (sequence is synthesized)
ggggcagcgtcagctacagccaacctggcctgagtggggtagggggcctggccgggaggatgggccgggaggctcacagggtgggcatatggagagagggcgaccgggcaggcacccctg

SEQ ID NO: 246311 - DNA, 120 bp, Artificial Sequence
  ENSG00000122515_47 (sequence is synthesized)
gggccgcctcctgtccacctctgttatcatggttcccagtgggtgcgccgtgaacagactccactcccatccaccctggcaatctgccttgactgtttgtgctcaaccctacagcctacc

SEQ ID NO: 246312 - DNA, 120 bp, Artificial Sequence
  ENSG00000122515_48 (sequence is synthesized)
tctcagggacgtggcggtgaaggcacagtctcagctatggtcccaggaaacagacagtggggcctccacccttccttccccgtttggattaaggggctcctggctggaacacctcacagg

SEQ ID NO: 246313 - DNA, 120 bp, Artificial Sequence
  ENSG00000122515_49 (sequence is synthesized)
actggccccatctggggcccccctctgggacccacctcacacgcgtggtgcgtttgtttgtggctgctcccattcctataacctccgagaccttcactcctaggaatgtcccaaggccaa

SEQ ID NO: 246314 - DNA, 120 bp, Artificial Sequence
  ENSG00000122515_50 (sequence is synthesized)
ttcccttggcagcaatgagaagaaatgcccttttccaaatagcgacttctgcaaaacccgctgttgtttgtgggtgagcactgcaagtcccacccatgccacagccagcctccctcctgg

SEQ ID NO: 246315 - DNA, 120 bp, Artificial Sequence
  ENSG00000122515_51 (sequence is synthesized)
ctcagatgaccctgggcatatggctcctctccccagatcagtctcctcacctgcaagaatgtggctatgcaggtcacacacctaggttatcagtgttgccacacaaaacatgccgcgggg

SEQ ID NO: 246316 - DNA, 120 bp, Artificial Sequence
  ENSG00000122515_52 (sequence is synthesized)
cagggagcagcaggtgggtacccaaaacatttgaatgttctttatggaaaagtgtcattccttctacttgctgcagagaaatccattgagaggacaggccctcgctgctggccatgtacc

SEQ ID NO: 246317 - DNA, 120 bp, Artificial Sequence
  ENSG00000122515_53 (sequence is synthesized)
ggctgagaggtgaggacagagaggctgaggcatgacatatgaggatggggcctcctgagtcccctaagtctttggacactggttctctttccacacctgctgtgggattttcttctcctg

SEQ ID NO: 246318 - DNA, 120 bp, Artificial Sequence
  ENSG00000122515_54 (sequence is synthesized)
tcttcacctagccttcacaaaatgccccaacctccctgtggacagctgctttccctgcttcccgtgctataccctgtcccccccacctctcccccaacccacttgccaggcctgttggtt

SEQ ID NO: 246319 - DNA, 120 bp, Artificial Sequence
  ENSG00000122515_55 (sequence is synthesized)
tctagcactttggagctgctgcatgaagcacgttgtttggctggttccctttggtgattcctgcttcctcataggttttggggaaccccatgggccctgcagggagtccctctggcagct

SEQ ID NO: 246320 - DNA, 120 bp, Artificial Sequence
  ENSG00000122543_0 (sequence is synthesized)
cagtgggcctgggaagatgtgtttcccctggatgtgcacattcctgtttgtggcttatcgcctctcatttattctgtgtgagtaggtagaaaatgagcatcacggacgtgctcagtgctg

SEQ ID NO: 246321 - DNA, 120 bp, Artificial Sequence
  ENSG00000122543_1 (sequence is synthesized)
acgacattgcagcagcgctccaggaatgccgagacccagacacttttgaaccccaaaaattcttccagacatcaggcctctccaagatgtcagccaatcaggtgaaggatgttttccggt

SEQ ID NO: 246322 - DNA, 120 bp, Artificial Sequence
  ENSG00000122543_2 (sequence is synthesized)
aaaccaagtccttgatggctgcggcggataatgatggagatgggaaaattggagcagaggaattccaggaaatggtgcattcttaaaagccccagtctctggagaaaagagagaaaggga

SEQ ID NO: 246323 - DNA, 120 bp, Artificial Sequence
  ENSG00000122543_3 (sequence is synthesized)
taatcacctggaaggattccaaagccctgggaatggggaaccccacatcccatccctacctaatttgttaattttccctgaaaaccttctgcagtttgctcattgttttagtgaggtcac

SEQ ID NO: 246324 - DNA, 120 bp, Artificial Sequence
  ENSG00000122543_4 (sequence is synthesized)
gagggagtcactcctgactttcttggtggtgggtatatgccctgacaacttctgtaagccccccttcccccaacaggcaatgcctctaaaaatcacccaataaagacaggcttctcatca

SEQ ID NO: 246325 - DNA, 120 bp, Artificial Sequence
  ENSG00000122543_5 (sequence is synthesized)
ggaaatctaagaggttgtaactatcactttttctagcctatataaggtaggtcagtaaggtagcaaaaacacatctgttgttttgctccttcaactctttttcctgattcttcctggggg

SEQ ID NO: 246326 - DNA, 120 bp, Artificial Sequence
  ENSG00000122545_0 (sequence is synthesized)
gagatggaagccagcctccgctaggcccggaagcctcgtctgagggggcgggggacggaggagggagcgggagtcgagcgagagcctgtggaggagtccgcctgctgtagcgtgcgtaag

SEQ ID NO: 246327 - DNA, 120 bp, Artificial Sequence
  ENSG00000122545_1 (sequence is synthesized)
caaggcagctacgccgggcggctacgctgcggaatcggcgtaggcgcctttggagaatcggcgggctgcgctccgctggggctggtcgcggagggggggaggggatgtcggtcagtgcga

SEQ ID NO: 246328 - DNA, 120 bp, Artificial Sequence
  ENSG00000122545_2 (sequence is synthesized)
gatccgctgctgctgaggagaggagcgtcaacagcagcaccatgggtcagcaacagaagaaccttgaaggctatgtgggatttgccaatctcccaaatcaagtatacagaaaatcggtga

SEQ ID NO: 246329 - DNA, 120 bp, Artificial Sequence
  ENSG00000122545_3 (sequence is synthesized)
agagaggttttgaattcacgcttatggtagtgggtgaatctggattgggaaagtcgacattaatcaactcattattcctcacagatttgtattctccagagtatccaggtccttctcata

SEQ ID NO: 246330 - DNA, 120 bp, Artificial Sequence
  ENSG00000122545_4 (sequence is synthesized)
gaattaaaaagactgtacaggtggaacaatccaaagttttaatcaaagaaggtggtgttcagttgctgctcacaatagttgataccccaggatttggagatgcagtggataatagtaatt

SEQ ID NO: 246331 - DNA, 120 bp, Artificial Sequence
  ENSG00000122545_5 (sequence is synthesized)
gctggcagcctgttatcgactacattgatagtaaatttgaggactacctaaatgcagaatcacgagtgaacagacgtcagatgcctgataacagggtgcagtgttgtttatacttcattg

SEQ ID NO: 246332 - DNA, 120 bp, Artificial Sequence
  ENSG00000122545_6 (sequence is synthesized)
ctccttcaggacatggacttaaaccattggatattgagtttatgaagcgtttgcatgaaaaagtgaatatcatcccacttattgccaaagcagacacactcacaccagaggaatgccaac

SEQ ID NO: 246333 - DNA, 120 bp, Artificial Sequence
  ENSG00000122545_7 (sequence is synthesized)
agtttaaaaaacagataatgaaagaaatccaagaacataaaattaaaatatacgaatttccagaaacagatgatgaagaagaaaataaacttgttaaaaagataaaggaccgtttacctc

SEQ ID NO: 246334 - DNA, 120 bp, Artificial Sequence
  ENSG00000122545_8 (sequence is synthesized)
ttgctgtggtaggtagtaatactatcattgaagttaatggcaaaagggtcagaggaaggcagtatccttggggtgttgctgaagttgaaaatggtgaacattgtgattttacaatcctaa

SEQ ID NO: 246335 - DNA, 120 bp, Artificial Sequence
  ENSG00000122545_9 (sequence is synthesized)
gaaatatgttgataagaacacacatgcaggacttgaaagatgttactaataatgtccactatgagaactacagaagcagaaaacttgcagctgtgacttataatggagttgataacaaca

SEQ ID NO: 246336 - DNA, 120 bp, Artificial Sequence
  ENSG00000122545_10 (sequence is synthesized)
agaataaagggcagctgactaagagccctctggcacaaatggaagaagaaagaagggagcatgtagctaaaatgaagaagatggagatggagatggagcaggtgtttgagatgaaggtca

SEQ ID NO: 246337 - DNA, 120 bp, Artificial Sequence
  ENSG00000122545_11 (sequence is synthesized)
aagaaaaagttcaaaaactgaaggactctgaagctgagctccagcggcgccatgagcaaatgaaaaagaatttggaagcacagcacaaagaattggaggaaaaacgtcgtcagttcgagg

SEQ ID NO: 246338 - DNA, 120 bp, Artificial Sequence
  ENSG00000122545_12 (sequence is synthesized)
atgagaaagcaaactgggaagctcaacaacgtattttagaacaacagaactcttcaagaaccttggaaaagaacaagaagaaagggaagatcttttaaactctctattgaccaccagtta

SEQ ID NO: 246339 - DNA, 120 bp, Artificial Sequence
  ENSG00000122545_13 (sequence is synthesized)
acgtattagttgccaatatgccagcttggacatcagtgtttgttggatccgtttgaccaatttgcaccagttttatccataatgatggatttaacagcatgacaaaaattattttttttt

SEQ ID NO: 246340 - DNA, 120 bp, Artificial Sequence
  ENSG00000122545_14 (sequence is synthesized)
ttgttcttgatggagattaagatgccttgaattgtctagggtgttctgtacttagaaagtaagagctctaagtacctttcctacattttctttttttattaaacagatatcttcagttta

SEQ ID NO: 246341 - DNA, 120 bp, Artificial Sequence
  ENSG00000122545_15 (sequence is synthesized)
atgcaagagaacattttactgttgtacaatcatgttctggtggtttgattgtttacaggatattccaaaataaaaggactctggaagattttcattgaggataaattgccataatatgat

SEQ ID NO: 246342 - DNA, 120 bp, Artificial Sequence
  ENSG00000122545_16 (sequence is synthesized)
gcaaactgtgcttctctatgataattacaatacaaaggttccattcagtgcagcatatacaataatgtaatttagtctaacacagttgaccctattttttgacacttccattgtttaaaa

SEQ ID NO: 246343 - DNA, 120 bp, Artificial Sequence
  ENSG00000122545_17 (sequence is synthesized)
atacacatggaaaaaaaaaaaaccctatatgcttactgtgcacctagagcttttttataacaacgtctttttgtttgtttgttttggattctttaaatatatattattctcatttagtgc

SEQ ID NO: 246344 - DNA, 120 bp, Artificial Sequence
  ENSG00000122545_18 (sequence is synthesized)
atttttgtaataacatttaatttagatattttccatatattggcactgctaaaatagaatatagcatctttcatatggtaggaaccaacaaggaaactttcctttaactccctttttaca

SEQ ID NO: 246345 - DNA, 120 bp, Artificial Sequence
  ENSG00000122545_19 (sequence is synthesized)
ctttatggtaagtagcagggggggaaatgcatttatagatcatttctaggcaaaattgtgaagctaatgaccaacctgtttctacctatatgcagtctctttattttactagaaatggga

SEQ ID NO: 246346 - DNA, 120 bp, Artificial Sequence
  ENSG00000122545_20 (sequence is synthesized)
atcatggcctcttgaagagaaaaaagtcaccattctgcatttagctgtattcatatattgcatttctgtattttttgtttgtattgtaaaaaattcacataataaacgatgttgtgatgt

SEQ ID NO: 246347 - DNA, 120 bp, Artificial Sequence
  ENSG00000122545_21 (sequence is synthesized)
aatattgtgtgaggtcttaaatatcctacagtcgatgtacaagagtagagtatgtttgggaagaaacttttcagcttaagtttgcctcctctacaatgacatcttttatatgcttgtctc

SEQ ID NO: 246348 - DNA, 120 bp, Artificial Sequence
  ENSG00000122545_22 (sequence is synthesized)
atttagaatgcatatgtgctgattttctaatttaagagataccatatctctctattcatttctatctctcatttgtatgcttatttttctgagaacattttttttttcccccagacaggg

SEQ ID NO: 246349 - DNA, 120 bp, Artificial Sequence
  ENSG00000122545_23 (sequence is synthesized)
gaacattttttttttcccccagacagggtcttgcttcattgcccaggctggagtgcggtggcacaaacacgacttgactgcagcctcaaccctctgggctcaagcagtcctcctgcctca

SEQ ID NO: 246350 - DNA, 88 bp, Artificial Sequence
  ENSG00000122545_24 (sequence is synthesized)
gtcatgcctggcctctgagaacagtttctgactcattcagattaggtatactctcaagtccctggaaactgaaattttttttaactgt

SEQ ID NO: 246351 - DNA, 120 bp, Artificial Sequence
  ENSG00000122545_25 (sequence is synthesized)
tactctcaagtccctggaaactgaaattttttttaactgtaaagagggtagtgtcatttcttttcttaaggtcaagtgacatagattttaatgtaatgcataatttaggtaagaaattaa

SEQ ID NO: 246352 - DNA, 120 bp, Artificial Sequence
  ENSG00000122545_26 (sequence is synthesized)
ttaatgtagcctagtttattatcttgaaatgttttaccctatttactttttaaaattaatgacctaagcggagggaataattataagtcaatagcagagagattgttgtttgggtgttta

SEQ ID NO: 246353 - DNA, 120 bp, Artificial Sequence
  ENSG00000122545_27 (sequence is synthesized)
tttttttcagtttttgttttgagagattgggttaacacctctagccaaaattgtttggttttagggaggctaacaataacctactgaatttggaaaatgcaaaggtaaaaaatgtatata

SEQ ID NO: 246354 - DNA, 120 bp, Artificial Sequence
  ENSG00000122545_28 (sequence is synthesized)
gactgcctgctgaactggttaagtactactgcttctgggaaatactatttcaaaattctatgtattataataataaatttgtaagacattcattattctaccatcctaatgaaaactttc

SEQ ID NO: 246355 - DNA, 120 bp, Artificial Sequence
  ENSG00000122545_29 (sequence is synthesized)
agaagtctttctttatccatggcatgcccagggttttacctgaatctgatacaggatctatataactttactaggacttttgattgttgactccaggcttaggtatatcagaaggttctt

SEQ ID NO: 246356 - DNA, 120 bp, Artificial Sequence
  ENSG00000122545_30 (sequence is synthesized)
tttgccatttggcctgtggatgtctgagaagatcattcacaatacatgtaaaattcaggtaggcctaaggaaaggccagcctgtagaaagcaaaatggcagtgtctgttctccactgttg

SEQ ID NO: 246357 - DNA, 120 bp, Artificial Sequence
  ENSG00000122545_31 (sequence is synthesized)
gaggcattatgtaatttaagtatcctgttagccactgtctttctgctaattaagtggggctgaacaagtaagcactaataataccagtgaaccacttgggcaccttgtgggtagagtttt

SEQ ID NO: 246358 - DNA, 120 bp, Artificial Sequence
  ENSG00000122545_32 (sequence is synthesized)
gctgccacctagtggaatgggatatcattgcttccatatcaggttcacaagcaagttaagtgggcacagtttatttctgtgtagctcaggctgtaatcttgaaagctgaggagataccca

SEQ ID NO: 246359 - DNA, 120 bp, Artificial Sequence
  ENSG00000122545_33 (sequence is synthesized)
tgcctctcagactcattagctgggtgtcacattaccacctgcacattctgacccaccgcatcttaatatgttttgtcctcttggagaaactaggagtagaagtcaggatatggtaggtaa

SEQ ID NO: 246360 - DNA, 120 bp, Artificial Sequence
  ENSG00000122545_34 (sequence is synthesized)
gggggaaaaaggaaagacggcttgatagctatgaatgcatgaggagcgaaatgttgactcagttatctagatcatggtctccaaacctgatgctatttccttacaaaaatatttgttgag

SEQ ID NO: 246361 - DNA, 120 bp, Artificial Sequence
  ENSG00000122545_35 (sequence is synthesized)
catgtgtccataattatatgtattgaacaatgaaaatatgtgtcaacaaatgtactgctacactaatgtgaacattatggaacaaaatttgaaagagtgaaataaaaggtttacactttc

SEQ ID NO: 246362 - DNA, 120 bp, Artificial Sequence
  ENSG00000122545_36 (sequence is synthesized)
tgaatgccaccttccttaacaatagtcttttgttcattttaaatctgaaatttttgttttggtaaaattttgaattcatattaaaactttttaagcttttttccccctagctattaatag

SEQ ID NO: 246363 - DNA, 120 bp, Artificial Sequence
  ENSG00000122545_37 (sequence is synthesized)
ttagcagacattgtgttcctttttaagtagtatcttcagtaaaatttatagataatataacctttttatacatattttttcaaaattaataccctagtgtaacaaaacggataaatttct

SEQ ID NO: 246364 - DNA, 120 bp, Artificial Sequence
  ENSG00000122545_38 (sequence is synthesized)
agtgcgagatccgctgctgctgaggagaggagcgtcaacagcagcaccatggtgtttcaatggatttgcctctcctgtttggactgaatatgtcattacaattcttggaattctttgttt

SEQ ID NO: 246365 - DNA, 120 bp, Artificial Sequence
  ENSG00000122545_39 (sequence is synthesized)
actgttcctctgtggatttcttctgttggaatctggaacactggaatgatggaaatgtgttctttacaaagtagctcaacagaagaaccttgaaggctatgtgggatttgccaatctccc

SEQ ID NO: 246366 - DNA, 120 bp, Artificial Sequence
  ENSG00000122545_40 (sequence is synthesized)
ggaatgccaacagtttaaaaaacagataatgaaagaaatccaagaacataaaattaaaatatacgaatttccagaaacagatgatgaagaagatggagatggagatggagcaggtgtttg

SEQ ID NO: 246367 - DNA, 120 bp, Artificial Sequence
  ENSG00000122545_41 (sequence is synthesized)
tagttataatgaacaagtttgagttgtgaaaaataaaattacaaaccattccatacaggtggcataagaacactaaagatgagagtttgggggtggatttatgcacacaaactgtgttag

SEQ ID NO: 246368 - DNA, 120 bp, Artificial Sequence
  ENSG00000122545_42 (sequence is synthesized)
gataataataattgaccatatttatttgtgtatgagtgaaaaagagggaaataacctttattgaactaaagacatgcctggataaattccacacaattaaagaagagaaaattagggaat

SEQ ID NO: 246369 - DNA, 120 bp, Artificial Sequence
  ENSG00000122545_43 (sequence is synthesized)
gtgatatttttgttaacaggttaggccttctttatttataatgtagtgtcaaggtagttcctggtgttacaacattgggcagggtaatgacaaaacatcccagaagacatacctactatc

SEQ ID NO: 246370 - DNA, 120 bp, Artificial Sequence
  ENSG00000122545_44 (sequence is synthesized)
ttgaaacccttctagatgttgagttatacatttagtttctattaatcaaaaagaccttggagacatttccttcaataggtggcaagaaagaaaagttggagaaaaagataaactgaacat

SEQ ID NO: 246371 - DNA, 120 bp, Artificial Sequence
  ENSG00000122545_45 (sequence is synthesized)
taaaaatccatagagcagttagtttgatagatgtctgagaatagtagaaaaaaaactatgggtaatcccaaaataacagtggtttcagtatgaagttttcttcacataaatttgttataa

SEQ ID NO: 246372 - DNA, 120 bp, Artificial Sequence
  ENSG00000122545_46 (sequence is synthesized)
tgttataattaaaaattataaaatagcctgggcatggtggctcatgcctgtaacgccagcactttgggaggctgaggcacacagatcacttgagttcagaagttcgagactagcctggcc

SEQ ID NO: 246373 - DNA, 120 bp, Artificial Sequence
  ENSG00000122545_47 (sequence is synthesized)
actgaactgagatcacgtcactgcactcccgcctgggcgacagatcaagactttgcctcaaaaaacaaacagacaaacaaaaagccctataaaataataaattattttaaaatatgtgag

SEQ ID NO: 246374 - DNA, 70 bp, Artificial Sequence
  ENSG00000122545_48 (sequence is synthesized)
aaagccctataaaataataaattattttaaaatatgtgagatgaggtaagaaggattgcttgagtccagg

SEQ ID NO: 246375 - DNA, 120 bp, Artificial Sequence
  ENSG00000122545_49 (sequence is synthesized)
ctataaaaaatttttaaaaatagttgggcatgatggcctgcacctatggtcccaactactcaggaggctgagacaggaagattacttgagcctgggagatagaggctgtagtgagccatg

SEQ ID NO: 246376 - DNA, 120 bp, Artificial Sequence
  ENSG00000122545_50 (sequence is synthesized)
attgtgccactgcatcccagcctgggtgacagagctagaccttgtctcaaaattatatacatatatatatatggatgacagtaatataaaatagttttaaaacaatctttaatgataaaa

SEQ ID NO: 246377 - DNA, 120 bp, Artificial Sequence
  ENSG00000122545_51 (sequence is synthesized)
tttagtaagatccctgttttatgtggcttcactaatatttgtatctaagtgtatgaagaagagattcagatctctcgttatattcttacagttgatctcattgcttttgtaattaccgca

SEQ ID NO: 246378 - DNA, 120 bp, Artificial Sequence
  ENSG00000122545_52 (sequence is synthesized)
taaaatatggaaaccttttttgactaaaggcataacaaaagtatgctaatccattgagtaaatagaatgcacggaatgagaaagtattaaataatttcgaggaaatgtttttattccaca

SEQ ID NO: 246379 - DNA, 120 bp, Artificial Sequence
  ENSG00000122545_53 (sequence is synthesized)
tcatttctcttacattattgggcttttcttgtaatttcttattaaaatctttcactgttgttatatttgttgtgagtttaatttagcaggggtatggaataattcctcctggtttcagac

SEQ ID NO: 246380 - DNA, 120 bp, Artificial Sequence
  ENSG00000122545_54 (sequence is synthesized)
gctgagcactacaggattagcatccctggcactgccactaaatgctaatagcagtgccctcctatcatagggcaaaccaaaatgtgcatacacacacacccctaatcaaaagtcactgtc

SEQ ID NO: 246381 - DNA, 120 bp, Artificial Sequence
  ENSG00000122545_55 (sequence is synthesized)
ttagctattgctgttgtattataaatgaataattaaagttcttaacatgacattttggagattaatttatcagcatgttgtaaatatatgcattgagtctctacctcttcagtaattcac

SEQ ID NO: 246382 - DNA, 120 bp, Artificial Sequence
  ENSG00000122545_56 (sequence is synthesized)
atataatctggaaaatctatatccaaaagggggaaaaaaacaggaataatcaagagtctactacattatctccacacttagattccattgagaatctaaaagtagtttaacttatatttg

SEQ ID NO: 246383 - DNA, 120 bp, Artificial Sequence
  ENSG00000122545_57 (sequence is synthesized)
gacagttttgaagaactattctttgaaggatggaatgttaacatttcaaggacctgtgaagagctctgggccaaggttcccaccagatactctaagccattagagaattaggcatgctca

SEQ ID NO: 246384 - DNA, 120 bp, Artificial Sequence
  ENSG00000122545_58 (sequence is synthesized)
ttctagattctttgtcttttatgaaaccacatctagagtgtatttaccaacatccctgtgataatgagtttgcaaatcatcatgtatatgatacatgatatatattgtgtaaatatacgt

SEQ ID NO: 246385 - DNA, 120 bp, Artificial Sequence
  ENSG00000122545_59 (sequence is synthesized)
gtgaatacataaataggtaaagaaacccttttagccttgtttaatacagtctctccttaaatccattatgctggaaatacttgtttggggcacagctagcagcacagtacatcagccaca

SEQ ID NO: 246386 - DNA, 120 bp, Artificial Sequence
  ENSG00000122545_60 (sequence is synthesized)
gcaccaagcaactttcatttattgtgttgtctagtgcacaccacagccctacaaggtagatattattgcccatctctcctttatagataagaaggataaattaacttagtatgccagcat

SEQ ID NO: 246387 - DNA, 120 bp, Artificial Sequence
  ENSG00000122545_61 (sequence is synthesized)
ttgaacccagttaatttttaagttaagctagataggtccacagtcctgtttttcacaatttcagaatggaaaaaactctgaaaactgcaaaacctaacatgaactaagttttaatcctac

SEQ ID NO: 246388 - DNA, 120 bp, Artificial Sequence
  ENSG00000122545_62 (sequence is synthesized)
atattgtgaatatttatatattttactgaaacaaataaaaagtaatgtgtttgattatacttgttgccccagatagcccaggaggtattttataaatatagtgtatactcctttctaagc

SEQ ID NO: 246389 - DNA, 120 bp, Artificial Sequence
  ENSG00000122545_63 (sequence is synthesized)
ggtgttgtcgttttaataactgaaaaatgttgaacttcaaaaggcatctgaccccatgggtttcttaagagtgagattgtgacctgtacctttatctacatgcagttaacacaaaagata

SEQ ID NO: 246390 - DNA, 120 bp, Artificial Sequence
  ENSG00000122545_64 (sequence is synthesized)
attacttatatgtaacaagttaaagaatgatgaacactgtaagcctactacctggcttaaaaaaatagaatgttatcaactcatttgaagatgctgtgtgcctgtcccctattgtatccc

SEQ ID NO: 246391 - DNA, 120 bp, Artificial Sequence
  ENSG00000122545_65 (sequence is synthesized)
tctctctcattcccagaggtaactactattccgaattgtgtatatgtgactcttttcatttaaaaaaaataactagagacattttcttatgttcctactttctgacatttcttagtaact

SEQ ID NO: 246392 - DNA, 120 bp, Artificial Sequence
  ENSG00000122545_66 (sequence is synthesized)
tgtttgctgtcatcaggaagatatcacctcagatttgattcatgtttgcttaagtgtgtcttaggtgattttgttttgtaggaattgcatgaaataattgaaataggaataaatctgaag

SEQ ID NO: 246393 - DNA, 120 bp, Artificial Sequence
  ENSG00000122545_67 (sequence is synthesized)
ggaattgcatgaaataattgaaataggaataaatctgaagtcacttcgggcttgcaaaaaaaaattgtatgcaaaattatagtaacatatataatatgtatataatatataatacatata

SEQ ID NO: 246394 - DNA, 120 bp, Artificial Sequence
  ENSG00000122545_68 (sequence is synthesized)
tgtagtaaaatctgtaacagaacataattcctggataactgaaggttttgaatagtccttgggtatttggcatagaaggatttaatctgatttttaaaatttgttgactttttttttttt

SEQ ID NO: 246395 - DNA, 120 bp, Artificial Sequence
  ENSG00000122545_69 (sequence is synthesized)
cagaaatggattgacttgcacctaaatgaaattacttatctaatgatctcttggacttaaagcactttgtttctgcagttacttcgcatgagtgtttactgcctctcagtcagcattctt

SEQ ID NO: 246396 - DNA, 120 bp, Artificial Sequence
  ENSG00000122545_70 (sequence is synthesized)
tacagtattaatacacagagaaggaaggaccagctgcattagaatcactgtaacttgttgaaaatccacatttccagacttaacacccagatattctaattcagtacgtctgagtgaggt

SEQ ID NO: 246397 - DNA, 120 bp, Artificial Sequence
  ENSG00000122545_71 (sequence is synthesized)
ccaggattctatatttttaacaaacatcccaggtgatttgcatgaagaccaatgtctgagaaccactgcttacaggaatcagagtactttgctggcatctttgagctcttagggtcctaa

SEQ ID NO: 246398 - DNA, 120 bp, Artificial Sequence
  ENSG00000122545_72 (sequence is synthesized)
actacctgctttcttttcacttgtcttagctttctaaacttggaattaggaggcttattcaagtcctggttcttccactttctggctagcaatcttgggcaagtcacttaaattctgcaa

SEQ ID NO: 246399 - DNA, 120 bp, Artificial Sequence
  ENSG00000122545_73 (sequence is synthesized)
ctgtttcctcatctgtacaatgagaacagtgatgtgttcactgcccagcctccaacatatttgtgattaaagaaaaacgagataagatagtaattttccattataaagtactccacactg

SEQ ID NO: 246400 - DNA, 120 bp, Artificial Sequence
  ENSG00000122545_74 (sequence is synthesized)
ttaagtttgttgctttttttttttttcctgtttcccaagattattgtcttgggtcactggccttttgggtggcaggtcctaaaggaggaggagtccttgaccagagtacttccaggtagt

SEQ ID NO: 246401 - DNA, 120 bp, Artificial Sequence
  ENSG00000122545_75 (sequence is synthesized)
actctgaatttacaacagggctattcaaatagtgctcatactccttatcattagggtgtctggatgaaacatacctctgcttctgatttcttaaatagttttgttttatatattgtgcta

SEQ ID NO: 246402 - DNA, 120 bp, Artificial Sequence
  ENSG00000122545_76 (sequence is synthesized)
agtgcgagatccgctgctgctgaggagaggagcgtcaacagcagcaccatggtagctgtgagtatactacataatttatagagtttttttcagtctcagttaacttaaatttaatttata

SEQ ID NO: 246403 - DNA, 120 bp, Artificial Sequence
  ENSG00000122545_77 (sequence is synthesized)
gttggatgaaatatgagccaaggaaaccttaggtttaatgcatatttctaactccactcatagcagactttcaaatatttgacttaaaaatgttagattctgattagtctcctaattatt

SEQ ID NO: 246404 - DNA, 120 bp, Artificial Sequence
  ENSG00000122545_78 (sequence is synthesized)
aatttggcttaagaattagttttatgaaatgaacaaaagagccaaagattatggatggaatatttagctacatgactagtaaacattgtagacttctgttctttgttaaatccaaatgta

SEQ ID NO: 246405 - DNA, 120 bp, Artificial Sequence
  ENSG00000122545_79 (sequence is synthesized)
ttgaattgatgttttgatcccatgattgctttttaaatgagaatttaaatgtggcagaaacttttaagagaatgtgtgcctctttttgctattttttaatgttgagataagactgcctcc

SEQ ID NO: 246406 - DNA, 120 bp, Artificial Sequence
  ENSG00000122545_80 (sequence is synthesized)
aaagtaaaattaaccaatgagactctgcttattcaaatagtcttaactacggacagcatttctcacccatggcaacagaagaaccttgaaggctatgtgggatttgccaatctcccaaat

SEQ ID NO: 246407 - DNA, 120 bp, Artificial Sequence
  ENSG00000122545_81 (sequence is synthesized)
ccaaaaccctgtgaccagggttcaagggcaggagtcaaagccttagccactccaatgcttcttgaagtcctgttctacctaacttttgctggcctaatacatcttcagagtgtttctgat

SEQ ID NO: 246408 - DNA, 120 bp, Artificial Sequence
  ENSG00000122545_82 (sequence is synthesized)
aaacttaaaccattggatattgagtttatgaagcgtttgcatgaaaaagtgaatatcatcccacttattgccaaagcagacacactcacaccagaggaatgccaacagtttaaaaaacag

SEQ ID NO: 246409 - DNA, 120 bp, Artificial Sequence
  ENSG00000122545_83 (sequence is synthesized)
gcccagagttcctggcttgggaacactgggaggcctgggatactgtggcttagactcaagcagaaaggtgaacacagatctttattagcagataccaaatttgacatttaaaggagattt

SEQ ID NO: 246410 - DNA, 120 bp, Artificial Sequence
  ENSG00000122545_84 (sequence is synthesized)
tactttagtaatctttaagtttgtgaagtacacacaactatagccattatgaagtactaaatttcatgtagaaatgtcttagttgaaaagccattttaagtcctatataagctaacagtg

SEQ ID NO: 246411 - DNA, 120 bp, Artificial Sequence
  ENSG00000122545_85 (sequence is synthesized)
attttactccttagttcttcattcataaggattttccctgcttcatgaaataaacagtgttgccaccatggtttgaggtctcaatgtggcaaatttagctttcatgttgaccactctgct

SEQ ID NO: 246412 - DNA, 120 bp, Artificial Sequence
  ENSG00000122545_86 (sequence is synthesized)
actaatagaaataccaaataaagagaagcagccataccagttagacatattcaaaataaatccaaagatgctatttattataagtttcatagaaatgattatcaaaaacacttgcatgcc

SEQ ID NO: 246413 - DNA, 120 bp, Artificial Sequence
  ENSG00000122545_87 (sequence is synthesized)
aatgttttcttgtgccatttctttctacaataaatctatttggcttctgtttcaccttagctgtcatagacgtgttgttcaggtatcatattgtcagtactaatcttttgtttattagga

SEQ ID NO: 246414 - DNA, 120 bp, Artificial Sequence
  ENSG00000122545_88 (sequence is synthesized)
cttaagacctaagaatctagacattaatctaatctgattgttctgtttgttatagttagcctgtactccctttttttgttttttgtacttctgctgtcattttgagtacatatatgtgtt

SEQ ID NO: 246415 - DNA, 120 bp, Artificial Sequence
  ENSG00000122545_89 (sequence is synthesized)
attgacaactgcagaattttccagttattcttcctcagtcttttcctttgggtaagtaactcagtatatataattcagccacctgatgattataactccaccatctctccaccaaaagaa

SEQ ID NO: 246416 - DNA, 120 bp, Artificial Sequence
  ENSG00000122545_90 (sequence is synthesized)
ctgtagtagcatcaggctaaatagcattaagttatctaacactcacattacagtagtgtaaaccaattccttcaagtatacctttctcttctatttttggcttcttgctctcttttactt

SEQ ID NO: 246417 - DNA, 120 bp, Artificial Sequence
  ENSG00000122545_91 (sequence is synthesized)
aaagatgtttcttcttttatgtctaatattcttttacagtactctcagtttacatgtttaaatcactaaactgactctgacttaaaaggctcaaaaaaagtaatctcaaaaatacaacat

SEQ ID NO: 246418 - DNA, 120 bp, Artificial Sequence
  ENSG00000122545_92 (sequence is synthesized)
attatataaccttttatgagtatttgtgtagctacttgaatttgtatttttaagtcattctcgtttaacttgtcagggctttttcctttaagccagcagagtgaaatcttaacctgcatt

SEQ ID NO: 246419 - DNA, 120 bp, Artificial Sequence
  ENSG00000122545_93 (sequence is synthesized)
taagtcaataaaacttgtcagcttataaccaattttattattttagatcttctggactctctccaagtttagtaattctcatgaagtcacattccttccatccccttggggaaaatttta

SEQ ID NO: 246420 - DNA, 120 bp, Artificial Sequence
  ENSG00000122545_94 (sequence is synthesized)
tttcctaaaattgcatgggaaatgagagcttttttaaaagaacaaatttttatattcaaatgatatgtagtggctttgtgccatttcttatttgtcacaaggggtaagatgtttaaaatt

SEQ ID NO: 246421 - DNA, 120 bp, Artificial Sequence
  ENSG00000122545_95 (sequence is synthesized)
gctatttcttatatataaaaatgtacctttgaacaatttctcagtttatttttagaaatggagcaaagttttgccctttggtacatgatattgtggattaagtgaaggaatatgacacag

SEQ ID NO: 246422 - DNA, 120 bp, Artificial Sequence
  ENSG00000122545_96 (sequence is synthesized)
aattttatgtatagagttccagatatcctgctcactacagactgaaattccatgcagtctaatagatgaatcagagcgtttccgtcttgtctgggtagtccctgggttccctttttggag

SEQ ID NO: 246423 - DNA, 120 bp, Artificial Sequence
  ENSG00000122545_97 (sequence is synthesized)
ggatttgtttttagataattataaattggtccaacagtgtactttcagtgcctcctacctccctctaccaagtatgaactgcatgcatggctaatgtatgatttcagctattattgcttc

SEQ ID NO: 246424 - DNA, 120 bp, Artificial Sequence
  ENSG00000122545_98 (sequence is synthesized)
atttgcattgttcagtattttgtaattgttattaaaataaaaaactgacttggaacatgaattttaaaatggtgttttatccttctagtattgattaccacttttagaaaaattggtgtc

SEQ ID NO: 246425 - DNA, 120 bp, Artificial Sequence
  ENSG00000122545_99 (sequence is synthesized)
atccagtgagttttatacagaaggattttttctcttatacatacatacatacatacatacaaaaaaaatttgtcatttgccctgtggttgttcattatgctgtagactttgaggttaaat

SEQ ID NO: 246426 - DNA, 120 bp, Artificial Sequence
  ENSG00000122545_100 (sequence is synthesized)
agtcttttctctctagtatgggtttatcttctagaaacgataaaggattttctgttgcttaaaaacaagatttaaaaactaaatttgttgatgaaaagaccagccaatataaaactaaat

SEQ ID NO: 246427 - DNA, 120 bp, Artificial Sequence
  ENSG00000122545_101 (sequence is synthesized)
ggacagaggaaaaaattcaaccagaatgtaatatacatgtgaactaaatgttttctgttgctgacattttgtaggcttctgaaatttaatgggacttttacaaggtttaccttttttcct

SEQ ID NO: 246428 - DNA, 120 bp, Artificial Sequence
  ENSG00000122545_102 (sequence is synthesized)
aaagtttaatttttaaactgacttaaatgttctttgaccctttggttatatttaagaagttgacttccctaatttccttgttatgtttatttttaaatatctttctttctagaagttggg

SEQ ID NO: 246429 - DNA, 120 bp, Artificial Sequence
  ENSG00000122545_103 (sequence is synthesized)
atatctttctttctagaagttgggatattataataaatactcagcaagtattgttttgcatttaaatataaaatcttgttatttggattttaatagtttatattaaatgcccttaagatt

SEQ ID NO: 246430 - DNA, 120 bp, Artificial Sequence
  ENSG00000122545_104 (sequence is synthesized)
agaattccaagggggcccataactccatgaggcccagagttcctggcttgggaacactgggaggcctgggatactgtggcttagactcaagcagaaagctacttcttagaaccactgtat

SEQ ID NO: 246431 - DNA, 120 bp, Artificial Sequence
  ENSG00000122545_105 (sequence is synthesized)
aagggtttgtcctcacaactttgcagtgcatttggggtactggggtggttaaactttttcttcttaacattttaaaacttctcatcttagcaaaggtcaccaaacttcaagcaacatgac

SEQ ID NO: 246432 - DNA, 120 bp, Artificial Sequence
  ENSG00000122545_106 (sequence is synthesized)
ttgggtttgtataccaactttgccacttatctgacaaagttgtttaacttctttgaacccatttacttttctataaaatggagataatacctatcataaaattgtttttaagacatattc

SEQ ID NO: 246433 - DNA, 120 bp, Artificial Sequence
  ENSG00000122545_107 (sequence is synthesized)
aatagaagaattctcattattgtaagaaatttaaaactgttcactttaattttattcatttgtataaattctatctcaatcctaatttaaacctgatatttagactttcagtttttctgt

SEQ ID NO: 246434 - DNA, 120 bp, Artificial Sequence
  ENSG00000122545_108 (sequence is synthesized)
ctttcagtttttctgtaagtcctaagtgaagaaaacaactatgaaattttagtctgaagtaattatcttagtattttataaataatacttttatttttgtttgaattcacattgtttttg

SEQ ID NO: 246435 - DNA, 120 bp, Artificial Sequence
  ENSG00000122545_109 (sequence is synthesized)
aggtaattttctgtcaactcttaaaactcccaagttcaccatgaagtttttttattatttaaagtaatctctcatttgaaattttaaactgcatataattgttttcatattatgaagtgt

SEQ ID NO: 246436 - DNA, 120 bp, Artificial Sequence
  ENSG00000122545_110 (sequence is synthesized)
gttattaatacacttattagtgcaaataatatgctaatatttagctgtgtttcgacagtaaatagtttattttctttcatttggaaagttttgaataatgaatatttattcaacataatt

SEQ ID NO: 246437 - DNA, 120 bp, Artificial Sequence
  ENSG00000122545_111 (sequence is synthesized)
tatatttttgaatatatagaataacttgacatatcttctactggtaaattcattttgcccatttgaaaatactgattattgtcctttaacagtcatcagttaattcatatgtagaattgc

SEQ ID NO: 246438 - DNA, 120 bp, Artificial Sequence
  ENSG00000122545_112 (sequence is synthesized)
tgataagcaggcttatatctgacataacagcttaataaggtagtggcagtttaaatttgtcatgaatatgaattgaaaaaccataacaatttagaaatctgagattgaatatttcatggc

SEQ ID NO: 246439 - DNA, 120 bp, Artificial Sequence
  ENSG00000122545_113 (sequence is synthesized)
tggcatttatatttagtgttttatataatgattaatgaaaagaagcaaaacttaaaattttttttcaaaaatggataggttcaggccagatgcaatggcttacgcctgtaatcccagcac

SEQ ID NO: 246440 - DNA, 90 bp, Artificial Sequence
  ENSG00000122545_114 (sequence is synthesized)
tacgcctgtaatcccagcactttggggaccaaggcaggaggaccattgcttgaggccacagactaaaattaaaaagttagttgaggctgg

SEQ ID NO: 246441 - DNA, 120 bp, Artificial Sequence
  ENSG00000122545_115 (sequence is synthesized)
gaaactaaaaaaagaaaaaaaaattagctgggcctgggggtgcactctgtagtcctagctacccaggagtcaaagtggaagaattggaggctatggtgagctatgactacaccactgcac

SEQ ID NO: 246442 - DNA, 120 bp, Artificial Sequence
  ENSG00000122545_116 (sequence is synthesized)
gacagagcaagaccctgtcaaaaaaataaataaataaaaatggataggttcttttagttaacactagtgaggcaagaacacagtttacagataatataaacagggttattccatctacac

SEQ ID NO: 246443 - DNA, 120 bp, Artificial Sequence
  ENSG00000122545_117 (sequence is synthesized)
ttccatctacacacacttttttcgttgtgctccctattctctgaatgccagtgtcaattttcaggggatttaagacaaggagaattagaataggaggcagctatcttaattctccatgtt

SEQ ID NO: 246444 - DNA, 120 bp, Artificial Sequence
  ENSG00000122545_118 (sequence is synthesized)
tgctttctccccctcactgtctctgtctttctgcctgtcagccttactactacagtaaagtatatacagtaatctttgttagtaaaaaggactggactatcttattagtcttagggccct

SEQ ID NO: 246445 - DNA, 120 bp, Artificial Sequence
  ENSG00000122545_119 (sequence is synthesized)
aatccccccagttttaatatatatgtttctctttctttattttaaaatgtcagtcaattcaattattagtatgtcaataaaattattaacagaatgagacctttatttcatttttctcat

SEQ ID NO: 246446 - DNA, 120 bp, Artificial Sequence
  ENSG00000122545_120 (sequence is synthesized)
gtttttataaaagttaaagaataccactttagaatggtagtcctttgcaaaatatttctagtatcttcatttattcttgtgaaacattcaattttagtccacaatatattccagatttga

SEQ ID NO: 246447 - DNA, 120 bp, Artificial Sequence
  ENSG00000122545_121 (sequence is synthesized)
ggacttcggttctcatttagaattactaaaggacataacgaaaatcacagcagcttactttttttgtcaacaaatatttgggcaccttcttgagtgttagataccacgctgggtgctgag

SEQ ID NO: 246448 - DNA, 120 bp, Artificial Sequence
  ENSG00000122545_122 (sequence is synthesized)
gatacagataaattgagataaggccctcgctgtagagggtatttcagtgagaagatgggagaaacaaatacagatgctcctcaacttgggacagggttacctgttgaagttgaagatacg

SEQ ID NO: 246449 - DNA, 120 bp, Artificial Sequence
  ENSG00000122545_123 (sequence is synthesized)
agggttacctgttgaagttgaagatacgtttaatagcgtagcctacatttgggcaaaatcatctaacataaaacctattttgtaataatgtgttgaatatctcatgtaatttattgaata

SEQ ID NO: 246450 - DNA, 120 bp, Artificial Sequence
  ENSG00000122545_124 (sequence is synthesized)
tgtatggtttctattctatgcgtattgcttgcacactatcagaaagttgaaaaattgttaagtggaaccatagttagtgaggacccatctgtatgcaggcaggcagttatggtacagcac

SEQ ID NO: 246451 - DNA, 120 bp, Artificial Sequence
  ENSG00000122545_125 (sequence is synthesized)
actaagtgttgtcagcacatagaaatatgcctagtctcaaggttagagaaggattcccagtggaaattggatcataagccagtgtcctaaaggatgaataggaattagccaggccaagga

SEQ ID NO: 246452 - DNA, 120 bp, Artificial Sequence
  ENSG00000122545_126 (sequence is synthesized)
gaaggaggatgagaatggaggagggtgttccagctaaggtagtagcctgtggccagatgtcaaagtatgatgctttcaaggaattgtaagaaattcagaaaggctggcacattggaagta

SEQ ID NO: 246453 - DNA, 120 bp, Artificial Sequence
  ENSG00000122545_127 (sequence is synthesized)
ggaggcgaaagaaaggccaggaatgctaagagatgaggttagcttgagaatctatgtcttcacaagctttgtgggccattctagttaaggcatctggcctttagtaagatttttggtcag

SEQ ID NO: 246454 - DNA, 120 bp, Artificial Sequence
  ENSG00000122545_128 (sequence is synthesized)
gtcataactccataagatttggatttagaaagaccactctgacttcagtatggatgattcatgttatagttattcattccaaaggacttggtggcctagactaaagtaatggaaatggag

SEQ ID NO: 246455 - DNA, 120 bp, Artificial Sequence
  ENSG00000122545_129 (sequence is synthesized)
atatacatacatcatgcatacacacatctatacacatactatatataggaataggattagaggaggggaggaatcctaggtttcacacttgagtaatggggaagattgtaatgccattca

SEQ ID NO: 246456 - DNA, 120 bp, Artificial Sequence
  ENSG00000122545_130 (sequence is synthesized)
ctgagataggaagcgtagaagagggaaaatgggggttcagatgagcttttgattttaaggagcccatggaacacccaggtagcatatccactgggtaaacacaaacctggaacttaacag

SEQ ID NO: 246457 - DNA, 120 bp, Artificial Sequence
  ENSG00000122545_131 (sequence is synthesized)
tgagatatgagctgtctatgaagatttggaagtcagttgaccaattgaagataattgaaatctattgtagtcataataattgtactgaatgtagagtaagaagagaaagcctggtaggga

SEQ ID NO: 246458 - DNA, 120 bp, Artificial Sequence
  ENSG00000122545_132 (sequence is synthesized)
attctaaagaatgtacttcttaagggactagcttactaagaggatcctgaaaagtatcctaaggaagaagagcttgtgagagaataagtaatggtaagcaccatgatagaagtatttagt

SEQ ID NO: 246459 - DNA, 120 bp, Artificial Sequence
  ENSG00000122545_133 (sequence is synthesized)
caccttcttgaaagtacagaggcaaactggaggcagcagccagattgtaatgaataaaagggatgttgaagattatcttgtgagcatcttgtcagagaaagatagttggtagcaagaact

SEQ ID NO: 246460 - DNA, 120 bp, Artificial Sequence
  ENSG00000122545_134 (sequence is synthesized)
caagaactgaatgtggagttggaagaggactaccatttttcatttttaaaaaatcctccagcctgggcaacctggcgagacattgtgtctacaaaaaatacaaaaattaggcaggcatgg

SEQ ID NO: 246461 - DNA, 120 bp, Artificial Sequence
  ENSG00000122547_0 (sequence is synthesized)
gactttggctttgacaccgactgcgagcgggagccgtgcggctggtgctgggtctggactggctctggcggatccccgcccgagttgggcgcaggactttttgccggggtaaacgcaact

SEQ ID NO: 246462 - DNA, 120 bp, Artificial Sequence
  ENSG00000122547_1 (sequence is synthesized)
gcggcggcgccgccgcaagccccggtgcagcctcggcggcgggtttcgccgccgctgccgccgcctccgagcagccctgcggcttctattcactctgggagagcgatgctaagtttctcc

SEQ ID NO: 246463 - DNA, 120 bp, Artificial Sequence
  ENSG00000122547_2 (sequence is synthesized)
catagaaagagccgggacacgcagaccgaagcggcgtagtcggcttccagggcctgaccagtgacccacacccgcgcggacgcctaggctggaggcagggggcccgtgctgtcccgggct

SEQ ID NO: 246464 - DNA, 120 bp, Artificial Sequence
  ENSG00000122547_3 (sequence is synthesized)
gggctcaggcttccgagccgcaggtggaagaggaaccggcgccccgcagagcggccgagaggcggccaagtgaaaggtaattttggacacgccaggcatggaagattcggtgtttgtcta

SEQ ID NO: 246465 - DNA, 120 bp, Artificial Sequence
  ENSG00000122547_4 (sequence is synthesized)
tagtaacctcttcagtccctgaatcctgcaccttccgtttttctgtgcttgtacggcctactgggcttcctccctagccagagagctcttctgcagtggtgcggccttcccgggagcctg

SEQ ID NO: 246466 - DNA, 120 bp, Artificial Sequence
  ENSG00000122547_5 (sequence is synthesized)
atcctggcggaccatggggagcaccctgggctgccaccgctccatccccagggacccctcggacctgtcccatagccgcaagttcagcgcagcctgtaacttcagcaacattctagtgaa

SEQ ID NO: 246467 - DNA, 120 bp, Artificial Sequence
  ENSG00000122547_6 (sequence is synthesized)
tcaggagcggctcaacatcaacactgccacggaggaggagctgatgaccctgcctggggtgacgcgtgccgtggcacgcagcatcgtggagtaccgagagtatatcggtggcttcaagaa

SEQ ID NO: 246468 - DNA, 120 bp, Artificial Sequence
  ENSG00000122547_7 (sequence is synthesized)
ggtggaggacctggcattggtcagtggtgtaggcgccaccaagctggagcaggtcaagtttgagatctgtgtgagcagcaagggcagctcagcgcagcactctcccagttccctgcggcg

SEQ ID NO: 246469 - DNA, 120 bp, Artificial Sequence
  ENSG00000122547_8 (sequence is synthesized)
ggacctgctagcggagcagcagcctcaccacctggccacagctgtgcccctcaccccacgtgttaacatcaacacagccaccccggcccagctcatgagcgtgcgaggcctctcggagaa

SEQ ID NO: 246470 - DNA, 120 bp, Artificial Sequence
  ENSG00000122547_9 (sequence is synthesized)
aatggccctcagcatcgtggacttccgccgtgagcatgggccctttcgcagcgttgaggacctagtgaggatggatggtatcaatgccgccttcctggacaggatccggcaccaggtgtt

SEQ ID NO: 246471 - DNA, 120 bp, Artificial Sequence
  ENSG00000122547_10 (sequence is synthesized)
tgctgagaggtccaggcccccatccacccacacgaacgggggactgaccttcaccgccaagcctcacccgagccccacttccctgagcctgcagagtgaggacctggacctgccgccagg

SEQ ID NO: 246472 - DNA, 120 bp, Artificial Sequence
  ENSG00000122547_11 (sequence is synthesized)
ggggcccacccagattatctccactcggccgtccgtggaggcctttggaggcacaagggatgggaggcctgtgctgaggctggccacctggaacttgcagggctgttccgtggagaaggc

SEQ ID NO: 246473 - DNA, 120 bp, Artificial Sequence
  ENSG00000122547_12 (sequence is synthesized)
caacaaccccggggtgcgagaggtggtgtgcatgacactcctggaaaacagcatcaagcttctagctgtgcaagaactgcttgacagagaggccttggaaaagttctgcacggagctaaa

SEQ ID NO: 246474 - DNA, 120 bp, Artificial Sequence
  ENSG00000122547_13 (sequence is synthesized)
ccagccgaccctgcccaacatccgcaagtggaaggggccccggggatgctggaaggctgttgttgctgagaagccctcgagtcagctccagaagggagctgggtatgcaggattcctatg

SEQ ID NO: 246475 - DNA, 120 bp, Artificial Sequence
  ENSG00000122547_14 (sequence is synthesized)
ggacgcggctgccggcatggagctgagagacgcgggttcacaggagagctcgccaagcaacgggcacgggaagctggcgggccccagcccatacctcgggaggttcaaggtgggaagtca

SEQ ID NO: 246476 - DNA, 120 bp, Artificial Sequence
  ENSG00000122547_15 (sequence is synthesized)
cgacctgacccttgttaaccttcacctggcagccctgaccctcctggggagcgagaatcccagcaagaatcacagtgatggccaccggttggcgagctttgcacagaccctacaggaaac

SEQ ID NO: 246477 - DNA, 120 bp, Artificial Sequence
  ENSG00000122547_16 (sequence is synthesized)
cctgaaaggagaaaaggatgtcattatcttaggggattttggccaagggccagacagcaatgactatgatatcctgaggaaagaaaagttccaccacctgatccccgcgcacaccttcac

SEQ ID NO: 246478 - DNA, 120 bp, Artificial Sequence
  ENSG00000122547_17 (sequence is synthesized)
caacatcagcaccaagaaccctcaaggctcgaagtctctggacaacatctggatcagtaaaagcttaaagaaggttttcacaggtcactgggctgtggtgagagaaggcctcacgaaccc

SEQ ID NO: 246479 - DNA, 120 bp, Artificial Sequence
  ENSG00000122547_18 (sequence is synthesized)
ttggattccggataactggtcttggggcggggtggcttctgaacactgcccagtgctagccgagttctacactgaaaaggactggagcaagaaggatgcccctcggaacggcagcggggt

SEQ ID NO: 246480 - DNA, 120 bp, Artificial Sequence
  ENSG00000122547_19 (sequence is synthesized)
atgagccctgtggggtgacgcttcagggcagagctgccttttaatttttattctcagagcatcagcacttgaggccttgccccacgccttctctgtggaccattcaggacctccagtggg

SEQ ID NO: 246481 - DNA, 120 bp, Artificial Sequence
  ENSG00000122547_20 (sequence is synthesized)
ggtggcgtgccaggcgcgtaccccaccaggtgggcaaagcagaaacctgcggggagcggagacgccttttatctctggatgccacagacctgagcagcattgggctggctgtccgctgct

SEQ ID NO: 246482 - DNA, 120 bp, Artificial Sequence
  ENSG00000122547_21 (sequence is synthesized)
gactggatggcagcacaaagacaatatgagcagagggaggagaagaaggggtgctcaggctgcgggccacagtccagcagcgccagaagcactcatttctgaccaccaggctatgacgtt

SEQ ID NO: 246483 - DNA, 120 bp, Artificial Sequence
  ENSG00000122547_22 (sequence is synthesized)
cctgctgcgcattacagaaagcttttaactgtgatcaggcactctgctcagatacattgagtggcgatttttagttttgttttgaaaaaataaacagattaacctgcctcgctgcagtga

SEQ ID NO: 246484 - DNA, 120 bp, Artificial Sequence
  ENSG00000122547_23 (sequence is synthesized)
gagcatgggacaagtccgccacagccctcccccgcccccttcccccgccccccaacgcgcagtgtgtatttgcaccacggcaggtgcctctgtgtggagctagggtcaagccctgagcag

SEQ ID NO: 246485 - DNA, 120 bp, Artificial Sequence
  ENSG00000122547_24 (sequence is synthesized)
cttcacttcccctgcgccttttatgtccccaccttgaggccttgcagaggcgcctctcaaggccccatcagctcgccgggacctctgtgaagcctctctgtcatctccccttcccagccc

SEQ ID NO: 246486 - DNA, 120 bp, Artificial Sequence
  ENSG00000122547_25 (sequence is synthesized)
ctccttcatcccctgcctccttcaccagcctggcttttgcctggagcactatttgtttagttctctttgcaggacaagaattctctcagggtggtatcacctcctccctcctccccactc

SEQ ID NO: 246487 - DNA, 120 bp, Artificial Sequence
  ENSG00000122547_26 (sequence is synthesized)
actccagtttttagcccggagcctcctgtggttgactatcaggaatgtgtgctgtgtcaggatacataggaagttgacctcggggtatcatggagagtgtccctcctagtggctggaggt

SEQ ID NO: 246488 - DNA, 120 bp, Artificial Sequence
  ENSG00000122547_27 (sequence is synthesized)
agggacagttggttgtggggctggagagaggttgtggggaggaagcgaggatgcgtgcctgccactaggcatctgcatccccgagcccaagccaggagggatttcccttaggcaacacca

SEQ ID NO: 246489 - DNA, 120 bp, Artificial Sequence
  ENSG00000122547_28 (sequence is synthesized)
tcccagggagatctgccacaatttgcgtttcacagctgaagacgctgaggcttagagagctcgacctcctcaaggtcacaccactgggtaaatagagggatgcagactcaggttttgcta

SEQ ID NO: 246490 - DNA, 120 bp, Artificial Sequence
  ENSG00000122547_29 (sequence is synthesized)
tgtgctcacatttcaactttatgcttaacatgaatggaaaaatatgaaagtaaatagtgaaaaggtaagttatgagcttagattacctagattattccagtatcccatggaagctgagga

SEQ ID NO: 246491 - DNA, 120 bp, Artificial Sequence
  ENSG00000122547_30 (sequence is synthesized)
cttattccgctttccacaccgaacactaaatgtggaccagtatcaagaaccctcctgtccccacgcagtgtaaacccagtggcttctctgacctggagctgatgggccgtgaagggggcc

SEQ ID NO: 246492 - DNA, 120 bp, Artificial Sequence
  ENSG00000122547_31 (sequence is synthesized)
tatttttctccaaaggccatccttttggggccacctggctccaagaagcatcgctggtcttggggacgggaagggaaccctcttccaggagctctaagggtacttgggaatcaattgtgt

SEQ ID NO: 246493 - DNA, 120 bp, Artificial Sequence
  ENSG00000122547_32 (sequence is synthesized)
ccattctgaggtctctccagtgggagggcggcagctcctgtccctgggttcaggctgtgcttctggaagcatcgaaatgggatgtctgagccttgaggaaaagcagcagggttagcatta

SEQ ID NO: 246494 - DNA, 120 bp, Artificial Sequence
  ENSG00000122547_33 (sequence is synthesized)
aagtcaagaggggcagctcaggatgctaccagggagcacatcgtttctggtgcctcatctaaaggtgaaacctcccctacattcaccagccggatgtcccaaatccctttagccagattg

SEQ ID NO: 246495 - DNA, 120 bp, Artificial Sequence
  ENSG00000122547_34 (sequence is synthesized)
ctttttgcaaccaaagctgtggacagaaaagcctccttaagtgagctgaggggacaggaaatccaatcagatgacctttgtgttcgtaatcgggcttgagccagaggctggggagctgag

SEQ ID NO: 246496 - DNA, 120 bp, Artificial Sequence
  ENSG00000122547_35 (sequence is synthesized)
tcccagccaaacctcactggcccttttgcttttcacgcccagggctcagtggcccaggaagtgtgctgggcagcctgttcttactccagctcaacccattgggtgttggctgtttttggt

SEQ ID NO: 246497 - DNA, 120 bp, Artificial Sequence
  ENSG00000122547_36 (sequence is synthesized)
tttagttgttgttttgtattttgttgttttaattaataggctttatttgtaagagcagttttatgtttacagaaaaattaggcacaaagggattcccatatccctcctcttctttgcata

SEQ ID NO: 246498 - DNA, 120 bp, Artificial Sequence
  ENSG00000122547_37 (sequence is synthesized)
tttccccctctaattagcatgttgcattagcatggcactttgttacaactgatgaacttgtattcattattagctacagtgttcatagtttatattaaagttcactctttgtgttgtgca

SEQ ID NO: 246499 - DNA, 120 bp, Artificial Sequence
  ENSG00000122550_0 (sequence is synthesized)
gggttctgcccggggacgcagcccagttggtagcgtcgctccctgagcgtttctaagggggccgcccggccttgtctttcggcagtggccgagccaccgccgcctgccgcgcgttccaga

SEQ ID NO: 246500 - DNA, 120 bp, Artificial Sequence
  ENSG00000122550_1 (sequence is synthesized)
gctgggcgctgcagctgcactgccgatcgccgtgtttggtcgatagaatccccagtgtgcccagagagtgcgacccctcgcccggcccggcgagccccgggcgtgaaccgagctgaggga

SEQ ID NO: 246501 - DNA, 120 bp, Artificial Sequence
  ENSG00000122550_2 (sequence is synthesized)
ggatggcagcctctggggtggagaagagcagcaagaagaagaccgagaagaaacttgctgctcgggaagaagctaaattgttggcgggtttcatgggcgtcatgaataacatgcggaaac

SEQ ID NO: 246502 - DNA, 120 bp, Artificial Sequence
  ENSG00000122550_3 (sequence is synthesized)
agaaaacgttgtgtgacgtgatcctcatggtccaggaaagaaagatacctgctcatcgtgttgttcttgctgcagccagtcatttttttaacttaatgttcacaactaacatgcttgaat

SEQ ID NO: 246503 - DNA, 120 bp, Artificial Sequence
  ENSG00000122550_4 (sequence is synthesized)
caaagtcctttgaagtagaactcaaagatgctgaacctgatattattgaacaactggtggaatttgcttatactgctagaatttccgtgaatagcaacaatgttcagtctttgctggatg

SEQ ID NO: 246504 - DNA, 120 bp, Artificial Sequence
  ENSG00000122550_5 (sequence is synthesized)
cagcaaaccaatatcagattgaacctgtgaagaaaatgtgtgttgattttttgaaagaacaagttgatgcttcaaattgtcttggtataagtgtgctagcggagtgtctagattgtcctg

SEQ ID NO: 246505 - DNA, 120 bp, Artificial Sequence
  ENSG00000122550_6 (sequence is synthesized)
aattgaaagcaactgcagatgactttattcatcagcactttactgaagtttacaaaactgatgaatttcttcaacttgatgtcaagcgagtaacacatcttctcaaccaggacactctga

SEQ ID NO: 246506 - DNA, 120 bp, Artificial Sequence
  ENSG00000122550_7 (sequence is synthesized)
ctgtgagagcagaggatcaggtttatgatgctgcagtcaggtggttgaaatacgatgaacctaatcgccagccatttatggttgatatccttgctaaagtcaggtttcctcttatatcaa

SEQ ID NO: 246507 - DNA, 120 bp, Artificial Sequence
  ENSG00000122550_8 (sequence is synthesized)
agaatttcttaagtaaaacggtacaagctgaaccacttattcaagacaatcctgaatgccttaagatggtgataagtggaatgaggtaccatctactgtctccagaggaccgagaagaac

SEQ ID NO: 246508 - DNA, 120 bp, Artificial Sequence
  ENSG00000122550_9 (sequence is synthesized)
ttgtagatggcacaagacctagaagaaagaaacatgactaccgcatagccctatttggaggctctcaaccacagtcttgtagatattttaacccaaaggattatagctggacagacatcc

SEQ ID NO: 246509 - DNA, 120 bp, Artificial Sequence
  ENSG00000122550_10 (sequence is synthesized)
gctgcccctttgaaaaacgaagagatgcagcatgcgtgttttgggacaatgtagtatacattttgggaggctctcagcttttcccaataaagcgaatggactgctataatgtagtgaagg

SEQ ID NO: 246510 - DNA, 120 bp, Artificial Sequence
  ENSG00000122550_11 (sequence is synthesized)
atagctggtattcgaaactgggtcctccgacacctcgagacagccttgctgcatgtgctgcagaaggcaaaatttatacatctggaggttcagaagtaggaaactcagctctgtatttat

SEQ ID NO: 246511 - DNA, 120 bp, Artificial Sequence
  ENSG00000122550_12 (sequence is synthesized)
ttgagtgctatgatacgagaactgaaagctggcacacaaagcccagcatgctgacccagcgctgcagccatgggatggtggaagccaatggcctaatctatgtttgtggtggaagtttag

SEQ ID NO: 246512 - DNA, 120 bp, Artificial Sequence
  ENSG00000122550_13 (sequence is synthesized)
gaaacaatgtttctgggagagtgcttaattcctgtgaagtttatgatcctgccacagaaacatggactgagctgtgtccaatgattgaagccaggaagaatcatgggctggtatttgtaa

SEQ ID NO: 246513 - DNA, 120 bp, Artificial Sequence
  ENSG00000122550_14 (sequence is synthesized)
aagacaagatatttgctgtgggtggtcagaatggtttaggtggtctggacaatgtggaatattacgatattaagttgaacgaatggaagatggtctcaccaatgccatggaagggtgtaa

SEQ ID NO: 246514 - DNA, 120 bp, Artificial Sequence
  ENSG00000122550_15 (sequence is synthesized)
cagtgaaatgtgcagcagttggctctatagtttatgtcttggctggttttcagggtgttggtcgattaggacacattctcgaatataataccgaaacagacaaatgggttgccaactcca

SEQ ID NO: 246515 - DNA, 120 bp, Artificial Sequence
  ENSG00000122550_16 (sequence is synthesized)
aagttcgtgcttttccagtcacaagttgtttaatttgtgttgtcgatacttgtggagcaaatgaagagacccttgaaacatgaaaaatgagtggacttcagactcatcagagactctaaa

SEQ ID NO: 246516 - DNA, 120 bp, Artificial Sequence
  ENSG00000122550_17 (sequence is synthesized)
atatagccaccagtgctttgttccaggagtttggtgacaaagttttggtttggtgttttggtaaagaaagtttcaagtgaaatgaggttcctataaaatagatgtttcttttatatggat

SEQ ID NO: 246517 - DNA, 120 bp, Artificial Sequence
  ENSG00000122550_18 (sequence is synthesized)
ttccttaattcaaagatcatattttagctggccacaaaaccaagaacatatctagcaagaaaacttgaaaaagtataagcatttgttaaaaatgtgaatttcttgaatgaatttcacatt

SEQ ID NO: 246518 - DNA, 120 bp, Artificial Sequence
  ENSG00000122550_19 (sequence is synthesized)
tgtaactatgattttggcagaatagaagattggctcatcagtgaagcgcagtatcttagctctagattctattttcatgcatcacagaagtgctatacggttaggtctgtttgtgctcag

SEQ ID NO: 246519 - DNA, 120 bp, Artificial Sequence
  ENSG00000122550_20 (sequence is synthesized)
tcaagaactaagaaatagtatgaattgtaagtcaagatgggcaactcagatggagcagcttagtctcacagtttgcttgtctatttattttatttagtgccaaatgtattccattttaaa

SEQ ID NO: 246520 - DNA, 120 bp, Artificial Sequence
  ENSG00000122550_21 (sequence is synthesized)
agtaagccagagtgagtcaaggcatatacacactttctcacaaaacttcctaaacagatttgggggtttaatatgtccaactcctcatgaaatatattcaatccacttaaatatattcca

SEQ ID NO: 246521 - DNA, 120 bp, Artificial Sequence
  ENSG00000122550_22 (sequence is synthesized)
tctttttaacataaaatgtaaagcttagcacccatcattaatttatgtctctgttttatccagtggttaaaaaaggattctgcctctttagtcctcactgttaaataaaacccaatcata

SEQ ID NO: 246522 - DNA, 120 bp, Artificial Sequence
  ENSG00000122550_23 (sequence is synthesized)
ttctttaacgagatcatgaattcttttcccttagccaaaacatgaaatatttaacctagttgtctctaaaagttttgtaatcatgagttagatatatgtcatctcctattcattgctttt

SEQ ID NO: 246523 - DNA, 120 bp, Artificial Sequence
  ENSG00000122550_24 (sequence is synthesized)
atgtgatcaataaatcttttacaaacccaactactcatttccttcctagtaatactttgcctttttcactgtgtatggaatgaaacatgtaaagctgtcacaatcaatgtttttatctga

SEQ ID NO: 246524 - DNA, 120 bp, Artificial Sequence
  ENSG00000122550_25 (sequence is synthesized)
taatattaaatattttttaacttaaaataggccactcagtttgttcttcaagtattttaggtaatggttgtttttagaatttgtgaaccagtgtctcttaattttcagttttctttatat

SEQ ID NO: 246525 - DNA, 120 bp, Artificial Sequence
  ENSG00000122550_26 (sequence is synthesized)
agaggttataatagtcttaaaccctaaaaatgtttaaatcaaaaaggaattaggaaaaacataatgataggtatatttctatttgtgtagggttttttaatgtacagctttattgagata

SEQ ID NO: 246526 - DNA, 79 bp, Artificial Sequence
  ENSG00000122550_27 (sequence is synthesized)
atttgtgtagggttttttaatgtacagctttattgagatataattcacataccatacaattcaccatttaaagtatact

SEQ ID NO: 246527 - DNA, 67 bp, Artificial Sequence
  ENSG00000122550_28 (sequence is synthesized)
gggaggccaaggtgggtagatcatttgaggtcagcagttcaagaccaccctggccaacatgcacttg

SEQ ID NO: 246528 - DNA, 120 bp, Artificial Sequence
  ENSG00000122550_29 (sequence is synthesized)
ttttaatatatccacagagttacgcaaccatcaccacaattttagaacattttcatcaccccaaaaagaaaccttgtactgattagcaatggttccctatttcccccaacgcccctgtat

SEQ ID NO: 246529 - DNA, 120 bp, Artificial Sequence
  ENSG00000122550_30 (sequence is synthesized)
ttcctagggctaccataacaaactactgcaaacttggtggctttaaagaacagaaatttattctctcacaattcaggaagccagcactcctaaatcaagttgtcagcagggttagttcct

SEQ ID NO: 246530 - DNA, 120 bp, Artificial Sequence
  ENSG00000122550_31 (sequence is synthesized)
tctggagggtctgcagcagaaaccacacatgcctctcccctagcttctggtggttgccagcaatcctcagcattctttggcttgtagctgcagcacttcagtctctgtctctgtcttcgc

SEQ ID NO: 246531 - DNA, 120 bp, Artificial Sequence
  ENSG00000122550_32 (sequence is synthesized)
atgggctttttccctgtgtgtctctgtatcttcacatggtgttcttataaggacaacataggagccagacacagtggctcaggccggtaatttcaacactttgggaggtggaggcagtag

SEQ ID NO: 246532 - DNA, 90 bp, Artificial Sequence
  ENSG00000122550_33 (sequence is synthesized)
tggaggcagtctgtctctacaaaaaaataaaaagttagcaggtgtggtatatacctgcagttctagctactcagaaggctgaggtgggag

SEQ ID NO: 246533 - DNA, 70 bp, Artificial Sequence
  ENSG00000122550_34 (sequence is synthesized)
ttaaaaaaaaaaaaaaaaaagctgggcgctgtgtctcacgcccttaatcccagcactttgggaggccgag

SEQ ID NO: 246534 - DNA, 120 bp, Artificial Sequence
  ENSG00000122550_35 (sequence is synthesized)
cagagcaagacaccttctcaaagcaaaatacaaacaaaaaaaggacaacatagggcccgcaatccagtatgaccttattttaattacacctgtaaagaccccatttccaaacgaggacac

SEQ ID NO: 246535 - DNA, 120 bp, Artificial Sequence
  ENSG00000122550_36 (sequence is synthesized)
attctgagcttctggatagacatgaatttggggagatgctgttcaacacagaaaacctcccaaacaccatagccctaggcaaccactaatctactttctgtctctagatttgattattct

SEQ ID NO: 246536 - DNA, 120 bp, Artificial Sequence
  ENSG00000122550_37 (sequence is synthesized)
gaacatttttagtagggttttcaattttgcactctattgaaaaatgtggctagtttaattttttgagagtgaaatatccatttattatattacaatatagctatataatttgacaatctc

SEQ ID NO: 246537 - DNA, 120 bp, Artificial Sequence
  ENSG00000122550_38 (sequence is synthesized)
ctatgtagaatatacagtacctgtctaagatattttaagtacaccagcatttccttttaggctatgtcaattgactagaacacactatagtaaatacatacacaggtttgatgtggatta

SEQ ID NO: 246538 - DNA, 120 bp, Artificial Sequence
  ENSG00000122550_39 (sequence is synthesized)
taatgaagtggtttttttccttagtaatctgtatcataattcccaattagtgtctttttctgccttggaaatttctacagaattgtcaatatcaggatagtgcgtaaaagtacactcacc

SEQ ID NO: 246539 - DNA, 120 bp, Artificial Sequence
  ENSG00000122550_40 (sequence is synthesized)
atactgacaagcacattttctattttgttgcccaaaactccctgtcctgtaaagtgctctgcttgctttttagtagacatttgataagttaatgttatatcctttgcaatgatattattt

SEQ ID NO: 246540 - DNA, 120 bp, Artificial Sequence
  ENSG00000122550_41 (sequence is synthesized)
tgatgacaaagtaagtttatgctttcaaaaatcacaattcggtcagaaaagtttagcatcttaaaaaaattgttgctatttgaaaaaaacaaaacaaaacatatacttgtgactttgtgg

SEQ ID NO: 246541 - DNA, 120 bp, Artificial Sequence
  ENSG00000122550_42 (sequence is synthesized)
tccagctggcaaaaacttgacatatcatcccatgaaaattttaagtcatgaattattttgacatgacaatattgctaacaaaatcaaaatcagccgtttaataaacaattattccaccaa

SEQ ID NO: 246542 - DNA, 120 bp, Artificial Sequence
  ENSG00000122550_43 (sequence is synthesized)
agttggtagaggggcgcgtaaaacaattctcgagcaaaagtgcttctcgtctgccgaggatgtagctcccaagtcagactcctgggggactcctcaggctggctttcgccgtcgggtatc

SEQ ID NO: 246543 - DNA, 120 bp, Artificial Sequence
  ENSG00000122550_44 (sequence is synthesized)
ggttgtgtaacagctctgccctagttatctctttgtggggcgaggatccttccattggcgagccgttttaaggtgccgtgagatcttgtgtgaagaaacccgttggcatagcccaaaccg

SEQ ID NO: 246544 - DNA, 120 bp, Artificial Sequence
  ENSG00000122550_45 (sequence is synthesized)
aagcccccaaagggaggagagttgctggcctgacatcagctgctcttaaataaggatccccgccccctcctgtgttccccggtggagctagttgaagaggagtcctcctgttcgtgctaa

SEQ ID NO: 246545 - DNA, 120 bp, Artificial Sequence
  ENSG00000122550_46 (sequence is synthesized)
tttagagcagaagcagccatcgataaataccatgccatcttctaagggcactgtgcgcctctgttattaagaggagctctttgttctgtccttggtgtgtggtgcattcgtgaaattctg

SEQ ID NO: 246546 - DNA, 120 bp, Artificial Sequence
  ENSG00000122550_47 (sequence is synthesized)
cagcacatcggcgaaagtgatttaaatctaccacccagctgtagttgaatctacaatctgctcagggatttatactcaatgccaatttgatatcatgctgggagggactgattgcagaac

SEQ ID NO: 246547 - DNA, 120 bp, Artificial Sequence
  ENSG00000122550_48 (sequence is synthesized)
gcttttcactgtgtgatgatccttagtggcacatgaatgaacgtccagatgtttgtgcagtagcccacccttatctgcaggatacgttccaagacccccagtgaatgcctgaaactgcag

SEQ ID NO: 246548 - DNA, 120 bp, Artificial Sequence
  ENSG00000122550_49 (sequence is synthesized)
atagtactgaatcctatatatactgtgttttttatgatacatacatgcctatgatgaagtttaatttctaaattagacagtaaaagattaacaacaataataataaaatagaacaacttt

SEQ ID NO: 246549 - DNA, 120 bp, Artificial Sequence
  ENSG00000122550_50 (sequence is synthesized)
atgtttctgggagagtgcttaattcctgtgaagtttatgatcctgccacagaaacgtatgtatctatttaaaatttattttacagttaactgtattctataagctctgtaggagatgtca

SEQ ID NO: 246550 - DNA, 120 bp, Artificial Sequence
  ENSG00000122550_51 (sequence is synthesized)
ttctcatttgttgtcttgccttgctcttataaatgagtcattcctaattgcactttgaaaatttatgggaaaatttaaataattgaggaatgaactaccaataaaaacattttcattcca

SEQ ID NO: 246551 - DNA, 120 bp, Artificial Sequence
  ENSG00000122550_52 (sequence is synthesized)
gttcaacttttgttttctacccttctagacattttgtgcgtatatgtacacatatgtgagtagtaaatgagcacttaattagaataatagacctttctcattagtatgagttcttttact

SEQ ID NO: 246552 - DNA, 120 bp, Artificial Sequence
  ENSG00000122557_0 (sequence is synthesized)
aacaacaaaaccggcgcgccagcggtggcgcaacggctctcgtccccgccctcctgctacctgtagtcgcctgggccgcccccggcccagccctgccttgccgccaccctgcgctgtcca

SEQ ID NO: 246553 - DNA, 120 bp, Artificial Sequence
  ENSG00000122557_1 (sequence is synthesized)
gactgaggggtcaggcggagagccgggccgcgccttcggtcagcttctctccctttcacccgcgcctcctcgcgagacccggggctgggccgtgccggtcgccgcgcagcaggaagggag

SEQ ID NO: 246554 - DNA, 120 bp, Artificial Sequence
  ENSG00000122557_2 (sequence is synthesized)
cggctgccacggaaaacgcctggccggacggtgtggctggcggccctgcctgggcgcggagggcggcggtggcgggccccgcggccttctctcagcttcctttctcctcacgacggcctc

SEQ ID NO: 246555 - DNA, 120 bp, Artificial Sequence
  ENSG00000122557_3 (sequence is synthesized)
cacagtccggagcccggcggagcccggacctggcggggagagctgcctccacggccgggcacccagaccccaccgtcgcagtcgccaccacctcagtccatccttggtaccggcaatggg

SEQ ID NO: 246556 - DNA, 120 bp, Artificial Sequence
  ENSG00000122557_4 (sequence is synthesized)
cttcgtatcctccagtgcacttgtaactgacttggacacggaatactaagaactcacttctgtcctcatcccagtcgcgccggcggtgaccatctcggctcttttgggcttaactgccgc

SEQ ID NO: 246557 - DNA, 120 bp, Artificial Sequence
  ENSG00000122557_5 (sequence is synthesized)
tcctctggactctgtctgactttgggggcaccatggaccaaagtgggatggagattcctgtgaccctcatcattaaagcaccgaatcagaaatacagtgaccagactattagctgcttct

SEQ ID NO: 246558 - DNA, 120 bp, Artificial Sequence
  ENSG00000122557_6 (sequence is synthesized)
tgaactggaccgtggggaaactaaaaacgcatctatctaacgtttaccctagcaaaccattgacgaaggatcagagattggtgtattcgggcagactgcttcccgatcatctgcagctga

SEQ ID NO: 246559 - DNA, 120 bp, Artificial Sequence
  ENSG00000122557_7 (sequence is synthesized)
aagacattctcagaaaacaagatgagtatcatatggttcatctagtatgtacttctcggactcctcccagttctccaaaatccagcaccaatagagaaagtcatgaagcattggcatcca

SEQ ID NO: 246560 - DNA, 120 bp, Artificial Sequence
  ENSG00000122557_8 (sequence is synthesized)
gcagcaattctagttcagatcattcaggatcaacaactccatcatctggtcaagaaaccttgtctttagctgtgggttcttcctcagaaggattgaggcagcgtacccttccacaagcac

SEQ ID NO: 246561 - DNA, 120 bp, Artificial Sequence
  ENSG00000122557_9 (sequence is synthesized)
aaactgaccaagcacagagtcaccagtttccatatgtaatgcaaggaaatgtagacaaccaatttcctgggcaagctgctccacctggattcccagtgtatcccgcgtttagcccactgc

SEQ ID NO: 246562 - DNA, 120 bp, Artificial Sequence
  ENSG00000122557_10 (sequence is synthesized)
agatgctatggtggcaacagatgtatgctcatcagtattatatgcagtatcaagctgcagtttcagctcaggccacatcaaatgtcaacccaacccagcctactacttcacagcctctaa

SEQ ID NO: 246563 - DNA, 120 bp, Artificial Sequence
  ENSG00000122557_11 (sequence is synthesized)
atttggcacatgttcctggagaagaacccccaccagctccaaacctagtggcccaagaaaatcgacccatgaatgagaatgttcaaatgaatgcacagggaggtccagtactaaatgaag

SEQ ID NO: 246564 - DNA, 120 bp, Artificial Sequence
  ENSG00000122557_12 (sequence is synthesized)
cttcaatcgagactggctagactggatgtacacgttctcacgagctgcgattctccttagcattgtatacttctattcttcttttagtcggtttatcatggtaatgggagccatgctact

SEQ ID NO: 246565 - DNA, 120 bp, Artificial Sequence
  ENSG00000122557_13 (sequence is synthesized)
ggtttatttacaccaagctggatggtttccttttaggcaagaaggaggtcatcagcaggctcccaacaataatgccgaagttaacaatgatgggcaaaatgcaaacaacttggaacttga

SEQ ID NO: 246566 - DNA, 120 bp, Artificial Sequence
  ENSG00000122557_14 (sequence is synthesized)
agaaatggagcgtcttatggatgatgggcttgaagatgagagtggagaagatggaggtgaagatgccagtgcaattcaaaggcctggattaatggcttcagcttggtctttcatcaccac

SEQ ID NO: 246567 - DNA, 120 bp, Artificial Sequence
  ENSG00000122557_15 (sequence is synthesized)
cttctttacttcactaataccagaggggcctccccaggttgccaattgacctgaaaaactgtgccagctacaaggagggtctgacttcaggaaagtggtttaaataacagtgcaatttca

SEQ ID NO: 246568 - DNA, 120 bp, Artificial Sequence
  ENSG00000122557_16 (sequence is synthesized)
aaaaaatttataactttcttttgatcatcatgtacagaggtgttttttttctttaggcttctcatgcatatgaatattttaagcacgaatggactactaaatatctgagttttttttttt

SEQ ID NO: 246569 - DNA, 120 bp, Artificial Sequence
  ENSG00000122557_17 (sequence is synthesized)
tttttttaaagatcctaacagaacatagcgtaacaatattggtcttccaggtgttactcatttcaattatgtgtagtataccaggacagacctattttcatgtcttatttctttaaagag

SEQ ID NO: 246570 - DNA, 69 bp, Artificial Sequence
  ENSG00000122557_18 (sequence is synthesized)
ccaggacagacctattttcatgtcttatttctttaaagagctgcttcattggccgggcgctacttgagg

SEQ ID NO: 246571 - DNA, 86 bp, Artificial Sequence
  ENSG00000122557_19 (sequence is synthesized)
aaacatggcgaaaccccatcttatcacgcgcctgtaatcccagctacttggggggctcaggcaggagaattgcctgaacccaggag

SEQ ID NO: 246572 - DNA, 120 bp, Artificial Sequence
  ENSG00000122557_20 (sequence is synthesized)
ctccaccctgggcgacagagtgagactcggtctcagaaaaaaaaaaaaaagagctgcttcacatataaatgtctatagctagtagcctggccctttaatgtttaatttgaatagatatat

SEQ ID NO: 246573 - DNA, 120 bp, Artificial Sequence
  ENSG00000122557_21 (sequence is synthesized)
tttaatttgaatagatatatctgttttccgtgaattatcttgaaagttttaaacagaatgacctcatagtttttaataaagaatattatttacctaaaatgtgctagtagcatcttgccc

SEQ ID NO: 246574 - DNA, 120 bp, Artificial Sequence
  ENSG00000122557_22 (sequence is synthesized)
agccataaagcaataaacttctcaataatcttaattttgatatttgaataaataatggaaactttctgtattaagggcatgtatcccatcaattggaatcagtaccttaacagaaaaagg

SEQ ID NO: 246575 - DNA, 120 bp, Artificial Sequence
  ENSG00000122557_23 (sequence is synthesized)
cagctcttcaatggaattaacgtgatataaaatgtttgatataggcagtacttttataaaaaaagataagctggaaattgctccgtgtaattttttaaataaaaagtcaattatggtaaa

SEQ ID NO: 246576 - DNA, 120 bp, Artificial Sequence
  ENSG00000122557_24 (sequence is synthesized)
tgagcggcccagctgcttccccgatccgcaccgcggggccgtggcgtaggggccttgttgcgttccagcttgggggtcgcggtggggcggggcagtgaccccgggccggccgttgtgccc

SEQ ID NO: 246577 - DNA, 120 bp, Artificial Sequence
  ENSG00000122557_25 (sequence is synthesized)
aagctcctggcaccgtgctttgcagacagacgacgctcaacacattttgagcagaagcgtggttcagcaccaggaaggacaccaacttttgcagagacgactcttgggatggagaaagac

SEQ ID NO: 246578 - DNA, 120 bp, Artificial Sequence
  ENSG00000122565_0 (sequence is synthesized)
agccttccctttttgttttccgtgccccaactcggcggattgactcggccccttccggaaacacccgaatcaacttctagtcaaattattgttcacgccgcaatgacccacccctggccc

SEQ ID NO: 246579 - DNA, 120 bp, Artificial Sequence
  ENSG00000122565_1 (sequence is synthesized)
gcgtctgtggaactgacccctggtgtacaggagagttcgctgctgaaagtggtcccaaaggggtactagtttttaagctcccaactccccctcccccagcgtctggaggattccacaccc

SEQ ID NO: 246580 - DNA, 120 bp, Artificial Sequence
  ENSG00000122565_2 (sequence is synthesized)
tcgcaccgcaggggcgaggaagtgggcggagtccggttttggcgccagccgctgaggctgccaagcagaaaagccaccgctgaggagactccggtcactgtcctcgccccgcctccccct

SEQ ID NO: 246581 - DNA, 120 bp, Artificial Sequence
  ENSG00000122565_3 (sequence is synthesized)
tccctccccttggggaccaccgggcgccacgccgcgaacgtaatagctcttcaagtctgcaataaaaaatggcctccaacaaaactacattgcaaaaaatgggaaaaaaacagaatggaa

SEQ ID NO: 246582 - DNA, 120 bp, Artificial Sequence
  ENSG00000122565_4 (sequence is synthesized)
agagtaaaaaagttgaagaggcagagcctgaagaatttgtcgtggaaaaagtactagatcgacgtgtagtgaatgggaaagtggaatatttcctgaagtggaagggatttacagatgctg

SEQ ID NO: 246583 - DNA, 120 bp, Artificial Sequence
  ENSG00000122565_5 (sequence is synthesized)
acaatacttgggaacctgaagaaaatttagattgtccagaattgattgaagcgtttcttaactctcagaaagctggcaaagaaaaagatggtacaaaaagaaaatctttatctgacagtg

SEQ ID NO: 246584 - DNA, 120 bp, Artificial Sequence
  ENSG00000122565_6 (sequence is synthesized)
aatctgatgacagcaaatcaaagaagaaaagagatgctgctgacaaaccaagaggatttgccagaggtcttgatcctgaaagaataattggtgccacagacagcagtggagaattgatgt

SEQ ID NO: 246585 - DNA, 120 bp, Artificial Sequence
  ENSG00000122565_7 (sequence is synthesized)
ttctcatgaaatggaaagattcagatgaggcagacttggtgctggcgaaagaggcaaatatgaagtgtcctcaaattgtaattgctttttatgaagagagactaacttggcattcttgtc

SEQ ID NO: 246586 - DNA, 120 bp, Artificial Sequence
  ENSG00000122565_8 (sequence is synthesized)
ctagtgtgacaaaataactacatcctaatgaaaatcaagtttgatatgtttgttttgaaagtagcgttggaagagttgttgggggttttttgcatccatagcactggttactttgaacaa

SEQ ID NO: 246587 - DNA, 120 bp, Artificial Sequence
  ENSG00000122565_9 (sequence is synthesized)
ataaataaaagctttctgtagttgcttcctttatcagaaaagaacatttgataccatggtatatcatttcctcttcattaaagaacagcttttctaaatgttgggggaaatgtccatagt

SEQ ID NO: 246588 - DNA, 120 bp, Artificial Sequence
  ENSG00000122565_10 (sequence is synthesized)
cttttctaaatgttgggggaaatgtccatagtcattactcagtcaaaacttgtgttctcatgagcctaaggaccattctagatttattacgtgttttttgtgtgtgtgtgtgtgtgtgtg

SEQ ID NO: 246589 - DNA, 120 bp, Artificial Sequence
  ENSG00000122565_11 (sequence is synthesized)
ttttttttgtttttaagcattcacccaaacaaaaaaatcacaggtaaacccatgtttctgagatgccattattccaagcaaaataagagataatcccttcaagttaaattgaaaattttc

SEQ ID NO: 246590 - DNA, 120 bp, Artificial Sequence
  ENSG00000122565_12 (sequence is synthesized)
ctgaaaccatacatttcaagtgaaataagtaattctagataggacaatttaaattggataattttaaagtgtctataattgcagtggtttatttgcaaaattcctaaaaggaaaaatttt

SEQ ID NO: 246591 - DNA, 120 bp, Artificial Sequence
  ENSG00000122565_13 (sequence is synthesized)
atcactgccatcacagcaggtttcctcatccagatgaggaaactagacaaatgctagtgtgttttaactagctaaacaaaactaagttaaatgaacatttaaaagtttccctagcgggcc

SEQ ID NO: 246592 - DNA, 120 bp, Artificial Sequence
  ENSG00000122565_14 (sequence is synthesized)
attccttagcaaaatgttggaatccctgttgctacattgactaaaaggtcatgatgaatggaatatgtaagacttggctcatagaaacctaatcagatggttagaggtgttggcagttta

SEQ ID NO: 246593 - DNA, 120 bp, Artificial Sequence
  ENSG00000122565_15 (sequence is synthesized)
ggacctgctgtcataaatgtgtgaacaaccttttgtaacctaacctattgacctgcatgttttttctttaccccaattcattacatggaggctcaatcttgagtttgctttactggttca

SEQ ID NO: 246594 - DNA, 120 bp, Artificial Sequence
  ENSG00000122565_16 (sequence is synthesized)
gcaaaagccaggaagaacaactttgtagtaatcaaaatgttatccaactgtatattgtttactttattgtaaatactggtgaacagtggttaataaatagttttatattcctttatgcaa

SEQ ID NO: 246595 - DNA, 120 bp, Artificial Sequence
  ENSG00000122565_17 (sequence is synthesized)
cttcggatgtggcttgagctgtaggcgcggagggccggagacgctgcagacccgcgacccggagcagctcggaggcggtgaataatagctcttcaagtctgcaataaaaaatggcctcca

SEQ ID NO: 246596 - DNA, 120 bp, Artificial Sequence
  ENSG00000122565_18 (sequence is synthesized)
ttttctttatttgatatgcctttacagtagaaatagaaatgcccacactcattggattatctttgtttataagttagatgataccagtaaggcattacagtacatatcctagatcttttg

SEQ ID NO: 246597 - DNA, 120 bp, Artificial Sequence
  ENSG00000122565_19 (sequence is synthesized)
agcttacgagttttaaacttgaatatgtatttccacaggaatgtttccacagttgggaaataaaagtttcatgtgatgcctagggtcaattgtctcattaaaatgaggttttaaattctg

SEQ ID NO: 246598 - DNA, 120 bp, Artificial Sequence
  ENSG00000122565_20 (sequence is synthesized)
cttgagctgtaggcgcggagggccggagacgctgcagacccgcgacccggagcagctcggaggcggtgaagtcggtggctttccttctctctagctctcgctcgctggtggtgcttcaga

SEQ ID NO: 246599 - DNA, 120 bp, Artificial Sequence
  ENSG00000122565_21 (sequence is synthesized)
cagatgccacacgcgtcccgggggcccggttctccgctcccctcccctccccttctcgccggaccccgcgccgggagctgcgggaaggagtggagggtcgggcggtggcctcgcggctgg

SEQ ID NO: 246600 - DNA, 120 bp, Artificial Sequence
  ENSG00000122565_22 (sequence is synthesized)
gcgcgcggccagcgccggtagttagtggggggactgctctgccctcgagggggtagggagctgtggcgacggttgccccatttcgagacaaagcgcatttccccctcccctcccccaccc

SEQ ID NO: 246601 - DNA, 120 bp, Artificial Sequence
  ENSG00000122565_23 (sequence is synthesized)
gagacaaagcgcatttccccctcccctcccccacccgcgttccggcggaggcgccccctcccccagccgccacgcggggctgggtcgagacttgggcctcccggagggcggcgcgtggtc

SEQ ID NO: 246602 - DNA, 120 bp, Artificial Sequence
  ENSG00000122565_24 (sequence is synthesized)
gcggatgcgctgaccacgaggcccgcgctcccgggtgggggcgggcacccgcgcttaggcctctggacgccgggcttcagcggcgggggtcgggagcgggtgtttgcaagaggtgattct

SEQ ID NO: 246603 - DNA, 120 bp, Artificial Sequence
  ENSG00000122565_25 (sequence is synthesized)
tttttcaaagtgtcacgaaacggggttgaagcatcttaagttttttccttttgttatttaattaccgattggaaagagggagggtttctgagcagaaaccaagttgggattgcagaacag

SEQ ID NO: 246604 - DNA, 87 bp, Artificial Sequence
  ENSG00000122565_26 (sequence is synthesized)
agcccaggagttggaggccagttaaaaaaaaaagaatcagcaagacgtggtggacacctcctgtagtctcagctacttgggaggctg

SEQ ID NO: 246605 - DNA, 120 bp, Artificial Sequence
  ENSG00000122565_27 (sequence is synthesized)
ttcaaggtgcagtgagctgtgatcatgccagtgcactttggcctaggcaacggagcaagaccttgtctcaaaaaattattaaataataaatcaggcacaactttaacaacacttattgag

SEQ ID NO: 246606 - DNA, 120 bp, Artificial Sequence
  ENSG00000122565_28 (sequence is synthesized)
tccttagcatgtgctatactgtgtgccaaattatttgcttttaatgtgctgtgaaatatctgtgcagtagatactaaaattctgttttattaacctaaaccacaaagaggttaattaact

SEQ ID NO: 246607 - DNA, 120 bp, Artificial Sequence
  ENSG00000122565_29 (sequence is synthesized)
tgcccaaagccacacagctcgtaagtggggtaggtccatcattctcacccaggcagtgtgactccagagcttgtgacattgatgtaaaactctgacaggaataaaggatttattgatatc

SEQ ID NO: 246608 - DNA, 120 bp, Artificial Sequence
  ENSG00000122565_30 (sequence is synthesized)
ggaaaagacattggtcccctattttaagccatgtgaagctgttttaggtaccaggatccccagtaaagtctttctagactcacatggttaggacacgtacttaagtacatcataagcaat

SEQ ID NO: 246609 - DNA, 120 bp, Artificial Sequence
  ENSG00000122565_31 (sequence is synthesized)
tgcactccagcctgggcgacaagagtgtgagaccctgtctcaaaaaaaaagactggaaaaaaataactgtttccagatagtgtttttttattgtattattttggtggtgggttgtaagtt

SEQ ID NO: 246610 - DNA, 120 bp, Artificial Sequence
  ENSG00000122565_32 (sequence is synthesized)
tggtgggttgtaagtttgaactaaatgaacaagataaagcattcttttattttattgtctgttgacttttaatctttccagaaggtgtctgccctgggatatagaagtaaaaatttatgt

SEQ ID NO: 246611 - DNA, 120 bp, Artificial Sequence
  ENSG00000122565_33 (sequence is synthesized)
ggatcgcttgagtcgggagttggaatcttcagtgagctatgattccactactgcactctcgtctgggcaacaaagcaagaccctgtctctggcggaggcaggctggggggtggggtaatg

SEQ ID NO: 246612 - DNA, 120 bp, Artificial Sequence
  ENSG00000122565_34 (sequence is synthesized)
tagggaaggaggaaatgattagtatctgcagtacagaggactttttattcccccgggtgtctattaaaatagatctggataatggtgatgaatcatatttaattcaatcacctttttttt

SEQ ID NO: 246613 - DNA, 120 bp, Artificial Sequence
  ENSG00000122566_0 (sequence is synthesized)
agtagcagcagcgccgggtcccgtgcggaggtgctcctcgcagagttgtttctcgagcagcggcagttctcactacagcgccaggacgagtccggttcgtgttcgtccgcggagatctct

SEQ ID NO: 246614 - DNA, 120 bp, Artificial Sequence
  ENSG00000122566_1 (sequence is synthesized)
ctcatctcgctcggctgcgggaaatcgggctgaagcgactgagtccgcgatggagagagaaaaggaacagttccgtaagctctttattggtggcttaagctttgaaaccacagaagaaag

SEQ ID NO: 246615 - DNA, 120 bp, Artificial Sequence
  ENSG00000122566_2 (sequence is synthesized)
tttgaggaactactacgaacaatggggaaagcttacagactgtgtggtaatgagggatcctgcaagcaaaagatcaagaggatttggttttgtaactttttcatccatggctgaggttga

SEQ ID NO: 246616 - DNA, 120 bp, Artificial Sequence
  ENSG00000122566_3 (sequence is synthesized)
tgctgccatggctgcaagacctcattcaattgatgggagagtagttgagccaaaacgtgctgtagcaagagaggaatctggaaaaccaggggctcatgtaactgtgaagaagctgtttgt

SEQ ID NO: 246617 - DNA, 120 bp, Artificial Sequence
  ENSG00000122566_4 (sequence is synthesized)
tggcggaattaaagaagatactgaggaacatcaccttagagattactttgaggaatatggaaaaattgataccattgagataattactgataggcagtctggaaagaaaagaggctttgg

SEQ ID NO: 246618 - DNA, 120 bp, Artificial Sequence
  ENSG00000122566_5 (sequence is synthesized)
ctttgttacttttgatgaccatgatcctgtggataaaatcgtattgcagaaataccataccatcaatggtcataatgcagaagtaagaaaggctttgtctagacaagaaatgcaggaagt

SEQ ID NO: 246619 - DNA, 120 bp, Artificial Sequence
  ENSG00000122566_6 (sequence is synthesized)
tcagagttctaggagtggaagaggaggcaactttggctttggggattcacgtggtggcggtggaaatttcggaccaggaccaggaagtaactttagaggaggatctgatggatatggcag

SEQ ID NO: 246620 - DNA, 120 bp, Artificial Sequence
  ENSG00000122566_7 (sequence is synthesized)
tatggaggaggacctggaggtggcaattttggaggtagccccggttatggaggaggaagaggaggatatggtggtggaggacctggatatggcaaccagggtgggggctacggaggtggt

SEQ ID NO: 246621 - DNA, 120 bp, Artificial Sequence
  ENSG00000122566_8 (sequence is synthesized)
tatgacaactatggaggaggaaattatggaagtggaaattacaatgattttggaaattataaccagcaaccttctaactacggtccaatgaagagtggaaactttggtggtagcaggaac

SEQ ID NO: 246622 - DNA, 120 bp, Artificial Sequence
  ENSG00000122566_9 (sequence is synthesized)
atggggggaccatatggtggaggaaactatggtccaggaggcagtggaggaagtgggggttatggtgggaggagccgatactgagcttcttcctatttgccatgggcttcactgtataaa

SEQ ID NO: 246623 - DNA, 120 bp, Artificial Sequence
  ENSG00000122566_10 (sequence is synthesized)
taggagaggatgagagcccagaggtaacagaacagcttcaggttatcgaaataacaatgttaaggaaactcttatctcagtcatgcataaatatgcagtgatatggcagaagacaccaga

SEQ ID NO: 246624 - DNA, 120 bp, Artificial Sequence
  ENSG00000122566_11 (sequence is synthesized)
gcagatgcagagagccattttgtgaatggattggattatttaataacattaccttactgtggaggaaggattgtaaaaaaaaatgcctttgagacagtttcttagctttttaattgttgt

SEQ ID NO: 246625 - DNA, 120 bp, Artificial Sequence
  ENSG00000122566_12 (sequence is synthesized)
ttctttctagtggtctttgtaagagtgtagaagcattccttctttgataatgttaaatttgtaagtttcaggtgacatgtgaaaccttttttaagatttttctcaaagttttgaaaagct

SEQ ID NO: 246626 - DNA, 120 bp, Artificial Sequence
  ENSG00000122566_13 (sequence is synthesized)
attagccaggatcatggtgtaataagacataacgtttttcctttaaaaaaatttaagtgcgtgtgtagagttaagaagctgttgtacatttatgatttaataaaataattctaaaggaaa

SEQ ID NO: 246627 - DNA, 120 bp, Artificial Sequence
  ENSG00000122566_14 (sequence is synthesized)
ggggtcagttccacagacgcgggccaggggtgggtcattgcggcgtgaacaataatttgactagaagttgattcgggtgtttccggaaggggccgagtcaatccgccgagttggggcacg

SEQ ID NO: 246628 - DNA, 120 bp, Artificial Sequence
  ENSG00000122566_15 (sequence is synthesized)
gaaaacaaaaagggaaggctactaagatttttctggcgggggttatcattggcgtaactgcagggaccacctcccgggttgagggggctggatctccaggctgcggattaagcccctccc

SEQ ID NO: 246629 - DNA, 120 bp, Artificial Sequence
  ENSG00000122566_16 (sequence is synthesized)
gtcggcgttaatttcaaactgcgcgaccgtttctcacctgccttgcgccaaggcagggggcgggaccctattccaagaggtagtaactagcaggactctagccttccgcaattcattgag

SEQ ID NO: 246630 - DNA, 120 bp, Artificial Sequence
  ENSG00000122566_17 (sequence is synthesized)
cgcatttacggaagtaacgtcgggtactgtctctggccgcaagggtgggaggagtacgcatttggcgtaaggtggggcgtagagccttcccgccattggcggcggatagggcgtttacgc

SEQ ID NO: 246631 - DNA, 120 bp, Artificial Sequence
  ENSG00000122566_18 (sequence is synthesized)
acatttttaagtgaaggttgaagaaatggcaatttacagatgccagaagaaaggataaaaatcaaggcaagataagaaaaaaggaggctgatgttctgctggtccacttggtttactggc

SEQ ID NO: 246632 - DNA, 120 bp, Artificial Sequence
  ENSG00000122566_19 (sequence is synthesized)
ttctctgtctgattgtgcctaactctgacactgtgccttccctctagacactgtagatgatgtttagtcctagctcaatcagtctctccctttgcacatttccgttacaaccctgctcat

SEQ ID NO: 246633 - DNA, 120 bp, Artificial Sequence
  ENSG00000122566_20 (sequence is synthesized)
gtgctcaagatattgctcctgctactctcccctctcttctgcatcaacagttctttctcatctactggacaattcgcatcagcctactatcatacacaaatacccccacctttaaaaacc

SEQ ID NO: 246634 - DNA, 120 bp, Artificial Sequence
  ENSG00000122566_21 (sequence is synthesized)
cctcccttggtcccacactagtcttcagattccatcccattttttgctccccttgacagcaaaaacctccaaagagtatctgtactcagtgtattttctcttcacccatcagcaaaattt

SEQ ID NO: 246635 - DNA, 120 bp, Artificial Sequence
  ENSG00000122566_22 (sequence is synthesized)
gacttagttaccatctcctcctggaaacagcttcttcacctggcatccaagtacctctctattctcctacctcatcaagaacttctgctttgctgattcttcatccccttgatatccaaa

SEQ ID NO: 246636 - DNA, 120 bp, Artificial Sequence
  ENSG00000122566_23 (sequence is synthesized)
catagcaatgtcccaaggctcagttctcaggtccaccaagcactctcccacttcacagcccttgtatttgcagccctttctgcctgtaagctctctcaaccctcttatcctcctgacccc

SEQ ID NO: 246637 - DNA, 120 bp, Artificial Sequence
  ENSG00000122566_24 (sequence is synthesized)
aggtctcttcaaatatttaccatctcagttttctttcttaatctctctatataaaaaactacatcaaaatctttttcccttatcttgctttattttttctccatagcatttagcaccagc

SEQ ID NO: 246638 - DNA, 120 bp, Artificial Sequence
  ENSG00000122566_25 (sequence is synthesized)
tgatatattaccatgtttatttgtttgctgtttgtcctactagaatgctagttttttgaaggcaagggctctgtctgcttggttcctgctgttggccacttcgtaacccagattctggca

SEQ ID NO: 246639 - DNA, 120 bp, Artificial Sequence
  ENSG00000122566_26 (sequence is synthesized)
cataacagacccttgctacatatttgttgaatagctgaactcttagacacaatatcctaagactttgatagagatcttacttctgatagattgttctttcctgcaacaatactgattcct

SEQ ID NO: 246640 - DNA, 120 bp, Artificial Sequence
  ENSG00000122566_27 (sequence is synthesized)
atataaatctggggaaggaagaaaaggtgactgatcactttttacctctcatcttttgccaaggtaaggttttttgtggttgttaaatctgaatataattaaattaaaaactttggatac

SEQ ID NO: 246641 - DNA, 120 bp, Artificial Sequence
  ENSG00000122566_28 (sequence is synthesized)
ccgaggcagctaactttgtttaaaaacttgctagtggtagagagagaaacttctaatctcgaaatcaaatgatctattttagaaccatgaagcaaagtcccctaaatctgtaatatgtgc

SEQ ID NO: 246642 - DNA, 120 bp, Artificial Sequence
  ENSG00000122566_29 (sequence is synthesized)
attaatacaacacacatggacacacacaaacatgcaaacacaagaatgtcacctatattacacaaataataacagggaaacaagtggttgatacagatcaagcccatagagaaattgatc

SEQ ID NO: 246643 - DNA, 120 bp, Artificial Sequence
  ENSG00000122566_30 (sequence is synthesized)
aagcaaactttagtctgggaaggctttttttgtggggggaaactttttgagtgtaatgaattggtaacaaaggtatgtaagatgtcttgtctgaaaactcaggaagagaaggactggagg

SEQ ID NO: 246644 - DNA, 120 bp, Artificial Sequence
  ENSG00000122566_31 (sequence is synthesized)
cagagaaattctgtatgatcaaaattcacactacaggaagccaaaattaggtataatataataatggatcataactcattgaataaaatgagttgaataaaagaatcaatgagtgcactc

SEQ ID NO: 246645 - DNA, 120 bp, Artificial Sequence
  ENSG00000122566_32 (sequence is synthesized)
ctcatctcgctcggctgcgggaaatcgggctgaagcgactgagtccgcgatggagaaaactttagaaactgttcctttggagaggaaaaagagagaaaaggaacagttccgtaagctctt

SEQ ID NO: 246646 - DNA, 120 bp, Artificial Sequence
  ENSG00000122566_33 (sequence is synthesized)
gttgtctgcaattcatcaggattaaattatgtagataacttaagggatatctctgcaaggagaaacacctttttagatcttttagatgctgcttcttcaatgcaaggaaaggaaataacc

SEQ ID NO: 246647 - DNA, 120 bp, Artificial Sequence
  ENSG00000122566_34 (sequence is synthesized)
ccagcgaggtactcttcagggacacaggtctagtacaagagaactcttgacggctactaagttcagccagtcttaaaaaactgtgctgtttctacaaaactttaactacagtagtttata

SEQ ID NO: 246648 - DNA, 120 bp, Artificial Sequence
  ENSG00000122566_35 (sequence is synthesized)
aggatgccaacgaaagctgagggtgtagagcaaaatagttctaagcttcagttaaacttctttaggtaagatcttatttacttttcctttcttaattttcctccctaaaagataaactaa

SEQ ID NO: 246649 - DNA, 120 bp, Artificial Sequence
  ENSG00000122566_36 (sequence is synthesized)
tactcttaaatggtctttcagtatagtggttcttacgtagtttaacatagctataaattgagtttaacaatttataaactcaagagaataatttttataaaccctgttttccaatctgtc

SEQ ID NO: 246650 - DNA, 120 bp, Artificial Sequence
  ENSG00000122566_37 (sequence is synthesized)
atttacttaaattattttggttgtttttccctttttttccttcttttcccaccccctccccctccatgtgaagatttgggtgcttaacatatcatttttttccctgccggaattttagca

SEQ ID NO: 246651 - DNA, 120 bp, Artificial Sequence
  ENSG00000122566_38 (sequence is synthesized)
ttgatatgaaccatggacaagtatattctgctgccacaaagactgtaaagtgcttcatttcaacagctgaggcaagccaagtgatcattaataaagcttttcttggttccttcagtggtg

SEQ ID NO: 246652 - DNA, 120 bp, Artificial Sequence
  ENSG00000122566_39 (sequence is synthesized)
ttggtagtaaaatggtaggtaaaagttaggctgcaagttcaataaatcatgagatttcccatcgttacacccttgtgtattcacatttcttggatcaaacattttgagtgaactaggggt

SEQ ID NO: 246653 - DNA, 120 bp, Artificial Sequence
  ENSG00000122566_40 (sequence is synthesized)
ttttattaaagacatttgttgtatttatggttgtaactgtacatgcttatcaggatgagactgaaagaaggtagggcaaaaatggttgaatctattttcagatagtagttcatacttgag

SEQ ID NO: 246654 - DNA, 120 bp, Artificial Sequence
  ENSG00000122566_41 (sequence is synthesized)
tgaagtgtcttgtctgcattatgaagcctggtatgtatccagtactaaataggtgggttaaatgtggtaattctagttcagtgtcttaccctgaagagaaagttgtaggttggctgttga

SEQ ID NO: 246655 - DNA, 120 bp, Artificial Sequence
  ENSG00000122566_42 (sequence is synthesized)
aattcattccttagatatgatcagtttgattgcccggctttattgcctttacaggaatgtgatactcagggcttactctatacaccaatgagtcttctttgatcctaagaccaccactga

SEQ ID NO: 246656 - DNA, 120 bp, Artificial Sequence
  ENSG00000122566_43 (sequence is synthesized)
agttgtttaggttcttttggacaaacatgataaacttcttcagatactttttttttcctttggcaggaaggtgtcttgctgcaggtaactaatgaagaagtggtcaaccacagagtcttc

SEQ ID NO: 246657 - DNA, 120 bp, Artificial Sequence
  ENSG00000122566_44 (sequence is synthesized)
aagaaataagaaattctgtaccatctgaaagtagttcttgttggtgccttcatttaaaaagcactctttaaaataaaagggaaatgttttctgataaaacaaacatttagttgaggttct

SEQ ID NO: 246658 - DNA, 120 bp, Artificial Sequence
  ENSG00000122566_45 (sequence is synthesized)
tgatataaaacaattacaaaatgagtgttgtttgtaaaacagtaacatcaaattggctagagagataaatgtatcatgttttaaattaggttttgtgagtagacagattacaattctatt

SEQ ID NO: 246659 - DNA, 120 bp, Artificial Sequence
  ENSG00000122566_46 (sequence is synthesized)
ttaaatataaagtttataaaataaatactttttgtatccaaatacttggtgtaatgtttacacataaaatgtgtgaatcttgttctataaatatttggttgtctaaaagatcaccatccc

SEQ ID NO: 246660 - DNA, 120 bp, Artificial Sequence
  ENSG00000122566_47 (sequence is synthesized)
ctaaatttttaaaagcagtttcacaaagctatgcatattttaatattaacaggtaaatgagaagagcattgtggacattattggctgtccccaataaaatgctgttcattatgcactgta

SEQ ID NO: 246661 - DNA, 120 bp, Artificial Sequence
  ENSG00000122566_48 (sequence is synthesized)
tgaaaagggcatggcgaggccgttggcgcctcagtggaagtcggccagccgcctccgtgggagagaggcaggaaatcggaccaattcagtagcagtggggcttaaggtttatgaacgggg

SEQ ID NO: 246662 - DNA, 120 bp, Artificial Sequence
  ENSG00000122566_49 (sequence is synthesized)
tcttgagcggaggcctgagcgtacaaacagcttccccaccctcagcctcccggcgccatttcccttcactgggggtgggggatggggagctttcacatggcggacgctgccccgctgggg

SEQ ID NO: 246663 - DNA, 120 bp, Artificial Sequence
  ENSG00000122566_50 (sequence is synthesized)
tgaaagtggggcgcggaggcgggaattcttattccctttctaaagcacgctgcttcgggggccacggcgtctcctcggcgagcgtttcggcgggcagcaggtcctcgtgagcgaggctgc

SEQ ID NO: 246664 - DNA, 120 bp, Artificial Sequence
  ENSG00000122566_51 (sequence is synthesized)
ggagcttcccctccccctctctcccgggaaccggatttggcggccgccattttcatggctcgccttcctctcagcgttttccttataactcttttattttcttagtgtgctttctctatc

SEQ ID NO: 246665 - DNA, 120 bp, Artificial Sequence
  ENSG00000122566_52 (sequence is synthesized)
aagaagtagaagtggttaactatttttttttcttctcgggctgttttcatatcgtttcgaggtggatttggagtgttttgtgagcttggatctttagagtcctgcgcacctcattaaagg

SEQ ID NO: 246666 - DNA, 120 bp, Artificial Sequence
  ENSG00000122566_53 (sequence is synthesized)
cgctcagccttcccctcgatgaaatggcgccattgcgttcggaagccacaccgaagagcggggagggggggtgctccgggtttgcgggcccggtttcagagaagatatcaccacccaggg

SEQ ID NO: 246667 - DNA, 120 bp, Artificial Sequence
  ENSG00000122566_54 (sequence is synthesized)
cgtcgggccgggttcaatgcgagccgtaggacaaagaaaccattttatgtttttcctgtcttttttttcctttgagtaacggttttatctgggtctgcagtcagtaaaacgacagatgaa

SEQ ID NO: 246668 - DNA, 120 bp, Artificial Sequence
  ENSG00000122566_55 (sequence is synthesized)
ccgcggcaaaataaacataaattggaagccatcggccacgaggggcagggacgaaggtggttttctgggcgggggagggatattcgcgtcagaatcctttactgttcttaaggattccgt

SEQ ID NO: 246669 - DNA, 120 bp, Artificial Sequence
  ENSG00000122566_56 (sequence is synthesized)
ttaagttgtagagctgactcattttaagtaatgttgttactgagaagtttaacccttacgggacagatccatggacctttatagatgattacgaggaaagtgaaataacgattttgtcct

SEQ ID NO: 246670 - DNA, 120 bp, Artificial Sequence
  ENSG00000122566_57 (sequence is synthesized)
tagttatacttcgattaaaacatggcttcagaggctccttcctgtaatgcgtatggattgatgtgcaaaactgttttgggcctgggccgctctgtatttgaactttgttacttttctcat

SEQ ID NO: 246671 - DNA, 120 bp, Artificial Sequence
  ENSG00000122566_58 (sequence is synthesized)
tttgtttgcaatcttggttgaacattacattgataagcataaggtctcaagcgaagggggtctacctggttattttctttgaccctaagcacgtttataaaataacattgtttaaaatcg

SEQ ID NO: 246672 - DNA, 120 bp, Artificial Sequence
  ENSG00000122566_59 (sequence is synthesized)
atagtggacatcgggtaagtttggataaattgtgaggtaagtaatgagtttttgctttttgttagtgatttgtaaaacttgttataaatgtacattatccgtaatttcagtttagagata

SEQ ID NO: 246673 - DNA, 120 bp, Artificial Sequence
  ENSG00000122566_60 (sequence is synthesized)
acctatgtgctgacgacaattaagaataaaaactagctgaaaaaatgaaaataactatcgtgacaagtaaccatttcaaaagactgctttgtgtctcataggagctagtttgatcatttc

SEQ ID NO: 246674 - DNA, 120 bp, Artificial Sequence
  ENSG00000122566_61 (sequence is synthesized)
agttaattttttctttaatttttacgagtcatgaaaactacaggaaaaaaatctgaactgggttttaccactactttttaggagttgggagcatgcgaatggagggagagctccgtagaa

SEQ ID NO: 246675 - DNA, 120 bp, Artificial Sequence
  ENSG00000122566_62 (sequence is synthesized)
ctgggatgagagcagcaattaatgctgcttgctaggaacaaaaaataattgattgaaaattacgtgtgactttttagtttgcattatgcgtttgtagcagttggtcctggatatcacttt

SEQ ID NO: 246676 - DNA, 120 bp, Artificial Sequence
  ENSG00000122566_63 (sequence is synthesized)
ctctcgtttgaggttttttaacctagttaacttttaagacaggtttccttaacattcataagtgcccagaatacagctgtgtagtacagcatataaagatttcagctctgaggtttttcc

SEQ ID NO: 246677 - DNA, 120 bp, Artificial Sequence
  ENSG00000122566_64 (sequence is synthesized)
tattgacttggaaaattgttttgtgcctgtcgcttgccacatggccaatcaagtaagcttcagctttcagtaattgttatcttagagattatgccacgtgaatgtattttattgtacata

SEQ ID NO: 246678 - DNA, 120 bp, Artificial Sequence
  ENSG00000122566_65 (sequence is synthesized)
tggttaagctgagtaattcatattctgtattgtcatatatcaaatatagacatgtccaccaaaaattaaactttttaagcttcgagtgctgctggtcataaaaattaatttgtcctggtt

SEQ ID NO: 246679 - DNA, 120 bp, Artificial Sequence
  ENSG00000122566_66 (sequence is synthesized)
ataagagtaatttttaaggttatttctaatgcatatctttaaatattttcgtaactgagagtcatatggagaaacttagtgtttgttgtaaaaagttgtgtttttttggctgagatactt

SEQ ID NO: 246680 - DNA, 120 bp, Artificial Sequence
  ENSG00000122566_67 (sequence is synthesized)
agaatcaccaccagagggggcagttaagggaaaataaatgatacttttcagatattgaatagtgaaataaaaactttgggtcataagtaatgaaccaagagttattttctgatgtttaaa

SEQ ID NO: 246681 - DNA, 120 bp, Artificial Sequence
  ENSG00000122566_68 (sequence is synthesized)
aatagaaatttgcgtttttaggttgtagggttgaaatttttggtaaagattctttaataatcctttgataatcacggtctacatttgtttatttttccttagaaagttttttttttaatt

SEQ ID NO: 246682 - DNA, 120 bp, Artificial Sequence
  ENSG00000122566_69 (sequence is synthesized)
aataatttaagataatttaatgttgagtaaatttatatcaagcattaatgactttgaaacttgtgtagatcagctgaggcaattttttggtgtaacacaactaatatgcagtttaacata

SEQ ID NO: 246683 - DNA, 120 bp, Artificial Sequence
  ENSG00000122566_70 (sequence is synthesized)
tggtttaaatttgatgtaagttttttttttccccccagaaaactttagaaactgttcctttggagaggaaaaaggtactctgccagcaggtcacctcatatttaagaatttaatttcctg

SEQ ID NO: 246684 - DNA, 120 bp, Artificial Sequence
  ENSG00000122566_71 (sequence is synthesized)
tatcttgggagacatagctgcaggagtaaaagctttttaggatcatgttatctttccttaaaatctggttagatggataatttcataacctattttttttttactctttacttctgttga

SEQ ID NO: 246685 - DNA, 120 bp, Artificial Sequence
  ENSG00000122566_72 (sequence is synthesized)
gggagggaagggggaggcggggcgaggacagtgaccggagtctcctcagcggtggcttttctgcttggcagcctcagcggctggcgccaaaaccggactccgcccacttcctcgcccctg

SEQ ID NO: 246686 - DNA, 120 bp, Artificial Sequence
  ENSG00000122566_73 (sequence is synthesized)
cgttttggtttgtttatgtgactaatacttaactatatcgtatatttacttcatttatattttgagtttttaaacattttatattagtgtctataaatggcttgggtgatagtggtccag

SEQ ID NO: 246687 - DNA, 120 bp, Artificial Sequence
  ENSG00000122574_0 (sequence is synthesized)
gcgccgcttggagcacgggcgctgcgggacggagcccggagccggaggcggcggcggcggagacgtcggccggagctcgagtccagtccagcccccggctccgccacctgcagagcagaa

SEQ ID NO: 246688 - DNA, 120 bp, Artificial Sequence
  ENSG00000122574_1 (sequence is synthesized)
tgcagagcagaagccactctcttgggaccattcataagcaggagacatcaacaccgtgacacatgccagtgccaccgccacccccacctcctctgcctccacctcccccgcctctggggg

SEQ ID NO: 246689 - DNA, 120 bp, Artificial Sequence
  ENSG00000122574_2 (sequence is synthesized)
ctcctccccctcccccaccatcagcacccccggtaagcacagacacctccagcttgcgaagggcagatccgaaaggccggagtgcgctgttggctgatatccagcaaggaactcgcctgc

SEQ ID NO: 246690 - DNA, 120 bp, Artificial Sequence
  ENSG00000122574_3 (sequence is synthesized)
gcaaagtcacgcagatcaacgaccgcagtgccccgcagatcgagagttctaaaggaaccaacaaagaaggaggaggttctgcaaacacacgaggcgcgagcacacctcccaccctgggag

SEQ ID NO: 246691 - DNA, 120 bp, Artificial Sequence
  ENSG00000122574_4 (sequence is synthesized)
atctgtttgctggtggctttcctgtattgcgaccagcaggccagcgggatgtagcaggtggcaagacagggcagggccctggctcccgcgcgccctctcccaggcttcccaacaaaacca

SEQ ID NO: 246692 - DNA, 120 bp, Artificial Sequence
  ENSG00000122574_5 (sequence is synthesized)
tcagcggcccgcttatcccgcctgcctctcccaggctaggcaatacctccgaggcgcatggcgctgccaggacagccccgcctcgccccaacgtgcctgccccgccccctcccaccccac

SEQ ID NO: 246693 - DNA, 120 bp, Artificial Sequence
  ENSG00000122574_6 (sequence is synthesized)
cccctccgcctccacccttacccccgccccttccctcttcctcccccatcaaaactccgcttgtgtccccacccggcccactgaccaaagggaacctcccggtggttgcaccccccgtcc

SEQ ID NO: 246694 - DNA, 120 bp, Artificial Sequence
  ENSG00000122574_7 (sequence is synthesized)
cctgtgcgccaccacctccacctccgccacctcccccaacgccacccccgctgcccccggcctcggttcttagtgacaaggcagtgaagcctcagctggctcccttgcacctcccgccca

SEQ ID NO: 246695 - DNA, 120 bp, Artificial Sequence
  ENSG00000122574_8 (sequence is synthesized)
tcccgcccccgctccctctgctcccaccttgtgggtatccggggctcaaagcggagcccgccagccctgcgcaagatgcgcaggagcctcccgccccgccgcccccgctccccccttatg

SEQ ID NO: 246696 - DNA, 120 bp, Artificial Sequence
  ENSG00000122574_9 (sequence is synthesized)
cttcttgctccccgagggcttctttgcccgcgccccctttgccaggagttaatagcagcagtgaaactccacccccgctaccccctaaatcccccagcttccaggccccaccgcagaagg

SEQ ID NO: 246697 - DNA, 120 bp, Artificial Sequence
  ENSG00000122574_10 (sequence is synthesized)
ccggtgcgcaggccttgcccgccccgcctgcccctccgggctcccagccgttcctgcagaagaagaggcatggccgaccaggggccggtgggggaaagctaaatccacctccagcacccc

SEQ ID NO: 246698 - DNA, 120 bp, Artificial Sequence
  ENSG00000122574_11 (sequence is synthesized)
ctgcgagatcacctaccacagagctttcaagcaagagccagcaggccacagcctggaccccgacgcagcagcctggaggtcaactgcgaaatggaagcctgcacatcattgatgacttcg

SEQ ID NO: 246699 - DNA, 120 bp, Artificial Sequence
  ENSG00000122574_12 (sequence is synthesized)
agtctaaattcacgttccattctgtggaagactttccccctccggatgaatataaaccatgccagaagatttaccccagcaagatccccagaagccgtacacctggtccctggctccaag

SEQ ID NO: 246700 - DNA, 120 bp, Artificial Sequence
  ENSG00000122574_13 (sequence is synthesized)
cggaagcagtcgggcagagctctgatgacatcaaaggcagaaattctcagttatctctaaagactcttcggtgagaagacagatgaagcgaaggtcctggggttccaggttgcagaacaa

SEQ ID NO: 246701 - DNA, 120 bp, Artificial Sequence
  ENSG00000122574_14 (sequence is synthesized)
catgtcagaccccacccaccccatgctcaagctgtaattcagttggcatacaggcttggaattgagaatttatttattgtaaatatgtgatttgcacgggctttaaagcagtattttaat

SEQ ID NO: 246702 - DNA, 120 bp, Artificial Sequence
  ENSG00000122574_15 (sequence is synthesized)
tgacttttatttcggtaatattttttaaaacacccctcatttttccattttttgcattgcatcttggcatttgtcagcacagatagagccctgtccctccacctagtgcccactccatga

SEQ ID NO: 246703 - DNA, 120 bp, Artificial Sequence
  ENSG00000122574_16 (sequence is synthesized)
ctgtgaatctgcttgcaggctggcccttcctagattctgaaccgtttgtagagagtccttagtttgcaggtagccccaaagttataaatatccacaacggcttcttattggcataatttc

SEQ ID NO: 246704 - DNA, 86 bp, Artificial Sequence
  ENSG00000122574_17 (sequence is synthesized)
ggaagtagcgtgtcccccacacccagacagtgccgcgcagcctccagggaacgaggtgccatgtctcgcttccattttgcagtaca

SEQ ID NO: 246705 - DNA, 120 bp, Artificial Sequence
  ENSG00000122574_18 (sequence is synthesized)
ggcttggccctccgatgccaaccacagggccccttttgtaactgaataatcctccaagtagccagtgctcctactgtttacagtgtccctcgtgcccaagtctctgtcactttcatcctg

SEQ ID NO: 246706 - DNA, 120 bp, Artificial Sequence
  ENSG00000122574_19 (sequence is synthesized)
ttccctccaagttcccagtcccatcccagtagccagctttatgagattttggtatttcttccctacagattaaaaacatacacaactcatcattatgctaaactaccagttgtatctcag

SEQ ID NO: 246707 - DNA, 120 bp, Artificial Sequence
  ENSG00000122574_20 (sequence is synthesized)
aggtctccccttctgcccttgcttcgagtgtggacttccatggaaaatatgacatgaaaaagtgtagaacgaaacatcgtgtgaaatacctgccacaaatacctagtgcctcactgcccc

SEQ ID NO: 246708 - DNA, 120 bp, Artificial Sequence
  ENSG00000122574_21 (sequence is synthesized)
catcttaggatccttggagccacccgtcaggcaaaacctagctcccttctgagctaaaggagaaccttgcctgacaactccacattcattcccttgtggtgggcacctgtctgtggggag

SEQ ID NO: 246709 - DNA, 120 bp, Artificial Sequence
  ENSG00000122574_22 (sequence is synthesized)
atgtgtgcaagctcagccactctgaatatggaaaaggtcaggccgggctggtcctgctcttcactccctcttcttgatcctgtagggagtggaaatgtgtttttgcttgctgcctgaccc

SEQ ID NO: 246710 - DNA, 120 bp, Artificial Sequence
  ENSG00000122574_23 (sequence is synthesized)
ctgatgttccccatctttggtcggggaagactgtgacagaggaaggagaaaaaatagaaggaaacagactgatccctgggctgtgctcaaaatagctgccctttaaaggaaatcaggcag

SEQ ID NO: 246711 - DNA, 120 bp, Artificial Sequence
  ENSG00000122574_24 (sequence is synthesized)
ggaggggagggaaaccagcgaaaaagaaatttgctttgcaacaacccacgcacacattcacccctgaagtatatcatgaacagaccaagccatccagaaaggcagccggtcaggagggtg

SEQ ID NO: 246712 - DNA, 120 bp, Artificial Sequence
  ENSG00000122574_25 (sequence is synthesized)
tgggcaaacatgactgcatctgcctcactgttgtctggagtaacgactcaggtggtgtcctgcagcagtgctgtgctttctcattccagatggaagcaagtgagccagggtcaaattccc

SEQ ID NO: 246713 - DNA, 120 bp, Artificial Sequence
  ENSG00000122574_26 (sequence is synthesized)
ttctccaggggaatgaatcaagcccaaactgtaacagctaaataagtagaagtttttgcaggtcatcagctctgggcataactaatttgttttattggttctggaagatttccaaaaagc

SEQ ID NO: 246714 - DNA, 120 bp, Artificial Sequence
  ENSG00000122574_27 (sequence is synthesized)
cagaatttattattataacagtgtccactccactgccctcacagttgtgtaaaataattatagaagttttaatgatcctgattaagaagaccctagacaaaggcaattccaccttcagag

SEQ ID NO: 246715 - DNA, 120 bp, Artificial Sequence
  ENSG00000122574_28 (sequence is synthesized)
tagactgcctgccctaatgaggtgtttagacattcgtgtctcctatggctgggatggaaattaaaataacactatttaaggacagagcgggccaggagcagtggctcatgcaggtaatcc

SEQ ID NO: 246716 - DNA, 120 bp, Artificial Sequence
  ENSG00000122574_29 (sequence is synthesized)
taactcaaaaaaaaaaaaggacagaggggaggaaggagcagaaaccaaaaatggcaattagggagaaatctcaggaatgtggcatcccatctccccttgagacctatcactgaattcaca

SEQ ID NO: 246717 - DNA, 120 bp, Artificial Sequence
  ENSG00000122574_30 (sequence is synthesized)
acccttcgagctcatgctggtgcactgagtcccttgggcgctgtaaaggtttaaccccttgactgtaaactcagacttagagacatctgagtcacacagtccccgccattgtcacatatt

SEQ ID NO: 246718 - DNA, 120 bp, Artificial Sequence
  ENSG00000122574_31 (sequence is synthesized)
ctcactgacactgcagtctgtgactcctccaatgtttcacgtgtattttatatttattgatgtctccttccgcagattcatttctttgtacttaataaactttagtaagtggaaatgctt

SEQ ID NO: 246719 - DNA, 120 bp, Artificial Sequence
  ENSG00000122574_32 (sequence is synthesized)
catgtctctgaatgtaaaaccaggaattctcctcaggaggcacagaaatggtaagggtatgctttctcctaaacagctttatatttttcctcacactccttttcctcagggaaagccatt

SEQ ID NO: 246720 - DNA, 120 bp, Artificial Sequence
  ENSG00000122574_33 (sequence is synthesized)
tggtggaccttttttcaagccagaatgaaacactcaccatttcaaaatctgaagtgtgacaaaagggggcttccctggaatcaccactacatatagaagcaagtttagcaactctgacat

SEQ ID NO: 246721 - DNA, 120 bp, Artificial Sequence
  ENSG00000122574_34 (sequence is synthesized)
tctgcaacaatcatgccaatcacttcccattcttccttggttatgatggcctgtgagaaaaactgaataacatgtataaaacataattcagtattctctctcatctgtagaatacatggt

SEQ ID NO: 246722 - DNA, 120 bp, Artificial Sequence
  ENSG00000122574_35 (sequence is synthesized)
ttcttttagcacacttggagtttttttttcccccaccaatgttataattgattttggccaaatttagtcacaattcaagtactagtacccacaagaaatgaacagaactagaaggcaagc

SEQ ID NO: 246723 - DNA, 120 bp, Artificial Sequence
  ENSG00000122574_36 (sequence is synthesized)
cagacagctgcttttgtgataagacagtccttgaagaaacacctttaatctcacccagggcatcttgaaccgaattatttcctaacctggacacatttccctgcacatgacagggtctca

SEQ ID NO: 246724 - DNA, 120 bp, Artificial Sequence
  ENSG00000122574_37 (sequence is synthesized)
tctttaaaagccctttgtttctttgaaaacatgtattcagtcgaacaataatctccccatttctgaatactatgtgacagactacagagtcacttgcagttaaaccaggcaattctgcaa

SEQ ID NO: 246725 - DNA, 120 bp, Artificial Sequence
  ENSG00000122574_38 (sequence is synthesized)
ctgtgtggaacatcaaggaaagtgacctgagaaggaagaggctaggttcctggaagctaggatgagttcctcagaggaaaaagtacatcctctagcagataagtatcccccttttctaac

SEQ ID NO: 246726 - DNA, 120 bp, Artificial Sequence
  ENSG00000122574_39 (sequence is synthesized)
cacagctgatgcaagaattgcagtaacgattcttagacgatcacaggttcaaaactgtgtgtatgattgtagttaaggaagaagtatatatacacaggaaaaaagacaggaagaatatac

SEQ ID NO: 246727 - DNA, 120 bp, Artificial Sequence
  ENSG00000122574_40 (sequence is synthesized)
acaatattgttaacaggtagagagaattctgagaagatggcagaggagaaagcaccaggaatctgtggacaacaattgcattggcagaatctgtctgatgtaatttgtctcatgtatttt

SEQ ID NO: 246728 - DNA, 120 bp, Artificial Sequence
  ENSG00000122574_41 (sequence is synthesized)
ggaactctgggattcattaaaggcttgaaacttccatgggaaagcttggacagtaaattgtgctcttagtacaatagtaactactcatcctccaccccccaccccatggcaggcaactgg

SEQ ID NO: 246729 - DNA, 120 bp, Artificial Sequence
  ENSG00000122574_42 (sequence is synthesized)
gcacgtgttcctggagcagcttgcatacagcttgcaggagccaaggtgggcacaaaaaaaaaaccctgtcctccagatactggggaatctgttctctgattggttattgctgcttctgat

SEQ ID NO: 246730 - DNA, 120 bp, Artificial Sequence
  ENSG00000122574_43 (sequence is synthesized)
cacagaggtacaaataaagagatgggcagccattgttgcacctcctcttattgttgtaaatccctttccctctggctgaagtggcctcctggggatttcaagggctggtggccattttgt

SEQ ID NO: 246731 - DNA, 120 bp, Artificial Sequence
  ENSG00000122574_44 (sequence is synthesized)
tcctcctgtccttgctctttttttttccccatttgggagccaaacattaaagatgaacattcaaaggctactacatatatgatgaaaattagaaagtgaccacatatgcccagggaaagg

SEQ ID NO: 246732 - DNA, 120 bp, Artificial Sequence
  ENSG00000122574_45 (sequence is synthesized)
cacaggctcagaaaagaccaagaagaccttaagattacacctcagactgattcttagcacagagacagcctacaacaatcaaaaaaataaaatgaacaaaaacaataagaaaaaccagca

SEQ ID NO: 246733 - DNA, 120 bp, Artificial Sequence
  ENSG00000122574_46 (sequence is synthesized)
aaccctgggggacagagagaattgatatctagagttaccacattattagattaaaatgtagagttttcaacaacaacaaaaatcacatcatacaaagaaacaggagagtatggcccattc

SEQ ID NO: 246734 - DNA, 120 bp, Artificial Sequence
  ENSG00000122584_0 (sequence is synthesized)
agtcctctcggctgtctcgagctgaatggctggcagtctgcggctcccccgcctccggcccggcagccacaggtcggaggcgcccggcgtcggcgctcgaggccggcaggggcgccctgc

SEQ ID NO: 246735 - DNA, 120 bp, Artificial Sequence
  ENSG00000122584_1 (sequence is synthesized)
accctcccgcgcccttccccgccctacgcgactcccggctgctcttcccgccactcccctgggctttgcgatcttccctacgccccccgggaagggggcgctgcggccaccgaagacacc

SEQ ID NO: 246736 - DNA, 120 bp, Artificial Sequence
  ENSG00000122584_2 (sequence is synthesized)
gcgggagccacttgtccctgtgggcccagcccgcgagagcctgagagccggatctgtttacacagggtactaattagtctttgaggaatcattcacccacgtgccaaagtaattgtccgt

SEQ ID NO: 246737 - DNA, 120 bp, Artificial Sequence
  ENSG00000122584_3 (sequence is synthesized)
gtcaggaaggtaggcgtgccaagccgcggctctgcggagaaaccacgaccaccgcggccgccggaaacccaaagcgctccagagcgtccccgggtggccgggcagcaccagggacagcgc

SEQ ID NO: 246738 - DNA, 120 bp, Artificial Sequence
  ENSG00000122584_4 (sequence is synthesized)
ccgggactccactggggaccggctcctgggcttcccagcgtcgcgggtagaggtacagctgctccgtgtgccgcaggctccagattctcgccaccccacccctccctcagaaactcggac

SEQ ID NO: 246739 - DNA, 120 bp, Artificial Sequence
  ENSG00000122584_5 (sequence is synthesized)
tgctctcgtctgccgtgtggttctcttttcttccgaaaggccagtgtcttatctctccacttcaagtccagaggacttgctcagtctcctccccttaagtcatttccaccatcctcaggc

SEQ ID NO: 246740 - DNA, 120 bp, Artificial Sequence
  ENSG00000122584_6 (sequence is synthesized)
agctgtgggaagccgagagtcctggactgttcgtccgggtgccagcgctggcagtcccagtccgtccggtgcagcagcccggcgcattcccctctctccctccctcttgctctccctccc

SEQ ID NO: 246741 - DNA, 120 bp, Artificial Sequence
  ENSG00000122584_7 (sequence is synthesized)
tttctgtcttcctctctttcctcctctactgctccctccctctcttgcctcttaagtttcctgcaccgtgaatccaactgtgccaagccttggctcccgcgaaccaatcctgagcgcgac

SEQ ID NO: 246742 - DNA, 120 bp, Artificial Sequence
  ENSG00000122584_8 (sequence is synthesized)
ccgggcactgggacggcgactccgccaaagctggacgaggcagccggacccgtctgcgctcgagcatggagacggagcgcctgggagggcacgtccggggcgctggagacgccaggcccg

SEQ ID NO: 246743 - DNA, 120 bp, Artificial Sequence
  ENSG00000122584_9 (sequence is synthesized)
agtagcttctccatggagcctgcccagagcggtcccttctcgcaggattcgccccaagtcctgtgcggctgctgagagcgctccttgctctgtaaagtggatgtcaggtggatctatgtt

SEQ ID NO: 246744 - DNA, 120 bp, Artificial Sequence
  ENSG00000122584_10 (sequence is synthesized)
tctgaaggaacaaagactcaaagaaggcaccgccaaggaagtttgagacgcgggagaatgcaggctgcgtgctggtacgtgcttttcctcctgcagcccaccgtctacttggtcacatgt

SEQ ID NO: 246745 - DNA, 120 bp, Artificial Sequence
  ENSG00000122584_11 (sequence is synthesized)
gccaatttaacgaacggtggaaagtcagaacttctgaaatcaggaagcagcaaatccacactaaagcacatatggacagaaagcagcaaagacttgtctatcagccgactcctgtcacag

SEQ ID NO: 246746 - DNA, 120 bp, Artificial Sequence
  ENSG00000122584_12 (sequence is synthesized)
acttttcgtggcaaagagaatgatacagatttggacctgagatatgacaccccagaaccttattctgagcaagacctctgggactggctgaggaactccacagaccttcaagagcctcgg

SEQ ID NO: 246747 - DNA, 120 bp, Artificial Sequence
  ENSG00000122584_13 (sequence is synthesized)
ttaaaacgggcaagtttaagaaaatgtttggatggggcgattttcattccaacatcaaaacagtgaagctgaacctgttgataactgggaaaattgtagatcatggcaatgggacattta

SEQ ID NO: 246748 - DNA, 120 bp, Artificial Sequence
  ENSG00000122584_14 (sequence is synthesized)
gtgtttatttcaggcataattcaactggtcaagggaatgtatctgtcagcttggtaccccctacaaaaatcgtggaatttgacttggcacaacaaaccgtgattgatgccaaagattcca

SEQ ID NO: 246749 - DNA, 120 bp, Artificial Sequence
  ENSG00000122584_15 (sequence is synthesized)
agtcttttaattgtcgcattgaatatgaaaaggttgacaaggctaccaagaacacactctgcaactatgacccttcaaaaacctgttaccaggagcaaacccaaagtcatgtatcctggc

SEQ ID NO: 246750 - DNA, 120 bp, Artificial Sequence
  ENSG00000122584_16 (sequence is synthesized)
tctgctccaagccctttaaggtgatctgtatttacatttccttttatagtacagattataaactggtacagaaagtgtgccctgactacaactaccacagtgacacaccttactttccct

SEQ ID NO: 246751 - DNA, 120 bp, Artificial Sequence
  ENSG00000122584_17 (sequence is synthesized)
cgggatgaaggtgaacatgggggtgagactgaagcctgaggaattaaaggtcatatgacagggctgttacctcaaagaagaaggtcacatctgttgcctggaatgtgtctacactgctgc

SEQ ID NO: 246752 - DNA, 120 bp, Artificial Sequence
  ENSG00000122584_18 (sequence is synthesized)
tcttgtcaactggctgcaaaatacactagtggaaaacactctgatgtaatttctgcccagtcagcttcatccctcagtataattgtaaatcatcacagattttgaattcacacctgaaga

SEQ ID NO: 246753 - DNA, 120 bp, Artificial Sequence
  ENSG00000122584_19 (sequence is synthesized)
catgctctcacatatagaggtacacaaacacaccgtcatgcacatttcagcttgcgtctatcatgattcctgttgagagggctttcattgtctgactcataatggttcaggatcaactat

SEQ ID NO: 246754 - DNA, 120 bp, Artificial Sequence
  ENSG00000122584_20 (sequence is synthesized)
catcaaacggaaggattaactagacagagaatgtttctaacagttgctgttatggaaatctcttttaaagtcttgagtacatgctaatcaataatctccactcatgcattcctactgctt

SEQ ID NO: 246755 - DNA, 120 bp, Artificial Sequence
  ENSG00000122584_21 (sequence is synthesized)
ggagtagctgtactggtaaatactactgtaggagtatctgcttgttaaaatggaaaaatgtgtctttagagctcagtattctttattttacaaacacaacaaaatgtagtaacttttttc

SEQ ID NO: 246756 - DNA, 120 bp, Artificial Sequence
  ENSG00000122584_22 (sequence is synthesized)
cagcatacagtaggcacattcaaagtggtccaagatggctcttttttctttgaaaggggcctgttctcagtaaagatgagcaaacatttggaatttacatgtgggcagacattgggataa

SEQ ID NO: 246757 - DNA, 120 bp, Artificial Sequence
  ENSG00000122584_23 (sequence is synthesized)
caactttcatcaccaatcattggacttttgtgaagttgacaccagctaaggctgcttaaaataagttctgatcattatataagaagggaaatgcctggcagacaccatgtaagttataag

SEQ ID NO: 246758 - DNA, 120 bp, Artificial Sequence
  ENSG00000122584_24 (sequence is synthesized)
tgtctgtcttatctttactacacatattgtaacaaattcaatatcctagtcttcatttgtatgaatggtttgtattgtacatagtttaaccaagtgttatttgagctgcttattaatatt

SEQ ID NO: 246759 - DNA, 120 bp, Artificial Sequence
  ENSG00000122584_25 (sequence is synthesized)
aacttgtacttgtctctctgcttgttattggttaagaaaaaaggatatgaggaattcattttatcaatgtagctgtgaaggccattaaaaagacaaacttaatgtacagagcatttattc

SEQ ID NO: 246760 - DNA, 120 bp, Artificial Sequence
  ENSG00000122584_26 (sequence is synthesized)
agatcaagtattgttgaaagctatacatatacaacattacagtctgtctgtatttagatattttatttctggaaaaaatgaaatgtacataaaaataaaacacttaaagttgagtttcaa

SEQ ID NO: 246761 - DNA, 120 bp, Artificial Sequence
  ENSG00000122584_27 (sequence is synthesized)
gtgtacgtgtgtgagcactgccagggctggcgaagaaccagccgccgcctttagtccgagccgccgggccacccaacacaagggcaggtctcgctgccggagaagcctgggctccgaacc

SEQ ID NO: 246762 - DNA, 120 bp, Artificial Sequence
  ENSG00000122584_28 (sequence is synthesized)
agcctgcacgcggctcagtgtgctccgccgcctgggaactcgcacccgaggagcgcagggggcaaggagcccctcaccctccctctcgtccgcccgcccgcctccccagctgcggaccgc

SEQ ID NO: 246763 - DNA, 120 bp, Artificial Sequence
  ENSG00000122584_29 (sequence is synthesized)
gcgcttgctggtctcaggcgctggatttactcgcttttcaatttttcgtaccctccctcccttttttttttggtcccccactccccgctacgaccccctttccccgcttgattgtcaagc

SEQ ID NO: 246764 - DNA, 120 bp, Artificial Sequence
  ENSG00000122585_0 (sequence is synthesized)
accccatccgctggctctcacccctcggagacgctcgcccgacagcatagtacttgccgcccagccacgcccgcgcgccagccaccatgctaggtaacaagcgactggggctgtccggac

SEQ ID NO: 246765 - DNA, 120 bp, Artificial Sequence
  ENSG00000122585_1 (sequence is synthesized)
tgaccctcgccctgtccctgctcgtgtgcctgggtgcgctggccgaggcgtacccctccaagccggacaacccgggcgaggacgcaccagcggaggacatggccagatactactcggcgc

SEQ ID NO: 246766 - DNA, 120 bp, Artificial Sequence
  ENSG00000122585_2 (sequence is synthesized)
tcttgatgagagaaagcacagaaaatgttcccagaactcggcttgaagaccctgcaatgtggtgatgggaaatgagacttgctctctggccttttcctattttcagcccatatttcatcg

SEQ ID NO: 246767 - DNA, 120 bp, Artificial Sequence
  ENSG00000122585_3 (sequence is synthesized)
tgtaaaacgagaatccacccatcctaccaatgcatgcagccactgtgctgaattctgcaatgttttcctttgtcatcattgtatatatgtgtgtttaaataaagtatcatgcattcaaaa

SEQ ID NO: 246768 - DNA, 120 bp, Artificial Sequence
  ENSG00000122585_4 (sequence is synthesized)
cgggactgggacgagagcggattgggggtcgcgtgtggtagcaggaggaggagcgcggggggcagaggagggaggtgctgcgcgtgggtgctctgaatccccaagcccgtccgttgagcc

SEQ ID NO: 246769 - DNA, 120 bp, Artificial Sequence
  ENSG00000122585_5 (sequence is synthesized)
gcaccccatccgctggctctcacccctcggagacgctcgcccgacagcatagtacttgccgcccagccacgcccgcgcgccagccaccacaagagtttgggcaagaagggagaaaagtga

SEQ ID NO: 246770 - DNA, 120 bp, Artificial Sequence
  ENSG00000122585_6 (sequence is synthesized)
cccagcaggaagaacttccaattcggttttgaatgctaaactggcggggcccccaccttgcactctcgccgcgcgcttcttggtccctgagacttcgaacgaagttgcgcgaagttttca

SEQ ID NO: 246771 - DNA, 120 bp, Artificial Sequence
  ENSG00000122591_0 (sequence is synthesized)
agagaggctggcggcagtggtggctctcccggctgggttgtcagtcagtgagaggagggggaagatggctcaccgggacccgttctgctaggaagaaggggagcaggtggtgctgctact

SEQ ID NO: 246772 - DNA, 120 bp, Artificial Sequence
  ENSG00000122591_1 (sequence is synthesized)
cgggaggaagcagagcagcctccgtcgctgtcgctgagagcctcacgagtcgaggtcctgcaggtggagctccggcagccgccctggttgaaggtttagaacagatgtggaaaaatgttt

SEQ ID NO: 246773 - DNA, 120 bp, Artificial Sequence
  ENSG00000122591_2 (sequence is synthesized)
acttcagagaaaggggttgtggaggaatggttgtcagagtttaagacattaccagaaacatctttaccaaattatgccacaaatttgaaagacaagagttctttagtttcatctctctat

SEQ ID NO: 246774 - DNA, 120 bp, Artificial Sequence
  ENSG00000122591_3 (sequence is synthesized)
aaagttatccaggagccacaaagtgagttgctagaacctgtctgtcaccagctctttgaattctatcgcagtggagaggagcagttgcttcaatttacgctgcaatttctcccagaacta

SEQ ID NO: 246775 - DNA, 120 bp, Artificial Sequence
  ENSG00000122591_4 (sequence is synthesized)
atttggtgctaccttgcagtctcagccagcagaaatgtgcatagcagtggatgcattgaagctcttcttctaggggtttacaatttggaaatagttgacaaacagggacataccaaagta

SEQ ID NO: 246776 - DNA, 120 bp, Artificial Sequence
  ENSG00000122591_5 (sequence is synthesized)
ttgagttttacgattccatctttatccaaaccatctgtataccatgaaccttccagcattgggtccatggctctgactgagagtgcactatcccagcatggtttgtcaaaagtggtatac

SEQ ID NO: 246777 - DNA, 120 bp, Artificial Sequence
  ENSG00000122591_6 (sequence is synthesized)
agtggacctcatcctcaaagggagatgctgacagcacagaatcggtttgaagtgttgacattccttttgttgtgttacaatgctgccttaacttacatgcccagtgtttctcttcagtca

SEQ ID NO: 246778 - DNA, 120 bp, Artificial Sequence
  ENSG00000122591_7 (sequence is synthesized)
ctgtgtcaaatttgttcaagaatctgtgtttgtggatatcctcgacaacatgtaagaaaatataaaggtataagtagcaggataccagtttcttcaggattcatggtgcaaatgttaaca

SEQ ID NO: 246779 - DNA, 120 bp, Artificial Sequence
  ENSG00000122591_8 (sequence is synthesized)
gggatttattttgccttttataatggagaatgggatctagctcaaaaagcactggatgatattatatacagagcccagctagaattatatccagagccattgctggttgctaatgcaata

SEQ ID NO: 246780 - DNA, 120 bp, Artificial Sequence
  ENSG00000122591_9 (sequence is synthesized)
aaggcttcattgcctcatggtcccatgaaatctaataaggaaggtacaaggtgtattcaagttgaaatcacaccaacttcctctcgaatatcaagaaatgcagtaaccagcatgtcaata

SEQ ID NO: 246781 - DNA, 120 bp, Artificial Sequence
  ENSG00000122591_10 (sequence is synthesized)
aggggtcataggtggaaaagacatggaaatacagaattaacaggtcaagaagaactgatggagatatctgaagttgacgagggattttattccagggctgcgtctagtaccagccagtcg

SEQ ID NO: 246782 - DNA, 120 bp, Artificial Sequence
  ENSG00000122591_11 (sequence is synthesized)
ggtttatcaaacagtagtcacaattgtagtaacaagccaagtataggaaagaaccacagacggtcaggaggaagcaaaactggaggaaaagaaaaagaaactacaggggaatcttgcaaa

SEQ ID NO: 246783 - DNA, 120 bp, Artificial Sequence
  ENSG00000122591_12 (sequence is synthesized)
gatcactttgctcgaaaacaaactcagagagcccaaagtgagaatcttgagcttctctctttgaagagacttactttaacaaccagccaatccctacctaagcctagtagccatggtttg

SEQ ID NO: 246784 - DNA, 120 bp, Artificial Sequence
  ENSG00000122591_13 (sequence is synthesized)
gctaagaccgcagcgactgtatttagtaaatcctttgaacaagtcagtggtgtcacagtcccacataacccgtcatctgctgttggttgtggggctgggacagatgccaataggttttcc

SEQ ID NO: 246785 - DNA, 120 bp, Artificial Sequence
  ENSG00000122591_14 (sequence is synthesized)
gcttgtagtctccaagaagaaaagcttatttacgtttcagaaagaactgaacttccaatgaagcatcaatcaggtcagcagagacctcctagtattagcattactctgtccacagattaa

SEQ ID NO: 246786 - DNA, 120 bp, Artificial Sequence
  ENSG00000122591_15 (sequence is synthesized)
ttagtaacatatttttctcccataacctagtgaacctggaaatacaactttgcttctttatgaaagtaccctgggtctttcatccgtattcctgacaggagccctgatgtcttaaattct

SEQ ID NO: 246787 - DNA, 120 bp, Artificial Sequence
  ENSG00000122591_16 (sequence is synthesized)
gaaggctcccctgactttatgaagggaagattgtctaggttgcagtaagttgaaatatggttttgttatttcttgattaagattttttccccttggtttgagtcttttttttccctcctc

SEQ ID NO: 246788 - DNA, 120 bp, Artificial Sequence
  ENSG00000122591_17 (sequence is synthesized)
ttatttgttattgttgccctaagattgtcagtgacaataaattttgacaggttgtctaatcaagttggttatgtctcatgtgaggttgtaaggtggtttttcttgttttggtttggtttg

SEQ ID NO: 246789 - DNA, 120 bp, Artificial Sequence
  ENSG00000122591_18 (sequence is synthesized)
gttttttaatagctcctattttgatggctgtgtgtttggccttcagagtcaaagggagtctgcatgtatgggaactgttttatagagaatggggcagaggcacaactccaggaattctct

SEQ ID NO: 246790 - DNA, 120 bp, Artificial Sequence
  ENSG00000122591_19 (sequence is synthesized)
agctcctggtcaggaagccaatctgaaaacaggcatgtggaaacacaaaaatgatgtgtatgaaaagcacctgatgaaaatatttgtaagcagatcatctttatgattagaacaatttgc

SEQ ID NO: 246791 - DNA, 120 bp, Artificial Sequence
  ENSG00000122591_20 (sequence is synthesized)
tcaaagccctggaaaatgcctggtaacccagtgcctagaatattatatgattccaggggatggctagaggcatttctgttgttatctctgaaacatttttatatcaaaaatcagattgct

SEQ ID NO: 246792 - DNA, 120 bp, Artificial Sequence
  ENSG00000122591_21 (sequence is synthesized)
ggtaggtgtgttgttttgaagtgttttatctggatttagcatgtgaagatccctttcaattattaaggtataataggctgtaaagctgatttaccctactgctggactttggaaatccta

SEQ ID NO: 246793 - DNA, 120 bp, Artificial Sequence
  ENSG00000122591_22 (sequence is synthesized)
gttagtttggactcctataattcagagcatacgtcattggaagacttcctggaaatcagtgtaaatcttgcaacatagctctcaagataccactgtataatatgtaattgtttgtctgca

SEQ ID NO: 246794 - DNA, 120 bp, Artificial Sequence
  ENSG00000122591_23 (sequence is synthesized)
aatgcatttttcatctataaaatgtcatgaaagaaaataaaggtagtgaaatatggacaaaggacatttatatattaactaaagttgtttatgtttgtgttcttaaatttaaaacacgaa

SEQ ID NO: 246795 - DNA, 120 bp, Artificial Sequence
  ENSG00000122591_24 (sequence is synthesized)
gaaaaagaaatgtctttcttgttagtgaacaggcctgttttaaatatcttagtatgatatcaaaagaataatcaatttagttacctcccaactaaaaagtaaaaatgaaaaagacgacat

SEQ ID NO: 246796 - DNA, 120 bp, Artificial Sequence
  ENSG00000122591_25 (sequence is synthesized)
ggcagaagttgaaacaaacttgtatgtatctgtatgtgacctctagatggaaataaaagtttgatgtttgctagccgtggtccttttggctatggttgcggttcccctgtaaagcaaatg

SEQ ID NO: 246797 - DNA, 120 bp, Artificial Sequence
  ENSG00000122591_26 (sequence is synthesized)
tacttaagtcatcattcagagtgagagagagaaagcacggctgaggctgagtcagttgaccgttgaggaagacctaaggagctgtccagttcttggctctttttcactgtgactgcacag

SEQ ID NO: 246798 - DNA, 120 bp, Artificial Sequence
  ENSG00000122591_27 (sequence is synthesized)
cggtttccttcttcatagtcccttgctgtagtcaccaagagagcatgctagtgttttcctcttgttcctgcttatgcagagctcagatatatgaaaaatttgtatgctttgaaggctgcc

SEQ ID NO: 246799 - DNA, 120 bp, Artificial Sequence
  ENSG00000122591_28 (sequence is synthesized)
aaagcatttatactctggacatagttttaactgcaactgctttggctaccagtttaaaccgagttcttcaaaaagcatgaactcgttttcattcattagccctgtttacaatgtggattt

SEQ ID NO: 246800 - DNA, 120 bp, Artificial Sequence
  ENSG00000122591_29 (sequence is synthesized)
tgacataaatgaatttgattttcttttagctccagtaacagaatggaataagatctattgccataaattgtagttaagaactgtaaggcaatcgggcagtgaaacttgatattgtattaa

SEQ ID NO: 246801 - DNA, 120 bp, Artificial Sequence
  ENSG00000122591_30 (sequence is synthesized)
cttaataggaaccctgtgtacaatttaaaatatttgtaaaatatcactgtgaatttacagatgtctttttgtcattctttaacaatgaatttcccctgtgcatagttattaatagtattg

SEQ ID NO: 246802 - DNA, 120 bp, Artificial Sequence
  ENSG00000122591_31 (sequence is synthesized)
gtattattaaaaactaatttggcattttaagattggcattttaagcaagttgaggtgcttaggaaacattgtagaataagtttggggaaatgttagctgacagagctgagagatcagatt

SEQ ID NO: 246803 - DNA, 120 bp, Artificial Sequence
  ENSG00000122591_32 (sequence is synthesized)
ttcatgttctatcactgtaatggaacctcatttagacctctctagacctttgctagctgtgtggtctgaggaccagtaagtaggattggcattatctggtatcttgttaaaaatgcagaa

SEQ ID NO: 246804 - DNA, 120 bp, Artificial Sequence
  ENSG00000122591_33 (sequence is synthesized)
tttcatgccactctaggtctactaaatcagaatttgcattcttaacaaggttcccaagtgatttttatgagaagaaagtatcagagtgcaaacaaattactcgtctaatatgtagaattc

SEQ ID NO: 246805 - DNA, 120 bp, Artificial Sequence
  ENSG00000122591_34 (sequence is synthesized)
ccagtggtctcacagccctagatcaaatgtgtcagacactagatcattataatcttcattggttttgacagctaattaattagtttaataatattgacatatggcttcttaagtatttga

SEQ ID NO: 246806 - DNA, 120 bp, Artificial Sequence
  ENSG00000122591_35 (sequence is synthesized)
attctagattgctaatgatccttatttttgcagtaaaaaagtaacactttatatttttcttgttaactataaatggaatcagagctgtaaatgcctgaaattttaagtgtgaaaaggggt

SEQ ID NO: 246807 - DNA, 120 bp, Artificial Sequence
  ENSG00000122591_36 (sequence is synthesized)
gccacccttttatatactgcacaacaaatttgcatttgtatattctttttaaaaaatctctgaagacttgctcagtgaaatggttctgattttttgcttcaaatgatttgcactaattga

SEQ ID NO: 246808 - DNA, 120 bp, Artificial Sequence
  ENSG00000122591_37 (sequence is synthesized)
ttttctggagagcggagttacgttaacaacaaaattcttttatagttcctttgatactatttcaaataaggattacacattgaaagtttttatagaaattatgaaaattggataatctta

SEQ ID NO: 246809 - DNA, 120 bp, Artificial Sequence
  ENSG00000122591_38 (sequence is synthesized)
actatggtaaccattactattatccatactactttctccccactgaactttcaaatttgaaaattggggtagcttttgtaggtcactttcttataaagatgctgatggtcacagatctcc

SEQ ID NO: 246810 - DNA, 120 bp, Artificial Sequence
  ENSG00000122591_39 (sequence is synthesized)
taagtatccagaataatatttttatcatgagaaggattccacacaaaattggggtcttgcaccccatatttcagaggatctgaacagaaattgtggcttcattgcacattttaaatctct

SEQ ID NO: 246811 - DNA, 120 bp, Artificial Sequence
  ENSG00000122591_40 (sequence is synthesized)
atagattcttgaaatcacccaacctctcacatttgaaaacccaacggcctggagtattctggtggcactggagccagcactagctttttggaatccaagtggggagagaaacaaaaatag

SEQ ID NO: 246812 - DNA, 120 bp, Artificial Sequence
  ENSG00000122591_41 (sequence is synthesized)
acttttcaagggactgtcccagactacccagggcaaatgtcttcccttcccttcctgaagccacaggaaagcaccctggagtcctttgtataccactatggaaatttttaaggcaagctc

SEQ ID NO: 246813 - DNA, 120 bp, Artificial Sequence
  ENSG00000122591_42 (sequence is synthesized)
tcaagacttgaagagttggaattctcggcatttaaatgatgcctgaagtttgttttgaaaaagcaatatttcattgctcttttcaattgtgaagcaactgctcagcaaatattactcatt

SEQ ID NO: 246814 - DNA, 120 bp, Artificial Sequence
  ENSG00000122591_43 (sequence is synthesized)
tttttaaaaagttgaattaaagggaaatatatttttaaaaccaaaatagatcaaaatgatcccagttttaagggattttgcctattttggaagaataaaactaaaatgttaaaactgttg

SEQ ID NO: 246815 - DNA, 120 bp, Artificial Sequence
  ENSG00000122591_44 (sequence is synthesized)
aattacagagaacagatgtactctgagacataattttaaacaaatatttaaaataaggcaggttaacatttgcgtttaggcacaataaatctgtattaaagggaagcacatcaaggaaat

SEQ ID NO: 246816 - DNA, 120 bp, Artificial Sequence
  ENSG00000122591_45 (sequence is synthesized)
atatacatgttgaataatgtaactgaaaaatattttttaaaaaccacttaaaaagaaaaataatttgatgggtactttaagcattgtagatagaaattaatgtataatagtgtcctccca

SEQ ID NO: 246817 - DNA, 120 bp, Artificial Sequence
  ENSG00000122591_46 (sequence is synthesized)
gtctttgtatgaaaaattaaaactctctagtcctttaatgagcatgaatttatacttctacatttgttgcttagtaaaattatactcagtactttgagttattcagatttatgtttaata

SEQ ID NO: 246818 - DNA, 120 bp, Artificial Sequence
  ENSG00000122591_47 (sequence is synthesized)
ttgttaaattcttcatcagagagcataaatatattgtcttctatactttgtaacttgtgcatatctaaagaaactaacaacgaacattttgggagatgtttttgtgtttttttatagtag

SEQ ID NO: 246819 - DNA, 120 bp, Artificial Sequence
  ENSG00000122591_48 (sequence is synthesized)
agttttagagtacatttgtcttaataggaagtttttaccataaacccaagattttatttcacgtattgttgctttctcttatatggaacttattgtgtacctcttacctttatttctaat

SEQ ID NO: 246820 - DNA, 120 bp, Artificial Sequence
  ENSG00000122591_49 (sequence is synthesized)
catttagtgatactaatcttttcatagtaaatatatttgtttctaattgtattcctagagtttacattcctaaagaataaacgacgactttggctatttttgtgtgttccctaccttctt

SEQ ID NO: 246821 - DNA, 120 bp, Artificial Sequence
  ENSG00000122591_50 (sequence is synthesized)
aaggctatggaaataaactggagtttagttttttgaatttttgtatatttgtgtaaatgttctccatatgtagtactttatacaacaagtgttgcctcttgttttattgaaataaaaact

SEQ ID NO: 246822 - DNA, 120 bp, Artificial Sequence
  ENSG00000122591_51 (sequence is synthesized)
gaaaaaaatattttttccagatcagtttactcatttaaaaaattattataaaaatttgcagaagttttgatatgaaggaagagaataaaggaggaagacttaggtaagttgagccattga

SEQ ID NO: 246823 - DNA, 120 bp, Artificial Sequence
  ENSG00000122591_52 (sequence is synthesized)
gagcttttgggggtaagtgataagacaatgacctcattcctggctttgtgctttacatgtcatagggctgaggagtatgacaggtccactcgtattcatccaaagatgaagatgagctct

SEQ ID NO: 246824 - DNA, 120 bp, Artificial Sequence
  ENSG00000122591_53 (sequence is synthesized)
atgggccatgcaccagtggcggattatttgtcatatcagaagcacaggcaaatttaggtaacatcactttgtccttctaactttagaatctttattgccatgtgtggtgagtagtagtcc

SEQ ID NO: 246825 - DNA, 120 bp, Artificial Sequence
  ENSG00000122591_54 (sequence is synthesized)
gaagaaagagtctatatctcttgagtacagagattatatgcccctagtacctagataggactttgtgcgtggtaggtatctagacatttatgagacaataaatgagttaggttgatgtta

SEQ ID NO: 246826 - DNA, 120 bp, Artificial Sequence
  ENSG00000122591_55 (sequence is synthesized)
gctttggaaaagaatcaaggataagtcttcagtgttttctttaacagtacaattttagaattttgtttgttggctttaggaaatctcagtggcattacatgaattgcattatagcatgta

SEQ ID NO: 246827 - DNA, 83 bp, Artificial Sequence
  ENSG00000122591_56 (sequence is synthesized)
aaatctcagtggcattacatgaattgcattatagcatgtacttagaaaaaagaacttcttttgggaggccgaggtgggtggat

SEQ ID NO: 246828 - DNA, 120 bp, Artificial Sequence
  ENSG00000122591_57 (sequence is synthesized)
tgaaaaaattcctggcttgtagttgattatatgtttggttaattccatttcatctaaggaactaagtaatttaggaaatgtgttcttaactactcttagaagggtacttgtagagaacca

SEQ ID NO: 246829 - DNA, 120 bp, Artificial Sequence
  ENSG00000122591_58 (sequence is synthesized)
gagtggtgattttgtaagcagtattttgtcctatacaatatgcactcttccagtaactccagtagtccacatagctgactcacctcctacaacccgactttgttaatatcaagataactg

SEQ ID NO: 246830 - DNA, 120 bp, Artificial Sequence
  ENSG00000122591_59 (sequence is synthesized)
ttttataattgtagagaaagattttttacaaccagttgtagttattattttctttgcattatgttattgtgatagtagtggtagctaatatgtgtaattaaaatgatcatcttatcctca

SEQ ID NO: 246831 - DNA, 120 bp, Artificial Sequence
  ENSG00000122591_60 (sequence is synthesized)
aaatcatcctataaagtgcatagaatccccattttacagaagaggaaactgaagctctcaatagggtagaggacttggctaaggtcacctagctgctgagtggcaaaactcagccttgaa

SEQ ID NO: 246832 - DNA, 120 bp, Artificial Sequence
  ENSG00000122591_61 (sequence is synthesized)
cacaggtcttaggactctcactttatatagcttggtaaaagaagatactaattaaatcctacctaatagagatgtatttaaaattcactcaccccatctgtcttacaggtaatagtttta

SEQ ID NO: 246833 - DNA, 120 bp, Artificial Sequence
  ENSG00000122591_62 (sequence is synthesized)
aggtaagataaaatcaaagtgttctaaaagtaaatcataatacattttacagaattagagataattgtgttttagtggtcaaacaatgctcgttattctgttagtaaaagcatggtaaaa

SEQ ID NO: 246834 - DNA, 120 bp, Artificial Sequence
  ENSG00000122591_63 (sequence is synthesized)
tgcaaattaaaataagatttctctttttttttcctgtcagattgataaagatgaaaaagattggttctagtattgacattggtatggggaaatcattagtcactgagatgattagcagga

SEQ ID NO: 246835 - DNA, 120 bp, Artificial Sequence
  ENSG00000122591_64 (sequence is synthesized)
ctgtagattggtacaaatgaattggtgggcagttcaacaggatctatcagactttaaagtgtatctcataccctctgaaacagccatcctactcttctatatttattccattctctgtat

SEQ ID NO: 246836 - DNA, 120 bp, Artificial Sequence
  ENSG00000122591_65 (sequence is synthesized)
tctactgaaaatttagcacaaatatataaacataagcatgcaaggtattcattgcagtattgcttgtaatagcaaaaacaagccagcaaatctaaatgtctgttaatagaggaatagata

SEQ ID NO: 246837 - DNA, 120 bp, Artificial Sequence
  ENSG00000122591_66 (sequence is synthesized)
aattatggtacgtacatatagtggaatataatgtagccattaaaaagaatgcagatctgtatgtgatgatttacattgattattcagtgtatgatcccacttgcattataaatgtgtgca

SEQ ID NO: 246838 - DNA, 120 bp, Artificial Sequence
  ENSG00000122591_67 (sequence is synthesized)
gtagttaaatatgagtgtgtgtatatgtataatacacacttacgtttgctagtatgggggaggagagcattgtttctcaaagtgtggtctaaagacagcctgcattaggaaatttttttt

SEQ ID NO: 246839 - DNA, 120 bp, Artificial Sequence
  ENSG00000122591_68 (sequence is synthesized)
ttaaatggggattcctgggcattgtgctaatttccctgaatcagaatcactgtgagtgaagcatggaaacctgtatttctaacgggttcctcagttgatggcttatacaaatgtaaaata

SEQ ID NO: 246840 - DNA, 120 bp, Artificial Sequence
  ENSG00000122591_69 (sequence is synthesized)
tggtctagtagctgtcagcaatgaattggatatctggtagtggattgtagttagaaagggcaaacttcttgaagagatcttgtattttaaatgaggcctacctaaaataaagccagttga

SEQ ID NO: 246841 - DNA, 120 bp, Artificial Sequence
  ENSG00000122591_70 (sequence is synthesized)
gtaacgttatcagcatagacctgttaatgaaggtgaattggcctgacatagaaaaatgattctaccatacagcactacacaccaactaaatgagcaagccttttaaaaaatccttgttga

SEQ ID NO: 246842 - DNA, 120 bp, Artificial Sequence
  ENSG00000122591_71 (sequence is synthesized)
acttcccaaatatcagatgacctgttaataaagcacaagtaaataataggacttactgtggtaagagaaagtgccaccttgatttggttgtgtgtcagaaccagaaagtaagattatttg

SEQ ID NO: 246843 - DNA, 120 bp, Artificial Sequence
  ENSG00000122591_72 (sequence is synthesized)
tagggctttgggatctatgctcaaatggtttaaggtatgtctgtcaaggcagggaactgattgggattagcaaagttgatagttcagaattagtggacacagcaagcagggttcttgaag

SEQ ID NO: 246844 - DNA, 120 bp, Artificial Sequence
  ENSG00000122591_73 (sequence is synthesized)
attcctgaaaagtcaactgttgtttgagaaacaagctgtttgcccaggtgagcagggcttcacctgtaggaattgtcttcaaccttaggaatttcctctacaaacaacaacaacaaaaaa

SEQ ID NO: 246845 - DNA, 120 bp, Artificial Sequence
  ENSG00000122591_74 (sequence is synthesized)
atagggattgttcttgtttttatttgctttgttttgtttgtaatcttatctttcctgggcaaagatttcctggaataaacaactaagttatgttgacatacatgggctacagtcttatcc

SEQ ID NO: 246846 - DNA, 120 bp, Artificial Sequence
  ENSG00000122591_75 (sequence is synthesized)
aagctgtattgacactgatggattcagtttgtttttcttagctctctctattcaaagattataagtcaatattatgtatatagcaattgacaggtcataagtacggcatgctaactgatc

SEQ ID NO: 246847 - DNA, 120 bp, Artificial Sequence
  ENSG00000122591_76 (sequence is synthesized)
gtaccactggagctccaacaattgatgtatctttggtgacttcttagtgttctgctgaagatcgcaaagatttctgtagcttcttgacctctataacacttggttcacacttgttaagtg

SEQ ID NO: 246848 - DNA, 120 bp, Artificial Sequence
  ENSG00000122591_77 (sequence is synthesized)
ttctaatataatccacatcacattgtgctgtgacttatctttctcatatttgtctccctcactagaccacagccctgtgggaatataatataactaatacataatggtgaataaagattt

SEQ ID NO: 246849 - DNA, 120 bp, Artificial Sequence
  ENSG00000122591_78 (sequence is synthesized)
gttttactagatagaatataaatcgaatccaggaaatcagtggcagcataggagagactgtgttgcttctcttctattcaatagaagtctttgaaactccttttattctctaatattctt

SEQ ID NO: 246850 - DNA, 120 bp, Artificial Sequence
  ENSG00000122591_79 (sequence is synthesized)
catggagatgaaaatgaaggttgtaaagctttactctgattattttaagcatgcctgcataaaaatgttttgagaagtaaattatgcatcatgtttctctttagttagactatgaatggt

SEQ ID NO: 246851 - DNA, 120 bp, Artificial Sequence
  ENSG00000122591_80 (sequence is synthesized)
gtgaagaattttctgggctaatgtttgacatttattattcactcctgtagatttgtggtgaatatgaatggtatctggactaatcagaaaacaacgtaggaaaggcctaacttcaacact

SEQ ID NO: 246852 - DNA, 120 bp, Artificial Sequence
  ENSG00000122591_81 (sequence is synthesized)
gaattcttgctccttgtctcacttgcttccttttgtagaaactacaagtatatttaacttttgtatcctagatccactacggcctactgaaagcctatcatgcatttatctttaaacttt

SEQ ID NO: 246853 - DNA, 120 bp, Artificial Sequence
  ENSG00000122591_82 (sequence is synthesized)
tactctcttcatttagccaacatatttctacttctatgttgcctgctgtgctgtgtaattttctacaaacattttcacctccaaatcccttgaaatgaaaccctctggaagagcatcacc

SEQ ID NO: 246854 - DNA, 120 bp, Artificial Sequence
  ENSG00000122591_83 (sequence is synthesized)
actttttcttcctctattctaattcccctctagtttcccctctagtttaagacttttgtttcaatatttattctttccttaagcctttaaattcatttatatccaccaagttgaatttga

SEQ ID NO: 246855 - DNA, 120 bp, Artificial Sequence
  ENSG00000122591_84 (sequence is synthesized)
tgagacaggacatgtttgaaagaaggacaaaccaaacaagcaagcaaacccatgaatactcgtacaataggacataatatacatttcccagttccctgaaggggtaaaattgagactggt

SEQ ID NO: 246856 - DNA, 120 bp, Artificial Sequence
  ENSG00000122591_85 (sequence is synthesized)
tatacaagcagtattgcacagcatgctgatactagctagacatagcctacagtgtttcagcttcactcaaagatggttctggaggacagtgaggaaatgaactttttccagcgagaataa

SEQ ID NO: 246857 - DNA, 120 bp, Artificial Sequence
  ENSG00000122591_86 (sequence is synthesized)
atatgagcagtatttctagtctgctttgcaccgaaagtgagccatcccaagatacagatctacaccatttatacctggccaggtggttggaaacacagacgtaataagattggaggatga

SEQ ID NO: 246858 - DNA, 120 bp, Artificial Sequence
  ENSG00000122591_87 (sequence is synthesized)
gtgacaaaaattgggagctaaacatattggacttcttaaaataggctcagattgcaagaataattgtttcctacagacatattaaacaaaggccctgtggtgaaggaggtgctaaataat

SEQ ID NO: 246859 - DNA, 120 bp, Artificial Sequence
  ENSG00000122591_88 (sequence is synthesized)
cagatggtcaagatgactttgaggatatcagtaaatctctttggtattccagcctttgttcaaacagtttatgggcaaagcggctatactggaaggatagggctacacaggaacttcaac

SEQ ID NO: 246860 - DNA, 120 bp, Artificial Sequence
  ENSG00000122591_89 (sequence is synthesized)
aatacaggcctcctttcatcaaggctgtccttattactgccaggagccgaactggccagcagcagtgaccatcctaagatacaacatctgagggtgaccagatagttagtggcagattga

SEQ ID NO: 246861 - DNA, 120 bp, Artificial Sequence
  ENSG00000122591_90 (sequence is synthesized)
ttatatcaaatattttctttcatggagagacaactatttgtcctcatggaatagagccttactctggatctggctttaagtttgccttccctaagcaccatgcttgtgtgtgcaataata

SEQ ID NO: 246862 - DNA, 120 bp, Artificial Sequence
  ENSG00000122591_91 (sequence is synthesized)
agcttcctgttcaccattatgattttccccaaaatattgcttctaagaaacttattttacaatgtaatcagtgaggtagaggtagaattacactttcagtcatgggaaactaggtaatta

SEQ ID NO: 246863 - DNA, 120 bp, Artificial Sequence
  ENSG00000122591_92 (sequence is synthesized)
ctttcagtcatgggaaactaggtaattaacatcaaaattcccattggcaactagataatccagcaaaactcttcaaaacatgaaaatctaggccaggcgcagtggcttatgcctataatc

SEQ ID NO: 246864 - DNA, 61 bp, Artificial Sequence
  ENSG00000122591_93 (sequence is synthesized)
gaggttgataaataaataaacatgaaaatctagagaggcaagcattggcacaacttctttc

SEQ ID NO: 246865 - DNA, 120 bp, Artificial Sequence
  ENSG00000122591_94 (sequence is synthesized)
atgaaaatctagagaggcaagcattggcacaacttctttcctggaggtattggctgattctagaagcatttaaggggataagcagtgcttcttactgctccaggatattaggaggacaaa

SEQ ID NO: 246866 - DNA, 120 bp, Artificial Sequence
  ENSG00000122591_95 (sequence is synthesized)
aactgaatgccagtgcctgccaagtcataaaagagggcttaggaaattcccatgctttgggctgggacccaaaaaagctccaccataggagtaagagtgaattggaagtgcatcaactct

SEQ ID NO: 246867 - DNA, 120 bp, Artificial Sequence
  ENSG00000122591_96 (sequence is synthesized)
cccccatacacagggaattcagcacggattcaaaccatcccaattcctgaaatcagattaaaaatgatcccctaagtgcttggtaataaacaaatcctctgtggaggtggaaaaaaaacc

SEQ ID NO: 246868 - DNA, 120 bp, Artificial Sequence
  ENSG00000122591_97 (sequence is synthesized)
ccatcatcttaagcctcaagttctacaatttttcaaatacagtcttcacaagagaaaagaaaaataaccagacacttctatagcagagcaacactcattgagaacaacaagcagctttgg

SEQ ID NO: 246869 - DNA, 120 bp, Artificial Sequence
  ENSG00000122591_98 (sequence is synthesized)
gtaaaattgcttaaaacctctgtttgaagccattgaagaactttcagctaaacaggactctagaagacaaaacgccagagagaaggtgtgcagaaaagagttaacataagaggctgagat

SEQ ID NO: 246870 - DNA, 120 bp, Artificial Sequence
  ENSG00000122591_99 (sequence is synthesized)
gctatccttagccctgattttaaagctgggctttggctagtgtctgggaacttggattaccggaatgttcccaccattccctaactgataagggggtttactctttgtaaactatataaa

SEQ ID NO: 246871 - DNA, 120 bp, Artificial Sequence
  ENSG00000122591_100 (sequence is synthesized)
caacatggtttatgctgaattcccgctttgcttctaggagtctggaattatgatttgtgctgggcagagggtgcctctatcactaacttccaatacaaactttgggcagtaagactctaa

SEQ ID NO: 246872 - DNA, 120 bp, Artificial Sequence
  ENSG00000122591_101 (sequence is synthesized)
cgagcatccctggcagacaacatttcacacctgttgtcacaattcagtactgaagtaattaaccacagcctgtgtgattccacaggcaaaggattcttggaatcttgtgtcaggtttcct

SEQ ID NO: 246873 - DNA, 120 bp, Artificial Sequence
  ENSG00000122591_102 (sequence is synthesized)
ctggacttcaccccatgtccttttcccctttgctgatttgctttgtagtacttttctctaataaatcatagccatgagtatgactatatgctgagccttgtgagtgcttctgttgaatca

SEQ ID NO: 246874 - DNA, 120 bp, Artificial Sequence
  ENSG00000122591_103 (sequence is synthesized)
ctgaacctggggtgctggcgtggtcttggggactcccaatacaaaagtattttaaccagagaagtgagcagacattctgcagctacttcttccattatggaatttgccaaatctgggtaa

SEQ ID NO: 246875 - DNA, 120 bp, Artificial Sequence
  ENSG00000122591_104 (sequence is synthesized)
aaggcccaagaagagagttactgttaagaatcagagaagcaaacaagttatggaaaccacacaggactggagaaacaaaaagaacagggcctttaaaccaatcgcacttgggagagcaga

SEQ ID NO: 246876 - DNA, 120 bp, Artificial Sequence
  ENSG00000122591_105 (sequence is synthesized)
cagagatcctagtaagacaggaagttcagagaagtgagcctggcactttccttgttttcctcttgagtatttgctgaattcttggattgctcagagagggaaaaaaaaaaaaaaaaaaaa

SEQ ID NO: 246877 - DNA, 120 bp, Artificial Sequence
  ENSG00000122591_106 (sequence is synthesized)
atgctactgaattgggcatccttgtcattcctgagattagtgtcacaaatgtggccggagagagaaccgggaatggggaaaaaggcagaacactaggagagattgatgctcagcatatac

SEQ ID NO: 246878 - DNA, 120 bp, Artificial Sequence
  ENSG00000122591_107 (sequence is synthesized)
agggtgtgcaggaaacagccacagatcctagaactgagagcaaaggcttgccagagatcaggaggcaaaaatctgtaagaaaaatgatggaggatggaataaactcacctggcagagtgc

SEQ ID NO: 246879 - DNA, 120 bp, Artificial Sequence
  ENSG00000122591_108 (sequence is synthesized)
aagagaataaaggaggaagacttagggctgaggagtatgacaggtccactcgtattcatccaaagatgaagatgagctctatgggccatgcaccagtggcggattatttgtcatatcaga

SEQ ID NO: 246880 - DNA, 120 bp, Artificial Sequence
  ENSG00000122591_109 (sequence is synthesized)
agcacaggcaaatttaggtgaagctgggatgtgtcctctttcctcttaaccccctagctcaggacctggtaaatacagcaaacggggagtgagtttctcaaatgcctggctgtgtctgcc

SEQ ID NO: 246881 - DNA, 120 bp, Artificial Sequence
  ENSG00000122591_110 (sequence is synthesized)
gccctccagttaccacgactacagcgctttccagcaggtttctataagacaaggatgttttggacatgttcaagcccccagaactggctgcaccccgtgtgcctttctctcagtgcagca

SEQ ID NO: 246882 - DNA, 120 bp, Artificial Sequence
  ENSG00000122591_111 (sequence is synthesized)
acttatgggctaataatggcccctgccagagcatattgtgctgggcggtcacgggtggcagaaactactggcctctcttttgacaacccacaggaaacatttgcacctccagcactttcc

SEQ ID NO: 246883 - DNA, 120 bp, Artificial Sequence
  ENSG00000122591_112 (sequence is synthesized)
gctcaaagtgctccatggtagcaacacctgtgtgtggtgcagaagctggggctacactgctttataactcgtctttctatctgacctctggagtccagtgaaagaccaaaactttactgc

SEQ ID NO: 246884 - DNA, 120 bp, Artificial Sequence
  ENSG00000122591_113 (sequence is synthesized)
ggggtttacaatttggtttgtatttaatggagttaacaaaatcttttttgacaaaatcaaatatataacctgtgcaactgcttttcattttaataaagctagtgtttgttttttcataca

SEQ ID NO: 246885 - DNA, 120 bp, Artificial Sequence
  ENSG00000122591_114 (sequence is synthesized)
ataaaggggtaagaaaatgtatatgtttaaagaacaatactgaaatgaactctagtgtaccattccccaagccaagaaatataatttattaccgtattccagaagccatctctgaacatt

SEQ ID NO: 246886 - DNA, 120 bp, Artificial Sequence
  ENSG00000122591_115 (sequence is synthesized)
tattaggttactcttgatcaaatgacggaaatggaatgttgcctcgagatcttttgtgtcatacttttgaaatattgaagaatgccttaatctcgtctttatgtaagcagttgcagtaaa

SEQ ID NO: 246887 - DNA, 120 bp, Artificial Sequence
  ENSG00000122591_116 (sequence is synthesized)
acctttttttcccccgtcgggagaattgtgaaaggtttccaaatagtccacatttgcttgcccttctgacattaccagaaacatctttaccaaattatgccacaaatttgaaagacaaga

SEQ ID NO: 246888 - DNA, 120 bp, Artificial Sequence
  ENSG00000122592_0 (sequence is synthesized)
gctgcggcgagctccgtccaaaagaaaatggggtttggtgtaaatctgggggtgtaatgttatcatatatcactctacctcgtaaaaccgacactgaaagctgccggacaacaaatcaca

SEQ ID NO: 246889 - DNA, 120 bp, Artificial Sequence
  ENSG00000122592_1 (sequence is synthesized)
ggtcaaaattatgagttcttcgtattatgtgaacgcgctttttagcaaatatacggcgggggcttctctgttccaaaatgccgagccgacttcttgctcctttgctcccaactcacagag

SEQ ID NO: 246890 - DNA, 120 bp, Artificial Sequence
  ENSG00000122592_2 (sequence is synthesized)
aagcggctacggggcgggcgccggcgccttcgcctcgaccgttccgggcttatacaatgtcaacagccccctttatcagagcccctttgcgtccggctacggcctgggcgccgacgccta

SEQ ID NO: 246891 - DNA, 120 bp, Artificial Sequence
  ENSG00000122592_3 (sequence is synthesized)
cggcaacctgccctgcgcctcctacgaccaaaacatccccgggctctgcagtgacctcgccaaaggcgcctgcgacaagacggacgagggcgcgctgcatggcgcggctgaggccaattt

SEQ ID NO: 246892 - DNA, 120 bp, Artificial Sequence
  ENSG00000122592_4 (sequence is synthesized)
ccgcatctacccctggatgcggtcttcaggacctgacaggaagcggggccgccagacctacacgcgctaccagacgctggagctggagaaggagttccacttcaaccgctacctgacgcg

SEQ ID NO: 246893 - DNA, 120 bp, Artificial Sequence
  ENSG00000122592_5 (sequence is synthesized)
gcgccgccgcattgaaatcgcccacgcgctctgcctcaccgagcgccagattaagatctggttccagaaccgccgcatgaagtggaagaaagagcataaggacgaaggtccgactgccgc

SEQ ID NO: 246894 - DNA, 120 bp, Artificial Sequence
  ENSG00000122592_6 (sequence is synthesized)
cgcagctcccgagggcgccgtgccctctgccgccgccactgctgccgcggacaaggccgacgaggaggacgatgatgaagaagaggaagacgaggaggaatgaggggccgatccggggcc

SEQ ID NO: 246895 - DNA, 120 bp, Artificial Sequence
  ENSG00000122592_7 (sequence is synthesized)
ctctctgcaccggacagtcggaaaagcgtctttaagagactcactggttttacttacaaaaatgggaaaaataaaagaaaatgtaaaaaacaaaaacaaaaacaaaaaagcaacccagtc

SEQ ID NO: 246896 - DNA, 120 bp, Artificial Sequence
  ENSG00000122592_8 (sequence is synthesized)
gcctccgaggaccccaaaagacacccccaaccccaggccagccggccctgctctggcgcgtccaaaatactacctagcacaggcctctgctcgaggcacccccaaactacctatgtatcc

SEQ ID NO: 246897 - DNA, 120 bp, Artificial Sequence
  ENSG00000122592_9 (sequence is synthesized)
agccccagagggcctccattcccaggaagtccctatgtatcccaacactggcagacacccagcaccaccctcccagacccgcaagaaagtgaatctcactactacctactcccctaaaac

SEQ ID NO: 246898 - DNA, 120 bp, Artificial Sequence
  ENSG00000122592_10 (sequence is synthesized)
tacctattttgtgctggctggcttgcctgctacctagtgccgactgctcccaggcaagtcccctgctgcttacagcccgcagcttttggggtccctgaggctgccctgagaatgtgctga

SEQ ID NO: 246899 - DNA, 120 bp, Artificial Sequence
  ENSG00000122592_11 (sequence is synthesized)
ggtccaggatcagggtattggcatctatttaaatcgaaaaataatatatttattccaaaaagcatcctaagtgcttgcaccctagaatcaatccctccttctctggcttggcacccacag

SEQ ID NO: 246900 - DNA, 120 bp, Artificial Sequence
  ENSG00000122592_12 (sequence is synthesized)
ctcaggcccatcaacccccacttctggaggggaatgttcctgagctggctgcagatctgtgggttagcttctgcttagcaggactgtggagatgcttccagcttcgctgtcctttcctct

SEQ ID NO: 246901 - DNA, 120 bp, Artificial Sequence
  ENSG00000122592_13 (sequence is synthesized)
ggctcctgtatcttactgttcagctgtgttaaatatgtacgccctgatgtttcctataatagcagatactgtatatttgaacaagatttttttttatcatttctatagtcttggagttca

SEQ ID NO: 246902 - DNA, 120 bp, Artificial Sequence
  ENSG00000122592_14 (sequence is synthesized)
tttgtaaggcagtgtcttgacttggaaaggatgtgttaatggggtgactttgtagcatggtatgttgtcttgagttaactgtagtgggtggggaggtccaatgccctccgcaatgccctt

SEQ ID NO: 246903 - DNA, 120 bp, Artificial Sequence
  ENSG00000122592_15 (sequence is synthesized)
catctcctgtgttgtcctgtaccctgctcagctccatcctggggttcagggaaggcacacttcccagcccagctgtgttttatgtaaccgaaaataaagatgcgtggtgacaaagaaaaa

SEQ ID NO: 246904 - DNA, 120 bp, Artificial Sequence
  ENSG00000122592_16 (sequence is synthesized)
gggcagtttatgaggcgtttaggggaagggttctccccaccatcctccaccgagcggtgggcggcaggggcttcagctggtgcaacatggtgcaggggtcggaggcctggaagggcggat

SEQ ID NO: 246905 - DNA, 120 bp, Artificial Sequence
  ENSG00000122592_17 (sequence is synthesized)
aaacagtgtgcctccgattaaggaaaggaagctgggagacgttgactttattcgaaccacatggctccagtttgcggtggcaatctctctgcagctgcaagagatgctgcgccttccccg

SEQ ID NO: 246906 - DNA, 120 bp, Artificial Sequence
  ENSG00000122641_0 (sequence is synthesized)
acagtgccaataccatgaagaggagctcagacagctcttaccacatgatacaagagccggctggtggaagagtggggaccagaaagagaatttgctgaagaggagaaggaaaaaaaaaac

SEQ ID NO: 246907 - DNA, 120 bp, Artificial Sequence
  ENSG00000122641_1 (sequence is synthesized)
accaaaaaaaaaaataaaaaaatccacacacacaaaaaaacctgcgcgtgaggggggaggaaaagcagggccttttaaaaaggcaatcacaacaacttttgctgccaggatgcccttgct

SEQ ID NO: 246908 - DNA, 120 bp, Artificial Sequence
  ENSG00000122641_2 (sequence is synthesized)
ttggctgagaggatttctgttggcaagttgctggattatagtgaggagttcccccaccccaggatccgaggggcacagcgcggcccccgactgtccgtcctgtgcgctggccgccctccc

SEQ ID NO: 246909 - DNA, 120 bp, Artificial Sequence
  ENSG00000122641_3 (sequence is synthesized)
aaaggatgtacccaactctcagccagagatggtggaggccgtcaagaagcacattttaaacatgctgcacttgaagaagagacccgatgtcacccagccggtacccaaggcggcgcttct

SEQ ID NO: 246910 - DNA, 120 bp, Artificial Sequence
  ENSG00000122641_4 (sequence is synthesized)
gaacgcgatcagaaagcttcatgtgggcaaagtcggggagaacgggtatgtggagatagaggatgacattggaaggagggcagaaatgaatgaacttatggagcagacctcggagatcat

SEQ ID NO: 246911 - DNA, 120 bp, Artificial Sequence
  ENSG00000122641_5 (sequence is synthesized)
cacgtttgccgagtcaggaacagccaggaagacgctgcacttcgagatttccaaggaaggcagtgacctgtcagtggtggagcgtgcagaagtctggctcttcctaaaagtccccaaggc

SEQ ID NO: 246912 - DNA, 120 bp, Artificial Sequence
  ENSG00000122641_6 (sequence is synthesized)
caacaggaccaggaccaaagtcaccatccgcctcttccagcagcagaagcacccgcagggcagcttggacacaggggaagaggccgaggaagtgggcttaaagggggagaggagtgaact

SEQ ID NO: 246913 - DNA, 120 bp, Artificial Sequence
  ENSG00000122641_7 (sequence is synthesized)
gttgctctctgaaaaagtagtagacgctcggaagagcacctggcatgtcttccctgtctccagcagcatccagcggttgctggaccagggcaagagctccctggacgttcggattgcctg

SEQ ID NO: 246914 - DNA, 120 bp, Artificial Sequence
  ENSG00000122641_8 (sequence is synthesized)
tgagcagtgccaggagagtggcgccagcttggttctcctgggcaagaagaagaagaaagaagaggagggggaagggaaaaagaagggcggaggtgaaggtggggcaggagcagatgagga

SEQ ID NO: 246915 - DNA, 120 bp, Artificial Sequence
  ENSG00000122641_9 (sequence is synthesized)
aaaggagcagtcgcacagacctttcctcatgctgcaggcccggcagtctgaagaccaccctcatcgccggcgtcggcggggcttggagtgtgatggcaaggtcaacatctgctgtaagaa

SEQ ID NO: 246916 - DNA, 120 bp, Artificial Sequence
  ENSG00000122641_10 (sequence is synthesized)
acagttctttgtcagtttcaaggacatcggctggaatgactggatcattgctccctctggctatcatgccaactactgcgagggtgagtgcccgagccatatagcaggcacgtccgggtc

SEQ ID NO: 246917 - DNA, 120 bp, Artificial Sequence
  ENSG00000122641_11 (sequence is synthesized)
ctcactgtccttccactcaacagtcatcaaccactaccgcatgcggggccatagcccctttgccaacctcaaatcgtgctgtgtgcccaccaagctgagacccatgtccatgttgtacta

SEQ ID NO: 246918 - DNA, 120 bp, Artificial Sequence
  ENSG00000122641_12 (sequence is synthesized)
tgatgatggtcaaaacatcatcaaaaaggacattcagaacatgatcgtggaggagtgtgggtgctcatagagttgcccagcccagggggaaagggagcaagagttgtccagagaagacag

SEQ ID NO: 246919 - DNA, 89 bp, Artificial Sequence
  ENSG00000122641_13 (sequence is synthesized)
cccagggggaaagggagcaagagttgtccagagaagacagtggcaaaatgaagaaatttttaaggtttctgagttaaccagaaaaatag

SEQ ID NO: 246920 - DNA, 120 bp, Artificial Sequence
  ENSG00000122641_14 (sequence is synthesized)
gatgaaggaagatgtggaaaaaatccttagccagggctcagagatgaagcagtgaaagagacaggaattgggagggaaagggagaatggtgtaccctttatttcttctgaaatcacactg

SEQ ID NO: 246921 - DNA, 120 bp, Artificial Sequence
  ENSG00000122641_15 (sequence is synthesized)
atgacatcagttgtttaaacggggtattgtcctttccccccttgaggttcccttgtgagccttgaatcaaccaatctagtctgcagtagtgtggactagaacaacccaaatagcatctag

SEQ ID NO: 246922 - DNA, 120 bp, Artificial Sequence
  ENSG00000122641_16 (sequence is synthesized)
aaagccatgagtttgaaagggcccatcacaggcactttcctacccaattacccaggtcataaggtatgtctgtgtgacacttatctctgtgtatatcagcatacacacacacacacacac

SEQ ID NO: 246923 - DNA, 120 bp, Artificial Sequence
  ENSG00000122641_17 (sequence is synthesized)
acacacacacacacacaggcatttccacacattacatatatacacatactggtaaaagaacaatcgtgtgcaggtggtcacacttcctttttctgtaccacttttgcaacaaaacaaaac

SEQ ID NO: 246924 - DNA, 120 bp, Artificial Sequence
  ENSG00000122641_18 (sequence is synthesized)
aaacaacattaaaaaattgagaacaagtatggaaagaatgaaagatcaaggaaaaaagaataccaagttacatttcgttaaggtgcttatgatcttagaactatgcaacctaataggttt

SEQ ID NO: 246925 - DNA, 120 bp, Artificial Sequence
  ENSG00000122641_19 (sequence is synthesized)
gaaactgtttacctgagagagaacaaaaagagagacttttttgtattggaagtaatctgattaatttttattttcttcaaggagagatacttgaaaggaatatgtttgtccatctgttgg

SEQ ID NO: 246926 - DNA, 120 bp, Artificial Sequence
  ENSG00000122641_20 (sequence is synthesized)
atccaaacatttctatattttgtaaatgttgttgttgttttttttttaatcgtttactatttgcactacaatggtgtttgacctgtctaatccttatttaacaagtattttctttggttg

SEQ ID NO: 246927 - DNA, 120 bp, Artificial Sequence
  ENSG00000122641_21 (sequence is synthesized)
ggggtgggggtggggtttaagagctgcacttaatgtgagctataaaagaactgctacagcacacaaaatagctatttttattattataattataattattattattattttgtaccttaa

SEQ ID NO: 246928 - DNA, 120 bp, Artificial Sequence
  ENSG00000122641_22 (sequence is synthesized)
aaaatagacacatacaccaaagacatttgtgtgagcctttaaacagtctgtctgtggttggtatcattcaccatcaatgagtcaggggttgggattcaaggttgagtagtgtggattgtg

SEQ ID NO: 246929 - DNA, 120 bp, Artificial Sequence
  ENSG00000122641_23 (sequence is synthesized)
ttcaggcttaaaagacctgagaagtttggtttttgactccttttacatccatgaaacaggacatttcatactggatgtacagtagttgtacactgttggatatcaagttcaatcaaattc

SEQ ID NO: 246930 - DNA, 120 bp, Artificial Sequence
  ENSG00000122641_24 (sequence is synthesized)
atggaactacatgcttgtatgtgtatatatacattgcttgtgcatatgcatatctgtatgtatatatacatgtattgtaccatgtccatacacattttaagcacttcaggctgtcatttt

SEQ ID NO: 246931 - DNA, 120 bp, Artificial Sequence
  ENSG00000122641_25 (sequence is synthesized)
tttaagaaggataggctatagtttttgcttttactctgaactaggtgggcgcatttcaaaaattcggatgggaaaaagcctggaaattccagtgaatattcagcaaggccctctttcatt

SEQ ID NO: 246932 - DNA, 120 bp, Artificial Sequence
  ENSG00000122641_26 (sequence is synthesized)
gtacagggatcaaatttcctcctcttttttgtgccccctcccacttctacaagttatcccctgtggggaaaacaggatgataatcaaaactctgggctgatgtttttccaacttagtgtc

SEQ ID NO: 246933 - DNA, 120 bp, Artificial Sequence
  ENSG00000122641_27 (sequence is synthesized)
tattggaatcaatcttaaatcagaagctttttcagaaaaataatatttaggccagaattagagttgagtgtattttttaaaaatgattaaggcttggttgtgagaaatattacctgtacc

SEQ ID NO: 246934 - DNA, 120 bp, Artificial Sequence
  ENSG00000122641_28 (sequence is synthesized)
agctgggaaaaataatgtcatcactaactaaaagataattaatttgagagaaagtgttaagagagggagagtaaggaagagaacagttaagaggaggcagaggtgagggcagtagtaaaa

SEQ ID NO: 246935 - DNA, 120 bp, Artificial Sequence
  ENSG00000122641_29 (sequence is synthesized)
atctctaaaattttaatttacagccaaaattcttcatgtgtaaatttgtattgattcagatgcagaaatgaaaaaaaaacacctttgttttataaatatcaaagtacatgcttaaagcca

SEQ ID NO: 246936 - DNA, 120 bp, Artificial Sequence
  ENSG00000122641_30 (sequence is synthesized)
agtttttatctagtttattctagtacttagcttgcctggaatagctaataaattattcatgtatgtgcttttgaaaatccagagccctatttttacacacttgtgtgaagttggcaaaca

SEQ ID NO: 246937 - DNA, 120 bp, Artificial Sequence
  ENSG00000122641_31 (sequence is synthesized)
ggcaaacattttgaaaaatggaaaaaagtttctaataattgggaacaattacattaattaatattttgtaaaatattgaagcttttagccctatgtcaatttgtagattaaaataaatta

SEQ ID NO: 246938 - DNA, 120 bp, Artificial Sequence
  ENSG00000122641_32 (sequence is synthesized)
aaaggaagataacagtgagaaaccaaacattacaaaaggtggtttagctctccttgaaaaatatactaagttggtatactataacacttggctatatgtaggcaatgtcactactgggca

SEQ ID NO: 246939 - DNA, 120 bp, Artificial Sequence
  ENSG00000122641_33 (sequence is synthesized)
aatacacttactgtgttctagaggcagccctttcttatgcagaaaatacaatacgcactgcatgagaagcttgagagtggattctaatccaggtctgtcgaccttggatatcatgcatgt

SEQ ID NO: 246940 - DNA, 120 bp, Artificial Sequence
  ENSG00000122641_34 (sequence is synthesized)
gggaaggtgggtgtggtgagaaaagttttaaggcaagagtagatggccatgttcaactttacaaaatttcttggaaaactggcagtattttgaactgcatcttctttggtaccggaacct

SEQ ID NO: 246941 - DNA, 120 bp, Artificial Sequence
  ENSG00000122641_35 (sequence is synthesized)
gcagaaacagtgtgagaaattaagtcctggttcactgcgcagtagcaaagatggtcaaggccatggaaaaagcagaaatttaccaagaaagctgatacccatgtatagttcccactcatc

SEQ ID NO: 246942 - DNA, 120 bp, Artificial Sequence
  ENSG00000122641_36 (sequence is synthesized)
tcaaatacatctgctatctttttaagctaagtcctagacatatcggggataacatgggggttgattagtgaccacagttatcagaagcagagaaatgtaattccatattttatttgaaac

SEQ ID NO: 246943 - DNA, 120 bp, Artificial Sequence
  ENSG00000122641_37 (sequence is synthesized)
ttattccatattttaattggatattgagtgattgggttatcaaacacccacaaactttaattttgttaaatttatatggctttgaaatagaagtataagttgctaccattttttgataac

SEQ ID NO: 246944 - DNA, 120 bp, Artificial Sequence
  ENSG00000122641_38 (sequence is synthesized)
attgaaagatagtattttaccatctttaatcatcttggaaaatacaagtcctgtgaacaaccactctttcacctagcagcatgaggccaaaagtaaaggctttaaattataacatatggg

SEQ ID NO: 246945 - DNA, 120 bp, Artificial Sequence
  ENSG00000122641_39 (sequence is synthesized)
attcttagtagtatgtttttttcttgaaactcagtggctctatctaaccttactatctcctcactctttctctaagactaaactctaggctcttaaaaatctgcccacaccaatcttaga

SEQ ID NO: 246946 - DNA, 120 bp, Artificial Sequence
  ENSG00000122641_40 (sequence is synthesized)
agctctgaaaagaatttgtctttaaatatcttttaatagtaacatgtattttatggaccaaattgacattttcgactattttttccaaaaaagtcaggtgaatttcagcacactgagttg

SEQ ID NO: 246947 - DNA, 120 bp, Artificial Sequence
  ENSG00000122641_41 (sequence is synthesized)
ggaatttcttatcccagaagaccaaccaatttcatatttatttaagattgattccatactccgttttcaaggagaatccctgcagtctccttaaaggtagaacaaatactttctattttt

SEQ ID NO: 246948 - DNA, 120 bp, Artificial Sequence
  ENSG00000122641_42 (sequence is synthesized)
ttttcaccattgtgggattggactttaagaggtgactctaaaaaaacagagaacaaatatgtctcagttgtattaagcacggacccatattatcatattcacttaaaaaaatgatttcct

SEQ ID NO: 246949 - DNA, 120 bp, Artificial Sequence
  ENSG00000122641_43 (sequence is synthesized)
gtgcaccttttggcaacttctcttttcaatgtagggaaaaacttagtcaccctgaaaacccacaaaataaataaaacttgtagatgtgggcagaaggtttgggggtggacattgtatgtg

SEQ ID NO: 246950 - DNA, 120 bp, Artificial Sequence
  ENSG00000122641_44 (sequence is synthesized)
tttaaattaaaccctgtatcactgagaagctgttgtatgggtcagagaaaatgaatgcttagaagctgttcacatcttcaagagcagaagcaaaccacatgtctcagctatattattatt

SEQ ID NO: 246951 - DNA, 120 bp, Artificial Sequence
  ENSG00000122641_45 (sequence is synthesized)
tattttttatgcataaagtgaatcatttcttctgtattaatttccaaagggttttaccctctatttaaatgctttgaaaaacagtgcattgacaatgggttgatatttttctttaaaaga

SEQ ID NO: 246952 - DNA, 120 bp, Artificial Sequence
  ENSG00000122641_46 (sequence is synthesized)
aaaatataattatgaaagccaagataatctgaagcctgttttattttaaaactttttatgttctgtggttgatgttgtttgtttgtttgtttctattttgttggttttttactttgtttt

SEQ ID NO: 246953 - DNA, 120 bp, Artificial Sequence
  ENSG00000122641_47 (sequence is synthesized)
ttgttttgttttgttttgttttgcatactacatgcagttctttaaccaatgtctgtttggctaatgtaattaaagttgttaatttatatgagtgcatttcaactatgtcaatggtttctt

SEQ ID NO: 246954 - DNA, 120 bp, Artificial Sequence
  ENSG00000122641_48 (sequence is synthesized)
aatatttattgtgtagaagtactggtaatttttttatttacaatatgtttaaagagataacagtttgatatgttttcatgtgtttatagcagaagttatttatttctatggcattccagc

SEQ ID NO: 246955 - DNA, 120 bp, Artificial Sequence
  ENSG00000122641_49 (sequence is synthesized)
ggatattttggtgtttgcgaggcatgcagtcaatattttgtacagttagtggacagtattcagcaacgcctgatagcttctttggccttatgttaaataaaaagacctgtttgggatgta

SEQ ID NO: 246956 - DNA, 120 bp, Artificial Sequence
  ENSG00000122641_50 (sequence is synthesized)
ctccctgacagccacaaacctacagcactgactgcattcagagaggaacctgcaaacaaaacttcacagaaaactttttgttcttgttccagagaatttgctgaagaggagaaggaaaaa

SEQ ID NO: 246957 - DNA, 120 bp, Artificial Sequence
  ENSG00000122641_51 (sequence is synthesized)
gggttcgctagtggctgctcctcgaggcgagaacagagccatgcaaatgctccagcgtggagttgggtttgtgaagtcgccagtaaatcaggccgcctccactaggtgaataacgcggtg

SEQ ID NO: 246958 - DNA, 120 bp, Artificial Sequence
  ENSG00000122641_52 (sequence is synthesized)
gcagcgggccactttgctagtgcagtcgctggaggaccgcgctccgcactcagaagggggcagttggctggtgcgcgagcgctcccggctcgcctctgtccgcggggagccagccggccc

SEQ ID NO: 246959 - DNA, 120 bp, Artificial Sequence
  ENSG00000122641_53 (sequence is synthesized)
ctccgcagctgccaaaaggggggaaaaaatcaagagctgctcttaaaagaagttgcccttgctggtgctcagggtaaaaatagaggctgccgcttagaccggcttggccctggctccagg

SEQ ID NO: 246960 - DNA, 120 bp, Artificial Sequence
  ENSG00000122641_54 (sequence is synthesized)
gcggccgcgttccggcgtgatccctggaagctgccagcaggtgctgctcaaggaaggaacagcttcagccataggtgacagtggcacacatctcactgaagacagagaaggacaagttga

SEQ ID NO: 246961 - DNA, 120 bp, Artificial Sequence
  ENSG00000122641_55 (sequence is synthesized)
gtcttatgatggtatcattcaacaatttttaaaattagattttggaaaacatttttttatcttctacctcattgtattctttcaaccgccaagtgaagccagtactttaagcctcactgc

SEQ ID NO: 246962 - DNA, 120 bp, Artificial Sequence
  ENSG00000122641_56 (sequence is synthesized)
caatttacagagcacagaataaaacagaagagaataaaatgatatgggttgcagcttcccagttgtaacgagcaaaaggataggagcctcagactcttagttctgaaccctgcctgggtt

SEQ ID NO: 246963 - DNA, 120 bp, Artificial Sequence
  ENSG00000122641_57 (sequence is synthesized)
agagaacctttcctatccatctgcagccctgcttggcccttgcctcagtgaatttaccactatcataatcacagtgtgcagagtgtgttaaattaagaacagaatccacagtacgcaatg

SEQ ID NO: 246964 - DNA, 120 bp, Artificial Sequence
  ENSG00000122641_58 (sequence is synthesized)
cacagaaaagcctgccttctgctgcagagaacttgaaactgtgcctaaaatttatagtaccgtaaacatctcagggcctcgagtgataagtatggctggatttccgttaactatagaaat

SEQ ID NO: 246965 - DNA, 120 bp, Artificial Sequence
  ENSG00000122641_59 (sequence is synthesized)
ccaggcagggagatcctcccagggagttgcaagttctaagatgaacttcttgaagattgttcccagatttgtgcatgggatacatgtacagcagacagttgtaaggaggtccacggtcat

SEQ ID NO: 246966 - DNA, 120 bp, Artificial Sequence
  ENSG00000122641_60 (sequence is synthesized)
ggaaaagaggatatgtttctatatgccaccaagtgggaaaaatggaagtgagggaaaatatttgattaatcaaaaaattttagtttggatacctgctttcatagtaattgttgctgtgtc

SEQ ID NO: 246967 - DNA, 120 bp, Artificial Sequence
  ENSG00000122641_61 (sequence is synthesized)
attaaacatacagttgcttaggaaaagagaaggaaataggtgactttctaattttagagttaggctggaactgagtggttgctaaattcaactgccctgacaatgtggggatttcctgtc

SEQ ID NO: 246968 - DNA, 120 bp, Artificial Sequence
  ENSG00000122641_62 (sequence is synthesized)
cattagcagcgattgctatttgacatatgtttctggtgcccattaatctgccctgtaatgggtcagaggcaaaaatgggggattcagaggtactaggtggctctcttaatttaatagaac

SEQ ID NO: 246969 - DNA, 120 bp, Artificial Sequence
  ENSG00000122641_63 (sequence is synthesized)
tcaatgctaaggacgcctctatttgttaataagtaatcaagtcattggctactttctgctaaacactagactatgatagtgaccttagaccccgggcattctaaaccaggctggcaggag

SEQ ID NO: 246970 - DNA, 120 bp, Artificial Sequence
  ENSG00000122641_64 (sequence is synthesized)
ggtggtggtggaggtgatgtgaggtaagcctcctagaggaactgtcatccaaacaatctgaaaattgaaacattattaaaggcagcactaagggtggtatgttggagttggggcaggagc

SEQ ID NO: 246971 - DNA, 120 bp, Artificial Sequence
  ENSG00000122641_65 (sequence is synthesized)
acttaaggcagaaggaacagcaggtgtcactgcctgcagttgagaaagggggtggaattctcaaggccttagaccccagagaacaggactgggcaagagctgacattcaagggaggaaca

SEQ ID NO: 246972 - DNA, 120 bp, Artificial Sequence
  ENSG00000122641_66 (sequence is synthesized)
gcatgtacagagcccaaagtcccagccactttctgttggatactgagcaataggaattcagtaaaggactttcaagaagaagtgatgtgatcagatccacctgtgggaaagatgccttta

SEQ ID NO: 246973 - DNA, 120 bp, Artificial Sequence
  ENSG00000122641_67 (sequence is synthesized)
gcttcatggagaaatgactggagaggaggccttccttagtgttgcagaggcaaagtaaagaaaatgctgctgcagtgacccagcaaagaggtgatggcggaggaatcaggctgtgacaag

SEQ ID NO: 246974 - DNA, 120 bp, Artificial Sequence
  ENSG00000122642_0 (sequence is synthesized)
gagacggggtggcggctgcagcccgggtagggccaggagacccggtccacgtttgcaaacgcagccgaacgcccaggccgacccgtgccgcccgagcgccgcgctgcgtccgcgccactc

SEQ ID NO: 246975 - DNA, 120 bp, Artificial Sequence
  ENSG00000122642_1 (sequence is synthesized)
gccccgatggcgttccggggctggaggcccccgccgccaccgctgctcctgctgctgctctgggtgaccgggcaggcagcgcccgtggcgggcctgggctccgacgcggagctgcagatc

SEQ ID NO: 246976 - DNA, 120 bp, Artificial Sequence
  ENSG00000122642_2 (sequence is synthesized)
tgcagatcgagcggcgcttcgtgcccgacgagtgcccgcgcaccgtgcgcagcggcgacttcgtgcgctaccactacgtggggacgttccccgacggccagaagttcgactccagctatg

SEQ ID NO: 246977 - DNA, 120 bp, Artificial Sequence
  ENSG00000122642_3 (sequence is synthesized)
acagagactccactttcaatgtgtttgtgggaaaaggacagctgatcacagggatggaccaggctcttgttgggatgtgcgtaaacgagagacgtttcgtgaagattcccccaaagcttg

SEQ ID NO: 246978 - DNA, 120 bp, Artificial Sequence
  ENSG00000122642_4 (sequence is synthesized)
cctacggaaatgaaggagtttctggtgtgatcccccccaattcagtgcttcattttgatgtacttctgatggatatttggaattctgaagaccaggttcagattcacacctatttcaagc

SEQ ID NO: 246979 - DNA, 120 bp, Artificial Sequence
  ENSG00000122642_5 (sequence is synthesized)
ccccgagttgccctcggaccatccaggtgtctgattttgtgaggtaccactacaacgggacgttcctggacggaactctgtttgattcgagtcacaatcgcatgaaaacatatgacacgt

SEQ ID NO: 246980 - DNA, 120 bp, Artificial Sequence
  ENSG00000122642_6 (sequence is synthesized)
atgtgggaattggctggctgattcctggaatggataaagggctgctggggatgtgtgtgggtgagaagcgcatcatcaccattcctccttttctggcctatggagaggatggagatggga

SEQ ID NO: 246981 - DNA, 120 bp, Artificial Sequence
  ENSG00000122642_7 (sequence is synthesized)
aagacattcccggtcaggcatctctggtgtttgatgttgcattattggacctccataaccccaaggacagcatttccattgagaacaaggtagtacctgaaaactgtgagcggataagtc

SEQ ID NO: 246982 - DNA, 120 bp, Artificial Sequence
  ENSG00000122642_8 (sequence is synthesized)
aaagtggggactttctcaggtatcattacaatggcacgcttctggatggcaccctctttgattccagctactctcggaaccgcacgtttgacacgtacattgggcagggctacgtgattc

SEQ ID NO: 246983 - DNA, 120 bp, Artificial Sequence
  ENSG00000122642_9 (sequence is synthesized)
ctgggatggatgaaggtctacttggtgtttgcattggagaaaagcgaaggattgtggtcccgcctcacctggggtatggagaggaaggaagagggaatatccccggctcggctgtgctgg

SEQ ID NO: 246984 - DNA, 120 bp, Artificial Sequence
  ENSG00000122642_10 (sequence is synthesized)
tgtttgacatccatgtgatcgacttccacaacccttcggactccatcagcatcacctcccactacaaaccccctgactgctcagtgctgagtaagaagggagattacctcaaatatcact

SEQ ID NO: 246985 - DNA, 120 bp, Artificial Sequence
  ENSG00000122642_11 (sequence is synthesized)
acaatgcctcacttctggatgggaccctgctggactccacgtggaatttaggcaaaacttacaatattgttctgggatctgggcaagttgtgttggggatggacatgggtctcagagaga

SEQ ID NO: 246986 - DNA, 120 bp, Artificial Sequence
  ENSG00000122642_12 (sequence is synthesized)
tgtgcgttggcgagaaacggacagtgatcattccgcctcacctgggctatggggaagctggcgtggatggagaagtgcccggcagtgccgtattagtgtttgacattgagctgctggagc

SEQ ID NO: 246987 - DNA, 120 bp, Artificial Sequence
  ENSG00000122642_13 (sequence is synthesized)
tggtggctggccttcctgaggggtacatgttcatatggaatggtgaggtgtcacccaacctctttgaagaaattgacaaggatggcaacggagaagtcctcctggaagagttctcagagt

SEQ ID NO: 246988 - DNA, 120 bp, Artificial Sequence
  ENSG00000122642_14 (sequence is synthesized)
tgtgaagaatatgttcaccaaccaggaccggaatggagatgggaaggtcacagccgaggaatttaaactcaaagaccaggaagccaaacacgatgaactctaaacctggcatgaaccaga

SEQ ID NO: 246989 - DNA, 120 bp, Artificial Sequence
  ENSG00000122642_15 (sequence is synthesized)
tggtgccagggagtacgtgacaccaagccacctgtgtggcaagacgtgcagtgagggtgcaagggtctctcagaagttgcatcattagccagtagtaggtgggtcacatagtacctggtg

SEQ ID NO: 246990 - DNA, 120 bp, Artificial Sequence
  ENSG00000122642_16 (sequence is synthesized)
tacacatcggggtgggttgatatatggggtgagaagtttgggctgatcgccagtgatagtaaacaaaatctgtgcagagggccttagcatgggatgtgtccagtattgaaaaggctgcac

SEQ ID NO: 246991 - DNA, 120 bp, Artificial Sequence
  ENSG00000122642_17 (sequence is synthesized)
tgccaaccatgatttgtgagccttctgggaaattttgttattaaaggaatatatagtgtcagacggaagttataatcatcttggaggaaccataagaaaaggtgtccagggtatctatat

SEQ ID NO: 246992 - DNA, 120 bp, Artificial Sequence
  ENSG00000122642_18 (sequence is synthesized)
aaagagggttaaatttttttttaacttgctggttaaaacattttagaaatattctagagatgggcaggagagtcaaagggcttgcttgccccagcagagttcccagcagacagccatggc

SEQ ID NO: 246993 - DNA, 120 bp, Artificial Sequence
  ENSG00000122642_19 (sequence is synthesized)
tcttcccagcagcctgtgcaaattctgatgatggccccacccccgcacacgcacacgcacatcatgcttttccagctcatcacaccccgccccactatgggcctaccattaatagtgtat

SEQ ID NO: 246994 - DNA, 120 bp, Artificial Sequence
  ENSG00000122642_20 (sequence is synthesized)
aacttggaggttaaaagagccttttggacagaaaactgggccaggaaaaggcatctcagaccacaaatagagaatttgattcctcatttgccacataagtcatctgcttagcttttcctt

SEQ ID NO: 246995 - DNA, 73 bp, Artificial Sequence
  ENSG00000122642_21 (sequence is synthesized)
agagtctccctactgtctcggctcactgcagcctccgcctcccgtattcaagcgattctcctgtctcagcctc

SEQ ID NO: 246996 - DNA, 120 bp, Artificial Sequence
  ENSG00000122642_22 (sequence is synthesized)
ctcccaaagtgttgggattacaggcgtgactcaccatgcccagccacttagttttttcttattcccacctttctatcccatagaacactcttttttatcttccctgaaccatattgatga

SEQ ID NO: 246997 - DNA, 120 bp, Artificial Sequence
  ENSG00000122642_23 (sequence is synthesized)
tagaacactcttttttatcttccctgaaccatattgatgagataaatagggctgggggctgggccccgctggtcactcaacagagtatttcccttggccgagatggaagttttgtcccaa

SEQ ID NO: 246998 - DNA, 120 bp, Artificial Sequence
  ENSG00000122642_24 (sequence is synthesized)
tagatgagctgctgagcatcaacaaggtgacatttttctgctgcccatttgtgtcctggagacggtggtaccctgaaggcagaggccagctgccgcaagacagcaatgacagtccacctg

SEQ ID NO: 246999 - DNA, 120 bp, Artificial Sequence
  ENSG00000122642_25 (sequence is synthesized)
ccgacctgattcctgcatcatggaataaccacatggctaccttctatcctctgttcccaaatggtggtggcacttatcctgaagtcgtcaatgatttccctttgaaactactttatttta

SEQ ID NO: 247000 - DNA, 120 bp, Artificial Sequence
  ENSG00000122642_26 (sequence is synthesized)
ctaatttaaactattttgtactgatgtagccctgaggtagttcatgaaaatgctgtgcactcattccatggaataaatgttggaaagctgatcttttctgatataaaatgttgaatgata

SEQ ID NO: 247001 - DNA, 120 bp, Artificial Sequence
  ENSG00000122642_27 (sequence is synthesized)
cagactggagaatcttggaagctttagattgggggaaaatgaaaagcagtgaactcatacacagctaaaatttccatcttaggtttatttcttctagatgtgaaagaaagtgtcattaac

SEQ ID NO: 247002 - DNA, 120 bp, Artificial Sequence
  ENSG00000122642_28 (sequence is synthesized)
tagcggtgactgcttgaacccttttggcccacattcaccttgggagcatcctaggtgtttatttatctggcctgaaaggcagcaactgtgaactcagtgtgtaatctttaatttctagct

SEQ ID NO: 247003 - DNA, 120 bp, Artificial Sequence
  ENSG00000122642_29 (sequence is synthesized)
cacctgccttcctcactagctgtggctgcttccacattgcttgaaacagggcttctttttctttttcttctttctttttgagatagggtctccctctgttgaacaggctggaaagtgtag

SEQ ID NO: 247004 - DNA, 120 bp, Artificial Sequence
  ENSG00000122642_30 (sequence is synthesized)
gcctcaagtgatcctcttgcctcagccttcagagtagctggcactacaggcacgcaccaccacaccctgcacagaacttcttgagagccaaaatattgaagctaaagtccagcttaagac

SEQ ID NO: 247005 - DNA, 120 bp, Artificial Sequence
  ENSG00000122642_31 (sequence is synthesized)
gagccaaaatattgaagctaaagtccagcttaagactggaattcccaaatagatttagtttctagagttgtcctgttatttctccttgtttctctgcccattttcctttaccttttgaaa

SEQ ID NO: 247006 - DNA, 120 bp, Artificial Sequence
  ENSG00000122642_32 (sequence is synthesized)
ggaagaggcggagaaactccatctatccatccatcaaagatttattgagtttcttcatgaccaggccctgctcacggtgttagggattcagcagaaagaaacacaaacaaaacttcctac

SEQ ID NO: 247007 - DNA, 120 bp, Artificial Sequence
  ENSG00000122642_33 (sequence is synthesized)
gcacacagagagtgtttccttgttgacgccctcaataatgtgtgtgcctcagaggttatcaggcacctgggagactgactcacgttaacttcctagaagctgacatactcacctgatgct

SEQ ID NO: 247008 - DNA, 120 bp, Artificial Sequence
  ENSG00000122642_34 (sequence is synthesized)
acatggttccttgactgggtgtgaatcgacctctacactggttggaattcttgtgcctggaatcctcggggcctgagaggctgagttcatttgactgctgacatcagatcccagggatgt

SEQ ID NO: 247009 - DNA, 80 bp, Artificial Sequence
  ENSG00000122642_35 (sequence is synthesized)
ctggggtatggagaggaaggaagagtgcaatcctaactcactgtagccttgacctcctggcctcaagcaatcctcctgcc

SEQ ID NO: 247010 - DNA, 120 bp, Artificial Sequence
  ENSG00000122643_0 (sequence is synthesized)
gcttccgagactcgcagtctacgcgagctgcctgtttttttcctgcttggacgcgcatgagggccccgtccatggaccgcgcggccgtggcgagggtgggcgcggtagcgagcgccagcg

SEQ ID NO: 247011 - DNA, 120 bp, Artificial Sequence
  ENSG00000122643_1 (sequence is synthesized)
tgtgcgccctggtggcgggggtggtgctggctcagtacatattcaccttgaagaggaagacggggcggaagaccaagatcatcgagatgatgccagaattccagaaaagttcagttcgaa

SEQ ID NO: 247012 - DNA, 120 bp, Artificial Sequence
  ENSG00000122643_2 (sequence is synthesized)
tcaagaaccctacaagagtagaagaaattatctgtggtcttatcaaaggaggagctgccaaacttcagataataacggactttgatatgacactcagtagattttcatataaagggaaaa

SEQ ID NO: 247013 - DNA, 120 bp, Artificial Sequence
  ENSG00000122643_3 (sequence is synthesized)
gatgcccaacatgtcataatatcattgacaactgtaagctggttacagatgaatgtagaaaaaagttattgcaactaaaggaaaaatattacgctattgaagttgatcctgttcttactg

SEQ ID NO: 247014 - DNA, 120 bp, Artificial Sequence
  ENSG00000122643_4 (sequence is synthesized)
tagaagagaagtacccttatatggtggaatggtatactaaatcacatggtttgcttgttcagcaagctttaccaaaagctaaacttaaagaaattgtggcagaatctgacgttatgctca

SEQ ID NO: 247015 - DNA, 120 bp, Artificial Sequence
  ENSG00000122643_5 (sequence is synthesized)
aagaaggatatgagaatttctttgataagctccaacaacatagcatccccgtgttcatattttcggctggaatcggcgatgtactagaggaagttattcgtcaagctggtgtttatcatc

SEQ ID NO: 247016 - DNA, 120 bp, Artificial Sequence
  ENSG00000122643_6 (sequence is synthesized)
aggaatacagaatatttcaatcaactaaaagacaatagtaacataattcttctgggagactcccaaggagacttaagaatggcagatggagtggccaatgttgagcacattctgaaaatt

SEQ ID NO: 247017 - DNA, 120 bp, Artificial Sequence
  ENSG00000122643_7 (sequence is synthesized)
ggatatctaaatgatagagtggatgagcttttagaaaagtacatggactcttatgatattgttttagtacaagatgaatcattagaagtagccaactctattttacagaagattctataa

SEQ ID NO: 247018 - DNA, 120 bp, Artificial Sequence
  ENSG00000122643_8 (sequence is synthesized)
acaagcattctccaagaagacctctctcctgtgggtgcaattgaactgttcatccgttcatcttgctgagagacttatttataatatatccttactctcgaagtgttccctttgtataac

SEQ ID NO: 247019 - DNA, 120 bp, Artificial Sequence
  ENSG00000122643_9 (sequence is synthesized)
tgaagtattttcagatatggtgaatgcattgactggaagctccttttctccacctctctcaacacactcctcaccgtatcttttaacccatttaaaaaaaaaaaaaagctaaaattagaa

SEQ ID NO: 247020 - DNA, 120 bp, Artificial Sequence
  ENSG00000122643_10 (sequence is synthesized)
aaataactccctacttttccaaagtgaattttgtagtttaatgttatcatgcagcttttgaggagtcttttacactgggaaagtttgtagaaattttaaaataagttttatgaaatggtg

SEQ ID NO: 247021 - DNA, 120 bp, Artificial Sequence
  ENSG00000122643_11 (sequence is synthesized)
aaataatatgcatgattttaagtattgccatttttgtaatttgggttattatgctgatggtatcaccatctcttgaaattgtgttaggtttggttattttgtctggggaaaaaatattta

SEQ ID NO: 247022 - DNA, 120 bp, Artificial Sequence
  ENSG00000122643_12 (sequence is synthesized)
ctggaaaagactagcagttagtgttggaaaaacctggtggtgtttacaatgttgctaatcattacaaaacattctatattgaagcactgataataaatatgaaatgcaaaacctttttaa

SEQ ID NO: 247023 - DNA, 120 bp, Artificial Sequence
  ENSG00000122643_13 (sequence is synthesized)
tttcttttgctggtgtagctcgtccggttaccttcaggaagattggataaccaagaaatgactaatcaagagtctgccgtacatgtgaaaatgcagaaaccagccttcttcgaagtggtc

SEQ ID NO: 247024 - DNA, 120 bp, Artificial Sequence
  ENSG00000122643_14 (sequence is synthesized)
tttcttttgctggtgtagctcgtccggttaccttcaggaagattggataaccaagaaatgactaatcaagagtctgccgtacatgtgaaaatgtgtagcagaaaccagccttcttcgaag

SEQ ID NO: 247025 - DNA, 120 bp, Artificial Sequence
  ENSG00000122643_15 (sequence is synthesized)
aaactgtaagaatatcaaatcgttcttcataattttaaaatctgaaaatattttaatcatgtaaatttatttattgttacttaatatatatcctatatccagaaattaggccaagccgat

SEQ ID NO: 247026 - DNA, 120 bp, Artificial Sequence
  ENSG00000122643_16 (sequence is synthesized)
aggcccactgtgggactccatccttctcagtgttaatatatccatattttaaaaacaatgtgcccttcttaaactttcattccccaagctatagactaataataaaagtagtaaaacttc

SEQ ID NO: 247027 - DNA, 120 bp, Artificial Sequence
  ENSG00000122643_17 (sequence is synthesized)
tcttttgctggtgtagctcgtccggttaccttcaggaagattggataaccaagaaatgactaatcaagagtctgccgtacatgtgaaaatgatgccagaattccagaaaagttcagttcg

SEQ ID NO: 247028 - DNA, 120 bp, Artificial Sequence
  ENSG00000122643_18 (sequence is synthesized)
actgggtttttaaaattcttcttggacattgacagtgaggagacctgctttttcttattatatttttgaggttttttttcccatattatataaatggttattttcatgtatggttttggt

SEQ ID NO: 247029 - DNA, 120 bp, Artificial Sequence
  ENSG00000122643_19 (sequence is synthesized)
agcaaagggaatcagagactcctgaaatatttcttgccaaatatggtctattcattattcaagaaatatttaaataggttgtaaactttgggttaacctgaagaaacaccatttatcaaa

SEQ ID NO: 247030 - DNA, 120 bp, Artificial Sequence
  ENSG00000122643_20 (sequence is synthesized)
ttttctttccagagccagttgccagttctaatagtacagatttaccttctctttaatcgtcacataacttcaattgataatgttatgtagattgacttgtgactagctcagagctagcga

SEQ ID NO: 247031 - DNA, 120 bp, Artificial Sequence
  ENSG00000122643_21 (sequence is synthesized)
ggctgtaaccaagagcatatataaagtactgtgcagcagtgcgtcacaaggtttttgcatagggcttagtcaaggcttttggaaccgccctcagttgcaccttgtgctatattagtactt

SEQ ID NO: 247032 - DNA, 120 bp, Artificial Sequence
  ENSG00000122643_22 (sequence is synthesized)
acagaaattagttgtcaagagataaacttactagctgaggtatttgtaagggagttacagaagtgatattccaaaacagcagtggtccctaaaactcagcagaaaagcagagtaaatact

SEQ ID NO: 247033 - DNA, 120 bp, Artificial Sequence
  ENSG00000122643_23 (sequence is synthesized)
actcatcatcatatccctagcatttagcaagagtgtgtggcacaaagtagacacatggtaaatattggttaggcgagtgaatgggttaatgtatgaaaaaaaaaaataggaaccagtgcc

SEQ ID NO: 247034 - DNA, 120 bp, Artificial Sequence
  ENSG00000122643_24 (sequence is synthesized)
ttaaaaataatgccttaatatttttatgtctttaaataagacaggtttctgcttggtatcaaaggaacctggggaaagaagaatgaaaactaattaattaattttcttttacttttagat

SEQ ID NO: 247035 - DNA, 120 bp, Artificial Sequence
  ENSG00000122643_25 (sequence is synthesized)
tgtagaaaaaaggtaaacactaacaacaatctatagtcactcaaagacttcattaccctttttgcctgagaatttcttcaggtgcattcacagaagtaagaatggatgtaaagtgcttac

SEQ ID NO: 247036 - DNA, 120 bp, Artificial Sequence
  ENSG00000122643_26 (sequence is synthesized)
agccatacctggcacatagtaagcactcagtaaatagtaggtttgctgtatgaattacacattcaaaacatattttaaagataaaaattcacagtaacttgacaacaaaacttatattta

SEQ ID NO: 247037 - DNA, 120 bp, Artificial Sequence
  ENSG00000122644_0 (sequence is synthesized)
ggcgcgcggcgcccgccaggcgcccagtcctctgccatcgcccacgcctccctggtgccagggaacaggtatcagcgcgcctccccagcggctgggagagacgctgaatgaagaagaggg

SEQ ID NO: 247038 - DNA, 120 bp, Artificial Sequence
  ENSG00000122644_1 (sequence is synthesized)
aaggacggttagtcagcagtcttatagctggatcagctaccaagagaagttgtaaaccaagaagagaaaagcatttcaatttgggacatttatttgcacctggaaatggggaatgggctg

SEQ ID NO: 247039 - DNA, 120 bp, Artificial Sequence
  ENSG00000122644_2 (sequence is synthesized)
tcagaccagacttctatcctgtccaacctgccttcatttcagtctttccacattgttattctgggtttggactgtgctggaaagacaactgtcttatacaggctgcagttcaatgaattt

SEQ ID NO: 247040 - DNA, 120 bp, Artificial Sequence
  ENSG00000122644_3 (sequence is synthesized)
gtaaataccgtacctaccaaaggatttaacactgagaaaattaaggtaaccttgggaaattctaaaacagtcacttttcacttctgggatgtaggtggtcaggagaaattaaggccactg

SEQ ID NO: 247041 - DNA, 120 bp, Artificial Sequence
  ENSG00000122644_4 (sequence is synthesized)
tggaagaagccaaaactgaacttcacaaaataactaggatatcagaaaatcagggagtccctgtacttatagttgctaacaaacaagatttgaggaactcattgtcactttcagaaattg

SEQ ID NO: 247042 - DNA, 120 bp, Artificial Sequence
  ENSG00000122644_5 (sequence is synthesized)
agaaattgttagcaatgggtgaactgagctcatcaactccttggcatttgcagcctacctgtgcaatcataggagatggcctaaaggaaggacttgagaaactacatgatatgatcatta

SEQ ID NO: 247043 - DNA, 120 bp, Artificial Sequence
  ENSG00000122644_6 (sequence is synthesized)
aaagaagaaaaatgttgcggcaacagaaaaagaaaagatgaatatcaatacctattatatctgtgtggagtaggttttctctggtctgattttgacaaatagaagagtgtctacagcgtg

SEQ ID NO: 247044 - DNA, 120 bp, Artificial Sequence
  ENSG00000122644_7 (sequence is synthesized)
gtttgcctgtctgccctcctggatgctattaaagctttgttttgttgaacaatcagatgcccaactctgttgccttgtggaagatgagtaaatgcagtgcttcttaaagtggtctcttct

SEQ ID NO: 247045 - DNA, 120 bp, Artificial Sequence
  ENSG00000122644_8 (sequence is synthesized)
ccctaccccacaaatcttttggtactaccatttggggaagccaagcaaggatagtaaattgaccagaacacagttgtgggaatttggtctgaagttagtgaaataaaactttaaagagtg

SEQ ID NO: 247046 - DNA, 120 bp, Artificial Sequence
  ENSG00000122644_9 (sequence is synthesized)
tggcttgacgccctggctgcgctgcaggtgcgccgggccgaacggagccggcagcctggcggcgacctgaccgcccgaggctccccttcacctgcagcggctgctcggctccctctggga

SEQ ID NO: 247047 - DNA, 120 bp, Artificial Sequence
  ENSG00000122644_10 (sequence is synthesized)
acgccgccttttctaacttaagggcaacaggtggtgccggtggaccgagagagagctcagctccgccgcgctgggagcggcagttaccctcaccaattagggagcgggggcgggagttgc

SEQ ID NO: 247048 - DNA, 120 bp, Artificial Sequence
  ENSG00000122644_11 (sequence is synthesized)
atggcttccctgatgcgggtgaccaatgggatttgggatcatgagtggaccgggaggagtgggcgtggtcggagtctgagtccaaggtttctcgtgcggcaactgccagagctgcttgga

SEQ ID NO: 247049 - DNA, 120 bp, Artificial Sequence
  ENSG00000122644_12 (sequence is synthesized)
tttctgccaaatgatttttgacgctttctggaatcaagtaatttaatagtatagcttaattctagacaatgtttaagttggtctacctttattaaaaataagatatttggggtatattca

SEQ ID NO: 247050 - DNA, 120 bp, Artificial Sequence
  ENSG00000122644_13 (sequence is synthesized)
agtgcatggattagttttcctgacaaagcatgttttggtgtgtagtcttactttttagaaatagctatgcatcgttctacacaggtttaaaacaacttttttggggatttagggctatta

SEQ ID NO: 247051 - DNA, 120 bp, Artificial Sequence
  ENSG00000122644_14 (sequence is synthesized)
taggaatagtttgttgtcagaagcactttcacttgaagaacctaaaatgattgactcattcatagtaaatatgggcatgtaaactaataaatatgcactggatacatatatggatttatg

SEQ ID NO: 247052 - DNA, 120 bp, Artificial Sequence
  ENSG00000122644_15 (sequence is synthesized)
aagaaggcgatttagtcaagaggatgtaattaaaatatgtggtctctaaaatattccagttacaagatatttgttttattaatatttgctggctaaaaacaaatgtggtttttatatatt

SEQ ID NO: 247053 - DNA, 120 bp, Artificial Sequence
  ENSG00000122644_16 (sequence is synthesized)
tttgtagtgtgttgagaagagcaaaagctttataaatatacctgatgcgctgtagaatgaaaatgtaaaagataacctgtatgtgttccgagctttaattttttgtttacaaattgaaca

SEQ ID NO: 247054 - DNA, 120 bp, Artificial Sequence
  ENSG00000122644_17 (sequence is synthesized)
gtgttacatgggctgtccagtcctgattatagagaggaagaaatggtaacagtatggcagataagaattacaattatagaaaatgaggggaaaataacaaacctgttttatgaaaattca

SEQ ID NO: 247055 - DNA, 120 bp, Artificial Sequence
  ENSG00000122644_18 (sequence is synthesized)
ctggtgctgtttacattggaataaaaagctctataaggaggaaaggcctttatctaattcttatctacagacacttacttccagtgaccatattttactaaatcagcttattttttatgt

SEQ ID NO: 247056 - DNA, 120 bp, Artificial Sequence
  ENSG00000122644_19 (sequence is synthesized)
actaaatcagcttattttttatgtctaaagcaacagctgttctgaaaaatcaccaaaagaaatgcactttgctagcaggatttgttttggctttgggttttgtttttttgtttttttttt

SEQ ID NO: 247057 - DNA, 120 bp, Artificial Sequence
  ENSG00000122644_20 (sequence is synthesized)
gaaccttgattcttgtgtcacacaaaatgaatgaagtagcttgatgtggagccttcatatgttaaatattcctgcactagtgatggtcacttagaatgtttatagaaatgtggataataa

SEQ ID NO: 247058 - DNA, 120 bp, Artificial Sequence
  ENSG00000122644_21 (sequence is synthesized)
ctaccaataaactacttgaggcactaggagaacagtatttgactttgaattttaatgtatttccacttttgctgaagcttttaatcagatgtgtaaaaacaattgaccagctaggctatt

SEQ ID NO: 247059 - DNA, 120 bp, Artificial Sequence
  ENSG00000122644_22 (sequence is synthesized)
tagtcccatagtagttcagatctgcttagatgtgacaggcattgaaggctgtttttttttttttctcccttcactgatactgaaatcatggtatctgctgcaaacatgagtagatccatg

SEQ ID NO: 247060 - DNA, 120 bp, Artificial Sequence
  ENSG00000122644_23 (sequence is synthesized)
atggattaataaagcttgctgaaaaaaaaaatctgtgtatcaattagatttaccagtttgcctgtactttctgtctacctactatgtaaaatagtgctgtttttaagtatttcaaaagct

SEQ ID NO: 247061 - DNA, 120 bp, Artificial Sequence
  ENSG00000122644_24 (sequence is synthesized)
tgtgtgttgaccctttgtagcctaagtacgtaaacaaattaatgttatctaagtttttcatatttcatggacaacaaaagagaaaatggtatgaacactgtacaaactttgatttataaa

SEQ ID NO: 247062 - DNA, 120 bp, Artificial Sequence
  ENSG00000122644_25 (sequence is synthesized)
gaagggatcccacttcggggaggatgggcttatcccggcgggcgcgccaggtgggatctctagcgcctcaggggcccgcgcggcaacagccggcaccctcgggcccgcggacaaagggtt

SEQ ID NO: 247063 - DNA, 120 bp, Artificial Sequence
  ENSG00000122674_0 (sequence is synthesized)
gggaggctcccgaggtgggggccggggcgggatggctgcagcggcggccggggccgggagcgggccctgggcggcccaggagaagcagttcccgccggcgctgctgagtttcttcatcta

SEQ ID NO: 247064 - DNA, 120 bp, Artificial Sequence
  ENSG00000122674_1 (sequence is synthesized)
gcagttcccgccggcgctgctgagtttcttcatctacaacccgcgcttcgggccgcgcgaaggacaggaggaaaataagattttattttatcatccaaatgaggtagaaaagaatgagaa

SEQ ID NO: 247065 - DNA, 120 bp, Artificial Sequence
  ENSG00000122674_2 (sequence is synthesized)
gattagaaatgtcggattgtgtgaagctattgtacagtttacaaggacatttagcccatcaaaacctgcaaaatctttacatacacagaagaacagacagttcttcaatgaaccagaaga

SEQ ID NO: 247066 - DNA, 120 bp, Artificial Sequence
  ENSG00000122674_3 (sequence is synthesized)
aaatttctggatggtcatggttgttcggaatcctataattgaaaaacagagtaaagatggaaaaccagttattgaatatcaagaggaggagttgttggacaaggtttatagctcggtgct

SEQ ID NO: 247067 - DNA, 120 bp, Artificial Sequence
  ENSG00000122674_4 (sequence is synthesized)
gcggcagtgctacagcatgtacaagctttttaatggtacatttctgaaagccatggaagacggaggcgtcaagcttctgaaagaaagattagagaaattcttccatcggtatttgcaaac

SEQ ID NO: 247068 - DNA, 120 bp, Artificial Sequence
  ENSG00000122674_5 (sequence is synthesized)
gctacatttgcagtcatgtgacctacttgacatttttggtggaatcagcttcttcccgttggataaaatgacttatttgaaaatccagtcctttattaatagaatggaggaaagcctgaa

SEQ ID NO: 247069 - DNA, 120 bp, Artificial Sequence
  ENSG00000122674_6 (sequence is synthesized)
tatagtcaaatacactgcttttctctataacgatcagctcatctggagtggattagaacaagatgacatgagaattttatacaaataccttaccacctccctttttccaaggcacatcga

SEQ ID NO: 247070 - DNA, 120 bp, Artificial Sequence
  ENSG00000122674_7 (sequence is synthesized)
acctgagttagcaggaagggattctccaataagagcagaaatgccaggaaatcttcaacactatggaagatttcttaccggacccttgaacctcaatgatccagatgcaaaatgcagatt

SEQ ID NO: 247071 - DNA, 120 bp, Artificial Sequence
  ENSG00000122674_8 (sequence is synthesized)
ccccaaaatttttgtaaatacagatgacacttatgaagagctccatttaatcgtttataaggccatgagtgcggctgtgtgctttatgatcgacgcctctgtccacccaacgttggattt

SEQ ID NO: 247072 - DNA, 120 bp, Artificial Sequence
  ENSG00000122674_9 (sequence is synthesized)
gaaagaaccccagtttaagtttatctacttcaaccacatgaatctcgccgagaagagcacagttcacatgaggaaaacgcccagcgtgtcgctcacttccgtgcacccggatttaatgaa

SEQ ID NO: 247073 - DNA, 120 bp, Artificial Sequence
  ENSG00000122674_10 (sequence is synthesized)
gattctcggtgacatcaacagtgactttaccagagtggatgaagatgaggagatcattgtgaaggccatgagtgattactgggttgttggaaagaagtctgatcggcgggagctctatgt

SEQ ID NO: 247074 - DNA, 120 bp, Artificial Sequence
  ENSG00000122674_11 (sequence is synthesized)
tattttgaatcaaaaaaatgcaaacctgattgaagtaaatgaagaggtcaagaaactttgtgcaacgcagttcaacaacatcttcttcttggattgacggatgacggctcaccgagagca

SEQ ID NO: 247075 - DNA, 120 bp, Artificial Sequence
  ENSG00000122674_12 (sequence is synthesized)
tatctaaaaaacactctgcaaacatttggtcacatgcaagttagtggtcatatgacggactgcattcaggacaagggtaaagcaatacttgctttgaagaatcacatttcgactcggtct

SEQ ID NO: 247076 - DNA, 120 bp, Artificial Sequence
  ENSG00000122674_13 (sequence is synthesized)
gctgatctgaggtttttagattttaaatatttatgtggaattaattaaaggtagttggctatatcgctatcatttcattcttttgacattatgtgaatattttactggaaaataagacta

SEQ ID NO: 247077 - DNA, 120 bp, Artificial Sequence
  ENSG00000122674_14 (sequence is synthesized)
ataaattgttaaaagtttttaaaattctggtttggtgttgagtctctctcctgctgcctatttatagattacactggccaccagctccgtgacccaggctggaatgcaatggctcactgc

SEQ ID NO: 247078 - DNA, 74 bp, Artificial Sequence
  ENSG00000122674_15 (sequence is synthesized)
agaaccacatgtacacaccaccacggtcggctgatgttttaattttgcagagatgggggggtctcactatgttg

SEQ ID NO: 247079 - DNA, 120 bp, Artificial Sequence
  ENSG00000122674_16 (sequence is synthesized)
gttgcccaggctggtctcgaactcccgtaatccagccatgtaggaaacctgagatgcagtgggccaaggggtatgttaaaacactgtgacgagttcagtgctaagaactgtaatgctcag

SEQ ID NO: 247080 - DNA, 120 bp, Artificial Sequence
  ENSG00000122674_17 (sequence is synthesized)
tcaggaaatcttacagcacgtgccatcctaagcctgtgtgtgtgtcctcgtgtctctctactttttcttcttcttgctggtgatggtcttgctggatggggacacggtcacatcctcctt

SEQ ID NO: 247081 - DNA, 120 bp, Artificial Sequence
  ENSG00000122674_18 (sequence is synthesized)
gggagggtccagtatgaggtgagaggatgacacgtctgccggctccttgagcactgtgatgtccacctcatagtcatgtctcttggcctcttcctctctcaagatgaagatgttcagcct

SEQ ID NO: 247082 - DNA, 120 bp, Artificial Sequence
  ENSG00000122674_19 (sequence is synthesized)
aattgtatggtgaagttatgggtgatctttactgttcagaatttaggaaagttctctggctgttgcatccaagtaaaattaaaataaaattggttgcaattttaaaatcaagttcttcct

SEQ ID NO: 247083 - DNA, 120 bp, Artificial Sequence
  ENSG00000122674_20 (sequence is synthesized)
atttgctttattcattcttggggctgttttaagaagctatgtttctgatgctgtagcatgttcaaagtttttaaattaaggcaaaataaacatggtctaatgaattcattgtataatttc

SEQ ID NO: 247084 - DNA, 120 bp, Artificial Sequence
  ENSG00000122674_21 (sequence is synthesized)
agtttatcaaactttgtaggttgttcggaatcctataattgaaaaacagagtaaagatggaaaaccagttattgaatatcaagaggaggagttgttggtaatgtgtcattgtttgtttat

SEQ ID NO: 247085 - DNA, 120 bp, Artificial Sequence
  ENSG00000122674_22 (sequence is synthesized)
ttatttatttttttaaatgtattgctgagtatgttgaatgccttacttggtcggatttaaactaggaggcttttgcagaagtttctcggggtatatagcaaaggtttatgtttatcattt

SEQ ID NO: 247086 - DNA, 120 bp, Artificial Sequence
  ENSG00000122674_23 (sequence is synthesized)
acatgagcacaatctttttaaaatgtatatgcacccaatctcactaataccttctactcttcatttatattgaaagccctcctaaagtaaggcttactgattcacaaattagagtttaaa

SEQ ID NO: 247087 - DNA, 120 bp, Artificial Sequence
  ENSG00000122674_24 (sequence is synthesized)
cacctgtaatcctagtactttgggaggtcaaggcaggcagattacttgaggtcaggggtccgagaccagcctggccaatatggcggaaccctgtctctactaaaactacaaaaactggcc

SEQ ID NO: 247088 - DNA, 77 bp, Artificial Sequence
  ENSG00000122674_25 (sequence is synthesized)
aatatggcggaaccctgtctctactaaaactacaaaaactggccagggatggtggcgcacacctgtcatcccgcgca

SEQ ID NO: 247089 - DNA, 120 bp, Artificial Sequence
  ENSG00000122674_26 (sequence is synthesized)
ccatctcaaaaaaaaaaaaaaaagaacgcaaacacttttttttcagcacgcaactattgtgggacaaagtttataaacattatactgtttggccaagagttagtgtacctttgccatcta

SEQ ID NO: 247090 - DNA, 120 bp, Artificial Sequence
  ENSG00000122674_27 (sequence is synthesized)
tagtgtacctttgccatctatccagtagacattgtttttcccttgaactgagctgtgtgctgtgttttcgcgtctgcaggacaaggtttatagctcggtgctgcggcagtgctacagcat

SEQ ID NO: 247091 - DNA, 120 bp, Artificial Sequence
  ENSG00000122674_28 (sequence is synthesized)
gtacaaggtaagcgtggcgttctttctcaactcagagtccagccacttacccctatctctaggctccagggttgtttaaagagaaatctgtaaatgactgcaaagtgactctgtatttgt

SEQ ID NO: 247092 - DNA, 120 bp, Artificial Sequence
  ENSG00000122674_29 (sequence is synthesized)
cttagagaagaaaataatgaggcctttgaaacaggtagtgaggtttatgcctacatttattcagtaagtattgaactcccttctcttttctcagccttatagtaggaatgtgtccccatt

SEQ ID NO: 247093 - DNA, 120 bp, Artificial Sequence
  ENSG00000122674_30 (sequence is synthesized)
gatgaaaaagtgtgtctatgtgctcaaggaatgtacagaatgcagataattttatgatttaaaagtttcagtgaggcagggcacagtggatcacacctgtaatttcagcattctgggagg

SEQ ID NO: 247094 - DNA, 90 bp, Artificial Sequence
  ENSG00000122674_31 (sequence is synthesized)
tctgggcaatatagcaagaacccatctctacaaaaaatttttataaaagttagccaggtatcatggtgcatgcctgtagtcccagctacc

SEQ ID NO: 247095 - DNA, 82 bp, Artificial Sequence
  ENSG00000122674_32 (sequence is synthesized)
cgcgccttggaggtcgaggctgcagtgaactgtgattgcaccactgcactctaccctgggcaacagagcgagattccatctc

SEQ ID NO: 247096 - DNA, 120 bp, Artificial Sequence
  ENSG00000122674_33 (sequence is synthesized)
gtatgatgggtaccatagctgcgcacaattacatgcaggggcacagagagggcaggtggagtgagatggtggtgcatgggggcgtttctgatcgtttctgatgtatgttttgtcttactg

SEQ ID NO: 247097 - DNA, 120 bp, Artificial Sequence
  ENSG00000122674_34 (sequence is synthesized)
agtgtgcttttagcgttcagtgaattcttaaaactgctgctggagaattgtcccaaacatatttttttaacctttgtaggacatttagcccatcaaaacctgcaaaatctttacatacac

SEQ ID NO: 247098 - DNA, 120 bp, Artificial Sequence
  ENSG00000122674_35 (sequence is synthesized)
caccacacccggccccacttgctttaggtttagttgactcctgttgtccaggatcttaagacgaaaggtcaggtcactgatttgagatctttcttctcttgagacaggatttcgctctcg

SEQ ID NO: 247099 - DNA, 120 bp, Artificial Sequence
  ENSG00000122674_36 (sequence is synthesized)
gaagtgggaagaggtactggggcaggtgggaatgtgagttcaggagcggaggctgtggctggtggaaggcggccagcggaggaaatagaatgctataaaccatagaggaggagggggaag

SEQ ID NO: 247100 - DNA, 120 bp, Artificial Sequence
  ENSG00000122674_37 (sequence is synthesized)
gcagacgaggggtcacacctgtcatgacatgagcaggaagtcagtacgatgcccaaagaggatacgttgaagagttaggataacgctgttgtctaatgacagtgtaaagtggttgccggg

SEQ ID NO: 247101 - DNA, 120 bp, Artificial Sequence
  ENSG00000122674_38 (sequence is synthesized)
gaggagggtcagagaacgaaatctgtggctttcatcatcaggcctggtgttctgctcagcctctcttaaccatacattgctttgataacttttaaacatttttggttatctgtggtcctg

SEQ ID NO: 247102 - DNA, 120 bp, Artificial Sequence
  ENSG00000122674_39 (sequence is synthesized)
gttgttgtcggttgctaggtctaatgtcataactgtaattacttgctataataaagtgagacaggatgatatccatttgctgtctttgtaaacgtgtgtcaatggaaatcgtcacagaat

SEQ ID NO: 247103 - DNA, 120 bp, Artificial Sequence
  ENSG00000122674_40 (sequence is synthesized)
aatggacagtttctgccaattctctattctctctggactatacacagagagactagaacagtgaacccctaagtccccatcacacaagtgaataagattctggtcttcgttgcttctcca

SEQ ID NO: 247104 - DNA, 120 bp, Artificial Sequence
  ENSG00000122674_41 (sequence is synthesized)
tgttgtgttgtcgggtttgcaagagcattttaagtcatcacgtcagtcacgaacacttccctgtgcctctctgatgaggacatccgtggtaacctccccactggcgctgtcacacctgac

SEQ ID NO: 247105 - DNA, 120 bp, Artificial Sequence
  ENSG00000122674_42 (sequence is synthesized)
aaggtcaacagcactcccctcgcatcatggaatgggcagtctgtgtccagatggctctagttgaccaaaaagcagcttcttacagttgacttctccccattgactttgaacagattgtta

SEQ ID NO: 247106 - DNA, 120 bp, Artificial Sequence
  ENSG00000122674_43 (sequence is synthesized)
ttatacgaaagtctccttttttccaccatttcataacctctggtttgttctgtcttcccaggccatgagtgcggctgtgtgctttatgatcgacggtgggtacgcgcctttgtctgattt

SEQ ID NO: 247107 - DNA, 120 bp, Artificial Sequence
  ENSG00000122674_44 (sequence is synthesized)
cagcctaagctttttgtactttgctgcatcctattcttaagtgataaatatgttttgggggtttcggttgtttgggctttttttgttggagacggggtttcactcttggagtgcagtggc

SEQ ID NO: 247108 - DNA, 120 bp, Artificial Sequence
  ENSG00000122674_45 (sequence is synthesized)
tcgctgggactgccagtacacaccgccggacccagctaatgtttttgtggttgtttgtttagacagggtctcactatgttgcccgggctagtgtcaaactcctgggctcaagcgatccac

SEQ ID NO: 247109 - DNA, 120 bp, Artificial Sequence
  ENSG00000122674_46 (sequence is synthesized)
cccccacacccagcccattaaatgataaatgtgttgtcataagcaatatagaggcatagagaggagccctgttccccatctgggacccccctgtctccttaactagccagtgctcatatt

SEQ ID NO: 247110 - DNA, 120 bp, Artificial Sequence
  ENSG00000122674_47 (sequence is synthesized)
ttttaagtcctagttttcccgctagtcagcagtagagtgtgggcatctttctgtgtcccaccgactgcgagctggagacagcagtggtacctctctcgggggggttctgaggatcgaatg

SEQ ID NO: 247111 - DNA, 120 bp, Artificial Sequence
  ENSG00000122674_48 (sequence is synthesized)
aggtcatgtctgtgaagcacctggcccatgagtgctacgtaatgtttgttaaataaacatacgaccttctgaggtctttctggggtaggcaaccgtttaccaccctacagggtgtgcctc

SEQ ID NO: 247112 - DNA, 120 bp, Artificial Sequence
  ENSG00000122674_49 (sequence is synthesized)
ggtcagcttttcacggtgagataggtcttcgcccttttttcatctgaaatgtaaccggttttctatcttctgtttctcttctatttgaggagcagaagggggcctgagcattcattgttt

SEQ ID NO: 247113 - DNA, 120 bp, Artificial Sequence
  ENSG00000122674_50 (sequence is synthesized)
gttttcccagaccagtgaagttttcgtttgaatactgttgttcagcgtcgcacagtaaaatgaatcttactggtattttttgtcatgacttgccagcctctgtccacccaacgttggatt

SEQ ID NO: 247114 - DNA, 120 bp, Artificial Sequence
  ENSG00000122678_0 (sequence is synthesized)
acccgcttccgtcagcctcactggggcttccttccgtctcgctcggagtttccctctgcgttcgctccgcgctgctggaggctgtcgtcccaatgctccccaaacggcggcgagcgcggg

SEQ ID NO: 247115 - DNA, 120 bp, Artificial Sequence
  ENSG00000122678_1 (sequence is synthesized)
tcgggtcccctagcggcgatgccgcttcctccacgccgccctcgacgcgcttcccgggagtcgccatctacctggtcgagcctcgcatgggtcgcagccgccgggccttcctcacaggcc

SEQ ID NO: 247116 - DNA, 120 bp, Artificial Sequence
  ENSG00000122678_2 (sequence is synthesized)
tggcgcgctccaaaggcttccgcgtccttgacgcctgcagctccgaagcgacacatgttgtgatggaagagacctcagcagaggaggccgtcagctggcaggagcgcaggatggcagctg

SEQ ID NO: 247117 - DNA, 120 bp, Artificial Sequence
  ENSG00000122678_3 (sequence is synthesized)
ctcccccgggttgcacccccccagctctgctggacataagctggttaacagagagcctgggagctgggcagcctgtacctgtggagtgccggcaccgcctggaggtggctgggccaagga

SEQ ID NO: 247118 - DNA, 120 bp, Artificial Sequence
  ENSG00000122678_4 (sequence is synthesized)
aggggcctctgagcccagcatggatgcctgcctatgcctgccagcgccctacgcccctcacacaccacaacactggcctctccgaggctctggagatactggccgaggcagcaggctttg

SEQ ID NO: 247119 - DNA, 120 bp, Artificial Sequence
  ENSG00000122678_5 (sequence is synthesized)
aaggcagtgagggccgcctcctcaccttctgcagagcagcctcggtgctcaaggcccttcccagccctgtcacaaccctgagccagctgcaggggcttccccactttggagaacactcct

SEQ ID NO: 247120 - DNA, 120 bp, Artificial Sequence
  ENSG00000122678_6 (sequence is synthesized)
ctagggttgtccaggagctgctggagcatggagtgtgtgaggaggtggagagagttcggcgctcagagaggtaccagaccatgaagctcttcacccagatcttcggggtcggtgtgaaga

SEQ ID NO: 247121 - DNA, 120 bp, Artificial Sequence
  ENSG00000122678_7 (sequence is synthesized)
ctgctgaccggtggtaccgggaaggactgcgaaccttagatgacctccgagagcagccccagaaactaacccaacagcagaaagcggggctccagcaccaccaggacctgagcaccccag

SEQ ID NO: 247122 - DNA, 120 bp, Artificial Sequence
  ENSG00000122678_8 (sequence is synthesized)
tcctgcggtccgatgtagatgccctgcagcaggtggtggaggaagctgtggggcaggccctgcctggggccaccgtcacgctgaccggcggcttccgcagggggaagttgcagggccatg

SEQ ID NO: 247123 - DNA, 120 bp, Artificial Sequence
  ENSG00000122678_9 (sequence is synthesized)
acgtggacttcctcatcacccaccccaaggagggtcaggaggcggggctgctgcctagagtgatgtgccgcctgcaggaccagggcctcatcctgtaccaccagcaccagcacagctgct

SEQ ID NO: 247124 - DNA, 120 bp, Artificial Sequence
  ENSG00000122678_10 (sequence is synthesized)
gtgagtcccctacccgcctggcccaacagagccacatggacgcttttgagagaagtttctgcattttccgcctaccacaacctccaggggctgctgtggggggatccacgaggccctgcc

SEQ ID NO: 247125 - DNA, 120 bp, Artificial Sequence
  ENSG00000122678_11 (sequence is synthesized)
ccagttccctttcgccctgctcggttggactggctccaagcttttccagcgggagctgcgccgcttcagccggaaggagaagggcctgtggctgaacagccatgggctgtttgacccgga

SEQ ID NO: 247126 - DNA, 120 bp, Artificial Sequence
  ENSG00000122678_12 (sequence is synthesized)
gcagaagacatttttccaagcggcttcagaggaagacatcttcagacacctgggccttgagtaccttcctccagagcagagaaacgcctgagcctgcctgtgtcccccacttccactcag

SEQ ID NO: 247127 - DNA, 120 bp, Artificial Sequence
  ENSG00000122678_13 (sequence is synthesized)
gaaattgggctgcccccaacctggccactgaatgtctccaggcagatatgctgccccctgacccccaccttcacccctccccgccaaggcctggctcttccggaggtcaattgtgcctgc

SEQ ID NO: 247128 - DNA, 120 bp, Artificial Sequence
  ENSG00000122678_14 (sequence is synthesized)
aggatcagttgagcccctgctggtgtgctgcagggtgtgatgaggtgggagccctcagtgccagcctcatcactgtgtgaccctgggtctgctcttagcctccccatggctcacgttcct

SEQ ID NO: 247129 - DNA, 120 bp, Artificial Sequence
  ENSG00000122678_15 (sequence is synthesized)
gccctggatgggatgtgagtggggcccacatcgtggagctgtggtggggcctgcagtcatgaatggcaagtggtccctgatgtgcagtgtctcattagttgcactgcagttaactgtggc

SEQ ID NO: 247130 - DNA, 120 bp, Artificial Sequence
  ENSG00000122678_16 (sequence is synthesized)
tcctgcagggcaccctgcccagaatgcccagaagagaaccatgcatacctgcactgcatttgagagccatgagctggaggctgtggttcgtgccagcaaggagcctactgtctggtgtgc

SEQ ID NO: 247131 - DNA, 120 bp, Artificial Sequence
  ENSG00000122678_17 (sequence is synthesized)
tgtaggcatctggagagggagagggcctgggtaggagctgggaggaagataattttcaactatggggcttcagtactgcagcgccccgagccaggctctgtgcttctgcctttaaggcct

SEQ ID NO: 247132 - DNA, 120 bp, Artificial Sequence
  ENSG00000122678_18 (sequence is synthesized)
gttctcagcacaatgtctcaaaaataggtcatatcctgccactcccgtcgcagagccctttaatggttccaaaccctaagtccacacatagcccctggctctggcatctctccagcccca

SEQ ID NO: 247133 - DNA, 120 bp, Artificial Sequence
  ENSG00000122678_19 (sequence is synthesized)
ctggccccgagctgcttgactcaccggcttcctatttgatgcacccaggcccccttgtggccaactccctccccttctcactgaggcagaagcactgaggtgggctggacatgggtgccc

SEQ ID NO: 247134 - DNA, 120 bp, Artificial Sequence
  ENSG00000122678_20 (sequence is synthesized)
tccacgtccctcatatccccaggcacactctggcctcaggttttgccctggccatgtcatctacctggagtgggccctccccttcttcaggccttgaatcaaaagccactttgttaggcg

SEQ ID NO: 247135 - DNA, 120 bp, Artificial Sequence
  ENSG00000122678_21 (sequence is synthesized)
aggatttcccagaccactcatcacattaaaaaatattttgaaaacatgcagtaaagttgactcttggggtgcagtttttgcacacgtagggcacaccaggtccatccccagaacacttcc

SEQ ID NO: 247136 - DNA, 120 bp, Artificial Sequence
  ENSG00000122678_22 (sequence is synthesized)
catgctgtcctattgtggtcatgtgcttctccacccccacccacttagcggtgctacatccctatagttttgctttctctagaatgtcatgtaaatagaaccaaactatatttaaccttt

SEQ ID NO: 247137 - DNA, 120 bp, Artificial Sequence
  ENSG00000122678_23 (sequence is synthesized)
gcgctcagagaggtaccagaccatgaaggtgcgcagggcagggctcggacctaccccaggaatgtcctgccctgggaatgacaacacagtccacaccatgcacggggaggcaaacagggg

SEQ ID NO: 247138 - DNA, 120 bp, Artificial Sequence
  ENSG00000122678_24 (sequence is synthesized)
ctagagggaagggagcagtctggtgcagagggtttggtggcagctttgtgtggtgggcttcctggggtctccacccagtgcagtcaggatctatcaaagccttttctcagtggacgatgc

SEQ ID NO: 247139 - DNA, 120 bp, Artificial Sequence
  ENSG00000122678_25 (sequence is synthesized)
tgaccacagcaacttccatgatatgccaggggcttgtgtctgcctactggttagactttgaccagtgaccagggacagcctgggccttgggcacactgcccagtgtggtgcttggtacat

SEQ ID NO: 247140 - DNA, 120 bp, Artificial Sequence
  ENSG00000122678_26 (sequence is synthesized)
ggaggcctgcagaggtggcactgagcagcagaaagaacatcagctttcaagtttgttaggcctgggtttgagtcttatctaccatttgccaggtaggtgaccattgcccaagaaataacc

SEQ ID NO: 247141 - DNA, 79 bp, Artificial Sequence
  ENSG00000122678_27 (sequence is synthesized)
accatttgccaggtaggtgaccattgcccaagaaataacctctctgagtctgttacattttctgtaaaatggagaagga

SEQ ID NO: 247142 - DNA, 120 bp, Artificial Sequence
  ENSG00000122678_28 (sequence is synthesized)
aagaccagtctgggcaacagggtgaaaccctgtctctacgagaaatacaagagttagccaggcgtgatggtggatgcccgtagtaccagctactcatgaggccgaggtacaaggatcgct

SEQ ID NO: 247143 - DNA, 87 bp, Artificial Sequence
  ENSG00000122678_29 (sequence is synthesized)
tagtaccagctactcatgaggccgaggtacaaggatcgctcgagcccgggaggtcaagccttgaggccaaggtggaagttgcaaagt

SEQ ID NO: 247144 - DNA, 120 bp, Artificial Sequence
  ENSG00000122678_30 (sequence is synthesized)
ctgatatgcacaaggcagccaagtggagacaggcaaggaagaagcttgttttgaggacagaattttctagatcactcagcaccatctggcttttggggctttttgttttattttgttttt

SEQ ID NO: 247145 - DNA, 120 bp, Artificial Sequence
  ENSG00000122678_31 (sequence is synthesized)
aggtcttgccgaggaagtggcagctaagctgatacctgatatgcacaaggcagccaagtggagacagctcttcacccagatcttcggggtcggtgtgaagactgctgaccggtggtaccg

SEQ ID NO: 247146 - DNA, 120 bp, Artificial Sequence
  ENSG00000122678_32 (sequence is synthesized)
ctgctccccaagagccaccgctggccaatgccactgcctcctgctctctccacaccaccggatggtctcagccacgcccgcctctccccacagggcctcatcctgtaccaccagcaccag

SEQ ID NO: 247147 - DNA, 120 bp, Artificial Sequence
  ENSG00000122678_33 (sequence is synthesized)
cagccaagtggagacaggctggagtacagtggtgcgatcacagctcacggcagccttgacttcctgggctcaaaccatcctcccacctcagtctctggagtagctgggactacaggcatg

SEQ ID NO: 247148 - DNA, 120 bp, Artificial Sequence
  ENSG00000122678_34 (sequence is synthesized)
attgttttttgctgttggctaaggaggagaaccacagaaatttgttccaccttctgttaggtgggagaggcatggtttttccagtgacttaggagcccctcgtgctgatgtgttagggtg

SEQ ID NO: 247149 - DNA, 120 bp, Artificial Sequence
  ENSG00000122679_0 (sequence is synthesized)
agcgggaccgagcgtgacccagctgcggccggccagccatggagactggagcgctgcggcgcccgcaacttctcccgttgctgctgctgctctgcggtgggtgtcccagagcaggcggct

SEQ ID NO: 247150 - DNA, 120 bp, Artificial Sequence
  ENSG00000122679_1 (sequence is synthesized)
gcaacgagacaggcatgttggagaggctgcccctgtgtgggaaggctttcgcagacatgatgggcaaggtggacgtctggaagtggtgcaacctgtccgagttcatcgtgtactatgaga

SEQ ID NO: 247151 - DNA, 120 bp, Artificial Sequence
  ENSG00000122679_2 (sequence is synthesized)
gtttcaccaactgcaccgagatggaggccaatgtcgtgggctgctactggcccaaccccctggcccagggcttcatcaccggcatccacaggcagttcttctccaactgcaccgtggaca

SEQ ID NO: 247152 - DNA, 120 bp, Artificial Sequence
  ENSG00000122679_3 (sequence is synthesized)
gggtccacttggaggaccccccagacgaggttctcatcccgctgatcgttatacccgtcgttctgactgtcgccatggctggcctggtggtgtggcgcagcaaacgcaccgacacgctgc

SEQ ID NO: 247153 - DNA, 120 bp, Artificial Sequence
  ENSG00000122679_4 (sequence is synthesized)
tgtgagggtcccggtgagatggagtgggtcacacctggcaagctggaagaaagttccctggggatgggagagcgggtgggtgctgccaatctccagctactgtggccacaccccacctgg

SEQ ID NO: 247154 - DNA, 120 bp, Artificial Sequence
  ENSG00000122679_5 (sequence is synthesized)
tgggcagacccctcccttcctgggctgacctgctccctcgaggccagcctgctccctggctgaggctcaggctatccgcccaagctctttgctcattctagggccagtggaggaaaatgt

SEQ ID NO: 247155 - DNA, 120 bp, Artificial Sequence
  ENSG00000122679_6 (sequence is synthesized)
gataaggccagagcttgtgtgctgggcacagaaatcacctgctgcatcctgtgctccgcaggctgggccggagcctctgcccgcaggtttctatgctgtttcttagcacagaatccagcc

SEQ ID NO: 247156 - DNA, 120 bp, Artificial Sequence
  ENSG00000122679_7 (sequence is synthesized)
tagccttagccgcagtctaggccctgcttggactaggactccttgcttgaccccatctctggttcctgccctggctcctgcaccagccccagctcctgcctacatccaggcagaaagata

SEQ ID NO: 247157 - DNA, 120 bp, Artificial Sequence
  ENSG00000122679_8 (sequence is synthesized)
ggcaggggctcttggaagacgttccgtgctgtgacctccgagccctcctggtgggaagacagctggaaaggctgggaggagaagggaggggctgggggttcccaggagccatgcgtggcc

SEQ ID NO: 247158 - DNA, 120 bp, Artificial Sequence
  ENSG00000122679_9 (sequence is synthesized)
tgcagagtccattccatcatgatgctgtgcccgctatgggctgtgtccatgaccagaggctggagtgggggtgtgttagagcccctcaccgggacttgctgtgcggatggggcctgggcc

SEQ ID NO: 247159 - DNA, 120 bp, Artificial Sequence
  ENSG00000122679_10 (sequence is synthesized)
tccttcctacaggggctcctctgtgggtgaggggccctctggaatggcatcccatgagcttgtggcctctatctgctaccatctgtgttttatctgagtaaagttaccttacttctggaa

SEQ ID NO: 247160 - DNA, 120 bp, Artificial Sequence
  ENSG00000122687_0 (sequence is synthesized)
acttccggcggcgcgctgcaggcgcggggaacaccaatggcggggtacttgaagctggtgtgtgtttcctttcagcgtcaagggttccacactgttgggagtcgctgcaagaatcggaca

SEQ ID NO: 247161 - DNA, 120 bp, Artificial Sequence
  ENSG00000122687_1 (sequence is synthesized)
ggcgctgagcacctgtggctgacccgacatctcagggacccatttgtgaaggctgcgaaggtggagagttaccggtgtcgaagcgccttcaagctcctggaggtgaacgagaggcaccag

SEQ ID NO: 247162 - DNA, 120 bp, Artificial Sequence
  ENSG00000122687_2 (sequence is synthesized)
attctgcggcccggccttcgggtgttagactgtggggcagctcctggggcctggagtcaggtggcggtgcagaaggtcaacgccgcaggcacagatcccagctctcctgttggcttcgtg

SEQ ID NO: 247163 - DNA, 120 bp, Artificial Sequence
  ENSG00000122687_3 (sequence is synthesized)
cttggggtagatcttcttcacatattccccctggaaggagcaacttttctgtgccctgctgacgtgactgacccgagaacctcacagagaatcctcgaggtgcttcctggcaggagagca

SEQ ID NO: 247164 - DNA, 120 bp, Artificial Sequence
  ENSG00000122687_4 (sequence is synthesized)
gatgtgattctgagcgacatggcgcccaatgccacagggttccgggacctcgatcatgacaggctcatcagcctgtgcctgacccttctcagcgtgaccccagacatcctgcaacctggg

SEQ ID NO: 247165 - DNA, 120 bp, Artificial Sequence
  ENSG00000122687_5 (sequence is synthesized)
gggacattcctttgtaaaacctgggctggaagtcaaagccgtcggttacagaggagactgacagaggaattccagaatgtaaggatcatcaaacctgaagccagcaggaaagagtcatca

SEQ ID NO: 247166 - DNA, 120 bp, Artificial Sequence
  ENSG00000122687_6 (sequence is synthesized)
gagctcctgaagagttcctgggagatttgagctgattttggagatggagcaggacaagtggggagtctctctctctctttctctctctctctttttaaccaaaaagagatgacaaaacta

SEQ ID NO: 247167 - DNA, 120 bp, Artificial Sequence
  ENSG00000122687_7 (sequence is synthesized)
agttcaggggccatggaaaatgaaaaagtccgctatattgtgatttgggaagagaaagttatcaagagaaagaggtgaggatggaaggatggagaaaaacagactgtgggaaggatcaga

SEQ ID NO: 247168 - DNA, 120 bp, Artificial Sequence
  ENSG00000122687_8 (sequence is synthesized)
aggaatccgccgaggcagggatgggtgtgcccatgtgtgccttgacgggacttcatcttatagactgttaaactgtcacacacaaacaggctttccacccctgctctgagagcaccacgc

SEQ ID NO: 247169 - DNA, 120 bp, Artificial Sequence
  ENSG00000122687_9 (sequence is synthesized)
acagatttccagttcttagtgtggctgtttaaagtagaaaatctgggggctgggtgaggccactcatgcctgtaaacccagggctttagaaggctgaggctgggggattgcttgaagtca

SEQ ID NO: 247170 - DNA, 120 bp, Artificial Sequence
  ENSG00000122687_10 (sequence is synthesized)
ttcaagaccaacctgggcaacatagcaacaccccccatgtctacaaaaatgaaaaaccaaaaagcaaaccaaaagaaaaatctgaaatttccatctggggattaacttctgtctttctgg

SEQ ID NO: 247171 - DNA, 120 bp, Artificial Sequence
  ENSG00000122687_11 (sequence is synthesized)
ctggtgaacaatatagcaattcacgcattcttcaagcagcaaaagttcccggaacaattagggaagacgtatggtctgaatttatccaggcagtgggtctgctttggtttttgctggaaa

SEQ ID NO: 247172 - DNA, 120 bp, Artificial Sequence
  ENSG00000122687_12 (sequence is synthesized)
tttatatcagtgtctgggctcccaagaacataaatgtaattgccaaagcaagcagtgatgtggtgtgtttattttcttttactcatctaggaacttgacgcagctttatatttaataaaa

SEQ ID NO: 247173 - DNA, 72 bp, Artificial Sequence
  ENSG00000122687_13 (sequence is synthesized)
gcccgccaccgcacccagctaattttttctttttgtttttttaagtagagatagggtttcactatgttggct

SEQ ID NO: 247174 - DNA, 120 bp, Artificial Sequence
  ENSG00000122687_14 (sequence is synthesized)
gctactcttaatgatgtattgacatctttccccaacagcacagctaaatttccaagtcgcataagccctggggctttcctggtggccccactggggctgctccgtccggaacctagaaga

SEQ ID NO: 247175 - DNA, 120 bp, Artificial Sequence
  ENSG00000122687_15 (sequence is synthesized)
ggcttcatggccagggctatggattctttgctctggatgaagctgagacacagttttcatctgttttgtatcttagggttttgagtaagattttctatataaaaaggttctcctgaataa

SEQ ID NO: 247176 - DNA, 120 bp, Artificial Sequence
  ENSG00000122687_16 (sequence is synthesized)
tgagatcagccaaccgcccatgcaactgaagacactgtcgtcattgggaaagtttcatcctattccatgtagtgcttgcaccgtaggttctttaaccagctccctcactgtggcatcaag

SEQ ID NO: 247177 - DNA, 120 bp, Artificial Sequence
  ENSG00000122687_17 (sequence is synthesized)
gttgcttttggcttttggctgggatgcgtgtgctgtggtgaatatccttgccatttatgtttcctgctgtaaagccagggtagctgcatgcactggcatttgaacagggtgagacagtcc

SEQ ID NO: 247178 - DNA, 120 bp, Artificial Sequence
  ENSG00000122687_18 (sequence is synthesized)
acccagagctctcccaagtctctcccaaataccttagagtagggacactggtccccatttattggtgagaaaacaggctcagggtttcatgacttgttgaaagtgcagaaatggaatgct

SEQ ID NO: 247179 - DNA, 120 bp, Artificial Sequence
  ENSG00000122687_19 (sequence is synthesized)
atggcggggtgagctgggcgctgctgctgcgcgtgcagacagcgggagtggttgggggtccgcccggtcgccttcctcggtcctggcctcggggctgggtgccgagcgctgggcaccgtc

SEQ ID NO: 247180 - DNA, 120 bp, Artificial Sequence
  ENSG00000122691_0 (sequence is synthesized)
aactcccagacacctcgcgggctctgcagcaccggcaccgtttccaggaggcctggcggggtgtgcgtccagccgttgggcgctttctttttggacctcggggccatccacaccgtcccc

SEQ ID NO: 247181 - DNA, 120 bp, Artificial Sequence
  ENSG00000122691_1 (sequence is synthesized)
ctcggggccatccacaccgtcccctccccctcccgcctccctccccgcctcccccgcgcgccctccccgcggaggtccctcccgtccgtcctcctgctctctcctccgcgggccgcatcg

SEQ ID NO: 247182 - DNA, 120 bp, Artificial Sequence
  ENSG00000122691_2 (sequence is synthesized)
gaagctggcgggctgaggcgccccgctcttctcctctgccccgggcccgcgaggccacgcgtcgccgctcgagagatgatgcaggacgtgtccagctcgccagtctcgccggccgacgac

SEQ ID NO: 247183 - DNA, 120 bp, Artificial Sequence
  ENSG00000122691_3 (sequence is synthesized)
ctcgccggccgacgacagcctgagcaacagcgaggaagagccagaccggcagcagccgccgagcggcaagcgcgggggacgcaagcggcgcagcagcaggcgcagcgcgggcggcggcgc

SEQ ID NO: 247184 - DNA, 80 bp, Artificial Sequence
  ENSG00000122691_4 (sequence is synthesized)
gcgggtgggggcgtcggaggcggcgacgagccgggcagcccggcccagggcaagcgcggcaagaagtctgcgggctgtgg

SEQ ID NO: 247185 - DNA, 120 bp, Artificial Sequence
  ENSG00000122691_5 (sequence is synthesized)
ggcggcgggagtccgcagtcttacgaggagctgcagacgcagcgggtcatggccaacgtgcgggagcgccagcgcacccagtcgctgaacgaggcgttcgccgcgctgcggaagatcatc

SEQ ID NO: 247186 - DNA, 120 bp, Artificial Sequence
  ENSG00000122691_6 (sequence is synthesized)
tctaccaggtcctccagagcgacgagctggactccaagatggcaagctgcagctatgtggctcacgagcggctcagctacgccttctcggtctggaggatggagggggcctggtccatgt

SEQ ID NO: 247187 - DNA, 120 bp, Artificial Sequence
  ENSG00000122691_7 (sequence is synthesized)
ccgcgtcccactagcaggcggagccccccaccccctcagcagggccggagacctagatgtcattgtttccagagaaggagaaaatggacagtctagagactctggagctggataactaaa

SEQ ID NO: 247188 - DNA, 120 bp, Artificial Sequence
  ENSG00000122691_8 (sequence is synthesized)
aataaaaatatatgccaaagattttcttggaaattagaagagcaaaatccaaattcaaagaaacagggcgtggggcgcacttttaaaagagaaagcgagacaggcccgtggacagtgatt

SEQ ID NO: 247189 - DNA, 120 bp, Artificial Sequence
  ENSG00000122691_9 (sequence is synthesized)
aaaagagaaagcgagacaggcccgtggacagtgattcccagacgggcagcggcaccatcctcacacctctgcattctgatagaagtctgaacagttgtttgtgttttttttttttttttt

SEQ ID NO: 247190 - DNA, 120 bp, Artificial Sequence
  ENSG00000122691_10 (sequence is synthesized)
gcatgcattctcaagaggtcgtgccaatcagccactgaaaggaaaggcatcactatggactttctctattttaaaatggtaacaatcagaggaactataagaacacctttagaaataaaa

SEQ ID NO: 247191 - DNA, 120 bp, Artificial Sequence
  ENSG00000122691_11 (sequence is synthesized)
atactgggatcaaactggcctgcaaaaccatagtcagttaattctttttttcatccttcctctgaggggaaaaacaaaaaaaaacttaaaatacaaaaaacaacattctatttatttatt

SEQ ID NO: 247192 - DNA, 120 bp, Artificial Sequence
  ENSG00000122691_12 (sequence is synthesized)
gaggacccatggtaaaatgcaaatagatccggtgtctaaatgcattcatatttttatgattgttttgtaaatatctttgtatatttttctgcaataaataaatataaaaaatttagagaa

SEQ ID NO: 247193 - DNA, 120 bp, Artificial Sequence
  ENSG00000122691_13 (sequence is synthesized)
tggagctggccatgactgctgagaagaagcacatgtccagatgataattcacgcacagttacaggttcccctccccaaagtggaacgtattattaataaaataatgttaaggagcagaaa

SEQ ID NO: 247194 - DNA, 120 bp, Artificial Sequence
  ENSG00000122691_14 (sequence is synthesized)
tgactgctgagaaggtgtgatacaattcagaaaataatttgtaattaagaaaaatcagacaagatggagaacaagaacaaatgtggagatgacttccagaggcaagaaaaaacacttcac

SEQ ID NO: 247195 - DNA, 120 bp, Artificial Sequence
  ENSG00000122691_15 (sequence is synthesized)
agaagaatgaggttttattcccaaaagaaagaatgcttccatcagaagacataataatgattccattgaactggaaattaagatggttacctgaccaatttgggattcttatgcttctga

SEQ ID NO: 247196 - DNA, 120 bp, Artificial Sequence
  ENSG00000122692_0 (sequence is synthesized)
gtcgttggtgtgttgcgcgactggccttgagggagagctggggcctgctcccggagagatacggctatgtcgatcgaaatcgaatcttcggatgtgatccgccttattatgcagtacttg

SEQ ID NO: 247197 - DNA, 120 bp, Artificial Sequence
  ENSG00000122692_1 (sequence is synthesized)
aaggagaacagtttacatcgggcgttagccaccttgcaggaggagactactgtgtctctgaatactgtggacagcattgagagttttgtggctgacattaacagtggccattgggatact

SEQ ID NO: 247198 - DNA, 120 bp, Artificial Sequence
  ENSG00000122692_2 (sequence is synthesized)
gtgttgcaggctatacagtctctgaaattgccagacaaaaccctcattgacctctatgaacaggttgttctggaattgatagagctccgtgaattgggtgctgccaggtcacttttgaga

SEQ ID NO: 247199 - DNA, 120 bp, Artificial Sequence
  ENSG00000122692_3 (sequence is synthesized)
cagactgatcccatgatcatgttaaaacaaacacagccagagcgatatattcatctggagaaccttttggccaggtcttactttgatcctcgtgaggcatacccagatggaagtagcaaa

SEQ ID NO: 247200 - DNA, 120 bp, Artificial Sequence
  ENSG00000122692_4 (sequence is synthesized)
gaaaagagaagagcagcaattgcccaggccttagctggcgaagtcagtgtggtgcctccatctcgtctcatggcattgctgggacaggcactgaagtggcagcagcatcagggattgctt

SEQ ID NO: 247201 - DNA, 120 bp, Artificial Sequence
  ENSG00000122692_5 (sequence is synthesized)
cctcctggtatgaccatagatttgtttcgaggcaaggcagctgtcaaagatgtggaagaagaaaagtttcctacacaactgagcaggcatattaagtttggtcagaaatcacatgtggag

SEQ ID NO: 247202 - DNA, 120 bp, Artificial Sequence
  ENSG00000122692_6 (sequence is synthesized)
tgtgctcgattttctccagatggtcagtatttggtcactgggtctgttgatggattcattgaagtatggaactttactactggaaaaatcagaaaggatcttaagtaccaggcccaagat

SEQ ID NO: 247203 - DNA, 120 bp, Artificial Sequence
  ENSG00000122692_7 (sequence is synthesized)
aactttatgatgatggatgatgctgtcctctgcatgtgtttcagcagagatacagaaatgttagcaactggggcccaagatggaaaaatcaaggtgtggaagattcagagtggacaatgt

SEQ ID NO: 247204 - DNA, 120 bp, Artificial Sequence
  ENSG00000122692_8 (sequence is synthesized)
ttaaggagatttgagagggcacacagtaagggtgtcacctgtctaagcttttctaaggatagcagtcagatccttagtgcttcttttgaccagacaattagaattcatggtttaaaatct

SEQ ID NO: 247205 - DNA, 120 bp, Artificial Sequence
  ENSG00000122692_9 (sequence is synthesized)
gggaaaaccctgaaggaatttcgtggccattcctcctttgttaacgaagcaacatttacacaagatggacattacattattagtgcatcctctgatggcactgtaaagatctggaatatg

SEQ ID NO: 247206 - DNA, 120 bp, Artificial Sequence
  ENSG00000122692_10 (sequence is synthesized)
aagaccacagaatgttcaaatacctttaaatccctgggcagcaccgcagggacagatattaccgtcaacagtgtgattctacttcctaaaaaccctgagcactttgtggtgtgcaacaga

SEQ ID NO: 247207 - DNA, 120 bp, Artificial Sequence
  ENSG00000122692_11 (sequence is synthesized)
tcaaacacggtggtcatcatgaacatgcaggggcagattgtcagaagcttcagttctggtaaaagagaaggtggggactttgtttgctgtgccctctctccccgtggtgaatggatctac

SEQ ID NO: 247208 - DNA, 120 bp, Artificial Sequence
  ENSG00000122692_12 (sequence is synthesized)
tgtgtaggggaggactttgtgctctactgtttcagtacagtcactggcaaactggagagaactttgacagtgcacgagaaggatgtgattggtattgcacatcaccctcatcagaacctg

SEQ ID NO: 247209 - DNA, 120 bp, Artificial Sequence
  ENSG00000122692_13 (sequence is synthesized)
attgctacctacagtgaagatggactcctaaagctctggaaaccataattcaacttttctttttaaatcagctcgaaagcatgtacttaaatgaagcatattcatgtaatgtgctttttt

SEQ ID NO: 247210 - DNA, 120 bp, Artificial Sequence
  ENSG00000122692_14 (sequence is synthesized)
ttttttttgccagcttttctaagcaaatagattgtctgaattagtcacagaataattttgtgaaaattcatgtttaagtagcaactaccctttctttttttatatatttttaaggtatta

SEQ ID NO: 247211 - DNA, 120 bp, Artificial Sequence
  ENSG00000122692_15 (sequence is synthesized)
gtttatcttcttctaactggtgcagtcacttaatgttttcattaatcttcgacctggagagtgaaatactgatatttctagaaaaaaattctactcctctgattatttgaaatgctgagg

SEQ ID NO: 247212 - DNA, 120 bp, Artificial Sequence
  ENSG00000122692_16 (sequence is synthesized)
gattatttgaaatgctgaggaaaatgtccctcccatagtaaaacttgtaaataaggaactatatcatattcagtagctgtgttctgttccatctttttttttttttttgagatggagttt

SEQ ID NO: 247213 - DNA, 120 bp, Artificial Sequence
  ENSG00000122692_17 (sequence is synthesized)
ccatgcccggcccatctttttttttttttttttttttaaagatgttaataaactttatacctttctggagactttgttctaaaatgtacataaatgctcatctagttaacatatttactt

SEQ ID NO: 247214 - DNA, 120 bp, Artificial Sequence
  ENSG00000122692_18 (sequence is synthesized)
agaatgtgggaggaggagtcacattattatccctgaatctcaagtacagcagaagtgaattcctgggatagtaggatagactaacatgtaaaaaggccaggtgatgcataggttctcatt

SEQ ID NO: 247215 - DNA, 120 bp, Artificial Sequence
  ENSG00000122692_19 (sequence is synthesized)
tcactgccctcagccttcctctccttctgagctgtgccttctcacatgttcagtcaactccagggaatattgtctccatcttctggatagaactagttgcaggatccgttacaagaattc

SEQ ID NO: 247216 - DNA, 120 bp, Artificial Sequence
  ENSG00000122692_20 (sequence is synthesized)
agagttttggcatctcccctttgtatgttgtaggagaaggtttggcattgaaaatgtgctgttgttccaaagaaaaattagcaaaggacttgagatttagaaaagtctcctttgtaatgt

SEQ ID NO: 247217 - DNA, 120 bp, Artificial Sequence
  ENSG00000122692_21 (sequence is synthesized)
gcatcattaccagttatctaaagaaaaacatgtaaaagccaacaaaacccttgaaaatattttgcatatggatgtctgtttcacgtttcaactgaagatgtatagagcacctctgatgat

SEQ ID NO: 247218 - DNA, 120 bp, Artificial Sequence
  ENSG00000122692_22 (sequence is synthesized)
gaggaagataccatgctaggcagtactttcaagaacgtgagttcttatttctgcaggccttttgtgcccccttttaaatgttagcatttattaggtacaaactagtggggaaggtttttt

SEQ ID NO: 247219 - DNA, 88 bp, Artificial Sequence
  ENSG00000122692_23 (sequence is synthesized)
ttagcatttattaggtacaaactagtggggaaggtttttttaaaaagttttgcagtcttgtaatttacctttttaaaaaatttatttt

SEQ ID NO: 247220 - DNA, 120 bp, Artificial Sequence
  ENSG00000122692_24 (sequence is synthesized)
acctgaaatgcagtatgatcctatatgtggcacgtagtaatgttcagtgtttgctgaattaattctgggcagcactaagaaatccctctttcccagtcatattctataacacatttccca

SEQ ID NO: 247221 - DNA, 120 bp, Artificial Sequence
  ENSG00000122692_25 (sequence is synthesized)
atgatttaaaaatggtcgtgggagttgaacatagtcatgaattcaggattcctgagcatgtagacagtcatcccagtggaaagacacgttcacttaagagaagtttaagttagaggaaac

SEQ ID NO: 247222 - DNA, 120 bp, Artificial Sequence
  ENSG00000122692_26 (sequence is synthesized)
agtttatgctaaaaaaatttttagaaaagtccttgagaatttttgatttagtcttgacctcatgaagctggtagttatgatgtgcatagtttgtatcaccgtttatgaagatggagaatc

SEQ ID NO: 247223 - DNA, 120 bp, Artificial Sequence
  ENSG00000122692_27 (sequence is synthesized)
tagtcagcacgtgttggtttattctaggaatttttagggaacacttctgttgctggcaccaggtgatgaatatggttaaaaaaagactcgtttctgcctaaacatagggaagaagagcaa

SEQ ID NO: 247224 - DNA, 120 bp, Artificial Sequence
  ENSG00000122692_28 (sequence is synthesized)
attaaaaggagtaattaaaactgataaaagctcaagttacctttgtgatgatgaggcgggcagttaacgcgaaagggttgggaaaggcttcctggagggactagggggcggtctaagcac

SEQ ID NO: 247225 - DNA, 120 bp, Artificial Sequence
  ENSG00000122692_29 (sequence is synthesized)
agggaacctaaccggggactccagtgtggcacagcggcaaggtatgtgctgggcaaaatgataggtgtcttgggagaccaggcaaagagagctggattaggagccgttaagtatatattt

SEQ ID NO: 247226 - DNA, 120 bp, Artificial Sequence
  ENSG00000122692_30 (sequence is synthesized)
ttcttctttttaaataaaataatgcactgggtgaacatgtaaacgctaagttgaaaatctgcctttcccaggtaacccttgttaatctttctacaacttcatttcgtacaaacctgaaaa

SEQ ID NO: 247227 - DNA, 120 bp, Artificial Sequence
  ENSG00000122692_31 (sequence is synthesized)
acacactgattttgtctttaaatgggcacacgctgcttacactcctcggcgcctagcctttctgaagccccacgcggccgtccctccagcattgaaggctggggcagcccagctcccctc

SEQ ID NO: 247228 - DNA, 120 bp, Artificial Sequence
  ENSG00000122692_32 (sequence is synthesized)
cagcgcccttacagccagaccgcggcggggtcgggccgcgcacgcgcagggcggacggccggatctggggcgccgctgctccgggtggtcggaggtaggagtcccatcttgggtccaggg

SEQ ID NO: 247229 - DNA, 120 bp, Artificial Sequence
  ENSG00000122692_33 (sequence is synthesized)
ccggtagagccccttaccgggggtagggagactgcgcacccgctagagccaactgtcagggcctgcagacgtcgggtgacgtcactgttacaaaattggcggtcacatcgtcttaagggc

SEQ ID NO: 247230 - DNA, 120 bp, Artificial Sequence
  ENSG00000122692_34 (sequence is synthesized)
cggtggcagcggctgcgcgaacgggagttggctgccgggaatcagtgctcacttccttctgaattgggcgtgtgcagtcggttcctagggaagtgctctgctgcagccaccagatttaac

SEQ ID NO: 247231 - DNA, 120 bp, Artificial Sequence
  ENSG00000122692_35 (sequence is synthesized)
ggatgctgctctctagcacttaacatagaagctaaactacctggcgttaaaattaattccatgagcataaggacatttgtcctatcccctattctgctgttgaattaatgactggaaaac

SEQ ID NO: 247232 - DNA, 120 bp, Artificial Sequence
  ENSG00000122692_36 (sequence is synthesized)
attgcgcggaggtatttgggagtagtatggctttttttttttttttttttttaacagcaaatggtataaatctcaggtacaattcagtatcttcttcaccagttgttttttttcagcatg

SEQ ID NO: 247233 - DNA, 120 bp, Artificial Sequence
  ENSG00000122692_37 (sequence is synthesized)
tattattactaccactaacggcctctgttgagcccttccttgctatgtaagcagccatatttaattctcagaacaatgtaatgagggtgcgcaaatgcacatgaagaaacaggtttccag

SEQ ID NO: 247234 - DNA, 120 bp, Artificial Sequence
  ENSG00000122692_38 (sequence is synthesized)
acgtgaggcacctaactcagtccaacttgcacgaagctcgcattgaaaaccagatgtgactccgaagctaggttttttttctctcttgcctcactctcaatattgctgtcagttcctcct

SEQ ID NO: 247235 - DNA, 120 bp, Artificial Sequence
  ENSG00000122692_39 (sequence is synthesized)
caatctttaggtttgggcagggacaaagaatacatggattgttcctccacatgctgcaaacacattcacctaagcagagcacaggtagtgagatgagtagagagaactgaattagaggat

SEQ ID NO: 247236 - DNA, 120 bp, Artificial Sequence
  ENSG00000122692_40 (sequence is synthesized)
tctggatgtcagtctttgctgtcacttcttttggcttgtgctagaacagtggttcttacaagtgtcacgtgatagacacattctaaggtcctatcccagacctacagaatcagaaattgg

SEQ ID NO: 247237 - DNA, 120 bp, Artificial Sequence
  ENSG00000122692_41 (sequence is synthesized)
tggtggggcccagcaagcgtgctcaaatttgagagcaggtagactacagggtagtttccgcatatacaaaaggtgttttaattcttgctgtcagtctcagaagtttcatgctgagataac

SEQ ID NO: 247238 - DNA, 120 bp, Artificial Sequence
  ENSG00000122692_42 (sequence is synthesized)
caaatttaaatgataaaggtgcaagactgactcttaaaatcacattttttcaaattgccatagcttgctagtgttctcattcactgtgcttttacagcttcattttccactattttaaga

SEQ ID NO: 247239 - DNA, 120 bp, Artificial Sequence
  ENSG00000122692_43 (sequence is synthesized)
gcttcattttccactattttaagagaagaaattgctatgaagtgtatgtccaagtgaggaagttccctggtctgaggttgtttaaaacttacaataggccgggcacggtggctcaagcct

SEQ ID NO: 247240 - DNA, 75 bp, Artificial Sequence
  ENSG00000122692_44 (sequence is synthesized)
tcaagaccaccctggccaacatggtgacaccctgtctctactaaggatactaggaggctgaggcaggagaatagc
